United States Patent Application Publication US 2017/0114356 A1 - sequence listing, part 108

SEQ ID NO: 205173 - DNA, 4205 bp, Zea Mays
gaacaattaaacacagaagcgaagaaaacgaacgaattgccgctgaatccttaagaacagacgacgatctgacccgcgggcctctcgtccccttcttcctgcacttcaggtctgcaaccatcatctatctggcttcctattccgcttggtcgcttccctccctccctcgtcctgctcgcgcgcggagtgagcctacaccacagggagaagcaggcgccaaccgtgacaccgagggtacctaactggaggccggtgatctccggttccggcggcggagatggggtcgtcgtcgcggatcttcgagtacttcgtagtgtgcgggctgggcccggagatccggtccctggatggcatcaagggtttccatggcgttgaggagatgtacatgtcggccttccttgaccagttcccgccgtccaaccacgctctgtaccctcctcctcctccgcagctccccacctgtgttttgccagcgggagtaagaatatattcttcagggctggacacagatgatgtctcaacttatccacgtagttatcctatagttttaacagagggagatggctcaaaaatttatgtcagttgtattgcatttcgggatcctatttgtgaagacataattgaggcttaccaaattccggcgaattcgtttgctgataaatgcatctgccttgtgtcccattctcctagtttccaagtccttcgtgatgcccttgaggaaatatttgttctttgtttttctccttcagggtgcagcaagcctttgtgggacataatatctcatatggtgtcacatgtgacattacccacaccaggaaagaatcgtgtcttatttgccattgagaattgtcttctttctgcggaagctcctccaaaagaatggcttccccatgctgatatatcattccagccattggtgcagtgtctggatgttgataaactaatacttctctttacagctgtcctgcttgaaagaaggatattgcttcgatcaaataagtatactctactgactctagtttcagaagccatttgccatttaatatacccaattaggtggcagcatgtctatattccaataatattctctagtggggttgattacattgatgccccgacaccctacatgatggggcttcattctggtgttgacacatctgcagtgacaatggatggtgtagtggtggtagatctcgaatacaaccgtataacaataacggaagaaattcctccaataccagaaactgaacataactttcttcgtgttgagattttaaaattactacaacccaatgtcatgggaattgatttcatgaaaatcaatcttgccaatatgggtgacctaagggctggcacaaaatcatggagtcaggaacatgatttccaacttaggctgatatttttgagattctttgcacagatcctgagtggttatcgtaacttcattgatactacttcagcgactggtttcaattctcaagcttttcttaaaaagcgttctcgagcaactaaccagcctgtcgactccatgtcaatgattatgcagtttttggagactcaagggttcttggattatctggagagatgcaacactgcagaagaaaatgcccacaaccttctcgataagttgcaggatgcaaccggaagaggacaaaaccctctaaccatatttccttctcaagtttctgatcctgagattataacaatagccaatcctgagattgaaggactagacaatagacactgctataagaggtttccagcaaatgcaagaacagaagaacaagaagaaaaacgtaagtcgattctagcgttagctagtggggctagtaagcaagtaccgagttctccttctatccgagtaaatgggggcccaaaggcagaaagtctgagcccaagagagagggcggctgagagagaaaggatggttctggacataaaagtgaagctccagggactctggcttcgtcttctgagactaggggcaactgaggatcctctctcatcttttgaatatggcaccatcctagctttgattgagtctgacgcagaaggcatcgggggaagtggctttgttgaatgcatcagagagcatattcattcgggctggcaatgtcgcttgactgatgaacaattcattgctgtaaaagaattgcttaagatggctataactcttgcgaactctcgcaacgacctggcgaccattagagatgctcttgaagtttctgctgaaatgtacagaaaagacccaaacaatgttcaagattatgttcagcgccatctattatcattgtcagtatgggaggagcttcgcttctgggatggctacttcgaatatttgatggaaaattgttcaaataagtcagcaaattatgtaacgttagttactgcacagctcattctcatggcaactcacatggctggattgggattacctgacattgactcttggaatatgattgagaaaatagccgagagaaacaacttgggttataaacagcttatcaaacttagagcattgctcacacatctgcaacaactccggattggctattggggggttgctacagggaaaagccaaccattgcagtcatatggcatggcttcacctcatgcgatcgatgtgattgatgaaagccaacaacctgctgaagcatctgggttgggccgaagttgggtgcaaagtatgtttagcagagacagaagtttaagagccagctctttcaaccgagctagtgatggaaatgctgttgctgccacgggcaaaaccgaaatctcagctgcacaaaagaaaactcaaactaacatgaggacccttagagggcatacaggtgctattactgctcttcattgcgtaacaagaaaggaggtctgggatcttgttggtgatcgtgaagatgctggttttttcatcagcggaagcacagattgcacggtaaaaatttgggatccaagtttgcgtggttctgaacttcgagcaacacttaaagggcatactagggcaattcgaacaatcagttcagatcgtggcaaaatagtttctggagctgatgatcagtctgtcatagtatgggataagcagacttttaagcttttggaagaactgaagggccacgaggcaccgttctgtccggatgctctcaggagaacgtgtccttattgcatcccatgatggtactgtgaagatgtgggatgtccggactgatacttgtgttgttaccgtgggtcgttgccaaagtgctgttctctgtatggaatatgatgattccactgggattctggcggctgctggaagagatatcacggcacatgtctgggatattcgctccagcaagcagatgttcaagcttcaagggcatacaaagtggataagatcaatgaggatgaccggagagaccataataacaggtagtgatgattggactgctagagtgtggtcccttaaccggggaacatgtgatgcagtgttagcatgccatgctggtcccgtactatgtgtggaatactcaccttcagataaaggaattatcactggttcagctgatgggctcatacgattttgggaaaatgaaggaggaataaaatgcgtcaagaatcttacacttcacacagcatccgttctgtccattagtgccagtgatcactggctagcgattggtgctgctgataattctatgtctctttttcatcggccacaagaaagattcggtggcttctcaaatgcaggatcaaaagttgcaggatggcagctttacagaactccccaaaaaactgctgcagtggtgagatgtatagcatctgacctggataggaaaagaatatgtagtggtggtcgcaacggactcctgcggctttgggatgcaactacaagcatctaggactgatagatgttcatgtgaaaaggcaattgacatgatgttgcatgccattttccttttagctaggaatttatgtgctatttagaggatgcgaaaggagccggactttgttctactgtttctttatcatctaaaaaaccctgcccagttgagtatatgtttgacgtcgtgtaaaattttgtttatattttcgggttcagatagccttacgtggctacgattttgtaagaactatgagaaacttgggaagttctgtactactaccagtgcaaatgtttgttttagtacaacattattttttatgtgcatattcatcgtatgaacctg

SEQ ID NO: 205174 - DNA, 4164 bp, Zea Mays
gcgaacaattaaacacagaagcgaagaaaacgaacgaattgccgctgaatccttaagaacagacgacgatctgacccgcgggcctctcgtccccttcttcctgcacttcaggtctgcaaccatcatctatctggcttcctattccgcttggtcgcttccctccctccctcgtcctgctcgcgcgcggagtgagcctacaccacagggagaagcaggcgccaaccgtgacaccgagggtacctaactggaggccggtgatctccggttccggcggcggagatggggtcgtcgtcgcggatcttcgagtacttcgtagtgtgcgggctgggcccggagatccggtccctggatggcatcaagggtttccatggcgttgaggagatgtacatgtcggccttccttgaccagttcccgccgtccaaccacgctctgtaccctcctcctcctccgcagctccccacctgtgttttgccagcgggagtaagaatatattcttcagggctggacacagatgatgtctcaacttatccacgtagttatcctatagttttaacagagggagatggctcaaaaatttatgtcagttgtattgcatttcgggatcctatttgtgaagacataattgaggcttaccaaattccggcgaattcgtttgctgataaatgcatctgccttgtgtcccattctcctagtttccaagtccttcgtgatgcccttgaggaaatatttgttctttgtttttctccttcagggtgcagcaagcctttgtgggacataatatctcatatggtgtcacatgtgacattacccacaccaggaaagaatcgtgtcttatttgccattgagaattgtcttctttctgcggaagctcctccaaaagaatggcttccccatgctgatatatcattccagccattggtgcagtgtctggatgttgataaactaatacttctctttacagctgtcctgcttgaaagaaggatattgcttcgatcaaataagtatactctactgactctagtttcagaagccatttgccatttaatatacccaattaggtggcagcatgtctatattccaataatattctctagtggggttgattacattgatgccccgacaccctacatgatggggcttcattctggtgttgacacatctgcagtgacaatggatggtgtagtggtggtagatctcgaatacaaccgtataacaataacggaagaaattcctccaataccagaaactgaacataactttcttcgtgttgagattttaaaattactacaacccaatgtcatgggaattgatttcatgaaaatcaatcttgccaatatgggtgacctaagggctggcacaaaatcatggagtcaggaacatgatttccaacttaggctgatatttttgagattctttgcacagatcctgagtggttatcgtaacttcattgatactacttcagcgactggtttcaattctcaagcttttcttaaaaagcgttctcgagcaactaaccagcctgtcgactccatgtcaatgattatgcagtttttggagactcaagggttcttggattatctggagagatgcaacactgcagaagaaaatgcccacaaccttctcgataagttgcaggatgcaaccggaagaggacaaaaccctctaaccatatttccttctcaagtttctgatcctgagattataacaatagccaatcctgagattgaaggactagacaatagacactgctataagaggtttccagcaaatgcaagaacagaagaacaagaagaaaaacgtaagtcgattctagcgttagctagtggggctagtaagcaagtaccgagttctccttctatccgagtaaatgggggcccaaaggcagaaagtctgagcccaagagagagggcggctgagagagaaaggatggttctggacataaaagtgaagctccagggactctggcttcgtcttctgagactaggggcaactgaggatcctctctcatcttttgaatatggcaccatcctagctttgattgagtctgacgcagaaggcatcgggggaagtggctttgttgaatgcatcagagagcatattcattcgggctggcaatgtcgcttgactgatgaacaattcattgctgtaaaagaattgcttaagatggctataactcttgcgaactctcgcaacgacctggcgaccattagagatgctcttgaagtttctgctgaaatgtacagaaaagacccaaacaatgttcaagattatgttcagcgccatctattatcattgtcagtatgggaggagcttcggtcagcaaattatgtaacgttagttactgcacagctcattctcatggcaactcacatggctggattgggattacctgacattgactcttggaatatgattgagaaaatagccgagagaaacaacttgggttataaacagcttatcaaacttagagcattgctcacacatctgcaacaactccggattggctattggggggttgctacagggaaaagccaaccattgcagtcatatggcatggcttcacctcatgcgatcgatgtgattgatgaaagccaacaacctgctgaagcatctgggttgggccgaagttgggtgcaaagtatgtttagcagagacagaagtttaagagccagctctttcaaccgagctagtgatggaaatgctgttgctgccacgggcaaaaccgaaatctcagctgcacaaaagaaaactcaaactaacatgaggacccttagagggcatacaggtgctattactgctcttcattgcgtaacaagaaaggaggtctgggatcttgttggtgatcgtgaagatgctggttttttcatcagcggaagcacagattgcacggtaaaaatttgggatccaagtttgcgtggttctgaacttcgagcaacacttaaagggcatactagggcaattcgaacaatcagttcagatcgtggcaaaatagtttctggagctgatgatcagtctgtcatagtatgggataagcagacttttaagcttttggaagaactgaagggccacgaggcaccggttagttctgtccggatgctctcaggagaacgtgtccttattgcatcccatgatggtactgtgaagatgtgggatgtccggactgatacttgtgttgttaccgtgggtcgttgccaaagtgctgttctctgtatggaatatgatgattccactgggattctggcggctgctggaagagatatcacggcacatgtctgggatattcgctccagcaagcagatgttcaagcttcaagggcatacaaagtggataagatcaatgaggatgaccggagagaccataataacaggtagtgatgattggactgctagagtgtggtcccttaaccggggaacatgtgatgcagtgttagcatgccatgctggtcccgtactatgtgtggaatactcaccttcagataaaggaattatcactggttcagctgatgggctcatacgattttgggaaaatgaaggaggaataaaatgcgtcaagaatcttacacttcacacagcatccgttctgtccattagtgccagtgatcactggctagcgattggtgctgctgataattctatgtctctttttcatcggccacaagaaagattcggtggcttctcaaatgcaggatcaaaagttgcaggatggcagctttacagaactccccaaaaaactgctgcagtggtgagatgtatagcatctgacctggataggaaaagaatatgtagtggtggtcgcaacggactcctgcggctttgggatgcaactacaagcatctaggactgatagatgttcatgtgaaaaggcaattgacatgatgttgcatgccattttccttttagctaggaatttatgtgctatttagaggatgcgaaaggagccggactttgttctactgtttctttatcatctaaaaaaccctgcccagttgagtatatgtttgacgtcgtgtaaaattttgtttatattttcgggttcagatagccttacgtggctacgattttgtaagaactatgagaaacttgggaagttctgtactactaccagtgcaaatgtttgttttagtacaacattattttttatgtgcatattcatcgtatgaacctg

SEQ ID NO: 205175 - DNA, 1019 bp, Zea Mays
tctataaatacagcgtacgcatccgcctcttcttcccatcctgagctcggctcctcctcagaaaaacacaagggaagacagctgcctacccaacctaccagccatggcgccacattcttactccatagcccccgtccaaagcgagctgaacatgacgctgtacaacaaggaggtgtacggtgggcgggggaccaacggagtgaccactctagtgaaccgagggccaatcggcaccacctgggtcttctcgtggcctgtcaccgacgggcccgccggcgccgacgcgaacgtcgtcggccatcttcagggcaccggcgttcaagtcgccacttaccccgactacatgtggcactactcccttgggctggtgttcggccagggaagcaggttcaatgggtccacactacaaatacaagggacttccaaaataaatggcgagtggagcattgttggagggacaggagaacttgctatggcaaagggcacggtcagacgcacagaagtttcgtatacgggaaatataaggatttcagaactcaatatacatgtgctttacactccaatgtgacctatacagatgtcaagaacaagtatctctggaggaggactactatgataagttcgatgagatctagggtgtggagaagttatcttaatctggtttattttatttagttatttttgtaagatgttttgtcatgtaataaagattgtgacattggtttatatacacactgagtcgtcatatatgtgaaatttgatcctgacacgtacatatgaggtgcatatggatttgtccttaaatccgggtgtgatattacttgagtgaggagagggttgaaagagacccagtcctcggactcctcaacagagacataggtttctctttgaaatcaaactctagtaaacaaaccaccatgtctcctatgcattttccttccctatttgcatttgtcttttcccattcaagcaaaacttgctttgttcttcatttgagctttaccttttgatattctgtt

SEQ ID NO: 205176 - DNA, 1525 bp, Zea Mays
gtggttcgtttagctccgtctccgtggagagcctctctcgcggataaccggtaggcactgccaaggggacggcggcgcctggtgccgtcggccagcgcggctgcgcggtgcgcgcgtctcgccgactcgatgtgccgttgcgtgttcgttcgtttcttggactacagtttcttactttctttggagaaaagtccgctgtttagaaattaagcttcggatctgaaataagcttctagattgtggaatgacgcgtcttttctgactagtagctcgcatataattctttctttacgaaaaggactccaggtggttacttgggatctacgtgctccaagaaatgagcaatagccagtaggaatccgtaagctgcgagaccaatcttcatatttactctgaaacagtatggacagtggtaaacttttttctcacgagctgcagtcataattcgagagtaacaagcagcggatgtcgtaatggttagattggatggatggatgctactagtgtagaaaccacttgatgatggttacctgcctacagtcaacccattcaacctcaaatgttccttgtgaggtatcatgacagaacagcaggaaggtgttagcaagagctcttcctcaagtattagcagcagcactcaggagagtgaggaggaactgaccatcggtacccttataaccgaagcaacaaacacaacaaacagtgccaagagtcttggaaagcgcctttcacacttagattcgatcccgcacactccacgtgttaatgggaaaattccagattttaataatgcgacaattgatcatgaatcattattagaaagattaggcacttatggcttagctgaatatcaaatagaaggagatgggaattgccagtttcgagctctggcagaccagatattccgcaatcctgactatcacaaacatgtgaggaaggcggtagtgaagcagctgaaggagttcaggaaacactatgaaggttatgtgccaatggaatataaggtttacttgaagaaaatgaaaaggtctggggaatggggtgatcatgtgaccttacaggcagctgcagacaggtttgctgctaaaatatgtctgttgacatcgtttagagacacatgcctagttgagatagtccccagagatgccactccaacaagagagctttggctaagtttctggtgtgaagtacactacaattcattgtatgcagttgaagatcttccaacacggaaaactaagaagaagcattggctgttctagctcgccaggctttggtgatttcttggtatgctattggtcttctctttgtagtccagcagcatctgtaagcctgcttagttatgcctttgtttgttgtaagttgtaacttgacctggaatcaaattcatttaagatcatgcaaaatacagtgagctcttgcttcgtccttggctgaaatatttccagcacatagtaaacatgttttcagggacctattttttattttttttggggggggggggggggggtattttgcttcgtag

SEQ ID NO: 205177 - DNA, 1395 bp, Zea Mays
atcccaaggtcatttcggttaatctccacacgcatcgcggacacggagacttgccttccttttggtgcggaaaaagaaagagaggagaagcgaaggaggttctcagttggagcggctccctctccccgcgcgcgccaccgcctccgatccgagcagccgcctacagtcaacccattcaacctcaaatgttccttgtgaggtatcatgacagaacagcaggaaggtgttagcaagagctcttcctcaagtattagcagcagcactcaggagagtgaggaggaactgaccatcggtacccttataaccgaagcaacaaacacaacaaacagtgccaagagtcttggaaagcgcctttcacacttagattcgatcccgcacactccacgtgttaatgggaaaattccagattttaataatgcgacaattgatcatgaatcattattagaaagattaggcacttatggcttagctgaatatcaaatagaaggagatgggaattgccaggttagctttttgtatcatgtacagaattaccttttcatttgtatgaagtaaatttatcgagatatattattattactctacatcaataatctggttctctgtagattaattgatttgtgttatgcttgtcatccatttgtatcgatagacttaataggtcgtcgggagggggagtactattgcttcaatccatcttctacttagttggtagtaatttactatatcttcttcttgctaagagcaaatctgattacgatatttaggttcattgacgaggtggctttgttgtcttttacgctttctccatgttgtgctttctcttgttgcagtttcgagctctggcagaccagatattccgcaatcctgactatcacaaacatgtgaggaaggcggtagtgaagcagctgaaggagttcaggaaacactatgaaggttatgtgccaatggaatataaggtttacttgaagaaaatgaaaaggtctggggaatggggtgatcatgtgaccttacaggcagctgcagacaggagctttggctaagtttctggtgtgaagtacactacaattcattgtatgcagttgaagatcttccaacacggaaaactaagaagaagcattggctgttctagctcgccaggctttggtgatttcttggtatgctattggtcttctctttgtagtccagcagcatctgtaagcctgcttagttatgcctttgtttgttgtaagttgtaacttgacctggaatcaaattcatttaagatcatgcaaaatacagtgagctcttgcttcgtccttggctgaaatatttccagcacatagtaaacatgttttcagggacctattttttattttttttggggggggggggggggggtattttgcttcgtag

SEQ ID NO: 205178 - DNA, 2119 bp, Zea Mays
gttcccccacctccccacccccaccccgcgtgagccgccgccgccctgcctcccacctccagtccgccgctctcccacggatcgtgctccctccccatgccctccttcttactccttaccgcggagtccgaggccactcgtggccttcggtgcctcctccgcatcggcgacctcgcctgacacggctgccgtctctcagtcggcctctcttcacccttcggcctggtctctgctcccctctcttttctggttgttccctatggatggttggcgcctgaagggcggatggatccgatggaaagctagcttctccggatccggtcagatcatatctcccggtaacccgttccgatcaacctcttccggtattttttcagaggaaaggttggccaacggcgttccggtggttggatttgtatttggtggcggtggactccggttatgtccactgattgcttgctgttcggttcgcttaagtgttggatgactctgatgatgctaccacttcggcacttatcaaggaggaggtggagaaatggcagcgagagggtgtgcgcatagtataccggcaccgggtgatccgggatggctacaaggctggaaacctgaaatcagccatgaactgcagttacgtgaaagactatgagttcgttgtcatcttcgatgctgatttccaaccacaggcggacttcctgaagcgcaccgtgccccatttcaagggaaaggatgacgtcgggttggttcaggcgagatggtcgttcgtaaacaaggatgagaacttgctgaccaggcttcagaacataaatctttgcttccacttcgaggtggagcagcaggtgaacggggcgtttctcaacttcttcgggttcaatggcaccgcgggagtctggagaatcaaggcgcttgaggagtctggaggatggatggagaggacgacggtggaggacatggacatagctgttcgagcgcacctcaaagggtggaagtttctctttctaaacgatgtcgagtgtcagtgtgaattgccagaatcgtatgaagcgtacagaaagcagcagcaccggtggcactcaggtcccatgcaattgtttaggctctgctttgtggatataatcaaatctaagatcggtttctggaagaagttcaacctcatattcctcttcttcctgctccggaagctgatactacccttctactccttcaccctcttctgcgtgatcctccccatgacgatgttcgtccccgaagccgagctccccgcgtgggtggtgtgctacatcccggcgacgatgtccatcctcaacatcctcccgtccccgaaatcgttcccgttcatcgtcccgtacctgctgttcgagaacaccatgtcggtgaccaagttcaacgccatggtctccggcctgttccagctggggagcgcctacgagtgggtcgtcaccaagaagtcggggcgctcctccgagggcgacctcgtggccctcgtggagaagcactccaagcagcagagggtaggctcggcgcccaacctcgacgcgctgaccaaggagtcgaagggcaccgaggaggagaagaataagaagaagaggaagaagaagcacaacaggatctacaggaaggagctcgcgctgtccttcctcctgctgaccgcggccgcccgcagcttgctgtccgcccagggcgtccacttctacttcctcctgttccagggggtttcgttcttggtcgtcgggctcgacctgatcggcgagcaggtggattgatagcagttgaataatgggttatatatatatatatatatatatattttcgcttgaagaaatcctcgcaggcatcatcaaattcaaagggctctttgtgaagggaagagcgtcgccttcttggatgcggaaaccttgggtccctgttcctgttccaggaggggtcggaaacgtggggagctgtgtagataggtatagcttggggtttagcctgcgagatgcttttgttcttccaggtttcgattcttttgtaagaatatttgtgcccctacatgcaagggctcttttgtttttttctttttttgacagactttaccttcaaatgaagataatacttgtgttccattccatctcgctactac

SEQ ID NO: 205179 - DNA, 1385 bp, Zea Mays
caaatatccggcaaaacccgactccgccgagccgactttagtgtgctcgctgacacaatagactattttgatttttgaatagtaccaattaccaaaccagccctgactccctgaggtttgacggaggttgggttggatgggtggcccttcctctccccgtcgggagaacgacggcgagggggagtggcgggagatctccggctccggcgacatggaaggagcgcccgaggtccttcgacgagaagaccaggacggcgtgttggcgtaaggcagcggtgctgtcgggacggcacccggaacgctggcggcaggacgccgtgggcaacgtggtctgccgccgtttctggggctgccacggatgcctctgctacgagtacgaccacatcgtccctttctccaaaggaggagaatccactgttgagaactgccagatcctccagactagggtgaaccgttccaaatctgataaagcatgggtagcgcaagcagagatgcagggtttttcctgcgatattatgtttactgataaggagctagatataattgagatggctgtgtacggggacgtcattcgtccagggaagcaatgtcgctgcagaacagtagccgaggtgctcgggcaggtgaagccaacgaatcgcatggctgcatgtgagttaccagacaaaggtgcctcttaaaatgtataattcgaataaattggtttcgaccctcacctgtcagaatacaaccttttgtagcgcagttgattccattcaacagaggaacttgagttctttctcacaagtcataatcttgggaaatggatgcagttgatctgcagcctgtgctcattcatgatatctgctcgtaaacattctgttgatttttttgttgttacatattgattgatggcaacgttatcaatgaattggcccattccaataattgggcttgaaaataactacttcgggtggttcaactcccatggctggtttagcttcagttggttggacctgtttagtaaggccactgtaaggatgtgagctgcaacagcctttgccgaggggtatagaaatgagaaactgaagtttaaatgttgtgttgtgatctgtagcctacatgatgtggtaacttcgaacttctacgcaaccatgatttctaccttaggaggcaaattccttaggagctgctggagaaggtcctcaattccgtatataccataccactagaaaagttgtaatcctacatgagtcagcttcaaattttgcattcctagtgccacttctgtctatacaccgtgaatgtgctgttatgcgccttggcccgtggggggaaaaaatacaattttacctttctcgctcctttgtcccgtcgacggtgaactgacctggaagcaacactga

SEQ ID NO: 205180 - DNA, 162 bp, Zea Mays
ttccatttgctgttataggatcatgttgctagttgcccaaatgaaagagaacgagtaacaaaggcggggactgaagtaaaatggcaaatagatacgtggcgagtgggttcagctgctcttcagcagaagttactaatgaagataaatgagtaacatggcgaa

SEQ ID NO: 205181 - DNA, 1245 bp, Zea Mays
tccggaagaaacaaatcctgttcgctcttcttgtcgagaccagaccaccgtatactggagagaaagaatcctccctcgcctccccaccccgccccacccatggcctccgccgccagcactgccgccgccgccggggccccgctgcgcctcctctcatcctcttccaaccgtatctccaagcccttccttccccgcccccaccgcctcaccctctcctcccccatctccttccagcgcctcacagcccggtccgcggcctccccttccccatccaccgccacctcgtccccgtccggctctgtcgacccggcgcaactgccccccgcgctacgcgacatcgtcggcctcttccagtccgtcccggacgcgcgcacccggtacaagcagctccttgcctatgccgcgcgcctgccgcccatggacccggcgctcaagaccgacgccaaccgcgtccggggttgcgtctcacaggtctgggtccacgccgagcccgacgagggcgacgccggccgccgcagcgtcaggttccacgccgactccgacgcgcagctcaccaagggcctcgccgcgctgctcgtgctagggctctctggcgcgcccgccgcggatgtggccagggtgcccgttgacttcatcgagctgctcgggatcaggcagagcctctctccctccaggaacagcggcctgctcaacatgctcagcctcatgaagcgcaaggcacttgagatcgccggtggtgactcaacgtcaagtcagcaatctgtccaagaggttaccagaccgcgtctagtgaacgggaaagagcctgaatttgcagctttcgaggtgcaagaaaaggaaaaggaaaggccacaggatgcagagaggcgcgacgaggatgaacaattgggtcaacttctaccacttgatgcagaagtgaatggtgctgcgggcggtgggaggaaggagaggataagggagagtttggagagggcactttctccggtagagttggagattgaagacatatcacacctccacaagggccatgctggcgtggctgggaccaatggggagacacatttcaatgtgagggtggtgtccaaggagtttgaggggaagagcttgctcaagaggcacagggctgtctatgatctcctgcaggaggagctcaagaccgggttgcacgccctgtcaatcgatgcaaagactccatctgaagtttagggtgtggcttagttctcagttatatgcagttgggactga

SEQ ID NO: 205182 - DNA, 865 bp, Zea Mays
cggactctatctctatctccaaaagtccgttctaatctaatctcttcgtgcgtcgtcctaatcagcgcgagccgcagcccccgctgacgcgaatcgcgacctccgcgcgaccctccgccaccgcaccctccgctgacccggtctccctgccgcctggagcgatgaaaccgcaccctcgcgcccaagcccagactcaaaactcagccaaacccctcgcatcttcctgtggtggcgtcctcctccaacgttggtccgtgtttgtctctatggcgctctcgaatgcctaagccaaggccgaccgcctcgagctggtgctcgacgaaacgccccgcaggaccgagttctcgtagaccatgctcgtcgattcgctggcgagggccggccgacagcacgacgcattctgcctctctgcggagatgcgggcctccagcgtggcctgcgactcccacgtctgcgtatgtcactatgggaagagctacatcttcatcgtaaattatgtgcaaagttaaagtaccagtgtgcagaggaggcatgtaggtgatgcttttcaaaataacaagtcgatggtgcctggcgcgatttcaccaattcaggacccgctttcatcatttgtgtatggagtcctgaatgatggatgattactacccagccatgtaccagcagttgacactggattcgttcaaaaagatcttgtgaattctacaataaactacaaacttataatttcctaaacctgtatttgactatttgttagcatactgcacagtagtgaaagcagagacattcagtagttagatgggtagaaacttttttttttctggaatacgcaggagagctgcgcatctttgtattaatagaagaaaag

SEQ ID NO: 205183 - DNA, 430 bp, Zea Mays
cttaatttatccagattctttgagaaagagtacttaatgagaaatggaaaggtccaaccgatacaattgaatagttacccaaaaggtgctgccgacaccaccatcttgctctttatcttcagtatctgcaacttttttggctgactgggggaggtgttcttattcctgagtcccttagctgagggtgaaagggctataaagccaagaagaggaagaaggggtgaagaattcaggttttcggaagcaatactgaagactattttttggtttctctttgcaatatgctctattgggattggattttcaatcactgttattaataatctaacacaaatatgagttgttgcatgtcatgtcgacacaaccatctcactctctgccttcagtttttgcaatttttggctgcctgggaggtgttgttgttcctgag

SEQ ID NO: 205184 - DNA, 4920 bp, Zea Mays
ctggacctgatgactactcacaaggccggagttctggaccctgatgcatactcggtagtcggtacgcacgagtattgcacgtgacaaggcctgtcactgtcagccatctgacgagggaaaaaaaacaagcaactgatgacggccgctgccgttcgatttgagagccaccgattaacccatccatccacctcgccgccgccggagagtatggttgagcggcggtacaccgaggaggaggaggccctcgagatcaagtccctccgccgcatcatcgccgcctacgccaactatcaagatgctgcagaaagggatgtcgagagatatgagcggtcattcaaaatgcttcctacagcgcacaagaaacttcttttccacctcggtctgaagtaccaaagtctgagatggtgtatatccatgaatgcatcttttatcatgaaaatgcttgaggcgtttgaacctccttttgacatgagtcaaagcaatttatcattggatgagcagcatgatagtcccaaagaatataccaagagacatgaaccttcaagagaaactgataataataagggaggggaagatcacatggcaggctgctcccagcctgttggcaacatggggatgtctcaaggtgcaggcattgcatgtaatggtgataaaaatacgggtgcagcagcttatttccaggataaagatgtctctgcatcttctgctattgaaaatgtagcactgcggcactgcacagcttcatcgctcaagttaaatgttcctccaattgatgttgacaaggtaagatgcatagtaagaaatatcgtgagagattggggtgatgagggtcaaaaggaacgtgatgagtgctataagcccattcttgaggagcttaatcgcctttttcctaaccggagcgatcagaggcctccttcatgtcttgtccctggtgctgggcttgggagattggctcttgatatatcttctctgggttttgtaagccaagggaatgaattctcatattacatgctgatctgttcaaatttcatcctgaaccacactcaagaagctaatgagtggtccatatatccttggatacatagcaactgcaattctctttctgacaacgatcaacttcgtcctgtttcatttcctgacattcatccctcaagtgcaggtatcacagagggattttcaatgtgcgctggggactttgtagaggtctacagcgaggaaagccaagaatctgcatgggatgctgttgtaacttgctttttcctggatacggcacacaatatcgttgaatacatcgagatcatatcaaaagttctcaaggatggtggggtctggattaacttgggtccccttctgtatcactttgctgattcatatgggccagatgatgatatgtctattgaattaagtttggaagatgtgaaaaaggttgcttaccattatggatttacaatggaggtggagaaaatgatcgagactacttacactgcaaacatgaaagcaatgatgcagttattggatattcggcccgactggttgtatatgggttgggttagtgcaacttttgaaagttcagttcagaaaaagctacggcgagaagccgagaagactagttgcggccgttggcccgccgaagcccaatcattcgcaggagacctcgtcgctggtttgcctccaaatgtgctcgccacgatcgcagccgtagaggaagacgcgggccttttttttgtctctttctctttctctacctgccgcgcgccggcgccggcggtcaaggtgaagttcttctctttatgtatcgtcatgaacaaagttatgtggtctttattagtaggtcaagagctctggctatcttttcaagaccatgctgagtgtacagaacttggacaatctttggcggacttcggaaaggcgattaagcttttgggctcttgtgaaggagatttgatggaaaaggtgttttctgaagttggttcaaagtcagagatgttgtcaataaagctgcaaagagaggcaatcagagcagatggacagacacaattgagccatgaaatagctttggagctaagtcagaggagtgctgctgctggactaaggccgattggagcagtggtcttcatgcaacggggtgtcctgaaggtttgcttgaggactactgacagtacagttaatacatcagagattgcaaaggcatatggcggaggtggaaaacgaagttcgagttcattcactctaagaatggatgagttcaacatctggacttcagtgaactcatgaattgaactggagaggtcacatagtgttcatactgtgggaactcgcaaccagctcatctgggcatggattccctcagtggtgaacatgtgaagatggggtggtctttttgtgctccggtatgagaggaaggaaaacaaaatcttagtctaacctaccatgttgatatgagcttacaggagaataatctcttcgatatgaatgactggagagcaatttggaggcataatgcttaagccgttcaagagaagatttgatgcctttaaatgaaaggtttgctggtacatcaaaagacgtattttatgctctttctaatctttctccagtagacctatgtgcttaattttagagatgataagggtggtgcgggccgaagatctgtcatactcctaggggccaattatagcttacacttatgttgttattagttttgaatgctgaacatacatggagatgggtagctcagctcagcttggatataacttggtttctatccaaactaatactttgctccatagggaatgcatctggcaacggaaattgttgtcaagctccagtagcagaaaggatcatcttcaattattgtaatcctgctccttaataatacattcttggatcttgctctgggcttaaaaaatctgcatcaccaaattgttcctcgttgcgaacatttatgtaatacagaaccttagaaactggaaatgtttattccattccggtaatttgggaatgatctgtgttaaaatcctttttaagtgtcataccacgcactatttttctgttcctcaactctatcgatcccataacctatttctgttaactggttactaaggacatgtacaatcccataaccaaattggtgggtatgcaatgcgtcaatgaaaaaaccatttcttcagtcctgtaatgttgttccgattgcgtcaatgaaaaaactgtaatttttgaccggggagatggtagcactagcatgtggggattaaagttcctaaatgttcagtactgtcctaaacacttgttttatcttttttgagtggaagtccgacgtccgagaggggctcgccattgggcttggcatgggcacagtcatgctgctcctcttctgcggctactcgctggtgatttgatatggctctaagctgatcctggagatggtgtacaccggagccaaggtcacaacatgatctttgtagtcctcactggttctcttttctcaaattgaccatggtgttgtaaatttgatcaatgaagaagattcaagaattaccgttttactggattgccatgggatttcgccattcagatttccaatgcaaatgatgaggtcgtttatcactgtggttcaagaaaactacccgaatcgtcttggggtattgtttgtcatccgccttcctccagttgtcagagttattgcacagacatttcttcaaattgcaatatcacatggtatccgtggagatgaggacgacattgcctccaagtctgctccaccggcatccatcgacggtgcaagatccagcagatagattgatggcaaagaggacgactccatgtccaggcgtactccccgccttgcatcgagattgctaggtcataatcgaagggtttacagggaggagatctgaacatagctcttcaatcccaaagttaacatcgttggttaccataattcttactgcttgcaagcccttttagaatattactgctgcgaggttcttgcaaagtccttgatgaagaagtcgaaggtgacgaacgccgaggccgtcatccttgatcgacgccaagaacctcacagcgcacctccttgtgatgctcttttctccaatgtcttctcttatctacatgcaggaaaaaatctacatgtttgatggcgtggatcagaaaaatgtggaaggacaagatttaagatgcactgccatggttggcggtctatttactgcatctcgaagcggcttgcattcaaaggactatattgtacatgaccttgaaggagctgaccatgtgacagaccttgatcataaccatgttgcagagttgaagatattaggactatattaaacattgctgcatatagcatcagacttagaagtcaaacaacatcaaacttatcatcagcaacaacttggtttccgtcgctgcccaaacttcagcagaggcgatctaagaagaagcaagcgtatcggctcatgttctgacggccgtgttcacgtggtgtaagatctgcattgtggaatccttcgcccggacaagagagattggatcctcccgtccagacaacctgatagaacgacagtgtataagaacagggctcttaggacgccttttgtcaaggtaagcgtctccgtggatggagcctgaagtatattcaaattcaaggcatgccacaaagcatctcgcgtgtgggatgctccggcgtgtggaaagtagaaaagccaaataaatgggtacatgtacagcaggcgtgagttcttaaatactcagattccttgtccataggcaaatgcatagttcatacgaatcagagtacacgatgcacacaacttgatgtctctatcgttgttttcaacatgatgaacatgcgaatttcgtggtattaattgggaccgtctgatttctcaaagaaaataacaaaaagaaaagaaaagaaca

SEQ ID NO: 205185 - DNA, 6453 bp, Zea Mays
ctggacctgatgactactcacaaggccggagttctggaccctgatgcatactcggtagtcggtacgcacgagtattgcacgtgacaaggcctgtcactgtcagccatctgacgagggaaaaaaaacaagcaactgatgacggccgctgccgttcgatttgagagccaccgattaacccatccatccacctcgccgccgccggagagtatggttgagcggcggtacaccgaggaggaggaggccctcgagatcaagtccctccgccgcatcatcgccgcctacgccaactatcaagatgctgcagaaagggatgtcgagagatatgagcggtcattcaaaatgcttcctacagcgcacaagaaacttcttttccacctcggtctgaagtaccaaagtctgagatggtgtatatccatgaatgcatcttttatcatgaaaatgcttgaggcgtttgaacctccttttgacatgagtcagtatgtagatgatgatgttcatgctcatccatcaatcttgcatgaccatagtcatatggattgcactcattccagcgagaggggtgattgctctataattgctatctccagaagcaatttatcattggatgagcagcatgatagtcccaaagaatataccaagagacatgaaccttcaagagaaactgataataataagggaggggaagatcacatggcaggctgctcccagcctgttggcaacatggggatgtctcaaggtgcaggcattgcatgtaatggtgataaaaatacgggtgcagcagcttatttccaggataaagatgtctctgcatcttctgctattgaaaatgtagcactgcggcactgcacagcttcatcgctcaagttaaatgttcctccaattgatgttgacaaggtaagatgcatagtaagaaatatcgtgagagattggggtgatgagggtcaaaaggaacgtgatgagtgctataagcccattcttgaggagcttaatcgcctttttcctaaccggagcgatcagaggcctccttcatgtcttgtccctggtgctgggcttgggagattggctcttgatatatcttctctgggttttgtaagccaagggaatgaattctcatattacatgctgatctgttcaaatttcatcctgaaccacactcaagaagctaatgagtggtccatatatccttggatacatagcaactgcaattctctttctgacaacgatcaacttcgtcctgtttcatttcctgacattcatccctcaagtgcaggtatcacagagggattttcaatgtgcgctggggactttgtagaggtctacagcgaggaaagccaagaatctgcatgggatgctgttgtaacttgctttttcctggatacggcacacaatatcgttgaatacatcgagatcatatcaaaagttctcaaggatggtggggtctggattaacttgggtccccttctgtatcactttgctgattcatatgggccagatgatgatatgtctattgaattaagtttggaagatgtgaaaaaggttgcttaccattatggatttacaatggaggtggagaaaatgatcgagactacttacactgcaaacatgaaagcaatgatgcagttattggatattcggcccgactggttgtatatgggttgggttagtgcaacttttgaaagttcagttcagaaaaagctacggcgagaagccgagaagactagttgcggccgttggcccgccgaagcccaatcattcgcaggagacctcgtcgctggtttgcctccaaatgtgctcgccacgatcgcagccgtagaggaagacgcgggccttttttttgtctctttctctttctctacctgccgcgcgccggcgccggcggtcaaggtgaagttcttctctttatgtatcgtcatgaacaaagttatgtggtctttattagtaggtcaaggtgaagttcttctctttatgtatctatatcagcttagctgtgatatgcgtgtgagtcgtaaatttcgatatatgaaagtctgttcttgcatccgatcaggaattgtgaacatctctttcttcatatgcctctctttcgtgaaattggggatatgtctttcgtctagatttacttctgttcggctgctccgctggcggctgctgctgttcatgctcatgcacttggatgtcatgaattataaaccaaagatttgggaattatttaactatggaagccatgaattctatcctcattagggacacatgtttatattagaattcatggatcaaaagaataactaactagctgatagatagctgatagatatatggattaaatgatagatttaataaaaccatcagattggatgtgaggtatggatttatttaattcagtgttttccttaaccgagcaaggcctaacactttgcgtggatttaacttgaatcggcgaactctgtgccgcggttatcgctaaggctgaagtattctttcttggggcagttgaacgtgcgtactctaggatcattctttggattactctgaccgccggtgttgttgaccgctgaagctcccgtgcattgctgagtcaatttgactccgtatgccggccagagacttcaggaagactgaaacattagcattggtggtaagaggaaaagatggccatgccaagagttccagggcagcagctcctgacgccaaggagtatgacgaatacgaggaggagcacaccgagccttttgcggaagctgcgacgacctttacattggcagcaactaaataatggactgagttagctgacaataggccatttgattctatcccatgtttggtgcatgtagtgtatcatgtttcgtttaccatctctattgtcatgatcagagctctggctatcttttcaagaccatgctgagtgtacagaacttggacaatctttggcggacttcggaaaggcgattaagcttttgggctcttgtgaaggagatttgatggaaaaggtgttttctgaagttggttcaaagtcagagatgttgtcaataaagctgcaaagagaggcaatcagagcagatggacagacacaattgagccatgaaatagctttggagctaagtcagaggagtgctgctgctggactaaggccgattggagcagtggtcttcatgcaacggggtgtcctgaaggtttgcttgaggactactgacagtacagttaatacatcagagattgcaaaggcatatggcggaggtggaaaacgaagttcgagttcattcactctaagaatggatgagttcaacatctggacttcagtgaactcatgaattgaactggagaggtcacatagtgttcatactgtgggaactcgcaaccagctcatctgggcatggattccctcagtggtgaacatgtgaagatggggtggtctttttgtgctccggtatgagaggaaggaaaacaaaatcttagtctaacctaccatgttgatatgagcttacaggagaataatctcttcgatatgaatgactggagagcaatttggaggcataatgcttaagccgttcaagagaagatttgatgcctttaaatgaaaggtttgctggtacatcaaaagacgtattttatgctctttctaatctttctccagtagacctatgtgcttaattttagagatgataagggtggtgcgggccgaagatctgtcatactcctaggggccaattatagcttacacttatgttgttattagttttgaatgctgaacatacatggagatgggtagctcagctcagcttggatataacttggtttctatccaaactaatactttgctccatagggaatgcatctggcaacggaaattgttgtcaagctccagtagcagaaaggatcatcttcaattattgtaatcctgctccttaataatacattcttggatcttgctctgggcttaaaaaatctgcatcaccaaattgttcctcgttgcgaacatttatgtaatacagaaccttagaaactggaaatgtttattccattccggtaatttgggaatgatctgtgttaaaatcctttttaagtgtcataccacgcactatttttctgttcctcaactctatcgatcccataacctatttctgttaactggttactaaggacatgtacaatcccataaccaaattggtgggtatgcaatgcgtcaatgaaaaaaccatttcttcagtcctgtaatgttgttccgattgcgtcaatgaaaaaactgtaatttttgaccggggagatggtagcactagcatgtggggattaaagttcctaaatgttcagtactgtcctaaacacttgttttatcttttttgagtggaagtccgacgtccgagaggggctcgccattgggcttggcatgggcacagtcatgctgctcctcttctgcggctactcgctggtgatttgatatggctctaagctgatcctggagatggtgtacaccggagccaaggtcacaacatgatctttgtagtcctcactggttctcttttctcaaattgaccatggtgttgtaaatttgatcaatgaagaagattcaagaattaccgttttactggattgccatgggatttcgccattcagatttccaatgcaaatgatgaggtcgtttatcactgtggttcaagaaaactacccgaatcgtcttggggtattgtttgtcatccgccttcctccagttgtcagagttattgcacagacatttcttcaaattgcaatatcacatggtatccgtggagatgaggacgacattgcctccaagtctgctccaccggcatccatcgacggtgcaaggtacggattcgagcctccggtccttcaatctagccaccaggtagattcgtctcagtggtggtcggattcatctcgacggtggtcagatccagcagatagattgatggcaaagaggacgactccatgtccaggcgtactccccgccttgcatcgagattgctaggtcataatcgaagggtttacagggaggagatctgaacatagctcttcaatcccaaagttaacatcgttggttaccataattcttactgcttgcaagcccttttagaatattactgctgcgaggttcttgcaaagtccttgatgaagaagtcgaaggtgacgaacgccgaggccgtcatccttgatcgacgccaagaacctcacagcgcacctccttgtgatgctcttttctccaatgtcttctcttatctacatgcaggaaaaaatctacatgtttgatggcgtggatcagaaaaatgtggaaggacaagatttaagatgcactgccatggttggcggtctatttactgcatctcgaagcggcttgcattcaaaggttctgcacctctaaatatttctggtcgtgaagctgtctatgaaaggaagatgaaaattcagcaagttggattgatttatctttcccccctatggctgattcagcaacctgtattaattagtctatttgacatttgatatttcaatgctgttataggactatattgtacatgaccttgaaggagctgaccatgtgacagaccttgatcataaccatgttgcagagttgaagatattaggactatattaaacattgctgcatatagcatcaggtacacaattttgctatcatttttataaaataaatatgtaccaaaggtctcaaacaacaatactcaatttgaatggcacatactttggaggatatgatgacatcagacttagaagtcaaacaacatcaaacttatcatcaggtatgttttgaattatcttacgttttttagattgaaaataactatttctgaaaccttattttcactctgagcctgtgaggacagtttatccttagttaatcagcactttatatctgttatttgcctattagaagttatatctgtgatccagcaacaacttggtttccgtcgctgcccaaacttcagcagaggcgatctaagaagaagcaagcgtatcggctcatgttctgacggccgtgttcacgtggtgtaagatctgcattgtggaatccttcgcccggacaagagagattggatcctcccgtccagacaacctgatagaacgacagtgtataagaacagggctcttaggacgccttttgtcaaggtaagcgtctccgtggatggagcctgaagtatattcaaattcaaggcatgccacaaagcatctcgcgtgtgggatgctccggcgtgtggaaagtagaaaagccaaataaatgggtacatgtacagcaggcgtgagttcttaaatactcagattccttgtccataggcaaatgcatagttcatacgaatcagagtacacgatgcacacaacttgatgtctctatcgttgttttcaacatgatgaacatgcgaatttcgtggtattaattgggaccgtctgatttctcaaagaaaataacaaaaagaaaagaaaagaaca

SEQ ID NO: 205186 - DNA, 5538 bp, Zea Mays
gactactcacaaggccggagttctggaccctgatgcatactcggtagtcggtacgcacgagtattgcacgtgacaaggcctgtcactgtcagccatctgacgagggaaaaaaaacaagcaactgatgacggccgctgccgttcgatttgagagccaccgattaacccatccatccacctcgccgccgccggagagtatggttgagcggcggtacaccgaggaggaggaggccctcgagatcaagtccctccgccgcatcatcgccgcctacgccaactatcaagatgctgcagaaagggatgtcgagagatatgagcggtcattcaaaatgcttcctacagcgcacaagaaacttcttttccacctcggtctgaagtaccaaagtctgagatggtgtatatccatgaatgcatcttttatcatgaaaatgcttgaggcgtttgaacctccttttgacatgagtcagtatgtagatgatgatgttcatgctcatccatcaatcttgcatgaccatagtcatatggattgcactcattccagcgagaggggtgattgctctataattgctatctccagaagcaatttatcattggatgagcagcatgatagtcccaaagaatataccaagagacatgaaccttcaagagaaactgataataataagggaggggaagatcacatggcaggctgctcccagcctgttggcaacatggggatgtctcaaggtgcaggcattgcatgtaatggtgataaaaatacgggtgcagcagcttatttccaggataaagatgtctctgcatcttctgctattgaaaatgtagcactgcggcactgcacagcttcatcgctcaagttaaatgttcctccaattgatgttgacaaggtaagatgcatagtaagaaatatcgtgagagattggggtgatgagggtcaaaaggaacgtgatgagtgctataagcccattcttgaggagcttaatcgcctttttcctaaccggagcgatcagaggcctccttcatgtcttgtccctggtgctgggcttgggagattggctcttgatatatcttctctgggttttgtaagccaagggaatgaattctcatattacatgctgatctgttcaaatttcatcctgaaccacactcaagaagctaatgagtggtccatatatccttggatacatagcaactgcaattctctttctgacaacgatcaacttcgtcctgtttcatttcctgacattcatccctcaagtgcaggtatcacagagggattttcaatgtgcgctggggactttgtagaggtctacagcgaggaaagccaagaatctgcatgggatgctgttgtaacttgctttttcctggatacggcacacaatatcgttgaatacatcgagatcatatcaaaagttctcaaggatggtggggtctggattaacttgggtccccttctgtatcactttgctgattcatatgggccagatgatgatatgtctattgaattaagtttggaagatgtgaaaaaggttgcttaccattatggatttacaatggaggtggagaaaatgatcgagactacttacactgcaaacatgaaagcaatgatgcagttattggatattcggcccgactggttgtatatgggttgggttagtgcaacttttgaaagttcagttcagaaaaagctacggcgagaagccgagaagactagttgcggccgttggcccgccgaagcccaatcattcgcaggagacctcgtcgctggtttgcctccaaatgtgctcgccacgatcgcagccgtagaggaagacgcgggccttttttttgtctctttctctttctctacctgccgcgcgccggcgccggcggtcaaggtgaagttcttctctttatgtatcgtcatgaacaaagttatgtggtctttattagtaggtcaagagctctggctatcttttcaagaccatgctgagtgtacagaacttggacaatctttggcggacttcggaaaggcgattaagcttttgggctcttgtgaaggagatttgatggaaaaggtgttttctgaagttggttcaaagtcagagatgttgtcaataaagctgcaaagagaggcaatcagagcagatggacagacacaattgagccatgaaatagctttggagctaagtcagaggagtgctgctgctggactaaggccgattggagcagtggtcttcatgcaacggggtgtcctgaaggtttgcttgaggactactgacagtacagttaatacatcagagattgcaaaggcatatggcggaggtggaaaacgaagttcgagttcattcactctaagaatggatgagttcaacatctggacttcagtgaactcatgaattgaactggagaggtcacatagtgttcatactgtgggaactcgcaaccagctcatctgggcatggattccctcagtggtgaacatgtgaagatggggtggtctttttgtgctccggtatgagaggaaggaaaacaaaatcttagtctaacctaccatgttgatatgagcttacaggagaataatctcttcgatatgaatgactggagagcaatttggaggcataatgcttaagccgttcaagagaagatttgatgcctttaaatgaaaggtttgctggtacatcaaaagacgtattttatgctctttctaatctttctccagtagacctatgtgcttaattttagagatgataagggtggtgcgggccgaagatctgtcatactcctaggggccaattatagcttacacttatgttgttattagttttgaatgctgaacatacatggagatgggtagctcagctcagcttggatataacttggtttctatccaaactaatactttgctccatagggaatgcatctggcaacggaaattgttgtcaagctccagtagcagaaaggatcatcttcaattattgtaatcctgctccttaataatacattcttggatcttgctctgggcttaaaaaatctgcatcaccaaattgttcctcgttgcgaacatttatgtaatacagaaccttagaaactggaaatgtttattccattccggtaatttgggaatgatctgtgttaaaatcctttttaagtgtcataccacgcactatttttctgttcctcaactctatcgatcccataacctatttctgttaactggttactaaggacatgtacaatcccataaccaaattggtgggtatgcaatgcgtcaatgaaaaaaccatttcttcagtcctgtaatgttgttccgattgcgtcaatgaaaaaactgtaatttttgaccggggagatggtagcactagcatgtggggattaaagttcctaaatgttcagtactgtcctaaacacttgttttatcttttttgagtggaagtccgacgtccgagaggggctcgccattgggcttggcatgggcacagtcatgctgctcctcttctgcggctactcgctggtgatttgatatggctctaagctgatcctggagatggtgtacaccggagccaaggtcacaacatgatctttgtagtcctcactggttctcttttctcaaattgaccatggtgttgtaaatttgatcaatgaagaagattcaagaattaccgttttactggattgccatgggatttcgccattcagatttccaatgcaaatgatgaggtcgtttatcactgtggttcaagaaaactacccgaatcgtcttggggtattgtttgtcatccgccttcctccagttgtcagagttattgcacagacatttcttcaagatacaaaccaaccaaggctgactacaagttaaagatgctctgtaaaaaggaaggatcagtttgactatatctttttgctggtagattgcaatatcacatggtatccgtggagatgaggacgacattgcctccaagtctgctccaccggcatccatcgacggtgcaagatccagcagatagattgatggcaaagaggacgactccatgtccaggcgtactccccgccttgcatcgagattgctaggtcataatcgaagggtttacagggaggagatctgaacatagctcttcaatcccaaagttaacatcgttggttaccataattcttactgcttgcaagcccttttagaatattactgctgcgaggttcttgcaaagtccttgatgaagaagtcgaaggtgacgaacgccgaggccgtcatccttgatcgacgccaagaacctcacagcgcacctccttgtgatgctcttttctccaatgtcttctcttatctacatgcaggaaaaaatctacatgtttgatggcgtggatcagaaaaatgtggaaggacaagatttaagatgcactgccatggttggcggtctatttactgcatctcgaagcggcttgcattcaaaggactatattgtacatgaccttgaaggagctgaccatgtgacagaccttgatcataaccatgttgcagagttgaagatattaggactatattaaacattgctgcatatagcatcagcaacaacttggtttccgtcgctgcccaaacttcagcagaggcgatctaagaagaagcaagcgtatcggctcatgttctgacggccgtgttcacgtggtgtaagatctgcattgtggaatccttcgcccggacaagagagattggatcctcccgtccagacaacctgatagaacgacagtgtataagaacagggctcttaggacgccttttgtcaagttgggtcataactctaccctgagaattgagatagatgatcatgtggtgcaagatattgagtccctaatctttgatgacacacataacaaatggtaagcgtctccgtggatggagcctgaagtatattcaaattcaaggcatgccacaaagcatctcgcgtgtgggatgctccggcgtgtggaaagtagaaaagccaaataaatgggtacatgtacagcaggcgtgagttcttaaatactcagattccttgtccataggcaaatgcatagttcatacgaatcagagtacacgatgcacacaacttgatgtctctatcgttgttttcaacatgatgaacatgcgaatttcgtggtattaattgggaccgtctgatttctcatggatccatagttctattctacaagcatttgagataaagggatcatgcaaactgaaaaatgggagatgacattactgtacaacttagtataattcataaacgggatgtttggctgacataactccggtgttgactctggattttttgagagccgtagtatatttttgtttttgttttggaatacctcatatactgcttcggcagtcttggtattcaatcttgaaatacctcatatattctggagaaatggtttcggttcgccgtgcgtacgtttggggttgtttctccctcgcttcttcctggcggcggaagatagagaagggcgagtggccgcgcggaacatcgacgaccgagagaccccctcgtcagcaactccatctgctattctccctgacggtgttcctagc

SEQ ID NO: 205187 - DNA, 6182 bp, Zea Mays
gactactcacaaggccggagttctggaccctgatgcatactcggtagtcggtacgcacgagtattgcacgtgacaaggcctgtcactgtcagccatctgacgagggaaaaaaaacaagcaactgatgacggccgctgccgttcgatttgagagccaccgattaacccatccatccacctcgccgccgccggagagtatggttgagcggcggtacaccgaggaggaggaggccctcgagatcaagtccctccgccgcatcatcgccgcctacgccaactatcaagatgctgcagaaagggatgtcgagagatatgagcggtcattcaaaatgcttcctacagcgcacaagaaacttcttttccacctcggtctgaagtaccaaagtctgagatggtgtatatccatgaatgcatcttttatcatgaaaatgcttgaggcgtttgaacctccttttgacatgagtcaaagcaatttatcattggatgagcagcatgatagtcccaaagaatataccaagagacatgaaccttcaagagaaactgataataataagggaggggaagatcacatggcaggctgctcccagcctgttggcaacatggggatgtctcaaggtgcaggcattgcatgtaatggtgataaaaatacgggtgcagcagcttatttccaggataaagatgtctctgcatcttctgctattgaaaatgtagcactgcggcactgcacagcttcatcgctcaagttaaatgttcctccaattgatgttgacaaggtaagatgcatagtaagaaatatcgtgagagattggggtgatgagggtcaaaaggaacgtgatgagtgctataagcccattcttgaggagcttaatcgcctttttcctaaccggagcgatcagaggcctccttcatgtcttgtccctggtgctgggcttgggagattggctcttgatatatcttctctgggttttgtaagccaagggaatgaattctcatattacatgctgatctgttcaaatttcatcctgaaccacactcaagaagctaatgagtggtccatatatccttggatacatagcaactgcaattctctttctgacaacgatcaacttcgtcctgtttcatttcctgacattcatccctcaagtgcaggtatcacagagggattttcaatgtgcgctggggactttgtagaggtctacagcgaggaaagccaagaatctgcatgggatgctgttgtaacttgctttttcctggatacggcacacaatatcgttgaatacatcgagatcatatcaaaagttctcaaggatggtggggtctggattaacttgggtccccttctgtatcactttgctgattcatatgggccagatgatgatatgtctattgaattaagtttggaagatgtgaaaaaggttgcttaccattatggatttacaatggaggtggagaaaatgatcgagactacttacactgcaaacatgaaagcaatgatgcagttattggatattcggcccgactggttgtatatgggttgggttagtgcaacttttgaaagttcagttcagaaaaagctacggcgagaagccgagaagactagttgcggccgttggcccgccgaagcccaatcattcgcaggagacctcgtcgctggtttgcctccaaatgtgctcgccacgatcgcagccgtagaggaagacgcgggccttttttttgtctctttctctttctctacctgccgcgcgccggcgccggcggtcaaggtgaagttcttctctttatgtatcgtcatgaacaaagttatgtggtctttattagtaggtcaaggtgaagttcttctctttatgtatctatatcagcttagctgtgatatgcgtgtgagtcgtaaatttcgatatatgaaagtctgttcttgcatccgatcaggaattgtgaacatctctttcttcatatgcctctctttcgtgaaattggggatatgtctttcgtctagatttacttctgttcggctgctccgctggcggctgctgctgttcatgctcatgcacttggatgtcatgaattataaaccaaagatttgggaattatttaactatggaagccatgaattctatcctcattagggacacatgtttatattagaattcatggatcaaaagaataactaactagctgatagatagctgatagatatatggattaaatgatagatttaataaaaccatcagattggatgtgaggtatggatttatttaattcagtgttttccttaaccgagcaaggcctaacactttgcgtggatttaacttgaatcggcgaactctgtgccgcggttatcgctaaggctgaagtattctttcttggggcagttgaacgtgcgtactctaggatcattctttggattactctgaccgccggtgttgttgaccgctgaagctcccgtgcattgctgagtcaatttgactccgtatgccggccagagacttcaggaagactgaaacattagcattggtggtaagaggaaaagatggccatgccaagagttccagggcagcagctcctgacgccaaggagtatgacgaatacgaggaggagcacaccgagccttttgcggaagctgcgacgacctttacattggcagcaactaaataatggactgagttagctgacaataggccatttgattctatcccatgtttggtgcatgtagtgtatcatgtttcgtttaccatctctattgtcatgatcagagctctggctatcttttcaagaccatgctgagtgtacagaacttggacaatctttggcggacttcggaaaggcgattaagcttttgggctcttgtgaaggagatttgatggaaaaggtgttttctgaagttggttcaaagtcagagatgttgtcaataaagctgcaaagagaggcaatcagagcagatggacagacacaattgagccatgaaatagctttggagctaagtcagaggagtgctgctgctggactaaggccgattggagcagtggtcttcatgcaacggggtgtcctgaaggtttgcttgaggactactgacagtacagttaatacatcagagattgcaaaggcatatggcggaggtggaaaacgaagttcgagttcattcactctaagaatggatgagttcaacatctggacttcagtgaactcatgaattgaactggagaggtcacatagtgttcatactgtgggaactcgcaaccagctcatctgggcatggattccctcagtggtgaacatgtgaagatggggtggtctttttgtgctccggtatgagaggaaggaaaacaaaatcttagtctaacctaccatgttgatatgagcttacaggagaataatctcttcgatatgaatgactggagagcaatttggaggcataatgcttaagccgttcaagagaagatttgatgcctttaaatgaaaggtttgctggtacatcaaaagacgtattttatgctctttctaatctttctccagtagacctatgtgcttaattttagagatgataagggtggtgcgggccgaagatctgtcatactcctaggggccaattatagcttacacttatgttgttattagttttgaatgctgaacatacatggagatgggtagctcagctcagcttggatataacttggtttctatccaaactaatactttgctccatagggaatgcatctggcaacggaaattgttgtcaagctccagtagcagaaaggatcatcttcaattattgtaatcctgctccttaataatacattcttggatcttgctctgggcttaaaaaatctgcatcaccaaattgttcctcgttgcgaacatttatgtaatacagaaccttagaaactggaaatgtttattccattccggtaatttgggaatgatctgtgttaaaatcctttttaagtgtcataccacgcactatttttctgttcctcaactctatcgatcccataacctatttctgttaactggttactaaggacatgtacaatcccataaccaaattggtgggtatgcaatgcgtcaatgaaaaaaccatttcttcagtcctgtaatgttgttccgattgcgtcaatgaaaaaactgtaatttttgaccggggagatggtagcactagcatgtggggattaaagttcctaaatgttcagtactgtcctaaacacttgttttatcttttttgagtggaagtccgacgtccgagaggggctcgccattgggcttggcatgggcacagtcatgctgctcctcttctgcggctactcgctggtgatttgatatggctctaagctgatcctggagatggtgtacaccggagccaaggtcacaacatgatctttgtagtcctcactggttctcttttctcaaattgaccatggtgttgtaaatttgatcaatgaagaagattcaagaattaccgttttactggattgccatgggatttcgccattcagatttccaatgcaaatgatgaggtcgtttatcactgtggttcaagaaaactacccgaatcgtcttggggtattgtttgtcatccgccttcctccagttgtcagagttattgcacagacatttcttcaaattgcaatatcacatggtatccgtggagatgaggacgacattgcctccaagtctgctccaccggcatccatcgacggtgcaaggtacggattcgagcctccggtccttcaatctagccaccaggtagattcgtctcagtggtggtcggattcatctcgacggtggtcagatccagcagatagattgatggcaaagaggacgactccatgtccaggcgtactccccgccttgcatcgagattgctaggtcataatcgaagggtttacagggaggagatctgaacatagctcttcaatcccaaagttaacatcgttggttaccataattcttactgcttgcaagcccttttagaatattactgctgcgaggttcttgcaaagtccttgatgaagaagtcgaaggtgacgaacgccgaggccgtcatccttgatcgacgccaagaacctcacagcgcacctccttgtgatgctcttttctccaatgtcttctcttatctacatgcaggaaaaaatctacatgtttgatggcgtggatcagaaaaatgtggaaggacaagatttaagatgcactgccatggttggcggtctatttactgcatctcgaagcggcttgcattcaaaggttctgcacctctaaatatttctggtcgtgaagctgtctatgaaaggaagatgaaaattcagcaagttggattgatttatctttcccccctatggctgattcagcaacctgtattaattagtctatttgacatttgatatttcaatgctgttataggactatattgtacatgaccttgaaggagctgaccatgtgacagaccttgatcataaccatgttgcagagttgaagatattaggactatattaaacattgctgcatatagcatcaggatatgatgacatcagacttagaagtcaaacaacatcaaacttatcatcagcaacaacttggtttccgtcgctgcccaaacttcagcagaggcgatctaagaagaagcaagcgtatcggctcatgttctgacggccgtgttcacgtggtgtaagatctgcattgtggaatccttcgcccggacaagagagattggatcctcccgtccagacaacctgatagaacgacagtgtataagaacagggctcttaggacgccttttgtcaagttgggtcataactctaccctgagaattgagatagatgatcatgtggtgcaagatattgagtccctaatctttgatgacacacataacaaatggtaagcgtctccgtggatggagcctgaagtatattcaaattcaaggcatgccacaaagcatctcgcgtgtgggatgctccggcgtgtggaaagtagaaaagccaaataaatgggtacatgtacagcaggcgtgagttcttaaatactcagattccttgtccataggcaaatgcatagttcatacgaatcagagtacacgatgcacacaacttgatgtctctatcgttgttttcaacatgatgaacatgcgaatttcgtggtattaattgggaccgtctgatttctcaaagaaaataacaaaaagaaaagaaaagaaca

SEQ ID NO: 205188 - DNA, 4404 bp, Zea Mays
gttcccccacctccccacccccaccccgcgtgagccgccgccgccctgcctcccacctccagtccgccgctctcccacggatcgtgctccctccccatgccctccttcttactccttaccgcggagtccgaggccactcgtggccttcggtgcctcctccgcatcggcgacctcgcctgacacggctgccgtctctcagtcggcctctcttcacccttcggcctggtctctgctcccctctcttttctggttgttccctatggatggttggcgcctgaagggcggatggatccgatggaaagctagcttctccggatccggtcagatcatatctcccggtaacccgttccgatcaacctcttccggtattttttcagaggaaaggttggccaacggcgttccggtggttggatttgtatttggtggcggtggactccggttatgtccactgattgcttgctgttcggttcgcttaagtggtaaagctgatgtctttaggttagaagaataactaagattgggtaggaaggaaggatggtggattgggtagctagctgctggctgcttggttcaggagttggggttaaattagcgtctgaaatacttgtttggtttaggtattcctatgtagacgacctgattatgattcagggtgatttatcgtagcagtaatctgaagtttggtgtggtgtttgatctgtgtgagtcttgtgttaggtgagtcatgaacaaatttatgtggtctttattagtaggtcaaggtgaagttcttctctttatgtatcgtcatgaacaaagttatgtggtctttattagtaggtcaagagctctggctatcttttcaagaccatgctgagtgtacagaacttggacaatctttggcggacttcggaaaggcgattaagcttttgggctcttgtgaaggagatttgatggaaaaggtgttttctgaagttggttcaaagtcagagatgttgtcaataaagctgcaaagagaggtgttcgcgctcccaccacccgccttcgtccagatctgccttcgcgcgttcctgggtgggggcggcgatggcggtgccacggggccaacacagtcggcggctcacacaatcggagcagatggacagacacaatcggttttaaaagtatcatacaatcggttttacaaatgtctcattttctatactaaatatttttattatttttatcatactataaggcaatcagagcagatggacagacacaattgagccatgaaatagctttggagctaagtcagaggagtgctgctgctggactaaggccgattggagcagtggtcttcatgcaacggggtgtcctgaaggtttgcttgaggactactgacagtacagttaatacatcagagattgcaaaggcatatggcggaggtggaaaacgaagttcgagttcattcactctaagaatggatgagttcaacatctggacttcagtgaactcatgaattgaactggagaggtcacatagtgttcatactgtgggaactcgcaaccagctcatctgggcatggattccctcagtggtgaacatgtgaagatggggtggtctttttgtgctccggtatgagaggaaggaaaacaaaatcttagtctaacctaccatgttgatatgagcttacaggagaataatctcttcgatatgaatgactggagagcaatttggaggcataatgcttaagccgttcaagagaagatttgatgcctttaaatgaaaggtttgctggtacatcaaaagacgtattttatgctctttctaatctttctccagtagacctatgtgcttaattttagagatgataagggtggtgcgggccgaagatctgtcatactcctaggggccaattatagcttacacttatgttgttattagttttgaatgctgaacatacatggagatgggtagctcagctcagcttggatataacttggtttctatccaaactaatactttgctccatagggaatgcatctggcaacggaaattgttgtcaagctccagtagcagaaaggatcatcttcaattattgtaatcctgctccttaataatacattcttggatcttgctctgggcttaaaaaatctgcatcaccaaattgttcctcgttgcgaacatttatgtaatacagaaccttagaaactggaaatgtttattccattccggtaatttgggaatgatctgtgttaaaatcctttttaagtgtcataccacgcactatttttctgttcctcaactctatcgatcccataacctatttctgttaactggttactaaggacatgtacaatcccataaccaaattggtgggtatgcaatgcgtcaatgaaaaaaccatttcttcagtcctgtaatgttgttccgattgcgtcaatgaaaaaactgtaatttttgaccggggagatggtagcactagcatgtggggattaaagttcctaaatgttcagtactgtcctaaacacttgttttatcttttttgagtggaagtccgacgtccgagaggggctcgccattgggcttggcatgggcacagtcatgctgctcctcttctgcggctactcgctggtgatttgatatggctctaagctgatcctggagatggtgtacaccggagccaaggtcacaacatgatctttgtagtcctcactggttctcttttctcaaattgaccatggtgttgtaaatttgatcaatgaagaagattcaagaattaccgttttactggattgccatgggatttcgccattcagatttccaatgcaaatgatgaggtcgtttatcactgtggttcaagaaaactacccgaatcgtcttggggtattgtttgtcatccgccttcctccagttgtcagagttattgcacagacatttcttcaagatacaaaccaaccaaggctgactacaagttaaagatgctctgtaaaaaggaaggatcagtttgactatatctttttgctggtagattgcaatatcacatggtatccgtggagatgaggacgacattgcctccaagtctgctccaccggcatccatcgacggtgcaagatccagcagatagattgatggcaaagaggacgactccatgtccaggcgtactccccgccttgcatcgagattgctaggtcataatcgaagggtttacagggaggagatctgaacatagctcttcaatcccaaagttaacatcgttggttaccataattcttactgcttgcaagcccttttagaatattactgctgcgaggttcttgcaaagtccttgatgaagaagtcgaaggtgacgaacgccgaggccgtcatccttgatcgacgccaagaacctcacagcgcacctccttgtgatgctcttttctccaatgtcttctcttatctacatgcaggaaaaaatctacatgtttgatggcgtggatcagaaaaatgtggaaggacaagatttaagatgcactgccatggttggcggtctatttactgcatctcgaagcggcttgcattcaaaggttctgcacctctaaatatttctggtcgtgaagctgtctatgaaaggaagatgaaaattcagcaagactatattgtacatgaccttgaaggagctgaccatgtgacagaccttgatcataaccatgttgcagagttgaagatattaggactatattaaacattgctgcatatagcatcaggatatgatgacatcagacttagaagtcaaacaacatcaaacttatcatcagaagttatatctgtgatccagcaacaacttggtttccgtcgctgcccaaacttcagcagaggcgatctaagaagaagcaagcgtatcggctcatgttctgacggccgtgttcacgtggtgtaagatctgcattgtggaatccttcgcccggacaagagagattggatcctcccgtccagacaacctgatagaacgacagtgtataagaacagggctcttaggacgccttttgtcaagttgggtcataactctaccctgagaattgagatagatgatcatgtggtgcaagatattgagtccctaatctttgatgacacacataacaaatggtaagcgtctccgtggatggagcctgaagtatattcaaattcaaggcatgccacaaagcatctcgcgtgtgggatgctccggcgtgtggaaagtagaaaagccaaataaatgggtacatgtacagcaggcgtgagttcttaaatactcagattccttgtccataggcaaatgcatagttcatacgaatcagagtacacgatgcacacaacttgatgtctctatcgttgttttcaacatgatgaacatgcgaatttcgtggtattaattgggaccgtctgatttctcaaagaaaataacaaaaagaaaagaaaagaaca

SEQ ID NO: 205189 - DNA, 4268 bp, Zea Mays
gttcccccacctccccacccccaccccgcgtgagccgccgccgccctgcctcccacctccagtccgccgctctcccacggatcgtgctccctccccatgccctccttcttactccttaccgcggagtccgaggccactcgtggccttcggtgcctcctccgcatcggcgacctcgcctgacacggctgccgtctctcagtcggcctctcttcacccttcggcctggtctctgctcccctctcttttctggttgttccctatggatggttggcgcctgaagggcggatggatccgatggaaagctagcttctccggatccggtcagatcatatctcccggtaacccgttccgatcaacctcttccggtattttttcagaggaaaggttggccaacggcgttccggtggttggatttgtatttggtggcggtggactccggttatgtccactgattgcttgctgttcggttcgcttaagtggtaaagctgatgtctttaggttagaagaataactaagattgggtaggaaggaaggatggtggattgggtagctagctgctggctgcttggttcaggagttggggttaaattagcgtctgaaatacttgtttggtttaggtattcctatgtagacgacctgattatgattcagggtgatttatcgtagcagtaatctgaagtttggtgtggtgtttgatctgtgtgagtcttgtgttaggtgagtcatgaacaaatttatgtggtctttattagtaggtcaaggtgaagttcttctctttatgtatcgtcatgaacaaagttatgtggtctttattagtaggtcaagagctctggctatcttttcaagaccatgctgagtgtacagaacttggacaatctttggcggacttcggaaaggcgattaagcttttgggctcttgtgaaggagatttgatggaaaaggtgttttctgaagttggttcaaagtcagagatgttgtcaataaagctgcaaagagaggtgttcgcgctcccaccacccgccttcgtccagatctgccttcgcgcgttcctgggtgggggcggcgatggcggtgccacggggccaacacagtcggcggctcacacaatcggagcagatggacagacacaatcggttttaaaagtatcatacaatcggttttacaaatgtctcattttctatactaaatatttttattatttttatcatactataaggcaatcagagcagatggacagacacaattgagccatgaaatagctttggagctaagtcagaggagtgctgctgctggactaaggccgattggagcagtggtcttcatgcaacggggtgtcctgaaggtttgcttgaggactactgacagtacagttaatacatcagagattgcaaaggcatatggcggaggtggaaaacgaagttcgagttcattcactctaagaatggatgagttcaacatctggacttcagtgaactcatgaattgaactggagaggtcacatagtgttcatactgtgggaactcgcaaccagctcatctgggcatggattccctcagtggtgaacatgtgaagatggggtggtctttttgtgctccggtatgagaggaaggaaaacaaaatcttagtctaacctaccatgttgatatgagcttacaggagaataatctcttcgatatgaatgactggagagcaatttggaggcataatgcttaagccgttcaagagaagatttgatgcctttaaatgaaaggtttgctggtacatcaaaagacgtattttatgctctttctaatctttctccagtagacctatgtgcttaattttagagatgataagggtggtgcgggccgaagatctgtcatactcctaggggccaattatagcttacacttatgttgttattagttttgaatgctgaacatacatggagatgggtagctcagctcagcttggatataacttggtttctatccaaactaatactttgctccatagggaatgcatctggcaacggaaattgttgtcaagctccagtagcagaaaggatcatcttcaattattgtaatcctgctccttaataatacattcttggatcttgctctgggcttaaaaaatctgcatcaccaaattgttcctcgttgcgaacatttatgtaatacagaaccttagaaactggaaatgtttattccattccggtaatttgggaatgatctgtgttaaaatcctttttaagtgtcataccacgcactatttttctgttcctcaactctatcgatcccataacctatttctgttaactggttactaaggacatgtacaatcccataaccaaattggtgggtatgcaatgcgtcaatgaaaaaaccatttcttcagtcctgtaatgttgttccgattgcgtcaatgaaaaaactgtaatttttgaccggggagatggtagcactagcatgtggggattaaagttcctaaatgttcagtactgtcctaaacacttgttttatcttttttgagtggaagtccgacgtccgagaggggctcgccattgggcttggcatgggcacagtcatgctgctcctcttctgcggctactcgctggtgatttgatatggctctaagctgatcctggagatggtgtacaccggagccaaggtcacaacatgatctttgtagtcctcactggttctcttttctcaaattgaccatggtgttgtaaatttgatcaatgaagaagattcaagaattaccgttttactggattgccatgggatttcgccattcagatttccaatgcaaatgatgaggtcgtttatcactgtggttcaagaaaactacccgaatcgtcttggggtattgtttgtcatccgccttcctccagttgtcagagttattgcacagacatttcttcaagatacaaaccaaccaaggctgactacaagttaaagatgctctgtaaaaaggaaggatcagtttgactatatctttttgctggtagattgcaatatcacatggtatccgtggagatgaggacgacattgcctccaagtctgctccaccggcatccatcgacggtgcaagatccagcagatagattgatggcaaagaggacgactccatgtccaggcgtactccccgccttgcatcgagattgctaggtcataatcgaagggtttacagggaggagatctgaacatagctcttcaatcccaaagttaacatcgttggttaccataattcttactgcttgcaagcccttttagaatattactgctgcgaggttcttgcaaagtccttgatgaagaagtcgaaggtgacgaacgccgaggccgtcatccttgatcgacgccaagaacctcacagcgcacctccttgtgatgctcttttctccaatgtcttctcttatctacatgcaggaaaaaatctacatgtttgatggcgtggatcagaaaaatgtggaaggacaagatttaagatgcactgccatggttggcggtctatttactgcatctcgaagcggcttgcattcaaaggactatattgtacatgaccttgaaggagctgaccatgtgacagaccttgatcataaccatgttgcagagttgaagatattaggactatattaaacattgctgcatatagcatcagcaacaacttggtttccgtcgctgcccaaacttcagcagaggcgatctaagaagaagcaagcgtatcggctcatgttctgacggccgtgttcacgtggtgtaagatctgcattgtggaatccttcgcccggacaagagagattggatcctcccgtccagacaacctgatagaacgacagtgtataagaacagggctcttaggacgccttttgtcaagttgggtcataactctaccctgagaattgagatagatgatcatgtggtgcaagatattgagtccctaatctttgatgacacacataacaaatggtaagcgtctccgtggatggagcctgaagtatattcaaattcaaggcatgccacaaagcatctcgcgtgtgggatgctccggcgtgtggaaagtagaaaagccaaataaatgggtacatgtacagcaggcgtgagttcttaaatactcagattccttgtccataggcaaatgcatagttcatacgaatcagagtacacgatgcacacaacttgatgtctctatcgttgttttcaacatgatgaacatgcgaatttcgtggtattaattgggaccgtctgatttctcaaagaaaataacaaaaagaaaagaaaagaaca

SEQ ID NO: 205190 - DNA, 3874 bp, Zea Mays
catttcgagattgttttgactaatttcagcaaacaaataatgtttgttctgaattttattttccaaaaaaatatttgtcttaaacatgtgggcagacctggtgcagtggtgagagttgccatattttttggggtggggggcttgtctcggcttatcacttccctagaccccacttatgtgggagatcccagcactgggtctgccctttatttggctttaacattacgaggaactctagctcaaagacgatcaataagaacctcaatttttcttgtttttagcacggtatatcaagatgaattacacagtcctatttttgattcattagaacttggacaatctttggcggacttcggaaaggcgattaagcttttgggctcttgtgaaggagatttgatggaaaaggtgttttctgaagttggttcaaagtcagagatgttgtcaataaagctgcaaagagaggtgttcgcgctcccaccacccgccttcgtccagatctgccttcgcgcgttcctgggtgggggcggcgatggcggtgccacggggccaacacagtcggcggctcacacaatcggagcagatggacagacacaatcggttttaaaagtatcatacaatcggttttacaaatgtctcattttctatactaaatatttttattatttttatcatactataaggcaatcagagcagatggacagacacaattgagccatgaaatagctttggagctaagtcagaggagtgctgctgctggactaaggccgattggagcagtggtcttcatgcaacggggtgtcctgaaggtttgcttgaggactactgacagtacagttaatacatcagagattgcaaaggcatatggcggaggtggaaaacgaagttcgagttcattcactctaagaatggatgagttcaacatctggacttcagtgaactcatgaattgaactggagaggtcacatagtgttcatactgtgggaactcgcaaccagctcatctgggcatggattccctcagtggtgaacatgtgaagatggggtggtctttttgtgctccggtatgagaggaaggaaaacaaaatcttagtctaacctaccatgttgatatgagcttacaggagaataatctcttcgatatgaatgactggagagcaatttggaggcataatgcttaagccgttcaagagaagatttgatgcctttaaatgaaaggtttgctggtacatcaaaagacgtattttatgctctttctaatctttctccagtagacctatgtgcttaattttagagatgataagggtggtgcgggccgaagatctgtcatactcctaggggccaattatagcttacacttatgttgttattagttttgaatgctgaacatacatggagatgggtagctcagctcagcttggatataacttggtttctatccaaactaatactttgctccatagggaatgcatctggcaacggaaattgttgtcaagctccagtagcagaaaggatcatcttcaattattgtaatcctgctccttaataatacattcttggatcttgctctgggcttaaaaaatctgcatcaccaaattgttcctcgttgcgaacatttatgtaatacagaaccttagaaactggaaatgtttattccattccggtaatttgggaatgatctgtgttaaaatcctttttaagtgtcataccacgcactatttttctgttcctcaactctatcgatcccataacctatttctgttaactggttactaaggacatgtacaatcccataaccaaattggtgggtatgcaatgcgtcaatgaaaaaaccatttcttcagtcctgtaatgttgttccgattgcgtcaatgaaaaaactgtaatttttgaccggggagatggtagcactagcatgtggggattaaagttcctaaatgttcagtactgtcctaaacacttgttttatcttttttgagtggaagtccgacgtccgagaggggctcgccattgggcttggcatgggcacagtcatgctgctcctcttctgcggctactcgctggtgatttgatatggctctaagctgatcctggagatggtgtacaccggagccaaggtcacaacatgatctttgtagtcctcactggttctcttttctcaaattgaccatggtgttgtaaatttgatcaatgaagaagattcaagaattaccgttttactggattgccatgggatttcgccattcagatttccaatgcaaatgatgaggtcgtttatcactgtggttcaagaaaactacccgaatcgtcttggggtattgtttgtcatccgccttcctccagttgtcagagttattgcacagacatttcttcaaattgcaatatcacatggtatccgtggagatgaggacgacattgcctccaagtctgctccaccggcatccatcgacggtgcaagatccagcagatagattgatggcaaagaggacgactccatgtccaggcgtactccccgccttgcatcgagattgctaggtcataatcgaagggtttacagggaggagatctgaacatagctcttcaatcccaaagttaacatcgttggttaccataattcttactgcttgcaagcccttttagaatattactgctgcgaggttcttgcaaagtccttgatgaagaagtcgaaggtgacgaacgccgaggccgtcatccttgatcgacgccaagaacctcacagcgcacctccttgtgatgctcttttctccaatgtcttctcttatctacatgcaggaaaaaatctacatgtttgatggcgtggatcagaaaaatgtggaaggacaagatttaagatgcactgccatggttggcggtctatttactgcatctcgaagcggcttgcattcaaaggttctgcacctctaaatatttctggtcgtgaagctgtctatgaaaggaagatgaaaattcagcaagttggattgatttatctttcccccctatggctgattcagcaacctgtattaattagtctatttgacatttgatatttcaatgctgttataggactatattgtacatgaccttgaaggagctgaccatgtgacagaccttgatcataaccatgttgcagagttgaagatattaggactatattaaacattgctgcatatagcatcaggatatgatgacatcagacttagaagtcaaacaacatcaaacttatcatcagaagttatatctgtgatccagcaacaacttggtttccgtcgctgcccaaacttcagcagaggcgatctaagaagaagcaagcgtatcggctcatgttctgacggccgtgttcacgtggtgtaagatctgcattgtggaatccttcgcccggacaagagagattggatcctcccgtccagacaacctgatagaacgacagtgtataagaacagggctcttaggacgccttttgtcaagttgggtcataactctaccctgagaattgagatagatgatcatgtggtgcaagatattgagtccctaatctttgatgacacacataacaaatggtaagcgtctccgtggatggagcctgaagtatattcaaattcaaggcatgccacaaagcatctcgcgtgtgggatgctccggcgtgtggaaagtagaaaagccaaataaatgggtacatgtacagcaggcgtgagttcttaaatactcagattccttgtccataggcaaatgcatagttcatacgaatcagagtacacgatgcacacaacttgatgtctctatcgttgttttcaacatgatgaacatgcgaatttcgtggtattaattgggaccgtctgatttctcaaagaaaataacaaaaagaaaagaaaagaaca

SEQ ID NO: 205191 - DNA, 3658 bp, Zea Mays
catttcgagattgttttgactaatttcagcaaacaaataatgtttgttctgaattttattttccaaaaaaatatttgtcttaaacatgtgggcagacctggtgcagtggtgagagttgccatattttttggggtggggggcttgtctcggcttatcacttccctagaccccacttatgtgggagatcccagcactgggtctgccctttatttggctttaacattacgaggaactctagctcaaagacgatcaataagaacctcaatttttcttgtttttagcacggtatatcaagatgaattacacagtcctatttttgattcattagaacttggacaatctttggcggacttcggaaaggcgattaagcttttgggctcttgtgaaggagatttgatggaaaaggtgttttctgaagttggttcaaagtcagagatgttgtcaataaagctgcaaagagaggtgttcgcgctcccaccacccgccttcgtccagatctgccttcgcgcgttcctgggtgggggcggcgatggcggtgccacggggccaacacagtcggcggctcacacaatcggagcagatggacagacacaatcggttttaaaagcaatcagagcagatggacagacacaattgagccatgaaatagctttggagctaagtcagaggagtgctgctgctggactaaggccgattggagcagtggtcttcatgcaacggggtgtcctgaaggtttgcttgaggactactgacagtacagttaatacatcagagattgcaaaggcatatggcggaggtggaaaacgaagttcgagttcattcactctaagaatggatgagttcaacatctggacttcagtgaactcatgaattgaactggagaggtcacatagtgttcatactgtgggaactcgcaaccagctcatctgggcatggattccctcagtggtgaacatgtgaagatggggtggtctttttgtgctccggtatgagaggaaggaaaacaaaatcttagtctaacctaccatgttgatatgagcttacaggagaataatctcttcgatatgaatgactggagagcaatttggaggcataatgcttaagccgttcaagagaagatttgatgcctttaaatgaaaggtttgctggtacatcaaaagacgtattttatgctctttctaatctttctccagtagacctatgtgcttaattttagagatgataagggtggtgcgggccgaagatctgtcatactcctaggggccaattatagcttacacttatgttgttattagttttgaatgctgaacatacatggagatgggtagctcagctcagcttggatataacttggtttctatccaaactaatactttgctccatagggaatgcatctggcaacggaaattgttgtcaagctccagtagcagaaaggatcatcttcaattattgtaatcctgctccttaataatacattcttggatcttgctctgggcttaaaaaatctgcatcaccaaattgttcctcgttgcgaacatttatgtaatacagaaccttagaaactggaaatgtttattccattccggtaatttgggaatgatctgtgttaaaatcctttttaagtgtcataccacgcactatttttctgttcctcaactctatcgatcccataacctatttctgttaactggttactaaggacatgtacaatcccataaccaaattggtgggtatgcaatgcgtcaatgaaaaaaccatttcttcagtcctgtaatgttgttccgattgcgtcaatgaaaaaactgtaatttttgaccggggagatggtagcactagcatgtggggattaaagttcctaaatgttcagtactgtcctaaacacttgttttatcttttttgagtggaagtccgacgtccgagaggggctcgccattgggcttggcatgggcacagtcatgctgctcctcttctgcggctactcgctggtgatttgatatggctctaagctgatcctggagatggtgtacaccggagccaaggtcacaacatgatctttgtagtcctcactggttctcttttctcaaattgaccatggtgttgtaaatttgatcaatgaagaagattcaagaattaccgttttactggattgccatgggatttcgccattcagatttccaatgcaaatgatgaggtcgtttatcactgtggttcaagaaaactacccgaatcgtcttggggtattgtttgtcatccgccttcctccagttgtcagagttattgcacagacatttcttcaagatacaaaccaaccaaggctgactacaagttaaagatgctctgtaaaaaggaaggatcagtttgactatatctttttgctggtagattgcaatatcacatggtatccgtggagatgaggacgacattgcctccaagtctgctccaccggcatccatcgacggtgcaagatccagcagatagattgatggcaaagaggacgactccatgtccaggcgtactccccgccttgcatcgagattgctaggtcataatcgaagggtttacagggaggagatctgaacatagctcttcaatcccaaagttaacatcgttggttaccataattcttactgcttgcaagcccttttagaatattactgctgcgaggttcttgcaaagtccttgatgaagaagtcgaaggtgacgaacgccgaggccgtcatccttgatcgacgccaagaacctcacagcgcacctccttgtgatgctcttttctccaatgtcttctcttatctacatgcaggaaaaaatctacatgtttgatggcgtggatcagaaaaatgtggaaggacaagatttaagatgcactgccatggttggcggtctatttactgcatctcgaagcggcttgcattcaaaggactatattgtacatgaccttgaaggagctgaccatgtgacagaccttgatcataaccatgttgcagagttgaagatattaggactatattaaacattgctgcatatagcatcagcaacaacttggtttccgtcgctgcccaaacttcagcagaggcgatctaagaagaagcaagcgtatcggctcatgttctgacggccgtgttcacgtggtgtaagatctgcattgtggaatccttcgcccggacaagagagattggatcctcccgtccagacaacctgatagaacgacagtgtataagaacagggctcttaggacgccttttgtcaagttgggtcataactctaccctgagaattgagatagatgatcatgtggtgcaagatattgagtccctaatctttgatgacacacataacaaatggtaagcgtctccgtggatggagcctgaagtatattcaaattcaaggcatgccacaaagcatctcgcgtgtgggatgctccggcgtgtggaaagtagaaaagccaaataaatgggtacatgtacagcaggcgtgagttcttaaatactcagattccttgtccataggcaaatgcatagttcatacgaatcagagtacacgatgcacacaacttgatgtctctatcgttgttttcaacatgatgaacatgcgaatttcgtggtattaattgggaccgtctgatttctcaaagaaaataacaaaaagaaaagaaaagaaca

SEQ ID NO: 205192 - DNA, 1514 bp, Zea Mays
cgattctgttctctgccactatccgtccgaccgacttgctcagcggtcagcacccacgcccacggatcaccgtgtgtgacaactcagaaacccagaagaatgaagaatcccagcaagccccatccgggaaatatttatgttatccccacgtgacggccggccctcgaccccacggcgcccgctccctcgtactcgttctcgtcaacccgccgcagggacatgaaagacgacgacgacgacggcggcgctggctctggcgcgcgcggccgcgtgctcgagtcggagcacggcctccccacgcgagggccggcccacgatcccacggcgcccgtccccttgtcctcatcctcgtcaacccaacgcagggaccggccggcccacgaccccacggcgcccgccccctcgtcctcatcctcgtcaatccgccgcagggacatgaaagacgacgacgacggcggcgctggctctggcgcgtgcggccgcgtgctcgagtgggagcacggcctccccacggcggaggagctgacgccggtctcgcacccgctcatccctccggcgctcgctgccgcgttcggcattgacgtcccgcgcaccgccttcccctcatccgccttcgactcccctgccctcgcgcgcaagccccccaatactcgcctgtccttgggctgctacggcgaggacgatgatgagaaggaggaagaggggaagagcgaggtcgccgcctacacaaccggcgcgtgcggaggcgggaagagcgaggacgccgcatccgcatccggcgcgtgcagaggcgggagggctgagaagaaggcgaggatagcgtggacgccggagctgcacaaccggttcgtcgcggcggtggagcacctcggcgacaagggcgccgtgcccaaggccatcgtgcgcctgatgaacgtcgagggcctcacccgcgaaaacgtcgccagccacctccagaagtaccgcatctacctcaagcaacaagcgcgcagccccgcagggccgcagcctcctccggcatacagtccctccgactccaggccccaacaaccctctgacacctccacccggagcacctgcgacatcgagaagctggaacgcgacaaagaagctagaaaagacaaatgatagctttagcattaaagcttacccgaagcacctcgtgacatctaaagcggatgacaagaaaactgaggaggagggttcaagtgacgtgttcgacaagccttcaagaagaaaagacacaagacagcaacgccgtcaacaacctcgatatatctgtgtataggatttgagaacttaaatgtagttccgtacgaagttgttcgtcgcgttgcctatgcatggggacgacctttttactgttcccaggtgcactcacacttggatcgctcagcatttgaagttgtaaagaatacgtactttcgaaccacattcaaacattacgaaggtatctttgtaaagagaacgggaaaaaaatatgtgaatcaggtagcagttagctttcatgtgcg

SEQ ID NO: 205193 - DNA, 2737 bp, Zea Mays
ccatgcttcatgatccactatttcgccgtcgccgcaaaatcctccgacctcgctcgcgccaccgaaaaccaaacgaggaaaaatgccgtccccgtccctcctcctccgcgctcctcctctctgcccctccccgtcccaccccccgcgccgcttcgctcccccctccctcatcacctcgtctccgcctgcccgcctcctccctctgcgcctgccctccgccgcgtcccgccacacgcctcgcgccggtgacacgcgcgtgcccgacgacctcatcccgatcgcgcgctgctacgagggccgccttgctcgactcgagctcgccggcgccgcgcgccgggaacaggccgtcgcggcagcggccgcggccggcggaggggcttcggcggaggaccacctcgccgccggctccgacgccatggtcgtcgaggcattcctccccgggccccatggcggtgggacgaccgcttcctccacgcgagtgattttgcaagccaaggaagttaaagataaggccagtaagatagagaaacagttcggatctgattttttctttgcaaatcaacctgattcagagagtatgttggctatggcctttaagcaagttgtaattcagcggctctcaaactttcggctcgaggtcttccccccaggttcagagagagacttccaagattttggcaaaccccgaaaggggtctttggattgtagtatcagctcatcagatggaaaacttctgtcttctcttgctgaggccattttctcctgtgtcattgaggatgtcagaaaaaatcattttgggagcataggcagtttttttcagaagcgacagctcaactgctcaatggattcctcagtttgtatacacaaaacttctgaggcagaagtagtgaaaaatgctaagaggtgtctggagatcgttagtttaatgaagtcttctcatgaagtacgtgaaacaaagaatggatggtggccacctccacatcatgaaagtttggtgaagattgggggtcctgagttagtgctttgggccaatgagtacattcctacttataagctgcaaattaatgccaacgcattggagaattctaatcttgaagttgaaggtctttatgagttagaaagtaataggcgggaagttctcttaacccactcacaactggtggaactagggaacgttctagacatgtactttgaagatcaattcacattaccaggcaaaacattccatccttattggaatccagatctgtcaaagattaaaaagaacaatggttacttgaacaaccttttcacttttttggctgggacctgtatttttctttttgtcaccatctttgctcagttatgctggcctcaatcctttagagacaaaaggctattcaaggaaagttcaaatgcctcattatctcagaactattgttccgatatcaagtctctttataacagtgaggtacaagcttattgcatgtcacttgttaagaaaatgaaagactcgtatggctgccctggtgatgtaatggttgattctcacattggagcatgggttggagaactacctaactgcttcaaggcaatcagtagtgaggatgctgctgcttctggctcttttcagtatcctgacactcttagccaagaaaatcaatcccagccagtgccagttaatactaagatgtctcatttggaacaaaatgatagaacccaggaatttcctctgcagaatattgctagttttcaggtggtcatgtcagaagaaggtaaagtagtgggatttcagccaactaacctcccagctgtgaaccattgggcaacaaacccactagcaacacttctgtatcaaggacggtcactttctccaggcattatagaacccaggctcaaaatttctcgtccagctaaggctgccccgatcgaattattgatgtcagtaaatcaagattccttttttgctttggcaaggcctgttgaagacccaaggtagcagagcgagcttcctcagattgattctactgcaagattgtgaacagttccaaagatgtgaaacgaaacaaatagtggcagctgagcctgaacaggatttaacaaggtgcctgagttatgagaaagaaatcgactaatgggccccatcattttaagtaagatgccggaggagtggtggtggctgacgtgaagaagaaattccactagtatcccgtcggagtgcaggaggagcgatcggaggggcacaacaaacggcacccggagactatgacccataagccctccagctctctatggttgaacacttgaactataaagtcttatattcagaagtatctaccgagtaggatcaaacaccattcgagtactttcttgggagaaaccatgaccactcttcaaatcttcaagtcttctatatttgtcaccatactatgaagagtctgttgtgcaattctgatgtttttttcgaagaactttgaacgcatcgtgatgatatctatcccgtggcacctaagcctaaaattggcttacaccaagccaattatagggtctcctaagttaattatagggtcttgaacatccttcaaattggctaccctgtgtcagctacagggtcttacatccttagtgatattgatgagtaatgatcgcttgttattttttttttttttggtaaaaataacccttggcaatttcatacgttggtctttcaatgttgaataacagttcccgagcttagttggaatttgccgtgcaggct

SEQ ID NO: 205194 - DNA, 2748 bp, Zea Mays
ccatgcttcatgatccactatttcgccgtcgccgcaaaatcctccgacctcgctcgcgccaccgaaaaccaaacgaggaaaaatgccgtccccgtccctcctcctccgcgctcctcctctctgcccctccccgtcccaccccccgcgccgcttcgctcccccctccctcatcacctcgtctccgcctgcccgcctcctccctctgcgcctgccctccgccgcgtcccgccacacgcctcgcgccggtgacacgcgcgtgcccgacgacctcatcccgatcgcgcgctgctacgagggccgccttgctcgactcgagctcgccggcgccgcgcgccgggaacaggccgtcgcggcagcggccgcggccggcggaggggcttcggcggaggaccacctcgccgccggctccgacgccatggtcgtcgaggcattcctccccgggccccatggcggtgggacgaccgcttcctccacgcgagtgattttgcaagccaaggaagttaaagataaggccagtaagatagagaaacagttcggatctgattttttctttgcaaatcaacctgattcagagagtatgttggctatggcctttaagcaagttgtaattcagcggctctcaaactttcggctcgaggtcttccccccaggttcagagagagacttccaagattttggcaaaccccgaaaggggtctttggattgtagtatcagctcatcagatggaaaacttctgtcttctcttgctgaggccattttctcctgtgtcattgaggatgtcagaaaaaatcattttgggagcataggcagtttttttcagaagcgacagctcaactgctcaatggattcctcagtttgtatacacaaaacttctgaggcagaagtagtgaaaaatgctaagaggtgtctggagatcgttagtttaatgaagtcttctcatgaagtacgtgaaacaaagaatggatggtggccacctccacatcatgaaagtttggtgaagattgggggtcctgagttagtgctttgggccaatgagtacattcctacttataagctgcaaattaatgccaacgcattggagaattctaatcttgaagttgaaggtctttatgagttagaaagtaataggcgggaagttctcttaacccactcacaactggtggaactagggaacgttctagacatgtactttgaagatcaattcacattaccaggcaaaacattccatccttattggaatccagatctgtcaaagattaaaaagaacaatggttacttgaacaaccttttcacttttttggctgggacctgtatttttctttttgtcaccatctttgctcagttatgctggcctcaatcctttagagacaaaaggctattcaaggaaagttcaaatgcctcattatctcagaactattgttccgatatcaagtctctttataacagtgaggtacaagcttattgcatgtcacttgttaagaaaatgaaagactcgtatggctgccctggtgatgtaatggttgattctcacattggagcatgggttggagaactacctaactgcttcaaggcaatcagtagtgaggatgctgctgcttctggctcttttcagtatcctgacactcttagccaagaaaatcaatcccagccagtgccagttaatactaagatgtctcatttggaacaaaatgatagaacccaggaatttcctctgcagaatattgctagttttcaggtggtcatgtcagaagaaggtaaagtagtgggatttcagccaactaacctcccagctgtgaaccattgggcaacaaacccactagcaacacttctgtatcaaggacggtcactttctccaggcattatagaacccaggctcaaaatttctcgtccagctaaggctgccccgatcgaattattgatgtcagtaaatcaagattccttttttgctttggcaaggcctgttgaagacccaaggtagcagagcgagcttcctcagattgattctactgcaagattgtgaacagttccaaagatgtgaaacgaaacaaatagtggcagctgagcctgaacaggatttaacaaggtgcctgagttatgagaaagaaatcgactaatgggccccatcattttaagtaagatgccggaggagtggtggtggctgacgtgaagaagaaattccactagtatcccgtcggagtgcaggaggagcgatcggaggggcacaacaaacgtgggaaattgggcacccggagactatgacccataagccctccagctctctatggttgaacacttgaactataaagtcttatattcagaagtatctaccgagtaggatcaaacaccattcgagtactttcttgggagaaaccatgaccactcttcaaatcttcaagtcttctatatttgtcaccatactatgaagagtctgttgtgcaattctgatgtttttttcgaagaactttgaacgcatcgtgatgatatctatcccgtggcacctaagcctaaaattggcttacaccaagccaattatagggtctcctaagttaattatagggtcttgaacatccttcaaattggctaccctgtgtcagctacagggtcttacatccttagtgatattgatgagtaatgatcgcttgttattttttttttttttggtaaaaataacccttggcaatttcatacgttggtctttcaatgttgaataacagttcccgagcttagttggaatttgccgtgcaggct

SEQ ID NO: 205195 - DNA, 2873 bp, Zea Mays
ccatgcttcatgatccactatttcgccgtcgccgcaaaatcctccgacctcgctcgcgccaccgaaaaccaaacgaggaaaaatgccgtccccgtccctcctcctccgcgctcctcctctctgcccctccccgtcccaccccccgcgccgcttcgctcccccctccctcatcacctcgtctccgcctgcccgcctcctccctctgcgcctgccctccgccgcgtcccgccacacgcctcgcgccggtgacacgcgcgtgcccgacgacctcatcccgatcgcgcgctgctacgagggccgccttgctcgactcgagctcgccggcgccgcgcgccgggaacaggccgtcgcggcagcggccgcggccggcggaggggcttcggcggaggaccacctcgccgccggctccgacgccatggtcgtcgaggcattcctccccgggccccatggcggtgggacgaccgcttcctccacgcgagtgattttgcaagccaaggaagttaaagataaggccagtaagatagagaaacagttcggatctgattttttctttgcaaatcaacctgattcagagagtatgttggctatggcctttaagcaagttgtaattcagcggctctcaaactttcggctcgaggtcttccccccaggttcagagagagacttccaagattttggcaaaccccgaaaggggtctttggattgtagtatcagctcatcagatggaaaacttctgtcttctcttgctgaggccattttctcctgtgtcattgaggatgtcagaaaaaatcattttgggagcataggcagtttttttcagaagcgacagctcaactgctcaatggattcctcagtttgtatacacaaaacttctgaggcagaagtagtgaaaaatgctaagaggtgtctggagatcgttagtttaatgaagtcttctcatgaagtacgtgaaacaaagaatggatggtggccacctccacatcatgaaagtttggtgaagattgggggtcctgagttagtgctttgggccaatgagtacattcctacttataagctgcaaattaatgccaacgcattggagaattctaatcttgaagttgaaggtctttatgagttagaaagtaataggcgggaagttctcttaacccactcacaactggtggaactagggaacgttctagacatgtactttgaagatcaattcacattaccaggcaaaacattccatccttattggaatccagatctgtcaaagattaaaaagaacaatggttacttgaacaaccttttcacttttttggctgggacctgtatttttctttttgtcaccatctttgctcagttatgctggcctcaatcctttagagacaaaaggctattcaaggaaagttcaaatgcctcattatctcagaactattgttccgatatcaagtctctttataacagtgaggtacaagcttattgcatgtcacttgttaagaaaatgaaagactcgtatggctgccctggtgatgtaatggttgattctcacattggagcatgggttggagaactacctaactgcttcaaggcaatcagtagtgaggatgctgctgcttctggctcttttcagtatcctgacactcttagccaagaaaatcaatcccagccagtgccagttaatactaagatgtctcatttggaacaaaatgatagaacccaggaatttcctctgcagaatattgctagttttcaggtggtcatgtcagaagaaggtaaagtagtgggatttcagccaactaacctcccagctgtgaaccattgggcaacaaacccactagcaacacttctgtatcaaggacggtcactttctccaggcattatagaacccaggctcaaaatttctcgtccagctaaggctgccccgatcgaattattgatgtcagtaaatcaagattccttttttgctttggcaaggcctgttgaagacccaagcgagcttcctcagattgattctactgcaagattgtgaacagttccaaagatgtgaaacgaaacaaatagtggcagctgagcctgaacaggatttaacaaggtgcctgagttatgagaaagaaatcgactaatgggccccatcattttaagtaagatgccggaggagtggtggtggctgacgtgaagaagaaattccactagtatcccgtcggagtgcaggaggagcgatcggaggggcacaacaaacgtgggaaattggtgggctttggcataggccaaactctgtgaatgaaaagataatgatctatatattggcaacgactactatgcaagccgttcttttgtgcaagcgtgcaagcaaactatctgatccattaaatcgtgatataaccggcacccggagactatgacccataagccctccagctctctatggttgaacacttgaactataaagtcttatattcagaagtatctaccgagtaggatcaaacaccattcgagtactttcttgggagaaaccatgaccactcttcaaatcttcaagtcttctatatttgtcaccatactatgaagagtctgttgtgcaattctgatgtttttttcgaagaactttgaacgcatcgtgatgatatctatcccgtggcacctaagcctaaaattggcttacaccaagccaattatagggtctcctaagttaattatagggtcttgaacatccttcaaattggctaccctgtgtcagctacagggtcttacatccttagtgatattgatgagtaatgatcgcttgttattttttttttttttggtaaaaataacccttggcaatttcatacgttggtctttcaatgttgaataacagttcccgagcttagttggaatttgccgtgcaggct

SEQ ID NO: 205196 - DNA, 3392 bp, Zea Mays
ccatgcttcatgatccactatttcgccgtcgccgcaaaatcctccgacctcgctcgcgccaccgaaaaccaaacgaggaaaaatgccgtccccgtccctcctcctccgcgctcctcctctctgcccctccccgtcccaccccccgcgccgcttcgctcccccctccctcatcacctcgtctccgcctgcccgcctcctccctctgcgcctgccctccgccgcgtcccgccacacgcctcgcgccggtgacacgcgcgtgcccgacgacctcatcccgatcgcgcgctgctacgagggccgccttgctcgactcgagctcgccggcgccgcgcgccgggaacaggccgtcgcggcagcggccgcggccggcggaggggcttcggcggaggaccacctcgccgccggctccgacgccatggtcgtcgaggcattcctccccgggccccatggcggtgggacgaccgcttcctccacgcgagtgattttgcaagccaaggaagttaaagataaggccagtaagatagagaaacagttcggatctgattttttctttgcaaatcaacctgattcagagagtatgttggctatggcctttaagcaagttgtaattcagcggctctcaaactttcggctcgaggtcttccccccaggttcagagagagacttccaagattttggcaaaccccgaaaggggtctttggattgtagtatcagctcatcagatggaaaacttctgtcttctcttgctgaggccattttctcctgtgtcattgaggatgtcagaaaaaatcattttgggagcataggcagtttttttcagaagcgacagctcaactgctcaatggattcctcagtttgtatacacaaaacttctgaggcagaagtagtgaaaaatgctaagaggtgtctggagatcgttagtttaatgaagtcttctcatgaagtacgtgaaacaaagaatggatggtggccacctccacatcatgaaagtttggtgaagattgggggtcctgagttagtgctttgggccaatgagtacattcctacttataagctgcaaattaatgccaacgcattggagaattctaatcttgaagttgaaggtctttatgagttagaaagtaataggcgggaagttctcttaacccactcacaactggtggaactagggaacgttctagacatgtactttgaagatcaattcacattaccaggcaaaacattccatccttattggaatccagatctgtcaaagattaaaaagaacaatggttacttgaacaaccttttcacttttttggctgggacctgtatttttctttttgtcaccatctttgctcagttatgctggcctcaatcctttagagacaaaaggctattcaaggaaagttcaaatgcctcattatctcagaactattgttccgatatcaagtctctttataacagtgaggtacaagcttattgcatgtcacttgttaagaaaatgaaagactcgtatggctgccctggtgatgtaatggttgattctcacattggagcatgggttggagaactacctaactgcttcaaggcaatcagtagtgaggatgctgctgcttctggctcttttcagtatcctgacactcttagccaagaaaatcaatcccagccagtgccagttaatactaagatgtctcatttggaacaaaatgatagaacccaggaatttcctctgcagaatattgctagttttcaggtggtcatgtcagaagaaggtaaagtagtgggatttcagccaactaacctcccagctgtgaaccattgggcaacaaacccactagcaacacttctgtatcaaggacggtcactttctccaggcattatagaacccaggctcaaaatttctcgtccagctaaggctgccccgatcgaattattgatgtcagtaaatcaagattccttttttgctttggcaaggcctgttgaagacccaagcgagcttcctcagattgattctactgcaagattgtgaacagttccaaagatgtgaaacgaaacaaatagtggcagctgagcctgaacaggatttaacaaggtgcctgagttatgagaaagaaatcgactaatgggccccatcattttaagtaagatgccggaggagtggtggtggctgacgtgaagaagaaattccactagtatcccgtcggagtgcaggaggagcgatcggaggggcacaacaaacgtgggaaattggtgggctttggcataggccaaactctgtgaatgaaaagataatgatctatatattggcaacgactactatgcaagccgttcttttgtgcaagcgtgcaagcaaactatctgatccattaaatcgtgatataaccgtaggtcacatttaacacttaaacccttccactccagctcaatactctttataaaaaaaaccctaacaaatcatggttgtatctgtggttggattgtaatctaatggattagatggtttgtttgcacgcttgcacagaatgactgcttcataacagtcgttgccatatatattaggttctgtttgtaagcacccaatttttaaaagctgatttatagaaattgaggtggttccaaacataccggtttatgactcagtttataaaattagattttcagtttattaaaaatcaagaagctggtctctcctatctaaaaaataaaatttgttttcttaaaaactgagttgtttccaaaacagggccttagtttaagcagaatagtgtaataccttgtgtctaggtagacatgttgccttacactgaattatgatgtgttttctgtttgggtcggttactatagaagtcctagtaaaattgtatatgtggaatcttaattgaactaagttttctttcttgtagggcacccggagactatgacccataagccctccagctctctatggttgaacacttgaactataaagtcttatattcagaagtatctaccgagtaggatcaaacaccattcgagtactttcttgggagaaaccatgaccactcttcaaatcttcaagtcttctatatttgtcaccatactatgaagagtctgttgtgcaattctgatgtttttttcgaagaactttgaacgcatcgtgatgatatctatcccgtggcacctaagcctaaaattggcttacaccaagccaattatagggtctcctaagttaattatagggtcttgaacatccttcaaattggctaccctgtgtcagctacagggtcttacatccttagtgatattgatgagtaatgatcgcttgttattttttttttttttggtaaaaataacccttggcaatttcatacgttggtctttcaatgttgaataacagttcccgagcttagttggaatttgccgtgcaggct

SEQ ID NO: 205197 - DNA, 3401 bp, Zea Mays
ccatgcttcatgatccactatttcgccgtcgccgcaaaatcctccgacctcgctcgcgccaccgaaaaccaaacgaggaaaaatgccgtccccgtccctcctcctccgcgctcctcctctctgcccctccccgtcccaccccccgcgccgcttcgctcccccctccctcatcacctcgtctccgcctgcccgcctcctccctctgcgcctgccctccgccgcgtcccgccacacgcctcgcgccggtgacacgcgcgtgcccgacgacctcatcccgatcgcgcgctgctacgagggccgccttgctcgactcgagctcgccggcgccgcgcgccgggaacaggccgtcgcggcagcggccgcggccggcggaggggcttcggcggaggaccacctcgccgccggctccgacgccatggtcgtcgaggcattcctccccgggccccatggcggtgggacgaccgcttcctccacgcgagtgattttgcaagccaaggaagttaaagataaggccagtaagatagagaaacagttcggatctgattttttctttgcaaatcaacctgattcagagagtatgttggctatggcctttaagcaagttgtaattcagcggctctcaaactttcggctcgaggtcttccccccaggttcagagagagacttccaagattttggcaaaccccgaaaggggtctttggattgtagtatcagctcatcagatggaaaacttctgtcttctcttgctgaggccattttctcctgtgtcattgaggatgtcagaaaaaatcattttgggagcataggcagtttttttcagaagcgacagctcaactgctcaatggattcctcagtttgtatacacaaaacttctgaggcagaagtagtgaaaaatgctaagaggtgtctggagatcgttagtttaatgaagtcttctcatgaagtacgtgaaacaaagaatggatggtggccacctccacatcatgaaagtttggtgaagattgggggtcctgagttagtgctttgggccaatgagtacattcctacttataagctgcaaattaatgccaacgcattggagaattctaatcttgaagttgaaggtctttatgagttagaaagtaataggcgggaagttctcttaacccactcacaactggtggaactagggaacgttctagacatgtactttgaagatcaattcacattaccaggcaaaacattccatccttattggaatccagatctgtcaaagattaaaaagaacaatggttacttgaacaaccttttcacttttttggctgggacctgtatttttctttttgtcaccatctttgctcagttatgctggcctcaatcctttagagacaaaaggctattcaaggaaagttcaaatgcctcattatctcagaactattgttccgatatcaagtctctttataacagtgaggtacaagcttattgcatgtcacttgttaagaaaatgaaagactcgtatggctgccctggtgatgtaatggttgattctcacattggagcatgggttggagaactacctaactgcttcaaggcaatcagtagtgaggatgctgctgcttctggctcttttcagtatcctgacactcttagccaagaaaatcaatcccagccagtgccagttaatactaagatgtctcatttggaacaaaatgatagaacccaggaatttcctctgcagaatattgctagttttcaggtggtcatgtcagaagaaggtaaagtagtgggatttcagccaactaacctcccagctgtgaaccattgggcaacaaacccactagcaacacttctgtatcaaggacggtcactttctccaggcattatagaacccaggctcaaaatttctcgtccagctaaggctgccccgatcgaattattgatgtcagtaaatcaagattccttttttgctttggcaaggcctgttgaagacccaaggtagcagagcgagcttcctcagattgattctactgcaagattgtgaacagttccaaagatgtgaaacgaaacaaatagtggcagctgagcctgaacaggatttaacaaggtgcctgagttatgagaaagaaatcgactaatgggccccatcattttaagtaagatgccggaggagtggtggtggctgacgtgaagaagaaattccactagtatcccgtcggagtgcaggaggagcgatcggaggggcacaacaaacgtgggaaattggtgggctttggcataggccaaactctgtgaatgaaaagataatgatctatatattggcaacgactactatgcaagccgttcttttgtgcaagcgtgcaagcaaactatctgatccattaaatcgtgatataaccgtaggtcacatttaacacttaaacccttccactccagctcaatactctttataaaaaaaaccctaacaaatcatggttgtatctgtggttggattgtaatctaatggattagatggtttgtttgcacgcttgcacagaatgactgcttcataacagtcgttgccatatatattaggttctgtttgtaagcacccaatttttaaaagctgatttatagaaattgaggtggttccaaacataccggtttatgactcagtttataaaattagattttcagtttattaaaaatcaagaagctggtctctcctatctaaaaaataaaatttgttttcttaaaaactgagttgtttccaaaacagggccttagtttaagcagaatagtgtaataccttgtgtctaggtagacatgttgccttacactgaattatgatgtgttttctgtttgggtcggttactatagaagtcctagtaaaattgtatatgtggaatcttaattgaactaagttttctttcttgtagggcacccggagactatgacccataagccctccagctctctatggttgaacacttgaactataaagtcttatattcagaagtatctaccgagtaggatcaaacaccattcgagtactttcttgggagaaaccatgaccactcttcaaatcttcaagtcttctatatttgtcaccatactatgaagagtctgttgtgcaattctgatgtttttttcgaagaactttgaacgcatcgtgatgatatctatcccgtggcacctaagcctaaaattggcttacaccaagccaattatagggtctcctaagttaattatagggtcttgaacatccttcaaattggctaccctgtgtcagctacagggtcttacatccttagtgatattgatgagtaatgatcgcttgttattttttttttttttggtaaaaataacccttggcaatttcatacgttggtctttcaatgttgaataacagttcccgagcttagttggaatttgccgtgcaggct

SEQ ID NO: 205198 - DNA, 1370 bp, Zea Mays
acttatcttccttatcctatctccatcgccccatttcctatcctcccagccgatcccctctccctcacggcgccctctcccatggccgtcggccctccccgccatggacgtcgctcttccttcctacaccgccatggcagtgcctccctgcagcagtccggtgaccgggccctccccttcccacgtcatgctggtgccatgtcttctccctcaccggccaacctcgccagccaccaggaaggtgtctccctctcggcagctcccatggccaccatcagccctagctgcgcttgccctggttccagcagctcgacgccagcccctctcaatcttccatcgctgccgctcagcttgtcccagatatattgatgttgacaattggaaatccatgtagcaaataaatgattttggaactagggacagatctgaatggctgacattctgtctccatcgatatttaatagtaaagcaaggtttgtgacctggatttattgggtgctgtagacattggaggtggattttcctcaattggagatattgacaaattggaaaaaatgtgacttgacctgtgctgcaacaaccttaaactaggaggggcttctaattcttcatctctaccaacagtcctctcctgttactttttaaaccaataactttttcaagtttgtgcagatgcacacatccttgagccaaaatagaaaaaaaatcatagaagagttctttggctgtcacgtgattcaagagtattaatgatatacaaaagtttgctttatggcaagtcaagtaaccaccaattttgggcaatgacagggatgtgcagtggtggtctcttaaaagaattttgtgttccagcgtagctatttccactgcaaactatcaaatcattacaaactggcattccatggcttccactagttgagtccccatgataaccaatccttgttatcatatacttcttcaagtttgacgtcagcaacgtggtcatggtgaccggcgggaggaacaccgggcgtgtaggagtgatcaagaactgggagaagcacaagggcagcttcgaggtcatcgacgtgctgcttggaggcttttgcatgctatttctagttttctcttatttgttgtacaagaaaacatagaatggaattcaaatttggtggtcgcaaaagtgtggagacttgaattcatataaagttaggcttaacattagtgcaaaaagttgtattttagttttgatttagagtacacttatgtatgccttgtttgacaatacttatttatgatatattgaatggtacctattgtaatcgtctattattgtaggatattcgagacagtttgataaatactttatgacttataatgtttgttttctc

SEQ ID NO: 205199 - DNA, 1131 bp, Zea Mays
acttatcttccttatcctatctccatcgccccatttcctatcctcccagccgatcccctctccctcacggcgccctctcccatggccgtcggccctccccgccatggacgtcgctcttccttcctacagatgttgacaattggaaatccatgtagcaaataaatgattttggaactagggacagatctgaatggctgacattctgtctccatcgatatttaatagtaaagcaaggtttgtgacctggatttattgggtgctgtagacattggaggtggattttcctcaattggagatattgacaaattggaaaaaatgtgacttgacctgtgctgcaacaaccttaaactaggaggggcttctaattcttcatctctaccaacagtcctctcctgttactttttaaaccaataactttttcaagtttgtgcagatgcacacatccttgagccaaaatagaaaaaaaatcatagaagagttctttggctgtcacgtgattcaagagtattaatgatatacaaaagtttgctttatggcaagtcaagtaaccaccaattttgggcaatgacagggatgtgcagtggtggtctcttaaaagaattttgtgttccagcgtagctatttccactgcaaactatcaaatcattacaaactggcattccatggcttccactagttgagtccccatgataaccaatccttgttatcatatacttcttcaagtttgacgtcagcaacgtggtcatggtgaccggcgggaggaacaccgggcgtgtaggagtgatcaagaactgggagaagcacaagggcagcttcgaggtcatcgacgtgctgcttggaggcttttgcatgctatttctagttttctcttatttgttgtacaagaaaacatagaatggaattcaaatttggtggtcgcaaaagtgtggagacttgaattcatataaagttaggcttaacattagtgcaaaaagttgtattttagttttgatttagagtacacttatgtatgccttgtttgacaatacttatttatgatatattgaatggtacctattgtaatcgtctattattgtaggatattcgagacagtttgataaatactttatgacttataatgtttgttttctc

SEQ ID NO: 205200 - DNA, 731 bp, Zea Mays
atcgcacgtggccaccgcacagcctgcctccgccgacgccccgggcacgaccggtgccacctcaatctgtccccaacgcaccctcgcccccaacgcctaccacgtgcgcccagcttgcccccacacgctgtccctaatgcaacctcgcctgctcgcactgctccacctcccccatacgttggaggagttccacgcctgcctcctctgctcccacggccgcaacggcaccacgacgcgcgtcgtcgggagccaccaggatgtctgctacctaccccttctcaaggagtagctctccgagccatggactggcgcgagtgaggcaccgtcatcgagatctcaaaattccggagaatgtctcgaagtgcatagattgaaaaaagtagcataagaagaatggatttgtggaattgattattttcacaagactgcaaatcagagtagatgtttttcgaccatgctttactctaaacgctttatgaagcatctcagcgtgcgtttcagctctacagttctataatccatccaagtatccatgcaaacaataaaattgtacgggcatttggagagaagagagtagaggataatttgaagaaccacgtggacctttgcaggatgcttgatattgtcgcattggaaaaggacatcttatgatcaaggggacaaatgagatcatgccaactctactccatgtactgctggtgtcacaggtttgcccactaagcttgattgca

SEQ ID NO: 205201 - DNA, 672 bp, Zea Mays
aaacgaaaggactgccctaacctcgtgcagtcgtgcccgcttgtttcacttgctcgccttcacccctcgccgccaccgccgccgccgtcgccgtcgcaagcgagacgatgctcgagatcaacttgttccgcaccgacaagggcggcaacccggaccttattcgcgagtcctagcgcagtcggttcgcctccgtcgagctcgtcgacgaggtcatcgccctcgacaaggcatggcgtggcaattcgagctggataagatccggcaggagctcaacgctaccagcaaaaagatcggcaagctcaaagccagcaagcaagaagaggaagcgaagaagctcatggatagcacagacgaaattaagaaaaggttggcagccaaagaagttgaggtgcaggaggccaagagcaccctcgacgccaaggtcatgacgatttgcaacatcgtgcatgagtctgtgccattcagcgatggcgaggcaaacaataaaattgtacgggcatttggagagaagagagtagaggataatttgaagaaccacgtggacctttgcaggatgcttgatattgtcgcattggaaaaggacatcttatgatcaaggggacaaatgagatcatgccaactctactccatgtactgctggtgtcacaggtttgcccactaagcttgattgca

SEQ ID NO: 205202 - DNA, 1274 bp, Zea Mays
cacgacacgagcccgacgagttcgcgccaccccccggacccggacccggcgcgttcgccgcgcccaccgtcctgtcgccgcggacaccggcgggaggcagaaggaagagattaggagacagtcggccgccctcccgatcggggaagaagacgcgatcgatcaccccggcccccatggaagtgttcaacggggtgcggttcgtgcgcctgcggtgctgcgcgcggcgcggcaagtacctggctgccggctccgacggctccagcgtgtgcctgacggggcagcgcggcgtgcacaacgcggtgtgggcggtgcaccacgcggcggggcccgacggcgggccctgcgtgctcctccgcggcgcctacggccggtacctcctggccaccagcgcgcaggccggcacggggccctcgcacggcgtggtcacggcgcaggacgggctcggcggcgccacgccgctgcccgggatgctgtggcaggccatccccaggcggtccaccttcgtcatccgcagcggcacggggcggtacctccgcgccaacggccggtacctgcggtggcgcagggccgtcacctccgccggcgacaacggcagcaccatgatgcagtgggacatcgagaacgtgcccatcagcatgacccgcccatgcattcttgatcccacctaccagctgacgcatgcgcggcggcgtccgctgacggagagcgaggtggctcggcagatccggtacgtccgcggcgagacggacgggagcgtgaacgagggagcctggaggacgatgcagctcaacacccacaacctgatgcagctgcggctcacgctggcgtgccgcctcggcgccagcatggacgtcacccgcaccaccctctgcgtccgcgccggccgctacgcccacctcagcccgctgctcgtcgacctgcccatcggcaacgaccccatcgacattgtcatcctcaaccacggcacagaagcggacaacgatctgcggtacccagatctgcatgctccaagagtgttagatagcagcaaggtctctaacaaaaatgaacagcggacaacgatctgaacacacatcttacagaggaattaaaactgtatttataaccttggcgaaaacagcgagacagcaactgccaactaatggttttcagtactacttccgttaaacagctctattctagagttctcagtaaactcagtatttttttcctatgtatacactgctgatacaatttataacctggttccttaattaggaaggttctgcgatgcc

SEQ ID NO: 205203 - DNA, 1011 bp, Zea Mays
attaagggcacgagacacggccaagtgtggattttaaaatcaagttccttacagttggtggaaagaaactaaagttgacaatatgggatactgctggccaggagaggtttaggacaattactagttcttactacagaggtgctcagggaattattctagtatatgatgtcacaaagagagaaagtttctcaaatttggctgatgtttggactaaggaaatagaagcaaactcaacaaacaaagactgcataaaaatgcttgttggaaacaaagttgacaaggatgatgaaagaatggtcacaaaagaggaaggtcttgcttttgctgaagaatatggatgtctgtttcttgagagcagtgcaaaaacacgagaaaacgttgagaaatgttttgaggaacttgcattgaagattcttgaggtgcctagtctcctagaggaagggtcttcttcggttgtcaagaggaacatcctgaaacagaagcaggaaagtgatgcaaagaacggtagtggatgctgtcaatagatgtatgtgctgatccacaccacacggttggctttcttcgtgtgagctgccctgattgtctgctgtacatgttcttgtgagtaagaagggcgagcataattgatttgtacaaaggacatgtcagtttggtgtcatagttttcctcatctccagtttagtatagcaattttgttgtcgccctagcaatggtaatatggaatcctctctctacagtattgctatctggccggctggcccttagaaaccgggaccgtggaacttgttcacattcctcgttccagaaatgttcgttctgttccaaaaacgtgggaacaattttgtttccgtagtgttaaaatcttgtttaaggattagtttggcaacttcattttttcatgggatttctaattttccttgaaaaaatggacaaaaaaatggactaatttccttgagaaaatagagtttccaaactagccttaagtatgtatgttcctatcctcgaccttag

SEQ ID NO: 205204 - DNA, 1618 bp, Zea Mays
ctccaaactattcctcttcgcttttaaattcgagaagcaaaaccgcgacctcgccggagaacaatggccaatgcactgccaggccagaaaaccggcgaggtcacggcgacgcagaatccgttcgagttccatgtgtacgggccgcgacacctgtcgtcccccagctggtgggatctcctccgttcgagctgggggtgtacctgctggagctggaccggcaggacaagcgcgacgagcgcaccgcccttgcgccgcagtggtggcgccacttcatgtacaggctctcccagacactcgtcgacgagcgcgacggctccatctacggcgccgtgctcgagtgggaccgccgggccttgctggctggctacgcgccgttccgccccgccggcgccccggccgccgtcgtggcgctccgcggcacgctgctgagcggggccacgttccggcgcgacgtcgtggacgacctccggttcctggcctgggacagcctcaagggctccgtgcggttcgccggcgcgctggccgcgctgcggtccgcggcgcgcaggcacggcacggggaacgtgtgcgtgggcgggcactcgctgggcgccgggttcgcgctccaggtgggcaaggcgctggccaaggaaggcgtgttcgtggagtgccacgtgttcaacccgccgtcggtgtctctggccacgagcctcaggggcttcgcggagacggccggcgagatgtggggctacgtgcgcgcgtggctgccctacgtgggctcggctgcggcggcggacgcgggcggcgaggccaaggaagtgtcgctggggcgcgccgggacggccaagtggttgccgcacctgtatatcaacaccaacgactacatctgctgctactacaccgacactgcggccgggacggcgaccgtgacggccagaggagggagcgggggcagtaaggttgctggaggggacggtggcatcggcaagccggggctggcgaggatgttgacggtgtccaaggggccgaccaagttccttgatgcgcacgggctgcagcagtggtgggctgacgatgtggagctgcaggtcgccctcaaccacagcaaactcatcgaccgccagctcaggtcgctctatgccgcgcagccggcctcgccgcaagtgaaccagtaggctgtgtagctctgtagcagctcacaaaacgctgagaaaaaaacgcaacgctagcatgatgctgttgatggattggactccgctgcgtgatggtccgctgagcgcacggatgatgagcgttccaaacatttcggatttgaaacagttgtgggcttgtggcaaatttaaaaaattcaaaaagtgaatttcaaaataatacgactccgctggggatcgaaacccagaatctctggttccgtagaccagcgccttatccattgggctacggagtcatttttgttttgaattgttaaccagattttatgtccttttgcacctcatacaaatttatcacgaatttccagataaactgatttgatacagtaattcggtgtgctcagtatatagttttccgaataaatgaattcgatacgataattcggcgtgctcagtatatttgacagttgatatgtcatttgttttag

SEQ ID NO: 205205 - DNA, 1977 bp, Zea Mays
ctattttaaaactttattatacaaacagtgcaatctataatacaaaacagtactttgcacggctatttacacgacgtcatggcattatattacctaggatgtacaaagatgacaccatgcagtaccattctaaaacttaatttttaactacagttggtgaacctaatacagcctggtgaagcattagcaaataacaatttaaaagttacaacaatttttagaatttgatgctcctgttaaaaacaaggcatcacattatttctatgttggctccaggaattgttgcaaataaaaggctataacaataaagggctataaaacgaggccaggacgaaacaaaaaagtcatcccggacaatacctaataaatttctcaatgctcgacagcagcctaagtgcgataaacaacacacaaaaaaaggagccactaggccttatgtgtggtgtgtcttgtgagaaattaccaggtgcatttctcaggaaaggacataaaagaaaggtgcatctcagtgggggaatcaggtgcccgggaaaggtaggtgggagacgaagtttctcgcgcgcaggcgatgagaagaacagtggcttcaaagtggagggcaaaaaaaaaaaaagaattaactatggatgctacaaccaacaagcaccgacgaaagaaaaaaaaggataaaagaagtggagaggcgttcctctttcactttggaggaaaccacaaaaatgcaaaatcacacaggacatgacgggccccggaacaggagagaagcaaaagcgaaagcaccacctgccgtccaagcaccaaaggcatgcacgaagaatcggctcggcccccaaaaagcacagggcccaggcgcccaccgcgcagcctgccaggcgggggagccgttggatgtcgcacaaactgcccagtcctccgcagtggagtacagcgccagcgagccaccagcaccctcatcctccgtttcgcggctcacagagatacctcaaaacccaaccaggccggcgtccaggtgtccacagaaagaggagagcagagagagcgggagatcatggagctctgcgtctctaccactgcctccgtccgcgccaccgccgcgcccatatccttcgccccgccccggcgaggcgcgtctgcttccaccgccctcccgctccaccgccgaatcccaactcgaggctggtgttgcgccagcgcggccgtgcctgacccggcgccctccgaagagctcgcatccgcctcctacaccgtcgtcgtcgcggacaagcccgattcgcctgccgatgacaaggtcgacgaggttagcgccgcgcctagtggctccgcggaggcgcccgtagcagaaccggtgtcatcagaggcgtccccgtccccgtccacggatgacggcggtctggatgagatactaagcaagttgaacattgaagtgactccgattttaatcctcactggatctggtgcctttgttgctttatggatcctatcttctgttgtttctgcagttgattcagtccccctgctcccaaaattgctggaattagtaggaactggttactcaatttggttcaccgcacggcatctccttttcaaggaaagcagagatggcatgtttgcaaagttcaaggatatcaaagagaggatcatttgatctaccatcgatatctggtcacgtgtttaggctttacagcctgcttattattaggttttctcccctttcaaatattactgaaggggtaaagaaggtcgtatatctaatttttcttctcacggggtctgtcattaggcttctcaagtttggctagtgtgcttcttcaggtcactctcgatgttttttactcaatcctatgtgtatgctgccgaataaagctttaaaaagatgaatgcaattagtatgttctcgctcctatgcaagttttgaaatccagtgtccagtaaacatttcagataccatatgttaagctcgagccttctgtgagaccgacg

SEQ ID NO: 205206 - DNA, 2578 bp, Zea Mays
agagaggcattgaaaaggatagaaggggtagacccattaaaatgtgcaagttcaggtatgtttgtgaatcttagtgctgtgatgctccgtctatgcgagccttttttggataacatggaatcaaagaaggataagattgatgtcaaatacctcttttgcaacaatagaattgatttcaaggatttgacagctataaatgcgtcttcagaagaagtctcatcttggatagagagcataaataacgagcatgctcaaaataatgccagtggagaggctcgttttgtggaatcacaggaagccacaagctctggcaaaaatagtgcatcttcacaacttcggtgctcaaagaagaacttctcatttgtttgcgaatgtttcttcatgacctcaagggtacttaatctcggtttgatgaaagctatatcagacttcaaacatatttctcagcaacttgcaaggtttgaagatgatttggagtcaaacagagcagtcagagatcagggagggggttcaccacagcttgaacaagatataactcgtttggagaagattgtcgagattttatcacaggacaaattatgttatgaagctcagatactacgagatggtgcattccttcaacgagcattatctttctacagattaatgattctgtggtcagttaatctagttggcggttttaagatgcctttgccatcacaatgctccaaggagtttgcttgcattccagaacattttcttgacgatgcaatggatttacttgttctaacctctagaattccaaaggctttggaaagctttgtattggatgacttcctcagcttcataattatgttcatgggaagcacatcttacattaagaatccttacctaagagcaaagatggttgaagttttgaattgctggatgccgcaaagaagtggcttgagttctacagcctcgttgtttgaggggcaccaactgtgtcttgactatcttgttagaaatcttctaaagctttatgtggatattgaattcactggttcccatacacaattttttgacaagtttaacattcgacataatattgctgagcttctggagtatttatgggatgtccccagtcaccgaaacgcatggagacaaatagctaaagaggaggaaaagggtgtatacttaaattttcttaactttctcatcaatgatagcatctatcttcttgatgagagcttgaacaaaattttggaactgaaagaaatagaggctgaaatgactaacactgttgagtgggagcgcagacctgctcaagaaagagaggagcggctccgtgtatttcatcaatgggaaaatattgttcgatttgacatgaggctagccaatgaggatgttgggatgcttgcattcacctcggaacaaattccagcacctttccttctccctgaaatggtggaaagggtcgcgagcatgcttaattacttcctcttgcaacttgctggtccccagaggaaatctttgactgtaaaggatccagagaagtacgagttcaagccgaagcagctgttgaaacagattgccaccatctatgtccatatctcaaggggcgacaaggaatctgtcttcccagctgcaatctcgaaagatggcagagcatacaacgatcagttgtttgctagtgcagctaatattctgtggaagattgggggtgatcccaaaatcatacaggagtttatgcagcttgctggtagggcaaaagctgctgcttctgaagctatggatgctgaggcaatccttggggacattccagacgaattcctggatccaattcagtacactctgatgaaagatcctgtgacactgccatcatcgaaggtcacagtggatcggcccgtaattatcaggcatctgctgagtgattctacggatccatttaaccgctcccacctcactcaagacatgctgataccaaacacggagctcaagttgcagatcgaggaatttgtccagtcccagcagttgagaaagcgaactgctgcggtgtcagagattggccaagcggatggtgctgatgatatggccgaatgaattgtgcgagcagcagggatggacattttcttttgtggtggggaaagacggatgctaatttacgcgaaatttaccagttcatcggtccgtataaaatcggtttgccagcttgtgtcaccatttgtctccattctttgtaaatgttgtaagtgcacggttgtaattttaagtccctgtttgtttacctttgagattatggccctgtttgtccttctaggattatatagtccagcttattataagcatctattgacctgcttatgaattatcataatttaggtgtttagattacataatttatataataatttgtgttgtttgtttaccctttaacttatttagctgaattatataatttagagggaaaacaaacatgtcctatataatctagcttaataagttaagaggtaaacaaaaaacatagattattagctggattatataatctagatgtctagattatgataatccataagcagataattaggtgtctagactatgataatctataaacagg

SEQ ID NO: 205207 - DNA, 2370 bp, Zea Mays
ggcttctcggataattgttcgcttaaccatacgagcaagagcaacagagcaaagcaagcgaaaggcggccacaggcgcagcgtagttgtccctgtccgtcgcttgcgccaacctgctgcccaccgttaatcagttttctttaaccccagctgctgcccgtttactaatcaaatcatcgtccccctccggcccctcctttcccttccgcgcctccctcgtcttcttctcgtctccactccccctctcccaagtcccacccgccgctcccgcccccgtgcgctcgccgacacggtcagtagttccactcggagaaaggaacgcttccccctgcctgtctcgccggatccgttgccccgctgcagtttcgcccgccgctttcactttcgctttcactcgatttagattccatttccgttcgttcgttcctgtttcccttgctcgttcgttcgattggagctagccgccgcctggatctggcctagccgagccccggctgctctgaatcccgattcggttcggctcccttgctctgcggtcgcttccgaggcgtgctcggatctcgtcggagtagagggcctcgcggctcgcttcgggggcgagatggatcatgtggtcgggggcaagttcaagctcggcaagaagatcgggagtggatcgttcggggagctcttcctcgccgtgaatgtgcagaccggggaggaggtcgccgtcaagctgctggcattccgcacctcaagtggttcggcgtcgagggggactacaatgtgatggtgatcgaccttctcggccctagccttgaggacttgttcaactactgcagcagaaagttctctctgaagactgtgctcatgctcgctgaccaaatgattaaccgggttgagtacatgcatcaaaaggggtttcttcaccgtgatataaagcctgataatttcctcatggggcttggtaggaaagccaatcaggtatatataatagactatggactagcgaaaaaatatagggaccttcaaactcataagcacatcccgtacagagagaacaagaacctcactggaactgcacgatatgcaagtgtcaacacccaccttggtgttgagcaaagcaggcgagatgatttagaatccctcggttatgttcttatgtacttccttaggggcagcctaccatggcaggggctgaaggcaggaaccaagaagcagaaatatgacaagatcagcgagaaaaagatgctcactcctgtggaggtactctgcaaatcgtacccatcagagttcatctcctacttccactactgccgttcgttgcggtttgaagacaagcctgactattcttacctgaagagactattccgcgatctctttatccgggaaggataccagttcgactacgtgtttgactggaccattctaaagtatcctcaaataggctccaacccacggaccagggccggtgaaagaactagtggcgctgctggaccctcaatggataggattgagaagaccccaggagaagcgtccggtagaaggaaccctagtggtcctgtgaatcagagcgacagttacgcgcaacggccacgcgagaccgtatccatgtcgctaaaggagattatgcatagcactgaccggtctggggaaaggactgtggagagaccacgcacgtcctcacgcacaggcagcgcatcccgcagagccgttgcgtcaagcagcaggccagcaacctcgtccatggaaccaagcgagcagcagtatagccgggcgagcagactgttctctagcaacagtggcagccggccatccagcgcccagagagtcaaccctgcgccgggcgagtctagggccacctccctttcgcgggcagcggtcgcgagaggctcccgcgacgagccactccaccgcagcctggagctcctttcccttggcagcggcaagaggaaatagcgggaaggaagccgatctgatagcggaagggaaaagaatgcctgttggcgactctgtaaatgacggggcatgtcacctgttcttcgccagcagttcttcccctggggcatcccgtaatttcatggtgcccgccccggccttttaccatggctccgtagatagcaataattcgttgttgaatgtgcgtgctgtgttgcagtcgcgttagggccaagtcctagcctttgtggtgattagatttagggggtggtcaagattcacatatttatgtttcttaaccctctcctggacttggcgactcttttttttaccccctcccgagacaagtgcccgtgcgtttcttgttgaactctgaatttgcttattcaacagaagttgataatgataataaaagaagaggcatcctgtgtaaatcgatgcctcattttcttac

SEQ ID NO: 205208 - DNA, 1685 bp, Zea Mays
cggcgaaggttgccgtggcgctcgcgctcatcacgctgctcgtcttcctccgcgagcccagcgatatcgccagccattctgtatgggccatactcaccgtcgtcgtcgtgttcgagttcagcatcggtgcaactttgagcaaagggttcaacaggggattgggtactcttattgcagggggccttgctctattggtcgctgagctagcggcacaaatgggaaaatatgacatgttggtcctcatcataagcacttttgtagttgcgttctgtgccaccttgacgaagctgcaccccaagatgaaaccatacgagtatggatttcgcgtgttcttgctgactttctgctacgtcacggtctctgggtacaacacgggagaattcacggctacggctataagcagatttgtgctgatcgctcttggtgccgctgtcagtctcggcatcaacatatgcatacacccaatctgggcaggagaggaccttcacctgttggtggccaggaatttttctggtgttgcaaaatctttagaaggatgtgttgatggatatctggcctgcatggaatatgagagggttccatccaagatactcacgtacgaagcatctgacgatgatcctgtctacagcgggtacagggcagctgttgaagcatcagcacaggaggaaaccttgctaggatttgctatatgggagccaccgcatggaccttacaagatggtgaaatatccgtggaagaactacaccaaagttggtggtgcgttgaggcattgctcattctcagtcatggcattgcatgggtgcatactttcagagatccaggcaccaccggagagcagaaaggttttctgtgcggagcttcacagagtgggccaagaaggtgctgaagtgcttcgcgaacttgggcagagagtcaagacgatgacgaagctgagctctccaaacattctttcagaagtgcacttggcagctgaagagctgcagaagaagatcgatgagaagtcttaccttctcgtcaatacagaaaggactcacgatggtgccagtgctcctgacaaggatgaatcgcccgagaacgccgctgccgattcagtgcacacgtcgaccagcttcgcttcaaacctgtacctcagcagatacgattcttcaaacccgtttctcggcagatacgattcgggatcaacggcgggcggtttatataaggcgcagtcatcgtggcctgctcggcaatctttccacccaagccttccatttgaaattgaggaatcaagaatttatgagagcgcaagcgccttgtcgctggccacgttcgcatcgctcctcattgagtttgttgcccggctccagaatcttgttgatgcatttgaagagttgagcgacaaggctaacttcaaggaccctgtggaggaaccttctacaatcagcagggagactcccggggttttagctagaatacataacttttttttggttcaagtgacgaggatgctctatcatgcacgctcgggacatgagatctcgctcgaagtctgtgaggtttatcaaattgattgccccatcgagaaatcaatgagcatgactgataccggtgcttcgacttcgaagctgaagttggcaatgaccgtgacaattggccctgtatggcacaattgtaagactcagtggcagaacccaagggacaactaa

SEQ ID NO: 205209 - DNA, 1689 bp, Zea Mays
gggcggtgcgctcgctggtcgtcgagatgtgggagttcgcgcgcaaggacccgcggaagcccgtgttcgcggcgaaggttgccgtggcgctcgcgctcatcacgctgctcgtcttcctccgcgagcccagcgatatcgccagccattctgtatgggccatactcaccgtcgtcgtcgtgttcgagttcagcatcggtgcaactttgagcaaagggttcaacaggggattgggtactcttattgcagggggccttgctctattggtcgctgagctagcggcacaaatgggaaaatatgacatgttggtcctcatcataagcacttttgtagttgcgttctgtgccaccttgacgaagctgcaccccaagatgaaaccatacgagtatggatttcgcgtgttcttgctgactttctgctacgtcacggtctctgggtacaacacgggagaattcacggctacggctataagcagatttgtgctgatcgctcttggtgccgctgtcagtctcggcatcaacatatgcatacacccaatctgggcaggagaggaccttcacctgttggtggccaggaatttttctggtgttgcaaaatctttagaaggatgtgttgatggatatctggcctgcatggaatatgagagggttccatccaagatactcacgtacgaagcatctgacgatgatcctgtctacagcgggtacagggcagctgttgaagcatcagcacaggaggaaaccttgctaggatttgctatatgggagccaccgcatggaccttacaagatggtgaaatatccgtggaagaactacaccaaagttggtggcaccaccggagagcagaaaggttttctgtgcggagcttcacagagtgggccaagaaggtgctgaagtgcttcgcgaacttgggcagagagtcaagacgatgacgaagctgagctctccaaacattctttcagaagtgcacttggcagctgaagagctgcagaagaagatcgatgagaagtcttaccttctcgtcaatacagaaaggactcacgatggtgccagtgctcctgacaaggatgaatcgcccgagaacgccgctgccgattcagtgcacacgtcgaccagcttcgcttcaaacctgtacctcagcagatacgattcttcaaacccgtttctcggcagatacgattcgggatcaacggcgggcggtttatataaggcgcagtcatcgtggcctgctcggcaatctttccacccaagccttccatttgaaattgaggaatcaagaatttatgagagcgcaagcgccttgtcgctggccacgttcgcatcgctcctcattgagtttgttgcccggctccagaatcttgttgatgcatttgaagagttgagcgacaaggctaacttcaaggaccctgtggaggaaccttctacaatcagcagggagactcccggggttttagctagaatacataacttttttttggttcaagtgacgaggatgctctatcatgcacgctcgggacatgagatctcgctcgaagtctgtgaggtttatcaaattgattgccccatcgagaaatcaatgagcatgactgataccggtgcttcgacttcgaagctgaagttggcaatgaccgtgacaattggccctgtatggcacaattgtaagactcagtggcagaacccaagggacaactaa

SEQ ID NO: 205210 - DNA, 1333 bp, Zea Mays
tgcaagcttgtctgattgggtatcagcgcgttcttcgagcggcaggaacgacaaacgggagaaggaagagaactcgtggggaaggcgaagcgggacgatgcagcccaagatcagcgcgttcttcgagcggcaggagacggacccagatccgattagtggcgacggtgaggggaacgggcagggaaacgtcggcgcggcgacggaggcgaagcggaaggccaatggctgcaggctcgatgggctcgtcagcaagaagaggaactacgcgcagctccatctggagctagggcagcctgatttcgtcctccacacgtgctccgtgtgcggcatgatgtacgcccgagggaacgacgaagacgaaaaggttcacagggcgtaccacaagagctactccgagggagtccctttcaagggttggaaaaaagagacagtgatagcgaggtccgagggcggtgatcgggttgttcttgcaactgacgagaactcttgtatgtcgaaaagtaaggtcagagaggtgatcacagtggtggagaaggagctgggatttggtgaagggaaactcctgcataagctttgcaaggtgtatctatacatatctgcacaaaggatcgtggggtgccttgtcactgaaccgataaaaacaggacatagagttatcccaagctccacggaaggaagccctaatgatttgccagttagtagtactgagcgaggaaaaaatggtcatacattagagttcggcagtattagtttcaagagggaaatcataaggcggcacagtcgttcggtcaagaacaaagaagagtgccaggaccctggtgccatactttgcgaaacggaagctgttcctgcgctttgtggatttcgagccatctgggtggcaccatcgtgcagaagaaaacgaattgcctcaaaactaatggacgttgcaaggaaaaccttctgcgaaggcaggactttggggatttcacagtttgctttctctcccccgacctcctctggcaaggggctagcatgccgttactgcaagaccagtgcattcttagtctacaaagacggaccggtgtaacacttgtactctaagaaagccctctctgaaacttttcttcctcttgtaaaatacgcttatcttgttggagcatttgacaaaaaaaatgtaaacaattagatcaatatgtattcaggtagaccagaaattagcgatgctttgtaacaatgtagctttctcttttgagtggtgacaatagctttcttgtgatcttcatgttggggacttgttctcaaatgctatgagttaagaacgaggcaacaaggagaatgttaaacgataaag

SEQ ID NO: 205211 - DNA, 548 bp, Zea Mays
aattaagcacgtacagccccagctcatggcattcaccacgcaccccccacctgccttgtgctctctgtccatatcttccggcggccgtcgatcgactttacaagcagcagcaaagagatgtcggacggcacggccacctgcgtcgacatcatcctcgccatcatcctgccgccgctcggggtcttcttcaagttcggctgcggggtgggcagggtcctgtagtcagcagctctttggtgtctcttgaagccactgcatcaaatccttctggtatgttgttctctgcctccacgtacttatctcccctcccccccggttgtgctcggtttttggagacatgggaagctagtgagggggaaaagtgaaacgaagggggaggaagatgtctgtaaactccatttgctgttgggggaaaactgtcattttgtagtttcgctctgagagaataggttaatggatggtggacgctgttttaatctcagcatggtttgtgttgttttcctttcaattgcaatttggaatatagaacgggagtggatattgagaag

SEQ ID NO: 205212 - DNA, 1039 bp, Zea Mays
cctttctcagcgtctctctgtctccaagcgcgtcgtccgcctctcccacgcccggccgcccccgctgagccctcggccccggccgcccctcgcgcgcccggccgcccccgccgcgcccggccccgacgcgcaaggccgccccggcccagccgcggacgcccccgacgcgctcgccaccgatgtgcccgcccccgactcgccgtaacgctccctgtgtcgtgtcgtttcttgcagtcctctcctccctgcctccatatctcccacctcggccctctctccacgcgcttcacttcatccctgacgccgacgccgacgactccggccgctcaccccgacgaacgcgcgcgcgctcgcactttctgacgactccctccccggcccggctgcctgtcactgtctctccccttcgttcacgaagcagcagcagctgtaggatgtacagggctaagagagctgcttcgctcagagcgaagcgccagcgccttggcaagtacgagctcggatgcaccatcggggaagggacatttgccaaggtccggatcgccaagaacatggacactggggatcatgttgccatcaagatcctcgacaaggccaaggttcacaagaataaactagctgagcagattaggagggaaatctatacgatgaagctaatacaacatcccaatgttgttcgcctgtacgaggggatgggaagttgaaagggaaatgtgcccttaggccatttctaagtattttggtgattgagtatcaacacaagtgcttaaatgtgaatcaatacccatggatgaacaaagtgcaaatcttcaacaaaggtatgtttctaagtcttagtacattggttttgtgtactaatatatttgtctaagtattagaaacagatagaagaagagaagagaagacttggctgtgtacagccaaggggctgtttcggtctggggcaccggactgtccggtggtgcaccggacagtgtccggtgcgccaggctccctcggccgaagagcccgctctcgggtttttctccggcgacttcgg

SEQ ID NO: 205213 - DNA, 1239 bp, Zea Mays
tagaacaattgcttttgtagtagctgttgctaatacaatgactgtcattaggcctgctgacatggatgctctccaaaatgcgttggacaacaataatgtatctcttttcttcacggagactcctacaaatccatttctcagatgcattgatattgaacatgtatcaaatatgtgccatagcaagggagcgttgctttgtattgacagtactttcgcgtcacctatcaatcagaaggcattaactttaggtgctgacctagttattcattctgcaacgaagtacattgctggacacaatgatgttattggaggatgcgtcagtggcagagatgagttagtttccaaagttcgtatttaccaccatgtagttggtggtgttctaaacccgaatgctgcgtaccttatccttcgaggtatgaagacactgcatctccgtgtgcaatgtcagaacgacactgctcttcggatggcccagtttttagaggagcatccaaagattgctcgtgtctactatcctggcttgccaagtcaccctgaacatcacattgccaagagtcaaatgactggctttggcggtgttgttagttttgaggttgctggagactttgatgctacgaggaaattcattgattctgttaaaataccctatcatgcgccttcttttggaggctgtgagagcataattgatcagcctgccatcatgtcctactgggattcaaaggagcagcgggacatctacgggatcaaggacaacctgatcaggttcagcattggtgtggaggatttcgaggatcttaagaacgatctcgtgcaggccctcgagaagatctaagcactctaatcagtttgtattgacaaaatcatgaggtgatggctgtcttggatcttgtcaagatctgtgacaatgatatgagctgatgactgcgaataagttctcttttgcttattttatccgtcaaattcaataagctgtgattgctgcatgatctagtgttgggcttagttacacttgtcaagttaaattggtctggaaccatgtatacttgtagttttgctttagagtggtgacctggctatgtgggatgaggtcacgcttcccttcaattactgtgagattcacacatttaataatcttgataataaaaatgaaaatcctcacaaggaattaacataatatgtcgaagtgaaaatattttttctttaattgaagttaaatggttagtgaggataacatttaac

SEQ ID NO: 205214 - DNA, 2004 bp, Zea Mays
cagaagggcacctcccgtttcctgccctcttcttgttcttcttcttttttccctaccctccgccgttgctctgcaaggcacgtcctgcacgcgccagagctaggcgataaactggaaaggagcgcgcagcgcaggcttcgggctcctgtctccgccgcggcgtcctctcgctttttttttttttgcttcttgggaagcacaaaggctcaggtctttcaggacttgcaggctctgcgcagcgcgatctgattgtgaatgaaacctgcaaaggaatagtccatcacaatgctaaggttgcttcccgactgaccacattgcgcttgttttagcctctggttatctcgtctggaaaaaaaaacccagacatctgaccgggtcagacgatacaacccatatacgtacgtcgagtcctcagagttcaattctacctggaccatcgcacccatcttggcccagagtacttccgcgccgcgctacgaacgaggccatccgccgccacacgccgtcggccatgccgcagaggtcggaggcgggcactgctggggagggcgacgaggagcagcggctgcgggctgctctgcgtcacctgcaggcggaggcgggggtgctggagcgcctggtatacaagcaccggaaccagcaccgcggcgccgcctatttccaatacctcctcaaggtgaggagggacctgaagcttctgctcggcgccggcctcgctgaggttctcaacgccgtgttcccagttctcgcatgccgcaagccggccaacacgatcctcgtccccaacaagcagtctaagaagaaacctgttgcaaaccacagccatcaccagaggcttttgggtgtagcccgcttgttatcccagatgttacttgatgttgtgtctatatacaataaggtcactgatcttactgaaaggaagcaggctgttaagattagcatcagtggagtgcaggctttcagagagtactacccctctatgaatgatgcatgtacagttctggagtgtgtatggataaaagataaattcgttttgcatgaaaaggttaaagatatctctcaggaaacccaagttgagaatcagaagtgctgcggtcctgaatctacagtccagtatgaaacaattgcactgattagtgaagattctacatagcggaagtcctcctggcactggagtacttgcacacgctcggtatcatataccgcgatctcaagcctgaaaatgtccttgtccgggaggacgggcacatcatgctctcggacttcgacctctctcttcgttgtgctgtcagtccaacactgatcaggtcctcaaaccctgacgcagaactgcagaagcgctcaggaagagcagccaaggctactgtgttgagccagcctgtgttgagccgtcctgcatcactcaaccgtcgtgtgcagccccaaccacctgcttcggcccacgcctgttctcctccaagtccaagaccaagagagaccggtaaccaaaaccagaagttgccaccccgatcagcccttggcctgagctcatagcggagcccagcgatgcacggtcgatgtcgtttgtgtgctatattgtttttccgttggtagatttttttgaggggtacttttacactttcttaaagttcacatctgtaattcagcaagtcctgattgtactgatctcctgcaatgcctttgcaaaacattgtcattttttttgtattccatcagttccaaattggaagtcgttttagtttgttccaagtcaaaacatgtcttactttaaccaactttgtaaaaaaaaatccaaattggaagtcgttttagtttgttccaagtcaaaacatgtggtcatgcatctaaccatcatggttttagtcttcgagttaaatttgggtacctattttaacgaaaaacggcatagtttttttttgtaatatcaactaaatgtactaacaacaaatatatttcatagtgtaccaagtaaatcttgttttttgtttcagacacttgtgtgtt

SEQ ID NO: 205215 - DNA, 1902 bp, Zea Mays
ggcacctcccgtttcctgccctcttcttgttcttcttcttttttccctaccctccgccgttgctctgcaaggcacgtcctgcacgcgccagagctaggcgataaactggaaaggagcgcgcagcgcaggcttcgggctcctgtctccgccgcggcgtcctctcgctttttttttttttgcttcttgggaagcacaaaggctcaggtctttcaggacttgcaggctctgcgcagcgcgatctgattgtgaatgaaacctgcaaaggaatagtccatcacaatgctaaggttgcttcccgactgaccacattgcgcttgttttagcctctggttatctcgtctggaaaaaaaaacccagacatctgaccgggtcagacgatacaacccatatacgtacgtcgagtcctcagagttcaattctacctggaccatcgcacccatcttggcccagagtacttccgcgccgcgctacgaacgaggccatccgccgccacacgccgtcggccatgccgcagaggtcggaggcgggcactgctggggagggcgacgaggagcagcggctgcgggctgctctgcgtcacctgcaggcggaggcgggggtgctggagcgcctggtatacaagcaccggaaccagcaccgcggcgccgcctatttccaatacctcctcaaggtgaggagggacctgaagcttctgctcggcgccggcctcgctgaggttctcaacgccgtgttcccagttctcgcatgccgcaagccggccaacacgatcctcgtccccaacaagcagtctaagaagaaacctgttgcaaaccacagccatcaccagaggcttttgggtgtagcccgcttgttatcccagatgtctgaacctgttatgaaggcagcaattcagataacatttttacttgctagatcattcttcgttgatctttgcacggctgtgctttctttgcttgcacgagtaagggtcctgatccaacagatgttacttgatgttgtgtctatatacaataaggtcactgatcttactgaaaggaagcaggctgttaagattagcatcagtggagtgcaggctttcagagagtactacccctctatgaatgatgcatgtacagttctggagtgtgtatggataaaagataaattcgttttgcatgaaaaggttaaagatatctctcaggaaacccaagttgagaatcagaagtgctgcggtcctgaatctacagtccagtatgaaacaattgcactgattagtgaaggttaaaatgctttatcttctatttgtcacaataaatgcatgatgatctattgatcttgatttttttgttgctttgtcagaattagctgacatgctcatgaatcatgagaatccttggtgctttgttgctgatttggtttgaaaaacaagcactttgtagtgtattgcattgttaagagcatagctcaatttttttttatggaatacgcaggagagctgcgcatctttgtattaatagaagaataagaaagggggagagaaccccattacagcacacacaccccaacactagagactaactaaggagcaccgactaacatggaaaaacacgacccacagcgctgttttaagccagcaactcatctacttggaggaaagacagagccttggctccagtcaaggaccagagcaccgcctcttccctagccaccctaagggctgtgaccaagctaggattacatccatcaaagacacatctattcctatgcttccatatggtccaagcacctaggattactaaagaattaaaaccctttctcataagatcagatgcccgagagctgttagacttccaccacgactcaaaggaatcctcgtgagctggacacagctcctgcagccccactgaactaaggaaatcaaac

SEQ ID NO: 205216 - DNA, 2117 bp, Zea Mays
ggcacctcccgtttcctgccctcttcttgttcttcttcttttttccctaccctccgccgttgctctgcaaggcacgtcctgcacgcgccagagctaggcgataaactggaaaggagcgcgcagcgcaggcttcgggctcctgtctccgccgcggcgtcctctcgctttttttttttttgcttcttgggaagcacaaaggctcaggtctttcaggacttgcaggctctgcgcagcgcgatctgattgtgaatgaaacctgcaaaggaatagtccatcacaatgctaaggttgcttcccgactgaccacattgcgcttgttttagcctctggttatctcgtctggaaaaaaaaacccagacatctgaccgggtcagacgatacaacccatatacgtacgtcgagtcctcagagttcaattctacctggaccatcgcacccatcttggcccagagtacttccgcgccgcgctacgaacgaggccatccgccgccacacgccgtcggccatgccgcagaggtcggaggcgggcactgctggggagggcgacgaggagcagcggctgcgggctgctctgcgtcacctgcaggcggaggcgggggtgctggagcgcctggtatacaagcaccggaaccagcaccgcggcgccgcctatttccaatacctcctcaaggtgaggagggacctgaagcttctgctcggcgccggcctcgctgaggttctcaacgccgtgttcccagttctcgcatgccgcaagccggccaacacgatcctcgtccccaacaatctaagaagaaacctgttgcaaaccacagccatcaccagaggcttttgggtgtagcccgcttgttatcccagatgtctgaacctgttatgaaggcagcaattcagataacatttttacttgctagatcattcttcgttgatctttgcacggctgtgctttctttgcttgcacgagtaagggtcctgatccaacagatgttacttgatgttgtgtctatatacaataaggtcactgatcttactgaaaggaagcaggctgttaagattagcatcagtggagtgcaggctttcagagagtactacccctctatgaatgatgcatgtacagttctggagtgtgtatggataaaagataaattcgttttgcatgaaaaggttaaagatatctctcaggaaacccaagttgagaatcagaagtgctgcggtcctgaatctacagtccagtatgaaacaattgcactgattagtgaagattctacatagcggaagtcctcctggcactggagtacttgcacacgctcggtatcatataccgcgatctcaagcctgaaaatgtccttgtccgggaggacgggcacatcatgctctcggacttcgacctctctcttcgttgtgctgtcagtccaacactgatcaggtcctcaaaccctgacgcagaactgcagaagcgctcaggaagagcagccaaggctactgtgttgagccagcctgtgttgagccgtcctgcatcactcaaccgtcgtgtgcagccccaaccacctgcttcggcccacgcctgttctcctccaagtccaagaccaagagagaccggtaaccaaaaccagaagttgccaccccgatcagcccttggcctgagctcatagcggagcccagcgatgcacggtcgatgtcgtttgtgtgctatattgtttttccgttggtagatttttttgaggggtacttttacactttcttaaagttcacatctgtaattcagcaagtcctgattgtactgatctcctgcaatgcctttgcaaaacattgtcattttttttgtattccatcagttccaaattggaagtcgttttagtttgttccaagtcaaaacatgtcttactttaaccaactttgtaaaaaaaaatccaaattggaagtcgttttagtttgttccaagtcaaaacatgtggtcatgcatctaaccatcatggttttagtcttcgagttaaatttgggtacctattttaacgaaaaacggcatagtttttttttgtaatatcaactaaatgtactaacaacaaatatatttcatagtgtaccaagtaaatcttgttttttgtttcagacacttgtgtgtt

SEQ ID NO: 205217 - DNA, 1138 bp, Zea Mays
ccccatttccattcctcgctcaccaagccaacaaccaaatcgaattcgccgacgactctctttattcctcccgctcgccgccgcggccgccgcctgagggcaagaagcgagcgagcgcaccgcggatctccctcccggccccgccgcgcgcaccggtgaagacgacgagcccctcgtgaatggtgggagcccgcgcgacgtccgtcgcctcgcagccgcagccggaggaggcctccttccgcggcttcggttactgcatgcagggctggaagcaggaagcaagccgatcgctcgctgagcgccgccgccgatggccgtcgcggtgccgatgaagctctggagggtggagacccgcggcaaggccgccgccgcggggcccgacgaccccctgcgcgtcctggtgacggtgaccgtcctcgggagcgccggcccgttgcgcttcatcgtcctcgagggcgacacggtcgccgcgctcatccgcggcgcgcttcgctgctacgcccgcgagggccgcatgccgctgctcggcaccgaccctgccggcttcgtcctctccaccgccaacggcggatccggcgcactcggagaagacgagaggatcagcttcaacgggtgccggaacttcctgctttggcagaaggctgcggctcagggtgccgccgccaaccacgccgggtccgatgctctgacggcaaccctgagccccggcaggaagggcagcggtggattcaaggctactgatccgagccctggcaggaaaggcggcggcggctggaaggctggactgaacaagttcctcctcagcttcagcatcaaggtgtgatccatacgtggacgagagaaggggggcgtttcttggtgtcgaggcaccgcgcaacaataaaaatgcattgcattggtttgtctgttttttcaattaatcaggattgtttgttgccgccagtgagatggcgaagtgtaattcgtcatgcgaatccgagtcgagtcgaggcaatgtgattcatcgtatgtttgagtcgagtcgtgtcagttgcttagtttatttggctgttctatttccaaatcatcggatcgggttcctctgatctcttgttaaaggttcttcattcaataatccatttgtgcgtgctggtctcat

SEQ ID NO: 205218 - DNA, 884 bp, Zea Mays
aaccggcttttaccgttccctccgtggataaagataataaagacaataaagagtttaaagttgattggaagagggtgggcatcacaagctccttcggatttgcttttgttggtccagttgggcattactggtatgaatacctggatcgcatcatccggcggaggtttcagcctaacacgttcaaattcgtcgcctcaaaagttgccgcggatggattcctcttcggaccactagacctcctcctgttcttctcatatgttggtctgggtcaaggaaggagcatagagcaggtgaaggaggacgtgaagagggacttcattccggctctggtgttaggcggaaccatctggcctgctgtgcagatcgcgaacttccgcttcgttcccgtgcggtaccagctcctgtatgtgaacttgttctgcctcctggacagctgcttcctgtcgtggattgagcagcagggtgacgcctcctggaagcggtggttcacttcgttccagaaaatcgaagaccagaagggtaaggtttgatttgagtcatgcatggttcgttgtctggatcagtacctgtaaactccggttgatcaaggaagataattgcgatgccagcaaggctgaacattggcgtcgctatagagaattctttttagtctttgacgggatgaaacggttgccgagttgctctgttaactgaagtgcctgtgttttgccgatgtgttaaactttctttttagtctttgatccaagatgcttaagtcatgtctgggaatgggtggaattgacgattgcaacgcgagcaaaagctgaatatatatcctgttgcagcagttccagtccaggaatagctagcgagggatgggtggggatcatggacggcgcacaggc

SEQ ID NO: 205219 - DNA, 833 bp, Zea Mays
ataataaaaataaaaataaataaaaagtgagagagggaggaaggcgcacacttcctccttccttctttccctcttcgtcttcgcttggccggtgggtggtgcggtggggatgcggcggctatggcggtggtaccagcagtgcctggccgcgcacccggtgcgcacgcaggtcgtcagctccggcatcctctggggcctcggcgacatcggcgcccagaccgtcacctactactccgctagccccgaccgtcgcggccacgacagcagccctcccgaccccgaggataaagataataaagacaataaagagtttaaagttgattggaagagggtgggcatcacaagctccttcggatttgcttttgttggtccagttgggcattactggtatgaatacctggatcgcatcatccggcggaggtttcagcctaacacgttcaaattcgtcgcctcaaaagttgccgcggatggattcctcttcggaccactagacctcctcctgttcttctcatatgttggtctgggtcaaggaaggagcatagagcaggtgaaggaggacgtgaagagggacttcattccggctctggtgttaggcggaaccatctggcctgctgtgcagatcgcgaacttccgcttcgttcccgtgcggtaccagctcctgtatgtgaacttgttctgcctcctggacagctgcttcctgtcgtggattgagcagcagggtgacgcctcctggaagcggtggttcacttcgttccagaaaatcgaagaccagaaggttccagtccaggaatagctagcgagggatgggtggggatcatggacggcgcacaggc

SEQ ID NO: 205220 - DNA, 1195 bp, Zea Mays
ataataaaaataaaaataaataaaaagtgagagagggaggaaggcgcacacttcctccttccttctttccctcttcgtcttcgcttggccggtgggtggtgcggtggggatgcggcggctatggcggtggtaccagcagtgcctggccgcgcacccggtgcgcacgcaggtcgtcagctccggcatcctctggggcctcggcgacatcggcgcccagaccgtcacctactactccgctagccccgaccgtcgcggccacgacagcagccctcccgaccccgaggataaagataataaagacaataaagagtttaaagttgattggaagagggtgggcatcacaagctccttcggatttgcttttgttggtccagttgggcattactgatgttgatcccacaatctcatcacttactgctgcaatttgttcatttgcaaaaggtatgaatacctggatcgcatcatccggcggaggtttcagcctaacacgttcaaattcgtcgcctcaaaagttgccgcggatggattcctcttcggaccactagacctcctcctgttcttctcatatgttggtctgggtcaaggaaggagcatagagcaggtgaaggaggacgtgaagagggacttcattccggctctggtgttaggcggaaccatctggcctgctgtgcagatcgcgaacttccgcttcgttcccgtgcggtaccagctcctgtatgtgaacttgttctgcctcctggacagctgcttcctgtcgtggattgagcagcagggtgacgcctcctggaagcggtggttcacttcgttccagaaaatcgaagaccagaagggtaaggtttgatttgagtcatgcatggttcgttgtctggatcagtacctgtaaactccggttgatcaaggaagataattgcgatgccagcaaggctgaacattggcgtcgctatagagaattctttttagtctttgacgggatgaaacggttgccgagttgctctgttaactgaagtgcctgtgttttgccgatgtgttaaactttctttttagtctttgatccaagatgcttaagtcatgtctgggaatgggtggaattgacgattgcaacgcgagcaaaagctgaatatatatcctgttgcagcagttccagtccaggaatagctagcgagggatgggtggggatcatggacggcgcacaggc

SEQ ID NO: 205221 - DNA, 858 bp, Zea Mays
gaatatataagattcccgagcctgctcctgtttgctgccacaactccaatcatcttcctgctggcagcttccctctccctccgctgctgagcaagctgatccaccgccatggggctggcgatggggaggcttcttgggtggaagaaggaggcgcagatcgcgctgttgggcctcggcggcgctggcaagacggccattctgcacaaactcaagctcggccacgcaatcaccaccggaccaacgatagggttcaacagcgagacgcttgaatacaatggcatcagcttcagggtctgggacgtgggtggtcaaggcgagctccggcccttgctaaggcactacctctatggcgtccagggcgtggtattcgtcgtcgacagcagcgaccgggagtggattcttcgagccaaagatctgctgaacatcattctggacgaggaccagttcaggaatagggatctcgcgctgcttgtgtttgcaaacaagcaggaccggccgaacgtcatgagcgcagcagagatagcggacgagtttgggcttccgtcacggctttgcaaccgtagatggcacattcaaagtagttctgcgatctctggagaaggcctccacgaggggatggcttggctctgcaccaacattcgataggaccaagatcctcctccttcacaaaagactacagtacaaaaggggggcatgctgtttatgtttttgcaggcctaaggaattgtaccagcagatgagatacatgattatgattgctggacaaggatagtttgcagtgtgatgtagaacctgttaggatttatgggctaggcccaattgagaaattcgaataaatcgcaggaaaatcacaaaagc

SEQ ID NO: 205222 - DNA, 827 bp, Zea Mays
tgctgccacaactccaatcatcttcctgctggcagcttccctctccctccgctgctgagcaagctgatccaccgccatggggctggcgatggggaggcttcttgggtggaagaaggaggcgcagatcgcgctgttgggcctcggcggcgctggcaagacggccattctgcacaaactcaagctcggccacgcaatcaccaccggaccaacgatagggttcaacagcgagacgcttgaatacaatggcatcagcttcagggtctgggacgtgggtggtcaaggcgaggtagctcatgtatcagcagctgtattgttcttgcattcaaggcgtggtattcgtcgtcgacagcagcgaccgggagtggattcttcgagccaaagatctgctgaacatcattctggacgaggaccagttcaggaatagggatctcgcgctgcttgtgtttgcaaacaagcaggaccggccgaacgtcatgagcgcagcagagatagcggacgagtttgggcttccgtcacggctttgcaaccgtagatggcacattcaaagtagttctgcgatctctggagaaggcctccacgaggggatggcttggctctgcaccaacattcgataggaccaagatcctcctccttcacaaaagactacagtacaaaaggggggcatgctgtttatgtttttgcaggcctaaggaattgtaccagcagatgagatacatgattatgattgctggacaaggatagtttgcagtgtgatgtagaacctgttaggatttatgggctaggcccaattgagaaattcgaataaatcgcaggaaaatcacaaaagc

SEQ ID NO: 205223 - DNA, 1959 bp, Zea Mays
gcctgccctgcacctgcgcggttataaaacgctagggagagggcgggagcaagagcgcttggcgaggtcctggatgactgactgaccacactagcgcagcgcgcacaggagcaaaggggggcatcctctatcgcgcgcgcgccatggccaccaggccgggccctttgactgaatggccatggcaaaggcttggaaacttcaagccgtgatccatcccttcgctgagcacatggtctactacgtcctgttcgccatccccatgctttcgactctctacatggggaacgcctccgtcctgggcatcgtgctctacatcgcctacatcgacttcatgaacaacatggggcactgcaacttcgagctggtgcccaggtggatgttccagctcttccctcccctcaagtacctcatgtacacgccgtccaccatggacaagtcgtctgaccagctgtacgagacctcgctcaggggagcggaggagacgcctggcctcgtccacctcacgcacatgaccgacctgcagtcggtctaccacctgcggatcggcttcgcctccgtggcgtccagaccgtctgccaccggcgccatgtggtggtacatgtgggtgctgtggcccgtggcgtggctgtccatggcgctcgcgtgggcctacgggtcctccgcgttcgtcgtcgagaggatcaaactcgggaagctgaggatgcaaacgtgggcagtgccaagatacaacttccagtacggcctgagctgggagagagaatcgatcaacggcctaatcgaaagggcgatactagatgctgatgcgagaggtgtcaaggtgctcagcctaggactgttgaaccaggcgaaacagctgaacggcggcggcgagctgttcaggcacaggtatcccaagctcagagttcgcctcgtcgacggaagtggcctagcgactgctgtggtgctcaggagcattcctcgtgacgcgaagcaggttctcctccacgcaggcccttctaaggtagcgtgcgccacggctgctgcgttgtgcgagaggggcgtccaggtcgtcatgaacccaaacaaggaatatgatatgctcaagtcacagattgcagatagcaaagcaagctatttggaacgacgctccgacaaccaccacacgcctcaggtttggctagtagacagcatcgacgacgaggaacagaagatggcaccgaaaggagccgtattcgtcccaatctcacagttccccatcaagaaaatccgcaaggattgcacctacctgagcactccagcaatgaagatccctgaaaccatgcaaaatatccatgcctgcgagaactggctgccaagacgggtgatgagcgcctggcgcatcggcgggatacttcacgccctggaagggtggaccgtgcacgagtgtggggacgccatggtgcatgctgacaaagcatggtcagctgctattaggcacggattcgttcctttgacgaaagcctgaaagcctgcgaagcccggggttctgtggctggggcctgcgatagatatatgtacgcagatctggacgccattcgacgatggctggaaaactacgtttcagcaatcggtagcacaaattctcccccgctagagaaggcgacttatatggtcggcgtgatgaatgacgaccttgattccaacagcatatagtaactacagttatgttgtggcattgtatgatgcaagtgcgagaaactgctttgtggctgtctgggtgacatatacaattataataaaatgtcgatttggcttgtccttttgaaatgtgccgaggaatactcttttgctgaaaaacggatagggctagtttggatattacaattttccaagaaattactatttttccaagtaaaaataaactaactttctttgggaaaaattaaaatctcgtggaaaaataggatttccaagctagccctaagcagttttttttataca

SEQ ID NO: 205224 - DNA, 1522 bp, Zea Mays
taaaaaaaggtgtcaatccaatctgtgctactttgatgcttatgcaatggtatccaattttgtcaagatagcaggccaaagcttgttgctggttctccagaaggatttcctggtcatgttgatgggaagctgcgagaggcgaggatgaaccatccaaagggatttacagtggacgacaggggtaacatctatgtggctgatgccatgaacatggccattagaaagatcagtgatacaggggttacaactattgctggggggaaatcaggcagaggagggcatgttgacggaccaagtgatgaggcaaaattttctactgattttgaagtccgttacattggcagtagctgctcccttctggtgattgacagaggaaaccaagcaattagagagattcagctccactttgatgactgtgtgtaccagtatgaagctggttttcctctaggagtcgcactgcttctcgctgccgctttctttggctacatgcttgcactgctccaacgccgagttttagggatgtattcaaatggagatgaccacgagagcccagtaaaagcaaaattaaccagcattccacctccataccagaagccactgaagccttatgttcaccccctgctaattccaaatgacgacgaacctgtgaaacaagaggaggaagaagggctcttcacgtcaattggcaagcttgtgggtggagcaaaatcatcaattgcagagatcattggcgccgcattctccagaaagaagcgagtgaacgttcatcatcatcagctgggtaggccaacctcctggccagcacaagaaagctatgccatcccgcgggacgagaccccaccgccgctggacacaagggcgcccacccctcgcaaaaactacgccttcatgtccaaggagccggagaagatccaccacatccggcacggccggcctcagttacatggctggaccggagaggcagcacctcagcagcagcagccgcagcaggtgcgtcaccaacagtacgtgcaacaccacaggcagtactcggccgggccgcagacctactacgagccgagctgcgatgcaacgaaggagatcgtcttcggagccgtgcaggaaggggacaccagccgccgtcccgtggagatcaaggccgtgaaccatggggacgcggcgccgtacgagcagaacgggctgcgattccgcagtagttatagcgtgcgctacaatggcaataactagtcgaggagcacttctgtagctgtaactgtaaggagaggagcgatagagagagcagtcgaggggagtacaatctcctcattgacaagtgcaacagaaaagctggaattttggtagaagagcttggtgataatggtcattggactctttactggcggtgacatatataaatatagcgtgtatttttcttgttcttcttgggtctacttctatttttaataaatcaccttgcgtataggcctatctttaataaacaaagtgtgtatttattattttatcaactgtttttcgttttgag

SEQ ID NO: 205225 - DNA, 1504 bp, Zea Mays
attcttttgatggcgatgtctttgttagcttgcagcctgcacagtctacatagcaggccaaagcttgttgctggttctccagaaggatttcctggtcatgttgatgggaagctgcgagaggcgaggatgaaccatccaaagggatttacagtggacgacaggggtaacatctatgtggctgatgccatgaacatggccattagaaagatcagtgatacaggggttacaactattgctggggggaaatcaggcagaggagggcatgttgacggaccaagtgatgaggcaaaattttctactgattttgaagtccgttacattggcagtagctgctcccttctggtgattgacagaggaaaccaagcaattagagagattcagctccactttgatgactgtgtgtaccagtatgaagctggttttcctctaggagtcgcactgcttctcgctgccgctttctttggctacatgcttgcactgctccaacgccgagttttagggatgtattcaaatggagatgaccacgagagcccagtaaaagcaaaattaaccagcattccacctccataccagaagccactgaagccttatgttcaccccctgctaattccaaatgacgacgaacctgtgaaacaagaggaggaagaagggctcttcacgtcaattggcaagcttgtgggtggagcaaaatcatcaattgcagagatcattggcgccgcattctccagaaagaagcgagtgaacgttcatcatcatcagctgggtaggccaacctcctggccagcacaagaaagctatgccatcccgcgggacgagaccccaccgccgctggacacaagggcgcccacccctcgcaaaaactacgccttcatgtccaaggagccggagaagatccaccacatccggcacggccggcctcagttacatggctggaccggagaggcagcacctcagcagcagcagccgcagcaggtgcgtcaccaacagtacgtgcaacaccacaggcagtactcggccgggccgcagacctactacgagccgagctgcgatgcaacgaaggagatcgtcttcggagccgtgcaggaaggggacaccagccgccgtcccgtggagatcaaggccgtgaaccatggggacgcggcgccgtacgagcagaacgggctgcgattccgcagtagttatagcgtgcgctacaatggcaataactagtcgaggagcacttctgtagctgtaactgtaaggagaggagcgatagagagagcagtcgaggggagtacaatctcctcattgacaagtgcaacagaaaagctggaattttggtagaagagcttggtgataatggtcattggactctttactggcggtgacatatataaatatagcgtgtatttttcttgttcttcttgggtctacttctatttttaataaatcaccttgcgtataggcctatctttaataaacaaagtgtgtatttattattttatcaactgtttttcgttttgag

SEQ ID NO: 205226 - DNA, 4268 bp, Zea Mays
tagctaatacagtataaaaatgggggaaaaaatatcccccacctctctagtgcagctgcatcctgtctagctgagtccgctgacctgacgagtagacaaactccaagcaagcagcgcgagcgcgagggatggccgcccgccgccaccgccagattggttcagtggcggacccccgacggatccctcctgttccccactcgcagtcgcagacaaggcggcttgctttgcttgcttcgtgcctcttcctcgtcgcctaggccgcctccttcactcttcgttctgctccatccatccccaatccatccaccattccgcccgtctgtctctacttgattcctcttgccggggttccttggcctgcctatccttgctaatcgggcgggccagtccgccgcctgcagatctgaacgctgccctcccctgctccccgagcgcggcgaggatcgccgctccacggacgcaagaacaagtgcccttgatcttttccccccatttgattgattcatccagtgctgctggtactggtacccagcaacagttttcggtaggaaactactatggcaacttctccaggtacatacagatggtgctagtgagggagaggtccgcgagccgtcgccgccatttcggaccaaccaaggcggcgctagtatgcttctgcttgctttccttctacctggacactactgcaatgccgtcaacgtcattgtaaaccgtcagtgctagccacatggtaacgctagactgcgaaagttgcgatctttttctcgcatctcctcggcaacttgccaatttggtcagcatcgtcatcaccaccaccatcagcggcgcagctgaactgacgatgctttgcccgagatccggatgctcatccagatcgagacgccattcatctccccccccccccccccccccccgccgtgcggatgcggtggctcctcctcttggcgttcgccgccgcccccgccgccggcgagatggggtacgcgcattgcggctgcgacggcagcggcggcgctggcggtggaagcgggttctggagcctggacaacatcttcaagtggcagaaggtgagcgacctgctcatcgcggcggcctacttctccatcccgcttgagatcctctacttcgtcgcggggctccgccacctgctcccgttccggtgggtgctggtccagttcggcgccttcatcgtgctgtgcggcctcacccacctgctggcggccttcacctacgagccccacccgttcatggtcgtgctgctcctcactgccgccaagttcctcacggcgctcgtctccttcctcaccgccatcacgctgctcacgctcatcccgcaactgctgcgcgtcaaggtccgcgagagcctgctgtggatcaaggcccgcgagctggaccgcgaggtggttctcatgaagcggcaggaggaggcgagctggcacgtccgcatgctcacccaggagatccgccgctcgctggaccgccacaccgtgctctacaccacgctcatcgagctctccagggtgctcgcgctcgacaactgcgccgtctggatgccatccgaggacaagtccggaatgtgcctcacacacgagctccggcggggcagcgacgacggcgaggccgtagtgggcgctgacgacgcggacgtcctcgaggtcaagggcgccgacggggtcaagctgctgccgccgggctcggtacttggctccgccagcggcggcggcaaggaggggaccggcacggtggcggcgatccgaatgccgatgctcagggtcgccgacttcaagggtgggacgccccaggtgatcaaggcaagctacgccgtgctggttctggtgccgcccagcggcaggaagtgggcgccgcacgagctggagatcgtggaggtggtcgccgaccaggtggccgtggcgctctcgcacgcctcgctgctggaggagtcgcaggcgatgcgtgacaggctggccgagcagaaccgcgagctgctgcaggcgaggcgggacgctctcatggcgaacgaggccagggacgcgttccagcgcgtcatgagccagggaatgcggaggcccatccactccgtccagggactggtgtccgtggtgcaggaggaggagggactggcgtccgagcagaggctcgtcgtcgacgctgtggcgcggaccgcaaccgtcgtctcgacgctcatcaacgacgtcatggagatgtccgcggccaccagccaggagcgcttcccgctggagacgcggccgttccgcctgcgctccatggtgagggacgccgcctgcgtggccaggtgtctctgtgacctgagcgggcggtttggtttcgcggtgcacgtggagaacgtgctgccggaccttgtcatcggcgatgagcggaggatcttccacgtcctgctgcacatggtaggcaatctgatcggtcgggtcgacgagggggacgtcacgttccgggtgcgcgccgatgatgaggcgacggaggaccagaggtgggatccgtggaggccgagctactccggtgggcactcgtcggtcaggtttgtggtcggggtgaagaggcagcagaacgcaggcgactcgcttccgcggttcttgcggcggccaaggacccatgacgggttggatctcaggctcagcttcagcatgtgcaggaagcttgtgcagacgatgcaagggaacatctgggcagttctcgacggccaaggactcccggagagcatgaccctggtcctgaggttccagctccaaccatcgctggcgagctccaacctcctcggagggtcgtttgatcaggagcactactcatcattgccatctaaccaaatagccgggctgaaggttctgctcatcgatgacgacgagatcaacctggtggtggcccggaagctcctggagaggctaggctgcaccgtttcctcaggctcgggactcatggactcttcctctgcctgtgcctcgttccagctcgtcatggttaacctcgagatgtcagcgatagatcccctggatgctgcctcgaggatcaggcagcagtacaggagctcgcactggcccctggtgatggccatgacgtcggagcagaacgtgtgggagaagtgcgcgcagtccgggatcaacggcgtcctgaagaagccgcttgttctgctggaagtgaaagaagagctcgagcggatccttcagaacacatgatgcctgccatgacccatgagctactaccatgatgaatacgacccccgtccgtccgtctagcatactacatagcagaggggaggggacatggatctcgagttgagaagtggatgcaagtctcctacgctgctgtagttgagtgactgctgtgaggacggaggtggtgacgacgacggatttggcaggcaagcacgagggccgcgttatccgatccatgcccatgccgcgtaaggaggcttcacctcgattcaccaactacataatcacctcgattcacacacgtcaggctttcagtcgataaattcattagtttcatcagaaacggaatgcagttgccagttataatgttggcgtcagtcgcaggggatcttcggccatcgtcgccgcatcagaagcaatgcgcagctccagtggcctcgaccgaacaggacaagaaatagaatttgttgccaatctatcaactcagctaatgtgttgggagcttcttcaacgttgtccagatagatcaggactcagaccgtgatgcgactattgtgcagctaagttttggagatcattcggggatactacttgacacgtttttgtcatatctgccaattatttttcctgatattcactgttttcctgattctttcaaggcaatcaacgatgaaggcatgtccatgtatcagaggcccttcatgaagggcaagctgtacatccacttctcggtggagttcccggactcgttgagcctggagcagtgcaaggccctggaggctgttctcccgcccaagccagtatcacagtacactgacatggagctggacgagtgcgaagatacgatgccctatgacgtgaacatcaaagaggagatgcggaggcggcagcagcagcaccaggaggcctacgacgaggagatgatgtgccaggcggtgggcagagggtgcagtgcgcccagcagtaggcagcttgcggcaaatttgttgtttcgctttgggcgactattgagtttgcccgcttgtattggtctgatgatacttctgttacaagagtgcagtattactaaggattagttcctatataatgacacattgg

SEQ ID NO: 205227 - DNA, 5211 bp, Zea Mays
gtttccctttcatttcgtctctcctcctcgctcccttttctcttctggcgcccccacccccctggcgattagctcccgcccgcctcccgctccgctcccgctccccaccgcgctcgccgtgctgtctcggcgctgcgcccggcggcgccgtgagggttggagggtgctcgtggccggcagatccggcgtcggcgtcggcgtcggcggacaggctcggaggtgagatcggcggcggggaagggcagagcgcgcgaggtggtcgagggaggaatcggctgcgcgcggaggcggggaggaggtcgagctcgcctggtgctgcatgggggcatgaagcgcggcaccagggacgacgccctcatggggtcccagctcaaacgctcgaacgttgtccgatccgatccgtcggctcagccacagcatatgtctgtgcctggttcagcgtctgcggccgcaccgccgcctcaggctggcgctgctccgccggcgcagccgcagcagccgtccggtgcggcctttaccaaccagaagctgacgacaaatgatgcgctcgtctaccttaaggcagttaaggataagtttcaggacaaacgggagaagtacgaggagttcctcgaggtcatgcgcgacttcaagagcgagaggattgacaccaatggagtgattgtccgtgtcaaaacgctgttcaacgggtaccctgaactgatccttgggttcaacgccttcttgcctaagggctatgcgatcaagctacaagaagagaagaaacctgtcgattttgtggaagctatcaatttcgtgaacaagataaagaatcggtttcagcatgatgaacaagtttacaaggcattcttggacatcctcaacatgtaccgcaaggataataagtctatccaagatgtttaccatgaggttgctatgctgttcaaagaccataaagatttgcttgaagagttccagcacttcctgcctgatacttcagtggctccacaagcagtggcctcaaagggtggtttggttaagcgggaggacaggagctctttagtgcctcctgcaaataagatccttcacaatgataagagggacagagtttacctgtcacatgctgaccgtgattttagtgttgaccgtcctgatgtggagcatgatcgccagagaagacgtcttgataaagacaaagaacggaaggtggaaagggacagaagggattatgagagagaagacaaggatggtgaacatgacagcagagacctggagctaggacagcgtaagcgaaagcctttttcaaggaatatcgaggataatgtaggtgctgagacacaccaaggaggccccagtgagaatcatggaatccacagtgtatctgcttcatcatatgacgataaggatgcgctgaagagtgtatacacacatgagttccatttctgcgagaaggtgaaggaaaagctggagcatgaagcttaccaagagtttttgaaatgtctacacatctatagccaagagattatcacaagaagtgaactgaagaacttggtgaatgatatactccaacattatccagatcttatggaagggtttaacgaattcttggagcattgtgaaaatatagatggatttcttgccggtgtcttcaacaaaaggccaagcacgagggctgttaaaactgaggataaagaaaaggatagagatcgggacagggaggacaaggatagagatcgggaaaaggaaagagaaaaggaacgagaaaggctcgataaaggatcaacattcaattcaaaggaaggttctagtcacaaaccttctatgttctctggcaaagagaagtacaacctatccaaaccaatatcagagcttgatctctcaaactgtcaacgctgcactccgagttaccggcttctacctaaaaattatcccatgcccccagccagcaacaggactgatcttggagcttctgttctgaatgatcactgggtatcagtgacatcaggaagtgaagattattcatttaaacacatgcggaagaatcagtacgaggaaagcttatttagatgcgaggatgacaggtttgagttggatatgctgttggaatcagttaatgcagcgactaagcgtgttgaagagctgatagagaagatgcaggacaactcagtcaaacctgagagcccaatacgcatcgatgaacatttgactccgttgaacctgaggtgcattgagcgactgtacggtgatcatggtctggatgtgatggatgttctacgcaaaaatgctagtgttgcattgccagttattctaactaggctcaaacagaagcaggaggagtggtcaaggtgtcgatcagatttcaacaaagtttgggccgaaatatatgccaaaaattatcacaagtcacttgaccatcgtagtttctatttcaagcagcaagatacgaagaacctgagcacaaagtctctcctgacagagataaaagaaattaatgagaagaaaaggaaggaagatgatgtgctccttgccattgctgctggaaataggcggcctatagttcccaatatgtcattcgagtatatagactcggaaatccatgaagatctacataaaatcattaagtactcctgtgctgaagtctgcaactcttcagatcaattagataaagtgatgagagtatggacaacttttctggagccagttttgggtgttcagcaaaaacatgggtctgaggatcctgatctagttaagaccaagagccgaacaacaaaattgggtcttgcaaatgtgagagaaagcaataccatagctgggattgtctccaagcaaagcaatggcgatgaaagtgaacaagatcgaattgcccgtaaaggtgaagaaccatcaaacgctatactaaatggaagagtgcatggtgctgtctctgcagatgaaacactttccctgatcacacaaaacattgcttctaccgagcgaccagcagaaaatgctgctgctgttaggactgagcaacataaggcgaacttggtacttacgccaggcatgaatgcttctagaagttctcatgatgcagttgaggtggctggtgaaggcaagactggcaatgaaacattgctttctgccgagggaggggagaggttgggaccatctttaaatggcaccagcgagggaattaaagggcgcctaaataatgatggttctgtgccccacacttcaaaagttgaaagagaagagggtgaattgtcgcctaacggagattttgaagaggaccattttgttcctttcgaagatggaacatctaaaggaaaggaagattctacaagcagaccattccatggtaggcctggggaagtggtaccctcttctgccgaggcagctggtgagaatgatgctgatgctgatgacgagggtgaggaaagtgctcagaggtctactgaggacagtgaaaatgcttcagaggcgggtgaagatgcatcgggtagtgaatctggtgatggtgaggaatgctctcgtgaagatcatgatgaggaagaagaggatatggatcacgatgatcaggatgcaaaagctgaaagtgagggtgaggcagaaggaacaactgaaacacatgatgtggaagggggaatatcactaccactttcagaacgctttctgtactcagttaaaccacttgccaagcatgtacctacagctttacatgatcgagagttctcacgtgtattttatggaaacgattcattttatgtgttgttcagactacatcagattttatatgagagactactttcagcaaaaactaattctttcactgctgaaaagaaatggaggaattctaaggatacaaaccctcctgatttatatgcaaagtttatgagcgcgctgtacaacttgcttgatggttcctctgacaacaccaaatttgaggatgactgccgagctattattgggactcaatcatatgtcctctttactttagataaactgatttataaagttgtgaagcagcttcaagctatagcaacagatgaaatggacaataagcttctgcaactatatttatatgaaaaatcaagatctcctgggaggttctttgacctagtttatcatgaaaatgcccgtgttctactccatgatgagagcatataccgatttgaatgttgctcgagtccgacaaggttgtctattcagctgatggaatatggtcacgaaaagccagaagtgactgcagtatcaattgaaccaaatttttcttcgtatctttttagcgagtacttgtgtagtacgccagacaagaaattatctgaaggcgtctaccttggaaggaataagcggaaatattcaaataatgatgaaccttcagattctttgaaggcaatggatggtatcaatgttgtgaatggtcttgaatgcaagatatcctgcaagacctcgaaagtttcatatgtccttgatactgaagatttcttgttccggcttcggaagagaaggaaaattttgcggggcgggaatgtgcccgaccgtttgcagatttcatcaatatctgctgcaaaagtgcagcgcttcaataggttcctatccaaaccataggatcatttggcatacaaatgtatcgaaacctgttgctggggtcccagctgcttggcttgaacaatgattccatcgacgtcgcggagtcccctttcggaataacagatgggaagacatagggtaaatacagcaaagcgaagcgagcatgtaggccacagtagtcagtctgttgttccgaaagatgtgtatatatgtattagcagcatgattgttctgattatctttttactgattttcgatggtaggtctattccatcaagtatttaactaatcatttgttgctgttggtataggtcttttgttcttttagccgtcgttttgcattgaagatatgtagccaaaattaaaaacctgtgtcgaacagttatgtagtcttggctccattaatcaaacggacaccgtaatttcttggagccttttggtgaggttgccagcaacctctcttgtgtatccaattcaattgaagtataggatgtgtgttacttcttgatgttgtgtaaggtggccgaaattagtggacgtgccatccactatttttactattagattagaacatatctataaaatctagagaatgtgtaaaccgtttagtcttgttcgccatattgattatcattttaatgtattggcatggatggatggaaa

SEQ ID NO: 205228 - DNA, 962 bp, Zea Mays
cggtgagccgcggccgccccgcgaagagaggtgacgcggcgagcacacggccatagaggttactgctctcctgggctgtgaggctgtgaggctgtgaccaaacgctctacgctcccacttcccaccaactcccaaatcctccctgaaaataagaatacgagggtgagcgatcgagcggtcgagggggttgtgcttgtgcgtcagatcaaccgactggtggcgaggctgcgggaggagatggccggcgaagggaatggggatgaagggtggaggcggagcggcatcgaggtcagcgccctgcagttcggctacgacgggcagccgccgctcttcgcgcgcttcaacctctgcgtcgcacccggctcccgctgcctcctcgtcggcgccaacggatcaggcaagaccacactcttgaagattcttgcgggaaagcatatggttggaggaagagatgtggtccgtgtcctcaatggttccgcttttcatgatacacagctagtgtgcaatggtgacctttcgtacttgggtggttcttggagccgtactattggttcagctggggatgttccactgcaaggcgacttctctgctgagcacatgatttttggagttgatggggttgatcctgtcaggcgagagaagctggttgatctgctagacattgatctgcagtggcgcatgcataaagtttcagatgggcagcgccgcagggtgcaaatctgcatgggtcttcttcatccatacaaggataagaacagcccaggacactctaccgttagttatttttttttggtaatgtctgacaaagctgaactagtaatttatttatttattttggtatgctgaatactcatatgttacatgctgtgatcatttgctcactgctgagtgagcctgattagatagctgcgttgtccatgccagagaagaagaaaaaagtagctgttttgccttgattattc

SEQ ID NO: 205229 - DNA, 2769 bp, Zea Mays
cgcggccgccccgcgaagagaggtgacgcggcgagcacacggccatagaggttactgctctcctgggctgtgaggctgtgaggctgtgaccaaacgctctacgctcccacttcccaccaactcccaaatcctccctgaaaataagaatacgagggtgagcgatcgagcggtcgagggggttgtgcttgtgcgtcagatcaaccgactggtggcgaggctgcgggaggagatggccggcgaagggaatggggatgaagggtggaggcggagcggcatcgaggtcagcgccctgcagttcggctacgacgggcagccgccgctcttcgcgcgcttcaacctctgcgtcgcacccggctcccgctgcctcctcgtcggcgccaacggatcaggcaagaccacactcttgaagattcttgcgggaaagcatatggttggaggaagagatgtggtccgtgtcctcaatggttccgcttttcatgatacacagctagtgtgcaatggtgacctttcgtacttgggtggttcttggagccgtactattggttcagctggggatgttccactgcaaggcgacttctctgctgagcacatgatttttggaggtattctatcactctaatgcttatgattttggcatatcccatacttgggggttcttattgacagaagatatcatgaatctaacacaatgtttccaagtcgagtcgagttgtgcagctactggctggtacactagttgtgactaggacagactagtcgtgactagtcgaatataagtcgatgaatatagttttatcatctgattgtcccacctattatcaacaatagaaattacttcatccattaatcactctttatgttccgaagcttccttgatgctcttttttgcatggtccatggcagcccacatttcagccattgctggtctctaccatttcagcctaacaagatctctaccatttgtcttggtcctcatcaagtcttaaattcttccatgtccatagataaatctagttatcttctttgctttagcaatgcagccactaaactcttttatcttcccaataacctacatcatgagatccttgtggatagcacacggtgtccaaaataaggtaggaaacttgtccattagcatcctacctactagggttgagatggttgtgtgggctcacatttttatacctaggcccaaataagtcacccgactcaaatgctatgactagtcgatgagtcgaacgactagctgagaaagtcgagtcaccgtcgagtcgctctggtcgactatcacctctacaccgacttctcgactagtcgctcgactttaaaacctaacatactcctatatttgtcctttaacaatcagctctttagagattactttttccctggtcgcattagtttttgcttaaacaaatcctgctttcacatttgcggtttagtttttcctagtttaatcatgcctttagttagaagattggcactaaggccatcatttctgctggtagaaaacctactggcttatcacttgtttcgttctgtaccctgaaatatgagcagttgatggggttgatcctgtcaggcgagagaagctggttgatctgctagacattgatctgcagtggcgcatgcataaagtttcagatgggcagcgccgcagggtgcaaatctgcatgggtcttcttcatccatacaaggtgcttttgctcgatgagatcacggttgatctggacgtggtgaccaggatggacctgcttggtttcttcaaggaagagtgcgagcagagggaagctaccatcgtgtacgccacccatatatttgacggactcgagacgtgggctaccgactttgcgtacatccaagaaggcgagctgagaaggtccgggagatactccgacatcgaggagctaaggagcgccaagaacttgctgtcggtagtcgagtcgtggctgaggtcagagaccaaacttccgaagaaggaacccccaccacgtcctgagacccaggccaggcgttcctcgccgttcgatgcttctcctttccgttcgtcacgccacatggcctactaccgttgatggtttcccaactcgtactacaccattgcctcttgttctgcgctatatatatatatttttgttgtcgctcatatcgtatagtagctgtggagtttaatatgtgtcctcttcacggcccttgtagacatcaatcaatatatagcaggcagcacagaaataaaagtttggttcggttggtcttgcgttgatgagcagttggtgacatgacttggtgcccagcacgttcttcttcatcgctcgtcacggcgctgctcgctgtttctgagaatcttatgccatagcctttagatattcagaaaacttttcccacgagaaagttgtgtcgacctttttaggctataaacttttcagctaaccctgtctggctggcggtcaactttggcaaccagcttgtaacctaacgtaattacactaccctaattgcttaggtaaatgatgcttctctttggctgtagtaactgtaatgcatgtgctagccagtgtgctatcctaaaccaaagggccccaccgcttggcagcttgcctgctttgctttgtttaccctttgctaacattatccgtaacgcgcttcacatgaccattaccgcgtacagtgggaaggaaacacgtcaacgtgcagggcttgtatctgtcggtatggccgtacttgccgtccacgcccgtctgctgcccccgtctgatgacgtacatgtgt

SEQ ID NO: 205230 - DNA, 1488 bp, Zea Mays
ttcccaacgccgggttcgtgcacatcatataggtcgggcactggaggagttgcgaagctcgttgtacaatgaaatgcatagcgcagaaggtgctaagcgccagcagcagcgattctgtggaccaagtgttgcattgacattcaattttgctgttgctgttgggattatcatggcaaacaaaatggtgatggggactgttggatttaaatttccaattgcactctcattaattcattatgcagttgcatttgttctaatggccacccttaagacattatccttgttaccagttgccccgccatcgaaatccactcctttctcatctatatttgctttgggtgctgtaatgtccctgtccactgggctagccaacgtgagtttgaaacataacaggtaaaccagaatacatttgaatgtgatgtgtgcttacctaaattttgtagtatcgccttcatatattctcagtatttttgctattcagtgtaggtttctatcaaatggctaagattgctgtaaccccaacaattgtcgtagcagaattcatgcttttccagaagaaagtttcctctaaaaaggctgtcacactggcagttgtgtcatttggagtcgctgtagcgactgttaccgatctggagttcaacttttttggtgcttgtgttgcattagcatggattgttcctagtgccgtgaacaaaatcctttggtcaagtttgcaacagagtggaaactggaccgcccttgcgctgatgtggaagacaactccgattacgatatttttcttgttgacattgatgcctttgctggacccccctggcctcttgttgttcaattggaacttcagaaacagctgcgctgttatcatctctgcattgttcggtttccttcttcagtggtctggtgctttggcactcggcgcgacgtcagctttgtctcatgttgtgctgggccaattcaaaacgatcgtcatcatgctctccggctacctgatcttcggctccgaccctgggatcaccagcgtctgcggtgccgtgctcgcactcggcggcatgtccttctacacctacctgggtctgaagaaagaccccgcgaccagcggcaaaaaagcaccatcgagacagaactccttcatggcgagacctaaggtcgctgctgacgacagtgacgacgcggattcagagcaagatgatactgtataggttggcgaaactgtcatctaggccacttaatgcaaagatcaatctgagctcagttaattctcggttggttgtaatctgtcggtgaccgagtccatttttgtacatagatgctacctttaagccttacggattgtctattgcgtagtgacaagtagttcgagaggtattgcccctaatttatagcctgtgagattcgattagcgatgtacgcaggaacggggaacccaagtcatctgtttttttatgtcgatcatcagttatttacaatgaaaatcatgcaactctacaaccg

SEQ ID NO: 205231 - DNA, 1697 bp, Zea Mays
caaattcccttctccctcacgtctctttctctccccaagccgccgcctccctgccgttccgtggagcaccaggccagtgccgttccgatggtcattccaagccagtgccattctcctttggccgtccctgctccagccgtgagctcacccaggccacggcctcgtcgaaccgcacagcccctgcgctccttccccagccgcgcttagccctatcctccctgctcgatctccttcgagccgtaacggctccctggcgtgtccggctccctgcccctctccatggcgtcgcccagctctagctcgccccccctctgatctgtgcgcaggggtttcttccatggcgagctcccctgcaaacttcatctagccgccggccgagtttctttggtggtcgcttacccccagcatcggccagagcttgctgtcattccccaacaaacatgtggttgtaggtgagagatttcagaagtctgttggacgaagaaaagagaagtgaaatttgtgcagcgcccgtcaggtgttaggtttaataggtgagccgttaatcatggttgctttcgcaacatttcatgggattttgatgtgatgctctatgacgatgagccatgttttctgtagatattgtgtctaccgtgtgagggaatcgtgccagcttcctttgggtttgggactgggagctccatcgctctatggtatgaaccacgtgtgtttgtgacaccaatgtgtaggatccatatactctgtcctagattaattagcagtgtgtgaatgccacagcatactctgtcctagattaattagcagtgtgtgaatgccacagcggcggtgctcgcccgtgtctcagctgccttcaatggcccccttgcccgcgcagtcgtctttggggtccatattgatggtagtccctctttctttgtgtgttcacaagatgggtcggcagttttagtgtctcacacgcagtggccacgggatttttcaagtcacttggtcgtggaagggcttcttattgcagtcatagtgttccagctctccaggaagagctacaaaccaccaaagaagccactcactgaaaaggagattgatgagctatgtgatgagtgggagccagagctgctatgccctccaatcaaggagggggccacaatagatgctccaacattggaaagtgccgttggaccacatacgattgttgattgttgatggtaaagaagttgtgaactttgcatcagcatgaggtctggagtctagacacagcattgcaaactgaggtttaatcatcttagcaactacggtacgtgaccctgagcgcgtgattgttgcgaaacaacgaccacctcggtctacaccttaaagttcaagctctgcaaggtgaggtctgttcagtttggccagaaagtcatcccctacctgaacacctacgacgaccgcaccatccgctaccccgaccctctcatcaaggccaacgacaccatcaagatcgatctggagaccaacaagatcatggacttcatcaagttgtatttgccctttcatagacttcatcaagttatatacttagttaggctcaatgttagcacaaacagttgatgagcaagtttaaatttagagtacacttatgtatgagttattatttgacaatacttatttatgagatattgaatattatttatctatattatattaattatagtgttatt

SEQ ID NO: 205232 - DNA, 1587 bp, Zea Mays
caaattcccttctccctcacgtctctttctctccccaagccgccgcctccctgccgttccgtggagcaccaggccagtgccgttccgatggtcattccaagccagtgccattctcctttggccgtccctgctccagccgtgagctcacccaggccacggcctcgtcgaaccgcacagcccctgcgctccttccccagccgcgcttagccctatcctccctgctcgatctccttcgagccgtaacggctccctggcgtgtccggctccctgcccctctccatggcgtcgcccagctctagctcgccccccctctgatctgtgcgcaggggtttcttccatggcgagctcccctgcaaacttcatctagccgccggccgagtttctttggtggtcgcttacccccagcatcggccagagcttgctgtcattccccaacaaacatgtggttgtaggtgagagatttcagaagtctgttggacgaagaaaagagaagtgaaatttgtgcagcgcccgtcaggtgttaggtttaatagatattgtgtctaccgtgtgagggaatcgtgccagcttcctttgggtttgggactgggagctccatcgctctatgcggcggtgctcgcccgtgtctcagctgccttcaatggcccccttgcccgcgcagtcgtctttggggtccatattgatggtagtccctctttctttgtgtgttcacaagatgggtcggcagttttagtgtctcacacgcagtggccacgggatttttcaagtcacttggtcgtggaagggcttcttattgcagtcatagtgttccagctctccaggaagagctacaaaccaccaaagaagccactcactgaaaaggagattgatgagctatgtgatgagtgggagccagagctgctatgccctccaatcaaggagggggccacaatagatgctccaacattggaaagtgccgttggaccacatacgattgttgattgttgatggtaaagaagttgtgaactttgcatcagcatgaggtctggagtctagacacagcattgcaaactgaggtttaatcatcttagcaactacggtacgtgaccctgagcgcgtgattgttgcgaaacaacgaccacctcggtctacaccttaaaggtttgcgcgacatggcttttcatagtgctcaattggatctatcccctgagcataggagaaaagtatcaatctgtacagtggatccaagtattctataaagcatttcaagctctgcaaggtgaggtctgttcagtttggccagaaagtcatcccctacctgaacacctacgacgaccgcaccatccgctaccccgaccctctcatcaaggccaacgacaccatcaagatcgatctggagaccaacaagatcatggacttcatcaagttgtatttgccctttcatagacttcatcaagttatatacttagttaggctcaatgttagcacaaacagttgatgagcaagtttaaatttagagtacacttatgtatgagttattatttgacaatacttatttatgagatattgaatattatttatctatattatattaattatagtgttatt

SEQ ID NO: 205233 - DNA, 1378 bp, Zea Mays
caaattcccttctccctcacgtctctttctctccccaagccgccgcctccctgccgttccgtggagcaccaggccagtgccgttccgatggtcattccaagccagtgccattctcctttggccgtccctgctccagccgtgagctcacccaggccacggcctcgtcgaaccgcacagcccctgcgctccttccccagccgcgcttagccctatcctccctgctcgatctccttcgagccgtaacggctccctggcgtgtccggctccctgcccctctccatggcgtcgcccagctctagctcgccccccctctgatctgtgcgcaggggtttcttccatggcgagctcccctgcaaacttcatctagccgccggccgagtttctttggtggtcgcttacccccagcatcggccagagcttgctgtcattccccaacaaacatgtggttgtaggtgagagatttcagaagtctgttggacgaagaaaagagaagtgaaatttgtgcagcgcccgtcaggtgttaggtttaatagatattgtgtctaccgtgtgagggaatcgtgccagcttcctttgggtttgggactgggagctccatcgctctatggtatgaaccacgtgtgtttgtgacaccaatgtgtaggatccatatactctgtcctagattaattagcagtgtgtgaatgccacagcatactctgtcctagattaattagcagtgtgtgaatgccacagcggcggtgctcgcccgtgtctcagctgccttcaatggcccccttgcccgcgcagtcgtctttggggtccatattgatggtagtccctctttctttgtgtgttcacaagatgggtcggcagttttagtgtctcacacgcagtggccacgggatttttcaagtcacttggtcgtggaagggcttcttattgcagtcatagtgttccagctctccaggaagagctacaaaccaccaaagaagccactcactgaaaaggagattgatgagctatgtgatgagtgggagccattgtggttgttgttgcatgagtaatcctacatatcatttcatatatggattaaccggatggtctcactcttgaaactgtgggagtgttggtgcaattcttatactagtttcacttaacttaatagtgccatgtgtggggacctattaatcttgaacatttactcgctagattatatgacatttaaaccatgtactcgtgattaaccagcaagggacaccttgaaccacatagaatatcatttacccttgctacccaaatgcttacatggctacatgcttcttggattgtattctctcttctctgatatcagtatgatcatcaaagcacctaaaatgtgctgctgtatgtatatagc

SEQ ID NO: 205234 - DNA, 1134 bp, Zea Mays
atgcaagaaaaagctaactgcagcaaatgaaagatctgatatagggcatttacccttttgtgactatggcactagcggctatctataaccttttcatcattaacaaatcaggcggccttatatactacaaggactatggttcagcagggaggatggataccaatgacagtctaagattagcaagtctgtggcattcgatgcatgctatctcccagcaactctcccctacccctggctgtactggcattgatctcttacaagctcataactttgatctccattgctttcaatccctcacagggacaaaatttttcgttgtatgcgaaactggagctccaaacatggaaatgctgctgaaagtgatttatgagctgtacacggacttcgttttgaagaatccgttctatgagatggagatgccgatccggtgtgagctgtttgatcacaacctggctcagatgatccagaaggaccgtgttgcgcttctgggtcggtgaatcttgaaaactcatggtctcagcccttgaaaaccctacttttccgttttcgacgcttggacttgctctgctggaaccctaaattctaccttgcggcactgctgtgctgtgcataaccgataacttgaatagtgtgttgctcgcttgtaatcttcttgcggtgtgatgaaatgtagagctttgcgggcataaatgccgctgcaaatagtaacaacatggaagcagcttttgttcttgcatgttttccctgcaatgagcttgagcagctagatgagggctggtttggtggaagtggaattgaaggggatccatagagaggaatttccttgctatttttgaatagcaagtgaatttctcccatagatcccttcaattccattttaccaaattggttatcagtgatttttcaatgcccttttaccaaattggttatcagtgatttggtgttcctcgttgttggggatcattgttcgggtgacagatggtcaatgttctgtcgactgttgtaggaccaccggtgccatggcaccagccttcgggcctgattggttcagcttttttctgaccagcttttctgaaaatctggttgtggggagaatctgagtatcattacgattacatgtggaggaagataaag

SEQ ID NO: 205235 - DNA, 1305 bp, Zea Mays
cggattttcgccccaggcacactctgttttctgtactctgttctctcccttgtccccatgcatacagcatacttcagcctctctctcggttctcccgggcccctcgcgtgcgctctgtctctgtcgccgtcgccgtcgccgccgccgccaacctacgccaagtgcccagatctccaccctcgggaccttcgccggcagcgaacacccaccaccagggcatttacccttttgtgactatggcactagcggctatctataaccttttcatcattaacaaatcaggcggccttatatactacaaggactatggttcagcagggaggatggataccaatgacagtctaagattagcaagtctgtggcattcgatgcatgctatctcccagcaactctcccctacccctggctgtactggcattgatctcttacaagctcataactttgatctccattgctttcaatccctcacagggacaaaatttttcgttgtatgcgaaactggagctccaaacatggaaatgctgctgaaagtgatttatgagctgtacacggacttcgttttgaagaatccgttctatgagatggagatgccgatccggtgtgagctgtttgatcacaacctggctcagatgatccagaaggaccgtgttgcgcttctgggtcggtgaatcttgaaaactcatggtctcagcccttgaaaaccctacttttccgttttcgacgcttggacttgctctgctggaaccctaaattctaccttgcggcactgctgtgctgtgcataaccgataacttgaatagtgtgttgctcgcttgtaatcttcttgcggtgtgatgaaatgtagagctttgcgggcataaatgccgctgcaaatagtaacaacatggaagcagcttttgttcttgcatgttttccctgcaatgagcttgagcagctagatgagggctggtttggtggaagtggaattgaaggggatccatagagaggaatttccttgctatttttgaatagcaagtgaatttctcccatagatcccttcaattccattttaccaaattggttatcagtgatttttcaatgcccttttaccaaattggttatcagtgatttggtgttcctcgttgttggggatcattgttcgggtgacagatggtcaatgttctgtcgactgttgtaggaccaccggtgccatggcaccagccttcgggcctgattggttcagcttttttctgaccagcttttctgaaaatctggttgtggggagaatctgagtatcattacgattacatgtggaggaagataaag

SEQ ID NO: 205236 - DNA, 1414 bp, Zea Mays
aatacatcatttttttctatgtttttttgaaaataaactgactgatataaaaatccgtacattagtgggccgtaacctccagcagctaccctgcgacgtgcggattttcgccccaggcacactctgttttctgtactctgttctctcccttgtccccatgcatacagcatacttcagcctctctctcggttctcccgggcccctcgcgtgcgctctgtctctgtcgccgtcgccgtcgccgccgccgccaacctacgccaagtgcccagatctccaccctcgggaccttcgccggcagcgaacacccaccaccagctgatatagggcatttacccttttgtgactatggcactagcggctatctataaccttttcatcattaacaaatcaggcggccttatatactacaaggactatggttcagcagggaggatggataccaatgacagtctaagattagcaagtctgtggcattcgatgcatgctatctcccagcaactctcccctacccctggctgtactggcattgatctcttacaagctcataactttgatctccattgctttcaatccctcacagggacaaaatttttcgttgtatgcgaaactggagctccaaacatggaaatgctgctgaaagtgatttatgagctgtacacggacttcgttttgaagaatccgttctatgagatggagatgccgatccggtgtgagctgtttgatcacaacctggctcagatgatccagaaggaccgtgttgcgcttctgggtcggtgaatcttgaaaactcatggtctcagcccttgaaaaccctacttttccgttttcgacgcttggacttgctctgctggaaccctaaattctaccttgcggcactgctgtgctgtgcataaccgataacttgaatagtgtgttgctcgcttgtaatcttcttgcggtgtgatgaaatgtagagctttgcgggcataaatgccgctgcaaatagtaacaacatggaagcagcttttgttcttgcatgttttccctgcaatgagcttgagcagctagatgagggctggtttggtggaagtggaattgaaggggatccatagagaggaatttccttgctatttttgaatagcaagtgaatttctcccatagatcccttcaattccattttaccaaattggttatcagtgatttttcaatgcccttttaccaaattggttatcagtgatttggtgttcctcgttgttggggatcattgttcgggtgacagatggtcaatgttctgtcgactgttgtaggaccaccggtgccatggcaccagccttcgggcctgattggttcagcttttttctgaccagcttttctgaaaatctggttgtggggagaatctgagtatcattacgattacatgtggaggaagataaag

SEQ ID NO: 205237 - DNA, 372 bp, Zea Mays
atcctcaagctccagccaggttgcagcgtgtgtgtgggtggtaaatcttctgtccacaccagtgttcacctctcccctgcccaagtttgcccagtccctaggtggtgaccatcgttggcaattagtccacctcgccgtaaccagaattcccagaagaagatgaaattcaagaagtagtttctgaagaggagtctgctccagtgcctgctcatcaagtggatggagctatctaactaaaggttgggtagaaggatctagaacctcctcactgcaacaaaggtgatgagaagtactctaagtgttcctgtggctggagggcgtttccagttctgggggaggattagttaggcttgtgtataagctttggagggt

SEQ ID NO: 205238 - DNA, 237 bp, Zea Mays
atcctcaagctccagccaggttgcagcgtgtgtgtgggtggtaaatcttctgtccacaccagtgttcacctctcccctgcccaagtttgcccagtccctaggtggtgaccatcgttggcaattagtccacctcgccgtaaccaggtgatgagaagtactctaagtgttcctgtggctggagggcgtttccagttctgggggaggattagttaggcttgtgtataagctttggagggt

SEQ ID NO: 205239 - DNA, 166 bp, Zea Mays
atcctcaagctccagccaggttgcagcgtgtgtgtgggtggtaaatcttctgtccacaccagtgttcacctctcccctgcccaagtttgcccagtccctaggtggtgaccatcgttggcaattagtccacctcgccgtaaccagagaattgggttagggattccac

SEQ ID NO: 205240 - DNA, 186 bp, Zea Mays
atcctcaagctccagccaggttgcagcgtgtgtgtgggtggtaaatcttctgtccacaccagtgttcacctctcccctgcccaagtttgcccagtccctaggtggtgaccatcgttggcaattagtccacctcgccgtaaccagtgaaattaggtgatcaagggatctgaacggggaggtctgtaa

SEQ ID NO: 205241 - DNA, 3358 bp, Zea Mays
ttatttttttatgtgaatagatacaaaacaaaattacaacctatatttagagaactattggagaactcacatttttttactccaaaagccatttagcaacttcttaaatctataatttagagagctaaaatttagctaactattggagttgctctagagccaacatcgtttcagagtcccatctgaactccgtagcgtgatagcagagggcggcagcagcagcaaatccctgctccttcctcctccccggccccaaaaccgcacaaacccctgctcctcctcccgccgccgccgccgccggggcacgccgggatgcagaagccagtggcctccgtcgtctccctatgtccgcagctatggcaccgccacttccgtcgcgctcccctcctcccccgcgcccgcggcctcccctcctcctctcctatcctcacacgccgccgctccgtactcccccgttccacttccactcacctcgccgcggtgtcaaccgctgccgccgccgccgccgccccatcagccacaccgtacccagtgtacgatcggcttctgccgtgccccttgcaggacgaccctccgagaatcgagcacctcgtggctcgggaggacgaggtggcagccgatttcatcgccaggtcgctcggcctgcctcctctacctcatcgagttcggtgctgtgtactacgcgctcgtcgccccgcagccgcctccctacgcttctccggagcattttaggctctttcgggaagtcaccgagccttccgtcctgcgccggagggcgtccatcaaggggaagacggtgagggaggctcagaagacgttccgggtgacggaccccaaccagcgcctcgaggccggcacctacctgcgggttcatgtgcatcctaaacggtttccaaggtgctatcaaattgactggaaatccagggtaatagcagtcgctgatgaatacgttgttcttgataaacctgccgcaacatcagtatgttcctctttaccttccactttctcgtttgttggtggtttacgggctctaaatttcttagatagttcatgtcgtatcatggaatgcgtgtctgcaacattggcccttcactttgttgaacatagtcttcatgtctttaactcgatgtcgtttgagtcccctatgaattatgatattgatttttctttcaccattaggttatctgcacagaataaaattcacatccactaatatgagtatgtacaatgtactaccactgcaacatttgacgcagccagaagcacgagttcttggtgaagcaagttttggtttattggatgttgtaggcagctaagttacaaatgaccagtcagtcgctaggttacggttgaacttttctgagtttcagatgataacaacaggtgaattttgaacctttaggtgggcggagcaactgataacattgaggaatcctgtgcagtctttacttcgcgtgcattaggattggaaacgccattgctgacgactcaccagattgacaactgctctgaaggctggtttgtctatcactttatttgtatatacttatttgctaaaatgtgggaataggcaagcaatgtcatcctttttcgaaactttgcagtgtggtactatctaaaacgaaagagttctgctctgttttccatggactgataagggagaaacaggttaaaaaactctatcttgcacttactacagcacctgtgtcaacaggaacgattacccattatatgcgcccagttaatcgcgctcctagattagtttctgaaggtaatcttgaactgaaattgttgcttctatatggttactagttcggccaatatgcgttttgtgctttgatgctggcactgttgtcctgacttcaagcatgcatatatctgggtcaggaatattattcatttttgggtgtcgtgaaactgtgtgctctctttatgaacatatgtgcacactgaccaccttttgttgatgctgtggccgctactgaagatagtgaaatgtgaatcagcagtttatatctaaaactcgttgattctgcatcaatcgtgtgcatgttgccttctattgttcttaaccactgttttgttgttaataaactctagaagatgaatgatgcataaactcatggcctgaatgcttccaccagaagttttaaataaccttcttgttttagtgtactgcgttttagttgttacattggaatcctttgttggtacattgatgttcttcttacttaaccagactgtattgaaagatggcatctctgtcaaatggaggtactcgattgtagcaaggtaccatggccaagctcttcgatcaggaaagcttacaatgtaaatggttgtgggtggccacagcaagaagctgcttacgaatgtaaaatcaatctcttgacagggaaaactcaccagataagggcacagcttgctgctataggcgctcctattataggggattctgcatacatgactgcagcaatggcagcgatggccaacccaagcataaacccattcggtagagagaggctgagttacaacagtgaagaggagaaagaagccgccgtcgaagcatggattgcctcccacgggaaggaaccaaaatccgtaattgggctgcaagcgtcagagatctcttgggatcacgagggcaagcaccattcttacaaggctggagttccgtggtggtggcaggatcctgactcctgagtgcgatggtggattggatgggggagttccatatgaacccctggaatctcgcctttttagaggacagatgtttttctacattgttccgagtgctgagcgaccactgtccaacacgaacattggtttggtttggttgctgcgcagaaattgttgggtcaccgaaaactgaatttgggcttgggagatgaaactaagcccgagtctgagctctcgaccaggccaacacgaacaccacaccagagctccttcaactgggaaaagcagatccaggccaacacgaacattgctttgctgttcattctagggcatgcaacgtcattcgttctatgactgtagctgtatggttgtgtgcaaggcctagcttctatttgggacagctctcaataatattccctggagattgagttggggtgagaccgtctctcataaagtcagtgaccgaaacatcaaattttttaaaggcaagcatcttaaaatcgataatggggcgtttggatccctcatttaataggaattgaagttcacttaacaaagtaacctatttgccttatttgccttaattggtatatgtcaaacgatccaaacgggcgttagagaaattcttatcgtccactttatgttctaattttcttagcttattaacaatgatgttgga

SEQ ID NO: 205242 - DNA, 2925 bp, Zea Mays
ttatttttttatgtgaatagatacaaaacaaaattacaacctatatttagagaactattggagaactcacatttttttactccaaaagccatttagcaacttcttaaatctataatttagagagctaaaatttagctaactattggagttgctctagagccaacatcgtttcagagtcccatctgaactccgtagcgtgatagcagagggcggcagcagcagcaaatccctgctccttcctcctccccggccccaaaaccgcacaaacccctgctcctcctcccgccgccgccgccgccggggcacgccgggatgcagaagccagtggcctccgtcgtctccctatgtccgcagctatggcaccgccacttccgtcgcgctcccctcctcccccgcgcccgcggcctcccctcctcctctcctatcctcacacgccgccgctccgtactcccccgttccacttccactcacctcgccgcggtgtcaaccgctgccgccgccgccgccgccccatcagccacaccgtacccagtgtacgatcggcttctgccgtgccccttgcaggacgaccctccgagaatcgagcacctcgtggctcgggaggacgaggtggcagccgatttcatcgccaggtcgctcggcctgcctcctctgtatgctgcagacctcatcgagttcggtgctgtgtactacgcgctcgtcgccccgcagccgcctccctacgcttctccggagcattttaggctctttcgggaagtcaccgagccttccgtcctgcgccggagggcgtccatcaaggggaagacggtgagggaggctcagaagacgttccgggtgacggaccccaaccagcgcctcgaggccggcacctacctgcgggttcatgtgcatcctaaacggtttccaaggtgctatcaaattgactggaaatccagggtaatagcagtcgctgatgaatacgttgttcttgataaacctgccgcaacatcagtatgttcctctttaccttccactttctcgtttgttggtggtttacgggctctaaatttcttagatagttcatgtcgtatcatggaatgcgtgtctgcaacattggcccttcactttgttgaacatagtcttcatgtctttaactcgatgtcgtttgagtcccctatgaattatgatattgatttttctttcaccattaggttatctgcacagaataaaattcacatccactaatatgagtatgtacaatgtactaccactgcaacatttgacgcagccagaagcacgagttcttggtgaagcaagttttggtttattggatgttgtaggcagctaagttacaaatgaccagtcagtcgctaggttacggttgaacttttctgagtttcagatgataacaacaggtgaattttgaacctttaggtgggcggagcaactgataacattgaggaatcctgtgcagtctttacttcgcgtgcattaggattggaaacgccattgctgacgactcaccagattgacaactgctctgaaggctgtgtggtactatctaaaacgaaagagttctgctctgttttccatggactgataagggagaaacaggttaaaaaactctatcttgcacttactacagcacctgtgtcaacaggaacgattacccattatatgcgcccagttaatcgcgctcctagattagtttctgaaggaatattattcatttttgggtgtcgtgaaactgtgtgctctctttatgaacatatgtgcacactgaccaccttttgttgatgctgtggccgctactgaagatagtgaaatactgtattgaaagatggcatctctgtcaaatggaggtactcgattgtagcaaggtaccatggccaagctcttcgatcaggaaagcttacaatgtaaatggttgtgggtggccacagcaagaagctgcttacgaatgtaaaatcaatctcttgacagggaaaactcaccagataagggcacagcttgctgctataggcgctcctattataggggattctgcatacatgactgcagcaatggcagcgatggccaacccaagcataaacccattcggtagagagaggctgagttacaacagtgaagaggagaaagaagccgccgtcgaagcatggattgcctcccacgggaaggaaccaaaatccgtaattgggctgcaagcgtcagagatctcttgggatcacgagggcaagcaccattcttacaaggctggagttccgtggtggtggcaggatcctgactcctgagtgcgatggtggattggatgggggagttccatatgaacccctggaatctcgcctttttagaggacagatgtttttctacattgttccgagtgctgagcgaccactgtccaacacgaacattggtttggtttggttgctgcgcagaaattgttgggtcaccgaaaactgaatttgggcttgggagatgaaactaagcccgagtctgagctctcgaccaggccaacacgaacaccacaccagagctccttcaactgggaaaagcagatccaggccaacacgaacattgctttgctgttcattctagggcatgcaacgtcattcgttctatgactgtagctgtatggttgtgtgcaaggcctagcttctatttgggacagctctcaataatattccctggagattgagttggggtgagaccgtctctcataaagtcagtgaccgaaacatcaaattttttaaaggcaagcatcttaaaatcgataatggggcgtttggatccctcatttaataggaattgaagttcacttaacaaagtaacctatttgccttatttgccttaattggtatatgtcaaacgatccaaacgggcgttagagaaattcttatcgtccactttatgttctaattttcttagcttattaacaatgatgttgga

SEQ ID NO: 205243 - DNA, 2498 bp, Zea Mays
ttatttttttatgtgaatagatacaaaacaaaattacaacctatatttagagaactattggagaactcacatttttttactccaaaagccatttagcaacttcttaaatctataatttagagagctaaaatttagctaactattggagttgctctagagccaacatcgtttcagagtcccatctgaactccgtagcgtgatagcagagggcggcagcagcagcaaatccctgctccttcctcctccccggccccaaaaccgcacaaacccctgctcctcctcccgccgccgccgccgccggggcacgccgggatgcagaagccagtggcctccgtcgtctccctatgtccgcagctatggcaccgccacttccgtcgcgctcccctcctcccccgcgcccgcggcctcccctcctcctctcctatcctcacacgccgccgctccgtactcccccgttccacttccactcacctcgccgcggtgtcaaccgctgccgccgccgccgccgccccatcagccacaccgtacccagtgtacgatcggcttctgccgtgccccttgcaggacgaccctccgagaatcgagcacctcgtggctcgggaggacgaggtggcagccgatttcatcgccaggtcgctcggcctgcctcctctgtatgctgcagacctcatcgagttcggtgctgtgtactacgcgctcgtcgccccgcagccgcctccctacgcttctccggagcattttaggctctttcgggaagtcaccgagccttccgtcctgcgccggagggcgtccatcaaggggaagacggtgagggaggctcagaagacgttccgggtgacggaccccaaccagcgcctcgaggccggcacctacctgcgggttcatgtgcatcctaaacggtttccaaggtgctatcaaattgactggaaatccagggtaatagcagtcgctgatgaatacgttgttcttgataaacctgccgcaacatcagtgggcggagcaactgataacattgaggaatcctgtgcagtctttacttcgcgtgcattaggattggaaacgccattgctgacgactcaccagattgacaactgctctgaagtgtggtactatctaaaacgaaagagttctgctctgttttccatggactgataagggagaaacaggttaaaaaactctatcttgcacttactacagcacctgtgtcaacaggaacgattacccattatatgcgcccagttaatcgcgctcctagattagtttctgaaggaatattattcatttttgggtgtcgtgaaactgtgtgctctctttatgaacatatgtgcacactgaccaccttttgttgatgctgtggccgctactgaagatagtgaaatactgtattgaaagatggcatctctgtcaaatggaggtactcgattgtagcaaggtaccatggccaagctcttcgatcaggaaagcttacaatgtaaatggttgtgggtggccacagcaagaagctgcttacgaatgtaaaatcaatctcttgacagggaaaactcaccagataagggcacagcttgctgctataggcgctcctattataggggattctgcatacatgactgcagcaatggcagcgatggccaacccaagcataaacccattcggtagagagaggctgagttacaacagtgaagaggagaaagaagccgccgtcgaagcatggattgcctcccacgggaaggaaccaaaatccgtaattgggctgcaagcgtcagagatctcttgggatcacgagggcaagcaccattcttacaaggctggagttccgtggtggtggcaggatcctgactcctgagtgcgatggtggattggatgggggagttccatatgaacccctggaatctcgcctttttagaggacagatgtttttctacattgttccgagtgctgagcgaccactgtccaacacgaacattggtttggtttggttgctgcgcagaaattgttgggtcaccgaaaactgaatttgggcttgggagatgaaactaagcccgagtctgagctctcgaccaggccaacacgaacaccacaccagagctccttcaactgggaaaagcagatccaggccaacacgaacattgctttgctgttcattctagggcatgcaacgtcattcgttctatgactgtagctgtatggttgtgtgcaaggcctagcttctatttgggacagctctcaataatattccctggagattgagttggggtgagaccgtctctcataaagtcagtgaccgaaacatcaaattttttaaaggcaagcatcttaaaatcgataatggggcgtttggatccctcatttaataggaattgaagttcacttaacaaagtaacctatttgccttatttgccttaattggtatatgtcaaacgatccaaacgggcgttagagaaattcttatcgtccactttatgttctaattttcttagcttattaacaatgatgttgga

SEQ ID NO: 205244 - DNA, 2462 bp, Zea Mays
ttatttttttatgtgaatagatacaaaacaaaattacaacctatatttagagaactattggagaactcacatttttttactccaaaagccatttagcaacttcttaaatctataatttagagagctaaaatttagctaactattggagttgctctagagccaacatcgtttcagagtcccatctgaactccgtagcgtgatagcagagggcggcagcagcagcaaatccctgctccttcctcctccccggccccaaaaccgcacaaacccctgctcctcctcccgccgccgccgccgccggggcacgccgggatgcagaagccagtggcctccgtcgtctccctatgtccgcagctatggcaccgccacttccgtcgcgctcccctcctcccccgcgcccgcggcctcccctcctcctctcctatcctcacacgccgccgctccgtactcccccgttccacttccactcacctcgccgcggtgtcaaccgctgccgccgccgccgccgccccatcagccacaccgtacccagtgtacgatcggcttctgccgtgccccttgcaggacgaccctccgagaatcgagcacctcgtggctcgggaggacgaggtggcagccgatttcatcgccaggtcgctcggcctgcctcctctgtatgctgcagacctcatcgagttcggtgctgtgtactacgcgctcgtcgccccgcagccgcctccctacgcttctccggagcattttaggctctttcgggaagtcaccgagccttccgtcctgcgccggagggcgtccatcaaggggaagacggtgagggaggctcagaagacgttccgggtgacggaccccaaccagcgcctcgaggccggcacctacctgcgggttcatgtgcatcctaaacggtttccaaggtgctatcaaattgactggaaatccagggtaatagcagtcgctgatgaatacgttgttcttgataaacctgccgcaacatcatctttacttcgcgtgcattaggattggaaacgccattgctgacgactcaccagattgacaactgctctgaaggctgtgtggtactatctaaaacgaaagagttctgctctgttttccatggactgataagggagaaacaggttaaaaaactctatcttgcacttactacagcacctgtgtcaacaggaacgattacccattatatgcgcccagttaatcgcgctcctagattagtttctgaaggaatattattcatttttgggtgtcgtgaaactgtgtgctctctttatgaacatatgtgcacactgaccaccttttgttgatgctgtggccgctactgaagatagtgaaatactgtattgaaagatggcatctctgtcaaatggaggtactcgattgtagcaaggtaccatggccaagctcttcgatcaggaaagcttacaatgtaaatggttgtgggtggccacagcaagaagctgcttacgaatgtaaaatcaatctcttgacagggaaaactcaccagataagggcacagcttgctgctataggcgctcctattataggggattctgcatacatgactgcagcaatggcagcgatggccaacccaagcataaacccattcggtagagagaggctgagttacaacagtgaagaggagaaagaagccgccgtcgaagcatggattgcctcccacgggaaggaaccaaaatccgtaattgggctgcaagcgtcagagatctcttgggatcacgagggcaagcaccattcttacaaggctggagttccgtggtggtggcaggatcctgactcctgagtgcgatggtggattggatgggggagttccatatgaacccctggaatctcgcctttttagaggacagatgtttttctacattgttccgagtgctgagcgaccactgtccaacacgaacattggtttggtttggttgctgcgcagaaattgttgggtcaccgaaaactgaatttgggcttgggagatgaaactaagcccgagtctgagctctcgaccaggccaacacgaacaccacaccagagctccttcaactgggaaaagcagatccaggccaacacgaacattgctttgctgttcattctagggcatgcaacgtcattcgttctatgactgtagctgtatggttgtgtgcaaggcctagcttctatttgggacagctctcaataatattccctggagattgagttggggtgagaccgtctctcataaagtcagtgaccgaaacatcaaattttttaaaggcaagcatcttaaaatcgataatggggcgtttggatccctcatttaataggaattgaagttcacttaacaaagtaacctatttgccttatttgccttaattggtatatgtcaaacgatccaaacgggcgttagagaaattcttatcgtccactttatgttctaattttcttagcttattaacaatgatgttgga

SEQ ID NO: 205245 - DNA, 1202 bp, Zea Mays
ggcatgattatctggtgtcctgctttggggattctaggagttgagaagaccgcttctcaacaagaaataaagaaggcgtatcacaaattggctctgcgcctccacccagataagaatcctggggatgaggaagccaaagagaagtttcagcagctgcagaaggttatatccattcttggagatgtagagaaaagagctttatatgatgagactggcatcactgatgatgatgcactggtgggagaagctgcaaacaatcttcaggagtacttcagaacaatgtacaagaaagtcacggaggctgacattgaagaatttgaagctaaatatagagggtcagattctgagaaaacggacttgaaggaactctacacaaaatataagggcaacatgaacaggcttttctgcgcaatgatttgctcagaaccaaagcttgattctcaccgcttcaaggatataattgacgaggcgattggtgaaggtgagctgaagtcaactaaggtgtatgagaaatgggctaaaaagatctcagggatggagccaccaacaaatccgctagagaggagagtgaacgcagggctgagcggaaaaaacagttcaactccatcctctcgaacatcatgtccaagtgtgactccaaggcgagcagctcggagcccacggaagaagagtttgagcaggcgcaacagaggctggagagcagaagggccaagaggcgcaagtgatgctgctgccagccttcttgccctatgctgaacattgtctgaagcttttggtgtgacctgattttaccagcatgcaagtgatgtttctaagacccagctcagtttgagcgtgtcagggtggggtgtgtgtcatatctcttgtcctctcacgatacactatgtcgtatggttatcggcttatcaccttgccgagagggaagctctatctgaacttttaattccgtagcatttggcaagtactagtagattgcaatgtaatgtttattctacggtgagctgcctgccagaagctggtcccacatgcaagggtccttaattattatccagtttgagaatgcagtttattgattctcgatggatactatgagcaaacaggttaagtgatggtctgagctttgttgtttcccaacccatacttaaagttcttgggagtacaatgatgagcatcgtaagaggataggtaaactgttgatctat

SEQ ID NO: 205246 - DNA, 1617 bp, Zea Mays
ctttgccggagcgtgtgaaccgtacggaatcgccggcatgagatggcggccgcctccgcgttcgggtcgtcccccggagatggagcggttcctctgcgagaggctgcttgatgcggaggaccccatcgcggagcgcttccgggcgttcttctccctcggtccctccgcaacctccgcggggatgcgccgcgccctcatctaaggatgctgaggctattcctgatctggtggcagttctcaaagatttttctctacatccatgtcttccatgaggttgcttatgtgctaggtcagctgcaaaataaaaccgcttcagatgcacattctacggtcgtgaagaatgtctgtgagcatccaatggccaggcatgaagccgctgaagcccttggctcaatgcggaccaagagagcattgtgcttttggaggagtttgcaaaggatcctgagcccatagtacgagagatcggggaagtcatttgagtttctcttccttgagactcctcgtgtgcagccctatgatcacccaaatgcgaagtggctgaaggctccttggttaatgtgactgcaccaaccatgtatccactggtggcttgcctgcaaaacagatcgtagctgcctcggagctaggagaagaatcctctgatcctttcggtttggatggttttgttgagcacaagcccaagaagcctgagagagcccgagaaagggccgatggcagctctgaacataggaagctgacagggagcaaagatatttctcaagtcgcagctggaggccccttgtgaaacgcctggaaatagctgctcggcgctacagagttccatgggcgcagactgccattgacatccttgcgaagcgcgcatactcccacgagacgaggatcagctgtggttgctcggctaaggtggtcagtcggcagagccgttggtgtctgtctgatccccgcttctcccccttggcaggcgggcgtagcatgatgatctggttgggttcaacaaggacggcgctcgcctgatccatccattgcctatgcctggcctgggactcccatggtccatggatttcggtgcttgtgatgaatgcggacgacgccagggtttcttctttgggcttcggcgagcgacacgggcgtgggagctgctgtttttgtgcttggatttccgtagaggagggttgacatgacatggccatcaccatccccatgcatgacctcatacatcagctgactgactggatgtgttggatgcatctgcatcccttacagttgcgttgcgatgccaagctaagcttgcaggtacctgtacaccgtatggtaggtgggtgggtggtgcctgtactgtacaccgtatggtgtgatatagagaagggggttgacttgaagaaagtacagtagagaaagagagcaaatgttttttggttttgatgatgttttcttttcccttctcttctataagagcaactccattagtttgctaaaggactctctaaatcaataagttaggtagttggtcttaaaacttgtgtccaacagctctttatgaactttctaaacataggaacttcaattcttatatatccttattttgtctctacatttagagaccatttataaactccc

SEQ ID NO: 205247 - DNA, 1702 bp, Zea Mays
gacctgacgccgggactcattccgctccgcggccatcgcctgaaggtttcccttcagcagtcgcatttcctcctgctgcagggccgcctctgccttcaggcgacggacctcctccacgagcggagacaccttcccgcgctcggccgcggcttcgtctctcagttcagcgcacagcgaagtcaagtccgccgcctcatcgctcctcagctccaactgctcgttggcacgaagcagcatggccttatggcgctgcagcgcggcccagacgtcgtgttcgcggcgaacgaagattgacttgaccatggacttcgccataaggtcctgcaaaggaaggaactcacatcatcacagcagcgtggttgcttatgtgctaggtcagctgcaaaataaaaccgcttcagatgcacattctacggtcgtgaagaatgtctgtgagcatccaatggccaggcatgaagccgctgaagcccttggctcaatgcggaccaagagagcattgtgcttttggaggagtttgcaaaggatcctgagcccatagtacgagagatcggggaagtcatttgagtttctcttccttgagactcctcgtgtgcagccctatgatcacccaaatgcgaagtggctgaaggctccttggttaatgtgactgcaccaaccatgtatccactggtggcttgcctgcaaaacagatcgtagctgcctcggagctaggagaagaatcctctgatcctttcggtttggatggttttgttgagcacaagcccaagaagcctgagagagcccgagaaagggccgatggcagctctgaacataggaagctgacagggagcaaagatatttctcaagtcgcagctggaggccccttgtgaaacgcctggaaatagctgctcggcgctacagagttccatgggcgcagactgccattgacatccttgcgaagcgcgcatactcccacgagacgaggatcagctgtggttgctcggctaaggtggtcagtcggcagagccgttggtgtctgtctgatccccgcttctcccccttggcaggcgggcgtagcatgatgatctggttgggttcaacaaggacggcgctcgcctgatccatccattgcctatgcctggcctgggactcccatggtccatggatttcggtgcttgtgatgaatgcggacgacgccagggtttcttctttgggcttcggcgagcgacacgggcgtgggagctgctgtttttgtgcttggatttccgtagaggagggttgacatgacatggccatcaccatccccatgcatgacctcatacatcagctgactgactggatgtgttggatgcatctgcatcccttacagttgcgttgcgatgccaagctaagcttgcaggtacctgtacaccgtatggtaggtgggtgggtggtgcctgtactgtacaccgtatggtgtgatatagagaagggggttgacttgaagaaagtacagtagagaaagagagcaaatgttttttggttttgatgatgttttcttttcccttctcttctataagagcaactccattagtttgctaaaggactctctaaatcaataagttaggtagttggtcttaaaacttgtgtccaacagctctttatgaactttctaaacataggaacttcaattcttatatatccttattttgtctctacatttagagaccatttataaactccc

SEQ ID NO: 205248 - DNA, 1396 bp, Zea Mays
atccgaattcggagcagcagccgccgcggatgccgttaaaccctaactcccaacctcttctttgtcacactatttctagggttttacatgcaccaacaggagccccttccgtcacttcgcctccaacaacagcagcgccgccgccgccgccgccgccacttaatcgccgggatcgtcgccggaggaaagcgccatggatcggtaccagcgggtggagaagccgccgcccgagcccgccgccatcggcgagaatgaggtccgcatcaccactcagggcctcgtccgcaactacgtcacctacgccacctccctcgtccaggaaaaacaggtgaaggaaattgtgttgaaggctatgggacaggctataagcaaggcagtggctattgctgagatcataaagaagaggattcctggtttgcatcaagatacaataatcagttctgtcagtattactgatgtatgggagcccattgaggaaggacttgtaccattggagatgactcgtcatgtttcaatgatatcgatttccttgtcacctaaggagcataacaagaattcacctgggtatcaagctcctctacattcggatcttaagccacaaagatatcagcaacctcagcaatatcaacagtaccagccaagacaacatcaagttcaaacggattcatatggacgcggccgaggcagaagcaggggccgaggaaggggctggggtactaggggtgggtacggcggaggctatggtggatatgaatatgataacaaccaagtaggttatggtgggtatgaacaccacggtggatatggacatcaaggtggatatggaaaccagggaggatatggccacaaccaaggtggctatggccacgaccaaggtggctatggcggttatggttacaaccaagaaaatggaggctggaactacaaccggaacagaggcggtggcggccgaggacgaggcaattggggctatggtggtcctggatatgaccgtggtggcagaggcgcaggtggccctggcggcaggggctatgttcgaggccgtggacgaatgggtggcggccgtggacggggcaaccaaaactactattagagcaagggcattttccacggccgtattgctgtatgtttcctctagtcctcccagattttagtataatcgccaatggtgcctgtaccattgcatcaattccgtgggattttgacattagtccttcagttttccctgggacatctttcctgtatttaagagtgcatttttgatagttcatcagcatccagttacgcgtttctccgcactgtgtattttggtgatagtttaagagcccagctgtttgtaccttggctccagaagaactggaacctgttgactgttgtgctgtagtgattctacggc

SEQ ID NO: 205249 - DNA, 5179 bp, Zea Mays
gttcgttttggtaacagtcgctagcgaaaaagcatccgcccacctcccctcgtctctctcgcgctccgccgccgcgcaaaactgtctggtgatgacgaacgccgccggtacggcccctcacccgactccgccgacgccgctccaacaacaacagcatcagccacccaaggaccagcagcagaaggcgctggccttgaacgcattccgcctgaaggggatcggcgaccgcatcaggttccacctgaagggcatgagcgtgcccccagtcgccgagttggcccacctcatctacgcgttcgccagagggattgacttcgcggtctcagctggtgatattcctctgacagccggtgacatacccgagattctgagaaaggtatatgagctgaggaaagaaacaattatacaatcttcgcttatgatactagcgatctcttgcaagaatgcttgctccaataaatggtttcaacctgcagattccagagacattcttagaatggtcaatgagctctctggcaacttctgcacgtccacaggccaggcagctagtgacagcactgtgcttgaaattatatcacaaataatgccaaggtattaccctcggttgaagtttgagcgcctaatcacttctattgaagcaaaggttggctatgatatattaatggctgacttctttattgagaggagcctatctcgagatgaaaagattagactaattgtcgtacaaaaggaaaatttagatgcctcatcatgtgtctcaagtccaccacatgtgagctttttggtcaatgggaagggtgtggacaagaggactaatgtttcaatggaacaaggaccccagttacctactgatatcaccaaaatgctcaaatatggggctaacattatccaaggtgttggatattttaatgctaattatatcatagctgtagcagttgtgaacgatttgacatccttcagtgctccaaaactggatgactatgcacaacctatcactgtttatcctgcagagaggctgcgttgaacccaggacctttggctttggctcagtgggaaggcttctcaccactgaaagttcagtatattttatgctatgcgtccagtttgttgttgttgttgttgttgtcgtcgagtttcttgactgggactgaagtgtgttttaaatgacattttgtaatctctcgattgaaatatccatgtaggttcatttaaatttgtgtctgattcttcatacccactgacattatagttttttatgttattttttgtttttttagaaatggactatcagttttactcgtaattattcaattcaattcttgctacaccttttgagttttttcaccatcgtcaatctgctcttgtctctgtttggccttatgttggaaaatggaaataactgattgctacctccatccccaaaaactttatgttcgtaaatcaaactatcttaagtttgactaaatttatagataaagttgtcaacttatgatacaaatagttatgctatgaaaacatgttcagatctaatgatacttatatttggtaatatatacattaatattctattgtataaaattggtcaaactttagatagtttgacttagaataaaatagaaagagtaaaatgcatcaacggtcctcgaacttggcatactgtgtcaattgggtccccctgggtccccgtacactcttgaaactaggaaaacaggtgttataactttgccagcccattcaaaatcaggtttgctcaaaccgtttgccgacgtggagtgccacgttagagtcacttggatccccgaactttcattagtgcgctccaacgtggctcgctatgtcagcatccggtttgaacaaacccggttttgaatggtgcagacaagttatagcacctgtttttctggttctgagagttcggagacccaattgacacaatatatcaagttcgaggactgctgatgcattttaatcaaacggaaacatcaagcttttggggatagaagtagtaccgaagattgattgtggtgttatgcatgatcatggacatggagcatgtaaagtgaacctgttgtctggaactggattcagtttctctgtaaagtgataggagctgggactcagtatgtaggtggacagttacttgtatagtttccctcttttaaactgactatatatatttttggctgtaaacatgaattcctgtctgtttgtgataacatgcagctttttaaagacttggtttttttttgctctgcacaaaatagacttgtgttttcccctagttcttcccatgggcaaatgaaacctgtaagttcagttttattgatccataaaagtgaaatacctagctgtacttgaacaatcagtttatattggaagagaccatacttgtaagcaaatgaacctatgaacaacatagaaaggtgacacaaatgccggatcatctgctagcagcccatgcggggcttatttgcatagttattgaagctggatgggcaattgacctgctcaggcaggttcaacagttttcctctccaacaactagtcctcttagtagcaactaccgagtatatttgccttggtgatgtgatcagcgtggttgtatctaagtacctaaaccccaattgtatgctgatcgtttcagttggttcgtgcaaagtcagatggctcagtgataatttgcatctatctgatgacttgaatcatgctgaaccaggctttagttctgctagcagtctgtccagtttcaataactacgtttatttgttgatagcatttccattcatttttcggtatcatgccttggtttcttgttcaaaataatatggtttgcttgcatgaagtacatgtagtgacagtaactagtaagagttaaaccatgtgagtatttttttattgtagttctaattgccagattagcaaaagttgattgccctctttggttcccctgcattcattgtctttatgtagtgtggccataatttgagttttaaggctgtccgcagcagatcgtgtaaaataggggatttacactgtagattacattgtttacagagtgaagtttgaaataggggatgcaatagaatagttgctggagacagcctaagtaatacagtatatgcattttcttagtgatggcttattttttaataatttcttccattacagttaacgatgtgtactggtctcttgtagattctgatgtacttgagggaccatcaagagtttccctaaattgtcctataagttttaggcgcataaaaactcctatcaaaggccgtctttgcaaacactatcagtgttttgattatgataattacatggagatgaactcaagaaaaccaaactggcgctgtccatattgtaacacctcctcaagcttcactgacctacgtattgaccaaaagatgatgaagatactagaagagactggagatgatgtcactgatgtccttgtatttgctgatggatcttggaaagttgttccagctcaggatgaaaaatctgatagacatagaggtgacacaattcagcaggctggagatgctgtagaaactggttcaccttctcgagatgtcatagatctgataaatggcaatgatgatggtgatatgcaaatggattgggcatcggctccagaagattcaaagcctgtgttgaatagtcaagatttgtctgtatcagactatcttacagatttccctatgacagctcagacagaagatctgaatcgaggggatggaaataatgggggaagcaacatggcttccacttcacgtcaaaatttgttactacctcctactagtgggctgggctcaagttcattagggaccttggaatctattctacctcaaaatgttctgcaccctgttatcacagatgcagtctctccttctcttgaaacctcttcagcatctggcatgcaacatgtttcacaggaaacacattgtggaactgtacagctgcagccacaaataggtccagtacatgggtccgaagtgagaaggcttcctatacctagaaatcccaggagagagccaataggagtacaggggttgacggttccaccacagaatcctgggtcatcaacaaggttgcagccaaatattctcaattgtccacctcctatcccgctatctagtccatcctcttcaacttaccaagcacatcaagtgaagaatccagacagtgtcattgcttcaaggaacagtggtagtgggccattaccaaggactcctagcgtcgctgctgcatcattgcacctacagtcgacagcacgggatattcgcaacacatcgagccatctacccagtcgagttgttggtctgcctgcgccacacctcatgggtgcacgaccaccaccaggaatttcagtgcaggctggaggagcgaacgcctacagaactatgcaacagactccaactatggatccactgaggcacacacggatgagcatgaaccaaacagcactggctgctgccggccaaaccaccgctgccgcgtatgtccgaccaacccaagcagacatccaaaaccatctctttcctgtgcagcaaagccaggcaccacgatcgcaacaagtgccacgaacaacaaccccgcctctacagcgggcgccaccgcacctgcaacctcccagtgtaccaccgactgttccaagcacacctcaggctggaccttcgcatggtcttccaccggagctccctgtggatgatagctggcgccccacgggacagatgagagggagtctgacaggcaatgcttacagttctgcaattaggcactatcggggccattctgagcagcagcagggcgagcctcggcctcccaacacttcaggtgcgcgaaggcctcagtaactgccagacattgcggcgttgccctgattatcaagcagggcttgggcagctaatttaccaagagattttaatttattatcatagctaatttggcgctatgatgatctatgttagtgtaggtaggggagcctagtgagtagtgatagtgctctgcttgtctacaacgcactctgatgttaaattagtagtatcaggtgaaccatttgtgtacccaatatggaacgtggattttttatgctaatgttttgcctgtgtaattggaccgattttcatgtgaaattcctgaacgattcccatgaaaatgaacaggtaacttgcat

SEQ ID NO: 205250 - DNA, 5174 bp, Zea Mays
gttcgttttggtaacagtcgctagcgaaaaagcatccgcccacctcccctcgtctctctcgcgctccgccgccgcgcaaaactgtctggtgatgacgaacgccgccggtacggcccctcacccgactccgccgacgccgctccaacaacaacagcatcagccacccaaggaccagcagcagaaggcgctggccttgaacgcattccgcctgaaggggatcggcgaccgcatcaggttccacctgaagggcatgagcgtgcccccagtcgccgagttggcccacctcatctacgcgttcgccagagggattgacttcgcggtctcagctggtgatattcctctgacagccggtgacatacccgagattctgagaaaggtatatgagctgaggaaagaaacaattatacaatcttcgcttatgatactagcgatctcttgcaagaatgcttgctccaataaatggtttcaacctgcagattccagagacattcttagaatggtcaatgagctctctggcaacttctgcacgtccacaggccaggcagctagtgacagcactgtgcttgaaattatatcacaaataatgccaaggtattaccctcggttgaagtttgagcgcctaatcacttctattgaagcaaaggttggctatgatatattaatggctgacttctttattgagaggagcctatctcgagatgaaaagattagactaattgtcgtacaaaaggaaaatttagatgcctcatcatgtgtctcaagtccaccacatctttttggtcaatgggaagggtgtggacaagaggactaatgtttcaatggaacaaggaccccagttacctactgatatcaccaaaatgctcaaatatggggctaacattatccaaggtgttggatattttaatgctaattatatcatagctgtagcagttgtgaacgatttgacatccttcagtgctccaaaactggatgactatgcacaacctatcactgtttatcctgcagagaggctgcgttgaacccaggacctttggctttggctcagtgggaaggcttctcaccactgaaagttcagtatattttatgctatgcgtccagtttgttgttgttgttgttgttgtcgtcgagtttcttgactgggactgaagtgtgttttaaatgacattttgtaatctctcgattgaaatatccatgtaggttcatttaaatttgtgtctgattcttcatacccactgacattatagttttttatgttattttttgtttttttagaaatggactatcagttttactcgtaattattcaattcaattcttgctacaccttttgagttttttcaccatcgtcaatctgctcttgtctctgtttggccttatgttggaaaatggaaataactgattgctacctccatccccaaaaactttatgttcgtaaatcaaactatcttaagtttgactaaatttatagataaagttgtcaacttatgatacaaatagttatgctatgaaaacatgttcagatctaatgatacttatatttggtaatatatacattaatattctattgtataaaattggtcaaactttagatagtttgacttagaataaaatagaaagagtaaaatgcatcaacggtcctcgaacttggcatactgtgtcaattgggtccccctgggtccccgtacactcttgaaactaggaaaacaggtgttataactttgccagcccattcaaaatcaggtttgctcaaaccgtttgccgacgtggagtgccacgttagagtcacttggatccccgaactttcattagtgcgctccaacgtggctcgctatgtcagcatccggtttgaacaaacccggttttgaatggtgcagacaagttatagcacctgtttttctggttctgagagttcggagacccaattgacacaatatatcaagttcgaggactgctgatgcattttaatcaaacggaaacatcaagcttttggggatagaagtagtaccgaagattgattgtggtgttatgcatgatcatggacatggagcatgtaaagtgaacctgttgtctggaactggattcagtttctctgtaaagtgataggagctgggactcagtatgtaggtggacagttacttgtatagtttccctcttttaaactgactatatatatttttggctgtaaacatgaattcctgtctgtttgtgataacatgcagctttttaaagacttggtttttttttgctctgcacaaaatagacttgtgttttcccctagttcttcccatgggcaaatgaaacctgtaagttcagttttattgatccataaaagtgaaatacctagctgtacttgaacaatcagtttatattggaagagaccatacttgtaagcaaatgaacctatgaacaacatagaaaggtgacacaaatgccggatcatctgctagcagcccatgcggggcttatttgcatagttattgaagctggatgggcaattgacctgctcaggcaggttcaacagttttcctctccaacaactagtcctcttagtagcaactaccgagtatatttgccttggtgatgtgatcagcgtggttgtatctaagtacctaaaccccaattgtatgctgatcgtttcagttggttcgtgcaaagtcagatggctcagtgataatttgcatctatctgatgacttgaatcatgctgaaccaggctttagttctgctagcagtctgtccagtttcaataactacgtttatttgttgatagcatttccattcatttttcggtatcatgccttggtttcttgttcaaaataatatggtttgcttgcatgaagtacatgtagtgacagtaactagtaagagttaaaccatgtgagtatttttttattgtagttctaattgccagattagcaaaagttgattgccctctttggttcccctgcattcattgtctttatgtagtgtggccataatttgagttttaaggctgtccgcagcagatcgtgtaaaataggggatttacactgtagattacattgtttacagagtgaagtttgaaataggggatgcaatagaatagttgctggagacagcctaagtaatacagtatatgcattttcttagtgatggcttattttttaataatttcttccattacagttaacgatgtgtactggtctcttgtagattctgatgtacttgagggaccatcaagagtttccctaaattgtcctataagttttaggcgcataaaaactcctatcaaaggccgtctttgcaaacactatcagtgttttgattatgataattacatggagatgaactcaagaaaaccaaactggcgctgtccatattgtaacacctcctcaagcttcactgacctacgtattgaccaaaagatgatgaagatactagaagagactggagatgatgtcactgatgtccttgtatttgctgatggatcttggaaagttgttccagctcaggatgaaaaatctgatagacatagaggtgacacaattcagcaggctggagatgctgtagaaactggttcaccttctcgagatgtcatagatctgataaatggcaatgatgatggtgatatgcaaatggattgggcatcggctccagaagattcaaagcctgtgttgaatagtcaagatttgtctgtatcagactatcttacagatttccctatgacagctcagacagaagatctgaatcgaggggatggaaataatgggggaagcaacatggcttccacttcacgtcaaaatttgttactacctcctactagtgggctgggctcaagttcattagggaccttggaatctattctacctcaaaatgttctgcaccctgttatcacagatgcagtctctccttctcttgaaacctcttcagcatctggcatgcaacatgtttcacaggaaacacattgtggaactgtacagctgcagccacaaataggtccagtacatgggtccgaagtgagaaggcttcctatacctagaaatcccaggagagagccaataggagtacaggggttgacggttccaccacagaatcctgggtcatcaacaaggttgcagccaaatattctcaattgtccacctcctatcccgctatctagtccatcctcttcaacttaccaagcacatcaagtgaagaatccagacagtgtcattgcttcaaggaacagtggtagtgggccattaccaaggactcctagcgtcgctgctgcatcattgcacctacagtcgacagcacgggatattcgcaacacatcgagccatctacccagtcgagttgttggtctgcctgcgccacacctcatgggtgcacgaccaccaccaggaatttcagtgcaggctggaggagcgaacgcctacagaactatgcaacagactccaactatggatccactgaggcacacacggatgagcatgaaccaaacagcactggctgctgccggccaaaccaccgctgccgcgtatgtccgaccaacccaagcagacatccaaaaccatctctttcctgtgcagcaaagccaggcaccacgatcgcaacaagtgccacgaacaacaaccccgcctctacagcgggcgccaccgcacctgcaacctcccagtgtaccaccgactgttccaagcacacctcaggctggaccttcgcatggtcttccaccggagctccctgtggatgatagctggcgccccacgggacagatgagagggagtctgacaggcaatgcttacagttctgcaattaggcactatcggggccattctgagcagcagcagggcgagcctcggcctcccaacacttcaggtgcgcgaaggcctcagtaactgccagacattgcggcgttgccctgattatcaagcagggcttgggcagctaatttaccaagagattttaatttattatcatagctaatttggcgctatgatgatctatgttagtgtaggtaggggagcctagtgagtagtgatagtgctctgcttgtctacaacgcactctgatgttaaattagtagtatcaggtgaaccatttgtgtacccaatatggaacgtggattttttatgctaatgttttgcctgtgtaattggaccgattttcatgtgaaattcctgaacgattcccatgaaaatgaacaggtaacttgcat

SEQ ID NO: 205251 - DNA, 4291 bp, Zea Mays
gttcgttttggtaacagtcgctagcgaaaaagcatccgcccacctcccctcgtctctctcgcgctccgccgccgcgcaaaactgtctggtgatgacgaacgccgccggtacggcccctcacccgactccgccgacgccgctccaacaacaacagcatcagccacccaaggaccagcagcagaaggcgctggccttgaacgcattccgcctgaaggggatcggcgaccgcatcaggttccacctgaagggcatgagcgtgcccccagtcgccgagttggcccacctcatctacgcgttcgccagagggattgacttcgcggtctcagctggtgatattcctctgacagccggtgacatacccgagattctgagaaaggtatatgagctgaggaaagaaacaattatacaatcttcgcttatgatactagcgatctcttgcaagaatgcttgctccaataaatggtttcaacctgcagattccagagacattcttagaatggtcaatgagctctctggcaacttctgcacgtccacaggccaggcagctagtgacagcactgtgcttgaaattatatcacaaataatgccaaggtattaccctcggttgaagtttgagcgcctaatcacttctattgaagcaaaggttggctatgatatattaatggctgacttctttattgagaggagcctatctcgagatgaaaagattagactaattgtcgtacaaaaggaaaatttagatgcctcatcatgtgtctcaagtccaccacatgtgagctttttggtcaatgggaagggtgtggacaagaggactaatgtttcaatggaacaaggaccccagttacctactgatatcaccaaaatgctcaaatatggggctaacattatccaaggtgttggatattttaatgctaattatatcatagctgtagcagttgtgaacgatttgacatccttcagtgctccaaaactggatgactatgcacaacctatcactgtttatcctgcagagaggctgcgttgaacccaggacctttggctttggctcagtgggaaggcttctcaccactgaaagttcagtatattttatgctatgcgtccagtttgttgttgttgttgttgttgtcgtcgagtttcttgactgggactgaagtgtgttttaaatgacattttgtaatctctcgattgaaatatccatgtaggttcatttaaatttgtgtctgattcttcatacccactgacattatagttttttatgttattttttgtttttttagaaatggactatcagttttactcgtaattattcaattcaattcttgctacaccttttgagttttttcaccatcgtcaatctgctcttgtctctgtttggccttatgttggaaaatggaaataactgattgctacctccatccccaaaaactttatgttcgtaaatcaaactatcttaagtttgactaaatttatagataaagttgtcaacttatgatacaaatagttatgctatgaaaacatgttcagatctaatgatacttatatttggtaatatatacattaatattctattgtataaaattggtcaaactttagatagtttgacttagaataaaatagaaagagtaaaatgcatcaacggtcctcgaacttggcatactgtgtcaattgggtccccctgggtccccgtacactcttgaaactaggaaaacaggtgttataactttgccagcccattcaaaatcaggtttgctcaaaccgtttgccgacgtggagtgccacgttagagtcacttggatccccgaactttcattagtgcgctccaacgtggctcgctatgtcagcatccggtttgaacaaacccggttttgaatggtgcagacaagttatagcacctgtttttctggttctgagagttcggagacccaattgacacaatatatcaagttcgaggactgctgatgcattttaatcaaacggaaacatcaagcttttggggatagaagtagtaccgaagattgattgtggtgttatgcatgatcatggacatggagcatgtaaagtgaacctgttgtctggaactggattcagtttctctgtaaagtgataggagctgggactcagtatgtaggtggacagttacttgtatagtttccctcttttaaactgactatatatatttttggctgtaaacatgaattcctgtctgtttgtgataacatgcagctttttaaagacttggtttttttttgctctgcacaaaatagacttgtgttttcccctagttcttcccatgggcaaatgaaacctattctgatgtacttgagggaccatcaagagtttccctaaattgtcctataagttttaggcgcataaaaactcctatcaaaggccgtctttgcaaacactatcagtgttttgattatgataattacatggagatgaactcaagaaaaccaaactggcgctgtccatattgtaacacctcctcaagcttcactgacctacgtattgaccaaaagatgatgaagatactagaagagactggagatgatgtcactgatgtccttgtatttgctgatggatcttggaaagttgttccagctcaggatgaaaaatctgatagacatagaggtgacacaattcagcaggctggagatgctgtagaaactggttcaccttctcgagatgtcatagatctgataaatggcaatgatgatggtgatatgcaaatggattgggcatcggctccagaagattcaaagcctgtgttgaatagtcaagatttgtctgtatcagactatcttacagatttccctatgacagctcagacagaagatctgaatcgaggggatggaaataatgggggaagcaacatggcttccacttcacgtcaaaatttgttactacctcctactagtgggctgggctcaagttcattagggaccttggaatctattctacctcaaaatgttctgcaccctgttatcacagatgcagtctctccttctcttgaaacctcttcagcatctggcatgcaacatgtttcacaggaaacacattgtggaactgtacagctgcagccacaaataggtccagtacatgggtccgaagtgagaaggcttcctatacctagaaatcccaggagagagccaataggagtacaggggttgacggttccaccacagaatcctgggtcatcaacaaggttgcagccaaatattctcaattgtccacctcctatcccgctatctagtccatcctcttcaacttaccaagcacatcaagtgaagaatccagacagtgtcattgcttcaaggaacagtggtagtgggccattaccaaggactcctagcgtcgctgctgcatcattgcacctacagtcgacagcacgggatattcgcaacacatcgagccatctacccagtcgagttgttggtctgcctgcgccacacctcatgggtgcacgaccaccaccaggaatttcagtgcaggctggaggagcgaacgcctacagaactatgcaacagactccaactatggatccactgaggcacacacggatgagcatgaaccaaacagcactggctgctgccggccaaaccaccgctgccgcgtatgtccgaccaacccaagcagacatccaaaaccatctctttcctgtgcagcaaagccaggcaccacgatcgcaacaagtgccacgaacaacaaccccgcctctacagcgggcgccaccgcacctgcaacctcccagtgtaccaccgactgttccaagcacacctcaggctggaccttcgcatggtcttccaccggagctccctgtggatgatagctggcgccccacgggacagatgagagggagtctgacaggcaatgcttacagttctgcaattaggcactatcggggccattctgagcagcagcagggcgagcctcggcctcccaacacttcaggtgcgcgaaggcctcagtaactgccagacattgcggcgttgccctgattatcaagcagggcttgggcagctaatttaccaagagattttaatttattatcatagctaatttggcgctatgatgatctatgttagtgtaggtaggggagcctagtgagtagtgatagtgctctgcttgtctacaacgcactctgatgttaaattagtagtatcaggtgaaccatttgtgtacccaatatggaacgtggattttttatgctaatgttttgcctgtgtaattggaccgattttcatgtgaaattcctgaacgattcccatgaaaatgaacaggtaacttgcat

SEQ ID NO: 205252 - DNA, 2988 bp, Zea Mays
gttcgttttggtaacagtcgctagcgaaaaagcatccgcccacctcccctcgtctctctcgcgctccgccgccgcgcaaaactgtctggtgatgacgaacgccgccggtacggcccctcacccgactccgccgacgccgctccaacaacaacagcatcagccacccaaggaccagcagcagaaggcgctggccttgaacgcattccgcctgaaggggatcggcgaccgcatcaggttccacctgaagggcatgagcgtgcccccagtcgccgagttggcccacctcatctacgcgttcgccagagggattgacttcgcggtctcagctggtgatattcctctgacagccggtgacatacccgagattctgagaaaggtatatgagctgaggaaagaaacaattatacaatcttcgcttatgatactagcgatctcttgcaagaatgcttgctccaataaatggtttcaacctgcagattccagagacattcttagaatggtcaatgagctctctggcaacttctgcacgtccacaggccaggcagctagtgacagcactgtgcttgaaattatatcacaaataatgccaaggtattaccctcggttgaagtttgagcgcctaatcacttctattgaagcaaaggttggctatgatatattaatggctgacttctttattgagaggagcctatctcgagatgaaaagattagactaattgtcgtacaaaaggaaaatttagatgcctcatcatgtgtctcaagtccaccacatgtgagctttttggtcaatgggaagggtgtggacaagaggactaatgtttcaatggaacaaggaccccagttacctactgatatcaccaaaatgctcaaatatggggctaacattatccaaggtgttggatattttaatgctaattatatcatagctgtagcagttgtgaacgatttgacatccttcagtgctccaaaactggatgactatgcacaacctatcactgtttatcctgcagattctgatgtacttgagggaccatcaagagtttccctaaattgtcctataaggcgcataaaaactcctatcaaaggccgtctttgcaaacactatcagtgttttgattatgataattacatggagatgaactcaagaaaaccaaactggcgctgtccatattgtaacacctcctcaagcttcactgacctacgtattgaccaaaagatgatgaagatactagaagagactggagatgatgtcactgatgtccttgtatttgctgatggatcttggaaagttgttccagctcaggatgaaaaatctgatagacatagaggtgacacaattcagcaggctggagatgctgtagaaactggttcaccttctcgagatgtcatagatctgataaatggcaatgatgatggtgatatgcaaatggattgggcatcggctccagaagattcaaagcctgtgttgaatagtcaagatttgtctgtatcagactatcttacagatttccctatgacagctcagacagaagatctgaatcgaggggatggaaataatgggggaagcaacatggcttccacttcacgtcaaaatttgttactacctcctactagtgggctgggctcaagttcattagggaccttggaatctattctacctcaaaatgttctgcaccctgttatcacagatgcagtctctccttctcttgaaacctcttcagcatctggcatgcaacatgtttcacaggaaacacattgtggaactgtacagctgcagccacaaataggtccagtacatgggtccgaagtgagaaggcttcctatacctagaaatcccaggagagagccaataggagtacaggggttgacggttccaccacagaatcctgggtcatcaacaaggttgcagccaaatattctcaattgtccacctcctatcccgctatctagtccatcctcttcaacttaccaagcacatcaagtgaagaatccagacagtgtcattgcttcaaggaacagtggtagtgggccattaccaaggactcctagcgtcgctgctgcatcattgcacctacagtcgacagcacgggatattcgcaacacatcgagccatctacccagtcgagttgttggtctgcctgcgccacacctcatgggtgcacgaccaccaccaggaatttcagtgcaggctggaggagcgaacgcctacagaactatgcaacagactccaactatggatccactgaggcacacacggatgagcatgaaccaaacagcactggctgctgccggccaaaccaccgctgccgcgtatgtccgaccaacccaagcagacatccaaaaccatctctttcctgtgcagcaaagccaggcaccacgatcgcaacaagtgccacgaacaacaaccccgcctctacagcgggcgccaccgcacctgcaacctcccagtgtaccaccgactgttccaagcacacctcaggctggaccttcgcatggtcttccaccggagctccctgtggatgatagctggcgccccacgggacagatgagagggagtctgacaggcaatgcttacagttctgcaattaggcactatcggggccattctgagcagcagcagggcgagcctcggcctcccaacacttcaggtgcgcgaaggcctcagtaactgccagacattgcggcgttgccctgattatcaagcagggcttgggcagctaatttaccaagagattttaatttattatcatagctaatttggcgctatgatgatctatgttagtgtaggtaggggagcctagtgagtagtgatagtgctctgcttgtctacaacgcactctgatgttaaattagtagtatcaggtgaaccatttgtgtacccaatatggaacgtggattttttatgctaatgttttgcctgtgtaattggaccgattttcatgtgaaattcctgaacgattcccatgaaaatgaacaggtaacttgcat

SEQ ID NO: 205253 - DNA, 1522 bp, Zea Mays
gcaaaatgttacctccgagtatagatgtgggtataaagttttgtcaattataaaattgtcacaaaaaatattcatttcatctgtgttctactcgacacgctatcattcctaaatgcaacacaatggtagcaaataaccacaatcctactaaacataccttgcatgtccaaaacaaccaaatactaacttgttgcatagtttatgctagtatgtactatatattgtatgaggcaccatgcatgctaggactagcacaataaactagtcacaacttagcctacttctatgcaatcccctcttagttaaggataaacatggtattttaaaaaaatgaaaagaaaaataagcaaggagcatgcaaccacaagatacacaacacccaccacaagtctaaatttagcattacatccatggttcctagccacaacaattctctaccacctccaaacacaacggccatcccccatccttcaccactcccgcccatcccttcgctccaccacctctgagactcctccttcacaggccggcgtcgtcggtggtcggagagatggggcaacaacgcacgttggtgtatagcttcgtggcgcgaggcaccatcgtcctagcggaccatgctgaggtctccggcaactttgcctccgttgctgcacaatgcctacagaaactccccgccaacaacaatcgcttcaactacaattgtgatgggcacacattcaactaccacatttatgatggattcacgtactgcgttgttgctaccgagtcagctggtcgccagcttccagttggatttattgagagagtcaaagaagatttttccaagaaatatagcggaggtaaagccaaaaatgctagtgccaatggcctcaagcgagaatacgggcctaaactcaaggagcacatgaggtattgtgaccagcaccctgaggagatcgacaaacttgcaaaagtgaaggctcaagtcacagaggtcaaaggagtgatgatgcaaaacatcgagaaggtattagatcgtggcgaaaaaatcgagctccttgtggataaaacggaggatctccgatcacaggcacaagatttcaggcaacagggaacaaagatacgacggaagatgtggtgggaaaacatgaagatgaagctcatcgttttcggcatcgtggttgcgctgatcctcctcattgtcttgacagtttgcaaggacttgaattgctgataagaagcagacacacaggaaagaaaagaagaacgtggaaaagggaaggaaaaaaaaacatagaaggtgcattattggtatcacaccgcacggccaaaatccatctcgtctttgtgatgttgacattgatcacattattgttcttagtcatgtctagatcgttgggctcaaagctataacagggctctctcatattttaaataattgtagtggtggtttggataaatatcccgccgtttctgtattagtagaagagattgacggcaaaacgaacaaatttctcctgtaatccatctcaatctgcttccg

SEQ ID NO: 205254 - DNA, 813 bp, Zea Mays
ctattgcctatgcaagttttacttgatgacacaacgtactgcgttgttgctaccgagtcagctggtcgccagcttccagttggatttattgagagagtcaaagaagatttttccaagaaatatagcggaggtaaagccaaaaatgctagtgccaatggcctcaagcgagaatacgggcctaaactcaaggagcacatgaggtattgtgaccagcaccctgaggagatcgacaaacttgcaaaagtgaaggctcaagtcacagaggtcaaaggagtgatgatgcaaaacatcgagaaggtattagatcgtggcgaaaaaatcgagctccttgtggataaaacggaggatctccgatcacaggcacaagatttcaggcaacagggaacaaagatacgacggaagatgtggtgggaaaacatgaagatgaagctcatcgttttcggcatcgtggttgcgctgatcctcctcattgtcttgacagtttgcaaggacttgaattgctgataagaagcagacacacaggaaagaaaagaagaacgtggaaaagggaaggaaaaaaaaacatagaaggtgcattattggtatcacaccgcacggccaaaatccatctcgtctttgtgatgttgacattgatcacattattgttcttagtcatgtctagatcgttgggctcaaagctataacagggctctctcatattttaaataattgtagtggtggtttggataaatatcccgccgtttctgtattagtagaagagattgacggcaaaacgaacaaatttctcctgtaatccatctcaatctgcttccg

SEQ ID NO: 205255 - DNA, 915 bp, Zea Mays
aaaaaaacgtagttttctcagaatccctgtcttgtttagcaaactgatgctcagtggggtgtttttagtttcgaatgatgctcaatactttccttatgggctgtgagcgaccggaagtatggcggccttagcttctcgactgaagatactggtcaggttcttgctatggcaggcgctagtcttctagtgtaccagcttgtcatttatcgctgggtccataggattcttgggacagtcaactcagcacgtattgcatctgctgtgtccatacttgttcttgcaacttatccctttatgacatacctgtcgggagtgaaactttccttggctctttgttctgcagccatgatgagaagtgctcttgcgatcactgtcaccacaggaatttcacttctacagaataatgctgtgtgccaagaacaaagaggcaccgcaaatggtatatcgacaactgcaatgtcattcttcaagtcaattgctccagtaggtgcaggggctctattctcatgggcacaaaaacgtcaagatgttgctttcctgccaggtgatcaagtggtgttcatggtgctgaatttggtgcagcttctcgggctgatatccacctttgagccctttctagtgttacctgcactaccagagtagtagtagtgttaaggctacaggacattatgaaaataaatgtaccttggcacatagttacagttgatcgagtgcaagacagaaggaacatgattgtagccacttgttacactactaatgatgtctgattagcccaagattaaaaaagaagaatgttttattaattagcaaacttgatctattgtaatatcactgtgacacaaaacccatatttctaatcatatggtcgtggatgctcaaaatgtgcaataaagttgtgatattcacatgtctagc

SEQ ID NO: 205256 - DNA, 1005 bp, Zea Mays
ttcaagatttcacctcctacgtgccgaatggctcctgtgtctcacaacaatgattccgattcgagtgatagtgacgacaacacaatcatactggccactcttcttaccctatgcatcgaagctaccaggcgtaggcgcaggcagtcttctatccctcgccgcgtgatcgctagggatcattttgctagggagaaccttatccgccatcactacttcggccctaaccccgtgtatccagctcacatgtttcgccgaaggtttcgcatgagtcggccattgttcctccgtattttgcaaggcctccagcagcaggatagttacttcactcaacaggtcgacgctacaggcctcgccggtcttggaccacttcaaaaaccattcggcacccctgggaggaaaagaagatctatttcacgcagatgcaggaaagtcaccggaaagatatcgagcgcgcattcagtgtgcttcaagcacggtgggcagtgctacgtggtcttgcttacagacgggatcgtaaccgtctaaccgagatcatcactgcttgcataataatgcacaacatgatcattgaagatgaaggggagtttgctgccaacaccgactttggagacaatgcttctgccactgcacattgcgaactcatacaagagggaaggtcggattgggtcatcgatcactttgatctacgtcgccaggaacgattttgcaatcttcaaaatgatcttgtcgagcatttgtggaccaaacgtgggagtatgtgatgaaacttgaaccttagtcctttaaatgatgtggctccgtagtgtatgttccatgtgtgtggtggtcattgtgttatgtttcatgtgtgtggtagtgggtgtgctatgttccatgcgtgtcttagtttgagttaggggttctgtggtcacgggcaatgagtacgaattcatttactcttagtggtcaaatgtgtactcttcagtatgaaatcaaatgtggcaccatctatgcaagagaaatgag

SEQ ID NO: 205257 - DNA, 4883 bp, Zea Mays
ctccgtcccatccccggcagtcccctccatccaagtgatttcagtgcttttgtaccgctggcagatcttgaggaatttactgagaagacaaagaatgatctgttagaccgagctccaaatatgaaagttaaaagaaaatatgttcaagtatttaatgatgctgtggagcagatctgcaaggcctacaatgagttgccaaaaacatctgaagctgcaaatggagcattgcctgatcagagtgaaaagccttcagagcaccttgtgaggtcacaggatgttggtgagattccaggattgggacaaatggaaggtgatagccctactgattactcgcatacttcagcgaaaaggccagggaccgaggaggatgtcaaagatgatggtcatgaaatatgtgatcattctttagcagtttatcaaaagaaaacatctttactagaggatcctaagcatcccatgacaaagaagtctgctgcatccaagtcttctcttgacatttacatggaacaggagcattcaccaacatctgtccgtgctgaaagggaggctgaagaggtgaaaattgaaaaagagagctgtcccctagatggttttattttggaacctaacttggaggtagtttgtgcccttgaagtgccaaagaaatctaaatccaacaagccgttgaggaatgctgaaaggaaggaaaacaaacgtgctggtattggtagccctattgaaaggattgttgctgaggctgcatctgatgttgtattaaacatgagtgctgacaaagagagcagagaatttaagaagtcaaaaatcatgacaaaacaatcactaactactgattcagagaaaatggattataataaaattgtgcatggcgggcctgacgagcaattgactggaaaatcatctgcagggttttcttccaataagaaatcgctgccagatagtgggcagcacaagatggacagtagtgctgatacacgtccgggaaaaaagccaaggcttatggacagggctggtgaaacagataagacagttgacaagagtgagatgaagtcaaacattgattatggaaagcattatgctgtgaaacatgagcggcctacctctatggaaacgtgtaaaaacacgattcttaagaccagtaccagcgatgatagggcactgagatcaggtggtgttgtatcacccatatcaaggcttcattctgaggtcatggaaccagcatgtggttctgtgacactgtcaactgttgctgattctgttaaaaagggttccagcatgaaggaggatgcctcacgtgttgataggcaattggtgaaacctaagagaagagcatgtcgttttgatgaagatgaggatgaaggacagcgaacaccacttcatagaacttctgctaaatctctctctacacatatagtcccaactgagaaagcaggtattcggggaaaattttcttctcatgttggcaatgtttttggaaaaaagttaggccctgcaagagaagagaaatcaaggagtgttaggatgtcacctgtgaagcatgagccaattttttcttcaccgagtcaggataaagtgcatgctagacaccaggtagtcgagaaaagactgatcacagggttggttgagactcctgctgtcattggtaacaaaatgagcctggttgatggcaaatcctctgctcaagtaaaaatgccggcatcctctgaggtgaagaaacttcgtagtagttcttctaaaccatcacacctaacatctgggaactcccattcccgaaactatcctgccccagaaaagatccccttgctgccccaaccagaagaaacaaaggctaaatctaagctagctacgtctgttgagcataaggtgggcaccactttgtcaactgaacagagtgggaagcgggatcacttgaaagaggaaagatccagttatgttgataaagcagtttcttctgaacctaaccctggctcggccaagtcaataaaacatcttattgcagctgcccaagcaaggaggaaccttatggcttctgttcatgcaaaatttgatgggtcttcgactgataatgctgatattacgtccacaccatatggtttgccgggactaagccctagtcctgttttccgcattccatccccacccagaattgcttttcccgggagtcctggtcaacgtattctgaaaagcccaatagagtttgacaatggtcatggaaagagtcccaaatctaggcaggccagcggttcacctagtggtggtactgatgcagctattgctcgtgatgctttggagggaatgatagagactttatcgaggacaaaggatagtataggacgtgcaacacgccatgcaattgagtgctctaaatatggcattgctggagagattgtcgagcttctcatacagaaattgcagagcgagcctaattttcatcgcagaattgacctcctttttcttgtagattccataacacagtgttctcattctcagagaggagttgccagggcttcatatgttcccactgttcaagcggcattgcctcgtcttctcggtgctgctgctccacctggagctggtgctcgtgaaaaccggcgccagtgccttaaagttttaagattgtggcttgagagaaagattatgccagaagacatactccggaagtacatgggcgacattgaggtgccaaatgatgatactagcactactttaatgttgaagcgaccatcccgtgctgaacgttctgtagacgatcctattagggagatggatgacatgcttgttgatgaatatggaagcaatgcaacttttgagctttctggaattttatcatcaaaagtgtttgaagatgatgaagacttccctaaaaataatgggtcatcaccatttgtttcacaggcacggcctgttgaaaatgatgtcatacgaaaaactgaagatactattgctccagtatatgttgaggaacacattattatagtagagaatgtaactactgatgctgctatggaagatgctttagagttaccaggcaacaaacaacagactgatggagctgtccttattgaacacgactctattcaagatccaggttcagagcaggcaattgaccagaatgactttccctctctacccgatggccctccaccgcttccgtcagattcaccaccacctccacctcctttgcctccttcaccaccacctgttacaccgccgcctccgccaccacctccactttctccagcttcaccacctccgccaccacctcccccactgccatctggaccacctcctcagcctgctccaccacctctggcaacccaggtcacacctcttccttctattcctccgcctgttccttcatctccaccatcattgagttatcagcctccagctcctgagtactttgtgacggccaatggtgatcaattaacccagatgacaggaaatatattgattcaagctattggaaatgcaacaaccttcattcctagtggaccagttaatggacaagctgcggttaattttgttacttcgatgcaggcagaatatggaaacaataacatatttatggcaccacaagcttctaatggtaattaccagtttcggcccactggtgtaccttttcagcaagggaatttcagtgcctttccatctgcacaaacacatccagttcaacctcactctcacatggcacacatgaatcccatgggccaacaagctgtaccacccacgctcaatccttatgctgtgcagtcatttccaaacagtcagagccattatccatccgaggaacattggcggatggcatctggtaacttcagcccagatggccagcataattggctagccggtggcggagcattaccttgctcagaagggccatatgtgcaggatggatattcaaggtcaaacattgacagatcttcaattaatcctatgaaccatcaacatactgttctgaatcatttgccgtatggagcaccactaccaggccatgttccgcagatgctaccagccaggtctgatgtccacactcttaattgctggaggccctcttgatagagttgtaaactgaacttctttatggttttaacgtggaaagctcagaacactggaggcaatttgaattgagtgcaacaattcatggctttgttagtctgtgagatgcacttgcctcattgcctgggtgtaacgatgagatctgccatagtatatggaatggacattttacaatgtaactagtcttggcaacagcatccagcagactaatctctcttagtgtctgaagaacgatagccgaacgatgacagggtttgatttgttgatgcgtcgttttggttctcacccgagccagtttttgaagtgaaagcaataataatgttgttggtgcaccgctgaggtgtttaggttttactgctggtttggtgttgggtgatggttcctatcatctcactaaacaagattgttgactgtacatctgggagggaggtgatctgggatattgaggtgggtatcatcatgtgacggcgaggcacttggtgccaaatcgtactgaattttgttatctgggtctcagtctgctgcttttgtcccgcccgtattcgtttattcccgcaggggcaggggcaggaccctgttggctggccaggccacatatcctttttagtcccaagcaagttggagagccacacagtatatattatataaataatagtgagacatatttttttatgagattacttaaaagcaaatcatctctcgtcgtcgtgatacatggtttgttttcctcttttcgtcgtcctactcctgccttaccacaagcaggcacggaaggctgcacgggcaagcattttgcttataaagttcagggtgctgcagatgttggc

SEQ ID NO: 205258 - DNA, 5307 bp, Zea Mays
gttgagaggagggagacgcgaggaggaagaagcaggcaaacaaagcagaagctccgtcccatccccggcagtcccctccatccaagtgatttcaggtatcagctaccgagaaacggagaaggtgaccgcacctcacgcaattcgcccccgccccgccgtcctttccctcctctagggttgtcttgtgggtgcctctgcttcccaccctaggggcaggtccagggccggtccttcttctcgccccgcccccgctgctctcttctctgctgctagagttaggttagtgttcggcgctggggggaggggcgtcctcctccctcgccgtcgccgccaatgcctcccggcggtaggcgcggcgccaagcagcggcccaactggaccagggaaccccagctaggtgacctcgtcctcgccaagatcaaggggtacccgcgttggccagctaagatcagcaggcccgaggaatttaatcatgagccaacgccaaaaaagttctttgtctacttctatggcaccgatgagattgcttttgtaccgctggcagatcttgaggaatttactgagaagacaaagaatgatctgttagaccgagctccaaatatgaaagttaaaagaaaatatgttcaagtatttaatgatgctgtggagcagatctgcaaggcctacaatgagttgccaaaaacatctgaagctgcaaatggagcattgcctgatcagagtgaaaagccttcagagcaccttgtgaggtcacaggatgttggtgagattccaggattgggacaaatggaaggtgatagccctactgattactcgcatacttcagcgaaaaggccagggaccgaggaggatgtcaaagatgatggtcatgaaatatgtgatcattctttagcagtttatcaaaagaaaacatctttactagaggatcctaagcatcccatgacaaagaagtctgctgcatccaagtcttctcttgacatttacatggaacaggagcattcaccaacatctgtccgtgctgaaagggaggctgaagaggtgaaaattgaaaaagagagctgtcccctagatggttttattttggaacctaacttggaggtagtttgtgcccttgaagtgccaaagaaatctaaatccaacaagccgttgaggaatgctgaaaggaaggaaaacaaacgtgctggtattggtagccctattgaaaggattgttgctgaggctgcatctgatgttgtattaaacatgagtgctgacaaagagagcagagaatttaagaagtcaaaaatcatgacaaaacaatcactaactactgattcagagaaaatggattataataaaattgtgcatggcgggcctgacgagcaattgactggaaaatcatctgcagggttttcttccaataagaaatcgctgccagatagtgggcagcacaagatggacagtagtgctgatacacgtccgggaaaaaagccaaggcttatggacagggctggtgaaacagataagacagttgacaagagtgagatgaagtcaaacattgattatggaaagcattatgctgtgaaacatgagcggcctacctctatggaaacgtgtaaaaacacgattcttaagaccagtaccagcgatgatagggcactgagatcaggtggtgttgtatcacccatatcaaggcttcattctgaggtcatggaaccagcatgtggttctgtgacactgtcaactgttgctgattctgttaaaaagggttccagcatgaaggaggatgcctcacgtgttgataggcaattggtgaaacctaagagaagagcatgtcgttttgatgaagatgaggatgaaggacagcgaacaccacttcatagaacttctgctaaatctctctctacacatatagtcccaactgagaaagcaggtattcggggaaaattttcttctcatgttggcaatgtttttggaaaaaagttaggccctgcaagagaagagaaatcaaggagtgttaggatgtcacctgtgaagcatgagccaattttttcttcaccgagtcaggataaagtgcatgctagacaccaggtagtcgagaaaagactgatcacagggttggttgagactcctgctgtcattggtaacaaaatgagcctggttgatggcaaatcctctgctcaagtaaaaatgccggcatcctctgaggtgaagaaacttcgtagtagttcttctaaaccatcacacctaacatctgggaactcccattcccgaaactatcctgccccagaaaagatccccttgctgccccaaccagaagaaacaaaggctaaatctaagctagctacgtctgttgagcataaggtgggcaccactttgtcaactgaacagagtgggaagcgggatcacttgaaagaggaaagatccagttatgttgataaagcagtttcttctgaacctaaccctggctcggccaagtcaataaaacatcttattgcagctgcccaagcaaggaggaaccttatggcttctgttcatgcaaaatttgatgggtcttcgactgataatgctgatattacgtccacaccatatggtttgccgggactaagccctagtcctgttttccgcattccatccccacccagaattgcttttcccgggagtcctggtcaacgtattctgaaaagcccaatagagtttgacaatggtcatggaaagagtcccaaatctaggcaggccagcggttcacctagtggtggtactgatgcagctattgctcgtgatgctttggagggaatgatagagactttatcgaggacaaaggatagtataggacgtgcaacacgccatgcaattgagtgctctaaatatggcattgctggagagattgtcgagcttctcatacagaaattgcagagcgagcctaattttcatcgcagaattgacctcctttttcttgtagattccataacacagtgttctcattctcagagagggcttcatatgttcccactgttcaagcggcattgcctcgtcttctcggtgctgctgctccacctggagctggtgctcgtgaaaaccggcgccagtgccttaaagttttaagattgtggcttgagagaaagattatgccagaagacatactccggaagtacatgggcgacattgaggtgccaaatgatgatactagcactactttaatgttgaagcgaccatcccgtgctgaacgttctgtagacgatcctattagggagatggatgacatgcttgttgatgaatatggaagcaatgcaacttttgagctttctggaattttatcatcaaaagtgtttgaagatgatgaagacttccctaaaaataatgggtcatcaccatttgtttcacaggcacggcctgttgaaaatgatgtcatacgaaaaactgaagatactattgctccagtatatgttgaggaacacattattatagtagagaatgtaactactgatgctgctatggaagatgctttagagttaccaggcaacaaacaacagactgatggagctgtccttattgaacacgactctattcaagatccaggttcagagcaggcaattgaccagaatgactttccctctctacccgatggccctccaccgcttccgtcagattcaccaccacctccacctcctttgcctccttcaccaccacctgttacaccgccgcctccgccaccacctccactttctccagcttcaccacctccgccaccacctcccccactgccatctggaccacctcctcagcctgctccaccacctctggcaacccaggtcacacctcttccttctattcctccgcctgttccttcatctccaccatcattgagttatcagcctccagctcctgagtactttgtgacggccaatggtgatcaattaacccagatgacaggaaatatattgattcaagctattggaaatgcaacaaccttcattcctagtggaccagttaatggacaagctgcggttaattttgttacttcgatgcaggcagaatatggaaacaataacatatttatggcaccacaagcttctaatggtaattaccagtttcggcccactggtgtaccttttcagcaagggaatttcagtgcctttccatctgcacaaacacatccagttcaacctcactctcacatggcacacatgaatcccatgggccaacaagctgtaccacccacgctcaatccttatgctgtgcagtcatttccaaacagtcagagccattatccatccgaggaacattggcggatggcatctggtaacttcagcccagatggccagcataattggctagccggtggcggagcattaccttgctcagaagggccatatgtgcaggatggatattcaaggtcaaacattgacagatcttcaattaatcctatgaaccatcaacatactgttctgaatcatttgccgtatggagcaccactaccaggccatgttccgcagatgctaccagccaggtctgatgtccacactcttaattgctggaggccctcttgatagagttgtaaactgaacttctttatggttttaacgtggaaagctcagaacactggaggcaatttgaattgagtgcaacaattcatggctttgttagtctgtgagatgcacttgcctcattgcctgggtgtaacgatgagatctgccatagtatatggaatggacattttacaatgtctgaagaacgatagccgaacgatgacagggtttgatttgttgatgcgtcgttttggttctcacccgagccagtttttgaagtgaaagcaataataatgttgttggtgcaccgctgaggtgtttaggttttactgctggtttggtgttgggtgatggttcctatcatctcactaaacaagattgttgactgtacatctgggagggaggtgatctgggatattgaggtgggtatcatcatgtgacggcgaggcacttggtgccaaatcgtactgaattttgttatctgggtctcagtctgctgcttttgtcccgcccgtattcgtttattcccgcaggggcaggggcaggaccctgttggctggccaggccacatatcctttttagtcccaagcaagttggagagccacacagtatatattatataaataatagtgagacatatttttttatgagattacttaaaagcaaatcatctctcgtcgtcgtgatacatggtttgttttcctcttttcgtcgtcctactcctgccttaccacaagcaggcacggaaggctgcacgggcaagcattttgcttataaagttcagggtgctgcagatgttggc

SEQ ID NO: 205259 - DNA, 5256 bp, Zea Mays
cgccgcgctgttgagaggagggagacgcgaggaggaagaagcaggcaaacaaagcagaagctccgtcccatccccggcagtcccctccatccaagtgatttcaggtatcagctaccgagaaacggagaaggtgaccgcacctcacgcaattcgcccccgccccgccgtcctttccctcctctagggttgtcttgtgggtgcctctgcttcccaccctaggggcaggtccagggccggtccttcttctcgccccgcccccgctgctctcttctctgctgctagagttaggttagtgttcggcgctggggggaggggcgtcctcctccctcgccgtcgccgccaatgcctcccggcggtaggcgcggcgccaagcagcggcccaactggaccagggaaccccagctaggtgacctcgtcctcgccaagatcaaggggtacccgcgttggccagctaagatcagcaggcccgaggaatttaatcatgagccaacgccaaaaaagttctttgtctacttctatggcaccgatgagattgcttttgtaccgctggcagatcttgaggaatttactgagaagacaaagaatgatctgttagaccgagctccaaatatgaaagttaaaagaaaatatgttcaagtatttaatgatgctgtggagcagatctgcaaggcctacaatgagttgccaaaaacatctgaagctgcaaatggagcattgcctgatcagagtgaaaagccttcagagcaccttgtgaggtcacaggatgttggtgagattccaggattgggacaaatggaaggtgatagccctactgattactcgcatacttcagcgaaaaggccagggaccgaggaggatgtcaaagatgatggtcatgaaataggagcattcaccaacatctgtccgtgctgaaagggaggctgaagaggtgaaaattgaaaaagagagctgtcccctagatggttttattttggaacctaacttggaggtagtttgtgcccttgaagtgccaaagaaatctaaatccaacaagccgttgaggaatgctgaaaggaaggaaaacaaacgtgctggtattggtagccctattgaaaggattgttgctgaggctgcatctgatgttgtattaaacatgagtgctgacaaagagagcagagaatttaagaagtcaaaaatcatgacaaaacaatcactaactactgattcagagaaaatggattataataaaattgtgcatggcgggcctgacgagcaattgactggaaaatcatctgcagggttttcttccaataagaaatcgctgccagatagtgggcagcacaagatggacagtagtgctgatacacgtccgggaaaaaagccaaggcttatggacagggctggtgaaacagataagacagttgacaagagtgagatgaagtcaaacattgattatggaaagcattatgctgtgaaacatgagcggcctacctctatggaaacgtgtaaaaacacgattcttaagaccagtaccagcgatgatagggcactgagatcaggtggtgttgtatcacccatatcaaggcttcattctgaggtcatggaaccagcatgtggttctgtgacactgtcaactgttgctgattctgttaaaaagggttccagcatgaaggaggatgcctcacgtgttgataggcaattggtgaaacctaagagaagagcatgtcgttttgatgaagatgaggatgaaggacagcgaacaccacttcatagaacttctgctaaatctctctctacacatatagtcccaactgagaaagcaggtattcggggaaaattttcttctcatgttggcaatgtttttggaaaaaagttaggccctgcaagagaagagaaatcaaggagtgttaggatgtcacctgtgaagcatgagccaattttttcttcaccgagtcaggataaagtgcatgctagacaccaggtagtcgagaaaagactgatcacagggttggttgagactcctgctgtcattggtaacaaaatgagcctggttgatggcaaatcctctgctcaagtaaaaatgccggcatcctctgaggtgaagaaacttcgtagtagttcttctaaaccatcacacctaacatctgggaactcccattcccgaaactatcctgccccagaaaagatccccttgctgccccaaccagaagaaacaaaggctaaatctaagctagctacgtctgttgagcataaggtgggcaccactttgtcaactgaacagagtgggaagcgggatcacttgaaagaggaaagatccagttatgttgataaagcagtttcttctgaacctaaccctggctcggccaagtcaataaaacatcttattgcagctgcccaagcaaggaggaaccttatggcttctgttcatgcaaaatttgatgggtcttcgactgataatgctgatattacgtccacaccatatggtttgccgggactaagccctagtcctgttttccgcattccatccccacccagaattgcttttcccgggagtcctggtcaacgtattctgaaaagcccaatagagtttgacaatggtcatggaaagagtcccaaatctaggcaggccagcggttcacctagtggtggtactgatgcagctattgctcgtgatgctttggagggaatgatagagactttatcgaggacaaaggatagtataggacgtgcaacacgccatgcaattgagtgctctaaatatggcattgctggagagattgtcgagcttctcatacagaaattgcagagcgagcctaattttcatcgcagaattgacctcctttttcttgtagattccataacacagtgttctcattctcagagaggagttgccagggcttcatatgttcccactgttcaagcggcattgcctcgtcttctcggtgctgctgctccacctggagctggtgctcgtgaaaaccggcgccagtgccttaaagttttaagattgtggcttgagagaaagattatgccagaagacatactccggaagtacatgggcgacattgaggtgccaaatgatgatactagcactactttaatgttgaagcgaccatcccgtgctgaacgttctgtagacgatcctattagggagatggatgacatgcttgttgatgaatatggaagcaatgcaacttttgagctttctggaattttatcatcaaaagtgtttgaagatgatgaagacttccctaaaaataatgggtcatcaccatttgtttcacaggcacggcctgttgaaaatgatgtcatacgaaaaactgaagatactattgctccagtatatgttgaggaacacattattatagtagagaatgtaactactgatgctgctatggaagatgctttagagttaccaggcaacaaacaacagactgatggagctgtccttattgaacacgactctattcaagatccaggttcagagcaggcaattgaccagaatgactttccctctctacccgatggccctccaccgcttccgtcagattcaccaccacctccacctcctttgcctccttcaccaccacctgttacaccgccgcctccgccaccacctccactttctccagcttcaccacctccgccaccacctcccccactgccatctggaccacctcctcagcctgctccaccacctctggcaacccaggtcacacctcttccttctattcctccgcctgttccttcatctccaccatcattgagttatcagcctccagctcctgagtactttgtgacggccaatggtgatcaattaacccagatgacaggaaatatattgattcaagctattggaaatgcaacaaccttcattcctagtggaccagttaatggacaagctgcggttaattttgttacttcgatgcaggcagaatatggaaacaataacatatttatggcaccacaagcttctaatggtaattaccagtttcggcccactggtgtaccttttcagcaagggaatttcagtgcctttccatctgcacaaacacatccagttcaacctcactctcacatggcacacatgaatcccatgggccaacaagctgtaccacccacgctcaatccttatgctgtgcagtcatttccaaacagtcagagccattatccatccgaggaacattggcggatggcatctggtaacttcagcccagatggccagcataattggctagccggtggcggagcattaccttgctcagaagggccatatgtgcaggatggatattcaaggtcaaacattgacagatcttcaattaatcctatgaaccatcaacatactgttctgaatcatttgccgtatggagcaccactaccaggccatgttccgcagatgctaccagccaggtctgatgtccacactcttaattgctggaggccctcttgatagagttgtaaactgaacttctttatggttttaacgtggaaagctcagaacactggaggcaatttgaattgagtgcaacaattcatggctttgttagtctgtgagatgcacttgcctcattgcctgggtgtaacgatgagatctgccatagtatatggaatggacattttacaatgtaactagtcttggcaacagcatccagcagactaatctctcttagtgtctgaagaacgatagccgaacgatgacagggtttgatttgttgatgcgtcgttttggttctcacccgagccagtttttgaagtgaaagcaataataatgttgttggtgcaccgctgaggtgtttaggttttactgctggtttggtgttgggtgatggttcctatcatctcactaaacaagattgttgactgtacatctgggagggaggtgatctgggatattgaggtgggtatcatcatgtgacggcgaggcacttggtgccaaatcgtactgaattttgttatctgggtctcagtctgctgcttttgtcccgcccgtattcgtttattcccgcaggggcaggggcaggaccctgttggctggccaggccacatatcctttttagtcccaagcaagttggagagccacacagtatatattatataaataatagtgagacatatttttttatgagattacttaaaagcaaatcatctctcgtcgtcgtgatacatggtttgttttcctcttttcgtcgtcctactcctgccttaccacaagcaggcacggaaggctgcacgggcaagcattttgcttataaagttcagggtgctgcagatgttggc

SEQ ID NO: 205260 - DNA, 1316 bp, Zea Mays
ctgcacggcgaacgcgagtctcctaaacgataccgggcgggcaggcacacgagcgcgagcacgcacgagttcgcgagtccccctgacccccacgtgcgcgtcgttggaaccaaggattggattagcctcgccgacgacgaggagagaagagctggtggctggcgaggggctcgcggggatggggatctcgaggcccctggcgctccttctggcgctgctgatcgccgtcgccggcgcgaccgccgaggagcccgtagtggcggcggactcggtggccggcgcggtggaggccgcggcggcgctcagggtggaggaggctgcggaggccgcggcgctcagggccgagctggagcagctccgggcgaagatctccgccttagagtcagacatagcagtgcgatctctcgaactgaagaataaggacgatgtcatcgtgaacctagagaaagccattgcggagaagtcaaaggctattacctctatgcagggcgagattgcttctctccaggcaaaaggatctctagctgccgaggagcaggctaacaaggccaatgccaaggctgttgaacttgagaagcagattgacaagctcaaaaaggatattcaagcacaaagtagtcagaaagcagcactagaatctagggccaacgatgcagagaacaaggtggaaaagttgaatgaaaagcttaatacagtaagcgcataaaccttccttgtctatggaatattgagtgacttttttaaagaaaaaaatcagtggtcaacttcttagtttcgtgtgctactgtaagtgtatatgccatctgcttttccctttctagttggctatatacaagcctgcaacaaattcttatgacactagcagatcaaactagatatctgtactagagtctaaagtccattggaattttaaattctattgaaggcatttggtgaagaaccatccaaccaaatggacattttagatgttggattacactatacttgtattttgtcgttgctagatgcaaaaggaaagtgatgagcaaaaacgcaaaatcaagaagacagaacgtgctcttaaagtcgctgaggtttgcaataagtttgttttactattaatgcacttgtgtcctggttgttgtgtggtatatatactattacatatttgttctttcgcattgtaggaggaattgatgaggttgcagttagaagcaactgctaaatcaaaacagctgactgaggttcatggagcatggttaccaccttggttagcgacacactatgctcgttacatgaaatttccatgctcatgctctctcatcgttatattcatc

SEQ ID NO: 205261 - DNA, 1692 bp, Zea Mays
ccggtcaggagcagagcacccgaccgcctttcctcccccgcctggccgcctgccaccgcgcgccagatcccgatctcgctgcgatccatggcgtcgtcgccgcagccgccgccgccgttcgccgcgcaaaaccctaccgcgcagggctcgggccaggggccgccaggctccggggtgggggctctccccggggcgttcgccaacctccagatctcccgcggcgcggccccgccgcccggcgccccgcgggggctcacgccgcagcaggcaccgcccaccttagccgcgcgtccgggccccccaccgtccgctgcccgtcccgccttccctggcagcccgcccgcaccgccattcgtgcgggcgccgacaccgtcaacttccgcctcgccgccctttggcggacagcctggggtaatgtcccagccgccgccaccgttcggagggcctccaggtgcgtcgtctcagccgccgccgccgttcggtgtcccccccggggtggtgtcccaggccccttccctgtttggaggccctcctgcgacggcatcgcaggcgtcttcgccttttgttggtcactctgttgctgcgtctcaggcggcaccattcggtgccccccctgttgcgggttcgcatcctccacccttcggtgggcctcctggagcggggcctcagccagcaccgccattgcggcagacattcgctggccagcctgggccaatggccgcagcggcagcttggacgcagccacctccacctagctttggagccccgcaacagcctccaccaccattcggttcgcggccagctgggcagccgctctttgctacacaatcagcgcctgcggcacaacaactgccattcatggggccacccagggtaaatgccccggcgtttggacctccgtcttggcaaactcagggagctgggtctggtgcaatgcagccacctttgagaatgccaggcattcctggtagcatgcagccaaacacactaggaccccctggcaccccgactataccttattctccacatgctggaacccaggtatcaaccccgtccaaaattgatcctaatcaaattccacgtcccatgcgtgaatcatcagtcatcatttatgagacccgtcaaggtggccaagcaaccattcccccggctgcatctagtgaatttattgtgaaggacactgggaactgtagcccccgtctaatgcgctgcactgtgaatcaaataccatgtactggggatctcttgactacttcgggcatgcctttagctctgatggttcaacctttttctcttcctcacccatctgaggaacatattcagcttgtggacttcggagagatgggacccattcggtgttctcgttgcaaagcgtacataaaccctttcatgaaatttgttgaccaagggaggcatttcatctgtaacttatgtggattcagaaatgatactcctagagactacatgtgcaacttagggcctgatggtaggcgacgtgatgctgatgacaggcctgaattgtctagaggaacagttgaatttgttgctacgaaggaatttctggttcgtgatccaatgcctgctgtatacttcttccttattgatgtctctatgaatgctatacaaactggtgcaactgctgcagcttgcagtgctatttctcaggctatttcagatctgccgcagacgtcg

SEQ ID NO: 205262 - DNA, 1893 bp, Zea Mays
agacggcctgcacggcaggccagaccgccagaccggtcaggagcagagcacccgaccgcctttcctcccccgcctggccgcctgccaccgcgcgccagatcccgatctcgctgcgatccatggcgtcgtcgccgcagccgccgccgccgttcgccgcgcaaaaccctaccgcgcagggctcgggccaggggccgccaggctccggggtgggggctctccccggggcgttcgccaacctccagatctcccgcggcgcggccccgccgcccggcgccccgcgggggctcacgccgcagcaggcaccgcccaccttagccgcgcgtccgggccccccaccgtccgctgcccgtcccgccttccctggcagcccgcccgcaccgccattcgtgcgggcgccgacaccgtcaacttccgcctcgccgccctttggcggacagcctggggtaatgtcccagccgccgccaccgttcggagggcctccaggtgcgtcgtctcagccgccgccgccgttcggtgtcccccccggggtggtgtcccaggccccttccctgtttggaggccctcctgcgacggcatcgcaggcgtcttcgccttttgttggtcactctgttgctgcgtctcaggcggcaccattcggtgccccccctgttgcgggttcgcatcctccacccttcggtgggcctcctggagcggggcctcagccagcaccgccattgcggcagacattcgctggccagcctgggccaatggccgcagcggcagcttggacgcagccacctccacctagctttggagccccgcaacagcctccaccaccattcggttcgcggccagctgggcagccgctctttgctacacaatcagcgcctgcggcacaacaactgccattcatggggccacccagggtaaatgccccggcgtttggacctccgtcttggcaaactcagggagctgggtctggtgcaatgcagccacctttgagaatgccaggcattcctggtagcatgcagccaaacacactaggaccccctggcaccccgactataccttattctccacatgctggaacccaggtatcaaccccgtccaaaattgatcctaatcaaattccacgtcccatgcgtgaatcatcagtcatcatttatgagacccgtcaaggtggccaagcaaccattcccccggctgcatctagtgaatttattgtgaaggacactgggaactgtagcccccgtctaatgcgctgcactgtgaatcaaataccatgtactggggatctcttgactacttcgggcatgcctttagctctgatggttcaacctttttctcttcctcacccatctgaggaacatattcagcttgtggacttcggagagatgggacccattcggtgttctcgttgcaaagcgtacataaaccctttcatgaaatttgttgaccaagggaggcatttcatctgtaacttatgtggattcagaaatgatactcctagagactacatgtgcaacttagggcctgatggtaggcgacgtgatgctgatgacaggcctgaattgtctagaggaacagttgaatttgttgctacgaaggaatttctggttcgtgatccaatgcctgctgtatacttcttccttattgatgtctctatgaatgctatacaaactggtgcaactgctgcagcttgcagtgctatttctcaggctatttcagatctgccgacggtggcgtcccgggtgtctccggagcgtcgcagggcttttgtttgggagtggatgcagctgccagagttgagatggagcagggaaaaaattggtggaggatctcaccgccatgtgtcgaaagcgggctggcctccagtggtttgaatggtggcaagttgatcgtgcaggtgaccag

SEQ ID NO: 205263 - DNA, 3532 bp, Zea Mays
aacgcaagaaagaaccatgcgaaaacaaaaccagacgccgtgcccgtgcccgtgctctcctatcccacctacccgttgtcctgccctgccccgtccgtctcccacggtttccgcgtcccacccatcccttccacactttctcacccccgcccttctcaccccccgaaaaaattcccccggaaatcagagacgcgaatccctccctcgccccacgtccgaggtcgctcgccaattcgatccgcctcgtcgtcgcccgcccgcccgtccgccggtcgaccttgactgctccgtcgcacgtggcgtttcgcagcgcggaatctaccctgggttgggttgggagatccggggaaacccttgttcccgggcgctccgggctcgaatctcgctgcagacgggcaatgtgagcgctctccatcggagagggacgatctgcggggcggttgttggccgggtgaatcgtgcggtgcggggttgcgggaatggagcacgtgatcggagggaagtttaagcttgggaagaagatcgggagcggatctttcggggagctctatctcggtgtcaacgtacagagcggcgaggaggtggctatcaagaatctgtaaaatcaaggcatcctcagcttcattatgagtcaaaactatacatgcttctccaagggggaactggaattcctcatttgaaatggtttggagtggatggggagtacaatgtcatggtcattgatcttcttggtccaagcctcgaagacttgttcaactactgcaacagaaagttttctcttaaaacagtacttatgctagctgatcagatgatatctagggtagagtacatgcacacgagggggtttcttcatcgtgatatcaagccagacaacttcctcatgggcttaggccgtaaaacaagtcaggtttatgtcattgactatggccttgcgaagaagtatcgggacctccaaactcatagacacattccatacagggagaacaaaaacctcacaggaacagcacgatatgctagtgtaaacacccatcttggagtaggtgagtatcgttatttaacggtggtgctaagaggtttaaataatgtttaattatacagaacagcaagttttaggtttttatgggtacacaatctagtacaaaaacagggccttttagtcccaattaagttggggtaggctagagatgagaccctacggaaaggaaaactcatataaaatataaaaaggcattaacactcccccatcacataatataaggcgtatgtttcattgtgacgagcctttgaccaacaattattatatatattttttcgcgaaaacgcaggagagctgcgcgtcattaaattaagaagaaatgggtttaaggtcctagaggaccagtacaagataagaccttacggaggccacatacaggcatacataatacataaacacatccatggccagacacagaccctaatataccaaaaaaacaagctaaatctgtgggagcccaggaataggacccatcaacagggacagcttctttgctccagccaattccaacaattattatagtagtggaatatttttttatttagatcctttacttaaaaattatttacttgtggttatgattttgtattacgtaatgacatattagtagacatgattgtcaaggactttgttctaacaaaggaaaaaacgtcttatattatgaacggtgtagtaatagaggtgtatccagtgttagctcccacgcaagttgatatccaggacacaagtggagagattctaccattgtgccatcccactgcttatacacttctgaagcttaaaaactgtaccttgccaatcaacagaaaatgtcactcgtccaatttttttttctcaccagcagttcaatgtacattttattttgtaagctttggttaactatatactgctgtctgttattttgactgttggtatgtgttattaaaaactcggccggtaggggaaagaccgccccacaatattatattaagaagcttaattggagccccgaccgagaaaggtcacgaaagttgaccctcgtgcagcatgagggtccgccccctataggtcagatctttactgtgctttgagccctcccagccctacacgaggatccccccctatagatcagtacatctcgtgtgcacacaactaggggaaccaccgagtgaccttttttaacctcaacctgaaatttggtcccactgggattcgaacttaggacctcacctaaccaagtcagctagaggcccttccgctgttggtgtgtgttattgatggttttctctacagaacaaagcaggagagatgacttagagtctcttggttatgtgctgatgtacttcttaagaggaagccttccttggcaaggcctgaaagctggaacgaaaaaacaaaagtatgacaaaatcagtgagaagaaaatgctaacctcaattgaggccctgtgtaaatcttatccatcagaatttgttacatatttccattattgccgctctttgcaatttgaagataagccagactacagctatttgaagaaaaattttcgggatttattcatccgtgaaggttgccagcctgattatgtatttgattggactgtatcaaggcaagctgcggacaataacagattgcgactgagtgggaagacaggtgggttggtgggaccatctgtggatcgggctgaacgagctgcagcaaaacaggatgttccacatagattcactggtccagctgatgcattggctaaaagaaccggctctggttctggtcattatggagaacacacaaagcacagaactctgttggattcccttatggcatccaatatgcgcaatggaagcacatcaaggaaggctcttctgtcaagcaaccgaggttctggagaccccagtgaaccaaatcgcagcagccacctagttccgaccaccaccagcagcagccgtccatcgaccaatcaaaggcttcaccactcaactggacttgagggcaggaccccatcatttccaaaacctggaagaatcggctatgatgatcccacaatgaggagttttgaacgccttactattagcgcagagaggaggaaatgaatctttggaagagcaaacgatctgagctgctcccggcgagtatacttcactgaatggattctgtgctgtgcatggtgctgagctctgcacatagcggtgctcgttgattcttggcacagatgatttgagttatgtacattcgtttaactcttccaaaaggttagcgaagcattttacaccccgctatgagggaccggggatcggctgcaatgtttaagccgtggtgatttaagatgatgttgactctaatacttatataatgacaatgaaaaaaagttccctagactagcattacatttgatgtgtttgtgaaagtaggattttcatctatgcaatggagtatagcagataactgtatgcataaggtcccgttggatcaattagctactaataatagttagctagctaagggcatgcacagtaaggg

SEQ ID NO: 205264 - DNA, 1682 bp, Zea Mays
gtttgatactgaatctgtaaaatcaaggcatcctcagcttcattatgagtcaaaactatacatgcttctccaagggggaactggaattcctcatttgaaatggtttggagtggatggggagtacaatgtcatggtcattgatcttcttggtccaagcctcgaagacttgttcaactactgcaacagaaagttttctcttaaaacagtacttatgctagctgatcagatgatatctagggtagagtacatgcacacgagggggtttcttcatcgtgatatcaagccagacaacttcctcatgggcttaggccgtaaaacaagtcaggtttatgtcattgactatggccttgcgaagaagtatcgggacctccaaactcatagacacattccatacagggagaacaaaaacctcacaggaacagcacgatatgctagtgtaaacacccatcttggagtagaacaaagcaggagagatgacttagagtctcttggttatgtgctgatgtacttcttaagaggaagccttccttggcaaggcctgaaagctggaacgaaaaaacaaaagtatgacaaaatcagtgagaagaaaatgctaacctcaattgaggccctgtgtaaatcttatccatcagaatttgttacatatttccattattgccgctctttgcaatttgaagataagccagactacagctatttgaagaaaaattttcgggatttattcatccgtgaaggttgccagcctgattatgtatttgattggactgtatcaaggcaagctgcggacaataacagattgcgactgagtgggaagacaggtgggttggtgggaccatctgtggatcgggctgaacgagctgcagcaaaacaggatgttccacatagattcactggtccagctgatgcattggctaaaagaaccggctctggttctggtcattatggagaacacacaaagcacagaactctgttggattcccttatggcatccaatatgcgcaatggaagcacatcaaggaaggctcttctgtcaagcaaccgaggttctggagaccccagtgaaccaaatcgcagcagccacctagttccgaccaccaccagcagcagccgtccatcgaccaatcaaaggcttcaccactcaactggacttgagggcaggaccccatcatttccaaaacctggaagaatcggctatgatgatcccacaatgaggagttttgaacgccttactattagcgcagagaggaggaaatgaatctttggaagagcaaacgatctgagctgctcccggcgagtatacttcactgaatggattctgtgctgtgcatggtgctgagctctgcacatagcggtgctcgttgattcttggcacagatgatttgagttatgtacattcgtttaactcttccaaaaggttagcgaagcattttacaccccgctatgagggaccggggatcggctgcaatgtttaagccgtggtgatttaagatgatgttgactctaatacttatataatgacaatgaaaaaaagttccctagactagcattacatttgatgtgtttgtgaaagtaggattttcatctatgcaatggagtatagcagataactgtatgcataaggtcccgttggatcaattagctactaataatagttagctagctaagggcatgcacagtaaggg

SEQ ID NO: 205265 - DNA, 1319 bp, Zea Mays
gtaccatagtaagaaaaggactacttattgcagggagaacaaaaacctcacaggaacagcacgatatgctagtgtaaacacccatcttggagtagaacaaagcaggagagatgacttagagtctcttggttatgtgctgatgtacttcttaagaggaagccttccttggcaaggcctgaaagctggaacgaaaaaacaaaagtatgacaaaatcagtgagaagaaaatgctaacctcaattgaggccctgtgtaaatcttatccatcagaatttgttacatatttccattattgccgctctttgcaatttgaagataagccagactacagctatttgaagaaaaattttcgggatttattcatccgtgaaggttgccagcctgattatgtatttgattggactgtatcaaggcaagctgcggacaataacagattgcgactgagtgggaagacaggtgggttggtgggaccatctgtggatcgggctgaacgagctgcagcaaaacaggatgttccacatagattcactggtccagctgatgcattggctaaaagaaccggctctggttctggtcattatggagaacacacaaagcacagaactctgttggattcccttatggcatccaatatgcgcaatggaagcacatcaaggaaggctcttctgtcaagcaaccgaggttctggagaccccagtgaaccaaatcgcagcagccacctagttccgaccaccaccagcagcagccgtccatcgaccaatcaaaggcttcaccactcaactggacttgagggcaggaccccatcatttccaaaacctggaagaatcggctatgatgatcccacaatgaggagttttgaacgccttactattagcgcagagaggaggaaatgaatctttggaagagcaaacgatctgagctgctcccggcgagtatacttcactgaatggattctgtgctgtgcatggtgctgagctctgcacatagcggtgctcgttgattcttggcacagatgatttgagttatgtacattcgtttaactcttccaaaaggttagcgaagcattttacaccccgctatgagggaccggggatcggctgcaatgtttaagccgtggtgatttaagatgatgttgactctaatacttatataatgacaatgaaaaaaagttccctagactagcattacatttgatgtgtttgtgaaagtaggattttcatctatgcaatggagtatagcagataactgtatgcataaggtcccgttggatcaattagctactaataatagttagctagctaagggcatgcacagtaaggg

SEQ ID NO: 205266 - DNA, 713 bp, Zea Mays
aaaggctttcgtgtgccctccggtccggccgccttctccgcgcgcgctaggagtaataaacggaaggcaccaatctcggaggcaacggcccagacgcgcaagcggaagaaagggggagcgcaacattcgcggccgcggggagggagagagacaaggggggcggtcacacacacgcggaccgcgcgagctagcgagcgagcgagatccccctctcgcgctgctggatccgatctgacctgaccttacctcgtcgccgccagccgtgagagagagaagaggaagaggaggaggaggcggagatggcaccggtgtcggcgctcgccaagtacaagctcgtcttcctgggggaccagtccgtcggcaagaccagcatcatcacccgcttcatgtacgataagttcgacaacacttaccaggctacaattggtattgatttcctgtcaaagacaatgtaccttgaagatagaactgtgagactccaactctgggatacagctggtcaggaaaggttcaggagtttaattccaagctatatcagagactcttcagttgctgtcattgtattcgatgttgcaagcaggcagtctttcttaaatacatccaagtggatagatgaagttcgcactgagaggggcagtgatgttatcattgtgcttgttgggaacaaaactgaccttgttgacaagaggaatttttaggtggatatcattcta

SEQ ID NO: 205267 - DNA, 2893 bp, Zea Mays
ctagttcacctggccatctcataaatcccccgccctctcctgaccacggccccgactggagactgctgttcccctcgaccctcgtccgtccgtccgtccgtcacctgacggctcccaaaccctaccccgcagatccctccccttcctctacccccgcctcgccgccggtcttcgtcacccgtcgccgtgcccgtcggcgcggtgttaagggtccgctacgctgcacctcgcggggagaaaggggtgggcctcggggacctccgccctccgcgcaaggtcattgaatgaccttctatacgaatatggatttgaatgcatcaccggtgcctgacgatgatgagcaacagccttatgatgattcagttgaggttgggtatgctcagacggaacatgttgaatctgctgttgcaacattgcgccgggagcgtgaagagagacgcaagagactaaagagagagcagcaggatgatgggtcaaggctacattcccagcagattaggaatgattatgctcctcaacccaaaagacatagtcgcattaaagaggcacctcagggctggctggactgccctgcatttggggaaccaatagataaaatcataccatctaaagttcctcttgacgaaacattcaatgagtcagtgcctcctgggaagcggtactcctcaaagcaactagttaacaaacaaagaaaagctggccgcgaaataggtctggtgattgatttgacaaataccacccgatattattcaccagcagaatggacgaagcaaggtactaagtatgcgaagattgcatgcaaggggagagatgctgtacctgacaatgaatctgttaataagtttgtctatgaggcaatgatgttccttgatcgacaaaaacaatcaaagaatcctaaatatattctggttcactgtacccatggtcataatcgtacaggtttcatgattattcattaccttatgcgcacacacgtctcttgtgttgctgaggcgattagtatatttgctcaaaggcggccacctggcatatacaagagggactatattgaagcattgtattcattttaccatgaggttcctgacaatatgatgatagcatgccctccaacaccagaatggaagagaccagatgatctcgatttaaatggcgaagctaagcaggatgacgatgatgacaatggtgatcctggaccactgcataatgaatcagaggataaagtcatcaccaatgacgatgtgttaggggatgaagtgccatatgaccagcaagaagctttgcgtgtcctatgttatcggttgcttgaaatgcctcttggaagggggcatgcacactttcctggatcacatccagtttctcttaacagtgaaaatctgcaactacttagacagcgatactactatgctacatggaaagctgacggaacacgttatatgatgcttataatgagacatggttgtttcttgattgatcggaattttagctttagaagggttcagatgcgctttccccataggagcctccaaggtctgcaagatatgaccttgattgatggagagatgattatagacacagtaccagattcaggcttgaagagacggtacttggcatatgatcttatggcgcttggctcagtgtccaaaactaggttgccattttctgaaaggtggaaaatgctggaagatgaaataatacagccgcgtaataatgagaaaggccttgagcgtggtgctaagagcaatccgttgtacaaatatgacatggaactattttcggttaggagaaaggctttttgggtgctattaacagtaaaaaaggttcttaaggtgtttattccatcgctatgccatgatgctgatggccttatatttcagggctgggatgatccatatgtaactcgtactcatgaaggtcttctaaagtggaaataccctgagatgaattctgttgactttctgtttgagcttacaaatgataatcgtcagctggttttcctatatgagagaggaaaaaagaaacttatggatggtgctcggatatcatttactgatgatgtagatccatcttctgtcgctgggaggattgtcgagtgctcttggaacaaggaagaacagtgttgggcatgtatgcgtattagatctgataaatcaactccaaacgacatcaacacataccggaaggtgatgaggagtatcacagataacattaccgaggagaagcttctcgaagagactgatgagataacgctcctgccgatgtatgccgataggatgaatgttcgtgttcatacaaagatggcacaacacaggcgaagattgccaccacagtgctagtctcgttgctagagtgctgggtcgctctcctagccagcggctggcttctgtagctgtgtaattagtagaggtttcagtagcccccccccccccccccccctatgatgatggccagccaactaattctttgcacttcatttgtgtcttgtcccctgccctcacacctacctgtataggcttccctgtaaattgtgtgctctatgttcctccatattctcccctatggttttatttttcatgggtgtagaatagcgtttaacaaggcgggtggtgttctatgtaggcgttgccatctctcggtgctgcctcgtgctagaataatgtagggtgtactggcgataccatgtggttgcgatatatggcttggttttagtgttttggtttgtgcgcacctgatccgatcctttgtccaacgaagattttttccccttatttttgggtaaaaaaggacgtcaatgttaccactctatggtatagtgcttttttgttcacatggttagatcatgtactgcgtggtccattttttctctttagtgtccgccactttgtggcgattgttc

SEQ ID NO: 205268 - DNA, 2795 bp, Zea Mays
ccccgccctctcctgaccacggccccgactggagactgctgttcccctcgaccctcgtccgtccgtccgtccgtcacctgacggctcccaaaccctaccccgcagatccctccccttcctctacccccgcctcgccgccggtcttcgtcacccgtcgccgtgcccgtcggcgcggtgttaagggtccgctacgctgcacctcgcggggagaaaggggtgggcctcggggacctccgccctccgcgcaagccttatgatgattcagttgaggttgggtatgctcagacggaacatgttgaatctgctgttgcaacattgcgccgggagcgtgaagagagacgcaagagactaaagagagagcagcaggatgatgggtcaaggctacattcccagcagattaggaatgattatgctcctcaacccaaaagacatagtcgcattaaagaggcacctcagggctggctggactgccctgcatttggggaaccaatagataaaatcataccatctaaagttcctcttgacgaaacattcaatgagtcagtgcctcctgggaagcggtactcctcaaagcaactagttaacaaacaaagaaaagctggccgcgaaataggtctggtgattgatttgacaaataccacccgatattattcaccagcagaatggacgaagcaaggtactaagtatgcgaagattgcatgcaaggggagagatgctgtacctgacaatgaatctgttaataagtttgtctatgaggcaatgatgttccttgatcgacaaaaacaatcaaagaatcctaaatatattctggttcactgtacccatggtcataatcgtacaggtttcatgattattcattaccttatgcgcacacacgtctcttgtgttgctgaggcgattagtatatttgctcaaaggcggccacctggcatatacaagagggactatattgaagcattgtattcattttaccatgaggttcctgacaatatgatgatagcatgccctccaacaccagaatggaagagaccagatgatctcgatttaaatggcgaagctaagcaggatgacgatgatgacaatggtgatcctggaccactgcataatgaatcagaggataaagtcatcaccaatgacgatgtgttaggggatgaagtgccatatgaccagcaagaagctttgcgtgtcctatgttatcggttgcttgaaatgcctcttggaagggggcatgcacactttcctggatcacatccagtttctcttaacagtgaaaatctgcaactacttagacagcgatactactatgctacatggaaagctgacggaacacgttatatgatgcttataatgagacatggttgtttcttgattgatcggaattttagctttagaagggttcagatgcgctttccccataggagcctccaaggtctgcaagatatgaccttgattgatggagagatgattatagacacagtaccagattcaggcttgaagagacggtacttggcatatgatcttatggcgcttggctcagtgtccaaaactaggttgccattttctgaaaggtggaaaatgctggaagatgaaataatacagccgcgtaataatgagaaaggccttgagcgtggtgctaagagcaatccgttgtacaaatatgacatggaactattttcggttaggagaaaggctttttgggtgctattaacagtaaaaaaggttcttaaggtgtttattccatcgctatgccatgatgctgatggccttatatttcagggctgggatgatccatatgtaactcgtactcatgaaggtcttctaaagtggaaataccctgagatgaattctgttgactttctgtttgagcttacaaatgataatcgtcagctggttttcctatatgagagaggaaaaaagaaacttatggatggtgctcggatatcatttactgatgatgtagatccatcttctgtcgctgggaggattgtcgagtgctcttggaacaaggaagaacagtgttgggcatgtatgcgtattagatctgataaatcaactccaaacgacatcaacacataccggaaggtgatgaggagtatcacagataacattaccgaggagaagcttctcgaagagactgatgagataacgctcctgccgatgtatgccgataggatgaatgttcgtgttcatacaaagatggcacaacacaggcgaagattgccaccacagtgctagtctcgttgctagagtgctgggtcgctctcctagccagcggctggcttctgtagctgtgtaattagtagaggtttcagtagcccccccccccccccccccctatgatgatggccagccaactaattctttgcacttcatttgtgtcttgtcccctgccctcacacctacctgtataggcttccctgtaaattgtgtgctctatgttcctccatattctcccctatggttttatttttcatgggtgtagaatagcgtttaacaaggcgggtggtgttctatgtaggcgttgccatctctcggtgctgcctcgtgctagaataatgtagggtgtactggcgataccatgtggttgcgatatatggcttggttttagtgttttggtttgtgcgcacctgatccgatcctttgtccaacgaagattttttccccttatttttgggtaaaaaaggacgtcaatgttaccactctatggtatagtgcttttttgttcacatggttagatcatgtactgcgtggtccattttttctctttagtgtccgccactttgtggcgattgttc

SEQ ID NO: 205269 - DNA, 2876 bp, Zea Mays
ctggagactgctgttcccctcgaccctcgtccgtccgtccgtccgtcacctgacggctcccaaaccctaccccgcagatccctccccttcctctacccccgcctcgccgccggtcttcgtcacccgtcgccgtgcccgtcggcgcggtgttaagggtccgctacgctgcacctcgcggggagaaaggggtgggcctcggggacctccgccctccgcgcaaggtgcaagtccaaaagaactgactacatcatatatgtaggtcattgaatgaccttctatacgaatatggatttgaatgcatcaccggtgcctgacgatgatgagcaacagccttatgatgattcagttgaggttgggtatgctcagacggaacatgttgaatctgctgttgcaacattgcgccgggagcgtgaagagagacgcaagagactaaagagagagcagcaggatgatgggtcaaggctacattcccagcagattaggaatgattatgctcctcaacccaaaagacatagtcgcattaaagaggcacctcagggctggctggactgccctgcatttggggaaccaatagataaaatcataccatctaaagttcctcttgacgaaacattcaatgagtcagtgcctcctgggaagcggtactcctcaaagcaactagttaacaaacaaagaaaagctggccgcgaaataggtctggtgattgatttgacaaataccacccgatattattcaccagcagaatggacgaagcaaggtactaagtatgcgaagattgcatgcaaggggagagatgctgtacctgacaatgaatctgttaataagtttgtctatgaggcaatgatgttccttgatcgacaaaaacaatcaaagaatcctaaatatattctggttcactgtacccatggtcataatcgtacaggtttcatgattattcattaccttatgcgcacacacgtctcttgtgttgctgaggcgattagtatatttgctcaaaggcggccacctggcatatacaagagggactatattgaagcattgtattcattttaccatgaggttcctgacaatatgatgatagcatgccctccaacaccagaatggaagagaccagatgatctcgatttaaatggcgaagctaagcaggatgacgatgatgacaatggtgatcctggaccactgcataatgaatcagaggataaagtcatcaccaatgacgatgtgttaggggatgaagtgccatatgaccagcaagaagctttgcgtgtcctatgttatcggttgcttgaaatgcctcttggaagggggcatgcacactttcctggatcacatccagtttctcttaacagtgaaaatctgcaactacttagacagcgatactactatgctacatggaaagctgacggaacacgttatatgatgcttataatgagacatggttgtttcttgattgatcggaattttagctttagaagggttcagatgcgctttccccataggagcctccaaggtctgcaagatatgaccttgattgatggagagatgattatagacacagtaccagattcaggcttgaagagacggtacttggcatatgatcttatggcgcttggctcagtgtccaaaactaggttgccattttctgaaaggtggaaaatgctggaagatgaaataatacagccgcgtaataatgagaaaggccttgagcgtggtgctaagagcaatccgttgtacaaatatgacatggaactattttcggttaggagaaaggctttttgggtgctattaacagtaaaaaaggttcttaaggtgtttattccatcgctatgccatgatgctgatggccttatatttcagggctgggatgatccatatgtaactcgtactcatgaaggtcttctaaagtggaaataccctgagatgaattctgttgactttctgtttgagcttacaaatgataatcgtcagctggttttcctatatgagagaggaaaaaagaaacttatggatggtgctcggatatcatttactgatgatgtagatccatcttctgtcgctgggaggattgtcgagtgctcttggaacaaggaagaacagtgttgggcatgtatgcgtattagatctgataaatcaactccaaacgacatcaacacataccggaaggtgatgaggagtatcacagataacattaccgaggagaagcttctcgaagagactgatgagataacgctcctgccgatgtatgccgataggatgaatgttcgtgttcatacaaagatggcacaacacaggcgaagattgccaccacagtgctagtctcgttgctagagtgctgggtcgctctcctagccagcggctggcttctgtagctgtgtaattagtagaggtttcagtagcccccccccccccccccccctatgatgatggccagccaactaattctttgcacttcatttgtgtcttgtcccctgccctcacacctacctgtataggcttccctgtaaattgtgtgctctatgttcctccatattctcccctatggttttatttttcatgggtgtagaatagcgtttaacaaggcgggtggtgttctatgtaggcgttgccatctctcggtgctgcctcgtgctagaataatgtagggtgtactggcgataccatgtggttgcgatatatggcttggttttagtgttttggtttgtgcgcacctgatccgatcctttgtccaacgaagattttttccccttatttttgggtaaaaaaggacgtcaatgttaccactctatggtatagtgcttttttgttcacatggttagatcatgtactgcgtggtccattttttctctttagtgtccgccactttgtggcgattgttc

SEQ ID NO: 205270 - DNA, 2707 bp, Zea Mays
ctggagactgctgttcccctcgaccctcgtccgtccgtccgtccgtcacctgacggctcccaaaccctaccccgcagatccctccccttcctctacccccgcctcgccgccggtcttcgtcacccgtcgccgtgcccgtcggcgcggtgttaagggtccgctacgctgcacctcgcggggagaaaggggtgggcctcggggacctccgccctccgcgcaaggtgcaagtccaaaagaactgactacatcatatatgtaggtcattgaatgaccttctatacgaatatggatttgaatgcatcaccggtgcctgacgatgatgagcaacagccttatgatgattcagttgaggttgggtatgctcagacggaacatgttgaatctgctgttgcaacattgcgccgggagcgtgaagagagacgcaagagactaaagagagagcagcaggatgatgggtcaaggctacattcccagcagattaggaatgattatgctcctcaacccaaaagacatagtcgcattaaagaggcacctcaggataggtctggtgattgatttgacaaataccacccgatattattcaccagcagaatggacgaagcaagattgcatgcaaggggagagatgctgtacctgacaatgaatctgttaataagtttgtctatgaggcaatgatgttccttgatcgacaaaaacaatcaaagaatcctaaatatattctggttcactgtacccatggtcataatcgtacaggtttcatgattattcattaccttatgcgcacacacgtctcttgtgttgctgaggcgattagtatatttgctcaaaggcggccacctggcatatacaagagggactatattgaagcattgtattcattttaccatgaggttcctgacaatatgatgatagcatgccctccaacaccagaatggaagagaccagatgatctcgatttaaatggcgaagctaagcaggatgacgatgatgacaatggtgatcctggaccactgcataatgaatcagaggataaagtcatcaccaatgacgatgtgttaggggatgaagtgccatatgaccagcaagaagctttgcgtgtcctatgttatcggttgcttgaaatgcctcttggaagggggcatgcacactttcctggatcacatccagtttctcttaacagtgaaaatctgcaactacttagacagcgatactactatgctacatggaaagctgacggaacacgttatatgatgcttataatgagacatggttgtttcttgattgatcggaattttagctttagaagggttcagatgcgctttccccataggagcctccaaggtctgcaagatatgaccttgattgatggagagatgattatagacacagtaccagattcaggcttgaagagacggtacttggcatatgatcttatggcgcttggctcagtgtccaaaactaggttgccattttctgaaaggtggaaaatgctggaagatgaaataatacagccgcgtaataatgagaaaggccttgagcgtggtgctaagagcaatccgttgtacaaatatgacatggaactattttcggttaggagaaaggctttttgggtgctattaacagtaaaaaaggttcttaaggtgtttattccatcgctatgccatgatgctgatggccttatatttcagggctgggatgatccatatgtaactcgtactcatgaaggtcttctaaagtggaaataccctgagatgaattctgttgactttctgtttgagcttacaaatgataatcgtcagctggttttcctatatgagagaggaaaaaagaaacttatggatggtgctcggatatcatttactgatgatgtagatccatcttctgtcgctgggaggattgtcgagtgctcttggaacaaggaagaacagtgttgggcatgtatgcgtattagatctgataaatcaactccaaacgacatcaacacataccggaaggtgatgaggagtatcacagataacattaccgaggagaagcttctcgaagagactgatgagataacgctcctgccgatgtatgccgataggatgaatgttcgtgttcatacaaagatggcacaacacaggcgaagattgccaccacagtgctagtctcgttgctagagtgctgggtcgctctcctagccagcggctggcttctgtagctgtgtaattagtagaggtttcagtagcccccccccccccccccccctatgatgatggccagccaactaattctttgcacttcatttgtgtcttgtcccctgccctcacacctacctgtataggcttccctgtaaattgtgtgctctatgttcctccatattctcccctatggttttatttttcatgggtgtagaatagcgtttaacaaggcgggtggtgttctatgtaggcgttgccatctctcggtgctgcctcgtgctagaataatgtagggtgtactggcgataccatgtggttgcgatatatggcttggttttagtgttttggtttgtgcgcacctgatccgatcctttgtccaacgaagattttttccccttatttttgggtaaaaaaggacgtcaatgttaccactctatggtatagtgcttttttgttcacatggttagatcatgtactgcgtggtccattttttctctttagtgtccgccactttgtggcgattgttc

SEQ ID NO: 205271 - DNA, 2874 bp, Zea Mays
agactgctgttcccctcgaccctcgtccgtccgtccgtccgtcacctgacggctcccaaaccctaccccgcagatccctccccttcctctacccccgcctcgccgccggtcttcgtcacccgtcgccgtgcccgtcggcgcggtgttaagggtccgctacgctgcacctcgcggggagaaaggggtgggcctcggggacctccgccctccgcgcaaggtcattgaatgaccttctatacgaatatggatttgaatgcatcaccggtgcctgacgatgatgagcaacagccttatgatgattcagttgaggttgggtatgctcagacggaacatgttgaatctgctgttgcaacattgcgccgggagcgtgaagagagacgcaagagactaaagagagagcagcaggatgatgggtcaaggctacattcccagcagattaggaatgattatgctcctcaacccaaaagacatagtcgcattaaagaggcacctcagggctggctggactgccctgcatttggggaaccaatagataaaatcataccatctaaagttcctcttgacgaaacattcaatgagtcagtgcctcctgggaagcggtactcctcaaagcaactagttaacaaacaaagaaaagctggccgcgaaataggtctggtgattgatttgacaaataccacccgatattattcaccagcagaatggacgaagcaaggtactaagtatgcgaagattgcatgcaaggggagagatgctgtacctgacaatgaatctgttaataagtttgtctatgaggcaatgatgttccttgatcgacaaaaacaatcaaagaatcctaaatatattctggttcactgtacccatggtcataatcgtacaggtttcatgattattcattaccttatgcgcacacacgtctcttgtgttgctgaggcgattagtatatttgctcaaaggcggccacctggcatatacaagagggactatattgaagcattgtattcattttaccatgaggttcctgacaatatgatgatagcatgccctccaacaccagaatggaagagaccagatgatctcgatttaaatggcgaagctaagcaggatgacgatgatgacaatggtgatcctggaccactgcataatgaatcagaggataaagtcatcaccaatgacgatgtgttaggggatgaagtgccatatgaccagcaagaagctttgcgtgtcctatgttatcggttgcttgaaatgcctcttggaagggggcatgcacactttcctggatcacatccagtttctcttaacagtgaaaatctgcaactacttagacagcgatactactatgctacatggaaagctgacggaacacgttatatgatgcttataatgagacatggttgtttcttgattgatcggaattttagctttagaagggttcagatgcgctttccccataggagcctccaaggtctgcaagatatgaccttgattgatggagagatgattatagacacagtaccagattcaggcttgaagagacggtacttggcatatgatcttatggcgcttggctcagtgtccaaaactaggttgccattttctgaaaggtggaaaatgctggaagatgaaataatacagccgcgtaataatgagaaaggccttgagcgtggtgctaagagcaatccgttgtacaaatatgacatggaactattttcggttaggagaaaggctttttgggtgctattaacagtaaaaaaggttcttaaggtgtttattccatcgctatgccatgatgctgatggccttatatttcagggctgggatgatccatatgtaactcgtactcatgaaggtcttctaaagtggaaataccctgagatgaattctgttgactttctgtttgagcttacaaatgataatcgtcagctggttttcctatatgagagaggaaaaaagaaacttatggatggtgctcggatatcatttactgatgatgtagatccatcttctgtcgctgggaggattgtcgagtgctcttggaacaaggaagaacagtgttgggcatgtatgcgtattagatctgataaatcaactccaaacgacatcaacacataccggaaggatcatgctctctaagacgttcacttcagcaattctcagtgtgatgaggagtatcacagataacattaccgaggagaagcttctcgaagagactgatgagataacgctcctgccgatgtatgccgataggatgaatgttcgtgttcatacaaagatggcacaacacaggcgaagattgccaccacagtgctagtctcgttgctagagtgctgggtcgctctcctagccagcggctggcttctgtagctgtgtaattagtagaggtttcagtagcccccccccccccccccccctatgatgatggccagccaactaattctttgcacttcatttgtgtcttgtcccctgccctcacacctacctgtataggcttccctgtaaattgtgtgctctatgttcctccatattctcccctatggttttatttttcatgggtgtagaatagcgtttaacaaggcgggtggtgttctatgtaggcgttgccatctctcggtgctgcctcgtgctagaataatgtagggtgtactggcgataccatgtggttgcgatatatggcttggttttagtgttttggtttgtgcgcacctgatccgatcctttgtccaacgaagattttttccccttatttttgggtaaaaaaggacgtcaatgttaccactctatggtatagtgcttttttgttcacatggttagatcatgtactgcgtggtccattttttctctttagtgtccgccactttgtggcgattgttc

SEQ ID NO: 205272 - DNA, 2836 bp, Zea Mays
agactgctgttcccctcgaccctcgtccgtccgtccgtccgtcacctgacggctcccaaaccctaccccgcagatccctccccttcctctacccccgcctcgccgccggtcttcgtcacccgtcgccgtgcccgtcggcgcggtgttaagggtccgctacgctgcacctcgcggggagaaaggggtgggcctcggggacctccgccctccgcgcaaggtcattgaatgaccttctatacgaatatggatttgaatgcatcaccggtgcctgacgatgatgagcaacagccttatgatgattcagttgaggttgggtatgctcagacggaacatgttgaatctgctgttgcaacattgcgccgggagcgtgaagagagacgcaagagactaaagagagagcagcaggatgatgggtcaaggctacattcccagcagattaggaatgattatgctcctcaacccaaaagacatagtcgcattaaagaggcacctcagggctggctggactgccctgcatttggggaaccaatagataaaatcataccatctaaagttcctcttgacgaaacattcaatgagtcagtgcctcctgggaagcggtactcctcaaagcaactagttaacaaacaaagaaaagctggccgcgaaataggtctggtgattgatttgacaaataccacccgatattattcaccagcagaatggacgaagcaaggtactaagtatgcgaagagattgcatgcaaggggagagatgctgtacctgacaatgaatctgttaataagtttgtctatgaggcaatgatgttccttgatcgacaaaaacaatcaaagaatcctaaatatattctggttcactgtacccatggtcataatcgtacaggtttcatgattattcattaccttatgcgcacacacgtctcttgtgttgctgaggcgattagtatatttgctcaaaggcggccacctggcatatacaagagggactatattgaagcattgtattcattttaccatgaggttcctgacaatatgatgatagcatgccctccaacaccagaatggaagagaccagatgatctcgatttaaatggcgaagctaagcaggatgacgatgatgacaatggtgatcctggaccactgcataatgaatcagaggataaagtcatcaccaatgacgatgtgttaggggatgaagtgccatatgaccagcaagaagctttgcgtgtcctatgttatcggttgcttgaaatgcctcttggaagggggcatgcacactttcctggatcacatccagtttctcttaacagtgaaaatctgcaactacttagacagcgatactactatgctacatggaaagctgacggaacacgttatatgatgcttataatgagacatggttgtttcttgattgatcggaattttagctttagaagggttcagatgcgctttccccataggagcctccaaggtctgcaagatatgaccttgattgatggagagatgattatagacacagtaccagattcaggcttgaagagacggtacttggcatatgatcttatggcgcttggctcagtgtccaaaactaggttgccattttctgaaaggtggaaaatgctggaagatgaaataatacagccgcgtaataatgagaaaggccttgagcgtggtgctaagagcaatccgttgtacaaatatgacatggaactattttcggttaggagaaaggctttttgggtgctattaacagtaaaaaaggttcttaaggtgtttattccatcgctatgccatgatgctgatggccttatatttcagggctgggatgatccatatgtaactcgtactcatgaaggtcttctaaagtggaaataccctgagatgaattctgttgactttctgtttgagcttacaaatgataatcgtcagctggttttcctatatgagagaggaaaaaagaaacttatggatggtgctcggatatcatttactgatgatgtagatccatcttctgtcgctgggaggattgtcgagtgctcttggaacaaggaagaacagtgttgggcatgtatgcgtattagatctgataaatcaactccaaacgacatcaacacataccggaaggtgatgaggagtatcacagataacattaccgaggagaagcttctcgaagagactgatgagataacgctcctgccgatgtatgccgataggatgaatgttcgtgttcatacaaagatggcacaacacaggcgaagattgccaccacagtgctagtctcgttgctagagtgctgggtcgctctcctagccagcggctggcttctgtagctgtgtaattagtagaggtttcagtagcccccccccccccccccccctatgatgatggccagccaactaattctttgcacttcatttgtgtcttgtcccctgccctcacacctacctgtataggcttccctgtaaattgtgtgctctatgttcctccatattctcccctatggttttatttttcatgggtgtagaatagcgtttaacaaggcgggtggtgttctatgtaggcgttgccatctctcggtgctgcctcgtgctagaataatgtagggtgtactggcgataccatgtggttgcgatatatggcttggttttagtgttttggtttgtgcgcacctgatccgatcctttgtccaacgaagattttttccccttatttttgggtaaaaaaggacgtcaatgttaccactctatggtatagtgcttttttgttcacatggttagatcatgtactgcgtggtccattttttctctttagtgtccgccactttgtggcgattgttc

SEQ ID NO: 205273 - DNA, 2214 bp, Zea Mays
agcccctcctcctaactatcatgtgaagataggtctggtgattgatttgacaaataccacccgatattattcaccagcagaatggacgaagcaaggtactaagtatgcgaagattgcatgcaaggggagagatgctgtacctgacaatgaatctgttaataagtttgtctatgaggcaatgatgttccttgatcgacaaaaacaatcaaagaatcctaaatatattctggttcactgtacccatggtcataatcgtacaggtttcatgattattcattaccttatgcgcacacacgtctcttgtgttgctgaggcgattagtatatttgctcaaaggcggccacctggcatatacaagagggactatattgaagcattgtattcattttaccatgaggttcctgacaatatgatgatagcatgccctccaacaccagaatggaagagaccagatgatctcgatttaaatggcgaagctaagcaggatgacgatgatgacaatggtgatcctggaccactgcataatgaatcagaggataaagtcatcaccaatgacgatgtgttaggggatgaagtgccatatgaccagcaagaagctttgcgtgtcctatgttatcggttgcttgaaatgcctcttggaagggggcatgcacactttcctggatcacatccagtttctcttaacagtgaaaatctgcaactacttagacagcgatactactatgctacatggaaagctgacggaacacgttatatgatgcttataatgagacatggttgtttcttgattgatcggaattttagctttagaagggttcagatgcgctttccccataggagcctccaaggtctgcaagatatgaccttgattgatggagagatgattatagacacagtaccagattcaggcttgaagagacggtacttggcatatgatcttatggcgcttggctcagtgtccaaaactaggttgccattttctgaaaggtggaaaatgctggaagatgaaataatacagccgcgtaataatgagaaaggccttgagcgtggtgctaagagcaatccgttgtacaaatatgacatggaactattttcggttaggagaaaggctttttgggtgctattaacagtaaaaaaggttcttaaggtgtttattccatcgctatgccatgatgctgatggccttatatttcagggctgggatgatccatatgtaactcgtactcatgaaggtcttctaaagtggaaataccctgagatgaattctgttgactttctgtttgagcttacaaatgataatcgtcagctggttttcctatatgagagaggaaaaaagaaacttatggatggtgctcggatatcatttactgatgatgtagatccatcttctgtcgctgggaggattgtcgagtgctcttggaacaaggaagaacagtgttgggcatgtatgcgtattagatctgataaatcaactccaaacgacatcaacacataccggaaggtgatgaggagtatcacagataacattaccgaggagaagcttctcgaagagactgatgagataacgctcctgccgatgtatgccgataggatgaatgttcgtgttcatacaaagatggcacaacacaggcgaagattgccaccacagtgctagtctcgttgctagagtgctgggtcgctctcctagccagcggctggcttctgtagctgtgtaattagtagaggtttcagtagcccccccccccccccccccctatgatgatggccagccaactaattctttgcacttcatttgtgtcttgtcccctgccctcacacctacctgtataggcttccctgtaaattgtgtgctctatgttcctccatattctcccctatggttttatttttcatgggtgtagaatagcgtttaacaaggcgggtggtgttctatgtaggcgttgccatctctcggtgctgcctcgtgctagaataatgtagggtgtactggcgataccatgtggttgcgatatatggcttggttttagtgttttggtttgtgcgcacctgatccgatcctttgtccaacgaagattttttccccttatttttgggtaaaaaaggacgtcaatgttaccactctatggtatagtgcttttttgttcacatggttagatcatgtactgcgtggtccattttttctctttagtgtccgccactttgtggcgattgttc

SEQ ID NO: 205274 - DNA, 1716 bp, Zea Mays
ctacttatcttgtttatcgtttagaaatgaatcagaggataaagtcatcaccaatgacgatgtgttaggggatgaagtgccatatgaccagcaagaagctttgcgtgtcctatgttatcggttgcttgaaatgcctcttggaagggggcatgcacactttcctggatcacatccagtttctcttaacagtgaaaatctgcaactacttagacagcgatactactatgctacatggaaagctgacggaacacgttatatgatgcttataatgagacatggttgtttcttgattgatcggaattttagctttagaagggttcagatgcgctttccccataggagcctccaaggtctgcaagatatgaccttgattgatggagagatgattatagacacagtaccagattcaggcttgaagagacggtacttggcatatgatcttatggcgcttggctcagtgtccaaaactaggttgccattttctgaaaggtggaaaatgctggaagatgaaataatacagccgcgtaataatgagaaaggccttgagcgtggtgctaagagcaatccgttgtacaaatatgacatggaactattttcggttaggagaaaggctttttgggtgctattaacagtaaaaaaggttcttaaggtgtttattccatcgctatgccatgatgctgatggccttatatttcagggctgggatgatccatatgtaactcgtactcatgaaggtcttctaaagtggaaataccctgagatgaattctgttgactttctgtttgagcttacaaatgataatcgtcagctggttttcctatatgagagaggaaaaaagaaacttatggatggtgctcggatatcatttactgatgatgtagatccatcttctgtcgctgggaggattgtcgagtgctcttggaacaaggaagaacagtgttgggcatgtatgcgtattagatctgataaatcaactccaaacgacatcaacacataccggaaggtgatgaggagtatcacagataacattaccgaggagaagcttctcgaagagactgatgagataacgctcctgccgatgtatgccgataggatgaatgttcgtgttcatacaaagatggcacaacacaggcgaagattgccaccacagtgctagtctcgttgctagagtgctgggtcgctctcctagccagcggctggcttctgtagctgtgtaattagtagaggtttcagtagcccccccccccccccccccctatgatgatggccagccaactaattctttgcacttcatttgtgtcttgtcccctgccctcacacctacctgtataggcttccctgtaaattgtgtgctctatgttcctccatattctcccctatggttttatttttcatgggtgtagaatagcgtttaacaaggcgggtggtgttctatgtaggcgttgccatctctcggtgctgcctcgtgctagaataatgtagggtgtactggcgataccatgtggttgcgatatatggcttggttttagtgttttggtttgtgcgcacctgatccgatcctttgtccaacgaagattttttccccttatttttgggtaaaaaaggacgtcaatgttaccactctatggtatagtgcttttttgttcacatggttagatcatgtactgcgtggtccattttttctctttagtgtccgccactttgtggcgattgttc

SEQ ID NO: 205275 - DNA, 868 bp, Zea Mays
cttatttgtctattagttgctgaaatgatgtagatccatcttctgtcgctgggaggattgtcgagtgctcttggaacaaggaagaacagtgttgggcatgtatgcgtattagatctgataaatcaactccaaacgacatcaacacataccggaaggtgatgaggagtatcacagataacattaccgaggagaagcttctcgaagagactgatgagataacgctcctgccgatgtatgccgataggatgaatgttcgtgttcatacaaagatggcacaacacaggcgaagattgccaccacagtgctagtctcgttgctagagtgctgggtcgctctcctagccagcggctggcttctgtagctgtgtaattagtagaggtttcagtagcccccccccccccccccccctatgatgatggccagccaactaattctttgcacttcatttgtgtcttgtcccctgccctcacacctacctgtataggcttccctgtaaattgtgtgctctatgttcctccatattctcccctatggttttatttttcatgggtgtagaatagcgtttaacaaggcgggtggtgttctatgtaggcgttgccatctctcggtgctgcctcgtgctagaataatgtagggtgtactggcgataccatgtggttgcgatatatggcttggttttagtgttttggtttgtgcgcacctgatccgatcctttgtccaacgaagattttttccccttatttttgggtaaaaaaggacgtcaatgttaccactctatggtatagtgcttttttgttcacatggttagatcatgtactgcgtggtccattttttctctttagtgtccgccactttgtggcgattgttc

SEQ ID NO: 205276 - DNA, 1258 bp, Zea Mays
atcttcttttaactggagcagcagagaactgaaaagtgcccgcctctcgctcgcatcaggaaatcaacgactgagtctccacgactgtcggtcacttcggatggcggcaccaccggaggggaatgtccgcttaggcgaggggtgggacgaggacgacgtgctggagccgcagccgctggaggtcatagcgccggatgtcaagtccaagaagcgcaatccggcgcccggagttcgggttgttggtcgccggatctacgatccagagaatggcaagacctgccaccaatgccgccagaagacaacagacttcgcagcggcgtgcaagcaagtcaagaagaagggtccgtgcccagtcaagtattgcctcaagtgcctccttaacaggtatggcgagagtgccgaggaggcggccggcaaggaggactggatctgtcctaagtgcaggggcatctgcaactgcagcttctgtagaaagaagaaaggcgagatgccaactgggataatggcccacatcgccaaggcttccgggtgcacctctgtccatgatctccttaaaaaggggtcagatgtggtttctgctgcacaggcgattctcaaggtgaatggtagtgacaagggcacaaagagatcccgagggacagatgctgctgctgaggtggcgactgaaaaggatgtaaatataggcattgatatcaatacagttatagcagatgaaggagatgaaaatataggtgttgatctcaattcacttccttctgttgataccaagaaaaggcagaagcggcagaagctcaagcacaggacaaagaaggatcctgctgatgcaacgtcacatggagtcaatactgaaccattgcagatggatgggaaccttgattttctcaatagtaaaactgtgcgacccaggggtaccccagtcactaaaattgcaggcgcagagcttgatgacgaggatactggggctgcaattcagtttatagaattctgccgtgcatttacagagatgaaaggatctgagctaaaagaatgctagaatttgtcacacgaggcttaatataagccttgcactgatgagttgctacacatcactctggatttagctgcctactgtacctctccaatcgtatccaaacactataacaaccattttatggcgagctagtgactatgaacccttgtttattatagcagtagtatactgcaatttctagaacaagaatggcagtgaaagtattttggtagctatgacctgttacaa

SEQ ID NO: 205277 - DNA, 1198 bp, Zea Mays
acccaacattgttgctagagctgattcggaggaagatgctgctgcagctgaggttgttgaaggggctgatctaggtattgtgggtgatgatacacaggtttccagtgatggacctttaagccctgctcctggtgtagagacagtagttgtattccccaaaaatgctggcaaaattgtactagcaggtgaagaaactgaattactagttggtctgcaaaatgagggtgaatcgactttgaatgttgttgctgttcattcaactctccatcttccttttgaccataatatgtatggccagaaccttactgttcagaatttcttcaacgcatcagttcctgtttctgtgcaagcaaccttcccttataaattcgttgtgagcaagttcttgcagcctggagcttatgatctggttggttacatagtgtatgagatcgaccagcacccttaccagaatgtattctacaatggcactattgaggtcgttgaggctggaggcttactcagtgttgagtctgtgttcctcatcacccttggaaccgctcttcttggtctctttggattatgggcatatggccaggttcagcagctctcgaagaaaacgaagaaggcccccaaggtggagctcggaactggaacaactgatgccaacatcgatgagtggctggagggcacttcgtttgtgcagagaagcaaatccaagaaagcagacctgaagctagctctccagagtagttaatccttggaggatctagaatgaggcatttgagggtagcccttcacaagtgacttctgcagaaagatagatgcctaaggaggtgctgaaaaatgtagtttcgtggtcgaacatctttgttgacaccattttcgaccttgtgtacttcacatggaacttttcttcaaacaaagttttgttaaaaaaaggtatatgctgttgtctctgtgatttctgatcttttattcgctgtcatggccactccaggatttttctttgtgggttgtgtagcagaagtcggcaggcaagctgttgatttctgacttcgtttgtgcattatccttatgcttgttctccatcgcttggcattgtgcgtcacgcatgccagcaagtcgattatatatatctgaaacgttattgcaaagtcaacaaatgtagtgtaccaaacggtttttccttttcaggctcgagtgcttccttcactgc

SEQ ID NO: 205278 - DNA, 2007 bp, Zea Mays
cttaccctctaatatttgtcaatccgtctggctttattttgtttcctcttgttgtgcattcatttgatttggtggtgtcatcagtcggaattctctcaatcagaggaacacgtgactctgggctcatttcccctatcgaagatcccatggcaattatgcaaaaaggctactctgttactattatgcttgctgttcttacatttggagtgtctactcgttggctcctgtacacggaacaagcaccttctgcatggctaaattttgcattgtgtggcttggtggggatcatcacagcatatgcttttgtttggatttcgaagtattacacggattataaacacgagccggtccgccttttagctctttcaagttctacaggacatggaactaatattattgctggagtaagtttggggatggaatcaacagccctaccagttctagtgataagtgttgccattatatcatcctattggctggggcagacctctggcttggtggacgagtctggcaacccaactggtggtctttttgggacagctgtagcgacaatggggatgcttagcacagcagggtatgttctcaccatggacatgtttggtcctatagctgacaatgctggtggtattgttgagatgagccagcagcatgaaagtgtgagagaaatcacagatgttctagatgctgtgggcaacacaactaaagctactacaaaaggatttgccataggatcagcagcactggcatcattcctcctgtttagtgcatacatggacgaagtagcttcttttgctcaaatgccgttcaaggaggttgacatagcagtcccggagatttttgttggtggtttattaggctcgatgcttatattcctgtttagtgcatgggcttgttcagcagttggcaaaactgcacaggaagttgttaatgaggtcaggagacaatttatcgagaggcctggtattatggactacaaagagaagcccgattatggacgctgtgtcgcaattgtggcctctgcatccttaagagaaatgataaaacctggggctctagcaattatatcacccatggccgttggcgttgtcttccggattttgggccactccactggtcagcctcttcttggagctaaagttgtagcctccatgcttatgtttgcgacggttgctggtattcttatggcactcttcttgaacactgctggcggcgcctgggataatgcaaagaagtacattgagactggtgcccttggtggcaaaggcagtgagtcccataaggctgcggttacaggcgacacggttggagacccattcaaagacactgcaggaccatcgctgcacgttcttatcaagatgctcgccacgatcacactggtcatggctcccatattcttgtgattaaccaaccagatttatcaagcttgccattaaccctgcggagatgtatctatgcgacttgtagatgaggtgtttacctgcatgtgatgtaatgatccaatcggttttagtgtgactacatgttgtacccaaagaaagaaagaaagaaagcagcgatctgtacccaggttttaatggtccaatcggttttagtgtgactatatgttgtacccaaagaaagaaagaaatcagcgatctgtacccaggtttgacggtagatattattctgaatttctgacgggtagtgatggtgcaaatgccatattttgtgacggacgtcactgaactagtagcccaagtgttttgtatttgtttattgctgggaacattatgacatccgttgagcttagctgtaagaaaggaacgatccacgatggattttaggatcgtgactgggtctacaccttacctttgactcttcacattaacaaagaaactgatgttatgtaatggtgttaatatgaccgattgtgagcacttctaagaggattaatatttaatagcttccagcacagaaaacatgcgcagataacaaaagaaacttcatatcaatctcaacagaagctgc

SEQ ID NO: 205279 - DNA, 2736 bp, Zea Mays
ttatattaatgagaaggagaaagatatctgatgccataagagatggcgctgaaggtttttttaggacacaatatggaactatttctaaaatggcatttattctggcctttgtcatccttggcatttatattttccgcactaccaccccacagcaggaggcatctggcttgggaagggcaacattagcctatattacagttgcctcttttctccttggagcgttatgttctggaatagctggttttgttggaatgtgggtgtccgtacgtgcaaatgtacgagtttcaagtgctgctcgtcgctctgcaagggaatcattgcagattgccgtccgtgctggtggtttctcagccattgtggttgtttgcatggctgtatttggcgtggcaatactgtactcaacattttatgtttggcttggagtagattcacctgggtcaatgaaggttaccgacttgcctcttctccttgtgggatatggttttggtgcctcttttgttgccctttttgctcagttgggtggtggaatatacacgaaagctgctgatgttggagctgatctggttggaaaagttgagcagggaataccagaagatgatcctcgtaacccagctgtcattgctgacttggttggtgacaatgttggagattgtgctgcccgaggcgctgatctttttgagagcatagcagcagaaattatcagtgcaatgatacttggaggaacaatggcacagcgctgtaaaattgaggatccgtctggctttattttgtttcctcttgttgtgcattcatttgatttggtggtgtcatcagtcggaattctctcaatcagaggaacacgtgactctgggctcatttcccctatcgaagatcccatggcaattatgcaaaaaggctactctgttactattatgcttgctgttcttacatttggagtgtctactcgttggctcctgtacacggaacaagcaccttctgcatggctaaattttgcattgtgtggcttggtggggatcatcacagcatatgcttttgtttggatttcgaagtattacacggattataaacacgagccggtccgccttttagctctttcaagttctacaggacatggaactaatattattgctggagtaagtttggggatggaatcaacagccctaccagttctagtgataagtgttgccattatatcatcctattggctggggcagacctctggcttggtggacgagtctggcaacccaactggtggtctttttgggacagctgtagcgacaatggggatgcttagcacagcagggtatgttctcaccatggacatgtttggtcctatagctgacaatgctggtggtattgttgagatgagccagcagcatgaaagtgtgagagaaatcacagatgttctagatgctgtgggcaacacaactaaagctactacaaaaggatttgccataggatcagcagcactggcatcattcctcctgtttagtgcatacatggacgaagtagcttcttttgctcaaatgccgttcaaggaggttgacatagcagtcccggagatttttgttggtggtttattaggctcgatgcttatattcctgtttagtgcatgggcttgttcagcagttggcaaaactgcacaggaagttgttaatgaggtcaggagacaatttatcgagaggcctggtattatggactacaaagagaagcccgattatggacgctgtgtcgcaattgtggcctctgcatccttaagagaaatgataaaacctggggctctagcaattatatcacccatggccgttggcgttgtcttccggattttgggccactccactggtcagcctcttcttggagctaaagttgtagcctccatgcttatgtttgcgacggttgctggtattcttatggcactcttcttgaacactgctggcggcgcctgggataatgcaaagaagtacattgagactggtgcccttggtggcaaaggcagtgagtcccataaggctgcggttacaggcgacacggttggagacccattcaaagacactgcaggaccatcgctgcacgttcttatcaagatgctcgccacgatcacactggtcatggctcccatattcttgtgattaaccaaccagatttatcaagcttgccattaaccctgcggagatgtatctatgcgacttgtagatgaggtgtttacctgcatgtgatgtaatgatccaatcggttttagtgtgactacatgttgtacccaaagaaagaaagaaagaaagcagcgatctgtacccaggttttaatggtccaatcggttttagtgtgactatatgttgtacccaaagaaagaaagaaatcagcgatctgtacccaggtttgacggtagatattattctgaatttctgacgggtagtgatggtgcaaatgccatattttgtgacggacgtcactgaactagtagcccaagtgttttgtatttgtttattgctgggaacattatgacatccgttgagcttagctgtaagaaaggaacgatccacgatggattttaggatcgtgactgggtctacaccttacctttgactcttcacattaacaaagaaactgatgttatgtaatggtgttaatatgaccgattgtgagcacttctaagaggattaatatttaatagcttccagcacagaaaacatgcgcagataacaaaagaaacttcatatcaatctcaacagaagctgc

SEQ ID NO: 205280 - DNA, 3142 bp, Zea Mays
gtcgtgaagcagcgggcttactaattttgagaggtgtctgacatagactaaaaaaaaatcagcgccagggctcagggagcgacctaccccaaggtggggagttggttccttttccagtaataatgagggcaaattcatatcccatcatgatggaagaggacatggaaaatggaaggtcgtatcaagaaagaccaagggctttttcaacagtacgaagcaaatcatctgtaccgctggccttccgtttgttgatgagggtaaatccccgtgccgtgattattctttctcttttggtcttcagtggtgttttgtatgtgggagctagtacatcaccaattctggtctttgtgttctgtatatgtactctcagtctattcttctctgtctaccttacaaagtgggttcttgctaaggacgaaggacctccagaaatgtccgagatatctgatgccataagagatggcgctgaaggtttttttaggacacaatatggaactatttctaaaatggcatttattctggcctttgtcatccttggcatttatattttccgcactaccaccccacagcaggaggcatctggcttgggaagcctatattacagttgcctcttttctccttggagcgttatgttctggaatagctggttttgttggaatgtgggtgtccgtacgtgcaaatgtacgagtttcaagtgctgctcgtcgctctgcaagggaatcattgcagattgccgtccgtgctggtggtttctcagccattgtggttgtttgcatggctgtatttggcgtggcaatactgtactcaacattttatgtttggcttggagtagattcacctgggtcaatgaaggttaccgacttgcctcttctccttgtgggatatggttttggtgcctcttttgttgccctttttgctcagttgggtggtggaatatacacgaaagctgctgatgttggagctgatctggttggaaaagttgagcagggaataccagaagatgatcctcgtaacccagctgtcattgctgacttggttggtgacaatgttggagattgtgctgcccgaggcgctgatctttttgagagcatagcagcagaaattatcagtgcaatgatacttggaggaacaatggcacagcgctgtaaaattgaggatccgtctggctttattttgtttcctcttgttgtgcattcatttgatttggtggtgtcatcagtcggaattctctcaatcagaggaacacgtgactctgggctcatttcccctatcgaagatcccatggcaattatgcaaaaaggctactctgttactattatgcttgctgttcttacatttggagtgtctactcgttggctcctgtacacggaacaagcaccttctgcatggctaaattttgcattgtgtggcttggtggggatcatcacagcatatgcttttgtttggatttcgaagtattacacggattataaacacgagccggtccgccttttagctctttcaagttctacaggacatggaactaatattattgctggagtaagtttggggatggaatcaacagccctaccagttctagtgataagtgttgccattatatcatcctattggctggggcagacctctggcttggtggacgagtctggcaacccaactggtggtctttttgggacagctgtagcgacaatggggatgcttagcacagcagggtatgttctcaccatggacatgtttggtcctatagctgacaatgctggtggtattgttgagatgagccagcagcatgaaagtgtgagagaaatcacagatgttctagatgctgtgggcaacacaactaaagctactacaaaaggatttgccataggatcagcagcactggcatcattcctcctgtttagtgcatacatggacgaagtagcttcttttgctcaaatgccgttcaaggaggttgacatagcagtcccggagatttttgttggtggtttattaggctcgatgcttatattcctgtttagtgcatgggcttgttcagcagttggcaaaactgcacaggaagttgttaatgaggtcaggagacaatttatcgagaggcctggtattatggactacaaagagaagcccgattatggacgctgtgtcgcaattgtggcctctgcatccttaagagaaatgataaaacctggggctctagcaattatatcacccatggccgttggcgttgtcttccggattttgggccactccactggtcagcctcttcttggagctaaagttgtagcctccatgcttatgtttgcgacggttgctggtattcttatggcactcttcttgaacactgctggcggcgcctgggataatgcaaagaagtacattgagactggtgcccttggtggcaaaggcagtgagtcccataaggctgcggttacaggcgacacggttggagacccattcaaagacactgcaggaccatcgctgcacgttcttatcaagatgctcgccacgatcacactggtcatggctcccatattcttgtgattaaccaaccagatttatcaagcttgccattaaccctgcggagatgtatctatgcgacttgtagatgaggtgtttacctgcatgtgatgtaatgatccaatcggttttagtgtgactacatgttgtacccaaagaaagaaagaaagaaagcagcgatctgtacccaggttttaatggtccaatcggttttagtgtgactatatgttgtacccaaagaaagaaagaaatcagcgatctgtacccaggtttgacggtagatattattctgaatttctgacgggtagtgatggtgcaaatgccatattttgtgacggacgtcactgaactagtagcccaagtgttttgtatttgtttattgctgggaacattatgacatccgttgagcttagctgtaagaaaggaacgatccacgatggattttaggatcgtgactgggtctacaccttacctttgactcttcacattaacaaagaaactgatgttatgtaatggtgttaatatgaccgattgtgagcacttctaagaggattaatatttaatagcttccagcacagaaaacatgcgcagataacaaaagaaacttcatatcaatctcaacagaagctgc

SEQ ID NO: 205281 - DNA, 3591 bp, Zea Mays
ctccgtttctgtttgtgtgcgtgtctcggagaagctctccctcgcctcgcagatccgcggcctgctttgttgctgctttgccagcaagctgccgcgctcatcctcgcgcgacgccagcggcggggtggcccctctccagtgacccggcgactgctcccgtcggtgccgccgccgcctcctcctccgagatccattcccgtgcccgcggcaaggaccagatccatcaccgcgccacgagctacagcaggcgacatccgccccggggtcgcacgccgcctgctagccgcggacgtcccgggagccccgttcgcagacgcctgcacgcgcgcggcgcgcaacgagctccgccacctgccgtcgtgaagcagcgacttgacggcaaaaggaccctttgaatcaaagagaagttcgtcactgaggctgaagaaaatctggatgtgtttacctttcagggcttactaattttgagaggtgtctgacatagactaaaaaaaaatcagcgccagggctcagggagcgacctaccccaaggtggggagttggttccttttccagtaataatgagggcaaattcatatcccatcatgatggaagaggacatggaaaatggaaggtcgtatcaagaaagaccaagggctttttcaacagtacgaagcaaatcatctgtaccgctggccttccgtttgttgatgagggtaaatccccgtgccgtgattattctttctcttttggtcttcagtggtgttttgtatgtgggagctagtacatcaccaattctggtctttgtgttctgtatatgtactctcagtctattcttctctgtctaccttacaaagtgggttcttgctaaggacgaaggacctccagaaatgtccgagatatctgatgccataagagatggcgctgaaggtttttttaggacacaatatggaactatttctaaaatggcatttattctggcctttgtcatccttggcatttatattttccgcactaccaccccacagcaggaggcatctggcttgggaagggcaacattagcctatattacagttgcctcttttctccttggagcgttatgttctggaatagctggttttgttggaatgtgggtgtccgtacgtgcaaatgtacgagtttcaagtgctgctcgtcgctctgcaagggaatcattgcagattgccgtccgtgctggtggtttctcagccattgtggttgtttgcatggctgtatttggcgtggcaatactgtactcaacattttatgtttggcttggagtagattcacctgggtcaatgaaggttaccgacttgcctcttctccttgtgggatatggttttggtgcctcttttgttgccctttttgctcagttgggtggtggaatatacacgaaagctgctgatgttggagctgatctggttggaaaagttgagcagggaataccagaagatgatcctcgtaacccagctgtcattgctgacttggttggtgacaatgttggagattgtgctgcccgaggcgctgatctttttgagagcatagcagcagaaattatcagtgcaatgatacttggaggaacaatggcacagcgctgtaaaattgaggatccgtctggctttattttgtttcctcttgttgtgcattcatttgatttggtggtgtcatcagtcggaattctctcaatcagaggaacacgtgactctgggctcatttcccctatcgaagatcccatggcaattatgcaaaaaggctactctgttactattatgcttgctgttcttacatttggagtgtctactcgttggctcctgtacacggaacaagcaccttctgcatggctaaattttgcattgtgtggcttggtggggatcatcacagcatatgcttttgtttggatttcgaagtattacacggattataaacacgagccggtccgccttttagctctttcaagttctacaggacatggaactaatattattgctggagtaagtttggggatggaatcaacagccctaccagttctagtgataagtgttgccattatatcatcctattggctggggcagacctctggcttggtggacgagtctggcaacccaactggtggtctttttgggacagctgtagcgacaatggggatgcttagcacagcagggtatgttctcaccatggacatgtttggtcctatagctgacaatgctggtggtattgttgagatgagccagcagcatgaaagtgtgagagaaatcacagatgttctagatgctgtgggcaacacaactaaagctactacaaaaggatttgccataggatcagcagcactggcatcattcctcctgtttagtgcatacatggacgaagtagcttcttttgctcaaatgccgttcaaggaggttgacatagcagtcccggagatttttgttggtggtttattaggctcgatgcttatattcctgtttagtgcatgggcttgttcagcagttggcaaaactgcacaggaagttgttaatgaggtcaggagacaatttatcgagaggcctggtattatggactacaaagagaagcccgattatggacgctgtgtcgcaattgtggcctctgcatccttaagagaaatgataaaacctggggctctagcaattatatcacccatggccgttggcgttgtcttccggattttgggccactccactggtcagcctcttcttggagctaaagttgtagcctccatgcttatgtttgcgacggttgctggtattcttatggcactcttcttgaacactgctggcggcgcctgggataatgcaaagaagtacattgagactggtgcccttggtggcaaaggcagtgagtcccataaggctgcggttacaggcgacacggttggagacccattcaaagacactgcaggaccatcgctgcacgttcttatcaagatgctcgccacgatcacactggtcatggctcccatattcttgtgattaaccaaccagatttatcaagcttgccattaaccctgcggagatgtatctatgcgacttgtagatgaggtgtttacctgcatgtgatgtaatgatccaatcggttttagtgtgactacatgttgtacccaaagaaagaaagaaagaaagcagcgatctgtacccaggttttaatggtccaatcggttttagtgtgactatatgttgtacccaaagaaagaaagaaatcagcgatctgtacccaggtttgacggtagatattattctgaatttctgacgggtagtgatggtgcaaatgccatattttgtgacggacgtcactgaactagtagcccaagtgttttgtatttgtttattgctgggaacattatgacatccgttgagcttagctgtaagaaaggaacgatccacgatggattttaggatcgtgactgggtctacaccttacctttgactcttcacattaacaaagaaactgatgttatgtaatggtgttaatatgaccgattgtgagcacttctaagaggattaatatttaatagcttccagcacagaaaacatgcgcagataacaaaagaaacttcatatcaatctcaacagaagctgc

SEQ ID NO: 205282 - DNA, 3509 bp, Zea Mays
ctccgtttctgtttgtgtgcgtgtctcggagaagctctccctcgcctcgcagatccgcggcctgctttgttgctgctttgccagcaagctgccgcgctcatcctcgcgcgacgccagcggcggggtggcccctctccagtgacccggcgactgctcccgtcggtgccgccgccgcctcctcctccgagatccattcccgtgcccgcggcaaggaccagatccatcaccgcgccacgagctacagcaggcgacatccgccccggggtcgcacgccgcctgctagccgcggacgtcccgggagccccgttcgcagacgcctgcacgcgcgcggcgcgcaacgagctccgccacctgccgtcgtgaagcagcgggcttactaattttgagaggtgtctgacatagactaaaaaaaaatcagcgccagggctcagggagcgacctaccccaaggtggggagttggttccttttccagtaataatgagggcaaattcatatcccatcatgatggaagaggacatggaaaatggaaggtcgtatcaagaaagaccaagggctttttcaacagtacgaagcaaatcatctgtaccgctggccttccgtttgttgatgagggtaaatccccgtgccgtgattattctttctcttttggtcttcagtggtgttttgtatgtgggagctagtacatcaccaattctggtctttgtgttctgtatatgtactctcagtctattcttctctgtctaccttacaaagtgggttcttgctaaggacgaaggacctccagaaatgtccgagatatctgatgccataagagatggcgctgaaggtttttttaggacacaatatggaactatttctaaaatggcatttattctggcctttgtcatccttggcatttatattttccgcactaccaccccacagcaggaggcatctggcttgggaagggcaacattagcctatattacagttgcctcttttctccttggagcgttatgttctggaatagctggttttgttggaatgtgggtgtccgtacgtgcaaatgtacgagtttcaagtgctgctcgtcgctctgcaagggaatcattgcagattgccgtccgtgctggtggtttctcagccattgtggttgtttgcatggctgtatttggcgtggcaatactgtactcaacattttatgtttggcttggagtagattcacctgggtcaatgaaggttaccgacttgcctcttctccttgtgggatatggttttggtgcctcttttgttgccctttttgctcagttgggtggtggaatatacacgaaagctgctgatgttggagctgatctggttggaaaagttgagcagggaataccagaagatgatcctcgtaacccagctgtcattgctgacttggttggtgacaatgttggagattgtgctgcccgaggcgctgatctttttgagagcatagcagcagaaattatcagtgcaatgatacttggaggaacaatggcacagcgctgtaaaattgaggatccgtctggctttattttgtttcctcttgttgtgcattcatttgatttggtggtgtcatcagtcggaattctctcaatcagaggaacacgtgactctgggctcatttcccctatcgaagatcccatggcaattatgcaaaaaggctactctgttactattatgcttgctgttcttacatttggagtgtctactcgttggctcctgtacacggaacaagcaccttctgcatggctaaattttgcattgtgtggcttggtggggatcatcacagcatatgcttttgtttggatttcgaagtattacacggattataaacacgagccggtccgccttttagctctttcaagttctacaggacatggaactaatattattgctggagtaagtttggggatggaatcaacagccctaccagttctagtgataagtgttgccattatatcatcctattggctggggcagacctctggcttggtggacgagtctggcaacccaactggtggtctttttgggacagctgtagcgacaatggggatgcttagcacagcagggtatgttctcaccatggacatgtttggtcctatagctgacaatgctggtggtattgttgagatgagccagcagcatgaaagtgtgagagaaatcacagatgttctagatgctgtgggcaacacaactaaagctactacaaaaggatttgccataggatcagcagcactggcatcattcctcctgtttagtgcatacatggacgaagtagcttcttttgctcaaatgccgttcaaggaggttgacatagcagtcccggagatttttgttggtggtttattaggctcgatgcttatattcctgtttagtgcatgggcttgttcagcagttggcaaaactgcacaggaagttgttaatgaggtcaggagacaatttatcgagaggcctggtattatggactacaaagagaagcccgattatggacgctgtgtcgcaattgtggcctctgcatccttaagagaaatgataaaacctggggctctagcaattatatcacccatggccgttggcgttgtcttccggattttgggccactccactggtcagcctcttcttggagctaaagttgtagcctccatgcttatgtttgcgacggttgctggtattcttatggcactcttcttgaacactgctggcggcgcctgggataatgcaaagaagtacattgagactggtgcccttggtggcaaaggcagtgagtcccataaggctgcggttacaggcgacacggttggagacccattcaaagacactgcaggaccatcgctgcacgttcttatcaagatgctcgccacgatcacactggtcatggctcccatattcttgtgattaaccaaccagatttatcaagcttgccattaaccctgcggagatgtatctatgcgacttgtagatgaggtgtttacctgcatgtgatgtaatgatccaatcggttttagtgtgactacatgttgtacccaaagaaagaaagaaagaaagcagcgatctgtacccaggttttaatggtccaatcggttttagtgtgactatatgttgtacccaaagaaagaaagaaatcagcgatctgtacccaggtttgacggtagatattattctgaatttctgacgggtagtgatggtgcaaatgccatattttgtgacggacgtcactgaactagtagcccaagtgttttgtatttgtttattgctgggaacattatgacatccgttgagcttagctgtaagaaaggaacgatccacgatggattttaggatcgtgactgggtctacaccttacctttgactcttcacattaacaaagaaactgatgttatgtaatggtgttaatatgaccgattgtgagcacttctaagaggattaatatttaatagcttccagcacagaaaacatgcgcagataacaaaagaaacttcatatcaatctcaacagaagctgc

SEQ ID NO: 205283 - DNA, 4417 bp, Zea Mays
caggattatcgtaatctgataaagtttatctgctattgatccaaacagtttggattctttgtcttgaatagtgtgctgcaacaaagaatctccatggagtattaaccttacgttgaattttgttggatactgtacacggtacaaattttgaaaatctccgggttcccaaacgccacctttgttgattgtgagatcagatgaggaatgtcctgagacgttggcgcatcatgtgttggtgaaggttagaggagaggaagatctctgagtaagaagaaacaccacaatagaaaaatcagttgtctccacaaaacgctcggactcgtatagccggtccttctctctgcgttctcccttgggctcccacgtccgcctaacaagccgccattctcccctccgtctggagagaaagagagattcacctctcttcccagggccgccagacgcaagaagaacttctaacggagttgtggatgaaaagagctgacagtaggatgttgacttgtagctgtttagatgacaccggatgaaaatgcccttattactctaaagaaaggtagcaagcttatcaagtatagccggaaaggaaaacccaagatccgttctttcagactttctagtgacgaaacagcattaatttggtattctcacaaaaaggaaaagttcctcagactgtcctctgtctctaaagtcattcctgggcagagaactgctgtttttaggaggtttctacgccctgagaaggactatctatcattttcactcatatacaagaacggccaacgttcccttgatctggtttgcaaggatcaagttgaagttgaagtttggttttcagcactcgaggcattaataagttcgtgccatagaaattcttcagttgatgaacacaaggatagagtatcattttctgatgatgtatcatattatcgagatggacatccgtatgattcaacactagatattgcttcaagtatatcacgtagttttaacacagcagattattgccgaggcagttcttttagtttcagaagatcagatgctggatctgatcgtgcaaatatgataagaactagtggtgcagatagtactcgacttagtatttccagtgcccctagctcttccagtcagggttctggaacagatgacatagaatcccttggtgatgtctatgtatggggtgaagtttggactgatgcggccccatcagatggacacacaagctcgtcttgctcaaaagtagacgttttgatcccgaagcctttagaatcagatgtcgtcttagatgttaatcagatagtatgtggttcaaggcatgttgctcttactaccaggcaaggggaggtgtttacatggggcgaggaacttggtgggcgccttggtcatggaactgatacagatattagtcgtcccaagcttgttgagtcactatccgtgaccatagttgattttatttcatgcggagagttccatacctgtgctatatctgcttctggtgatctgttcaactggggggatggctcttaccgtgctggattgcttggatacgacactggggctagccattggcttccaaagcgtgtctcagggcccttggaggggcttcaggtactgtctgttgcatgtggctcgtggcattcagctctgatcacatcaactggaagactttacacatttggtgacggaaaattcggtgctcttgggcatggaaaccgtgaaagcgctgcgtacccaaaagaagtggaagccttgaatggatttagaactgtcaaagttgcatgcggagtctggcattctgcagcaattgtggaggcctctgttcagacaggcatgaatgtggtgtctaagaagctgtatacgtggggtgatggagataagaatcgtttaggccaaggggacaaagaagctaggctgattcctacctgtcttcaagctcttcttgagcacaattttcatcagctgggatgtggacagaacatgactgttgcccttgctacatccggtcatgtgtataccatgggtagttctgacaatggtcagctcggaaatccaaaatctgatggtaaacatccttgccttgtcaaagacaaactagctaacgagttggttgaggagatctcatgtggagccgcccatgttgcagttctaacgtcaagaagcgaagtatacacgtggggactgggtgccaatggaagacttggtcatggtgacctcaacgacaagaagacaccaactattgtcgaagcacttaaagatcggcatgtcaaaagtatatcatgcggctcaaacttcacaacatgtatctgcatacataggtgggtgtcaggtgcagatcagtctgtttgcacaggttgtaggcaggcatttggtttcacgaggaagagacataattgctacaactgtgggctagtacactgccatgcttgcagttcaagaaaagtgctcaaggctgctctggcaccaactcctggcaagccgcatcgtgtatgtgattcatgtttcctgaaactgaagaatgcagacaccagcagcagcaatgcgaacagaagaaatgccgctactcgtcgctctacggacagcagagaaaaaccagaaataaggcctcccaggcttgtggcaacaccgtcagcagagccaggcaagtacatggaggtaaaagcatctaagagcgatatgaaacctgcagattcgatcatgaaggcatcacaagcttcggctctactgcagttcaaagatcttggttttggtgcccaatttggtgggcttcagcctatgggaatgccaccggcattagctatgtcacctgcgataccggcattttctttggcacctccatctccatatacaaagaaaatgaaatcacctcctacttctgctatcccccagagctctaaagtcgatgttgatcacttgcagaagtcaaatgacttgctgaatcaggaagttctgaaattgcaatctcaggttgaggatttgaaacaaaagtgcgaagcacagcacgagcagcttcagaaatcagataaaaaagctaagtcagttgcctctatggccactgaagaatcctcgaaacgtaatgctgccgtggagtttgttaaatttcttgataatgagctcaagggtattgcagataaacttcctgttgacgttgccgacagcttgaaagctttgcaaatgcgaacacagtcactactgagggaacaatcaggtcaccccttagagctcgtgaatccaatggaacgtgatcatcttcacctgtccagtggtggaagtggaagatatgatttggtcactcataagtcaggaggtgtaggttacctgacaatgtctcaagatggcagttctgccagtggctcagccatgtccatcacgagtgaatccccatcccatcgtttcatggaaaacagttcaaaggcccatggtgattttgccccgaagcagggtacccatggagaggtccagttaattgagcagtttgaacctggcgtatatgtgacacttatccaactaaaggacggtaccaaagtattcaagcgggtccgattcagcaagaggagattcgcagagaatcaggctgaagaatggtggagggaaaaccaagagcgggtcttcaagaaatacagccacccaactcatgcaccacatggaaacacaacttctcacgaggaagagcatcattcatgatctccaaatcaggtccacacaggtcgtcatgtaggaggtttatcacgcgaaataggacatggcgaagaacaataacgatcaaacaggagaagtggaccggagacgacgatgaagcaaggaggtgagacgaggaaccatagctggacgacgacgatgtggtatgctggtcgtggtcacaatggagatctagacgacaagttggagtcacggtagtgctgcgggttgaggttgtcaccttccaggacggtggtctgaggtcgcgatagtggatggcaagtcgtggttgttgcagcaatcgggtcgaggccatgccaacctccaagacggtggttcgagatcgcggctctagacaacgtcggggtcacaacaacgctaagggtcgaggtcacatcgtcctcctggccagtggtccgaggttacggtggagctttgtcgcagtaggtactcgaggtcgtgggctcatagtggctttgatgaattcgctgatgcgctgttgggggaggaaaagacaggcggatgtagatggaggaaatgagcgaaaaattgtttgtgctatgttttttgttgtagaaatggcgcacaagtgtatttcgggagtagctctaggttcctaaacgtagggagaaaattgggttgggtaggagctttgtaaatttaccaaataggttttacacaactgttggagaggtgtttgtttgtaacagcttcctaaatctatgatttaggaagttgttttcat

SEQ ID NO: 205284 - DNA, 3090 bp, Zea Mays
ttctgcttcttttgccaccccgacaatgcctcccgctaccgtcaccctgctaccagcgtgcgccgtgctgctgctgtgctgccgtctctctccggcggccgcggcgtcgcccgccgatgtcggcgggggcggggccaggcgggtgctccaccagccattgttcccaatcgagtggaccccgccgccgtcgccgccgcctccgccggcaccggacttcacctccgatccggcgacgccggacggcccacccggcgacttcttccctccggcgccaccgacggcgccggccggcggcggaggtacgagcacgacgacgacgacgacgtcgtcctcgccgaccaccgtcgccgccgacgtcccgagcgcctcgtcaggatccggtgacgccggacaccacggcggccctgcgaaggggaccatcgtcgcggcgggggcggccgcggccgcggccatcgcgctgctggccttcgcgtgcgccttcctcgtcgcgggccgcgcgcgccgccacggggactcgcagaagctgctcagccccgaccgcggctccgcgcgccaccgctccgcgccctcggccgccgacttcctctacgtcggcacggtggagcccgccacgccgggccgccaccgtgggcccaccgccgccgacctcgttgggtccccgtaccgcaagctgcgcagcgagcgcgagcgcgcgcgccgcgggctgggccgcgcccgcgacgagcccaccgaccacccgagcccggagctccgcccgctcccgccgctgcgccgcgcggccacggtgggctccgacgacgacgatgcctactacacgccacgtcagcgctccgccggtggcggggtcggcggcgaaacgtggagcgaggccagcgcgtccagcccgcccaccaccaccaccgcgtcccgccgaagtctccccagcctcaccagcgactgctttcctccggtcgccgccattgctgcgccgacaccgtcccctgcgtggtcccgccgtacgcccccgcgcacgcgcttctctgccggctccacccctgacatcaaacaggtgatctcgccgtccccgcggtcggtgcaaccatccaaaccagcaccaacgccaccgccgcggccgccgccgacaccacctcctccaccgccgctgccgaagtctaccacagctccaaaacctcctcctcctccgccgccgccgccacgaatggttccatctaataccggcctgaagcccgcgcagccgctttccgaaccgacgtcgcgacgccggttgctcaagccgttaccacctgagggcccccgcattgccatgccgatgccgatcacggaggcaacggcacaggatagtatcgggagcgcgtcaatgcctaaacaggatgacgtggcagacggtatcgttggcaacggcgagccgcggccgaagctcaagccgctgcactgggacaaggttgaatgaggacatgatcgaggcattgttcatgaataactcaacgccgtccgcgctgccgagagatgcgggacggaagaccaccgtcccaccattcaggcaggaggagagggtgctcgaccccaagaaagcacagaacatcgccatcctgctccgtgcattgaatgttacgcgcgatgaggtctctgatgcactgttggatggcaacgctgaatgtttggggacagaacttttggagactttagtcaagatggctcctactaaagaggaagaactcagactacgagattataatggtgacgcatcgaagcttggttctgcagagcgctttctcaaagctgtgcttgatataccttttgccttcaagagagttgatgccatgctataccgagccaattttgaggccgaaataaattacttaatgaaatcttttgagacattagaggcagcctgcgaagatctcagaggcagcaggttgttcctgaaactactcgaggcggtgctgagaaccgggaaccggatgaatgtcggcacaaaccggggtgaggcaaaagctttcaagcttgacactctcctgaaacttgctgatgtcaagagcactgatggtaaaacaacgctgttgcatttcgtcgtccaagaaataattcgatcagaagatgcaaaatcagaaaaagaaagcgccatgattattcatagctctaaagacgagcagttgcggaagcaaggtctgaaacttgtctctggcctcagcagtgagctgggaaatgtcaagaaagcagccatgatggactttgatgtgttgcatggctatgttagtaagctagaaacaggcattgaaaagatcaagtcggtcttgcagctcgagaggcaatgcactcaaggccaaaagttctttacgacaatgcagagttttctgaagaaagccgagacggagatagacaaagtcagaggggaggagaagaaggccctggtgagagtaaaagacatcaccgagtacttccatggtgacaccgcgaaagaggaagcgcaccctcttaggatattcatggtggtgagggacttcctctcgacgttggatcatgtctgcaaggaggttggcaggttacagcaggacagaacggttattgggtcagccaggtctttcaggatttcagccacctcaatgccagttctaagtgtgtatggacaacgaagggagaacaactctgacgatgacagtgcatcatcctaggacaggacagcaaggctgagggacaaatcaccaagtcacaacactgaattttggaaggagcacagcacatcagctatgccatttttagctgctgaagcggatgtcgcattggcatttgccccgaggcacatgtttaaggttgggaggacgaaggtcgggagggggtggtatacttttggatcccgtggaaattctttttgtacaaaaggaaaataatcgtaacaggttctctctcttgttgggtgacttgcagaaactgaggtcgaggcttgaaaagctgcccactttcagtaagtagtgcactgcagcttctgggatatggcttcttatgtaactagtatgctcatctgatataacctgggaacatgctatctctattgttcatgtaaattttgctctcctcgtaatatatggtaac

SEQ ID NO: 205285 - DNA, 3053 bp, Zea Mays
ttctgcttcttttgccaccccgacaatgcctcccgctaccgtcaccctgctaccagcgtgcgccgtgctgctgctgtgctgccgtctctctccggcggccgcggcgtcgcccgccgatgtcggcgggggcggggccaggcgggtgctccaccagccattgttcccaatcgagtggaccccgccgccgtcgccgccgcctccgccggcaccggacttcacctccgatccggcgacgccggacggcccacccggcgacttcttccctccggcgccaccgacggcgccggccggcggcggaggtacgagcacgacgacgacgacgacgtcgtcctcgccgaccaccgtcgccgccgacgtcccgagcgcctcgtcaggatccggtgacgccggacaccacggcggccctgcgaaggggaccatcgtcgcggcgggggcggccgcggccgcggccatcgcgctgctggccttcgcgtgcgccttcctcgtcgcgggccgcgcgcgccgccacggggactcgcagaagctgctcagccccgaccgcggctccgcgcgccaccgctccgcgccctcggccgccgacttcctctacgtcggcacggtggagcccgccacgccgggccgccaccgtgggcccaccgccgccgacctcgttgggtccccgtaccgcaagctgcgcagcgagcgcgagcgcgcgcgccgcgggctgggccgcgcccgcgacgagcccaccgaccacccgagcccggagctccgcccgctcccgccgctgcgccgcgcggccacggtgggctccgacgacgacgatgcctactacacgccacgtcagcgctccgccggtggcggggtcggcggcgaaacgtggagcgaggccagcgcgtccagcccgcccaccaccaccaccgcgtcccgccgaagtctccccagcctcaccagcgactgctttcctccggtcgccgccattgctgcgccgacaccgtcccctgcgtggtcccgccgtacgcccccgcgcacgcgcttctctgccggctccacccctgacatcaaacaggtgatctcgccgtccccgcggtcggtgcaaccatccaaaccagcaccaacgccaccgccgcggccgccgccgacaccacctcctccaccgccgctgccgaagtctaccacagctccaaaacctcctcctcctccgccgccgccgccacgaatggttccatctaataccggcctgaagcccgcgcagccgctttccgaaccgacgtcgcgacgccggttgctcaagccgttaccacctgagggcccccgcattgccatgccgatgccgatcacggaggcaacggcacaggatagtatcgggagcgcgtcaatgcctaaacaggatgacgtggcagacggtatcgttggcaacggcgagccgcggccgaagctcaagccgctgcactgggacaaggtgcgggcgacctccgaccgcgccatggtctgggaccagctgaagtcaagctcattccagttgaatgaggacatgatcgaggcattgttcatgaataactcaacgccgtccgcgctgccgagagatgcgggacggaagaccaccgtcccaccattcaggcaggaggagagggtgctcgaccccaagaaagcacagaacatcgccatcctgctccgtgcattgaatgttacgcgcgatgaggtctctgatgcactgttggatggcaacgctgaatgtttggggacagaacttttggagactttagtcaagatggctcctactaaagaggaagaactcagactacgagattataatggtgacgcatcgaagcttggttctgcagagcgctttctcaaagctgtgcttgatataccttttgccttcaagagagttgatgccatgctataccgagccaattttgaggccgaaataaattacttaatgaaatcttttgagacattagaggcagcctgcgaagatctcagaggcagcaggttgttcctgaaactactcgaggcggtgctgagaaccgggaaccggatgaatgtcggcacaaaccgggaaataattcgatcagaagatgcaaaatcagaaaaagaaagcgccatgattattcatagctctaaagacgagcagttgcggaagcaaggtctgaaacttgtctctggcctcagcagtgagctgggaaatgtcaagaaagcagccatgatggactttgatgtgttgcatggctatgttagtaagctagaaacaggcattgaaaagatcaagtcggtcttgcagctcgagaggcaatgcactcaaggccaaaagttctttacgacaatgcagagttttctgaagaaagccgagacggagatagacaaagtcagaggggaggagaagaaggccctggtgagagtaaaagacatcaccgagtacttccatggtgacaccgcgaaagaggaagcgcaccctcttaggatattcatggtggtgagggacttcctctcgacgttggatcatgtctgcaaggaggttggcaggttacagcaggacagaacggttattgggtcagccaggtctttcaggatttcagccacctcaatgccagttctaagtgtgtatggacaacgaagggagaacaactctgacgatgacagtgcatcatcctaggacaggacagcaaggctgagggacaaatcaccaagtcacaacactgaattttggaaggagcacagcacatcagctatgccatttttagctgctgaagcggatgtcgcattggcatttgccccgaggcacatgtttaaggttgggaggacgaaggtcgggagggggtggtatacttttggatcccgtggaaattctttttgtacaaaaggaaaataatcgtaacaggttctctctcttgttgggtgacttgcagaaactgaggtcgaggcttgaaaagctgcccactttcagtaagtagtgcactgcagcttctgggatatggcttcttatgtaactagtatgctcatctgatataacctgggaacatgctatctctattgttcatgtaaattttgctctcctcgtaatatatggtaac

SEQ ID NO: 205286 - DNA, 2376 bp, Zea Mays
aatagtcatgtgcgctcgacgcgtcgcgtgcctctctctccgctccctctgacttgttcgcttgccgtcctcgctcgcggcaaagctgcagcgtgtctcggctccggcgcgccaccgctcgggacgcccgacggatccgctcccgcgtgcgctcgatatcccttgcttcaacggtccaagtcaacccccccaccaaatcgccgtccgtccggccgctgccgcaccctagcaggatcgcagcgtgcacagctcttcttcaatctgcaggattgcagccacgcacaagtcgtagctgctcgctcaattgtacttcagatagcatcttctttgattgtcctcttctgcatactcttgttgatggtgctatcatattcttgaaaaccttccgtgctgtctatctggcattcttctgtctctgtacttgtcctttaacagtcacttgcttcgaggttccattttccatgtggatacccatggctgaatccactttgagattattacataccttttgttctagctgtttctgttgtttttctttctatccatacattatcacttggctcccccaatattattggttcatgtgctctttccaaagtttccttggaactttgagctttggaagatgccaaggagaacaggaaatgctgcttcgaccaaatcagttgaattggtcaaacaagaccaaatggagtttgatcatcctgatgaggtagatgaagaggaagaagttgagtatgaagaaattgaggaggaggttgagtatgaagaggtagaggtagaggaggaggaggaggaggaggaggaggatgaaattgaaggtgtgcgtgaagttgatgctaatcatgacagtaaaatagtggatgatgatcccaaggatgggaatgaaaaagaaaagcatgctgagcttcttgctcttcctcctcatggagctgaagtttatgttggggggctttcctctgatgtatcttctgaagatctcaaacaactatttgaatctgttggagaagttgcagaagtgcgaatgcgaggaaagggggataacaagacatatgcttttattaatttcagaactaaagagatggctttaaaggccatccaaaagttgagcaataaagacctaaagggaaaaaagataaaagtttcatcctctcaggctaagaataggctttttattgggaatgtaccccatgattggacacctgatgatttcaaaaccgcagtggaagaagttggtcctggagttttaaaagttgatctcatgaaggctcaggtcgcaataagggttatggctttattgaatactacaaccaggcatgtgcagagtatgctaagcagaagatgtctactccagaattcaaactagatacaaatgctcctactgtcagctgggcagatcataagaatgctagtgaagctacatctacttcacaggttaaatctctatatgtcaaaaacctccccaagactgttactcaagagcagctgaaaaagctgtttgagcatgttggagaaatcacaaaagttgttattccacctgcaaaatctgggcatgaaaatcggtacggttttgttcattttaaggaacggtccatggttatgaaggctctgaagaacactgagagatatgaacttgatggtcagctgctggattgttcacctgcgaaacctcctgctgataagaaggatgatactggatcatctcctactgcaaaaggacgtccattacccccaagttatgccccacttggatatggactagcgggagcttataatccacttggaaaaggactggcaggtgcttacaattcccctggaaacggactggcaggtgcttatggcgtgctttctgctcatgccgcacagccaatgttgtatgctccaggtgcttctccaggttcaacaatgatcccaatggtcctaccagacggccgtcttgtatacgtaccacagactgcagggcagcagcctctgcatgtgacttcgcctctgcctcagcaaggcggtcgtcgattcggcggcggtggcggatccagctccggcggaaagcgacagaggggagatgaccgtggcagtaacagcaacagtagccgcaggggctggcaccgtccgtattgatgtttgcaatgccgctgatttgcaattagaagttagaacccagcaattagcatatttatcgcagtaccatgctggaaactgtactttgaattatttgtttttcctgtgtgcttcgtagcaggcctgccctaaaaagaacgatagtaccggaaggggcaaatgtagtggtaatatactctatacatttgtaaccatctccatcctgccgttgaccgtcttaggttattaaaataaatatatttcttccgttctttttta

SEQ ID NO: 205287 - DNA, 2053 bp, Zea Mays
aatagtcatgtgcgctcgacgcgtcgcgtgcctctctctccgctccctctgacttgttcgcttgccgtcctcgctcgcggcaaagctgcagcgtgtctcggctccggcgcgccaccgctcgggacgcccgacggatccgctcccgcgtgcgctcgatatcccttgcttcaacggtccaagtcaacccccccaccaaatcgccgtccgtccggccgctgccgcaccctagcaggatcgcagcgtgcacagctcttcttcaatctgcaggattgcagccacgcacaagtcgtagctgatgccaaggagaacaggaaatgctgcttcgaccaaatcagttgaattggtcaaacaagaccaaatggagtttgatcatcctgatgaggtagatgaagaggaagaagttgagtatgaagaaattgaggaggaggttgagtatgaagaggtagaggtagaggaggaggaggaggaggaggaggaggatgaaattgaaggtgtgcgtgaagttgatgctaatcatgacagtaaaatagtggatgatgatcccaaggatgggaatgaaaaagaaaagcatgctgagcttcttgctcttcctcctcatggagctgaagtttatgttggggggctttcctctgatgtatcttctgaagatctcaaacaactatttgaatctgttggagaagttgcagaagtgcgaatgcgaggaaagggggataacaagacatatgcttttattaatttcagaactaaagagatggctttaaaggccatccaaaagttgagcaataaagacctaaagggaaaaaagataaaagtttcatcctctcaggctaagaataggctttttattgggaatgtaccccatgattggacacctgatgatttcaaaaccgcagtggaagaagttggtcctggagttttaaaagttgatctcatgaaggcaccaggctcaggtcgcaataagggttatggctttattgaatactacaaccaggcatgtgcagagtatgctaagcagaagatgtctactccagaattcaaactagatacaaatgctcctactgtcagctgggcagatcataagaatgctagtgaagctacatctacttcacaggttaaatctctatatgtcaaaaacctccccaagactgttactcaagagcagctgaaaaagctgtttgagcatgttggagaaatcacaaaagttgttattccacctgcaaaatctgggcatgaaaatcggtacggttttgttcattttaaggaacggtccatggttatgaaggctctgaagaacactgagagatatgaacttgatggtcagctgctggattgttcacctgcgaaacctcctgctgataagaaggatgatactggatcatctcctactgcaaaaggacgtccattacccccaagttatgccccacttggatatggactagcgggagcttataatccacttggaaaaggactggcaggtgcttacaattcccctggaaacggactggcaggtgcttatggcgtgctttctgctcatgccgcacagccaatgttgtatgctccaggtgcttctccaggttcaacaatgatcccaatggtcctaccagacggccgtcttgtatacgtaccacagactgcagggcagcagcctctgcatgtgacttcgcctctgcctcagcaaggcggtcgtcgattcggcggcggtggcggatccagctccggcggaaagcgacagaggggagatgaccgtggcagtaacagcaacagtagccgcaggggctggcaccgtccgtattgatgtttgcaatgccgctgatttgcaattagaagttagaacccagcaattagcatatttatcgcagtaccatgctggaaactgtactttgaattatttgtttttcctgtgtgcttcgtagcaggcctgccctaaaaagaacgatagtaccggaaggggcaaatgtagtggtaatatactctatacatttgtaaccatctccatcctgccgttgaccgtcttaggttattaaaataaatatatttcttccgttctttttta

SEQ ID NO: 205288 - DNA, 1134 bp, Zea Mays
cggtcacctccagccctagcgccatctactctgtacccccaccgctaacctcctcagctctggcctgcccgcgctcctcctcgttgcctggatccggcagcccctccatgctcatccgcccctttcccgctctctcctcgaccggctcgctcccgcttgcaaccacccacaccctgttctgctccagagacagtcctgacggcgctgaaggaggagacgcagcagcggatggatgacacatcgattggaggtcattggtggccactcacgcctcctcagacctcaccatcacttcgtcgtcagcgcaggtttggccaacggcccccgaccggatcgcaggtcctcctcacggcacctataaattttgtatgccttcacgccgtgaagccacatttgcggccattggcaatggctgtatccactgtttcgatccatatatttggtgatgtcccttcttcacctcttgttgggctgcttcaggacaaaatcaataactggagggagacagctcttatattgacatccatccttttcgctgcagttgtgttctggttcattggtgtgtctgaggctgcacaagttgctcttgatcatcttttcaaccaaggccacaatctcgtaacagaaaatgagatttctgatacctttactaggctggttgaaaggctaccacaagtggtacttggaagcgaggagacaaccgcactttcacatgctaggatgttgttggctctgaccttttatgctggtcatagctcacagttttctggttccatggacaagctaattgtatcaaagccactatctatcgggtatctttattcagttgctgagttgaagagtggcgcctattctaaagatacaactaacatatctctgcatgccacgtcaacatctgcagcctccaaaatatctgttatccatgataatgctttgccaaatgcattacttggtacagttgaatatgagttgccccatgtgcctccatggtttattcatgctggtagccagaagctttatggggttcttgctggaataattagacttgttggcctatcaacagtgtcaggatagcatactcatacagtaatattgttgcatgtcgctcttaacaaatttcatttaggaaccggg

SEQ ID NO: 205289 - DNA, 871 bp, Zea Mays
tgcagttccacacgtgaaatagccatatggatatgtaacaacataaattttttcagtgggaaataagtttctataatacatttatgcacccagaggggcgagggttgttcagtgctttgacatgtgtgcaactattcaagcacaatggttagatgatatccccattcattttagattattacattgtggtgttcgacttcttcagtcaagcagcaatcatgcaacatgccttactgtagtttgtatatttgactgtgaatatttgaacccactgttacaattgttgctaattgaggtcagatttcagaggccaaataattctggtatctgcagagttggaagatacaacatctctgcaaaatataggggtaaggttagggatggcaatgggtacggtgggcagatggttaacgggcatccaccggaagcgcacatctgtcccacgcttcttgcccggtcatcctgcgtcacgcgcaaagtacacatctatatcttcctcgccagggtatcgcctgacaactacatcacgtgcaaagcgcacatctatttcccctccccgcttgtgtcacacaagaagcacacatttgttttcccctcccccgataccgagttaaagctagaagcaaagcttgcaacccaagcctttcctagccacacgaatgagcgcctccagacgaagctcaaagggcggtggggtaaaaaaggaaaatgtctggactccatcctccacatcctgcacgcgggcatcgccgcatgcctcgtggccctcctcgccgatggctccaactcacacggttgcagcgtaccgctcgccgcgcgcgtcatcgccgaggccaaccttttagagtcaatggatccatgcgcgagctag

SEQ ID NO: 205290 - DNA, 1214 bp, Zea Mays
tttacctcaatttggtgcttgaatatgtgccagaaactgttcaccgtgttattaaacattacaataagatgaaccaacggatgccattgatttatgttaaactttatatgtatcagatttgtagagctttggcttaccttcacaactgcgtaggagtgtgccacagagatataaagccacaaaatattctggtgaacccacatacccatcagctgaagttgtgtgacttcggcagtgccaaagtcttggtacaaggggaaccaaatatttcatatatttgttctagatactacagagccccagagctcatatttggggctactgagtatacaacagctattgacgtgtggtctgctggttgtgtacttgctgagcttcttctagtggtgtcgatcagcttgttgaaattattaaggttctaggtactccaacacgggatgaaattaagcgcatgaatccaaactacaccgaatttaagtttccgcaaatcaaagctcacccatggcacaaaatcttccacaaaagaatgccatctgaagctgtagattttgtgtctcggcttctgcagtactcaccaaacctccggtgcacagcattggaggcgttaatccatccattctttgatgaactgcggtacccaaactcacgtctaccaaatggccgttcccttccccatctcttcaattttaaacctaatgagttgagaggagtaccagaggagtttgttgtgcaattgatccctcagcatgctaagaagcaatgtgctttcttaggagtttgagaaagcagttcaattttattccagaaaagaaaaaagagagaggatgcagcagttgagaggttacctgagtattgattacttacgttctgtttaaccgcacagtagcattagcctacagtattatcgactaggcaacgtgtgctgttatctttcacgacggcttttacatcgcaatgttctaccacggtggtgggatctttttcaccacattctgtaaagcagaagaagacgtaaatcgactggtcacccgttcttgtggtctgtatattggtctcccccaatcttgagaacacgttcttttgtttttggagatggattcatttcgtatctgtatcactatcaccaaatgaaacaagaactcatgtattcttgaactggattcagttacatgagagtcaaaccatgtcctttctctaaggtcatccacatgtct

SEQ ID NO: 205291 - DNA, 1259 bp, Zea Mays
  misc_feature (1)..(1): n is a, c, g, or t
ntttacctcaatttggtgcttgaatatgtgccagaaactgttcaccgtgttattaaacattacaataagatgaaccaacggatgccattgatttatgttaaactttatatgtatcagatttgtagagctttggcttaccttcacaactgcgtaggagtgtgccacagagatataaagccacaaaatattctggtgaacccacatacccatcagctgaagttgtgtgacttcggcagtgccaaagtcttggtacaaggggaaccaaatatttcatatatttgttctagatactacagagccccagagctcatatttggggctactgagtatacaacagctattgacgtgtggtctgctggttgtgtacttgctgagcttcttctaggtcagcctgtttttcctggggacagtggtgtcgatcagcttgttgaaattattaaggttctaggtactccaacacgggatgaaattaagcgcatgaatccaaactacaccgaatttaagtttccgcaaatcaaagctcacccatggcacaaaatcttccacaaaagaatgccatctgaagctgtagattttgtgtctcggcttctgcagtactcaccaaacctccggtgcacagcatttcttctctctctaacagttggaggcgttaatccatccattctttgatgaactgcggtacccaaactcacgtctaccaaatggccgttcccttccccatctcttcaattttaaacctaatgagttgagaggagtaccagaggagtttgttgtgcaattgatccctcagcatgctaagaagcaatgtgctttcttaggagtttgagaaagcagttcaattttattccagaaaagaaaaaagagagaggatgcagcagttgagaggttacctgagtattgattacttacgttctgtttaaccgcacagtagcattagcctacagtattatcgactaggcaacgtgtgctgttatctttcacgacggcttttacatcgcaatgttctaccacggtggtgggatctttttcaccacattctgtaaagcagaagaagacgtaaatcgactggtcacccgttcttgtggtctgtatattggtctcccccaatcttgagaacacgttcttttgtttttggagatggattcatttcgtatctgtatcactatcaccaaatgaaacaagaactcatgtattcttgaactggattcagttacatgagagtcaaaccatgtcctttctctaaggtcatccacatgtct

SEQ ID NO: 205292 - DNA, 1484 bp, Zea Mays
aggcacactgatggccccgccagatccaagccgcgacccagacggcaagatagagcgagcgacctctcgattctccccatcccgccgtgcttcccgtcttcaccaaatccttcgccacgatggcgcgcctgctcatccccctccccttcgccgccgcctctgcctcatcgctccacctcgccgtctcccgccttcctctcgccgcggtctccgccgcgcgtcgcgagtgtctctttgggggaagggtggtaggaggagtggtgagggcgcccgcgaggctttctaagcgcgggttgtgcgccggcgcagaggctggcgactcggccgtcacggtggaggccatggaatgggtcaagaaggacaggaggcgcctgctccacgtcgtctaccgcgtcggggacctcgacaagacgatcaagttctacacggagtgcctgggcatgaaactgttgaggaagagggacattcccgaggagaggtacaccaatgcctttctggggtacgggcctgaggattcacattttgttgtggagctcacttacaattatggtgtggagagctataacatcgggactggttttggccactttggaattgctgttgaggatgttgcaaaaacagtggaacttattaaagcaaaaggaggaacagtcacaagggagccaggccctgtcaaaggtgggaaatcagtaattgcctttattgaggatcctgatggttacaagtttgagcttatagaaagagggcctactcccgagcctttgtgccaggcatttggcatggaacttcttcgcaagcgagacaattctgagtacaagtatacgattgcgatgatgggatatggtccagaagacaaaaatgctgtattggagttgacctacaactatggggtgaaggaatatgataagggaaatgcttatgcacagattgctattagtactgatgatgtctacaaaactgcggaagcaattagagtaaatggtggacaaattactcgtgaacctggcccattacctggcatcaccaccaagataactgcatgcacagatccagatggctggaaaacagtgtttgtcgataacatagattttctgaaggagttggaagaatgagctttgctagagatctcaacttggtacatcaagctccatacggttgcaccccgtgagttccatgcatgacctgcaaaatctttgtaaagccacagcctcaaactgaggattgtagataggtcgtccaatctacggcatcatcgcaattgatagttgatagagcattagattttccttgcagatctatatagatgcgcaaccgtttttgtattatgcattttaatgcataagttcaatggaaatgattcatgggtaagaaaatcgtcttctttcaagcggcaatataagggctggtttggtgacttgaatagcaagtgatttatttttccatgaattctctccaatttcattgtcaacaaaccacaaaccagc

SEQ ID NO: 205293 - DNA, 1671 bp, Zea Mays
agaagctccgtccaggataaacgatgctccataaattatgaagcagatgcccccgccacctaaggatttggagattgctatagttcggagctcgagctgcccttcgatcgaaccaagaacaaccctgctgccctcacaacatcaaagtttggtatcagcaagatggagcttctcaaggcatgcttttgtagggagtgactgctgatgtagaggaactcatggatgaagatcattgatccctttcatgtcatggtctattcaaaaggaaaatccacttctgagattaacagttgagaactgtgagttgtccagtattggtgtgattatacttctggactgcctcacaaatgcgaagcaactccttgatgtgctatctattgcagacaatcatctagggagtcctgtggcagctgcattggccagattcttgggttcacatgtacgagctttaaatgctacagatatcggcttgggaacagtaggcttccaaatacttgaggaaacattgccaacagaagtagctctttcccacatcaacatcaggaggattggcctgctggtggacaaggaggcccccgccctggtcctggtgctgctgctacagctccagcaccagcaccggttgctgctcgcccataggctttagcttttcgaccgtgttgaaagtcttctgcccacgcagtttcggagttgtcgcctatgggtgaaaaacaagaagatggaaaatacaagcactctgtggatctcccgaaaacaacatttgagctgagagcgaattctgtacagcgggagctagagctccaaaaattatgggacgataatcaggttctgaaaagggtttctgaggaacactggggtgagttgatatattcaatgatcttcacatgggccatgcgctcaataaaatcctcaaggattttataaatcgctacaagctgcttcagaatcataaagtgtcctttgttcctggttgggattgccacggccttctaatagaactaaaaggcaagttcatttgtacaaaggttgtatttgtatatgatgctaatctccttattgtcgcacatgttcacgctggagaaggtggcttgtgcgaacgaggcgtggcaatcgatgagcagtggcaaacccaaaaatcttcaaaagcctaggcaaaagtagtaactaaagatacatcaccttgtccagtttttctgcttttacttcgactatatgtcattgtgccacaaaaaacttgtttcatcgacttatgatgagtcttctcaattgtttcttgaatatgcttttttagaaccaaattgaattttacaaggtgcaatattgattagaaaaaggtgtgatgctgactgggaaagcgctactcccttgtatgaattagctggtcgatgattttgtttcccatcctttttaatttcttgacatccgtttgttcattggggagcacatatgtagaatgatgattaatgtttttaaatattaatagattttatcataatatattgccgccgtaacaacgtacgggcatacaactagtcattgaagaagtcaaaaagatgagagaagcacggtaagagacagagagacaccatgagaagttctttgagttcgaaaagtgtaagcttgagatggaacagactaaacttgaattggagcgagattggcaggacaaag

SEQ ID NO: 205294 - DNA, 1593 bp, Zea Mays
agaagctccgtccaggataaacgatgctccataaattatgaagcagatgcccccgccacctaaggatttggagattgctatagttcggagctcgagctgcccttcgatcgaaccaagaacaaccctgctgccctcacaacatcaaagtttggtatcagcaagatggagcttctcaaggcatgcttttgtagggagtgactgctgatgtagaggaactcatggatgaagatcattgatccctttcatgtcatggtctattcaaaaggaaaatccacttctgagattaacagttgagaactgtgagttgtccagtattggtgtgattatacttctggactgcctcacaaatgcgaagcaactccttgatgtgctatctattgcagacaatcatctagggagtcctgtggcagctgcattggccagattcttgggttcacatgtacgagctttaaatgctacagatatcggcttgggaacagtaggcttccaaatacttgaggaaacattgccaacagaagtagctctttcccacatcaacatcaggaggattggcctgctggtggacaaggaggcccccgccctggtcctggtgctgctgctacagctccagcaccagcaccggttgctgctcgcccataggctttagcttttcgaccgtgttgaaagtcttctgcccacgcagtttcggagttgtcgcctatgggtgaaaaacaagaagatggaaaatacaagcactctgtggatctcccgaaaacaacatttgagctgagagcgaattctgtacagcgggagctagagctccaaaaattatgggacgataatcaggttctgaaaagggtttctgaggaacactggggtgagttgatatattcaatgatcttcacatgggccatgcgctcaataaaatcctcaaggattttataaatcgctacaagctgcttcagaatcataaagtgtcctttgttcctggttgggattgccacggccttctaatagaactaaaaggtggcttgtgcgaacgaggcgtggcaatcgatgagcagtggcaaacccaaaaatcttcaaaagcctaggcaaaagtagtaactaaagatacatcaccttgtccagtttttctgcttttacttcgactatatgtcattgtgccacaaaaaacttgtttcatcgacttatgatgagtcttctcaattgtttcttgaatatgcttttttagaaccaaattgaattttacaaggtgcaatattgattagaaaaaggtgtgatgctgactgggaaagcgctactcccttgtatgaattagctggtcgatgattttgtttcccatcctttttaatttcttgacatccgtttgttcattggggagcacatatgtagaatgatgattaatgtttttaaatattaatagattttatcataatatattgccgccgtaacaacgtacgggcatacaactagtcattgaagaagtcaaaaagatgagagaagcacggtaagagacagagagacaccatgagaagttctttgagttcgaaaagtgtaagcttgagatggaacagactaaacttgaattggagcgagattggcaggacaaag

SEQ ID NO: 205295 - DNA, 869 bp, Zea Mays
gaaacgttcaggcacacgcggcgctgcagtatacaacgaagcgagtgtggaaaagcaaggcagcgcgacgaagcggcgccgccagctccccaaaacctccccagctgccacctcctctgcctccctgcgtcccccgagcaaagcagaacaaggggggaaaaagttgacatacgcttgcagcgatggcctttgccgcccgcgccgcgctcgtgcgcgtcctccctccgcgaccatcgccgacctcccaaccgaagcagctcaagcaaggtctaggcggccgcggcgggtcctcgctcgccgttcgggcgaaggactccgatgacttcggggcccttctgtcggagaagctcgatgcgcaggcgcctgagaagcgggatgggcgggatggttttgggagggaggcgagtagcgtggaggaggagaaggaggtgcagggcgagccggcttcgtggggtgtgctcaaccagatcggcgtcgagttggactctgacaaatcatattctgctctcatatatggcacatctgctcttgttgcaatttggatatcatcaattgtggtttctgcacttgattcagtccctttggttcctcaagtgatggaagttgttggtcttggcttcacaatttggttcacatcgagatacctgatatttaaggagaaccgtgatgaacttttcacgagagtcagctccatcaagaagcaaattttggggtctcatgagaactgagcgtctctcttacgttctgttctgttaactggtgagtgtagggctgcgatgacctaaagtgcgactttctttgcatgctttgcggggcccgctgaggcggctatcaattgtgtgcgttcctctctgacccggacacccggc

SEQ ID NO: 205296 - DNA, 2296 bp, Zea Mays
gtggtgatcatactgtagtttgctgttttcgtcgttcttgtgggcgcctgattgatggctacgacagttccatgagcgagtgggatgattatccgaggtatctaaattcagatggagtggagattgccccagcggtatacggagatatttatggatatgggtatgctccttacggggcatactctcctgccacttccccagttccaacagttgatggtcagatgtttggtgcacagcattaccagtatccaactgcgtatttccagcctcctacaccagttccttctaccactcaaagtgacctacagtcttctaaaaatcctgaaaagccagcagctaaagcagatccagccaagactactaacggtgttcccaatggtactgctcacagtaacagtggaactgtaccccttgcgtcgagccaacaaaattcatcactgacgcctgatggaacttatagggcgcccttgctaggtggagttccttctgctggttacctggacacgacatatgggtatgacagcacaggggcacactttgcatggtatgatggctctgcttatgcaaatggacaacaaagagcaactacaactaaccattttccatcctcaacatttggtaatggttccccagcaaggtatcagaacaagagcaccaccacaccgcagatgggtatgcagaatagaagacctacaactacatcaccagctcctacttatcccaataggatgtaccctagctcccgaccgtacacccagtatgggaattcaataaaaactggccttccctacgggagcaacggttatgattccaggatatatgggcgatggggtcttggtatggataacaggtacaggcctaggggccgtaatggatactatggttatggcaacgagagtcaggatggaacaatcgagttaaacagaggtcctagatctggccgtttcaagaaccagaaattgtacggccatactgtcactattgctgtgaaagggcagagccttccttctggtgaaagcaaggatgatagtgccgtgcctgatagagcacagttcaatagagacgatttccctgttcagtatgatgctgcaaagttctttgtcattaaatcgtacagtgaggatgacatccacaagagtgtaaaatacaatgtgtgggcaagcacaaccaatggaaataagaagctcgatgctgcttatcaagaagctcagtcgaagggttctgcgtgccctatattcttgtttttctcagtgaatacaagtgggcagtttgttggtgttgctgaaatgacgggggctgtcgattttgagaaaaccctggggtattggcaacaggacaagtggaatggttccttctctgttaagtggcacattgtcaaggacgtgcctaacaacattctcaaacacatcatcctagagaacaacgagaacaagcctgtcacgaacagccgcgacactcaagagatacacctagaacaaggccttcagatgctcaagatattcaaggagcatgtcagcaagacgtccatcctggatgacttcgccttctatgagagtcgccagaagctgatgcaggataagaggtcgaaacagcagcaggtccaaaagcaggtctgggacagtaggacccccatttctgtcactggaagcgagcaacagcaggaagctgccaatgggaagcccaatccgtctgtaccaaacggtgtccctgcagaggtgaaggcggcgaaggcttctgcagagaacggcaccgccactccagctatttcctacgcggcaaaggtggcccaagcagcaacagagaaacctgtgctcgccaacggagtcgctaagaccggttagctggaccgcccaaccgatgctccatagctagccgcgagcgacggtcgacgtccccaagagctcgaccgaatcactgtacaagggaaactggtgaccaaccaaggcaggctgtggaactgggcaggcatggcgccctagagcgttgcggctccatctcgtcgctgctggagagcagctggctagctgttagcgttttccctagtctctctctctgttccccgtttcagtttgcttatagcccgaagacttttctgctgtagtattggaatgccagagacctttggccggacaagaggaatttgcgaaggccgtctggctgggtgtgttgcgtcgtcattggggtcgagtatggccggttgtgttcgtcgttatattgagtggatccgaatgaatgtgggttagattggagctttccttttctttctctttcctttacctgtttgattattgcggac

SEQ ID NO: 205297 - DNA, 2827 bp, Zea Mays
ccttttccgctccagacacagcagcccctcttgtaccagtaaaccgtgctgctatcccccgctaccgctacccgccgcgctgctgcggctcgcctccctcctccccagtccccacgccccgccgccgccgccgccacctcctctcgctccctccttttaccccgagcttaagctcgcgcgtacctgcctacctatccgtaggagaggaagaggggacaaggcccggtcggtcggtcggtcggtcggggggctctcggatctcgccgctgcctccccgttcgttcgttcgttcgttgggatctcgcgccatggccgccgtcgcgccgcccccggcccccgcgccggcaccggttccggctcctgctcctgccaccgtccctgtcgcggatcaaaccacggatctgctgcagaagctgtcgctcgactcgcagcccaaggcggcggacgcaacacagcctgctgctgccaccgccaaaaagcagggcgccgcggcgagccagccgctgagcgtggcgatcccgccggagccgtccatcacgccggtgatccaagactttacggatcccaacctgttttatctaccagcgtattactacggaggctacgacagttccatgagcgagtgggatgattatccgaggtatctaaattcagatggagtggagattgccccagcggtatacggagatatttatggatatgggtatgctccttacggggcatactctcctgccacttccccagttccaacagttgatggtcagatgtttggtgcacagcattaccagtatccaactgcgtatttccagcctcctacaccagttccttctaccactcaaagtgacctacagtcttctaaaaatcctgaaaagccagcagctaaagcagatccagccaagactactaacggtgttcccaatggtactgctcacagtaacagtggaactgtaccccttgcgtcgagccaacaaaattcatcactgacgcctgatggaacttatagggcgcccttgctaggtggagttccttctgctggttacctggacacgacatatgggtatgacagcacaggggcacactttgcatggtatgatggctctgcttatgcaaatggacaacaaagagcaactacaactaaccattttccatcctcaacatttggtaatggttccccagcaaggtatcagaacaagagcaccaccacaccgcagatgggtatgcagaatagaagacctacaactacatcaccagctcctacttatcccaataggatgtaccctagctcccgaccgtacacccagtatgggaattcaataaaaactggccttccctacgggagcaacggttatgattccaggatatatgggcgatggggtcttggtatggataacaggtacaggcctaggggccgtaatggatactatggttatggcaacgagagtcaggatggaacaatcgagttaaacagaggtcctagatctggccgtttcaagaaccagaaattgtacggccatactgtcactattgctgtgaaagggcagagccttccttctggtgaaagcaaggatgatagtgccgtgcctgatagagcacagttcaatagagacgatttccctgttcagtatgatgctgcaaagttctttgtcattaaatcgtacagtgaggatgacatccacaagagtgtaaaatacaatgtgtgggcaagcacaaccaatggaaataagaagctcgatgctgcttatcaagaagctcagtcgaagggttctgcgtgccctatattcttgtttttctcagtgaatacaagtgggcagtttgttggtgttgctgaaatgacgggggctgtcgattttgagaaaaccctggggtattggcaacaggacaagtggaatggttccttctctgttaagtggcacattgtcaaggacgtgcctaacaacattctcaaacacatcatcctagagaacaacgagaacaagcctgtcacgaacagccgcgacactcaagagatacacctagaacaaggccttcagatgctcaagatattcaaggagcatgtcagcaagacgtccatcctggatgacttcgccttctatgagagtcgccagaagctgatgcaggataagaggtcgaaacagcagcaggtctgggacagtaggacccccatttctgtcactggaagcgagcaacagcaggaagctgccaatgggaagcccaatccgtctgtaccaaacggtgtccctgcagaggtgaaggcggcgaaggcttctgcagagaacggcaccgccactccagctatttcctacgcggcaaaggtggcccaagcagcaacagagaaacctgtgctcgccaacggagtcgctaagaccggttagctggaccgcccaaccgatgctccatagctagccgcgagcgacggtcgacgtccccaagagctcgaccgaatcactgtacaagggaaactggtgaccaaccaaggcaggctgtggaactgggcaggcatggcgccctagagcgttgcggctccatctcgtcgctgctggagagcagctggctagctgttagcgttttccctagtctctctctctgttccccgtttcagtttgcttatagcccgaagacttttctgctgtagtattggaatgccagagacctttggccggacaagaggaatttgcgaaggccgtctggctgggtgtgttgcgtcgtcattggggtcgagtatggccggttgtgttcgtcgttatattgagtggatccgaatgaatgtgggttagattggagctttccttttctttctctttcctttacctgtttgattattgcggac

SEQ ID NO: 205298 - DNA, 1402 bp, Zea Mays
gttggatggatggaacaatcgagttaaacagaggtcctagatctggccgtttcaagaaccagaaattgtacggccatactgtcactattgctgtgaaagggcagagccttccttctggtgaaagcaaggatgatagtgccgtgcctgatagagcacagttcaatagagacgatttccctgttcagtatgatgctgcaaagttctttgtcattaaatcgtacagtgaggatgacatccacaagagtgtaaaatacaatgtgtgggcaagcacaaccaatggaaataagaagctcgatgctgcttatcaagaagctcagtcgaagggttctgcgtgccctatattcttgtttttctcagtgaatacaagtgggcagtttgttggtgttgctgaaatgacgggggctgtcgattttgagaaaaccctggggtattggcaacaggacaagtggaatggttccttctctgttaagtggcacattgtcaaggacgtgcctaacaacattctcaaacacatcatcctagagaacaacgagaacaagcctgtcacgaacagccgcgacactcaagagatacacctagaacaaggccttcagatgctcaagatattcaaggagcatgtcagcaagacgtccatcctggatgacttcgccttctatgagagtcgccagaagctgatgcaggataagaggtcgaaacagcagcaggtccaaaagcaggtctgggacagtaggacccccatttctgtcactggaagcgagcaacagcaggaagctgccaatgggaagcccaatccgtctgtaccaaacggtgtccctgcagaggtgaaggcggcgaaggcttctgcagagaacggcaccgccactccagctatttcctacgcggcaaaggtggcccaagcagcaacagagaaacctgtgctcgccaacggagtcgctaagaccggttagctggaccgcccaaccgatgctccatagctagccgcgagcgacggtcgacgtccccaagagctcgaccgaatcactgtacaagggaaactggtgaccaaccaaggcaggctgtggaactgggcaggcatggcgccctagagcgttgcggctccatctcgtcgctgctggagagcagctggctagctgttagcgttttccctagtctctctctctgttccccgtttcagtttgcttatagcccgaagacttttctgctgtagtattggaatgccagagacctttggccggacaagaggaatttgcgaaggccgtctggctgggtgtgttgcgtcgtcattggggtcgagtatggccggttgtgttcgtcgttatattgagtggatccgaatgaatgtgggttagattggagctttccttttctttctctttcctttacctgtttgattattgcggac

SEQ ID NO: 205299 - DNA, 2235 bp, Zea Mays
accttcacgaagacatccccggcccactagcgatccgtgcaggcgctgccatccaccacctctccctcggcgtcgcactagcgtccccaacttcccctacgccgtcggtcgcacgtgctgagcgcctgacatggtgacacccacggaaactggtagttgctcccccgtggtgataccgagcctgcctctggcaagtggggtgccccgtaccccaggcggctgacgggtggggcacccaggtgacccgactgacatggaccatctcttcctcctcctccgtcttcctcccctaaccccagataaagccaagcccagcgaggccaccaactccacctcgtggactccttccccacaaaactaaaccctcgcttcggaggcgcgtgaacccaagaccgacaggcgaacgaagcgagggtcctcacaaccaccatcccctgctgcaacgacgccgccggcgatggcgtccatctccggcgcggcggcgccgccatcttccgccgtgtgccggcttcggctgcgccggcaccttctgctccggccctcccacctccgcctccgcgcgccccactccatcgccgacctctcccgctcctccaattccgccccgagcccggcccgcccagcgctgggctccggcccggagaacggcagcggcggcgtccgcgcggtggagaaggacccgatcaagctgtgggagcgctacgtcgagtggctctaccagcacaaggagctcggcatgcgggagctcgagaagggcgccatcgccaaccccgacgagggtcgcatggtgggccactactggctccgcgacccggccctcgctcccaactccttcctccggaacaagatcgagaccgcactcgacagaatcctcgccttctctcaagatgtcgtctctggaaagattctttccccatctggtcgtttcacttcaattctctctataggaatcggagggtcagctttgggccctcaatttgttgctgaggcacttgcgcctgataaccctccactgaagataagatttattgacaacaccgatcctgctgggattgatcatcaaattgctcaactaggacctgaactggcaactactcttgtaattgtcatttctaagagcggaggcacacctgaaacccgcaatgggctactggaagtacagaaagccttcagagatgcaggtctgcaattctcgaaacagggtgttgcaatcactcaagaaaattctctgttggataacactgccagaatagagggatggttagctcggtttcctatgtttgactgggttggtggtaggacttcagaaatgtcagctgttggtttacttccagctgcattgcagggtattgatatcaaggaaatgctagttggtgcagctttaatggatgaggaaacccggaacactgtggttaaagcaaatccagcagcattgcttgcattatgttggtattgggcatcggaagggataggcaaaaaggatatggttgtgcttccttacaaggatagtttattacttttgagtagatatttgcaacaacttgtcatggaatctcttggaaaagaattcgacctggatggcaaccgtgttaatcaagggctaactgtatatggtaacaaaggaagcactgaccagcatgcttacattcagcagctgagagaaggtgtacaaaacttctttgttacgtttattgaggtcttgcgtgacaggcctgctggacatgattgggagcttgaacctggagtcacgtgtggtgactatttgtttgggatgttgcagggaacccgttctgctctttatgcaaatgaccgggagtctatctctgttactgtgcaagaggtaactcctagagctgttggagcactgattgcactttatgaacgtgctgtggggatttatgcttctttggtaaatatcaatgcctatcatcagcctggtgttgaggctgggaaaaaggcagcaggagaagtattggcccttcagaaaagggttctgactgtattaaaggaggccatgtatggaacttctgacctgtgttctttctgtttctctgtgaagtgattggttatgcatagtatttttggggcatatttctagttgtgatgctttgaaaatgcatttcgttgtatcactaggtgggactttgttttgaggaatggtgtggttcatcatattctcaccctcacttttttgtttggtttatggagttgaataggttcatctgccaccaccct

SEQ ID NO: 205300 - DNA, 2097 bp, Zea Mays
accttcacgaagacatccccggcccactagcgatccgtgcaggcgctgccatccaccacctctccctcggcgtcgcactagcgtccccaacttcccctacgccgtcggtcgcacgtgctgagcgcctgacatggtgacacccacggaaactggtagttgctcccccgtggtgataccgagcctgcctctggcaagtggggtgccccgtaccccaggcggctgacgggtggggcacccaggtgacccgactgacatggaccatctcttcctcctcctccgtcttcctcccctaaccccagataaagccaagcccagcgaggccaccaactccacctcgtggactccttccccacaaaactaaaccctcgcttcggaggcgcgtgaacccaagaccgacaggcgaacgaagcgagggtcctcacaaccaccatcccctgctgcaacgacgccgccggcgatggcgtccatctccggcgcggcggcgccgccatcttccgccgtgtgccggcttcggctgcgccggcaccttctgctccggccctcccacctccgcctccgcgcgccccactccatcgccgacctctcccgctcctccaattccgccccgagcccggcccgcccagcgctgggctccggcccggagaacggcagcggcggcgtccgcgcggtggagaaggacccgatcaagctgtgggagcgctacgtcgagtggctctaccagcacaaggagctcggcatcttcgtcgacgtcagccggatggggttcacggaggagttcctgcggcagatggagccgcggatgcagcaggccttcgtcgacatgcgggagctcgagaagggcgccatcgccaaccccgacgagggtcgcatggtgggccactactggctccgcgacccggccctcgctcccaactccttcctccggaacaagatcgagaccgcactcgacagaatcctcgccttctctcaagatgtcgtctctggaaagattctttccccatctggtcgtttcacttcaattctctctataggaatcggagggtcagctttgggccctcaatttgttgctgaggcacttgcgcctgataaccctccactgaagataagatttattgacaacaccgatcctgctgggattgatcatcaaattgctcaactaggacctgaactggcaactactcttgtaattgtcatttctaagagcggaggcacacctgaaacccgcaatgggctactggaagtacagaaagccttcagagatgcaggtctgcaattctcgaaacagggtgttgcaatcactcaagaaaattctctgttggataacactgccagaatagagggatggttagctcggtttcctatgtttgactgggttggtggtaggacttcagaaatgtcagctgttggtttacttccagctgcattgcagggtattgatatcaaggaaatgctagttggtgcagctttaatggatgaggaaacccggaacactgtggttaaagcaaatccagcagcattgcttgcattatgttggtattgggcatcggaagggataggcaaaaaggatatggttgtgcttccttacaaggatagtttattacttttgagtagatatttgcaacaacttgtcatggaatctcttggaaaagaattcgacctggatggcaaccgtgttaatcaagggctaactgtatatggtaacaaaggaagcactgaccagcatgcctgagagaaggtgtacaaaacttctttgttacgtttattgaggtcttgcgtgacaggcctgctggacatgattgggagcttgaacctggagtcacgtgtggtgactatttgtttgggatgttgcagggaacccgttctgctctttatgcaaatgaccgggagtctatctctgttactgtgcaagaggtaactcctagagctgttggagcactgattgcactttatgaacgtgctgtggggatttatgcttctttggtaaatatcaatgcctatcatcagcctggtgttgaggctgggaaaaaggcagcaggagaagtattggcccttcagaaaagggttctgactgtattaaaggaggccatctgcgatgag

SEQ ID NO: 205301 - DNA, 1652 bp, Zea Mays
gtttttgtcatcattttagtagtaattttagtattagtaattgtctttgacctttacgtttcctccgtcacccacacccccctccggtttcgttctggttgtgttcgattcgtggcttctttggctctgtcgcaggatcgaaaggaggcaaggtgttttaacgtggttattactacctacaagataacagaaacttgtatttgtaatttgagatcaagcttgtggatgggcgaaccctcagcggacttcagtgctgaagatgttagtagcatctcaggtccttgccacaacacttgtttaaagccttgttgcgagcatggttgtgcctgttgggaagatgaatatgttgaagcagtaatatcttgtgtgcaagatgatttggcggttgaggaaattggaatcgctcttacagaagtgacgacgatcgatctgttggcggttgacgaagggtcaggtctgcatgaagattctgatgacgattacatcgatgatccaattctttctctggaatctgattcaactgatgatttagtgaacgttgattttatatcacctgcctttcctattggtggtgtaacagaatcatcaattagcaattcagttgctgggaattcttcaattaatggcactccaaggttagtttctgcaatgaaaggaactcgtgccaagaagggaatcaaaacaaagttgagcgtttcatgggccactgatgtatatgacccacctattacttcagactcgcacactgtgaaagggcaccgtaagagttcaactaagggtaactacaaatacaagtgttccaagagcagcagtagcagtaaccacagtaccactggaagcaaaaaggacaagaagcattctaggcaccgtagcagcagtgggggtggcagcaaaagggacaggaaacattcttactgcagtagtgctagcagcaacagtagcagagttgttaccaacggttctctatatggtaacacatgcagtggcggtgggatcagcagcagcagcagaactacgacatgtgttcctgaatctgccaaggtatctacattgatggtagctgaaaatgcgacaccacaagagagagttcctgtattgaagacaccggaaccaatcaaatgtactaccagctacggcaaagagaagccatttgccttgctgtcgcgccagtttccccctgcaagatacaaggggatgttctccttctggagccaaaaccagctggcttcttgataatctgctatacggaaagctgctatacagaaagctcacctggaagtcttggttgctaattaaattgcactgcatctgtgattgttttttggtgtcgttctcttcgttgccatgtttcttttgcctgcgtctgaaacttcagagatcacgttttcgaaaattgctcagcgaagtgcttgtatatttgagtttatgttgttactatttcctcaccgaatcgtgtaattcgcttatcaatttcatcatgtgttttgtattattccatttgagatcatgcactattatttccacacctacactgtagcaagggactggtttagtcttctgtactttggttattatgttggaattgcaacgattacagtaaatgagaatgacatcacctgatgcttaggacataagacatgttgatttattcc

SEQ ID NO: 205302 - DNA, 1899 bp, Zea Mays
gccgcaccaacagccaatccggacctctcgcctcctctctcgcgttgtcctcgccgcgccctgctccggttccccaatccttcgccccgcctccgttgcctaccgtctcctccgagccagatcgatacaagcggagccgtgatccggtcaacgcgcggagcgtgttagccggattctctcgccgtcgcctcccctcccctcccgccgccgtcaccgccgtttctggttgcccgggatcagccgagttggatctcgaggcgtgaagcgttgcgggcgcccggcgaggatacgatgcctgcggtgctcgccgcattcgcttgcctccgactccgagcggccgctgccatcgccttcggggactcctccttcctctgctcccatcgtcttaagcatcattttagtagtaattttagtattagtaattgtctttgacctttacgtttcctccgtcacccacacccccctccggtttcgttctggttgtgttcgattcgtggcttctttggctctgtcgcaggatcgaaaggaggcaaggtgttttaacgtggttattactacctacaagataacagaaacttgtatttgtaatttgagatcaagcttgtggatgggcgaaccctcagcggacttcagtgctgaagatgttagtagcatctcagaagtgacgacgatcgatctgttggcggttgacgaagggtcaggtctgcatgaagattctgatgacgattacatcgatgatccaattctttctctggaatctgattcaactgatgatttagtgaacgttgattttatatcacctgcctttcctattggtggtgtaacagaatcatcaattagcaattcagttgctgggaattcttcaattaatggcactccaaggttagtttctgcaatgaaaggaactcgtgccaagaagggaatcaaaacaaagttgagcgtttcatgggccactgatgtatatgacccacctattacttcagactcgcacactgtgaaagggcaccgtaagagttcaactaagggtaactacaaatacaagtgttccaagagcagcagtagcagtaaccacagtaccactggaagcaaaaaggacaagaagcattctaggcaccgtagcagcagtgggggtggcagcaaaagggacaggaaacattcttactgcagtagtgctagcagcaacagtagcagagttgttaccaacggttctctatatggtaacacatgcagtggcggtgggatcagcagcagcagcagaactacgacatgtgttcctgaatctgccaaggtatctacattgatggtagctgaaaatgcgacaccacaagagagagttcctgtattgaagacaccggaaccaatcaaatgtactaccagctacggcaaagagaagccatttgccttgctgtcgcgccagtttccccctgcaagatacaaggggatgttctccttctggagccaaaaccagctggcttcttgataatctgctatacggaaagctgctatacagaaagctcacctggaagtcttggttgctaattaaattgcactgcatctgtgattgttttttggtgtcgttctcttcgttgccatgtttcttttgcctgcgtctgaaacttcagagatcacgttttcgaaaattgctcagcgaagtgcttgtatatttgagtttatgttgttactatttcctcaccgaatcgtgtaattcgcttatcaatttcatcatgtgttttgtattattccatttgagatcatgcactattatttccacacctacactgtagcaagggactggtttagtcttctgtactttggttattatgttggaattgcaacgattacagtaaatgagaatgacatcacctgatgcttaggacataagacatgttgatttattcc

SEQ ID NO: 205303 - DNA, 804 bp, Zea Mays
caccaatttctcaaaaaccgttgagataaaaaatattccgaaccggggcgcatccccttgtgctagctacccccacgacctcgagttctagaagccgtctgctccgccatctgctcgtcctcgatgatgacttcaggctccgcttagactttcaatcttgggcgacagagcacagaggcgccatcgtcagcggcagaagatgccctcttatcgatagtagggaggcaggctcaggttaaccaaaaacttgcgcaagcactcagatattctctgtctttaatgagtgatgcagctaagaaacttcaagatactgcctctttgtgctacacagatgaagatgttgtcgacggtttcaagctgactcaagtggctcgttccttggacgagttagctgaaacgttagaagttactgcaattgactgtcaggtctcgatgatggatccaacaactatattagaagctggctatggtagcgaagatagtgcggtgtgggaggacgtattccgtgaccgagaaataatgaatcagccattggaagcggagacactagctgagcactgtgctaagtgggggctgaattacaatgagatcagggatagatctgtgtaacatcttctagtgtagtgcttttgtaacactagctatgcttttgtaaggtgaacttgatcagtgtaacaccgacagtgcttatgtaacactggctatgctattgtaatgtgtaagaactatgttgttatgttgcaaccgacatggaacttggctgttatcttttatgaaatggaatgaaatggtatggaacttggc

SEQ ID NO: 205304 - DNA, 1642 bp, Zea Mays
gatttttcatatgcacgcagaagacgaaattggttgagtggttacaaaaaaaccaaacactttccagcatatgcatgcaagggacgaaattagttaccagttaccaacactttcagcatatgcacgcaagggacgagattgattacccattaccaaaccaacagtttccagttcagcggtaggaacaggccgtcacggcgtcatccgccaaaggacaatccatttgctcacacaggcacaaacgctgagcgcctgagcctgctctcgcggtctaggagatggcgttgatcacgaatgtctctgactatgaggagcttgcaaagcagaagctgcctaagatggtttatgacttctatgccgggggtgcagaagaccagtggacactcaaggagaataaggaggcattctccaagattctgtttcgaccacgggtgctgattgatgtgtctcatattgacatgtctacaagtatattgggttacaaaatttccatgcctattatggtggctcccactgctttgcacaaactagcccaccaagaaggagaggttgcttctgcccaggcagcagctgctgcaggaactataatgacgttgtcttcatggtcatcttgcagcattgaggaagttagctcaattgcaccaggactccgtttcttccaactttcagtattcaaggatagggatatcgtgcaacagcttgtcagaagggctgaaaatgctggctataaggcaatcgccgtcactgtcgacgctccacgccttggtcgcagggaagccgatgtcaggaacaggctgcctgaaaatgtggtgttgaagtgctttgaaggactggatctcagcaagatggacaagactaagggttcaggccttgctgcttacgccactagccagattgacagctctctttcttggaaggatatcaagtggctacagacgattaccgggctgcctatcttagtgaaaggagtcataacagcagaagatgctcgaattgctatcgaatgcggtgtcgccggcattatcgtgtccaaccacgggggccgccagctagactatcttcctgcaaccatcagctgcctggaagaggggaaacttcaggttgtgagagaagcgaagggccgccgtgtgcctgtgttcctcgacggcggcatccgccgtggcactgacgtgttcaaggccttggcgctgggagcctcaggagtgtttattggaaggcccgtactgttcgccctcgccgtggacggcagggcaggggtgaggaatgcgctgcggatgctgagggatgagctcgagatcaccatggcgctgagcggctgcgcgtcgctgaaagatatcacccgcgatcgcgttatcactgagcgcgacatgatccgtcgctctcggatataggcttcgattcgtttgctgttgtgttgtgcggggctgaaagtctgttgttgccctggcatgactgtcatattcgaaactgaccggaccatcagattggttttgacttttgacctattggctaacgatgtgctaggttttctcatttgtctgcgtctcagcctaattttgcccagctgtgattgataatatatgcttcaataagtcataaaatagcatatcaaacaggtcttacttgagtgttgacaccggcc

SEQ ID NO: 205305 - DNA, 1494 bp, Zea Mays
aataaataagaggataagccaaaccttcgctgtccatcgtcaccctccttccttccccagcctctcatcctatgcaagaacccataatccagacccacgaactcgcagcagccattagcgtgcgctagccggccgcagccatggccgcccccgcaacgacctctctactgagcaccctgctgaatctgccgctcgccccgttgtcggggaagagctcgccgccgtccgtggtgcatgtggcgcggcgggggccgatggtggtggtggccgccaaggggtacaatgtgcagatcctggtggacgagaacgagggggaggagtccatcttccggcggttccggcgggaggtgatgcgggccggcgtgctgcaggagatcaagcgccgtcggaggtatgagagcaagacggacgagaagaagcgcaaggcgcgcgaggccgggcgccgcaaccgccgcaggcgtatgatggatgagccgaggttcccagaagaagacgccgacgctaccgcaaaggctcgggacgaggacgatgacaactgggagatcgatggcatcctgtgaaagagaagcaacggagtccatgatttcacaacgtccagacacacagaccccgacagctaatctgagttctttttggcccccggttggcaggttcactgtcccaaaaatagcacagtgacacccggccaggtggttgctcgcgagaggcgcctccgtgacacccggtccatgcaaccgcggaggccgcgcgcagccactccattgccgctttttaaagcatcgcgcaccaccttcgcctcgccaaaatccacaagccacttcagtgcttgcgatcgcgtcggccacgatctcttgcgaaaaagcttaccctgtgtctgtctgtccgaccgtcagtccgtctaacaatcgatttccatgacgacgtccccgcgcgtgtggctgctcgccatggcactggcgctcgcctgcgtgctgctcgtgaggtccgccgacgctgctgccgaggcgtccccgactccaggcggctccacctacgggtgcaacccggccacggacaagtcgtgcaagcccgagggcgtgggggtggtgctgccgggcggcggcatcgacctcgacggcgacggtgacgaggacgagctgccgcagttccagccccacctcatgatcctcggccatggccactgatgagtgtaaatggttggttggttggtcgtcctcagccgatctactggacgacacgatggcggtcacatttgcgtccgaatttctcttgttaaattgaggccagagtgattaaatgagcatatgatggtaatttattcaccgtgtattgcctgttcaaacatgaaagtgcactgatacaattttaaaaaacttatgcacaacagcatatagcaagctaccacttgtattattatatcgcacttttcctacgtttcttcaaccctatcgtgattcatgaacgtgataatctccggccgatccgattgtcttg

SEQ ID NO: 205306 - DNA, 453 bp, Zea Mays
gccaaaccttcgctgtccatcgtcaccctccttccttccccagcctctcatcctatgcaagaacccataatccagacccacgaactcgcagcagccattagcgtgcgctagccggccgcagccatggccgcccccgcaacgacctctctactgagcaccctgctgaatctgccgctcgccccgttgtcggggaagagctcgccgccgtccgtggtgcatgtggcgcggcgggggccgatggtggtggtggccgccaaggggtacaatgtgcagatcctggtggacgagaacgagggggaggagtccatcttccggcggttccggcgggaggtgatgcgggccggcgtgctgcaggagatcaagcgccgtcggaggtatgagagcaagacggacgagaagaagcgcaaggcgcgcgaggccgggcgccgcaaccgccgcagaaatgaattgggt

SEQ ID NO: 205307 - DNA, 2597 bp, Zea Mays
caccgacattccgacaataaggtgtggattgaccttgtcagtcacagaagggcggagcagtgccagtgtactggccgccaccactcgccactcgtccccctccccccgaaagccggcacgagccctcccttcccttcctccaacctgttccgatccgccccgagccggctggccatggcgatcagggctggccgctcggccctccacctccacgctctcgctttcctcatcctcgccgcctccccctgcctccaagtccaagctctagtggaccatcgcaaacagatatctgactggggtaggcaacccaactttgaactgcagaatatgtcctcgagtcaaagggatggctctcatctcttgggcagatcaaaggaaataacacacaggaaactaagggggagaattggtgtaaggaacaaaatggaagtagtgcagcaggatgatgaagcattagttaaacttgagaacacagaatatattctgttcttgccaaatctaggggcaaacttgatctctatcaggagctgctagcaagactcaaggaaagccagcgctcccttggggaagctactgctgatgccgaacttccgaagagtgcttcagatagaatcaaagcaatgggccaagttttatcaaaagcaagggatctgttgtatgattgcaaggaaattacccagcgtttgagagcaatgcttcagtcagcagatgagcaggtccggagcttgaagaagcagagcaccttccttagccagcttgcagctaagacaatcccaaatggcatccattgtctttctatgcgcttaacaattgattattaccttctctctccagagaaaagaaagttccccaatagcgagaacttggaaaatcctgatctttaccattatgctcttttctcagataatgttttggcagcatcagttgtggtcaactcaaccatcatgaatgcgaaggttagtgtaatccccatcttgaaactggaagtgtaatctcttcattatgtctaccattgaatgacccattatatagcacttttgattttctttctataaattttcaggagcctgaaaaacatgtgtttcaccttgttactgacaaactgaactttggggccatgaacatgtggtttttgctgaatccacctggggatgcaacaatgcatgtggaaaatgttgatgacttcaaatggttgaactcttcttactgccctgttctgaaacagctcgagtctgcagccatgaaagaatactatttcaaggctgatcgtccgaaaacactctctgctggctcttctaatctgaagtatcgaaacccaaaatatctgtctatgctcaaccatctaagattttacctcccccaagtctatcccaagctgaataaaattcttttcctggatgatgacatagttgtccagagggacctaactggactctgggaggtagatcttaatgggaatgtaaatggagcggtggaaacatgtggagagagttttcaccgatttgacaagtacctcaacttctcaaacccaaatattgctcagaattttgatcctaatgcatgtggttgggcttatggaatgaacatgtttgatctggaagaatggaagaagaaagacattactggaatctaccacaaatggcagaacatggtgaattggaagattttacattacttgcatcttgacaccttttcttttaatattgcatttaattttcctatacgtacacagccatcttgctgatttatattctgttgctttggcttttcagatatcgtgattttggtcatttttatgcatatatgactactgtgtacagtatagatgaagcaaatgctaaatagttattttttagtatgattgcattggagtccttaattaattttcataataccaacaactctattaattagttaattagctgatgtttaatcattacaaagaattaagagcaagtcgaaacataaatgtactgcctgagatgtacatatcagtgcatacatttattgactccattttcacactgttttatgttatctttatacagaacgagaacaggctgctctggaaattggggacattgccgccagggcttctaactttttacaagctgacacaccctctggacaaatcatggcatgtgcttggtttagggtacaatccaaccgttgagcgctcagaaatagacaatgccgcagtcatccactacaatggtaacatgaagccatggctggaaatcgcaatgacaaagtatcggccttactggacaaagtacatcaattatgagcatccttacattcatggatgcaagttcagccaataggaactacctaaacattcttctgtgatgaacactgaagttagagggcactcaaaatatagtcctctcttagtagtataactatcacatgttctttcttcgttttatattaagcttatcatgtgtatgtagtagtttcatcgcctttagtccgttgtcggttcttgtctttttttttgtcatgaaaaggacgatgagttcaaagattctcatcagctgataaatgcaatatatgaatttctgttggtagcaaattaatgatgtcactcaaactgt

SEQ ID NO: 205308 - DNA, 1970 bp, Zea Mays
caccgacattccgacaataaggtgtggattgaccttgtcagtcacagaagggcggagcagtgccagtgtactggccgccaccactcgccactcgtccccctccccccgaaagccggcacgagccctcccttcccttcctccaacctgttccgatccgccccgagccggctggccatggcgatcagggctggccgctcggccctccacctccacgctctcgctttcctcatcctcgccgcctccccctgcctccaagtccaagctctagtggaccatcgcaaacagatatctgactggggtaggcaacccaactttgaactgcagaatatgtcctcgagtcaaagggatggctctcatctcttgggcagatcaaaggaaataacacacaggaaactaagggggagaattggtgtaaggaacaaaatggaagtagtgcagcaggatgatgaagcattagttaaacttgagaacacagtgcttcagatagaatcaaagcaatgggccaagttttatcaaaagcaagggatctgttgtatgattgcaaggaaattacccagcgtttgagagcaatgcttcagtcagcagatgagcaggtccggagcttgaagaagcagagcaccttccttagccagcttgcagctaagacaatcccaaatggcatccattgtctttctatgcgcttaacaattgattattaccttctctctccagagaaaagaaagttccccaatagcgagaacttggaaaatcctgatctttaccattatgctcttttctcagataatgttttggcagcatcagttgtggtcaactcaaccatcatgaatgcgaaggagcctgaaaaacatgtgtttcaccttgttactgacaaactgaactttggggccatgaacatgtggtttttgctgaatccacctggggatgcaacaatgcatgtggaaaatgttgatgacttcaaatggttgaactcttcttactgccctgttctgaaacagctcgagtctgcagccatgaaagaatactatttcaaggctgatcgtccgaaaacactctctgctggctcttctaatctgaagtatcgaaacccaaaatatctgtctatgctcaaccatctaagattttacctcccccaagtctatcccaagctgaataaaattcttttcctggatgatgacatagttgtccagagggacctaactggactctgggaggtagatcttaatgggaatgtaaatggagcggtggaaacatgtggagagagttttcaccgatttgacaagtacctcaacttctcaaacccaaatattgctcagaattttgatcctaatgcatgtggttgggcttatggaatgaacatgtttgatctggaagaatggaagaagaaagacattactggaatctaccacaaatggcagaacatgaacgagaacaggctgctctggaaattggggacattgccgccagggcttctaactttttacaagctgacacaccctctggacaaatcatggcatgtgcttggtttagggtacaatccaaccgttgagcgctcagaaatagacaatgccgcagtcatccactacaatggtaacatgaagccatggctggaaatcgcaatgacaaagtatcggccttactggacaaagtacatcaattatgagcatccttacattcatggatgcaagttcagccaataggaactacctaaacattcttctgtgatgaacactgaagttagagggcactcaaaatatagtcctctcttagtagtataactatcacatgttctttcttcgttttatattaagcttatcatgtgtatgtagtagtttcatcgcctttagtccgttgtcggttcttgtctttttttttgtcatgaaaaggacgatgagttcaaagattctcatcagctgataaatgcaatatatgaatttctgttggtagcaaattaatgatgtcactcaaactgt

SEQ ID NO: 205309 - DNA, 3923 bp, Zea Mays
cctgattttatggcgctggaccaactaaatgggctttagatgctgtttagatctgataggtcgtggcggagacgaagaagagaaccgaagaaggttccctcacttcccttgcctcgacgcgcccaaccacgccacgaagccacgcgcccgccggcggctcacctttcccgtcccttcaccttccccttccccttctccgttcggtgaaactgcgggagaccctcgcggcttccccacctcgacctccaaactctaaccacagacgcatcgaaaaccctcggtgcccggccgatggggaggaggaaggagcgccgcctggctgccatggccgcggcgggccgcagggtcaagctggacctcttcctcgatctcccccccggggaggcatcacataatgatggaataggaggtgaaaaccgtgaccaacagactgtggttcccacttcatcttcagggttgctggcctgcaaggaacattgagtaaattctactgagctgccactgtcaaaactgagtgaatgcctatgggcaatttctcatttggcagcatctaagcatggggatttctggatgtgattgttccctcctcggttcgtatgtctctttctttgtatgtagcttctaacctggtcttatttatggccagttttctgttaactttacgttaataattttaacaatacagtattctatttagtttttacaacaccattgatttcattatgtatgcttgagaaaagagcttcactgtattttgccacaccacaaaaccctttttatttctgaagatttcatgtaattttaatttcagataaaaaggagaatcctctagcattgcttgggcaatatagtgatgatgaagaggaaaatgaggaaacaacagatcaacccactgatgaagctaagaggagtcctggagatgctagtgctaagttatctagtccgtgtgtggatacagctggtaataatggcgtggcaagaactgaaccatcggtttctgtcggtgatcaacaagaagcacctcaagctggtgatattaagaactatacccaaagtgttacagaaaacactattgctcccgagccaattctacaagacgagaatgtgaaatcaactgaatctgttcctgattcatctggcatgcaaattgttggtgaagtcggtggaaattggagagcaataatgcatgaacagagtaatcaatgttattactggaacactgttactggagaaacgtcttgggacataccaaatggattagcttcaggagctgcgactgcatctgttccttctgatgtgggctattcaatagaagctcaagcccatgttcttcctcacagcacacttgaagcgtacccaagtgacatgtctgtcgggaatggcacatcaacttttgctaattttggaatggcatgtggaagtgcacaggttactcaagatgcttacgcttatgctgctcctatcgccagtcatgagcctatggacattgatcccttgtatcttgcaaaatatggtgatgatttgctgcaaagattgaacctgttggaaaggctctgtggcttgaatgaaggtcttgaattgataaggagagaaatcgggatacggatatcagactgcaatgcactttcatcgtatgggtcttctttgctcccgttgtggatgcatgctgaggtgcaccttaagcaactagactcttccatttctaggatggaaatgagctaccatgcagatacagaacataggaattctaagacagaggttgttgaacacaatgcacctgatggagctgacctgacaacaccctccaatggattcacaaggtagggatattgcagcagttcctccaaaagttgaatctgacaatgaccaagatatggatgtggaaatggaagttgatgaagataacgtcgaagagcaggcacattgcagttctgtacctaaaaaggagcatcctccatcagaacagttgagttcaactaatttgccatcatttgaagatcctacacctgaggataattctgtccctccgcctccaccagaagaggaatggattccacctccaccacctgaaaatgaaccagctcctccagaccctccaaaagagccagctgcatcatatgttcaggtacagaaggtacaaatgccaattactatatgcaagtgagtgagcctcatgtccttcaagcacaacagcattcttattatgcaccagtatctgggagtggcgtatctgtttctgttgatggcacatctattgccccagaatcttattatacccatccttcagtcactatggctgccagcgcagtagcagctgaacattctgtatactatgcttcatcaatctctgccatttctagcagcgcagcagatatcaaaacaagctcagcttctcttgtttctgcaaatagcaattcagatctcaaaggtcctgataaacttatatccaatgatgcgagtattgtacctttgacccaagctgtagtagcaacatcaggcgcaggaacgccatctgtcctgggaagttctacacagccttctagcagtactaaaaatctgaccaaagttactcgtaacaagaagcgggctgttggtattacctcgtctctgaggtctaataagaaagtttcaagtttggtggataagtggaaagctgcaaaagaggaacttcgcaacgaagaggaagaggagcctgaaagtgctctggaggcattagaaaggaagcggcaaaaggaaatagaggaatggcggaaacaacagatagctagtggagaagctcaggaaaatgccaattttattcctgttcgtggtgattggcgtgaccgtgtcaaacgcaaaagggctcaagcaaaaaatgagtcaaaagatgacattgttgctgcatctttaggtagttccgaacagcataaaggacctcctgatctagcagagctctccaaggatcttcctactggttggcaggcatacttggatgagtatactaagcaagtctattatgggaacaacctcacgtcagagacgtcctgggagcggccaacaaaatgaaaatctacagccttgtgcggtcacgaacagtaggataagggcatgtttgtttggaattctaatgtgttcggattatataatccaatatattttgaactacttaggctctgtttatttcccttctagattatataagctgaattatggtgaaaggttaagagggtaaaataacacattgggatcataaataaactaaaataagctactcaatactagcttatttcagcttatttatggtcctacagtgatattttatcctcctaccctttttattataatccaacttatataatcgagtaaacaaacgtacacttagttcaaaaatattgaattatataatctggccagattataatctcaaacaagcatgtcttaatttaaccatgtagatggtgctgtacaatgggcagatcaattttgttgtagatatctcctggagttttaaaagaacgaacagaagtgccaaggatgtttagagaatgaaaacggaaagtgaagttcttataatgaattaatgatgctcagtttctagttttctatcttcgtgctacgagaagctccaacatgatctattttgatgattggagagcacatagtcactcaaatttctttcatagttttcatttctagggctcttattattcgtttgtaagaaataattggtgatgtagtttgtaaggaataaggtgatgttcttcctcaagctttcatttttagagctcttgataatgataaggaccttgtacgtgttttatttgacctaacaagccattttacataggttggtgtactatcttcatttttttaaagattggtagcgtgattcctcaataaggtaatgtagtttgtacggctatatgcagtagattgtgtaaaat

SEQ ID NO: 205310 - DNA, 4230 bp, Zea Mays
cggagacgaagaagagaaccgaagaaggttccctcacttcccttgcctcgacgcgcccaaccacgccacgaagccacgcgcccgccggcggctcacctttcccgtcccttcaccttccccttccccttctccgttcggtgaaactgcgggagaccctcgcggcttccccacctcgacctccaaactctaaccacagacgcatcgaaaaccctcggtgcccggccgatggggaggaggaaggagcgccgcctggctgccatggccgcggcgggccgcagggtcaagctggacctcttcctcgatctcccccccggggaggcatcacataatgatggaataggaggtgaaaaccgtgaccaacagactgtggttcccacttcatcttcaggtgggtttcatcaatttccttccaagggatatgtaaagaagacatacctatggattattgaacataaatatggtggaaatttggatttgtgtacaagcttgtattcctccgcaaatctggttctgagatacatgtagggttgctggcctgcaaggaacattgagtaaattctactgagctgccactgtcaaaactgagtgaatgcctatgggcaatttctcatttggcagcatctaagcatggggatttctggatgtgattgttccctcctcggttcgtatgtctctttctttataaaaaggagaatcctctagcattgcttgggcaatatagtgatgatgaagaggaaaatgaggaaacaacagatcaacccactgatgaagctaagaggagtcctggagatgctagtgctaagttatctagtccgtgtgtggatacagctggtaataatggcgtggcaagaactgaaccatcggtttctgtcggtgatcaacaagaagcacctcaagctggtgatattaagaactatacccaaagtgttacagaaaacactattgctcccgagccaattctacaagacgagaatgtgaaatcaactgaatctgttcctgattcatctggcatgcaaattgttggtgaagtcggtggaaattggagagcaataatgcatgaacagagtaatcaatgttattactggaacactgttactggagaaacgtcttgggacataccaaatggattagcttcaggagctgcgactgcatctgttccttctgatgtgggctattcaatagaagctcaagcccatgttcttcctcacagcacacttgaagcgtacccaagtgacatgtctgtcgggaatggcacatcaacttttgctaattttggaatggcatgtggaagtgcacaggttactcaagatgcttacgcttatgctgctcctatcgccagtcatgagcctatggacattgatcccttgtatcttgcaaaatatggtgatgatttgctgcaaagattgaacctgttggaaaggctctgtggcttgaatgaaggtcttgaattgataaggagagaaatcgggatacggatatcagactgcaatgcactttcatcgtatgggtcttctttgctcccgttgtggatgcatgctgaggtgcaccttaagcaactagactcttccatttctaggatggaaatgagctaccatgcagatacagaacataggaattctaagacagaggttgttgaacacaatgcacctgatggagctgacctgacaacaccctccaatggtgaggctttgaaatctgaggttagtcctgggattactatcgatgaaaatgtggagattgataagccaacttcgatattatctgctcaggattcacaaggtagggatattgcagcagttcctccaaaagttgaatctgacaatgaccaagatatggatgtggaaatggaagttgatgaagataacgtcgaagagcaggcacattgcagttctgtacctaaaaaggagcatcctccatcagaacagttgagttcaactaatttgccatcatttgaagatcctacacctgaggataattctgtccctccgcctccaccagaagaggaatggattccacctccaccacctgaaaatgaaccagctcctccagaccctccaaaagagccagctgcatcatatgttcaggtggatgccattcctcagccatatatcgctcaagaaaatgttgggtatacaatttcaggaatggagtactatggtattgtaggtacagaaggtacaaatgccaattactatatgcaagtgagtgagcctcatgtccttcaagcacaacagcattcttattatgcaccagtatctgggagtggcgtatctgtttctgttgatggcacatctattgccccagaatcttattatacccatccttcagtcactatggctgccagcgcagtagcagctgaacattctgtatactatgcttcatcaatctctgccatttctagcagcgcagcagatatcaaaacaagctcagcttctcttgtttctgcaaatagcaattcagatctcaaaggtcctgataaacttatatccaatgatgcgagtattgtacctttgacccaagctgtagtagcaacatcaggcgcaggaacgccatctgtcctgggaagttctacacagccttctagcagtactaaaaatctgaccaaagttactcgtaacaagaagcgggctgttggtattacctcgtctctgaggtctaataagaaagtttcaagtttggtggataaggttgctctctacaacagatctctgttgcatattggtgcaaatatttaggacctgtttgggattgcttcaccaactccaccgttgagcagcttcacaaaaaacctggagtttctgggtgctctcatgttttcatagagcagagtttatgtcgcagcacctgtttagctgaaaaagcatagttgaaatacgtggaacggagcagtcccaaacgggcgcttagtggtgacttgtgcctgaaatttacaattttttagcatgttcctgtataatcatggaatgaacaaatcctagtttcttactcttgatttgagatgtggtctcaagtctcaactatctaagaatccagtgtaaaatatcaagggtttaacaccatggtatattttgcaagattccctatgtatcatgtcaagaagaaatagtggactctgcgtcttaaccgtctgtttccttgtcatttttggttcatggtaaccattttctagtttattttatgagtctgctttcgtggtaaggtttaaattaaggtcagtagtgatgtgtaaataattgttgccctagcaacatcacttgctgaatcagcctgttttgcttttcttctaacagtggaaagctgcaaaagaggaacttcgcaacgaagaggaagaggagcctgaaagtgctctggaggcattagaaaggaagcggcaaaaggaaatagaggaatggcggaaacaacagatagctagtggagaagctcaggaaaatgccaattttattcctgttcgtggtgattggcgtgaccgtgtcaaacgcaaaagggctcaagcaaaaaatgagtcaaaagatgacattgttgctgcatctttaggtagttccgaacagcataaaggacctcctgatctagcagagctctccaaggatcttcctactggttggcaggcatacttggatgagtatactaagcaagtctattatgggaacaacctcacgtcagagacgtcctgggagcggccaacaaaatgaaaatctacagccttgtgcggtcacgaacagtaggcttaatttaaccatgtagatggtgctgtacaatgggcagatcaattttgttgtagatatctcctggagttttaaaagaacgaacagaagtgccaaggatgtttagagaatgaaaacggaaagtgaagttcttataatgaattaatgatgctcagtttctagttttctatcttcgtgctacgagaagctccaacatgatctattttgatgattggagagcacatagtcactcaaatttctttcatagttttcatttctagggctcttattattcgtttgtaagaaataattggtgatgtagtttgtaaggaataaggtgatgttcttcctcaagctttcatttttagagctcttgataatgataaggaccttgtacgtgttttatttgacctaacaagccattttacataggttggtgtactatcttcatttttttaaagattggtagcgtgattcctcaataaggtaatgtagtttgtacggctatatgcagtagattgtgtaaaat

SEQ ID NO: 205311 - DNA, 2897 bp, Zea Mays
taaactatgcatatttattaaaaaacacaatgtactcatatttatacttgttgtgtgattgcctattgtacgcgtgctcgttggcgactgttggagctcgacctcttacgctgacggtgtttgttcctaggtgaggaaaaacataaaatttgctagacttaggagtgacatgaaatgatacacctaatactgagggaatgagagaaacctttggctgatgccttgatgcatgttaattgcataaatatttgataccttgacacttggatgaaactggacgggaatgaaaccagagcagtagggtaagtgttggtgcatgcgctaccatggtggtagacttgagaccgagttgtcatggtgacatctcgggtttactagttttggttggtggctgctctggtgaaccataaggactgtgtgttggggtgccatctcacctaacttatttccagtgcgaccacatgagcttgtatgggcaagccttagcctaatcccactggctggcctggtagtcgtccgaggtggatatgttttgggttggggacccgagcggtcagaacccagggtttgtgggcggctaggcgaggttgagccatgactgggtgttggctatgatagagtcgtcttgggacggtgatgtgcgtgtggcactacacgacggttgatctttagcgacccttattagggaccgacggttggtcgctaaaagttatggaccgacgattggtcgctaaatacgtttatagcgacggtctgtgggtcactaaaagtctagaaatttaacgacttatggtcggtcgctataggggtaagtgtgtgactgatggtgggtcgctatagaggtacgtgatttttgtgtttcttatttactcaccaaagcccatctaaaggcctactaaacaaacgaccgtgtggaaccggctggggaaaactatttcgtggcggctagggtttaacaaatgccaaccacgctgctttgctagaccgccgccgatatctacggtcggattaggttcggtgccctcttcgcctctgtctcccgaggtctccctgcggcggcggtcaccgtagtggactccggccacccccacgacaaccggcaaaagggtacgggagtgtgaactatgccgtgcaaagacctgcgcttcactgcctttgcccacacctcaggctagaaaatggttcctgattccgtcaataaccaaggtatgaatagttgaaagctattgcaatatactactgcaacattcattgctttgtgccactttgcttatgttagtaatttcgacatgctctgcttatttagttgacacttgttgatacgattgtgcttgccgtccataagtgagttctaaagactattgatttcattgacgatatttaatcttatgcactatgtttatgtgacctattaatatttttgctgctttgttgattgcttatacctctttactgttatctcaggacagttatagttttccaatttgtacacttacatatagattaataattgaagtccaattgttgttaacaaaaaatattccttagacatatggatgctcatatatttattatttttaaacatcaagaattcctatgaagctacactcattcatttcacaattgctcatacgactgttctgctcctctttagaattgttctacgcatctctatgtatgctccaagcactatctctttaatctacgacaagaatttcatagcagctttgactactattgaagttgatctttttactagtgtggtctgcttagcagtaggtagcactacaactagcaatgtatggatgaattaaaggaagtgaagaaggcagacaatcttacataaactctacatcttaaaactgccatgattggcaaagaagctggatgcatcctttgcattggtgtattcttatcaccaagcagtaacgtgaagcaagtcctgaccagattgaagctctgtatcagtacgccaaatttcagtttgagtgtggtaactactcaggggctgctgattacctttaccagtatcgtgctttgtgcacaaacagtgagcgaaatgtgagtgccgtctggggaaagctggcagcagaaatcctaatgcagaactgggacgtagctttggaggaactcaaccgcttgaaggaaataattgattcaaagaacttctcatcacctctgaatcagctctagaacaggatatggctgatgcattgggctctgttcatcttctttaaccatgaaaatggtagaaatgggatcattgatctgttcttccaggacaggtacttgaatgctatacagacaaatgcacaccatcttattaggtatctagctactgcagttgttgtcaacaaaaggagaaggaatatgcttgaagagttgattaaggtcattcaacaggagcaccatagctacaaggatcccgtaactgaatttctggaatgcttatatgtaaactatgattttgatggtgctcaacagaaactcatagagtgtgagcagggttctggacaaagaaagcttgtaccttaaaacaggaggatacaagaagctggagtggttgtctgaaggcttttgaactgcttgaagcattagtgtagctttggtgcttttgtgactgatcaactctggagcagctagagtgatgtagttgtgggcttttgaacaatagctggagtgatatgaaacattagtgatgtagttgtgggcttttgaactgcttcaagctggagtgatgtcgttgtggtgcttttgtgactgatctagtcgtgaatgatattataattgtgatgcttttgtgtttatgtgatggatctatgattgtggtatactgattaactgtgtatgtctttatgatttgtgtataaaatatgtgatttgtgctgcttaattaa

SEQ ID NO: 205312 - DNA, 1760 bp, Zea Mays
gtgatgtatgtgaacaacagctagctctggtgttcctggtctgcctggtggcggggtgcagcatctgctggttcaacacggtgtgcttcgtcctctgcatccgcagcttctccacgagcaaccgctccctggccctctccctctcgataagcttcaacggtctcagcgccgccttctacgcgctcttcgcaaacgccatctcacccttcaccccaaccatctacctcctcctcaacgcggtcctccctctcgccgtctccgtcctcgcgctcccagcgatcctcctctgccacacaggcgacagcaacaaccacctccgcagcgcgcccaggccgcaggacaggcgcgtcttcctcggcctctacatcctcgcggtcatcaccggcgtgtatctcgtgatctttgggtctttcaccacgaccggccccgccgcgtgggtcatcctcacgggcgccatggtcctcctcgctctccctctcatcatccccgcctgctccagctgctcctatttcgatacacaacatggcacaggcaccactgaccctgcatcgcaactgaaccagcatgatgacccaaacaaaccactccttgtcagtgacagccatcagatcgagcctgatggcgtgacgcagaaagaaccggagcaccagctgcagggcggttgttgtggaaccatactgtacaagggctgcctggcggttcttggtgaggagcatagcgcaaagaaactcatctggagtgtggacttctggctctactacacagcctacttctgtggagccactgttggtctcgtatacagcaacaacctgggccagatcgcgcagtcactgcaccagcaatcgcagctcaccatgttactcgctgtgtactcatcctgctccttcttcggccgacttctctctgcgctccccaacttgcctcacaggatggtatcacttgctcggacagggtggctcgctgctgcattggtgcccatgccaatggcattcttcctgatgtggaaacaacaggacgtaggcgctctggtagcaggaacagcgatggttggcctgagctcaggattcatcttcgccgcagcagtgtcagtgacatccgagctctttggaccaaacagcatcggtgtgaaccacaacatcctgatcaccaacatcccgctggggtcactcctctatgggcagatcgccgccatggtgtacgacgcgaatggacaaaggatgacactgatggataatcgcactggcatcattgacaccatgattgtgtgcatgggggtgaagtgctactcgaccaccttcctcgtgtggggttgcatcacattgctggggttagtgtcgagcgtagttctgttcataagaacaaaaccggcttatgctgctgctggtcggtcgagttgtaagcaccttcaccaagtttccagttaacggggggaacttcttggtcatacccttattgccttacttttgacatcagttagcttgtacaaaattcagtttagttctagctgaaatgtgttagatacaaaacatgaaacgaatagcatcacaaggaagagacaccaagaggataggaaattgtcagcttagtactagctggcatgcgaagtacagaacgggtattccatttactggacattaataacaagctgccccaatgttgcattaaagcattttggaattttttaatgctggttaaattgacctatgtgcaaagtcctccatatctaccgttgttatggagtagtagtactactactgtaa

SEQ ID NO: 205313 - DNA, 3731 bp, Zea Mays
ccaacccaaacctcaaccgacactccccgtggggggcggtgccgtcgccggcgactcgccaattttgatttgaagaaaagaaaccaccagccaccacgcccgcggccgtcagccggaggtgaagcacgcaattcattacaaaagggtcccctgccaagatccaacactcatgaattgcaacaatacggatcggagacagcgagcagatctcgcggacttgcaattcctgttttatcttcttgccgcagcccctgctgagctgtgagctgtatgcatggcatggccacccctgtggcgcctcttctccatgatgagcctcaagctgctggtatcttactcccagggacaacccagcattcagatcaaacaaactctgactctagagttggagagcttatactgcctaatggggatacttatcgtggcgcgttatcgggcaacacgccacatggcccaggttgttatatctggtccgatggttgtgtttatgagggtgattggaggagaggcctcaggcatggccgaggcaagacgctgtggccaacaggggccacctacacaggtgactactccggtggctacatttatggtcagggaacgtataccgccgggcttaacagttacaggggaggctggaagctgaatcttaagcatggccaccttggcctacagacatatcccaacggagacacttttcaaggttcttgggtgcatgggcaaatgcaggggcatggcacctatacctgggcaaatgggaacacttatgttggcgccatgaaagatggggtcatgtcaggcaaaggaattctcacatggaacaatggagattcatttgaagggaactggttagatggtgccatgcatggctatggaatctacacatggaaggactctggctactatgtaggaacctggacaaggggggtcaaggacggaaaaggcacgttctatccaaaatgccgtgggattccggttaccgacatcgacgatttaagaaacagaggtgtactgcctggtgctgaaagccagactcatggttcccgtatccttcactctgcctcatcggacatggcagacatggtggctagcagaaatcaggactctgtaggtatttcatctgttagaagcttgaattttgagaaaactcgctccactaatgtgctactggaaagaaggtggagccttggagtggctattgaaaaattcctcggtcgcgaaaccaatgaaagttctgcaattgaaagatgtgaaaacaaggctgattccaaccttcctatactggaacgggaatatatgcaaggtgttctcatcagcgaggtcgtggtggatgcaagcttctcgaatccattaaaaagggtatcacgccgccagaagaaaatagtgaaggacataaagaaacctgggcagacaataattaaaggacataggagttatgatctgatgctcagtctgcagcttggaatcaggtatacagttggaaagattacacctattcagagacgtgaagtgcgagcttctgattatggttccagagcaagtttctggatgaacttccccaaaaatggttcacgacttactccttcacatcatgctgataattttaaatggaaagactactgcccaatggtgttcagaaatttgagggagatgttcaagattgatgcagcggattatatggtttccatttgtggaagtgacgcacttagggagctatcttctcctggaaagagtggaagtgtcttctttctatctcaggatgatcgatttatgatcaagactctacggaagtctgaagtgcaggttcttctacgaatgcttccagagtattatcaccatgtccgtacctatgagaacacactcataactaagttttttggcctccacagggttaaaccgtccagcagtcaaaagttccggtttgtagtgatgggaaacatgttttgcactgaacttagaattcaccggaggtttgacttgaaaggttcatccttaggccgctcaacagacaaagtaaaaatcgacgagaacacaacactgaaagacttggatctaaactattcattttatctcgagccttcttggcggcagactttgcttgcgcaaattgagaccgatagcaaatttctaaagcagcacgcaataatggattatagtttgcttcttggcgttcatttccgggctcctcaaagcctacggacacaggcatcctttcatcaagcaatcctaccagataggctggctgttctttcagaagaaggtgctctggaggaggatgttttgaacagtcctgaaggactggttttggttcagcgagctagtgatcaaaatgatgttgtcattggttcccatataaggggggcccgtcttcgatcatcaagtgcaagttttgaggaagtagatctcttgcttccaggcaccgcaaggctccagatccaacttggggttaacatgccggccagggcaaaacagacggttgaggatgatgacagtgaagataatggtcaggtgtatgatgtggtgctgtacctgggaataattgatatcttgcaggagtacagcataaggaagaagattgagcatgcttacaagtgcatccaatataactcattgtcaatatctgtcgtggaacccagtctctactcggagcgcttcctgaaattcattcaaactatctttcctgaaaattcataaaataaaatccagtaattcttcacctacaggagcaaagtgaaagaaacattgttcagtgtgcattgtggccctttgcaagtatgcttttgctacgtccttgattgattctctttctttacacatgttgatcatggtaaggatttccggattacgtatcccagtggtgctatccactagtagtggataactgtaccttgccctattaatctgagttgatgacgattctaccgtctacttcaaattcacactgtctaaacaatgttttgcacattcacttattcataccagtaaattcagccttagggctggtttggttttgtgacaaagggagattgaaggagaaataaactaatttctccctcagtgtcatccaatccacctgtgatttctagtcaccaaaccagaccttagtgtaccttgaattccacgtccattgtagtattgtatgtgtaaaaatgtccattgtagtattgtatgtgtaaaaatgttttgcacaaaatgtattctctgtgggtaaatttagcttttagatttttggaagtattatcagacctataagcctattattattattgttttattacagagagattcctaaaaaaacaagaagctattaaatggtgattctcctttatttctacttgcacaggttcaaattttacataatagaaggtgataacatactctgtccgtccatacttttggaagcagcagcagcacctgctgtcatccacgagctaagcatatagaagcagcagcacctgccagagacttatccatccatgtccctatattcaaacttcaatacagtttatagtgcaaaatagtgtttcgaataatggatacggtcattttaagatttgcttggatattcacctcaatccacatacattcaagtggattgtaaatgtaagtttaacttccacccttaatttaccttaaatattatatggatcgaatgtaaaactgaggtggatatgagtgcagccaaacaaacacaaactattatatttgacgattcactaagctccacaagcggc

SEQ ID NO: 205314 - DNA, 2483 bp, Zea Mays
agcaatttcaggcgtggtgcctgcctgcctgttgaatataaatataaatcagttgcgtctctagcttgtgctgcggtgctgcctagtcttgccttctaccaagggtgtgccacacatcaaacaccattgatagatagatactgatgactgcttccttggaacaatctcctatttaaaagctgtgtgcataccaggcactcaggcagcacaaaggtcgacgagttaggaaggatggcctttctggtgccgtttctgctgggtctttcctctgtcctcgccgcgtggatctactctgaattcctgggatacagggcatcatcgtctcatgaaaaagtccactcggatgttcacgtcggcgataaaaccatcaaagaaaatgacagggcggtcctacttgaagaaggtgaatctaaaccgccatcgacaaaggcacccaacatgtctgccagagccaaattaatacggtttattacgttggacgagtcctttcttgttggaaaccgcgccacactgagagccatagctgaattcggcattattcttgtttacttttacacctgtgatcggaccaacatatttgcagagagcaagaagaactacaaccgcgacatgtttctgtttctttacattcttcttgtcgtcgcatcaacgattacctcactcaagaagcaccctgaaaattcagtagtttcaggaaagaccgttttctatcttaatcgcaaccaaactgatgaatggagagggtggatgcaggtcttgtttctgatgtaccactatttcgctgcctcggaaatatacaatgcaatccgtgtgttcattgcttgctatgtctggatgactggatttgggaatttctcatactactacaagaagaaagatttcagtatcgcaagatttgctcagatgatgtggagggtaaatttctttgccatgtcctgttgcatggtccttgacaatgactacatgttgtactatatcgctccgatgcataccctgttcactcttatggtgtatggatcactgtttgttctcaacaagtacaatgagatcccatcagtcatggccattaagatcgcaggctgcctcttgactgtcattctgatatgggaaattcctggtgtgtttgaaattttctgggcaccatttacgtttctgctaggttacaaaaacccagagccttctaagatgaacttacccctgttacacgaatggcgcttccgctctggccttgatcgttacatatggatcattggaatgatttatgcttactttcaccccaacgttgaaagatggatggaaaagctggaagaatctgagactaaggtgagagtgttaatcaagggaaccattgttacagcttccttaatggccggctatctgtggtacgaatatatctacaagctggacaaacatacatataacaagtaccatccctacacgtcgtggattccaataactatctatgtctgcctacgcaattgcacccaacagttgaggagtacccatttgtctctttttgtgtaagtatttaattctttttttatggccattggaaaggtatcaagagcgatcaaaacttgaaatttgacgtatatatctatcggtaccattctaggctggttaaaaatatattttttaccgatttgtccttttatagttggcttggcaaaattacaatggagagttatatttctcagtttcacatttggctcaggtaagtgccggacccagctttttttatataaagaaaggttttattgaaaatcaaaacaattacatcatgatgacacaaccatcctgagctactcctggcagcaaagcaggagttcattaaactgaatctctgaaagaaaaatgttgaaatgttttttgagcttctgctgcgcagtttcagtttcttgcaccaaccaagctgtggtttcttttacaggtctagtattccgaacggacagccaaagttgcttctatctttcttaccagattatccgatgcttaactttttgcttactacgacgatatttctgtcggtatcattccgggtgtttaagctcacaaacgtactgaaagaggcatttatccccaccagggacaacaagtgtctatatcaaaattttattgctggagttgcagtctttgcatgcctatattgcagctcattattcttcaaaacctaccaacagtatagctgatacatagactctaaatcttagctatctcatgtagctcaactcagaaagcacattgtttttcctgggatggagaaattccaagtaattaagtgaacttgttaatttgtttcttttgtatgtatttccaagtaattgcgtgtttttagagacatccatagtcgtgtccttagttttggtggttttaactgcctatgtaaacaaaacaacaagtcttgtaaaatcagttctatagtagtgttctactttagttaagctttactcttacgagttcactatatttccgcttacataata

SEQ ID NO: 205315 - DNA, 997 bp, Zea Mays
ggaaacggactaccagcgctgagccgttccgtttcttttcaatcttggcgttttgtctccattcaatagggaaagggatgtttcgcttgaggctttcctttgtgcctgtgtcttctctgtagctttcaagagaataaaaatttggagcttctctcgcaccagcgtcctttccttcttccttggtttcatgctgacaactagggctgatcttcaggacggcctgttcttggttcggttcctgagagcgattgatagcgccagacggagtttcttctttaggagtcgtgcactatgggtaattgctggtttaaggggaatccatactttaacagggtttcttccaatgcaaccaaagcagaatctcccaaaattcagagcccctcggagagaactgaaaaggaggattgccagctaccatccaacccgaaagaggcaagattcgttactaggcggtggtggatttggcagagtctacaaaggttttatcaccaaggatctccgcgaagggttagagatagaagagcccacaagagttgccgttaaggtccatgatggtgacaatagcttccagggccatagggagtggctggctgaggttatatttcttggacagctctctcacccgaatttagtgaagttgatcggctattgttgtgaagatgaccacagggtccttgtttacgagttcatgcctctaggaagtgtggagtctcatttgttttcaagggttatggtgccacttacgtggtcgatcagaatgaaaattgcgctcggtgctgcgaaaggacttgcttttctgcatgaagctgagaagcccgtcatctatcgggacttcaagacatcaaatatattactagatgaggaatataatgcaaaactatctgactttgggcttgcaaaagatggaccagttggcgataagtcccatgtttcaactcgtattatgggtacctacggttatgctgcaccagagtacattatgacaggggcggaccta

SEQ ID NO: 205316 - DNA, 1912 bp, Zea Mays
ggaaacggactaccagcgctgagccgttccgtttcttttcaatcttggcgttttgtctccattcaatagggaaagggatgtttcgcttgaggctttcctttgtgcctgtgtcttctctgtagctttcaagagaataaaaatttggagcttctctcgcaccagcgtcctttccttcttccttggtttcatgctgacaactagggctgatcttcaggacggcctgttcttggttcggttcctgagagcgattgataggtctgagattatatattggtgtcgttgttgtttgttttttttcgtgctcatccgttgctaaataagcaaaccatcagcccatcagcttactacaagcactcttttgcctccttttctgttcttggtgttcttggtgagacacagcgccagacggagtttcttctttaggagtcgtgcactatgggtaattgctggtttaaggggaatccatactttaacagggtttcttccaatgcaaccaaagcagaatctcccaaaattcagagcccctcggagagaactgaaaaggaggattgccagctaccatccaacccgaaagaggcaagattcgttactaggcggtggtggatttggcagagtctacaaaggttttatcaccaaggatctccgcgaagggttagagatagaagagcccacaagagttgccgttaaggtccatgatggtgacaatagcttccagggccatagggagtggctggctgaggttatatttcttggacagctctctcacccgaatttagtgaagttgatcggctattgttgtgaagatgaccacagggtccttgtttacgagttcatgcctctaggaagtgtggagtctcatttgttttcaagggttatggtgccacttacgtggtcgatcagaatgaaaattgcgctcggtgctgcgaaaggacttgcttttctgcatgaagctgagaagcccgtcatctatcgggacttcaagacatcaaatatattactagatgaggaatataatgcaaaactatctgactttgggcttgcaaaagatggaccagttggcgataagtcccatgtttcaactcgtattatgggtacctacggttatgctgcaccagagtacattatgacagctatggtgttgtactactggagctcctcacgggccggaagtcactggacaagtcccggccagtcagggagcagatgctggcagactgggcactcccattgttggcacagaagaagaaggtgcttggcatagtagacccaaggcttgccgaggactacccagtgaaggcagtgcagaagacggcgatgctggcgtaccattgcctcagccgcaacccaaaggctaggccgctgatgcgcgacatcgtcgcgactttggagcctcttcaacagctggaggagacccctggagacagcgtggcagtgacacttgaagggacttgaagcagtgttccattcacagctcacatcacagtcacacacagctctggaaaactcgggtgccacgtacttaactatgcatgataatagtagctagctagtgttcttgatatgcaggatgatttcttgattgtttaattaatccatggagacagtagctttgttcagcagaaagttagtgtgtatctcagtaggacggttcatgtgtgtgtatccaggtgttcagtcctggcgtagcgaactccctggcatttcggatgcgggcaagtctgtgcaatctgtatttgcaatgcttgttgcccgcagaggaagcttgcttaccagtgtttgtaacctagtattgtgcagttcatgatctatgcatgttgaataatgtgtgtgtatatatatatataacaggtataacgggagcactgagcttccaatagttaaagaaagcctaagccgaccaaccctgcaacct

SEQ ID NO: 205317 - DNA, 1013 bp, Zea Mays
gtcgtacaacgccattattatataaagcacttcccgctgacggacggagcgctgtgcctggtggcggcgacggcgttcacggcggagctggtgctcttctacttccactccacgacgcacatgggggctggagggctactaccactacctgctggtgctgctggtgggcctgtgcgtggccgccgccgtcctcggcgcgctcctgccggacagcttcccggccgacctggcctcgggcgtcctcgtcgcgctgcaggggctctggttctaccagacggcgctggcgctgtacgggcccatgctgcccgcgggctgcgcccgcgacgccgacgcccacgtcgagtgccgctcgcgcgccgcgcaggagcgcgccgagcagctcgccatctcccagctcttcgccctcgtgctcctcgccttcctctacgcgctcgggtgctacgccgtcgctgccgccaggtacgggcaacccccggagctggccgtggttcgtcataggcacgccgcggccgtggagctggagtgccggcagggtgatgacgctggcgcgctggaggagtgcgcgatctagtggccaggccagtggtgatggctgctctggatggagtctgctggactctgccttttgggtttggtgtagtagccgtataggaaattcagatttcatagtacatgcgtgggcagaagtagcttgcagcttgttcgctgcggcttgctgcggctgcaatccggctgcggctgcggcttctacagtatttttctctctatggattgcagctgcagcagtccaaacagctgcaacagtgtcggcttgtagccagccgaacacacccttggagttttcaggctttcgatatcagggagggcagggcaggcagggagtgtacatgttcggattaactatcaccaaagcttttgggtttcatttcacgagttgcttaacttatgctgtaactgttactcatgtcagaggagcgatacatagaatgaaaggaatatacttgttcgtaaaa

SEQ ID NO: 205318 - DNA, 3413 bp, Zea Mays
ctgaaatcctctctaaaggctaggcttatctgcacactctgtgctgagtaggagatgccaaataattcccagcagaacctcttggctggtgcctggtggagtgagaatcaaaagaaagtgccacttgcaagttgcaacagaattattgcctcaataacatgagaatgtgcatcagggctacccaacagagacattattgcgtttccttaaagctagagagtggcatgtgaataaggctcacaggatgcttgaagattctttgaattggaggatgcaaaatgaaatcgatagtatattggagaaacctattatcccagtagatttgtatagatcaattcgtgatacacagcttattgggttatcaggatactccaaagagggcattcctgtatttgcagttggtgttgggctgagtacatatgacaaagcttcggttaactactatgtgcaatctcacattcagatcaatgagtaccgagatcgttttattttgcctacagtgacaaagaagtatgggagacctattaccacctgtataaaggttctcgatatgactggtctgaaattgtcagcactacaccaaatgaagattgtgactgcaatatctacagttgatgatttgaattaccctgaaaagactgagacctattatatagtaaacgctccatacatattttctgcatgttggaaggtcgtgaagcctctgttgcaagagagaacaaggaagaaagttcatgtgttgcgtggctgcgggagagacgagcttctacagatcatggactactcctccctcccccatttctgcagacaggagggctcgggctcatccaaacattcgtcaggcgacgccgataactgcttctctctcgaccacccgttccaccaggagctctacagcttcatccaggagcaggcgctgaaccaggagctcatcaagcagggctccttgcacgtgaaaatccccgagcaggaccctgaggacgcaaagatcgtggaggtcatcgaggccgagttccacaagcttggcgtgcagaacgggtccgccaatggcatcgaccaagcatagcacctttgtctaataaggccagcctgattcaaccgagacgttgcttgccacttctgatgcaactaatcctactgtttaatttttttggtggggtgggcccacccccattgctgtttcctggggggaggggggggggggggggggtgattggtattggtggtatacatagcaaagtcatttgcagatccatccatgatgcaggactgagatagacgatatcacctgtgtaaacttgcagatttgcaatgtgtcctcatctcatatgtatgctgagttgagatgaaatgaataaatcatcctacaagttttttttgagtcatcttcagaattgtgttgtgctcagtcagaaaagtaaccatgcgtttctgtgccgattcttgctagccctaattaatataaggcgaaacagataatgcctatccattggagggattagaggaaggttctccccttagaaagattgtgggtcaccaaacaaagggtaaacgaaccgaaccgaaccgtgcatatcaacaacattacaacaaagtaagcatgctcttggttggcagtagttaccacttgataaaaagaagagggagaccatgtgctttggcttcctctctgagccatctttcttgctctagccttaggccttagcaatggagatcagcgacgagcagaggatgcaagtggagtgccagcgccttccgccttcctggcaaggcaacggatcagacgccgatgtcgaagtggatcatcatctgtggccgtcaaaagatggccctcttccaatattccttaagtttgagaacgtggagtacagggtgtcaggaggcgagaggaagaggaccagcatcgggaacgagatcctcgtcgacccgtcgctgctcctcctcgacgagcccacctccggcctcgactccacgtcggcgagcaagctcatctttatcctccagcgcctggccaagacgcggaggacgatcatcacgacgatccaccagccgtcgagccggatgttccacatgttcgacaagctgctgctcatctccgacgggcacgccatctaccacggcaaggcccgggactgcatgcaccacttctcctcgctgggcttcgtcccggagatccccatgaacccggccgagttcctgctggacctcgccaccggcaacctcgacgacatcagcgtccccgaggcgctgcgcggctcgccggacccgcaggagttcaggtcccaggtcatcaggcacctgcagctcaagtaccgggcgggcgccgaggctcccgcggggagaaggacgcccactgagcagctgcgtctggcggtgcgggcgcataacaaggaccgccgccggcggagcatcggctggctccagcagttcgccgtgctgtcccggcgcacgttccgggagcgcgcatccgactacctggacaagatgcggctcgcgcaggccgtcggcgtggcgctcctgctgggtctcctctggtggaagtcccagaccgggaacgaggcccagctgcgggaccaggtcggtctcatcttctacatctgcatcttctggacgtcgtcgtcgctcttcggctccgtctacgtgttccccttcgagaagctgtacctggtcaaggagcgcaaggcggacatgtaccggctgagcgcctactacgccagcagcacgctgtgcgacgccgtgccgcacgtcgtgtacccgccagggcaccggggagctgctgggcgccgccatcctcagcgtcaagagggcgggggtcatggcgtcgctcgtgctcatgctcttcctcctcaccggcggctactacgtccagcacatccccaagttcatccgctggctcaagtacgtctccttcatgcactacggcttcaacctgctgctcaaagcgcagtaccacggccacctcacgtacaactgtgccagccggggcggctgccagcgcctgcagtcgtcgccgtcgttcggcaccgtggacctcgacggcggcatgcgcgaggtctggatcctgctcgccatggcgctcgcataccgactcctcgcctacttctgcctcctcaagcggatcagcctcacgcccttgtgatcatccacctaattaaattggggcgcaatttcgcatgcctgtgtgaatgattattcatgggaaatgcctgcatggcgatgtgtatcaggctatcagctatactttgcagactgctgggcctaatttacgaggtgtatttgtctgacacaagttttagaagaagagtgaacaatgacatagcatttttagattatataagtgtttatgctagccgttcctagttataagttgcatttttagctttattaataagatcatctagattttgataaac

SEQ ID NO: 205319 - DNA, 3286 bp, Zea Mays
ggaccaatggacgcgccgctgaagaagacatttgagaatgtgcatcagggctacccaacagagacattattgcgtttccttaaagctagagagtggcatgtgaataaggctcacaggatgcttgaagattctttgaattggaggatgcaaaatgaaatcgatagtatattggagaaacctattatcccagtagatttgtatagatcaattcgtgatacacagcttattgggttatcaggatactccaaagagggcattcctgtatttgcagttggtgttgggctgagtacatatgacaaagcttcggttaactactatgtgcaatctcacattcagatcaatgagtaccgagatcgttttattttgcctacagtgacaaagaagtatgggagacctattaccacctgtataaaggttctcgatatgactggtctgaaattgtcagcactacaccaaatgaagattgtgactgcaatatctacagttgatgatttgaattaccctgaaaagactgagacctattatatagtaaacgctccatacatattttctgcatgttggaaggtcgtgaagcctctgttgcaagagagaacaaggaagaaagttcatgtgttgcgtggctgcgggagagacgagcttctacagatcatggactactcctccctcccccatttctgcagacaggagggctcgggctcatccaaacattcgtcaggcgacgccgataactgcttctctctcgaccacccgttccaccaggagctctacagcttcatccaggagcaggcgctgaaccaggagctcatcaagcagggctccttgcacgtgaaaatccccgagcaggaccctgaggacgcaaagatcgtggaggtcatcgaggccgagttccacaagcttggcgtgcagaacgggtccgccaatggcatcgaccaagcatagcacctttgtctaataaggccagcctgattcaaccgagacgttgcttgccacttctgatgcaactaatcctactgtttaatttttttggtggggtgggcccacccccattgctgtttcctggggggaggggggggggggggggggtgattggtattggtggtatacatagcaaagtcatttgcagatccatccatgatgcaggactgagatagacgatatcacctgtgtaaacttgcagatttgcaatgtgtcctcatctcatatgtatgctgagttgagatgaaatgaataaatcatcctacaagttttttttgagtcatcttcagaattgtgttgtgctcagtcagaaaagtaaccatgcgtttctgtgccgattcttgctagccctaattaatataaggcgaaacagataatgcctatccattggagggattagaggaaggttctccccttagaaagattgtgggtcaccaaacaaagggtaaacgaaccgaaccgaaccgtgcatatcaacaacattacaacaaagtaagcatgctcttggttggcagtagttaccacttgataaaaagaagagggagaccatgtgctttggcttcctctctgagccatctttcttgctctagccttaggccttagcaatggagatcagcgacgagcagaggatgcaagtggagtgccagcgccttccgccttcctggcaaggcaacggatcagacgccgatgtcgaagtggatcatcatctgtggccgtcaaaagatggccctcttccaatattccttaagtttgagaacgtggagtacagggtgtcaggaggcgagaggaagaggaccagcatcgggaacgagatcctcgtcgacccgtcgctgctcctcctcgacgagcccacctccggcctcgactccacgtcggcgagcaagctcatctttatcctccagcgcctggccaagacgcggaggacgatcatcacgacgatccaccagccgtcgagccggatgttccacatgttcgacaagctgctgctcatctccgacgggcacgccatctaccacggcaaggcccgggactgcatgcaccacttctcctcgctgggcttcgtcccggagatccccatgaacccggccgagttcctgctggacctcgccaccggcaacctcgacgacatcagcgtccccgaggcgctgcgcggctcgccggacccgcaggagttcaggtcccaggtcatcaggcacctgcagctcaagtaccgggcgggcgccgaggctcccgcggggagaaggacgcccactgagcagctgcgtctggcggtgcgggcgcataacaaggaccgccgccggcggagcatcggctggctccagcagttcgccgtgctgtcccggcgcacgttccgggagcgcgcatccgactacctggacaagatgcggctcgcgcaggccgtcggcgtggcgctcctgctgggtctcctctggtggaagtcccagaccgggaacgaggcccagctgcgggaccaggtcggtctcatcttctacatctgcatcttctggacgtcgtcgtcgctcttcggctccgtctacgtgttccccttcgagaagctgtacctggtcaaggagcgcaaggcggacatgtaccggctgagcgcctactacgccagcagcacgctgtgcgacgccgtgccgcacgtcgtgtacccgccagggcaccggggagctgctgggcgccgccatcctcagcgtcaagagggcgggggtcatggcgtcgctcgtgctcatgctcttcctcctcaccggcggctactacgtccagcacatccccaagttcatccgctggctcaagtacgtctccttcatgcactacggcttcaacctgctgctcaaagcgcagtaccacggccacctcacgtacaactgtgccagccggggcggctgccagcgcctgcagtcgtcgccgtcgttcggcaccgtggacctcgacggcggcatgcgcgaggtctggatcctgctcgccatggcgctcgcataccgactcctcgcctacttctgcctcctcaagcggatcagcctcacgcccttgtgatcatccacctaattaaattggggcgcaatttcgcatgcctgtgtgaatgattattcatgggaaatgcctgcatggcgatgtgtatcaggctatcagctatactttgcagactgctgggcctaatttacgaggtgtatttgtctgacacaagttttagaagaagagtgaacaatgacatagcatttttagattatataagtgtttatgctagccgttcctagttataagttgcatttttagctttattaataagatcatctagattttgataaac

SEQ ID NO: 205320 - DNA, 3640 bp, Zea Mays
gcaaggcagcagaatagcagtagcccatgttgttgaggacaggtcgcctgtaggccaaccgaccaaagggccacagcactacagcaggccggccaacacgactccgagttggaggcgacctccgctcccctcttcctccctctttccgactttccctccctactcgcccccgcgccgcgccaatcttttttccctcttgacggcgcacataaatccgcgccaaatcgtcaaaccaaaaccaggccgcgcccgcctcgtcagtcctcagtcctcactttcgggccgagctccggatatccagcggcggcaatggcagccgaagccagcgccgtccagcagctcgctggcctcctggaccaagtggacgcgccgctgaagaagacatttgagaatgtgcatcagggctacccaacagagacattattgcgtttccttaaagctagagagtggcatgtgaataaggctcacaggatgcttgaagattctttgaattggaggatgcaaaatgaaatcgatagtatattggagaaacctattatcccagtagatttgtatagatcaattcgtgatacacagcttattgggttatcaggatactccaaagagggcattcctgtatttgcagttggtgttgggctgagtacatatgacaaagcttcggttaactactatgtgcaatctcacattcagatcaatgagtaccgagatcgttttattttgcctacagtgacaaagaagtatgggagacctattaccacctgtataaaggttctcgatatgactggtctgaaattgtcagcactacaccaaatgaagattgtgactgcaatatctacagttgatgatttgaattaccctgaaaagactgagacctattatatagtaaacgctccatacatattttctgcatgttggaaggtcgtgaagcctctgttgcaagagagaacaaggaagaaagttcatgtgttgcgtggctgcgggagagacgagcttctacagatcatggactactcctccctcccccatttctgcagacaggagggctcgggctcatccaaacattcgtcaggcgacgccgataactgcttctctctcgaccacccgttccaccaggagctctacagcttcatccaggagcaggcgctgaaccaggagctcatcaagcagggctccttgcacgtgaaaatccccgagcaggaccctgaggacgcaaagatcgtggaggtcatcgaggccgagttccacaagcttggcgtgcagaacgggtccgccaatggcatcgaccaagcatagcacctttgtctaataaggccagcctgattcaaccgagacgttgcttgccacttctgatgcaactaatcctactgtttaatttttttggtggggtgggcccacccccattgctgtttcctggggggaggggggggggggggggggtgattggtattggtggtatacatagcaaagtcatttgcagatccatccatgatgcaggactgagatagacgatatcacctgtgtaaacttgcagatttgcaatgtgtcctcatctcatatgtatgctgagttgagatgaaatgaataaatcatcctacaagttttttttgagtcatcttcagaattgtgttgtgctcagtcagaaaagtaaccatgcgtttctgtgccgattcttgctagccctaattaatataaggcgaaacagataatgcctatccattggagggattagaggaaggttctccccttagaaagattgtgggtcaccaaacaaagggtaaacgaaccgaaccgaaccgtgcatatcaacaacattacaacaaagtaagcatgctcttggttggcagtagttaccacttgataaaaagaagagggagaccatgtgctttggcttcctctctgagccatctttcttgctctagccttaggccttagcaatggagatcagcgacgagcagaggatgcaagtggagtgccagcgccttccgccttcctggcaaggcaacggatcagacgccgatgtcgaagtggatcatcatctgtggccgtcaaaagatggccctcttccaatattccttaagtttgagaacgtggagtacagggtgtcaggaggcgagaggaagaggaccagcatcgggaacgagatcctcgtcgacccgtcgctgctcctcctcgacgagcccacctccggcctcgactccacgtcggcgagcaagctcatctttatcctccagcgcctggccaagacgcggaggacgatcatcacgacgatccaccagccgtcgagccggatgttccacatgttcgacaagctgctgctcatctccgacgggcacgccatctaccacggcaaggcccgggactgcatgcaccacttctcctcgctgggcttcgtcccggagatccccatgaacccggccgagttcctgctggacctcgccaccggcaacctcgacgacatcagcgtccccgaggcgctgcgcggctcgccggacccgcaggagttcaggtcccaggtcatcaggcacctgcagctcaagtaccgggcgggcgccgaggctcccgcggggagaaggacgcccactgagcagctgcgtctggcggtgcgggcgcataacaaggaccgccgccggcggagcatcggctggctccagcagttcgccgtgctgtcccggcgcacgttccgggagcgcgcatccgactacctggacaagatgcggctcgcgcaggccgtcggcgtggcgctcctgctgggtctcctctggtggaagtcccagaccgggaacgaggcccagctgcgggaccaggtcggtctcatcttctacatctgcatcttctggacgtcgtcgtcgctcttcggctccgtctacgtgttccccttcgagaagctgtacctggtcaaggagcgcaaggcggacatgtaccggctgagcgcctactacgccagcagcacgctgtgcgacgccgtgccgcacgtcgtgtacccgccagggcaccggggagctgctgggcgccgccatcctcagcgtcaagagggcgggggtcatggcgtcgctcgtgctcatgctcttcctcctcaccggcggctactacgtccagcacatccccaagttcatccgctggctcaagtacgtctccttcatgcactacggcttcaacctgctgctcaaagcgcagtaccacggccacctcacgtacaactgtgccagccggggcggctgccagcgcctgcagtcgtcgccgtcgttcggcaccgtggacctcgacggcggcatgcgcgaggtctggatcctgctcgccatggcgctcgcataccgactcctcgcctacttctgcctcctcaagcggatcagcctcacgcccttgtgatcatccacctaattaaattggggcgcaatttcgcatgcctgtgtgaatgattattcatgggaaatgcctgcatggcgatgtgtatcaggctatcagctatactttgcagactgctgggcctaatttacgaggtgtatttgtctgacacaagttttagaagaagagtgaacaatgacatagcatttttagattatataagtgtttatgctagccgttcctagttataagttgcatttttagctttattaataagatcatctagattttgataaac

SEQ ID NO: 205321 - DNA, 1481 bp, Zea Mays
tttcatttaccttacaattcagattagcattgaagggttatccaatattcagtgaaaactagctactgaagaataggagtagcaatacctttgatgccccataaccccattcattagtttctgcaatgtctttgtcttctatttgctgtgcgaagttccatctactaaggaactctataggagacacttgcagtgtcagatggcttaaataccatagcagattgatatatgaaactttcctctcaagcagaatacatcaaagtaggcctcctagtacaacagtgctagcaagaagcacaagaaaaggaagtaagcagtcatttagcaatggccgccatttgcacagtaaatcggttgaatcatcaattgaagtgttcaagcagtcagagcttgagcagcttaaatcacttcattgctacaatgttgaggaagagttttctgaagtcaagaccgaatggcctgcaactatccttgtttttgatattgaaactactggcttctcacgtcgtgatgacagaattattgagtttgctgtccgtgatcttatggggggaaagaatagcacttttcagacactcataaatcctgagaaagatgtgaaaaatacatatgttcatggtattaacaacagtatgctctgcaggcctgatgttccaagatttggagagattattcccattctgctacaatatgtgtggagtcgtcaaatggacggtaaaccagttctctgggttgctcataatgggcgttcctttgacgtaccctttctcatgtttgagtttcgacggtgtaaagtagaaatgcctggtgattggctctttgtggatactcttcctatcgcaaaacaattggtcgattctaatgggtcaaaactcagttctgtgtcattgaagttcctgagggaacgctacaaaatcccactcacagggagcgcgcatcgtgccatgcaggatgtgacaaccctctcttacgtgcttcagaaattgacctttgagctgaaactaactgttcctcagctgctcgagaagtctttccgagcatcggatcttccagctaatcgtcctgcaaagtgactgtatctgcctcacctgaatatcgcctgaagcactaaattattatcaccgccgttttcgaatatttgtcgtctgcaagtttatttttgaactaaaacacgacaaaaaaagagggagtacattgttgttgtattattacagagatgttatttggagatcccagctctgatttcttctatgttctttctaacaacctaataaagccagcctgattgccactgatacatcagtagcacagtaatccgtattactgatactctgacattgtaggcttgtatacattactaaatcatcaattcaacatatatttacttgactgcgaacttatgcgtagggatggcaatgggtacgagtatgggtaaatagtcgcagatttatctattggatatgagtatggtagaattaggt

SEQ ID NO: 205322 - DNA, 265 bp, Zea Mays
gtaatcttacaccttggttggacggaaggcatgtcgtgtttggccaggtcctggaagggatggatgtcgtaagtctgatcgagtcgcaggagaccgacagaggtgaccgcccgaagaagaaagtagtcatcagcgagtgtggggagcttccagtggtctaagtgttactcatctgttgtcggtcttacctaacctcggatggatggcgatatttcccccacctgaacttgtcgtgctaccctccccctccccacccccctaccct

SEQ ID NO: 205323 - DNA, 1620 bp, Zea Mays
gtcacgttctaccgccggacggggcggtgggagtcgcacatatgggcgtacgatcgagcggcgatcaagttccgcggcgtggaggccgacatcaatttcagcttggaggattaccaagacgacatgaagcagatgtgccacctgagcaaggaggagttcgttcacgtgctccggcggcagagcacggggttcccccggggcagctccaagtacaggggcgtgacgctccacaagtgcgggcggtgggaggcgcgcatgggccagttcctcggcaagaagtacgtctacttgggcctgttcgacaccgaggaggaagccgccagggcgtacgaccgcgcggccatcaagtgcaacggcaaggacgcggtgacaaacttcgatcccagcatttacgccgaggaggaggtcgcgccggcggcggcgacgggcggcgccgccggcgacgagcacaacctggacctgtcgctgggaagctcggcggggaacaaaaggggcagccttgacggcggcggcggcggcggcggcgacgacaagtcctcggaccagcgcgtccccatggcgttcgacatcgactggcagacggccgcacgtcggagcaccaaggcaaagctcctgagcaacggcgatccggggaccgcggcgggaggcctttccctggcgatcggcggcggaggcgggcactggcctccgcagctgcagcatcagcagcagcagcagaggctccacggcgccaggaacaacggcggcggcacgagctggccgccgccgccgcacccgtgcccgccgccagtaccggccgccgccgcgaccgcagctgcagcatcatcacgattccatccctacgttgttacgagtacgacgcaaagcccggccggctgggtccagaagaatgggttccattcgctggccaggcccacgtagaccaagaaccaggactgggcgttcgtccttcgatcgtattccacggcgaaggtccatcatttgacccaagggcaaacggctcgtcgatccaccgatttacaccccctccccctttctttcccttttccattctctgtgttcttgattgggtgagacatggatccgaggatggatgggcctgctgcccccctgctgtaaatgaggagtttccgggaagaagacgagtgctttggtaggcgactaggcgtcgcgtcaggcagtgcgtccttttgccgctttttgttctctctcccccccttctgcattcactcaccaatcaccattggcaagcaccgatgaatggtggcatggggtgtcaacatcgcagctcattttgtttggtctcatgttgcatcactcgctgctgcacgcacgatgatggcctgctgcactgtcgtctgctgagctgctactgtcttcgatacgtgtgggtctcgcgctcgtgtaaaccttgtttctaattcgggcactgcaataactgtgggagaagagaagacgacccgggggaggccgaccggcggttaccttcctcgccggatgggacgagaccgtaccccacgccgtcatcttcatactatgtggatggatggctacattgccggcaagtgcggccactgtgcgcacagctcgcgcgcaggaagaaaagttgctagataatgc

SEQ ID NO: 205324 - DNA, 2990 bp, Zea Mays
ctataatataaattctaatagttaaaaattattttagattgcaataataaataagaatagttatcgaaatcttttaaaatttcacaactatggtttcaccactttttagagcacctggtgacctagttcaccgatttcaccagatttttaggccggagaagttccaaacactactccagcgtggattttctggagtaataatattttaggactgagcaattccaggcggtaatcaccatctaccgacagggcggcctacacgatgtggcggcagtcaggctgcccccggcccagaccaattcattggatcgcccccaggcacggtgatggtgtccgcgcccagagccccaggcgaccgccgcagcagccagcagcatcggaaagccgccgcgcccccttcactgctccgccggtcgctgtgcctccacgccgacgacatcatacccgctcaggcccagctgctctcactgccgaattgaaaccttttaattccctatgacccgtcagtctcctccaaagaacgtaagcgtgaagcaaagcttccccgttccggatcgatcgatcgatcatccatctgaatattctattggcatttttttagtggttgaaagctgcatctgcacctgcatatgctgctgctgctgcggcttcccctttctcgtccctgtcgtcgttgcgtactttggatagctggacctcttccctctcgtcccgctggccgcgaccagttctccatcccgagcttaggtagctacgtactcatatgtagacaggcagaggcagtcgcatgcagagctcggaagctcgagagagaacagcctgcagagcaacagtaacagccgttggtcgttagtatcttcagaacgagacgtacacgaggcacagagagagcaggtccggggtagctagctgccatgggcaacgtatgcttctgcggcaccacctccacctcccctgatcagcctgaaccggccacggccggcaaagcgccgccacaaggcgccaccaacaggaggccggcgacgcctccgagcagccagcagggcagcagccaagagccgagcccggccccgggggccaataagcccggaccgaaggcgaggcccaaggctactactaaggcgaacccgtacgactgggctccgccggcggcggcgcacgcgtcccgggcgtcggcgtcggtgtcggcgtcgcgcgtgctggacggcgtggtgccgcaccacccgcggctgcgcgtgacggacaagtaccacctcgggcgggagctggggcggggcgagttcggcgtcacgcggctcgccacggaccgcgccacgcgggagcgcctggcgtgcaagtccatccccaagcggcgcctgcgcacggcggtggacgtcgcggacgtgcgccgggaggtggccatcatggcgtcgctgcccgaccacccggcgctcgtgcgcctgcgggccgcctacgaggacgccgacgccgtgcacctggtcatggagctctgcgacggcggcgagctgttcgaccggatcgtcgcgcgcggcaggtacacggagcgcgccgcggccgccgcggccaggaccgtggcggaggtggtgcgggcgtgccacgctcacggggtcatgcaccgggacctcaagcccgagaacttcctgtacgcgggcaagagcgacgacgcgcagctcaaggccatcgatttcggcctctccgtctttttcagaccaggcgagcggttcacggagatcgtgggcagcccgtactacatggcgccggaggtgctgcggcggagctacgggccggaggtggacatctggagcgccggcgtgatcctctacatcctcctctgcggcgtgccgccgttctgggccgagacggagcagggcgtggcgcgcgccatcctccgcggcaacctggacctgcagcgggagccgtggccgcggatctccgagggcgccaagagcctcgtccgccagatgctccagatggaccccaagaagcgccccaccgcgcagcaagtgctcgagcacccgtggctgcagaacgcgcggaaggcgcccaacgtgccgctgggcgacgtcgtccgggcgcgcctgcagcagttctccgctatgaacaagttcaagaagaaggcgatgcgggtgatcgcggagcacctgtccgtggaggaggtggaggtgatccgggacatgttcgcgctcatggacaccgacaaggacggcagggtgacgctggaggagctcaaggccgggctcaggaaggtggggtccaagctcgccgagcccgagatggagctgctcatggaggccgctgacgtgaacggcaacggttacctggactacggcgagttcgtggccatcaccatccacctgcagcggctctccaacgacgcccacctccgcaaggcgtttctcttcttcgacaaggacagcagcggctacatcgagcgcgccgagctggccgacgcgctcgccgacgaggccgggcacgccgacgaggccgcgctcgacaacgtcctgcgagaggtcgacaccgacaaggatgggcggatcagcttcgaggagttcgtggcgatgatgaaggccgggacggactggaggaaggcgtcccggcagtactcgagggagcgcttcaagaccctgagcaacagcctcctcaaggacgggtcgctccgcatggcgcgatgaccagagaagagaacgatgcttgtgcggggcttcagagacgatccatgcgatgcgatgcttggtttcttatgcatacacccttcatcaatggatggatagaatgatagattcctttcttcagcttgcttgtatattcgttccagaaagtccgaactttggaatttgggtaggaatatttgtcgttaacaaaagctgatgggggttcaggtcagtgtctatggctacgaagtgaacatgtgttgcttgtaattatgcgtcctaggaaggaactaaattttgaaaatgtccttaaaaaaatctgacctgtaactttgaaac

SEQ ID NO: 205325 - DNA, 1752 bp, Zea Mays
agcaatttggatttggaggctaaacttgtagttggacttgtaattttgttagtataaatcctgaactacgtaaaccagcacaaatgggtacagagttgaccatttgatgggggggtttggaatgtcgcaccagcaggctctggctcaagttacagcccaagcaacccattctccactcagaatgtttgatcaccttgaacagccatctttctccacagctgcaacaacttctggagctctacaccatatgaattctgcagccagtatggcaggaatttcagatatgacaatggcaacagcaaacaatgagaatccatcctttcagtctgctgaggcatcccaaaggtatcaagttaatgcccctgttgataagccagctgatgatggctataactggcggaaatatggtcagaaggtggtaaagggcagtgattgtccaaggagctattacaaatgcacccatcccaattgtcctgtcaagaaaaaggtagagcatgcagaagatggtcagatatctgagatcatatacaaaggcaaacacaatcaccaacgtccaccaaataagcgggcaaaagacggcaactcttcagcatttgatcaaaatgaacaatctaatgataccacatctggcttgtcaggtgccaagagagatcaggacaatatatacgggatgtctgagcaagcatatggtttaagtgatggagatgatatggatgatggtgaatcaaggccacacgaagtggatgacgctgataatgagagtaaaagaaggaatatacaaatttcttcacaaaggaccttgtcagagtctaagatcattgtgcaaacaactagtgaggttgatcttttggatgatggttatagatggcgcaagtatgggcagaaggtagtcaaagggaattctcatccaaggagttactacaaatgcacatttgctggatgcaatgtccggaagcacattgagagggcttcgtcagaccccagggctgtcataacaacctatgaaggaaaacatgaccatgaaccgccggttggtcggggcaacaaccagaatgcaggaataccacaacagaaagaagggcagaacaatatatcaagtaatcaagcttcacttttcgaggccagattttagcaacgctaaccagatgccaattggaatcttacaattcaagagcgagcaatagtgacatccatttttgactctgctgggaaccttgctgctcgctgttgtttggatgacgttcttttggtaaataccggatgcctgcaattcgtacagtcatatggcatcaaagtttcttaaaagcctgataatcaaatggtatcagtttgcagtttttcccccatagttacacatgatagcgggtacggcaccatccatttctagtatgtacatgttattaagtcgaagcatgcagaatgtgatatcagctagatggaagttgtttatttatatgtgcttatgatgttctatagatggatcagtggtatagtacatgttcatcttctgattttattcctgacatccaacaagatcttgtatgtgtattgtaataagattgaaaagagaaatttgaatgtacagatgtttttcagttacattttgcttcctgtaatttgtaacttcaaagatgttctagttttctatgtccttttcctttcctcccaaatttggtttgctcttagtcttctgtgatcactattatcaacaatacgttgaaggtactacaataaagcaccattttgcatctg

SEQ ID NO: 205326 - DNA, 1563 bp, Zea Mays
ctgctgctgatcgtcggcgcgccgggctcatgatcggaaattcggaaccagatcccctcactttttatcccatctttggctccggcgagctatgcgagcatgcggcaccaccaagcctgcagccgcgctcaccaggtgggcgctctggtcctcgtctctgccaccttcctcctcacccgcctcttcgaccgcttcctcctcgacacatattcctccgcccccataaaccccggccggcccttctcttccgctgacctccgcatctacgtctacgctgaggacgagatccagggcctccgcgccctgctccggggacgcgacggcaccatcaacgccgccacatgcctcaagggccaatggggcacccaggtcaaggtccaccaatttcttctaaagtcaaggttcagaacatttaacaaggatcacgcaaatctcttctttgttccgagctatgtcaagtgtgttcgcatgacaggggcactaagtgacaaagaaatcaatcagacctatgtcaaggttctgagtcagatgccatatttccgtagatcaggtgggcgcgaccacatttttgtcttcccaagtggtgcaggcgctcatctgtttcgttcatgggcaatatttctgaatcgatctattatccttactccagagggtgaccggactgacaaacgtggtacgagtgcatttaatacatggaaagatattattatacctgggaacgtggatgattctatggtgaagtctgatgctcctgctgtccaaccaatcccgctaacaaaaaggaagtacttagccaacttccttggacgtgcccaggggaaagcaggacgccttcaactggtggagcttgcaaagcagtatcctgacaagctggaatctccagaactcaagttataggacccaaaaaattgggaaggatcgagtacttcaagcacctgagaaatgcaaagttctgcttggctccacgtggagagtcatcttggacacttcggttctacgagtccttctttgtgtgattttgtcagatgaagttgagcttcctttccagaatgtgatcgactacagtgaaatctcgataaagtggccgtcgtccaggattggacctgaactccttgagtaccttgaatcaatatcagatgaaaggatcgaggaaatgattggtcatgggcgtgagatgagatgcttgtgggtgtatgcagctgatactgagccgtgctctgccatgagcggtatcctgacggagctgcagaagaaagtgcggcggttccatcaatcgccggaaacgttctggctgcacaacagaacaattgtgaatagagatctgattgagttccacagctggaagacgcctgttccgttgccatgaaccatgtattctgatttcaactatagccggcatctgtttctgtaccatgttagacatttttcttgtgaagctgtgtttgttgttgttcttgctaatcttgagaataaacacatacatcgtgttaaggattgacaatagtacgctagatatatttttttactttatcgggatgatagaagggtaagataaaacgatat

SEQ ID NO: 205327 - DNA, 2285 bp, Zea Mays
gggccggggcccgaatcaagtttagtcctcgggagccctcgcgtgcgctctcttttcctgtgtctgctgccgacgaaagggcggccgccgccagacctccatcttcgtgaccttcgtaggcggcgagcacccaccaggagaaggcatggcttcacgcatgacaccttccaagaggccttttcagagaagatcttcagactacgatggccggggcaagtggcagaagacgaagcacccttctccacataaatctcagttcaaaatcgagcctggtgttcccattttccgtattctctgcccggcttcaaaatctggtaatgtgattggcaaaggaggtgccattattgcaaagatacgtcaagaaaccaggatgagaatcagggttgatagggcagcccccggctgtgacgagagagtcatcttcataactgctgccaacaaggatgaagaagctggcagcgagcaaggcggagagaatgacggaggtgctgctgcttctactggtggtgaccatgagaaggataaagataacaacagcaaggagcaaaacgttgatccagaggagaacaactgcaacgagcagaatgatgattcagagaaaggaagtggtaaggaagaaatagatggtttcgagaaagaccatggtacggaagaaaagaatgattcagagaaagaacacaataagggagaaaaggatgatcccttggttgcgaaagttacaaagttagaaccagagagggtaataccgttggcactgaaggccgtttcacttgtattcgataggatttttgcaactgaaggtaataatgaaactgggaacgcatctgctgcaagcgctcctgtttcgttgcgaatgttggtgctatacagccaagcaggttggctcctggggaagggcggtagtgtggttaagcaaatggcagcagataacggctgtgaaatccgtgttttgaaagacaaccttccgtcatgtgctctgttgaatgacaaactttgccagatcactggagagattgactcagtaaggaaaggtctcaatgctgtatctgaagtgctcttagctcatccacccaaggaaactgatgcagttgctgatgttcattcttctggatcatcgtcacgttctttgttcagccagcctgatggtcttccctctggaatgcaatctaacttccatatacctttgcaaggcccgccatcccaagccaatggaccttttgatatagttgatcttcaacctccaatacatggtcatgcctcagtggctatagaatccctctcctttaggatgctgtgtccacaagacaaggttggcagtataataggcaagggtggaaatattgttaaaaccattcaaaatgatacaggctgtgaaattaaagttcttgacactgttccaaaaacagatgatcgcatcataagtatatctggacctgcgcatccgagtgatggaatctcccctgcacagaatgccattctgcatgtgcagcgtaaaattatgttacctagctctgataagaaggaaggtcctgcaacgtgtaggctgatcgtttctggaaaccaagttggttgtgttctcggcaagggtggtagtatcatagctgaaatgaggaagctgtcaggagcatttatagtagtgttgagcaaagacaagattccaaggggtgtcccagagcatgatgaagttatccagataaacggaagttgtgaagctattcaagaagctctaatgcaggttacagctaggcttcgtaaccatcttttccgggacagaatgcctgcagtggggcctaatatgcggccaccttttggtttgttagatccccagtttggtccattttcgggaaaccatgaatcatcatccctgtttcataaagatttcatgggacgaccattggatgggattgctgctccttggacagtgaagggcatgcgggatctcagcgatccagtgtcaatatccgatatccctggagcagggcatagagaagctggtggatttccaggtcctggtcagccatctatgatgccaaacttgactgcagaggtcttggttccaagattagttatccctgttctctgcggtgaggatggaggttgtttggacaggatccgtgagttttctgaagctaagataactgtcgctgagcctacagccgatgcgatggacactgctgttttgatatctggcacaccagagcagatgcatgcagcccgaagtctcgttgaagcattcgttatgagcgaatcttttggcccatgacatgtccagagctgatggtagg

SEQ ID NO: 205328 - DNA, 2747 bp, Zea Mays
gggccggggcccgaatcaagtttagtcctcgggagccctcgcgtgcgctctcttttcctgtgtctgctgccgacgaaagggcggccgccgccagacctccatcttcgtgaccttcgtaggcggcgagcacccaccaggagaaggcatggcttcacgcatgacaccttccaagaggccttttcagagaagatcttcagactacgatggccggggcaagtggcagaagacgaagcacccttctccacataaatctcagttcaaaatcgagcctggtgttcccattttccgtattctctgcccggcttcaaaatctggtaatgtgattggcaaaggaggtgccattattgcaaagatacgtcaagaaaccaggatgagaatcagggttgatagggcagcccccggctgtgacgagagagtcatcttcataactgctgccaacaaggatgaagaagctggcagcgagcaaggcggagagaatgacggaggtgctgctgcttctactggtggtgaccatgagaaggataaagataacaacagcaaggagcaaaacgttgatccagaggagaacaactgcaacgagcagaatgatgattcagagaaaggaagtggtaaggaagaaatagatggtttcgagaaagaccatggtacggaagaaaagaatgattcagagaaagaacacaataagggagaaaaggatgatcccttggttgcgaaagttacaaagttagaaccagagagggtaataccgttggcactgaaggccgtttcacttgtattcgataggatttttgcaactgaaggtaataatgaaactgggaacgcatctgctgcaagcgctcctgtttcgttgcgaatgttggtgctatacagccaagcaggttggctcctggggaagggcggtagtgtggttaagcaaatggcagcagataacggctgtgaaatccgtgttttgaaagacaaccttccgtcatgtgctctgttgaatgacaaactttgccagatcactggagagattgactcagtaaggaaaggtctcaatgctgtatctgaagtgctcttagctcatccacccaaggaaactgatgcagttgctgatgttcattcttctggatcatcgtcacgttctttgttcagccagcctgatggtcttccctctggaatgcaatctaacttccatatacctttgcaaggcccgccatcccaagccaatggaccttttgatatagttgatcttcaacctccaatacatggtcatgcctcagtggctatagaatccctctcctttaggatgctgtgtccacaagacaaggttggcagtataataggcaagggtggaaatattgttaaaaccattcaaaatgatacaggctgtgaaattaaagttcttgacactgttccaaaaacagatgatcgcatcataagtatatctggacctgcgcatccgagtgatggaatctcccctgcacagaatgccattctgcatgtgcagcgtaaaattatgttacctagctctgataagaaggaaggtcctgcaacgtgtaggctgatcgtttctggaaaccaagttggttgtgttctcggcaagggtggtagtatcatagctgaaatgaggaagctgtcaggagcatttatagtagtgttgagcaaagacaagattccaaggggtgtcccagagcatgatgaagttatccaggttacagctaggcttcgtaaccatcttttccgggacagaatgcctgcagtggggcctaatatgcggccaccttttggtttgttagatccccagtttggtccattttcgggaaaccatgaatcatcatccctgtttcataaagatttcatgggacgaccattggatgggattgctgctccttggacagtgaagggcatgcgggatctcagcgatccagtgtcaatatccgatatccctggagcagggcatagagaagctggtggatttccaggtcctggtcagccatctatgatgccaaacttgactgcagaggtcttggttccaagattagttatccctgttctctgcggtgaggatggaggttgtttggacaggatccgtgagttttctgaagctaagataactgtcgctgagcctacagccgatgcgatggacactgctgttttgatatctggcacaccagagcagatgcatgcagcccgaagtctcgttgaagcattcgttatgagcgaatcttttggcccatgacatgtccagaggcagtgaagctagcgatcatatgtgggttcatgtttgtgaatatgcgtcccagtctgtctgcagagtgacatatgctccaagtggctaattaggctgaatattcgactggagtcctctttctgtctgcagagtggcaaatgctccaggttgctagttatatataatcttccaaagtcgtcactttgactctgagatacggagcacattttgagtagccgcagaactatgttgcttatgcaaggaagtattgtttggacccggaaaggctctaactttatttttgttgtactgatgttgtgagatgtaccaccattgtctgtatttcagtccggctttatatctgtattttatggtattgctaccatagttaatatgacggtaaggcagcgaaaaggcgtaagccggggaatattaaatagtagaaatctttatctttatatatactaatataatgaagcagatgcaaactccctttgccctgtgtgcgcatgtaatgcaagcacgcctccttcgg

SEQ ID NO: 205329 - DNA, 2785 bp, Zea Mays
gggccggggcccgaatcaagtttagtcctcgggagccctcgcgtgcgctctcttttcctgtgtctgctgccgacgaaagggcggccgccgccagacctccatcttcgtgaccttcgtaggcggcgagcacccaccaggagaaggcatggcttcacgcatgacaccttccaagaggccttttcagagaagatcttcagactacgatggccggggcaagtggcagaagacgaagcacccttctccacataaatctcagttcaaaatcgagcctggtgttcccattttccgtattctctgcccggcttcaaaatctggtaatgtgattggcaaaggaggtgccattattgcaaagatacgtcaagaaaccaggatgagaatcagggttgatagggcagcccccggctgtgacgagagagtcatcttcataactgctgccaacaaggatgaagaagctggcagcgagcaaggcggagagaatgacggaggtgctgctgcttctactggtggtgaccatgagaaggataaagataacaacagcaaggagcaaaacgttgatccagaggagaacaactgcaacgagcagaatgatgattcagagaaaggaagtggtaaggaagaaatagatggtttcgagaaagaccatggtacggaagaaaagaatgattcagagaaagaacacaataagggagaaaaggatgatcccttggttgcgaaagttacaaagttagaaccagagagggtaataccgttggcactgaaggccgtttcacttgtattcgataggatttttgcaactgaaggtaataatgaaactgggaacgcatctgctgcaagcgctcctgtttcgttgcgaatgttggtgctatacagccaagcaggttggctcctggggaagggcggtagtgtggttaagcaaatggcagcagataacggctgtgaaatccgtgttttgaaagacaaccttccgtcatgtgctctgttgaatgacaaactttgccagatcactggagagattgactcagtaaggaaaggtctcaatgctgtatctgaagtgctcttagctcatccacccaaggaaactgatgcagttgctgatgttcattcttctggatcatcgtcacgttctttgttcagccagcctgatggtcttccctctggaatgcaatctaacttccatatacctttgcaaggcccgccatcccaagccaatggaccttttgatatagttgatcttcaacctccaatacatggtcatgcctcagtggctatagaatccctctcctttaggatgctgtgtccacaagacaaggttggcagtataataggcaagggtggaaatattgttaaaaccattcaaaatgatacaggctgtgaaattaaagttcttgacactgttccaaaaacagatgatcgcatcataagtatatctggacctgcgcatccgagtgatggaatctcccctgcacagaatgccattctgcatgtgcagcgtaaaattatgttacctagctctgataagaaggaaggtcctgcaacgtgtaggctgatcgtttctggaaaccaagttggttgtgttctcggcaagggtggtagtatcatagctgaaatgaggaagctgtcaggagcatttatagtagtgttgagcaaagacaagattccaaggggtgtcccagagcatgatgaagttatccagataaacggaagttgtgaagctattcaagaagctctaatgcaggttacagctaggcttcgtaaccatcttttccgggacagaatgcctgcagtggggcctaatatgcggccaccttttggtttgttagatccccagtttggtccattttcgggaaaccatgaatcatcatccctgtttcataaagatttcatgggacgaccattggatgggattgctgctccttggacagtgaagggcatgcgggatctcagcgatccagtgtcaatatccgatatccctggagcagggcatagagaagctggtggatttccaggtcctggtcagccatctatgatgccaaacttgactgcagaggtcttggttccaagattagttatccctgttctctgcggtgaggatggaggttgtttggacaggatccgtgagttttctgaagctaagataactgtcgctgagcctacagccgatgcgatggacactgctgttttgatatctggcacaccagagcagatgcatgcagcccgaagtctcgttgaagcattcgttatgagcgaatcttttggcccatgacatgtccagagtgaagctagcgatcatatgtgggttcatgtttgtgaatatgcgtcccagtctgtctgcagagtgacatatgctccaagtggctaattaggctgaatattcgactggagtcctctttctgtctgcagagtggcaaatgctccaggttgctagttatatataatcttccaaagtcgtcactttgactctgagatacggagcacattttgagtagccgcagaactatgttgcttatgcaaggaagtattgtttggacccggaaaggctctaactttatttttgttgtactgatgttgtgagatgtaccaccattgtctgtatttcagtccggctttatatctgtattttatggtattgctaccatagttaatatgacggtaaggcagcgaaaaggcgtaagccggggaatattaaatagtagaaatctttatctttatatatactaatataatgaagcagatgcaaactccctttgccctgtgtgcgcatgtaatgcaagcacgcctccttcgg

SEQ ID NO: 205330 - DNA, 2779 bp, Zea Mays
gggccggggcccgaatcaagtttagtcctcgggagccctcgcgtgcgctctcttttcctgtgtctgctgccgacgaaagggcggccgccgccagacctccatcttcgtgaccttcgtaggcggcgagcacccaccaggcatggcttcacgcatgacaccttccaagaggccttttcagagaagatcttcagactacgatggccggggcaagtggcagaagacgaagcacccttctccacataaatctcagttcaaaatcgagcctggtgttcccattttccgtattctctgcccggcttcaaaatctggtaatgtgattggcaaaggaggtgccattattgcaaagatacgtcaagaaaccaggatgagaatcagggttgatagggcagcccccggctgtgacgagagagtcatcttcataactgctgccaacaaggatgaagaagctggcagcgagcaaggcggagagaatgacggaggtgctgctgcttctactggtggtgaccatgagaaggataaagataacaacagcaaggagcaaaacgttgatccagaggagaacaactgcaacgagcagaatgatgattcagagaaaggaagtggtaaggaagaaatagatggtttcgagaaagaccatggtacggaagaaaagaatgattcagagaaagaacacaataagggagaaaaggatgatcccttggttgcgaaagttacaaagttagaaccagagagggtaataccgttggcactgaaggccgtttcacttgtattcgataggatttttgcaactgaaggtaataatgaaactgggaacgcatctgctgcaagcgctcctgtttcgttgcgaatgttggtgctatacagccaagcaggttggctcctggggaagggcggtagtgtggttaagcaaatggcagcagataacggctgtgaaatccgtgttttgaaagacaaccttccgtcatgtgctctgttgaatgacaaactttgccagatcactggagagattgactcagtaaggaaaggtctcaatgctgtatctgaagtgctcttagctcatccacccaaggaaactgatgcagttgctgatgttcattcttctggatcatcgtcacgttctttgttcagccagcctgatggtcttccctctggaatgcaatctaacttccatatacctttgcaaggcccgccatcccaagccaatggaccttttgatatagttgatcttcaacctccaatacatggtcatgcctcagtggctatagaatccctctcctttaggatgctgtgtccacaagacaaggttggcagtataataggcaagggtggaaatattgttaaaaccattcaaaatgatacaggctgtgaaattaaagttcttgacactgttccaaaaacagatgatcgcatcataagtatatctggacctgcgcatccgagtgatggaatctcccctgcacagaatgccattctgcatgtgcagcgtaaaattatgttacctagctctgataagaaggaaggtcctgcaacgtgtaggctgatcgtttctggaaaccaagttggttgtgttctcggcaagggtggtagtatcatagctgaaatgaggaagctgtcaggagcatttatagtagtgttgagcaaagacaagattccaaggggtgtcccagagcatgatgaagttatccagataaacggaagttgtgaagctattcaagaagctctaatgcaggttacagctaggcttcgtaaccatcttttccgggacagaatgcctgcagtggggcctaatatgcggccaccttttggtttgttagatccccagtttggtccattttcgggaaaccatgaatcatcatccctgtttcataaagatttcatgggacgaccattggatgggattgctgctccttggacagtgaagggcatgcgggatctcagcgatccagtgtcaatatccgatatccctggagcagggcatagagaagctggtggatttccaggtcctggtcagccatctatgatgccaaacttgactgcagaggtcttggttccaagattagttatccctgttctctgcggtgaggatggaggttgtttggacaggatccgtgagttttctgaagctaagataactgtcgctgagcctacagccgatgcgatggacactgctgttttgatatctggcacaccagagcagatgcatgcagcccgaagtctcgttgaagcattcgttatgagcgaatcttttggcccatgacatgtccagagtgaagctagcgatcatatgtgggttcatgtttgtgaatatgcgtcccagtctgtctgcagagtgacatatgctccaagtggctaattaggctgaatattcgactggagtcctctttctgtctgcagagtggcaaatgctccaggttgctagttatatataatcttccaaagtcgtcactttgactctgagatacggagcacattttgagtagccgcagaactatgttgcttatgcaaggaagtattgtttggacccggaaaggctctaactttatttttgttgtactgatgttgtgagatgtaccaccattgtctgtatttcagtccggctttatatctgtattttatggtattgctaccatagttaatatgacggtaaggcagcgaaaaggcgtaagccggggaatattaaatagtagaaatctttatctttatatatactaatataatgaagcagatgcaaactccctttgccctgtgtgcgcatgtaatgcaagcacgcctccttcgg

SEQ ID NO: 205331 - DNA, 2783 bp, Zea Mays
gggccggggcccgaatcaagtttagtcctcgggagccctcgcgtgcgctctcttttcctgtgtctgctgccgacgaaagggcggccgccgccagacctccatcttcgtgaccttcgtaggcggcgagcacccaccaggcatggcttcacgcatgacaccttccaagaggccttttcagagaagatcttcagactacgatggccggggcaagtggcagaagacgaagcacccttctccacataaatctcagttcaaaatcgagcctggtgttcccattttccgtattctctgcccggcttcaaaatctggtaatgtgattggcaaaggaggtgccattattgcaaagatacgtcaagaaaccaggatgagaatcagggttgatagggcagcccccggctgtgacgagagagtcatcttcataactgctgccaacaaggatgaagaagctggcagcgagcaaggcggagagaatgacggaggtgctgctgcttctactggtggtgaccatgagaaggataaagataacaacagcaaggagcaaaacgttgatccagaggagaacaactgcaacgagcagaatgatgattcagagaaaggaagtggtaaggaagaaatagatggtttcgagaaagaccatggtacggaagaaaagaatgattcagagaaagaacacaataagggagaaaaggatgatcccttggttgcgaaagttacaaagttagaaccagagagggtaataccgttggcactgaaggccgtttcacttgtattcgataggatttttgcaactgaaggtaataatgaaactgggaacgcatctgctgcaagcgctcctgtttcgttgcgaatgttggtgctatacagccaagcaggttggctcctggggaagggcggtagtgtggttaagcaaatggcagcagataacggctgtgaaatccgtgttttgaaagacaaccttccgtcatgtgctctgttgaatgacaaactttgccagatcactggagagattgactcagtaaggaaaggtctcaatgctgtatctgaagtgctcttagctcatccacccaaggaaactgatgcagttgctgatgttcattcttctggatcatcgtcacgttctttgttcagccagcctgatggtcttccctctggaatgcaatctaacttccatatacctttgcaaggcccgccatcccaagccaatggaccttttgatatagttgatcttcaacctccaatacatggtcatgcctcagtggctatagaatccctctcctttaggatgctgtgtccacaagacaaggttggcagtataataggcaagggtggaaatattgttaaaaccattcaaaatgatacaggctgtgaaattaaagttcttgacactgttccaaaaacagatgatcgcatcataagtatatctggacctgcgcatccgagtgatggaatctcccctgcacagaatgccattctgcatgtgcagcgtaaaattatgttacctagctctgataagaaggaaggtcctgcaacgtgtaggctgatcgtttctggaaaccaagttggttgtgttctcggcaagggtggtagtatcatagctgaaatgaggaagctgtcaggagcatttatagtagtgttgagcaaagacaagattccaaggggtgtcccagagcatgatgaagttatccagataaacggaagttgtgaagctattcaagaagctctaatgcaggttacagctaggcttcgtaaccatcttttccgggacagaatgcctgcagtggggcctaatatgcggccaccttttggtttgttagatccccagtttggtccattttcgggaaaccatgaatcatcatccctgtttcataaagatttcatgggacgaccattggatgggattgctgctccttggacagtgaagggcatgcgggatctcagcgatccagtgtcaatatccgatatccctggagcagggcatagagaagctggtggatttccaggtcctggtcagccatctatgatgccaaacttgactgcagaggtcttggttccaagattagttatccctgttctctgcggtgaggatggaggttgtttggacaggatccgtgagttttctgaagctaagataactgtcgctgagcctacagccgatgcgatggacactgctgttttgatatctggcacaccagagcagatgcatgcagcccgaagtctcgttgaagcattcgttatgagcgaatcttttggcccatgacatgtccagaggcagtgaagctagcgatcatatgtgggttcatgtttgtgaatatgcgtcccagtctgtctgcagagtgacatatgctccaagtggctaattaggctgaatattcgactggagtcctctttctgtctgcagagtggcaaatgctccaggttgctagttatatataatcttccaaagtcgtcactttgactctgagatacggagcacattttgagtagccgcagaactatgttgcttatgcaaggaagtattgtttggacccggaaaggctctaactttatttttgttgtactgatgttgtgagatgtaccaccattgtctgtatttcagtccggctttatatctgtattttatggtattgctaccatagttaatatgacggtaaggcagcgaaaaggcgtaagccggggaatattaaatagtagaaatctttatctttatatatactaatataatgaagcagatgcaaactccctttgccctgtgtgcgcatgtaatgcaagcacgcctccttcgg

SEQ ID NO: 205332 - DNA, 2778 bp, Zea Mays
atttctcgtgtgcgaaaccgagcacccaaaccctaaccctagccttgtatcccgtccttcctgctgtgcgaacacgagcacccaaaccctagctatctgtattcgaatctgatcttacccaatcccaagtgagaaggcatggcttcacgcatgacaccttccaagaggccttttcagagaagatcttcagactacgatggccggggcaagtggcagaagacgaagcacccttctccacataaatctcagttcaaaatcgagcctggtgttcccattttccgtattctctgcccggcttcaaaatctggtaatgtgattggcaaaggaggtgccattattgcaaagatacgtcaagaaaccaggatgagaatcagggttgatagggcagcccccggctgtgacgagagagtcatcttcataactgctgccaacaaggatgaagaagctggcagcgagcaaggcggagagaatgacggaggtgctgctgcttctactggtggtgaccatgagaaggataaagataacaacagcaaggagcaaaacgttgatccagaggagaacaactgcaacgagcagaatgatgattcagagaaaggaagtggtaaggaagaaatagatggtttcgagaaagaccatggtacggaagaaaagaatgattcagagaaagaacacaataagggagaaaaggatgatcccttggttgcgaaagttacaaagttagaaccagagagggtaataccgttggcactgaaggccgtttcacttgtattcgataggatttttgcaactgaaggtaataatgaaactgggaacgcatctgctgcaagcgctcctgtttcgttgcgaatgttggtgctatacagccaagcaggttggctcctggggaagggcggtagtgtggttaagcaaatggcagcagataacggctgtgaaatccgtgttttgaaagacaaccttccgtcatgtgctctgttgaatgacaaactttgccagatcactggagagattgactcagtaaggaaaggtctcaatgctgtatctgaagtgctcttagctcatccacccaaggaaactgatgcagttgctgatgttcattcttctggatcatcgtcacgttctttgttcagccagcctgatggtcttccctctggaatgcaatctaacttccatatacctttgcaaggcccgccatcccaagccaatggaccttttgatatagttgatcttcaacctccaatacatggtcatgcctcagtggctatagaatccctctcctttaggatgctgtgtccacaagacaaggttggcagtataataggcaagggtggaaatattgttaaaaccattcaaaatgatacaggctgtgaaattaaagttcttgacactgttccaaaaacagatgatcgcatcataagtatatctggacctgcgcatccgagtgatggaatctcccctgcacagaatgccattctgcatgtgcagcgtaaaattatgttacctagctctgataagaaggaaggtcctgcaacgtgtaggctgatcgtttctggaaaccaagttggttgtgttctcggcaagggtggtagtatcatagctgaaatgaggaagctgtcaggagcatttatagtagtgttgagcaaagacaagattccaaggggtgtcccagagcatgatgaagttatccagataaacggaagttgtgaagctattcaagaagctctaatgcaggttacagctaggcttcgtaaccatcttttccgggacagaatgcctgcagtggggcctaatatgcggccaccttttggtttgttagatccccagtttggtccattttcgggaaaccatgaatcatcatccctgtttcataaagatttcatgggacgaccattggatgggattgctgctccttggacagtgaagggcatgcgggatctcagcgatccagtgtcaatatccgatatccctggagcagggcatagagaagctggtggatttccaggtcctggtcagccatctatgatgccaaacttgactgcagaggtcttggttccaagattagttatccctgttctctgcggtgaggatggaggttgtttggacaggatccgtgagttttctgaagctaagataactgtcgctgagcctacagccgatgcgatggacactgctgttttgatatctggcacaccagagcagatgcatgcagcccgaagtctcgttgaagcattcgttatgagcgaatcttttggcccatgacatgtccagagtgaagctagcgatcatatgtgggttcatgtttgtgaatatgcgtcccagtctgtctgcagagtgacatatgctccaagtggctaattaggctgaatattcgactggagtcctctttctgtctgcagagtggcaaatgctccaggttgctagttatatataatcttccaaagtcgtcactttgactctgagatacggagcacattttgagtagccgcagaactatgttgcttatgcaaggaagtattgtttggacccggaaaggctctaactttatttttgttgtactgatgttgtgagatgtaccaccattgtctgtatttcagtccggctttatatctgtattttatggtattgctaccatagttaatatgacggtaaggcagcgaaaaggcgtaagccggggaatattaaatagtagaaatctttatctttatatatactaatataatgaagcagatgcaaactccctttgccctgtgtgcgcatgtaatgcaagcacgcctccttcgg

SEQ ID NO: 205333 - DNA, 1344 bp, Zea Mays
acaagtttcctgggcgttacgtctcatgcgcttgtggccttttacataagcaacccccccgacctcttttccctaccctctctttcgttacctacaggctacagctcccgtctctccgccgcttgcttggaaaacgaagaaaccctcctccaccaacccaatccagctacatccgtctgggtgaactccagggccaggagcagttcgccgccttcgttcgcatcacctacgcggttcgatccaactggcaggaaggaacgtgatggccaagacgagctcgttcaagctggagcacccccttggttgtgattataatggaagtatggtgctgttgttgattggatagtaatgcgtggctgcaattatgtgcttcgactgagtgttcttccacaagtttatgttagacagtgatattcagtagttgtacatgatacaagtggctagtcaatctgtaaatccaaactgatcattggagaagaggcagtctgaggctaatcggatcagagagaagtaccctgacagaattccagtgattgttgagaaggctgagaggagtgacattcctgacatcgacaagaaaaagtacctcgtccctgctgatcttacggttggacaattcgtgtatgttgttaggaagagaatcaagctcagtgctgagaaagctatcttcatctttgtgaagaacacccttccaccaacagctgctctgatgtcttcaatctatgaagagaacaaggatgaggatggattcctctacatgacctacagtggtgagaacaccttcgggctcctctagatggctcaccacaatcgggtctgccttgcccttgcttccctactgatgccctgcctcgtgtaaataagacctgccaagcaattgtgtatattctggtttcctcgctcaactgctggaagtctaaaacctaccttatcatggacaccgtttaaattaagtaattgactggacctgaatctggggggtcctatgacctatgtcgtttacggttactggtccttgtaaatgctgtaacgaggtcaattggattcgcagtatgctattgaatccgattgctgttgccgttttattgcttgactggtgcctgcagcctgctgcttggtgtctgctgccgacagcagcagctagtggaacggctcaccgtcaggcacgagggccttatgtcgccggtgccattactgcgtttgggctctgttgctgatggcggcagagtctggatggtgatgggcgtgtcaggatgaatgcatggaatcctggttcttgcgttggcgctatatgggctggtctgttgctgctagtctgctactagcatttagtttcggctgttg

SEQ ID NO: 205334 - DNA, 280 bp, Zea Mays
gtggccttttacataagcaacccccccgacctcttttccctaccctctctttcgttacctacaggctacagctcccgtctctccgccgcttgcttggaaaacgaagaaaccctcctccaccaacccaatccagctacatccgtctgggtgaactccagggccaggagcagttcgccgccttcgttcgcatcacctacgcggttcgatccaactggaaggaacgtgatggccaagacgagctcgttcaagctggagcacccccttggttaaattatacata

SEQ ID NO: 205335 - DNA, 1149 bp, Zea Mays
gtggccttttacataagcaacccccccgacctcttttccctaccctctctttcgttacctacaggctacagctcccgtctctccgccgcttgcttggaaaacgaagaaaccctcctccaccaacccaatccagctacatccggtgagtccctctgggtgaactccagggccaggagcagttcgccgccttcgttcgcatcacctacgcggttcgatccaactggcaggaaggaacgtgatggccaagacgagctcgttcaagctggagcacccccttgagaagaggcagtctgaggctaatcggatcagagagaagtaccctgacagaattccagtgattgttgagaaggctgagaggagtgacattcctgacatcgacaagaaaaagtacctcgtccctgctgatcttacggttggacaattcgtgtatgttgttaggaagagaatcaagctcagtgctgagaaagctatcttcatctttgtgaagaacacccttccaccaacagctgctctgatgtcttcaatctatgaagagaacaaggatgaggatggattcctctacatgacctacagtggtgagaacaccttcgggctcctctagatggctcaccacaatcgggtctgccttgcccttgcttccctactgatgccctgcctcgtgtaaataagacctgccaagcaattgtgtatattctggtttcctcgctcaactgctggaagtctaaaacctaccttatcatggacaccgtttaaattaagtaattgactggacctgaatctggggggtcctatgacctatgtcgtttacggttactggtccttgtaaatgctgtaacgaggtcaattggattcgcagtatgctattgaatccgattgctgttgccgttttattgcttgactggtgcctgcagcctgctgcttggtgtctgctgccgacagcagcagctagtggaacggctcaccgtcaggcacgagggccttatgtcgccggtgccattactgcgtttgggctctgttgctgatggcggcagagtctggatggtgatgggcgtgtcaggatgaatgcatggaatcctggttcttgcgttggcgctatatgggctggtctgttgctgctagtctgctactagcatttagtttcggctgttg

SEQ ID NO: 205336 - DNA, 1038 bp, Zea Mays
acagttcatgtttgatttttctcaaatcaacatgtcaactttgatagttgttctggttgggaaagaacaaagtagaagaagatgaaagtgatagcgatagtgacagtgacatggatgatgaggacagtgaagatcaggagagcgcagatgcaaaatctctcgtagttgatgaaggcaattgctcaaatggatccataaaaaatgagaaacttgatctgggttctgtttctggatcacattcagaaggagagtcctcaggggaaaagtcccaaccgacaacaaaatcaggagctgaaggtggtgactttgaatctgatggcagtgcagagcctgaattaggaatggtggatcatcccattcctgtgaacaatgctgttgctgctgcttcagaagaagtgctgaaatcagatgaagtgacagcagatgaggataacactacttcagcaacttcaaaccaaaacaatccagtggtaccacaagttaaagaagcgctgaaagcagacgaggataacagtgcttcagctacttcgaaccaaaacaacccagaggtgcccaaagtagaagaatatgccgatgccagcaaatcttattcagagccattggaccttgcaaagtacagttcagctgtagaattggaggtgcttggtctggagaagctaaaaatagagctgcaatctcgtggattaaaatgtggtggaactttacaggagcgagctacccgactcttccttctgaagacaactccattggataagttaccaaagaagctgcttgctaaggccgctattggggggaagtgagaagctgtataaacaagtactgatggtgcaatgcttaagttttttctttgacgatgtatggaaatctgttgtggtgtaatcacgtgttacaagcccttggtgtggcattgacgattaatgatgtgtctgtatctacgtatatgctaatcgttacctttgaagccccaagtttggactagggttccatttcgttgtagtgggagaaaagttatgtgcccatctgttgggccaacacaag

SEQ ID NO: 205337 - DNA, 426 bp, Zea Mays
tttcaaataaacactatcagcacagtgtgcttggtctggagaagctaaaaatagagctgcaatctcgtggattaaaatgtggtggaactttacaggagcgagctacccgactcttccttctgaagacaactccattggataagttaccaaagaagctgcttgctaaggccgctattggggggaagtgagaagctgtataaacaagtactgatggtgcaatgcttaagttttttctttgacgatgtatggaaatctgttgtggtgtaatcacgtgttacaagcccttggtgtggcattgacgattaatgatgtgtctgtatctacgtatatgctaatcgttacctttgaagccccaagtttggactagggttccatttcgttgtagtgggagaaaagttatgtgcccatctgttgggccaacacaag

SEQ ID NO: 205338 - DNA, 2813 bp, Zea Mays
tgaaattccaacattcacatctgagattctgaggttagcatatgtggaagcacggcatatgttgctcagactgcttggatccggaatggaaccattcaagagaacattttatttggaaagccaatgcattcagagagatattcggaaatcgtaaatgcttgctgcctggaaaaggatttggaaatgatggagtttggtgaccagactgaaataggagagcgagggatcaatctcagtggaggccagaaacagcgcatccagcttgcaagagcggtttatcaagactgcgatatatatcttctcgatgacatatttagcgcggttgatgctcatactggatcagctattttcaaggaatgtctgaaaggcatactcaagaataagactgtgttgcttgtgactcaccaagtggacttcttgcaaaatgtggatactataattgtaatgaaagatgggttagtcatccagtcagggatctatcttgagttactagcatcatgctcagaattttctgatcttgttacagctcatcatagttcaatggagacagcaggggcacaagcttttcatgttcagaacacagagagctctcaggcttccactggatctgtagatgccccatctttggcatcgaaatccaatgctgaaaatggtgaatcagttggcagtgcaacaaacaaagaagcaggttcttctaagctgatccaggaagaggaaaaggagagtggccgagtaagctggcgtgtgtacaagctatatatgacagaggcctggggatggtggggaattgtggtcattttagctgtgtcactgctgtcagagggctccagtatggctagcaactactggttatcatatgagacatcaggaggccctgtgtttgacacttccttatttcttggtgtttatgcttcgatagttgctacgacaattatattggaaatgatcgccactcttattgtgacattcatggggcttcaatcagcacaggcctttttcaacaagatgtttgacagcattttacgagcgccaatgtcattttttgacaccactccttcaggaaggatcctaagccgggcatcatcagaccaatctaagattgatactaaccttgtgttctatgttggttttgccacatcaatgtgcatctcagtggttaccaacgtcgctattacttgccaagttgcatggccatcagtaattgcagtatttcctctgctgcttttgaacatctggtatcggaaccgttacattacgacatctcgagagcttacccggcttcaaggggtaacaagggcgccaattattgatcactttacagaaagctttctgggtgccccaactgtaaggtgcttcagaaaggaggatgagttctaccagataaacctggacaggatcaattcgaatctgcgtatgtcatttcataattatgcagctaatgagtggcttggatttcgcctggagctaattggcacacttattttgtctataactgcttttctcatgatcagcttgcctagcaatttcatcaagaaagaatttgtcggcatgtccctttcctacggcatttctctcaattccttggtgtactacacaatttccataagctgtatgatcgagaatgatatggtagccatagagagggtgcatcagtacagtactctcccttctgaggcagcatgggaagttgccgacggtcttccctcacaagattggcccagccgaggagacattgatgtgaaagatctgaaggttcggtatcgtcaaaacacgcctctaatcttgaaaggcattactgtgagcatcaaaggtggagaaaaggttggagttgtgggaaggactggcagtggaaagtcgactttggtgcaggctttattcaggatcgtggagcctgcagatggccatatcatcatcgatggtgtcaacatctgcactctggggcttcgtgatctgaggtctcgcttcggtgtgattccccaagaacctgtgctcttcgaaggaactgtacggagcaacatagacccagcagggcggtattccgaggctgagatatggcaggccctcgagtgctgccagctaaaggatatagtagcctcaaaaccagagaagcttgatgcactagtcgccgacatgggggagaactggagcgtagggcagaagcagcttctgtgcttcggccgagtcatactgaaacgcagccggatcctcttcatggacgaggcaacggcttcggtcgattctcaaacagacgcggctatccaaaagatcatccgcgaggagttcactgaatgtactgtcatcagcgttgcacatcggatcccgactgtcatggacagtgaccgtgtcctggtgttggacgcaggtctagtggcagaattcgacgcaccctccaagttgatgcggaggccatcactctttggtgcgatggttcaggagtacgcaagtcgctcatctagcgtgaaggaaaccgttggatgagatgagagtatgagaccacttctcatggccaaaagacgacggtatcggagaaatttaggcatacgcatgatgggctctgttcgcaaggaaaaataaattgtactaggactttctgtaagcttgcaagcataaagctttgttttgttcgctacaccatgtattatcttaaatagaactggactatttggtttgcatttccgccaattttgtatgtgacgaaagcttagagcatctacaggaagtttgtgtaattcacatgctaaaccagtgactttcctaagttaagaaaacctaaatttatctctctctggctaatagttttatatgaacttccg

SEQ ID NO: 205339 - DNA, 4940 bp, Zea Mays
gggatggcgctcccatggtggctcaccaccaaggcgtgcacagcgccgccgcctggccccggctccttctccgatgcggtcgcgttcctcttcctctccccgtgcccgcagcgcgggctcctcgccaccgccgacctcgtgttcctcgtcgcctgcatcgtccgcctcgccagacgccttcgcaggggacacccggtgcccgcggctgctccccctcccgagcgcgaggcgctgctgcagaagccgaaccatccttcgccgccgctcgtccgccacgtgctcgcgctcggggcctccgcggtgttcgcggcggtgtccgtcgtcctcctcgcgctcgcgctcctcctcctgccggccacgccgtggcgcgccgcggagggagccttcctctccgtccacgccgtcgcgcacggggtggctgcctggaccatcgtctcttcgcggagagcaggagctgccccggaggcgcacctccgcgtgttctggctcgccaccgctctcggcgccgcgctcttctctgcctcggcagtggtccgcggcgcggacgcctcgctgctcttccccgatgacattctcgccttcgctggtctgcttgtctccctgcctctggcatacatagcggtcaccggcttcaccggcaatgtcaccagggcacaagaaggtgaaccggaacacgccggtccagaggcgccctcctcgccgtacaccaccgcttcgttcctttcgcgcgctacgttcagctggataaactccctcatcaccaagggctacgcggccgaatccctcaaaaccgaagacgtgcccccggtctctgccgcccaccgcgccgaggcggcgcacgccttgttcatgtccaattggccagcgtcgccagcatctcggcacccggtcggcgtggcactctggctctctttctggccgcagctcgtgcttactgcgttccttggcctcgctcgtctgggggccatgtacgttgggccgtcgctcatcgatcagttcgtcgagttcatccgccgcggcgggacatcatgggagggccttcgtctcgttctcatcttgctcgctggcaaggccgtccagacgctggcatcgcaccattacagcttccagggacagcttctgggcatgcgcatccgcggcgcgctgcagacggcgctgtaccgcaagtcgctgcgcctcaccgccggtgctcgccgagcgcacggcgctggagccatcgtcaactacatgcaggtcgacgctgggatcgtgtcctacgccatgcacggactccacgggctgtggctgatgccgctgcagatagtggtggcgctactcctcctgtacgcctacctcgggccccgccgtgctcatgacgctcgccgtgatcaccgcagtgactgtggtcacggccttcgctaacaagctcaacctggcgtaccagctcaagttcctcggcgtccgcgatagccgcgtgaaggcccatcaccgagatgctcagtaacatgcgtcccatcaagctgcaggcttgggaggacaccttcgggggcaaggttcgcgacatccggcgagaagagctcgggtggctggccaagatcatgctcttcatgtgcgccaacacggtggtattctcgagcggtccgctcgctatgacggtgctcgtgttcgggacctacctcgcctccggtgggcagctcgacgccggcaaggtgttcacggccacggcgttcttcggcatgctggaaggccccatgcggaacttcccgcagactattgtcatgtccatgcaggcgtttgtgtcgctggatcggctgaacaaattcctgacggacaccgagatcgacaccgcggccgtggagcgcatcgagagtggcggcgctgaggacacagtggccgtcaaggtgcaaggcggggtgttcgcttgggatgtgccagcggacgaggagatgaagggcaacaacaacaacagcagcaggccccgccatgaggtggcagagaatgaccaaggaaatcgggcggagttggtgacagtgctgaggggcattgacgtggaggtgaggaggggcgagcttacggcggtggtcgggacagtgggctccggcaaatcgtcgctgctgtcctgcatcatgggggagatgcacaagctctccggcacggttagcatatgtggaagcacggcatatgttgctcagactgcttggatccggaatggaaccattcaagagaacattttatttggaaagccaatgcattcagagagatattcggaaatcgtaaatgcttgctgcctggaaaaggatttggaaatgatggagtttggtgaccagactgaaataggagagcgagggatcaatctcagtggaggccagaaacagcgcatccagcttgcaagagcggtttatcaagactgcgatatatatcttctcgatgacatatttagcgcggttgatgctcatactggatcagctattttcaaggaatgtctgaaaggcatactcaagaataagactgtgttgcttgtgactcaccaagtggacttcttgcaaaatgtggatactataattgtaatgaaagatgggttagtcatccagtcagggatctatcttgagttactagcatcatgctcagaattttctgatcttgttacagctcatcatagttcaatggagacagcaggggcacaagcttttcatgttcagaacacagagagctctcaggcttccactggatctgtagatgccccatctttggcatcgaaatccaatgctgaaaatggtgaatcagttggcagtgcaacaaacaaagaagcaggttcttctaagctgatccaggaagaggaaaaggagagtggccgagtaagctggcgtgtgtacaagctatatatgacagaggcctggggatggtggggaattgtggtcattttagctgtgtcactgctgtcagagggctccagtatggctagcaactactggttatcatatgagacatcaggaggccctgtgtttgacacttccttatttcttggtgtttatgcttcgatagttgctacgacaattatattggaaatgatcgccactcttattgtgacattcatggggcttcaatcagcacaggcctttttcaacaagatgtttgacagcattttacgagcgccaatgtcattttttgacaccactccttcaggaaggatcctaagccgggcatcatcagaccaatctaagattgatactaaccttgtgttctatgttggttttgccacatcaatgtgcatctcagtggttaccaacgtcgctattacttgccaagttgcatggccatcagtaattgcagtatttcctctgctgcttttgaacatctggtatcggaaccgttacattacgacatctcgagagcttacccggcttcaaggggtaacaagggcgccaattattgatcactttacagaaagctttctgggtgccccaactgtaaggtgcttcagaaaggaggatgagttctaccagataaacctggacaggatcaattcgaatctgcgtatgtcatttcataattatgcagctaatgagtggcttggatttcgcctggagctaattggcacacttattttgtctataactgcttttctcatgatcagcttgcctagcaatttcatcaagaaagaatttgtcggcatgtccctttcctacggcatttctctcaattccttggtgtactacacaatttccataagctgtatgatcgagaatgatatggtagccatagagagggtgcatcagtacagtactctcccttctgaggcagcatgggaagttgccgacggtcttccctcacaagattggcccagccgaggagacattgatgtgaaagatctgaaggttcggtatcgtcaaaacacgcctctaatcttgaaaggcattactgtgagcatcaaaggtggagaaaaggttggagttgtgggaaggactggcagtggaaagtcgactttggtgcaggctttattcaggatcgtggagcctgcagatggccatatcatcatcgatggtgtcaacatctgcactctggggcttcgtgatctgaggtctcgcttcggtgtgattccccaagaacctgtgctcttcgaaggaactgtacggagcaacatagacccagcagggcggtattccgaggctgagatatggcaggaaatacaacctaaacctatgctatgccctcgagtgctgccagctaaaggatatagtagcctcaaaaccagagaagcttgatgcactagtcgccgacatgggggagaactggagcgtagggcagaagcagcttctgtgcttcggccgagtcatactgaaacgcagccggatcctcttcatggacgaggcaacggcttcggtcgattctcaaacagacgcggctatccaaaagatcatccgcgaggagttcactgaatgtactgtcatcagcgttgcacatcggatcccgactgtcatggacagtgaccgtgtcctggtgttggacgcaggtctagtggcagaattcgacgcaccctccaagttgatgcggaggccatcactctttggtgcgatggttcaggagtacgcaagtcgctcatctagcgtgaaggaaaccgttggatgagatgagagtatgagaccacttctcatggccaaaagacgacggtatcggagaaatttaggcatacgcatgatgggctctgttcgcaaggaaaaataaattgtactaggactttctgtaagcttgcaagcataaagctttgttttgttcgctacaccatgtattatcttaaatagaactggactatttggtttgcatttccgccaattttgtatgtgacgaaagcttagagcatctacaggaagtttgtgtaattcacatgctaaaccagtgactttcctaagttaagaaaacctaaatttatctctctctggctaatagttttatatgaacttccg

SEQ ID NO: 205340 - DNA, 5029 bp, Zea Mays
ccccatcgacggatcccccaacgagttccgacttccgttccactagcagtctgcactcggcagtcggccagtcgcacagccagagagccaacaagcccgcagggccgccgcaggcacacgggatggcgctcccatggtggctcaccaccaaggcgtgcacagcgccgccgcctggccccggctccttctccgatgcggtcgcgttcctcttcctctccccgtgcccgcagcgcgggctcctcgccaccgccgacctcgtgttcctcgtcgcctgcatcgtccgcctcgccagacgccttcgcaggggacacccggtgcccgcggctgctccccctcccgagcgcgaggcgctgctgcagaagccgaaccatccttcgccgccgctcgtccgccacgtgctcgcgctcggggcctccgcggtgttcgcggcggtgtccgtcgtcctcctcgcgctcgcgctcctcctcctgccggccacgccgtggcgcgccgcggagggagccttcctctccgtccacgccgtcgcgcacggggtggctgcctggaccatcgtctcttcgcggagagcaggagctgccccggaggcgcacctccgcgtgttctggctcgccaccgctctcggcgccgcgctcttctctgcctcggcagtggtccgcggcgcggacgcctcgctgctcttccccgatgacattctcgccttcgctggtctgcttgtctccctgcctctggcatacatagcggtcaccggcttcaccggcaatgtcaccagggcacaagaaggtgaaccggaacacgccggtccagaggcgccctcctcgccgtacaccaccgcttcgttcctttcgcgcgctacgttcagctggataaactccctcatcaccaagggctacgcggccgaatccctcaaaaccgaagacgtgcccccggtctctgccgcccaccgcgccgaggcggcgcacgccttgttcatgtccaattggccagcgtcgccagcatctcggcacccggtcggcgtggcactctggctctctttctggccgcagctcgtgcttactgcgttccttggcctcgctcgtctgggggccatgtacgttgggccgtcgctcatcgatcagttcgtcgagttcatccgccgcggcgggacatcatgggagggccttcgtctcgttctcatcttgctcgctggcaaggccgtccagacgctggcatcgcaccattacagcttccagggacagcttctgggcatgcgcatccgcggcgcgctgcagacggcgctgtaccgcaagtcgctgcgcctcaccgccggtgctcgccgagcgcacggcgctggagccatcgtcaactacatgcaggtcgacgctgggatcgtgtcctacgccatgcacggactccacgggctgtggctgatgccgctgcagatagtggtggcgctactcctcctgtacgcctacctcgggccccgccgtgctcatgacgctcgccgtgatcaccgcagtgactgtggtcacggccttcgctaacaagctcaacctggcgtaccagctcaagttcctcggcgtccgcgatagccgcgtgaaggcccatcaccgagatgctcagtaacatgcgtcccatcaagctgcaggcttgggaggacaccttcgggggcaaggttcgcgacatccggcgagaagagctcgggtggctggccaagatcatgctcttcatgtgcgccaacacggtggtattctcgagcggtccgctcgctatgacggtgctcgtgttcgggacctacctcgcctccggtgggcagctcgacgccggcaaggtgttcacggccacggcgttcttcggcatgctggaaggccccatgcggaacttcccgcagactattgtcatgtccatgcaggcgtttgtgtcgctggatcggctgaacaaattcctgacggacaccgagatcgacaccgcggccgtggagcgcatcgagagtggcggcgctgaggacacagtggccgtcaaggtgcaaggcggggtgttcgcttgggatgtgccagcggacgaggagatgaagggcaacaacaacaacagcagcaggccccgccatgaggtggcagagaatgaccaaggaaatcgggcggagttggtgacagtgctgaggggcattgacgtggaggtgaggaggggcgagcttacggcggtggtcgggacagtgggctccggcaaatcgtcgctgctgtcctgcatcatgggggagatgcacaagctctccggcacgcatatgtggaagcacggcatatgttgctcagactgcttggatccggaatggaaccattcaagagaacattttatttggaaagccaatgcattcagagagatattcggaaatcgtaaatgcttgctgcctggaaaaggatttggaaatgatggagtttggtgaccagactgaaataggagagcgagggatcaatctcagtggaggccagaaacagcgcatccagcttgcaagagcggtttatcaagactgcgatatatatcttctcgatgacatatttagcgcggttgatgctcatactggatcagctattttcaaggaatgtctgaaaggcatactcaagaataagactgtgttgcttgtgactcaccaagtggacttcttgcaaaatgtggatactataattgtaatgaaagatgggttagtcatccagtcagggatctatcttgagttactagcatcatgctcagaattttctgatcttgttacagctcatcatagttcaatggagacagcaggggcacaagcttttcatgttcagaacacagagagctctcaggcttccactggatctgtagatgccccatctttggcatcgaaatccaatgctgaaaatggtgaatcagttggcagtgcaacaaacaaagaagcaggttcttctaagctgatccaggaagaggaaaaggagagtggccgagtaagctggcgtgtgtacaagctatatatgacagaggcctggggatggtggggaattgtggtcattttagctgtgtcactgctgtcagagggctccagtatggctagcaactactggttatcatatgagacatcaggaggccctgtgtttgacacttccttatttcttggtgtttatgcttcgatagttgctacgacaattatattggaaatgatcgccactcttattgtgacattcatggggcttcaatcagcacaggcctttttcaacaagatgtttgacagcattttacgagcgccaatgtcattttttgacaccactccttcaggaaggatcctaagccgggcatcatcagaccaatctaagattgatactaaccttgtgttctatgttggttttgccacatcaatgtgcatctcagtggttaccaacgtcgctattacttgccaagttgcatggccatcagtaattgcagtatttcctctgctgcttttgaacatctggtatcggaaccgttacattacgacatctcgagagcttacccggcttcaaggggtaacaagggcgccaattattgatcactttacagaaagctttctgggtgccccaactgtaaggtgcttcagaaaggaggatgagttctaccagataaacctggacaggatcaattcgaatctgcgtatgtcatttcataattatgcagctaatgagtggcttggatttcgcctggagctaattggcacacttattttgtctataactgcttttctcatgatcagcttgcctagcaatttcatcaagaaagaatttgtcggcatgtccctttcctacggcatttctctcaattccttggtgtactacacaatttccataagctgtatgatcgagaatgatatggtagccatagagagggtgcatcagtacagtactctcccttctgaggcagcatgggaagttgccgacggtcttccctcacaagattggcccagccgaggagacattgatgtgaaagatctgaaggttcggtatcgtcaaaacacgcctctaatcttgaaaggcattactgtgagcatcaaaggtggagaaaaggttggagttgtgggaaggactggcagtggaaagtcgactttggtgcaggctttattcaggatcgtggagcctgcagatggccatatcatcatcgatggtgtcaacatctgcactctggggcttcgtgatctgaggtctcgcttcggtgtgattccccaagaacctgtgctcttcgaaggaactgtacggagcaacatagacccagcagggcggtattccgaggctgagatatggcaggccctcgagtgctgccagctaaaggatatagtagcctcaaaaccagagaagcttgatgcactagtcgccgacatgggggagaactggagcgtagggcagaagcagcttctgtgcttcggccgagtcatactgaaacgcagccggatcctcttcatggacgaggcaacggcttcggtcgattctcaaacagacgcggctatccaaaagatcatccgcgaggagttcactgaatgtactgtcatcagcgttgcacatcggatcccgactgtcatggacagtgaccgtgtcctggtgttggacgcaggtctagtggcagaattcgacgcaccctccaagttgatgcggaggccatcactctttggtgcgatggttcaggagtacgcaagtcgctcatctagcgtgaaggaaaccgttggatgagatgagagtatgagaccacttctcatggccaaaagacgacggtatcggagaaatttaggcatacgcatgatgggctctgttcgcaaggaaaaataaattgtactaggactttctgtaagcttgcaagcataaagctttgttttgttcgctacaccatgtattatcttaaatagaactggactatttggtttgcatttccgccaattttgtatgtgacgaaagcttagagcatctacaggaagtttgtgtaattcacatgctaaaccagtgactttcctaagttaagaaaacctaaatttatctctctctggctaatagttttatatgaacttccg

SEQ ID NO: 205341 - DNA, 2638 bp, Zea Mays
gtactagtaccattacacacaagcagtgagtgaccggccatttctcttgccaaccatggcggtgccgacgacgacgctatcccaccgtagaatctcctcctacagcctcgttgcctccaccgccgctcttctcctcgtcttccatcaccatgtaccgtccaccacggcacagccgctgccgtggcagctctgcaacgacacgagcggcaacttcacggacaagagcgcctaccaggccaacatcaaccagctcgcgaccgccctcaccaacaacgcgtcctcctcaccgtctctcttcgccgccggcgccgcgggcagcgcgccggacgtggcctacgcgctcgcgctctgccgcggcgacaccaacgcctcctcgtgcgcgcgttgcgtcgccgcgtcgttcaagaccgcgcagcagctatgcgccttcaagaggggcgccaccctgtacgacgacccctgcatcctccgctacgccgactgggacttcctgaccaacaccacggacaacaggggcttgtacatcgcctggagctacgacaacgtctccgccgcggtcgcgccggcgttcgacgccgcctccgcgcggctcgtcaacgccacctccgactacgcggccacggaccccgtcaggcggttcggcacgggggaggagccgttcgacgacgcgaagtaccccaagatctactcgctggcgcagtgcacgccggacatgacggtggccgactgccgggcgtgtctggggggagtctataggaggtttgcgcccacgtatttcggcggcaagcatggcgggagagtctttggggtgcgctgtagcttgcgctttgagacgtatcacttcttctccggtaacccgctgctgcaaatcccggggccgcccggggcgccgccgccagcagcgccagcagtgaacatgacgccgccggcgaccgggcaagggggaggaggccataaaaatagaaccagactggtgttggccattgcattgcctttagctgctgcaactgcaatattagctctcgcagtagcatgtttgtattaccggagtagaagaagaacaacagcgcaaagggactcatcaggaaagccatgttctcctagtccagatgacattgataagagcatcgattcgctcctttttgacctaccggcattacgggcagcaaccaataacttcgctgaaagcaataagcttggcgaaggagggttcggtgcagtttataagggaatcctttctgaaggccaacaagtagcagtgaagaggctctcacttggctctacacaagggttaacagagctcaaaacagagctagtcttagttgccaggcttcaacataagaaccttgtgaggctcataggcgtttgcttggaagaagacgagaaactacttgtgtatgaatacatgccaaacaggagcctcgacaccattctttttgaaaagcaaagagctggattggtggaagagactcgagattgtgagcggagttgcacggggcctgcaatatctccacgaggagtctcagctgaagatagtccatcgagaccttaaaccaagcaacgtgctccttgactctgcttacaccccgaagatatcagattttggcctagcaaaactcttccacatggatcagagccaaggtgccactagccatattgctggaacatatggatacatggcaccagaatacgccatgcacgggcaatactcggtcaagtcggatgtcttcagttttggtgttttgatcctggagatggtcacagggaggaaaaacagtaactcggaccaatcagttgacctcttaagcctagtatgggagcactggagctcaggaacaatccaagagctgctggacccattcctgatgagccaccgagctcctccagaccagatggcgaagcttgtcaacatcgggctactatgcgttcaggacagccctgcagacaggccgctgatgtcgtctgtaaacgttatgctcagcagcgacaccatctcactacaggccccgtcaaggccaacattttgcattcaggagacggaagaccattcgcgcccctactccgatgcgtataagagggcgctgaagctgcagtcgtccactgatagggcagcaatgtcgccgaacgaggttacgctcacggagcttgaaccaagataagcatgcatgaacgccgacaagaatatacatatggccgaaagatatatatatatatatatatatatatactgttttcaagaatctcaagtcgtattagataatgttttttttttctgaatgaactggaggggtaccccgtacggataataattttatttgaatgaaaaggacttgtcatagaatcacataaacgaaaagaaagaaaaagggagtctgtaaaaaaaatgtgaaaggcatctatgcagacttggggatgtctttgaagatgaggttgctccttaggcaccaaatgctccaacacatgaactgcattcacgagcaaacttacattgtaagaaaagatgggatagacagatgacacaattgtaccagggaaaatgcattctctttcatcttaaaagctctctaatgcttagcaagagtaacaaaaagaagactttgtgcttgttttttgggaagtgagtgaattaaggtctttg

SEQ ID NO: 205342 - DNA, 2430 bp, Zea Mays
cacggccggctctccgctccgccagacccggaccggcaccacgccacggctccggccatcacgcgccgcgcacaccatgaccacggttgcgcaccatcaccacctcgccgctgccaccgtgctcttcttcgtcgcattcaccatggcgcctctcgccgccggggaccccgtgggccagctctgcggtaccagcggcaactacacgctcaacagcacctaccagggcaacatccgccgcctcgccgccacgctgccgaagaacgcctccacctccgcgacgctcttcgccacggacaccttcggcgccgtcccggacatcgtctacgcgctcgcgctctgccgcggcgacaccaacgcctccgcctgcagcggctgcgtcgccgccgcgttcctggacgcgcagcagctgtgcgcctacaacaaggacgccaccatgttctacgacccctgcctcctccgctactccaaccagaacttcctcgccgaccccagcagcgatggccgcgggaccgcgctcatcctcatgaacacgcagaacgtcaccgcgcggttcaaggtgttcgacgccgccgtcgccgcgctcctcaacgccaccgccgcctacgcggccgccaattcgtccaaaaggttcggcaccggggtcgaggcgttccagaacttcgacagcaaccgcccgaggatctacgggctggcgcagtgcacgccggacatgacgccggccgactgccagagctgcctctcgggtatgagcagtacccgttctttacaagcaccccactgcttcagctggcggagcctaccgtgggggccccggcgcccgcgcccgcggtggtcaacggaactccaacgccaccgacgaccggaggagcacgacgaggaacaacaggaaataaaactggtagagttttagccattacactgcctatagttgctgcagtgctagctactgtagtactttgttcatgcctctggaggaggaagaggaaaacacaagggaagtcgtcactaccagatacaactaaccctgaggacatacaaagtattgattccctcattattgatgtgtcaactctacgagctgcaacagaaaactttgctgaagccaataagctcggtgaaggaggttttggttcagtatataagggaatcctccccgatgaccaggaaatagcagtgaaaaggctctcgcagacttctagacaagggatggaggagctgaaaaacgagcttgtgttggttgctaaactgcaacacaagaatttagtgaggcttgtcggggtttgcttggaggaccatgaaaaattgcttgtctatgaatacatgcccaacaaaagccttgacaccattctatttaatcacgagagatgtggagagctggattgggggaagaggtttaagatagttaacgggatcgcccgtggcttgcagtaccttcatgaagattctcagcaaggctattcggaagtgagcaatcacgagatgtcaccaaccgcgtcgtcggaacctatggatacatggcccctgagtacgccatgcgtgggcactactctgtcaagtccgacgtgttcagcttcggcgttttaatcctagaaatcgtcaccggaaggcgaaatggtggctcctatagctctgaggaatcggccgatctccttagtctggtgtgggagcactggacgacggggacattggtggagatcatggatccatccttgagcagccttgctccacgagacctgatgttgaagtgcatccacatcggcctcctctgcgttcaagatgaccatgaggacaggccgatgatgtcgacagtgaatgtcatgcttagtagcagcacggtgaccctccaagctccatcgaggccggcgttttgcttcccgaagagtggcttcaactcagagatcaactcagaagtgtacccgccaggagcttatcagtccgcgagcaggtcgcccatgtcgctcaacgacgtctcaatcactgagctcgagcccagatgatccatgcatggcggcgatgaattgatgattctcttcttcgaaggagtttctgttgagtgtttgtgttttaccgcctgggccgagcacgtaagtgtgacccgtagtatacaatgcaaaaccagtagactaccaatatggcgaaatataacgcctattagtcgtccaattacttatgtatctgtatggcattgcctttcaaatgtagaggagagtagaaatgagaacgtggataagagaatgtatcggtggttcctgattcctgaaaatgtcatcccagtattggttgaagttaggtgttgtttgattcacgaaatgtaacgcaaagggtaacggtaatggtttacacttgattactgtcggtaacaagtttgaatagtccggtatcaatttttagtatggtatctgataacggttggactaaaacaaacatgat

SEQ ID NO: 205343 - DNA, 1057 bp, Zea Mays
gtaatcgatcagctccacccctgtccttttgtattttgaaaatgtcttcatatgtgtcattttgtactcgaccagccccagtcctgttcgttgttttttctctcactttgtaatcgatcagctgcaatgaagtgggtagagtgggtagccgctgtcgaggatcgccatcgagagggcgacggccgcgctctcgacgggccagagcagcaactgggtggtcgtcgagttcaggcatccgaacccctccaacgacgactgggtcggcgtcttctctccctcgggtttcaggtactcgacggactatggcatgtttaggctctgcatagcgaacacggaggaggactgggggccgggaacggagcagtacaagttcatcgatcgaagcagccctggctcgtcttcctcgcgcaccgtgttctcggctactcgtcgggtggctggtacgagacaatgatgggctcgtacggggagccgatgggccgggacgggcttcaagacctctggcagagagccggtgagtccaagatgatatggatcattacggcgggcggggcggttcaacgcgacgacccatgtcaccgttggctgcggcggcggcgcgagcctgtctacgttcagagacagtgtgccgtactggagcttcttcagggacgccgacacttgatgttcggcaagctcacggccatcaacagctcgttcctcttgtttgagtacaagaagagccgcgacggccatgtgtatgaccgtttcagtctcgcacgactaccgtcacctggtggcctgctccgtcgacagttgcccccgaagcaccttggccgtctgatcgagctccggactctggagacatgtgttgatagatacactgtttgatatactttcagcattgtttttagttaccattggttctgaatgcactgaaccttctacctcgacactacatgctacatatcaaaagggcaatggtgtagaacaaatcatgtgcttctcactttcatctggttctggtttccagcgcagattctggctggatctttagcatgttcatatgaatgtcctt

SEQ ID NO: 205344 - DNA, 1124 bp, Zea Mays
gtaatcgatcagctccacccctgtccttttgtattttgaaaatgtcttcatatgtgtcattttgtactcgaccagccccagtcctgttcgttgttttttctctcactttgtaatcgatcagctgcaatgaagtgggtagagtgggtagccgctgtcgaggatcgccatcgagagggcgacggccgcgctctcgacgggccagagcagcaactgggtggtcgtcgagttcaggcatccgaacccctccaacgacgactgggtcggcgtcttctctccctcgggtttcaggtactcgacggactatggcatgtttaggctctgcatagcgaacacggaggaggactgggggccgggaacggagcagtacaagttcatcgatcgaagcagccctggctcgtcttcctcgcgcaccgtgttctcggctactcgtcgggtggctggtacgagacaatgatgggctcgtacggggagccgatgggccgggacgggcttcaagacctctggcagaggtacgatatagcggtcttcggccacatccacggatacgagcgcacgtgccccgtctaccaggcaaagagccggtgagtccaagatgatatggatcattacggcgggcggggcggttcaacgcgacgacccatgtcaccgttggctgcggcggcggcgcgagcctgtctacgttcagagacagtgtgccgtactggagcttcttcagggacgccgacacttgatgttcggcaagctcacggccatcaacagctcgttcctcttgtttgagtacaagaagagccgcgacggccatgtgtatgaccgtttcagtctcgcacgactaccgtcacctggtggcctgctccgtcgacagttgcccccgaagcaccttggccgtctgatcgagctccggactctggagacatgtgttgatagatacactgtttgatatactttcagcattgtttttagttaccattggttctgaatgcactgaaccttctacctcgacactacatgctacatatcaaaagggcaatggtgtagaacaaatcatgtgcttctcactttcatctggttctggtttccagcgcagattctggctggatctttagcatgttcatatgaatgtcctt

SEQ ID NO: 205345 - DNA, 881 bp, Zea Mays
cacacgcccacaccggccacgagttaaaagccagcgaacacctatgcagtgcaaggcaaggcagcatgtacacccagaggccagagctagtgatgactgatgactgacgagcctctatagcatacagcaccgcgcgcggcggagccaaagccaaggacggtccggtcgtatgaataagtatcacccccaccagaaccccaagccacacaccaggcacgccagcctcactcactccccagaccacctcacacgcacgaagcagcagagcagtggactggactagcaaggtgggcaacatgaagcctgcggccaccgccagagttgctggcctcctcttcttcctcgtcctcctcctggcgctgccttccctccgcgtctccatggctggatcagggttctgcgacggcaagtgcgcggtgaggtgctccaaggcgagccggcacgacgactgcctcaagtactgcgggatctgctgcgccacctgcaactgcgtgccgtccgggaccgcgggcaacaaggacgagtgcccatgctaccgcgacatgaccaccggacacggcaaccgcaccaggcccaagtgcccctgatgatattccttccttcgctccggggagccagctgccagctggggctgtcttgcatgcgtatgtaatgtataggctgtgcaatgcatgcatacatgatacatgccgtgactctggatcggtggatgcctatgcatgcttttcagttttcactagctgctactactactactcttcctgtcttcctagttcctactatgtgcaccagagagtgagagggacgacatgcatggagatgagatgtcgtgttatgtgcactggcggccgcttggccagactacagtgtgctcaagtcaa

SEQ ID NO: 205346 - DNA, 3752 bp, Zea Mays
aagggtgatgtgctgttcttttcctgaaacatgaacaacagctgcctacgttttattatgtgagggaggggaacagccctctcggatggaaccacttcctgatggctcaatgaacccaagacgaagtgcgattaagcaagttgctagtggacggtttggagtttccagctattacctgactaatgcagatgagctgcagataaaaatggcccagggtgccaagcctggtgaaggtggtgagcttccaggccacaaggttattggtgacattgctgtcacaagacattccacagctggtgtaggactgatcagtccacctccgcatcatgatatttattcgattgaggatcttgcacagcttatacatgatcttaagaattcaaatcctggagcccgtatcagtgtcaaactagtttctgaggctggtgtgggagttgttgctagtggtgttgtaaaaggacatgcagaccatgttcttatatctggccatgatggtggcacgggagcttcaagatggacaggtatcaagaacgctggacttccatgggaacttgggttggctgagacacatcaaactctagtagcaaatgggcttcgtggtcgagctgttctgcaaacagatggacagttgaagactggtagagatgttgctgttgcttgcttgcttggtgcagaggaatttggttttagcactgcaccactgatcacactcggttgtattatgatgcgaaaatgccacatgaacacttgtcctgttggtatagctactcaagacccagtgcttcgagaaaagtttgctggagaaccagagcatgtcattaacttttttttcatgcttgctgaggagctaagagaaatcatggcaaaccttgggttccgcaccattactgaaatggttggacgttctgatatgcttgaggttgatccagaagtagtgaagactaatgagaaacttgagaacattgatctctcactaatcttgaaaccagcttcagagattcgtccaggtgttgctcagtactgtgttgagaagcaagaccatggcctagacatggcattagataacaaactaatagatctgtcaagaactgctattgaaaagcaagttcgtgttttcatcgagactccaattcagaacacgaaccgagcagttggaactatgctcagtcatgaagtcacaaaacgttatcacatcaatggattgcctgctggtacaattcatgtgaagtttactggaagtgctggtcaaagctttggtgcttttctttgtcctggagtcactcttgaactggaaggagacagcaatgattatcttggtaagggattatctggtgggaaaattgttgtgtacccaccaaggaacagttcatttagtccagaggacaatattgtcattggtaatgtggctttatatggtgctaccatgggagaggcatatttcaatggtatggcagcagaaaggttttgtgtccgcaactcaggtgctcaagcagtggttgaaggaattggagatcatggatgtgagtacatgactggaggcactgtggttatccttgggaaaactgggcggaactttgctgctggcatgagtggaggcattgcctatgtttatgatgttgatgggaaattcagtgctcgctgcaacaatgagttagttgatctatatcatgtggaggaagaggatgacatcatcacattgaaaatgatgattgagcaacatcgtcgcaacactgagagtgttttggctagagacatactctccgattttgataatcttcttccaaaatttgtaaaagtatatccaagggactataagagggttttagaaaacatgaagttggaaaagagtgttgctaatcatgcaaaggagcctaagatggtaaatggaatatctgtgacgactaagaaagtacaacctgatcagtcagcaagccggccaacacgtgttgccaatgccaaaaagtaccgaggttttattacatatgagcgagagagtatttcttacagagatccaaaagagcgtgttaaagattggaaggaagttgcaatcgaatcaacacctggtccactattaaatacacaatctgctcgttgcatggactgtggtactcctttctgtcatcaggaaagctcaggtgctggctgtcctcttggaaataagatcccagaattcaatgaattagttcaccagaacagatggcgcgaagcattggatcgactacttgagacaaacaacttccctgaatttactggacgagtatgccctgctccttgtgaggggtcatgtgttcttgggattattgagaatccggtgtctatcaaaagtatagaatgtgcaatcatagacaaaggtttcgaagagggatggatgattccacgacctccacttcaaagaacaggaaggaaggtggccattgttggcagtggaccagctggtttggctgctgcggatcaactaaacaaaatggggcattttgtaactgtgttcgaacgtgcagaccgaattggaggtttaatgatgtacggcgttccaaacatgaagactgacaagattggcattgtccagcgccgtgttaacctaatggcagaagagggtgtcacatttgtggtgaatgccaatgttggtagtgatcctctgtactcaattgaacgtctacgttctgagaatgatgcagttattttggcttgcggagcaacaaaaccaagagatctcaccatccctggacgcgagctatctggagttcattttgcaatggaatttctccatgcaaataccaaaagtttactcgacagcaacctggaggatggtaaatatatatccgcccgcgggaaaaaggtggtggttattggtggaggtgatacaggaacagattgcattggcacatctattaggcatggttgcaccagccttgtaaatcttgaactcctgacaaaaccaccaagcaatagagctgctgataacccatggccccagtggccaagaattttccgtgttgactatgggcatcaagaagctgctaccaagtttggaaaggatccaagaacttatgaagtcttgacaaagcgttttattggcgatgaaaatggcaaggtgaaggctcttgagttagtgcgtgtgaagtgggagaaagtagatggaagatttcaactcaaggagatccaaggatcagaagagattattgaagctgatctcgtcctcctagctatgggattcttgggtcctgaagcgtctatcgctgagaaactgggtttggagaaggacaacagatcaaacttcaaagcgcagtttggagacttcgctaccagtgttgatggtgtgttcgcagccggggactgcaggcgtggacaatcactggtggtatgggccatcacggaggggcggcaggctgctgcagcggtagacaagtacatatcaaggcatgatcagaatgtcgcaggcgacatcactccctttggggcagggctcgttcagccggttggagcataaaaaaaacatagaccgaggcatgttttaggttctcgtcagtggttcctcacagcaaattttgttcttgtatattttgacgatagataaacagttgaaagttttggtgtctattgtttctttttcttctccggttattatgttttgcgtgtctgcatgtggttttctagtccaaaatgtacagttttccttttattaaatagatgtaaatttggtgggtgatatggcgatcattttgtgtgtatatgaaagcgaaattgagccacca

SEQ ID NO: 205347 - DNA, 5882 bp, Zea Mays
cccaactgttttgatgaaattctgtgctactgatgctttctttttggttcactcaaggttctccacaaacacctttcccagctgggaccgtgcgcaaccaatgcgtgttttaggtcataatggagagatcaatacccttagaggaaacaagaattggatgacagcacgtgagggtctcttagaggcggagaagcttggattatcaaaggagcagcttgcaagaattctgccaattgttgatgctacctcttctgattctggcgcattcgataatgttcttgagcttcttgtccgtggtgggcgaagcctgctagaagccgtgatgatgatgatccctgaggcatggcagaacgatggaaacatggatcctgagaagaaagctctctacgagttcttgtcagcacttatggagccttgggatggacctgctctaatatcttttactgatggtcgttaccttggagctaccctggaccgtaacggtttgaggcctggtcggttttatgtgacgcacagtgggcgtgtgatcatgggtagtgaggtcggtgttgttgatgttcctcctgaagacgtgctgagaaaaggcaggttaaaccctggaatgatgctattggttgattttgagaatcacactgtagtggatgatgaagctctgaaagcacaatactctaaagctcacccgtatggggaatggctcaagagacaaaagatatatctcaaggatattgtagaatcagtaccagaaaccgatagggttgctccaagcatttctagctcacttcctgcaaagaatgagaacaaggaccatgttggtatcaatgggattttgaccccactgaaggcttttgggtacacggtggaagccctggacatgttgctactgccaatggctaaggatggagtggaagctctcggttccatgggaaatgatacaccacttgcggtgatgtcaaacagggagaagttgacttttgagtacttcaagcagatgtttgcacaagttacaaaccctccgattgaccctattagagagaaaattgttacatctatggagtgtatgattggccccgaaggcgacttgttggaaacaactgaaaaacaatgcaaccgtctttcacttaaaggtcccttggtttctattgatgaaatggaggctattaaaaagatgaattatcgaggttggcgaagcaaagtgcttgacataacatacccaaaaaagtctgggaggaagggcttggaagaaactttgaacagaatgtgtgctgaagctcgtgaagccatacgcgagggatatactattttggttctctcagatagaggattttcctcagaccgtgttgctgccagttctctcttagcagtgggagcagtgcatcagcaccttgttgcaaatcttgagaggacacgcataggattgttggttgagtcagctgaacctcgtgaagtgcatcatttctgcaccctgcttggatttggtgctgatgctatatgcccttatttggctattgaagcaatttggtgcttgcagaatgatgggaagattcctcctaatggtgatggacaacccaactcaaaggaagagctggtgaagaagtatttctatgcttctaactatggaatgatgaaagttcttgcgaagatgggaatatccacccttgcatcctacaaaggtgcacagatttttgaagctcttggtctttcttccgaagtgattggcaagtgtttcgaaggcacacctagcaggattgagggtgcaacatttgaaatgcttgcacgagatgcacttcgtcttcatgagttagctttcccatcaagaacccctccagctggcagtgcagatgcaaaggcccttcccaacccaggggattaccactggaggaaaaatggtgaagttcatctcaacgacccacttgcaatgggaaaactacaagaagcagctagagtcaacagccgggcagcatacaaggaatattcgaaacgaattcaggagctcaacaaggcgtgcaatttacgtggcatgctgaaatttaaagatatttctgacaagatatctttggatgatgttgaacctgcaagtgagatagtgaaacgcttttgtactggagcaatgagttatggttctatttcattagaagcacatactgcccttgctattgccatgaacaaacttggaggaaaatctaatacaggtgagggaggggaacagccctctcggatggaaccacttcctgatggctcaatgaacccaagacgaagtgcgattaagcaagttgctagtggacggtttggagtttccagctattacctgactaatgcagatgagctgcagataaaaatggcccagggtgccaagcctggtgaaggtggtgagcttccaggccacaaggttattggtgacattgctgtcacaagacattccacagctggtgtaggactgatcagtccacctccgcatcatgatatttattcgattgaggatcttgcacagcttatacatgatcttaagaattcaaatcctggagcccgtatcagtgtcaaactagtttctgaggctggtgtgggagttgttgctagtggtgttgtaaaaggacatgcagaccatgttcttatatctggccatgatggtggcacgggagcttcaagatggacaggtatcaagaacgctggacttccatgggaacttgggttggctgagacacatcaaactctagtagcaaatgggcttcgtggtcgagctgttctgcaaacagatggacagttgaagactggtagagatgttgctgttgcttgcttgcttggtgcagaggaatttggttttagcactgcaccactgatcacactcggttgtattatgatgcgaaaatgccacatgaacacttgtcctgttggtatagctactcaagacccagtgcttcgagaaaagtttgctggagaaccagagcatgtcattaacttttttttcatgcttgctgaggagctaagagaaatcatggcaaaccttgggttccgcaccattactgaaatggttggacgttctgatatgcttgaggttgatccagaagtagtgaagactaatgagaaacttgagaacattgatctctcactaatcttgaaaccagcttcagagattcgtccaggtgttgctcagtactgtgttgagaagcaagaccatggcctagacatggcattagataacaaactaatagatctgtcaagaactgctattgaaaagcaagttcgtgttttcatcgagactccaattcagaacacgaaccgagcagttggaactatgctcagtcatgaagtcacaaaacgttatcacatcaatggattgcctgctggtacaattcatgtgaagtttactggaagtgctggtcaaagctttggtgcttttctttgtcctggagtcactcttgaactggaaggagacagcaatgattatcttggtaagggattatctggtgggaaaattgttgtgtacccaccaaggaacagttcatttagtccagaggacaatattgtcattggtaatgtggctttatatggtgctaccatgggagaggcatatttcaatggtatggcagcagaaaggttttgtgtccgcaactcaggtgctcaagcagtggttgaaggaattggagatcatggatgtgagtacatgactggaggcactgtggttatccttgggaaaactgggcggaactttgctgctggcatgagtggaggcattgcctatgtttatgatgttgatgggaaattcagtgctcgctgcaacaatgagttagttgatctatatcatgtggaggaagaggatgacatcatcacattgaaaatgatgattgagcaacatcgtcgcaacactgagagtgttttggctagagacatactctccgattttgataatcttcttccaaaatttgtaaaagtatatccaagggactataagagggttttagaaaacatgaagttggaaaagagtgttgctaatcatgcaaaggagcctaagatggtaaatggaatatctgtgacgactaagaaagtacaacctgatcagtcagcaagccggccaacacgtgttgccaatgccaaaaagtaccgaggttttattacatatgagcgagagagtatttcttacagagatccaaaagagcgtgttaaagattggaaggaagttgcaatcgaatcaacacctggtccactattaaatacacaatctgctcgttgcatggactgtggtactcctttctgtcatcaggaaagctcaggtgctggctgtcctcttggaaataagatcccagaattcaatgaattagttcaccagaacagatggcgcgaagcattggatcgactacttgagacaaacaacttccctgaatttactggacgagtatgccctgctccttgtgaggggtcatgtgttcttgggattattgagaatccggtgtctatcaaaagtatagaatgtgcaatcatagacaaaggtttcgaagagggatggatgattccacgacctccacttcaaagaacaggaaggaaggtggccattgttggcagtggaccagctggtttggctgctgcggatcaactaaacaaaatggggcattttgtaactgtgttcgaacgtgcagaccgaattggaggtttaatgatgtacggcgttccaaacatgaagactgacaagattggcattgtccagcgccgtgttaacctaatggcagaagagggtgtcacatttgtggtgaatgccaatgttggtagtgatcctctgtactcaattgaacgtctacgttctgagaatgatgcagttattttggcttgcggagcaacaaaaccaagagatctcaccatccctggacgcgagctatctggagttcattttgcaatggaatttctccatgcaaataccaaaagtttactcgacagcaacctggaggatggtaaatatatatccgcccgcgggaaaaaggtggtggttattggtggaggtgatacaggaacagattgcattggcacatctattaggcatggttgcaccagccttgtaaatcttgaactcctgacaaaaccaccaagcaatagagctgctgataacccatggccccagtggccaagaattttccgtgttgactatgggcatcaagaagctgctaccaagtttggaaaggatccaagaacttatgaagtcttgacaaagcgttttattggcgatgaaaatggcaaggtgaaggctcttgagttagtgcgtgtgaagtgggagaaagtagatggaagatttcaactcaaggagatccaaggatcagaagagattattgaagctgatctcgtcctcctagctatgggattcttgggtcctgaagcgtctatcgctgagaaactgggtttggagaaggacaacagatcaaacttcaaagcgcagtttggagacttcgctaccagtgttgatggtgtgttcgcagccggggactgcaggcgtggacaatcactggtggtatgggccatcacggaggggcggcaggctgctgcagcggtagacaagtacatatcaaggcatgatcagaatgtcgcaggcgacatcactccctttggggcagggctcgttcagccggttggagcataaaaaaaacatagaccgaggcatgttttaggttctcgtcagtggttcctcacagcaaattttgttcttgtatattttgacgatagataaacagttgaaagttttggtgtctattgtttctttttcttctccggttattatgttttgcgtgtctgcatgtggttttctagtccaaaatgtacagttttccttttattaaatagatgtaaatttggtgggtgatatggcgatcattttgtgtgtatatgaaagcgaaattgagccacca

SEQ ID NO: 205348 - DNA, 7010 bp, Zea Mays
gccctatactaatccggaggaggggtcaaggaaggcgagcgacgctcccacaccaatccacaacaccgccgcgccgcccgccgccgctggggacgagcgtggggcgagcaaccaaatctaagacaccgatccccgacgcgcaggccgcgaagctagcggcggagaaaagatcggagccacaacgcggtcgtgagcccgcagccaccggttccgcgaggctagacggagacagagcgaggcttgctgttcagccatgtcgacggcgcaagggacagcgttgaagtcggcgccgataggcgcaggtcatcgggcccggcgcggccgccccgtggtgccgccgtaccgttctggctggcaagcatacggcggcgtttccctcgagggcagcgggttcctcggcggcctgcagcgcaccgaggagcgcgtcgctacgctggcgccccgcgcggcggcgcgcgacgcggaggtggtgaggccgctctcgaagctcccgaacagcagcattgggctctatgatccctcgttcgagcgtgacgcgtgcggcgttgggtttgtcgctgagctttctggcgattacaaacgcgagactgttaatgatgctattgaaatgcttgagagaatggcgcaccgtggtgcctgtggctgcgaaaagaacacaggagacggtgccggcattatggtcgctctaccacatgacttcttcaaagaggtcacaaaggatgctgggtttgagctacccccgccaggcgactatgctgttggaatgtttttcatgccaaccgatgaaaagcgtcgcgagaagggcaaagctgagtttaagaaggtcgcggaatcactgggacatgtaatactcgggtggcgtcctgttcctactgacaactcagacttgggtgaatctgcactcgagactgagccagtcattgagcaggttttcgttaccaagagttcaagatcagaggctgagtttgagcaacagctatatatccttaggagactctcaatcatctctgtccgagcctctctgaacattaagcgtggaggagagagggatttctacatgtgctctctatcttcaaggactattgtttacaagggccagcttaaaccgtgccagcttaaggggtactactatgctgacctaggtcaagaaaacttcatgagttatatggctctggttcactcaaggttctccacaaacacctttcccagctgggaccgtgcgcaaccaatgcgtgttttaggtcataatggagagatcaatacccttagaggaaacaagaattggatgacagcacgtgagggtctcttagaggcggagaagcttggattatcaaaggagcagcttgcaagaattctgccaattgttgatgctacctcttctgattctggcgcattcgataatgttcttgagcttcttgtccgtggtgggcgaagcctgctagaagccgtgatgatgatgatccctgaggcatggcagaacgatggaaacatggatcctgagaagaaagctctctacgagttcttgtcagcacttatggagccttgggatggacctgctctaatatcttttactgatggtcgttaccttggagctaccctggaccgtaacggtttgaggcctggtcggttttatgtgacgcacagtgggcgtgtgatcatgggtagtgaggtcggtgttgttgatgttcctcctgaagacgtgctgagaaaaggcaggttaaaccctggaatgatgctattggttgattttgagaatcacactgtagtggatgatgaagctctgaaagcacaatactctaaagctcacccgtatggggaatggctcaagagacaaaagatatatctcaaggatattgtagaatcagtaccagaaaccgatagggttgctccaagcatttctagctcacttcctgcaaagaatgagaacaaggaccatgttggtatcaatgggattttgaccccactgaaggcttttgggtacacggtggaagccctggacatgttgctactgccaatggctaaggatggagtggaagctctcggttccatgggaaatgatacaccacttgcggtgatgtcaaacagggagaagttgacttttgagtacttcaagcagatgtttgcacaagttacaaaccctccgattgaccctattagagagaaaattgttacatctatggagtgtatgattggccccgaaggcgacttgttggaaacaactgaaaaacaatgcaaccgtctttcacttaaaggtcccttggtttctattgatgaaatggaggctattaaaaagatgaattatcgaggttggcgaagcaaagtgcttgacataacatacccaaaaaagtctgggaggaagggcttggaagaaactttgaacagaatgtgtgctgaagctcgtgaagccatacgcgagggatatactattttggttctctcagatagaggattttcctcagaccgtgttgctgccagttctctcttagcagtgggagcagtgcatcagcaccttgttgcaaatcttgagaggacacgcataggattgttggttgagtcagctgaacctcgtgaagtgcatcatttctgcaccctgcttggatttggtgctgatgctatatgcccttatttggctattgaagcaatttggtgcttgcagaatgatgggaagattcctcctaatggtgatggacaacccaactcaaaggaagagctggtgaagaagtatttctatgcttctaactatggaatgatgaaagttcttgcgaagatgggaatatccacccttgcatcctacaaaggtgcacagatttttgaagctcttggtctttcttccgaagtgattggcaagtgtttcgaaggcacacctagcaggattgagggtgcaacatttgaaatgcttgcacgagatgcacttcgtcttcatgagttagctttcccatcaagaacccctccagctggcagtgcagatgcaaaggcccttcccaacccaggggattaccactggaggaaaaatggtgaagttcatctcaacgacccacttgcaatgggaaaactacaagaagcagctagagtcaacagccgggcagcatacaaggaatattcgaaacgaattcaggagctcaacaaggcgtgcaatttacgtggcatgctgaaatttaaagatatttctgacaagatatctttggatgatgttgaacctgcaagtgagatagtgaaacgcttttgtactggagcaatgagttatggttctatttcattagaagcacatactgcccttgctattgccatgaacaaacttggaggaaaatctaatacaggtgagggaggggaacagccctctcggatggaaccacttcctgatggctcaatgaacccaagacgaagtgcgattaagcaagttgctagtggacggtttggagtttccagctattacctgactaatgcagatgagctgcagataaaaatggcccagggtgccaagcctggtgaaggtggtgagcttccaggccacaaggttattggtgacattgctgtcacaagacattccacagctggtgtaggactgatcagtccacctccgcatcatgatatttattcgattgaggatcttgcacagcttatacatgatcttaagaattcaaatcctggagcccgtatcagtgtcaaactagtttctgaggctggtgtgggagttgttgctagtggtgttgtaaaaggacatgcagaccatgttcttatatctggccatgatggtggcacgggagcttcaagatggacaggtatcaagaacgctggacttccatgggaacttgggttggctgagacacatcaaactctagtagcaaatgggcttcgtggtcgagctgttctgcaaacagatggacagttgaagactggtagagatgttgctgttgcttgcttgcttggtgcagaggaatttggttttagcactgcaccactgatcacactcggttgtattatgatgcgaaaatgccacatgaacacttgtcctgttggtatagctactcaagacccagtgcttcgagaaaagtttgctggagaaccagagcatgtcattaacttttttttcatgcttgctgaggagctaagagaaatcatggcaaaccttgggttccgcaccattactgaaatggttggacgttctgatatgcttgaggttgatccagaagtagtgaagactaatgagaaacttgagaacattgatctctcactaatcttgaaaccagcttcagagattcgtccaggtgttgctcagtactgtgttgagaagcaagaccatggcctagacatggcattagataacaaactaatagatctgtcaagaactgctattgaaaagcaagttcgtgttttcatcgagactccaattcagaacacgaaccgagcagttggaactatgctcagtcatgaagtcacaaaacgttatcacatcaatggattgcctgctggtacaattcatgtgaagtttactggaagtgctggtcaaagctttggtgcttttctttgtcctggagtcactcttgaactggaaggagacagcaatgattatcttggtaagggattatctggtgggaaaattgttgtgtacccaccaaggaacagttcatttagtccagaggacaatattgtcattggtaatgtggctttatatggtgctaccatgggagaggcatatttcaatggtatggcagcagaaaggttttgtgtccgcaactcaggtgctcaagcagtggttgaaggaattggagatcatggatgtgagtacatgactggaggcactgtggttatccttgggaaaactgggcggaactttgctgctggcatgagtggaggcattgcctatgtttatgatgttgatgggaaattcagtgctcgctgcaacaatgagttagttgatctatatcatgtggaggaagaggatgacatcatcacattgaaaatgatgattgagcaacatcgtcgcaacactgagagtgttttggctagagacatactctccgattttgataatcttcttccaaaatttgtaaaagtatatccaagggactataagagggttttagaaaacatgaagttggaaaagagtgttgctaatcatgcaaaggagcctaagatggtaaatggaatatctgtgacgactaagaaagtacaacctgatcagtcagcaagccggccaacacgtgttgccaatgccaaaaagtaccgaggttttattacatatgagcgagagagtatttcttacagagatccaaaagagcgtgttaaagattggaaggaagttgcaatcgaatcaacacctggtccactattaaatacacaatctgctcgttgcatggactgtggtactcctttctgtcatcaggaaagctcaggtgctggctgtcctcttggaaataagatcccagaattcaatgaattagttcaccagaacagatggcgcgaagcattggatcgactacttgagacaaacaacttccctgaatttactggacgagtatgccctgctccttgtgaggggtcatgtgttcttgggattattgagaatccggtgtctatcaaaagtatagaatgtgcaatcatagacaaaggtttcgaagagggatggatgattccacgacctccacttcaaagaacaggaaggaaggtggccattgttggcagtggaccagctggtttggctgctgcggatcaactaaacaaaatggggcattttgtaactgtgttcgaacgtgcagaccgaattggaggtttaatgatgtacggcgttccaaacatgaagactgacaagattggcattgtccagcgccgtgttaacctaatggcagaagagggtgtcacatttgtggtgaatgccaatgttggtagtgatcctctgtactcaattgaacgtctacgttctgagaatgatgcagttattttggcttgcggagcaacaaaaccaagagatctcaccatccctggacgcgagctatctggagttcattttgcaatggaatttctccatgcaaataccaaaagtttactcgacagcaacctggaggatggtaaatatatatccgcccgcgggaaaaaggtggtggttattggtggaggtgatacaggaacagattgcattggcacatctattaggcatggttgcaccagccttgtaaatcttgaactcctgacaaaaccaccaagcaatagagctgctgataacccatggccccagtggccaagaattttccgtgttgactatgggcatcaagaagctgctaccaagtttggaaaggatccaagaacttatgaagtcttgacaaagcgttttattggcgatgaaaatggcaaggtgaaggctcttgagttagtgcgtgtgaagtgggagaaagtagatggaagatttcaactcaaggagatccaaggatcagaagagattattgaagctgatctcgtcctcctagctatgggattcttgggtcctgaagcgtctatcgctgagaaactgggtttggagaaggacaacagatcaaacttcaaagcgcagtttggagacttcgctaccagtgttgatggtgtgttcgcagccggggactgcaggcgtggacaatcactggtggtatgggccatcacggaggggcggcaggctgctgcagcggtagacaagtacatatcaaggcatgatcagaatgtcgcaggcgacatcactccctttggggcagggctcgttcagccggttggagcataaaaaaaacatagaccgaggcatgttttaggttctcgtcagtggttcctcacagcaaattttgttcttgtatattttgacgatagataaacagttgaaagttttggtgtctattgtttctttttcttctccggttattatgttttgcgtgtctgcatgtggttttctagtccaaaatgtacagttttccttttattaaatagatgtaaatttggtgggtgatatggcgatcattttgtgtgtatatgaaagcgaaattgagccacca

SEQ ID NO: 205349 - DNA, 6655 bp, Zea Mays
gccctatactaatccggaggaggggtcaaggaaggcgagcgacgctcccacaccaatccacaacaccgccgcgccgcccgccgccgctggggacgagcgtggggcgagcaaccaaatctaagacaccgatccccgacgcgcaggccgcgaagctagcggcggagaaaagatcggagccacaacgcggtcgtgagcccgcagccaccggttccgcgaggctagacggagacagaggttaatgatgctattgaaatgcttgagagaatggcgcaccgtggtgcctgtggctgcgaaaagaacacaggagacggtgccggcattatggtcgctctaccacatgacttcttcaaagaggtcacaaaggatgctgggtttgagctacccccgccaggcgactatgctgttggaatgtttttcatgccaaccgatgaaaagcgtcgcgagaagggcaaagctgagtttaagaaggtcgcggaatcactgggacatgtaatactcgggtggcgtcctgttcctactgacaactcagacttgggtgaatctgcactcgagactgagccagtcattgagcaggttttcgttaccaagagttcaagatcagaggctgagtttgagcaacagctatatatccttaggagactctcaatcatctctgtccgagcctctctgaacattaagcgtggaggagagagggatttctacatgtgctctctatcttcaaggactattgtttacaagggccagcttaaaccgtgccagcttaaggggtactactatgctgacctaggtcaagaaaacttcatgagttatatggctctggttcactcaaggttctccacaaacacctttcccagctgggaccgtgcgcaaccaatgcgtgttttaggtcataatggagagatcaatacccttagaggaaacaagaattggatgacagcacgtgagggtctcttagaggcggagaagcttggattatcaaaggagcagcttgcaagaattctgccaattgttgatgctacctcttctgattctggcgcattcgataatgttcttgagcttcttgtccgtggtgggcgaagcctgctagaagccgtgatgatgatgatccctgaggcatggcagaacgatggaaacatggatcctgagaagaaagctctctacgagttcttgtcagcacttatggagccttgggatggacctgctctaatatcttttactgatggtcgttaccttggagctaccctggaccgtaacggtttgaggcctggtcggttttatgtgacgcacagtgggcgtgtgatcatgggtagtgaggtcggtgttgttgatgttcctcctgaagacgtgctgagaaaaggcaggttaaaccctggaatgatgctattggttgattttgagaatcacactgtagtggatgatgaagctctgaaagcacaatactctaaagctcacccgtatggggaatggctcaagagacaaaagatatatctcaaggatattgtagaatcagtaccagaaaccgatagggttgctccaagcatttctagctcacttcctgcaaagaatgagaacaaggaccatgttggtatcaatgggattttgaccccactgaaggcttttgggtacacggtggaagccctggacatgttgctactgccaatggctaaggatggagtggaagctctcggttccatgggaaatgatacaccacttgcggtgatgtcaaacagggagaagttgacttttgagtacttcaagcagatgtttgcacaagttacaaaccctccgattgaccctattagagagaaaattgttacatctatggagtgtatgattggccccgaaggcgacttgttggaaacaactgaaaaacaatgcaaccgtctttcacttaaaggtcccttggtttctattgatgaaatggaggctattaaaaagatgaattatcgaggttggcgaagcaaagtgcttgacataacatacccaaaaaagtctgggaggaagggcttggaagaaactttgaacagaatgtgtgctgaagctcgtgaagccatacgcgagggatatactattttggttctctcagatagaggattttcctcagaccgtgttgctgccagttctctcttagcagtgggagcagtgcatcagcaccttgttgcaaatcttgagaggacacgcataggattgttggttgagtcagctgaacctcgtgaagtgcatcatttctgcaccctgcttggatttggtgctgatgctatatgcccttatttggctattgaagcaatttggtgcttgcagaatgatgggaagattcctcctaatggtgatggacaacccaactcaaaggaagagctggtgaagaagtatttctatgcttctaactatggaatgatgaaagttcttgcgaagatgggaatatccacccttgcatcctacaaaggtgcacagatttttgaagctcttggtctttcttccgaagtgattggcaagtgtttcgaaggcacacctagcaggattgagggtgcaacatttgaaatgcttgcacgagatgcacttcgtcttcatgagttagctttcccatcaagaacccctccagctggcagtgcagatgcaaaggcccttcccaacccaggggattaccactggaggaaaaatggtgaagttcatctcaacgacccacttgcaatgggaaaactacaagaagcagctagagtcaacagccgggcagcatacaaggaatattcgaaacgaattcaggagctcaacaaggcgtgcaatttacgtggcatgctgaaatttaaagatatttctgacaagatatctttggatgatgttgaacctgcaagtgagatagtgaaacgcttttgtactggagcaatgagttatggttctatttcattagaagcacatactgcccttgctattgccatgaacaaacttggaggaaaatctaatacaggtgagggaggggaacagccctctcggatggaaccacttcctgatggctcaatgaacccaagacgaagtgcgattaagcaagttgctagtggacggtttggagtttccagctattacctgactaatgcagatgagctgcagataaaaatggcccagggtgccaagcctggtgaaggtggtgagcttccaggccacaaggttattggtgacattgctgtcacaagacattccacagctggtgtaggactgatcagtccacctccgcatcatgatatttattcgattgaggatcttgcacagcttatacatgatcttaagaattcaaatcctggagcccgtatcagtgtcaaactagtttctgaggctggtgtgggagttgttgctagtggtgttgtaaaaggacatgcagaccatgttcttatatctggccatgatggtggcacgggagcttcaagatggacaggtatcaagaacgctggacttccatgggaacttgggttggctgagacacatcaaactctagtagcaaatgggcttcgtggtcgagctgttctgcaaacagatggacagttgaagactggtagagatgttgctgttgcttgcttgcttggtgcagaggaatttggttttagcactgcaccactgatcacactcggttgtattatgatgcgaaaatgccacatgaacacttgtcctgttggtatagctactcaagacccagtgcttcgagaaaagtttgctggagaaccagagcatgtcattaacttttttttcatgcttgctgaggagctaagagaaatcatggcaaaccttgggttccgcaccattactgaaatggttggacgttctgatatgcttgaggttgatccagaagtagtgaagactaatgagaaacttgagaacattgatctctcactaatcttgaaaccagcttcagagattcgtccaggtgttgctcagtactgtgttgagaagcaagaccatggcctagacatggcattagataacaaactaatagatctgtcaagaactgctattgaaaagcaagttcgtgttttcatcgagactccaattcagaacacgaaccgagcagttggaactatgctcagtcatgaagtcacaaaacgttatcacatcaatggattgcctgctggtacaattcatgtgaagtttactggaagtgctggtcaaagctttggtgcttttctttgtcctggagtcactcttgaactggaaggagacagcaatgattatcttggtaagggattatctggtgggaaaattgttgtgtacccaccaaggaacagttcatttagtccagaggacaatattgtcattggtaatgtggctttatatggtgctaccatgggagaggcatatttcaatggtatggcagcagaaaggttttgtgtccgcaactcaggtgctcaagcagtggttgaaggaattggagatcatggatgtgagtacatgactggaggcactgtggttatccttgggaaaactgggcggaactttgctgctggcatgagtggaggcattgcctatgtttatgatgttgatgggaaattcagtgctcgctgcaacaatgagttagttgatctatatcatgtggaggaagaggatgacatcatcacattgaaaatgatgattgagcaacatcgtcgcaacactgagagtgttttggctagagacatactctccgattttgataatcttcttccaaaatttgtaaaagtatatccaagggactataagagggttttagaaaacatgaagttggaaaagagtgttgctaatcatgcaaaggagcctaagatggtaaatggaatatctgtgacgactaagaaagtacaacctgatcagtcagcaagccggccaacacgtgttgccaatgccaaaaagtaccgaggttttattacatatgagcgagagagtatttcttacagagatccaaaagagcgtgttaaagattggaaggaagttgcaatcgaatcaacacctggtccactattaaatacacaatctgctcgttgcatggactgtggtactcctttctgtcatcaggaaagctcaggtgctggctgtcctcttggaaataagatcccagaattcaatgaattagttcaccagaacagatggcgcgaagcattggatcgactacttgagacaaacaacttccctgaatttactggacgagtatgccctgctccttgtgaggggtcatgtgttcttgggattattgagaatccggtgtctatcaaaagtatagaatgtgcaatcatagacaaaggtttcgaagagggatggatgattccacgacctccacttcaaagaacaggaaggaaggtggccattgttggcagtggaccagctggtttggctgctgcggatcaactaaacaaaatggggcattttgtaactgtgttcgaacgtgcagaccgaattggaggtttaatgatgtacggcgttccaaacatgaagactgacaagattggcattgtccagcgccgtgttaacctaatggcagaagagggtgtcacatttgtggtgaatgccaatgttggtagtgatcctctgtactcaattgaacgtctacgttctgagaatgatgcagttattttggcttgcggagcaacaaaaccaagagatctcaccatccctggacgcgagctatctggagttcattttgcaatggaatttctccatgcaaataccaaaagtttactcgacagcaacctggaggatggtaaatatatatccgcccgcgggaaaaaggtggtggttattggtggaggtgatacaggaacagattgcattggcacatctattaggcatggttgcaccagccttgtaaatcttgaactcctgacaaaaccaccaagcaatagagctgctgataacccatggccccagtggccaagaattttccgtgttgactatgggcatcaagaagctgctaccaagtttggaaaggatccaagaacttatgaagtcttgacaaagcgttttattggcgatgaaaatggcaaggtgaaggctcttgagttagtgcgtgtgaagtgggagaaagtagatggaagatttcaactcaaggagatccaaggatcagaagagattattgaagctgatctcgtcctcctagctatgggattcttgggtcctgaagcgtctatcgctgagaaactgggtttggagaaggacaacagatcaaacttcaaagcgcagtttggagacttcgctaccagtgttgatggtgtgttcgcagccggggactgcaggcgtggacaatcactggtggtatgggccatcacggaggggcggcaggctgctgcagcggtagacaagtacatatcaaggcatgatcagaatgtcgcaggcgacatcactccctttggggcagggctcgttcagccggttggagcataaaaaaaacatagaccgaggcatgttttaggttctcgtcagtggttcctcacagcaaattttgttcttgtatattttgacgatagataaacagttgaaagttttggtgtctattgtttctttttcttctccggttattatgttttgcgtgtctgcatgtggttttctagtccaaaatgtacagttttccttttattaaatagatgtaaatttggtgggtgatatggcgatcattttgtgtgtatatgaaagcgaaattgagccacca

SEQ ID NO: 205350 - DNA, 7106 bp, Zea Mays
gcagcgagggcgagctcaccaccacggcacgtcggcaccaccaccctccctctataaatgcagggacaccgaaataccgaatgctccccaacgccctatactaatccggaggaggggtcaaggaaggcgagcgacgctcccacaccaatccacaacaccgccgcgccgcccgccgccgctggggacgagcgtggggcgagcaaccaaatctaagacaccgatccccgacgcgcaggccgcgaagctagcggcggagaaaagatcggagccacaacgcggtcgtgagcccgcagccaccggttccgcgaggctagacggagacagagatagcgaggcttgctgttcagccatgtcgacggcgcaagggacagcgttgaagtcggcgccgataggcgcaggtcatcgggcccggcgcggccgccccgtggtgccgccgtaccgttctggctggcaagcatacggcggcgtttccctcgagggcagcgggttcctcggcggcctgcagcgcaccgaggagcgcgtcgctacgctggcgccccgcgcggcggcgcgcgacgcggaggtggtgaggccgctctcgaagctcccgaacagcagcattgggctctatgatccctcgttcgagcgtgacgcgtgcggcgttgggtttgtcgctgagctttctggcgattacaaacgcgagactgttaatgatgctattgaaatgcttgagagaatggcgcaccgtggtgcctgtggctgcgaaaagaacacaggagacggtgccggcattatggtcgctctaccacatgacttcttcaaagaggtcacaaaggatgctgggtttgagctacccccgccaggcgactatgctgttggaatgtttttcatgccaaccgatgaaaagcgtcgcgagaagggcaaagctgagtttaagaaggtcgcggaatcactgggacatgtaatactcgggtggcgtcctgttcctactgacaactcagacttgggtgaatctgcactcgagactgagccagtcattgagcaggttttcgttaccaagagttcaagatcagaggctgagtttgagcaacagctatatatccttaggagactctcaatcatctctgtccgagcctctctgaacattaagcgtggaggagagagggatttctacatgtgctctctatcttcaaggactattgtttacaagggccagcttaaaccgtgccagcttaaggggtactactatgctgacctaggtcaagaaaacttcatgagttatatggctctggttcactcaaggttctccacaaacacctttcccagctgggaccgtgcgcaaccaatgcgtgttttaggtcataatggagagatcaatacccttagaggaaacaagaattggatgacagcacgtgagggtctcttagaggcggagaagcttggattatcaaaggagcagcttgcaagaattctgccaattgttgatgctacctcttctgattctggcgcattcgataatgttcttgagcttcttgtccgtggtgggcgaagcctgctagaagccgtgatgatgatgatccctgaggcatggcagaacgatggaaacatggatcctgagaagaaagctctctacgagttcttgtcagcacttatggagccttgggatggacctgctctaatatcttttactgatggtcgttaccttggagctaccctggaccgtaacggtttgaggcctggtcggttttatgtgacgcacagtgggcgtgtgatcatgggtagtgaggtcggtgttgttgatgttcctcctgaagacgtgctgagaaaaggcaggttaaaccctggaatgatgctattggttgattttgagaatcacactgtagtggatgatgaagctctgaaagcacaatactctaaagctcacccgtatggggaatggctcaagagacaaaagatatatctcaaggatattgtagaatcagtaccagaaaccgatagggttgctccaagcatttctagctcacttcctgcaaagaatgagaacaaggaccatgttggtatcaatgggattttgaccccactgaaggcttttgggtacacggtggaagccctggacatgttgctactgccaatggctaaggatggagtggaagctctcggttccatgggaaatgatacaccacttgcggtgatgtcaaacagggagaagttgacttttgagtacttcaagcagatgtttgcacaagttacaaaccctccgattgaccctattagagagaaaattgttacatctatggagtgtatgattggccccgaaggcgacttgttggaaacaactgaaaaacaatgcaaccgtctttcacttaaaggtcccttggtttctattgatgaaatggaggctattaaaaagatgaattatcgaggttggcgaagcaaagtgcttgacataacatacccaaaaaagtctgggaggaagggcttggaagaaactttgaacagaatgtgtgctgaagctcgtgaagccatacgcgagggatatactattttggttctctcagatagaggattttcctcagaccgtgttgctgccagttctctcttagcagtgggagcagtgcatcagcaccttgttgcaaatcttgagaggacacgcataggattgttggttgagtcagctgaacctcgtgaagtgcatcatttctgcaccctgcttggatttggtgctgatgctatatgcccttatttggctattgaagcaatttggtgcttgcagaatgatgggaagattcctcctaatggtgatggacaacccaactcaaaggaagagctggtgaagaagtatttctatgcttctaactatggaatgatgaaagttcttgcgaagatgggaatatccacccttgcatcctacaaaggtgcacagatttttgaagctcttggtctttcttccgaagtgattggcaagtgtttcgaaggcacacctagcaggattgagggtgcaacatttgaaatgcttgcacgagatgcacttcgtcttcatgagttagctttcccatcaagaacccctccagctggcagtgcagatgcaaaggcccttcccaacccaggggattaccactggaggaaaaatggtgaagttcatctcaacgacccacttgcaatgggaaaactacaagaagcagctagagtcaacagccgggcagcatacaaggaatattcgaaacgaattcaggagctcaacaaggcgtgcaatttacgtggcatgctgaaatttaaagatatttctgacaagatatctttggatgatgttgaacctgcaagtgagatagtgaaacgcttttgtactggagcaatgagttatggttctatttcattagaagcacatactgcccttgctattgccatgaacaaacttggaggaaaatctaatacaggtgagggaggggaacagccctctcggatggaaccacttcctgatggctcaatgaacccaagacgaagtgcgattaagcaagttgctagtggacggtttggagtttccagctattacctgactaatgcagatgagctgcagataaaaatggcccagggtgccaagcctggtgaaggtggtgagcttccaggccacaaggttattggtgacattgctgtcacaagacattccacagctggtgtaggactgatcagtccacctccgcatcatgatatttattcgattgaggatcttgcacagcttatacatgatcttaagaattcaaatcctggagcccgtatcagtgtcaaactagtttctgaggctggtgtgggagttgttgctagtggtgttgtaaaaggacatgcagaccatgttcttatatctggccatgatggtggcacgggagcttcaagatggacaggtatcaagaacgctggacttccatgggaacttgggttggctgagacacatcaaactctagtagcaaatgggcttcgtggtcgagctgttctgcaaacagatggacagttgaagactggtagagatgttgctgttgcttgcttgcttggtgcagaggaatttggttttagcactgcaccactgatcacactcggttgtattatgatgcgaaaatgccacatgaacacttgtcctgttggtatagctactcaagacccagtgcttcgagaaaagtttgctggagaaccagagcatgtcattaacttttttttcatgcttgctgaggagctaagagaaatcatggcaaaccttgggttccgcaccattactgaaatggttggacgttctgatatgcttgaggttgatccagaagtagtgaagactaatgagaaacttgagaacattgatctctcactaatcttgaaaccagcttcagagattcgtccaggtgttgctcagtactgtgttgagaagcaagaccatggcctagacatggcattagataacaaactaatagatctgtcaagaactgctattgaaaagcaagttcgtgttttcatcgagactccaattcagaacacgaaccgagcagttggaactatgctcagtcatgaagtcacaaaacgttatcacatcaatggattgcctgctggtacaattcatgtgaagtttactggaagtgctggtcaaagctttggtgcttttctttgtcctggagtcactcttgaactggaaggagacagcaatgattatcttggtaagggattatctggtgggaaaattgttgtgtacccaccaaggaacagttcatttagtccagaggacaatattgtcattggtaatgtggctttatatggtgctaccatgggagaggcatatttcaatggtatggcagcagaaaggttttgtgtccgcaactcaggtgctcaagcagtggttgaaggaattggagatcatggatgtgagtacatgactggaggcactgtggttatccttgggaaaactgggcggaactttgctgctggcatgagtggaggcattgcctatgtttatgatgttgatgggaaattcagtgctcgctgcaacaatgagttagttgatctatatcatgtggaggaagaggatgacatcatcacattgaaaatgatgattgagcaacatcgtcgcaacactgagagtgttttggctagagacatactctccgattttgataatcttcttccaaaatttgtaaaagtatatccaagggactataagagggttttagaaaacatgaagttggaaaagagtgttgctaatcatgcaaaggagcctaagatggtaaatggaatatctgtgacgactaagaaagtacaacctgatcagtcagcaagccggccaacacgtgttgccaatgccaaaaagtaccgaggttttattacatatgagcgagagagtatttcttacagagatccaaaagagcgtgttaaagattggaaggaagttgcaatcgaatcaacacctggtccactattaaatacacaatctgctcgttgcatggactgtggtactcctttctgtcatcaggaaagctcaggtgctggctgtcctcttggaaataagatcccagaattcaatgaattagttcaccagaacagatggcgcgaagcattggatcgactacttgagacaaacaacttccctgaatttactggacgagtatgccctgctccttgtgaggggtcatgtgttcttgggattattgagaatccggtgtctatcaaaagtatagaatgtgcaatcatagacaaaggtttcgaagagggatggatgattccacgacctccacttcaaagaacaggaaggaaggtggccattgttggcagtggaccagctggtttggctgctgcggatcaactaaacaaaatggggcattttgtaactgtgttcgaacgtgcagaccgaattggaggtttaatgatgtacggcgttccaaacatgaagactgacaagattggcattgtccagcgccgtgttaacctaatggcagaagagggtgtcacatttgtggtgaatgccaatgttggtagtgatcctctgtactcaattgaacgtctacgttctgagaatgatgcagttattttggcttgcggagcaacaaaaccaagagatctcaccatccctggacgcgagctatctggagttcattttgcaatggaatttctccatgcaaataccaaaagtttactcgacagcaacctggaggatggtaaatatatatccgcccgcgggaaaaaggtggtggttattggtggaggtgatacaggaacagattgcattggcacatctattaggcatggttgcaccagccttgtaaatcttgaactcctgacaaaaccaccaagcaatagagctgctgataacccatggccccagtggccaagaattttccgtgttgactatgggcatcaagaagctgctaccaagtttggaaaggatccaagaacttatgaagtcttgacaaagcgttttattggcgatgaaaatggcaaggtgaaggctcttgagttagtgcgtgtgaagtgggagaaagtagatggaagatttcaactcaaggagatccaaggatcagaagagattattgaagctgatctcgtcctcctagctatgggattcttgggtcctgaagcgtctatcgctgagaaactgggtttggagaaggacaacagatcaaacttcaaagcgcagtttggagacttcgctaccagtgttgatggtgtgttcgcagccggggactgcaggcgtggacaatcactggtggtatgggccatcacggaggggcggcaggctgctgcagcggtagacaagtacatatcaaggcatgatcagaatgtcgcaggcgacatcactccctttggggcagggctcgttcagccggttggagcataaaaaaaacatagaccgaggcatgttttaggttctcgtcagtggttcctcacagcaaattttgttcttgtatattttgacgatagataaacagttgaaagttttggtgtctattgtttctttttcttctccggttattatgttttgcgtgtctgcatgtggttttctagtccaaaatgtacagttttccttttattaaatagatgtaaatttggtgggtgatatggcgatcattttgtgtgtatatgaaagcgaaattgagccacca

SEQ ID NO: 205351 - DNA, 336 bp, Zea Mays
gtgactcttaaccagcttagatcatattcatgcagtgacactgacggtgaacatccatacgtcacatagttgtagctaatttgatgcttgtgtttgtggaaaccaagaggtggcgctgattcattggaaacctggtcgtgtatgaatgggtttccagctacttctattcttggagatagaaaccaacatgtttggtttttgtttttattcgttttagaacaactcatttttgtacggaaagaggcatttagctataattgtttgttgtagtatgtttatcacaggatagccgattccatgaaatacataaaaacctgatattgttgctatatttgg

SEQ ID NO: 205352 - DNA, 3738 bp, Zea Mays
cctcccttcccatcgccatctctctctccgcactatggccctcgatttgattcgggtctgagcacttcatcccattccccgccccagatcacgcccaccgctgtcctgttcgccttccgccgtgccatcccatatccaccgtgctccccaccctccctactcctccccgttgggtgctgacctttttccctctcttacggaaatcatgcttcatctggtgatgttcttaatatggagcaacggataagcttatccgtgtgtcagtttctctaatatctaagtagggtttcccaccgtcccccgttacgtctagtatgccattagttttaggctgtgtctgatccattaatggcactgcaaccaagacgtgccatcgtccagtcgcaccatcacaagagccgacaaaggcggccaaaggcagatccatggaggttatgactggggcactaccgagcctcatccccaagcttgctaatctagtcgctggtgagtacaatctgcaaaagggtgtcaaaggggatatcatgttcctccaagaagagcttgagagcatgagggatgcactcgaggagatctccaaggttccagcagaccagcttcccaacagagataagatttgggctaggaacgtgagagagctctcctacgacatagagcccaagattcgccataaaatggctactgaaattaggacgatcaaaaggcgcatcgttgaggtgcacgaacgacatatcaggtatgaaattaatcttggtcctgataagcttggcaatgctgctgtagatccccgaatatttggtcagtacacagagctgaaagagcttgttggcatcgacgagacaagagatgagttaatcgatattatgatggaagggaatgtagtccccatgaagcaagtgtctcaaactcctgacttgaagaaattattcaagagtttgctctatgatcttggcaagtacatcaatgaagaatcgttggatgagagacagctcatcaatgtactcagagaattccttcaagagagaaggtatttaattgttattgatgacatatgggacatctcagtctggaaaatgattagatgtgctttaccagacaatgatatcgggtacattattgttacaaccacacgcatttccgatgttgctgaaaaagttggtggtgcttataagctaaaacctctttcattgaacaactctcgagaattaatgtataagataatatttgggaacgaaaatagagaaaacactaaagacaaagaaatatgtttagatgaggagcttgcagaagtatcaaataaaatactaaagaaatgtgccggtgtgcccctagctattattacgatggctagtgtactagcttgtaaagcaagaaatgaaatggagtggtatgaggtgtacaactctattggtgttggcattgagaacaatctagatgtggggaatatgagaaagattttgtcattcagctattacgatatggcatcccatctcaagacatgtttattatacttaagtatgtttccagaagattataaaattgagaaagatcgtttgatatggatgtggatagctgaaggctttgtccaatatgtgaaacaagggaagagcctatttgagcatggagagagttacttcaatgaactcataaacagaggtatgatccaacccatatataaccaagctggcatgatatatgaatgtcgtgtgcatgatatggtgcttggtcttatatgttccttgtcaaatggagaaaattttgttacaacattaaatggtttgggtcacggatctccatcaaatatgattaggagattatcagttcaaaatggcaatgagagtcaagctatgactctgcaaaccagaaacttgcagcaagtaaggtcggttgttgcctttccggatgccaccgctagtgtagttacggtcttgaggagcttccgagttctacgtgtactagatttacaagattgtgacctttcacaatgttgcagcctgaagtaccttgggaatctatttcacttgaggtatctaggactatgtaacacaagtattacacagctccctgaagaaattgtaaacttgcaacttctacaaatactggatgtatggaacaataaaatgtattgcctaccctcaactattgtgcagctgagatatttgatgtgcctttacattgatggttttactagagtgccaaacgggattgggagcctaacaagccttgaagaactcacatttctaggcatttatgactccactgtggacattatagaagagctgggccagctaacggagctacgggtactgcatatcgttctttttggtgaatggaacgacaagctggtggagtgcctgcacaagctgaaaaagttgaaatatctatatatcaaggaccgcagtggtcaacttaacattggtggtttggatgcctgggtagcccctccaaatctccaaatattgaatacgcgatcgggttgctggttcaccacactgtcagcatcagcatggatgaatccatctcttcttcaggacctctccttatctaccaccgtgagggagttgcagcaggatgacattataattcttgggagtttgccagctctccgctatctaaatctgatgattgttggtgaggatttgggagttcacaatgaaatccatggggaatgcattgttggtgctggtttgttcccatccctagtatactgccagctctggggaaatgtggcgcctatagtgtttcagcgaggagccatgccacggctcagaacccttgactttcggttatctgttcaagaggtgagaggaatcaacggcagggatggtggtatcgacttgggcctcaggaacctgccatcactccagaaggtttgggttcatttggaccctgagggcgctaacaaggcagaggtgaaggaactggaggctgagttgacgcgtgccatcaaaattcatccaaatcatcctcagctgtatggaattcaggatgaagatgcagatgatgaatgatgcactggagaaaagattaccaattatgcagaagctagtgcactttcaactttcatggcactggtctcaaggattgtctgattcagatggattacttctgtttctgtctcagattcagaatgtgatgtccaccccaatcatccaacccttaaggaacatggtgtcatggtgatgaagatgtaaggagccaacttgtgatcatccgctggaaaatggaagagcaatctggtggcctgatggactagcaaacctggaaaattaaagcgtagtgtggcaatgtggcagcctggggaaacctgcaactggcgatctggaggtctggagagaacaaaacgccagtgacagttggggcttaggcttggcaagcctaatattgcaatagcacatatgaataacggttgtttgttgcgactggaagtcctgtttggtttttttacatagtgtttgctgttttcactcatgcctttttcttttgtgttttgtgtactgtcttgggtgttcctagggttgccaaaccgtttttgtgacaccccagtgtcacctagggtttctctcaaaatgccaaaccaagaaccatcattttatgtgaatcaaattaagcatgagcatcaaattgacttaagaatgaagaatccatcatgcatatacttaaaagtatcatgatcagaacaaatgggtctttcaaaaaggtaataatgttgcaaccctaataaaaaccctaagtgag

SEQ ID NO: 205353 - DNA, 3115 bp, Zea Mays
caatccagtagcgcgccgcctctggccgtccgccgtcgtcgccctctccctcgtcctcgcccgtcgcacgtgttgtgtgatccagcggccaaaggcagatccatggaggttatgactggggcactaccgagcctcatccccaagcttgctaatctagtcgctggtgagtacaatctgcaaaagggtgtcaaaggggatatcatgttcctccaagaagagcttgagagcatgagggatgcactcgaggagatctccaaggttccagcagaccagcttcccaacagagataagatttgggctaggaacgtgagagagctctcctacgacatagagcccaagattcgccataaaatggctactgaaattaggacgatcaaaaggcgcatcgttgaggtgcacgaacgacatatcaggtatgaaattaatcttggtcctgataagcttggcaatgctgctgtagatccccgaatatttggtcagtacacagagctgaaagagcttgttggcatcgacgagacaagagatgagttaatcgatattatgatggaagggaatgtagtccccatgaagcaagtgtctcaaactcctgacttgaagaaattattcaagagtttgctctatgatcttggcaagtacatcaatgaagaatcgttggatgagagacagctcatcaatgtactcagagaattccttcaagagagaaggtatttaattgttattgatgacatatgggacatctcagtctggaaaatgattagatgtgctttaccagacaatgatatcggattataaaattgagaaagatcgtttgatatggatgtggatagctgaaggctttgtccaatatgtgaaacaagggaagagcctatttgagcatggagagagttacttcaatgaactcataaacagaggtatgatccaacccatatataaccaagctggcatgatatatgaatgtcgtgtgcatgatatggtgcttggtcttatatgttccttgtcaaatggagaaaattttgttacaacattaaatggtttgggtcacggatctccatcaaatatgattaggagattatcagttcaaaatggcaatgagagtcaagctatgactctgcaaaccagaaacttgcagcaagtaaggtcggttgttgcctttccggatgccaccgctagtgtagttacggtcttgaggagcttccgagttctacgtgtactagatttacaagattgtgacctttcacaatgttgcagcctgaagtaccttgggaatctatttcacttgaggtatctaggactatgtaacacaagtattacacagctccctgaagaaattgtaaacttgcaacttctacaaatactggatgtatggaacaataaaatgtattgcctaccctcaactattgtgcagctgagatatttgatgtgcctttacattgatggttttactagagtgccaaacgggattgggagcctaacaagccttgaagaactcacatttctaggcatttatgactccactgtggacattatagaagagctgggccagctaacggagctacgggtactgcatatcgttctttttggtgaatggaacgacaagctggtggagtgcctgcacaagctgaaaaagttgaaatatctatatatcaaggaccgcagtggtcaacttaacattggtggtttggatgcctgggtagcccctccaaatctccaaatattgaatacgcgatcgggttgctggttcaccacactgtcagcatcagcatggatgaatccatctcttcttcaggacctctccttatctaccaccgtgagggagttgcagcaggatgacattataattcttgggagtttgccagctctccgctatctaaatctgatgattgttggtgaggatttgggagttcacaatgaaatccatggggaatgcattgttggtgctggtttgttcccatccctagtatactgccagctctggggaaatgtggcgcctatagtgtttcagcgaggagccatgccacggctcagaacccttgactttcggttatctgttcaagaggtgagaggaatcaacggcagggatggtggtatcgacttgggcctcaggaacctgccatcactccagaaggtttgggttcatttggaccctgagggcgctaacaaggcagaggtgaaggaactggaggctgagttgacgcgtgccatcaaaattcatccaaatcatcctcagctgtatggaattcaggatgaagatgcagatgatgaatgatgcactggagaaaagattaccaattatgcagaagctagtgcactttcaactttcatggcactggtctcaaggattgtctgattcagatggattacttctgtttctgtctcagattcagaatgtgatgtccaccccaatcatccaacccttaaggaacatggtgtcatggtgatgaagatgtaaggagccaacttgtgatcatccgctggaaaatggaagagcaatctggtggcctgatggactagcaaacctggaagtaagtacaaacaaaacacgagacagagacacagagtcgggcctaagatttagcaaaactgatgctgggttgggtatgtatgccctgtttggtgtgctctgatcagaggatgacatttacagaattaaagcgtagtgtggcaatgtggcagcctggggaaacctgcaactggcgatctggaggtctggagagaacaaaacgccagtgacagttggggcttaggcttggcaagcctaatattgcaatagcacatatgaataacggttgtttgttgcgactggaagtcctgtttggtttttttacatagtgtttgctgttttcactcatgcctttttcttttgtgttttgtgtactgtcttgggtgttcctagggttgccaaaccgtttttgtgacaccccagtgtcacctagggtttctctcaaaatgccaaaccaagaaccatcattttatgtgaatcaaattaagcatgagcatcaaattgacttaagaatgaagaatccatcatgcatatacttaaaagtatcatgatcagaacaaatgggtctttcaaaaaggtaataatgttgcaaccctaataaaaaccctaagtgag

SEQ ID NO: 205354 - DNA, 4323 bp, Zea Mays
ctccaatcaagacaaccccatatctctagtggcaatccagtagcgcgccgcctctggccgtccgccgtcgtcgccctctccctcgtcctcgcccgtcgcacgtgttgtgtgatccaggtgactctgcttccctcccttcccatcgccatctctctctccgcactatggccctcgatttgattcgggtctgagcacttcatcccattccccgccccagatcacgcccaccgctgtcctgttcgccttccgccgtgccatcccatatccaccgtgctccccaccctccctactcctccccgttgggtgctgacctttttccctctcttacggaaatcatgcttcatctggtgatgttcttaatatggagcaacggataagcttatccgtgtgtcagtttctctaatatctaagtagggtttcccaccgtcccccgttacgtctagtatgccattagttttaggctgtgtctgatccattaatggcactgcaaccaagacgtgccatcgtccagtcgcaccatcacaagagccgacaaagggtaccatactcttttttgacagtgaatcaactgacactgtttgcacccagagatagagagatagaacaaatacacaacaattttgtaaaaaaaaagtcagtcctatgtgtggggatttcagaaattacaagcaaatcatttttttttctttaacaagttgcagcaagaaacttctttcgaggagcgaaacatgcacctcgacattggtggcggcatttattttgttcttgatttgcctttcccaatagctacgatgcacactactattcaactccgcacaccatttctgctcagtgagcataattcacacaccaataatcttgctcctagcagcggccaaaggcagatccatggaggttatgactggggcactaccgagcctcatccccaagcttgctaatctagtcgctggtgagtacaatctgcaaaagggtgtcaaaggggatatcatgttcctccaagaagagcttgagagcatgagggatgcactcgaggagatctccaaggttccagcagaccagcttcccaacagagataagatttgggctaggaacgtgagagagctctcctacgacatagagcccaagattcgccataaaatggctactgaaattaggacgatcaaaaggcgcatcgttgaggtgcacgaacgacatatcaggtatgaaattaatcttggtcctgataagcttggcaatgctgctgtagatccccgaatatttggtcagtacacagagctgaaagagcttgttggcatcgacgagacaagagatgagttaatcgatattatgatggaagggaatgtagtccccatgaagcaagtgtctcaaactcctgacttgaagaaattattcaagagtttgctctatgatcttggcaagtacatcaatgaagaatcgttggatgagagacagctcatcaatgtactcagagaattccttcaagagagaaggtatttaattgttattgatgacatatgggacatctcagtctggaaaatgattagatgtgctttaccagacaatgatatcgggtacattattgttacaaccacacgcatttccgatgttgctgaaaaagttggtggtgcttataagctaaaacctctttcattgaacaactctcgagaattaatgtataagataatatttgggaacgaaaatagagaaaacactaaagacaaagaaatatgtttagatgaggagcttgcagaagtatcaaataaaatactaaagaaatgtgccggtgtgcccctagctattattacgatggctagtgtactagcttgtaaagcaagaaatgaaatggagtggtatgaggtgtacaactctattggtgttggcattgagaacaatctagatgtggggaatatgagaaagattttgtcattcagctattacgatatggcatcccatctcaagacatgtttattatacttaagtatgtttccagaagattataaaattgagaaagatcgtttgatatggatgtggatagctgaaggctttgtccaatatgtgaaacaagggaagagcctatttgagcatggagagagttacttcaatgaactcataaacagaggtatgatccaacccatatataaccaagctggcatgatatatgaatgtcgtgtgcatgatatggtgcttggtcttatatgttccttgtcaaatggagaaaattttgttacaacattaaatggtttgggtcacggatctccatcaaatatgattaggagattatcagttcaaaatggcaatgagagtcaagctatgactctgcaaaccagaaacttgcagcaagtaaggtcggttgttgcctttccggatgccaccgctagtgtagttacggtcttgaggagcttccgagttctacgtgtactagatttacaagattgtgacctttcacaatgttgcagcctgaagtaccttgggaatctatttcacttgaggtatctaggactatgtaacacaagtattacacagctccctgaagaaattgtaaacttgcaacttctacaaatactggatgtatggaacaataaaatgtattgcctaccctcaactattgtgcagctgagatatttgatgtgcctttacattgatggttttactagagtgccaaacgggattgggagcctaacaagccttgaagaactcacatttctaggcatttatgactccactgtggacattatagaagagctgggccagctaacggagctacgggtactgcatatcgttctttttggtgaatggaacgacaagctggtggagtgcctgcacaagctgaaaaagttgaaatatctatatatcaaggaccgcagtggtcaacttaacattggtggtttggatgcctgggtagcccctccaaatctccaaatattgaatacgcgatcgggttgctggttcaccacactgtcagcatcagcatggatgaatccatctcttcttcaggacctctccttatctaccaccgtgagggagttgcagcaggatgacattataattcttgggagtttgccagctctccgctatctaaatctgatgattgttggtgaggatttgggagttcacaatgaaatccatggggaatgcattgttggtgctggtttgttcccatccctagtatactgccagctctggggaaatgtggcgcctatagtgtttcagcgaggagccatgccacggctcagaacccttgactttcggttatctgttcaagaggtgagaggaatcaacggcagggatggtggtatcgacttgggcctcaggaacctgccatcactccagaaggtttgggttcatttggaccctgagggcgctaacaaggcagaggtgaaggaactggaggctgagttgacgcgtgccatcaaaattcatccaaatcatcctcagctgtatggaattcaggatgaagatgcagatgatgaatgatgcactggagaaaagattaccaattatgcagaagctagtgcactttcaactttcatggcactggtctcaaggattgtctgattcagatggattacttctgtttctgtctcagattcagaatgtgatgtccaccccaatcatccaacccttaaggaacatggtgtcatggtgatgaagatgtaaggagccaacttgtgatcatccgctggaaaatggaagagcaatctggtggcctgatggactagcaaacctggaagtaagtacaaacaaaacacgagacagagacacagagtcgggcctaagatttagcaaaactgatgctgggttgggtatgtatgccctgtttggtgtgctctgatcagaggatgacatttacagaattaaagcgtagtgtggcaatgtggcagcctggggaaacctgcaactggcgatctggaggtctggagagaacaaaacgccagtgacagttggggcttaggcttggcaagcctaatattgcaatagcacatatgaataacggttgtttgttgcgactggaagtcctgtttggtttttttacatagtgtttgctgttttcactcatgcctttttcttttgtgttttgtgtactgtcttgggtgttcctagggttgccaaaccgtttttgtgacaccccagtgtcacctagggtttctctcaaaatgccaaaccaagaaccatcattttatgtgaatcaaattaagcatgagcatcaaattgacttaagaatgaagaatccatcatgcatatacttaaaagtatcatgatcagaacaaatgggtctttcaaaaaggtaataatgttgcaaccctaataaaaaccctaagtgag

SEQ ID NO: 205355 - DNA, 3406 bp, Zea Mays
aacacattgactatgctaacattcaatcgtccactccaatcaagacaaccccatatctctagtggcaatccagtagcgcgccgcctctggccgtccgccgtcgtcgccctctccctcgtcctcgcccgtcgcacgtgttgtgtgatccagcggccaaaggcagatccatggaggttatgactggggcactaccgagcctcatccccaagcttgctaatctagtcgctggtgagtacaatctgcaaaagggtgtcaaaggggatatcatgttcctccaagaagagcttgagagcatgagggatgcactcgaggagatctccaaggttccagcagaccagcttcccaacagagataagatttgggctaggaacgtgagagagctctcctacgacatagagcccaagattcgccataaaatggctactgaaattaggacgatcaaaaggcgcatcgttgaggtgcacgaacgacatatcagagctgaaagagcttgttggcatcgacgagacaagagatgagttaatcgatattatgatggaagggaatgtagtccccatgaagcaagtgtctcaaactcctgacttgaagaaattattcaagagtttgctctatgatcttggcaagtacatcaatgaagaatcgttggatgagagacagctcatcaatgtactcagagaattccttcaagagagaaggtatttaattgttattgatgacatatgggacatctcagtctggaaaatgattagatgtgctttaccagacaatgatatcgggtacattattgttacaaccacacgcatttccgatgttgctgaaaaagttggtggtgcttataagctaaaacctctttcattgaacaactctcgagaattaatgtataagataatatttgggaacgaaaatagagaaaacactaaagacaaagaaatatgtttagatgaggagcttgcagaagtatcaaataaaatactaaagaaatgtgccggtgtgcccctagctattattacgatggctagtgtactagcttgtaaagcaagaaatgaaatggagtggtatgaggtgtacaactctattggtgttggcattgagaacaatctagatgtggggaatatgagaaagattttgtcattcagctattacgatatggcatcccatctcaagacatgtttattatacttaagtatgtttccagaagattataaaattgagaaagatcgtttgatatggatgtggatagctgaaggctttgtccaatatgtgaaacaagggaagagcctatttgagcatggagagagttacttcaatgaactcataaacagaggtatgatccaacccatatataaccaagctggcatgatatatgaatgtcgtgtgcatgatatggtgcttggtcttatatgttccttgtcaaatggagaaaattttgttacaacattaaatggtttgggtcacggatctccatcaaatatgattaggagattatcagttcaaaatggcaatgagagtcaagctatgactctgcaaaccagaaacttgcagcaagtaaggtcggttgttgcctttccggatgccaccgctagtgtagttacggtcttgaggagcttccgagttctacgtgtactagatttacaagattgtgacctttcacaatgttgcagcctgaagtaccttgggaatctatttcacttgaggtatctaggactatgtaacacaagtattacacagctccctgaagaaattgtaaacttgcaacttctacaaatactggatgtatggaacaataaaatgtattgcctaccctcaactattgtgcagctgagatatttgatgtgcctttacattgatggttttactagagtgccaaacgggattgggagcctaacaagccttgaagaactcacatttctaggcatttatgactccactgtggacattatagaagagctgggccagctaacggagctacgggtactgcatatcgttctttttggtgaatggaacgacaagctggtggagtgcctgcacaagctgaaaaagttgaaatatctatatatcaaggaccgcagtggtcaacttaacattggtggtttggatgcctgggtagcccctccaaatctccaaatattgaatacgcgatcgggttgctggttcaccacactgtcagcatcagcatggatgaatccatctcttcttcaggacctctccttatctaccaccgtgagggagttgcagcaggatgacattataattcttgggagtttgccagctctccgctatctaaatctgatgattgttggtgaggatttgggagttcacaatgaaatccatggggaatgcattgttggtgctggtttgttcccatccctagtatactgccagctctggggaaatgtggcgcctatagtgtttcagcgaggagccatgccacggctcagaacccttgactttcggttatctgttcaagaggtgagaggaatcaacggcagggatggtggtatcgacttgggcctcaggaacctgccatcactccagaaggtttgggttcatttggaccctgagggcgctaacaaggcagaggtgaaggaactggaggctgagttgacgcgtgccatcaaaattcatccaaatcatcctcagctgtatggaattcaggatgaagatgcagatgatgaatgatgcactggagaaaagattaccaattatgcagaagctagtgcactttcaactttcatggcactggtctcaaggattgtctgattcagatggattacttctgtttctgtctcagattcagaatgtgatgtccaccccaatcatccaacccttaaggaacatggtgtcatggtgatgaagatgtaaggagccaacttgtgatcatccgctggaaaatggaagagcaatctggtggcctgatggactagcaaacctggaaaattaaagcgtagtgtggcaatgtggcagcctggggaaacctgcaactggcgatctggaggtctggagagaacaaaacgccagtgacagttggggcttaggcttggcaagcctaatattgcaatagcacatatgaataacggttgtttgttgcgactggaagtcctgtttggtttttttacatagtgtttgctgttttcactcatgcctttttcttttgtgttttgtgtactgtcttgggtgttcctagggttgccaaaccgtttttgtgacaccccagtgtcacctagggtttctctcaaaatgccaaaccaagaaccatcattttatgtgaatcaaattaagcatgagcatcaaattgacttaagaatgaagaatccatcatgcatatacttaaaagtatcatgatcagaacaaatgggtctttcaaaaaggtaataatgttgcaaccctaataaaaaccctaagtgag

SEQ ID NO: 205356 - DNA, 3502 bp, Zea Mays
gccttagaaagtattttggcgagcggcaacacattgactatgctaacattcaatcgtccactccaatcaagacaaccccatatctctagtggcaatccagtagcgcgccgcctctggccgtccgccgtcgtcgccctctccctcgtcctcgcccgtcgcacgtgttgtgtgatccagcggccaaaggcagatccatggaggttatgactggggcactaccgagcctcatccccaagcttgctaatctagtcgctggtgagtacaatctgcaaaagggtgtcaaaggggatatcatgttcctccaagaagagcttgagagcatgagggatgcactcgaggagatctccaaggttccagcagaccagcttcccaacagagataagatttgggctaggaacgtgagagagctctcctacgacatagagcccaagattcgccataaaatggctactgaaattaggacgatcaaaaggcgcatcgttgaggtgcacgaacgacatatcaggtatgaaattaatcttggtcctgataagcttggcaatgctgctgtagatccccgaatatttggtcagtacacagagctgaaagagcttgttggcatcgacgagacaagagatgagttaatcgatattatgatggaagggaatgtagtccccatgaagcaagtgtctcaaactcctgacttgaagaaattattcaagagtttgctctatgatcttggcaagtacatcaatgaagaatcgttggatgagagacagctcatcaatgtactcagagaattccttcaagagagaaggtatttaattgttattgatgacatatgggacatctcagtctggaaaatgattagatgtgctttaccagacaatgatatcgggtacattattgttacaaccacacgcatttccgatgttgctgaaaaagttggtggtgcttataagctaaaacctctttcattgaacaactctcgagaattaatgtataagataatatttgggaacgaaaatagagaaaacactaaagacaaagaaatatgtttagatgaggagcttgcagaagtatcaaataaaatactaaagaaatgtgccggtgtgcccctagctattattacgatggctagtgtactagcttgtaaagcaagaaatgaaatggagtggtatgaggtgtacaactctattggtgttggcattgagaacaatctagatgtggggaatatgagaaagattttgtcattcagctattacgatatggcatcccatctcaagacatgtttattatacttaagtatgtttccagaagattataaaattgagaaagatcgtttgatatggatgtggatagctgaaggctttgtccaatatgtgaaacaagggaagagcctatttgagcatggagagagttacttcaatgaactcataaacagaggtatgatccaacccatatataaccaagctggcatgatatatgaatgtcgtgtgcatgatatggtgcttggtcttatatgttccttgtcaaatggagaaaattttgttacaacattaaatggtttgggtcacggatctccatcaaatatgattaggagattatcagttcaaaatggcaatgagagtcaagctatgactctgcaaaccagaaacttgcagcaagtaaggtcggttgttgcctttccggatgccaccgctagtgtagttacggtcttgaggagcttccgagttctacgtgtactagatttacaagattgtgacctttcacaatgttgcagcctgaagtaccttgggaatctatttcacttgaggtatctaggactatgtaacacaagtattacacagctccctgaagaaattgtaaacttgcaacttctacaaatactggatgtatggaacaataaaatgtattgcctaccctcaactattgtgcagctgagatatttgatgtgcctttacattgatggttttactagagtgccaaacgggattgggagcctaacaagccttgaagaactcacatttctaggcatttatgactccactgtggacattatagaagagctgggccagctaacggagctacgggtactgcatatcgttctttttggtgaatggaacgacaagctggtggagtgcctgcacaagctgaaaaagttgaaatatctatatatcaaggaccgcagtggtcaacttaacattggtggtttggatgcctgggtagcccctccaaatctccaaatattgaatacgcgatcgggttgctggttcaccacactgtcagcatcagcatggatgaatccatctcttcttcaggacctctccttatctaccaccgtgagggagttgcagcaggatgacattataattcttgggagtttgccagctctccgctatctaaatctgatgattgttggtgaggatttgggagttcacaatgaaatccatggggaatgcattgttggtgctggtttgttcccatccctagtatactgccagctctggggaaatgtggcgcctatagtgtttcagcgaggagccatgccacggctcagaacccttgactttcggttatctgttcaagaggtgagaggaatcaacggcagggatggtggtatcgacttgggcctcaggaacctgccatcactccagaaggtttgggttcatttggaccctgagggcgctaacaaggcagaggtgaaggaactggaggctgagttgacgcgtgccatcaaaattcatccaaatcatcctcagctgtatggaattcaggatgaagatgcagatgatgaatgatgcactggagaaaagattaccaattatgcagaagctagtgcactttcaactttcatggcactggtctcaaggattgtctgattcagatggattacttctgtttctgtctcagattcagaatgtgatgtccaccccaatcatccaacccttaaggaacatggtgtcatggtgatgaagatgagccaacttgtgatcatccgctggaaaatggaagagcaatctggtggcctgatggactagcaaacctggaaaattaaagcgtagtgtggcaatgtggcagcctggggaaacctgcaactggcgatctggaggtctggagagaacaaaacgccagtgacagttggggcttaggcttggcaagcctaatattgcaatagcacatatgaataacggttgtttgttgcgactggaagtcctgtttggtttttttacatagtgtttgctgttttcactcatgcctttttcttttgtgttttgtgtactgtcttgggtgttcctagggttgccaaaccgtttttgtgacaccccagtgtcacctagggtttctctcaaaatgccaaaccaagaaccatcattttatgtgaatcaaattaagcatgagcatcaaattgacttaagaatgaagaatccatcatgcatatacttaaaagtatcatgatcagaacaaatgggtctttcaaaaaggtaataatgttgcaaccctaataaaaaccctaagtgag

SEQ ID NO: 205357 - DNA, 1224 bp, Zea Mays
caaaaaaggcaggcaggcactcacggttcactgccttccttcgcttgcatctcgcagactcgcactcccagtcggccagtgcagccgtgcaggtgaggtgatcgcgcgtggatgggagttcagacaatgtcgtcccactcccacggcgacgacggccgccgcggcctcccgcggcagggctcggtctacggcctcacgctgaccgaggtggagacgcagctgggcgagccgctgcggaccatgaacctggacgacctcctgcgcaccgtgctcccggcctccgccgccgccgccgcaggcccgcccccgcccccggccccggcggccaagaagacggtggacgaggtgtggcgcgacatccagagcgccggcggcggcggcggcggccgtcagccctccatgggcgagatgacgctggaggacttcctctcccgcgccggcgtcgccgtcgatgccgccccgcattggatgcaccagtacccgcagcagcagcagtacgcgctgccgcggcccctaccgcttcccggcccggctctggacgccgcgtaccacggcgaccggccaggtgttttcctctcgcactcgcaggtggccgggcggaagcgcgccgccacgggggccgtggccggggacggcgtcgtggagaggacggtggagcggcggcagaagcgcatgatcaagaaccgcgagtccgcggcgaggtcccgggccaggaagcaggcgtacaccaaacgagctggagaacaaggtggcccggctggaggaggagaacaagcgtctcattgagctcaaggtgctgaaaccactggagccactggagccgccaccggcggagcagaacaagaagcagccgccgccgcaaccgaagaggaagcagccgcagccaccgccaccgcctccgccgccgattcagcagctgccgccgaagcaccgccacgacctccggcgaacgaattccgccactttctgatgacgagggcacgggggggggctctctctagggcgtctacgggggggttggaggacaccatctgggttgcttttgcagtttgcagcttgcagcaacgaccagcaaatgaagatcataacttgcaggtaaaaatgcctgtttggttcggttctcctgtctgggccaggatcgcatgctaaaaacgggcaggcaagctggctaggctaaaaacggattttcttaggctatgaccacatgtatatgaccgctgtact

SEQ ID NO: 205358 - DNA, 3558 bp, Zea Mays
cacaaatccaaacccccgcatcgtcctcgtcgccgccacagagcccctcgtctcggccgcccttcgccgcctccgcggagcaggcatcgcaggagaccaaagatccggccagctctgatgtcaggagctagtggctcaaccgggcgcgcggccccgcggtacgccccggatgacctgacgttgctcaagccgtggcgcggcctcgtcgacggcaccaccggctacctgtactactggaacccggagacgaacgtcacgcagtacgagcggcctatgccccctgagaatcagctgcccccgcccccgcccccgttgcctcccccgcctccccggagccgcgaccggcgcgacaggtccagatcccgatcccgcacccctcccaggcgcgaccgccgcgaccgcgaccgtgacgacgagcatgcgtcctccaagacggcgtcttcccaccaccatccggctccgatagccgtcgccgactatccgtccaccgaggcataccgacgccgccatgagatcaccgtcacgggggataacgtgccggctccaataacttcatttgaggctggtggcttcccatcagaaattctgaaggagatgcgatatctgctccgagggggagctaatgtcgtatgctgcctcgcgcgcccttggccaatctataagtgagatgagctgagggcaggtcttgctgatggagctgccaaggtgggtgaacgctcgaggttgctcgcttcctccctggggggccgcccatggagcggaggagggccacccactcgtggcacccacggtggctgatttgtcgctctgcgtccaattcttggaaaaggctccttgcatggatgatgggcttcttctggggcttgacccatggaggtctggcccaggctgtcaacgcccatccatatataggatcgggtggcagctgctggaaggggccttgtggatcaacggtctatgcctgaatacaacgtgctggatttgcaagcccaacacctatccaagcgcagtcatggccaattgctatgcaaaatcaagatgtagtagctattgcgaagactggatcaggcaaaactcttggttatctacttcctggatttatgcatatcaagcgcctgcagaacagcactaggaatggtccaacagtgctagttttggccccaacaagggaacttgcaacgcagattctggatgaagctatgaaatttggaagatcatctagaatttcttgcacggtttgttctgtctgtatctattttaatatacaaatggtcacgattttatgttttaccaggttattaattcaaaaaaccttctgaggaatgtttaaactgttgaccatgtgttgaagttatattgtgaattattatattgtacttgttgatctgtgtgactgtctaatgtttgtctcactgtcatgatctctggtttatatattcattgtttaacctttggttcttgatctgcttgtagtgcctatacggtggtgctcctaaaggtcctcagttgagagatttagatagaggggttgatgttgttgttgcaacacctggaaggttaaatgacattttggagatgcgaagggtaagtcttaagcaagtgtcatatcttgttctggatgaggctgatcgcatgctggacatgggctttgagccacaaatacggaagatagtgaaagagatacctcaccgtcggcaaacccttatgtacaccgctacttggcccaaggaagtccggaggattgcagatgatcttcttgtccatcctttacaggtgacaattggaaatgttgatgaacttgttgctaatagtgctattactcagcatatagaagtcataacaccctcagaaaaacaacggcgcctggagcagatattacgatcccaggtttcaggttcaaagatattaatattttgtaccaccaagaggatgtgtgaccaacttgcaaggacactcaccaggcagtttggagcttcagccattcatggtgacaagtcccaaagtgaaagggagaaggtcctgaatcattttagatctgggcgctctcctattttagtggcaactgatgttgctgcgcgaggtttggacatcaaagatatcagggtagtgatcaactatgacttccccactggtgttgaagactatgttcacaggattggcaggacaggaagggctggtgccactggtgttgcatatacatttttctgtgatcaggactcaaaatatgctgctgacctaatcaaaattcttgaaggggcaaaccaacaggtgccccgtgatttagaggatatggcttctcgtggtggtgggcgaggtaagaagaggaaccgttgggcatcccgctctgaaaggggtggtccacgatctgaactggattcaaggtacagcggcagagatggattagcatcttccgggagatcagagagtggtcgtggcagtcatggaagggatgattatggtagccgtggcaggtatgactctggtgaaactgatgggcgatctcgtaggtctgctagaggtcgcagtagaagtcgtagcccaagccccaagaggtcacaccatcatgaagctaggcgtagccgaagcaggagcaggagccgaagctgtagaaactttcgtgctagccgcagcaagagtcacagccctgttgctagcagtaggcatgaaaaggctgctgttatttcaggatctactcaacctaacttggggtatgcagagcacaaaagccctccaagatctcactctggggatgaccatgtgaaccaccctgatcaaaaggatgaccacatgggagatgggaagatggaaagggttgatcttgatcgctcgcccagcccacaatatgataagtctgctccatatagtcctgcgtacaatggcaaagccagtgactcgatgagccctaatgttcagccaaaggcagatgccaaatatgtcaaaccttctgggaaacctgagcctgcatctccattgcgccacagcaaaggcagagatgatgatgaaggtatcatagacgacgatggagagattgctgagggtgagatgatgatgaaggtatcatagacgaggatggagagattgctgagcgtgatttgcgtgcaagtgcagctgtgtagagaatggtaataactgacggagaatggcctgcatcttctgtgacaacaagactgttatgcaaactgcagtcgttcccatctgcaagagtccagaatgtagaaatgcatttgtgccattaaatgtctcgtaggacctatgataatacatctgccatatatgaacaaaaactgttgatgtatgtcctgttgtttgttaaacttcaatgacttgtgttctggtgtcttactgctagttctgttaagtgatttatgataaaacatattgtcaggtctggaagtgataaatttatgatacttgtcaggtctggaagtagtttattatattggcagctccctggttggagattcctaggattgcaaaacctggcttgtttgagagcaagggcattggaggggattgatccccttactatcttatagcctgatttgttgtgttgttttt

SEQ ID NO: 205359 - DNA, 3367 bp, Zea Mays
attttatggttccgaacgttgtttaaggtctctcggacatgtcctaactcctcgagctaaaaaaaaaacgcaagaaaacagggcaagaccacaaatccaaacccccgcatcgtcctcgtcgccgccacagagcccctcgtctcggccgcccttcgccgcctccgcggagcaggcatcgcaggagaccaaagatccggccagctctgatgtcaggagctagtggctcaaccgggcgcgcggccccgcggtacgccccggatgacctgacgttgctcaagccgtggcgcggcctcgtcgacggcaccaccggctacctgtactactggaacccggagacgaacgtcacgcagtacgagcggcctatgccccctgagaatcagctgcccccgcccccgcccccgttgcctcccccgcctccccggagccgcgaccggcgcgacaggtccagatcccgatcccgcacccctcccaggcgcgaccgccgcgaccgcgaccgtgacgacgagcatgcgtcctccaagacggcgtcttcccaccaccatccggctccgatagccgtcgccgactatccgtccaccgaggcataccgacgccgccatgagatcaccgtcacgggggataacgtgccggctccaataacttcatttgaggctggtggcttcccatcagaaattctgaaggagatgcgatatctgctccgagggggagctaatgtcgtatgctgcctcgcgcgcccttggccaatctataagtgagatgagctgagggcaggtcttgctgatggagctgccaaggctccttgcatggatgatgggcttcttctggggcttgacccatggaggtctggcccaggctgtcaacgcccatccatatataggatcgggtggcagctgctggaaggggccttgtggatcaacggtctatgcctgagtgagcctccatggactctgttagagctttttctacttcgccttgtgtgcgcaagtctacacattgcgggaacattttatttatacaacgtgctggatttgcaagcccaacacctatccaagcgcagtcatggccaattgctatgcaaaatcaagatgtagtagctattgcgaagactggatcaggcaaaactcttggttatctacttcctggatttatgcatatcaagcgcctgcagaacagcactaggaatggtccaacagtgctagttttggccccaacaagggaacttgcaacgcagattctggatgaagctatgaaatttggaagatcatctagaatttcttgcacgtgcctatacggtggtgctcctaaaggtcctcagttgagagatttagatagaggggttgatgttgttgttgcaacacctggaaggttaaatgacattttggagatgcgaagggtaagtcttaagcaagtgtcatatcttgttctggatgaggctgatcgcatgctggacatgggctttgagccacaaatacggaagatagtgaaagagatacctcaccgtcggcaaacccttatgtacaccgctacttggcccaaggaagtccggaggattgcagatgatcttcttgtccatcctttacaggtgacaattggaaatgttgatgaacttgttgctaatagtgctattactcagcatatagaagtcataacaccctcagaaaaacaacggcgcctggagcagatattacgatcccaggtttcaggttcaaagatattaatattttgtaccaccaagaggatgtgtgaccaacttgcaaggacactcaccaggcagtttggagcttcagccattcatggtgacaagtcccaaagtgaaagggagaaggtcctgaatcattttagatctgggcgctctcctattttagtggcaactgatgttgctgcgcgaggtttggacatcaaagatatcagggtagtgatcaactatgacttccccactggtgttgaagactatgttcacaggattggcaggacaggaagggctggtgccactggtgttgcatatacatttttctgtgatcaggactcaaaatatgctgctgacctaatcaaaattcttgaaggggcaaaccaacaggtgccccgtgatttagaggatatggcttctcgtggtggtgggcgaggtaagaagaggaaccgttgggcatcccgctctgaaaggggtggtccacgatctgaactggattcaaggtacagcggcagagatggattagcatcttccgggagatcagagagtggtcgtggcagtcatggaagggatgattatggtagccgtggcaggtatgactctggtgaaactgatgggcgatctcgtaggtctgctagaggtcgcagtagaagtcgtagcccaagccccaagaggtcacaccatcatgaagctaggcgtagccgaagcaggagcaggagccgaagctgtagaaactttcgtgctagccgcagcaagagtcacagccctgttgctagcagtaggcatgaaaaggctgctgttatttcaggatctactcaacctaacttggggtatgcagagcacaaaagccctccaagatctcactctggggatgaccatgtgaaccaccctgatcaaaaggatgaccacatgggagatgggaagatggaaagggttgatcttgatcgctcgcccagcccacaatatgataagtctgctccatatagtcctgcgtacaatggcaaagccagtgactcgatgagccctaatgttcagccaaaggcagatgccaaatatgtcaaaccttctgggaaacctgagcctgcatctccattgcgccacagcaaaggcagagatgatgatgaaggtatcatagacgacgatggagagattgctgagggtgagatgatgatgaaggtatcatagacgaggatggagagattgctgagcgtgatttgcgtgcaagtgcagctgtgtagagaatggtaataactgacggagaatggcctgcatcttctgtgacaacaagactgttatgcaaactgcagtcgttcccatctgcaagagtccagaatgtagaaatgcatttgtgccattaaatgtctcgtaggacctatgataatacatctgccatatatgaacaaaaactgttgatgtatgtcctgttgtttgttaaacttcaatgacttgtgttctggtgtcttactgctagttctgttaagtgatttatgataaaacatattgtcaggtctggaagtgataaatttatgatacttgtcaggtctggaagtagtttattatattggcagctccctggttggagattcctaggattgcaaaacctggcttgtttgagagcaagggcattggaggggattgatccccttactatcttatagcctgatttgttgtgttgttttt

SEQ ID NO: 205360 - DNA, 939 bp, Zea Mays
gaaataaactgaatggtgagctggcaaatgttggcctaaagcatctgaagcatgatgacctcgtttatgtatctggtcatctgggctcttatcataaagtcagtccaagtggtgaacggcacattgtctataagatttatgtcagagagctgaattatgttgttgatcaaaataagaagcctcagaatgatgcagactcaacaagtccaccatcaatgacatctgtcacccgtcttctttgcgaacccatatgagtggtgggacaaccgacgatccaaaccatgggccaactaccctgatttcaagcacaaggacactcgtgagaaaatatggcttcgtccagatgaccctccttgggtacgaaagcagcttgaattatatgacctggaagtagcagagaatggccataggtgtaaaagtcgactgtcaaaaaaacaaaattggaaaacccaagattttgactactttgatgatgaagaagtacagcatttagcggaagcatgaataggacgcatggcattgtctgccaagaatgaagaaattcaccaggccatttgggtggtttgggggtgggggcggctgtttctttgctcagggatcgtactcaattgtatcgatgtatgtttggtaggatgtggatatgttgagtcttctagtttgtaattttatttatgcgtattttgagatgcaagtgtgagggaacctcgacagtcgacatattagcgaggccctatcaattaacatgcctcgaagtttgctaagtgatacttgggcctgtttggttcaacttttttctgaccagcttttctgaaaatctggctgtgtagagaatctggttgtgtagagaatctgagtatcattagaattatgtgcggagaaagataaaggtgtccataggactcgggatctaaaaagtgacgaattcctattattgcaatg

SEQ ID NO: 205361 - DNA, 1329 bp, Zea Mays
accaaaccagaccaaacataatacgatgctgcggcgccttgtcggcggagccgccgccgtgcgttcgccgctgccgccgccgttctgtcggctgcttcacaacggcggcggaggtggtgggtgtagctcgggggagccggagagcgtggcgtaccgcatgtcgatgctgcggcgcccctctaccgtcagcaagaaggggctcacctggaactggtgcagcctcatcggtcgcctcgccgcaccggtgaggccgatcgacactagctttcttgaagtccccagggcgtacaccttcctctccgtcaccctctcgtcgcccgcgccctcttcgagctcgtccaacataaactgaatggtgagctggcaaatgttggcctaaagcatctgaagcatgatgacctcgtttatgtatctggtcatctgggctcttatcataaagtcagtccaagtggtgaacggcacattgtctataagatttatgtcagagagctgaattatgttgttgatcaaaataagaagcctcagaatgatgcagactcaacaagtccaccatcaatgacatctgtcacccttcaaatgctaaaagagaatgaatgtataggcaggcttcgcttgtggcaggtcttctttgcgaacccatatgagtggtgggacaaccgacgatccaaaccatgggccaactaccctgatttcaagcacaaggacactcgtgagaaaatatggcttcgtccagatgaccctccttgggtacgaaagcagcttgaattatatgacctggaagtagcagagaatggccataggtgtaaaagtcgactgtcaaaaaaacaaaattggaaaacccaagattttgactactttgatgatgaagaagtacagcatttagcggaagcatgaataggacgcatggcattgtctgccaagaatgaagaaattcaccaggccatttgggtggtttgggggtgggggcggctgtttctttgctcagggatcgtactcaattgtatcgatgtatgtttggtaggatgtggatatgttgagtcttctagtttgtaattttatttatgcgtattttgagatgcaagtgtgagggaacctcgacagtcgacatattagcgaggccctatcaattaacatgcctcgaagtttgctaagtgatacttgggcctgtttggttcaacttttttctgaccagcttttctgaaaatctggctgtgtagagaatctggttgtgtagagaatctgagtatcattagaattatgtgcggagaaagataaaggtgtccataggactcgggatctaaaaagtgacgaattcctattattgcaatg

SEQ ID NO: 205362 - DNA, 1852 bp, Zea Mays
gttttttttcacgccgtccgctgcaccatttccccttccgttccgtccgctgcatcctcgtcgtacgttctgtctgtctttctcgccccctctcgctctccgacggctggtcggccgccgccgccgtaagccgccaggtgctgaggctttcgttggtctcttcgccggggacgagcacccactagatggcaaatgaagagaagttgttcaagatgggaaatgcagatacagatactgctgcactgcacaatgaatgggatgatgctctctgtccgatatgcatggaccatccacacaatgctgtccttctgttgtgcagctcccatgacaaaggatgccgatcctatatatgtgatacaagctataggcattcaaattgcttagacaggttcaagaaaatgaaagtgaatgatggggacagtccttcacagtcaagctcatccatgcctaggggtacaagaaaccaaaatgttgtccacggatctcgttttggtcttactagagagagccgcagactacacatagacatatctgaacccaatgaagcttccaatcatcaaggtgccagccatagacctgctgccataggtggagaacaggaagataacagctacaatgaaggcacagatttgacattggaaggtcaagaggttgagatcaatggtacttcagagtcaagtgatatgtcaagcttaaaccaattgttgtgcccactgtgtaggggggctgttagtggctggaagatcatcgaagaagctagacagtatttggatgagaaatccagagcttgctcacgagaagcctgcatgttttctggcaactacagggagatccgtagacatgccagaagggtgcaccccactacaaggcctgctgatgttgatccatcaagacgccgtgcatggcaccgcctggagcatcagcgggagtatgctgatatagtaagtgcaatcaggtcggctatgcctggggcagttgtgtttggtgattatgctatcgaaggtggtgaaatgttttcacatgaccgggaaaccagtggcccaagtgaaccgagtgggtctcttctgacaacattctttctatttcatatgctcagcagtagtccgattagatcaggtgatgagccaggaggcacatcaaggggcctgagaaggcatagaagacgctatctgtggggagagaatttgttaagtcttcaatacaatgataatgatgatgatgatgatgatgatgatgatgatgatgagggggaggagggcgaaggagatgctgtagatgaagaagttcagagaccaaggagccgccggaggttcataagatcaagatcggaggagcgagtataatacattggtggcttgtggtaattacattcttcgctgctgtgaagttcttttgccgtgaacccatgatgactccttgcatggcagtggatgatgtgcttccttgcattgttaaaatgctgcgcacatccttgcaatcaaagacctaaaggcttgtggacctcaagttcaagtttagatgactcaaatgtgtttaacaccatccatgagaccctcttgaatccgacacttacggggaacactcgttcttatggcaaagctggactgatctcagcacaattacacaagtgatactagaagctagcttttggagatgctcgctccatcacagttggtgctgtcgctggtgcaccatgtctttttaccttatgcactgtgtgtcatctgcatttgttgtatattcttcacatattacattccattgagttcatgctgctactattctggttcatatcgggtgtgtttggttgcctggatatgatctggccagactcatgagacgcagctttatt

SEQ ID NO: 205363 - DNA, 3090 bp, Zea Mays
attttcgccgttcctgctagcatgtgtgtgtgtgtgttctccaaccatctccgaggatctcgtcagtcgtcacgaaatctccatggctggagcacgcgagaggccaggatatctcgccggagtaacaagggtagaaacatctccggcgtgccacgtgtcagccctttccacggcactacaatacacttatacaccccaggtccccagccgcgcccgcgctatataaagctcccgccccccattcccttcccctcctcccccagccccaggtagtagcttagctagcgtgataatcaccgcgctaaactgatcatatatacacagcaattggcgtgtgacaggacagaggaggagggggcaggctggtaatatctagcaaaagtacaagcgttcctccagtggcgtccagcgctatatagttcgctgtccggcgtcctttccgaccgagcgcgagcgatgacggtgacgccgaggattacggtgtgggatgggcggctggtggcgcacgggcggagcgtcctcgccggcgtgccggacaacatcgtgctcacgcacgcctccggggcggggctggtcgacggcgccttcgtcggcgccacggccgccgagcccagcagcatgcacgtcttcaccttcggcaccctccgggacctgcggttcgtgtgctgcttccggttcaagctgtggtggatgacccagcgcatgggcacctccggccgcgacgtcccgctggagacgcagttcatgctcctggagtgcggcccgggcgacggccacggcgacggcgacgcggcggtgtacgtggcgatgctgccgctgctggagggccagttccgggcggcgctgcagggcaacgaccgcgacgagctggagatcaccctcgagagcggggacaaggcggtgcagactgcgcaggggacctgcatgctgtacgtgcacgccgggaccaaccctttcgacaccatcactcaggcggtcaaggtggtggagagacacatgcagacgttccatcacagggagaagaaaaagctgccgtcgttcgtggactggttcggctggtgcacgtgggacgccttctacaccgacgtcaccgccgagagcgtcaagcaaggcctcaagagcttggcggacggcggcacgccgccgcggttcctgatcatcgacgacgggtggcagcagatcggcagcgagaacaaggaggagtccgccaacgccgtcgtccaggaaggggcgcagttcgccagtaggctgacggggatcaaggagaacgccaagttccagaagaagacgaagacgaaggagagcggcggcggcggcggcgagcagcaggcgcaaacgccgggcctgaagctgctggtggaggaggcgaagcgcgagcacggcgtcaggtacgtgtacgtgtggcacgccatggcggggtactggggcggcgtgaagccggcggcggaggggatggagcactacgagagcgcgctggcgtacccggtgcagtcgccgggtgtgatgggcaaccagccggacatcgtcatggactcgctgtccgtgctgggcctggggctggtgcacccgcgcagggcgctgagcttctacgacgagctgcactcgtacctcgcctcctgcggcgtcgacggcgtcaaggtggacgtgcagaacatcatcgagacgctcggcgccgggcacggcggccgggtcgcgctcacccgcgcctaccaccgcgcgctcgaggactccgtggcgcgcaacttccccgacaacggctgcatctcctgcatgtgccacaacaccgacatgctctacagcgcgcgccagaccgccgtcgtgcgcgcctccgacgacttctacccgcgggacccggcgtcgcacaccgtccacgtctcctccgtcgcctacaacaccctcttcctcggcgagttcatgcagcccgactgggacatgttccatagcctgcacccggcggcggactaccacggcgcggcgagggcaatcggcggctgcccgatatacgtcagcgacaagccaggcaaccacaacttcgagctgctcaagaagctggtgctccccgacggctccgtgctccgcgcgcagctcccgggccgccccacccgcgactgcctcttcgccgacccggcgcgcgacggcacgagcctgctcaagatctggaacgtgaacaagtgcacgggcgtggtgggcgtgttcaactgccagggcgccgggtggtgccgcgtcaccaagaagacccgggtgcacgacgcggcgccggggacgctgacggggtcggtccgcgccgacgacgtggacgtgatcgccggcctcgccggggacggctggggcggcgaggccgtcgtgtacgcctacaggtcaggggagctagtcaggctgccccagggcgccacactgccggtgacgctcaaggtgctggagttcgaggtgttccacgtctcccccgtcagggcggtcgcgccgggcgtgtcgttcgcgcccatcggcctgctcgacatgttcaactccggcggggcggtggagcagtgcgaggtccgtggcggcgcgaacgcggccgccgccgtcgcgctcagggtccgcggctgcggccgcttcggcgcgtactgctcgcggcggcccgcgaggtgcatgctggacgcgacggaggtggagttcagccacgacgctgatacggggctcgtcacgctccacatccccgtgccggagcaggagttctacagatggagcctggagatcgaagtctagaggtgctcccggcctgtcggatctgtggcaattgcctcccattcttcagtggattcaccattacacgcgtgcctcagtgtgtggttggcgtgtgtgcgacgtagggaggcgtgtggaacgcatgaaacgggcacgtacgccattgacgcgcctctcttcgtccctagaagaataagctaagcctctgttctaccttgctgcatcgacctgcttgcaataaactgctactatactccatgtgtatgcaatgtgacacaaacaaaaacacatctccagttccatgatacactgtactgttgactaattagacaaattccaaattaaattccgaatataaatcatgac

SEQ ID NO: 205364 - DNA, 2169 bp, Zea Mays
ctcaaattcagcggcagctgtgtaatatttcgtaatttttttatgtgctttccgttgctatatggtcttgcttgcatgagtgactgtggaaataaacccaatgggacaggtacctgcaattgttgatggaagattcaaactatttgaaagtcatgcgattttgaggtatcttgcatcggttttccctggagtagctgaccactggtatccttctgacttgttcaccagagccaaaattgagtcaatcttggattggcatcactcaaatttgcggcgtggtgcagcaacccttgtaatgcacactgcattggctcccttccttggtcttacgacaagtcatgaggctgtgaaacaagcagagaagcttgtgatgcagtcactgggggtgatcgaatccgtatggctgaaaggcgatgccaagttcttgctaggtatcccccagccatcgattgcagatctgagccttgtctgtgagataatgcagttggagatccttggcgatgaggtccgtgaccgattcctgggagctcatgagaggatccttgtctggatggacaaggtgaagaaagccacgagccctcattttgaggaagcccacgagctccttttccaagtgaagaaggcacgcatggtgcaaggcagcagcagcaaggcttttgagtcgagcacaaagctcaaaacagcatcaaagctctgacgaccaaaggcagaataagcgacagacagatccatcttgtgatataatataataaacgggaactattattaattactgttggtattaattacacttattccagaaggccacaagtgcttcgttgcacttacttattccacaaggccacggtcgggaactacttactgttcgttccagcatgctatagtaaacaactctgcaacaacatcatccccaaaaaacaagcaaacaacaaaattggtatctagtctgtcttgaatctgtgtgaaatcctctccaggccgtccttgcactcttccattgccctcttcgacttgtctccaagggttgcaccaaacgcagatacgcttcccttcacttgtgctgatacctcgtttgccctggaagcagcacaagccccaaactcggtacaccactgccttgcatctgcagcttgctgctttaggattgcgatgaaggacctcacatgctgcatcactctctccaccgcaccccgagacctcacctccatctcaccagacattgtcttgagcttctccagcagagcttctgcctggttgatagactcgtcgactgcgttttctttgccagcgttagcccatgtcaccccagctgaggcgtcatccttcagttctccttcgacaacaactctgattccttgacgctcccattggttccgggcctcctcaagggcgcgtgcatgctcccgggcctttttggcttcctcctctgcccaagccctggttaagttaaagagcacaataacatcatgcacaatgaaataatatgcacaaaaatgatcaaatctcagatgtcaagaattcttcttgccttgccatagataacgccttcctctccacttcaagctcatactgaagttgcacaacagccgagttatcgctctcaatttccttttggagtttctcaatcctactcttctcgaacgacacctccaccttcttgctcagtacgttctgcagctgttcctctacctcactcctcaacttcaacagaacttccatttcagactcaacagcagctctgcccctgaccagaatattcttctcttcctctctttctgccctcaacctatctagctccaccctagcttcttcagctactttttcaagggtctctaccctttctctttcctccttaagctccctttcaaaacttgcattaagatctttctcgacctgagcaaccaatgcagcatgtgcatttacagctgcttcagctattttctctgcctcgatacgggcaacctcctccagaaccacttcgccagaatcaccagctgaaaatgctagggcagcttgtccctttgtcacaggtttgttcggttggaaaagtcttgtgaaaccttcaagacaagagctttagcgataaccctgaatccacaccaggaagatcaattatacaaagagcttaccgaaggcaagagctgtaatgctctggtctccagcatccaa

SEQ ID NO: 205365 - DNA, 2212 bp, Zea Mays
gttctgtctgtcttcacttatccgaggttccgtgcagcagtggaaaagagcagattttagcagagcagcgagggtcggagaagcctccccaagcttcgaatcgctatgcagcccgtcaaggtgtacgccgaccggcggtcgcaaccctcccgagctgtcatcatcttctgcagggtgaaccagatcgatttcgaggaggtcacggtggatctgttcaagtctcagcacctcacacccgaattcaaaagtatccttctgacttgttcaccagagccaaaattgagtcaatcttggattggcatcactcaaatttgcggcgtggtgcagcaacccttgtaatgcacactgcattggctcccttccttggtcttacgacaagtcatgaggctgtgaaacaagcagagaagcttgtgatgcagtcactgggggtgatcgaatccgtatggctgaaaggcgatgccaagttcttgctaggtatcccccagccatcgattgcagatctgagccttgtctgtgagataatgcagttggagatccttggcgatgaggtccgtgaccgattcctgggagctcatgagaggatccttgtctggatggacaaggtgaagaaagccacgagccctcattttgaggaagcccacgagctccttttccaagtgaagaaggcacgcatggtgcaaggcagcagcagcaaggcttttgagtcgagcacaaagctcaaaacagcatcaaagctctgacgaccaaaggcagaataagcgacagacagatccatcttgtgatataatataataaacgggaactattattaattactgttggtattaattacacttattccagaaggccacaagtgcttcgttgcacttacttattccacaaggccacggtcgggaactacttactgttcgttccagcatgctatagtaaacaactctgcaacaacatcatccccaaaaaacaagcaaacaacaaaattggtatctagtctgtcttgaatctgtgtgaaatcctctccaggccgtccttgcactcttccattgccctcttcgacttgtctccaagggttgcaccaaacgcagatacgcttcccttcacttgtgctgatacctcgtttgccctggaagcagcacaagccccaaactcggtacaccactgccttgcatctgcagcttgctgctttaggattgcgatgaaggacctcacatgctgcatcactctctccaccgcaccccgagacctcacctccatctcaccagacattgtcttgagcttctccagcagagcttctgcctggttgatagactcgtcgactgcgttttctttgccagcgttagcccatgtcaccccagctgaggcgtcatccttcagttctccttcgacaacaactctgattccttgacgctcccattggttccgggcctcctcaagggcgcgtgcatgctcccgggcctttttggcttcctcctctgcccaagccctggttaagttaaagagcacaataacatcatgcacaatgaaataatatgcacaaaaatgatcaaatctcagatgtcaagaattcttcttgccttgccatagataacgccttcctctccacttcaagctcatactgaagttgcacaacagccgagttatcgctctcaatttccttttggagtttctcaatcctactcttctcgaacgacacctccaccttcttgctcagtacgttctgcagctgttcctctacctcactcctcaacttcaacagaacttccatttcagactcaacagcagctctgcccctgaccagaatattcttctcttcctctctttctgccctcaacctatctagctccaccctagcttcttcagctactttttcaagggtctctaccctttctctttcctccttaagctccctttcaaaacttgcattaagatctttctcgacctgagcaaccaatgcagcatgtgcatttacagctgcttcagctattttctctgcctcgatacgggcaacctcctccagaaccacttcgccagaatcaccagctgaaaatgctagggcagcttgtccctttgtcacaggtttgttcggttggaaaagtcttgtgaaaccttcaagacaagagctttagcgataaccctgaatccacaccaggaagatcaattatacaaagagcttaccgaaggcaagagctgtaatgctctggtctccagcatccaa

SEQ ID NO: 205366 - DNA, 2221 bp, Zea Mays
ctcgctgcgccgcgtctgcgttctgtctgtcttcacttatccgagggtcggagaagcctccccaagcttcgaatcgctatgcagcccgtcaaggtgtacgccgaccggcggtcgcaaccctcccgagctgtcatcatcttctgcagggtgaaccagatcgatttcgaggaggtcacggtggatctgttcaagtctcagcacctcacacccgaattcaaaaaaataaacccaatgggacaggtacctgcaattgttgatggaagattcaaactatttgaaagtcatgcgattttgaggtatcttgcatcggttttccctggagtagctgaccactggtatccttctgacttgttcaccagagccaaaattgagtcaatcttggattggcatcactcaaatttgcggcgtggtgcagcaacccttgtaatgcacactgcattggctcccttccttggtcttacgacaagtcatgaggctgtgaaacaagcagagaagcttgtgatgcagtcactgggggtgatcgaatccgtatggctgaaaggcgatgccaagttcttgctaggtatcccccagccatcgattgcagatctgagccttgtctgtgagataatgcagttggagatccttggcgatgaggtccgtgaccgattcctgggagctcatgagaggatccttgtctggatggacaaggtgaagaaagccacgagccctcattttgaggaagcccacgagctccttttccaagtgaagaaggcacgcatggtgcaaggcagcagcagcaaggcttttgagtcgagcacaaagctcaaaacagcatcaaagctctgacgaccaaaggcagaataagcgacagacagatccatcttgtgatataatataataaacgggaactattattaattactgttggtattaattacacttattccagaaggccacaagtgcttcgttgcacttacttattccacaaggccacggtcgggaactacttactgttcgttccagcatgctatagtaaacaactctgcaacaacatcatccccaaaaaacaagcaaacaacaaaattggtatctagtctgtcttgaatctgtgtgaaatcctctccaggccgtccttgcactcttccattgccctcttcgacttgtctccaagggttgcaccaaacgcagatacgcttcccttcacttgtgctgatacctcgtttgccctggaagcagcacaagccccaaactcggtacaccactgccttgcatctgcagcttgctgctttaggattgcgatgaaggacctcacatgctgcatcactctctccaccgcaccccgagacctcacctccatctcaccagacattgtcttgagcttctccagcagagcttctgcctggttgatagactcgtcgactgcgttttctttgccagcgttagcccatgtcaccccagctgaggcgtcatccttcagttctccttcgacaacaactctgattccttgacgctcccattggttccgggcctcctcaagggcgcgtgcatgctcccgggcctttttggcttcctcctctgcccaagccctggttaagttaaagagcacaataacatcatgcacaatgaaataatatgcacaaaaatgatcaaatctcagatgtcaagaattcttcttgccttgccatagataacgccttcctctccacttcaagctcatactgaagttgcacaacagccgagttatcgctctcaatttccttttggagtttctcaatcctactcttctcgaacgacacctccaccttcttgctcagtacgttctgcagctgttcctctacctcactcctcaacttcaacagaacttccatttcagactcaacagcagctctgcccctgaccagaatattcttctcttcctctctttctgccctcaacctatctagctccaccctagcttcttcagctactttttcaagggtctctaccctttctctttcctccttaagctccctttcaaaacttgcattaagatctttctcgacctgagcaaccaatgcagcatgtgcatttacagctgcttcagctattttctctgcctcgatacgggcaacctcctccagaaccacttcgccagaatcaccagctgaaaatgctagggcagcttgtccctttgtcacaggtttgttcggttggaaaagtcgaaggcaagagctgtaatgctctggtctccagcatccaa

SEQ ID NO: 205367 - DNA, 2283 bp, Zea Mays
cacccttatacgttgccctcgctgcgccgcgtctgcgttctgtctgtcttcacttatccgaggttccgtgcagcagtggaaaagagcagattttagcagagcagcgagggtcggagaagcctccccaagcttcgaatcgctatgcagcccgtcaaggtgtacgccgaccggcggtcgcaaccctcccgagctgtcatcatcttctgcagggtgaaccagatcgatttcgaggaggtcacggtggatctgttcaagtctcagcacctcacacccgaattcaaaaaaataaacccaatgggacaggtacctgcaattgttgatggaagattcaaactatttgaaagtcatgcgattttgaggtatcttgcatcggttttccctggagtagctgaccactgcaacccttgtaatgcacactgcattggctcccttccttggtcttacgacaagtcatgaggctgtgaaacaagcagagaagcttgtgatgcagtcactgggggtgatcgaatccgtatggctgaaaggcgatgccaagttcttgctaggtatcccccagccatcgattgcagatctgagccttgtctgtgagataatgcagttggagatccttggcgatgaggtccgtgaccgattcctgggagctcatgagaggatccttgtctggatggacaaggtgaagaaagccacgagccctcattttgaggaagcccacgagctccttttccaagtgaagaaggcacgcatggtgcaaggcagcagcagcaaggcttttgagtcgagcacaaagctcaaaacagcatcaaagctctgacgaccaaaggcagaataagcgacagacagatccatcttgtgatataatataataaacgggaactattattaattactgttggtattaattacacttattccagaaggccacaagtgcttcgttgcacttacttattccacaaggccacggtcgggaactacttactgttcgttccagcatgctatagtaaacaactctgcaacaacatcatccccaaaaaacaagcaaacaacaaaattggtatctagtctgtcttgaatctgtgtgaaatcctctccaggccgtccttgcactcttccattgccctcttcgacttgtctccaagggttgcaccaaacgcagatacgcttcccttcacttgtgctgatacctcgtttgccctggaagcagcacaagccccaaactcggtacaccactgccttgcatctgcagcttgctgctttaggattgcgatgaaggacctcacatgctgcatcactctctccaccgcaccccgagacctcacctccatctcaccagacattgtcttgagcttctccagcagagcttctgcctggttgatagactcgtcgactgcgttttctttgccagcgttagcccatgtcaccccagctgaggcgtcatccttcagttctccttcgacaacaactctgattccttgacgctcccattggttccgggcctcctcaagggcgcgtgcatgctcccgggcctttttggcttcctcctctgcccaagccctggttaagttaaagagcacaataacatcatgcacaatgaaataatatgcacaaaaatgatcaaatctcagatgtcaagaattcttcttgccttgccatagataacgccttcctctccacttcaagctcatactgaagttgcacaacagccgagttatcgctctcaatttccttttggagtttctcaatcctactcttctcgaacgacacctccaccttcttgctcagtacgttctgcagctgttcctctacctcactcctcaacttcaacagaacttccatttcagactcaacagcagctctgcccctgaccagaatattcttctcttcctctctttctgccctcaacctatctagctccaccctagcttcttcagctactttttcaagggtctctaccctttctctttcctccttaagctccctttcaaaacttgcattaagatctttctcgacctgagcaaccaatgcagcatgtgcatttacagctgcttcagctattttctctgcctcgatacgggcaacctcctccagaaccacttcgccagaatcaccagctgaaaatgctagggcagcttgtccctttgtcacaggtttgttcggttggaaaagtcttgtgaaaccttcaagacaagagctttagcgataaccctgaatccacaccaggaagatcaattatacaaagagcttaccgaaggcaagagctgtaatgctctggtctccagcatccaa

SEQ ID NO: 205368 - DNA, 1728 bp, Zea Mays
ctcgatggggacgacggacgagacggtcatacttcaactgccgcgtccccgaatattggctattttccaaccggcggcgcagccggtgacgcgcaggcgggcgggttcatctgacccttcgtcgactcgtggcagatgtgactttctgaggccggtgtgcctggacggtttcgtccatggcgtgcgcagtgcgcactcgcatcgcatggtattaatagtcattgcaagccaagaggagactagaaaagagaaggtggaagaacagcaggagagtcggaggaagcaagcttgcccatacgctggtacttatgtgctgatactactgcagccgcgctgcgagagaagaggagtgggagcacgtggagccaaaggggcgattctttgcttggccttcatttctcgcctcttccgcatctcgagttgtcgtgattaacaagacagcaagacctcggcggcggcaaacagtcgagcacctgcgagcgtctctgccaccgggactcaagaggcaatgccagcaccagccccaccaattcgtctgggacctccgactccctatatatcctctcatggatccaaagttgcacgcctacacatgtatgactggattgtgctaattcttttagctgtattggatggagttcttaatataatagaacccttccatcgcttcgtcggatcagaaatgatgacagacctcagataccccatgaagggcaatacagtgccattttgggctgtgccgataattggtatcattgggcctatggttatcataacagtgatatactttaagaagagaaatgtatatgatctgcatcatgccatactagtacttattactgctgttttaactgatgcgataaaggatggtgttgggcgaccacgtcctgatttcttctggcgttgcttccctgatggaaaacctgagtataacaactttactacaggcgccatatgccatggccaggcgagtgttattaaagaaggtcataaaagctttccaagtggtcatacttcatggtcttttgctggccttgggttcctttcatggtatttggctggtaaaatcaaagtattcgatcgtagaggacatgttgcaaaagtctgcattgtcctttcccctctgcttcttgcagccttagtggcagtttctcgagttgatgactattggcatcattggcaagacgtatgtactggcggattacttgggttcacggttgcttccatttgctacctgcagttttttccactaccatctgatgaaaatggactgtggccgcacgcatatttccgacacattcttgagccagagggtgacagccaagcgcaacccacgtacatgagccgtcgcagctcggttcagaacggttcctttcagtacagccctgacgcagtggaaatgaggagcacgagccaagcaatggattccatggaagctggccagagagcccaataatgatggaattaataggaacatcaatttagccacggaccgttgtaatgtaatataacgtcgttgtagcgcttagtacagcaagatcttgttcagatcccttattgtgtagtataacagttcctgaatgatggtcacgtttctgctggtcctccgaagactgaagcgcgactgattaccgcgttggcgtgatccggctggctgccatgtgactcaggcgatgaacaatgcaaatttaaaactcgttcggtgcgatggggttcgttgggactggg

SEQ ID NO: 205369 - DNA, 1361 bp, Zea Mays
ctggaaccaaccacctcatccgtctgcgtgttgatgatttatcaatggaaccacaagttgaaagagaacttatgcttataaaagtaaatgcagagcgagaaaagttacctgagataatgggtttggttcgcattttcaaagcagaagtggttgatctttcagactacacactaactattgaggtaactggagatcctggaaagatggttgcaatacagaagactctgagcaaatatgggatcagagaaattgctagaactggcaagatagctttgcgccgtgaaaaaatgggagaaactgctccattttggaggttctctgcagcttcttatccggatctcgaagtggcaataccttcaaatttccagcaaaacactggtgtgaaggcaatcaatcagaatccggaagaatcttcagggggtgatgtttatccagtggaatcttatgaaagcttctcatcaacaagtcaaattctggatgctcattggggtgttatgactgatggcgatccaacagggttttgttcacatactctatcaattcttgtgaatgatgtccctggagttctcaatcttgtaacaggtgtattctccagaaggggctacaatattcagagtcttgctgttggcccagctgaaaaagaaggaacttctcgcatcactactgttgttcctggaactgatgaatccattgccaagctagtacatcaactgtacaagctcattgatgtttatgaagttcaggattttacccacttaccatttgctgctagagagttaatgatcataaaggtcgcggcaaatgctacagctcgaagggatgtcttagatattgctcagatttttgaggcacagaaagttgacatatcagaccacacaattacactactgctcaccggagacattgacagaatggttagattgcaaaagatgctagagcagtatggcatctgtgaggttgcacggacaggccggattgctctgctccgagagtctggagttgactccaagtacctccgcgggttttccctcccgctgtaattctccatttccagacattacactgcgcgatttcaggtcgccacggtcattttgacttctgagaatggagctggaggaatcattcaaaaatccaagggtgagaactgtagaaataatagctgttaagtttcttgcttctgcaagtatcacgcagcacatggggagagatgaagtatcatacacaacaatatgtctgcagtcagaaacgatcgatgaggggtccaatatttttttcactacacatgttgtatacgtacactggtagtatcctagttgaaggaaacgcaatatatatatattcactacacatgttgctcaacc

SEQ ID NO: 205370 - DNA, 1848 bp, Zea Mays
ctggaaccaaccacctcatccgtctgcgtgtgcgcgctgactcccccctctcccaaaacccccacactcccccttcggcatctccgatatccgttcagcaatgaccatgaacgctgcgatcgcctcccgactcggcctcgccgtctccaggtgtggggctgggtcccgagtggacagccggccgctgacgccggcagtgggtttcacggcggggccgagggcgcgctcagtagccgtcaccgccgcctcctcttctccggcgaccggtggcgtgacgccggtgccaccccgctcgaatcgctcggttatgaagcgtcacacgctatcagtttttgttggtgatgaaagtgggatgatcaatcgaattgctggggtttttgctagaagaggatataacatcgagtcattggctgttgggttgaacaaggataaagcattatttacaatagtagtgtcaggaacagacaaaatattaaaccaggtcgtagagcaactaaacaagcttgttaatgtcataaaggttgatgatttatcaatggaaccacaagttgaaagagaacttatgcttataaaagtaaatgcagagcgagaaaagttacctgagataatgggtttggttcgcattttcaaagcagaagtggttgatctttcagactacacactaactattgaggtaactggagatcctggaaagatggttgcaatacagaagactctgagcaaatatgggatcagagaaattgctagaactggcaagctttgcgccgtgaaaaaatgggagaaactgctccattttggaggttctctgcagcttcttatccggatctcgaagtggcaataccttcaaatttccagcaaaacactggtgtgaaggcaatcaatcagaatccggaagaatcttcagggggtgatgtttatccagtggaatcttatgaaagcttctcatcaacaagtcaaattctggatgctcattggggtgttatgactgatggcgatccaacagggttttgttcacatactctatcaattcttgtgaatgatgtccctggagttctcaatcttgtaacaggtgtattctccagaaggggctacaatattcagagtcttgctgttggcccagctgaaaaagaaggaacttctcgcatcactactgttgttcctggaactgatgaatccattgccaagctagtacatcaactgtacaagctcattgatgtttatgaagttcaggattttacccacttaccatttgctgctagagagttaatgatcataaaggtcgcggcaaatgctacagctcgaagggatgtcttagatattgctcagatttttgaggcacagaaagttgacatatcagaccacacaattacactactgctcaccggagacattgacagaatggttagattgcaaaagatgctagagcagtatggcatctgtgaggttgcacggacaggccggattgctctgctccgagagtctggagttgactccaagtacctccgcgggttttccctcccgctgtaattctccatttccagacattacactgcgcgatttcaggtcgccacggtcattttgacttctgagaatggagctggaggaatcattcaaaaatccaagggtgagaactgtagaaataatagctgttaagtttcttgcttctgcaagtatcacgcagcacatggggagagatgaagtatcatacacaacaatatgtctgcagtcagaaacgatcgatgaggggtccaatatttttttcactacacatgttgtatacgtacactggtagtatcctagttgaaggaaacgcaatatatatatattcactacacatgttgctcaacc

SEQ ID NO: 205371 - DNA, 247 bp, Zea Mays
tgtatctgaagaactgtttgacatatatttggttcctgattctacgatctactgcaattgtttttcatattgagctgcacaagtacagcacaagatatggccgcatatttacattacaaaggtgcaactttgctaacaggatctgcacgaaccagaaaccatcagaaataagcatcattgtctgagaaatatggcacaggcttcagactgaatgtttggcatagcctgtgatacagcctacagcttc

SEQ ID NO: 205372 - DNA, 2973 bp, Zea Mays
aaattttttcgtcgcggggacacgtatggggagctattccccggcggggaattccccgttgccatccctacttgtgtcctctaaccatgtcctgatgatggttttcttgctgttgtggtttggttcagtgattttttcagggtcagctgattgtcagtccttgcctcagatgtagaatcatgcatggctgttgcccgcttcgaggatgcacatgactgagttttgttagctttcagtgctactatttattttgtttgtggaactaaacattagctcatttgtaacttgattttaggaatgcaataaaccaccatgtctggcttactgagtctacgattgccataggtgatgatgaaggttgcattaaggtatgggatacccggtaacaatcttgctgcaacagttttgaagtccacgatgattacatttcagatatgacctatgtggctgactcaaatcagatactggccacaaaggtttaactagattccgtgcagttgagatgtatcaaacacaatcgaaacactatctgcatggcagcaactaaagatgatcaccaattatcttatttattcccttttttttttgtcatggatcaggcataagtactcctgttttcagttccacatttaactgctacttcatgcagattggatattaagtaatttgatgatgtgattttgtaataccatcgaacagaagatattctgtgagatctaaagatggatttatttgcaaaacatttgcatgtcaaatttatcgacatgcattctgtgcatgatacacagcatggtaactaaagattaaacttctttgctttccttgtagcggggatgaaactttgtctatgaacaccctgcggaggaataaagtaaggtcacaatctgaattttcagaagatgagttggtatcctcggtgctaatgaaggtacacgatggagggagcgggaagagatgccaaccctttgagcggttacagaattggcaaaaccctgggaattgggtcgttcggtaaagtgaagatcgcggaacatatattgactggtcataaggtggcgatcaagattctcaatcgcaagaagatcagaagcatggatatggaagagaaagttaagagagaaatcaagatactgagattatttatgcatcctcatatcatacgcctttatgaggtgatagatacacctgctgatatctgtgttgttatggagtatgttaaatctggagagttgtttgattacatcgttgagaagggaaggctacacgaagaggaagcccgacacttttttcagcagatcatatctggtgttgaatattgccataggaacatggttgctcaccgtgatttaaagccagagaatcttcttttggattcaaaatgcaatgttaagattgccgattttggcttaagtaatattatgcgtgatggtcactttcttaagacgagttgtggtagcccgaattatgcagcacctgaggtcatatctggtaaactatatgctggtcctgaagttgacgtctggagctgtggagttattctttatgctcttctttgtggcactctcccatttgacgatgagaatattccaaaccttttcaagaaaataaagggtggaatatatacccttcctagtcatttgtcaccttcagcgagggacttgattcccagaatgctggttgttgatccaatgaaaaggattacaatacgtgaaatccgtgaacatgtgtggttcaagatccgacttccgcgctatttggctgtgccgcctccagacactgctcaacaagttaaaaaggtcgacgaggaaactcttaatgatgttattaagatgggttttgacaagaatcagctaattgaatctctgcaaaacagattgcagaatgaggcaacagttgcctattatttactcttggacaataggcttcgtacaaccagtggttatcttggatctgagtttcaagaatctatggactcatctttgtctcaagtaatcgctgaaacaccaacttcagcaactgaacttcgtcagcatgggttttcagaatctccaggttctggcttgaggcagcattttgcagctgaaaggaaatgggcccttggtcttcagtctcgagcacatccacgagaaataataagtgaagtgcttaaagctctgcaagaactgaatgtttactggaaaaagattggacactacaacatgaaatgcagatggagtcctggctgccttgagagtatgatgcataacagtgatagcttcagtgcggagtctgctataattgaaactgatgttttcatggagaaatcaaccccgacagtgaagtttgagattcagctttacaaaacgagggatgagaagtaccttcttgacctgcaaagggtcagtggatcacatcttctctttctggacttgtgttccgcctttctaactcagctgagagttctttgagcctgacatgattggcttcccaagcactccttgatgcacccagtggagtttcaagttacatttgagatgtacataatgaccatatataatcctccagtagattatattttctggagcatgtaatgtagacgttagaggcttgtcctggtttgccaagatggttgttacctaaggtcctaacaagaggccgcaggcgagcccagtccaattagatgatgtgaaaaatttttggcctttttttagtctttggacatgttatcaaattaaggaggtcgtgctagcacgatacccaaactaagaaataccccattgaaaactgaaaacaaagcttgctcgttcatactagtgtcaactctggcactaaagactggtgcttattttactccatagacagtaattagatgtcacattcacgtcacgtgcatattcatcacaactgttttaggtattatggattgcatacgttttcttttggatccttcgttctggtggggtgcactcttgttcgtttgtttttaatctatac

SEQ ID NO: 205373 - DNA, 2279 bp, Zea Mays
ccttgccctttttggacttcacatcaggtatgggatacccggtaacaatcttgctgcaacagttttgaagtccacgatgattacatttcagatatgacctatgtggctgactcaaatcagatactggccacaagcggggatgaaactttgtctatgaacaccctgcggaggaataaagtaaggtcacaatctgaattttcagaagatgagttggtatcctcggtgctaatgaaggtacacgatggagggagcgggaagagatgccaaccctttgagcggttacagaattggcaaaaccctgggaattgggtcgttcggtaaagtgaagatcgcggaacatatattgactggtcataaggtggcgatcaagattctcaatcgcaagaagatcagaagcatggatatggaagagaaagttaagagagaaatcaagatactgagattatttatgcatcctcatatcatacgcctttatgaggtgatagatacacctgctgatatctgtgttgttatggagtatgttaaatctggagagttgtttgattacatcgttgagaagggaaggctacacgaagaggaagcccgacacttttttcagcagatcatatctggtgttgaatattgccataggaacatggttgctcaccgtgatttaaagccagagaatcttcttttggattcaaaatgcaatgttaagattgccgattttggcttaagtaatattatgcgtgatggtcactttcttaagacgagttgtggtagcccgaattatgcagcacctgaggtcatatctggtaaactatatgctggtcctgaagttgacgtctggagctgtggagttattctttatgctcttctttgtggcactctcccatttgacgatgagaatattccaaaccttttcaagaaaataaagggtggaatatatacccttcctagtcatttgtcaccttcagcgagggacttgattcccagaatgctggttgttgatccaatgaaaaggattacaatacgtgaaatccgtgaacatgtgtggttcaagatccgacttccgcgctatttggctgtgccgcctccagacactgctcaacaagttaaaaaggtcgacgaggaaactcttaatgatgttattaagatgggttttgacaagaatcagctaattgaatctctgcaaaacagattgcagaatgaggcaacagttgcctattatttactcttggacaataggcttcgtacaaccagtggttatcttggatctgagtttcaagaatctatggactcatctttgtctcaagtaatcgctgaaacaccaacttcagcaactgaacttcgtcagcatgggttttcagaatctccaggttctggcttgaggcagcattttgcagctgaaaggaaatgggcccttggtcttcagtctcgagcacatccacgagaaataataagtgaagtgcttaaagctctgcaagaactgaatgtttactggaaaaagattggacactacaacatgaaatgcagatggagtcctggctgccttgagagtatgatgcataacagtgatagcttcagtgcggagtctgctataattgaaactgatgttttcatggagaaatcaaccccgacagtgaagtttgagattcagctttacaaaacgagggatgagaagtaccttcttgacctgcaaagggtcagtggatcacatcttctctttctggacttgtgttccgcctttctaactcagctgagagttctttgagcctgacatgattggcttcccaagcactccttgatgcacccagtggagtttcaagttacatttgagatgtacataatgaccatatataatcctccagtagattatattttctggagcatgtaatgtagacgttagaggcttgtcctggtttgccaagatggttgttacctaaggtcctaacaagaggccgcaggcgagcccagtccaattagatgatgtgaaaaatttttggcctttttttagtctttggacatgttatcaaattaaggaggtcgtgctagcacgatacccaaactaagaaataccccattgaaaactgaaaacaaagcttgctcgttcatactagtgtcaactctggcactaaagactggtgcttattttactccatagacagtaattagatgtcacattcacgtcacgtgcatattcatcacaactgttttaggtattatggattgcatacgttttcttttggatccttcgttctggtggggtgcactcttgttcgtttgtttttaatctatac

SEQ ID NO: 205374 - DNA, 2142 bp, Zea Mays
ccgaaaacgccaaaccgtccctctccggcgtcccgtcccgtccgtccaggagcggcggacacgataacacggcgccctcgaggcgcccgctgtcgcggtacacgatggagggagcgggaagagatgccaaccctttgagcggttacagaattggcaaaaccctgggaattgggtcgttcggtaaagtgaagatcgcggaacatatattgactggtcataaggtggcgatcaagattctcaatcgcaagaagatcagaagcatggatatggaagagaaagttaagagagaaatcaagatactgagattatttatgcatcctcatatcatacgcctttatgaggtgatagatacacctgctgatatctgtgttgttatggagtatgttaaatctggagagttgtttgattacatcgttgagaagggaaggctacacgaagaggaagcccgacacttttttcagcagatcatatctggtgttgaatattgccataggaacatggttgctcaccgtgatttaaagccagagaatcttcttttggattcaaaatgcaatgttaagattgccgattttggcttaagtaatattatgcgtgatggtcactttcttaagacgagttgtggtagcccgaattatgcagcacctgaggtcatatctggtaaactatatgctggtcctgaagttgacgtctggagctgtggagttattctttatgctcttctttgtggcactctcccatttgacgatgagaatattccaaaccttttcaagaaaataaagggtggaatatatacccttcctagtcatttgtcaccttcagcgagggacttgattcccagaatgctggttgttgatccaatgaaaaggattacaatacgtgaaatccgtgaacatgtgtggttcaagatccgacttccgcgctatttggctgtgccgcctccagacactgctcaacaagttaaaaaggtcgacgaggaaactcttaatgatgttattaagatgggttttgacaagaatcagctaattgaatctctgcaaaacagattgcagaatgaggcaacagttgcctattatttactcttggacaataggcttcgtacaaccagtggttatcttggatctgagtttcaagaatctatggactcatctttgtctcaagtaatcgctgaaacaccaacttcagcaactgaacttcgtcagcatgggttttcagaatctccaggttctggcttgaggcagcattttgcagctgaaaggaaatgggcccttggtcttcagtctcgagcacatccacgagaaataataagtgaagtgcttaaagctctgcaagaactgaatgtttactggaaaaagattggacactacaacatgaaatgcagatggagtcctggctgccttgagagtatgatgcataacagtgatagcttcagtgcggagtctgctataattgaaactgatgttttcatggagaaatcaaccccgacagtgaagtttgagattcagctttacaaaacgagggatgagaagtaccttcttgacctgcaaagggtcagtggatcacatcttctctttctggacttgtgttccgcctttctaactcagctgagagttctttgagcctgacatgattggcttcccaagcactccttgatgcacccagtggagtttcaagttacatttgagatgtacataatgaccatatataatcctccagtagattatattttctggagcatgtaatgtagacgttagaggcttgtcctggtttgccaagatggttgttacctaaggtcctaacaagaggccgcaggcgagcccagtccaattagatgatgtgaaaaatttttggcctttttttagtctttggacatgttatcaaattaaggaggtcgtgctagcacgatacccaaactaagaaataccccattgaaaactgaaaacaaagcttgctcgttcatactagtgtcaactctggcactaaagactggtgcttattttactccatagacagtaattagatgtcacattcacgtcacgtgcatattcatcacaactgttttaggtattatggattgcatacgttttcttttggatccttcgttctggtggggtgcactcttgttcgtttgtttttaatctatac

SEQ ID NO: 205375 - DNA, 2072 bp, Zea Mays
gtcgaaccttgtaatttcgttgctgaagtacacgatggagggagcgggaagagatgccaaccctttgagcggttacagaattggcaaaaccctgggaattgggtcgttcggtaaagtgaagatcgcggaacatatattgactggtcataaggtggcgatcaagattctcaatcgcaagaagatcagaagcatggatatggaagagaaagttaagagagaaatcaagatactgagattatttatgcatcctcatatcatacgcctttatgaggtgatagatacacctgctgatatctgtgttgttatggagtatgttaaatctggagagttgtttgattacatcgttgagaagggaaggctacacgaagaggaagcccgacacttttttcagcagatcatatctggtgttgaatattgccataggaacatggttgctcaccgtgatttaaagccagagaatcttcttttggattcaaaatgcaatgttaagattgccgattttggcttaagtaatattatgcgtgatggtcactttcttaagacgagttgtggtagcccgaattatgcagcacctgaggtcatatctggtaaactatatgctggtcctgaagttgacgtctggagctgtggagttattctttatgctcttctttgtggcactctcccatttgacgatgagaatattccaaaccttttcaagaaaataaagggtggaatatatacccttcctagtcatttgtcaccttcagcgagggacttgattcccagaatgctggttgttgatccaatgaaaaggattacaatacgtgaaatccgtgaacatgtgtggttcaagatccgacttccgcgctatttggctgtgccgcctccagacactgctcaacaagttaaaaaggtcgacgaggaaactcttaatgatgttattaagatgggttttgacaagaatcagctaattgaatctctgcaaaacagattgcagaatgaggcaacagttgcctattatttactcttggacaataggcttcgtacaaccagtggttatcttggatctgagtttcaagaatctatggactcatctttgtctcaagtaatcgctgaaacaccaacttcagcaactgaacttcgtcagcatgggttttcagaatctccaggttctggcttgaggcagcattttgcagctgaaaggaaatgggcccttggtcttcagtctcgagcacatccacgagaaataataagtgaagtgcttaaagctctgcaagaactgaatgtttactggaaaaagattggacactacaacatgaaatgcagatggagtcctggctgccttgagagtatgatgcataacagtgatagcttcagtgcggagtctgctataattgaaactgatgttttcatggagaaatcaaccccgacagtgaagtttgagattcagctttacaaaacgagggatgagaagtaccttcttgacctgcaaagggtcagtggatcacatcttctctttctggacttgtgttccgcctttctaactcagctgagagttctttgagcctgacatgattggcttcccaagcactccttgatgcacccagtggagtttcaagttacatttgagatgtacataatgaccatatataatcctccagtagattatattttctggagcatgtaatgtagacgttagaggcttgtcctggtttgccaagatggttgttacctaaggtcctaacaagaggccgcaggcgagcccagtccaattagatgatgtgaaaaatttttggcctttttttagtctttggacatgttatcaaattaaggaggtcgtgctagcacgatacccaaactaagaaataccccattgaaaactgaaaacaaagcttgctcgttcatactagtgtcaactctggcactaaagactggtgcttattttactccatagacagtaattagatgtcacattcacgtcacgtgcatattcatcacaactgttttaggtattatggattgcatacgttttcttttggatccttcgttctggtggggtgcactcttgttcgtttgtttttaatctatac

SEQ ID NO: 205376 - DNA, 744 bp, Zea Mays
ctacagagttctgcctgctctagtgtcactacgaagataatcttaaatgtggaacccagacgcaatcgtcttcaactcctggcagcattacggcactcccagttactggatgcagacgcttttccgcgagtctagtggtgctatgttccatccaacgacaatcagctccagctactcaggttcacttgcagcgtctgcgattacctggcaggactccgagaacagcttcctaagagtaaaggtcataaacttcgggtcagatgctgtgaccctgacaatctccacaagtgggctccaggccagtatcaacgctctgggatcaaccgccactgttctcacatcagcagatgtgatggatgaaaactccttcagcaacccaaccaaggttgtgccggtaaagagcgatctgagcaatgctgcagagcagatgcaggtcacgctggctcctcgctccttcagctcgttcgatctcgccctggctcagtccaagcttgtagcggagatgtgagctaggctggtacactagtatacaatacaacgtgtgaagtgtggtacacaaataccagcaaccacaggggttgccaagctgttgttagcatcttgaacacatggctttgtattgtgtataatgacatgatgctgatactaatctctattatataaagcactagtttctatgttgtcgtgctcccacgtatttaaatgataaaaaagctaaaattatacacaaatggatattcaaac

SEQ ID NO: 205377 - DNA, 1750 bp, Zea Mays
ttcaggttctgatattagccatgtttaagaacatagaagaaggaaaggtctacaatcttgttatgtttgttaagtcaccagaaacaactgacttgacagtttcactaacaagctctaacgggttgcaaaatctggcttcagctacagtaacagtttccggcgaatcaaactggataaaagtggagcaaaagttggttgctaaaggaaccaatagaacctcaaggcttcaaataacaactaacaagaaaggagttgtctggtttgatcaagtatcactcatgcctgaagacacatacaagggacatggctttcgcacagaacttatatccatgattttggatttaaaaccacgattcttgagatttcctggaggctgctttgtagaaggtggctggttaagaaatgcctttaggtggagagaatctattggtccatgggaagagagacctggacacttcggggatgtttggcattactggactgatgatggccttggatactatgaatttcttcagcttgcggaggacctgggtactgaaccaatctgggtattcaacaatggagtcagccacaatgatgaagttgatactgttgctattgctccttttgtaaaggatgtattggacagtatagaatttgcaagggggagtgcaaattcaacatggggctctgttagggctgcaatgggccaccctgaaccattcccagtgaaatatgttgcaataggaaatgaagattgtgggaaaaaattttaccgcggtaactacctcaagttctacaatgctataagacaggcctatccagacattcaaatgatttcaaactgcgatggttcatctacaccacttgatcatcctgctgatttatacgacttccatgtctataatgattctaagactttgttcaacatgaagagcacatttgacagaacatctcgtagtggacccaaggcttttgtaagtgagtacgctgtttggagaggtgatgcaggtagaggaagtcttcttgcttcattggcagaagctgctttccttactggactggagaagaataggtggaacccagacgcaatcgtcttcaactcctggcagcattacggcactcccagttactggatgcagacgcttttccgcgagtctagtggtgctatgttccatccaacgacaatcagctccagctactcaggttcacttgcagcgtctgcgattacctggcaggactccgagaacagcttcctaagagtaaaggtcataaacttcgggtcagatgctgtgaccctgacaatctccacaagtgggctccaggccagtatcaacgctctgggatcaaccgccactgttctcacatcagcagatgtgatggatgaaaactccttcagcaacccaaccaaggttgtgccggtaaagagcgatctgagcaatgctgcagagcagatgcaggtcacgctggctcctcgctccttcagctcgttcgatctcgccctggctcagtccaagcttgtagcggagatgtgagctaggctggtacactagtatacaatacaacgtgtgaagtgtggtacacaaataccagcaaccacaggggttgccaagctgttgttagcatcttgaacacatggctttgtattgtgtataatgacatgatgctgatactaatctctattatataaagcactagtttctatgttgtcgtgctcccacgtatttaaatgataaaaaagctaaaattatacacaaatggatattcaaac

SEQ ID NO: 205378 - DNA, 2362 bp, Zea Mays
atcctgccttcggaagccactgctaaccgctttctctgcccttctctacctacataagcgcgagggagcacgcctcccggcctctcctcatccaattcctatgccctgcacccgcagacggggagctcgcgtcttccttcggatggtggatgcatgcatgcatgacacgccggcccaaccagaattgacaagtggaagcgtatgggtattaccagcaacgacgcggcccctcgtgccgtcctcctccgcttcttgtttctgctctgcataggctgcaaatgcctggcatcagaggtagaggccacccagacggcgaccctcgcggtggacgcctcgccgcagcttgctcggaagatccctgatacactgttcgggatcttctttgagggtttgaagctggaggcctccatactccatcaaacattgacccatggtccatcattggagacgactcctctgtatttgtggagaccgatcgcacatcatgtttcagtcgaaacatcgttgctctcaggatggaggtcctttgcgataactgtcctactggtggtgttggtgtttacaacccagggttctggggcatgaacatagaagaaggaaaggtctacaatcttgttatgtttgttaagtcaccagaaacaactgacttgacagtttcactaacaagctctaacgggttgcaaaatctggcttcagctacagtaacagtttccggcgaatcaaactggataaaagtggagcaaaagttggttgctaaaggaaccaatagaacctcaaggcttcaaataacaactaacaagaaaggagttgtctggtttgatcaagtatcactcatgcctgaagacacatacaagggacatggctttcgcacagaacttatatccatgattttggatttaaaaccacgattcttgagatttcctggaggctgctttgtagaaggtggctggttaagaaatgcctttaggtggagagaatctattggtccatgggaagagagacctggacacttcggggatgtttggcattactggactgatgatggccttggatactatgaatttcttcagcttgcggaggacctgggtactgaaccaatctgggtattcaacaatggagtcagccacaatgatgaagttgatactgttgctattgctccttttgtaaaggatgtattggacagtatagaatttgcaagggggagtgcaaattcaacatggggctctgttagggctgcaatgggccaccctgaaccattcccagtgaaatatgttgcaataggaaatgaagattgtgggaaaaaattttaccgcggtaactacctcaagttctacaatgctataagacaggcctatccagacattcaaatgatttcaaactgcgatggttcatctacaccacttgatcatcctgctgatttatacgacttccatgtctataatgattctaagactttgttcaacatgaagagcacatttgacagaacatctcgtagtggacccaaggcttttgtaagtgagtacgctgtttggagaggtgatgcaggtagaggaagtcttcttgcttcattggcagaagctgctttccttactggactggagaagaatagtgacattgtttccatggcaagttacgcgccactattcgtaaacgacaatgaccagacgtggaacccagacgcaatcgtcttcaactcctggcagcattacggcactcccagttactggatgcagacgcttttccgcgagtctagtggtgctatgttccatccaacgacaatcagctccagctactcaggttcacttgcagcgtctgcgattacctggcaggactccgagaacagcttcctaagagtaaaggtcataaacttcgggtcagatgctgtgaccctgacaatctccacaagtgggctccaggccagtatcaacgctctgggatcaaccgccactgttctcacatcagcagatgtgatggatgaaaactccttcagcaacccaaccaaggttgtgccggtaaagagcgatctgagcaatgctgcagagcagatgcaggtcacgctggctcctcgctccttcagctcgttcgatctcgccctggctcagtccaagcttgtagcggagatgtgagctaggctggtacactagtatacaatacaacgtgtgaagtgtggtacacaaataccagcaaccacaggggttgccaagctgttgttagcatcttgaacacatggctttgtattgtgtataatgacatgatgctgatactaatctctattatataaagcactagtttctatgttgtcgtgctcccacgtatttaaatgataaaaaagctaaaattatacacaaatggatattcaaac

SEQ ID NO: 205379 - DNA, 2091 bp, Zea Mays
cgtccacaatcttttggtgcacggttctgcccatccgccatcaacgcggacgcgcccgtcaaggaaggttgtcgcgtcatagatccccatcctccttcctccccatctgctccccgccatcaacgctctccatggaagtcgagtccgcgatgctcgcgtcgtccctaaaccccgccccgactctctccgcgtccgcgacaacccgatttccagcgtcctccaccccgaatcgccgccccggctctctccatggaaggcgcgtctgcgacagcccgatctccgtggaaggcgtgtcctcctccccagatcgtcgtcccggctctctccacgcccgtgacagcctgctctctatggaaggtgagtctgcgatgctcacgtggattgggtaccccgcccccgctctctccatggaaggcgtgtctccgatagccgcatcctcccttgcgaaccgcgtgcgtcatggcaacacgggcgaggcggtggggagtctggtggacgcgcatcacggtgagacgaacgggggcaagggcaagggatatattttccatccggggcggatgtggagaggttcttcaaactctgtgaccctggtgagtgcgctcgatctctggtcttccgtggtttttctgcttgggtttcgttgctttggtgggggattggatcattggaagctaaatttggagaaatctcccttttctctgtctcctctaccctcactcgacatgcttcagattcgattattggtggccttacagctttcgttaatgctctgcttgtgcttgattgtagctgttcgaatttggtgagagattggaccccgtgatgacagttttatgttggttggaactgtggaaccagtggctgacatataattttttttgctattaggttgttacttgttagcgctatggggttgctatcaatcttgtattgacagcttgcttgcagaaaatcactagatatttttggctgatcggcgccgtggaatttcgattgtgtactgggtgcttggtttctatatgactaggcagtttgctcttccatctatcgcacagcgccacatcttggctggtctggcatcagcagttgacggtctgagtgcaccatatgaaagagcatcatgtattcatgaaagacatgtagtgaactggctgtgggctgcaggctgtcatccgtttggaccattctcgaactcctcccagatcagtcaaattctttaggatgtagcactgagaactacaatttatgctcaagtcaatgctgctcttcgcaaaataagagacacatcagagtttgtccaatcttttgcatcagagcatcttaagacgccattagaagaacttgtgaaaggtaataaaaacaagtccaccactgagttatgggtagagaaattctataagaaggtaaccaatctaccggagccttttccccatgatcttgttgagaagttagaagaatacctggataaacttgaagggcaacccgtggacttgtcttccttattgtatgaccaccagctgatcgatgcatatcaaaacagtaccgacatcctgcaaagcactatttttacacaacagtatgtggaacgtgttctagctaacgagagagacaagatgaaatgctgtagcattgaatatagtcatccaaagcagtcatcccaggcttttgtctatggagggatccttctggctggatttattgtgtattcactgatcaatgcttgttgcaacatcatagtgcacctgatggggaatccaacatgtttcacgtgacatgtaggggaaggcatcgaaaaaggtgaaggttgtagaaaagggccctaaaaagggcacgatgaaagcccaacttgctaagagaggtaggaaggctaagaattgatgacatgttgatttcctcgtcagagaaaaaaatgctatagcaacaaagatgagaattcttcaacgcattagccatcgttgtgaggcgcatcatcaattcaacatcatgtagtgctggttttagagagaaaggcaacatgtaaagctataaatgttgtgtactctacgagtgttcagctttggatcattgaaaagatcaagatgttgaactaaa

SEQ ID NO: 205380 - DNA, 3534 bp, Zea Mays
ctccccgaagcagtttagatatcttcctcccaaccttccctgccaaatcgcggtcactgctccgaagtccgaaccttcatacacatcgtctcgtttccgatttccccaaattcaggccacaggcgctacaggacccaggcaccactcggtcggcggccaccgcgtcgccccgcctgctcgattggggtcgcgtgtgcgataggaagttcgtcatacgcctcgcggtttttctagtttccgttttgatttctatgcgcccaatgttttgtccgattgattgatctgcttaggtacgtgagactgtctctattgttcgtgagtgcgtagatggtgggtgagtctggttgtttagatttgtgactggttgctcgacttgattgtgctgactgattgtttcatctatcgtgtaagctgtattaatgtctaatcccttaattgctttgaaaccactgcatgtgcttgattagtttggtttgtaccgacagcttttggtgcctatttgtgatgagattgaacatcctgctgcttgtgtttaatcttctaggttcgtgttcttgctgtatgcgtggttaatggttgactagtacttctctgatgctgaggatgattgctattgattgactagaatttaacatttccctgtggggaagtaatctcctatgttctgtcgaaagcagcacactctggcaactgtattgctgcatatattttccgtcaaaaaaatatttgctaaacatgaaaaccacacttattttgccttttcatctctccttgtggcacaatactatggcccagttttgaacctatggcccaacactcttagctaataactcaactaattgttaactaactcgcagctaacaattagttcattagctgcctcaatccagctaacaatttgttagctggctaactattagatttaggggttccaaacatgactgtatcaattgacttcctctgttggccgacctttgcatatatcatcaatgagcagaaaaaaaacaggttttgtttttgctaaattaaggagaagtatcgctcgaatttagcatcgtaatgggggaacacatcatcttctcgatgaattccgctatatgccccagctatacccagatgagaacaggaagggacagtttgtggactacttgcaggctattgatttatgtattctttggtaaagaatcgggaagggcatttttcttatgcaggttgcataaccactggtgatatgagatgatctctattcgcttggaaagtagagataggttaaatttcggtctgaacggtgaaaccttaaataaaatcttaggatgctgtgtgagagaagcatgctggctccctcaaaggtatgtttgattgaagaatcaacggattgaaaatctcttatggatagaagtgcttattaactaaagattttgaagaagaagctgctgtctgctggaggtaggcttccttgaaatctaacgtcttaatgaacctttaagatcataacaacgtgcacgagtggtacatgctaacacgtcgaaacccttgtcacgaaagaatcatgtttctttcttccttccatttcctggcatttgatgctatgatgtgttcctcttgccagagaatggtgtggacaacgcggtaaatttggtgcagatggatggtgtgttcaaattgatcggagttctctggatggatacctatcgagtagtataattcctctctcagctcactgtccagacaattagtgctatctgtgactgttgggcaatcaggttatcgagattttgctggttggagctgtccggcattgctttcatcttttatcaatatgccggtctttggcagcatatggcgattcagaactgtattgtgttgtgtttgcaacgtgatagcttgtactgggaacaaaggtcaagatgggcgccttggacctacaccttgactttgcttctgctcaacatggacaagccaagttaaaggaatatgccaagagctctttgttgtctgatggaaactacaatacagacaagatcaatggttcaaaccctgatgactatgagaaatttgagaaagggataatgcactatgggtgtccacattatagaaggagatgccgcataagagctccttgctgcaatgaaatttttgattgccgacactgccacaatgaaactaagaattccattaaaattgataaaatgaagaggcatgaacttccacgccatgaagtgcagcaggttgtatgctcattgtgtggcactgaacaggaggtgcgacaagtatgtatcaattgcggtgtttgcatggggaaatacttctgtggtttgtgcaaactcttcgacgatgatgtctctaaacagcagtatcactgcaacggatgtggaatataatcggagggagggagaatttcttccactgttcaaaatgtggatgttgctattcaattgcgctgaagaatagtcatgcatgtgttgaaggggcgatgcatcatgactgtccaatctgcttcgagtacttgttcgattcgacaaatgatgtttccgtcctgccttgtggtcataccattcatgtaaagtgcctgaaagaaatggaagagcactgccagtttgcatgccccctttgctccaagtcggtttgtgacatgtcgaaggcatgggaaaggctcgacatggagctggcaactctgtctgactcctgtgatcacaaaatggtccgcatattatgcaacgactgcggggcaatatcagatgtgcagttccatttgattgcgcacaagtgccagaattgcaagtcatacaacacccgccagatttgaagtaagaatcgcaagtcacacaacaccgtcagatctgaaatagcaaatcctgtgggggtttctgcatttcttcaagaagcgtgatggactgatggccccttcccgtgagctgctgagcaccgggatatctggcaagacactcatcactgtatccactccactgggtcctgcggaggcaaacagctcgagattgtatatctgctgctagctgccgcccttcgttatgcataagcctactcttgccgttttactcctgtcgctccgtgattctagtgtaataatgtcatatttactgttgcttcaagtatggcccgtacggctgcggttgaacggcggcggcggctgctgagccacagtaccttgctgttgctgagactgcacccagccacagtgcgccgccgccgccgcagcttgtagctggacttgatttatgaaggtgccggaagagttcttggttgcgggtagctattaaggccatctcgagtagatgtcctattacatcccttatttcatcctctatttcaaactttatataaatagtattaaatatctcatctacactgccctatctcctgatcttttaagacagtctttagttaggaaaatgtgaacggtgtgcacatgtggttgtacgtcaaatccggatcccattttctatgcttaattatagtgttgtgttcccaagttgtgatttactcccaccgggcatagaagtacccatatagaag

SEQ ID NO: 205381 - DNA, 1884 bp, Zea Mays
ctccccgaagcagtttagatatcttcctcccaaccttccctgccaaatcgcggtcactgctccgaagtccgaaccttcatacacatcgtctcgtttccgatttccccaaattcaggccacaggcgctacaggacccaggcaccactcggtcggcggccaccgcgtcgccccgcctgctcgattggggtcgcgtgtgcgataggaagtattgtgttgtgtttgcaacgtgatagcttgtactgggaacaaaggtcaagatgggcgccttggacctacaccttgactttgcttctgctcaacatggacaagccaagttaaaggaatatgccaagagctctttgttgtctgatggaaactacaatacagacaagatcaatggttcaaaccctgatgactatgagaaatttgagaaagggataatgcactatgggtgtccacattatagaaggagatgccgcataagagctccttgctgcaatgaaatttttgattgccgacactgccacaatgaaactaagaattccattaaaattgataaaatgaagaggcatgaacttccacgccatgaagtgcagcaggttgtatgctcattgtgtggcactgaacaggaggtgcgacaagtatgtatcaattgcggtgtttgcatggggaaatacttctgtggtttgtgcaaactcttcgacgatgatgtctctaaacagcagtatcactgcaacggatgtggaatataatcggagggagggagaatttcttccactgttcaaaatgtggatgttgctattcaattgcgctgaagaatagtcatgcatgtgttgaaggggcgatgcatcatgactgtccaatctgcttcgagtacttgttcgattcgacaaatgatgtttccgtcctgccttgtggtcataccattcatgtaaagtgcctgaaagaaatggaagagcactgccagtttgcatgccccctttgctccaagtcggtttgtgacatgtcgaaggcatgggaaaggctcgacatggagctggcaactctgtctgactcctgtgatcacaaaatggtccgcatattatgcaacgactgcggggcaatatcagatgtgcagttccatttgattgcgcacaagtgccagaattgcaagtcatacaacacccgccagatttgaagtaagaatcgcaagtcacacaacaccgtcagatctgaaatagcaaatcctgtgggggtttctgcatttcttcaagaagcgtgatggactgatggccccttcccgtgagctgctgagcaccgggatatctggcaagacactcatcactgtatccactccactgggtcctgcggaggcaaacagctcgagattgtatatctgctgctagctgccgcccttcgttatgcataagcctactcttgccgttttactcctgtcgctccgtgattctagtgtaataatgtcatatttactgttgcttcaagtatggcccgtacggctgcggttgaacggcggcggcggctgctgagccacagtaccttgctgttgctgagactgcacccagccacagtgcgccgccgccgccgcagcttgtagctggacttgatttatgaaggtgccggaagagttcttggttgcgggtagctattaaggccatctcgagtagatgtcctattacatcccttatttcatcctctatttcaaactttatataaatagtattaaatatctcatctacactgccctatctcctgatcttttaagacagtctttagttaggaaaatgtgaacggtgtgcacatgtggttgtacgtcaaatccggatcccattttctatgcttaattatagtgttgtgttcccaagttgtgatttactcccaccgggcatagaagtacccatatagaag

SEQ ID NO: 205382 - DNA, 1900 bp, Zea Mays
cccgaatcctccagaaaccgtgtgctccccgaagcagtttagatatcttcctcccaaccttccctgccaaatcgcggtcactgctccgaagtccgaaccttcatacacatcgtctcgtttccgatttccccaaattcaggccacaggcgctacaggacccaggcaccactcggtcggcggccaccgcgtcgccccgcctgctcgattggggtcgcgtgtattgtgttgtgtttgcaacgtgatagcttgtactgggaacaaaggtcaagatgggcgccttggacctacaccttgactttgcttctgctcaacatggacaagccaagttaaaggaatatgccaagagctctttgttgtctgatggaaactacaatacagacaagatcaatggttcaaaccctgatgactatgagaaatttgagaaagggataatgcactatgggtgtccacattatagaaggagatgccgcataagagctccttgctgcaatgaaatttttgattgccgacactgccacaatgaaactaagaattccattaaaattgataaaatgaagaggcatgaacttccacgccatgaagtgcagcaggttgtatgctcattgtgtggcactgaacaggaggtgcgacaagtatgtatcaattgcggtgtttgcatggggaaatacttctgtggtttgtgcaaactcttcgacgatgatgtctctaaacagcagtatcactgcaacggatgtggaatatgtagaatcggagggagggagaatttcttccactgttcaaaatgtggatgttgctattcaattgcgctgaagaatagtcatgcatgtgttgaaggggcgatgcatcatgactgtccaatctgcttcgagtacttgttcgattcgacaaatgatgtttccgtcctgccttgtggtcataccattcatgtaaagtgcctgaaagaaatggaagagcactgccagtttgcatgccccctttgctccaagtcggtttgtgacatgtcgaaggcatgggaaaggctcgacatggagctggcaactctgtctgactcctgtgatcacaaaatggtccgcatattatgcaacgactgcggggcaatatcagatgtgcagttccatttgattgcgcacaagtgccagaattgcaagtcatacaacacccgccagatttgaagtaagaatcgcaagtcacacaacaccgtcagatctgaaatagcaaatcctgtgggggtttctgcatttcttcaagaagcgtgatggactgatggccccttcccgtgagctgctgagcaccgggatatctggcaagacactcatcactgtatccactccactgggtcctgcggaggcaaacagctcgagattgtatatctgctgctagctgccgcccttcgttatgcataagcctactcttgccgttttactcctgtcgctccgtgattctagtgtaataatgtcatatttactgttgcttcaagtatggcccgtacggctgcggttgaacggcggcggcggctgctgagccacagtaccttgctgttgctgagactgcacccagccacagtgcgccgccgccgccgcagcttgtagctggacttgatttatgaaggtgccggaagagttcttggttgcgggtagctattaaggccatctcgagtagatgtcctattacatcccttatttcatcctctatttcaaactttatataaatagtattaaatatctcatctacactgccctatctcctgatcttttaagacagtctttagttaggaaaatgtgaacggtgtgcacatgtggttgtacgtcaaatccggatcccattttctatgcttaattatagtgttgtgttcccaagttgtgatttactcccaccgggcatagaagtacccatatagaag

SEQ ID NO: 205383 - DNA, 1370 bp, Zea Mays
ccgcctcgccgctcgccaatggacacctccactagtccacttggcgccactccagcttcacgctgcccgcgtctgtgattcccattcataagagctggccacgcagcctcggagcaacagacccccgcccacgaccacacgcagcaagcagcagccgcgcgctcgcctaggactaccgactacgagcggccggcacatatggcagcgcagtccatgctcatgtcgaccagcgtcaacggcggccgcgcgctgccgtctcttcaggccgtccggccggctccatacccgcggctaccgctgccgtcgtcgtcgtcctcgtcagctggctacaggcactccaagtccgtctccgtgaagacgctcgccctgttcggcaaatccaaggtcaagaccgcgccggcgaagaaggctgctgcgcccaagcccaagccgaaggttgaggatggtatcttcggcacgtccggcgggatcggtttcaccaaggagaacgagctgttcgtcggccgcgttgccatgcttggctttgccgcatcgctacttggagaggccattaccgggaagggcatccttgcgcagctgaacctggagacgggcatccccatctacgaggcggagcccctcctcctgttcttcatcctcttcaccctccttggcgccatcggcgctctcggagaccgcggccgcttcgtcgacgaggaggtcaccggcctcgacaaggccgtcatccaacccggcaagggcttccgcggcgccctcggcctcagcgagggagggccgctgttcgggttcaccaagtcgaacgagctgttcgtggggcggatggcgcagctgggcgtggccttctccatcatcggcgagatcatcacggggaagggcgcgctggcgcagctcaacatcgagacgggggtgcccatcaacgagatagagccgctcgtcatcttcaacgtcctcttcttcttcatcgccgccatcaaccccggcaatggcaggttcatcatcggcgaggaagaggaataggctgctggctgctgctgctggcctcggacatgagtcgtgtgcgtttacttttacctgtgactgtgcgtctcggtgcgcgcgcgtaagtgctttgctgtgtatcaattactcgtgatgagacctcgaaggtagggtgtcgcgttgggttgtctgcttgtagaaacaagagcttatatataaattactactagctaatatgccatggttgcaacgagttctcctagactatataatcttgttgagttcgagagaccgtataaatcacactgattgaccttcggtactgagctgcatttctaagtggcgctctcttgtgtaactctactccgtttccgttctaacttttgcccccg

SEQ ID NO: 205384 - DNA, 3041 bp, Zea Mays
gctatttggctacgcgtgcaacaggcatatataatttcctgttcctccgcctcgtctccgcctcccatcgccgcatcagatatccgcacaaaccaagccatcagcgccatggcgatctccacctggagcgcgcgccttctcctcacccctgcttcctcccgcgccaccctatcaccccctcgccctcccactacaaacccgctctcatcgttctttcctcgcaatcgtctccatttcgtgcgcccgcgcccgcgcccgccgtgcgcctacatctctgcgccagcgccgggcccggaggccgcatacgcgccgccttctctcgacgccaccgccgcggcagccgatgtcgccgctgcgatatcctcctccgacgcggtcacttgggccggcgtctgggcgctgctctcgcgacacagggcccgcatcgcggtctgcatcgccgcgctcgtcgcctgcaccacctgcacgctctccatgccgctcttctcagggaggtttttcgagaccctgattgggagggggaacgagccattgtggaggctcttatccaagattgcgatactgtacacactggagcccatcttcaccatcatattcgtgatcaatataactatcatctgggagcaggttatggcaaggctgcggagccagatatttcgaaggattctgatccaaaagatgttattttttgatcgtcacaaggttggtgaattgaccggtttgttgacatctgatttgggttccttgaagagtgttgtaagtgataacatatccagagatcgtggactgagggcactctctgagatcattggtacactttgtatacttttcacactatcaactgagctagctccagttcttgggctccttatggtgtccgtctccgtgctagttgctattttcaagaggtcaactgttcccacttttaaatcttatggaatcgtgcaagcacgcatatcagactgtgcatcagagacattttcagctattcgtactgttcgatcatttggtggtgaaaaacgacaaatttctttgtttgacaatttggcacatgcttaccaaaataatggcacaaaacttggagtgctgaaatctgctaatgaatcattaactcgagtagtcgtctatgtctccctaatggcactttacattcttggcggtagaaaggtcaatgcgggcaaattatctgttggaaccatggtatcttttattggttacaccttcacattaacctttgctgttcaaggagctgttaatacccttggtgatctgcgtggcacattggcttccgtagagagaataaattctattctttcagcgaaggacattgatgattcacttgcatatggtttagccaaagaacttgatggcaaagagtttgatgattccaatggagtgtatgaaaatggatctgttaacaaacatttcatgtcagagctgaaatcatccagtagctgtagtaatctagcctggtctggtgacattcgtctgaaaggtcatattattattacatctggtctggtgacatttgtctttacatctagggtgcccttatatctaagcttatactatatttcaccttttgtatgctttatatattattactatatagcgtattgttccttagcttatgggtcatgattgaatatcctcgtaacttaaaattgtgtcattagctcatcttttctaaaatattgtttcaccttctttatctaaaaacatacttaagatgaaatatgttcacacatcaaatttgtgaatagtactggtaactcaccagtgtatcattacctcgatagaacattatttcttttgattgtttttgtaatgtcgatagaacatgcaacattcaacctctaatgcactaacataacattcttggatgacttcagttctacttgctcatgtagtcatgtgtttctgacagaagtccatttctcttatccattgagatctaatgtggagattttaaatggccttgaccttacaattgagtgtggaaaagtcacagcacttgtcgggcctagtggtgctgggaaaagcacagtggtacaacttctagcacggtattatgagccaactcaaggttccatcactgtcgcaggagaagacatccgtgtatttgacaaaagggaatggtctcgagtagtatctctagtcaatcaggatccggtcctattctccgtgtctgttggagaaaatattgcttatggtctcccagatgatgttgtctctaaggatgagataataaaagctgctaaagctgccaatgctcatgaattcatcatctctcttccacaggggtatgatactcttgttggagagcgaggtagtctcctaagtgggggacaaaggcagaggattgcaattgcacgagccctcttgaaaaatgctcctattctaatacttgatgaggctactagtgcactggacgcgacaagtgagcgactcgtgcaggaagctctcaatcacttgatgaagggaaggacttctctggtcattgctcacaggttgagtaccgtacagaatgcacatcgaattgctgtttgttcagagggcaggataactgaactggggacacaccgagaactggttgctaagggaggcagttatgcatcacttgtcgggacacagagacttgctttcgagtaatcacacgtcaactgcgaggaacggatcgactgcaatgtaggggattctatatattactctattttccttcagggcccatcggaacataggaattctcgtggaaatcagaatgaatttcatgggtaaaatatagaaaacagaagatgaaaaaaaacccaccttctgaatgtggccttggttataggttgtttcttatccacagaagcaacacatgaatcagaaaacacatgtatgtatcgaactttataatatattaacctaaacaaaggacaacaaacttcttatcctcacttgcattccttatttattagttctatgtttggttgtaatgatgggacagcatgggatggaacgatcccttagataaggctatttagagtgcgtttggt

SEQ ID NO: 205385 - DNA, 2584 bp, Zea Mays
ctcgtctccgcctcccatcgccgcatcagatatccgcacaaaccaagccatcagcgccatggcgatctccacctggagcgcgcgccttctcctcacccctgcttcctcccgcgccaccctatcaccccctcgccctcccactacaaacccgctctcatcgttctttcctcgcaatcgtctccatttcgtgcgcccgcgcccgcgcccgccgtgcgcctacatctctgcgccagcgccgggcccggaggccgcatacgcgccgccttctctcgacgccaccgccgcggcagccgatgtcgccgctgcgatatcctcctccgacgcggtcacttgggccggcgtctgggcgctgctctcgcgacacagggcccgcatcgcggtctgcatcgccgcgctcgtcgcctgcaccacctgcacgctctccatgccgctcttctcagggaggtttttcgagaccctgattgggagggggaacgagccattgtggaggctcttatccaagattgcgatactgtacacactggagcccatcttcaccatcatattcgtgatcaatataactatcatctgggagcaggttatggcaaggctgcggagccagatatttcgaaggattctgatccaaaagatgttattttttgatcgtcacaaggttggtgaattgaccggtttgttgacatctgatttgggttccttgaagagtgttgtaagtgataacatatccagagatcgtggactgagggcactctctgaggcaagaaattttacactatgagaatatcattggtacactttgtatacttttcacactatcaactgagctagctccagttcttgggctccttatggtgtccgtctccgtgctagttgctattttcaagaggtcaactgttcccacttttaaatcttatggaatcgtgcaagcacgcatatcagactgtgcatcagagacattttcagctattcgtactgttcgatcatttggtggtgaaaaacgacaaatttctttgtttgacaatttggcacatgcttaccaaaataatggcacaaaacttggagtgctgaaatctgctaatgaatcattaactcgagtagtcgtctatgtctccctaatggcactttacattcttggcggtagaaaggtcaatgcgggcaaattatctgttggaaccatggtatcttttattggttacaccttcacattaacctttgctgttcaaggagctgttaatacccttggtgatctgcgtggcacattggcttccgtagagagaataaattctattctttcagcgaaggacattgatgattcacttgcatatggtttagccaaagaacttgatggcaaagagtttgatgattccaatggagtgtatgaaaatggatctgttaacaaacatttcatgtcagagctgaaatcatccagtagctgtagtaatctagcctggtctggtgacattcgtctgaaagaagtccatttctcttatccattgagatctaatgtggagattttaaatggccttgaccttacaattgagtgtggaaaagtcacagcacttgtcgggcctagtggtgctgggaaaagcacagtggtacaacttctagcacggtattatgagccaactcaaggttccatcactgtcgcaggagaagacatccgtgtatttgacaaaagggaatggtctcgagtagtatctctagtcaatcaggatccggtcctattctccgtgtctgttggagaaaatattgcttatggtctcccagatgatgttgtctctaaggatgagataataaaagctgctaaagctgccaatgctcatgaattcatcatctctcttccacaggggtatgatactcttgttggagagcgaggtagtctcctaagtgggggacaaaggcagaggattgcaattgcacgagccctcttgaaaaatgctcctattctaatacttgatgaggctactagtgcactggacgcgacaagtgagcgactcgtgcaggaagctctcaatcacttgatgaagggaaggacttctctggtcattgctcacaggttgagtaccgtacagaatgcacatcgaattgctgtttgttcagagggcaggataactgaactggggacacaccgagaactggttgctaagggaggcagttatgcatcacttgtcgggacacagagacttgctttcgagtaatcacacgtcaactgcgaggaacggatcgactgcaatgtaggggattctatatattactctattttccttcagggcccatcggaacataggaattctcgtggaaatcagaatgaatttcatgggtaaaatatagaaaacagaagatgaaaaaaaacccaccttctgaatgtggccttggttataggttgtttcttatccacagaagcaacacatgaatcagaaaacacatgtatgtatcgaactttataatatattaacctaaacaaaggacaacaaacttcttatcctcacttgcattccttatttattagttctatgtttggttgtaatgatgggacagcatgggatggaacgatcccttagataaggctatttagagtgcgtttggt

SEQ ID NO: 205386 - DNA, 2614 bp, Zea Mays
ggctgtcaccacacgcgcccgccgacgccgaccaggctttggggatttggttgcttcctgtcggggtttgagaggagcggcgctcttgaattgttgctttcaattggtccgtttggcagggtttggcaatagaaagatttgttgccggagatgggcaagccgtcgctgaagaagaagagggcctccggcggcggcaagtccggcgaccacgggggcaagccggcgtcactggagcggtctggttccaaggtcctcgacggcgatgagaccctcttcacggacatggcgcaggagcacaaggaagagggcaataagctcttccagcgccgggactacgaccgcgcgctgctcaactacgacaaggccataaagcttctgccccgggcgcaccccgacgtcgcctacctccacagcaacatcgccgcctgctacatgcagatgagcccgcccgactactaccgagccatcaacgagtgcaacatcgcgctcgaagcgtcgcccaagtacaccaaggcgctgctcaagcgggcgcgctgcttcgaggctctgggcaggctcgacctcgcgtgcagggacgtcaacaaggtgctcgctctggagcccaacaaccttactgcgctggatgtatccgacaggatcaagaagactatggaggagaagggaatcgttctggacgacaaggagatcatgcccacgccggaggaggtggtggccgctgcacccaagcagaaaccgcgcaagaagaggggaggacggaagttcgctgccaaggctgcggctgctgctgtggaggaggtcgatgaacagaagattgcggaagctatcaaggaggaggtggaggagcagccaaggcaggtgaaactcgtgtttggggaggacataaggtgggctcaggtgccggcgagctgcagcatggcacagctgcgcgaggccgtccggagcaagtttcctggactgaaggctgttcttgtcaagtacaaggacaaggagggtgatcttgtgacaatcaccaaccaggatgagctgaaatgggctgaggagttggctgaggctgggagctcacttcggctgtatgttaccgaggctgatccggaacatgaaccttatgttgacgacaccaatatggagagaaatgtaaacagcaattcggataatggaagtattagaagcaataggcaggatgaggacaggagcactgtgacctgtattgatgattggattgtgcaattcgcccggcttttcaagaaccatgttgggattagctctgatgagtacctggacctccatgaggtcagtatgaagctctacactgaggcaatcgaggacactattactactgaggaagcccaggaggtgtttcatcttgctgagggaaactttcaggagatggcagcacttgcatttttccactggggtaatgttcacatgtcccgggccaggaagagattgttgctatcaggagattccccaagtgaattggtgcttgagcaggtgaaggaagcatatgaatgggcaagggacgaatacaataaggctggaacaagatatgaagatgccgtgaaggccaagccggacttttttgaaggtttccttgcactggcgcaccagcagtttgaacaagcaaaactgtcatggtactatgcaattggtagtaatgcagatttggacagctgttcttctgaaattctggagctcttcaataaagctgaggataatattgagaaaggtatagagatgtgggaggaaatggaagaacagcgtctgaagaatcgatctaaacctagccaggagaatattgtgctagagaagatgggcttggaggagtatatcaaggatgtatccactgatgatgcggctgaacaggcttccaatttaaggtctcagataaacattttatggggtatgctcctttatgaacgttcagttgtggaatttaaattaggtctcccaatgtgggaggattgtttgatggctgctattgaaaagttcaaacttgggggagcttctgccacagatattgctgtgctggtgaaaaaccactgtgccaatgaaactgctcaagatggtttgggcttcaagattgatgaaattgttcaagcctggaatgaaatgtatgacattaaacggtggctgcgtggtgttccatcatttcgccttgagccattatttaggcgaagagttccacaattgcatactgcacttgaacatatatagtactcatgaagttgttctacatcatattggatttcaatgcttttttatcagtgacacttttctctttttttggtgagtacaataactgtatttttatcttgtaatagattagttttattcatacgacaagcactatgcactgtgatatttgttgatttttcctttacctgcccccttgcactttctaattaaatgtttgtgactatggaatggatcttttccattccatgtggtttgggggacaattgatgtgctttgctttgaagacagttgtagtggtcatctgattgtgaatttgtggtgcacaagttggctgtgtgttttttccaagaaaaatattttcttaacatagtccagcactaggattctcgagtccccgatccccagcacaaacttgctg

SEQ ID NO: 205387 - DNA, 3674 bp, Zea Mays
atggagatcactgacccacgggcctaccttacgcacagtttgcccgcaaagagaggagcggaggtgtatgaagccctgatggagatcactagcccacgtgcctaccttattcactgtttgcccgcagagagaggattggaggtgacagacggtgccatcgaggctcccaaatcaatcgtgttcccccaggccgagaacagaatgcacgctcagaaatagcataccatcttcaaacagcccggggaaattaccaattaacaggtagtatttgttcattgttgcgctcatattttagtgcctaatagatgcctaaggaaatgcctagatgctatgattttctcccagattctgagtttctgaatatttgtgctgcatttctaaatatttgagtttgcatacgtgctatgatttactcacagatgctagcaaagtatgtacatcagccatgcattctaattctcctactatgcgctcgaactcgctcctctaatctactgcaggggtgatattgttgaagtagatacatggattagtgctaatggtaaaaatggaatgcgtagacattggcatgtacatgattctataacaagccatacaatactaaaggtgacaaggttcaaatctacgtcgtgctcatatgtctatatctttaatcaattttattagcaatttaattctaccagctgccatgttacgtttgacacaacacttatagtttctctgctaaaaaacaacaaatcttctaggtgcaccaccggcaccctggatcattattgttattttttggtcatttattcgatatttggtgtcctcttgctcctattatcctataattcatctgcttgataatctctttttgtataatgatgttttattggcattgcaaggtttaccactgtctacaacacacaagtttggattatatcttgtgtctcataagcaatttggaaataaaaggaagtatacatttttgttatttaggtgactgatactatctatcactacaaagtagaaatcttggagttatacattttattagggagatgaagactatttatattagttttagatgcattcggtacccccttgtttttcggtgtcatgaatcatggccacatgagagagaaatacatgcacatccgcacatggaaaaaatgatacatgtgtgagtggatagttcatctatgagcataactaaattgaaccctgatgatcttaaccttagatggttatcgaaggatgacattggggatttggaccatcttcgcattggtgttgttattacatttttcatcatgttagaatttagtgtttaggaggatttatgggtggcgttttattaacaaaactgcaaatcttgtgttgcaaggatgaactcttgatttcagcgctctccagtatttactgattaggttatgaccagtagtattatttattgtgtagtgcagtacttctgacttttggtaatgtgagggtgtcggagagggaattcttcgaccgggtggcggagtgcacccgccctaaatcctaagatgaggagggggcttaagcgttttgcctgttggtagatgaacgatgaactcaggaacacgcgaggatttagagtggttcgggccgccggagcttaataccctactccactgtatgttggattgctgtgaaagcttgagagctgagagtctaagtctaagttcggtctaactgtgtctgagtctgtccctttgtaatgttgcatgcctccccttttatagctaaagaggggcgtacaagggtgctgagccccgacatgtgggcccaggaatataatggatgtaatatttggagttggtggagcaatcttcttgcaccctgacatccgcgatctgcgtggtattggcgtgcagggaaagcttccctggcaacgcataagtgatgatggacacagtgcatcttgcagcacgggcgtactgtttggcaatggactggacaggcacgccgcctgcaggatggcctggatgccgcctgccagctgagtggacaggtcacaataaatgctgaggcggcacatcgcctgtcagcagggtggacaggcggcgcatcctctccacaataaatgcagagatcgtgcggcctagaggccttacgtcaggctccgcccgctggcttacgtcacgggcaacaagccatgtggcagcatcgggtctccgcctgagcggggagcgcaagcgcacaggataaagcctggacacgtgtcagtaccggacccttgcttaggctagggtatcccctgtctcgggacctcgttatgggtggcccagaccttactcggagggatccggaccccatccaagggacccaacacgcttacttagttacttggaagtcccggaccatatttgggggttcgggctgtgcgtgcaggggtccggtgcttcctcgtggaggtccggtccaacagattgcatcctgggacatatcatcttttccgggccatgtggcgcccctggagtcgtccacgtggtggggtcgggtgctgttcaccgcgtgctagagattaccgcacaggcaccgtgccatcatactgtagtaaggggtacccctgattcagggtaccgacagagagcatgagaataaggcaagggaaaaaggcatagacactagaggaatctgtttagaatttttgggttgattgttgctacatatgtcggtgttttgggtccgaccgcacacctggggttacccctcaaggtgtttttaggagtaggacggtgtcgacaactgtagcaaaatggttcatgccgattgcacgagggacagtggacaagatttgcaggttcgggccgcttagagatgcgtaacaccctacgtcctgatgagtatttgagtgcggttacaagagggctctctggaactgaggcacagagagtttacgtgagtggctaagtaaagtagggtcgatccttctgaaggggtgccccctaggccttatatactcgaccgtggggcagtacacgtggatatgataacaacaagtagctgaaagatagtaaacctcttgagtttatccctacgtaacccttgccgacttatcctcgcatggttctgttgcatgggggcttcagcgcgggaagtcgagtctctgttgcgatttactcgcccgacgttgtgggccgtccgggtttgctccaatccagtcttacatcttctctgcttcgttgattgtctctccccaggcccacgaaagaacgaccttacgatttattgggcccttgggcctttcgtgaggtcttttatctctttagtggacccgggggatatctatcccccacaagcccccgatctttgggttgatttagaggtaatcaactcaaagatccaaggcccaagaaatggcttcctgctgtcttttcttgctccgatcacttgttcgaccgaagtttagttttgtgcttgtgccttagaggtcggcattttgaattgtagaattctggatttcattgggtgcaccggaggtgcacccaatgggtgtagcccccgacctttgagtagattttagaaaatgatctactcgaaggtcttccccagaaattatctctatgcgcgctcctgtaccttggttgaggattggtcttttcaatcttgtcccatgccttagaagtcggcactaaatcggtttagagtgataatccatgggg

SEQ ID NO: 205388 - DNA, 3879 bp, Zea Mays
ccttccccgcccgcccgcgactccggcgagaaggctccagatcccgccgccattgctcgaacagtcccggtggatgaaagccctgatggagatcactgacccacgggcctaccttacgcacagtttgcccgcaaagagaggagcggaggtgacagactgtgccatcgaggctcccaattcaattgtgttcccccaggccgagaatagaatgcacgctcaaaaatagcataccatcttcaaatagcccgaggaaattaccaattaataggtgtatgaagccctgatggagatcactagcccacgtgcctaccttattcactgtttgcccgcagagagaggattggaggtgacagacggtgccatcgaggctcccaaatcaatcgtgttcccccaggccgagaacagaatgcacgctcagaaatagcataccatcttcaaacagcccggggaaattaccaattaacaggtagtatttgttcattgttgcgctcatattttagtgcctaatagatgcctaaggaaatgcctagatgctatgattttctcccagattctgagtttctgaatatttgtgctgcatttctaaatatttgagtttgcatacgtgctatgatttactcacagatgctagcaaagtatgtacatcagccatgcattctaattctcctactatgcgctcgaactcgctcctctaatctactgcaggggtgatattgttgaagtagatacatggattagtgctaatggtaaaaatggaatgcgtagacattggcatgtacatgattctataacaagccatacaatactaaaggtgacaaggttcaaatctacgtcgtgctcatatgtctatatctttaatcaattttattagcaatttaattctaccagctgccatgttacgtttgacacaacacttatagtttctctgctaaaaaacaacaaatcttctaggtgcaccaccggcaccctggatcattattgttattttttggtcatttattcgatatttggtgtcctcttgctcctattatcctataattcatctgcttgataatctctttttgtataatgatgttttattggcattgcaaggtttaccactgtctacaacacacaagtttggattatatcttgtgtctcataagcaatttggaaataaaaggaagtatacatttttgttatttaggtgactgatactatctatcactacaaagtagaaatcttggagttatacattttattagggagatgaagactatttatattagttttagatgcattcggtacccccttgtttttcggtgtcatgaatcatggccacatgagagagaaatacatgcacatccgcacatggaaaaaatgatacatgtgtgagtggatagttcatctatgagcataactaaattgaaccctgatgatcttaaccttagatggttatcgaaggatgacattggggatttggaccatcttcgcattggtgttgttattacatttttcatcatgttagaatttagtgtttaggaggatttatgggtggcgttttattaacaaaactgcaaatcttgtgttgcaaggatgaactcttgatttcagcgctctccagtatttactgattaggttatgaccagtagtattatttattgtgtagtgcagtacttctgacttttggtaatgtgagggtgtcggagagggaattcttcgaccgggtggcggagtgcacccgccctaaatcctaagatgaggagggggcttaagcgttttgcctgttggtagatgaacgatgaactcaggaacacgcgaggatttagagtggttcgggccgccggagcttaataccctactccactgtatgttggattgctgtgaaagcttgagagctgagagtctaagtctaagttcggtctaactgtgtctgagtctgtccctttgtaatgttgcatgcctccccttttatagctaaagaggggcgtacaagggtgctgagccccgacatgtgggcccaggaatataatggatgtaatatttggagttggtggagcaatcttcttgcaccctgacatccgcgatctgcgtggtattggcgtgcagggaaagcttccctggcaacgcataagtgatgatggacacagtgcatcttgcagcacgggcgtactgtttggcaatggactggacaggcacgccgcctgcaggatggcctggatgccgcctgccagctgagtggacaggtcacaataaatgctgaggcggcacatcgcctgtcagcagggtggacaggcggcgcatcctctccacaataaatgcagagatcgtgcggcctagaggccttacgtcaggctccgcccgctggcttacgtcacgggcaacaagccatgtggcagcatcgggtctccgcctgagcggggagcgcaagcgcacaggataaagcctggacacgtgtcagtaccggacccttgcttaggctagggtatcccctgtctcgggacctcgttatgggtggcccagaccttactcggagggatccggaccccatccaagggacccaacacgcttacttagttacttggaagtcccggaccatatttgggggttcgggctgtgcgtgcaggggtccggtgcttcctcgtggaggtccggtccaacagattgcatcctgggacatatcatcttttccgggccatgtggcgcccctggagtcgtccacgtggtggggtcgggtgctgttcaccgcgtgctagagattaccgcacaggcaccgtgccatcatactgtagtaaggggtacccctgattcagggtaccgacagagagcatgagaataaggcaagggaaaaaggcatagacactagaggaatctgtttagaatttttgggttgattgttgctacatatgtcggtgttttgggtccgaccgcacacctggggttacccctcaaggtgtttttaggagtaggacggtgtcgacaactgtagcaaaatggttcatgccgattgcacgagggacagtggacaagatttgcaggttcgggccgcttagagatgcgtaacaccctacgtcctgatgagtatttgagtgcggttacaagagggctctctggaactgaggcacagagagtttacgtgagtggctaagtaaagtagggtcgatccttctgaaggggtgccccctaggccttatatactcgaccgtggggcagtacacgtggatatgataacaacaagtagctgaaagatagtaaacctcttgagtttatccctacgtaacccttgccgacttatcctcgcatggttctgttgcatgggggcttcagcgcgggaagtcgagtctctgttgcgatttactcgcccgacgttgtgggccgtccgggtttgctccaatccagtcttacatcttctctgcttcgttgattgtctctccccaggcccacgaaagaacgaccttacgatttattgggcccttgggcctttcgtgaggtcttttatctctttagtggacccgggggatatctatcccccacaagcccccgatctttgggttgatttagaggtaatcaactcaaagatccaaggcccaagaaatggcttcctgctgtcttttcttgctccgatcacttgttcgaccgaagtttagttttgtgcttgtgccttagaggtcggcattttgaattgtagaattctggatttcattgggtgcaccggaggtgcacccaatgggtgtagcccccgacctttgagtagattttagaaaatgatctactcgaaggtcttccccagaaattatctctatgcgcgctcctgtaccttggttgaggattggtcttttcaatcttgtcccatgccttagaagtcggcactaaatcggtttagagtgataatccatgggg

SEQ ID NO: 205389 - DNA, 2036 bp, Zea Mays
cggccgttggcctggtctctgtctctctctcctctggtggcagtggcacccgccgcgccagccatatatgtcgcggaggcgcgcgcgttcctgcctggctcgagattccgtccacgccattgcgtcgcactgcctccacacgacgactccacgaacacgagcggccacaagacgagatccaggcggctgtgtagctacgctgccatgacgtctaccgtgacgacgcccagccggccgctcgccgccgggagccgtccgcggcggtccggacccgccgtgctctcgctcagcaagggcggcggcggtcagcggcggcagcggcggctggcgccgtccacgagctgcgccgtgctcgcgtcgcccgacaagcagagcacggccaacaagctcccgctgtcgtcgaggaagcaggaggaggaggtggagaaggccacggactacaacgaggtcgcggcagcgctggagaccatctacaagctcagccccgccgtggaggtcgaggagaagaagcgccagggcggcaatgaagacgacggcggtggcgaggccaagaagaaaaggaagcgcagagtggcgggtaggagcacggtggtcgtgaggagccggcgtcggcgtggcgggaggaggatggacctcgggaagcgggtggagatgaagggcgcggccgccgctagcagagagcagcagcaggggggagaggagcaaggagagcgcgagttcgaggagatgctgctgcgggagcactcggtgtcgacggacatgggcagcctggactggaagcgcatgaagatcccgccggtgctcacctcatcgcagagcgcgcggctcttcaagaccatgcagcccatgaaggagagcttgcgagaggagctgcagagggaccccaccgacgcggaggtcgccgaggccaccggcatgaccgtccaccagctccgccgccgcctcgatgtcggccgggccgccaggaacaagctcattaagcacaacctccggctggtgccgtacgccctcaacaagtactaccctgacatgggcggcgacgagaggttcgacgagctgtgccaggcgggcgccaacgggctgatcaccgccatcgatcggttcgagccgaagcgcggcttccgcatctccacgtacgcgctcttctggatccggcactccatcgtgcgcgccatgacgctgtccagcttcacccgcttcccgttcgccatggagtcggagcggcaggagatcggcagggcgcgggaggagctggcgttcgagctcggccggccgcccacggacgaggaggtgcgggcgagggtgggcctctccccgcagaggtaccgcgacgtgctgcggatggccaggcccacatactcgctgcacgcccggaaccgcgtcacgcaggaggagctcatcggcgaggtcaccgacgccgaagccgtcggggtcgacgccggcggcaagcacgacgcgctgctccgcctcgccatcgatgacctcctggactctctgaaacccaaggagagcctggtgatcaggcagcggttcggcctggacggcagggggaggcgcacgctaagcgaggtcgccggcaacctcagcatctcgcgggagatggtgcgcaagtacgagctcaaggcgctcatgaagctcaagcaccccacaagggtggaatacctgcgcaggtacatgtgatcgggctgagctgagctgagcttcttctgctgctatggaatgcattgtaatccgaattcttctattattattgtataataatacaagactatagcagatatatagacgaaatgtacgtgtacaggaagacaggaatgaatggtgtgtgcgtttggggatccagatgagtgacttcatcttttaatttgcatgtaattaattcttaacgtacatacatacgaccgtcgtttatgtccattatctagataaagttcaagaatacggaactttattttgctttctgcatttatctagtcaaggtagcttttttcgtatggtgactttgttacattatggcgacgcaaagaagaacgagg

SEQ ID NO: 205390 - DNA, 1072 bp, Zea Mays
aactgacgtgtgggccgagaaacatgtcgtctcacctcgccgcggccgcttccgcccttcctctccctcttcctccgccggcggtcgccgcgccttcccgcgccctccgagctctaatcctgtcccggggcggcgccgccgccgtatgctccagtctgcgccgcggcggcacgccggcatgcctcgtgcgtcgcctgtgctcccaccactccgccgcggcggcggcgacggcgttggaggaggcgcggcgcgggcggaagcagctcggaatgacgcctgcgctctacgactacctcctcgccaacgtccgcgagcaccccattctccgggagcttcgcgaggagaccgcggctatgagggggagccagatgcaggtttctcccgctcaggctcagctgttgtcaatgcttgtgcaaatccttggggcgcgccgttgcattgaagttggggtattcatcattagctgttgcactggcccttcctgaatctggtcacttggttgcttgtgagagggatgacagatgcctagaagttgccaagaagtactaccaacgtgctggtgttgcacataagattgatgtgaaacatgctttggctgcggattctctaagatctcttcttgattgcggcgaagcttccagctatgacttcgcatttgttgatgctgacaagagaatgtatgaggaatattatgaacttctactgaagctagtaagagttggtggtttaattgtaatggacaatgtcctttggtatggaagggttgccgatctactggttgatgaccaaaagacgatcagtataaggaacttcaacaagaaagttttagaggacaagcgtgtcgatatcagcatggtgccaattggagatgggatgacaatttgccggaagctagtagatacttgagttcacaacgtttttgtgtagatgcggaaaacttcttaccaaggtcaagccctgaaaaatcaaactggtgtatatggaactatggaagtgtggtgcacgtattaaattgtgagtcgtgatcatccattttatatctaatggttgctctatatattttacaaacaac

SEQ ID NO: 205391 - DNA, 1371 bp, Zea Mays
gaaacgagatcattttttccaatgcgagcggcggcgccaggaaaggcaagcaactgatatcactgccacgtgggcccttccccttcgaggagcggcgcaaccgcgcttcgcgttatccgaattccgaaaaaaaccaacagcgcgggcgtggggtaactgacgtgtgggccgagaaacatgtcgtctcacctcgccgcggccgcttccgcccttcctctccctcttcctccgccggcggtcgccgcgccttcccgcgccctccgagctctaatcctgtcccggggcggcgccgccgccgtatgctccagtctgcgccgcggcggcacgccggcatgcctcgtgcgtcgcctgtgctcccaccactccgccgcggcggcggcgacggcgttggaggaggcgcggcgcgggcggaagcagctcggaatgacgcctgcgctctacgactacctcctcgccaacgtccgcgagcaccccattctccgggagcttcgcgaggagaccgcggctatgagggggagccagatgcaggtttctcccgctcaggctcagctgttgtcaatgcttgtgcaaatccttggggcgcgccgttgcattgaagttggtgtgtttactgggtattcatcattagctgttgcactggcccttcctgaatctggtcacttggttgcttgtgagagggatgacagatgcctagaagttgccaagaagtactaccaacgtgctggtgttgcacataagatctcttcttgattgcggcgaagcttccagctatgacttcgcatttgttgatgctgacaagagaatgtatgaggaatattatgaacttctactgaagctagtaagagttggtggtttaattgtaatggacaatgtcctttggtatggaagggttgccgatctactggttgatgaccaaaagacgatcagtataaggaacttcaacaagaaagttttagaggacaagcgtgtcgatatcagcatggtgccaattggagatgggatgacaatttgccggaagctagtagatacttgagttcacaacgtttttgtgtagatgcggaaaacttcttaccaaggtcaagccctgaaaaatcaaactgtggcctgggctctactaaccacagtggtggggaagcagttggtggcagtaattttgattcgctgcttagaacgctgagatgagtgtggcgtgtcttgcacacagtataacttgaattcaagtacaaaaccagtgttatggtgttttgttgatagaccacagtttcatctcaggtgtatatggaactatggaagtgtggtgcacgtattaaattgtgagtcgtgatcatccattttatatctaatggttgctctatatattttacaaacaac

SEQ ID NO: 205392 - DNA, 1819 bp, Zea Mays
cccgccgagaaacgagatcattttttccaatgcgagcggcggcgccaggaaaggcaagcaactgatatcactgccacgtgggcccttccccttcgaggagcggcgcaaccgcgcttcgcgttatccgaattccgaaaaaaaccaacagcgcgggcgtggggtaactgacgtgtgggccgagaaacatgtcgtctcacctcgccgcggccgcttccgcccttcctctccctcttcctccgccggcggtcgccgcgccttcccgcgccctccgagctctaatcctgtcccggggcggcgccgccgccgtatgctccagtctgcgccgcggcggcacgccggcatgcctcgtgcgtcgcctgtgctcccaccactccgccgcggcggcggcgacggcgttggaggaggcgcggcgcgggcggaagcagctcggaatgacgcctgcgctctacgactacctcctcgccaacgtccgcgagcaccccattctccgggagcttcgcgaggagaccgcggctatgagggggagccagatgcaggtttctcccgctcaggctcagctgttgtcaatgcttgtgcaaatccttggggcgcgccgttgcattgaagttggggtattcatcattagctgttgcactggcccttcctgaatctggtcacttggttgcttgtgagagggatgacagatgcctagaagttgccaagaagtactaccaacgtgctggtgttgcacataaggtaattgatgttaatattcacctcttgtaccttggatagaaagttaaatcattttttatgattcttaagccagctctagatttttttgcataacaaagtaaatatgcttaaagtagtccaataacctttttgtgcaaatttgaaaattcttccaagcaaactacttttcaagctcttctcttttatttttttatatctgtatcattgttcttatattgttttctgtgtgtcttgactattaagttctgcacagcagtgcagaaaactagaaaaaaaatctggtacaccgcatattgcatctttttcgttagaaatctaatcttcatgatactaagcacttaagcagtaattctctttcataaccaactctacgcattcaaagccgaaatgctatctggatctgccctacaatgattgatgtgaaacatgctttggctgcggattctctaagatctcttcttgattgcggcgaagcttccagctatgacttcgcatttgttgatgctgacaagagaatgtatgaggaatattatgaacttctactgaagctagtaagagttggtggtttaattgtaatggacaatgtcctttggtatggaagggttgccgatctactggttgatgaccaaaagacgatcagtataaggaacttcaacaagaaagttttagaggacaagcgtgtcgatatcagcatggtgccaattggagatgggatgacaatttgccggaagctagtagatacttgagttcacaacgtttttgtgtagatgcggaaaacttcttaccaaggtcaagccctgaaaaatcaaactgtggcctgggctctactaaccacagtggtggggaagcagttggtggcagtaattttgattcgctgcttagaacgctgagatgagtgtggcgtgtcttgcacacagtataacttgaattcaagtacaaaaccagtgttatggtgttttgttgatagaccacagtttcatctcaggtgtatatggaactatggaagtgtggtgcacgtattaaattgtgagtcgtgatcatccattttatatctaatggttgctctatatattttacaaacaac

SEQ ID NO: 205393 - DNA, 1465 bp, Zea Mays
aacgtagaaggaggcgccgtggaaactcgctgccgccggcggtgagagcccgccgagaaacgagatcattttttccaatgcgagcggcggcgccaggaaaggcaagcaactgatatcactgccacgtgggcccttccccttcgaggagcggcgcaaccgcgcttcgcgttatccgaattccgaaaaaaaccaacagcgcgggcgtggggtaactgacgtgtgggccgagaaacatgtcgtctcacctcgccgcggccgcttccgcccttcctctccctcttcctccgccggcggtcgccgcgccttcccgcgccctccgagctctaatcctgtcccggggcggcgccgccgccgtatgctccagtctgcgccgcggcggcacgccggcatgcctcgtgcgtcgcctgtgctcccaccactccgccgcggcggcggcgacggcgttggaggaggcgcggcgcgggcggaagcagctcggaatgacgcctgcgctctacgactacctcctcgccaacgtccgcgagcaccccattctccgggagcttcgcgaggagaccgcggctatgagggggagccagatgcaggtttctcccgctcaggctcagctgttgtcaatgcttgtgcaaatccttggggcgcgccgttgcattgaagttggtgtgtttactgggtattcatcattagctgttgcactggcccttcctgaatctggtcacttggttgcttgtgagagggatgacagatgcctagaagttgccaagaagtactaccaacgtgctggtgttgcacataagattgatgtgaaacatgctttggctgcggattctctaagatctcttcttgattgcggcgaagcttccagctatgacttcgcatttgttgatgctgacaagagaatgtatgaggaatattatgaacttctactgaagctagtaagagttggtggtttaattgtaatggacaatgtcctttggtatggaagggttgccgatctactggttgatgaccaaaagacgatcagtataaggaacttcaacaagaaagttttagaggacaagcgtgtcgatatcagcatggtgccaattggagatgggatgacaatttgccggaagctagtagatacttgagttcacaacgtttttgtgtagatgcggaaaacttcttaccaaggtcaagccctgaaaaatcaaactgtggcctgggctctactaaccacagtggtggggaagcagttggtggcagtaattttgattcgctgcttagaacgctgagatgagtgtggcgtgtcttgcacacagtataacttgaattcaagtacaaaaccagtgttatggtgttttgttgatagaccacagtttcatctcaggtgtatatggaactatggaagtgtggtgcacgtattaaattgtgagtcgtgatcatccattttatatctaatggttgctctatatattttacaaacaac

SEQ ID NO: 205394 - DNA, 1981 bp, Zea Mays
ggacgatagaaattaataacgtagaaggaggcgccgtggaaactcgctgccgccggcggtgagagcccgccgagaaacgagatcattttttccaatgcgagcggcggcgccaggaaaggcaagcaactgatatcactgccacgtgggcccttccccttcgaggagcggcgcaaccgcgcttcgcgttatccgaattccgaaaaaaaccaacagcgcgggcgtggggtaactgacgtgtgggccgagaaacatgtcgtctcacctcgccgcggccgcttccgcccttcctctccctcttcctccgccggcggtcgccgcgccttcccgcgccctccgagctctaatcctgtcccggggcggcgccgccgccgtatgctccagtctgcgccgcggcggcacgccggcatgcctcgtgcgtcgcctgtgctcccaccactccgccgcggcggcggcgacggcgttggaggaggcgcggcgcgggcggaagcagctcggaatgacgcctgcgctctacgactacctcctcgccaacgtccgcgagcaccccattctccgggagcttcgcgaggagaccgcggctatgagggggagccagatgcaggtttctcccgctcaggctcagctgttgtcaatgcttgtgcaaatccttggggcgcgccgttgcattgaagttggtgtgtttactgggtattcatcattagctgttgcactggcccttcctgaatctggtcacttggttgcttgtgagagggatgacagatgcctagaagttgccaagaagtactaccaacgtgctggtgttgcacataaggtaattgatgttaatattcacctcttgtaccttggatagaaagttaaatcattttttatgattcttaagccagctctagatttttttgcataacaaagtaaatatgcttaaagtagtccaataacctttttgtgcaaatttgaaaattcttccaagcaaactacttttcaagctcttctcttttatttttttatatctgtatcattgttcttatattgttttctgtgtgtcttgactattaagttctgcacagcagtgcagaaaactagaaaaaaaatctggtacaccgcatattgcatctttttcgttagaaatctaatcttcatgatactaagcacttaagcagtaattctctttcataaccaactctacgcattcaaagccgaaatgctatctggatctgccctacaatggtaataattggtattatatgatagagtcaatttatgcttttatactctaaaatttctgtgtggattggtgtgtaaaaaatcattagattgatgtgaaacatgctttggctgcggattctctaagatctcttcttgattgcggcgaagcttccagctatgacttcgcatttgttgatgctgacaagagaatgtatgaggaatattatgaacttctactgaagctagtaagagttggtggtttaattgtaatggacaatgtcctttggtatggaagggttgccgatctactggttgatgaccaaaagacgatcagtataaggaacttcaacaagaaagttttagaggacaagcgtgtcgatatcagcatggtgccaattggagatgggatgacaatttgccggaagctagtagatacttgagttcacaacgtttttgtgtagatgcggaaaacttcttaccaaggtcaagccctgaaaaatcaaactgtggcctgggctctactaaccacagtggtggggaagcagttggtggcagtaattttgattcgctgcttagaacgctgagatgagtgtggcgtgtcttgcacacagtataacttgaattcaagtacaaaaccagtgttatggtgttttgttgatagaccacagtttcatctcaggtgtatatggaactatggaagtgtggtgcacgtattaaattgtgagtcgtgatcatccattttatatctaatggttgctctatatattttacaaacaac

SEQ ID NO: 205395 - DNA, 3368 bp, Zea Mays
caacaatcaggccttgggatgctgacgctgtcatcagttttctcatcgcctcagcaatgccgtgactccgccgacgacggagaaggtatatgcccgccttcctcgcttcagacggccttcttctacgcctccctctacttggtggccatcgcccagagcgggcacaagccctgcgtgcaggccttcggcgccgaccagttcgacgcgacagaccccgacgagtccgtgtcccgggcatccttcttcaactggtggtacatgggactgtgcaccagcgccaccgtgacaattgcgctcatgagctacgtgcaggacaacgtgggctgggccctcggcttcggcgtgccgtccatggccatgctactcgcgctcgccatcttcctgctcggcacgaggacctacaggttctacggctcccgcggtggtgctggtgccagtgccagcgcgtcgtcccttttccgcaacgcgttcgtggcctggaggaaaaggtcgcgtgaagtggagctgggacatggtgagctcgcccaggacgatgccgtgctcgcggaagaggtgaaggggctggcgaggctgttcccgatatgggcgacgtgcctgctctacggcgcggtgttcgcgcagccgcccacgctcttcacgaagcaggcggcgacgctggaccggaggatcgggcggtcgttccaggtacctcccgcggcgctgcagtgcttcctcggcgccagcatcgtcacctgcatcgtgctgtacgaccgcgtcctggtgcccgtgacgcgcagggtctccggcgccgcctcgggcatcaccatgctgcagcggatcggcacggggatcgcgctgtcccttgtcactctagtcgtcgccgtgctggtggagatgaagcggctgcgagcggcgagggacgccggcggcggcggcctggtggacggctctggcaccggcacggcggcggtccccatgagcctgtggtggatcgtgccgcagtacgtgctgctcggcgccgcggacgtgttcacgatggtcggcatgcaggagttcttctacgaccaggtccccggggccctcaagagcctcgggctggcgctctacctcagcgtcctcggcgtcggcagcttcatcagcagcttcctcatcacggtgattgatgccgttacgacgaggaacggaggcaccagctggttcgccgacgacctcaaccggggtcacctagactacttctacctgctccttgcagcgctcgccgcgctggagcttctcgctttcgcttacttctcaacgtcttacgtttacaagacaaaggcaggcaatctctaatctccgtggacagaggcatgcatgtcagcatatgtatgtttattatagatagaaggattgcatggcagcgttcttcagtgtccttgcaaactaaaatgggctgcgtttagcgcgcagacagcaaagtactagaggctatcgggaaattgtaaaatggaggtgtactacggtcacaagtggggcacaataataatgaaattacgtgcttcacaaagcataaaattgtgcaaaaacaagatttttttagggtgcgtttagctagcagcctgacccccgcgcgcaatgcaaaattttatgttcagaattagtccaaaacatagcaatgccgtggatgataatttgatcatcagcagtaacttgatgaagatcacaagttcacaacggcacagcaagggcggacacaattactagactttgccttttcttgtcattttcttattggtaatccttcagtaccatgataaagagcttcttcaccatattataaagctacagccttgaggttgaggcgcgcaaaattatccaacactccgaacagagctgaatcagagctgaatccaacgacctagacgtactggcagacgaagcagagcagaggtcagtaggtcacctggctggctcctggctcaatcctccagctcggcggccggatcggccagcgtgggcagcacagggtacttgcgcgagaagcacgcgtcgcagtagttccccgactcctcgccgtagatgctgtgcagcttgtccagcgagaggaaggcgagggagtcgctgccgatctcccggcgcacgccatcaaggtccatccggttggagatgagctcgccctcgctcggagtgtcgatgccgtagaggcaggagcccacaacgggcgggctcgcgatccgcatgtgcacctcccgcgcgccggcgtcgcggagcagccgcacgatcttgctcgaggtggtgccgcgcaccagggagtcgtccacgaccacgacgctcttgccggtgatgacgccgcgcacgggggcgagcttcagcttcacggcgaggtcccggatcgcctgcgtcggctggatgaagctgcggccgctgtagtgccaccggatgagaccctgctggaactcgagccccgacgcgcgtgcgaacccgagcgcggcgtagaaacccgagtcgggcaccgggatgacgacgtcggcgcccggggcaggggactcctcggccagcgcctgcccgaaggcggtacggcgctcgtggacggcgtgcgagaacaccaccgagttgggcagcgagaagtagatgtgctcgaacacgcaggcgcggcgggggcggtgcgggacgaggcaggccgaggccaccgacatgtcgcggcggtcgaccacgaccacctccccaggctccacctcgcgctcgtaggtggcgtcgatgaggtccagcgcgcacgtctccgacgcgaagacgacggcgccgttccggcggcggcccatcaccagcgggcggaacccgtgtgggtcgcgcacggcgaagagcttgtcggccgtgaggaacaggagcgagtaggcccccgcaaggcgctcgcaggcatcgcagacccgggcgaggaggggccgcgacagcgacgtcgcaatcaggtggagaatgacctccgtatccgaggacgtgttgaagatggatcccctggcctcgagtttgttccgcagagcttggtagttgacgaggtttccgttatgcgccacggcgacctgcccgaaccggtacccggccaggaacggctgcacgttgcgcagcgacgcggcggcgccgcgagagaggatacggactcgcgtagtacctgaggtggtgccggttatggcggtcgctgccagcggctgcgtagcggtagaggagacgggacgtggcagtcgtggcggcggcggcggcgacaattcccattcccgcttatttgagagatcgaggggatttggggcgggcggcggggcgagccgggcacgcggagtgatgcctctctctggctgcgcgtcaatgggccagatttgaagaagtcttggcgattggcgagtgcctgactgccgctggat

SEQ ID NO: 205396 - DNA, 1751 bp, Zea Mays
agcgcggcagcgccccaccccttgctgactccctcagtcggtctgtccctctatttcgaaagagcacactgcacacgcctcatccttcgtccagacgcgcccacgcctccgctgagagaataggttctgtgcgagggctccctcgcactccgcaagcacgccaacctcagtcgccagccagccatggcgtctgattccggcaccgcctcctcggacccgctcctccacggccgccgcgcgccgtccacgggcggctggaaatccgccctcttcataatttgggtagaggtggcggagcggttcgcgtactacggcatctcgtcgaacctgatcagctacctgaccggcccgctcggccagaccacggcggcggcagccgcggcggtgaacgcgtggtcgggcgccgcgtccatgctgccgctcctcggcgccgccgtcgccgactcctggctcgggcgctaccgcaccatcgtcgcctcctccgtgctctacatcacggtgagcccccaaccacgcaccgcttctcctcccatctcacgccccgacatacttttatcaattcccgctccgtgcttgcattgcatgggttactctttgctgccatgtgatcgctgacctgtcctgctgtccacgatcacgaccgagtataaaattcggcacgagaggcgcatggatggaatggaagtatggaactgcctagcaagtagcaatcatacattctaaaattcatgctataaaatgagttcaggggaaaaaaactcctgtctattcatctgaaggagtgatgaatagatcccgagaaccagacaatgactgttggttgtttggttgggtatgagcttagctgacgctcatgctgtcatgcaccctgtttcatacttgacgtattcatgtgtttttgtgggtttatgtatactggcagttgtgagtccgtaggccgtatagctcagcagtatagcaagttcaccaagctgaccgtgcatcctgctgtccggacaccggacgcgtagaggctgaccggactatcgagcgacctgcccctgcaaggctgcaaccatccaccctatttcctatctctcgtataacaccaaaaaaagtctccatttttcatgcatgttagaaccaccgtcctctatggccttggacacgtcttctcctgggcgttgtggatctgaattcaagacgaccacgcgacctcctcaatacgtttgtgcaactgcccccgttttcaacttgattgtgctgcgcatgtgcgtatcttctttggagacgtctttggttcgttcggtcgttttcagtgtgacggcctcagcagaaatcagagcgtgcacatccttcagtggagcctggcagtccagaggcgaaataggagcagtggagcactaccggccggtggtcgcattcaaattacaaacggagccaaccaaatgtgggaacgaaaaacgagtcacgctaagcctagtttgggcaacaaacgttcggttcggattagaagcgtaaccaaccgatagaacgtttgcgtcccttggaaactcggatcatgtttcccccaagaaatgaattatacactaacgtcaaaagtgaaaatgttggtagtcgtgtcgatccaaacagccaaaggctactgtgattcctgcgaattgcatcaaaagaaatgtgatgtacttatgttgtatgtgttaggatttatgggcttggcccaattaagttattcaaataaatcccaggaaaatctcaaaagcccatataag

SEQ ID NO: 205397 - DNA, 1607 bp, Zea Mays
cgccaaccaagcaaaagcgaatggaatcctcgggtccgtccggccacgcaagcggcggcaccaccattcatctacgaatccatgggaggagattggagtggggccagctaacggatcggagtcggagtccttcttgtgcttctcctgctctgctggtgccgctgccatgggtttccccagcacccccaacctgaagctggagcctcgccctcgcacgcggaggctcctgcgctgcgccctcagctctgagcctgtgcctcccatgactgtttccatcactggagccacaggtttcattggacgcagattggttcacaagcttctatcggatgatcacaaggtttgcatcttaacaaggtctgcctccaaggctgcgtcagtttttcctgcttccacctatcctggactcacaatagcccagcaaggggattgggaggcatgcgtcagaggctccactgctgttgtcaacctggcaggcatgcccataagcactagatggtcacccgagattaagcaggaaatcaaacagagccgggtcaatgttacatcaaaggtggtgaagtacatcaaccatgctggaaacgctgatactcgaccctcagtgtttgtgagcgcaacagccattggctattatgtccaatagaaacacatgcaccggttgttttcgatcacttcgctgcgtgcataaatgctgcaggtaccagcgaaatccatagctttgatgaatcaagtccctcgggcaatgactacctagctgaggtgtgcagagaatgggaggccacggcatgccaagtaaaccaggaggatgttaggcttgtacttctccggattggggttgttcttggcaaggacggcggtgctctaggttgctgtgtttcatttaattccttttctcccctcttgtccttttattttccttcctcaagagaaggaccattccaatctacgctgcttattcacctggttcatctgtccatctgcagcaaagatgatacccctttttatgatgtttgctggtggtcctctggggacgggacgccaatggttttcttggattcatctggatgacctagtcaacctcatctatgaatctctaacgaaccctacatacaaaggtgtaatcaatggaactgcacctaatcctgtgcgtttgtctgagctatgcgaacgtctggggcgaatcgttgggcggccctcttggttgcccgtgccgggatttgcgctcaaagcggtgctaggagaaggcgcttctgtggtgttggaaggacaaaaggttgttccggcgaaggccaaggatctgggcttctcctatagatacccctatgttgaagacgctctaaaggccattgcccgagacctatagagctaggttgaggacgatacaggcaacttaatttaattatttcttatcttaactaggaacgtgcccgtgcgatgctacggaatacaaattgcgaccctttaatagacttagggccctgacgacgtgcggcgtgagtacaatagtgacggcaaaatatgtgattgttaaacatagatatagaacgatataaataagtctacccaaatagattgaaatggaatcacacaaatagtttataaagagt

SEQ ID NO: 205398 - DNA, 1972 bp, Zea Mays
cgaatggaatcctcgggtccgtccggccacgcaagcggcggcaccaccattcatctacgaatccatgggaggagattggagtggggccagctaacggatcggagtcggagtccttcttgtgcttctcctgctctgctggtgccgctgccatgggtttccccagcacccccaacctgaagctggagcctcgccctcgcacgcggaggctcctgcgctgcgccctcagctctgagcctgtgcagcctcccatgactgtttccatcactggagccacaggtttcattggacgcagattggttcacaagcttctatcggatgatcacaaggtttgcatcttaacaaggtctgcctccaaggctgcgtcagtttttcctgcttccacctatcctggactcacaatagcccagcaaggggattgggaggcatgcgtcagaggctccactgctgttgtcaacctggcaggcatgcccataagcactagatggtcacccgagattaagcaggaaatcaaacagagccgggtcaatgttacatcaaaggtggtgaagtacatcaaccatgctggaaacgctgatactcgaccctcagtgtttgtgagcgcaacagccattggctattatggtgcgtcgttcgtgaactagccacttggcttcatcttgctgaggctgatgaactagcatccgccgttttaatccacctgcagtccaatagaaacacatgcaccggttgttttcgatcacttcgctgcgtgcataaatgctgcaggtaccagcgaaatccatagctttgatgaatcaagtccctcgggcaatgactacctagctgaggtgtgcagagaatgggaggccacggcatgccaagtaaaccaggaggatgttaggcttgtacttctccggattggggttgttcttggcaaggacggcggtgctctaggttgctgtgtttcatttaattccttttctcccctcttgtccttttattttccttcctcaagagaaggaccattccaatctacgctgcttattcacctggttcatctgtccatctgcagcaaagatgatacccctttttatgatgtttgctggtggtcctctggggacgggacgccaatggttttcttggattcatctggatgacctagtcaacctcatctatgaatctctaacgaaccctacatacaaaggtgaactcacacattctctgacccccccccccccgcccatgtgttacagactaggtatgctgctagaagccatgcaaacaccctactgcaagcaaaacaacttatgaatttcatgaattgtaagataatggtatggatatcagttgaatgcaagacactttatggtgcgatactgcaatgaattcatattgtggtagcattcaagtaatgacgtagtgctagctgactttggagtacatgatacactttatggcatgattttgtatattgagagcagcctcacattctgtttattaggtgtaatcaatggaactgcacctaatcctgtgcgtttgtctgagctatgcgaacgtctggggcgaatcgttgggcggccctcttggttgcccgtgccgggatttgcgctcaaagcggtgctaggagaaggcgcttctgtggtgttggaaggacaaaaggttgttccggcgaaggccaaggatctgggcttctcctatagatacccctatgttgaagacgctctaaaggccattgcccgagacctatagagctaggttgaggacgatacaggcaacttaatttaattatttcttatcttaactaggaacgtgcccgtgcgatgctacggaatacaaattgcgaccctttaatagacttagggccctgacgacgtgcggcgtgagtacaatagtgacggcaaaatatgtgattgttaaacatagatatagaacgatataaataagtctacccaaatagattgaaatggaatcacacaaatagtttataaagagt

SEQ ID NO: 205399 - DNA, 1509 bp, Zea Mays
cgaatggaatcctcgggtccgtccggccacgcaagcggcggcaccaccattcatctacgaatccatgggaggagattggagtggggccagctaacggatcggagtcggagtccttcttgtgcttctcctgctctgctggtgccgctgccatgggtttccccagcacccccaacctgaagctggagcctcgccctcgcacgcggaggctcctgcgctgcgccctcagctctgagcctgtgcagcctcccatgactgtttccatcactggagccacaggtttcattggacgcagattggttcacaagcttctatcggatgatcacaaggtttgcatcttaacaaggtctgcctccaaggctgcgtcagtttttcctgcttccacctatcctggactcacaatagcccagcaaggggattgggaggcatgcgtcagaggctccactgctgttgtcaacctggcaggcatgcccataagcactagatggtcacccgagattaagcaggaaatcaaacagagccgggtcaatgttacatcaaaggtggtgaagtacatcaaccatgctggaaacgctgatactcgaccctcagtgtttgtgagcgcaacagccattggctattatggtgcgtcgttcgtgaactagccacttggcttcatcttgctgaggctgatgaactagcatccgccgttttaatccacctgcagtccaatagaaacacatgcaccggttgttttcgatcacttcgctgcgtgcataaatgctgcaggtaccagcgaaatccatagctttgatgaatcaagtccctcgggcaatgactacctagctgaggtgtgcagagaatgggaggccacggcatgccaagtaaaccaggaggatgttaggcttgtacttctccggattggggttgttcttggcaaggacggcggtgctctaggttgctgtgtttcatttaattccttttctcccctcttgtccttttattttccttcctcaagagaaggaccattccaatctacgctgcttattcacctggttcatctgtccatctgcagcaaagatgatacccctttttatgatgtttgctggtggtcctctggggacgggacgccaatggttgcttctctctcttgtgctacagacttatagtatacgctgggatcctagtcattctgttttcagacagatgggatttgatcgttagtacattcaacttcagcatattgtaccaattaattgattatctgattgctaggttttcttggattcatctggatgacctagtcaacctcatctatgaatctctaacgaaccctacatacaaaggtgtaatcaatggaactgcacctaatcctgtgcgtttgtctgagctatgcgaacgtctggggcgaatcgttgggcggccctcttggttgcccgtgccgggatttgcgctcaaagcggtgctaggagaaggcgcttctgtggaattgttcacaatggcccgcgtgtatgttggcaacttggattcatg

SEQ ID NO: 205400 - DNA, 1806 bp, Zea Mays
cgaatggaatcctcgggtccgtccggccacgcaagcggcggcaccaccattcatctacgaatccatgggaggagattggagtggggccagctaacggatcggagtcggagtccttcttgtgcttctcctgctctgctggtgccgctgccatgggtttccccagcacccccaacctgaagctggagcctcgccctcgcacgcggaggctcctgcgctgcgccctcagctctgagcctgtgcagcctcccatgactgtttccatcactggagccacaggtttcattggacgcagattggttcacaagcttctatcggatgatcacaaggtttgcatcttaacaaggtctgcctccaaggctgcgtcagtttttcctgcttccacctatcctggactcacaatagcccagcaaggggattgggaggcatgcgtcagaggctccactgctgttgtcaacctggcaggcatgcccataagcactagatggtcacccgagattaagcaggaaatcaaacagagccgggtcaatgttacatcaaaggtggtgaagtacatcaaccatgctggaaacgctgatactcgaccctcagtgtttgtgagcgcaacagccattggctattatggtgcgtcgttcgtgaactagccacttggcttcatcttgctgaggctgatgaactagcatccgccgttttaatccacctgcagtccaatagaaacacatgcaccggttgttttcgatcacttcgctgcgtgcataaatgctgcaggtaccagcgaaatccatagctttgatgaatcaagtccctcgggcaatgactacctagctgaggtgtgcagagaatgggaggccacggcatgccaagtaaaccaggaggatgttaggcttgtacttctccggattggggttgttcttggcaaggacggcggtgctctaggttgctgtgtttcatttaattccttttctcccctcttgtccttttattttccttcctcaagagaaggaccattccaatctacgctgcttattcacctggttcatctgtccatctgcagcaaagatgatacccctttttatgatgtttgctggtggtcctctggggacgggacgccaatggttgcttctctctcttgtgctacagacttatagtatacgctgggatcctagtcattctgttttcagacagatgggatttgatcgttagtacattcaacttcagcatattgtaccaattaattgattatctgattgctaggttttcttggattcatctggatgacctagtcaacctcatctatgaatctctaacgaaccctacatacaaaggtgaactcacacattctctgacccccccccccccgcccatgtgttacagactaggtatgctgctagaagccatgcaaacaccctactgcaagcaaaacaacttatgaatttcatgaattgtaagataatggtatggatatcagttgaatgcaagacactttatggtgcgatactgcaatgaattcatattgtggtagcattcaagtaatgacgtagtgctagctgactttggagtacatgatacactttatggcatgattttgtatattgagagcagcctcacattctgtttattaggtgtaatcaatggaactgcacctaatcctgtgcgtttgtctgagctatgcgaacgtctggggcgaatcgttgggcggccctcttggttgcccgtgccgggatttgcgctcaaagcggtgctaggagaaggcgcttctgtggaattgttcacaatggcccgcgtgtatgttggcaacttggattcatg

SEQ ID NO: 205401 - DNA, 1833 bp, Zea Mays
cgaatggaatcctcgggtccgtccggccacgcaagcggcggcaccaccattcatctacgaatccatgggaggagattggagtggggccagctaacggatcggagtcggagtccttcttgtgcttctcctgctctgctggtgccgctgccatgggtttccccagcacccccaacctgaagctggagcctcgccctcgcacgcggaggctcctgcgctgcgccctcagctctgagcctgtgcctcccatgactgtttccatcactggagccacaggtttcattggacgcagattggttcacaagcttctatcggatgatcacaaggtttgcatcttaacaaggtctgcctccaaggctgcgtcagtttttcctgcttccacctatcctggactcacaatagcccagcaaggggattgggaggcatgcgtcagaggctccactgctgttgtcaacctggcaggcatgcccataagcactagatggtcacccgagattaagcaggaaatcaaacagagccgggtcaatgttacatcaaaggtggtgaagtacatcaaccatgctggaaacgctgatactcgaccctcagtgtttgtgagcgcaacagccattggctattatggtgcgtcgttcgtgaactagccacttggcttcatcttgctgaggctgatgaactagcatccgccgttttaatccacctgcagtccaatagaaacacatgcaccggttgttttcgatcacttcgctgcgtgcataaatgctgcaggtaccagcgaaatccatagctttgatgaatcaagtccctcgggcaatgactacctagctgaggtgtgcagagaatgggaggccacggcatgccaagtaaaccaggaggatgttaggcttgtacttctccggattggggttgttcttggcaaggacggcggtgctctaggttgctgtgtttcatttaattccttttctcccctcttgtccttttattttccttcctcaagagaaggaccattccaatctacgctgcttattcacctggttcatctgtccatctgcagcaaagatgatacccctttttatgatgtttgctggtggtcctctggggacgggacgccaatggttgcttctctctcttgtgctacagacttatagtatacgctgggatcctagtcattctgttttcagacagatgggatttgatcgttagtacattcaacttcagcatattgtaccaattaattgattatctgattgctaggttttcttggattcatctggatgacctagtcaacctcatctatgaatctctaacgaaccctacatacaaaggtgaactcacacattctctgacccccccccccccgcccatgtgttacagactaggtatgctgctagaagccatgcaaacaccctactgcaagcaaaacaacttatgaatttcatgaattgtaagataatggtatggatatcagttgaatgcaagacactttatggtgcgatactgcaatgaattcatattgtggtagcattcaagtaatgacgtagtgctagctgactttggagtacatgatacactttatggcatgattttgtatattgagagcagcctcacattctgtttattaggtgtaatcaatggaactgcacctaatcctgtgcgtttgtctgagctatgcgaacgtctggggcgaatcgttgggcggccctcttggttgcccgtgccgggatttgcgctcaaagcggtgctaggagaaggcgcttctgtggtaagaatggatggagagttgaactatctcgtaattccagtggtcgtggtggtcgtgatcggtatggtggatctgag

SEQ ID NO: 205402 - DNA, 992 bp, Zea Mays
cgaatggaatcctcgggtccgtccggccacgcaagcggcggcaccaccattcatctacgaatccatgggaggagattggagtggggccagctaacggatcggagtcggagtccttcttgtgcttctcctgctctgctggtgccgctgccatgggtttccccagcacccccaacctgaagctggagcctcgccctcgcacgcggaggctcctgcgctgcgccctcagctctgagcctgtgcagcctcccatgactgtttccatcactggagccacaggtttcattggacgcagattggttcacaagcttctatcggatgatcacaaggtttgcatcttaacaaggtctgcctccaaggctgcgtcagtttttcctgcttccacctatcctggactcacaatagcccagcaaggggattgggaggcatgcgtcagaggctccactgctgttgtcaacctggcaggcatgcccataagcactagatggtcacccgagattaagcaggaaatcaaacagagccgggtcaatgttacatcaaaggtggtgaagtacatcaaccatgctggaaacgctgatactcgaccctcagtgtttgtgagcgcaacagccattggctattatgtccaatagaaacacatgcaccggttgttttcgatcacttcgctgcgtgcataaatgctgcaggtaccagcgaaatccatagctttgatgaatcaagtccctcgggcaatgactacctagctgaggtgtgcagagaatgggaggccacggcatgccaagtaaaccaggaggatgttaggcttgtacttctccggattggggttgttcttggcaaggacggcggtgctctagcaaagatgatacccctttttatgatgtttgctggtggtcctctggggacgggacgccaatggttttcttggattcatctggatgacctagtcaacctcatctatgaatctctaacgaaccctacatacaaaggtgaactca

SEQ ID NO: 205403 - DNA, 1009 bp, Zea Mays
cgaatggaatcctcgggtccgtccggccacgcaagcggcggcaccaccattcatctacgaatccatgggaggagattggagtggggccagctaacggatcggagtcggagtccttcttgtgcttctcctgctctgctggtgccgctgccatgggtttccccagcacccccaacctgaagctggagcctcgccctcgcacgcggaggctcctgcgctgcgccctcagctctgagcctgtgcctcccatgactgtttccatcactggagccacaggtttcattggacgcagattggttcacaagcttctatcggatgatcacaaggtttgcatcttaacaaggtctgcctccaaggctgcgtcagtttttcctgcttccacctatcctggactcacaatagcccagcaaggggattgggaggcatgcgtcagaggctccactgctgttgtcaacctggcaggcatgcccataagcactagatggtcacccgagattaagcaggaaatcaaacagagccgggtcaatgttacatcaaaggtggtgaagtacatcaaccatgctggaaacgctgatactcgaccctcagtgtttgtgagcgcaacagccattggctattatggtgcgtcgttcgtgaactagccacttggcttcatcttgctgaggctgatgaactagcatccgccgttttaatccacctgcagtccaatagaaacacatgcaccggttgttttcgatcacttcgctgcgtgcataaatgctgcaggtgtgcagagaatgggaggccacggcatgccaagtaaaccaggaggatgttaggcttgtacttctccggattggggttgttcttggcaaggacggcggtgctctagcaaagatgatacccctttttatgatgtttgctggtggtcctctggggacgggacgccaatggttttcttggattcatctggatgacctagtcaacctcatctatgaatctctaacgaaccctacatacaaaggtgaactca

SEQ ID NO: 205404 - DNA, 1342 bp, Zea Mays
cgaatggaatcctcgggtccgtccggccacgcaagcggcggcaccaccattcatctacgaatccatgggaggagattggagtggggccagctaacggatcggagtcggagtccttcttgtgcttctcctgctctgctggtgccgctgccatgggtttccccagcacccccaacctgaagctggagcctcgccctcgcacgcggaggctcctgcgctgcgccctcagctctgagcctgtgcctcccatgactgtttccatcactggagccacaggtttcattggacgcagattggttcacaagcttctatcggatgatcacaaggtttgcatcttaacaaggtctgcctccaaggctgcgtcagtttttcctgcttccacctatcctggactcacaatagcccagcaaggggattgggaggcatgcgtcagaggctccactgctgttgtcaacctggcaggcatgcccataagcactagatggtcacccgagattaagcaggaaatcaaacagagccgggtcaatgttacatcaaaggtggtgaagtacatcaaccatgctggaaacgctgatactcgaccctcagtgtttgtgagcgcaacagccattggctattatggtaccagcgaaatccatagctttgatgaatcaagtccctcgggcaatgactacctagctgaggtgtgcagagaatgggaggccacggcatgccaagtaaaccaggaggatgttaggcttgtacttctccggattggggttgttcttggcaaggacggcggtgctctagcaaagatgatacccctttttatgatgtttgctggtggtcctctggggacgggacgccaatggttttcttggattcatctggatgacctagtcaacctcatctatgaatctctaacgaaccctacatacaaagctatgcgaacgtctggggcgaatcgttgggcggccctcttggttgcccgtgccgggatttgcgctcaaagcggtgctaggagaaggcgcttctgtggtaacactcatctcattgacatactacattcctacgtaaatcacacttatatgctatttggagagagatcagaacagattattacttttggatactgttatgacgggtataggatatgggcgtaggctgaaacagctacccgcccagggccaaacggcttagaagacaagggaagaatctgttagctagttattagatagagtttgttagctagttatccctaaataaaagggctacatattaggaggagtttgttgaggcccgggaccggtctataaggtctaggcgttgtatccaaaaggattgtgcattgatcaatcaaagaaag

SEQ ID NO: 205405 - DNA, 1449 bp, Zea Mays
tttccccacccggtttccagaaagcgcgaggacacgcccgtcatggctcctacatcaacagttcagcagccgccgaatgcagatccaacggttgctatttaaaagacatactctgagacaaaaggccataatttcacactgaatgcttcatttgatgagattactgctagtgaatatgatggattggtaattcctggagggcgtgcaccagaataccttgcgatggatgaaaaggtgcttgacctagtcagaatgttctctggtgctaagaagcctattgcatcagtttgtcatggacagttgattttagcggcagcaagagtagtcgagaaccgtacctgcacagcatttccggctgttaaaccagttttggttgctgctggtgccaagtgggaagagcctgacacaatggcaaaatgcactgttgatggcaatctcatcacagcagcgacttataattctcatcccgaattcatcagcctatttgtcaaagcactcggaggttcagtggcaggctcagataagagaatactgttcctatgtggggactacatggaggattatgaggtcatggtcccattccaggctctccaagctcttggctgccatgtcgatgccgtttgccccgacaagggagctggggagacgtgcccgacagccattcatgatttcgaaggtgaccagacctacagcgagaagcctggccacgattttactctgacagcgtcgtttggaagtgtggatgcttcgagctacgacgcgcttgtggttcctggcggacgggctccagagtacctggctctgaacgataaggtcatcagcttggtgaaggccttcgcggagagcggaaagccaatcgcgtcgatctgccacggccagcagatattatccgctgccggagtcctcaaggggaagaagtgcaccgcatacccagccgtgaagctgaacgtgttgctcggtggcgggacctggctggagcctgacccgatccaccgctgcttcaccgatggcaaccttgtgaccggcgcagcctggccaggccacccagagttcgtgtcccagctcatggcgttgctcggcgtcaaggtttccttctgaagtccaaactgaaagggcaaggcagaaagagctctggctcaacctggggaggggcgtgatagcatagctttggatttccagatagaagagaacagactcaaaacgacaccttatagcgatcgctgcacttaatccttgttccatgcgcagcaagcctcaggcttattacccttgtttgtcagcgttgtgtaaaaactgtaacccggatgctgtttcttcttcttcttcttggttccttcttttttctgagtcgtcctttgtggattcaaataataaataaagtcttgtatactgctgtttgttgatctggtactgtgcttcgagcagctagatggccaacaaagaaaatag

SEQ ID NO: 205406 - DNA, 1291 bp, Zea Mays
ttcaatggaggtggtgggtctcccccgtttcgtctcctgccattcgtcctcctcctcccctgtctctctctccatccatccaatcccacctggagaaaaacgagacaaatcaaatctcgccgcgagttgggcgctgagcgcgggcgccatggcgagcaacagcgcgcccggcgccggctacgagtgcggcagcgacaacgacggcgggctgcacaagccgctgctgcccaacagcgggagctgccaacggacggggtcgcgccagcccagcctcaacgccgccggcacctcctccagggccgtcctgcgcgagtcccacgtctccgccttcctctgcacgctcatcgtcgcgctcggccccatccagtgcggcttcacaagcggctactcctcgccgacgcaggacggcatcatccgggacctcaacctctccatctccgagttctcggcgttcggttcgctgtccaacgtgggcgccatggtcggggcgatcgccagcggccagatggccaagtacattggccggagagggtcattgattattgcagcggttccgaacatcatgggctggcttgcaatctccttcgcgaaacacacttcgtttctgtacatgggacgattgcttgaaggatttggtgtcggtgtcatttcctatgtggtaccggtatacatagcagagatatctcctcagaacatgagaggagctcttggcgctgtgaacccgttgtctgcaacatttggtgtcatgtttgtctatgtgcttggcttgttttttccttggaggcttcttgcattaataggaacgttgccctgcttatttttgatacctggcctattcttcattccggaatctccaagatggctggcaaggatgaataggatggatgattgcgagacttctctacaagttctcaggggattcaatgctgacatcactgcagaagctaatgatataaagatagctgtgacatcagcaaacaaaagtggtacaataagttttcaagagttgaaccaaaagaaaaaccgcacgcccctaattctaggaattggcctacttgtgttgcaacagctaagtggaataaactgtatagtattttattcaggtagcatcttcaaagctgcagatgaaggaatattgttcaatggagggaatgagagttctacaatagaattggacgaaccattcgatgacaacaacaggggttttgtacgaaggatacaagaatatgaagttaaggaggcgctaaaaaggatgaaggtaggaaaggcgatgggccctgatggtatccct

SEQ ID NO: 205407 - DNA, 2319 bp, Zea Mays
ttcaatggaggtggtgggtctcccccgtttcgtctcctgccattcgtcctcctcctcccctgtctctctctccatccatccaatcccacctggagaaaaacgagacaaatcaaatctcgccgcgagttgggcgctgagcgcgggcgccatggcgagcaacagcgcgcccggcgccggctacgagtgcggcagcgacaacgacggcgggctgcacaagccgctgctgcccaacagcgggagctgccaacggacggggtcgcgccagcccagcctcaacgccgccggcacctcctccagggccgtcctgcgcgagtcccacgtctccgccttcctctgcacgctcatcgtcgcgctcggccccatccagtgcggcttcacaagcggctactcctcgccgacgcaggacggcatcatccgggacctcaacctctccatctccgagttctcggcgttcggttcgctgtccaacgtgggcgccatggtcggggcgatcgccagcggccagatggccaagtacattggccggagagggtcattgattattgcagcggttccgaacatcatgggctggcttgcaatctccttcgcgaaagtatggtgctaagtgtgtcagtttattcccactcattgcttcacaaatgacaacatcggccttgatggctgtcgatgtatggtctgctctgcagcacacttcgtttctgtacatgggacgattgcttgaaggatttggtgtcggtgtcatttcctatgtggtatgtataataaaacttcatgcctggttatgtcttgagagtatgagtacttgtgctttttaacctatgatatgtcatcatttttagacaaaatgatctaaggcccaggaggctcgcctgcagctaagattttgcttgcataacagtcgttcccgtagttatatcagctaattttggtctgtgaattctgggccaccaggtaccggtatacatagcagagatatctcctcagaacatgagaggagctcttggcgctgtgaacccgttgtctgcaacatttggtgtcatgtttgtctatgtgcttggcttgttttttccttggaggcttcttgcattaataggaacgttgccctgcttatttttgatacctggcctattcttcattccggaatctccaagatggctggcaaggatgaataggatggatgattgcgagacttctctacaagttctcaggggattcaatgctgacatcactgcagaagctaatgatataaagatagctgtgacatcagcaaacaaaagtggtacaataagttttcaagagttgaaccaaaagaaaaaccgcacgcccctaattctaggaattggcctacttgtgttgcaacagctaagtggaataaactgtatagtattttattcaggtagcatcttcaaagctgcagggctcaagaacagcaacttggacgcatgtgtacttggagctctcgaggttcttgccactggtgttacaatcacgttcttggacagagctggccggagaatcctccttattatatcttcttgtgggatgaccctaagccttcttgcggttgctgttgtattttacatcaaggataatatttcacatgattctgacatgcataacatcttaagtatggtgtcgttggttggtgtcgtggcttatgtcattgccttctgcttcggcatgggtgccattccatggatcattatgtctgaggtatagtacctcaacacatgagatgcttgagacacatgctgaaagctctctgaacgaagggattattctcgaaactttgcatatcgacagatccttccggttagcatcaagagtgtggcaggaagctttgcgaccctagccaactggttgacatcctttgggataacaatgacagcaaatttgctcttgagctggagtgctgcaggcacatttgcctcctacatggtcgtgagtgcgttcactctaatgttcgtcatcctctgggtgccagagacgaagggaagaacccttgaggagatacagtggtccttccagtagtgagctgcagcagcattcatcagtaaatgcagtcatcagcaaggtctggtctgagctgctgtatgtggtgtggcggcatttcttcttctttttgtactgcaatctcttctgtggcatcatttggtgtggttcgctcaccacccacactcgagactgttcattaagtttactcttatggagatgatcgagtggaagttggataaggattggagtcggatgtatcaggtgccaaggaatccttgtattcggtaaaaaatctatgctaagaatcagcatatcccttgcgca

SEQ ID NO: 205408 - DNA, 2171 bp, Zea Mays
ttcaatggaggtggtgggtctcccccgtttcgtctcctgccattcgtcctcctcctcccctgtctctctctccatccatccaatcccacctggagaaaaacgagacaaatcaaatctcgccgcgagttgggcgctgagcgcgggcgccatggcgagcaacagcgcgcccggcgccggctacgagtgcggcagcgacaacgacggcgggctgcacaagccgctgctgcccaacagcgggagctgccaacggacggggtcgcgccagcccagcctcaacgccgccggcacctcctccagggccgtcctgcgcgagtcccacgtctccgccttcctctgcacgctcatcgtcgcgctcggccccatccagtgcggcttcacaagcggctactcctcgccgacgcaggacggcatcatccgggacctcaacctctccatctccgagttctcggcgttcggttcgctgtccaacgtgggcgccatggtcggggcgatcgccagcggccagatggccaagtacattggccggagagggtcattgattattgcagcggttccgaacatcatgggctggcttgcaatctccttcgcgaaacacacttcgtttctgtacatgggacgattgcttgaaggatttggtgtcggtgtcatttcctatgtggtaccggtatacatagcagagatatctcctcagaacatgagaggagctcttggcgctgtgaacccgttgtctgcaacatttggtgtcatgtttgtctatgtgcttggcttgttttttccttggaggcttcttgcattaataggaacgttgccctgcttatttttgatacctggcctattcttcattccggaatctccaagatggctggcaaggatgaataggatggatgattgcgagacttctctacaagttctcaggggattcaatgctgacatcactgcagaagctaatgatataaagctctatgcagatagctgtgacatcagcaaacaaaagtggtacaataagttttcaagagttgaaccaaaagaaaaaccgcacgcccctaattctaggaattggcctacttgtgttgcaacagctaagtggaataaactgtatagtattttattcaggtagcatcttcaaagctgcagggctcaagaacagcaacttggacgcatgtgtacttggagctctcgaggttcttgccactggtgttacaatcacgttcttggacagagctggccggagaatcctccttattatatcttcttgtgggatgaccctaagccttcttgcggttgctgttgtattttacatcaaggataatatttcacatgattctgacatgcataacatcttaagtatggtgtcgttggttggtgtcgtggcttatgtcattgccttctgcttcggcatgggtgccattccatggatcattatgtctgagatccttccggttagcatcaagagtgtggcaggaagctttgcgaccctagccaactggttgacatcctttgggataacaatgacagcaaatttgctcttgagctggagtgctgcaggcacatttgcctcctacatggtcgtgagtgcgttcactctaatgttcgtcatcctctgggtgccagagacgaagggaagaacccttgaggagatacagtggtccttccagtagtgagctgcagcagcattcatcagtaaatgcagtcatcagcaaggtctggtctgagctgctgtatgtggtgtggcggcatttcttcttctttttgtactgcaatctcttctgtggcatcatttggtgtgtaagtttcctgcatgacattgatagtagggattaacttgcatttgtgacaaattagttgatagtgataggatccctttttgacgtccccatatcctccgtgtggcggcatgggatgtcaaaaggaaagggatggagttttctcgcttttggtgtagcaggcctccctttggtcaagtagtcacagacccattttttttttgtcattggattggatacgttacagggttcgctcaccacccacactcgagactgttcattaagtttactcttatggagatgatcgagtggaagttggataaggattggagtcggatgtatcaggtgccaaggaatccttgtattcggtaaaaaatctatgctaagaatcagcatatcccttgcgca

SEQ ID NO: 205409 - DNA, 1264 bp, Zea Mays
ccttattgttcctaagtcctaacacattataatatgttaaacaaagctaatatattagtctccttgtaggttacaacatggtttatcgttctcttgctttgataaatgatggcattttattgtttattacaaaaacaggctcaagaacagcaacttggacgcatgtgtacttggagctctcgaggttcttgccactggtgttacaatcacgttcttggacagagctggccggagaatcctccttattatatcttcttgtgggatgaccctaagccttcttgcggttgctgttgtattttacatcaaggataatatttcacatgattctgacatgcataacatcttaagtatggtgtcgttggttggtgtcgtggcttatgtcattgccttctgcttcggcatgggtgccattccatggatcattatgtctgaggtatagtacctcaacacatgagatgcttgagacacatgctgaaagctctctgaacgaagggattattctcgaaactttgcatatcgacagatccttccggttagcatcaagagtgtggcaggaagctttgcgaccctagccaactggttgacatcctttgggataacaatgacagcaaatttgctcttgagctggagtgctgcaggcacatttgcctcctacatggtcgtgagtgcgttcactctaatgttcgtcatcctctgggtgccagagacgaagggaagaacccttgaggagatacagtggtccttccagtagtgagctgcagcagcattcatcagtaaatgcagtcatcagcaaggtctggtctgagctgctgtatgtggtgtggcggcatttcttcttctttttgtactgcaatctcttctgtggcatcatttggtgtgtaagtttcctgcatgacattgatagtagggattaacttgcatttgtgacaaattagttgatagtgataggatccctttttgacgtccccatatcctccgtgtggcggcatgggatgtcaaaaggaaagggatggagttttctcgcttttggtgtagcaggcctccctttggtcaagtagtcacagacccattttttttttgtcattggattggatacgttacagggttcgctcaccacccacactcgagactgttcattaagtttactcttatggagatgatcgagtggaagttggataaggattggagtcggatgtatcaggtgccaaggaatccttgtattcggtaaaaaatctatgctaagaatcagcatatcccttgcgca

SEQ ID NO: 205410 - DNA, 3848 bp, Zea Mays
agattttcactttccaattcctatttatctcttcttttgttctttaatttggttcgtacgtacaagacttctcggatcactcgtcttctttgattgcatcatcgagacctgcattttcccttccaaattcgtcactcactctggttggccgccttctgtcttctgatccaatccggttgaaatcctccgtctccttccagcaagatctggcacataaggagaatcggcaagaaccattctgcaaatgaggccggatacgcggcttgaatcggcggtgttccagctcaccccgacccgcaccaggtgtgatttagttgtggtggcgaatggacggaaggagaagatagcctctggtctgctgaacccattcgtcgcccatctcaaggttgcacaagaacaaattgccaagggaggctattctatcacacttgagcctgacccagagattgatgcaccctggtttaccaggggcacgttggataggtttgttcgatttgtcagtacaccagaggtcctggagcgggtcacaaccatagagtctgagatattgcagatcgaggatggcattgccgtccagggcagtgacagtcttgggttgagatctgtggaatactataatgggaaattggtggactgcatggaaggtagtaaggcaagttacaatcctgatgcagatagggcacttgttccatacaaggctggtacacaaccaattccaccattgcagaatcatgatgctacacaggaggagaattcaaaggatcaattgctcagagtgctagagactcgcaaaacagtcttacgtaaagaacaggctatggcctttgcacgtgctgtagcagcaggatttgacatcgacaacttggtgtatctgatcacttttgcagagtgttttggtgcttctcgcttgatgaaggcatgtacacaattcattgagttgtggaagcaaaagcatgaaactggacagtggattgaagttgaacctgaagcaatgtctgcacgctccgaatttcctccgtttaatccttctggcattatgtttatgggggacaacatgaagcagactatggaatctatgtctgtttccaacggagatgcaaatggcgaagatgcttctaaagcagatcaaaggacatctcagcactctggtgctccccatgagttcttccatggtccatatcagtcagcatatccaccatgggcaatgcatccaccttactctatgcaaggcatgccttactatcctggaatgaacccatattacccttccccctaccccccaatggatgagaccaggtaccacccctcagaaaggagagtatcaaagaaacactcagatagcaaggactcagaaacttcagatgataaaagtgaccagagtggttcagagagggaaacttcttatggtcacaggtcccataaaaaagataaaagggcaggtaagaagaagcctagtgtggttgtcatccgaaatatcaatgtaacatcgaaaaggcacggatcatcagacagtgactcacaaacaggttcagatgtagtatcagaggatagcgacgattcacacgccaagtccagaaagaaaaagaataatagctcaagttcaaagaaaaaagatgctaggaagatggttttcgagtctgcagatgaatatagcaagaatggaatgtcatatgggcaagatggagaccaagggagctggaatgttttccagagtttcctgctaagagctgatgagaaaagagataatgacgcggacctattcgccagtgagaaaaaagcacccccagcaaggatgaaggagagcacaagcgttgatgttgattcaattctcttggtggagcaaaattctgctggggccaatgaacataatacaacaggtttcagtatggaaaatgagaggattagaccccagcagatgctgtctggtgatgaacttatgatgtatggggaaggtgaaggcatgagctttggatgtgatgacataaaggagattgaagctggaggtgtgagatacagaagaggaacaagtgatgacttcatgatatatggacaggaaaagtcaatggacagagggagttctttggatcctcttgcagaagcacagtacaagagccccaccctggttgacaaaaatgtgcacagcttggcagatgaatcgtttatgatacctcttaggtctacctcagaggataaccatgaaccagaatgtcgtactgccattgacattgatgttgagcttccctcaactgttcagaagatatcagatgctaaagctggtagtcagcttttctatgagccagctgaattgatgccggagcgtggatgtgaagacgtttcgtttggatatgatccagcaatggattataatagtcagatacagagtcaatctgccaccatggttgaagatgcacatatggaagatgcattgttgagcactgtggatgaaataaagaagccagagaaagacaagaagctaagaagttcacaggagagtttggataaacgtagaaaagatgcttcagcgaggaggttgtcatcatcaaaaggcccgctgactgatgcacagaaacgcgcacaaaacttgcgaatatataaagcggaccttcagaaggcaaagaaagagcaggaagaggaacagatcaaacggctagaaaggcttaagctagagaggcaaaagaggattgctgcaagaagcagcacttccaatgcaccaacaccacagcagcccagagtaaagccttctcccaaggtttcccccagcacctacaagagctcaaagctcagcgataccgaacttgcatcctcttcacctctcagaaaatttcctatcaaaactaccccagggactgatcctgaaaaaacagcaaaatcaagcaaactaaatgacaatactaatgcagttagtaagccaaccttgacagacatgaaggagagaagtgggaggaccgaatcatccaacgagagattgagaaaacttgctgaacctaaaaccaacagttcgactggccatactttgaattccaagtcagcaagcgtggaccgcccgcggagaaaaagcatgccacaagatagccagacaaagaaaatttcagctataatgcagcttgaccagagtaaatcagcaacactaccagaactgaaggtcaaatactcgcaagctcctgctgttgtgaaaaatgcagtagctagtagagagagaaaagaggtttcagctggagctaaatctcttcgtacaacagaaactgctagtgtaaaggaaaccaacggtaacatctcaaggatgaacagcagcgacgataatgtggtggttgagaagaccgttgtgatgctcgaagatgaggcggtcattctacattctggaagaaatgcagcaaaggaaacttgtagtgatgacaggacagagaagcccagcccagaatcggagtacatagctatcagggctccgctgtctccagttattcttccggaggctgagagatctgatgacctggggagctcatatgaggtggtgactgagtgtctaaaggatgaacctgaggagccaaccttgggcgccgtggagaaaccttaccaggccccctttgctagggtgacatcgctggagaatgcatcagacaacagtccattacctgaatcacttgcgcatgcaaatagcattaaggctcgagtgcctgagcctgtgtacacagtttcagttgagggccatgtggtaagtgaaaagcctcgaagcaaagagccaaaaggcttgaggaaacttttgaaatttggcaggaaaagccatgctgagggcgcaatggattcatcagttgacgaagcctcagcaggagatggggattcttgcttttcag

SEQ ID NO: 205411 - DNA, 1443 bp, Zea Mays
agtagccgtatttgtcacgcattgtttgtatcatgatggggccatttgttatcttatttacaaatctcgtcgtcgagtgctttcagcagattgttttgattaatctggttttttcggtacttggggattgggatgttgtcaatctgatgaatgaattgcatattttaaggtctttactgcactagaagtagagtagatgggttataaatatacaaatctcagcttcctatccattctttctatttagagtcctaggcaccacatagtatatagcagcagtgctttgctcagtccactttgttgaggctgggttgagagtgtaggagtaaagcctcaagtctctttggaccgtcgaggatcgatcaggcgggcagaagcggtcgtcgccggacaagacgcataggtccaccatggatggcgtctaccaccatcaccaccaccaagagtcgccgttgacgggcaacggcgtcgccaccgccggtgagaagctaggcgtggagcggttcgagctgccgctgatctacatctcgctgtcgcggaaggagaaggaagacgatttccttgcgatgaagggcaccaagctgccccagcggcccaagaaaagggctaagaacgtggacaagaccctccaatttgtcttcccgggtatgtggttgtccgatttgacgaggggacggtacgaggtgcgggagaagaaatgcgtgaagaagaagcgaagagggctgaaagggatggagagcatggacagcgactcggagtaataaggtggaggcgcggcgcagccatcttccatgggggtgggagtcgaggaagaaggggccctagagaaggaggaaaggaggagacgttgagggcaagagtgagcggtcgcgcctgctcaccttgagccgccgccgcgctggaagcgtcggaggacggcggtgcttgccacacacagggctgtgtttctggcggtcgtgaggtttttttgttccttgatgctgagctgcgtctccgcggccgctgtttgcagcatgtaaccctgaaactctgcgatccgtctatctctgccttcttcattttttctcatgcgctttcgagccacctgaaacgagacggttggattcattcgattgcaccggtgacggtaaggtgaaaacgacacaccaccggtggctagttgttggactgggcttgggttcctctgaagggaatgggccctggctcttttagtcgcattgcgcaagttgtgaagcccgggaaatgttagaatatttcaagtgcgccttctgactatcttgccctacttgctgcctccggctagataaataaaaaaaacggcaaacgcttgtcgctgactcgcagtggctgagatctcgatgagcacgcacgactagatccagccagagaggcatgtgggggtttttattttaggagcttgacaatgatctggcggatgccaac

SEQ ID NO: 205412 - DNA, 2238 bp, Zea Mays
ccgtcactggctgcgacggcggcaagaaatcggattaggacgagtgtagggggtacttgtcttaggaaaggggatggggggtctctgctcgaaggtctcagctgtagacaagtcaccgagcgacactgcgtttggccggaaccaggtcaccgatcatgatccgggggcgtcgttggagttggagaagcagccggtgtccggaaaggcagctgcaccggcaaagcggctggacgagcagcagcagcagcatcagtctttctcgttcctagagagcgtcgtccctggggttgcttttcatgcccgggctaatgctagcggcgaaacggggcccaggacctcgccgcaactgaccagatcgctgtcgcagagggatggcgtgggcaaggcaaaagccggtgctgacaaggtttcagaagtgagctcaattttaggtagagctagcactgttgggcttgaaaaggcagtggaggttctggacacacttggcagtagcatgacaagttttaattctagccgtggttttgtgtcaagttctgcagcaaagggaaacaaaatatccatgctggcttttgagatggcaaatactatagttaaaggctctaatctgatgcattctttatcggagcttagcataaagcatctgaaggaggtggtgcttcattcagaacttcagaaggtgttcaacaccttatatccaaagattttgatgaactgctcaagatggcagctgccgacaaaagggaagagttagaagtattcacaaaagaggtcattcgctttggaaaccgttgcaaggatcctcagtggcataacttggaccgctactttgaaaagctggcatccgaactagccccatgaagttatctgaaaggaaaagcagaatcagtgatgcagaaactggttacatgtgttcaaaatacagttgaattatatcatgaattgcatgctttggatagattggaacatgattatcgccttaaacagaaagaacaggatggcttgagtttaagaggagacagtctggatatactgaagcaggcagtgaaggtccagagtaagcatgttaaaagtatgaaaaagaaatcactttggtccaagaatttggaagaggtggtggtaaagcttgtagatattgtccacttcttacatttggagatatataacgccttcggtcatcctgacaaggaagagccacaagaacgtggcaaacaccataatagattgggaccagcaggccttgcgttgcattacgctagtatcatcaatcagattgacaatcttgtttctcaatcatgtgcaatgcctccaaatgcaagggatgcattatatcatagtttaccacctatcatcaaatctgctctccgctataaactacaatcgtttgaagtcaaggaagagcttacagcttctcaggtcaaagcagaaatggagaagactttgtggtggcttgtccctttggctagtaacacaaataaggcataccatggcttcggttgggttggagagttggcaaatacaggatctgaaatgaactgcaagctatcagggcagaaggacatgtcccgaatcgagacattgtatcatgctgacaaggagaagactgaagcacttatcctggagctggtcgtgtggcttcatcatcttatcagtaaatcaagacacgccagtggaggtgtaaggtctcccatcaaatctccagtcagctcaccaacacaaaatggcgctgcaatcacactgttgccgggcaaaacgaaaatttcatcaccgattctcacccaagaggatcaggatatgctaagggatgtcaagtacaggaaatttgtcccagggataagcaaaagtcaagagtttgacacaaagtcaagtcacagcaaacggagtaggttgagcaagagcaacagccagtccccagctagtggcaacaggaaataattgctcccagttaggaggtcttccatgcttccagttattgacttcgaaattcacaggaccaaagctttggatttaattgacaggcttgacaacctaaaaatacaacgagcaggaagctaaccggaacgtaaacttgaatgtggtcatccgcagtcttgaaaccccagccgcgatataaacagttactgagtatcagatatgagtagcaaggccggccgttgaactctggtccagtgaaaactgtcgagagtggtccaatgaacgacactaaattgtgtgatactacatgaacaagcacatgtcttt

SEQ ID NO: 205413 - DNA, 678 bp, Zea Mays
ctgctacatgcaatcaaacgtcctacggagaacaagtcgtcgatcgacagccgtgctcgtacgtcgtaggcggcggcatcggggcatggacaggtgcggcggcggcgccatggcgtcgtacctggtggcagtcgtcctgctcgttgcgctcttcgcgtcctctgcaaaatgtcgtcctgagccactcgacggcggcggcaacgttaacggcaatggcacggcgccgccagtcaacggcggcggccccggccccggccccggcgccgtactgaagctgcagttctgcatccagaggaactgcgtgtacgaaggccgtggcaacgccccgtgcttctgctgcggggccttgaagcccaaccagtgctacgaaacgagggaccggtgcagcggcaactgcgtgtagcggtgtagccgcgccgccgccggcgagggcgagcgatgggagatcgatcgatcggtccatcgatctcagccgccgccgccgccatcgaatggctaaacaacgaactgcgtgtttttttttgtttttctgtcttgaagaagaaccttggtaaattgcgctgttatagtgctatatatgatcttctctgatgtacaagcacccttgcgttcaacaatcaaatgatatcatgcatgccgatgttgcgattgggaaaatcgtcatgcactagtgttttg

SEQ ID NO: 205414 - DNA, 1801 bp, Zea Mays
accttagtagtagtaggacgtatctagagccatttctacaagagatagagattaataaaaataaaataggagcggagagagaggggcaggaaataaacgaggatctcaaccacacgcaacacaagaagctgacgaagggctaatcccccggaacccgttaacgctgtgggagtgtgagcccacccggccacccgtttcggctaatcccccgctcgccttctcccatcgccatggctgccgcttcctggtccgcgcccaccacctccttcgcgccggcgccggcgccgccatgggggcggtggaggaccaaggcggcgcctttacccatcaggacgcttccccgccgagtgcttctcaacgcagttggcgaatccgccatggttgctgctggtgacacattgcttggtttgtatgagaaagagcggttaggcctgttgcagtatgccgacgacgagtctaaagaagagaggtactgggaaaccttggatgctgatttgcgttactggaccagatccctgcgcccagtgcagtggtatcctggtcatattgcaaaaacagagaaagaattgaaggaacaattgaggctcatggatgtcgtcatagagatccgtgatgctaggattcccttgtccaccagccatcctaagatggactcatggctaggcaaccggaaaaggatcatagtcttgaatcgcaaggacatgatctcaactgaggatatgaatgcatgggctacttactttggtaatcagggcatcaaagttgttttctccaatggccagctggggtacaatgaaattaggtaggatggcgaaatcagtagcatctgttgcgaacacaaagagaaaggagaagggattgcttcctcgtccggttcgagctggaatagttggatatccaaatgttggcaaatcttccttgattaatcgcttgctaaaacgaagaatgtgcccagcagcacctaggccaggtgtcacaagagagctgaagtgggttcgttttggaacagacctagagttgttagattcacctggaattttacctatgcgaattagtgaccagacatctgcaatcaagctcgctatatgtgatgatattggagaaaggtcatacgattttgctgatgtggcggcgattcttgtgcagatgttgataagacatcctgcagtaggttctgaagcatttcgaagacgatataagattgatgtagatagtgagtgcggtaaaacgtttgtcacaaagctctctgttcacttgttcaatggagacacaagccaggcagctttccgcatattgtctgactacaggaaaggcaaatttggatgggtagcgctggagagacctccaacatgaacaagcgggatatcatagatccttagataaaagacatgtgcttgttcatgtagtatcacacaatttagtgtcgttcattggaccactctcgacagttttcactggacctgcacatatacgaggaattaattcagaatagctgtccatctgatgatctaaagacaaaacttaagaaatgctcctgctgttatcagacagtccagagcaaacgagctgatttgtatgatctattgaatgagctcaactatgtttctatgtaacggaattaggtttgagaaatgaaagattgtatgtctcctaatttagttgctcatgtactttgttcttttaggaaaagttgctcctgtacttctggatgattcattagattcgggaactggtgtaacattttaggcccagacaatagacatccctctacaaattcagtttccctgcttttaagttttct

SEQ ID NO: 205415 - DNA, 1371 bp, Zea Mays
ggtgccgccgtgggtcgtgtgggcgccgacgcgcctagagtagcagcgaggttaacgagtcacttgaagaccaagttggtgaaatacctaggaatcttgagtctaaggcaagttgtgcccttgatcacttttctctttacccaataatgttccaattaatcactatgacatgctcaggttaattttatgggacctaataggttccctagatttgtttatcccacaccttgtttaccactgaacttttgggtagttttgctattgctctacctggttttgggattaatgttacattatgatcctgttcccagttatgctgttgttttaattattgttcatgacaagatcattgtgttgattggaacatccgaacatggagcttaacttgagatatccatgataccacaagggtggaatgggacgcccttggtcgactaattaggaaagctagtggagcactaccttaaccaaaaggggcaagggcgatagaggagctgtgtatagggaggttctcgggtcgatcatgctgcgatggcttttcggacgagggattcctatattgcccttcttagaaaccgtagcgggttttctaaagctagtggaactttgtaaaggcctcatagtggatccctagccattcacctcggaagtgtctaagagccttgaaaccctggctagacgggatacacgacttgtgggtaaagggcgcaacctctgcagagtgtaaaactggtatatcagccatgctcacggtcaagagcgactcaggactctcgcatgattaacttatggaactaaacttaatctgttagatgcattgcgtcgtgggtgttattatcaattgtgatcttttatttaattgggttggtatctacttatgcatagtaaatgctaataaaattctgaccaactctaaaagcaatgcttagctttaaccatctcctttggtaagccttacacttcacatgagatcccaccttcgatgagttcatgcacattattccccacaacttgttgagcgatgaacgtatgtgagctcacccttgctgtactcagatccccccaggtcaagaataggtaccgtaggatgaggcgcatgaaggatgctgtgatgagttcatgagtggtctaggccatcgtctcccagtcaactttggttgctggatcgttgtcttcgtatgatgtaattacttaactattttgtatagaactccattatatataaatgatgttacattcatttctgtaccatgagttatcatatgtgtgagacttgatcctagcacacatgtgaatcgcgcccaggtttggccccctaaatccgggtgtgacaatattgatgagtctaggaagggctagcaaagcagcatc

SEQ ID NO: 205416 - DNA, 2233 bp, Zea Mays
cgcccgctccccgccacaagctcctcctcctctcctccctacacactccagagccagaggcagcacgtgctgccgtgctcgagcacagctaggccgcagctgcatcaccatggcgggcgcgccgctgcggagatcggaccttgacttcgccgacgtctttggcggcccgccgcgccgcgtgtctgggaacgagcaccgctcgcagcgcggctcgcaggacacctcgtcgttcgagtccgcgacgagggcggggagcggcggaccggacacgcccgttttcggggaccgggggagctccgaccgaagaaggcagctcggggaggagttctacaaggacatattccccgggagcgaggcagcgtcgcccaggcggagcggcgccggggattgggggaatgtgttcggcgcgcaggcttcgcctgtctccacggcccgcccgcgatcgagcttctccattcggttcaacagaggcatggacagttcaatgcctacttctccctctcagcaaatgtccaacagaaacgatgatggcacatcttatgcttatagtgttccaacttcacccaatgcatccatgaacaattatcttgctcaaggggcagcccgacaagattcgaagaagaatcccttctcatggcatcgctatccatttctatctaggttccgttctcaaagtggagaaaagaagagcacatctaatcatgtcagctcaatggacaatgaatttgaagggactcctgttaacttggaaagtatcatggccaataacaagttccatttttccttctacaagtgggcaggcaaaggagccttgttagtgttgccagctactgcacaagaaaagtccgtagacatcattggactgagaagcttccctcaagtggtcattcaaggtattgatctaattgattgtgaagacagcatgtcaactgccaccggaacagccaaaaatcagacagattacgaagattcgaaatctggaaaacatagcgcaaactcagcaaccaaggatggagctattcctttactctttgaagactacatgcaaggaacgaaacagagcaatgatcatacaaagaatgatgtttcatcaactaccctgagttctaaaatttctcgatcaccttcaggggagagaagtcgtagtagcagggtgaaggaaaagatgaagggtttcataaaactatttagccctgagagttcaccaaagcgcaaacgagcaccggaaacacaaaggcaaacatctgtggggaaaaatggaaccaaaactgaactgcatgataagttcagcatgtccagtttggaggccagtgaggatgtggaaacggtatgactgaagtgcaagagaggttggacaaaccagttttgacagcgaatagtaaaatggatacagctacgggaagtaatgaggccgcttctaatgagcccatccatgatgatacaaaagacaaagcggccaacacaatagagcatgaggacattgaagatcttgatggatgtgtggttgagcatttttctgaagatcatgttcttcataatgatcaggaaaaggagctaataaagatatcagaagctaaaattcgcgaatggtctaggggaaaagaaggaaatattaggtcattgctttcaacactgcaatatgtcttatggcctgagagtggatggaaaccagttccacttgttgatataattgaaggagcagcagttaagaaggcttaccagaaagcattattgtgccttcatccagataagttgcagcaacgaggtgctgccatgcatcagaagtgtatagcagagaaggtttttgacattttacaggaagcatggaaggaattcaattcggtcacttttggatagtactaggagtttatttcactactgtattggtccaatgatctatcgcacaggcatattgcttcccggtgtctgcaacagttagttggttgaaacaacctagaacagtacagcaaatgggcaaccgagagttcggtttgtgaatttcggtgcacagtcaatgccgacctccgccatttcttcaaaattccgactgtaacaagtgtaatatgtaatattggttaatcaggtttaatggatccagacgatgactgaaatgtcatttaaggaatgctttgtgcacagccatttgatgtgtgcctagtagctgttggtgcataaattttgtctaagcttcggatgaaaaaggttatcaatcttttatctgactgttaatttt

SEQ ID NO: 205417 - DNA, 2362 bp, Zea Mays
cgcccgctccccgccacaagctcctcctcctctcctccctacacactccagagccagaggcagcacgtgctgccgtgctcgagcacagctaggccgcagctgcatcaccatggcgggcgcgccgctgcggagatcggaccttgacttcgccgacgtctttggcggcccgccgcgccgcgtgtctgggaacgagcaccgctcgcagcgcggctcgcaggacacctcgtcgttcgagtccgcgacgagggcggggagcggcggaccggacacgcccgttttcggggaccgggggagctccgaccgaagaaggcagctcggggaggagttctacaaggacatattccccgggagcgaggcagcgtcgcccaggcggagcggcgccggggattgggggaatgtgttcggcgcgcaggcttcgcctgtctccacggcccgcccgcgatcgagcttctccattcggttcaacagaggcatggacagttcaatgcctacttctccctctcagcaaatgtccaacagaaacgatgatggcacatcttatgcttatagtgttccaacttcacccaatgcatccatgaacaattatcttgctcaaggggcagcccgacaagattcgaagaagaatcccttctcatggcatcgctatccatttctatctaggttccgttctcaaagtggagaaaagaagagcacatctaatcatgtcagctcaatggacaatgaatttgaagggactcctgttaacttggaaagtatcatggccaataacaagttccatttttccttctacaagtgggcaggcaaaggagccttgttagtgttgccagctactgcacaagaaaagtccgtagacatcattggactgagaagcttccctcaagtggtcattcaaggtattgatctaattgattgtgaagacagcatgtcaactgccaccggaacagccaaaaatcagacagattacgaagattcgaaatctggaaaacatagcgcaaactcagcaaccaaggatggagctattcctttactctttgaagactacatgcaaggaacgaaacagagcaatgatcatacaaagaatgatgtttcatcaactaccctgagttctaaaatttctcgatcaccttcaggggagagaagtcgtagtagcagggtgaaggaaaagatgaagggtttcataaaactatttagccctgagagttcaccaaagcgcaaacgagcaccggaaacacaaaggcaaacatctgtggggaaaaatggaaccaaaactgaactgcatgataagttcagcatgtccagtttggaggccagtgaggatgtggaaacggtacaaatgaacagccagaatgcttttactgccgaaccttttccaatgactgaagtgcaagagaggttggacaaaccagttttgacagcgaatagtaaaatggatacagctacgggaagtaatgaggccgcttctaatgagcccatccatgatgatacaaaagacaaagcggccaacacaatagagcatgaggacattgaagatcttgatggatgtgtggttgagcatttttctgaagatcatgttcttcataatgatcaggaaaaggagctaataaagatatcagaagctaaaattcgcgaatggtctaggggaaaagaaggaaatattaggtcattgctttcaacactgcaatatgtcttatggcctgagagtggatggaaaccagttccacttgttgatataattgaaggagcagcagttaagaaggcttaccagaaagcattattgtgccttcatccagataagttgcagcaacgaggtgctgccatgcatcagaagtgtatagcagagaaggtttttgacattttacaggtgctattaattactgctttcccttgttgaaacactccagcagtccaaatatgctgttccggttgatgtcttgtcacgacactcaagaagcatggaaggaattcaattcggtcacttttggatagtactaggagtttatttcactactgtattggtccaatgatctatcgcacaggcatattgcttcccggtgtctgcaacagttagttggttgaaacaacctagaacagtacagcaaatgggcaaccgagagttcggtttgtgaatttcggtgcacagtcaatgccgacctccgccatttcttcaaaattccgactgtaacaagtgtaatatgtaatattggttaatcaggtttaatggatccagacgatgactgaaatgtcatttaaggaatgctttgtgcacagccatttgatgtgtgcctagtagctgttggtgcataaattttgtctaagcttcggatgaaaaaggttatcaatcttttatctgactgttaatttt

SEQ ID NO: 205418 - DNA, 1712 bp, Zea Mays
cgcccgctccccgccacaagctcctcctcctctcctccctacacactccagagccagaggcagcacgtgctgccgtgctcgagcacagctaggccgcagctgcatcaccatggcgggcgcgccgctgcggagatcggaccttgacttcgccgacgtctttggcggcccgccgcgccgcgtgtctgggaacgagcaccgctcgcagcgcggctcgcaggacacctcgtcgttcgagtccgcgacgagggcggggagcggcggaccggacacgcccgttttcggggaccgggggagctccgaccgaagaaggcagctcggggaggagttctacaaggacatattccccgggagcgaggcagcgtcgcccaggcggagcggcgccggggattgggggaatgtgttcggcgcgcaggcttcgcctgtctccacggcccgcccgcgatcgagcttctccattcggttcaacagaggcatggacagttcaatgcctacttctccctctcagcaaatgtccaacagaaacgatgatggcacatcttatgcttatagtgttccaacttcacccaatgcatccatgaacaattatcttgctcaaggggcagcccgacaagattcgaagaagaatcccttctcatggcatcgctatccatttctatctaggttccgttctcaaagtggagaaaagaagagcacatctaatcatgtcagctcaatggacaatgaatttgaagggactcctgttaacttggaaagtatcatggccaataacaagttccatttttccttctacaagtgggcaggcaaaggagccttgttagtgttgccagctactgcacaagaaaagtccgtagacatcattggactgagaagcttccctcaagtggtcattcaaggtattgatctaattgattgtgaagacagcatgtcaactgccaccggaacagccaaaaatcagacagattacgaagattcgaaatctggaaaacatagcgcaaactcagcaaccaaggatggagctattcctttactctttgaagactacatgcaaggaacgaaacagagcaatgatcatacaaagaatgatgtttcatcaactaccctgagttctaaaatttctcgatcaccttcaggggagagaagtcgtagtagcagggtgaaggaaaagatgaagggtttcataaaactatttagccctgagagttcaccaaagcgcaaacgagcaccggaaacacaaaggcaaacatctgtggggaaaaatggaaccaaaactgaactgcatgataagttcagcatgtccagtttggaggccagtgaggatgtggaaacggtacaaatgaacagccagaatgcttttactgccgaaccttttccaatgactgaagtgcaagagaggttggacaaaccagttttgacagcgaatagtaaaatggatacagctacgggaagtaatgaggccgcttctaatgagcccatccatgatgatacaaaagacaaagcggccaacacaatagagcatgaggacattgaagatcttgatggatgtgtggttgagcatttttctgaagatcatgttcttcataatgatcaggaaaaggagctaataaagatatcagaagctaaaattcgcgaatggtctaggggaaaagaaggaaatattaggtcattgctttcaacactgcaatatatcataaataatgtctcccacggtccca

SEQ ID NO: 205419 - DNA, 428 bp, Zea Mays
gaagaacaaagaagcagctgatgatccaagtagcagagctagttcccaagcatcacggaaggacaaagaagcaggagccagcgcccaatcccggtggcagttcaaagaacacaaaaggcgggaaaaagaaaaagtgatgcagtatcattgtgttgttttttattctgttcgtcatcatacactaagcttctgtgaaaaagaaaaagtcttggacgttgttgttatgttgccattatgccatttttcatgtataagaacttactaagaatcttccattgactcggtaaaatgcaacataaaaaaatggcttcgctagattaaagggccctttgacaaaggttcgccttctctggctattttgtaattcgtctgacaaaacaggttcttttccctatgtttcgtaagttagattttcttacgtagtgtgt

SEQ ID NO: 205420 - DNA, 2736 bp, Zea Mays
accaaaccgccgctcgcgtcggtcacgccaggcctgacgcgagcacatcgcaatcctagccaccaaaacaatgcccggcggcaagcgccgccgcgcacgcaaccccaccgccggcgggcctcagcgtagcgccggcgcaggtcgtcgtcgtcccgtccccgagctcccgtcttttgtctcccccgcttctgtcgccgccgccttctcccccgcctcgggcggccgcagccgcgggcggtgcgcccggcgttgcggcgcctactccgatggcgagtcctcccacgccgtcccctttagctatccttccctccgctcctgctccgcttatccggagcgtgatcaggcgcaggcactggaggtgaccatcgacaccgcaccctgcgccgacccagccgcttccgtcccgatgtactcgtacggccccgccgtgctcggtgagaccgggcttgtgctgagtgcggacgaggaggaggcctgtgatagagggctgcatctcgggttaggattccgggatggaggacacgatgagatggagctcaaattgaaagagctgacagaggaagatgtctccttcaagacgcccaagcggaagcaggagcagagggcgaaggccaacccaggatttttgttgattgggggagtcaggatttacacggaggacatctcatcatcagaatcggatcggatgagcagctctgatgtggatttagagcccaactcaggtgatggggagagatttgagaatgatgatggtgacagtgacgaggaagataggcaaggcgaggagagagattcaatatctgatagcgagtcattaggatcggaatcagatgaagatttgagcaccggggattcttcttcagttgacaatgaggttgttgctgattacatggagggtattggtgggagtgacgagctgttgagcagtaagtggatcactagtatgaatttgggtgatgcagatactatagagcagatgtatacaaatgacaatgatgggtttgtgaagaaggggaaggaaaagcttgagggttatgcactaatgactgcatccgagcagtatgggatgaagaggcggaactcccttgagcagcggaagggaaaaggaatggtttgtgacagggatttgtcaagcatgcaagtgatggaccaggaagatatgttcatggtgaacaatgtctggatgccaaacaggtcaagaaaggggatgaagacaggatcatcatcctctcagctctcacagtcgtggcctaaagatgataggaaaagcaaaaactatcagagcaggccaggtgaaaagaagcagcataggaaggaactcattgcaaagaagcgtcaacaacgagctctaagcagaggagttgacttagggcaaattaatagtaaattgaggaaaatggttgtggatcaggttgacatgttatgttttcatccaatgcactctcgagactgttctcaggtacaacgccttgcatctatttatcaattgaagagcgggtgtcaaggttctggcaagaagagagcccaggcgatttactgcaaggcagcaaggatagtggtttacagaacatctttgcatcatttgtcatgcagtaatagttcaagggttcctgagcagttgtggctgttgcagatcatcctgattacacattactgattctttcaatgaaccattatgacatcatttttcgctacacattcttagtcaactcttgagatttgtaactgtgacattgactgggcactcttccttgccatctgcagatggccaagttcgacttgaaaagcttttggggactgaatctgagaactctgtctcgagctctaaaggcccagcacgactgaagggccattctgctccaggaaagtgtgtaaaacactgggaatccagtggaaataaatctaccaagaaacaggtctccttcgcagagcgtccagtatcttttgtcaagtgtggaaccattgtggactcccttactgaggcaatagctggcccaagtggtggtgatacctcgtgtgttaaacctgttgaaagtaactccacccatctaggctcctttgaggtgcacaccaagggctttggttcaaagatgatggccaaaatgggattcatcgagggcactggccttggtaaagatggccaaggtatagtgcagccgatacaagccgtgcatcgtcccaaatctcttggactaggtgtagaatttgacagtgtggctgaggcgatcaaagcaagggcagaacccatcaaattaatttcagagctgaggcggaatgtgtgggcaccagagacgagtggcgttggctcctttgagaaacacaccaagggttttggctccaaaatgatggtgaatatggggtttgtcccagggtccggactggggaaggatggccagggcattgccacccccttgaccggagtaaggcgaccgaaatcacggggactgggagccgaggacaaatattagcttacaccattttcgcatttgatgtatctttcttgtcgtgttccttgttacatgcggattacatagtttgctgggagggcgaacctttgagcaccctgaatggtgaaacaatgggttttcacttgtttctttcaacttctcaatgaagttttatatatttgttctatcaatgttatatttgtttcatttttctatggcccttgcttgtgcaactgaatgattgtgaataggctcatcactaagtgagaagaggtcaactttatccgct

SEQ ID NO: 205421 - DNA, 1107 bp, Zea Mays
caagagtaacaacaacacgagctgatgtacaacgccttgcatctatttatcaattgaagagcgggtgtcaaggttctggcaagaagagatttgtaactgtgacattgactgggcactcttccttgccatctgcagatggccaagttcgacttgaaaagcttttggggactgaatctgagaactctgtctcgagctctaaaggcccagcacgactgaagggccattctgctccaggaaagtgtgtaaaacactgggaatccagtggaaataaatctaccaagaaacaggtctccttcgcagagcgtccagtatcttttgtcaagtgtggaaccattgtggactcccttactgaggcaatagctggcccaagtggtggtgatacctcgtgtgttaaacctgttgaaagtaactccacccatctaggctcctttgaggtgcacaccaagggctttggttcaaagatgatggccaaaatgggattcatcgagggcactggccttggtaaagatggccaaggtatagtgcagccgatacaagccgtgcatcgtcccaaatctcttggactaggtgtagaatttgacagtgtggctgaggcgatcaaagcaagggcagaacccatcaaattaatttcagagctgaggcggaatgtgtgggcaccagagacgagtggcgttggctcctttgagaaacacaccaagggttttggctccaaaatgatggtgaatatggggtttgtcccagggtccggactggggaaggatggccagggcattgccacccccttgaccggagtaaggcgaccgaaatcacggggactgggagccgaggacaaatattagcttacaccattttcgcatttgatgtatctttcttgtcgtgttccttgttacatgcggattacatagtttgctgggagggcgaacctttgagcaccctgaatggtgaaacaatgggttttcacttgtttctttcaacttctcaatgaagttttatatatttgttctatcaatgttatatttgtttcatttttctatggcccttgcttgtgcaactgaatgattgtgaataggctcatcactaagtgagaagaggtcaactttatccgct

SEQ ID NO: 205422 - DNA, 3423 bp, Zea Mays
ctccggtagaactagaagagagactaacccagctgcggcccgatccgagtccgggggcccaaggcgcgggaggcgacggcgatggacgcgcgcccgcgacggcggagggcgcgcacggcggaggaggcggcggcgacgctgcgaaaggcgtggtgccggctgcggctgtccgcgcgcgacccggcgcgcgtgccgccctgggacgccgtcgtgctcacggccgccagccctaagcaggccgcgctctacaaccgccagctcgagcgcgcccgcgccctcggccgcttcccggcctccaccgcggccatcgccgtccccgaccccgacggcgcccgcatcggctccggcgccgccacgctccacgccgtcgctgcccttgttcgccacctcgccgcccaggcttccaaggaagagatcggcgaattccttctcgaaggcggaaatggtggttcgggggatgaggccacgatcgccgcggcagcgggattcatggcgaagaagcacgtgctcttgcttcacgccgggggcgacagcaagagggttccgtgggcgaaccccatggggaaggcgtttctccctctgccttacctggccggggacaatcccgatggacctgttccgctcctgttcgatcacattcttgccatctcctccagtgcaaggcaagctttcaacaaccaaggtgggatcttcataatgaccggggatgttctcccgtgctttgatgcctccaatctatatcttcctgacgatgctgcttgtattgtgacggtgcccaccactctggatgtggctgctaatcatggagtggttgtagcatcaaaggacgctgggatcgatcaggagacctactctctttgcttggttgatgatctcctgcagaagccgacagtgagcgagcttgcagagggccatgccatcctagatgacgggagagcattgcttgacacaggaataatagccgcaacggctaagcttatatgaggatcttgtggcagcatgggtaccagccaagcatgtatggttgcggaaccgtccattgggcaaggaactgatttctgctttaggaaaacaaaggcttttcagcttttgttcatatgacttttcatttctacattttggcacatccgcggaggttcttgatcacctggcgggttcctattctggacttgtaggtcgaaggcatatgtgttcactaccagagaccactgcttgtgatattgcagcgacagctattattttgtgtacaaagatttcttctggagtctcaataggagaggatacattggtttatgattcagtactttccggtagaatacggatcggctcgcaatgtattattgtctcggtgaatatacgtgagtttgatggtagcgcttgtttcacattacctgatcgacattgcctctgggaagtacctttggcaaactctgcggggagggttttggtttactgtggtcttcacgataatccaaaagtttctattcagaaggatgggacgttctgtggcaagccatggataaatgtcttggaagatcttagaatccaggatacggatctgtggggttcaactagccaggacaaatgcttatggactgcaaagctttttcctgtcatgtctctcccagaaatgcttaatgtgggcatgtggcttatgggatcagaatgcgacccagatgggagaatagcttccttgtggcaaaaatcacagaggatcagcctggaagagctgcatcgtgctattgattacagacaactttgcaccgattcgagcaagcatcaggcaaatcttgcagctgacatagccaaggcttgcatgaactatggcttactcggtcgtaatctgtttcaactttgtgaggaaatgttacaaaaagatacatgtttagcagtctatgaagaattactttcattttttccaagtcacagtgaacagtatcctggggttcttcctcagagcagagaatatcaggtcaagatggatctgcttagagcttctggagatctttccactgcatgtacggtggaagagaaagtgtgggcttccattgcaagcgaaactgcgtcggcgataaaatatggatccaaagagccatctagcggcaagatgtcttcaaaccatgaaagcttgcatccaaggaagactgttgtagaattaccagtccgtgtggactttgttgggggttggagtgatacacctccgtggagcttggagcgtccaggttgtgttttgaatatggcgataagtttgcaaggaagccttccagtcggtgctatgatagagacaacagaggaccaccttggagtaaggatcgaagacgacgctggtagacatgtttatatcgataatctggcatctatttcttctccattcaaagaaagtgatccattccgtctcgtcaagtccgctcttattgttactggaatccttggccacgagatattgtcgaaatcaggcctgaacatcaggacatggtcgaatgttcctcgtggaagtggactgggaacttctagtatattatcagctgctgttgttaagggactgttccaagtgatggaggacgacgaaagtgacgacagtgttgctagagccgtgctagtggtggaacaaataatgggcacaggtggtgggtggcaggaccaaattgggggcctatatcctgggatcaagtgcacccagagttttccaggacaaccgttacggttgcaagttgttccagtgctgaccactcctcagctgatccaggaattagaagaacgtctcctgattgtattcactggccaagtaaggctcgcccaccaagtcctgcagaaagtcgtgactcggtacctccgccgcgacagcatcctgatatccagcatcaagaggctagcggaactagccaagatcgggagagaggcgctgatgaacggtgagctggacgagctcggcggcatcctgctggaggcctggaggttgcaccaggagctggaccctttctgcagcaacaggcccgtggacgagctgttcgccttcgccgacccttactgctgcgggtacaaactggtcggagctggtggcggtggcttcgcgttgctgcttgccaagaacccgagctgcgccagagagcttcgacgggcgcttgaagagtccgacaccttcgatgtgaaggtgtacgattggaacgtcgccatgccacggtgaagagtagctggctcaaagggattgtgtacactgtattgctaccatagacgctgttatcattttttgtgtgtcagacgacctagggtggtggggtggttgtgtgactctgatccaaaagtcggctgttatcaagtgagcaggctgtcggtttggttggcttttccaacgcggtcatgccaaaaaaatcgctgatccaatgtctcgtcaaacagttcccgtttcgtccaggcggacggcgg

SEQ ID NO: 205423 - DNA, 3592 bp, Zea Mays
ctgataaccagtcaatgctccggtagaactagaagagagactaacccagctgcggcccgatccgagtccgggggcccaaggcgcgggaggcgacggcgatggacgcgcgcccgcgacggcggagggcgcgcacggcggaggaggcggcggcgacgctgcgaaaggcgtggtgccggctgcggctgtccgcgcgcgacccggcgcgcgtgccgccctgggacgccgtcgtgctcacggccgccagccctaagcaggccgcgctctacaaccgccagctcgagcgcgcccgcgccctcggccgcttcccggcctccaccgcggccatcgccgtccccgaccccgacggcgcccgcatcggctccggcgccgccacgctccacgccgtcgctgcccttgttcgccacctcgccgcccaggcttccaaggaagagatcggcgaattccttctcgaaggcggaaatggtggttcgggggatgaggccacgatcgccgcggcagcgggattcatggcgaagaagcacgtgctcttgcttcacgccgggggcgacagcaagagggttccgtgggcgaaccccatggggaaggcgtttctccctctgccttacctggccggggacaatcccgatggacctgttccgctcctgttcgatcacattcttgccatctcctccagtgcaaggcaagctttcaacaaccaaggttgtagcccagacaaaattgactgatcagtgcacttatacaatgcccaaagaaaagaagggactgccacatctgtttccgtttctaattgcccgtagatgaccaggtgggatcttcataatgaccggggatgttctcccgtgctttgatgcctccaatctatatcttcctgacgatgctgcttgtattgtgacggtgcccaccactctggatgtggctgctaatcatggagtggttgtagcatcaaaggacgctgggatcgatcaggagacctactctctttgcttggttgatgatctcctgcagaagccgacagtgagcgagcttgcagagggccatgccatcctagatgacgggagagcattgcttgacacaggaataatagccgcaacgggtaaagcatggcaggaccttgttacccttgcacattcatctagccattccgtggttaaggagctcatgacttgtaacaaagaggcaagctaccatttccagcattctaagcttatatgaggatcttgtggcagcatgggtaccagccaagcatgtatggttgcggaaccgtccattgggcaaggaactgatttctgctttaggaaaacaaaggcttttcagcttttgttcatatgacttttcatttctacattttggcacatccgcggaggttcttgatcacctggcgggttcctattctggacttgtaggtcgaaggcatatgtgttcactaccagagaccactgcttgtgatattgcagcgacagctattattttgtgtacaaagatttcttctggagtctcaataggagaggatacattggtttatgattcagtactttccggtagaatacggatcggctcgcaatgtattattgtctcggtgaatatacgtgagtttgatggtagcgcttgtttcacattacctgatcgacattgcctctgggaagtacctttggcaaactctgcggggagggttttggtttactgtggtcttcacgataatccaaaagtttctattcagaaggatgggacgttctgtggcaagccatggataaatgtcttggaagatcttagaatccaggatacggatctgtggggttcaactagccaggacaaatgcttatggactgcaaagctttttcctgtcatgtctctcccagaaatgcttaatgtgggcatgtggcttatgggatcagaatgcgacccagatgggagaatagcttccttgtggcaaaaatcacagaggatcagcctggaagagctgcatcgtgctattgattacagacaactttgcaccgattcgagcaagcatcaggcaaatcttgcagctgacatagccaaggcttgcatgaactatggcttactcggtcgtaatctgtttcaactttgtgaggaaatgttacaaaaagatacatgtttagcagtctatgaagaattactttcattttttccaagtcacagtgaacagtatcctggggttcttcctcagagcagagaatatcaggtcaagatggatctgcttagagcttctggagatctttccactgcatgtacggtggaagagaaagtgtgggcttccattgcaagcgaaactgcgtcggcgataaaatatggatccaaagagccatctagcggcaagatgtcttcaaaccatgaaagcttgcatccaaggaagactgttgtagaattaccagtccgtgtggactttgttgggggttggagtgatacacctccgtggagcttggagcgtccaggttgtgttttgaatatggcgataagtttgcaaggaagccttccagtcggtgctatgatagagacaacagaggaccaccttggagtaaggatcgaagacgacgctggtagacatgtttatatcgataatctggcatctatttcttctccattcaaagaaagtgatccattccgtctcgtcaagtccgctcttattgttactggaatccttggccacgagatattgtcgaaatcaggcctgaacatcaggacatggtcgaatgttcctcgtggaagtggactgggaacttctagtatattatcagctgctgttgttaagggactgttccaagtgatggaggacgacgaaagtgacgacagtgttgctagagccgtgctagtggtggaacaaataatgggcacaggtggtgggtggcaggaccaaattgggggcctatatcctgggatcaagtgcacccagagttttccaggacaaccgttacggttgcaagttgttccagtgctgaccactcctcagctgatccaggaattagaagaacgtctcctgattgtattcactggccaacatcctgatatccagcatcaagaggctagcggaactagccaagatcgggagagaggcgctgatgaacggtgagctggacgagctcggcggcatcctgctggaggcctggaggttgcaccaggagctggaccctttctgcagcaacaggcccgtggacgagctgttcgccttcgccgacccttactgctgcgggtacaaactggtcggagctggtggcggtggcttcgcgttgctgcttgccaagaacccgagctgcgccagagagcttcgacgggcgcttgaagagtccgacaccttcgatgtgaaggtgtacgattggaacgtcgccatgccacggtgaagagtagctggctcaaagggattgtgtacactgtattgctaccatagacgctgttatcattttttgtgtgtcagacgacctagggtggtggggtggttgtgtgactctgatccaaaagtcggctgttatcaagtgagcaggctgtcggtttggttggcttttccaacgcggtcatgccaaaaaaatcgctgatccaatgtctcgtcaaacagttcccgtttcgtccaggcggacggcgg

SEQ ID NO: 205424 - DNA, 1842 bp, Zea Mays
cccatttgtcgtctcaccgtgccgcgtgcccgcgtgcgcgcagtgcaactgtgcaaacctagaagaatcggcagcttctgtggacccctctcccactcccctccggccctcccctcccacctcacatcccttcttgcttctcgcctccccacccttcatccacccgccgctcctcaagccccaagctccggcgatatgtcacgcttcggtcgatccggtccgccgccgccgatccgcgacacatattcactcctcgtcctcaacatcaccttccgcacgactgctgatgacctcttcccgctcttcgacaagtacggcgagattgtcgacatctacatcccaagggaccgcaggactggcgactcgcgcggattcgcgttcgtgaggtacaagtacgaggacgaggcacagaaggcagttgataggctcgatgggagattggtagacgggagggagatcatggtgcagtttgccaagtacggtccaaatgctgaacggattaataaagggagaataatggagccagttccaaggcccaggggccgttccagaagccgcagtccaagacggaggtaccgtgatgattatcgagatgactaccaggatagagattatagaaggcgaagccgtagccagagtagagatagatacgcccgtgacaggtacagagatagggattaccgccatcgtagcctgagtcgcagtttgtctcctgcacgaagaagccctagtcatagccgcagccgcagttacactcctgatgattacaagaggcgtggcaaagacagcagcgcatcacctgcaagtaggagccctagtcgctcccctcctcgcaagacgccaccttctcctaagagatctcctgtcaggcacaatgatgaccggtctccacgctcacggagcccttcaacataagcacaattcacttgcaaagcatcttgaacagctcaggatgaatggacttgctctgatcctatgtgtgtgtggctatgcttgtgctcaatggtgggcacttttcagttaaagttttgtagtgctgtctgtcagttgctgcctcaaacttggaatactacttctgtttggcacctgaactgcttatcaaaaactttatttacatggagtgaagatatgctggctgatatgcggtcaacatgcacgtagcttactgttgaagttgatataatctgtgctgtttgcgttgttgatgatgatggctgatgagatgatggaactgcagctgactgcacaatttgctgctgtctgcacctattatgctgacaacaatagaaggcgtggggagaagtttcagcgacagaaatgcctgactagttgattgatcttctggatctgaatgctgatgatttgcttcaaagacttagtctcatgtagtcatgtcatttgtggagtctgctgacccatcaggctctggattttgtaacacgaactttgatatgcttctgtgaaaaaaaatgggtaaccttacataagtgtttagacggtttagtggtgttctgctcttttctttacggtactgaaaaacattgactgttagttgggttgttaacctggttgaatgttatacacacttagttcagctgaattaaattgtttatttgattgttcgttgcgatatgagcgtattccctcctttcttttttaaatgtcgtcctcacacttatcgagatgttaatcatgctcaacttggatcaattagatacaagaaaataataatatttagaagatatattagtattattatatagatcattgattctgtttttatagtgaacctatttggagatacaaatattgctattttttacaaatcaagttaaatttaag

SEQ ID NO: 205425 - DNA, 1819 bp, Zea Mays
gccgcgtgcccgcgtgcgcgcagtgcaactgtgcaaacctagaagaatcggcagcttctgtggacccctctcccactcccctccggccctcccctcccacctcacatcccttcttgcttctcgcctccccacccttcatccacccgccgctcctcaagccccaagctccggcgatatgtcacgcttcggtcgatccggtccgccgccgccgatccgcgacacatattcactcctcgtcctcaacatcaccttccgcacgactgctgatgacctcttcccgctcttcgacaagtacggcgagattgtcgacatctacatcccaagggaccgcaggactggcgactcgcgcggattcgcgttcgtgaggtacaagtacgaggacgaggcacagaaggcagttgataggctcgatgggagattggtagacgggagggagatcatggtgcagtttgccaagtacggtccaaatgctgaacggattaataaagggagaataatggagccagttccaaggcccaggggccgttccagaagccgcagtccaagacggaggtaccgtgatgattatcgagatgactaccaggatagagattatagaaggcgaagccgtagccagagtagagatagatacgcccgtgacaggtacagagatagggattaccgccatcgtagcctgagtcgcagtttgtctcctgcacgaagaagccctagtcatagccgcagccgcagttacactcctgatgattacaagaggcgtggcaaagacagcgcatcacctgcaagtaggagccctagtcgctcccctcctcgcaagacgccaccttctcctaagagatctcctgtcaggcacaatgatgaccggtctccacgctcacggagcccttcaacataagcacaattcacttgcaaagcatcttgaacagctcaggatgaatggacttgctctgatcctatgtgtgtgtggctatgcttgtgctcaatggtgggcacttttcagttaaagttttgtagtgctgtctgtcagttgctgcctcaaacttggaatactacttctgtttggcacctgaactgcttatcaaaaactttatttacatggagtgaagatatgctggctgatatgcggtcaacatgcacgtagcttactgttgaagttgatataatctgtgctgtttgcgttgttgatgatgatggctgatgagatgatggaactgcagctgactgcacaatttgctgctgtctgcacctattatgctgacaacaatagaaggcgtggggagaagtttcagcgacagaaatgcctgactagttgattgatcttctggatctgaatgctgatgatttgcttcaaagacttagtctcatgtagtcatgtcatttgtggagtctgctgacccatcaggctctggattttgtaacacgaactttgatatgcttctgtgaaaaaaaatgggtaaccttacataagtgtttagacggtttagtggtgttctgctcttttctttacggtactgaaaaacattgactgttagttgggttgttaacctggttgaatgttatacacacttagttcagctgaattaaattgtttatttgattgttcgttgcgatatgagcgtattccctcctttcttttttaaatgtcgtcctcacacttatcgagatgttaatcatgctcaacttggatcaattagatacaagaaaataataatatttagaagatatattagtattattatatagatcattgattctgtttttatagtgaacctatttggagatacaaatattgctattttttacaaatcaagttaaatttaag

SEQ ID NO: 205426 - DNA, 1722 bp, Zea Mays
tgtggacccctctcccactcccctccggccctcccctcccacctcacatcccttcttgcttctcgcctccccacccttcatccacccgccgctcctcaagccccaagctccggcgatatgtcacgcttcggtcgatccggtccgccgccgccgatccgcgacacatattcactcctcgtcctcaacatcaccttccgcacgactgctgatgacctcttcccgctcttcgacaagtacggcgagattgtcgacatctacatcccaagggaccgcaggactggcgactcgcgcggattcgcgttcgtgaggtacaagtacgaggacgaggcacagaaggcagttgataggctcgatgggagattggtagacgggagggagatcatggtgcagtttgccaagtacggtccaaatgctgaacggattaataaagggagaataatggagccagttccaaggcccaggggccgttccagaagccgcagtccaagacggaggtaccgtgatgattatcgagatgactaccaggatagagattatagaaggcgaagccgtagccagagtagagatagatacgcccgtgacagtttgtctcctgcacgaagaagccctagtcatagccgcagccgcagttacactcctgatgattacaagaggcgtggcaaagacagcagcgcatcacctgcaagtaggagccctagtcgctcccctcctcgcaagacgccaccttctcctaagagatctcctgtcaggcacaatgatgaccggtctccacgctcacggagcccttcaacataagcacaattcacttgcaaagcatcttgaacagctcaggatgaatggacttgctctgatcctatgtgtgtgtggctatgcttgtgctcaatggtgggcacttttcagttaaagttttgtagtgctgtctgtcagttgctgcctcaaacttggaatactacttctgtttggcacctgaactgcttatcaaaaactttatttacatggagtgaagatatgctggctgatatgcggtcaacatgcacgtagcttactgttgaagttgatataatctgtgctgtttgcgttgttgatgatgatggctgatgagatgatggaactgcagctgactgcacaatttgctgctgtctgcacctattatgctgacaacaatagaaggcgtggggagaagtttcagcgacagaaatgcctgactagttgattgatcttctggatctgaatgctgatgatttgcttcaaagacttagtctcatgtagtcatgtcatttgtggagtctgctgacccatcaggctctggattttgtaacacgaactttgatatgcttctgtgaaaaaaaatgggtaaccttacataagtgtttagacggtttagtggtgttctgctcttttctttacggtactgaaaaacattgactgttagttgggttgttaacctggttgaatgttatacacacttagttcagctgaattaaattgtttatttgattgttcgttgcgatatgagcgtattccctcctttcttttttaaatgtcgtcctcacacttatcgagatgttaatcatgctcaacttggatcaattagatacaagaaaataataatatttagaagatatattagtattattatatagatcattgattctgtttttatagtgaacctatttggagatacaaatattgctattttttacaaatcaagttaaatttaag

SEQ ID NO: 205427 - DNA, 1463 bp, Zea Mays
tgtggacccctctcccactcccctccggccctcccctcccacctcacatcccttcttgcttctcgcctccccacccttcatccacccgccgctcctcaagccccaagctccggcgatatgtcacgcttcggtcgatccggtccgccgccgccgatccgcgacacatattcactcctcgtcctcaacatcaccttccgcacgactgctgatgacctcttcccgctcttcgacaagtacggcgagattgtcgacatctacatcccaagggaccgcaggactggcgactcgcgcggattcgcgttcgtgaggtacaagtacgaggacgaggcacagaaggcagttgataggctcgatgggagattggtagacgggagggagatcatggtgcagtttgccaagtacggtccaaatgctgaacggattaataaagggagaataatggagccagttccaaggcccaggggccgttccagaagccgcagtccaagacggaggtaccgtgatgattatcgagatgactaccaggatagagattatagaaggcgaagccgtagccagagtagagatagatacgcccgtgacaggtacagagatagggattaccgccatcgtagcctgagtcgcaggtacagtcctgatgattacaagaagcgtgggagagacaggcatatgcacagaacatttgtttaattgttccatattgctggtttgcacttattcaccacatcatctgctgtgattatgggcagtttgtctcctgcacgaagaagccctagtcatagccgcagccgcagttacactcctgatgattacaagaggcgtggcaaagacagcgcatcacctgcaagtaggagccctagtcgctcccctcctcgcaagacgccaccttctcctaagagatctcctgtcaggcacaatgatgaccggtctccacgctcacggagcccttcaacataagcacaattcacttgcaaagcatcttgaacagctcaggatgaatggacttgctctgatcctatgtgtgtgtggctatgcttgtgctcaatggtgggcacttttcagttaaagttttgtagtgctgtctgtcagttgctgcctcaaacttggaatactacttctgtttggcacctgaactgcttatcaaaaactttatgtataccagttacattccacttttaaccttcatattagtattaccatattataactgtcttttcagtatttagtacttactattcatggtgacttgcacctttctagttacatggagtgaagatatgctggctgatatgcggtcaacatgcacgtagcttactgttgaagttgatataatctgtgctgtttgcgttgttgatgatgatggctgatgagatgatggaactgcagctgactgcacaatttgctgctgtctgcacctattatgctgacaatgagcaactcatggtcaaccatattattggtgg

SEQ ID NO: 205428 - DNA, 1466 bp, Zea Mays
tgtggacccctctcccactcccctccggccctcccctcccacctcacatcccttcttgcttctcgcctccccacccttcatccacccgccgctcctcaagccccaagctccggcgatatgtcacgcttcggtcgatccggtccgccgccgccgatccgcgacacatattcactcctcgtcctcaacatcaccttccgcacgactgctgatgacctcttcccgctcttcgacaagtacggcgagattgtcgacatctacatcccaagggaccgcaggactggcgactcgcgcggattcgcgttcgtgaggtacaagtacgaggacgaggcacagaaggcagttgataggctcgatgggagattggtagacgggagggagatcatggtgcagtttgccaagtacggtccaaatgctgaacggattaataaagggagaataatggagccagttccaaggcccaggggccgttccagaagccgcagtccaagacggaggtaccgtgatgattatcgagatgactaccaggatagagattatagaaggcgaagccgtagccagagtagagatagatacgcccgtgacaggtacagagatagggattaccgccatcgtagcctgagtcgcaggtacagtcctgatgattacaagaagcgtgggagagacaggcatatgcacagaacatttgtttaattgttccatattgctggtttgcacttattcaccacatcatctgctgtgattatgggcagtttgtctcctgcacgaagaagccctagtcatagccgcagccgcagttacactcctgatgattacaagaggcgtggcaaagacagcagcgcatcacctgcaagtaggagccctagtcgctcccctcctcgcaagacgccaccttctcctaagagatctcctgtcaggcacaatgatgaccggtctccacgctcacggagcccttcaacataagcacaattcacttgcaaagcatcttgaacagctcaggatgaatggacttgctctgatcctatgtgtgtgtggctatgcttgtgctcaatggtgggcacttttcagttaaagttttgtagtgctgtctgtcagttgctgcctcaaacttggaatactacttctgtttggcacctgaactgcttatcaaaaactttatgtataccagttacattccacttttaaccttcatattagtattaccatattataactgtcttttcagtatttagtacttactattcatggtgacttgcacctttctagttacatggagtgaagatatgctggctgatatgcggtcaacatgcacgtagcttactgttgaagttgatataatctgtgctgtttgcgttgttgatgatgatggctgatgagatgatggaactgcagctgactgcacaatttgctgctgtctgcacctattatgctgacaatgagcaactcatggtcaaccatattattggtgg

SEQ ID NO: 205429 - DNA, 1722 bp, Zea Mays
atcccttctgtggaccaattctataagcttgacagaaattcagaatgcacgtggggtcatggatgttctttcagagatgttaaatgctatcgatcctggtaacagagagggtctaaggcaggaggtcattgtggaccttgtggaccaatgtcgttcatacaagcaaagagtggtgcagcttgtcaactcaacatcggatgaggacctattaagtcagggccttactttgaatgatgatttacaacgtgttttagcaaagcacgatgcaattgctgctggcatagccattcgattacaaaaaccaaaatcagccccggcccgcgcagacagttctccaacgaagcctgagccgacaaaggaaacagaacaaaggtctgctaaagttgccagtagtgtgactccatttgagcagttagcacttcctgcaccaccatcatcaagtgcttcaaagtctcatggagaatcagctgttagcccaaatattgatttgcttagtggtgatgagttttttaaaccagaacctgttcattcccaagctcttgttcctttagtcactcaggcttcagcttcttcaagccccagtactttagaccttttagacatgttttctgatagcaatgctatcaataacaccagccagaaccctaccatactttctatatctaactcaaatcctaatacatcagtacaagcctatcctgttccacagcaacctgttccaccacaccatccttcaccatatgctaatggcttaaattcagatacaatgacaccctttgatcaaggctctaagttaacctcagcaagttcatggaatgaacagattgcccatggaatgattccaccacagcagtttgcccatggtcaaggtgaacaaagcaacgaccttccactaccaccctgggaagctctgcctgcagaaactgagcaattagaagctgaccatcctggtgggttgtcagctctgccacaatttggagttagtcaaccccagccagtccaaattacacattctgggcagcaagtgttaccatcgcaattaatgccaactggacaaccgggagggcagttccagcctagatttggggctcaacaaccatatgctacagaaaatacgcagtatggaggaatgtatccgccagtgcaaggcaaccaaccaacgggtatttatccccagcaaatggctggagatgtctaccagcaacagatgtttggtggccagatgataggttatggctatggtccgcagcctggaggctactacgtgccgaacgccgcatatgcatatgccggtgcaaatgatctttctcagaggatgaatggcctctcgatgcaaggcaacagtctgtatggcacacccgcgtcgtcttccctccagcagcgtaacaggccaagcagacctgaagattcgctctttagtgatcttgttagcatcgccaaacaaagccttgtaaaactgcttccaacaaggctggtaacttgtaaaccatgagtttctgctcatagtatataaaattcttgaaatttttttcctattggaaagtagtgggcgagatttgtatatcctgatattgataaagatgtttacatcttttcaagaaattatattttgtttacaagtattctgtaccattaatgtcttatgtatatacataggagcaaaaaaaaaaaaagactccagtatgctgattcctctttgaaattttggcatacgacttcagc

SEQ ID NO: 205430 - DNA, 853 bp, Zea Mays
agagcagtggccaacagcctgctctgctgttcctgcgaagtggaactgcaaccgccaccacgggccccaccgcggcaaatcgccaccgacccagagaatggagactggagccgtctcctcctgtcctcccgagacccgactcaactttttctctgcacgccactgccaattccccgccagcagcagaaatcacactccgcttcatcttccgctggatccctagtctacgccggcctaacgccttgggacctccgctgctgttctctcgccggtcatttttggttcaggggctgatcgcttgatcggatcggtgtcgcagccctatacatcatacatgacgacgcccggctcctgtcctgcgacaaccgccgccacccaccctcccatgtgcgccgctagcgccgcaggtggatcgcaaaaaatggtgcgtccgcgactagtgctcttcggggactccatcaccgagcagtccttccgccccggtggctggggtgccgcactggctgatacctactcgcgcaaggctgatgtagttgtcagaggctatggtggatacaacacaagatgggctcttttcttagtacatcacatctttccgctggatggtttagcaccccctcttgcaaccactattttctttggagcaaatgacgcagccctgttaggaagaactggcgagcgacaacatgttccagtttcagaatataaaaataatctcaaaatgattgttaatcatttgaaggattgttctaattccatggttattgtgcttattacgccacctccaattgatgaagaaggaagagaaagatttgcacggaaccattaggtttcatttgacataaagtttacc

SEQ ID NO: 205431 - DNA, 1019 bp, Zea Mays
agagcagtggccaacagcctgctctgctgttcctgcgaagtggaactgcaaccgccaccacgggccccaccgcggcaaatcgccaccgacccagagaatggagactggagccgtctcctcctgtcctcccgagacccgactcaactttttctctgcacgccactgccaattccccgccagcagcagaaatcacactccgcttcatcttccgctggatccctagtctacgccggcctaacgccttgggacctccgctgctgttctctcgccggtcatttttggttcaggggctgatcgcttgatcggatcggtgtcgcagccctatacatcatacatgacgacgcccggctcctgtcctgcgacaaccgccgccacccaccctcccatgtgcgccgctagcgccgcaggtggatcgcaaaaaatggtgcgtccgcgactagtgctcttcggggactccatcaccgagcagtccttccgccccggtggctggggtgccgcactggctgatacctactcgcgcaaggctgatgtagttgtcagaggctatggtggatacaacacaagatgggctcttttcttagtacatcacatctttccgctggatggtttagcaccccctcttgcaaccactattttctttggagcaaatgacgcagccctgttaggaagaactggcgagcgacaacatgttccagtttcagaatataaaaataatctcaaaatgattgttaatcatttgaaggattgttctaattccatggttattgtgcttattacgccacctccaattgatgaagaaggaagagaaagatttgcacggtcactttatggacagaatgcgaggaagctacctgaaaggacaaatgaaatggctggggtctatgctggttattgcgtcgaactagctagagaaatgtgtataccctgtgttaatatctggtcaaagatgcaggagacagaaggatggcagaaactttacctaagggcccaagggggcggcgacaaggagcagcagtaag

SEQ ID NO: 205432 - DNA, 1003 bp, Zea Mays
agagcagtggccaacagcctgctctgctgttcctgcgaagtggaactgcaaccgccaccacgggccccaccgcggcaaatcgccaccgacccagagaatggagactggagccgtctcctcctgtcctcccgagacccgactcaactttttctctgcacgccactgccaattccccgccagcagcagaaatcacactccgcttcatcttccgctggatccctagtctacgccggcctaacgccttgggacctccgctgctgttctctcgccggtcatttttggttcaggggctgatcgcttgatcggatcggtgtcgcagccctatacatcatacatgacgacgcccggctcctgtcctgcgacaaccgccgccacccaccctcccatgtgcgccgctagcgccgcaggtggatcgcaaaaaatggtgcgtccgcgactagtgctcttcggggactccatcaccgagcagtccttccgccccggtggctggggtgccgcactggctgatacctactcgcgcaaggctgatgtagttgtcagaggctatggtggatacaacacaagatgggctcttttcttagtacatcacatctttccgctggatggtttagcaccccctcttgcaaccactattttctttggagcaaatgacgcagccctgttaggaagaactggcgagcgacaacatgttccagtttcagaatataaaaataatctcaaaatgattgttaatcatttgaaggattgttctaattccatggttattgtgcttattacgccacctccaattgatgaagaaggaagagaaagatttgcacgaatgcgaggaagctacctgaaaggacaaatgaaatggctggggtctatgctggttattgcgtcgaactagctagagaaatgtgtataccctgtgttaatatctggtcaaagatgcaggagacagaaggatggcagaaactttacctaagggcccaagggggcggcgacaaggagcagcagtaag

SEQ ID NO: 205433 - DNA, 1153 bp, Zea Mays
ccagccacaagcccagcctggcttttgtccagaccgtggccattagggttggaggcggcgcggcggcgccaagctaccagccgctactagcctaggacgctggagatccaggctgccgccccttccgtccagaacactcccaagcccgttccgtccactactacgccatctcttcgtctcgcgtctttcagtgtgcaagcaccatgaaggaggataatgcagactggtgcgatgaaaatgttaagatagcttgtgaaatatttgctgaggaagtaagagcaaagaatagatcaggttctcacttaaacaagcttgggtacaacaatgtaatggtcaagttcaaagagaggacagggaaaacttacagcaagctacagttcaaaaataaatgggacaagctgaaaaaagattatagtaattggaaacaactgggaaaagagacaggatgtggttgggaccctaacaagaagttgtatgttgctccagattggtggtggaagaaggcaaacatacaattcaaaggcattagcaagtttaaagacaagtcacttcaaaatgcagaagaattgagtgtcatgtttgaagaccttcggaacaccggtgatgatcactgggccccaaccagtggtgagctaccccaagacagtgaagcacaaatacaagatgccatcaacattgaagatgaaaatgctagtgattgtggggaagacacaccatctagttccacatccaagagacgtcgtgtggttgtgacagataaaggtaaaaaaccaaagactacgggaggacaatggatgcaagaccagatgtctaaacttgttgaattgaataagcagacaacaacatcttgtgagtctatggtcctggcaagaacacaagagacacctggatcttccataaaagatgttatgcaattggtgaaggcatgtggtgctatagctggcagcaaagagcacttcattgcaactcaagtctttaccaaaaaaagtgaaagagaaatgttcttgactttggatacacccgaagagcgctttcagtggttatcaatgaagtatgaatggatgacaatgaacaagaagggctagttagagctactttgttatgcatttatcgtgtcattttttgtttttaccttaccaaacttatctgttat

SEQ ID NO: 205434 - DNA, 820 bp, Zea Mays
gagaaggcaggcgatcccatcctgtgctgttgccccagctgtgtgtgatctctcctcctcgtatggccgtacacgagctctatataaacagaaacaggcttgcccctctcagcacacgcgcctggattctcctcgcccctcgcctccctccacctgcagagagcgccacaagagcgcttcgttctagcagcagcggacgagggagacaagaggaggaagagatggcaggccgtgatggagccaagtcatcggcgtccatggaggaagaggcatgcggggagaagaagtacggaggaatcgcacccaagaagaagcctttgatatccaaggaccacgagcgcgcctacttcgactctgcagactgggtgctgggcaagcaggctgcgaacagtagcacgagggccaccgtcgagtctctgaagcccaagctgaagagaacgcctcaccaccagctgccccctcgcaagcccacctgcgcttccggttgagacgaccggacccatggctacgcgttgcagctgctcggaggtgagggagggaggacgccgaggccgagctcacataaatgtctagctggtcggaaaccgtggtagggacgaatccgagatgcaatctggcttgttggccgttgcattgcagcacctattgtgtctttatcagttcgttatcaattatctggctttaagtttggcatggcacttggtgttcgaatgaactacacaagagagtggacgagagattttgcctcccaaaaatgcgggcattagaaattttgtttctttgtccgcggggtttgtggctttcttctagggaacagaag

SEQ ID NO: 205435 - DNA, 649 bp, Zea Mays
tgtgatggagccaagtcatcggcgtccatggaggaagagccaagtactggaagcggtcaagcaggagagccaagtcatcggcgtccatggaggaagaggcatgcggggagaagaagtacggaggaatcgcacccaagaagaagcctttgatatccaaggaccacgagcgcgcctacttcgactctgcagactgggtgctgggcaagcaggctgcgaacagtagcacgagggccaccgtcgagtctctgaagcccaagctgaagagaacgcctcaccaccagctgccccctcgcaagcccacctgcgcttccggttgagacgaccggacccatggctacgcgttgcagctgctcggaggtgagggagggaggacgccgaggccgagctcacataaatgtctagctggtcggaaaccgtggtagggacgaatccgagatgcaatctggcttgttggccgttgcattgcagcacctattgtgtctttatcagttcgttatcaattatctggctttaagtttggcatggcacttggtgttcgaatgaactacacaagagagtggacgagagattttgcctcccaaaaatgcgggcattagaaattttgtttctttgtccgcggggtttgtggctttcttctagggaacagaag

SEQ ID NO: 205436 - DNA, 1225 bp, Zea Mays
gttcaatcagtgccgcatccttatctgagaaagcaggaaggtgcgccacgctttttcggttatttctccacaggaaagagagagagaaaaaaaagttgcttgtggcactcatcgtcccgcaccccgctgcctttagtcggtcgagatcatgacggggaccaaactttcctgatgagcagcagctctctggccaggcctccctttcgccctgtcactcttgtctcgagcgctcctctagtctctctacacggattatttttgtccaaagcctccagtgctaaggacgccggttattttatcagatctgatctagcctgaatccacctgttgtcaagatccatcagcccaccgaaagcaagcatcgcccacgatgacaaccataggcaaaactgcccagtccgccattttgtgagccatacaatttctttttttataacaaggcgtcagcaggagagcaactatatttatatacatcttccctgatctgtccctgtccggcaacaagaacaccaccaataaggatctcatcactacgagtcaccggcggcgtcgaggatcagggccaagatcctgtacgcgacatcgaagcaaggcctgcggcggctgctggacggggtccactacgaggtgcaggccaccgacccctccgagatgggcttcgacgtcatcagaggccgcgcgcaatgaggcccccgctgcgctctgctcctatttacgtacttacctgtgcgtgggcgtgttctcctactactcactgctcagtagtcagtagtcatctgcgttcgtgtgtgtgtgtgtgtgatcggccggatgctaattggcgttggtgtgctcccgtagcgatcgatgctgccaatctgacgaggcttcgcgtgtaagaaaaaaaagtacaaagtggggaatagccatggcaattaaaatgaagttgtgtttaaaaattgcttgctccagttctcaggatctgcctagttttccggtccgttttttagaatcgttttgatgaaaatcgtccgaaatcgacataaacatgccgagtcgtagtgatagtagtaatccgtcacttttaaaacctaaaccatataaactcgtttatctttctttgcacgtaattcttacgatactcatattaataaaagtttgttagaaaaaagctaaaacaaatagtcccatattaggtactctcacactttccagtctagaccttgtactatatagttgggccaac

SEQ ID NO: 205437 - DNA, 1132 bp, Zea Mays
gcaacgatcaggtccaaaaacgtggtcaccggcggcgtcgaggatcagggccaagatcctgtacgcgacatcgaagcaaggcctgcggcggctgctggacggggtccactacgaggtgcaggccaccgacccctccgagatgggcttcgacgtcatcagaggccgcgcgcaatgaggcccccgctgcgctctgctcctatttacgtacttacctgtgcgtgggcgtgttctcctactactcactgctcagtagtcagtagtcatctgcgttcgtgtgtgtgtgtgtgtgatcggccggatgctaattggcgttggtgtgctcccgtagcgatcgatgctgccaatctgacgaggcttcgcgtgtgtttgctttgctattttcggttctcgggagagatggtgcaggcgtggtgtgttgatgttgatgggtggagtagaagctcaggggagtggcagcggactaatgaaacgtccacctctgcgacgtagaattccactgaaaaaaaaatgctccagtgtaccataagctgcttcagatttgatcgtgttttctctcccatggtggcgtttctacctacatttttcttagaaaacacatttctagttactcgttcagttctgaattataaaatgttttgatttttctagatgtattgcttttgctacgtttagatatacacaatgtctagatagatagttaaagcaataaatctaagaaaaatcttataatttagaacgagacaatatgattcagagcaaagttgggttacgagagcaacatagaagaaaaaaaagtacaaagtggggaatagccatggcaattaaaatgaagttgtgtttaaaaattgcttgctccagttctcaggatctgcctagttttccggtccgttttttagaatcgttttgatgaaaatcgtccgaaatcgacataaacatgccgagtcgtagtgatagtagtaatccgtcacttttaaaacctaaaccatataaactcgtttatctttctttgcacgtaattcttacgatactcatattaataaaagtttgttagaaaaaagctaaaacaaatagtcccatattaggtactctcacactttccagtctagaccttgtactatatagttgggccaac

SEQ ID NO: 205438 - DNA, 639 bp, Zea Mays
gtgtggggggagggagcgaatagtatgtggctattgcagcattattgccttttccccattcgttgagatgagagggagaggaatgaagggaatttttgggctgcttgttgccgcactctttttataaagtcgacccaccctcacctaattttaatgtcaaaagaacccgcagcagggaagactgagagtctgggagatagagagaggagagggagggtttcctcaaagagaacccgaacccaaacccaaaccgaagcagagcacactagcgttccctcaccagggcgtccatcccagcagccatggcgatggcgtacaagatggcgacggaggggatgaacgtgaaggaggagtgccagcgctggttcatggagatgaagtggaagaaggtgcaccgcttcgtggtgtacaagatcgacgagcggtcgcgcgccgtgctggtggacaaggtgggcggccccggggaagggtacgaggagctcgtggccgcgctgcccggcgacgactgccgctacgccgtcttcgacttcgacttcgtcaccgtcgacaactgccagaagagcaagatcttcttcatcgcctgtatccaattgttaaagcactactatggatgagctgtgctggcgactgctgctggct

SEQ ID NO: 205439 - DNA, 2644 bp, Zea Mays
cgcttctcttcggcttcccgtaacggcttttaactaattcctcctcctcctctctctctccccgatccagctagcctgacctcccaccctccctcttgaatccgctcaagttcccgatctcccacctcgtcctccagctcgatcgcgttcgcggcaccccactccgtgctccagaaataagtagccggcggtttcctcgccccaggttttgcggtcgctggggagtgggaattcgttcggctccggtctggccaatgctcctgcggtttcttggagaggccgctgagattgggatccaagctgcgttaggcgagcagcagcagtagccgcatcgagattcgccgtcgttgtccgagggattctccgtttcttgggcggggatttcggttgcggcgggaaaaaaaaaagaattctttcaccggacttggcccaactccgctgtatgttagggtagccttttcgacgcgtttctttcgtcgccccagatccgtctccccgcccgattctttcggagtaatcggcggcggatcggaggcagaggggtttggaggcctgagctccgatggagatgcacgccgacgtcgacgggtgcagcgtgcccctggccgtgctcctcaagcgggagctgtgcaaccagaaggtggagaggccggacatcctgttcggggaggccaacaagagcaagaaaggggaggacttcacgctcctcgtgcccaggtgccaccgcaccccgggcggcagtggcggcggcgagaatgccggcgacgacgacaccatttccgtatttgcgatttttgacggacacaatggctctgcagctgccatatacacccgggagaatctaataagcagtgtgttggctgctattcctccaaatctcacaagtgaggagtggaaagctgcgctgccaagggcactagttgctggttttgtaaaaacagataaagacttccaaggaaaagctgcacgctcagggaccactgtgacttttgttataatagatggatgggttgtcactgtagcatcagttggcgattcacgatgcattctagaatctgctgagggttcaatatattttttatcagcagatcatcgcctggatgctaatgaagaggaggtggagcgtgtaacagcaagtggtggtgaagttgggagaataaatatcgctgggggtgccgggattggtccactcagatgctggccaggtggattgtgtttatcaaggtcaataggtgatatcgacgtcggggaatttatagttcctgtcccacacgtgaagcaagtaaagttgtccaatgctggtgggcggcttgtcattgccagtgatggtgtgtgggatgcactgcactttcaagaggctctgaactacaccaggggcctgccagctgaagctgctgctaatcgaattgtcaaggaagctgtcacttcgaagggattaagagatgatactacttgcatagtagttgatatactacctccagagaagttaagccccccactaaagagacctggaaaaggagtcatcaaagctctgttccggcggaggccctctgatgaaatgtctgaagatcagatggacagaggatgcttagaaactgatgttgtggaggaaatatacgaggagggctctgcaatgcttgctcgaaggttgaatataaattacccagaaggaaatatgttcaagctgcatgattgtgctgtctgccaattggagatgaaacctggtgagggcacctctgttcatggtaacatgcccaaacattcgagagttgacccctggggtggtccttttctctgttcctcctgtcaattgaaaaaggaggccatggaagggaagctacattcaagaaattcccaatctgctgttcaacctgtacctaagtaggccttccttgacgggttcaatacattggttcatacacactaactaccactaacaacagcattagcaaataaagtagactcgtcaatgccatcttattcatcaatcaatgtttgacagagtcatgaattttcacctactacattcttatcaaatggcgatcggtacagattttagagatttatggtgtcatttatatgatgcactacagttgttcggtagtagaaggttcaagtctgagccttatcaagtctatattcagagagaccacaactgacctctaggatcaaatgaactggtagccttaaggtgtgctgctttctgtagttctttcattgattatcaagtctgcacgacttgtctacttgtgaataccagtcgttggttgaaccccatttagtcctaagtcccaacgtagattccttttttttcttcacatgacatactgcttgatgggtggccataaagaccatgttttttccactctcagtcacatgtgatgcttccttattaatcctctcaccacgtggatttccctttctttttcattctttaccatgtgtatagtcacgaggcacatcattacatcacattgactattttttttgtatttgcaccataattctgcagttgtaccattgtactctcaattttctaacattttttttattctttttgttattggaactttcgcttcctatgtacttgaaatggtgttgctgaatttgaatatatttctaagctttatggatgtaatttggt

SEQ ID NO: 205440 - DNA, 561 bp, Zea Mays
acgaccttctctaggaagttagctgccccagctaacttcctacgacctactctaggaagttatcttttagcttttgaccagtcaaacgagccgctaactttctagagtatatgtacaacctctaggaagttaagtaacttcctatgaatttactctaggaagtaatattttttatcctaatctacgaatttaacgttatctttccatcgttcatcctttcttctccaacacccgtcgctctcttctccaactcgaagatgtcggccgccaccgccctgcttcatcgaggcccaagacccaatctccgtttttgataaagaaaccaaacagcaacctagcagtcttccttcacttctctgctcccgacctcgtagcgaatcagatcggggggctagggttccggtgcgcctctacagccggacgcgaggctaggctgggcatggagggaatcgtcacggcctgaaagaggtcctggccggagacgacgaacggggctgcagccgccgggaagcgctacaaagacacagagtcatttcaaactggtctatcaagcaaatcaaa

SEQ ID NO: 205441 - DNA, 1025 bp, Zea Mays
agaatggcatgtcggcaccctgaggtgaagtgggctcagaggatcgacaaggtttacatcactgtacagttacctgacgcaaaggatgctaaggtcaatttggatccagatggtgtcttcacattctctggcagtgctggtacaaacttgtatgaattgaaactagatctgaatgacaaagtaaacgttgaggctagcaaaataagtgtgggggtcaggtccatattctgtatcgtagaaaaagctgaagccaaatggtggaagaaactcgttcgagatgatcaaagggcacctcactttgtgaaagttgattgggacaaatgggttgatgaagatgatgatggtgctgatatcaacatggatgggatggacttctcgaatttcggtggcatgggtggtatgggcggcatgggtggcatgggtgatatggctggtatgggtggtcttggtggcatgggtggtatgggtggtcttggtggcatgggcggtatgggaatggatgatttcgaagatgagagtgatgatgaagaagtgtcgaaacctcaagctgcggacaaggctgttgaggctgaggagacggagtcagcggaaaccaagattgaggcggctcagagcagttgaagatgcttatgatctaagctagattgtatcctcatgttaattctgctgaatcggaggacaaaccttacatttatggtgctggcaagtcccagtggcgtgccatgaaaatttacgttccgtcttttaactgggtatccgagtgtcgtgctcagcatattatggatattatttccgtaatgcttcctttggtcgccaatcatgtggtgaagagtttgttttactggattgctttatttgttttttggtcgccaatcgaatggtctggtcaaaaggactagtggcgacgtgattttgttatttggttctctacccagcaatacaactcccacggtaaagtgctacagaggagcaccttcaactgagcaccttcaactgtttctaatatttattcttccaatattgct

SEQ ID NO: 205442 - DNA, 1258 bp, Zea Mays
ctcatatggccgtatcacaattcacacctagcccatcatacctactcgacctacaccagcccttttcggcctgctactgccgatccgttccctcagcccctcacaccgcttacttgactcctcccgaacttccacatctctgctctgccttcccagtctcccatccctgaaaacctcacaaaaccctcgctcgctccccaccaccccgccgcgccgccgcctgtaccagctgcgtcaagatgagtcggcaccctgaggtgaagtgggctcagaggatcgacaaggtttacatcactgtacagttacctgacgcaaaggatgctaaggtcaatttggatccagatggtgtcttcacattctctggcagtgctggtacaaacttgtatgaattgaaactagatctgaatgacaaagtaaacgttgaggctagcaaaataagtgtgggggtcaggtccatattctgtatcgtagaaaaagctgaagccaaatggtggaagaaactcgttcgagatgatcaaagggcacctcactttgtgaaagttgattgggacaaatgggttgatgaagatgatgatggtgctgatatcaacatggatgggatggacttctcgaatttcggtggcatgggtggtatgggcggcatgggtggcatgggtgatatggctggtatgggtggtcttggtggcatgggtggtatgggtggtcttggtggcatgggcggtatgggaatggatgatttcgaagatgagagtgatgatgaagaagtgtcgaaacctcaagctgcggacaaggctgttgaggctgaggagacggagtcagcggaaaccaagattgaggcggctcagagcagttgaagatgcttatgatctaagctagattgtatcctcatgttaattctgctgaatcggaggacaaaccttacatttatggtgctggcaagtcccagtggcgtgccatgaaaatttacgttccgtcttttaactgggtatccgagtgtcgtgctcagcatattatggatattatttccgtaatgcttcctttggtcgccaatcatgtggtgaagagtttgttttactggattgctttatttgttttttggtcgccaatcgaatggtctggtcaaaaggactagtggcgacgtgattttgttatttggttctctacccagcaatacaactcccacggtaaagtgctacagaggagcaccttcaactgagcaccttcaactgtttctaatatttattcttccaatattgct

SEQ ID NO: 205443 - DNA, 1758 bp, Zea Mays
gccctatcggctttatcttttcttttctatcttggacagccagctttcagtggaaatagaccctttgtttcttctctctctttttttttacccttggtgttctatagtagtctatacccgtgaacgaattaatgggcaatcgtggcttttcgcttcttcgtgcgttgcctgcctatatatgcagcgtgatggggggcatgtccctccggcctgggccgttactagcttagctcatatacgtacgtacgcaggaaggctgcaagagagaggagcaatataatggctggttcttcgatggacactgaagctgcaggcaaggagctcaagcagggcagcggcggcggcggcggctacaccatgccggctactgctcatgcggtggacacagactcgtggcagcaggtggggctgctcctggtgatcggcttcaactgcgcctacgtgctcagcttctccaacctcatgatggtgcccctgggctgggcgtggggcgtcgcctgcctgctgctcgtcggcgccgccgcgtggtacgccaactggctcctcgccggcctccacttcgtcgacggccagaggttcatccgctacagggacctcatgggcttcatattcgggaggaacatgtactacatcacctggttcctgcagttcgcaactctacttctgtgcaacatgggcttcattttgctaggagcaagagcgctcaaggcaatcaacacggagtttacccacaccccagccaggctgcagtggttcatcacggccacgggaatcgtttacttcgccttcgcctacttcgtgccgacgatttctgccatgaggaactggctcgccacgtcggcggcgctgacgttagcttacgacgtcgctctgctggctatcttgatcagagatgggaaatcgaacaagcagaaggactatgacgtccatgccggatcccaagccgagaaggtgttcaacgcgttgggcgccgtcgctgccatcctcgtctgcaacacgtccgggctgctcccggagatacagtcgacggtgcgggagccggcggttcgcggcatgaggcgggcgctgctgctgcagtacaccgccggcgccgcggggtactacggcatcagcgtggcggggtactgggcgtacgggtcagcggtgtcggagtacctccccaacgagctcggcggcccgaggtgggccgccgtcctcatcaacgccaccgccttcctgcagagcattgtgtcccaacacctgttcacggtgccgatccacgaggcgatggacacgcggctgcagcggctggacgaaggcatgttctcccgctacaacctcacgcgccgcgtctgcgcgcgggggctcgtcttcggcttcaacgtcttcgtcaccgcgctgttcccgttcatgggggacttcgtcaacctcgtcggctccttagcgctcgtcccgctcaccttcacgttccccagcatggccgtcctcaagatcaaaggcaagagcggtgggagatgtaacagactttggcattggggcatcatagttctgtcctcggctctctgcgttgctaccaccgccgccgccgttcgtttgatcttcaacaatgctaggatctaccacttcttcgccgacatgtagcgagcgagtagtagtgggattgacatgtgtatcgtcaccacgaggtattgcatgcccaaagcccaacagaaactagggcggggcgacgcccagcgtcagcggccgcggcaccggcgtcccagccctgcaagacggctg

SEQ ID NO: 205444 - DNA, 3273 bp, Zea Mays
gttttggactgcgttgatgttattcttattcagtgcaaagatctagagatacagagtggcatatccacagtctgatactctgattaagttacaattatctatctagtggctgaagatccagggatacagatatctatctagtgactatcttgtttctgttattactctgtactgagtggctttatgcctctatttttgtctgttgatgttggtcatcgttcatattctacttcagtatcttgaaaccaatgtacagtgtacctctattgtaactaggctatgtgtcgtccattcagagtggtatactaaattatatcttcatggatgtttggtaacttagcgattggatttttattggtgattcggtacaaccaaaaaggatttccgaaccttgtcctgtgtccgccattggtcggcgctgcagtttgagaagcacgtgggggcggagtcgaagaaccagaacggtaacatcctcctcatcaacgacaagttgctctacgacctgttccacgagctcagaaattggcccccttgtgcggaggagttttgggcgaccgccggggtactcatgactgtgcctgccaccgaagcctcatctgcgccgcaggggcagcaagcaggcgcgcccgctagctgggaacccaacggggttcaggttgacggcgtgacggtggatccccctttgcctggacggggagccatggtgatgctgaccgaggaggagaaagccagcttgtgtctgcttggtttgaagcaaagcagttccacggctgagttggacactatatgcggcattgaagggcctgctgcggaacagatcaaagatgaagcaggtggtgaccatgtgatgcacgatgctctagtgggagtgacagaaacagagtatcagctagacagtgaccttagagatgttagaggactgctgtccactggacttcttgaaggtttcagggtgacctacatgaaggatgaggtggaggaggttggacggataaatggacagggttattcttgtggctgctcaaagtgtaattacaatagtaatattatgaatgcgtgcgagtttgaggagcattatggtcagtcatttgacaaccagattgatcacatcttcttggataccgggatttctctattcagggtggtggaagcactgaaaccttgtaagcttaacatgcttggggatttcattgaagagaagattggtttccctcctaatttggatgagtataacaagtggaaagcttcatttcagaagagaaaagattatttagatgctgtggcttcagatggttgtttgactcagagttcacaggggttggctgcaggggagatgatttacagtttgagagattacttgaaagattctgtcagcaatagcatctcaaaccttaactggagtgcatctaaaaggcggtctgggagacggtttagacaaggagacactgggacttcaactccaacctttagcggaagcccaggcaaagggggttttggccactctactgacacctcagagaagaaaggcactgaagaaactcacagtgagaacacaggagaccctctcagcatcgatggtgttaagtctgattctccattacctactgcagtaaccactaaccactctaaacacgattcaacaaatttagggctttctttatcaagtccagtaaaaatcacgcaaaggccactccgaaactgcagcatagactcaaagtcaaaagaatcaaaaacaagggataccactttgcatccactgattttcaaggaggatggccttgcagataatactttgttgacttacaagttaaagaatggagaggctctaaagcaagggtataaacggggaacatgcatcatctgtaactgttgcaatcaagagttttctccttcccactttgaagaacatgctggcatggggagaagacggcaaccgtatcacaacatttatacattagaaggattatcacttcataagctagctctgcaactgcaagatcatttgaatccaaatggattcgacaatgctagtgtttccagcgtcagtgactaccataaccttacttcttcaggttgtggcagagaaccttctactaccagtggacctattgttcctctgaaacggactttacaagaaagagtggtagaaacagagagttgctatttctgtgggtatggccacacaacgattggaaatatcaatccagacacgattattttctgtaaccagtgcgagagaccatgccacatcaaatgttacaacaatagagttgtaaaaaagaaggtgcctctggaaattttgaaagaatacatgtgttttcacttcttgtgctgccaagaatgtcaatcactccgtgcccgtctagaagaaggactggaaaagtgtgtagggattaccttccttagacggataagatctaatatttgttggcgacttttaagtggaatggatgcaagtagggatgtcaaactctacatgcctcaggtcattgatatcttcaaagatgcatttatggattctactgatgagcacagtgacatcatctcagacatggttaatggcaaaaatggagaccaagagaaggattttcgaggaatgtattgtgcactgttaactgcaagcacacatgttgtctctgctgcgattctgaaagtgcgcatcgaacaaatcgcagaacttgtcctcattgctactcgtagcgagtgcagaaaaaagggttacttcatacttctcctaaagtcgatcgaggcaaatttgagagcctggaatgtaagccttcttactgcgcctgttgaccctgaaatggcacaaatctggtcagagaagctcgggttcaccattttatcagctgaagagaaggagtcaatgctggagtcgcaccccttggtgatgttcaagaacctagtcttggtgcagaaatcacttgcttgagcaaatctgatctatgtttgtttgtactactttagaaatgaaaacccggtttcgagagcttagacagtacggggttaggccgtgttaagtcattttgtttattatttagatttaaaatatttttaaactatttaaatatatattataaattatatctctacgcttgagcgggaaactggaacagtcccaaacactcccatagagtttagacggactagatgttcgtgtattgttacggttttatgtcacatggacacagatagattttgttttaataaataaaatatatgtgctctaatggttaggtggatgtagatgtgaaatcaataactaaggtgtgg

SEQ ID NO: 205445 - DNA, 3055 bp, Zea Mays
ctttatgtggatggaagttaagctgcctgcctgctgcttgtacctctattgtaactaggctatgtgtcgtccattcagagtggtatactaaattatatcttcatggatgtttggtaacttagcgattggatttttattggtgattcggtacaaccaaaaaggatttccgaaccttgtcctgtgtccgccattggtcggcgctgcagtttgagaagcacgtgggggcggagtcgaagaaccagaacggtaacatcctcctcatcaacgacaagttgctctacgacctgttccacgagctcagaaattggcccccttgtgcggaggagttttgggcgaccgccggggtactcatgactgtgcctgccaccgaagcctcatctgcgccgcaggggcagcaagcaggcgcgcccgctagctgggaacccaacggggttcaggttgacggcgtgacggtggatccccctttgcctggacggggagccatggtgatgctgaccgaggaggagaaagccagcttgtgtctgcttggtttgaagcaaagcagttccacggctgagttggacactatatgcggcattgaagggcctgctgcggaacagatcaaagatgaagcaggtggtgaccatgtgatgcacgatgctctagtgggagtgacagaaacagagtatcagctagacagtgaccttagagatgttagaggactgctgtccactggacttcttgaaggtttcagggtgacctacatgaaggatgaggtggaggaggttggacggataaatggacagggttattcttgtggctgctcaaagtgtaattacaatagtaatattatgaatgcgtgcgagtttgaggagcattatggtcagtcatttgacaaccagattgatcacatcttcttggataccgggatttctctattcagggtggtggaagcactgaaaccttgtaagcttaacatgcttggggatttcattgaagagaagattggtttccctcctaatttggatgagtataacaagtggaaagcttcatttcagaagagaaaagattatttagatgctgtggcttcagatggttgtttgactcagagttcacaggggttggctgcaggggagatgatttacagtttgagagattacttgaaagattctgtcagcaatagcatctcaaaccttaactggagtgcatctaaaaggcggtctgggagacggtttagacaaggagacactgggacttcaactccaacctttagcggaagcccaggcaaagggggttttggccactctactgacacctcagagaagaaaggcactgaagaaactcacagtgagaacacaggagaccctctcagcatcgatggtgttaagtctgattctccattacctactgcagtaaccactaaccactctaaacacgattcaacaaatttagggctttctttatcaagtccagtaaaaatcacgcaaaggccactccgaaactgcagcatagactcaaagtcaaaagaatcaaaaacaagggataccactttgcatccactgattttcaaggaggatggccttgcagataatactttgttgacttacaagttaaagaatggagaggctctaaagcaagggtataaacggggaacatgcatcatctgtaactgttgcaatcaagagttttctccttcccactttgaagaacatgctggcatggggagaagacggcaaccgtatcacaacatttatacattagaaggattatcacttcataagctagctctgcaactgcaagatcatttgaatccaaatggattcgacaatgctagtgtttccagcgtcagtgactaccataaccttacttcttcaggttgtggcagagaaccttctactaccagtggacctattgttcctctgaaacggactttacaagaaagagtggtagaaacagagagttgctatttctgtgggtatggccacacaacgattggaaatatcaatccagacacgattattttctgtaaccagtgcgagagaccatgccacatcaaatgttacaacaatagagttgtaaaaaagaaggtgcctctggaaattttgaaagaatacatgtgttttcacttcttgtgctgccaagaatgtcaatcactccgtgcccgtctagaagaaggactggaaaagtgtgtagggattaccttccttagacggataagatctaatatttgttggcgacttttaagtggaatggatgcaagtagggatgtcaaactctacatgcctcaggtcattgatatcttcaaagatgcatttatggattctactgatgagcacagtgacatcatctcagacatggttaatggcaaaaatggagaccaagagaaggattttcgaggaatgtattgtgcactgttaactgcaagcacacatgttgtctctgctgcgattctgaaagtgcgcatcgaacaaatcgcagaacttgtcctcattgctactcgtagcgagtgcagaaaaaagggttacttcatacttctcctaaagtcgatcgaggcaaatttgagagcctggaatgtaagccttcttactgcgcctgttgaccctgaaatggcacaaatctggtcagagaagctcgggttcaccattttatcagctgaagagaaggagtcaatgctggagtcgcaccccttggtgatgttcaagaacctagtcttggtgcagaaatcacttgcttgagcaaatctgatctatgtttgtttgtactactttagaaatgaaaacccggtttcgagagcttagacagtacggggttaggccgtgttaagtcattttgtttattatttagatttaaaatatttttaaactatttaaatatatattataaattatatctctacgcttgagcgggaaactggaacagtcccaaacactcccatagagtttagacggactagatgttcgtgtattgttacggttttatgtcacatggacacagatagattttgttttaataaataaaatatatgtgctctaatggttaggtggatgtagatgtgaaatcaataactaaggtgtgg

SEQ ID NO: 205446 - DNA, 3201 bp, Zea Mays
cccatctagagctctactgcttggtcggcctactcaccacgctagccgttcgatcccctcccctcgccgcctgccctcgttgtcggccgcctgccgccgccatctcacggcctcctaccttccctcgtggtgggctccaccgcggtctggttcgtcttcgatcgtgtgggatacagcttcctctccgtcctcttgaaagctatcagagcaagcaagccagccactttacctagctagtgttccggctgattccactggcgacgattcgagattggatttttattggtgattcggtacaaccaaaaaggatttccgaaccttgtcctgtgtccgccattggtcggcgctgcagtttgagaagcacgtgggggcggagtcgaagaaccagaacggtaacatcctcctcatcaacgacaagttgctctacgacctgttccacgagctcagaaattggcccccttgtgcggaggagttttgggcgaccgccggggtactcatgactgtgcctgccaccgaagcctcatctgcgccgcaggggcagcaagcaggcgcgcccgctagctgggaacccaacggggttcaggttgacggcgtgacggtggatccccctttgcctggacggggagccatggtgatgctgaccgaggaggagaaagccagcttgtgtctgcttggtttgaagcaaagcagttccacggctgagttggacactatatgcggcattgaagggcctgctgcggaacagatcaaagatgaagcaggtggtgaccatgtgatgcacgatgctctagtgggagtgacagaaacagagtatcagctagacagtgaccttagagatgttagaggactgctgtccactggacttcttgaaggtttcagggtgacctacatgaaggatgaggtggaggaggttggacggataaatggacagggttattcttgtggctgctcaaagtgtaattacaatagtaatattatgaatgcgtgcgagtttgaggagcattatggtcagtcatttgacaaccagattgatcacatcttcttggataccgggatttctctattcagggtggtggaagcactgaaaccttgtaagcttaacatgcttggggatttcattgaagagaagattggtttccctcctaatttggatgagtataacaagtggaaagcttcatttcagaagagaaaagattatttagatgctgtggcttcagatggttgtttgactcagagttcacaggggttggctgcaggggagatgatttacagtttgagagattacttgaaagattctgtcagcaatagcatctcaaaccttaactggagtgcatctaaaaggcggtctgggagacggtttagacaaggagacactgggacttcaactccaacctttagcggaagcccaggcaaagggggttttggccactctactgacacctcagagaagaaaggcactgaagaaactcacagtgagaacacaggagaccctctcagcatcgatggtgttaagtctgattctccattacctactgcagtaaccactaaccactctaaacacgattcaacaaatttagggctttctttatcaagtccagtaaaaatcacgcaaaggccactccgaaactgcagcatagactcaaagtcaaaagaatcaaaaacaagggataccactttgcatccactgattttcaaggaggatggccttgcagataatactttgttgacttacaagttaaagaatggagaggctctaaagcaagggtataaacggggaacatgcatcatctgtaactgttgcaatcaagagttttctccttcccactttgaagaacatgctggcatggggagaagacggcaaccgtatcacaacatttatacattagaaggattatcacttcataagctagctctgcaactgcaagatcatttgaatccaaatggattcgacaatgctagtgtttccagcgtcagtgactaccataaccttacttcttcaggttgtggcagagaaccttctactaccagtggacctattgttcctctgaaacggactttacaagaaagagtggtagaaacagagagttgctatttctgtgggtatggccacacaacgattggaaatatcaatccagacacgattattttctgtaaccagtgcgagagaccatgccacatcaaatgttacaacaatagagttgtaaaaaagaaggtgcctctggaaattttgaaagaatacatgtgttttcacttcttgtgctgccaagaatgtcaatcactccgtgcccgtctagaagaaggactggaaaagtgtgtagggattaccttccttagacggataagatctaatatttgttggcgacttttaagtggaatggatgcaagtagggatgtcaaactctacatgcctcaggtcattgatatcttcaaagatgcatttatggattctactgatgagcacagtgacatcatctcagacatggttaatggcaaaaatggagaccaagagaaggattttcgaggaatgtattgtgcactgttaactgcaagcacacatgttgtctctgctgcgattctgaaagtgcgcatcgaacaaatcgcagaacttgtcctcattgctactcgtagcgagtgcagaaaaaagggttacttcatacttctcctaaagtcgatcgaggcaaatttgagagcctggaatgtaagccttcttactgcgcctgttgaccctgaaatggcacaaatctggtcagagaagctcgggttcaccattttatcagctgaagagaaggagtcaatgctggagtcgcaccccttggtgatgttcaagaacctagtcttggtgcagaaatcacttgcttgagcaaatctgatctatgtttgtttgtactactttagaaatgaaaacccggtttcgagagcttagacagtacggggttaggccgtgttaagtcattttgtttattatttagatttaaaatatttttaaactatttaaatatatattataaattatatctctacgcttgagcgggaaactggaacagtcccaaacactcccatagagtttagacggactagatgttcgtgtattgttacggttttatgtcacatggacacagatagattttgttttaataaataaaatatatgtgctctaatggttaggtggatgtagatgtgaaatcaataactaaggtgtgg

SEQ ID NO: 205447 - DNA, 2955 bp, Zea Mays
cttcatcttctcatgggtttcttctttgcgccgcgcaggtgctgtcgtctgtcgacgccaagggcggacatgggcaaggcccaacccatctagagctctactgcttggtcggcctactcaccacgctagccgttcgatcccctcccctcgccgcctgccctcgttgtcggccgcctgccgccgccatctcacggcctcctaccttccctcgtggtgggctccaccgcggtctggttcgtcttcgatcgtgtgggatacagcttcctctccgtcctcttgaaagctatcagagcaagcaagccagccactttacctagctagtgttccggctgattccactggcgacgattcgagtttgagaagcacgtgggggcggagtcgaagaaccagaacggggcagcaagcaggcgcgcccgctagctgggaacccaacggggttcaggttgacggcgtgacggtggatccccctttgcctggacggggagccatggtgatgctgaccgaggaggagaaagccagcttgtgtctgcttggtttgaagcaaagcagttccacggctgagttggacactatatgcggcattgaagggcctgctgcggaacagatcaaagatgaagcaggtggtgaccatgtgatgcacgatgctctagtgggagtgacagaaacagagtatcagctagacagtgaccttagagatgttagaggactgctgtccactggacttcttgaaggtttcagggtgacctacatgaaggatgaggtggaggaggttggacggataaatggacagggttattcttgtggctgctcaaagtgtaattacaatagtaatattatgaatgcgtgcgagtttgaggagcattatggtcagtcatttgacaaccagattgatcacatcttcttggataccgggatttctctattcagggtggtggaagcactgaaaccttgtaagcttaacatgcttggggatttcattgaagagaagattggtttccctcctaatttggatgagtataacaagtggaaagcttcatttcagaagagaaaagattatttagatgctgtggcttcagatggttgtttgactcagagttcacaggggttggctgcaggggagatgatttacagtttgagagattacttgaaagattctgtcagcaatagcatctcaaaccttaactggagtgcatctaaaaggcggtctgggagacggtttagacaaggagacactgggacttcaactccaacctttagcggaagcccaggcaaagggggttttggccactctactgacacctcagagaagaaaggcactgaagaaactcacaggctttctttatcaagtccagtaaaaatcacgcaaaggccactccgaaactgcagcatagactcaaagtcaaaagaatcaaaaacaagggataccactttgcatccactgattttcaaggaggatggccttgcagataatactttgttgacttacaagttaaagaatggagaggctctaaagcaagggtataaacggggaacatgcatcatctgtaactgttgcaatcaagagttttctccttcccactttgaagaacatgctggcatggggagaagacggcaaccgtatcacaacatttatacattagaaggattatcacttcataagctagctctgcaactgcaagatcatttgaatccaaatggattcgacaatgctagtgtttccagcgtcagtgactaccataaccttacttcttcaggttgtggcagagaaccttctactaccagtggacctattgttcctctgaaacggactttacaagaaagagtggtagaaacagagagttgctatttctgtgggtatggccacacaacgattggaaatatcaatccagacacgattattttctgtaaccagtgcgagagaccatgccacatcaaatgttacaacaatagagttgtaaaaaagaaggtgcctctggaaattttgaaagaatacatgtgttttcacttcttgtgctgccaagaatgtcaatcactccgtgcccgtctagaagaaggactggaaaagtgtgtagggattaccttccttagacggataagatctaatatttgttggcgacttttaagtggaatggatgcaagtagggatgtcaaactctacatgcctcaggtcattgatatcttcaaagatgcatttatggattctactgatgagcacagtgacatcatctcagacatggttaatggcaaaaatggagaccaagagaaggattttcgaggaatgtattgtgcactgttaactgcaagcacacatgttgtctctgctgcgattctgaaagtgcgcatcgaacaaatcgcagaacttgtcctcattgctactcgtagcgagtgcagaaaaaagggttacttcatacttctcctaaagtcgatcgaggcaaatttgagagcctggaatgtaagccttcttactgcgcctgttgaccctgaaatggcacaaatctggtcagagaagctcgggttcaccattttatcagctgaagagaaggagtcaatgctggagtcgcaccccttggtgatgttcaagaacctagtcttggtgcagaaatcacttgcttgagcaaatctgatctatgtttgtttgtactactttagaaatgaaaacccggtttcgagagcttagacagtacggggttaggccgtgttaagtcattttgtttattatttagatttaaaatatttttaaactatttaaatatatattataaattatatctctacgcttgagcgggaaactggaacagtcccaaacactcccatagagtttagacggactagatgttcgtgtattgttacggttttatgtcacatggacacagatagattttgttttaataaataaaatatatgtgctctaatggttaggtggatgtagatgtgaaatcaataactaaggtgtgg

SEQ ID NO: 205448 - DNA, 2461 bp, Zea Mays
aaaaaagacacgggggctgtagctttctccagatatttccatcgcacaactctccagcggctttctctagagatttccatcgcacacctctctagtctccatctgtcgggacgccgcatctcgctttctaccagttgctttgtctcgctttcatcctctccgcgtcacttgggtttcgtcagcgtcaagtactccgcttccgcccgaagacttcgccttctcttggcttgctcaccggctacgtctctttgatcctattgcttcggtgcgtggagattgagatctaaacgacaactattttcttttggttaaccggttcgcaagaagtgcagatgcacatctggttccaaatttgtgcttcgatcgtatctagctgccagcttggtcgtcgacacgtttatttccatagttgtgctcccattcttgcttcgccgattgtttcgttttggtgcacagctgatctcgtttgtgtcaaatggtatgtatgaagttcaaattttgccttcttcgatttatggcatttaaatttgttgcattttgtttgtccagcataaggttgtctcaggtcggagatttccagttgtgctcattgcgaccaagacgaagaagacgacgacgatccgtccacgacgaccgtctcctccacgggcgtattgacgccacaacccgctatgggtaccttgagttggccatcgagcagatggcagagaccgcagatgctagcaacgcacttgaccatgggcttcactaccttcggtcaaccggcaatgcatgtgcggcgagggcgctgttatggtggggatgggataactctgatgctcacgctggtatggccacttccgtcgaactttccttgttcttgcctccttcggtgaacttcctcggttcttgcctccttcggcaacttcatgtactcacggccgatgttgccgccacacaccgtctcttgtgctcctcctccggcgaacatccactgctcgaaccaccatggcgctcagctacagggcgtcatgacagcagctccccaagcgatgcaagccgcctgttcgacgaaatggcgtcatgacagcagctccctaagcgatgcaagccgcttgttcgacgaaatgtgtgagaagcaaaatgaacatgcccgcgtgttaggtcctttatgtgacccaaataactgaatttcagctaagcaccagagctaatatctctaatcagcttccatgggtgaggcaattaacacttactccaatttgttcttccttcacggtgctacttaattcaacacgttcttcgttgcaatgattacagttacacttggtttatcaccattgctttcagcttgacaaagccttatctttgctacatacttaattaatgcttcaaagcactgacaattccaaatgacaggtacaagcttagtttcattgtcactgatggaacatgtgaagcagagttcttttgttttgatagcatagccagaaaaatagtaggaaaaccttgtaacaaccttgttacagcagttacaacttctcaaggtcccctagcagacctagccgatgttatgtgactgaaatttacccttgcagttgccatcaatatgccagcctactctatcacaaacagtcttctctattctgtctattttgacaaatcatgtaagacatgccttcatgccatctaacatgtctaaccatcctgaagagttgtatacacaagatgaagtacctagccttccggtcacacaaaactctccaacaacatctttggcgaaactatctacctgtagcaacgaaagaaacgaggtacgaaacttcttgttttcttgccatgtacaacctattagaaacatcttatttttttcatgcatataacttgataaagtctattcaactggcgctatgcgttctaacatatttagatatgctacagtacataaagatacctttagtactactaaattctaaacttccatacactcacatagttatgtatctattgcattctaataccacaaatataaattaatacagacaaaactcactagcaacaaatttttagtttataaaataaataaataaataaatgaagacaaaatggacttccactttgtcatagcaaactagattcacagattttatgcatttaaccatagggtgatgaccaacgtacaagtgaactcaacaagcaagatttatcatcaccaccgaaaaggtatttgctttttgtgcacctatcaggatcaccatcacttttggaccatgaatgcttcagcttttagcctatttgtggatctatacatatggacttaacacctgcaagcacactgttgctaggtcttgatgtacggtggttgaatgctacttactatatattttttattgtagtctaaattaactctacaactgatatcaactattagagaaaaacaatgttatatgcttatatttggttctgtgcctgcgcattctat

SEQ ID NO: 205449 - DNA, 2248 bp, Zea Mays
tcaggaatcaaataaaatatcaaagagcaaacttgttttggggaccgcttcactgaacctagcagattatgcatctgctgctgaagaggaaatcgagataatcctaccattgtctgtgcctagtagtgcaacagacctggtcccatcactccatcttactttaagcctggcggaagtaagaacatctcaacaatcacctggcgcttcacaacgttctgttattgccccattgtcaccttcctctggtgactctcttgcttctggaaaagatgaggtttctgtcattaaggtgggtctgagaaatctgaaaatgctaagagatctagtgtctacacggaggttcaaaaagactaaccaagactttgacggcagtgagaagtattatgtccacagcgatggtgcagaattttcttgtgatactgactctcttgacgatgatctggatgatagagagcatgacgatgagtttgggggttcagccgttaggaagtccttcagctacggctcactgcagactatgaatgttggtgccctactttatgcgcctaggattgatggagacgatgagggttgggtacattacagtcaccgcaactctgatgttggttatcatgttgagcaagtgccaccccccacagctgaggagcatgcttccatccctttgcggcggaagaggagcatacttccagctcggtggagaaaggtaaaattaccaaaggctaaaggggagcctctgttgaagccgtatggagaggagggtggtgatgatattgactacgatcggcggctgttgaccccttctgatggatctgtttcagagggatcaaatggttctaacagtatggtgtcggtatttggtgatgacgattttgttgtggggaactgggagtcgaaggaagtatttagccgagatggccacttgaagctttctacacaggtgttctttgcatcgatagaccagagaagcgaacgggctgcaggggagagtgcatgcacagcacttgtggctgttgttgcagactggttccaaacaaaccaggacctgatgccaatcaggtcacagtttgacaacctgatccgagaaggatctctggaatggaggagactctgtgagaacgagacctacagagagcgctttcctgataagcactttgatcttgaaactgtccttcatgcaaagatccgtccactcacagttgctcacagtaagtcattcattgggtttttccatcctcaaggcactgaggatgtaactggattcgacttcctcgacggtgcaatgtcattcgataacatctgggacgagataagccgagcagcggagtgctcctccggaaagcctgccctctacattgtcagttggaacgaccacttctttgtcctcaaggttgacgccaatgctatttacatcattgacacgctcggtgagaggctgtctgaaggctgcaaccaggcatacatcttgaagtttgatgacaccaccaccatccacaaaacacctgctgaaaagaaggaaccaagtcctgatcaccgtggacgccgcaaggattcctcagagacctgctcaaccgagcagggcagcggatcggacactgaagagtgcgagcctgtgttgaagggcaaggatgcatgcaaggagtacatcaagagcttcttggccgccatcccgatccgggagctgcaggctgacatcaagaaaggtctcatggcatcaacgcccctgcaccaccgcctccagatcgagttccactacacggaaccccgccccgccgagatcgcggcgccttctccactgcccccattcgaagcccccttcgagttctgctggcccgagccaccgtcaccgccagctgccactgaatccaccgtgacccatccacctgccatggaggccggcataacccaggctgtcgccgttgtatagccggtcctggctgctgctgcggcctagcctagggcaacggttgcttagtttaacatatagagggcggcgcttcttttagcgagcgaattgtgaggtcgagaccagatcgaagatttggctggcttcggccctggtctgctccttttgctgtctaattaagatgaactgactagtatagcttgactgtcttttggtctcagctttcatcatcttgtaaagaaagaaaggatgattgctcctgcacatctttacctgtgaagcgagttcgctggaattgtaatcctttgctacattatctttatgtgaatcatgacctcgtctttt

SEQ ID NO: 205450 - DNA, 3005 bp, Zea Mays
ttttctcctcgtatattcccgtcccaatctccaactgcttcctcaaatcccgccccgccccgccccgacataaatccgggcccctaatcccgatcccgccgccaaaatccaatcctgcgccgtcctctcctctcaattcgtgtgtcgctgggccggttcgggcgcggggatcgagtctcccgtggtgctcttgcagccgagctgggattctcgggggcaattgggttggagtttggatttccgctcggaggttggtggtggtgtggtcgccgggagcctttgacttttttttttgccggagtacggaggagcagggggcctgtttgacctccggtgcggtgatggtggcgcggatgatgcggtggcctcggccgccgccggcgcggaatatccgcgtccgcctggtggtgcggcgggcggagggcctgcccccgcctcctgcgcccctctcgcctgacgggtcccccggccccgaggccgaggcgaaggcgtttgtggaggtgagctggaagggcccgaagatgtcgccgctctcctcgctgcggcgcgcgcagcggcctcccaggaaccagacgcggaaggaggcgctgccggccgtcgccgcggccgctctcgaggatggcgccgccgccgcccctgctctagcggtgtcggcggtggcctgggacgaggagttcgagagggatgcggcgctcacggcgacgtcgcaccgtgagcccgctgcgttccacccctgggacgtcaccttctccgttgtcagcgaatcaaataaaatatcaaagagcaaacttgttttggggaccgcttcactgaacctagcagattatgcatctgctgctgaagaggaaatcgagataatcctaccattgtctgtgcctagtagtgcaacagacctggtcccatcactccatcttactttaagcctggcggaagtaagaacatctcaacaatcacctggcgcttcacaacgttctgttattgccccattgtcaccttcctctggtgactctcttgcttctggaaaagatgaggtttctgtcattaaggtgggtctgagaaatctgaaaatgctaagagatctagtgtctacacggaggttcaaaaagactaaccaagactttgacggcagtgagaagtattatgtccacagcgatggtgcagaattttcttgtgatactgactctcttgacgatgatctggatgatagagagcatgacgatgagtttgggggttcagccgttaggaagtccttcagctacggctcactgcagactatgaatgttggtgccctactttatgcgcctaggattgatggagacgatgagggttgggtacattacagtcaccgcaactctgatgttggttatcatgttgagcaagtgccaccccccacagctgaggagcatgcttccatccctttgcggcggaagaggagcatacttccagctcggtggagaaaggtaaaattaccaaaggctaaaggggagcctctgttgaagccgtatggagaggagggtggtgatgatattgactacgatcggcggctgttgaccccttctgatggatctgtttcagagggatcaaatggttctaacagtatggtgtcggtatttggtgatgacgattttgttgtggggaactgggagtcgaaggaagtatttagccgagatggccacttgaagctttctacacaggtgttctttgcatcgatagaccagagaagcgaacgggctgcaggggagagtgcatgcacagcacttgtggctgttgttgcagactggttccaaacaaaccaggacctgatgccaatcaggtcacagtttgacaacctgatccgagaaggatctctggaatggaggagactctgtgagaacgagacctacagagagcgctttcctgataagcactttgatcttgaaactgtccttcatgcaaagatccgtccactcacagttgctcacagtaagtcattcattgggtttttccatcctcaaggcactgaggatgtaactggattcgacttcctcgacggtgcaatgtcattcgataacatctgggacgagataagccgagcagcggagtgctcctccggaaagcctgccctctacattgtcagttggaacgaccacttctttgtcctcaaggttgacgccaatgctatttacatcattgacacgctcggtgagaggctgtctgaaggctgcaaccaggcatacatcttgaagtttgatgacaccaccaccatccacaaaacacctgctgaaaagaaggaaccaagtcctgatcaccgtggacgccgcaaggattcctcagagacctgctcaaccgagcagggcagcggatcggacactgaagagtgcgagcctgtgttgaagggcaaggatgcatgcaaggagtacatcaagagcttcttggccgccatcccgatccgggagctgcaggctgacatcaagaaaggtctcatggcatcaacgcccctgcaccaccgcctccagatcgagttccactacacggaaccccgccccgccgagatcgcggcgccttctccactgcccccattcgaagcccccttcgagttctgctggcccgagccaccgtcaccgccagctgccactgaatccaccgtgacccatccacctgccatggaggccggcataacccaggctgtcgccgttgtatagccggtcctggctgctgctgcggcctagcctagggcaacggttgcttagtttaacatatagagggcggcgcttcttttagcgagcgaattgtgaggtcgagaccagatcgaagatttggctggcttcggccctggtctgctccttttgctgtctaattaagatgaactgactagtatagcttgactgtcttttggtctcagctttcatcatcttgtaaagaaagaaaggatgattgctcctgcacatctttacctgtgaagcgagttcgctggaattgtaatcctttgctacattatctttatgtgaatcatgacctcgtctttt

SEQ ID NO: 205451 - DNA, 1427 bp, Zea Mays
ggccaggtgcctgcctccatctccctcctccactcgggtcttcacgatgccgccgccgccacacgacatcgcacatccgctcttctccctcccctcgctctcggcggtcgacgtccgctcccctggtgccatcgcttgtgcctggctcccgccatcgctggctccccgatggacctcacggctagtgtggggccatggatccccgacggatcgagggtcgcgccgcctcatgaggtcaaaaattcatctttctggctcgaacagaaaatacctgaagcttcaatttgacgtcgtgtagcaatgaatgcgtgcaaggaatgctcttttacatgttgagaatgaagaaaaattagatgtcgtggaggcatcccaaaacatgtactttccattttgcacattttagtccaaggttcaatacaaactttctcagaaaactatctcaaacactactaatcgttgttggtctgcagggtttcaaattaggacttagctatttttccatcagcctgaaacagcctaataatcttactttgatcccttgggaaaaaatgttcttattattttgagtttttgacctatagtcaggtctagaacatacccctgacatcacactactaatctgggacaaaaatatgtagttctccaaaagaaaattgtttctaatcctgccttgaaaatgtttgctgaaatactatttggtaaagttgctgaaatactgtttatgtatatttctctttcaaattattataatttggatgcgctccttgtttgagtgctccaaatctgaaaaccaagaaggtaagaaaatgtaaaggcattggtccaatcagtaattccaggcatatttagggcacatgcatttaggagtccaagtgtccaacattgctagatcaataagaaataaagattgatgatttgaaaaaaactgaagtagcttaaataaattgtttgattgacaaattcagatagctgtacctttgaacttcctcttacttggaggactttcagtgtttcttctatctgcaggaatgtcctcaggaggcttggagccttcatgctggtcaatcttcccaagaagaaagctgcagccgaaacagtagccagctgaacatgctgacatgttattgcgggtggtcaaggctcaggattcagagcagaagatacacataaatactggtgaatgatgccatcgacgatgatgaactgatcaaacgatggatgatgccatcgatgaaagatggaatggaactcaaatttgggtggtcgcacaagtgtggagacttgaatttatatatacttagtctcaatgttagcacaaacagttgatgagcaagttttcccattgtattttagtttgaatttagagtacacttatgtaagagttatttgacaatgcttatttatgagatattgaatgatatttatat

SEQ ID NO: 205452 - DNA, 1467 bp, Zea Mays
ggccaggtgcctgcctccatctccctcctccactcgggtcttcacgatgccgccgccgccacacgacatcgcacatccgctcttctccctcccctcgctctcggcggtcgacgtccgctcccctggtgccatcgcttgtgcctggctcccgccatcgctggctccccgatggacctcacggctagtgtggggccatggatccccgacggatcgagggtcgcgccgcctcatgagaaaattcatctttctggctcgaacagaaaatacctgaagcttcaatttgacgtcgtgtagcaatgaatgcgtgcaaggaatgctcttttacatgttgagaatgaagaaaaattagatgtcgtggaggcatcccaaaacatgtactttccattttgcacattttagtccaaggttcaatacaaactttctcagaaaactatctcaaacactactaatcgttgttggtctgcagggtttcaaattaggacttagctatttttccatcagcctgaaacagcctaataatcttactttgatcccttgggaaaaaatgttcttattattttgagtttttgacctatagtcaggtctagaacatacccctgacatcacactactaatctgggacaaaaatatgtagttctccaaaagaaaattgtttctaatcctgccttgaaaatgtttgctgaaatactatttggtaaagttgctgaaatactgtttatgtatatttctctttcaaattattataatttggatgcgctccttgtttgagtgctccaaatctgaaaaccaagaaggtaagaaaatgtaaaggcattggtccaatcagtaattccaggcatatttagggcacatgcatttaggagtccaagtgtccaacattgctagatcaataagaaataaagattgatgatttgaaaaaaactgaagtagcttaaataaattgtttgattgacaaattcagatagctgtacctttgaacttcctcttacttggaggactttcagtgtttcttctatctgcaggaatgtcctcaggaggcttggagccttcatgctggtcaatcttcccaagaagaaaggtgtattgagacttcaaatgcttgtagtttgtcttcggctgagtctgcagccgaaacagtagccagctgaacatgctgacatgttattgcgggtggtcaaggctcaggattcagagcagaagatacacataaatactggtgaatgatgccatcgacgatgatgaactgatcaaacgatggatgatgccatcgatgaaagatggaatggaactcaaatttgggtggtcgcacaagtgtggagacttgaatttatatatacttagtctcaatgttagcacaaacagttgatgagcaagttttcccattgtattttagtttgaatttagagtacacttatgtaagagttatttgacaatgcttatttatgagatattgaatgatatttatat

SEQ ID NO: 205453 - DNA, 1548 bp, Zea Mays
ggccaggtgcctgcctccatctccctcctccactcgggtcttcacgatgccgccgccgccacacgacatcgcacatccgctcttctccctcccctcgctctcggcggtcgacgtccgctcccctggtgccatcgcttgtgcctggctcccgccatcgctggctccccgatggacctcacggctagtgtggggccatggatccccgacggatcgagggtcgcgccgcctcatgagaaaattcatctttctggctcgaacagaaaatacctgaagcttcaatttgacgtcgtgtagcaatgaatgcgtgcaaggaatgctcttttacatgttgagaatgaagaaaaattagatgtcgtggaggcatcccaaaacatgtactttccattttgcacattttagtccaaggttcaatacaaactttctcagaaaactatctcaaacactactaatcgttgttggtctgcagggtttcaaattaggacttagctatttttccatcagcctgaaacagcctaataatcttactttgatcccttgggaaaaaatgttcttattattttgagtttttgacctatagtcaggtctagaacatacccctgacatcacactactaatctgggacaaaaatatgtagttctccaaaagaaaattgtttctaatcctgccttgaaaatgtttgctgaaatactatttggtaaagttgctgaaatactgtttatgtatatttctctttcaaattattataatttggatgcgctccttgtttgagtgctccaaatctgaaaaccaagaaggtaagaaaatgtaaaggcattggtccaatcagtaattccaggcatatttagggcacatgcatttaggagtccaagtgtccaacattgctagatcaataagaaataaagattgatgatttgaaaaaaactgaagtagcttaaataaattgtttgattgacaaattcagatagctgtacctttgaacttcctcttacttggaggactttcagtgtttcttctatctgcaggaatgtcctcaggaggcttggagccttcatgctggtcaatcttcccaagaagaaaggtgtattgagacttcaaatgcttgtagtttgtcttcggctgagtgtaatcgtcaatttattcttactgttttctataaacctatgtctgtggtcgtaagaaagaaggtagctacaacagaaatatctgcagccgaaacagtagccagctgaacatgctgacatgttattgcgggtggtcaaggctcaggattcagagcagaagatacacataaatactggtgaatgatgccatcgacgatgatgaactgatcaaacgatggatgatgccatcgatgaaagatggaatggaactcaaatttgggtggtcgcacaagtgtggagacttgaatttatatatacttagtctcaatgttagcacaaacagttgatgagcaagttttcccattgtattttagtttgaatttagagtacacttatgtaagagttatttgacaatgcttatttatgagatattgaatgatatttatat

SEQ ID NO: 205454 - DNA, 1529 bp, Zea Mays
ggccaggtgcctgcctccatctccctcctccactcgggtcttcacgatgccgccgccgccacacgacatcgcacatccgctcttctccctcccctcgctctcggcggtcgacgtccgctcccctggtgccatcgcttgtgcctggctcccgccatcgctggctccccgatggacctcacggctagtgtggggccatggatccccgacggatcgagggtcgcgccgcctcatgagaaaattcatctttctggctcgaacagaaaatacctgaagcttcaatttgacgtcgtgtagcaatgaatgcgtgcaaggaatgctcttttacatgttgagaatgaagaaaaattagatgtcgtggaggcatcccaaaacatgtactttccattttgcacattttagtccaaggttcaatacaaactttctcagaaaactatctcaaacactactaatcgttgttggtctgcagggtttcaaattaggacttagctatttttccatcagcctgaaacagcctaataatcttactttgatcccttgggaaaaaatgttcttattattttgagtttttgacctatagtcaggtctagaacatacccctgacatcacactactaatctgggacaaaaatatgtagttctccaaaagaaaattgtttctaatcctgccttgaaaatgtttgctgaaatactatttggtaaagttgctgaaatactgtttatgtatatttctctttcaaattattataatttggatgcgctccttgtttgagtgctccaaatctgaaaaccaagaaggtaagaaaatgtaaaggcattggtccaatcagtaattccaggcatatttagggcacatgcatttaggagtccaagtgtccaacattgctagatcaataagaaataaagattgatgatttgaaaaaaactgaagtagcttaaataaattgtttgattgacaaattcagatagctgtacctttgaacttcctcttacttggaggactttcagtgtttcttctatctgcaggaatgtcctcaggaggcttggagccttcatgctggtcaatcttcccaagaagaaaggtgtattgagacttcaaatgcttgtagtttgtcttcggctgagtgtaatcgtcaatttattcttactgttttctataaacctatgtctgtggtcgtaagaaagaagctgcagccgaaacagtagccagctgaacatgctgacatgttattgcgggtggtcaaggctcaggattcagagcagaagatacacataaatactggtgaatgatgccatcgacgatgatgaactgatcaaacgatggatgatgccatcgatgaaagatggaatggaactcaaatttgggtggtcgcacaagtgtggagacttgaatttatatatacttagtctcaatgttagcacaaacagttgatgagcaagttttcccattgtattttagtttgaatttagagtacacttatgtaagagttatttgacaatgcttatttatgagatattgaatgatatttatat

SEQ ID NO: 205455 - DNA, 1417 bp, Zea Mays
ggccaggtgcctgcctccatctccctcctccactcgggtcttcacgatgccgccgccgccacacgacatcgcacatccgctcttctccctcccctcgctctcggcggtcgacgtccgctcccctggtgccatcgcttgtgcctggctcccgccatcgctggctccccgatggacctcacggctagtgtggggccatggatccccgacggatcgagggtcgcgccgcctcatgagaaaattcatctttctggctcgaacagaaaatacctgaagcttcaatttgacgtcgtgtagcaatgaatgcgtgcaaggaatgctcttttacatgttgagaatgaagaaaaattagatgtcgtggaggcatcccaaaacatgtactttccattttgcacattttagtccaaggttcaatacaaactttctcagaaaactatctcaaacactactaatcgttgttggtctgcagggtttcaaattaggacttagctatttttccatcagcctgaaacagcctaataatcttactttgatcccttgggaaaaaatgttcttattattttgagtttttgacctatagtcaggtctagaacatacccctgacatcacactactaatctgggacaaaaatatgtagttctccaaaagaaaattgtttctaatcctgccttgaaaatgtttgctgaaatactatttggtaaagttgctgaaatactgtttatgtatatttctctttcaaattattataatttggatgcgctccttgtttgagtgctccaaatctgaaaaccaagaaggtaagaaaatgtaaaggcattggtccaatcagtaattccaggcatatttagggcacatgcatttaggagtccaagtgtccaacattgctagatcaataagaaataaagattgatgatttgaaaaaaactgaagtagcttaaataaattgtttgattgacaaattcagatagctgtacctttgaacttcctcttacttggaggactttcagtgtttcttctatctgcaggaatgtcctcaggaggcttggagccttcatgctggtcaatcttcccaagaagaaagccgaaacagtagccagctgaacatgctgacatgttattgcgggtggtcaaggctcaggattcagagcagaagatacacataaatactggtgaatgatgccatcgacgatgatgaactgatcaaacgatggatgatgccatcgatgaaagatggaatggaactcaaatttgggtggtcgcacaagtgtggagacttgaatttatatatacttagtctcaatgttagcacaaacagttgatgagcaagttttcccattgtattttagtttgaatttagagtacacttatgtaagagttatttgacaatgcttatttatgagatattgaatgatatttatat

SEQ ID NO: 205456 - DNA, 1416 bp, Zea Mays
ccttgtgttatagccatagtgatgttcatatatctctagaatttagctgaagttgaatgctttatatgttcagacttcaattttgatattaaacatgtagattatcgttatttaaatatgagtaagggagatgccaatgtgctaattgtttgtttcttttttctgccattttgatgtgcctgtgccaggtgtagaatataacttttaacatcccactcttgttgcagaaaattcatctttctggctcgaacagaaaatacctgaagcttcaatttgacgtcgtgtagcaatgaatgcgtgcaaggaatgctcttttacatgttgagaatgaagaaaaattagatgtcgtggaggcatcccaaaacatgtactttccattttgcacattttagtccaaggttcaatacaaactttctcagaaaactatctcaaacactactaatcgttgttggtctgcagggtttcaaattaggacttagctatttttccatcagcctgaaacagcctaataatcttactttgatcccttgggaaaaaatgttcttattattttgagtttttgacctatagtcaggtctagaacatacccctgacatcacactactaatctgggacaaaaatatgtagttctccaaaagaaaattgtttctaatcctgccttgaaaatgtttgctgaaatactatttggtaaagttgctgaaatactgtttatgtatatttctctttcaaattattataatttggatgcgctccttgtttgagtgctccaaatctgaaaaccaagaaggtaagaaaatgtaaaggcattggtccaatcagtaattccaggcatatttagggcacatgcatttaggagtccaagtgtccaacattgctagatcaataagaaataaagattgatgatttgaaaaaaactgaagtagcttaaataaattgtttgattgacaaattcagatagctgtacctttgaacttcctcttacttggaggactttcagtgtttcttctatctgcaggaatgtcctcaggaggcttggagccttcatgctggtcaatcttcccaagaagaaagctgcagccgaaacagtagccagctgaacatgctgacatgttattgcgggtggtcaaggctcaggattcagagcagaagatacacataaatactggtgaatgatgccatcgacgatgatgaactgatcaaacgatggatgatgccatcgatgaaagatggaatggaactcaaatttgggtggtcgcacaagtgtggagacttgaatttatatatacttagtctcaatgttagcacaaacagttgatgagcaagttttcccattgtattttagtttgaatttagagtacacttatgtaagagttatttgacaatgcttatttatgagatattgaatgatatttatat

SEQ ID NO: 205457 - DNA, 1079 bp, Zea Mays
gtttatgaatatttatatggatgctgaagctgcaaatccttttgaatattgtgatgtggttaccacaaccacgcacaagtccctcagagggccaagggctggcatgatcttctacaggaaaggccctaagccccccaagaagggccagcctgagggtgctgtttatgattacgaagacaagatcaactttgcagtgttcccatctctccaaggtggccctcacaaccaccagattgctgcacttgctgttgctctacagcaaactatgtcgcctggcttcaaggcctatgcaaagcaagtgaaggccaatgctgttgcaattggaaactatctcatgagcaagggctacaagatggtgactgatggaactgagaaccaccttgttctctgggatctccgcccccttggcttgactggaaacaaggtcgaaaagctatgtgatctttgccacatcacattgaacaagaatgctgtcttcggtgacagcagtgcattgtctccgggtggtgtccgcattggcgcgccagcaatgacctcgaggggtctactggagaaggatttcgagcagattggggagttcctccaccaggcagtgaccatctgcctgaacatccagaaggagtacggcaagctcctcaaggacttcaacaagggcctggtgaacaacaaggacatcgagaacctcaaggtccaggtggagaagtttgccgactccttcgacatgcctgggttcacgcttgagagcatgaaatacaaggagtagatatgcctctttcatgcgcggcaaggtcctcctgtaccgatgtctttccttgtggtggcgcagggtgccatggcactgcattgccgccacacttacgatgatgatgatgggttatggattttgtctacaatgtcagcaggataggctcacaattgccccctgccctccggtttggtcgcctctcaggttttcatttggtagttgttcgcagggaaccatatgagaattgcaatgtcaatcaggtgtttgccaataataattgggtggtttctgctcttgctctgatcattaccatgcgttttttattctgttggtg

SEQ ID NO: 205458 - DNA, 1536 bp, Zea Mays
atttttttgcaattaaacaacttaagagactttacgttaaacatcactatacatgccctaattacaattgcaacagtatcatccgattgaatctactttttaagcagtagaggacagaacagaacaggacccggcccttcctcgttccttcgtttctcctccccgcatttgctggtcgctgtcatacgacggcgccggaattccggtgggacagggccatcctctccgcttgtcccccagttctgcatttccctcttcgcagacattcgagttgggcctgccgccagttcttcagatggccggagcgggcgacgcggccaaggagtacgtcgccggatccgccgccggcgtcgctcaggtcgtagtcggccacccgttcgacacggtcaaggttaaactgcaagctcataataccacggctcatggaaaggtgtacaagaatgccttccactgcaccagtaggatactgcttgacgaaggaattacagggctgtacaaaggtgcgtcatcttcatttattggtatagctgttgaaagctcccttttctttggcacatattcccaagccaaacagttattacaggtactcaaatgatctttccaactaaaagaactaaacatataatcgttgaacagtagctaagtaagcatggagaattgaagattgcaaatcttgagtcaaggcttgaccttagtttagtatagttttctaaagaatgttttttcagggaagctatgaggttggtaggccacatcttcaggtaattatcccttctgctgcatgcagtggagctctgattagctgcatcctcactccaactgagctgaccaaggtagtggcattggtgctaaattcccacttttttctaatcaatataaggacttataatgcatgattcaagtggcatttaatgatgtgatgtcaagactttttccagtgcagaatgcaagttcaagggaaggatgtaatccatggcgccaggtactccagccctctagattgtgctgtgaaaacattggaaagtgaaggggttaagggtatattccgtggtggtttggcaacattattcagagaggcgatcggcaatgctgtcttcttctgcacttatgagtacagtcgatactggatgcacaactatttggattcctcgagattttctggtagcagtcatttcgtggcggcaaaagatattgggataggggttgtaagtggtggcgttagtggaatggcattctggacagctaccctaccgttggatgtggcaaaaaccataatacagactgatccggaccctcatgtgagccgaaaccccttgcagattttgagcatggtttataagagagctgggttgggtggctgttatgctggacttggaccaactctagcaagagcattccctgccaatgcagcagcaattgttgcttgggagtacagcgctaagattctcggtataaagcgagaccagaaaacagaaacaaaccaggtgggaatatgcagttgatgaggaattcaactctgcaatcagccaactcggt

SEQ ID NO: 205459 - DNA, 893 bp, Zea Mays
attcctcctgatgaaggttcgtcggcccaaaccaagtagcgtctagggttttagcctctccaaccgcacgatggacaccgacgcgagaaggcagggggagagaaaatggcgtatttgtcccgcacagccgccgccgtcgccgtcgccgtgaggtcggcggtccgctccgcacctctcactggccgcgtcctcggagcgccactgccttcccttgcctcgccttccgctgcccggtccgcccgaatcctccgcaggacggcggccgcggcgtcggcggggctggagactctaatgccgctgcacagcgcggtggcggccgcgcggcttaggtcctgcatcgtcgtcgactcctcgtgctggagctcgctctcgcaaggtttaaacaagcgcatctgatcatggctaggagctgagcacagaagagaagtgaggacaacgagttagaacgaagtcatctcttttgcagatatttgtaacattttggtcatgagctatgctgaaggaaaaaacttgtacttgtaataaaaaaacacttcagttttttctttaggatatgctttgcctttatgagaggagaggtgcacctgaagaaaccaatgaacattaggaattacaaacaagggctgtaataatgtgattgttgtaaactaattttacctttgatgttcattgaatcatccacagatgtacaactggcatttgttgatgttgggattttatttacgtggatccatgaattacctgcagctcctctttcaaacggttgcttcattattggcattgggatgctcagatattattttcaattccgatgtaggcatcacttgaaatagcttcaattatgtgccttccttgagaattcggttcactctgcttgggttacaatgcctgag

SEQ ID NO: 205460 - DNA, 801 bp, Zea Mays
tcggcccaaaccaagtagcgtctagggttttagcctctccaaccgcacgatggacaccgacgcgagaaggcagggggagagaaaatggcgtatttgtcccgcacagccgccgccgtcgccgtcgccgtgaggtcggcggtccgctccgcacctctcactggccgcgtcctcggagcgccactgccttcccttgcctcgccttccgctgcccggtccgcccgaatcctccgcaggacggcggccgcggcgtcggcggggctggagactctaatgccgctgcacagcgcggtggcggccgcgcggcttaggtcctgcatcgtcgtcgactcctcgtgctggagctcgctctcgcaaggtttaaacaagcgcatctgatcatggctaggagctgagcacagaagagaagtgaggacaacgagttagaacgaagtcatctcttttgcagatatttgtaacatgatatgctttgcctttatgagaggagaggtgcacctgaagaaaccaatgaacattaggaattacaaacaagggctgtaataatgtgattgttgtaaactaattttacctttgatgttcattgaatcatccacagatgtacaactggcatttgttgatgttgggattttatttacgtggatccatgaattacctgcagctcctctttcaaacggttgcttcattattggcattgggatgctcagatattattttcaattccgatgtaggcatcacttgaaatagcttcaattatgtgccttccttgagaattcggttcactctgcttgggttacaatgcctgag

SEQ ID NO: 205461 - DNA, 761 bp, Zea Mays
tcggcccaaaccaagtagcgtctagggttttagcctctccaaccgcacgatggacaccgacgcgagaaggcagggggagagaaaatggcgtatttgtcccgcacagccgccgccgtcgccgtcgccgtgaggtcggcggtccgctccgcacctctcactggccgcgtcctcggagcgccactgccttcccttgcctcgccttccgctgcccggtccgcccgaatcctccgcaggacggcggccgcggcgtcggcggggctggagactctaatgccgctgcacagcgcggtggcggccgcgcggcttaggtcctgcatcgtcgtcgactcctcgtgctggagctcgctctcgcaaggtttaaacaagcgcatctgatcatggctaggagctgagcacagaagagaagtgaggacaacgagatatgctttgcctttatgagaggagaggtgcacctgaagaaaccaatgaacattaggaattacaaacaagggctgtaataatgtgattgttgtaaactaattttacctttgatgttcattgaatcatccacagatgtacaactggcatttgttgatgttgggattttatttacgtggatccatgaattacctgcagctcctctttcaaacggttgcttcattattggcattgggatgctcagatattattttcaattccgatgtaggcatcacttgaaatagcttcaattatgtgccttccttgagaattcggttcactctgcttgggttacaatgcctgag

SEQ ID NO: 205462 - DNA, 1215 bp, Zea Mays
cgtctcgtatgcgtggaggcggccgaggccatgggcgccgagcgggagcacctggaggccgccgtcgggtcggccgtgagcgtccggacgccgggggacatcgtcaccgtcaccgccgccgccgccaccgcgttgagaggcgccgcgacgctgaaggcgagggctctcaaggaggtgtggaacatcgcggcggtgatcccggtggagaagggcccgggcccggtcggcggaggaggaggaggccaccaccaccaacaccaccagaagcacggcgcgcccaagcagcagctgcaccgcaagatggatagcgacggcagcagcgtcagcgacctctcgctggaggaggagaacagcttccttggcatctgcagccaggagctgcttgctcgcggcaccgaactcctcaaacgcacccggaaaggcgctctgcactggaaggtcgtgtcggtgtacatcaaccggatgggcctggtgatgctgaagacgaagagccggcacgtggcagggacgatcacgaagaagaagaaaagtgtggtggtcgaggtgtgcagggacgtgccggcgtggcccgggcggcacctgctggaggacggcgggcaccggcggtacttcggcctgcgcacggcggagcggcgggtggtcgagttcgagtgccgcagccagcgggagtacgagatgtggaccaagggcgtggcgcggctcctgagcgtggccgccgagcggaagcgcctggcgtgacagattgcgtgcaggtgcagccccgtgccgcacaggaattatgtaggtaggtatgctagggcacgaccgcacgaggttggattggatttgtggcggtgtggttttttgtacgggctgggatgcgacgccggcgcgtggaacgccatgccatgcccttgtgggtgtgagaaggcgcttgctacgctgagctgagctctgaccttgttctggctctctctctttctctttcttgtaagttttgcgtctactctctctctctctctcgttgggccatactacactgtagctggcgaaagataaatgctttgttctggtggtagtagtaactctgtctttgaccggacagtcgatgtgtttggttcccgtggtttggccatcaccatcatcctgtcctgaccgagcaacccgaagccgaggggcgctgctggtccggcaacagcgacaacagcgaaatgcaagtgcgctggagtatctgag

SEQ ID NO: 205463 - DNA, 2376 bp, Zea Mays
ctccagtttagcgcgcgcgcgcgccgccgccggctccgtctctccgccccgagctccgcgtgtaatctcagacccagcctaagcaaaccaccagagtcagtaccccgccagcacccgagcccctgttctggtgattggtgaagaccttgtcgcagaccgcaacgatgtcggccgcggcagggacgccaccggaagacggaggggatcggccgtggcagtcttaccataccgcatacaccaacgccaaagctggaatggagggtgttgacaaagagaaggtgcagaaggtaatctacgaaatgagcaagggctcaaaatatttcgaaaatgagcagaggaaggaggcagccaccaaacaaaagattgaacatctccgtgcacaatgtgcagtattgactgataatgacatatcacattttcagaaggttgcagataagaaaatgttagagttggaagcttcacgagatctttcaaagatatggcttcacactgacatggatgccttttatgctgctgttgagacattggagaacccatccttgaagggaaaacccttggcggttggtagcatgtctatgatagctactgccagttatgaggcacgcaagtttggagtgcgtgcagcgatgcctggttttattggatgcaaactatgtcctgacttggtttttgtcccaccaaactttgagagatatactcattatagcgagctgacaagaaaagttttccagaggtatgatcccaacttcattgcaacaagtctagatgaagcatacctcaacataaccaatgtttgcattgagagaggcattacaggcgaggaggtctgccattcaccaggaaactggtctaacatgtagtgctggggttgctccaaaccgtatgattgcgaaggtttgctctgatattaacaagcccaatgggcagtttattttgccaaatgactgggaagctgtattgacatttgtatctacattgcctataagaaagataggtggcataggtaaggtaacagaacagatgttacatcaggttcttggaatcagtacatgtcaggagatgctgcaaaaggctgcttttttatgtgctcttttttcggaaagctcagctgatttctttctgtcggttggtctcgggttaggaggtacagaaaccccagaacaaaggcaaaggaaaagtatcagttgcgagcgaactttcacagcaacaaatgattcttctttgcttttcaaaaaattagctagccttgcagaaaatttatctgatgatttgcaaaaggagggtttcaagggaaaaacactaacactcaaactgaagactgcagattttgaggttcggacaagggcagtaacaacacggaactacatcgactccaaggaagatattctggtctatgctacaaagttgattaaagctgaaatgcctatttctttgagattgatggggttgcggatgtctcagctacatgatgagaaggacgatccatctacttcaacacaaaagacactagatatattctttcgttcatcaaacagtaactcaaatggcaatggaaccactgttcagagaatcactaattccccagggcaggataatgattctattagtctcacaaccaaggaagagtacttggcacctgatgctggaacaagtgtttccacaggccaacaggatttcttcctacatgatgagatctgttttattcccgaacaacaacggagtttagacaacgatactaaagaggctgtcctaagcgacccgttaggtggaacaaagtcagatgatgtgtcttccagtgcaaaggttacgcccactaagaagttggatgaacctgatcccttgatcagcccgaaggctgtgtcttcatcaagtaaacctgaccagcagtcatggattgatggctacatttgttccatctgtggatttgaactgcctccgggcttcgaggaggagaggctggaacattcagattttcacctggctgaaacactccagcaggaagaagcagtggacggcacaagacacatctcaaacgagagctgggtggctgaaagaccacgctctactgcacccacgcccaagaagaaactcaagtcttctaaagaaggaaagcatattcctattgactctttcttcacaaagtgtaataagagcccgtaaccgtaaggtaggacttgccggcaactctgtaactatgggcatgctagccaagtgttgtacgtgttaactttattcttgatgagagcaatatatgtaaatatcaccctcaactctcactaatagccaagtgttgttacagagttccacggtgtttccacatacgcaggccttcatgacaaaaaaaaaaaatggagagtgttttttttttctttctaa

SEQ ID NO: 205464 - DNA, 2397 bp, Zea Mays
gtcgcgttctccagtttagcgcgcgcgcgcgccgccgccggctccgtctctccgccccgagctccgcgtgtaatctcagacccagcctaagcaaaccaccagagtcagtaccccgccagcacccgagcccctgttctggtgattggtgaagaccttgtcgcagaccgcaacgatgtcggccgcggcagggacgccaccggaagacggaggggatcggccgtggcagtcttaccataccgcatacaccaacgccaaagctggaatggagggtgttgacaaagagaaggtgcagaaggtaatctacgaaatgagcaagggctcaaaatatttcgaaaatgagcagaggaaggaggcagccaccaaacaaaagattgaacatctccgtgcacaatgtgcagtattgactgataatgacatatcacattttcagaaggttgcagataagaaaatgttagagttggaagcttcacgagatctttcaaagatatggcttcacactgacatggatgccttttatgctgctgttgagacattggagaacccatccttgaagggaaaacccttggcggttggtagcatgtctatgatagctactgccagttatgaggcacgcaagtttggagtgcgtgcagcgatgcctggttttattggatgcaaactatgtcctgacttggtttttgtcccaccaaactttgagagatatactcattatagcgagctgacaagaaaagttttccagaggtatgatcccaacttcattgcaacaagtctagatgaagcatacctcaacataaccaatgtttgcattgagagaggcattacaggcgaggaggttgctattgaacttaggtctgccattcaccaggaaactggtctaacatgtagtgctggggttgctccaaaccgtatgattgcgaaggtttgctctgatattaacaagcccaatgggcagtttattttgccaaatgactgggaagctgtattgacatttgtatctacattgcctataagaaaggtggcataggtaaggtaacagaacagatgttacatcaggttcttggaatcagtacatgtcaggagatgctgcaaaaggctgcttttttatgtgctcttttttcggaaagctcagctgatttctttctgtcggttggtctcgggttaggaggtacagaaaccccagaacaaaggcaaaggaaaagtatcagttgcgagcgaactttcacagcaacaaatgattcttctttgcttttcaaaaaattagctagccttgcagaaaatttatctgatgatttgcaaaaggagggtttcaagggaaaaacactaacactcaaactgaagactgcagattttgaggttcggacaagggcagtaacaacacggaactacatcgactccaaggaagatattctggtctatgctacaaagttgattaaagctgaaatgcctatttctttgagattgatggggttgcggatgtctcagctacatgatgagaaggacgatccatctacttcaacacaaaagacactagatatattctttcgttcatcaaacagtaactcaaatggcaatggaaccactgttcagagaatcactaattccccagggcaggataatgattctattagtctcacaaccaaggaagagtacttggcacctgatgctggaacaagtgtttccacaggccaacaggatttcttcctacatgatgagatctgttttattcccgaacaacaacggagtttagacaacgatactaaagaggctgtcctaagcgacccgttaggtggaacaaagtcagatgatgtgtcttccagtgcaaaggttacgcccactaagaagttggatgaacctgatcccttgatcagcccgaaggctgtgtcttcatcaagtaaacctgaccagcagtcatggattgatggctacatttgttccatctgtggatttgaactgcctccgggcttcgaggaggagaggctggaacattcagattttcacctggctgaaacactccagcaggaagaagcagtggacggcacaagacacatctcaaacgagagctgggtggctgaaagaccacgctctactgcacccacgcccaagaagaaactcaagtcttctaaagaaggaaagcatattcctattgactctttcttcacaaagtgtaataagagcccgtaaccgtaaggtaggacttgccggcaactctgtaactatgggcatgctagccaagtgttgtacgtgttaactttattcttgatgagagcaatatatgtaaatatcaccctcaactctcactaatagccaagtgttgttacagagttccacggtgtttccacatacgcaggccttcatgacaaaaaaaaaaaatggagagtgttttttttttctttctaa

SEQ ID NO: 205465 - DNA, 3290 bp, Zea Mays
gggaaatactgggctggctgcctgggcgcagcagcggcactgttgcgacgcggacgaactcgcacacgcgcacacgctcctgcttgacgcttcttcgcaccccgcccgcttgcttaaatgccctagacctaatcattcccatcccccctccttccttttcctaccaccccacaccctctcccatctctctctccgtgccctcctcctcccccccagtccgccccacccttccggccctccccctcttttatatccagtaccatggtgatctccgagctcgggtgagctgatgagagaagaagtgcctcaactcggagctgtggcacgcctgcgccggcccgctcgtctgcctccccaccgtcggtacgcgcgtcgtctacttcccgcagggccacagcgagcaggtggcagcgtcgacgaacaaggaggtggacgggcacatccccaactaccccaacctgccgccgcagctgatctgccagctccatgatgtcacaatgcatgcggatgtggagacagacgaagtgtacgcgcagatgacgctgcagccgctcaatccacaagagcagaacgacgcgtacctgcctgccgagatgggaatcatgagcaagcagccgacgaattacttctgcaagacgctgactgcgagcgacaccagcacgcacggcgggttctctgtgccccgtcgtgcggccgagcgcgtcttccccccgctggatttcacacagcagcctccagcacaggagcttattgcacgggatattcatgatgttgagtggaagttcaggcatatcttccgaggccagcccaaaagacacctgctgacgactggctggagtgtgtttgtcagtgctaagagacttgttgctggagattctgtgctattcatatggaatgagaaaaaccagcttttgcttggaatcagacacgctacccggccacagactgtgatgccctcttctgttctttcgagtgacagcatgcacatcggactccttgcagcagcagctcatgctgctgcaacaaacagccgcttcacaattttctataatcctagggcaagtccaacagaatttgttatacccctttcgaaatacatcaaggctgtttttcacacgcggatatcagttgggatgcgattcaggatgttatttgagactgaggaatcaagtgtccgcaggtacatggggacaataacagaagtgagtgatgctgacccagtgcgttggcctagttcctattggagatcagtgaaggttggttgggatgaatcaaccgcaggagaaaggccacctagagtttctctgtgggaaattgagccactgacaacctttcctatgtatccatccctgttcccactgcgagttaagcatccttggtattcaggacttgctgctcttcatgatgacagcaatgctttgatgtggctgagaggagtaaccggtgaagggggctttcattctttgaacttccagtcacctggtataggttcctggggacaacagagactccatccatccttacttagcaatgaccatgatcagtatcaagcagtggttgctgccgcagctgcctcccagtccggtggttatctgaagcagcaattcctacaccttcaacaacctatgcagtccccacaggagcagtgcaatctcaatccgctgttgcagcaacaaatactacagcaagcgagccaacagcagatggttagttctgatgctcaaaatattcagtccgtgctcaacccaggtgctattcagcagcagctccaccaactccagcagatgcagcatactcataatgaccagaagcaaaagattcaaccagatcaacagtaccaagttgctagcagtgcggttctcccgagtccaacatcattaccaagccatttgcgtgaaaaatttggcttctctgatcctaatgtgaactcttccagcttcatcagctctagcagcaacgaaaacatgctggaatcaaacttccttcaggtaagttcaaaatccgtggatttgtctagattcaaccaaccagtagttagcgagcagcagcagccgcaacaacaacaggcatggaagcaaaagtttatgggctcacagtcaatgtcttttgggggctcggtttcgcttaactcgcccactagcaaagatggttctgttgacaacaaagttggtcgtgatgtgcagaaccagtccctttttagccctcaagtcgactcttcctccctactgtacaatatggtacctaatcttacctcaaatgttgctgataataatatatcagcgtttccctctggatcaacatatctgcaaagtccaatgtatggttgtctggatgactcttctggtttattgcaaaatacaggagagaatgatccgacaactagaacttttgttaaggtaagtataatcgagtctactaaaaacaaatttaagcccttcctcatgtaatcattttttaaaattcaggtttacaagtcaggatcagtggggagatccttggacatcacccggttctctaattatgctgaacttcgagaggaactgggtcagatgttcggcattaagggtcagttggacgaccctgatagatcaggctggcagcttgtatttgtcgacagggagaacgatgtgcttctccttggagacgacccgtgggagtcatttgtgaatagtgtatggtacatcaagatactttcacctgaggatgtgcataagatgggaaagccaggaaacgatccacgctacctatcttagctacctatcttaaatcgatacatggagctctttctggctcccatgacgattctgcggcacactgcagcactgttcacgacggccctgctctactgtgctcgcatgttcgcccgtgtcatctctactctctagcatgcacaccgtgctcgtcttcagaagacgaactccccgtcgcttgtatccggtgcaggtcacccgctcctggactgatattttgtaggttccacgtaggaatcagtatcagcaactctatcctagtttgtggtaggctcgcgcggcgctcgttcctgtgtcgcatcaggatcttcggactaaaatgcgtagtcgaaaccgttctcgtgattcgtaagctattcatgtatttgaggattcctcgacatgctttcgacgatgaactgcaataatctgaatgcaggaggattgtttgagatttgtacttcagttttgtgtctgccggtttgcagggttgctgtgatgacgtttcaggtgttctctgtctgaaactattttttatggattggcgagttggtgaccgct

SEQ ID NO: 205466 - DNA, 3233 bp, Zea Mays
ccaccccacaccctctcccatctctctctccgtgccctcctcctcccccccagtccgccccacccttccggccctccccctcttttatatccagtaccatggtgatctccgagctcgggtgagctgatgagaatgcggccgatttgaggaaggctgtgggcgcgatggatgcggtttcgggcggattcgctaggaggctgtagaggttaggttccggtgtcccccggcccggccggtcgtgggagatgagctcctcgtccgcggccagcatcgggcagccgccgccgcccgcgccgccgccggaagaagagaagaagtgcctcaactcggagctgtggcacgcctgcgccggcccgctcgtctgcctccccaccgtcggtacgcgcgtcgtctacttcccgcagggccacagcgagcaggtggcagcgtcgacgaacaaggaggtggacgggcacatccccaactaccccaacctgccgccgcagctgatctgccagctccatgatgtcacaatgcatgcggatgtggagacagacgaagtgtacgcgcagatgacgctgcagccgctcaatccacaagagcagaacgacgcgtacctgcctgccgagatgggaatcatgagcaagcagccgacgaattacttctgcaagacgctgactgcgagcgacaccagcacgcacggcgggttctctgtgccccgtcgtgcggccgagcgcgtcttccccccgctgtgtggtttgtaggatttcacacagcagcctccagcacaggagcttattgcacgggatattcatgatgttgagtggaagttcaggcatatcttccgaggccagcccaaaagacacctgctgacgactggctggagtgtgtttgtcagtgctaagagacttgttgctggagattctgtgctattcatatggaatgagaaaaaccagcttttgcttggaatcagacacgctacccggccacagactgtgatgccctcttctgttctttcgagtgacagcatgcacatcggactccttgcagcagcagctcatgctgctgcaacaaacagccgcttcacaattttctataatcctagggcaagtccaacagaatttgttatacccctttcgaaatacatcaaggctgtttttcacacgcggatatcagttgggatgcgattcaggatgttatttgagactgaggaatcaagtgtccgcaggtacatggggacaataacagaagtgagtgatgctgacccagtgcgttggcctagttcctattggagatcagtgaaggttggttgggatgaatcaaccgcaggagaaaggccacctagagtttctctgtgggaaattgagccactgacaacctttcctatgtatccatccctgttcccactgcgagttaagcatccttggtattcaggacttgctgctcttcatgatgacagcaatgctttgatgtggctgagaggagtaaccggtgaagggggctttcattctttgaacttccagtcacctggtataggttcctggggacaacagagactccatccatccttacttagcaatgaccatgatcagtatcaagcagtggttgctgccgcagctgcctcccagtccggtggttatctgaagcagcaattcctacaccttcaacaacctatgcagtccccacaggagcagtgcaatctcaatccgctgttgcagcaacaaatactacagcaagcgagccaacagcagatggttagttctgatgctcaaaatattcagtccgtgctcaacccaggtgctattcagcagcagctccaccaactccagcagatgcagcatactcataatgaccagaagcaaaagattcaaccagatcaacagtaccaagttgctagcagtgcggttctcccgagtccaacatcattaccaagccatttgcgtgaaaaatttggcttctctgatcctaatgtgaactcttccagcttcatcagctctagcagcaacgaaaacatgctggaatcaaacttccttcaggtaagttcaaaatccgtggatttgtctagattcaaccaaccagtagttagcgagcagcagcagccgcaacaacaacaggcatggaagcaaaagtttatgggctcacagtcaatgtcttttgggggctcggtttcgcttaactcgcccactagcaaagatggttctgttgacaacaaagttggtcgtgatgtgcagaaccagtccctttttagccctcaagtcgactcttcctccctactgtacaatatggtacctaatcttacctcaaatgttgctgataataatatatcagcgtttccctctggatcaacatatctgcaaagtccaatgtatggttgtctggatgactcttctggtttattgcaaaatacaggagagaatgatccgacaactagaacttttgttaaggtttacaagtcaggatcagtggggagatccttggacatcacccggttctctaattatgctgaacttcgagaggaactgggtcagatgttcggcattaagggtcagttggacgaccctgatagatcaggctggcagcttgtatttgtcgacagggagaacgatgtgcttctccttggagacgacccgtgggatgtatggtacatcaagatactttcacctgaggatgtgcataagatgggaaagccaggaaacgatccacgctacctatcttagctacctatcttaaatcgatacatggagctctttctggctcccatgacgattctgcggcacactgcagcactgttcacgacggccctgctctactgtgctcgcatgttcgcccgtgtcatctctactctctagcatgcacaccgtgctcgtcttcagaagacgaactccccgtcgcttgtatccggtgcaggtcacccgctcctggactgatattttgtaggttccacgtaggaatcagtatcagcaactctatcctagtttgtggtaggctcgcgcggcgctcgttcctgtgtcgcatcaggatcttcggactaaaatgcgtagtcgaaaccgttctcgtgattcgtaagctattcatgtatttgaggattcctcgacatgctttcgacgatgaactgcaataatctgaatgcaggaggattgtttgagatttgtacttcagttttgtgtctgccggtttgcagggttgctgtgatgacgtttcaggtgttctctgtctgaaactattttttatggattggcgagttggtgaccgct

SEQ ID NO: 205467 - DNA, 3077 bp, Zea Mays
ccaccccacaccctctcccatctctctctccgtgccctcctcctcccccccagtccgccccacccttccggccctccccctcttttatatccagtaccatggtgatctccgagctcgggtgagctgatgagaatgcggccgatttgaggaaggctgtgggcgcgatggatgcggtttcgggcggattcgctaggaggctgtagaggttaggttccggtgtcccccggcccggccggtcgtgggagatgagctcctcgtccgcggccagcatcgggcagccgccgccgcccgcgccgccgccggaagaagagaagaagtgcctcaactcggagctgtggcacgcctgcgccggcccgctcgtctgcctccccaccgtcggtacgcgcgtcgtctacttcccgcagggccacagcgagcaggtggcagcgtcgacgaacaaggaggtggacgggcacatccccaactaccccaacctgccgccgcagctgatctgccagctccatgatgtcacaatgcatgcggatgtggagacagacgaagtgtacgcgcagatgacgctgcagccgctcaatccacaagagcagaacgacgcgtacctgcctgccgagatgggaatcatgagcaagcagccgacgaattacttctgcaagacgctgactgcgagcgacaccagcacgcacggcgggttctctgtgccccgtcgtgcggccgagcgcgtcttccccccgctggatttcacacagcagcctccagcacaggagcttattgcacgggatattcatgatgttgagtggaagttcaggcatatcttccgaggccagcccaaaagacacctgctgacgactggctggagtgtgtttgtcagtgctaagagacttgttgctggagattctgtgctattcatatggaatgagaaaaaccagcttttgcttggaatcagacacgctacccggccacagactgtgatgccctcttctgttctttcgagtgacagcatgcacatcggactccttgcagcagcagctcatgctgctgcaacaaacagccgcttcacaattttctataatcctagggcaagtccaacagaatttgttatacccctttcgaaatacatcaaggctgtttttcacacgcggatatcagttgggatgcgattcaggatgttatttgagactgaggaatcaagtgtccgcaggtacatggggacaataacagaagtgagtgatgctgacccagtgcgttggcctagttcctattggagatcagtgaaggttggttgggatgaatcaaccgcaggagaaaggccacctagagtttctctgtgggaaattgagccactgacaacctttcctatgtatccatccctgttcccactgcgagttaagcatccttggtattcaggacttgctgctcttcatgatgacagcaatgctttgatgtggctgagaggagtaaccggtgaagggggctttcattctttgaacttccagtcacctggtataggttcctggggacaacagagactccatccatccttacttagcaatgaccatgatcagtatcaagcagtggttgctgccgcagctgcctcccagtccggtggttatctgaagcagcaattcctacaccttcaacaacctatgcagtccccacaggagcagtgcaatctcaatccgctgttgcagcaacaaatactacagcaagcgagccaacagcagatggttagttctgatgctcaaaatattcagtccgtgctcaacccaggtgctattcagcagcagctccaccaactccagcagatgcagcatactcataatgaccagaagcaaaagattcaaccagatcaacagtaccaagttgctagcagtgcggttctcccgagtccaacatcattaccaagccatttgcgtgaaaaatttggcttctctgatcctaatgtgaactcttccagcttcatcagctctagcagcaacgaaaacatgctggaatcaaacttccttcaggtaagttcaaaatccgtggatttgtctagattcaaccaaccagtagttagcgagcagcagcagccgcaacaacaacaggcatggaagcaaaagtttatgggctcacagtcaatgtcttttgggggctcggtttcgcttaactcgcccactagcaaagatggttctgttgacaacaaagttggtcgtgatgtgcagaaccagtccctttttagccctcaagtcgactcttcctccctactgtacaatatggtttacaagtcaggatcagtggggagatccttggacatcacccggttctctaattatgctgaacttcgagaggaactgggtcagatgttcggcattaagggtcagttggacgaccctgatagatcaggctggcagcttgtatttgtcgacagggagaacgatgtgcttctccttggagacgacccgtgggagtcatttgtgaatagtgtatggtacatcaagatactttcacctgaggatgtgcataagatgggaaagccaggaaacgatccacgctacctatcttagctacctatcttaaatcgatacatggagctctttctggctcccatgacgattctgcggcacactgcagcactgttcacgacggccctgctctactgtgctcgcatgttcgcccgtgtcatctctactctctagcatgcacaccgtgctcgtcttcagaagacgaactccccgtcgcttgtatccggtgcaggtcacccgctcctggactgatattttgtaggttccacgtaggaatcagtatcagcaactctatcctagtttgtggtaggctcgcgcggcgctcgttcctgtgtcgcatcaggatcttcggactaaaatgcgtagtcgaaaccgttctcgtgattcgtaagctattcatgtatttgaggattcctcgacatgctttcgacgatgaactgcaataatctgaatgcaggaggattgtttgagatttgtacttcagttttgtgtctgccggtttgcagggttgctgtgatgacgtttcaggtgttctctgtctgaaactattttttatggattggcgagttggtgaccgct

SEQ ID NO: 205468 - DNA, 1886 bp, Zea Mays
cttcatgcaatgctttgatgtggctgagaggagtaaccggtgaagggggctttcattctttgaacttccagtcacctggtataggttcctggggacaacagagactccatccatccttacttagcaatgaccatgatcagtatcaagcagtggttgctgccgcagctgcctcccagtccggtggttatctgaagcagcaattcctacaccttcaacaacctatgcagtccccacaggagcagtgcaatctcaatccgctgttgcagcaacaaatactacagcaagcgagccaacagcagatggttagttctgatgctcaaaatattcagtccgtgctcaacccaggtgctattcagcagcagctccaccaactccagcagatgcagcatactcataatgaccagaagcaaaagattcaaccagatcaacagtaccaagttgctagcagtgcggttctcccgagtccaacatcattaccaagccatttgcgtgaaaaatttggcttctctgatcctaatgtgaactcttccagcttcatcagctctagcagcaacgaaaacatgctggaatcaaacttccttcaggtaagttcaaaatccgtggatttgtctagattcaaccaaccagtagttagcgagcagcagcagccgcaacaacaacaggcatggaagcaaaagtttatgggctcacagtcaatgtcttttgggggctcggtttcgcttaactcgcccactagcaaagatggttctgttgacaacaaagttggtcgtgatgtgcagaaccagtccctttttagccctcaagtcgactcttcctccctactgtacaatatggtacctaatcttacctcaaatgttgctgataataatatatcagcgtttccctctggatcaacatatctgcaaagtccaatgtatggttgtctggatgactcttctggtttattgcaaaatacaggagagaatgatccgacaactagaacttttgttaaggtaagtataatcgagtctactaaaaacaaatttaagcccttcctcatgtaatcattttttaaaattcaggtttacaagtcaggatcagtggggagatccttggacatcacccggttctctaattatgctgaacttcgagaggaactgggtcagatgttcggcattaagggtcagttggacgaccctgatagatcaggctggcagcttgtatttgtcgacagggagaacgatgtgcttctccttggagacgacccgtgggagtcatttgtgaatagtgtatggtacatcaagatactttcacctgaggatgtgcataagatgggaaagccaggaaacgatccacgctacctatcttagctacctatcttaaatcgatacatggagctctttctggctcccatgacgattctgcggcacactgcagcactgttcacgacggccctgctctactgtgctcgcatgttcgcccgtgtcatctctactctctagcatgcacaccgtgctcgtcttcagaagacgaactccccgtcgcttgtatccggtgcaggtcacccgctcctggactgatattttgtaggttccacgtaggaatcagtatcagcaactctatcctagtttgtggtaggctcgcgcggcgctcgttcctgtgtcgcatcaggatcttcggactaaaatgcgtagtcgaaaccgttctcgtgattcgtaagctattcatgtatttgaggattcctcgacatgctttcgacgatgaactgcaataatctgaatgcaggaggattgtttgagatttgtacttcagttttgtgtctgccggtttgcagggttgctgtgatgacgtttcaggtgttctctgtctgaaactattttttatggattggcgagttggtgaccgct

SEQ ID NO: 205469 - DNA, 2242 bp, Zea Mays
caaaaccaagcgcgcctactgcagacattaccgaacagtggtgctgtatatactagtggccttttttccaattccgatctacactcaaaggtgaattctactagtttgagattttggaggacctaccataattctgggaagtttgatttgactgatctgacgcatcctcatatgtggtacccgaaagctcgagaaaagaagcgtaatgtgtttttacatgttggccctacaaatagtgggaaaacttatagtgctctcaagaggctagaagcaagctcttcaggtgtgtactgtggacctctgagattgttagcaagagaggtagcccaaaggttaaacaaagttaacgtcccttgtaacctgattactggacaagaaaggaatgaaattgaaggtgcaaaacatagctcagtgacagttgagatggctgatatgacaactaactatcaatgtgctgttattgatgaaattcagatggttggctgtaaatcaaggggttattcgttcacacgtgcacttctgggactttgttcagatgaacttcatgtctgcggtgacccagctgctgttccccttatccagcgaattcttgaagctactggtgatgtagttacggttcaatattatgagagactatctcctttggttcctctgaaatctccacttgggtctttctctaacatcaaggcaggagattgtttagtatcattctcaagacgtggaatttataaactcaagaaaagaattgaaagggagggaaaacatctttgctctgtggtctatggttcattgccaccagaaactcgaacaaagcaggcgacaatgttcaatgatgataccagtgaccttaatgtgctagtagctagtgatgctattggaatgggtcttaacctgaacatttccagaattattttctctactatgatgaagtttgatggtttctgcaacagggaactaactgtggccgaaatcaaacagattgctggtagggctggaagatatggatctaagttccctgttggagaagtgacctgtctaaatcctcaagatctcccattgctgcactcgtctctgaaatcagcttcctccattatagagcgtgctggactttttcccacatttgatttattatctttgtattcacgattacatggaactgacttttttcaccctatactggaacgtttcttggagaaggctaaactatcaccagactatttcattactgattgtgaagatatgttgaaggttgctgctattgttgatgatttacctcttgggttgtatgataaatacctcttctgtatgagtccggtggactttgcagaaaattatgcaaggaaaggaattgttcgacttaaagaaatattcacacctggaacattacaggttcctaaaacagacaatcaactcaaggagcttgaatctgttcacaaggtcctagagttatatgtgtggttaagcttcagaatggatgattcctttccagaccgtgaagtagctgcctctcaaaagtcaatctgtagcatgttgatcgaagaatatctggagaggtttggatggcagccacaagaccgaagaaaggttttgggtggagcacaaaagctgctccaagaatacgatgtatcacaaatgaacaaatattttcaagaagtcaacccaggaccgaagtagaaggactatacaggaaatgagcctcaccacttccagtccagatttgaggaaccaataccatccagagcatttgcgttctgcctcactggttatggatcaccggcacaaagtggaactacacttcggacgaccgaagatatacgtggacgcatctcaaaccgtgatcatctagattgatttggcagcacgcatttccatcagccagatcgtgatcgactagtaggacttttttccccaaaaatgaaactacactccagtcttaagtcataatgaatacagagccatgagcccatgatagggccgcttctgagacggagattgtgtattaacgggtacacagacggtacttgcattctagtctgagttcgatgagttgcagcaatagcggctgtaatcctgtatataaagagggaaaataatgttgcttgtgctgttatttattgcaagatctgaatgtttgtgtccaatgacaatttagtagacattttacatgcactaactaatagctaatggcccgtgtgtacctttgtatatatcctttcagatttttttgtgtcacgatgctgat

SEQ ID NO: 205470 - DNA, 2302 bp, Zea Mays
ggtgccatgtgttcggtagaatgccaaaaccaagcgcgcctactgcagacattaccgaacagtggtgctgtatatactagtggccttttttccaattccgatctacactcaaaggtgaattctactagtttgagattttggaggacctaccataattctgggaagtttgatttgactgatctgacgcatcctcatatgtggtacccgaaagctcgagaaaagaagcgtaatgtgtttttacatgttggccctacaaatagtgggaaaacttatagtgctctcaagaggctagaagcaagctcttcaggtgtgtactgtggacctctgagattgttagcaagagaggtagcccaaaggttaaacaaagttaacgtcccttgtaacctgattactggacaagaaaggaatgaaattgaaggtgcaaaacatagctcagtgacagttgagatggctgatatgacaactaactatcaatgtgctgttattgatgaaattcagatggttggctgtaaatcaaggggttattcgttcacacgtgcacttctgggactttgttcagatgaacttcatgtctgcggtgacccagctgctgttccccttatccagcgaattcttgaagctactggtgatgtagttacggttcaatattatgagagactatctcctttggttcctctgaaatctccacttgggtctttctctaacatcaaggcaggagattgtttagtatcattctcaagacgtggaatttataaactcaagaaaagaattgaaagggagggaaaacatctttgctctgtggtctatggttcattgccaccagaaactcgaacaaagcaggcgacaatgttcaatgatgataccagtgaccttaatgtgctagtagctagtgatgctattggaatgggtcttaacctgaacatttccagaattattttctctactatgatgaagtttgatggtttctgcaacagggaactaactgtggccgaaatcaaacagattgctggtagggctggaagatatggatctaagttccctgttggagaagtgacctgtctaaatcctcaagatctcccattgctgcactcgtctctgaaatcagcttcctccattatagagcgtgctggactttttcccacatttgatttattatctttgtattcacgattacatggaactgacttttttcaccctatactggaacgtttcttggagaaggctaaactatcaccagactatttcattactgattgtgaagatatgttgaaggttgctgctattgttgatgatttacctcttgggttgtatgataaatacctcttctgtatgagtccggtggacgtaagtgatgatatatctgcccaaggactagttcagtttgcagaaaattatgcaaggaaaggaattgttcgacttaaagaaatattcacacctggaacattacaggttcctaaaacagacaatcaactcaaggagcttgaatctgttcacaaggtcctagagttatatgtgtggttaagcttcagaatggatgattcctttccagaccgtgaagtagctgcctctcaaaagtcaatctgtagcatgttgatcgaagaatatctggagaggtttggatggcagccacaagaccgaagaaaggttttgggtggagcacaaaagctgctccaagaatacgatgtatcacaaatgaacaaatattttcaagaagtcaacccaggaccgaagtagaaggactatacaggaaatgagcctcaccacttccagtccagatttgaggaaccaataccatccagagcatttgcgttctgcctcactggttatggatcaccggcacaaagtggaactacacttcggacgaccgaagatatacgtggacgcatctcaaaccgtgatcatctagattgatttggcagcacgcatttccatcagccagatcgtgatcgactagtaggacttttttccccaaaaatgaaactacactccagtcttaagtcataatgaatacagagccatgagcccatgatagggccgcttctgagacggagattgtgtattaacgggtacacagacggtacttgcattctagtctgagttcgatgagttgcagcaatagcggctgtaatcctgtatataaagagggaaaataatgttgcttgtgctgttatttattgcaagatctgaatgtttgtgtccaatgacaatttagtagacattttacatgcactaactaatagctaatggcccgtgtgtacctttgtatatatcctttcagatttttttgtgtcacgatgctgat

SEQ ID NO: 205471 - DNA, 1375 bp, Zea Mays
actactctgcctctgactggggcaagcaaagcattggggcttgggatttctcgaagccataaaagagtgagccccaaaaagaagcctaccaaagtaccactacgactccgcctccggctccgagagcagcagcctcagtaccaccagtccagtccagcctccagctaggggaagaagaagaagagcgaaggaaggggacgggggcgaggaaggagccagagcagacccaatccctcaatggcttcctctcgcgctctcgctctcgctctcttcctcctctgcgccctgctgcccgcgccccctgtctcggccacattgctgttcggcggcggcgagtcggccaagaaggcgggcgtcgacgcggagtggcggccggccactgcgacgtggtacggcgaggcagagggcgacggcagcgacggacggcctgcaagtacggcgggaagaacatcgcgttccgtgtgaacgagggctcgactaacttctggctctcgctgctcgtcgagttcgaggacggcgagggcgacataggatccatgcagataaagcaggccaactcggtggagtggctggacatgcggcacgtgtggggggcaacctggtgcctggtgcggggcccgctcgtgggccccttctccgtgaggctcaccacgctgtccgcgcggaagacgctcacggcccgcgacgtgatccccaggaactggacgcccaaggccacctacacctcgcgcctcaacttccagccgtctctctaggtctaggacgagggagggacccaccgcggcgactggggcccacgttttatcggccccggacactgccctgtgggcccgttgcaaaacgaggaatcagtcagtccagagtgtttttttttttgttttccctgtatgcagatgcaggcaaccttcgtatggtttggtttttatcttatcgtagtcgtagctagtgtgaggaggtggttcatggccatcatagtacgtaggcatcgaacatgtgtgatgctcatgaggatgagttgagtctgtgagcgggcacagagtgccagccaccaggtacacacagacaggcgctgtctccaaaggagagagcgttcgttcgctgcttgctcccgggtccagcggcccttggaggctcgaaacccgatcgtggcgtctgcttcgctcgtgtgtgtgtgtgtggatgtgtttttggcgtcgatatgtgttgagaactacgttaccacggatcaccagatccgctcccttccctcccgtcagcagtagaggcgcgagaagctgtagagaacccgtctcccttcccataagcacgacagaggaaacgcacgagacacatgatatagggttgggcctctggcctctttctgatcactgtatta

SEQ ID NO: 205472 - DNA, 610 bp, Zea Mays
gctcttttgcccggcgcacgtcattggcgcgcctgcgcctggtgtagttcatggagcatggttaccaccttggtttgcggcacaatatgctcattacgcggaggttgtcgcaggtcactagaataaacaagggaaacctgctgtgcataatgttttgcataagagaaaatggttgccctcaagaaaaatgtaggaccttatgtataaaaggtatcaacaagatgttaatgggataaacctcatattgagaccgctaagatgaaatggattcatgttaaggagaaattggttgtcctcaagaaaaatgcagaaccttatgtacaaatggattgtcttcaaaatgttgttcttgtagctacaacaaagagaaacaacaatggtggtgatgctatacgtgtagaagtagcaatgttggtcttgtagctccaagattttgttattttgttgttgatgaatgatatctatgataatatattgctaagtgtatgtgatgatcattggttgttgtttaattataatggtttgtgcttattgtgctacattgacattggtaataattaaaaaattaaaatggccttggttgggccaaatgttttgtgacaaacaaaat

SEQ ID NO: 205473 - DNA, 3823 bp, Zea Mays
caaaccaggcctcaaacggaccagaacccgactacccgaggccttgtccccacgtttgcctcttctcgacttctcctgtagggctgttcgtgttttttctgctttcgcctttttcccagcatttttttcctctcctgcgcctcgccaccgcttcctcttgtcgcccgcctctctcatcgaccctaggcgcgccgcctcgccgccgccgatcccgcagccgtcgatcctggccgctccgatagccgagggctacttgattgtttggaatctacttttatagttgattccaagcatggaaagtctaccaaatggttcagtaaacaatgcggagcataaccaggaaaacaagaagtccatggatgctagtgtgcctgaagaagtacaagatgtttttatttacagagaagatgttgtgagcttgaagtccaaggaggatgtccgtggattagttttagaggtagctggggaatatgattctgaaggtagcatcactgatgatgatattgatactgaggaacatgaagataaaactgttcgtggagcagaaaatggtgctgctgatggtgataatgctagtaatggagctgaagttgaaagccagagttctttgccggataacaaagttcgagtgttatggcttgatgatagtgaaaaaacagaagacattgatgaggtagttgttgttgatagaagtttccttcatggtgatttagttgcctctgcctcagatccaactggtcagatggggcttgttttggatgtcaatcttgtggttgatttgcaaggtgtgaatggcgatatgataaagggtgtttcttccaaggatttgagacgaatcagggaattcaatgtgggtgattatgttgtctctgggctatggcttggtcgagttgatgaagtgctcgatagtgttaatgtgctttttgacgatggctctgtctgtaaagtcaatagagcagatcctatgtgcttaaagccagtatttggcccaatgcatccagatacagattgtcctttttatccaggacagcgtgtgaaggcagtgtcatcatctgttttcaaaacatcaaggtggcttaatggattgtggagagcaagtcgtcttgaaggtactgtcacaaaagtggaaagtgtttctgttatagtctattggattgcatctgcacactttgcttcagatcagcaacctgttcctccagagaagcagaacccaaaggaccttactcttctgtcttgtttctcttatgcaaactggcaattaactgactggtgtcttcctcaccgatacactttatgtactaatgataccgtgattaattctgataagcatacaggtcagatctgtacatgcccagaaagctcagttccactgtctgatattccagaatctcaagctgatgttcagactgaacaagatcaaatgactgatacagatgcaggtcataggcaaatagatgttgattctactgcagatggattgagtatgtcggacggagataattcatgcatagccaaagaatcagaaactagtgtatcaagcattctaaaggagccacaggacaatgcaacatctaggaaaaagcttaggaaagtgtccctaaaaaaacataaaagaacgaaaaaaagagacgacagctttgagcgagctctactcattgcaaatacttgtaccaaagttgatgtaatctggcaggacgggacaaaggaatgtggggtagccgcaacatcgttgattcctatccacaatccaaatgaccatgagttcttccctgagcagtatgttgtggacaaggtcacaaatgatgttgatgattcttctgaaccaaggcgtgtgggtcttgttagaagtgttagtgctaaggaccgaacagtaactgtatcatggtttaagccttcgctacatccagaggagacaaagaatatcgtgtgtaatgaaattgtgagtgcatatgaactggatggccatccggattatgattattgctatggagatattgtcgttcgcttgccgcctgtctcacctgtaattgaatcaaccaataacaaggatcaaatggaactagataggacggtcgatgcctcggaaggatttgctgcctcaaatgatgcaccctctaatactagtgcaagtgaacaacttttgcagaaggaatcctgctcgcagtttacaagcctctcatgggctggaaatatagttggctttcaagacggtgagattgaagtcatttggggtgatgggtcgatttcaaaggttgggcctcatgaaatatatgttgttggccgtgaagatgatgatgcctcactagatgacggaacagcctctgatggtgctagctgggagactgttgatgacaatgaaatggatgtacttgatgattctgcaaaggatgattcacaaagcatacctgagaatagcattgaaagggaagatggttcattcagctcccagaatggaagttctgttgcaactggtcccctttcagttgcttttgggtttgtgacccgactagcgagtgatctcttcgctcgaggtagaaggcatttagatagatcgtcaaactcggatgctatggatgaagttgagtctcaccagtctaatgaagtttcagaaactagtgatgacattgataagattaatgagaataatgtggaatcgccagaggatgctgcagtaatagaaaacgattcttctgtcgagaagtctgtagatgtggtcatggctgataatcttgtagatttggaatgtttcaaacactttgatattctgcaatgtcctccagaccaccattaccttgaaaacatagcccagggcacgggtggaagaaagtgggtaaaaaaagtacagcaggaatggagcatacttgagaagaacctaccagactatatttatgtcagagtctttgaggatcgcatggatctcttgagagccgtgattgttggagcaagtggaacaccctaccaagatggcctgttcttctttgatttctaccttccacctgagtatccgcaagttcctccgtcagcatactaccattctggtggtttgcgtgtaaatccaaacctgtatgtggatggaaaggtttgcttaagtctcttaaatacttggaccggcagagggaacgaagtgtgggacccatcatcatcaagtattctacaagtactggtttcacttcagggattggttctcaatgaaaaaccctattttaatgaggctgggtacgagaagcaagttggtactgttgaaggggagaagaatgcagtgccgtataatgagaatacgtacctgctgagcgtgaaatccatgctgtatatattgagacggcctcctttgcattttgaggattttgtgaagagccatttccgcaagcgtggccactacatccttaaagcctgtgaggcatatttgcaaggaaatgttgttggcactctcactgacgacgcatgcaccaccaacagaagcacggagcactcgagctctgtcggcttcaagcttgcactagcaaagattttaccaaggttgattacagccctgaaggagcatggagctgattgcgaccaatacgagcaccttggcaaaacagaccccgttagagagagctgatcattgagtgacttgtacttggatcttttgccttttatatctgttcttttttcgggtttcagaaaagatggtgacttaataccaccaggctgttttcgtataaatgtacattcaaagtttgttgtttccgtcaaacatttggaaaatatggccccaaatgatttattcgatacatggaaccgagctaccctgtgcagttgatgtttccgttgaacttgcagg

SEQ ID NO: 205474 - DNA, 932 bp, Zea Mays
cccgggccccgcatcttcctctgcctcagctcgcccgcgtggacgcacacggcgctgtcgccgccccgtgctttggcaagcacgcccggcgcctcacctccctgccgtgacccctcgcctcctctcaccacctcaccctcccatgcaagtaacggctgcccgtttcccctccatctcctctacccattcactccaagaaggaatggccgccatgccattaatggcgttgaagacaccgaccgttctccctctctctacgacgtccctccctcctccttctctctataaaacgcgagctcgtgcacatggagctgattcttggtcgccccaacctctccatgatctctccctctctcccgccgtagagaatcgctgtcggttcgctgctcgccgccgttcgacgtccggagccgaagccgatgccgcgccgacgacccccactgctgaggtcgtgccctgcttccccttgctgctccatcggtcatcgcaccctgctcctttaccgaccccctgctcttcaatttcgtccacacgcaagaaccaagggtgaggaagaagactttgcagatgatgtcgacaagtactaagtctaccgatgcgccagtcaccttcctgtggaagagtgtccaagcttaattctgttgtactttgataatgatactttttaagacactatggtctggatgatgtaataaagttactctactctctttacgcctttattgcattgtcttttaatatattacacttgtgacgtcaacatatgtgtggaaaatggatcctggcatacaatatgctatgcatttggttttgcccccaaagccggctatgacaccatgttaggtggtgctcttatcttagagtaagcctttgggatgctttggggtacccttggtatgtgtacatgtcagtagcccctaagctatcaaatg

SEQ ID NO: 205475 - DNA, 1043 bp, Zea Mays
gaagctagagctgcgatattaattggtttggtcgtgtcgcttcagctatggactgctacattcctccgtgacgccagctggctgaagctactgacggtgtcctacttcttcgggtcgtttctaaaccacaacctgttcctggccatccacgagctgagccacaaccttgccttcgcgaccccatccctgaaccgctggctgggcatcttcgcgaacctccccatcggtgtgcccatgtccatcacgttccagaagtaccacctggagcaccaccggttccagggcgtggacggcgtggacatggacatcccgagccaggcggaggcgcgcgccgtgaggagcgccgccggcaagtccgcgtgggtcgtgctccagctcttcttctacgctctgcggccgctgttcctgaagccgaagcctccgggcctgtgggagctgaccaacctggcggcccaggtcggcctcgacgccgggctcgtgtacctgtgcggctggaggtcgctggcctaccttgtcctctccacgttcgtcggcggcggcatgcaccccatggcgggccacttcatctcggagcactacgtgttcagccccgagcaggagacctactcgtactacgggcccctgaacctggtggcgtggcacgtggggtaccacaacgagcaccacgacttccccaggatcccgggcacccggctgcacagggtgaaggagatggcgccggagtactacgacggcctcgagtcgtacaggtcctggagccaggtcatttacatgtacatcatggaccggacggtcggcccgttcagccggatgaagaggaaggcgcagaagaaagactcgtagtcgccgtgtgctcaatttgttttttttttggtcgcgtgtgatgtgaactcatgtttggtgtaagcatttcgattcgtcggaacagcttgtttgtgatatcaatggctcgttttttcgtgctggatccaccgtgcccagcacgagctgtcaaaatggcgcgttgacacccccggagttcgtcccagctccaggctgctatt

SEQ ID NO: 205476 - DNA, 530 bp, Zea Mays
aaccatcaagttccacaaaatcacatctgcttcgactccaccgccgcctccttccttctttcctcgccgccacccgcgccgtgagagcaccgagccgtccgcgatcacgctgcgctctcctacaggcaacggagccggagccggagccccagttgcagctggctccgctgaattcggggctcgccgaataccgcctccagtcgtctgcgtccgggtgcaactgaatccggttaaggtaccgtctttgtagacttggctggagaaattggttgtttctatgatgaagactaagacgagtaggagcttacagaagtctgggagaggtaatcaggtccaaggagaagggccaaactgggttcttgttgctgggggttttttgcttagcgcgctttcagtcaagattgggtgcaaactaaagcagtggttcaatgggaagcagcaaaataatacttccaaagacctgaagcatgcgagctgcactcagacctctaccggttcagtgaccaaactggctgttgctactctgtttc

SEQ ID NO: 205477 - DNA, 3109 bp, Zea Mays
cttgaacaatgcaggaaagttggtgtcatttcattaaaacagaggaatacaaagatgtacaacatctccccgaccctaccaacacacgcacgcacacacacataccagtgacacacaactagttcatgatcatctcatgctacatgaaaagtgaaagatacaaccaaggaagctggagtcgatcagtcactcatttagaagacaaaagtgaaatgtcagaatcagcgtgcaacttgctaatactcagcacgaacttgaactataactatgtcatcatggaaccattagatgaattttctgaatatggaatgcgtcgaagacattgaatcctttcagtaatctcacaattacgatgctgatctatttcatcgtaaacattaacacataataactttatgtagaagccatagtaaggatggtttactctatagtgactgtcttgcatagtcaagaatatccttttcctgtagttcaaagctttggatgaagatacattatttcaggaggtctgagtaaacaaaacattgtagataccaagatttaaaatatacgccctcttgctaacaattgttattgtgagatatgacaggcccattatgcattttatttcttgagggatctctgaaaggcatgctaattaagagaacgactgttatgcaagcagtgcttctgtgcaagcgtgcaagcaaaccatctgatccattagatcgtgatccaaccgtaattcatatctaacatttaaacccttccatcaccagctcaataatttttataaaaaaaactctaacaaatcatggttgtatctgtggttggatcataatttaatggatcagatggtttgcttgcacgcttgcacagaaacactgcttgcatagcagtcgttgccgctaattataactaataaaactattatgcagtctgttccaaagaactttttgttagattaaaacatgtcagaaggcccagcatagtgtgtaaaactttcttcaagggtgcttgcctaaagcgttccctaaagttttagacacaccctaaagctactgtcgttgcctctaaaaggcactctaaattaaagagtcagatcctcatgcatctaaatatatggggttctctcttttcctctaaattttttatgctctaaaatacgaattaaatacagaattaatatgtacataccattttagactataataaatacatatgtaaaaaaatctaattttaaatatattaggaatatggtgtattatgtatagggggtggatttagaggggagagtggtgaaaaaaaatgagatttaggggatgaaaaatcatcgtggatattctcaaggagtgacgcgtcgagctctcttgatgaatcctcgtattggcccgagccacgcaggtcctttaaaatctgaacagaatgcaggcacaatcgagcatctcaggagacacgtctcgaaagcactgagcagcattacttacaaccaatttgttgcaaaaattcgcaaatgtcaagcagaagaaagtggcacagagaagacattatggagtcgaaggggaggaccgcaggagcgagagggaccgccgctggcctcctcgaagaagagcgtccaccggagggccttattgatatattcggagatccaagtagcagcggcgccggacgaggtgcggccgccggcgaggacaaggacgtcgacgaaaccccgcaccagacggcgctcctcctccatggccaccaccggcgggtgtgcccaccccattttccgagcctgcttctcacaatcctgacttctgcagggactacccggaaaacaatcctgcacttatcactttgcactcagaaccctatatttatgcatttccttttctatcactcttttgtttggttcgcacctcgcacagacgcacgcaagcctgaggtcctgaaatgaaaatttgcaactataacaaggtggtacttgaatagcagccacaaaaccctaacctcgcgaccgtataaacgagccaacccgcccacctcccgcgccgccgccactcagcgccgcgcttgcgtttccttctctccgcttccaagatgtcgaagcgagggcgtggaggttcggctggtaacaagttccggatgtcactgggtctaccagtggcagctactggaatcaagggtcgccttaacaggcttccttctgcctgtgttggtgacatggttatggcaaccgtgaagaagggaaagcctgaccttagaaagaaggtgatgccagctgttattgtgaggcagcgcaagccatggcgccgaaaggatggtgtctacatgtactttgaagacaatgctggagtgattgtgaacccaaagggagagatgaaaggttctgccatcactgggcccatcggaaaggagtgcgctgatctctggcccaggattgctagcgcggcaaatgcgatcgtctaaaggaagcagtttgtcgaagtttcatttaaaatggggacttgagaagggagttcttagttagacgagcttttgattgccctgaatatgtttccccggctaatgcttgtgctgctggaccgtttcctgatagctttgctttgatgacatcctccccgttatcgataaaggtgtcacgccggaacttctgaaactgtaaaaagtggtttctacaagacactgatgcttcagcatcacaggatcaaatcgcatcagcaatatggcgcatgcagcatgctcaaggcatgaaggagacggcatgtaaaattgcctcgaagcgacacttattttttacaacgttgtatcaacaacgccttcagtttccgtaaacagcttgtgttctctaatgtatccaattacttcatcactggtgcccataagaactataccgatgaactgatctgattcggcacgaccgagatgatgttatcctggaaacgagctcagaacatcagtaaggaaacttaaccatcagacagcaagttgcatcactgctggctatcaacttcccggcatcctttcctttccttgcatatggttttgacctggaagcaaaagcaggtgcggaagtttattattagcaaagttattacctgatcttgtatccaaacatctgaatgactcgagcaagtcagaaccacat

SEQ ID NO: 205478 - DNA, 4583 bp, Zea Mays
agataccaagatttaaaatatacgccctcttgctaacaattgttattgtgagatatgacaggcccattatgcattttatttcttgagggatctctgaaaggcatgctaattaagagaacgactgttatgcaatctgttccaaagaactttttgttagattaaaacatgtcagaaggcccagcatagtgtgtaaaactttcttcaagggtgcttgcctaaagcgttccctaaagttttagacacaccctaaagctactgtcgttgcctctaaaaggcactctaaattaaagagtcagatcctcatgcatctaaatatatggggttctctcttttcctctaaattttttatgctctaaaatacgaattaaatacagaattaatatgtacataccattttagactataataaatacatatgtaaaaaaatctaattttaaatatattaggaatatggtgtattatgtatagggggtggatttagaggggagagtggtgaaaaaaaatgagatttaggggatgaaaaatcatcgtggatattctcaaggagtgacgcgtcgagctctcttgatgaatcctcgtattggcccgagccacgcaggtcctttaaaatctgaacagaatgcaggcacaatcgagcatctcaggagacacgtctcgaaagcactgagcagcattacttacaaccaatttgttgcaaaaattcgcaaatgtcaagcagaagaaagtggcacagagaagacattatggagtcgaaggggaggaccgcaggagcgagagggaccgccgctggcctcctcgaagaagagcgtccaccggagggccttattgatatattcggagatccaagtagcagcggcgccggacgaggtgcggccgccggcgaggacaaggacgtcgacgaaaccccgcaccagacggcgctcctcctccatggccaccaccggcgggtgtgcccaccccattttccgagcctgcttctcacaatcctgacttctgcagggactacccggaaaacaatcctgcacttatcactttgcactcagaaccctatatttatgcatttccttttctatcactcttttgtttggttcgcacctcgcacagacgcacgcaagcctgaggtcctgaaatgaaaatttgcaactataacaaggtggtacttgaatagcagccacaaaaccctaacctcgcgaccgtataaacgagccaacccgcccacctcccgcgccgccgccactcagcgccgcgcttgcgtttccttctctccgcttccaagatgtcgaagcgagggcgtggaggttcggctggtaacaagttccggatgtcactgggtctaccagtggcagctactgtgaactgtgccgataacactggagccaagaacctgtacatcatttctgtgaagggaatcaagggtcgccttaacaggcttccttctgcctgtgttggtgacatggttatggcaaccgtgaagaagggaaagcctgaccttagaaagaaggtgatgccagctgttattgtgaggcagcgcaagccatggcgccgaaaggatggtgtctacatgtactttgaagacaatgctggagtgattgtgaacccaaagggagagatgaaaggttctgccatcactgggcccatcggaaaggagtgcgctgatctctggcccaggattgctagcgcggcaaatgcgatcgtctaaaggaagcagtttgtcgaagtttcatttaaaatggggacttgagaagggagttcttagttagacgagcttttgattgccctgaatatgtttccccggctaatgcttgtgctgctggaccgtttcctgatagctttgctttgatgacatcctccccgttatcgataaagttgcgtagcctgacattttgcagagtttaagttggcttgttttggagcaagggtagttgctattttagctcctccaatccccttgcgcctaacactatctaagggctagtttgagagccataaaatctgagtggatttgaggtgctaaaattccttccttactcaattttaataagaaggggattttagtccctcctgttcttcggttttgtttggaagctacaaaaccggagaggattagaggggctagaatccactttttatttaaatttgaataattaggggattctaacaactccaattcccttcggttttatgtctcccaagctatctttaagggctggtttgatgataggggaatttgagggggtccattggcgaggaattcctttgctatttgaaattgaatagcactggaatttttcccacatcagttttggaaccttattttcctggaggaattctatttttccaaaaaaaaatgaactaaattcccttgtgaaaatgaaaattacttgagaaaatgtggttcccaaactagttctaaatgtcatatgtaggggagtcattagcaattttgtcattatcatttgtggatttcgctaatatgatatcgggttcgtaaattatagatatacatggttttatttgtcatagacatgagatgacataataataggaagcgaacactgagagtggcaaaattataaatttctccagggtgtcacgccggaacttctgaaactgtaaaaagtggtttctacaagacactgatgcttcagcatcacaggatcaaatcgcatcagcaatatggcgcatgcagcatgctcaaggcatgaaggagacggcatgtaaaattgcctcgaagcgacacttattttttacaacgttgtatcaacaacgccttcagtttccgtaaacagcttgtgttctctaatgtatccaattacttcatcactggtgcccataagaactataccgatgaactgatctgattcggcacgaccgagatgatgttatcctggaaacgagctcagaacatcagtaaggaaacttaaccatcagacagcaagttgcatcactgctggctatcaacttcccggcatcctttcctttccttgcatatggttttgacctggaagcaaaagcaggtgcggaagtttattattagcaaagttattacctgatcttgtatccaaacatctgaatgactcgagcaagtcagaaccacataaaagcattaccttgaggctaccttttcgcaaacttatggcattgcgcgggcccacgtgtcaacggctcatgttaaccccgccgccacttatcccttcccactggcctcgcgcccctccacatcacaagctacaccgcccaggcgtcagctgcttcattgcgtggccgtggccgtggccgtcgacgcctcgcgggaaacatggccagttcctgcctctccaccgccgcggcgcagctccagctgcagctgcagctccatctcgcgtcgtcaccagtgttcccgcgcccagcgcgcgcgcaccaccggctcgtcgccgcgcacgccgttgcggtgcccgtacatcggaggcgcgcgctcgcggtcaccgcgagcgcgtcgcaggaggaggccgaggccacggttgtcgaggaggaattggaggaggtcgcggagcgaggcagagaggtacagttgcaagaacaagacgaagttcaggaggaaggtgcagccgtcggggctagctcggacgacagcggcccgtcggtggccgcgagcaccacgaccaccaagctctacttcgggaacctgccgtacaactgcgacagcgcgcagcttgccggcattgtgcaggagtacgccagcccggagatggtcgaggtgctgtacgatcgtacgacgggcagaagccgagggttcgccttcgtgacgatgaccacggttcaggactgcgagttggtcatcaagaacctcgacggcagcctgtacggtggccggacgatgaaggtgaacttcgccgaccggcccaagcccaagcaggcgctgtacccggagacggagcacaagctgttcgtcggcaacctgtcgtggacggtcacgtcggagatgctcacggaggcgttcggccgctgcggcaccgtggtcggcgcgagggtgctctacgacggcgagaccggccgctccaggggctacggcttcgtctgctactccaccagggaggagatggacgaggcgctttcctcgctcaacggaatggaaatggaaggcagggagatgagggtcaacttggccctcggaaagaagtaacagagttcagatatgtggaggaagttgcaattggtatgtgatggatgcctatgcgatgcaaccgagacgacgacgcttgctcatctcatccggagcacatacgaggagagcagagagcaggaaaaggaaaaggaaacggaaaccttcctgatctagcatagcatgggagtgtcattgccatctggtgtgtgtttagcaaatatatacggttcatacagtgcgaattgtgattctggcgagattaggatgctgattcctccgatcattggagcacagttttggcttgatccatgcacattcgaagctgctgttactgaaagagttgacaggccgtatgtttggtacaactttttttatgagaatatggatttgtggataatactgaaagatgtcctatacgttctgaatccaagaaaaaaac

SEQ ID NO: 205479 - DNA, 1736 bp, Zea Mays
ctcaaggagtgacgcgtcgagctctcttgatgaatcctcgtattggcccgagccacgcaggtcctttaaaatctgaacagaatgcaggcacaatcgagcatctcaggagacacgtctcgaaagcactgagcagcattacttacaaccaatttgttgcaaaaattcgcaaatgtcaagcagaagaaagtggcacagagaagacattatggagtcgaaggggaggaccgcaggagcgagagggaccgccgctggcctcctcgaagaagagcgtccaccggagggccttattgatatattcggagatccaagtagcagcggcgccggacgaggtgcggccgccggcgaggacaaggacgtcgacgaaaccccgcaccagacggcgctcctcctccatggccaccaccggcgggtgtgcccaccccattttccgagcctgcttctcacaatcctgacttctgcagggactacccggaaaacaatcctgcacttatcactttgcactcagaaccctatatttatgcatttccttttctatcactcttttgtttggttcgcacctcgcacagacgcacgcaagcctgaggtcctgaaatgaaaatttgcaactataacaaggtggtacttgaatagcagccacaaaaccctaacctcgcgaccgtataaacgagccaacccgcccacctcccgcgccgccgccactcagcgccgcgcttgcgtttccttctctccgcttccaagatgtcgtctaccagtggcagctactggaatcaagggtcgccttaacaggcttccttctgcctgtgttggtgacatggttatggcaaccgtgaagaagggaaagcctgaccttagaaagaaggtgatgccagctgttattgtgaggcagcgcaagccatggcgccgaaaggatggtgtctacatgtactttgaagacaatgctggagtgattgtgaacccaaagggagagatgaaaggttctgccatcactgggcccatcggaaaggagtgcgctgatctctggcccaggattgctagcgcggcaaatgcgatcgtctaaaggaagcagtttgtcgaagtttcatttaaaatggggacttgagaagggagttcttagttagacgagcttttgattgccctgaatatgtttccccggctaatgcttgtgctgctggaccgtttcctgatagctttgctttgatgacatcctccccgttatcgataaaggtgtcacgccggaacttctgaaactgtaaaaagtggtttctacaagacactgatgcttcagcatcacaggatcaaatcgcatcagcaatatggcgcatgcagcatgctcaaggcatgaaggagacggcatgtaaaattgcctcgaagcgacacttattttttacaacgttgtatcaacaacgccttcagtttccgtaaacagcttgtgttctctaatgtatccaattacttcatcactggtgcccataagaactataccgatgaactgatctgattcggcacgaccgagatgatgttatcctggaaacgagctcagaacatcagtaaggaaacttaaccatcagacagcaagttgcatcactgctggctatcaacttcccggcatcctttcctttccttgcatatggttttgacctggaagcaaaagcaggtgcggaagtttattattagcaaagttattacctgatcttgtatccaaacatctgaatgactcgagcaagtcagaaccacat

SEQ ID NO: 205480 - DNA, 2403 bp, Zea Mays
gtgaggcggagtgagcaacgggacccccacatggcgccaccgccgctgcccctcttctccccgtccctaaaggccccgccgccgccgccatggctccacgggtcctctacccaaagccgcgactccgcacccccggtgcctccactccccgccgaggcaactccttccaagttccgcatcgacagccccaaaccggcaccggcaaggaaaaacaccaaaacagcagccaagcccctcactgccggagtccccgggggccgcacccaccgagcggtcctcggcatcatccggcgcgtccgctccctcgagctctccgatgctccgagtccgaattccgtccacaccagcaacagcggtgccgccgccgccgcattccaccttacgatcgagctgtccccgccgcgggaaccaggccaatatgtggttgagaaggagaagtcacgggctgttccgtgggcggctgctagggacgagggcctcaaggttgcgctgcggcgggagaagaagccgcgggagccgacgcgcgcggagaccgagctggagacccacgagctgcatcgcctgcggcggttggcgcgtgggataggcaggtgggcgcgggccaagaaggccggagtcaccgacgaggtagtcaaggaggtgcgaagggaatgggccagtggtgaggagctcgccgccgtgcgcatagtcgagccactccgccggtccatggatcgcgccagggaaattcttgagattaaaacaggaggcttagttgtgtggacaaaaggagacatgcattttgtctacagaggaagcaaatatcagcaaaacgcaaagcatagtcacacttttctaactaatgttcataaagatgatgcttttcaagaaaatgatcaaagcatttgtggccagaaggatgaagaacctgtcaagggtacactatatgagagagaagtcaatagactattggacactttgggccctcgatttgttgattggtggtgggacacaccattacctgttgatgctgatctcctcccagagtttgttccaggctttaagactccatataggctgtgccctcctggggtgagaccaacactagctgatgaggagctgacatacttgcgcaagcttgcacgccttttgccaacacattttgcccttggtagaaacacaagattgcagggtttggctgctgctatactgaagctttgggagaaaagccttatagcaaaaattgcagtgaaaataggtatccagaatacaaacaatgaacaaatggcatggaacctcaagtgcagcatcttacgggaggcactgttatattgagaaacaaggattttattattctatatagaggcaaggattttcttcctggtggagttgctcaaactgtcattcaacgagaagctcaggtacatgatgaacaggtgaaggaagaggaagcccgactgaaagcagttgactcacttcagatggttggtgaattatctgaagaaagttctttaggaactttcagggagtaccagggtttccatgctaagtttgtgcatgaaaatactgaaaactctaacaccatgattgaactagaggctgagaagtatagattggaaaaggaactgaaagaccatgagtggaagctttccgttctcaacaagaagattgaaagatctaaccaggcactggcaaagcttcacagttcttggagcccttcagagcagtctgctgatagagaacacttgacagaagaggaaaaaataatgttccgccggattggccgcaaaatggatgggcttgttctcctaggaaggcgtggtatctttgatggtgtaattgaagagattcatcagcactggaaacataaagaggttgtgaaagtaattacaaaacagaatcaaactcgacagatcatgtacgccgcgagtctgctcgaggttgagacaggtgggatattaatagcagtagaaaagctcacaaccagccatgccataatactttaccgtggaaaaaactatcgccgcccagcaaaatcatcatttagtaatctcctaacaaaaagagaagcgctccgaagatcaatcgaggtccaacgacgagggtcaatgaaatactttgttcgggagagacagaagtccattttggaattgaaaaggaaactgaggtatgtgacaaggcaaatcaggtatcgaaccccatgatcatgaagagtttggatagcatggttagtaaatgatagttagaatttgcaataatgactgcatccaatttttttccttaatatgggatagccgtgtaaactgtgaagcccaacatgaacaattctgaagtgtacagattatataatagtgtctgttgtacatatgtgacacttttgactttacccatatttcatgaaacaagagatttttttttctgctt

SEQ ID NO: 205481 - DNA, 2340 bp, Zea Mays
gaacggatgagtgaggcggagtgagcaacgggacccccacatggcgccaccgccgctgcccctcttctccccgtccctaaaggccccgccgccgccgccatggctccacgggtcctctacccaaagccgcgactccgcacccccggtgcctccactccccgccgaggcaactccttccaagttccgcatcgacagccccaaaccggcaccggcaaggaaaaacaccaaaacagcagccaagcccctcactgccggagtccccgggggccgcacccaccgagcggtcctcggcatcatccggcgcgtccgctccctcgagctctccgatgctccgagtccgaattccgtccacaccagcaacagcggtgccgccgccgccgcattccaccttacgatcgagctgtccccgccgcgggaaccaggccaatatgtggttgagaaggagaagtcacgggctgttccgtgggcggctgctagggacgagggcctcaaggttgcgctgcggcgggagaagaagccgcgggagccgacgcgcgcggagaccgagctggagacccacgagctgcatcgcctgcggcggttggcgcgtgggataggcaggtgggcgcgggccaagaaggccggagtcaccgacgaggtagtcaaggaggtgcgaagggaatgggccagtggtgaggagctcgccgccgtgcgcatagtcgagccactccgccggtccatggatcgcgccagggaaattcttgagattaaaacaggaggcttagttgtgtggacaaaaggagacatgcattttgtctacagaggaagcaaatatcagcaaaacgcaaagcatagtcacacttttctaactaatgttcataaaggttatctagtaaaacataatgttcatacaaccttacttaagtatgggagcattggtccagtgttaatcaacaattatggtgaagcagatgatgcttttcaagaaaatgatcaaagcatttgtggccagaaggatgaagaacctgtcaagggtacactatatgagagagaagtcaatagactattggacactttgggccctcgatttgttgattggtggtgggacacaccattacctgttgatgctgatctcctcccagagtttgttccaggctttaagactccatataggctgtgccctcctggggtgagaccaacactagctgatgaggagctgacatacttgcgcaagcttgcacgccttttgccaacacattttgcccttggtagaaacacaagattgcagggtttggctgctgctatactgaagctttgggagaaaagccttatagcaaaaattgcagtgaaaataggtatccagaatacaaacaatgaacaaatggcatggaacctcaagcatcttacgggaggcactgttatattgagaaacaaggattttattattctatatagaggcaaggattttcttcctggtggagttgctcaaactgtcattcaacgagaagctcaggtacatgatgaacaggtgaaggaagaggaagcccgactgaaagcagttgactcacttcagatggttggtgaattatctgaagaaagttctttaggaactttcagggagtaccagggtttccatgctaagtttgtgcatgaaaatactgaaaactctaacaccatgattgaactagaggctgagaagtatagattggaaaaggaactgaaagaccatgagtggaagctttccgttctcaacaagaagattgaaagatctaaccaggcactggcaaagcttcacagttcttggagcccttcagagcagtctgctgatagagaacacttgacagaagaggaaaaaataatgttccgccggattggccgcaaaatggatgggcttgttctcctaggaaggcgtggtatctttgatggtgtaattgaagagattcatcagcactggaaacataaagaggttgtgaaagtaattacaaaacagaatcaaactcgacagatcatgtacgccgcgagtctgctcgaggttgagacagtcaatgaaatactttgttcgggagagacagaagtccattttggaattgaaaaggaaactgaggtatgtgacaaggcaaatcaggtatcgaaccccatgatcatgaagagtttggatagcatggttagtaaatgatagttagaatttgcaataatgactgcatccaatttttttccttaatatgggatagccgtgtaaactgtgaagcccaacatgaacaattctgaagtgtacagattatataatagtgtctgttgtacatatgtgacacttttgactttacccatatttcatgaaacaagagatttttttttctgctt

SEQ ID NO: 205482 - DNA, 983 bp, Zea Mays
accctcataatgatgttcattatcctttggaagctcttagacagatccagtctgctgatataaaaatgaagctactagagatgcagaagggagaattgaggtgcctcctacccagaagtttgcttgataatggattttttggtatccgttctagtgaagataaggatagcaagaaaaatactggtccgttttcaagttttagttggagtggtcaacgcaaagttccatcatatcttccaaaaattgttttccctcatgaatttatgagtactctacgtactattgccatgcaagaacatgagcttgaacaggttgcttctttacttggagagactttattctctaggcgtgaaactacactttttggagatgcagtgatcagtgtttcgttcgctacttctgaactgatctgttgataactgtgtactaaaaaggagtaggagactagtgactccgcactgaagacagagaaacatcttgtgcagcgatccaaagtgctatttgggaggtctgcggtgatcagggtgcactgggtttgcttgtggatcttctcggggtcaaaatggctgaacttgaagagggctctggaacagaagcatctgacgccgaactgctcgagcagttcgattccattcagccagaagactacgcgagtgaaagcggcgagaagcacgaaaggaagtcaaagacaaactaccgttcgtgtgtagtgtaccggagagggcaaaagcagctgacgaggctgttcctgagggaggtagagcatcttctggagctttctgcgaaagaacagagctaagagactctcatctgaggaatccaatacagatgaaggatggaattttcaggataatgctatgaaacagatgcagaatttccttgcgcctttattgattcttggcctgatgctatcatccatgtcatctagcttcgcagaccagaaggagtcaaattcccaggatcacaataaggtacaagaaacg

SEQ ID NO: 205483 - DNA, 2436 bp, Zea Mays
ctccctcccgctcactcgcgcaatccgtcgaactcgaacactgccatggccaccgccgctgccgacgacgatgtcaagctcgaatccttcctccaatggctccagtccaacggcgccgacctccgcagctgcacgatccgcgcatgcggcggcaagggcttgggggttttttccaccgccgcccccgagccgggctccaacgacggtaacgctcctctcctttcccccgagtcgacgaggctcatttggacgatgcgccggcgctgtgcaggggtggcgatggtggtaccgctcgatctcgccatcacgcccatgcgggtgctgcaggacccactcgtcggcccgcgatgccgcgcgctcttagaggacggagtcgtcgacgaccgcctcctcgtcatgctcttcctcatggccgagcgccgacgccctggctcactctggaagccatacttggatatgcttccgagcacctttgggagctccctttggtttactgaggaagagcttgccgaactggaagggacaactttgcaccgagctacgttgattcagaggaagtcattgcaatcctcatttgatgagaaggttaaagggctcgttgaggagcttttgcatgtcgatgaatcagcaagctcagttgaagttttgtttgaggacttcctttgggcaaactcaatcttctggactcgagcactgaacataccattgcctcattcttatgtttttctgggctcatgtggcgatcaacaggccagggctgacaatgatgcccaccaggaaattgatattacagctaaggattgtagtgctgatgagaattctaaaccaagtaacacagagtcaatttgggttgagggccttgtcccaggaattgatttctgcaatcataatgtaaaggcactggcaacatgggaagttgattctgtgggaaatgctaccggaattcctgcttcaatgtacctcttgcttgctgataaaagtcctgctgagactggagcagagatctgcataaactacggcaacaaaggaaatgaggaactactgtacctttatggatttgtggttgacaacaatcctgatgattatctcatggttcattatcctttggaagctcttagacagatccagtctgctgatataaaaatgaagctactagagatgcagaagggagaattgaggtgcctcctacccagaagtttgcttgataatggattttttggtatccgttctagtgaagataaggatagcaagaaaaatactggtccgttttcaagttttagttggagtggtcaacgcaaagttccatcatatcttccaaaaattgttttccctcatgaatttatgagtactctacgtactattgccatgcaagaacatgagcttgaacaggttgcttctttacttggagagactttattctctaggcgtgaaactacactttttggagatgcagtgatcagtgtttcgttcgctacttctgaactgatctgttgataactgtgtactaaaaaggagtaggagactagtgactccgcacgttggatatagtgaagacagagaaacatcttgtgcagcgatccaaagtgctatttgggaggtctgcggtgatcagggtgcactgggtttgcttgtggatcttctcggggtcaaaatggctgaacttgaagagggctctggaacagaagcatctgacgccgaactgctcgagcagttcgattccattcagccagaagactacgcgagtgaaagcggcgagaagcacgaaaggaagtcaaagacaaactaccgttcgtgtgtagtgtaccggagagggcaaaagcagctgacgaggctgttcctgagggaggtagagcatcttctggagctttctgcgaaagaacagagctaagagactctcatctggtacaagattgatttccttctctctgttttccgagtgaaattcctgaggtttctatgttttactagcctgttgtttatctacgatcatgacattgacaggccctgcctgcatcaaggttagaactgcagggttgtgaaaggaggcacacccgttgcgaaagtagaataccgccttcgtttcgttcccttgcgaaagtactactactccgttccaggactacgatttcgtctcccgaggattccggattgcccgttggctgggcatttgtggaggagacgtcgtcttgcactttgctgccacggctaggctgtagctttacctgattcagcttgcagcggcggagctgcagcgaacagccatctagagacagctccagagctctggttttaccaaaatgcgtttcttttctagatgactttgccttcgtcagagatgcatctcctggtctcacgagtcacagttccgactccgagacggtcaaggagattatagtctgctaagattatgtaatctaaagtattttttaaaccggg

SEQ ID NO: 205484 - DNA, 2250 bp, Zea Mays
ctccctcccgctcactcgcgcaatccgtcgaactcgaacactgccatggccaccgccgctgccgacgacgatgtcaagctcgaatccttcctccaatggctccagtccaacggcgccgacctccgcagctgcacgatccgcgcatgcggcggcaagggcttgggggttttttccaccgccgcccccgagccgggctccaacgacggggtggcgatggtggtaccgctcgatctcgccatcacgcccatgcgggtgctgcaggacccactcgtcggcccgcgatgccgcgcgctcttagaggacggagtcgtcgacgaccgcctcctcgtcatgctcttcctcatggccgagcgccgacgccctggctcactctggaagccatacttggatatgcttccgagcacctttgggagctccctttggtttactgaggaagagcttgccgaactggaagggacaactttgcaccgagctacgttgattcagaggaagtcattgcaatcctcatttgatgagaaggttaaagggctcgttgaggagcttttgcatgtcgatgaatcagcaagctcagttgaagttttgtttgaggacttcctttgtacgagtctatgacagggcaaactcaatcttctggactcgagcactgaacataccattgcctcattcttatgtttttctgggctcatgtggcgatcaacaggccagggctgacaatgatgcccaccaggaaattgatattacagctaaggattgtagtgctgatgagaattctaaaccaagtaacacagagtcaatttgggttgagggccttgtcccaggaattgatttctgcaatcataatgtaaaggcactggcaacatgggaagttgattctgtgggaaatgctaccggaattcctgcttcaatgtacctcttgcttgctgataaaagtcctgctgagactggagcagagatctgcataaactacggcaacaaaggaaatgaggaactactgtacctttatggatttgtggttgacaacaatcctgatgattatctcatggttcattatcctttggaagctcttagacagatccagtctgctgatataaaaatgaagctactagagatgcagaagggagaattgaggtgcctcctacccagaagtttgcttgataatggattttttggtatccgttctagtgaagataaggatagcaagaaaaatactggtccgttttcaagttttagttggagtggtcaacgcaaagttccatcatatcttccaaaaattgttttccctcatgaatttatgagtactctacgtactattgccatgcaagaacatgagcttgaacaggttgcttctttacttggagaggttggatatagtgaagacagagaaacatcttgtgcagcgatccaaagtgctatttgggaggtctgcggtgatcagggtgcactgggtttgcttgtggatcttctcggggtcaagtattcaatcctcctcttgtttacccgtcgatgtattttggaccatatagccgtccttggtctagcatcacgaacaacccacagatcacaacgttcccttttgcaagaatggctgaacttgaagagggctctggaacagaagcatctgacgccgaactgctcgagcagttcgattccattcagccagaagactacgcgagtgaaagcggcgagaagcacgaaaggaagtcaaagacaaactaccgttcgtgtgtagtgtaccggagagggcaaaagcagctgacgaggctgttcctgagggaggtagagcatcttctggagctttctgcgaaagaacagagctaagagactctcatctggttagaactgcagggttgtgaaaggaggcacacccgttgcgaaagtagaataccgccttcgtttcgttcccttgcgaaagtactactactccgttccaggactacgatttcgtctcccgaggattccggattgcccgttggctgggcatttgtggaggagacgtcgtcttgcactttgctgccacggctaggctgtagctttacctgattcagcttgcagcggcggagctgcagcgaacagccatctagagacagctccagagctctggttttaccaaaatgcgtttcttttctagatgactttgccttcgtcagagatgcatctcctggtctcacgagtcacagttccgactccgagacggtcaaggagattatagtctgctaagattatgtaatctaaagtattttttaaaccggg

SEQ ID NO: 205485 - DNA, 2218 bp, Zea Mays
ctccctcccgctcactcgcgcaatccgtcgaactcgaacactgccatggccaccgccgctgccgacgacgatgtcaagctcgaatccttcctccaatggctccagtccaacggcgccgacctccgcagctgcacgatccgcgcatgcggcggcaagggcttgggggttttttccaccgccgcccccgagccgggctccaacgacggggtggcgatggtggtaccgctcgatctcgccatcacgcccatgcgggtgctgcaggacccactcgtcggcccgcgatgccgcgcgctcttagaggacggagtcgtcgacgaccgcctcctcgtcatgctcttcctcatggccgagcgccgacgccctggctcactctggaagccatacttggatatgcttccgagcacctttgggagctccctttggtttactgaggaagagcttgccgaactggaagggacaactttgcaccgagctacgttgattcagaggaagtcattgcaatcctcatttgatgagaaggttaaagggctcgttgaggagcttttgcatgtcgatgaatcagcaagggcaaactcaatcttctggactcgagcactgaacataccattgcctcattcttatgtttttctgggctcatgtggcgatcaacaggccagggctgacaatgatgcccaccaggaaattgatattacagctaaggattgtagtgctgatgagaattctaaaccaagtaacacagagtcaatttgggttgagggccttgtcccaggaattgatttctgcaatcataatgtaaaggcactggcaacatgggaagttgattctgtgggaaatgctaccggaattcctgcttcaatgtacctcttgcttgctgataaaagtcctgctgagactggagcagagatctgcataaactacggcaacaaaggaaatgaggaactactgtacctttatggatttgtggttgacaacaatcctgatgattatctcatggttcattatcctttggaagctcttagacagatccagtctgctgatataaaaatgaagctactagagatgcagaagggagaattgaggtgcctcctacccagaagtttgcttgataatggattttttggtatccgttctagtgaagataaggatagcaagaaaaatactggtccgttttcaagttttagttggagtggtcaacgcaaagttccatcatatcttccaaaaattgttttccctcatgaatttatgagtactctacgtactattgccatgcaagaacatgagcttgaacaggttgcttctttacttggagaggttggatatagtgaagacagagaaacatcttgtgcagcgatccaaagtgctatttgggaggtctgcggtgatcagggtgcactgggtttgcttgtggatcttctcggggtcaagtattcaatcctcctcttgtttacccgtcgatgtattttggaccatatagccgtccttggtctagcatcacgaacaacccacagatcacaacgttcccttttgcaagaatggctgaacttgaagagggctctggaacagaagcatctgacgccgaactgctcgagcagttcgattccattcagccagaagactacgcgagtgaaagcggcgagaagcacgaaaggaagtcaaagacaaactaccgttcgtgtgtagtgtaccggagagggcaaaagcagctgacgaggctgttcctgagggaggtagagcatcttctggagctttctgcgaaagaacagagctaagagactctcatctggccctgcctgcatcaaggttagaactgcagggttgtgaaaggaggcacacccgttgcgaaagtagaataccgccttcgtttcgttcccttgcgaaagtactactactccgttccaggactacgatttcgtctcccgaggattccggattgcccgttggctgggcatttgtggaggagacgtcgtcttgcactttgctgccacggctaggctgtagctttacctgattcagcttgcagcggcggagctgcagcgaacagccatctagagacagctccagagctctggttttaccaaaatgcgtttcttttctagatgactttgccttcgtcagagatgcatctcctggtctcacgagtcacagttccgactccgagacggtcaaggagattatagtctgctaagattatgtaatctaaagtattttttaaaccggg

SEQ ID NO: 205486 - DNA, 2907 bp, Zea Mays
ctccctcccgctcactcgcgcaatccgtcgaactcgaacactgccatggccaccgccgctgccgacgacgatgtcaagctcgaatccttcctccaatggctccagtccaacggcgccgacctccgcagctgcacgatccgcgcatgcggcggcaagggcttgggggttttttccaccgccgcccccgagccgggctccaacgacggggtggcgatggtggtaccgctcgatctcgccatcacgcccatgcgggtgctgcaggacccactcgtcggcccgcgatgccgcgcgctcttagaggacggagtcgtcgacgaccgcctcctcgtcatgctcttcctcatggccgagcgccgacgccctggctcactctggaagccatacttggatatgcttccgagcacctttgggagctccctttggtttactgaggaagagcttgccgaactggaagggacaactttgcaccgagctacgttgattcagaggaagtcattgcaatcctcatttgatgagaaggttaaagggctcgttgaggagcttttgcatgtcgatgaatcagcaagctcagttgaagttttgtttgaggacttcctttggtatgtaatattcttgtttgcattaaaagcagaaacaacatactacaaccttcacttaataataccattttaccatcttgattgataatgccaatatgtggagttgtggactgtgggcagcctgtattaatgtaatgttgtaaacagtacatgggaatatgggattggtgaacctccttcagtctgtgggctgtacttacgtacataaacctgataaagactatcctgaaatgacgtaatcaagagaagaagcagaaggatcgtttgtggttatctttgtttatgcagtgtaaattagttaggtttcatctgttacaatagtataataaatagtgcattttcaccatggttagtggtgttgctgttgcataggtatactattgtacctgcaaatataccatgtagttggatgttcagcgtagctacttacataaacgagttagccacacaaaaagcaacagcttaaccaaataaggcaaggtgttactgtattattcatccaaaaaaagttaacatgctttgatatctagcatcgtgtacattgcatccttttcctgtggtcagggtgaaaatttgatcagaatcatggaatctgcaatatgtacttgattaaagtgatggtgtcaaagactagttctttctttagtttacataattaaaagtttaaagaaaatgccatataggcatcccaattttcttatctctagttaatttttactctaattagcagtacgagtctatgacagggcaaactcaatcttctggactcgagcactgaacataccattgcctcattcttatgtttttctgggctcatgtggcgatcaacaggccagggctgacaatgatgcccaccaggaaattgatattacagctaaggattgtagtgctgatgagaattctaaaccaagtaacacagagtcaatttgggttgagggccttgtcccaggaattgatttctgcaatcataatgtaaaggcactggcaacatgggaagttgattctgtgggaaatgctaccggaattcctgcttcaatgtacctcttgcttgctgataaaagtcctgctgagactggagcagagatctgcataaactacggcaacaaaggaaatgaggaactactgtacctttatggatttgtggttgacaacaatcctgatgattatctcatggtaaccctcataatgatgttcattatcctttggaagctcttagacagatccagtctgctgatataaaaatgaagctactagagatgcagaagggagaattgaggtgcctcctacccagaagtttgcttgataatggattttttggtatccgttctagtgaagataaggatagcaagaaaaatactggtccgttttcaagttttagttggagtggtcaacgcaaagttccatcatatcttccaaaaattgttttccctcatgaatttatgagtactctacgtactattgccatgcaagaacatgagcttgaacaggttgcttctttacttggagaggttggatatagtgaagacagagaaacatcttgtgcagcgatccaaagtgctatttgggaggtctgcggtgatcagggtgcactgggtttgcttgtggatcttctcggggtcaaaatggctgaacttgaagagggctctggaacagaagcatctgacgccgaactgctcgagcagttcgattccattcagccagaagactacgcgagtgaaagcggcgagaagcacgaaaggaagtcaaagacaaactaccgttcgtgtgtagtgtaccggagagggcaaaagcagctgacgaggctgttcctgagggaggtagagcatcttctggagctttctgcgaaagaacagagctaagagactctcatctggccctgcctgcatcaaggttagaactgcagggttgtgaaaggaggcacacccgttgcgaaagtagaataccgccttcgtttcgttcccttgcgaaagtactactactccgttccaggactacgatttcgtctcccgaggattccggattgcccgttggctgggcatttgtggaggagacgtcgtcttgcactttgctgccacggctaggctgtagctttacctgattcagcttgcagcggcggagctgcagcgaacagccatctagagacagctccagagctctggttttaccaaaatgcgtttcttttctagatgactttgccttcgtcagagatgcatctcctggtctcacgagtcacagttccgactccgagacggtcaaggagattatagtctgctaagattatgtaatctaaagtattttttaaaccggg

SEQ ID NO: 205487 - DNA, 2766 bp, Zea Mays
cagctccctcccgctcactcgcgcaatccgtcgaactcgaacactgccatggccaccgccgctgccgacgacgatgtcaagctcgaatccttcctccaatggctccagtccaacggcgccgacctccgcagctgcacgatccgcgcatgcggcggcaagggcttgggggttttttccaccgccgcccccgagccgggctccaacgacggggtggcgatggtggtaccgctcgatctcgccatcacgcccatgcgggtgctgcaggacccactcgtcggcccgcgatgccgcgcgctcttagaggacggagtcgtcgacgaccgcctcctcgtcatgctcttcctcatggccgagcgccgacgccctggctcactctggaagccatacttggatatgcttccgagcacctttgggagctccctttggtttactgaggaagagcttgccgaactggaagggacaactttgcaccgagctacgttgattcagaggaagtcattgcaatcctcatttgatgagaaggttaaagggctcgttgaggagcttttgcatgtcgatgaatcagcaagctcagttgaagttttgtttgaggacttcctttggtatgtaatattcttgtttgcattaaaagcagaaacaacatactacaaccttcacttaataataccattttaccatcttgattgataatgccaatatgtggagttgtggactgtgggcagcctgtattaatgtaatgttgtaaacagtacatgggaatatgggattggtgaacctccttcagtctgtgggctgtacttacgtacataaacctgataaagactatcctgaaatgacgtaatcaagagaagaagcagaaggatcgtttgtggttatctttgtttatgcagtgtaaattagttaggtttcatctgttacaatagtataataaatagtgcattttcaccatggttagtggtgttgctgttgcataggtatactattgtacctgcaaatataccatgtagttggatgttcagcgtagctacttacataaacgagttagccacacaaaaagcaacagcttaaccaaataaggcaaggtgttactgtattattcatccaaaaaaagttaacatgctttgatatctagcatcgtgtacattgcatccttttcctgtggtcagggtgaaaatttgatcagaatcatggaatctgcaatatgtacttgattaaagtgatggtgtcaaagactagttctttctttagtttacataattaaaagtttaaagaaaatgccatataggcatcccaattttcttatctctagttaatttttactctaattagcagtacgagtctatgacagggcaaactcaatcttctggactcgagcactgaacataccattgcctcattcttatgtttttctgggctcatgtggcgatcaacaggccagggctgacaatgatgcccaccaggaaattgatattacagctaaggattgtagtgctgatgagaattctaaaccaagtaacacagagtcaatttgggttgagggccttgtcccaggaattgatttctgcaatcataatgtaaaggcactggcaacatgggaagttgattctgtgggaaatgctaccggaattcctgcttcaatgtacctcttgcttgctgataaaagtcctgctgagactggagcagagatctgcataaactacggcaacaaaggaaatgaggaactactgtacctttatggatttgtggttgacaacaatcctgatgattatctcatggttcattatcctttggaagctcttagacagatccagtctgctgatataaaaatgaagctactagagatgcagaagggagaattgaggtgcctcctacccagaagtttgcttgataatggattttttgtactctacgtactattgccatgcaagaacatgagcttgaacaggttgcttctttacttggagaggttggatatagtgaagacagagaaacatcttgtgcagcgatccaaagtgctatttgggaggtctgcggtgatcagggtgcactgggtttgcttgtggatcttctcggggtcaaaatggctgaacttgaagagggctctggaacagaagcatctgacgccgaactgctcgagcagttcgattccattcagccagaagactacgcgagtgaaagcggcgagaagcacgaaaggaagtcaaagacaaactaccgttcgtgtgtagtgtaccggagagggcaaaagcagctgacgaggctgttcctgagggaggtagagcatcttctggagctttctgcgaaagaacagagctaagagactctcatctggccctgcctgcatcaaggttagaactgcagggttgtgaaaggaggcacacccgttgcgaaagtagaataccgccttcgtttcgttcccttgcgaaagtactactactccgttccaggactacgatttcgtctcccgaggattccggattgcccgttggctgggcatttgtggaggagacgtcgtcttgcactttgctgccacggctaggctgtagctttacctgattcagcttgcagcggcggagctgcagcgaacagccatctagagacagctccagagctctggttttaccaaaatgcgtttcttttctagatgactttgccttcgtcagagatgcatctcctggtctcacgagtcacagttccgactccgagacggtcaaggagattatagtctgctaagattatgtaatctaaagtattttttaaaccggg

SEQ ID NO: 205488 - DNA, 2283 bp, Zea Mays
gagggatgcggagactgctggagagcgaaacagtgcctgcgaccgtgcaaaatgcggatgcggagtggtatacggagggttgctggagttggtctaatggtaaaaaactcaactacaatcaggcccacctgcctgtcagctccctcccgctcactcgcgcaatccgtcgaactcgaacactgccatggccaccgccgctgccgacgacgatgtcaagctcgaatccttcctccaatggctccagtccaacggcgccgacctccgcagctgcacgatccgcgcatgcggcggcaagggcttgggggttttttccaccgccgcccccgagccgggctccaacgacggggtggcgatggtggtaccgctcgatctcgccatcacgcccatgcgggtgctgcaggacccactcgtcggcccgcgatgccgcgcgctcttagaggacggagtcgtcgacgaccgcctcctcgtcatgctcttcctcatggccgagcgccgacgccctggctcactctggaagccatacttggatatgcttccgagcacctttgggagctccctttggtttactgaggaagagcttgccgaactggaagggacaactttgcaccgagctacgttgattcagaggaagtcattgcaatcctcatttgatgagaaggttaaagggctcgttgaggagcttttgcatgtcgatgaatcagcaagctcagttgaagttttgtttgaggacttcctttgggcaaactcaatcttctggactcgagcactgaacataccattgcctcattcttatgtttttctgggctcatgtggcgatcaacaggccagggctgacaatgatgcccaccaggaaattgatattacagctaaggattgtagtgctgatgagaattctaaaccaagtaacacagagtcaatttgggttgagggccttgtcccaggaattgatttctgcaatcataatgtaaaggcactggcaacatgggaagttgattctgtgggaaatgctaccggaattcctgcttcaatgtacctcttgcttgctgataaaagtcctgctgagactggagcagagatctgcataaactacggcaacaaaggaaatgaggaactactgtacctttatggatttgtggttgacaacaatcctgatgattatctcatggttcattatcctttggaagctcttagacagatccagtctgctgatataaaaatgaagctactagagatgcagaagggagaattgaggtgcctcctacccagaagtttgcttgataatggattttttggtatccgttctagtgaagataaggatagcaagaaaaatactggtccgttttcaagttttagttggagtggtcaacgcaaagttccatcatatcttccaaaaattgttttccctcatgaatttatgagtactctacgtactattgccatgcaagaacatgagcttgaacaggttgcttctttacttggagaggttggatatagtgaagacagagaaacatcttgtgcagcgatccaaagtgctatttgggaggtctgcggtgatcagggtgcactgggtttgcttgtggatcttctcggggtcaaaatggctgaacttgaagagggctctggaacagaagcatctgacgccgaactgctcgagcagttcgattccattcagccagaagactacgcgagtgaaagcggcgagaagcacgaaaggaagtcaaagacaaactaccgttcgtgtgtagtgtaccggagagggcaaaagcagctgacgaggctgttcctgagggaggtagagcatcttctggagctttctgcgaaagaacagagctaagagactctcatctggccctgcctgcatcaaggttagaactgcagggttgtgaaaggaggcacacccgttgcgaaagtagaataccgccttcgtttcgttcccttgcgaaagtactactactccgttccaggactacgatttcgtctcccgaggattccggattgcccgttggctgggcatttgtggaggagacgtcgtcttgcactttgctgccacggctaggctgtagctttacctgattcagcttgcagcggcggagctgcagcgaacagccatctagagacagctccagagctctggttttaccaaaatgcgtttcttttctagatgactttgccttcgtcagagatgcatctcctggtctcacgagtcacagttccgactccgagacggtcaaggagattatagtctgctaagattatgtaatctaaagtattttttaaaccggg

SEQ ID NO: 205489 - DNA, 1331 bp, Zea Mays
ctcgaacagtattctattttcttcccgaggcaatttcgagctggcaataatagttctaaccttgaacaaggagccaagtcttggagtcaatattttatgctgccatgcacatttcatataagtactgtcataaccgaactaaaacagtttctgagaggaagcatcgcgattgccatggaagctgggagaatggatcagccatttatggctgctatcaatagccagcctttcgtggaggatattgagccagtgaagaaagccagtggggacatgcctgcgacaacaggaagcggatgcttcgaatgcaacatctgccttgattttgcatcagaaccagtggttactttctgtggtcatctctactgctggccttgtatctacgagtggctgcgccctggggtggagtcagctgccagcgacaacagcagttcggcaaggcggcaatgtcctgtatgcaaggcaacactctcaacggacacccttgtgccactatacggccgtggaggcaactcaaagaagtcacttgatggcatggccatcccgcgccgccccatggtacaccgggagactgttgaggagcaacagaatgcacagagcaatgtcaatgaccagcactaccaccagagcatggaagacaactctcagcgccagccattgctgcaagcgcaccaccatcccattcccactgggtttgacttcatctaccctccagcaccagtagggcgtggcttgatccactcaactgccggaggggtgctcggagggatggcagagattgtgcttcccttggcgctccgtggccagatgccagcgagcttgtactacacgaatccataccatgctgcgacgcagaacgtgaaccccaggctgaggcggcatcagatggaaatcgagaggtccctgcaccagatctggttcttcctctgtgtgtttgtggtgctgtgcctgctcttgttctgagacaagactattctatacacctctttgtagatattgaaagtgggagggggatactaatggatgatgcgtatagtaaacagggtaatggtctgtgtcgacaggcatgtgcttaagcatgctgatgtagagttgtaatatgatgagacacggaggtgaaatgcatatttcattcttctctatcactgtcggcctgttaggttgcctacctgacatcttcatgttaggtttagcatcatctgttgtgtattggttggtgtcactgccaagggccttttgatttgtatataaatagaaaatgatggtttgtctaccaatttctgctctgtatcctctttaatccctgttccaagattgacacagcaattttgtcc

SEQ ID NO: 205490 - DNA, 2449 bp, Zea Mays
tgcgcaagttatacgaatggtggaattactattccggtatttcctgagaggtgtaacctaagatttttttgtttgtttgttccaaactactgcggtttctcaggaaaagatccggttatctctctttctggttactttgcctctccccttcttctgtgccgcctgcctccacatctcttcgatcagatttcagatatgcaaggacagcgtttagatttatcacttcgttgattatttgatcgaatcagagctccaaacatcgcaatcaaagcagatcgtctggtcgcacggatcgacagggcgggggcgggggcaaggttggcaatggcgaacaaggccgtctcgggggcgcggagcccgctgaacctggtggtggccatggcgctgtgctgcttcttctacgtgctcggcgcgtggcagcgcagcggctacggcaagggcgatcgcatcgccgccgcggtgagccggcagacggcctgcggcgacgtcgccgcggggctcagcttcgagacgcaccacggcggcgccggggccatcaacgcgtcgtcgtcgttgcccttcggggccgacgcggcgccgccggcgttcgcgccgtgcgcggcggcgctagcggaccacacgccgtgccaccaccaggaccgcgccatgaagttcccccgcaagaacatggtgtaccgggagcggcactgcccctccgacggcgagcggctgcggtgcctggtgcccgcgccgccggggtacgtgacgccgttcccgtggccccggagccgcgactacgtgcccttcgccaacgcgccgtacaagagcctcaccgtcgagaaggccgtccagaactgggtgcagtacgagggcgccgtgttccgcttccccggcggcggcacgcagttcccgcagggcgccgacaagtacatcgaccagctcggctccgtcatccccttcgccggtggccgcgtccgcaccgtcctcgacaccggatgcggcgtggcgagcttgggcgcgtacctggactcccgcggcgtgatcgccatgtcgttcgcgccgcgcgactcgcacgaggcgcaggttcagttcgcgctggagcgcggagtgccggccttcatcggcgtcctcggctccgtcaagctcccgttcccgccgcgctccttcgacatggcgcactgctcccggtgcctcatcccctggggcggtaacggcgggatgtacatgatggagatcgaccgcgtgctacggccgggtggctactgggtgctctccggcccgccgatcaactggaagacgaaccacaaggcctgggagcgcacggaggcggacctctccgccgagcagcaacggatcgaaaagtacgccgccatgctctgctgggagaaggtcaccgagatccgcgagatcgccatctggcggaagcagctcgacccctcggcggcgtgccccgacaggccgccggtccggacgtgcgacgacgccaactccgacgacgtctggtacaagaacatggagacttgcataacgccgccggctgctgccgtggccggcgagctgcagccgttcccggcgcggctaacggccgtacccccgcggatatccgccggtgctgtgccaggcttcacggcagagtcgtacgaggaggagaaccggcggtgggagcggcacgtggcggcctacaagaaggtgaactacaggctgaacagcgagcggtaccggaacatcatggacatgaacgccggcgtgggtgggttcgccgccgccatcttctcgcccaagtcatgggtcatgaacgtcgtgccgacggcggccgagatctgcaccctcggcgtggtgtacgagagggggctcatcggcatataccacgactggtgtgaggcattctcaacttatccaagaacatacgacctcatacatgccaatggcatcttcactctctacaaggacagaatggaggacatcctgctggagatggatcggatcctgcgcccagagggaaccgtgatcctccgcgacgacgtcgaggtcctgctcaaggtgcagaggacggtgaaggggatgcgttggaagacgctgctggcaaaccatgaggacggccccaacgtgcctgagaaggtgctcttcgctgtcaagcggtactggacagccgccggcgaaggcacggcagcagaggagaagacgccgggcagctcttcagtagcaggcatggattcagaggaataaatggtgggtgtgagacgaggggcggacagtttggcgatggaggtggacggctggctgctttcagtttgtgtcgcacgcttggtagaagaagtgaggatttatgtttagagcgtagaagatctagaatttcagatgctttggattttttgcaattttgcagtagtttatttccttttcttctatattaatattatctattaaccataaagaaggccaagtttctttcggtttatttttttgtcca

SEQ ID NO: 205491 - DNA, 3154 bp, Zea Mays
cttttcctttcctcgcagcagctgcgcggcgcggcggatcctgtccacaagttcatgacccgcccccccacccccagtggcggtggcggcagacccgccgggcagctggaccgagccgatcggtccggtcccatctcagcggcccgcggcgcctgcccaccctctcagccaaaagccccctgcacccagtccatccaaacctgtgtccgcagctctcgccagccagtcgccgccacgagaggggatgtcgacggcgagcggcgtatccgctggctccgtgctccagctgccctcctttcgggtgccggccaagagatttctgcctcggagaacagccgctggtgctccggctggtaacttttttgtgaagagagatattatatataatagaagctaccaccaattcttaccattgaagcatataggaggcttgcaagcagcagtacttccagttactccaccactattagatggtgaggggaaaaagaaacaaatggctgaagagtatgggttcacacaaattggagatgaactaccagatgatattactcttaaagatgtcatggatactttacctaaagaggtatttgaaatcaatgatgtgaaggcttggacatcagttttgatatcagttacttcttatgcgctgggtttatatttcattgctaagtctccatggtatcttcttcccttggcttgggcttggacaggcacagcagtgactgggttttttgtgataggtcatgattgtgctcacaaatcattttcaaggaataagttggttgaagatgttgttggaaccttggctttcatgccattgatatatccttatgaaccgtggagatttaagcatgaccgacatcatgccaagacaaacatgttgatagaagatactgcatggcaacctgtttggcaaaaggaaattgaatcatcaccttttctaaggaaggcaattatttttggctatggccctatcaggccatggatgtctattgctcactggttgatttggcactttgatctaaaaaaattcagaccaaatgaagttccaagggttaagataagcttagcatgtgtgtttgcattcatggcgattggatggcccttgatcattctcaaatcaggactagctggatggtttaagttctggttcatgccatggatggtttatcatttttggatgagcacttttacaatggtacatcacacagctcctcatataccattcaagtcatctgaagaatggaatgctgcacaagctcaattaaacggcacagttcattgtaactatcctcaatggatagagatcctttgccatgacataaatgtgcatgtcccacaccatatttctccaagaattccaagctataaccttcgtgctgcttatgattccatcaaacagaactggggcaagtatgtcaatgaagccaactggaattggcgattgatgaagacgatactgacgagatgccatgtgtacgacaaggagagatactatgttccgttcgatgagctcgcgcctcaggagtcccaaccaatcaaattccttaggaagttcatgccagattacgcatgatgccatcatcacagctgttgactagttgagattattcagtattgtcggcacaggtggacagtcacattttcagtgattacgcatgtcccaaaattttgactggaatactccatgttacactattattcgtgcagtaggaaagcacgtagcgtaccaaaatatttatacttcaggaaatagacaaagacattggtgatgaaaacggacagaatcgtgtggaaaacatctcttctcttgtcatttctatattttttttccggaaacagaaacacgttcaaaattcccggaattgaaaacagggttgggatatgtggttgttcggaaacaaactaatttactaataaaatacgacttgcacaggcctgctgggccgccgcaacctaagaatggacaccgtcaaatgagcccaccccttaataaaccctagcccgcctccgccgccctataatccgacgccggacgccccatgatttcgctttcttcttcccgtcgagacccaaccataccagcggcgccgcaggctgacgaggaggcggagtagagtggccggactacctcgacacctccactgcaaccatgggtatctcacgtgattcgatgcacaagcgccgtgccaccggtggaaagcagaaggcgtggcgcaagaagcgaaagtatgagcttggccgtcagcctgctaacaccaaactgtctagcaataagacagtgaggagggtccgtgtccgtggaggcaacgtgaagtggagggctctccgattggatacaggtaactactcgtggggaagtgaggctcttacccgcaagacccgcatcctggatgtggtctataatgcatcaaacaatgagcttgtgaggactcagactcttgtgaagagcgccattgtacaagttgatgctgctccattcaagcagtggtacctcactcactatggagtggacatcggtaggaagaagaaggtgcctgttgctaagaaggatgcgactgagggacaagagggtgaggctatagctgaggaaacaaagaagagtaaccatgtgcagaggaagattgagaagcgacagcaggaccgtgcactcgacactcatattgaagagcaatttggcagtgggagattgttggcctgcatttctgcccgtcctgggcagtgtggccgagctgatggctacatccttgagggtaaagagctcgagttctacatgaagaagctccagaggaagaagggcaagggtgttgcatcttagagcattcttttagctagaactgcaaaatatcttctacttgggggttttgttgttagtctttatgcatatcatttgcggacctgatgaacacttcataagtgaatcaactctcgattccaagaattgataattttcacatgcggtggttgtaattgtgatatttaggtttgctatttattgaaacttcttgtctaaagcagttttagtttaccttgaagatgattgttagaaacgagatcctatccaatctatattgctgtttggttttcactttatagctgctaacatttgattgcatagtaagaactggtcacgcgtacgacaatctctcatgag

SEQ ID NO: 205492 - DNA, 3115 bp, Zea Mays
cggatcctgtccacaagttcatgacccgcccccccacccccagtggcggtggcggcagacccgccgggcagctggaccgagccgatcggtccggtcccatctcagcggcccgcggcgcctgcccaccctctcagccaaaagccccctgcacccagtccatccaaacctgtgtccgcagctctcgccagccagtcgccgccacgagaggggatgtcgacggcgagcggcgtatccgctggctccgtgctccagctgccctcctttcgggtgccggccaagagatttctgcctcggagaacagccgctggtgctccggctggtaacttttttgtgaagagagatattatatataatagaagctaccaccaattcttaccattgaagcatataggaggcttgcaagcagcagtacttccagttactccaccactattagatggtgaggggaaaaagaaacaaatggctgaagagtatgggttcacacaaattggagatgaactaccagatgatattactcttaaagatgtcatggatactttacctaaagaggtatttgaaatcaatgatgtgaaggcttggacatcagttttgatatcagttacttcttatgcgctgggtttatatttcattgctaagtctccatggtatcttcttcccttggcttgggcttggacaggcacagcagtgactgggttttttgtgataggtcatgattgtgctcacaaatcattttcaaggaataagttggttgaagatgttgttggaaccttggctttcatgccattgatatatccttatgaaccgtggagatttaagcatgaccgacatcatgccaagacaaacatgttgatagaagatactgcatggcaacctgtttggcaaaaggaaattgaatcatcaccttttctaaggaaggcaattatttttggctatggccctatcaggccatggatgtctattgctcactggttgatttggcactttgatctaaaaaaattcagaccaaatgaagttccaagggttaagataagcttagcatgtgtgtttgcattcatggcgattggatggcccttgatcattctcaaatcaggactagctggatggtttaagttctggttcatgccatggatggtttatcatttttggatgagcacttttacaatggtacatcacacagctcctcatataccattcaagtcatctgaagaatggaatgctgcacaagctcaattaaacggcacagttcattgtaactatcctcaatgagatcctttgccatgacataaatgtgcatgtcccacaccatatttctccaagaattccaagctataaccttcgtgctgcttatgattccatcaaacagaactggggcaagtatgtcaatgaagccaactggaattggcgattgatgaagacgatactgacgagatgccatgtgtacgacaaggagagatactatgttccgttcgatgagctcgcgcctcaggagtcccaaccaatcaaattccttaggaagttcatgccagattacgcatgatgccatcatcacagctgttgactagttgagattattcagtattgtcggcacaggtggacagtcacattttcagtgattacgcatgtcccaaaattttgactggaatactccatgttacactattattcgtgcagtaggaaagcacgtagcgtaccaaaatatttatacttcaggaaatagacaaagacattggtgatgaaaacggacagaatcgtgtggaaaacatctcttctcttgtcatttctatattttttttccggaaacagaaacacgttcaaaattcccggaattgaaaacagggttgggatatgtggttgttcggaaacaaactaatttactaataaaatacgacttgcacaggcctgctgggccgccgcaacctaagaatggacaccgtcaaatgagcccaccccttaataaaccctagcccgcctccgccgccctataatccgacgccggacgccccatgatttcgctttcttcttcccgtcgagacccaaccataccagcggcgccgcaggctgacgaggaggcggagtagagtggccggactacctcgacacctccactgcaaccatgggtatctcacgtgattcgatgcacaagcgccgtgccaccggtggaaagcagaaggcgtggcgcaagaagcgaaagtatgagcttggccgtcagcctgctaacaccaaactgtctagcaataagacagtgaggagggtccgtgtccgtggaggcaacgtgaagtggagggctctccgattggatacaggtaactactcgtggggaagtgaggctcttacccgcaagacccgcatcctggatgtggtctataatgcatcaaacaatgagcttgtgaggactcagactcttgtgaagagcgccattgtacaagttgatgctgctccattcaagcagtggtacctcactcactatggagtggacatcggtaggaagaagaaggtgcctgttgctaagaaggatgcgactgagggacaagagggtgaggctatagctgaggaaacaaagaagagtaaccatgtgcagaggaagattgagaagcgacagcaggaccgtgcactcgacactcatattgaagagcaatttggcagtgggagattgttggcctgcatttctgcccgtcctgggcagtgtggccgagctgatggctacatccttgagggtaaagagctcgagttctacatgaagaagctccagaggaagaagggcaagggtgttgcatcttagagcattcttttagctagaactgcaaaatatcttctacttgggggttttgttgttagtctttatgcatatcatttgcggacctgatgaacacttcataagtgaatcaactctcgattccaagaattgataattttcacatgcggtggttgtaattgtgatatttaggtttgctatttattgaaacttcttgtctaaagcagttttagtttaccttgaagatgattgttagaaacgagatcctatccaatctatattgctgtttggttttcactttatagctgctaacatttgattgcatagtaagaactggtcacgcgtacgacaatctctcatgag

SEQ ID NO: 205493 - DNA, 3042 bp, Zea Mays
ggatcctgtccacaagttcatgacccgcccccccacccccagtggcggtggcggcagacccgccgggcagctggaccgagccgatcggtccggtcccatctcagcggcccgcggcgcctgcccaccctctcagccaaaagccccctgcacccagtccatccaaacctgtgtccgcagctctcgccagccagtcgccgccacgagaggggatgtcgacggcgagcggcgtatccgctggctccgtgctccagctgccctcctttcgggtgccggccaagagatttctgcctcggagaacagccgctggtgctccggctggaggcttgcaagcagcagtacttccagttactccaccactattagatggtgaggggaaaaagaaacaaatggctgaagagtatgggttcacacaaattggagatgaactaccagatgatattactcttaaagatgtcatggatactttacctaaagaggtatttgaaatcaatgatgtgaaggcttggacatcagttttgatatcagttacttcttatgcgctgggtttatatttcattgctaagtctccatggtatcttcttcccttggcttgggcttggacaggcacagcagtgactgggttttttgtgataggtcatgattgtgctcacaaatcattttcaaggaataagttggttgaagatgttgttggaaccttggctttcatgccattgatatatccttatgaaccgtggagatttaagcatgaccgacatcatgccaagacaaacatgttgatagaagatactgcatggcaacctgtttggcaaaaggaaattgaatcatcaccttttctaaggaaggcaattatttttggctatggccctatcaggccatggatgtctattgctcactggttgatttggcactttgatctaaaaaaattcagaccaaatgaagttccaagggttaagataagcttagcatgtgtgtttgcattcatggcgattggatggcccttgatcattctcaaatcaggactagctggatggtttaagttctggttcatgccatggatggtttatcatttttggatgagcacttttacaatggtacatcacacagctcctcatataccattcaagtcatctgaagaatggaatgctgcacaagctcaattaaacggcacagttcattgtaactatcctcaatgagatcctttgccatgacataaatgtgcatgtcccacaccatatttctccaagaattccaagctataaccttcgtgctgcttatgattccatcaaacagaactggggcaagtatgtcaatgaagccaactggaattggcgattgatgaagacgatactgacgagatgccatgtgtacgacaaggagagatactatgttccgttcgatgagctcgcgcctcaggagtcccaaccaatcaaattccttaggaagttcatgccagattacgcatgatgccatcatcacagctgttgactagttgagattattcagtattgtcggcacaggtggacagtcacattttcagtgattacgcatgtcccaaaattttgactggaatactccatgttacactattattcgtgcagtaggaaagcacgtagcgtaccaaaatatttatacttcaggaaatagacaaagacattggtgatgaaaacggacagaatcgtgtggaaaacatctcttctcttgtcatttctatattttttttccggaaacagaaacacgttcaaaattcccggaattgaaaacagggttgggatatgtggttgttcggaaacaaactaatttactaataaaatacgacttgcacaggcctgctgggccgccgcaacctaagaatggacaccgtcaaatgagcccaccccttaataaaccctagcccgcctccgccgccctataatccgacgccggacgccccatgatttcgctttcttcttcccgtcgagacccaaccataccagcggcgccgcaggctgacgaggaggcggagtagagtggccggactacctcgacacctccactgcaaccatgggtatctcacgtgattcgatgcacaagcgccgtgccaccggtggaaagcagaaggcgtggcgcaagaagcgaaagtatgagcttggccgtcagcctgctaacaccaaactgtctagcaataagacagtgaggagggtccgtgtccgtggaggcaacgtgaagtggagggctctccgattggatacaggtaactactcgtggggaagtgaggctcttacccgcaagacccgcatcctggatgtggtctataatgcatcaaacaatgagcttgtgaggactcagactcttgtgaagagcgccattgtacaagttgatgctgctccattcaagcagtggtacctcactcactatggagtggacatcggtaggaagaagaaggtgcctgttgctaagaaggatgcgactgagggacaagagggtgaggctatagctgaggaaacaaagaagagtaaccatgtgcagaggaagattgagaagcgacagcaggaccgtgcactcgacactcatattgaagagcaatttggcagtgggagattgttggcctgcatttctgcccgtcctgggcagtgtggccgagctgatggctacatccttgagggtaaagagctcgagttctacatgaagaagctccagaggaagaagggcaagggtgttgcatcttagagcattcttttagctagaactgcaaaatatcttctacttgggggttttgttgttagtctttatgcatatcatttgcggacctgatgaacacttcataagtgaatcaactctcgattccaagaattgataattttcacatgcggtggttgtaattgtgatatttaggtttgctatttattgaaacttcttgtctaaagcagttttagtttaccttgaagatgattgttagaaacgagatcctatccaatctatattgctgtttggttttcactttatagctgctaacatttgattgcatagtaagaactggtcacgcgtacgacaatctctcatgag

SEQ ID NO: 205494 - DNA, 3035 bp, Zea Mays
ggatcctgtccacaagttcatgacccgcccccccacccccagtggcggtggcggcagacccgccgggcagctggaccgagccgatcggtccggtcccatctcagcggcccgcggcgcctgcccaccctctcagccaaaagccccctgcacccagtccatccaaacctgtgtccgcagctctcgccagccagtcgccgccacgagaggggatgtcgacggcgagcggcgtatccgctggctccgtgctccagctgccctcctttcgggtgccggccaagagatttctgcctcggagaacagccgctggtgctccggctggtaacttttttgtgaagagagatattatatataatagaagctaccaccaattcttaccattgaagcatataggaggcttgcaagcagcagtacttccagttactccaccactattagatggtgaggggaaaaagaaacaaatggctgaagagtatgggttcacacaaattggagatgaactaccagatgatattactcttaaagatgtcatggatactttacctaaagaggtatttgaaatcaatgatgtgaaggcttggacatcagttttgatatcagttacttcttatgcgctgggtttatatttcattgctaagtctccatggtatcttcttcccttggcttgggcttggacaggcacagcagtgactgggttttttgtgataggtcatgattgtgctcacaaatcattttcaaggaataagttggttgaagatgttgttggaaccttggctttcatgccattgatatatccttatgaaccgtggagatttaagcatgaccgacatcatgccaagacaaacatgttgatagaagatactgcatggcaacctgtttggcaaaaggaaattgaatcatcaccttttctaaggaaggcaattatttttggctatggccctatcaggccatggatgtctattgctcactggttgatttggcactttgatctaaaaaaattcagaccaaatgaagttccaagggttaagataagcttagcatgtgtgtttgcattcatggcgattggatggcccttgatcattctcaaatcaggactagctggatggtttaagttctggttcatgccatggatggtttatcatttttggatgagcacttttacaatggtacatcacacagctcctcatataccattcaagtcatctgaagaatggaatgctgcacaagctcaattaaacggcacagttcattgtaactatcctcaatggatagagatcctttgccatgacataaatgtgcatgtcccacaccatatttctccaagaattccaagctataaccttcgtgctgcttatgattccatcaaacagaactggggcaagtatgtcaatgaagccaactggaattggcgattgatgaagacgatactgacgagatgccatgtgtacgacaaggagagatactatgttccgttcgatgagctcgcgcctcaggagtcccaaccaatcaaattccttaggaagttcatgccagattacgcatgatgccatcatcacagctgttgactagttgagattattcagtattgtcggcacaggtggacagtcacattttcagtgattacgcatgtcccaaaattttgactggaatactccatgttacactattattcgtgcagtaggaaagcacgtagcgtaccaaaatatttatacttcaggaaatagacaaagacattggtgatgaaaacggacagaatcgtgtggaaaacatctcttctcttgtcatttctatattttttttccggaaacagaaacacgttcaaaattcccggaattgaaaacagggttgggatatgtggttgttcggaaacaaactaatttactaataaaatacgacttgcacaggcctgctgggccgccgcaacctaagaatggacaccgtcaaatgagcccaccccttaataaaccctagcccgcctccgccgccctataatccgacgccggacgccccatgatttcgctttcttcttcccgtcgagacccaaccataccagcggcgccgcaggctgacgaggaggcggagtagagtggccggactacctcgacacctccactgcaaccatgggtatctcacgtgattcgatgcacaagcgccgtgccaccggtggaaagcagaaggcgtggcgcaagaagcgaaagtatgagcttggccgtcagcctgctaacaccaaactgtctagcaataagacagtgaggagggtccgtgtccgtggaggcaacgtgaagtggagggctctccgattggatacagagcgccattgtacaagttgatgctgctccattcaagcagtggtacctcactcactatggagtggacatcggtaggaagaagaaggtgcctgttgctaagaaggatgcgactgagggacaagagggtgaggctatagctgaggaaacaaagaagagtaaccatgtgcagaggaagattgagaagcgacagcaggaccgtgcactcgacactcatattgaagagcaatttggcagtgggagattgttggcctgcatttctgcccgtcctgggcagtgtggccgagctgatggtggcatttccttttattggccagctacatccttgagggtaaagagctcgagttctacatgaagaagctccagaggaagaagggcaagggtgttgcatcttagagcattcttttagctagaactgcaaaatatcttctacttgggggttttgttgttagtctttatgcatatcatttgcggacctgatgaacacttcataagtgaatcaactctcgattccaagaattgataattttcacatgcggtggttgtaattgtgatatttaggtttgctatttattgaaacttcttgtctaaagcagttttagtttaccttgaagatgattgttagaaacgagatcctatccaatctatattgctgtttggttttcactttatagctgctaacatttgattgcatagtaagaactggtcacgcgtacgacaatctctcatgag

SEQ ID NO: 205495 - DNA, 3068 bp, Zea Mays
ggatcctgtccacaagttcatgacccgcccccccacccccagtggcggtggcggcagacccgccgggcagctggaccgagccgatcggtccggtcccatctcagcggcccgcggcgcctgcccaccctctcagccaaaagccccctgcacccagtccatccaaacctgtgtccgcagctctcgccagccagtcgccgccacgagaggggatgtcgacggcgagcggcgtatccgctggctccgtgctccagctgccctcctttcgggtgccggccaagagatttctgcctcggagaacagccgctggtgctccggctggtaacttttttgtgaagagagatattatatataatagaagctaccaccaattcttaccattgaagcatataggaggcttgcaagcagcagtacttccagttactccaccactattagatggtgaggggaaaaagaaacaaatggctgaagagtatgggttcacacaaattggagatgaactaccagatgatattactcttaaagatgtcatggatactttacctaaagaggtatttgaaatcaatgatgtgaaggcttggacatcagttttgatatcagttacttcttatgcgctgggtttatatttcattgctaagtctccatggtatcttcttcccttggcttgggcttggacaggcacagcagtgactgggttggttgaagatgttgttggaaccttggctttcatgccattgatatatccttatgaaccgtggagatttaagcatgaccgacatcatgccaagacaaacatgttgatagaagatactgcatggcaacctgtttggcaaaaggaaattgaatcatcaccttttctaaggaaggcaattatttttggctatggccctatcaggccatggatgtctattgctcactggttgatttggcactttgatctaaaaaaattcagaccaaatgaagttccaagggttaagataagcttagcatgtgtgtttgcattcatggcgattggatggcccttgatcattctcaaatcaggactagctggatggtttaagttctggttcatgccatggatggtttatcatttttggatgagcacttttacaatggtacatcacacagctcctcatataccattcaagtcatctgaagaatggaatgctgcacaagctcaattaaacggcacagttcattgtaactatcctcaatggatagagatcctttgccatgacataaatgtgcatgtcccacaccatatttctccaagaattccaagctataaccttcgtgctgcttatgattccatcaaacagaactggggcaagtatgtcaatgaagccaactggaattggcgattgatgaagacgatactgacgagatgccatgtgtacgacaaggagagatactatgttccgttcgatgagctcgcgcctcaggagtcccaaccaatcaaattccttaggaagttcatgccagattacgcatgatgccatcatcacagctgttgactagttgagattattcagtattgtcggcacaggtggacagtcacattttcagtgattacgcatgtcccaaaattttgactggaatactccatgttacactattattcgtgcagtaggaaagcacgtagcgtaccaaaatatttatacttcaggaaatagacaaagacattggtgatgaaaacggacagaatcgtgtggaaaacatctcttctcttgtcatttctatattttttttccggaaacagaaacacgttcaaaattcccggaattgaaaacagggttgggatatgtggttgttcggaaacaaactaatttactaataaaatacgacttgcacaggcctgctgggccgccgcaacctaagaatggacaccgtcaaatgagcccaccccttaataaaccctagcccgcctccgccgccctataatccgacgccggacgccccatgatttcgctttcttcttcccgtcgagacccaaccataccagcggcgccgcaggctgacgaggaggcggagtagagtggccggactacctcgacacctccactgcaaccatgggtatctcacgtgattcgatgcacaagcgccgtgccaccggtggaaagcagaaggcgtggcgcaagaagcgaaagtatgagcttggccgtcagcctgctaacaccaaactgtctagcaataagacagtgaggagggtccgtgtccgtggaggcaacgtgaagtggagggctctccgattggatacaggtaactactcgtggggaagtgaggctcttacccgcaagacccgcatcctggatgtggtctataatgcatcaaacaatgagcttgtgaggactcagactcttgtgaagagcgccattgtacaagttgatgctgctccattcaagcagtggtacctcactcactatggagtggacatcggtaggaagaagaaggtgcctgttgctaagaaggatgcgactgagggacaagagggtgaggctatagctgaggaaacaaagaagagtaaccatgtgcagaggaagattgagaagcgacagcaggaccgtgcactcgacactcatattgaagagcaatttggcagtgggagattgttggcctgcatttctgcccgtcctgggcagtgtggccgagctgatggctacatccttgagggtaaagagctcgagttctacatgaagaagctccagaggaagaagggcaagggtgttgcatcttagagcattcttttagctagaactgcaaaatatcttctacttgggggttttgttgttagtctttatgcatatcatttgcggacctgatgaacacttcataagtgaatcaactctcgattccaagaattgataattttcacatgcggtggttgtaattgtgatatttaggtttgctatttattgaaacttcttgtctaaagcagttttagtttaccttgaagatgattgttagaaacgagatcctatccaatctatattgctgtttggttttcactttatagctgctaacatttgattgcatagtaagaactggtcacgcgtacgacaatctctcatgag

SEQ ID NO: 205496 - DNA, 3075 bp, Zea Mays
ggatcctgtccacaagttcatgacccgcccccccacccccagtggcggtggcggcagacccgccgggcagctggaccgagccgatcggtccggtcccatctcagcggcccgcggcgcctgcccaccctctcagccaaaagccccctgcacccagtccatccaaacctgtgtccgcagctctcgccagccagtcgccgccacgagaggggatgtcgacggcgagcggcgtatccgctggctccgtgctccagctgccctcctttcgggtgccggccaagagatttctgcctcggagaacagccgctggtgctccggctggtaacttttttgtgaagagagatattatatataatagaagctaccaccaattcttaccattgaagcatataggaggcttgcaagcagcagtacttccagttactccaccactattagatggtgaggggaaaaagaaacaaatggctgaagagtatgggttcacacaaattggagatgaactaccagatgatattactcttaaagatgtcatggatactttacctaaagaggtatttgaaatcaatgatgtgaaggcttggacatcagttttgatatcagttacttcttatgcgctgggtttatatttcattgctaagtctccatggtatcttcttcccttggcttgggcttggacaggcacagcagtgactggggaataagttggttgaagatgttgttggaaccttggctttcatgccattgatatatccttatgaaccgtggagatttaagcatgaccgacatcatgccaagacaaacatgttgatagaagatactgcatggcaacctgtttggcaaaaggaaattgaatcatcaccttttctaaggaaggcaattatttttggctatggccctatcaggccatggatgtctattgctcactggttgatttggcactttgatctaaaaaaattcagaccaaatgaagttccaagggttaagataagcttagcatgtgtgtttgcattcatggcgattggatggcccttgatcattctcaaatcaggactagctggatggtttaagttctggttcatgccatggatggtttatcatttttggatgagcacttttacaatggtacatcacacagctcctcatataccattcaagtcatctgaagaatggaatgctgcacaagctcaattaaacggcacagttcattgtaactatcctcaatggatagagatcctttgccatgacataaatgtgcatgtcccacaccatatttctccaagaattccaagctataaccttcgtgctgcttatgattccatcaaacagaactggggcaagtatgtcaatgaagccaactggaattggcgattgatgaagacgatactgacgagatgccatgtgtacgacaaggagagatactatgttccgttcgatgagctcgcgcctcaggagtcccaaccaatcaaattccttaggaagttcatgccagattacgcatgatgccatcatcacagctgttgactagttgagattattcagtattgtcggcacaggtggacagtcacattttcagtgattacgcatgtcccaaaattttgactggaatactccatgttacactattattcgtgcagtaggaaagcacgtagcgtaccaaaatatttatacttcaggaaatagacaaagacattggtgatgaaaacggacagaatcgtgtggaaaacatctcttctcttgtcatttctatattttttttccggaaacagaaacacgttcaaaattcccggaattgaaaacagggttgggatatgtggttgttcggaaacaaactaatttactaataaaatacgacttgcacaggcctgctgggccgccgcaacctaagaatggacaccgtcaaatgagcccaccccttaataaaccctagcccgcctccgccgccctataatccgacgccggacgccccatgatttcgctttcttcttcccgtcgagacccaaccataccagcggcgccgcaggctgacgaggaggcggagtagagtggccggactacctcgacacctccactgcaaccatgggtatctcacgtgattcgatgcacaagcgccgtgccaccggtggaaagcagaaggcgtggcgcaagaagcgaaagtatgagcttggccgtcagcctgctaacaccaaactgtctagcaataagacagtgaggagggtccgtgtccgtggaggcaacgtgaagtggagggctctccgattggatacaggtaactactcgtggggaagtgaggctcttacccgcaagacccgcatcctggatgtggtctataatgcatcaaacaatgagcttgtgaggactcagactcttgtgaagagcgccattgtacaagttgatgctgctccattcaagcagtggtacctcactcactatggagtggacatcggtaggaagaagaaggtgcctgttgctaagaaggatgcgactgagggacaagagggtgaggctatagctgaggaaacaaagaagagtaaccatgtgcagaggaagattgagaagcgacagcaggaccgtgcactcgacactcatattgaagagcaatttggcagtgggagattgttggcctgcatttctgcccgtcctgggcagtgtggccgagctgatggctacatccttgagggtaaagagctcgagttctacatgaagaagctccagaggaagaagggcaagggtgttgcatcttagagcattcttttagctagaactgcaaaatatcttctacttgggggttttgttgttagtctttatgcatatcatttgcggacctgatgaacacttcataagtgaatcaactctcgattccaagaattgataattttcacatgcggtggttgtaattgtgatatttaggtttgctatttattgaaacttcttgtctaaagcagttttagtttaccttgaagatgattgttagaaacgagatcctatccaatctatattgctgtttggttttcactttatagctgctaacatttgattgcatagtaagaactggtcacgcgtacgacaatctctcatgag

SEQ ID NO: 205497 - DNA, 2166 bp, Zea Mays
taccaaaaattaagatgatatttggtaggatgtgccaaaaaacgtgtagaccatcaactctgttttatttaacaaaattattcaattgtgtgttgtccagtccttgtttagagttagtcagaggacaatatttcattgaagtttcagcaacaaatatggaatgctttttttttggatattttgggataaaggattcatgttggcttaagtgtcaatcttctactagcaaatcaatttctagtgaaattaccgtgggaacatgttggcctcttcaattgaattttcaaatgagtaatggatttctattacaggatagagatcctttgccatgacataaatgtgcatgtcccacaccatatttctccaagaattccaagctataaccttcgtgctgcttatgattccatcaaacagaactggggcaagtatgtcaatgaagccaactggaattggcgattgatgaagacgatactgacgagatgccatgtgtacgacaaggagagatactatgttccgttcgatgagctcgcgcctcaggagtcccaaccaatcaaattccttaggaagttcatgccagattacgcatgatgccatcatcacagctgttgactagttgagattattcagtattgtcggcacaggtggacagtcacattttcagtgattacgcatgtcccaaaattttgactggaatactccatgttacactattattcgtgcagtaggaaagcacgtagcgtaccaaaatatttatacttcaggaaatagacaaagacattggtgatgaaaacggacagaatcgtgtggaaaacatctcttctcttgtcatttctatattttttttccggaaacagaaacacgttcaaaattcccggaattgaaaacagggttgggatatgtggttgttcggaaacaaactaatttactaataaaatacgacttgcacaggcctgctgggccgccgcaacctaagaatggacaccgtcaaatgagcccaccccttaataaaccctagcccgcctccgccgccctataatccgacgccggacgccccatgatttcgctttcttcttcccgtcgagacccaaccataccagcggcgccgcaggctgacgaggaggcggagtagagtggccggactacctcgacacctccactgcaaccatgggtatctcacgtgattcgatgcacaagcgccgtgccaccggtggaaagcagaaggcgtggcgcaagaagcgaaagtatgagcttggccgtcagcctgctaacaccaaactgtctagcaataagacagtgaggagggtccgtgtccgtggaggcaacgtgaagtggagggctctccgattggatacaggtaactactcgtggggaagtgaggctcttacccgcaagacccgcatcctggatgtggtctataatgcatcaaacaatgagcttgtgaggactcagactcttgtgaagagcgccattgtacaagttgatgctgctccattcaagcagtggtacctcactcactatggagtggacatcggtaggaagaagaaggtgcctgttgctaagaaggatgcgactgagggacaagagggtgaggctatagctgaggaaacaaagaagagtaaccatgtgcagaggaagattgagaagcgacagcaggaccgtgcactcgacactcatattgaagagcaatttggcagtgggagattgttggcctgcatttctgcccgtcctgggcagtgtggccgagctgatggctacatccttgagggtaaagagctcgagttctacatgaagaagctccagaggaagaagggcaagggtgttgcatcttagagcattcttttagctagaactgcaaaatatcttctacttgggggttttgttgttagtctttatgcatatcatttgcggacctgatgaacacttcataagtgaatcaactctcgattccaagaattgataattttcacatgcggtggttgtaattgtgatatttaggtttgctatttattgaaacttcttgtctaaagcagttttagtttaccttgaagatgattgttagaaacgagatcctatccaatctatattgctgtttggttttcactttatagctgctaacatttgattgcatagtaagaactggtcacgcgtacgacaatctctcatgag

SEQ ID NO: 205498 - DNA, 1013 bp, Zea Mays
catctctcggtgactggttgcggcagtagtaattgatttgagacttgagtccttcgattggttacatttacctccagtgctttatgaggtatgagcttggccgtcagcctgctaacaccaaactgtctagcaataagacagtgaggagggtccgtgtccgtggaggcaacgtgaagtggagggctctccgattggatacaggtaactactcgtggggaagtgaggctcttacccgcaagacccgcatcctggatgtggtctataatgcatcaaacaatgagcttgtgaggactcagactcttgtgaagagcgccattgtacaagttgatgctgctccattcaagcagtggtacctcactcactatggagtggacatcggtaggaagaagaaggtgcctgttgctaagaaggatgcgactgagggacaagagggtgaggctatagctgaggaaacaaagaagagtaaccatgtgcagaggaagattgagaagcgacagcaggaccgtgcactcgacactcatattgaagagcaatttggcagtgggagattgttggcctgcatttctgcccgtcctgggcagtgtggccgagctgatggctacatccttgagggtaaagagctcgagttctacatgaagaagctccagaggaagaagggcaagggtgttgcatcttagagcattcttttagctagaactgcaaaatatcttctacttgggggttttgttgttagtctttatgcatatcatttgcggacctgatgaacacttcataagtgaatcaactctcgattccaagaattgataattttcacatgcggtggttgtaattgtgatatttaggtttgctatttattgaaacttcttgtctaaagcagttttagtttaccttgaagatgattgttagaaacgagatcctatccaatctatattgctgtttggttttcactttatagctgctaacatttgattgcatagtaagaactggtcacgcgtacgacaatctctcatgag

SEQ ID NO: 205499 - DNA, 1465 bp, Zea Mays
gtttgcgtgcacgcccgcggtgtcggggtagagcagcgaagctcacaccacacgccgggcttgctgctgcggctgcgtttgcttgaagcgtgatcgcggcacacatggcactgcactacggacggattggggggctggggagggtgctacctcgccttcaaacatcgcgcttcttctgaacggcgtgaggggtctgatgctggacatgtacgacttccgcaacgacgtctggctctgccactcctacggcggcatctgccagaacttcaccgcgtttcaaccggcggtgaacgtgctccgcgaggtggagcgcttcctgtcgcggaaccccgccgaggtggtgaccatcttcgtggaggactacgtggagtcgcccatggggctcacccgggtgctcaacgcgtcgggcctcgcgcgctacgtgctccccgcctggcgcatgcccaagagcggcggcgactggccgctgctcagcgacatggtccgcgacaaccaccgcctgctcgtcttcacctccaaggccgctaaggaggccgccgagggcgtcgcctacgagtggcgctacgtcgtcgagaaccagtacgggaccaaggggatggtgaaggggacgtgccacaaccgcgccgagtcggccgccatgaacgacctgtcgaggtcgctggtgctcgtcaactacttcagggacctcccgaacctgccggcggcgtgcaaggacaactcggcgcagctgctggacatggtcaccgcctgccacgacaagtccggggaccggtggcccaacttcatcgccgtggacttctacaagaggagcgaccggggcggcgcggcggaggccacggacaaggcgaacggcggcctagtctgcggctgcgggagcatatcggcctgcaacgccaacgggacatgcactccccggcacggcaggacgcccagaggcatcttcaacgcctcatctgacgcagcggcgtggaggccgccgccgccggtgctgcaatggcagaggctcatcctgctgccttctctccttgctcttcttctgggcctgtgaattctacgtattttgttgtatagaccgatacggatcggtttggttgcaggcaccgagcgcattttgttgtgtatatatacacacagatgacagattggttgaagccagctagcagcttagtccatggtagtctgtgtataagacagagtgcatatacaaggttaacacaacatcaacaatcagatgcggaaaactgcgtttaatcatgatctcacactaaacgcctcttttgcagcttctcacatctaccaattgacgactaaaaaattatatcaaaatttgcaatttaaccctttagtaatctatttttcttttatttatatagatcatcaagtggtaatatgagaggctgcaaagtacctttttcacaactcatcgactacaacaatttttttcacactcatagcctaaccaaac

SEQ ID NO: 205500 - DNA, 316 bp, Zea Mays
atggggcccgagggcggcgtcgacgggcccatggtgtcgtacgacaaccagaggtgtgtcgacgcgctggacgcagcgctggagcggcgcggggtggcgctaccccggcccaacgcgacgtgcgacacggtgctctgcttctgcggcatccggctccaccagatcggctcgctccgctgccccgccgcggccaggaacgccacgcccactgccgcggtgaaggccctggagaagagctgccgcaacgcctcctacgccggctgctcgcgatgcgtgcagtccctgcaaaaggtaaatacccaggagaacaagtact

SEQ ID NO: 205501 - DNA, 1495 bp, Zea Mays
ctttagatgaagctagtgtagtccaatctagtgtactgcatcgacaaggagttatcggatcagtactcacaggtggtgagtctggtcttcccgacttcaaggatgcaatctctggtgctttcaagttcttgaccaagagttcaaagcaaggcaaagatgggccgtcgaccagcaggccacatacttctgagttgttgacccaggtcaattatctcagagaggagctacaaatgttgtctaaatcaaatcatgttgctattgtcactgttgatggtagacctgggcctggtgcatatggtattacagctgttattattggagctattggctatttattcataagatggaaggggtggaaactttctgatatgatgtttgtgacgaagcgtggattatctgatgcttgcaatgttgtggggaaacaagtggatcaggtttcagaaagtgttaatgttgcaaggagacatcttgcaggaaggattgatcgtgtagattgtagtttagatgaatgtcatgaaattacagaagccacaagggaacaggtcacaatcatccatggagatctaagtgccttccagaaggaaatggaaacagttcatcttgtagttcgtagtctggaggcaaagcttggacgcctagcttatactcaagatcggacaacacgaggaatatatgatttgtgtgaattcactaaaagattggatcagagcccgaaagctgagactcatcaggttacatcatcaactcctcgccctgctattgaatcctcagagagaattgctagggctggttctttgcccccagctttggaaccagagtctcctagaatagaggcgcctaaggttgtgcgctcatctacaatcatgtcagcatcgggacttagtttgctagctggaactacaacaccacctaaaagagaccagccgggtgctttcagcagaacaagttcaatgaaggaaggatcctctgagttaccgagtggtgtccgaagctcagcagaaccaagccccaggagatctggcggttcaaccctttttggagggcttggttttctaaggagctacaccagctgagacgtatgtgctcagatacgtgaatttttattcagactccatcagcttgagctgcatatgtaggtagtagaaaacatggcagttgccaaaaggatggctcccttttccaattgggaattgcgaatttttgtaggaacttaataccttgcagggcaatgcctggagggttgtatattgcactggattatactagtagaatacatgtttggcaaggagcagttgcaactaaatttgtgcttttcttggactcaaacctgctggctgatgatgcttgcttggatagcatgtatgcaacatttgttgtggcagctgcaggctgcaggcatatctggaaactctggatccactcacggttggatttccacccagtacttggtctgatatgtgatatggacaagacgttatgatccgcaacgtccatg

SEQ ID NO: 205502 - DNA, 1473 bp, Zea Mays
acgcgacgcatgctgtccctttgcgggagttatcggatcagtactcacaggtggtgagtctggtcttcccgacttcaaggatgcaatctctggtgctttcaagttcttgaccaagagttcaaagcaaggcaaagatgggccgtcgaccagcaggccacatacttctgagttgttgacccaggtcaattatctcagagaggagctacaaatgttgtctaaatcaaatcatgttgctattgtcactgttgatggtagacctgggcctggtgcatatggtattacagctgttattattggagctattggctatttattcataagatggaaggggtggaaactttctgatatgatgtttgtgacgaagcgtggattatctgatgcttgcaatgttgtggggaaacaagtggatcaggtttcagaaagtgttaatgttgcaaggagacatcttgcaggaaggattgatcgtgtagattgtagtttagatgaatgtcatgaaattacagaagccacaagggaacaggtcacaatcatccatggagatctaagtgccttccagaaggaaatggaaacagttcatcttgtagttcgtagtctggaggcaaagcttggacgcctagcttatactcaagatcggacaacacgaggaatatatgatttgtgtgaattcactaaaagattggatcagagcccgaaagctgagactcatcaggttacatcatcaactcctcgccctgctattgaatcctcagagagaattgctagggctggttctttgcccccagctttggaaccagagtctcctagaatagaggcgcctaaggttgtgcgctcatctacaatcatgtcagcatcgggacttagtttgctagctggaactacaacaccacctaaaagagaccagccgggtgctttcagcagaacaagttcaatgaaggaaggatcctctgagttaccgagtggtgtccgaagctcagcagaaccaagccccaggagatctggcggttcaaccctttttggagggcttggttttctaaggagctacaccagctgagacgtatgtgctcagatacgtgaatttttattcagactccatcagcttgagctgcatatgtaggtagtagaaaacatggcagttgccaaaaggatggctcccttttccaattgggaattgcgaatttttgtaggaacttaataccttgcagggcaatgcctggagggttgtatattgcactggattatactagtagaatacatgtttggcaaggagcagttgcaactaaatttgtgcttttcttggactcaaacctgctggctgatgatgcttgcttggatagcatgtatgcaacatttgttgtggcagctgcaggctgcaggcatatctggaaactctggatccactcacggttggatttccacccagtacttggtctgatatgtgatatggacaagacgttatgatccgcaacgtccatg

SEQ ID NO: 205503 - DNA, 1720 bp, Zea Mays
gttttatattttagatgaggatgcatggaccgagcgagtcggcgcgagcctgaccagccacctagctgaacccgaactggcgcacgaaccctagctactacctactagacgtccctgcccccttcccctccggaggtgctggattcacccctcctctccctcgcgggtcccggcgcggacgcaaggcaaaggcaaaaggcggcagaggtggcgctgcagtccaccaattagcggctatggtgcttggcaagatcgccatcgtcatcggctccggagttatcggatcagtactcacaggtggtgagtctggtcttcccgacttcaaggatgcaatctctggtgctttcaagttcttgaccaagagttcaaagcaaggcaaagatgggccgtcgaccagcaggccacatacttctgagttgttgacccaggtcaattatctcagagaggagctacaaatgttgtctaaatcaaatcatgttgctattgtcactgttgatggtagacctgggcctggtgcatatggtattacagctgttattattggagctattggctatttattcataagatggaaggggtggaaactttctgatatgatgtttgtgacgaagcgtggattatctgatgcttgcaatgttgtggggaaacaagtggatcaggtttcagaaagtgttaatgttgcaaggagacatcttgcaggaaggattgatcgtgtagattgtagtttagatgaatgtcatgaaattacagaagccacaagggaacaggtcacaatcatccatggagatctaagtgccttccagaaggaaatggaaacagttcatcttgtagttcgtagtctggaggcaaagcttggacgcctagcttatactcaagatcggacaacacgaggaatatatgatttgtgtgaattcactaaaagattggatcagagcccgaaagctgagactcatcaggttacatcatcaactcctcgccctgctattgaatcctcagagagaattgctagggctggttctttgcccccagctttggaaccagagtctcctagaatagaggcgcctaaggttgtgcgctcatctacaatcatgtcagcatcgggacttagtttgctagctggaactacaacaccacctaaaagagaccagccgggtgctttcagcagaacaagttcaatgaaggaaggatcctctgagttaccgagtggtgtccgaagctcagcagaaccaagccccaggagatctggcggttcaaccctttttggagggcttggttttctaaggagctacaccagctgagacgtatgtgctcagatacgtgaatttttattcagactccatcagcttgagctgcatatgtaggtagtagaaaacatggcagttgccaaaaggatggctcccttttccaattgggaattgcgaatttttgtaggaacttaataccttgcagggcaatgcctggagggttgtatattgcactggattatactagtagaatacatgtttggcaaggagcagttgcaactaaatttgtgcttttcttggactcaaacctgctggctgatgatgcttgcttggatagcatgtatgcaacatttgttgtggcagctgcaggctgcaggcatatctggaaactctggatccactcacggttggatttccacccagtacttggtctgatatgtgatatggacaagacgttatgatccgcaacgtccatg

SEQ ID NO: 205504 - DNA, 1444 bp, Zea Mays
tatgctctaagaattataagaattaggacaaagataagtatttttgatgcataatatatattcggcgacagaacaacggagatggcatgacgggaggtaaagcgtccgttttgtctcggtgtcagagctatactacgtcaatgcacttgcggacacatcgtcacgaagattttattccaagctccaaataacttctgtttcatgtcaccatcaccattgtcgtatatatagttattataattataacaatggcaacatcatgtcagcacaaaatcatccactggtgacctggccgaatcaggtctacaaagtacatcagatcaggaggcacttcctataaatttggtgaccgggtttcctcgcaagtagccacgcacaaagagggacttgctcgagggtttagctagcttggaagccctccgcaaactcccatggcgtgcctcctcgtgctcgtcatcgctgccacagtactaacgggtccaccgggaaaactgacgcacgccgctcggacgtcgccggcggaggccttctggcatgcggccctccccggcgctcccatgcccgaggccatccgcgagctcttgcgcccagctgggaccaacgctccagacgccgctaggtccaggcaccacgacgccgatccgccgccgatgaacttcaagtacgaagactacaggtcctcgcgtcggaacgaagccaccgccacctccgccgaggccctggaccgcgctggcggcgccgggaacgcggccgcgtcgccggcggtgttcttcctcgaggaggcagtgcgcgtcgggggtgtcctgcccttccgtggtatggtcccgcggggcaccgccagcgtggcagtggcctcgcctccgatgcggctgtacaaggtccgcgccgtgcgggccatcgacgggcgcaggttcatggtgtgccgccgcgaccgcgaggacggccccgacggcgacgccgtgtacgggtgccgcgcgacgggccccgcgagggcgtacgctgtgggcgtggtcggcgagcgcggggagacggtggccgcgaccgtcgtgtgccgcaccgacacgtcccggtggaaccgggtgcgtgccgcgttcaggctgctcgacgtgaagcccggaggcgcggcggtctgccacgcggcgctcggcgcgcaggtaatcccagtcaagaacgacagtggctcctccttggtgtgaaggaaggctcccacgtgttccgtttgtcgtcgtcgtcgtgatgcaacgtttctagtagtagctatgtatgcatgtggtgaagcaagtgctcgtcggtgtgtagtgttcgctcttctgatccattgtctgtgctctgtactgtagtgatcagcgtcaaaataaagaaatgcatgtccttgtttaaaataaattgatcgctctgtcttttggtactcaagaataaacgaccaccatgaaaatgggaagtg

SEQ ID NO: 205505 - DNA, 3139 bp, Zea Mays
gaggcaagacggatcgagactacgacgccgatcctagctagctctcccgtttctgctcgcaagtcacacacagctccggtagatccgcccctcgcctctgggctccaggaagagattagcttcagacggcagggatcgatactagcaagcaagcatggcgcacgacttgtgcgaggacttggagctcgtcgccgacgacggcggcttcgatgactactactgggacgacgacttccatttccacgacgacgacggcttctccgcctcccctacgacccccgccagcgttggtgcgccccgccagcagcagcagcagcagcagatgggtgatatttcagcctcggactacaaagaaggcgaagacatgcaggggataccctgggaaaggctcaactacaccagggaccagtatcgtcggatgaggctcaaagagtacaagagctaccagaacctcacgaggtcgcacagcggcctacaacaacaggtggagaggaaggacacattctacgatttccatctgaacacgagagccgtcaagtcaacgatagtgcatttccaggtacggtttcaactcggtacttctccatccacacacctgaccaagacgtgtttcgcgcgaggatgtgaagtgccgtttgattagcccactggaatttaccataatcttctgctcatcccatatcgcccaaccaaaaaacacacacacagtcaggatagtagtcattccgttggccataggctgttacacttgcacaatttattctcttaaggctagtttaatttgggaaccttatttttccaatgaaaaaagaactaatttactttggaaaaatgaaaattccttgagaaaaaatgaggttcccaaactaacattaaggaaagagtaggcatgccatcaagatgcatagtggtgcgtgtgactctgggttgcccgcctcacagttcgattgcttcagtttgcatgatagaagcacagtgctcttgttgtccgttctctttaccagaactcagagggcgcgcagggttacaagttggaacgtgtgccacccccctatccgaaaaaaattctttacatacgagatataaagaatttttttacagcctctcacatatatctatatcagttgttggtttatataaatagaagaaaaataaattactaaagggttattttgtaaattttgatatgtgtttgtgaactttcgagtggtggatgtgaggggctttaaaagataacgtttacatcggctgaggaacctcctgtggcctacatcgaagcacgacgtgtacctggtgcagagctactccgtgacgcactggtctgccctgctccggagaggaagagaggttctcaacgtggccggccggttggctccgacccagaacgtgaagggggctggaccgttgtcgagggttcagatcagcgccatggctgtgaaggacaacctcatggtggccggtggcttccagggagaactcatatgcaagtacgttgatagacccggggtggcattctgcaccagcctgaccggtggcagcagttccatcacgaacgccgtcgacatccaccaggcacccaggtaagcgatccagaccgtcatgttctgataacagacaactgagctgttctgttgtgaaccacgaccgacggtatgatgatgcagcggcgccacgcgagtgatggcggcgaacaacgactgcgtcgtcaggacgttcgacgccgagagatacagccttctcacgcagctcaccttcccgtggtccgtcaacagcacgtcggtgagccccgacggcaagctgctggcggtcctgggcgacagcacggagtgcgtggtcgccgacccgcagtcgggcaaggcggtggcgacgctgcgcgggcacctggactactccttcgcgtcggcgtggcaccccgacggccgcgtcctggcgacggggaaccaggacgcgacgtgccggctgtgggacgcgcgcagcctgtcggagccgttcgccgtgctcggggcccggatcggcgccgtccggggcctccgcttctcccccgacggcaggttcctggccgcggccgaggccgccgacttcgtgcacgtgtacgacgccgcggccgggtacgccggcgccgcgcaggaggtggacgtgttcggggaggtcgccggcgccgcgttcagccccgacggcgaggcgctgttcgtgagcgtcgccgaccgcacctacggcggcctgctcgagttccgacgccggcgggcggaccgctacctcgacgcgtgtttcttctgagggagaggcgcgcgcgcgcgccgtctgttgtgtactgtgcatgtgcctgccggcgggcggcacgtatacatgtggtgtgttgtgtagtgtaaaacgcagagttttggtgcgtatcggacagcgtaccggctggagacaacctggccagggtgctttcaggagctagtatcgctttcttgtttgttttggacttcgggggaaaaacacttcagaatggtgcactcgggttgcctttaggtactacaagcttgctatagagatgctgtgtatcaattcgttaatgtaagaactgtaaaatacttctaatacttcttctgtcctaaattatattttatctctttcctaaattataactaagtataagacataattattatgttatagtatttttatattcgttgttttctataatctacatatctagatgtatagtttagtttagcttatatcgttaagtctagcttatatgtgtagttttgttctttttatttcaatcatattagggtctgtttggttgggcatgtggaaaaagctgttgttgggcctgtggaaaaagctgctgtggactgtgagcggtggaaaaagctgttgtgagctgttaaaaagctaaaaaccgtttgatgtaaactactaaaagccgttaaaagtttttttatatatgttttaaagtttttttatatatgttttcacagttccatctaaaagccgttaaaagcaggttaaggagtgtttataattttatactgcgaaaaagtcagcttttagaaaaagttgatttctagaatcagtcttttggtttggtttttgatttttagggggtaaaagccaaaaccaaaagctaaaccgaacacttgtaaaggac

SEQ ID NO: 205506 - DNA, 2104 bp, Zea Mays
ctgccctttgcgcgaaggggcacccactcgtgacacccacggtggccgatttgttgctctgcgtccggttcttggaaggctccccccatggatgatggggcctcttctggggcttgacccgtggaggtctggcccaggctgtcaacgtccatccatatataggatcgggtggcagctgctgcaaggggcctcgtggatcaactatccatgcctgagcgcctccacggattctatacaacgtgctggattcgcaagcccaacacctatccaagcccagtcatggccaattgctatgcaaaatcaagatgtagtagctattgcaaagactggatcaggcaaaactcttgggtatctacttcctgggtttatgcatatcaagcgcctgcagaacagcactaggaatggcccaacagtgctagttttggccccaacaagggaacttgcaacacagattctggatgaagctgtgaaatttggaagatcttcaagaatttcttgcacgtgcttatatggtggtgctcctaaaggtcctcagttgagagatttagatagaggggttgatgttgttgttgcaacacctggaaggttaaatgacatcttggagatgcgaaaggtgacaattggaagtgttgattcacttgttgctaatagttctattactcagcatgtagagatcataacaccctcagaaaaacaacggcgcctggagcagatattacgatcccaggattcaggttcaaagatattaatattttgtaccaccaagaggatgtgtgaccaacttgcaaggacactcaccaggcagtttggagcttcggccattcatggtgacaagtcccaaagtgaaagggagaaggttctgaatcagtttcgatctgggcggtctcccattttagtggcaactgatgttgctgcgcgaggtttggacatcaaagatatcagggtagtgatcaactatgacttccccactggtgttgaagactacgttcacaggattggcaggacaggaagggctggtgccactggtgttgcatatacatttttttgtgatcaggattcaaaatatgctgctgacctaatcaaaattctggaaggggcaaaccaacgagtgccccgtgatttagaggatatggcttctcgtggcggtggacgaggtaggaagaggaaccattgggcatcccgccctgacaggggtggttcacgttctgaactggattcaaggtacagcagcagagatggactagcatcttctgggaaatcagagagtggtcgcggcagtcgtggaagggatgataatggtagccgtggcaggtacgaccctggtgaaaccgatgggcgatctcgtaggtctactagaggccgcagtagaagccgtagcaaaagtgacagtagaagccgtagcccaagtcccaagaagtcacgtcgtcatgaaggtagacgtagcaggactaagagcaggagcaggagcaggagccgtagaaatcatggcgctagccacagcaagagtcgcagccctgtcgctagccgtaggtatgaaaagactgcttcaggatctgctcggcctaactcggggcatgcagagcacaaaagccctccaagatctcactctagggatgaccatgtgaaccactctgaccacaaggatgatccgcgtgcaaatgcagctgtgcagaatggtaataactgacggagagtggcctgcatcttctgtgacaaccaagacttatctgttatgcaaaatgcagtcattcccatctgcaagtcctgaatacggaaatgcatttgtgtgccattaaatatctcgtagaacatgtgatactgatgcctctgccatcgatgaaccaaaactgttgatgcatgtcatgtcatgttgttaaacttaatgacattgttgtgttctggtgttttacagccagttctgtaagtgatttatgataaaatatattgtcaggtctggaagtggtagtttatgataactagcaaagttatgttgctacggtttctatttataaagtatagaatataaaatacaaagacatgtgttctgttggttaggtgaatgcgaatatgggtttatagcaaaaaaaccatggtttgaatcttt

SEQ ID NO: 205507 - DNA, 2497 bp, Zea Mays
tcttggaaggctccccccatggatgatggggcctcttctggggcttgacccgtggaggtctggcccaggctgtcaacgtccatccatatataggatcgggtggcagctgctgcaaggggcctcgtggatcaactatccatgcctgagcgcctccacggattctatacaacgtgctggattcgcaagcccaacacctatccaagcccagtcatggccaattgctatgcaaaatcaagatgtagtagctattgcaaagactggatcaggcaaaactcttgggtatctacttcctgggtttatgcatatcaagcgcctgcagaacagcactaggaatggcccaacagtgctagttttggccccaacaagggaacttgcaacacagattctggatgaagctgtgaaatttggaagatcttcaagaatttcttgcacgtgcttatatggtggtgctcctaaaggtcctcagttgagagatttagatagaggggttgatgttgttgttgcaacacctggaaggttaaatgacatcttggagatgcgaaaggtaagtcttaagcaagtgtcatatcttgttctggatgaggctgatcgcatgctggacatgggctttgagccacaaatacggaagatagtgaaagagatacctcaccgtcggcaaacccttatgtacaccgctacatggcccaaggaagtccgaaggattgcagatgatcttcttgttcatcctgtacaggtgacaattggaagtgttgattcacttgttgctaatagttctattactcagcatgtagagatcataacaccctcagaaaaacaacggcgcctggagcagatattacgatcccaggattcaggttcaaagatattaatattttgtaccaccaagaggatgtgtgaccaacttgcaaggacactcaccaggcagtttggagcttcggccattcatggtgacaagtcccaaagtgaaagggagaaggttctgaatcagtttcgatctgggcggtctcccattttagtggcaactgatgttgctgcgcgaggtttggacatcaaagatatcagggtagtgatcaactatgacttccccactggtgttgaagactacgttcacaggattggcaggacaggaagggctggtgccactggtgttgcatatacatttttttgtgatcaggattcaaaatatgctgctgacctaatcaaaattctggaaggggcaaaccaacgagtgccccgtgatttagaggatatggcttctcgtggcggtggacgaggtaggaagaggaaccattgggcatcccgccctgacaggggtggttcacgttctgaactggattcaaggtacagcagcagagatggactagcatcttctgggaaatcagagagtggtcgcggcagtcgtggaagggatgataatggtagccgtggcaggtacgaccctggtgaaaccgatgggcgatctcgtaggtctactagaggccgcagtagaagccgtagcaaaagtgacagtagaagccgtagcccaagtcccaagaagtcacgtcgtcatgaaggtagacgtagcaggactaagagcaggagcaggagcaggagccgtagaaatcatggcgctagccacagcaagagtcgcagccctgtcgctagccgtaggtatgaaaagactgcttcaggatctgctcggcctaactcggggcatgcagagcacaaaagccctccaagatctcactctagggatgaccatgtgaaccactctgaccacaaggatgaccacaaggatgaccacatggaagatgggaagatggaaagggttgatcttgatcgctcgcccagcccacacgatgacaagtctgctccatatagtcctgtgtacaatggcaaagccagtggctcaatgagccccaacggtcagccagaggcaggtgccaaatttgttgaaccttctgggaaacctgagcctgcatctccagtgcgctgcagcaaaggcagagatgatgatgaggaaggtatcatagacgaggatggagagattggtgaggatgatccgcgtgcaaatgcagctgtgcagaatggtaataactgacggagagtggcctgcatcttctgtgacaaccaagacttatctgttatgcaaaatgcagtcattcccatctgcaagtcctgaatacggaaatgcatttgtgtgccattaaatatctcgtagaacatgtgatactgatgcctctgccatcgatgaaccaaaactgttgatgcatgtcatgtcatgttgttaaacttaatgacattgttgtgttctggtgttttacagccagttctgtaagtgatttatgataaaatatattgtcaggtctggaagtggtagtttatgataactagcaaagttatgttgctacggtttctatttataaagtatagaatataaaatacaaagacatgtgttctgttggttaggtgaatgcgaatatgggtttatagcaaaaaaaccatggtttgaatcttt

SEQ ID NO: 205508 - DNA, 2646 bp, Zea Mays
atttcagatgaaacttgtgttctacctcatgatgatcgtggtctcttgacaacagcagatactggatccaaagctagtggctcccagttctgcattactttcaagcctaattctcatcttgacaggaagcacacagtttttggcaagcttgttgttggaagtgatgttctgaagagaatcgagcaagtagatgtgcaatcccctgattcaactcctgttgttccggttactatagtaaattgtggggagctcactgaccgtaaagatattggatctatgagaataggaattgataaaaagagggccgccaaatcaaagttgtcaaagggtatatcttctgatgaggaaagtaatgaaggacagcacaagggccgccgtaacaaatcttcaaaaaggagaaggaagaagagatatttttattcggagtcagatagctcttctgagtcggagactgaatcatctgattctgagagcgattctgatacttactcaagtgactcatctgatgtcagcagttcaagtgatgacaggcgaaggcgcagaaagagacattcgaagaaaaataaacgcaagcgttcaagaagaaagcatgaccaaaggcgtgaaagaaggcgtaggaagcgtgataggaaatcaaaacagaagtcaaaaaggataaagggtgacagtgaagctgaaagttcgagtgatagcagctctgaagatgctagaagcaagagacaccgccacgggcggaagtccaaggcatcatctcaagtttttggtaatgcaatggcagtagttaatgcgacccaagcacaatcaagggacttcacaaaaaggaaaatattgctgcagtgtctgctttgaaggatgccacgtcacctcaacaaaagagtggcataccaaacagtccagcacaagatgtctccccgctgcaaaatggggaaaactatacaaatggtgttaacgaatcaaaaattgaaaggaatgcagctgtcatgcctgttctaactggcaaccaaagcaaatctaggagccagagcatgagtgttaatcactcaatgagcaagagtatgagcatcagcccaagaagaagcccaatgaaaaggtcaattaccaccacaaagaggtcagttagcaggagccctgttcaccataatcgcagtggaagtcctgtcggtgctccccaaaaaagcgtgagcaggagttcagccagaaggcagagcatcagcaggagccctgctaggagcctcagcaagagcccacccagagatgcaagcagaagcccccacataagcaggactcctgttaaagctcacagaagaagcattagcaggagctcagctaggtccatggaacagagaagtctaagcaggagcctggagagaattcatgtacgaaaaagtgtcagcccaagaccaccattggcgaagccaaaaagcattacccgaacccctgtgacatctccattgcgaagcgttagccggagcccagctaggatttcaaggagcccacttaggccttctaggagaagccctatgagaagtccacgacggaacattcacagaagtctcagcaggagccctgcaagaatacttagaagtgtgagcagaagtccagtaagaggtggtcgacctcgccggaacattagcagaagtcccagtccacttcgcagggcattaacaccaccaaacaatggaaggagccgatctaggagtgattctcctgatgggtcacccaaacgcataagacgtggacgtggttttactcaacgctattcatttgcaagacaatatcgctcaccttccgctgatcgcttgcatcgttatggcggaagaaatgaccgtgacagatacatgggttaccggggttttcgccaccgatcacctcctcgacgttataggagcccctctagaggcagagtgtcatcgccaaggtacaggaggaggagccgaagcgcatcacgcagtcctgtccacagaggaaggagaggtgggtacaacaagagtcctgtacggagccgttcaccccccgccaggaaaaggtcacctagcgatcgtgcacggtcagtttctaggagccacctttctaggtcagtatcaaagtctccaccagtgcatcatccctccccacttgattctccatctctggagcgtgcaagtgatgggaaatctcggtccccatcaccgtctggtggaggcaagaaaggtttggtttcctacggtgatggcactcctgattcagctgggaagtaggtttccaccggatgtattgtactacctttggccattgtctcttgatcggtccagtgttacgtcactactgtagagaagagaacggttttggtccttgaggcgccccgtgtactggtgttgtcgctgtagaattgttacttaagttgtttgggatgatcgtcgttgtccttagattatcttaagacctagtactctgagcttagtttacgctcatgctgaacatgtagcagggcttcagcttaattaccattggtggaatttggatgttataatgtttgacgcatagagaatcattacattattttgatctcggagcacaataacatgtataattaataattaattccttctggaactatccaacactagcgtttctgcatgtatgcaataattcgcttggccgcgtcat

SEQ ID NO: 205509 - DNA, 3218 bp, Zea Mays
ctccactcccctattccccacatcactccgcttttgcggccgcttgtggcggtgccttccacggggctgcggctgcgctccgccggagcgagcaaatatccttgcccccacgagaccctcgcacagtcgcacctctccgacgtgaccggcgccgtagaaccaccgggtcttcccttgtgctaccgtgttggcccagggattattcaagaacatggagagaaagagaaaccccattgtctttctggatgtatctgtaggtgatgagccagatgaaagaatgatctttgagttgttcgctgatgttgcaccccttgtgactgagaacttcagagctttatgcacaggtgagctgggaattggacacaagactaagaagccattatgttacaagggatcatcgttccaccgtgtcatcgaagggttcatggcacaaggaggtgacattgcgaaaggaaatgggtctggtggagaaaacatatatagtggaaaatctgcagatgaaacttgtgttctacctcatgatgatcgtggtctcttgacaacagcagatactggatccaaagctagtggctcccagttctgcattactttcaagcctaattctcatcttgacaggaagcacacagtttttggcaagcttgttgttggaagtgatgttctgaagagaatcgagcaagtagatgtgcaatcccctgattcaactcctgttgttccggttactatagtaaattgtggggagctcactgaccgtaaagatattggatctatgagaataggaattgataaaaagagggccgccaaatcaaagttgtcaaagggtatatcttctgatgaggaaagtaatgaaggacagcacaagggccgccgtaacaaatcttcaaaaaggagaaggaagaagagatatttttattcggagtcagatagctcttctgagtcggagactgaatcatctgattctgagagcgattctgatacttactcaagtgactcatctgatgtcagcagttcaagtgatgacaggcgaaggcgcagaaagagacattcgaagaaaaataaacgcaagcgttcaagaagaaagcatgaccaaaggcgtgaaagaaggcgtaggaagcgtgataggaaatcaaaacagaagtcaaaaagcaggataaagggtgacagtgaagctgaaagttcgagtgatagcagctctgaagatgctagaagcaagagacaccgccacgggcggaagtccaaggcatcatctcaagtttttggtaatgcaatggcagtagttaatgcgacccaagcacaatcaagggacttcacaaaaaggaaaatattgctgcagtgtctgctttgaaggatgccacgtcacctcaacaaaagagtggcataccaaacagtccagcacaagatgtctccccgctgcaaaatggggaaaactatacaaatggtgttaacgaatcaaaaattgaaaggaatgcagctgtcatgcctgttctaactggcaaccaaagcaaatctaggtttcctatacttcttcatacatcattctttgtgcttactgcttctggaagcggtgtttcatctgacattgataagcaggagccagagcatgagtgttaatcactcaatgagcaagagtatgagcatcagcccaagaagaagcccaatgaaaaggtcaattaccaccacaaagaggtcagttagcaggagccctgttcaccataatcgcagtggaagtcctgtcggtgctccccaaaaaagcgtgagcaggagttcagccagaaggcagagcatcagcaggagccctgctaggagcctcagcaagagcccacccagagatgcaagcagaagcccccacataagcaggactcctgttaaagctcacagaagaagcattagcaggagctcagctaggtccatggaacagagaagtctaagcaggagcctggagagaattcatgtacgaaaaagtgtcagcccaagaccaccattggcgaagccaaaaagcattacccgaacccctgtgacatctccattgcgaagcgttagccggagcccagctaggatttcaaggagcccacttaggccttctaggagaagccctatgagaagtccacgacggaacattcacagaagtctcagcaggagccctgcaagaatacttagaagtgtgagcagaagtccagtaagaggtggtcgacctcgccggaacattagcagaagtcccagtccacttcgcagggcattaacaccaccaaacaatggaaggagccgatctaggagtgattctcctgatgggtcacccaaacgcataagacgtggacgtggttttactcaacgctattcatttgcaagacaatatcgctcaccttccgctgatcgcttgcatcgttatggcggaagaaatgaccgtgacagatacatgggttaccggggttttcgccaccgatcacctcctcgacgttataggagcccctctagaggcagagtgtcatcgccaaggtacaggaggaggagccgaagcgcatcacgcagtcctgtccacagaggaaggagaggtgggtacaacaagagtcctgtacggagccgttcaccccccgccaggaaaaggtcacctagcgatcgtgcacggtcagtttctaggagccacctttctaggtcagtatcaaagtctccaccagtgcatcatccctccccacttgattctccatctctggagcgtgcaagtgatgggaaatctcggtccccatcaccgtctggtggaggcaagaaaggtttggtttcctacggtgatggcactcctgattcagctgggaagtaggtttccaccggatgtattgtactacctttggccattgtctcttgatcggtccagtgttacgtcactactgtagagaagagaacggttttggtccttgaggcgccccgtgtactggtgttgtcgctgtagaattgttacttaagttgtttgggatgatcgtcgttgtccttagattatcttaagacctagtactctgagcttagtttacgctcatgctgaacatgtagcagggcttcagcttaattaccattggtggaatttggatgttataatgtttgacgcatagagaatcattacattattttgatctcggagcacaataacatgtataattaataattaattccttctggaactatccaacactagcgtttctgcatgtatgcaataattcgcttggccgcgtcat

SEQ ID NO: 205510 - DNA, 3080 bp, Zea Mays
ctccactcccctattccccacatcactccgcttttgcggccgcttgtggcggtgccttccacggggctgcggctgcgctccgccggagcgagcaaatatccttgcccccacgagaccctcgcacagtcgcacctctccgacgtgaccggcgccgtagaaccaccgggtcttcccttgtgctaccgtgttggcccagggattattcaagaacatggagagaaagagaaaccccattgtctttctggatgtatctgtaggtgatgagccagatgaaagaatgatctttgagttgttcgctgatgttgcaccccttgtgactgagaacttcagagctttatgcacaggtgagctgggaattggacacaagactaagaagccattatgttacaagggatcatcgttccaccgtgtcatcgaagggttcatggcacaaggaggtgacattgcgaaaggaaatgggtctggtggagaaaacatatatagtggaaaatctgcagatgaaacttgtgttctacctcatgatgatcgtggtctcttgacaacagcagatactggatccaaagctagtggctcccagttctgcattactttcaagcctaattctcatcttgacaggaagcacacagtttttggcaagcttgttgttggaagtgatgttctgaagagaatcgagcaagtagatgtgcaatcccctgattcaactcctgttgttccggttactatagtaaattgtggggagctcactgaccgtaaagatattggatctatgagaataggaattgataaaaagagggccgccaaatcaaagttgtcaaagggtatatcttctgatgaggaaagtaatgaaggacagcacaagggccgccgtaacaaatcttcaaaaaggagaaggaagaagagatatttttattcggagtcagatagctcttctgagtcggagactgaatcatctgattctgagagcgattctgatacttactcaagtgactcatctgatgtcagcagttcaagtgatgacaggcgaaggcgcagaaagagacattcgaagaaaaataaacgcaagcgttcaagaagaaagcatgaccaaaggcgtgaaagaaggcgtaggaagcgtgataggaaatcaaaacagaagtcaaaaaggataaagggtgacagtgaagctgaaagttcgagtgatagcagctctgaagatgctagaagcaagagacaccgccacgggcggaagtccaaggcatcatctcaagtttttgaggaaaatattgctgcagtgtctgctttgaaggatgccacgtcacctcaacaaaagagtggcataccaaacagtccagcacaagatgtctccccgctgcaaaatggggaaaactatacaaatggtgttaacgaatcaaaaattgaaaggaatgcagctgtcatgcctgttctaactggcaaccaaagcaaatctaggagccagagcatgagtgttaatcactcaatgagcaagagtatgagcatcagcccaagaagaagcccaatgaaaaggtcaattaccaccacaaagaggtcagttagcaggagccctgttcaccataatcgcagtggaagtcctgtcggtgctccccaaaaaagcgtgagcaggagttcagccagaaggcagagcatcagcaggagccctgctaggagcctcagcaagagcccacccagagatgcaagcagaagcccccacataagcaggactcctgttaaagctcacagaagaagcattagcaggagctcagctaggtccatggaacagagaagtctaagcaggagcctggagagaattcatgtacgaaaaagtgtcagcccaagaccaccattggcgaagccaaaaagcattacccgaacccctgtgacatctccattgcgaagcgttagccggagcccagctaggatttcaaggagcccacttaggccttctaggagaagccctatgagaagtccacgacggaacattcacagaagtctcagcaggagccctgcaagaatacttagaagtgtgagcagaagtccagtaagaggtggtcgacctcgccggaacattagcagaagtcccagtccacttcgcagggcattaacaccaccaaacaatggaaggagccgatctaggagtgattctcctgatgggtcacccaaacgcataagacgtggacgtggttttactcaacgctattcatttgcaagacaatatcgctcaccttccgctgatcgcttgcatcgttatggcggaagaaatgaccgtgacagatacatgggttaccggggttttcgccaccgatcacctcctcgacgttataggagcccctctagaggcagagtgtcatcgccaaggtacaggaggaggagccgaagcgcatcacgcagtcctgtccacagaggaaggagaggtgggtacaacaagagtcctgtacggagccgttcaccccccgccaggaaaaggtcacctagcgatcgtgcacggtcagtttctaggagccacctttctaggtcagtatcaaagtctccaccagtgcatcatccctccccacttgattctccatctctggagcgtgcaagtgatgggaaatctcggtccccatcaccgtctggtggaggcaagaaaggtttggtttcctacggtgatggcactcctgattcagctgggaagtaggtttccaccggatgtattgtactacctttggccattgtctcttgatcggtccagtgttacgtcactactgtagagaagagaacggttttggtccttgaggcgccccgtgtactggtgttgtcgctgtagaattgttacttaagttgtttgggatgatcgtcgttgtccttagattatcttaagacctagtactctgagcttagtttacgctcatgctgaacatgtagcagggcttcagcttaattaccattggtggaatttggatgttataatgtttgacgcatagagaatcattacattattttgatctcggagcacaataacatgtataattaataattaattccttctggaactatccaacactagcgtttctgcatgtatgcaataattcgcttggccgcgtcat

SEQ ID NO: 205511 - DNA, 3841 bp, Zea Mays
agccaggctgccagggtacttggccgctgcgctcctccactcccctattccccacatcactccgcttttgcggccgcttgtggcggtgccttccacggggctgcggctgcgctccgccggagcgagcaaatatccttgcccccacgagaccctcgcacagtcgcacctctccgacgtgaccggcgccgtagaaccaccgggtcttcccttgtgggattattcaagaacatggagagaaagagaaaccccattgtctttctggatgtatctgtaggtgatgagccagatgaaagaatgatctttgagttgttcgctgatgttgcaccccttgtgactgagaacttcagagctttatgcacaggtgagctgggaattggacacaagactaagaagccattatgttacaagggatcatcgttccaccgtgtcatcgaagggttcatggcacaaggaggtgacattgcgaaaggaaatggtgagtttgcacaattagttcttcctttacattttgctatttctttcccttcccagaaaaaaagcagcaattcccctccccactttcacggcctctcattttttgtgttctcttatataccaatgttcttgtgtacgtcaacttatgggcttgcatgcacatagcactccctgtaagttgtgcagttatgggctacttatgataattgtgatgatttttgttttcatttctatatgttatcacaatgcccctctcttttgatttgatgattatgttgtgcgctcctcactagcatttgacgttcttttagattcatactcttttttaaatggagtagtttagcagtttttcatgtcatatatggttaaatggccttaatattggtattaaatttttcaagtttgcttatggttagtttgttttcatatgcaatgatttgttccaggatccagatttatactgtgcccacatttgtagattgctgtatttttgtctattaatgttacatacggtgatgcatgttaacatctttacttttttggtatatttttctgttgcacattagttctgtttgtttgatgtaaatctaccttgcatgtatagttgcagcttcatgtggtacatcttgtttttggaaatgactgattttaactatgttacagggtctggtggagaaaacatatatagtggaaaatctgcagatgaaacttgtgttctacctcatgatgatcgtggtctcttgacaacagcagatactggatccaaagctagtggctcccagttctgcattactttcaagcctaattctcatcttgacaggaagcacacagtttttggcaagcttgttgttggaagtgatgttctgaagagaatcgagcaagtagatgtgcaatcccctgattcaactcctgttgttccggttactatagtaaattgtggggagctcactgaccgtaaagatattggatctatgagaataggaattgataaaaagagggccgccaaatcaaagttgtcaaagggtatatcttctgatgaggaaagtaatgaaggacagcacaagggccgccgtaacaaatcttcaaaaaggagaaggaagaagagatatttttattcggagtcagatagctcttctgagtcggagactgaatcatctgattctgagagcgattctgatacttactcaagtgactcatctgatgtcagcagttcaagtgatgacaggcgaaggcgcagaaagagacattcgaagaaaaataaacgcaagcgttcaagaagaaagcatgaccaaaggcgtgaaagaaggcgtaggaagcgtgataggaaatcaaaacagaagtcaaaaagcaggataaagggtgacagtgaagctgaaagttcgagtgatagcagctctgaagatgctagaagcaagagacaccgccacgggcggaagtccaaggcatcatctcaagtttttgaggaaaatattgctgcagtgtctgctttgaaggatgccacgtcacctcaacaaaagagtggcataccaaacagtccagcacaagatgtctccccgctgcaaaatggggaaaactatacaaatggtgttaacgaatcaaaaattgaaaggaatgcagctgtcatgcctgttctaactggcaaccaaagcaaatctaggtttcctatacttcttcatacatcattctttgtgcttactgcttctggaagcggtgtttcatctgacattgataagcaggagccagagcatgagtgttaatcactcaatgagcaagagtatgagcatcagcccaagaagaagcccaatgaaaaggtcaattaccaccacaaagaggtcagttagcaggagccctgttcaccataatcgcagtggaagtcctgtcggtgctccccaaaaaagcgtgagcaggagttcagccagaaggcagagcatcagcaggagccctgctaggagcctcagcaagagcccacccagagatgcaagcagaagcccccacataagcaggactcctgttaaagctcacagaagaagcattagcaggagctcagctaggtccatggaacagagaagtctaagcaggagcctggagagaattcatgtacgaaaaagtgtcagcccaagaccaccattggcgaagccaaaaagcattacccgaacccctgtgacatctccattgcgaagcgttagccggagcccagctaggatttcaaggagcccacttaggccttctaggagaagccctatgagaagtccacgacggaacattcacagaagtctcagcaggagccctgcaagaatacttagaagtgtgagcagaagtccagtaagaggtggtcgacctcgccggaacattagcagaagtcccagtccacttcgcagggcattaacaccaccaaacaatggaaggagccgatctaggagtgattctcctgatgggtcacccaaacgcataagacgtggacgtggttttactcaacgctattcatttgcaagacaatatcgctcaccttccgctgatcgcttgcatcgttatggcggaagaaatgaccgtgacagatacatgggttaccggggttttcgccaccgatcacctcctcgacgttataggagcccctctagaggcagagtgtcatcgccaaggtacaggaggaggagccgaagcgcatcacgcagtcctgtccacagaggaaggagaggtgggtacaacaagagtcctgtacggagccgttcaccccccgccaggaaaaggtcacctagcgatcgtgcacggtcagtttctaggagccacctttctaggtcagtatcaaagtctccaccagtgcatcatccctccccacttgattctccatctctggagcgtgcaagtgatgggaaatctcggtccccatcaccgtctggtggaggcaagaaaggtttggtttcctacggtgatggcactcctgattcagctgggaagtaggtttccaccggatgtattgtactacctttggccattgtctcttgatcggtccagtgttacgtcactactgtagagaagagaacggttttggtccttgaggcgccccgtgtactggtgttgtcgctgtagaattgttacttaagttgtttgggatgatcgtcgttgtccttagattatcttaagacctagtactctgagcttagtttacgctcatgctgaacatgtagcagggcttcagcttaattaccattggtggaatttggatgttataatgtttgacgcatagagaatcattacattattttgatctcggagcacaataacatgtataattaataattaattccttctggaactatccaacactagcgtttctgcatgtatgcaataattcgcttggccgcgtcat

SEQ ID NO: 205512 - DNA, 3412 bp, Zea Mays
agccaggctgccagggtacttggccgctgcgctcctccactcccctattccccacatcactccgcttttgcggccgcttgtggcggtgccttccacggggctgcggctgcgctccgccggagcgagcaaatatccttgcccccacgagaccctcgcacagtcgcacctctccgacgtgaccggcgccgtagaaccaccgggtcttcccttgtgggattattcaagaacatggagagaaagagaaaccccattgtctttctggatgtatctgtaggtgatgagccagatgaaagaatgatctttgagttgttcgctgatgttgcaccccttgtgactgagaacttcagagctttatgcacaggtgagctgggaattggacacaagactaagaagccattatgttacaagggatcatcgttccaccgtgtcatcgaagggttcatggcacaaggaggtgacattgcgaaaggaaatgggtctggtggagaaaacatatatagtggaaaatctgcaggtatcaaccttggtgtgaattcttttatatagcggagatgttgaataccaataacagaataaccttgcaaccttttatttgaggatttataatgttggttaccagtacatagtcaaatgctgtgttgttatgtgtctactgtctatattaggagtgtgttcaaattctaataatctatttcaagttactgcttttatctttttgtctgctactctgctttgctctgcggatctggagatagtatccaactgttctggtaagcactaaagcatgtagtatatctgtaatgacagtatattgtttgcatttcagatgaaacttgtgttctacctcatgatgatcgtggtctcttgacaacagcagatactggatccaaagctagtggctcccagttctgcattactttcaagcctaattctcatcttgacaggaagcacacagtttttggcaagcttgttgttggaagtgatgttctgaagagaatcgagcaagtagatgtgcaatcccctgattcaactcctgttgttccggttactatagtaaattgtggggagctcactgaccgtaaagatattggatctatgagaataggaattgataaaaagagggccgccaaatcaaagttgtcaaagggtatatcttctgatgaggaaagtaatgaaggacagcacaagggccgccgtaacaaatcttcaaaaaggagaaggaagaagagatatttttattcggagtcagatagctcttctgagtcggagactgaatcatctgattctgagagcgattctgatacttactcaagtgactcatctgatgtcagcagttcaagtgatgacaggcgaaggcgcagaaagagacattcgaagaaaaataaacgcaagcgttcaagaagaaagcatgaccaaaggcgtgaaagaaggcgtaggaagcgtgataggaaatcaaaacagaagtcaaaaagcaggataaagggtgacagtgaagctgaaagttcgagtgatagcagctctgaagatgctagaagcaagagacaccgccacgggcggaagtccaaggcatcatctcaagtttttgaggaaaatattgctgcagtgtctgctttgaaggatgccacgtcacctcaacaaaagagtggcataccaaacagtccagcacaagatgtctccccgctgcaaaatggggaaaactatacaaatggtgttaacgaatcaaaaattgaaaggaatgcagctgtcatgcctgttctaactggcaaccaaagcaaatctaggagccagagcatgagtgttaatcactcaatgagcaagagtatgagcatcagcccaagaagaagcccaatgaaaaggtcaattaccaccacaaagaggtcagttagcaggagccctgttcaccataatcgcagtggaagtcctgtcggtgctccccaaaaaagcgtgagcaggagttcagccagaaggcagagcatcagcaggagccctgctaggagcctcagcaagagcccacccagagatgcaagcagaagcccccacataagcaggactcctgttaaagctcacagaagaagcattagcaggagctcagctaggtccatggaacagagaagtctaagcaggagcctggagagaattcatgtacgaaaaagtgtcagcccaagaccaccattggcgaagccaaaaagcattacccgaacccctgtgacatctccattgcgaagcgttagccggagcccagctaggatttcaaggagcccacttaggccttctaggagaagccctatgagaagtccacgacggaacattcacagaagtctcagcaggagccctgcaagaatacttagaagtgtgagcagaagtccagtaagaggtggtcgacctcgccggaacattagcagaagtcccagtccacttcgcagggcattaacaccaccaaacaatggaaggagccgatctaggagtgattctcctgatgggtcacccaaacgcataagacgtggacgtggttttactcaacgctattcatttgcaagacaatatcgctcaccttccgctgatcgcttgcatcgttatggcggaagaaatgaccgtgacagatacatgggttaccggggttttcgccaccgatcacctcctcgacgttataggagcccctctagaggcagagtgtcatcgccaaggtacaggaggaggagccgaagcgcatcacgcagtcctgtccacagaggaaggagaggtgggtacaacaagagtcctgtacggagccgttcaccccccgccaggaaaaggtcacctagcgatcgtgcacggtcagtttctaggagccacctttctaggtcagtatcaaagtctccaccagtgcatcatccctccccacttgattctccatctctggagcgtgcaagtgatgggaaatctcggtccccatcaccgtctggtggaggcaagaaaggtttggtttcctacggtgatggcactcctgattcagctgggaagtaggtttccaccggatgtattgtactacctttggccattgtctcttgatcggtccagtgttacgtcactactgtagagaagagaacggttttggtccttgaggcgccccgtgtactggtgttgtcgctgtagaattgttacttaagttgtttgggatgatcgtcgttgtccttagattatcttaagacctagtactctgagcttagtttacgctcatgctgaacatgtagcagggcttcagcttaattaccattggtggaatttggatgttataatgtttgacgcatagagaatcattacattattttgatctcggagcacaataacatgtataattaataattaattccttctggaactatccaacactagcgtttctgcatgtatgcaataattcgcttggccgcgtcat

SEQ ID NO: 205513 - DNA, 3238 bp, Zea Mays
agccaggctgccagggtacttggccgctgcgctcctccactcccctattccccacatcactccgcttttgcggccgcttgtggcggtgccttccacggggctgcggctgcgctccgccggagcgagcaaatatccttgcccccacgagaccctcgcacagtcgcacctctccgacgtgaccggcgccgtagaaccaccgggtcttcccttgtgggattattcaagaacatggagagaaagagaaaccccattgtctttctggatgtatctgtaggtgatgagccagatgaaagaatgatctttgagttgttcgctgatgttgcaccccttgtgactgagaacttcagagctttatgcacaggtgagctgggaattggacacaagactaagaagccattatgttacaagggatcatcgttccaccgtgtcatcgaagggttcatggcacaaggaggtgacattgcgaaaggaaatgggtctggtggagaaaacatatatagtggaaaatctgcagatgaaacttgtgttctacctcatgatgatcgtggtctcttgacaacagcagatactggatccaaagctagtggctcccagttctgcattactttcaagcctaattctcatcttgacaggaagcacacagtttttggcaagcttgttgttggaagtgatgttctgaagagaatcgagcaagtagatgtgcaatcccctgattcaactcctgttgttccggttactatagtaaattgtggggagctcactgaccgtaaagatattggatctatgagaataggaattggtaattcttatcaactgattggaatttccgcagcacctattgctccatttgatataaagataaaaagagggccgccaaatcaaagttgtcaaagggtatatcttctgatgaggaaagtaatgaaggacagcacaagggccgccgtaacaaatcttcaaaaaggagaaggaagaagagatatttttattcggagtcagatagctcttctgagtcggagactgaatcatctgattctgagagcgattctgatacttactcaagtgactcatctgatgtcagcagttcaagtgatgacaggcgaaggcgcagaaagagacattcgaagaaaaataaacgcaagcgttcaagaagaaagcatgaccaaaggcgtgaaagaaggcgtaggaagcgtgataggaaatcaaaacagaagtcaaaaagcaggataaagggtgacagtgaagctgaaagttcgagtgatagcagctctgaagatgctagaagcaagagacaccgccacgggcggaagtccaaggcatcatctcaagtttttgaggaaaatattgctgcagtgtctgctttgaaggatgccacgtcacctcaacaaaagagtggcataccaaacagtccagcacaagatgtctccccgctgcaaaatggggaaaactatacaaatggtgttaacgaatcaaaaattgaaaggaatgcagctgtcatgcctgttctaactggcaaccaaagcaaatctaggtttcctatacttcttcatacatcattctttgtgcttactgcttctggaagcggtgtttcatctgacattgataagcaggagccagagcatgagtgttaatcactcaatgagcaagagtatgagcatcagcccaagaagaagcccaatgaaaaggtcaattaccaccacaaagaggtcagttagcaggagccctgttcaccataatcgcagtggaagtcctgtcggtgctccccaaaaaagcgtgagcaggagttcagccagaaggcagagcatcagcaggagccctgctaggagcctcagcaagagcccacccagagatgcaagcagaagcccccacataagcaggactcctgttaaagctcacagaagaagcattagcaggagctcagctaggtccatggaacagagaagtctaagcaggagcctggagagaattcatgtacgaaaaagtgtcagcccaagaccaccattggcgaagccaaaaagcattacccgaacccctgtgacatctccattgcgaagcgttagccggagcccagctaggatttcaaggagcccacttaggccttctaggagaagccctatgagaagtccacgacggaacattcacagaagtctcagcaggagccctgcaagaatacttagaagtgtgagcagaagtccagtaagaggtggtcgacctcgccggaacattagcagaagtcccagtccacttcgcagggcattaacaccaccaaacaatggaaggagccgatctaggagtgattctcctgatgggtcacccaaacgcataagacgtggacgtggttttactcaacgctattcatttgcaagacaatatcgctcaccttccgctgatcgcttgcatcgttatggcggaagaaatgaccgtgacagatacatgggttaccggggttttcgccaccgatcacctcctcgacgttataggagcccctctagaggcagagtgtcatcgccaaggtacaggaggaggagccgaagcgcatcacgcagtcctgtccacagaggaaggagaggtgggtacaacaagagtcctgtacggagccgttcaccccccgccaggaaaaggtcacctagcgatcgtgcacggtcagtttctaggagccacctttctaggtcagtatcaaagtctccaccagtgcatcatccctccccacttgattctccatctctggagcgtgcaagtgatgggaaatctcggtccccatcaccgtctggtggaggcaagaaaggtttggtttcctacggtgatggcactcctgattcagctgggaagtaggtttccaccggatgtattgtactacctttggccattgtctcttgatcggtccagtgttacgtcactactgtagagaagagaacggttttggtccttgaggcgccccgtgtactggtgttgtcgctgtagaattgttacttaagttgtttgggatgatcgtcgttgtccttagattatcttaagacctagtactctgagcttagtttacgctcatgctgaacatgtagcagggcttcagcttaattaccattggtggaatttggatgttataatgtttgacgcatagagaatcattacattattttgatctcggagcacaataacatgtataattaataattaattccttctggaactatccaacactagcgtttctgcatgtatgcaataattcgcttggccgcgtcat

SEQ ID NO: 205514 - DNA, 2389 bp, Zea Mays
cagggctctcagggagccaggctgccagggtacttggccgctgcgctcctccactcccctattccccacatcactccgcttttgcggccgcttgtggcggtgccttccacggggctgcggctgcgctccgccggagcgagcaaatatccttgcccccacgagaccctcgcacagtcgcacctctccgacgtgaccggcgccgtagaaccaccgggtcttcccttgtgggattattcaagaacatggagagaaagagaaaccccattgtctttctggatgtatctgtaggtgatgagccagatgaaagaatgatctttgagttgttcgctgatgttgcaccccttgtgactgagaacttcagagctttatgcacaggtgagctgggaattggacacaagactaagaagccattatgttacaagggatcatcgttccaccgtgtcatcgaagggttcatggcacaaggaggtgacattgcgaaaggaaatgggtctggtggagaaaacatatatagtggaaaatctgcagatgaaacttgtgttctacctcatgatgatcgtggtctcttgacaacagcagatactggatccaaagctagtggctcccagttctgcattactttcaagcctaattctcatcttgacaggaagcacacagtttttggcaagcttgttgttggaagtgatgttctgaagagaatcgagcaagtagatgtgcaatcccctgattcaactcctgttgttccggttactatagtaaattgtggggagctcactgaccgtaaagatattggatctatgagaataggaattgataaaaagagggccgccaaatcaaagttgtcaaagggtatatcttctgatgaggaaagtaatgaaggacagcacaagggccgccgtaacaaatcttcaaaaaggagaaggaagaagagatatttttattcggagtcagatagctcttctgagtcggagactgaatcatctgattctgagagcgattctgatacttactcaagtgactcatctgatgtcagcagttcaagtgatgacaggcgaaggcgcagaaagagacattcgaagaaaaataaacgcaagcgttcaagaagaaagcatgaccaaaggcgtgaaagaaggcgtaggaagcgtgataggaaatcaaaacagaagtcaaaaagcaggataaagggtgacagtgaagctgaaagttcgagtgatagcagctctgaagatgctagaagcaagagacaccgccacgggcggaagtccaaggcatcatctcaagtttttgaggaaaatattgctgcagtgtctgctttgaaggatgccacgtcacctcaacaaaagagtggcataccaaacagtccagcacaagatgtctccccgctgcaaaatggggaaaactatacaaatggtgttaacgaatcaaaaattgaaaggaatgcagctgtcatgcctgttctaactggcaaccaaagcaaatctaggagccagagcatgagtgttaatcactcaatgagcaagagtatgagcatcagcccaagaagaagcccaatgaaaaggtcaattaccaccacaaagaggtcagttagcaggagccctgttcaccataatcgcagtggaagtcctgtcggtgctccccaaaaaagcgtgagcaggagttcagccagaaggcagagcatcagcaggagccctgctaggagcctcagcaagagcccacccagagatgcaagcagaagcccccacataagcaggactcctgttaaagctcacagaagaagcattagcaggagctcagctaggtccatggaacagagaagtctaagcaggagcctggagagaattcatgtacgaaaaagtgtcagcccaagaccaccattggcgaagccaaaaagcattacccgaacccctgtgacatctccattgcgaagcgttagccggagcccagctaggatttcaaggagcccacttaggccttctaggagaagccctatgagaagtccacgacggaacattcacagaagtctcagcaggagccctgcaagaatacttagaagtgtgagcagaagtccagtaagaggtggtcgacctcgccggaacattagcagaagtcccagtccacttcgcagggcattaacaccaccaaacaatggaaggagccgatctaggagtgattctcctgatgggtcacccaaacgcataagacgtggacgtggttttactcaacgctattcatttgcaagacaatatcgctcaccttccgctgatcgcttgcatcgttatggcggaagaaatgaccgtgacagatacatgggttaccggggttttcgccaccgatcacctcctcgacgttataggagcccctctagaggcagagtgtcatcgccaagcag

SEQ ID NO: 205515 - DNA, 1995 bp, Zea Mays
atgttctgcctcctcccatcacgcgtccgcgtccgcagctctgccccaccgcgcctccgccgccgcaatccgcgcccgcatcccaccatccccgtgcggctccttcgccgtgatgctcgcccacgcatgatagaaggcacacccgcatctcgattcccgccaccacaatctttgccccttgctgacttcgatggaaggcgtaccgctcgctctcacctgcctgtgccccgcgacgcccacccctccccattgctggggccaggcaaggatcatttccaccgtcgcaaaccaccgatcccgcaaaacggcgccgccatcctgctcgtccctaaccaccgcctacagatggattcccctcccccactgcgcacaacagatggctccgcgcatctcgtgaacacagcgggccgccggcggataagcacgcagcagctcaccatgcctgggtcgccaacaaacccgcccctctccttctcatccccacctgccagtgtaggagaagaggacggaggttagcagatctcgtcgcgctggtggagatgaccgaagccgcggagtgcgaggaggagcgggacctgtttgccgatgcataggccagcgaggtgtatgattgttagcatccggacggtgtggccgcggggctcgagctgctgaattcgatctgcgcggtgcacaggtcagcgaggtgtatgattgttagcatcggtgcggtgtcgtagctggtggaattgttgccgaagctagcgacggagtgtgtcgagccggctttggacatcttggatgccctgtctgcggttccagaggggaggatggttcttaaggattgtctgcagacgatacccaatgctgtccggttgctgatgagagtttcagaggcatgcactcgacgagctctgtcgatgttgtggccggtgtgtcggatggctccggaagaatgcgcacctgctgcagtggaggctgggttggcggcgaagcttcagcttgtcatccaaagtggttgtgcgctggagctgaagcagaaggcgtcggagctgctcaagctgtgccgcctcaactacaccgacaccccctccatctccaagtgcaaactcacaaggacaattcagtgagatatgcaaatgatgctggtctgatctgatttggttcgatgatgcgtggtttgtcgattgaccttgctgagtttagagttccgaggaaatggaattggcaaattgacgaatgatggcaagactggtggttaccacaacaattttcggggagacaagaagcgatgcagcctaatgactagcaagttagatggcaagcaggcggggtgtacatgcaaattgttgagaatttgatcagctcaataagcacatgaggttgggtgatgacagatacttgtagaagtggcaatggtattacagaagccattcatttcgttgaatggggtgagaaaggaggacgtcagtttcttactcctgctggaattttaacatttaacagaaatagcatgagcgccaaagataaggctacgaggaaggatcagatcgatcttcgggtgggctgtctgaggctgacatctagaagatggtgcaagaagctaaactgcgtgcctagaagaatcaggaacggaaaagccctcatcatctaatctaattcgtttgtccattattttgctgagaagtccatccctcgataagtgttcccttcatgagtttataacaccaactccaacatactcactcacctctttcagtctgttcaaagcattgcttgccaattaacagagtaacgatttattatctgcaaatttaaatcatgttagatatataccgttgcaacgcacgggcctctaactagtatataattatatatatttgtgtggataagaccttcatatcgaatttcgcaccggacccctgaaaagccaggaacggccctgagactcatcgaccatcgttcgcgccggcggatgcgcaccaagagtgtttgcggggccttgcggttttgaag

SEQ ID NO: 205516 - DNA, 2139 bp, Zea Mays
cgacatgttctgcctcctcccatcacgcgtccgcgtccgcagctctgccccaccgcgcctccgccgccgcaatccgcgcccgcatcccaccatccccgtgcggctccttcgccgtgatgctcgcccacgcatgatagaaggcacacccgcatctcgattcccgccaccacaatctttgccccttgctgacttcgatggaaggcgtaccgctcgctctcacctgcctgtgccccgcgacgcccacccctccccattgctggggccaggcaaggatcatttccaccgtcgcaaaccaccgatcccgcaaaacggcgccgccatcctgctcgtccctaaccaccgcctacagatggattcccctcccccactgcgcacaacagatggctccgcgcatctcgtgaacacagcgggccgccggcggataagcacgcagcagctcaccatgcctgggtcgccaacaaacccgcccctctccttctcatccccacctgccagtgtaggagaagaggacggaggttagcagatctcgtcgcgctggtggagatgaccgaagccgcggagtgcgaggaggagcgggacctgtttgccgatgcataggccagcgaggtgtatgattgttagcatccggacggtgtggccgcggggctcgagctgctgaattcgatctgcgcggtgcacaggtcagcgaggtgtatgattgttagcatcggtgcggtgtcgtagctggtggaattgttgccgaagctagcgacggagtgtgtcgagccggctttggacatcttggatgccctgtctgcggttccagaggggaggatggttcttaaggattgtctgcagacgatacccaatgctgtccggttgctgatgagagtttcagaggcatgcactcgacgagctctgtcgatgttgtggccggtgtgtcggatggctccggaagaatgcgcacctgctgcagtggaggctgggttggcggcgaagcttcagcttgtcatccaaagtggttgtgcgctggagctgaagcagaaggcgtcggagctgctcaagctgtgccgcctcaactacaccgacaccccctccatctccaagtgcaaactcacaaggacaattcagtgagatatgcaaatgatgctggtctgatctgatttggttcgatgatgcgtggtttgtcgattgaccttgctgagtttagagttccgaggaaatggaattggcaaattgacgaatgatggcaagactggtggttaccacaacaattttcggggagacaagaagcgatgcagcctaatgactagcaagttagatggcaagcaggcggggtgtacatgcaaattgttgagaatttgatcagctcaataagcacatgaggttgggtggtgtcctgaatgatatggggctagactcactgtattggttatgtagacaacacccatatcggcatataagctcaacttcgtatcagcagaggaaaacatacattgtggaaataaattaattatggtctcagattcaagatatgacagatacttgtagaagtggcaatggtattacagaagccattcatttcgttgaatggggtgagaaaggaggacgtcagtttcttactcctgctggaattttaacatttaacagaaatagcatgagcgccaaagataaggctacgaggaaggatcagatcgatcttcgggtgggctgtctgaggctgacatctagaagatggtgcaagaagctaaactgcgtgcctagaagaatcaggaacggaaaagccctcatcatctaatctaattcgtttgtccattattttgctgagaagtccatccctcgataagtgttcccttcatgagtttataacaccaactccaacatactcactcacctctttcagtctgttcaaagcattgcttgccaattaacagagtaacgatttattatctgcaaatttaaatcatgttagatatataccgttgcaacgcacgggcctctaactagtatataattatatatatttgtgtggataagaccttcatatcgaatttcgcaccggacccctgaaaagccaggaacggccctgagactcatcgaccatcgttcgcgccggcggatgcgcaccaagagtgtttgcggggccttgcggttttgaag

SEQ ID NO: 205517 - DNA, 1323 bp, Zea Mays
atatatatgtgctcaactgttcatcgatataatcgtcggcgagatgattgccatgtcgtcgacgccgattctgctcaccatactcttggcatacctcgcgttctctgcaaactgcgaacgtggtaatgacgaggacacaccagctgcaggtggtcaccggcggtggcagccaaacggcgacaagacgatttccggaggcagcagcgacgacgaggcggcgacgtgcgtgagcagtgaatgcgagggcagcacctgttactgctgcccaacgatgcccactagcccttgcttcttggatctggatgcttgcttgagagtctgccatggtcgtcgtcgtcgtcgtcggccagccgcaccgctgccggaggatgaaactccagtaccctcaattgctgcggcagttaatcgacatagtcaggaggtttgtagtttaccagcggaccctcagccaagcgacactaacaactcgcagttgcacaacttcatcgcaaatataaccatgccaccagaaccccctctgattcaaacccttccacacaacaatttacccaacacagcaaatgcaatttgggtttcgccccaacagcatataaataggcctggccaagcttccacctccggcaagagatatagtgttagattggctgcaaagaaaaaattaatgttggggcgttctagagattcaatatccaaagctcaggatattctggtagctaaactatacaactcaacaacaaaaaataatctaggctctttggcttcttgctcatctaatgaagtcaatcattttgaacagattgcaaggctttttgcaagacctcttaccaagattcagatggaggagatcatggagctggccaatcatggaaaaggaaagaaaatcaacaacaagaaagggcgcaaggtggctcccttcttagcaccggtcgcccctttggccttggaaggctgagtgcggtagtcttgtctgtaatggtggagatggttttgctgatgttacagcagatggttcttttggtggtccttttggcggtgttgtcggcagtagagttgggtttagagtctggctgctggctcttgcttctagggcatccagggctgttatgtcttcctttgtactgcgtcttacttcaagtgcactcccttatgttgtcgtggttgagggctgtgccgttgcaccctgtgtatggcctcttggctgttatgatttcctcaagtagaggtggccggttgtattaatgtgttccatttgcactgttttctcctggaatgttaggggcttaaataatcctgctaaacgggaaagtgtgagacaaactatta

SEQ ID NO: 205518 - DNA, 1875 bp, Zea Mays
atatatatgtgctcaactgttcatcgatataatcgtcggcgagatgattgccatgtcgtcgacgccgattctgctcaccatactcttggcatacctcgcgttctctgcaaactgcgaacgtggtaatgacgaggacacaccagctgcaggtggtcaccggcggtggcagccaaacggcgacaagacgatttccggaggcagcagcgacgacgaggcggcgacgtgcgtgagcagtgaatgcgagggcagcacctgttactgctgcccaacgatgcccactagcccttgcttcttggatctggatgcttgcttgagagtctgccatggtcgtcgtcgtcgtcgtcggccagccgcaccgctgccggaggtaacgtcgtcgtctgggcgcgggtccggaccaagcagattcccctgatcgagagtagctagctagctggggcggcctcgccgtcgacgacccctagctagctccatcggcgatcgatgtcctagcttgtgacaattgacaagacgagagaacatggatgttttcgccaccaccacggctcttcctcgaacaagtatcactccaaactgaagtttctacacgtatatatagttccaaaaacaaagtaaattgcatacatataatataggcttcatgctagtgcgactatggtgcctacgaaaaattatgcaacagattaatgtgtttatataatggatgtacacatgtacactggtaaaaggaagaagagatcatgcttgtctcttacacgtacatactatcgattcaagttattcatttgaattagaaacagttttttttcatagtaaatgaactagaatcggatacaaacttaattgcaatttaaacctgataaaattaacattttttccagaagttctagacggtaactgtactgtgactgttctacaggatgaaactccagtaccctcaattgctgcggcagttaatcgacatagtcaggaggtttgtagtttaccagcggaccctcagccaagcgacactaacaactcgcagttgcacaacttcatcgcaaatataaccatgccaccagaaccccctctgattcaaacccttccacacaacaatttacccaacacagcaaatgcaatttgggtttcgccccaacagcatataaataggcctggccaagcttccacctccggcaagagatatagtgttagattggctgcaaagaaaaaattaatgttggggcgttctagagattcaatatccaaagctcaggatattctggtagctaaactatacaactcaacaacaaaaaataatctaggctctttggcttcttgctcatctaatgaagtcaatcattttgaacagattgcaaggctttttgcaagacctcttaccaagattcagatggaggagatcatggagctggccaatcatggaaaaggaaagaaaatcaacaacaagaaagggcgcaaggtggctcccttcttagcaccggtcgcccctttggccttggaaggctgagtgcggtagtcttgtctgtaatggtggagatggttttgctgatgttacagcagatggttcttttggtggtccttttggcggtgttgtcggcagtagagttgggtttagagtctggctgctggctcttgcttctagggcatccagggctgttatgtcttcctttgtactgcgtcttacttcaagtgcactcccttatgttgtcgtggttgagggctgtgccgttgcaccctgtgtatggcctcttggctgttatgatttcctcaagtagaggtggccggttgtattaatgtgttccatttgcactgttttctcctggaatgttaggggcttaaataatcctgctaaacgggaaagtgtgagacaaactatta

SEQ ID NO: 205519 - DNA, 2765 bp, Zea Mays
aggggtttcactcgccagtctccaacaattgtgtccatggatcaagacattggtactttaatcctaagattccacaagctgaggaattgtactggatgtccatcctttgtcctagataaatcccaatctatgtgatttgtgttttccaatgtgtggtggattcatgccattagggagttacctatgtttcttgtctctttcaggttttcctcatttttattagatcctttcttagcgatcttggatctccactctccaggactccagggtttgccgtttgcttgacgatcacacgtatcaaaaagggttctcaagtattattggtaaagtatcacaattagatatagcttgaagttgcattttacgcgttgagctatcacattgtagactaacttgtacagttttcttttgcagtccttcttgcttgctttcacatttggggtgttctgctataatttacgttgattatttttcccttgcaatttggcatgcatacaaacatttgctctctatttttctatccaacataattcatgatttaaataaaggaactatttcttaaaagtcttctatttagtttcatcctttggaaaacaactctgctactaatgtgctgccccagaccccagttttacttctatttgacctgccagtgaaagcatttggagattttcttttaatccaccgtgaagcaaattcatggctaaatgctgcaacgtttagtctgtagcagtgtcctacttcttcctacttattaattagttgatggctacttccgtatgagttaacaacttatatgtgagagggcgaacgagacagagttgaaaaccctgcatccatccaatctggacatacataaaagttgtcataaagaaaggcacttgtccaggaaaaatgttttattgactgtcctgctgttcctttccccgctaaataatgtatcaagttaaaacttagctgagataatgtcaacttaagcttttccatgtcggcatatgtgcttcccacaatcttcggatggtcttttttttaaaaaaatctttggcctgcttcatcaagaactagatttgatcatgttcttctctgtgttgatgaattatctacagtttagctataaacacatctgaaatgttagtctattgaaggatacttggatactgaagccatgcatctttaaattgttaacttttctttttgtggtttagtatggatgaataaaaggggaaaaagcaaaagggaacaagcatcctctgatttttattttgatgatgcaatcttagaaaccctacctgaactgaacacctcttttggcattttaaaagtgctgcaaaggaaacaagcatcctcttgcttttgtatctttagtatgttgtcggcatatgtacgctattatgtccttttttggttaaatatctattattcatgggtttgctgttcacatgaatcgcatatagctatcacctttgctgcattcaggttgatgctatgctccaagaattagaaaaggagattgatgatgtggatgcacaaattggaaatcgttggcaactgcttgataaggaccatgatggcaaagtgacccctgaagaggtggcggcggcgacagcttatctcaaggacaccatagggaaagaaggcgtgcaagagctcatcagcaacctttctaaagacacagaaggaaaaaatccttgttgaagatattgtgaagctagcatcccaaatagagaacaatgaagaggaagaggaagcacggtagatgggagagtatatggaaacatcacactcgttcagcagtcaaaactcatgtattgaaagggaactacgtatgtttatggaactttctttaaaccatatatttcttagcatgagaatgaaatcgaccggaatctccttgagccgagagctcgagccaccgacacggttgtcctttattttcagaaggctgcttcagcaggacaaagtactttctcagaaatatgttttaaaatatgttgctgcccagtcaccttctcagaaatcaaggcaacgccttcatcaggaatcacagcagccgccacaataacagcaaccacaagtgcaggtgtagcaggcgcaaccacaaaaacaagcagcacctgttatgcgcagagaatcatctattgctgctcggcaagcagcaatggcacatcaatctcaggagactaaacctgttcaatcttcgcccaagatcaagcgtcaaacaccagcgagatctggttcagtggcatccacagcctccggtagctgcatccgcaccaaaacctggtggtagtccaaagaaaggtgaggtcaaacctgctgtcgacccagttcaaactccaaccacaggtgccgattcaacgaaacccgagcctagcgccccatcactccctggagccgaaggggtggacaagatggccatcgatgaggccagtggtgacgccccagaggtagcagaagagcttgaccctgcgctcgaagaggagatgtcgatggaggagatgatccgtgtgacgcgcgccaagctaaggaggcgcacgaccaccgaagttcctgctgggaattagttgttagcggcacgggcaacgaacgcctgcaattgtaacatcatacacttcaatctggtcactccttgagtatcttcaggatgtcacatccagccgcaattttcagccggcagggaaacaagaacaactgtttttctatcattctctgtgtacatgtatctgtttgagtccctggtatacactgcagttagtctggcagaa

SEQ ID NO: 205520 - DNA, 962 bp, Zea Mays
gggttagggttaggggtttcactcgccagtctccaacaattgtgtccatggatcaagacattggtactttaatcctaagattccacaagctgaggaattgtactggatgtccatcctttgtcctagataaatcccaatctatgtgatttgtgttttccaatgtgtggtggattcatgccattagggagttacctatgtttcttgtctctttcaggttttcctcatttttattagatcctttcttagcgatcttggatctccactctccaggactccagggtttgccgtttgcttgacgatcacacgtatcaaaaagggttctcaagtattattggttgatgctatgctccaagaattagaaaaggagattgatgatgtggatgcacaaattggaaatcgttggcaactgcttgataaggaccatgatggcaaagtgacccctgaagaggtggcggcggcgacagcttatctcaaggacaccatagggaaagaaggcgtgcaagagctcatcagcaacctttctaaagacacagaaggaaaaaatccttgttgaagatattgtgaagctagcatcccaaatagagaacaatgaagaggaagaggaagcacggtagatgggagagtatatggaaacatcacactcgttcagcagtcaaaactcatgtattgaaaggcaatacatccatttcttgtgtctcttgactgactttgatagtgacttccaattagcaaggtagattttctgtagaaaggctcatgctgacatgcatttagttagccgtcgtgttgtgatttggtaggtaaattgcaaccaaaatttagaccggttgcatggacgtggataatacagatcaattgtatttgttatgctactatgcaatcccgaaatattggatctgtttcaaattctcaagtaatcattgatggatgctatttattgaccataaagcttacgaaatcat

SEQ ID NO: 205521 - DNA, 3820 bp, Zea Mays
ctccagagtatggctgtatggctgggtggtataggctcttgagtatcagagtactttgccctagatctttattgccatttttcagttttggatccacttttccattttatggaaatcttagttgccacatcctatttctttatggtagaaagtgtttttggttaatcatgattggttgttagaaatggcaaacatggtatgtgattttaggagttcatgtagcatgatagatagtctgtccctgtactttttttggtgatctgttcaagcacttaggtagggtgtcgttctcacaaggcggtttcacatcctcactgttaataacaaatactattcacgtactaggaagatgagtgctttcttctcatctggggtggacatgtaacagagaagacctaatctgtattatatgtcaatgttcagtagtatgtgtaaattgtgatgtcgtactttgataagttcaagtgattatttagggccttcttgttgtatctgaacactcccaaaagtatggcatttggcagccatcattcataatttcttttttatgtttcttttggcgtcaagcaactttcagtaacacttaagccttctctctctctcttaatttgtaatattttaatggcatggatttgaatcgcttcactgaatttcttattatagcaataaatcgtacctgtgatacctgtttgatgagccttttgaaactgcacaattgagagttgaagatgccaaagagaaatcagatgaatcatgaatagaataggatactgccaaggataatggttcagagatggaggaagtccctcgtgagaaagtgaatttctcagaagagcttttgagcagcacatcatttgctcgccaattagcggatcagatgactttagcaaaggcgtatgtcatccttgcaaaagagcatgataatcttcagcttgcatgggagcttagttcgcagataaggaattgtcaaagattgctctctgaaggggcagttagtgggagagcaatcactaaagatgaagcccatcctataataagccggctagcactgttaatatacaaggctcaggactctcactatgatatcagcacaacaatagtgacattgaagaaccatgccctggcactagaggagcgtgcaaaggcagcaattgttcagagtgctgagtttggccagttagcagcagaatccttcccgaagaatctgcactgtctaactgtgaaactgacagaggagtggcttcggaacccgaagcataggagtcgctcagaggagaaccggaattccacacgattggtggataataatctgtatcatttctgtatattctctgataatgtgctggccacttcagttgttgtcaattctacagtctccaatgcaaatcaccctcaacagcttgtgtttcatgtggtcactgacagaatccattttggcgcaatgtcaacattgttcctcataaatgacttcaaaggttgtactgttgaagtccgatgcatagatgagttctcgtggttgaatgcttcttcatctcctcttgtcaggcaactatctgaggttgaaactcagggttactattactcagctggttccaagaatcctgaaagagaaataaaattccataatccaaagtttgtttctctactgaaccatttacggttctacattcctcagatacttcccaacttggagaaggtggtgtttcttgatgacgatgttgtggtgcaaaaggatttgactcagctgttctccatagagctgcatggcaatgtcattggagcagtggaaacttgtttagagtcgtttcatcggtatcacaagtatctaaatttttcgcatcctactatcagctccaagattgatccacatacttgtggatgggcttttggaatgaacatttttgacttgatagcttggaggaaggcaaacgccacatcattgtatcattattggcaagagcaaaattctgacctattgctctggagaacaggaactcttcctgcaggccttttgacattttatggcctgatggagcccctagaccgcagatggcatgtcttgggtctcgggtatgatgtagacatagatgatcgtctgattgagagtgctgctgttgtgcactataatggaaacatgaaaccctggctgaagctggctattcgccgttacaagtatatatgggaacggtatgtgaatatctcacacccgtatgttagagagtgtatgttgcattagaaagtctgcaaatctctgtatgttcttgcatggcactgaagctgcatgcttcagtttcttcacatgaggctgcttttgagcaccttatgtgccggaaagttccagaggtagaatatatactcaagggacagcatcaaagaagtcaactgttaagttttctttttgggttgggagaagattcattttgggatgaaaataattcctttgcagagtttacatacaatttggactggaaaatttagcagtctaaccagatacatctggatagatactgtaaaagagatacagttggatcaatggacattcttttttttagatttaggaaatgcaaattgtgagctcaactgtgcagggccagtggtgttggattcttttagtaatatcttgttttataccggcgaagaaggctctgcctccctcgtataagtagctcctttgtgcttattcgtacactatgaattcagttggatttcatacactatggcatccttcttttcagaggaaaatgcatgtaggtagatccagatctggtcggcaggttttcatgtgtttcgtttttcatgtgccgtctgcaatgcatgcgtgcttcatcatgatctacacatatattacgtgtgaatggaagaaagacgtctcatgtgtttgagcgacacggattgcatctccgcagctgggaacggctaaggtccctcgttcggttgttaaggattagctcggcacgattcttagccgcattgtttctataatttatataaacttttatttatcagccgaaatgatttcagatgtaatcaaagaaatctcgaaagcgttgttgcggtaatagacttggtaccgttagaactaatctattgtgatttattctaattgagttgttgaaagatggcaagagatacttcatagatgattgtactagattttgctacatgtacttgttaaaatcaaatgataaatcattacatcatttaaaatctataaagttgaggtaaataatcaattagagaaggaaattggacggttacggtctaaccgtggggatattccttaaatgagttttctgagtttttttatggaacatgatattattcgtgagagaacatcgtcattctcaccacaatttaatgagattgctgaaagaaagaaatgtgttctacctgaattagtatttacatgttagagacaatagaattatctaagtaacggtggggtgaagcaaagatgacagtgtattatattatattctaaataaagtgcccacaaagaacaaaaaattacactattcgaggaattaatggataataagagatacaagggattgtaatgtacaattttcttacctttgtttgtcactaccgatggcttggaggcataagaaattgcattggagtgatatagaaaatactagaatatgtacgataacaagtaagatactgtgcaaaattgcactagcatacagaaaattgtcccaaggacaatgcccgaaaagataaggcattcatatctgcaacaaccactagtacaatttggctctatacaagcggtagactttttacatcacaggcggttcggttagaaaaccgcctg

SEQ ID NO: 205522 - DNA, 912 bp, Zea Mays
gtcttacctttgcaaggtaaaagagcagcaacgaaagcgaaaggtttcaggtgcggttgtgccattatgtgacagagaatgccagttttctccctttttccgctcttgctggagtgttgtatcatgtttgaggcgctttctccttttatttccttttcaagtattgtgggtaagcttaggtatacaatcactcattttggtgcaagcgtgcaatcaaactatccagagcatccaatctagatccaacggtttcatatggaagtggttaaaattaaaataggtactatgttttaggtgtaaggggttaaatataaaataacagtcatcattagatctagatcggatgcaccagatcgcttgattgcatgcttgcaccaggataagtgatggcataggatattttcccgcggttaagtgcccattaatcacgagtttgcatcgaacacaaaattggaaggcagcttgctgctaattacccttaatcttaagttatgccaagcacacacaatttgaaggcagtcattagtgtctaaactgcgatcttccatgatttcaggttctcttctatatttatgctaccccgggtgacgtgatgaacttttcggaacggcgttctaactgatcaatttacattacgtaacaccaaaaccaattgtaatctgataactaaggaagctttggaggcagaggagcgggcgttagcaggttggtgcaaggtagtaaatatgttgacgggtcgcacaggaccggccgcgggtgcagaagccgccgaaaaatatgaaactttgtttcgaagctttgcagcttttatcgtttttaataatgagttctgttttcaataatgagttccggtaggatgtgtttttgccttcggtataaggtctcccatgttcattgcgcggctgagctcgt

SEQ ID NO: 205523 - DNA, 2429 bp, Zea Mays
ccaggcaaaacaaaaaggcgctagagctgtttgtgttgctttatggcgcggagcgggtgtgaggctgcagtgcctgggtggagctcgcgtggtccctgcagcggccgcaatgcctgccccacgcgcctgaccatgcattccaggctgctcaagaggctcgcgaagaggatcatgtgacggcaccttgccgtcgtttcgaccatcgcgcgcctgcgggacggggaagcatgcggaggatggatggcttcatctcgtcgtcgttggcgctcgtcgtgctggcgcttcatcttagcgtggatggctgctcggcggtcaaccttgaagggtcgatactgctcaaattccagtcaagagtggaggaggatccgtatggcgccatggtaggctggagcccgcgcgacagcgatccctgcagttggaacggcgtgcgctgcgttgatggcagagttgtaacgttaaacctgaaggatctctcattaagaggcaccctaggtccagagctaggaactcttagccatctgagggctcttgtactctccaataacttattcagtggatcaatacctaaggaattgagtgctcttacaatgttggagatactggatttaagcaacaacaacttgagtggggaagttccacaagagattgcagaaatgcaatcacttaggcagttattgctttccaataactgctttcagtggcctctgacccaacattcctatgggaactacgatcaggaaaatgatttcaatatttatgataatcttgggaggggtaatatgaatcgaagagctgagaatgggttggaatctggttcttcttcacaagagaacaaaaaggacactagcaacctttctggtaatccaactcaacttccttcacaacacgaaccaagaaatacagcatcacaccttacccagcgcaggttacttcaagatagcaatcttgctgcaccttctcctgcaaatgcccttgttccagctgctgttcctgttccttccactggaactgaactacctccgaagaagatcaagaaacaaggtccatcaaatggctttatgtcattgtactgccactggtcgcacttcttatgtttggcatcgcatgtatgcttttgctatgccgcaccaagtcagggacaacaataggtccatggaagacagggctcagtggccagctccaaaaggcatttgtaacaggagtaccaaagttgcaacgctctgagctggaaggtgcgtgtgaggatttcagtaatattgtggcaagctacccacaatacactgtctacaagggaaccttatcaagtggtgtggagatagctgttgtatcaaccatgattatctctagcaaagattggtcaaaacattcggaagggcgattcaggaagaagactcactgtcgcgaatcaatcataagaattatatcaatctgcttggatactgtgaggaggaagagcctttcatgcggatgatggtgatggaatatgctcccaatggaacgctatatgaacacctccatgtcgagggatttgatcctattgattggaatggtaggatgagggtaattatgggagtcgcatactgcacgctacacatgcatgagctcagccctcctataacacatccagacataaagtcaagtgctatattgctatctgaggatggagctgcaaagatagtagacatgagcgtttggcatgaagtatattccagagaaaacgtgcccaacgatgacgacttagttgatcacccggaacgagtagctgcggatccagctgggaacatctacagttttggtctactcatgctggagatcatctcaggaaagcctccatattccaaagaaaagggttcgcttttgaacttggctttggagtgcattagggataaccgaaacatgtcttgtttgcttgatcctaacttgaaggatcacaaagaaaaggacctagaaatcatatgtgatttgctctatgaatgcatccaaagcgatccgaagaagagaccaaccatgagggaggtcaccactagattgcgagaagtactgtcaatttcgcctgaggctgcaacgccccggttatctccactctggtgggcagagcttgagatcctttcagttgaagcaagctagcgaaaatgttctttgtttgcagcaacgaggtacttgtgcatattgtaatgcaaccctgtacatccctgttgtatgttttcatcttgtgttgtaactttggtgtctgcgtgctacaattttccctccccagtgaattcagttgcctggtatgttttctcatttgttcctcgctttccctatgtatactaaacatacatggtgtgaaagtagaaaataaaaaacgcttcatgccgtccaagggctgaatgtaatcagcaaatgtatagtgttccatagttttctttgattcaataactagtaat

SEQ ID NO: 205524 - DNA, 2603 bp, Zea Mays
ccaggcaaaacaaaaaggcgctagagctgtttgtgttgctttatggtgattgcaagtttcctctgctccccatcgcccttttctctggcgcctctgactctctgagctgttcccgtctgtttcctcttgcacgcaggcgcggagcgggtgtgaggctgcagtgcctgggtggagctcgcgtggtccctgcagcggccgcaatgcctgccccacgcgcctgaccatgcattccaggctgctcaagaggctcgcgaagaggatcatgtgacggcaccttgccgtcgtttcgaccatcgcgcgcctgcgggacggggaagcatgcggaggatggatggcttcatctcgtcgtcgttggcgctcgtcgtgctggcgcttcatcttagcgtggatggctgctcggcggtcaaccttgaagggtcgatactgctcaaattccagtcaagagtggaggaggatccgtatggcgccatggtaggctggagcccgcgcgacagcgatccctgcagttggaacggcgtgcgctgcgttgatggcagagttgtaacgttaaacctgaaggatctctcattaagaggcaccctaggtccagagctaggaactcttagccatctgagggctcttgtactctccaataacttattcagtggatcaatacctaaggaattgagtgctcttacaatgttggagatactggatttaagcaacaacaacttgagtggggaagttccacaagagattgcagaaatgcaatcacttaggcagttattgctttccaataactgctttcagtggcctctgacccaacattcctatgggaactacgatcaggaaaatgatttcaatatttatgataatcttgggaggggtaatatgaatcgaagagctgagaatgggttggaatctggttcttcttcacaagagaacaaaaaggacactagcaacctttctggtaatccaactcaacttccttcacaacacgaaccaagaaatacagcatcacaccttacccagcgcaggttacttcaagatagcaatcttgctgcaccttctcctgcaaatgcccttgttccagctgctgttcctgttccttccactggaactggttcgttttcagcatttagtcccaacaatgcacctgtaccagctgtaaattcaccaagtagtccaccgatggtccccagaactacctccgaagaagatcaagaaacaaggtccatcaaatggctttatgtcattgtactgccactggtcgcacttcttatgtttggcatcgcatgtatgcttttgctatgccgcaccaagtcagggacaacaataggtccatggaagacagggctcagtggccagctccaaaaggcatttgtaacaggagtaccaaagttgcaacgctctgagctggaaggtgcgtgtgaggatttcagtaatattgtggcaagctacccacaatacactgtctacaagggaaccttatcaagtggtgtggagatagctgttgtatcaaccatgattatctctagcaaagattggtcaaaacattcggaagggcgattcaggaagaagatagactcactgtcgcgaatcaatcataagaattatatcaatctgcttggatactgtgaggaggaagagcctttcatgcggatgatggtgatggaatatgctcccaatggaacgctatatgaacacctccatgtcgagggatttgatcctattgattggaatggtaggatgagggtaattatgggagtcgcatactgcacgctacacatgcatgagctcagccctcctataacacatccagacataaagtcaagtgctatattgctatctgaggatggagctgcaaagatagtagacatgagcgtttggcatgaagtatattccagagaaaacgtgcccaacgatgacgacttagttgatcacccggaacgagtagctgcggatccagctgggaacatctacagttttggtctactcatgctggagatcatctcaggaaagcctccatattccaaagaaaagggttcgcttttgaacttggctttggagtgcattagggataaccgaaacatgtcttgtttgcttgatcctaacttgaaggatcacaaagaaaaggacctagaaatcatatgtgatttgctctatgaatgcatccaaagcgatccgaagaagagaccaaccatgagggaggtcaccactagattgcgagaagtactgtcaatttcgcctgaggctgcaacgccccggttatctccactctggtgggcagagcttgagatcctttcagttgaagcaagctagcgaaaatgttctttgtttgcagcaacgaggtacttgtgcatattgtaatgcaaccctgtacatccctgttgtatgttttcatcttgtgttgtaactttggtgtctgcgtgctacaattttccctccccagtgaattcagttgcctggtatgttttctcatttgttcctcgctttccctatgtatactaaacatacatggtgtgaaagtagaaaataaaaaacgcttcatgccgtccaagggctgaatgtaatcagcaaatgtatagtgttccatagttttctttgattcaataactagtaat

SEQ ID NO: 205525 - DNA, 2459 bp, Zea Mays
ccaggcaaaacaaaaaggcgctagagctgtttgtgttgctttatggtgattgcaagtttcctctgctccccatcgcccttttctctggcgcctctgactctctgagctgttcccgtctgtttcctcttgcacgcaggcgcggagcgggtgtgaggctgcagtgcctgggtggagctcgcgtggtccctgcagcggccgcaatgcctgccccacgcgcctgaccatgcattccaggctgctcaagaggctcgcgaagaggatcatgtgacggcaccttgccgtcgtttcgaccatcgcgcgcctgcgggacggggaagcatgcggaggatggatggcttcatctcgtcgtcgttggcgctcgtcgtgctggcgcttcatcttagcgtggatggctgctcggcggtcaaccttgaagggtcgatactgctcaaattccagtcaagagtggaggaggatccgtatggcgccatggtaggctggagcccgcgcgacagcgatccctgcagttggaacggcgtgcgctgcgttgatggcagagttgtaacgttaaacctgaaggatctctcattaagaggcaccctaggtccagagctaggaactcttagccatctgagggctctattgctttccaataactgctttcagtggcctctgacccaacattcctatgggaactacgatcaggaaaatgatttcaatatttatgataatcttgggaggggtaatatgaatcgaagagctgagaatgggttggaatctggttcttcttcacaagagaacaaaaaggacactagcaacctttctggtaatccaactcaacttccttcacaacacgaaccaagaaatacagcatcacaccttacccagcgcaggttacttcaagatagcaatcttgctgcaccttctcctgcaaatgcccttgttccagctgctgttcctgttccttccactggaactggttcgttttcagcatttagtcccaacaatgcacctgtaccagctgtaaattcaccaagtagtccaccgatggtccccagaactacctccgaagaagatcaagaaacaaggtccatcaaatggctttatgtcattgtactgccactggtcgcacttcttatgtttggcatcgcatgtatgcttttgctatgccgcaccaagtcagggacaacaataggtccatggaagacagggctcagtggccagctccaaaaggcatttgtaacaggagtaccaaagttgcaacgctctgagctggaaggtgcgtgtgaggatttcagtaatattgtggcaagctacccacaatacactgtctacaagggaaccttatcaagtggtgtggagatagctgttgtatcaaccatgattatctctagcaaagattggtcaaaacattcggaagggcgattcaggaagaagatagactcactgtcgcgaatcaatcataagaattatatcaatctgcttggatactgtgaggaggaagagcctttcatgcggatgatggtgatggaatatgctcccaatggaacgctatatgaacacctccatgtcgagggatttgatcctattgattggaatggtaggatgagggtaattatgggagtcgcatactgcacgctacacatgcatgagctcagccctcctataacacatccagacataaagtcaagtgctatattgctatctgaggatggagctgcaaagatagtagacatgagcgtttggcatgaagtatattccagagaaaacgtgcccaacgatgacgacttagttgatcacccggaacgagtagctgcggatccagctgggaacatctacagttttggtctactcatgctggagatcatctcaggaaagcctccatattccaaagaaaagggttcgcttttgaacttggctttggagtgcattagggataaccgaaacatgtcttgtttgcttgatcctaacttgaaggatcacaaagaaaaggacctagaaatcatatgtgatttgctctatgaatgcatccaaagcgatccgaagaagagaccaaccatgagggaggtcaccactagattgcgagaagtactgtcaatttcgcctgaggctgcaacgccccggttatctccactctggtgggcagagcttgagatcctttcagttgaagcaagctagcgaaaatgttctttgtttgcagcaacgaggtacttgtgcatattgtaatgcaaccctgtacatccctgttgtatgttttcatcttgtgttgtaactttggtgtctgcgtgctacaattttccctccccagtgaattcagttgcctggtatgttttctcatttgttcctcgctttccctatgtatactaaacatacatggtgtgaaagtagaaaataaaaaacgcttcatgccgtccaagggctgaatgtaatcagcaaatgtatagtgttccatagttttctttgattcaataactagtaat

SEQ ID NO: 205526 - DNA, 1061 bp, Zea Mays
aagatccgaacttgacccattgctctagtttgcacatgtacgttcccatccaaaaaccctcggcaacggtgatgcgacgcccgtcccgttccaagtcctgacaaccgagcgtacgctgagctgcaagtaaacggcgctggctaccggaagagccgagccggaccaagtctcctcgtccctcacctcgtcgccgatggagggcggcgactcgtccggcgccggcgccggcggcgccgtggccgcggcggccaagtggcggagcgacgcgtcgcgggcgttccagtactacctggaccgctcgacgcctcacgccacggggcggtggctcggcacgctcgccgccgcggccatctacgcgctgcgggtttacatggtgcagggcttctacatcgtcacctacgggctcgggatctaccttctcaacctcctcatcggtttcctctcccccatggtcgaccccgagctcgacccttccgccgcctccgaggggccggcgctgcccacccgggggtccgacgagttcaagccattcatcaggcgcctccccgagttcaagttctgaaatatggtgggaagaagagtgccgtgagcccgagttcctcaaaagactgattccgaacctgccccagtagaaacttgccaggggaacaagatacgttggatgatgatatttgatgtgctcaataccaagtgtaatacttcattcatatctaggaggtagacggattttcgctcctgtttctgactctgggctcactgtttaattccatgttgtgcttaggtcgcttcctcctatgcttgtatagcgagtttcgcgtctcagataaattatttcgttttagttactacatatctgggccctaaaacaataagctctatgctctcagcaagtttggttgggtgttgagctgggtgaggtaggcggttggttatttttgtatcgaactggaacaggatgctaaactttaaacgcagaatattttgacccactgtagcatatcatagatagtacgtatcaaacatcgaaattcaaacgcagaatattgctgtctgcatttgac

SEQ ID NO: 205527 - DNA, 3141 bp, Zea Mays
ccccacgaccctacctttcttccttccccgatttcaccgccgccagctgtccaatcccgccgcccagcccccgcccccagaggttggaggtgcgagcgatagccccggcgcccccactgccattacccccgccgcgatgctcgcgttcgtgaggcgtcacgcgcacatcgtgcaacccaacccccttcctccatcgcggcagaacgacatcctccaactccggcggcctccatttccccatcctcttcaacgcgcggcacaacgacctcctcctcccccaccggcggcctccaccagaccaccaccccaccggtcgtcgacctcaaccgtccgttgacctcaaccgtccaccagaccacctcacctcctccaattcccgcgcccgcgcctgatatggaaggtccgccggaggactcgggcgtcgaggccatggcggagcagcaccccttctcccccctgcctcgcgcgcggcggccgagatggtgctggctgggttgttcgagatgatggtccttcccgccctccctgctatcctcgccccaaatcgacgagaatcatgcagcccaaatctgaggtggaggcgtctgcactgtcgatggaggtgtcaagtctgcagtggtgtctgtagatgggaaggcatggtgtgcagcggcagcggccaggtggtgtcgctgagcctgcccttttacgggctcactggcacgctctccacggccttcgggaacctcacattcctgcgtatgctgaacctgagctccaattcattccgcggggaggtcctagcgaccatcgttcgccttgcgcatctgcatgcgctagacctgagctacaacgccttctccgatgctcatgacatttcccaatgcaacaaaatatctgaaaacaattataagctttggtaaggttgatcctgggcacaaggaaaaagttgaacagatatgtagtgcattttaagtgctcgacggttgcgtggaagaggtgggaggctaccacgtcggctacgacatcaagctctccagcaccgagtcccctaggtcggtcacggggctcgagggcgtccgcgtccgtgtgctgtttgcctgggtgcccatcaccggcgtcgaggcggtcgacggagaggtcactgtccacatcgggccaatcaggaagtcgttccccgccgttgggttcaaatccagcccccggtgcatcatcagattggaggcgtggtcacttgtcatggggtggagactaaggatccaagccaatatcacggaccacaacatcaagtgtatgaggcagggcaaagaggccaacaggtgcagggtttgccgtttgcttgacgatcacacgtatcaaaaagggttctcaagtattattggtaaagtatcacaattagatatagcttgaagttgcattttacgcgttgagctatcacattgtagactaacttgtacagttttcttttgcagtccttcttgcttgctttcacatttggggtgttctgctataatttacgttgattatttttcccttgcaatttggcatgcatacaaacatttgctctctatttttctatccaacataattcatgatttaaataaaggaactatttcttaaaagtcttctatttagtttcatcctttggaaaacaactctgctactaatgtgctgccccagaccccagttttacttctatttgacctgccagtgaaagcatttggagattttcttttaatccaccgtgaagcaaattcatggctaaatgctgcaacgtttagtctgtagcagtgtcctacttcttcctacttattaattagttgatggctacttccgtatgagttaacaacttatatgtgagagggcgaacgagacagagttgaaaaccctgcatccatccaatctggacatacataaaagttgtcataaagaaaggcacttgtccaggaaaaatgttttattgactgtcctgctgttcctttccccgctaaataatgtatcaagttaaaacttagctgagataatgtcaacttaagcttttccatgtcggcatatgtgcttcccacaatcttcggatggtcttttttttaaaaaaatctttggcctgcttcatcaagaactagatttgatcatgttcttctctgtgttgatgaattatctacagtttagctataaacacatctgaaatgttagtctattgaaggatacttggatactgaagccatgcatctttaaattgttaacttttctttttgtggtttagtatggatgaataaaaggggaaaaagcaaaagggaacaagcatcctctgatttttattttgatgatgcaatcttagaaaccctacctgaactgaacacctcttttggcattttaaaagtgctgcaaaggaaacaagcatcctcttgcttttgtatctttagtatgttgtcggcatatgtacgctattatgtccttttttggttaaatatctattattcatgggtttgctgttcacatgaatcgcatatagctatcacctttgctgcattcaggttgatgctatgctccaagaattagaaaaggagattgatgatgtggatgcacaaattggaaatcgttggcaactgcttgataaggaccatgatggcaaagtgacccctgaagaggtggcggcggcgacagcttatctcaaggacaccatagggaaagaaggcgtgcaagagctcatcagcaacctttctaaagacacagaaggaaaaaatccttgttgaagatattgtgaagctagcatcccaaatagagaacaatgaagaggaagaggaagcacggtagatgggagagtatatggaaacatcacactcgttcagcagtcaaaactcatgtattgaaaggcaatacatccatttcttgtgtctcttgactgactttgatagtgacttccaattagcaaggtagattttctgtagaaaggctcatgctgacatgcatttagttagccgtcgtgttgtgatttggtaggtaaattgcaaccaaaatttagaccggttgcatggacgtggataatacagatcaattgtatttgttatgctactatgcaatcccgaaatattggatctgtttcaaattctcaagtaatcattgatggatgctatttattgaccataaagcttacgaaatcat

SEQ ID NO: 205528 - DNA, 3290 bp, Zea Mays
cccggactccccacgaccctacctttcttccttccccgatttcaccgccgccagctgtccaatcccgccgcccagcccccgcccccagaggttggaggtgcgagcgatagccccggcgcccccactgccattacccccgccgcgatgctcgcgttcgtgaggcgtcacgcgcacatcgtgcaacccaacccccttcctccatcgcggcagaacgacatcctccaactccggcggcctccatttccccatcctcttcaacgcgcggcacaacgacctcctcctcccccaccggcggcctccaccagaccaccaccccaccggtcgtcgacctcaaccgtccgttgacctcaaccgtccaccagaccacctcacctcctccaattcccgcgcccgcgcctgatatggaaggtccgccggaggactcgggcgtcgaggccatggcggagcagcaccccttctcccccctgcctcgcgcgcggcggccgagatggtgctggctgggttgttcgagatgatggtccttcccgccctccctgctatcctcgccccaaatcgacgagaatcatgcagcccaaatctgaggtggaggcgtctgcactgtcgatggaggtgtcaagtctgcagtggtgtctgtagatgggaaggcatggtgtgcagcggcagcggccaggtggtgtcgctgagcctgcccttttacgggctcactggcacgctctccacggccttcgggaacctcacattcctgcgtatgctgaacctgagctccaattcattccgcggggaggtcctagcgaccatcgttcgccttgcgcatctgcatgcgctagacctgagctacaacgccttctccgaattctagagctgcgattcctgaggccatggagcagcaaacaatatcaattgccaaagctgccattacaataatactcattttagggacttcatttcttgcagctgccaatccaattgcaggatgctatgccgctcttaagatgctcatgacatttcccaatgcaacaaaatatctgaaaacaattataagctttggtaaggttgatcctgggcacaaggaaaaagttgaacagatatgtagtgcattttaagtgcttgatggttgcgtggaagaggtggggggctaccgcgtcggctacgacatcaagctctccggcaccgagtcccctaggtcggtcacggggctcgagggcgtctgcgtccgtgtgctatttgcctgggtgctcatcaccggcgtcgaggcggccgatggagaggtcactgtccacatcgggccaatcaggaagtcgttccccgccgttgggttcaaatccagcccctggtgcatcatcggattggcgacgtggtcacttgtcatggggtggagactaaggatccaagccaatatcacggaccacaacatcaagtgtatgaggcagggcaaagaggccaacaggtgcagggtttgccgtttgcttgacgatcacacgtatcaaaaagggttctcaagtattattggtaaagtatcacaattagatatagcttgaagttgcattttacgcgttgagctatcacattgtagactaacttgtacagttttcttttgcagtccttcttgcttgctttcacatttggggtgttctgctataatttacgttgattatttttcccttgcaatttggcatgcatacaaacatttgctctctatttttctatccaacataattcatgatttaaataaaggaactatttcttaaaagtcttctatttagtttcatcctttggaaaacaactctgctactaatgtgctgccccagaccccagttttacttctatttgacctgccagtgaaagcatttggagattttcttttaatccaccgtgaagcaaattcatggctaaatgctgcaacgtttagtctgtagcagtgtcctacttcttcctacttattaattagttgatggctacttccgtatgagttaacaacttatatgtgagagggcgaacgagacagagttgaaaaccctgcatccatccaatctggacatacataaaagttgtcataaagaaaggcacttgtccaggaaaaatgttttattgactgtcctgctgttcctttccccgctaaataatgtatcaagttaaaacttagctgagataatgtcaacttaagcttttccatgtcggcatatgtgcttcccacaatcttcggatggtcttttttttaaaaaaatctttggcctgcttcatcaagaactagatttgatcatgttcttctctgtgttgatgaattatctacagtttagctataaacacatctgaaatgttagtctattgaaggatacttggatactgaagccatgcatctttaaattgttaacttttctttttgtggtttagtatggatgaataaaaggggaaaaagcaaaagggaacaagcatcctctgatttttattttgatgatgcaatcttagaaaccctacctgaactgaacacctcttttggcattttaaaagtgctgcaaaggaaacaagcatcctcttgcttttgtatctttagtatgttgtcggcatatgtacgctattatgtccttttttggttaaatatctattattcatgggtttgctgttcacatgaatcgcatatagctatcacctttgctgcattcaggttgatgctatgctccaagaattagaaaaggagattgatgatgtggatgcacaaattggaaatcgttggcaactgcttgataaggaccatgatggcaaagtgacccctgaagaggtggcggcggcgacagcttatctcaaggacaccatagggaaagaaggcgtgcaagagctcatcagcaacctttctaaagacacagaaggaaaaaatccttgttgaagatattgtgaagctagcatcccaaatagagaacaatgaagaggaagaggaagcacggtagatgggagagtatatggaaacatcacactcgttcagcagtcaaaactcatgtattgaaaggcaatacatccatttcttgtgtctcttgactgactttgatagtgacttccaattagcaaggtagattttctgtagaaaggctcatgctgacatgcatttagttagccgtcgtgttgtgatttggtaggtaaattgcaaccaaaatttagaccggttgcatggacgtggataatacagatcaattgtatttgttatgctactatgcaatcccgaaatattggatctgtttcaaattctcaagtaatcattgatggatgctatttattgaccataaagcttacgaaatcat

SEQ ID NO: 205529 - DNA, 3354 bp, Zea Mays
cccggactccccacgaccctacctttcttccttccccgatttcaccgccgccagctgtccaatcccgccgcccagcccccgcccccagaggttggaggtgcgagcgatagccccggcgcccccactgccattacccccgccgcgatgctcgcgttcgtgaggcgtcacgcgcacatcgtgcaacccaacccccttcctccatcgcggcagaacgacatcctccaactccggcggcctccatttccccatcctcttcaacgcgcggcacaacgacctcctcctcccccaccggcggcctccaccagaccaccaccccaccggtcgtcgacctcaaccgtccgttgacctcaaccgtccaccagaccacctcacctcctccaattcccgcgcccgcgcctgatatggaaggtccgccggaggactcgggcgtcgaggccatggcggagcagcaccccttctcccccctgcctcgcgcgcggcggccgagatggtgctggctgggttgttcgagatgatggtccttcccgccctccctgctatcctcgccccaaatcgacgagaatcatgcagcccaaatctgaggtggaggcgtctgcactgtcgatggaggtgtcaagtctgcagtggtgtctgtagatgggaaggcatggtgtgcagcggcagcggccaggtggtgtcgctgagcctgcccttttacgggctcactggcacgctctccacggccttcgggaacctcacattcctgcgtatgctgaacctgagctccaattcattccgcggggaggtcctagcgaccatcgttcgccttgcgcatctgcatgcgctagacctgagctacaacgccttctccgaattctagagctgcgattcctgaggccatggagcagcaaacaatatcaattgccaaagctgccattacaataatactcattttagggacttcatttcttgcagctgccaatccaattgcaggatgctatgccgctcttaagatgctcatgacatttcccaatgcaacaaaatatctgaaaacaattataagctttggtaaggttgatcctgggcacaaggaaaaagttgaacagatatgtagtgcattttaagtgcttgatggttgcgtggaagaggtggggggctaccgcgtcggctacgacatcaagctctccggcaccgagtcccctaggtcggtcacggggctcgagggcgtctgcgtccgtgtgctatttgcctgggtgctcatcaccggcgtcgaggcggccgatggagaggtcactgtccacatcgggccaatcaggaagtcgttccccgccgttgggttcaaatccagcccctggtgcatcatcggattggcgacgtggtcacttgtcatggggtggagactaaggatccaagccaatatcacggaccacaacatcaagtgtatgaggcagggcaaagaggccaacaggtgcaggttttcctcatttttattagatcctttcttagcgatcttggatctccactctccaggactccagggtttgccgtttgcttgacgatcacacgtatcaaaaagggttctcaagtattattggtaaagtatcacaattagatatagcttgaagttgcattttacgcgttgagctatcacattgtagactaacttgtacagttttcttttgcagtccttcttgcttgctttcacatttggggtgttctgctataatttacgttgattatttttcccttgcaatttggcatgcatacaaacatttgctctctatttttctatccaacataattcatgatttaaataaaggaactatttcttaaaagtcttctatttagtttcatcctttggaaaacaactctgctactaatgtgctgccccagaccccagttttacttctatttgacctgccagtgaaagcatttggagattttcttttaatccaccgtgaagcaaattcatggctaaatgctgcaacgtttagtctgtagcagtgtcctacttcttcctacttattaattagttgatggctacttccgtatgagttaacaacttatatgtgagagggcgaacgagacagagttgaaaaccctgcatccatccaatctggacatacataaaagttgtcataaagaaaggcacttgtccaggaaaaatgttttattgactgtcctgctgttcctttccccgctaaataatgtatcaagttaaaacttagctgagataatgtcaacttaagcttttccatgtcggcatatgtgcttcccacaatcttcggatggtcttttttttaaaaaaatctttggcctgcttcatcaagaactagatttgatcatgttcttctctgtgttgatgaattatctacagtttagctataaacacatctgaaatgttagtctattgaaggatacttggatactgaagccatgcatctttaaattgttaacttttctttttgtggtttagtatggatgaataaaaggggaaaaagcaaaagggaacaagcatcctctgatttttattttgatgatgcaatcttagaaaccctacctgaactgaacacctcttttggcattttaaaagtgctgcaaaggaaacaagcatcctcttgcttttgtatctttagtatgttgtcggcatatgtacgctattatgtccttttttggttaaatatctattattcatgggtttgctgttcacatgaatcgcatatagctatcacctttgctgcattcaggttgatgctatgctccaagaattagaaaaggagattgatgatgtggatgcacaaattggaaatcgttggcaactgcttgataaggaccatgatggcaaagtgacccctgaagaggtggcggcggcgacagcttatctcaaggacaccatagggaaagaaggcgtgcaagagctcatcagcaacctttctaaagacacagaaggaaaaaatccttgttgaagatattgtgaagctagcatcccaaatagagaacaatgaagaggaagaggaagcacggtagatgggagagtatatggaaacatcacactcgttcagcagtcaaaactcatgtattgaaaggcaatacatccatttcttgtgtctcttgactgactttgatagtgacttccaattagcaaggtagattttctgtagaaaggctcatgctgacatgcatttagttagccgtcgtgttgtgatttggtaggtaaattgcaaccaaaatttagaccggttgcatggacgtggataatacagatcaattgtatttgttatgctactatgcaatcccgaaatattggatctgtttcaaattctcaagtaatcattgatggatgctatttattgaccataaagcttacgaaatcat

SEQ ID NO: 205530 - DNA, 3543 bp, Zea Mays
cccggactccccacgaccctacctttcttccttccccgatttcaccgccgccagctgtccaatcccgccgcccagcccccgcccccagaggttggaggtgcgagcgatagccccggcgcccccactgccattacccccgccgcgatgctcgcgttcgtgaggcgtcacgcgcacatcgtgcaacccaacccccttcctccatcgcggcagaacgacatcctccaactccggcggcctccatttccccatcctcttcaacgcgcggcacaacgacctcctcctcccccaccggcggcctccaccagaccaccaccccaccggtcgtcgacctcaaccgtccgttgacctcaaccgtccaccagaccacctcacctcctccaattcccgcgcccgcgcctgatatggaaggtccgccggaggactcgggcgtcgaggccatggcggagcagcaccccttctcccccctgcctcgcgcgcggcggccgagatggtgctggctgggttgttcgagatgatggtccttcccgccctccctgctatcctcgccccaaatcgacgagaatcatgcagcccaaatctgaggtggaggcgtctgcactgtcgatggaggtgtcaagtctgcagtggtgtctgtagatgggaaggcatggtgtgcagcggcagcggccaggtggtgtcgctgagcctgcccttttacgggctcactggcacgctctccacggccttcgggaacctcacattcctgcgtatgctgaacctgagctccaattcattccgcggggaggtcctagcgaccatcgttcgccttgcgcatctgcatgcgctagacctgagctacaacgccttctccgaattctagagctgcgattcctgaggccatggagcagcaaacaatatcaattgccaaagctgccattacaataatactcattttagggacttcatttcttgcagctgccaatccaattgcaggatgctatgccgctcttaagatgctcatgacatttcccaatgcaacaaaatatctgaaaacaattataagctttggtaaggttgatcctgggcacaaggaaaaagttgaacagatatgtagtgcattttaagtgcttgatggttgcgtggaagaggtggggggctaccgcgtcggctacgacatcaagctctccggcaccgagtcccctaggtcggtcacggggctcgagggcgtctgcgtccgtgtgctatttgcctgggtgctcatcaccggcgtcgaggcggccgatggagaggtcactgtccacatcgggccaatcaggaagtcgttccccgccgttgggttcaaatccagcccctggtgcatcatcggattggcgacgagtgctcgacggttgcgtggaagaggtgggaggctaccacgtcggctacgacatcaagctctccagcaccgagtcccctaggtcggtcacggggctcgagggcgtccgcgtccgtgtgctgtttgcctgggtgcccatcaccggcgtcgaggcggtcgacggagaggtcactgtccacatcgggccaatcaggaagtcgttccccgccgttgggttcaaatccagcccccggtgcatcatcagattggaggcgtggtcacttgtcatggggtggagactaaggatccaagccaatatcacggaccacaacatcaagtgtatgaggcagggcaaagaggccaacaggtgcagggtttgccgtttgcttgacgatcacacgtatcaaaaagggttctcaagtattattggtaaagtatcacaattagatatagcttgaagttgcattttacgcgttgagctatcacattgtagactaacttgtacagttttcttttgcagtccttcttgcttgctttcacatttggggtgttctgctataatttacgttgattatttttcccttgcaatttggcatgcatacaaacatttgctctctatttttctatccaacataattcatgatttaaataaaggaactatttcttaaaagtcttctatttagtttcatcctttggaaaacaactctgctactaatgtgctgccccagaccccagttttacttctatttgacctgccagtgaaagcatttggagattttcttttaatccaccgtgaagcaaattcatggctaaatgctgcaacgtttagtctgtagcagtgtcctacttcttcctacttattaattagttgatggctacttccgtatgagttaacaacttatatgtgagagggcgaacgagacagagttgaaaaccctgcatccatccaatctggacatacataaaagttgtcataaagaaaggcacttgtccaggaaaaatgttttattgactgtcctgctgttcctttccccgctaaataatgtatcaagttaaaacttagctgagataatgtcaacttaagcttttccatgtcggcatatgtgcttcccacaatcttcggatggtcttttttttaaaaaaatctttggcctgcttcatcaagaactagatttgatcatgttcttctctgtgttgatgaattatctacagtttagctataaacacatctgaaatgttagtctattgaaggatacttggatactgaagccatgcatctttaaattgttaacttttctttttgtggtttagtatggatgaataaaaggggaaaaagcaaaagggaacaagcatcctctgatttttattttgatgatgcaatcttagaaaccctacctgaactgaacacctcttttggcattttaaaagtgctgcaaaggaaacaagcatcctcttgcttttgtatctttagtatgttgtcggcatatgtacgctattatgtccttttttggttaaatatctattattcatgggtttgctgttcacatgaatcgcatatagctatcacctttgctgcattcaggttgatgctatgctccaagaattagaaaaggagattgatgatgtggatgcacaaattggaaatcgttggcaactgcttgataaggaccatgatggcaaagtgacccctgaagaggtggcggcggcgacagcttatctcaaggacaccatagggaaagaaggcgtgcaagagctcatcagcaacctttctaaagacacagaaggaaaaaatccttgttgaagatattgtgaagctagcatcccaaatagagaacaatgaagaggaagaggaagcacggtagatgggagagtatatggaaacatcacactcgttcagcagtcaaaactcatgtattgaaaggcaatacatccatttcttgtgtctcttgactgactttgatagtgacttccaattagcaaggtagattttctgtagaaaggctcatgctgacatgcatttagttagccgtcgtgttgtgatttggtaggtaaattgcaaccaaaatttagaccggttgcatggacgtggataatacagatcaattgtatttgttatgctactatgcaatcccgaaatattggatctgtttcaaattctcaagtaatcattgatggatgctatttattgaccataaagcttacgaaatcat

SEQ ID NO: 205531 - DNA, 3396 bp, Zea Mays
cccggactccccacgaccctacctttcttccttccccgatttcaccgccgccagctgtccaatcccgccgcccagcccccgcccccagaggttggaggtgcgagcgatagccccggcgcccccactgccattacccccgccgcgatgctcgcgttcgtgaggcgtcacgcgcacatcgtgcaacccaacccccttcctccatcgcggcagaacgacatcctccaactccggcggcctccatttccccatcctcttcaacgcgcggcacaacgacctcctcctcccccaccggcggcctccaccagaccaccaccccaccggtcgtcgacctcaaccgtccgttgacctcaaccgtccaccagaccacctcacctcctccaattcccgcgcccgcgcctgatatggaaggtccgccggaggactcgggcgtcgaggccatggcggagcagcaccccttctcccccctgcctcgcgcgcggcggccgagatggtgctggctgggttgttcgagatgatggtccttcccgccctccctgctatcctcgccccaaatcgacgagaatcatgcagcccaaatctgaggtggaggcgtctgcactgtcgatggaggtgtcaagtctgcagtggtgtctgtagatgggaaggcatggtgtgcagcggcagcggccaggtggtgtcgctgagcctgcccttttacgggctcactggcacgctctccacggccttcgggaacctcacattcctgcgtatgctgaacctgagctccaattcattccgcggggaggtcctagcgaccatcgttcgccttgcgcatctgcatgcgctagacctgagctacaacgccttctccgatgctcatgacatttcccaatgcaacaaaatatctgaaaacaattataagctttggtaaggttgatcctgggcacaaggaaaaagttgaacagatatgtagtgcattttaagtgcttgatggttgcgtggaagaggtggggggctaccgcgtcggctacgacatcaagctctccggcaccgagtcccctaggtcggtcacggggctcgagggcgtctgcgtccgtgtgctatttgcctgggtgctcatcaccggcgtcgaggcggccgatggagaggtcactgtccacatcgggccaatcaggaagtcgttccccgccgttgggttcaaatccagcccctggtgcatcatcggattggcgacgagtgctcgacggttgcgtggaagaggtgggaggctaccacgtcggctacgacatcaagctctccagcaccgagtcccctaggtcggtcacggggctcgagggcgtccgcgtccgtgtgctgtttgcctgggtgcccatcaccggcgtcgaggcggtcgacggagaggtcactgtccacatcgggccaatcaggaagtcgttccccgccgttgggttcaaatccagcccccggtgcatcatcagattggaggcgtggtcacttgtcatggggtggagactaaggatccaagccaatatcacggaccacaacatcaagtgtatgaggcagggcaaagaggccaacagggtttgccgtttgcttgacgatcacacgtatcaaaaagggttctcaagtattattggtaaagtatcacaattagatatagcttgaagttgcattttacgcgttgagctatcacattgtagactaacttgtacagttttcttttgcagtccttcttgcttgctttcacatttggggtgttctgctataatttacgttgattatttttcccttgcaatttggcatgcatacaaacatttgctctctatttttctatccaacataattcatgatttaaataaaggaactatttcttaaaagtcttctatttagtttcatcctttggaaaacaactctgctactaatgtgctgccccagaccccagttttacttctatttgacctgccagtgaaagcatttggagattttcttttaatccaccgtgaagcaaattcatggctaaatgctgcaacgtttagtctgtagcagtgtcctacttcttcctacttattaattagttgatggctacttccgtatgagttaacaacttatatgtgagagggcgaacgagacagagttgaaaaccctgcatccatccaatctggacatacataaaagttgtcataaagaaaggcacttgtccaggaaaaatgttttattgactgtcctgctgttcctttccccgctaaataatgtatcaagttaaaacttagctgagataatgtcaacttaagcttttccatgtcggcatatgtgcttcccacaatcttcggatggtcttttttttaaaaaaatctttggcctgcttcatcaagaactagatttgatcatgttcttctctgtgttgatgaattatctacagtttagctataaacacatctgaaatgttagtctattgaaggatacttggatactgaagccatgcatctttaaattgttaacttttctttttgtggtttagtatggatgaataaaaggggaaaaagcaaaagggaacaagcatcctctgatttttattttgatgatgcaatcttagaaaccctacctgaactgaacacctcttttggcattttaaaagtgctgcaaaggaaacaagcatcctcttgcttttgtatctttagtatgttgtcggcatatgtacgctattatgtccttttttggttaaatatctattattcatgggtttgctgttcacatgaatcgcatatagctatcacctttgctgcattcaggttgatgctatgctccaagaattagaaaaggagattgatgatgtggatgcacaaattggaaatcgttggcaactgcttgataaggaccatgatggcaaagtgacccctgaagaggtggcggcggcgacagcttatctcaaggacaccatagggaaagaaggcgtgcaagagctcatcagcaacctttctaaagacacagaaggaaaaaatccttgttgaagatattgtgaagctagcatcccaaatagagaacaatgaagaggaagaggaagcacggtagatgggagagtatatggaaacatcacactcgttcagcagtcaaaactcatgtattgaaaggcaatacatccatttcttgtgtctcttgactgactttgatagtgacttccaattagcaaggtagattttctgtagaaaggctcatgctgacatgcatttagttagccgtcgtgttgtgatttggtaggtaaattgcaaccaaaatttagaccggttgcatggacgtggataatacagatcaattgtatttgttatgctactatgcaatcccgaaatattggatctgtttcaaattctcaagtaatcattgatggatgctatttattgaccataaagcttacgaaatcat

SEQ ID NO: 205532 - DNA, 675 bp, Zea Mays
atggccgaggagatccaccagaaccaggaggaggaggaggaggaggaggttgtggctgcgtccaccgccaagcgcagacgcaaggcggcgtcttccgggaagaagcccaagccgacgcccaagaaggctaaaccggccgtcgacggcggcccagggatgtgcccccgcgccattgcccccggcctcgcgttgtccgcgtcgctcacgaagtcgcccccagcccctgcgtcagaaattataatttgggtcagagaaatacagttcattcttataagtcccacaatctacatgttcattctgttaagcccctcgactctcgatggcgatggtgagcaggctgctgccacgctgaggagccaatgctccccgcagcacccgcggtcctggaaggtgcaacaaataactgttcaggcacctttgaaggatgcagagtcccagaaagatgttgggaagggtgataaatcaggggataaaggaactgctgagaagtttgcaatatatcagaagcatcgttcttcgttggcagacattgttcagttcaggaggccagctgctccaacttccagtgtgaatgctgatattgtgggaacatccactctgcagtctgcatctctaccgaaacaagaatcctcaacagctacatccaagagctatactttcagagaagggtgcgtt

SEQ ID NO: 205533 - DNA, 2389 bp, Zea Mays
ggctaacagttgtatgatcgtgtcaaccatgactcggcgaggacgtgcacttgactccctctggcggttttttttgtttagccctcgttcaaaaaccaaatgttctccctgctccaccccgttctcacgccgccgccgcgtgctagccggaaccctaggaccctgcggccgtggtaggaagcgctgccgcagccatgacagggacaacttggataattgacagccaaagatttgccaccaaaataaaaaatgcttctgggtctttagatccaagtaaacagaaatggatcggcaacccaagtaaagagtgcccaaagtgcagtcatgtgattgataacagtgatgttgttcaccagtggcccggtttgcctaaaggtgtaaaatttgatccttctgaccaggaattaatctggcacttaatggcaaaacatggaaaatctggaataaaacctcatccgttcattgatgaattcattccaacagttgaggaagatgaaggcatctgttacactcatccacaaaaacttccaggtgttaaacaaaatggaagtgtatcacatttcttccacagaacatttaaggcttacaacactgggactaggaagcgtcgaaggataaacactgacgatgctgatgtccgttggcacaagacaggcaagacaaagccagtactagttgatggaaaacaccttggttgtaagaaaataatggtgctttatataagcccgttgaagggtggaaaggctgagaagaccaattgggtgatccaccagtaccacctaggcactggagaggatgagagagatggtgaatatgttgtctccaaactattttttcagcaacagtttaaacctggggacaagaatgctcaagagctaactacatccgatgatctggaatcaatggctgctgaatcaaatctcccagattttactacattgcccactgacaaacatgttggtacagtccaagaagttgttcataatcctgagcataatctttaccaggttgttcaccagtggcccggtttgcctaaaggtgtaaaatttgatccttctgaccaggaattaatctggcacttaatggcaaaacatggaaaatctggaataaaacctcatccgttcattgatgaattcattccaacagttgaggaagatgaaggcatctgttacactcatccacaaaaacttccaggtgttaaacaaaatggaagtgtatcacatttcttccacagaacatttaaggcttacaacactgggactaggaagcgtcgaaggataaacactgacgatgctgatgtccgttggcacaagacaggcaagacaaagccagtactagttgatggaaaacaccttggttgtaagaaaataatggtgctttatataagcccgttgaagggtggaaaggctgagaagaccaattgggtgatccaccagtaccacctaggcactggagaggatgagagagatggtgaatatgttgtctccaaactattttttcagcaacagtttaaacctggggacaagaatgctcaagagctaactacatccgatgatctggaatcaatggctgctgaatcaaatctcccagattttactacattgcccactgacaaacatgttggtacagtccaagaagttgttcataatcctgagcataatctttaccagcttaatagaaactgtgaaataagcattgaagagactgttgtcctcccaccctctgtaaaaacaacaaaggacggagataatctccaatcacaagatcagaagttgtgggaaggcgattcccagtttgaattgttagactctcagcagctggcagaaggactcgctctctgtgacgagttcctcctgagtcagtctcagacctcttgtggaggtggagatgaacctagagagaccaaaccctgcctggctgcttatgcccatctgtcagcagaggacttcaagaaggatttagagtgccagcggttggagcccacagataacacaaaccttgagcttgacaacactgatgagtttcgactcagccaaattgaattttcacaggatagctttatgacatgggcagctgaaaagattactgacgactgacgctgctctagtgcactctcggcaccattttggtacatgaagaaacaactgatctgtttttttgtgggacggcagtgaagtctgcaacaacagtggtctcgcttttgctttgagtagctctggtgcacataaaataatttatatgaaatatgaaaggctgaggaatcatgcggtaccaactgtggagtactgttcagtgtgagattggccttggttgcatcagcttgtacattttgtaatgaatatgctcattttagttggcagaccagttgcttgtttggaattggtactga

SEQ ID NO: 205534 - DNA, 3052 bp, Zea Mays
ggctaacagttgtatgatcgtgtcaaccatgactcggcgaggacgtgcacttgactccctctggcggttttttttgtttagccctcgttcaaaaaccaaatgttctccctgctccaccccgttctcacgccgccgccgcgtgctagccggaaccctaggaccctgcggccgtggtaggaagcgctgccgcagccatgacagggacaacttggataattgacagccaaagatttgccaccaaaataaaaaatgcttctgggtctttagatccaagtaaacagaaatggatcggcaacccaagtaaagagtgcccaaagtgcagtcatgtgattgataacagtgatgttgttcaccagtggcccggtttgcctaaaggtgtaaaatttgatccttctgaccaggaattaatctggcacttaatggcaaaacatggaaaatctggaataaaacctcatccgttcattgatgaattcattccaacagttgaggaagatgaaggcatctgttacactcatccacaaaaacttccaggtgttaaacaaaatggaagtgtatcacatttcttccacagaacatttaaggcttacaacactgggactaggaagcgtcgaaggataaacactgacgatgctgatgtccgttggcacaagacaggcaagacaaagccagtactagttgatggaaaacaccttggttgtaagaaaataatggtgctttatataagcccgttgaagggtggaaaggctgagaagaccaattgggtgatccaccagtaccacctaggcactggagaggatgagagagatggtgaatatgttgtctccaaactattttttcagcaacagtttaaacctggggacaagaatgctcaagagctaactacatccgatgatctggaatcaatggctgctgaatcaaatctcccagattttactacattgcccactgacaaacatgttggtacagtccaagaagttgttcataatcctgagcataatctttaccaggttgttcaccagtggcccggtttgcctaaaggtgtaaaatttgatccttctgaccaggaattaatctggcacttaatggcaaaacatggaaaatctggaataaaacctcatccgttcattgatgaattcattccaacagttgaggaagatgaaggcatctgttacactcatccacagaaacttccaggtgttaaacaaaatggaagtgtatcacatttcttccacagaacatttaaggcttacaacactgggactaggaagcgtcgaaggataaacactgacgatgctgatgtccgttggcacaagacaggcaagacaaagccagtactagttgatggaaaacaccttggttgtaagaaaataatggtgctttatataagcccgttgaagggtggaaaggctgagaagaccaattgggtgatccaccagtaccacctaggcgctggagaggatgagagagatggtgaatatgttgtctccaaactattttttcagcaacagtttaaacctggggacaagaatgctcaagagctaactacatccgatgatctggaatcaatggctgctgaatcaaatctcccagattttactacattgcccactgacaaacatgttggtacagtccaagaagttgttcataatcctgagcataatctttaccaggttgttcaccagtggcccggtttgcctaaaggtgtaaaatttgatccttctgaccaggaattaatctggcacttaatggcaaaacatggaaaatctggaataaaacctcatccgttcattgatgaattcattccaacagttgaggaagatgaaggcatctgttacactcatccacaaaaacttccaggtgttaaacaaaatggaagtgtatcacatttcttccacagaacatttaaggcttacaacactgggactaggaagcgtcgaaggataaacactgacgatgctgatgtccgttggcacaagacaggcaagacaaagccagtactagttgatggaaaacaccttggttgtaagaaaataatggtgctttatataagcccgttgaagggtggaaaggctgagaagaccaattgggtgatccaccagtaccacctaggcactggagaggatgagagagatggtgaatatgttgtctccaaactattttttcagcaacagtttaaacctggggacaagaatgctcaagagctaactacatccgatgatctggaatcaatggctgctgaatcaaatctcccagattttactacattgcccactgacaaacatgttggtacagtccaagaagttgttcataatcctgagcataatctttaccagcttaatagaaactgtgaaataagcattgaagagactgttgtcctcccaccctctgtaaaaacaacaaaggacggagataatctccaatcacaagatcagaagttgtgggaaggcgattcccagtttgaattgttagactctcagcagctggcagaaggactcgctctctgtgacgagttcctcctgagtcagtctcagacctcttgtggaggtggagatgaacctagagagaccaaaccctgcctggctgcttatgcccatctgtcagcagaggacttcaagaaggatttagagtgccagcggttggagcccacagataacacaaaccttgagcttgacaacactgatgagtttcgactcagccaaattgaattttcacaggatagctttatgacatgggcagctgaaaagattactgacgactgacgctgctctagtgcactctcggcaccattttggtacatgaagaaacaactgatctgtttttttgtgggacggcagtgaagtctgcaacaacagtggtctcgcttttgctttgagtagctctggtgcacataaaataatttatatgaaatatgaaaggctgaggaatcatgcggtaccaactgtggagtactgttcagtgtgagattggccttggttgcatcagcttgtacattttgtaatgaatatgctcattttagttggcagaccagttgcttgtttggaattggtactga

SEQ ID NO: 205535 - DNA, 2054 bp, Zea Mays
atgtctcaggttgttcaccagtggcccggtttgcctaaaggtgtaaaatttgatccttctgaccaggaattaatctggcacttaatggcaaaacatggaaaatctggaataaaacctcatccgttcattgatgaattcattccaacagttgaggaagatgaaggcatctgttacactcatccacagaaacttccaggtgttaaacaaaatggaagtgtatcacatttcttccacagaacatttaaggcttacaacactgggactaggaagcgtcgaaggataaacactgacgatgctgatgtccgttggcacaagacaggcaagacaaagccagtactagttgatggaaaacaccttggttgtaagaaaataatggtgctttatataagcccgttgaagggtggaaaggctgagaagaccaattgggtgatccaccagtaccacctaggcgctggagaggatgagagagatggtgaatatgttgtctccaaactattttttcagcaacagtttaaacctggggacaagaatgctcaagagctaactacatccgatgatctggaatcaatggctgctgaatcaaatctcccagattttactacattgcccactgacaaacatgttggtacagtccaagaagttgttcataatcctgagcataatctttaccaggttgttcaccagtggcccggtttgcctaaaggtgtaaaatttgatccttctgaccaggaattaatctggcacttaatggcaaaacatggaaaatctggaataaaacctcatccgttcattgatgaattcattccaacagttgaggaagatgaaggcatctgttacactcatccacaaaaacttccaggtgttaaacaaaatggaagtgtatcacatttcttccacagaacatttaaggcttacaacactgggactaggaagcgtcgaaggataaacactgacgatgctgatgtccgttggcacaagacaggcaagacaaagccagtactagttgatggaaaacaccttggttgtaagaaaataatggtgctttatataagcccgttgaagggtggaaaggctgagaagaccaattgggtgatccaccagtaccacctaggcactggagaggatgagagagatggtgaatatgttgtctccaaactattttttcagcaacagtttaaacctggggacaagaatgctcaagagctaactacatccgatgatctggaatcaatggctgctgaatcaaatctcccagattttactacattgcccactgacaaacatgttggtacagtccaagaagttgttcataatcctgagcataatctttaccagcttaatagaaactgtgaaataagcattgaagagactgttgtcctcccaccctctgtaaaaacaacaaaggacggagataatctccaatcacaagatcagaagttgtgggaaggcgattcccagtttgaattgttagactctcagcagctggcagaaggactcgctctctgtgacgagttcctcctgagtcagtctcagacctcttgtggaggtggagatgaacctagagagaccaaaccctgcctggctgcttatgcccatctgtcagcagaggacttcaagaaggatttagagtgccagcggttggagcccacagataacacaaaccttgagcttgacaacactgatgagtttcgactcagccaaattgaattttcacaggatagctttatgacatgggcagctgaaaagattactgacgactgacgctgctctagtgcactctcggcaccattttggtacatgaagaaacaactgatctgtttttttgtgggacggcagtgaagtctgcaacaacagtggtctcgcttttgctttgagtagctctggtgcacataaaataatttatatgaaatatgaaaggctgaggaatcatgcggtaccaactgtggagtactgttcagtgtgagattggccttggttgcatcagcttgtacattttgtaatgaatatgctcattttagttggcagaccagttgcttgtttggaattggtactga

SEQ ID NO: 205536 - DNA, 2263 bp, Zea Mays
attgtcattgtgtgatacctgctaccaccggccaccagctctataaattggtgcaactattggctgcccccatcatatcgatcagctcttgcaaccttatctccattgcattgcattgcattagtagagggagatccatggccagagaaatggagaaggcaaagaaggccgcatcttcccctaagagctcaacaattagtactggtcccaagagcccggtgaggaatggaggaggatcgtctccccctcataagaaaaacactactactaccgaggcacgtggacggaaacatgagcagcaaaacgttcgaaaaggaggagacacgttgtctcatgacgagagcaaaccacgccgttcctcatcaactgcggcacaaacctcacccaagagatcaccgagacacgaacaacccctgagctacaacaggctccacactgaggagagagcaataaggcgagctggctacaattatcaggttgcaagcaagataaatacccaggaaatcattcgcagatttgaagagaagcttgcacagttgatggaggagcgcgagataaagctgatgaggaaggatatggttcccaaggcccaactgatgccagcatttgacaagccattccacccacaaaggcatgcaaatcccatctctctctctctccctctgaatatctctctctatatacactgtatattgcatatatatggtatatatgaaacgattcaaatcagtcagttattgttgcatccaattattagcgcctatatatttaatactaagggtaaaaatgagtacaccagcaaaatcgagtgcaccaccataaaatacccatttaacttattggattattcaggtcgacgaggcctctgacggtgccaaaggagccgagtttcctgaggctgaaatgctgcatcggtggggagttccatcgccatttttgctacaatggagccaacaacaaggccatcaagtcgtagtccatacataatacatgcatgcagagagatatacacacatgtgcctccctacactacagtaaccggaaacaagccgagtgtctgaagctacaataccgatcagcattctttttgccgccgccgttgcatacgtttccaacagaactactgtataacccacgcaatccatgcatatatacatagaagttgcacatgtacgcacaaatttttcacgtacgtagcacacacagatgtggttaatcgcatgctgatgatgtaattaaatttcgcctgccgttcccccacttctttttctttgtcttttacattttccatccctctaggttaagttctcttttcctcatttagctagcttgttccatgcatgtatatttttgctggcataaataaaaagctttcatatatatatatatatatatatatatatatatatgactaggtatgtgcccgtacgttgcaatggaagtaaaaaaagttagtataaaacataaatacagaacaacaaacatcactataatataaaaaaaataaaaaataaacaacaataaatatgtcgtgaattgtaatcaacatctcatgctggtacacacagtcatcaaagtggagttgaatatcccgaattgcttggtttactcggtccatcacagaagggatcatcagctactgccaatataatgaacttcaaaatcattagaaaattttgcctcgccacttggtccgtcaacatgccctcctgtgcctggttccccccatcaatccccctaagaatcaaaacccaatatgtcaggcacaaaggaactttttctttacaagagattagacaagagagaagtatgcataatgattgcagaaacgtctaaatctatactacctattaagactctaaggggtaggctgcctctgacatgttctgccttccagcgatctggaccgtccaatacgccataaagtccctctgtcgtccgatgtgtgcgccctcttccccgatgcacacctgctcgcgatccctgttttgcctcccctattcggatccaaaaccctaagcggcggcggcgcggtgcccgcagcctggatcccaagtcctgctccccctgtcaagcagtcgttcctccactatgcttacctatcccacgccgcgtcagcctccttgtccgccctcccgctcccccggggaccgttggtcgtcgctttccaggggcctcgacgtgcccaacctgacgaagcgatgcgggaggttcgtctctaccacgccctgccccaggcgcttcgacctccgccttcacatcc

SEQ ID NO: 205537 - DNA, 2750 bp, Zea Mays
aatcggtcgcagaatggcgcagagcaactgggaagcggataagatgctcgacgtgtatatctatgactacctgctgaagaggaacctgcagacgacggccaaggctttcatgaccgagggaaaggttgctgctgatccagttgcaattgatgctcctggagggtttctgtttgagtggtggtctgtcttttgggatatattcatcgcaaggacaaatgaaaagcattctgaagttgcagcggcatatctagaggcacagcaaataaaagcaagagagcaccagcagcagatgcagatgcagcaattgcaacttatgcatcaaagacatgctcaacttcagcgaactaacgcgaatcatccttcacttaatggtccaataaatgctttaaattctgagggcattttggggccatcaacagctagtgtcttagctgccaagatgtatgaagagcgattgaagcacccacattcaatggagtctgagggatcacaacttattgaagctagtagaatggctcttctcaagtcagcaacaaaccatgcagggcaattagttccagggactcctggaaatgtgtctacaactctgcagcaaatccaggcacggaatcagcaaacgattgatattaagagtgaaggtaacatgggagtaccccagagatctttacccatggatccatcatctttatacggtcaaggattaattcaacctaaacctggattgagcggtgcagggctgaaccaaggtgtaagcggtttaccactgaagggctggccattaactggaattgaccagttaaggccgaatttgggtgctcaaatgcagaagccatttctttcaacacagtcacagttccaacttatgtccccacagcagcaacaacaatacttagcacaggcccaagcacaagggaaccttggaaactcaactaattatggggatattgatccccgcagacttacagcattgaccaggggtagtttgaatggtaaagatagtcagcctgcaggaacggatggttgtattagttcccctatgcaatccagttcacccaaagtcagaccagaccaagagtatctcatgaagatgcagcagacatcttcccagcaaccccaggaacagcttcagcagcagcagcagaaccaacagcagcaacagagccaacaacaaatgcaacagaacaatagaaaaagaaagcagcctacttcttcaggaccagcaaatagtaccggtacaggaaacactgtgggtcctgcaaactccccaccatctacaccatccacacatactcctggggatggacttggaatgggtggtaatatgcgccacgttccaaagaacttaatgatttatggtgcggatggaactggacttgcctcctcttcaaatcaaatggatgacctggagcagtttggtgatgtgggctctttggacgataatgttgaatccttcttatccaatgatgatggagatcccagggatatttttgctgcactcaaaagaagtcctgcagagcctagcccagccgtttcaaaaggttttactttcagtgaagtcaactgttggcgcacaagcaacagcaaaattgtttgctgccacttctcttcagatggcaagattttggctagtgcaggacatgaaaagaaggctgtactttggaacatggaaaattttcagacacagtatacaccagaagagcatgcccttattatcactgatgtccgtttcaggcctaactctagtcagctggcaacatcttcttttgatagaactattaaattatggaatgctgccgatcctggattctctttgcatacattcactgggcacaacggccaggtcacatcattagattttcatccaaagaaaacagaccttctatgctcttgtgatggcagtggtgaaatccggtactggaatgtgacccagtttgcatgcttgcgtgccataaagggtggtagtgcccaagtccggtttcagcctcatgttggacagtttttagccgcagctgctgaaaacgtggtttccatatttgacattgagacacatgggaaaaaatacactctacagggccataacactgatgtgcagtcagtgtgctgggacaacaatggggaatatattgcatctgtcagtcaggacctagttaaggtttggtcaatgtcaactggggattgcatttatgagcttagttccaatggaaacaagttccattcttgcgtgttccacccgagctattccaatctcttggttattggaggctaccagtctctcgaggtttggaacatggtgaaaaaccagagcctaaccgtacaagctcatgaaggtctaattgcggcgctggcgcagtcaccagtcacagggatgatagcttctgctagccatgacaactctgtcaaggtgtggaaataacagtaacaacgattatgatgcatctaggtagttttttttccagggcaagtgaaatttctcctgctgaggcataaaataaggaagagtagtaaattagatggttgccggtcgcggttcagctgtccaagagcagtgagtttgttgatgggttgtattgtatttatgctgataggctgtttgtgtagctcagaaacaaaaaagaatacattggctgaaaaggtgtccgcctgttttattttttgtttctgccgtatcatatgtaaccatttaacgttccctgttttttaattggaactcgctgcgattggcatctggcagaaaaaaaaccagagatact

SEQ ID NO: 205538 - DNA, 2640 bp, Zea Mays
catcctttctcttagcaggaggtgaggaaaggggacggaagcacgcagaccgggtcggatccaccggcccgcggaacggatcgaggccaccggcatcctcggctcgcgtcgcgtcgcggcgccgagctcgaaatccccggatcggtgcagctgccccctgccgccgcccgataacgcggcgggagggtggtggcctgtcgatctcgcggcgggagctggttaactacctgccaatttgtggatttgtgtgcgtgcttgattttggtgcgtgtgtggtggtgttgagtcgccggcgtggggtgtcggagctagggtttgggcgttcaggatgacgcgccgggtgcggcggcggacatgcagggaacgggagggtaaggtggtgcggggcgcatcgcgtgttgtttcggctgggccggaaggcgaggaggatgcggcggcggtggaggtggactggagggcgctgccggacgacacggtgctgcagctctttgcgcggctgaactaccgcgaccgcgccagcatggcgtcagcgtgccgggcttggcgagcgctgggctcgtcaccctgcttgtggaggacgctcgacctccgcgcacatcgctatgacagggaggtggcgtcgtcgcttgcctcgcggtgcgggagcctgcgtcggatacgcttgcgcggccacgaggcggcagaggccgtcctgggcctccgtgcgcgtggtcttcgcgaggtggtggccgatggctgccgcggcctcacagatgccacgctcgctgtcctcgccgcgcggcacgaggacctccagagcctccagatcgggcccgatcctctcgagcgcatctctagcgacgccctccgccacgtcgcgctttgttgctcgcagctctgccgccttcgcctctcgggtctccgtgaagttgacgcggaggccgtcggagcgctcgcccggtgctgccccctcctcgaggatgtggctttcctcgattgtggcaccgtggatgaggccgcccttgctggtatccactctgtccgattcctctctgtagcaggatgccggaacctgaaatgggctactgcatccacctgctggacccagcttccctccctcattgcccttgacgtctcccgcactgatgttccgccaagtgctgtttcacgcctcatttcccatgccaaaaccctcaagctaatatgcacgctgaactgcatttctgttgaggaggaacagcttcacaatcctgctgtatttagtaactctaagggcaaggtcgtgctaacgattaacagcgatatcttcaaatcttttgagaccatgtttccagttgtggatgtgaaagagcatgagtttttcaatcaatgtaactggagtcacaaagacaagatacctggtgatacgatgacatggctcgaatggatcctgtcacagtcacttctccgaattgcagagtccaacccacaaggcatggatggtttctggctgcagaagggcactacactgctgcttagactgttgaagagtttacaggaggatgtgcaggagcgggcagctacgtcgcttgctacgtttgtagttatggatgatgagagtgcaaatgtggatcctgcaaggtcggaggcagtgatgcagaatgggggcattcgaatgttgctggaccttgcaaggtgctcaagggagagcgcacaatctgaagcagcaaaagctattgccaacttgtcagtgaataccaaggttgccaaggcagttgcagatgaaggcggcattacaatactcattaatttagccaagtcgatgaataggcttgttgccgaagaagctgctggtggcctttggaatctctctgtaggcgaggaccacaaggcggctattgcagtatctggtggcattaaggccctggtcgatctaatatttcgttggcctgctggaactgatggagttcttgaacgtgctgctggcgcgcttgcaaacctggctgctgatgacaagtgtagcttggaagttgcaaaggctggtggtgtccatgctttggttacacttgctagatcatgtaaacttgatggtgtcctagaacaggctgcaagaggtctggctaacttagctgcacatggggacaacaatgacaacaatgctgctgtaggtcaggaagcaggggctctggaggcactggtgcaactaacaagttctcaaaacgagggtgtaagacaagaagctgctggtgctttgtggaacctgtcatttgatgacagaaaccgtgaagccattgctgcagtgggtggcgttgaagctttggttgccctagtgcaacaatgtttgaatgcttcagaaggtcttcaggagagagctgctggtgcattgtggggattatctgtttcagaagctaatagcattgcaattgggcagggtggtggggttgcaccattgctcacattggcacgctcagaggttgaagatgttcacgagacagctgcaggggcactatggaatcttgcattttattctggtaatgctctccgcatagtcgaagaaggcggggttcctgttcttgtaaaaatttgctcatcatcacggtccaagatggcacgtttcatgtctgcactagcactagcatatatgtttgacggaagcaactctatttggaagacttgggctcc

SEQ ID NO: 205539 - DNA, 1992 bp, Zea Mays
gtcgtcctgccagtttccgccgaatcgctaggccaccgccaaatcacccccggctaccctctcgcctcaacggccccagcgtggtctggtctccctcctcctctcaatcgctgcaggaagccaagcgtaccagcaagcgccaatggagaggccttggctgatcctaggccgaatactctacgtcaacccgccccgcgacgacgacgacatgctcgaggtcgaggacgcggaggagcacgccgtggtcggcgaagctcaagccgaggaggacgcgcaggcgcaggaggagcagcacgccgcggccgtggacgcggtggtggaggcgcatgatgatcagcaagccgaggtcggggaaggcggagccgaagccgaagccgaagaggaggaacagcaggctcagctggaggagagcatcttgaacgtgaacacggacgcagcagcgtcggaggcggcgcacgcggcgcacggcgcggcggaacccgacttcaccatatgggtcgcgccaccgccgtggctaacggacctcgtcgcgggccccggttcccatcccgaccccgcgagacccgacatgtacccctacatcatcgcctccggacgcttctgcctcctcgtccacttctccatcgctcccttctacggcaccaacttcgagaaggaacccaaccacagcaacctcgtggtggtgcgccacttccgcaggtcagacaatggccagatcgaggcgcgcgctgtgcacgtacccgaccgccccgaggacaacgtcaatatacccgccctagccaatatcgagagcgtcggcttaatatgcaaccacgaaacaggtcactacctgattgccgagctcgttgttcccacagataatcaagacgaatccagcgtcatctacataagaacggaggatggcgtctggtactcgaactactttgcttaccccttctggtgggagagccgccggcattgggtaccccacggctctgtcaccataggcaacgtggtcttctggttcgacctctcgtgggggatcatcttctgcgacgacctcacccagccgcacgaggagcaaatattgtccttcttccgcctcccgcgtggttgcgttctccgcgacggacacgcgccggacctccactacagccgctgcgtcgctgtaagcgagaacgtgttgcggtacgtgcagatcatccgcaaacacgaccaagcagcgacggtgcacatgtggtatcgaaacccggagcgatggatcaccaactataatgaaagcttcgacgacatctgggacgacgaaagctacatccaaaccgggctgccacggaaatctcccgggctcgtgggcgtctccccggtagactccaatgtggtctacttcaccctggaccagcgattgttcggagtcgatgtgcccgagcaccgggtggtggactgtgcggaaagtgttgagccgctgaacaggacagagatgctggacgattcggtctcaagtcgctccttgatcacttggaacctggacgcggatggagctgcgtggcaaacaatctctatggatttcatttcaggtcttcccaaatttggccatgctaacaacattctgcaataaacgtcggacatcagccggatgaaccttcagaccatgcggattcgacaagcgagggtggaacgatggatgaaggagagctagatgatccaagtgactccgagatagtggacatgaccgagcactagtcgttcttaggcatgggaaactcggtcaggacgactaaaaagaagggacatgaactgctccattttttgtttgtgcatgcttttcttgtggagatgttagagaagctgaggctccacgtgatggactaattgaaacattttgtctactataatcttttttctttcaagaatgcatccgttcacacgtttcgttaaagaggaaagatcgtttacatcggatcatactggcgacataactagctttgttagtaagtcgtcgaacacgcaaagcag

SEQ ID NO: 205540 - DNA, 1005 bp, Zea Mays
tttaatagatatatatatagttcggtgctggctgaagaaacagaaggatgtcatggcccctgctgttattgcaaagggggaggacgtcatgtggacttctggtctaatctttggaaaaggagaggggattgtggggcttgaaacaaatttagggacacttcatattcaattgctgcctggttgcgcgccccgttcagtggaccacttcatcgagctcctgggcttgcgcaactgtgctggatgcagattttatcgtgcagaaggacgtgggaacgtctgggatgcaaaaggcgaccatgaaaaaaatgttgcatttggccccccatatgcattgcttcaaggaacactggaagttgatggtgtgcccttcaagaagataccaagagaagcatgtccggcggtgaaaagagggtccgttgcctgggtagggtcagggccagagttcctgatcagcttagcggaccacgaggagtggagggacgcctacaccgtgttcgggaatgtgcttcccatggacatggcgatcgctgaggagatgacactgctgccgacaagcacagacgtgtggagcaacgtgaaagtgaaggtgctgaaagatcctgtctacttcaaggtcaagagaagcagcaatgctagcgctgtctaggtgatgggcatatttcttcttgcttgtttggatggaaggctgtggcaacaccggcaaatggttgtttgaccatgaaaacctgtgttataactcacaggagacgatggtctcgcttcattgtgcaaagaaaggggagagttctaatacaacagtaatatactagcacagtagtaatatactagtacaatactcctagtacaaaggccggagattctctcttttttcctcgtgtagaacacgtgactcaacgagttcttcgtgtcttttagtttgcctcctgcgttttggcccgttaggcatctccagcatatcctatatcatatttctattttatcatctattttaaacttcactctgca

SEQ ID NO: 205541 - DNA, 2498 bp, Zea Mays
ggaggccctacaggtactcgacatcgtgctccgcgagctcgccaaccagaggtacgtgtccatagggcggtccttctactcgccggacatcaggaagccgcagcggctcggcgacggcctgcagtcgtggcgtgggttctaccagagcatccggccgacccagatgggattgtcgcttaacatcgacatgtcgtccacggcatttattgaacccctgccggtgatcgagttcgtggcccagatattaggaaaggatgtcatatcaaggccattgtccgatgctaaccgaatcaagatcaagaaggcattgcggggtgtaaaagttgaggtcactcaccgggggaatgtacggcgcaagtatcgcatttcaggcctcacaacacagccaactcatgaattgattttcccgattgatgaacaaatgaatatgaaatctgtcgtggaatacttcaaggaaatgtatggtttcaccattcagcatcctcatcttccctgccttcaggttggaaaccaaaagaaggcaaactatctacccatggaggcctgcaagatcattgaaggccagagatacacaaagaggctgaatgaaaaacagatcacatcgctgctaaaggttacatgccaaaggcctagagagcaagagatggatattctacagacagttcatcaaaatgattatgagcaagatccatatgcgaaggaatttgggatcaacattagtgagaagctaacctctgttgaagcccgagtccttcctgcaccttggttgaagtatcatgacactggaaaagagaaagagtgcttaccacaggttggtcagtggaacatggtaaacaagaaagtgataaatggatgcaaggtgagccattgggcatgtataaacttctcaaggagtgttccagaaaccacagctcggggattttgccaggaattggcacaaatgtgtcaaatttcgggcatggaatttaacagtgagcctgtgatgccaatatattcagctagaccagatcaagttgtgaaggcacttaaaaacgtgtataatattgcattgaacaaacttaagggtaaagatcttgaacttcttttggctatcctccctgacaacaatgggcagttatatggtgacatcaaacgtatttgtgaaactgatttggggttgatatcacaatgttgcttaaccaagcatgtttttaagatcagcaagcagtacttggcaaatgtctcactgaaaattaatgttaagatgggaggaagaaacactgtgctcctggacgcaataagttggaggattccgttggtcagtgacatcccaactattatatttggtgcagatgtaacacatcctgaaaccggggaggactcaagtccatcgattgctgccgttgttgcttctcaagattggccagaagttacaaagtatgctggattggtttgtgctcaggcacaccggcaagagctcattcaagacctttacaaaacatggcacgatcctcagagaggcactgtaacaggcggcatgatcagggagctcttaatatccttcaggaaggccactggacagaagccattgagaataatattctacagggacggtgttagtgaaggtcagttctatcaagttctcctttacgagttagatgccatccggaaggcatgtgcatccctagaaccaaattaccagcctcctgtaacatttgtggtggttcaaaaacgtcatcatacaagactatttgcaaataatcacaaagacagaagtagcatggacaagagtggaaatattttgccaggaaccgttgttgattctaagatatgccacccaacggagtttgatttctacctctgtagtcatgctggaatccagggaacgagtaggcctgctcactaccatgtcctctgggatgagaacaatttcacagcagacgaaatgcagacattgacaaacaacctttgctacacattgatgtatactgatgcagttatgcccggtgcacacgctcggtttctgttgtccctcctgcatactacgcacacttggcagcattccgggctcggttctacatggaaccagagatgttggacaaccagacgtccaagacctccaatggcacgagcggagtctcggtgaagcccctgcctgctgtgaaggagaaggtgaaaaggatgatgttctactgctgacaaggagaccacttaaccactcacatgctgtagctaacttgctagagtttagtaaggattagatagctttctcaaggagtgatggatcaatctgatctgttaacgacctctgtaaagtactcggaaatggctgtataatagttgttgtttcaaatgtgaaagcatctaggtccttagttagatttcagtgatcagtgatcaatgacgatactagattattgtgactaatgtatgctagattattatgattaatgtatgttttgcagaaacaatggattttgtgccgccattaatagtattcaattttggttttcaaagta

SEQ ID NO: 205542 - DNA, 760 bp, Zea Mays
cacgctctacctcgatgttgctgtggatcagatctgcatcaactcttcgtcaagccggcaggtctctcggcctagccgaactgtcctacgcgacaggcttcgattctccctctacacaaacaaacggtccatattatttcgaagacttggtcgatatgatgtatgacaaaatttctgaatcttttaatgcctactttgaggataatagtattgaggaggttgctgaacagtttttgatcatacatgaagaatgcctgcaaaacaactattcgtctatagagaagctaaggaattctcctgttccggggaatgctgtttctcaaagtagacagatagtgggcgatgacgacgatgacagtgatagctcagatgacggtgatgacacatcgatggtggctgatgaagaggctgggccagaagagatggcagtggacaggccaaggccccccaagcctactccagacgccgatgggtggactgttgtgcctcctaggcgtggtggtcgcagcaagaaatagagtacatggtagctgctggcttttctcgcggaatgtttgttgagtgctgcggttccatattcacttgtatcgctcgatatttgacccgacatggatgttgtgagtgtgtagtatgtttggtttgccaccgcccaccaatttggtgtaaacaaggtaattattatagatgcatcctgtgatcaggttttgagtgttgcagagtcatcgtttacgtgctgcccgtcccacaaagagcttattct

SEQ ID NO: 205543 - DNA, 3185 bp, Zea Mays
cgtaggcgtaggctgctgatgcgcggacgcgaaccagcccgagcgcccgtctctgattcccttttcttccctttaaaaacacgcaagaacctacccggtgacgctaccaaacgggcggggccgcaccgaccgaacctaaccgagagcacgagcatacccgtcccgactccgactgcagagcatcagccgaggagaaaagtcgggagaaacgcgcgtgacgtctgcccgcgtcgtatgcgccgcgctgccgtcgccgcgacgacgacgacgaccaggatggcagccgaggagatgagacgggcctccgcctcaacggccacggcggagatgccggcgtcgccggcgccggcgcaagcggggtcgaggtgggcgcgggtgtggccgcgcgcgctccggtggatccccacctccacggaccgcatcatcgccgccgagaagcgactcctcacgatagtcaaaactggatatgtccaggaacgagtcaacattggctctgctccacctgggtcaaaagtaagatggtttaggtcagcaagtgatgaaccaaggttcattaatactgtaacatttgatagcaaggagaatgcccccaccctggttatggtccatggctatggagcttcacaggggttcttctttcgaaactttgatgcccttgcaagccgttttagggtgattgccattgatcagcttggctggggtggttcaagcagacctgacttcacatgtaaaagtaccgaagaaactgaggcatggttcatagattctttcgaggagtggcgcaaggccaagaacctcagtaattttatattgcttggtcactcttttggaggatatgttgctgcaaaatatgcgctaaagcaccctgaacacgttcaacagttgattttggttggtcctgctggcttctcatcagaaacagagcatagctctgagtggttaaccaagtttcgagcaacatggaaaggcatgctaatgaatcgtctttgggagtccaattttactccccaaagggttattaggtagtctaagcttattgcacttatgctttttttcgaagcattacatattacaaattaaaatttcatgtgactttttatttgttttttgccctccatttccaaattgtaattcgttttgctttgtcctaagttaaactttaatatctttgtccaaatttatagaaaaatacataaacatatttttatagcccatttattttgtattgtaccctctctgttccaaatcgtaagatttttttttggtacattatttttactgtgtatctagacatagtgtatatataagtgcgtagcaaaacgtcttatgatttggaatggatggataagtacatgttaatattgtgtgttttttttctggggattcctgcatagacaatattaagatgacttacaatttggaactgagggggtatttggaatataaataggatggcattgcaacagaatctattattcggatttaaatgttggaacaacctgcccttaaggttagagagtagcatggttagtcttttcaattggtaaacgtgtggtgtcagtcgtgacctccacatcagacaaagtttacatggctttacatggaaaacttcaaagaaaaacttgaagttgcgttcgagttggaaacacctgcccagttcgagctgagtccattaatctccattaataaaagttgcattcaaatgtgtgaaagaaaccgaagtaacacctacaccagtcaggctcaaattaacatttctgagcatttccatctgcattactacacacttcagaggccccttgagcatatgcatatcactactgttttgcatccaagacctgagcagcacaagaaggatgctcacaggggcctgcgcagaggttatggaggagtgtttgtcacttctcaagaagactaagtgatgctaaactcatgctgtgtcatgtcacaactttgaagctgcctaggtgcctaccaattcccgctgcatattggaatttaaaataagaactgcataagttgtcattttttattttatttattccttgtagtcaacatgcatagacatcttatgttctgacatggcagtcacatatgcgactgctggctgctgcaaataatggccacttggccaggttaaaaatgggcatatccgcatatggcatgggctactttaacagagtagaggggccagccatattcagatcatactagaggggctcaattgctccaatgggaaaattatgtgaggctttgttgcaattttgctgcaaaaacaaagaacaatgctcttatatttttttgggtaggtgctcctacattttgtccttatatttgtttgtttgtctcaaacaggggattgggtccttggggtccaggtctagtacagagatataccagtgccaggtttggtacaagttctactggtgaattactaacagatgaagaatcggcattgatgacagattatatgtaccatacgttagctgccaaagctagtggagagctgtgcttgaaatatatattttccttcggggcatttgcaaggaaacctcttctgcagtgcgcgtccgattggaaagtgccgactactttcatatatgggcagcaagattggatgaactaccaaggcgctcagcaagcacggaaggacatgaaagttccttgtgaaataatcagggtgccgcagggtggacattttgtgttcatagacaacccttcagggttccactcggctgtcttctatgcgtgccgtaatcttctatcagtaaatggagaggagggattcacatttcctgatggcctaatatctgcgtgaagtggcatgttcaacaagcttgctcaacaacagtttacataaagcaaagatatacgattgtggaaatcattgcccatttccaccaatttgcttgtatacggattatgctgtgtatatattacataacaaatgtattagtatcatttaatgcacgatttgtgaaagggcctgagtttgtatttagcgaattttaggttggtttttttccctttttcttctttcagtgcgcttgctagtcaatcccatactataagccgtgatcattttttgtttatgtctcataatataaggcacatctcactacacacgtttatcgatgcagtgatatatagggaattaaatacaatttttggtttttaaatcagag

SEQ ID NO: 205544 - DNA, 2797 bp, Zea Mays
cgtaggcgtaggctgctgatgcgcggacgcgaaccagcccgagcgcccgtctctgattcccttttcttccctttaaaaacacgcaagaacctacccggtgacgctaccaaacgggcggggccgcaccgaccgaacctaaccgagagcacgagcatacccgtcccgactccgactgcagagcatcagccgaggagaaaagtcgggagaaacgcgcgtgacgtctgcccgcgtcgtatgcgccgcgctgccgtcgccgcgacgacgacgacgaccaggatggcagccgaggagatgagacgggcctccgcctcaacggccacggcggagatgccggcgtcgccggcgccggcgcaagcggggtcgaggtgggcgcgggtgtggccgcgcgcgctccggtggatccccacctccacggaccgcatcatcgccgccgagaagcgactcctcacgatagtcaaaactggatatgtccaggaacgagtcaacattggctctgctccacctgggtcaaaagtaagatggtttaggtcagcaagtgatgaaccaaggttcattaatactgtaacatttgatagcaaggagaatgcccccaccctggttatggtccatggctatggagcttcacaggggttcttctttcgaaactttgatgcccttgcaagccgttttagggtgattgccattgatcagcttggctggggtggttcaagcagacctgacttcacatgtaaaagtaccgaagaaactgaggcatggttcatagattctttcgaggagtggcgcaaggccaagaacctcagtaattttatattgcttggtcactcttttggaggatatgttgctgcaaaatatgcgctaaagcaccctgaacacgttcaacagttgattttggttggtcctgctggcttctcatcagaaacagagcatagctctgagtggttaaccaagtttcgagcaacatggaaaggcatgctaatgaatcgtctttgggagtccaattttactccccaaagggttattaggtagtctaagcttattgcacttatgctttttttcgaagcattacatattacaaattaaaatttcatgtgactttttatttgttttttgccctccatttccaaattgtaattcgttttgctttgtcctaagttaaactttaatatctttgtccaaatttatagaaaaatacataaacatatttttatagcccatttattttgtattgtaccctctctgttccaaatcgtaagatttttttttggtacattatttttactgtgtatctagacatagtgtatatataagtgcgtagcaaaacgtcttatgatttggaatggatggataagtacatgttaatattgtgtgttttttttctggggattcctgcatagacaatattaagatgacttacaatttggaactgagggggtatttggaatataaataggatggcattgcaacagaatctattattcggatttaaatgttggaacaacctgcccttaaggttagagagtagcatggttagtcttttcaattggtaaacgtgtggtgtcagtcgtgacctccacatcagacaaagtttacatggctttacatggaaaacttcaaagaaaaacttgaagttgcgttcgagttggaaacacctgcccagttcgagctgagtccattaatctccattaataaaagttgcattcaaatgtgtgaaagaaaccgaagtaacacctacaccagtcaggctcaaattaacatttctgagcatttccatctgcattactacacacttcagaggccccttgagcatatgcatatcactactgttttgcatccaagacctgagcagcacaagaaggatgctcacaggggcctgcgcagaggttatggaggagtgtttgtcacttctcaagaagactaagtgatgctaaactcatgctgtgtcatgtcacaactttgaagctgcctaggggattgggtccttggggtccaggtctagtacagagatataccagtgccaggtttggtacaagttctactggtgaattactaacagatgaagaatcggcattgatgacagattatatgtaccatacgttagctgccaaagctagtggagagctgtgcttgaaatatatattttccttcggggcatttgcaaggaaacctcttctgcagtgcgcgtccgattggaaagtgccgactactttcatatatgggcagcaagattggatgaactaccaaggcgctcagcaagcacggaaggacatgaaagttccttgtgaaataatcagggtgccgcagggtggacattttgtgttcatagacaacccttcagggttccactcggctgtcttctatgcgtgccgtaatcttctatcagtaaatggagaggagggattcacatttcctgatggcctaatatctgcgtgaagtggcatgttcaacaagcttgctcaacaacagtttacataaagcaaagatatacgattgtggaaatcattgcccatttccaccaatttgcttgtatacggattatgctgtgtatatattacataacaaatgtattagtatcatttaatgcacgatttgtgaaagggcctgagtttgtatttagcgaattttaggttggtttttttccctttttcttctttcagtgcgcttgctagtcaatcccatactataagccgtgatcattttttgtttatgtctcataatataaggcacatctcactacacacgtttatcgatgcagtgatatatagggaattaaatacaatttttggtttttaaatcagag

SEQ ID NO: 205545 - DNA, 2617 bp, Zea Mays
ctacatagcacattacatgttccattacatggtcattaaattgtaaaaaagttggatgactaaagtctaagttcatgcttcggataagtttatattggatattttatacccacgggttaacgggtatgggtgaaggcggaacattctaatacccgtttatccattgcgtgaagatttttgttcaataagagaccaatgggtagaatatttagcccacatacatatcctaatagaataaatacgcatcggatatcgggtcgcgtgtacccattgccatctctagccgtcgcctattgctggacatccactgcccagtgatgcgggtggccgctcccctcgcgcagccgcacaccgcccggagaaaaggttccaccgtctctaccttgccccgaccggaactggaacccctaaaaatttccctttcgtacctttccccttcctcctcccgtccaccacaccccggctccaccccgtgcaaatccgctggccgcagcaagagaggtcgaggagggaaacagatcgggtggcggcaaccggtagccggttccgctggcacgatgggcggcgaggccgagggcggggagcggcggctggggcgggtcctgagctttgggatcccggacacggcgctggggctagtgatggggtacgtggaggacccttgggaccgcgacgccatctcgctggtgtgccgccactggtgccgcgtcgacgcgctcagccgcaagcacgtcacggtggccatggcctactccacaacacccgagcgcctgttcggccgcttcccgtgcctcgagtcactcaagctcaaagcaaagccccgcgcggccatgttcaacctcatctccgacgactggggcgggtctgcgtcgccgtggattcgacagctctcggccactttccactccctcaagaagctccacctgcgcaggatgatagtatccaatgacgacatcaacacgctcgtccgcgccaaagcccatatgctcgtgtcgctgaagctcgaccgctgctcaggcttctccacgccctccatcgcactcatcgcccgctcttgcaggaaactggaaacacttttcctggaagaaagcatgattgatgagaaagaaaatgatgaatggatccgtgagcttgctacgagcaattctgttcttgagacactgaatttctttcagacagatctcagggcatccccagagtatcttacccttcttgtgcgcaactgtcaaaggctgaaaaccttgaagattagcgagtgtttcatgcctgatctggttagtttgttccgaactgcacaaacactacaagaattcgctggtggttcctttgaagatcagggtcaacctgtggcagaggatcactgtcagatagttcagcgctgccccaatctggaaaccttagaggtgagggatgtcataggggatcgtgggctacaagttgttgcagagacctgcaagaaattgcagaggctcagagtagagagaggagatgatgatcaaggaggtcttgaggatgaacaaggtaggatttcacaggttggggtgatggctatagcccaaggctgccctgagttgacatactgggcaatatatgtatcggacattacaaatgcagctctagaggcggttggtacatgcagcagaaatcttaatgatttccgccttgtccttcttgatagagaagcacatataactgagttgccactggacaatggggttcgtgctttgcttagaggttgcaccaaactcaggaggtttgcattttatgtgagacctggggtcctatctgatgttggtcttggctatgttggagaatttagcaagagcattcgatatatgttgcttggcaatgttggtgaatctgataatggaattatacaattatcaaaaggctgcccaagcttgcaaaaactggagctgaggggttgtttgtttagtgagcatgctttagctatggctgcactagagctcaagtcactgaggtatctgtgggtgcaaggattcaggtcatctccaaccggaactgatcttatggcaatggtacgccccttctggaacattgagtatattcttccagaccaagatgaaccttgcccagagtataagaaacagattctggcatactactcccttgctggaaggaggacagattgccctccatcggtaactccactttacccagcagtttgagcgtagatacttgctttttgctagactgaatctcatggtactaagctccattgctcccacaatctgtgaaatcgatggttcctgttgatggggacatgcagacgttccattgcacataaccccagagctaagctttaagcaggacgacagctcggagctgaggctagctgagaacaatcgtgaatacctgaaggcagcactttgtggatcagattggcctagctgtccagtatggaaatgtaaactttgccattttgaatagttttggagaaacaattttgtaataatttacccctgtttagtgtacattattgattttcgtttatatgatgatgttgtattgctttatttaacatttaagtcaattagttaatctacagtctgacttgctgtgattcgatgaatttatggattttccttgctgctcg

SEQ ID NO: 205546 - DNA, 3165 bp, Zea Mays
gccgcgagtcactttcaccagctctcactcttatccgcctgcgcgcccaccgcgccgcccacccgcgcccaccccagcgccccaaataccgctccaaccctagcctcccgccacgcctttcgatctcgggcggccatgggcaactgctgccgctcgccgaccaccatcgcgtgggaggacgtcagctcctcgcacttccccgcatccaacgcaaagaagaagccgcaccaagcgcggaacggcggcggcggcgacgggcagaagcggctctcggttctggccgggcgacgaggggtgcgaggtcatcgggatcgatgacaagtacgtcctggacagggagctcgaccgcggggagttcggggtgacatacctgtgtatggatcgggacaccaaggagctgctcgcctgcaagtccatctccaagcgcaagctgcggacggccatcgacgtggaggacgtgcgccgggaggtggccatcatgcgccacctgcccaagagcccgagcgtcatgtccctgcgggaggcgtgcggggacgagggcaccgtccacctcgtcatggagctctgcgagggcggcgagctcttggaccgcatcgtcgcgcaggggcactacaccgagtgcgccgccgccaatgtcacccgcaccatcgtcgtggtcgtccagctctgccatcggcatgacatcatccaccgcgacctcaagccggagaacatcctcttcaccaataagaaggagaactcgccactcatggtctctccatcttcttcaagcctagtgagtcacaccaaccgagatcctttcccaatttcggacgattttctgcgcacttccgtgatttctggttttagtgggaggaaatttgacggtagagctcagagtagcaaaatgtacttcttttttcctgcaatccataaaacatgtggttattactagctctgcatcccggaaacaacttggtggttctttcataggcaattggctattactagctgcaagatagtatttggtagtgatctggtagatactgttaatctccttttttttcaggataatatctagtggtactgacgataattttcaggacatcggttcaaccgagctctttcttccctattacagagcattttggtttgatgaagaatgaaaatatattgtgttgggctttgcctggttggtacatcaaagtcttaggatgtttgtggtgtggtacacacttttgggattatgatgaacaattagtggtgcataaggtgtgaaatctgtttagtatcacattcattgttatcgatacattatttctttgatgctggaaggtgaatatgtgacaatgagcacaggttccgctactgtgtagaagttatataacactgaattgttagtattttggaattcagagtgcatgtgatatacattcttacacttgaagaattataattataaattcatgaaacatttaatagtatttactctaggtagagttcccaaatacagcatacgtagttacttgatttgcatcaacttatccagtgagcttagtggttaggatttgtgatattgataagtaagataaagtggtactatagtatgatactgctgtggatgttttcttttgtgacagcgaactctttatagaggattcatgtcaggtgcttcttttcttgcccattctctatgtgcttttggtattggacccccactccccccatccccgtacccacccacacaaaaagagctaactaagaatagcccatgtgccattttgtcatttagatttgcatcttaaatgttgattattttatgaaatactgtgtacacaacacgaggacagtccactctgacttaacttactgagtcacttgagtattcagctcatggagcagatttatatgtcaccgtgcaaactttgttttaaagaaaaatggtcttatgctgctgaaaacttgtcgcttaagttatatgtcgtagaaagaaattggtacactcaaataccatccaaagtctgctcggttatactttattactcacggtaaggtcccatacttggaggagatgagaaagaagaaagttgaaagatgggaccaatttgttgatgtcatagagcaaattaagaaggttgcatctgaaatcaggcctgcagattttgtaccctttagaattcatgtggatcagtctgatcagtctttaagaaagctggaggagctaacgaaagagctgcaatcccttcagaaggagaagagtgatcggctgaagcaagtcatggaacatcttaacactttgcattcgttatgcgaggtgcttggtgtagacttcaaacaaacagtaaatgaggtgcaccctagcctgggtgaggctgatgaatcaaagaacctaagcaactgtacaattgaaagccctgcatcagctacaagcagactgcgtgaattgaaagtccagaggatgcaaaagcttcaagatttggcctctagcatgcttgaactttggaatctcatggatacaccacttgaagaacagcagatgttccagaatgtaacgtgcaatattgctgcttctgaacatgaaataactgagcctaacaccctctctattgacttcctcagctacgtggaatctgaagttttaagactcgagcaacttaaagcgagcaagatgaaagaccttgttataaaaaagaagacagaactggaagagcataggagacgtgctcatttgtttggcgaggaaggctatgcagctgaatttcgcgatgaggctattgaggcagttggatgacacaatcatcaaaaccattgagactgctcccaacaatgaactgaaaaaagcaaaagaaatcattcaacgtattcgccgaagagaactttacaaggatattcatcatcgcacgaaggcgaagcacattgagattgaaatccacttcatccgtaaaaaggttgctttgtggcaccttcgagtgctacatgtcccttctgcacatcagtccatggacatcatgacttagggactgtctgtacagttgtttagtgactttcagtccagtctatgcgtccagttctctccagatgtgaatgcgggacgggtattagagatatgtatagtctagagatatgtatgtacttgtatttcaaggtgtattttgactatacacatgaaagtcaccctttctataa

SEQ ID NO: 205547 - DNA, 874 bp, Zea Mays
atcttttctgtcatctttttattttttttttcttgctccaataatcatctactgctgcagcctgcagctggttggtccgtccgaatccgatagcactactttcctagctagctaggcgatcgatcggtgtttctttgctaccggagtacatacatcgatctctacgtatcgatgtgcacgatccaagagatcccggcgcagcaccgaggggacgcggtgagcagcctggtgtacgaggccaacgcgcgcgtcagggacccggtgtacggctgcgtgggcgccatctcgtcgctgcaggagcaggtggaggcgctgcaggcgcagctggcgctggcgcaggccgagatggtcaggctcaggatgaccaacgactacatcgtgcaccgcctcaaggcggccagcagggccggcggcgggggcagcagctacgccggctcgccctcgtccatgtcctcgcccaagacggcggagccggaggcgcactgcaaggccacgccggagctgctggacatggtcgtggaccagcccggcatggacgacgcccacttctggtcgtcctactagcctagggccgggatggaggccgctgacaaccgagcgcttctcttctgatctattagtcgtgtggtcgatcaggtgctgttttttgagtcacagatggtgtcatcaggtatatggtgtgcgcgcgctgtaacagcgtcacactaggaggaatggaaggcgagcgtacgtagaaggccttcttctcctataccttctaccagtatgtccagggcttgatttttttggctgtccttccatgagaaggtggaacatggttacaggtattggtgtgcatctactgcctagttaaaacaggtgaactctgctgtgg

SEQ ID NO: 205548 - DNA, 1727 bp, Zea Mays
agtgtattgatcatcttggtgaacattgagtaaaccaaaacccaatctaatatacgaggggatttaaagctcttaaacaaactgtcaagctttactataagctggggaaatacaaagaaatgatggatgcatatagagagatgttaacatacataaaatctgcggtcacccggaactacagcgagaaatgtataaacaacataatggattttgtttctggatcagctagtcagaattttactcttctgcaagagttctaccagacaacactgaaagcgcttgaagaagcgaaaaatgagagattatggttcaagacaaacttgaagctttgcaaaatttggtttgatataggcgagtacggtcgcatgagcaagatattgaaggaactgcataaatcttgccaaagggaagatggttctgatgatcaaaagaaaggcacacaacttttggaagtctatgctattgaaatacaaatgtacactgaaacaaagaataataaaaagcttaaggaattgtatcaaagggctctttccatcaaatcagcgatacctcatccaagaatcatgggtataattcgcgagtgtggtggaaagatgcatatggctgagaggcagtgggctgaggctgcgactgatttctttgaagctttcaagaactacgatgaagcaggcaatccacggagaatccaatgcctaaaatatcttgtccttgccaatatgttgatggaatctgaagtgaatccttttgatggacaagaggccaagccgtacaagaatgatcctgaaatccttgcaatgacaaacctgattgcagcgtaccagaagaatgacatcatggaatttgaaaagatcctgaagagtaatagaagaacaataatggacgatccttttatccgtaactatattgaggacttattgaagaacatcagaacccaagtgctgctcaagcttattaaaccatatactcgaatcaggataccattcatttcacaggaactcaattttccagaaaaggatgtcgagcagctgttggtgtcactcattctggacaaccgtatccaaggccacatagatcaggttaacaagctgctagaacgtggagaaaggtccaaggggatgaggaagtacaatgctatcgacaagtggaatactcagctgaagtccatttaccaaacattgtccaacagagtttgatgagaaggatcgctgctgctgcgtgcattgcacacctagcattgttgatagcctgttttgcggatttgagggcaactgcaaagaactgtctggtgacgcttgcgatagaatcctggatctgggtaaagttaatattgactacgaggtcgtctctgaattgaatctggtgttttgatagtgcaagactacttgactggtcaaaagccaaatatacgacgatgcccttctggttggtctttgattgcagttggagcgatgacggtctttaacctcccaaacttgcctgcacacgctgaacgttaagtttcaggttgagagtagatgcgctgggtgaagtggcgcggcttaaatgttgaaacgaggtgagcgcagacactaccaaagaagctgggcctgtttggttgcctccgaatcagggtcgcgggatgcaggtagctagcttgcgtttggcttcctggtccaggcattgagccaggcttgtggcgtgctacgttcctacaaattttatcttggaaaaatcattgcatatgatcg

SEQ ID NO: 205549 - DNA, 1951 bp, Zea Mays
ccctctcctcgcgtctcgttgtcccatctagcccatctgctatcagcgaggacgaaggcacaaacccctcacctccctcaaaccctagccctcgctctcccgcttgttcccgtcaccgccatcatgggctcagatgcggacatggaggactacgggttcgagtactctgacgaagagccggaggagcaggatgtcgacattgagaaccagtattacaactccaaaggtttggtcgagacagacccagagggtgcacttgctggttttgatcaagtggtcagtatggagcctgaaaaggctgaatggggatttaaagctcttaaacaaactgtcaagctttactataagctggggaaatacaaagaaatgatggatgcatatagagagatgttaacatacataaaatctgcggtcacccggaactacagcgagaaatgtataaacaacataatggattttgtttctggatcagctagtcagaattttactcttctgcaagagttctaccagacaacactgaaagcgcttgaagaagcgaaaaatgagagattatggttcaagacaaacttgaagctttgcaaaatttggtttgatatagatattgaaggaactgcataaatcttgccaaagggaagatggttctgatgatcaaaagaaaggcacacaacttttggaagtctatgctattgaaatacaaatgtacactgaaacaaagaataataaaaagcttaaggaattgtatcaaagggctctttccatcaaatcagcgatacctcatccaagaatcatgggtataattcgcgagtgtggtggaaagatgcatatggctgagaggcagtgggctgaggctgcgactgatttctttgaagctttcaagaactacgatgaagcaggcaatccacggagaatccaatgcctaaaatatcttgtccttgccaatatgttgatggaatctgaagtgaatccttttgatggacaagaggccaagccgtacaagaatgatcctgaaatccttgcaatgacaaacctgattgcagcgtaccagaagaatgacatcatggaatttgaaaagatcctgaagagtaatagaagaacaataatggacgatccttttatccgtaactatattgaggacttattgaagaacatcagaacccaagtgctgctcaagcttattaaaccatatactcgaatcaggataccattcatttcacaggaactcaattttccagaaaaggatgtcgagcagctgttggtgtcactcattctggacaaccgtatccaaggccacatagatcaggttaacaagctgctagaacgtggagaaaggtccaaggggatgaggaagtacaatgctatcgacaagtggaatactcagctgaagtccatttaccaaacattgtccaacagagtttgatgagaaggatcgctgctgctgcgtgcattgcacacctagcattgttgatagcctgttttgcggatttgagggcaactgcaaagaactgtctggtgacgcttgcgatagaatcctggatctgggtaaagttaatattgactacgaggtcgtctctgaattgaatctggtgttttgatagtgcaagactacttgactggtcaaaagccaaatatacgacgatgcccttctggttggtctttgattgcagttggagcgatgacggtctttaacctcccaaacttgcctgcacacgctgaacgttaagtttcaggttgagagtagatgcgctgggtgaagtggcgcggcttaaatgttgaaacgaggtgagcgcagacactaccaaagaagctgggcctgtttggttgcctccgaatcagggtcgcgggatgcaggtagctagcttgcgtttggcttcctggtccaggcattgagccaggcttgtggcgtgctacgttcctacaaattttatcttggaaaaatcattgcatatgatcg

SEQ ID NO: 205550 - DNA, 1948 bp, Zea Mays
ccccctctcctcgcgtctcgttgtcccatctagcccatctgctatcagcgaggacgaaggcacaaacccctcacctccctcaaaccctagccctcgctctcccgcttgttcccgtcaccgccatcatgggctcagatgcggacatggaggactacgggttcgagtactctgacgaagagccggaggagcaggatgtcgacattgagaaccagtattacaactccaaaggtttggtcgagacagacccagagggtgcacttgctggttttgatcaagtggtcagtatggagcctgaaaaggctgaatggggatttaaagctcttaaacaaactgtcaagctttactataagctggggaaatacaaagaaatgatggatgcatatagagagatgttaacatacataaaatctgcggtcacccggaactacagcgagaaatgtataaacaacataatggattttgtttctggatcagctagtcagaattttactcttctgcaagagttctaccagacaacactgaaagcgcttgaagaagcgaaaaatgagagattatggttcaagacaaacttgaagctttgcaaaatttggtttgatataggcgagtacggtcgcatgagcaagatattgaaggaactgcataaatcttgccaaagggaagatggttctgatgatcaaaagaaaggcacacaacttttggaagtctatgctattgaaatacaaatgtacactgaaacaaagaataataaaaagcttaaggaattgtatcaaagggctctttccatcaaatcagcgatacctcatccaagaatcatgggtataattcgcgagtgtggtggaaagatgcatatggctgagaggcagtgggctgaggctgcgactgatttctttgaagctttcaagaactacgatgaagcagatatcttgtccttgccaatatgttgatggaatctgaagtgaatccttttgatggacaagaggccaagccgtacaagaatgatcctgaaatccttgcaatgacaaacctgattgcagcgtaccagaagaatgacatcatggaatttgaaaagatcctgaagagtaatagaagaacaataatggacgatccttttatccgtaactatattgaggacttattgaagaacatcagaacccaagtgctgctcaagcttattaaaccatatactcgaatcaggataccattcatttcacaggaactcaattttccagaaaaggatgtcgagcagctgttggtgtcactcattctggacaaccgtatccaaggccacatagatcaggttaacaagctgctagaacgtggagaaaggtccaaggggatgaggaagtacaatgctatcgacaagtggaatactcagctgaagtccatttaccaaacattgtccaacagagtttgatgagaaggatcgctgctgctgcgtgcattgcacacctagcattgttgatagcctgttttgcggatttgagggcaactgcaaagaactgtctggtgacgcttgcgatagaatcctggatctgggtaaagttaatattgactacgaggtcgtctctgaattgaatctggtgttttgatagtgcaagactacttgactggtcaaaagccaaatatacgacgatgcccttctggttggtctttgattgcagttggagcgatgacggtctttaacctcccaaacttgcctgcacacgctgaacgttaagtttcaggttgagagtagatgcgctgggtgaagtggcgcggcttaaatgttgaaacgaggtgagcgcagacactaccaaagaagctgggcctgtttggttgcctccgaatcagggtcgcgggatgcaggtagctagcttgcgtttggcttcctggtccaggcattgagccaggcttgtggcgtgctacgttcctacaaattttatcttggaaaaatcattgcatatgatcg

SEQ ID NO: 205551 - DNA, 1977 bp, Zea Mays
aaaaaaggtccccctctcctcgcgtctcgttgtcccatctagcccatctgctatcagcgaggacgaaggcacaaacccctcacctccctcaaaccctagccctcgctctcccgcttgttcccgtcaccgccatcatgggctcagatgcggacatggaggactacgggttcgagtactctgacgaagagccggaggagcaggatgtcgacattgagaaccagtattacaactccaaaggtttggtcgagacagacccagagggtgcacttgctggttttgatcaagtggtcagtatggagcctgaaaaggctgaatggggatttaaagctcttaaacaaactgtcaagctttactataagctggggaaatacaaagaaatgatggatgcatatagagagatgttaacatacataaaatctgcggtcacccggaactacagcgagaaatgtataaacaacataatggattttgtttctggatcagctagtcagaattttactcttctgcaagagttctaccagacaacactgaaagcgcttgaagaagcgaaaaatgagagattatggttcaagacaaacttgaagctttgcaaaatttggtttgatataggcgagtacggtcgcatgagcaagatattgaaggaactgcataaatcttgccaaagggaagatggttctgatgatcaaaagaaaggcacacaacttttggaagtctatgctattgaaatacaaatgtacactgaaacaaagaataataaaaagcttaaggaattgtatcaaagggctctttccatcaaatcagcgatacctcatccaagaatcatgggtataattcgcgagtgtggtggaaagatgcatatggctgagaggcagtgggctgaggctgcgactgatttctttgaagctttcaagaactacgatgaagcaggcaatccacggagaatccaatgcctaaaatatcttgtccttgccaatatgttgatggaatctgaagtgaatccttttgatggacaagaggccaagccgtacaagaatgatcctgaaatccttgcaatgacaaacctgattgcagcgtaccagaagaatgacatcatggaatttgaaaagatcctgaagaagaacaataatggacgatccttttatccgtaactatattgaggacttattgaagaacatcagaacccaagtgctgctcaagcttattaaaccatatactcgaatcaggataccattcatttcacaggaactcaattttccagaaaaggatgtcgagcagctgttggtgtcactcattctggacaaccgtatccaaggccacatagatcaggttaacaagctgctagaacgtggagaaaggtccaaggggatgaggaagtacaatgctatcgacaagtggaatactcagctgaagtccatttaccaaacattgtccaacagagtttgatgagaaggatcgctgctgctgcgtgcattgcacacctagcattgttgatagcctgttttgcggatttgagggcaactgcaaagaactgtctggtgacgcttgcgatagaatcctggatctgggtaaagttaatattgactacgaggtcgtctctgaattgaatctggtgttttgatagtgcaagactacttgactggtcaaaagccaaatatacgacgatgcccttctggttggtctttgattgcagttggagcgatgacggtctttaacctcccaaacttgcctgcacacgctgaacgttaagtttcaggttgagagtagatgcgctgggtgaagtggcgcggcttaaatgttgaaacgaggtgagcgcagacactaccaaagaagctgggcctgtttggttgcctccgaatcagggtcgcgggatgcaggtagctagcttgcgtttggcttcctggtccaggcattgagccaggcttgtggcgtgctacgttcctacaaattttatcttggaaaaatcattgcatatgatcg

SEQ ID NO: 205552 - DNA, 1122 bp, Zea Mays
cggtggcccagccagccaaaacccttctcggctctcgcccagcctgaccggaacgaaacgctgaggcagcatcttccccgccgtcctccgccgcctcccattttcaccttggctgcagcctgcaacacaatcctacgcttccgacttcaacgcgcgcccctcccattttcacctagccctactcctttgtacataaaggaagatgggagcatatgcaacgactggtatgcagatgatagcaacacgcccttccatcccggcctacaggcaaatacttgggtcgacatcagcactatctgcatttggaaggtcaatctgttccagaactggctttgccatctcttctaaagccacatcagcaggaccactggtttcttcgaattgcaagagggttgttgtgagggcaatgtcgcagagaggtgcccaaggacttcccattgatctcacaggtaaaagagcatttatagctggagttgctgatgataatggttatggttgggcaattgctaaggctcttgctgctgctggtgctgagattcttgttggtacatgggtgcctgcgttgaacatatttgagacaagcttgagacgtggaaagtttgatgaatcacggaagctacctgatggatctcttatggagattgctaaagtatatccactggacgcagtttatgacacccctgaggatgttcctgaagatgttaaagcaaacaaaagatatgctggagcttcaaactggactgttaagttgttgagactgtaaagaatgactttggtagcattgatatccttgtacactctctcgccaacggtcctgaggtaacaaagtcactgcttgagacatcaaggagaggataccttgctgcaatttcagcatctagttattcttatgtttctttacttcaacacttccttcccataatgaatccaggaggtgctagtatctctttgacctacatagcttctgaaaggataattcctggctacggtggtggtatgagttcagcaaaagcagctcttgagagtgatacaagagttcttgcatatgaagcaggtcgaaaaggcaaaatcagagtgaacaccatatcagcaggtccactttaggaaatctgccgagcagaa

SEQ ID NO: 205553 - DNA, 1206 bp, Zea Mays
ttgggcggttgggccatttatgtaggtagctcacttgggtcctggcagtcaccagcccactggccactgcccaccacgttactcggtggcccagccagccaaaacccttctcggctctcgcccagcctgaccggaacgaaacgctgaggcagcatcttccccgccgtcctccgccgcctcccattttcaccttggctgcagcctgcaacacaatcctacgcttccgacttcaacgcgcgcccctcccattttcacctagccctactcctttgtacataaaggaagatgggagcatatgcaacgactggtatgcagatgatagcaacacgcccttccatcccggcctacaggcaaatacttgggtcgacatcagcactatctgcatttggaaggtcaatctgttccagaactggctttgccatctcttctaaagccacatcagcaggaccactggtttcttcgaattgcaagagggttgttgtgagggcaatgtcgcagagaggtgcccaaggacttcccattgatctcacaggtaaaagagcatttatagctggagttgctgatgataatggttatggttgggcaattgctaaggctcttgctgctgctggtgctgagattcttgttggtacatgggtgcctgcgttgaacatatttgagacaagcttgagacgtggaaagtttgatgaatcacggaagctacctgatggatctcttatggagattgctaaagtatatccactggacgcagtttatgacacccctgaggatgttcctgaagatgttaaagcaaacaaaagatatgctggagcttcaaactggactgttaaggaagttgttgagactgtaaagaatgactttggtagcattgatatccttgtacactctctcgccaacggtcctgaggtaacaaagtcactgcttgagacatcaaggagaggataccttgctgcaatttcagcatctagttattcttatgtttctttacttcaacacttccttcccataatgaatccaggtgctagtatctctttgacctacatagcttctgaaaggataattcctggctacggtggtggtatgagttcagcaaaagcagctcttgagagtgatacaagagttcttgcatatgaagcaggtcgaaaaggcaaaatcagagtgaacaccatatcagcaggtccactttaggaaatctgccgagcagaa

SEQ ID NO: 205554 - DNA, 1698 bp, Zea Mays
cagtaatccaactcataaacttcaattacttaacctcttacatatattagtatttttttcttgaagacacaagagagctgcgcataattatattataagaaagaaaaaaggatgaaggggcattacaaacaaacaaaccacacacacccagatcagtgtgcctttgtacaaagagaacaccacgaccaaatctcaaactacacttggtacaagccacaagggctgtgaggttctggtaaaactactacttgtacaaaatatgcttattatcatcagaagaaaggattcaaaccagcactggtttgtgctgatacatttagggctggtgcttttgatcagttaaagcaaaatgcaacgaaggccaagattcccttttatggaagctacatggaatctgatccagtgaaaattgctgttgagggtgtggagaggttcaagaaagaaaactgtgatctcatcattgtggacacaagtggaaggcacaaacaagaagcagcactctttgaagaaatgcggcaagtttcggaagcaacaaaaccagacctggtgatttttgtgatggacagtagtattggtcaggctgcatttgatcaagcacaggcatttaaacaaagtgtttctgttggtgctgtgattattacaaaaatggatggtcacgcaaaaggcggtggtgcccttagcgcggtcgcagcaacaaaaagtcctgttatattcattggaactggcgagcacattgacgagtttgaagtttttgatgtgaagccatttgttagtcgcctgttaggaatgggagattgggcaggctttatggacaagattcatgaagtcgtacctacggatcaacaacctgagcttctgcagaaactgtctgaaggaagctttactctcaggcttatgtatgagcagttccaaaacattctgaaaatgggtcctattggacaggtcttctctatgttgcctgggtttagcgccgaactaatgccaaaaggacatgagaaggaaagccaggctaagattaagcgctacatgacaatgatggattccatgactgatgcagagcttgacagcacaaatcctaagctgatgactgaatcacggatcattcggattgcacgggggtctggtcgtcctgtcagggatgtcatcgacatgctggaagagtataagcggcttgctaaaatctggggcaagatgaagggtctcaagatcccaaagaaaggggagatgagtgcactgtcccgcaacatgaatgttcagcacatgagcaaggtccttcctccgcagatgcttaaacagattggtggcatgggcggtctgcagtctctgatgaaacagatgggatcgaaggagatgagcggaatgtttggaggcatgggtggcgagcggtaattttacgtcctgtttttggtggatcgtcgctgtgaacttgtgatgctaaattgagagggtttagtgctgcggtctgatcatcgtcagaggtttccatgaagatcagcctgcgccatgttatggaacaggcttgctgtagctccccatgcctgaaatttaatttatatgattatgaacagtacatttgtcctcgaaaaaatgtataagatataatatttgacaaatggaatatgcttatgtagtcttccagtcttgttatgccgttgggttggcaaggatgcgccatgaagcttcgtgccagggcgagcc

SEQ ID NO: 205555 - DNA, 1200 bp, Zea Mays
tgtatatgcaatatggtaaaattcacaaaaataaagaaaccagacctggtgatttttgtgatggacagtagtattggtcaggctgcatttgatcaagcacaggcatttaaacaaagtgtttctgttggtgctgtgattattacaaaaatggatggtcacgcaaaaggcggtggtgcccttagcgcggtcgcagcaacaaaaagtcctgttatattcattggaactggcgagcacattgacgagtttgaagtttttgatgtgaagccatttgttagtcgcctgttaggaatgggagattgggcaggctttatggacaagattcatgaagtcgtacctacggatcaacaacctgagcttctgcagaaactgtctgaaggaagctttactctcaggcttatgtatgagcagttccaaaacattctgaaaatgggtcctattggacaggtcttctctatgttgcctgggtttagcgccgaactaatgccaaaaggacatgagaaggaaagccaggctaagattaagcgctacatgacaatgatggattccatgactgatgcagagcttgacagcacaaatcctaagctgatgactgaatcacggatcattcggattgcacgggggtctggtcgtcctgtcagggatgtcatcgacatgctggaagagtataagcggcttgctaaaatctggggcaagatgaagggtctcaagatcccaaagaaaggggagatgagtgcactgtcccgcaacatgaatgttcagcacatgagcaaggtccttcctccgcagatgcttaaacagattggtggcatgggcggtctgcagtctctgatgaaacagatgggatcgaaggagatgagcggaatgtttggaggcatgggtggcgagcggtaattttacgtcctgtttttggtggatcgtcgctgtgaacttgtgatgctaaattgagagggtttagtgctgcggtctgatcatcgtcagaggtttccatgaagatcagcctgcgccatgttatggaacaggcttgctgtagctccccatgcctgaaatttaatttatatgattatgaacagtacatttgtcctcgaaaaaatgtataagatataatatttgacaaatggaatatgcttatgtagtcttccagtcttgttatgccgttgggttggcaaggatgcgccatgaagcttcgtgccagggcgagcc

SEQ ID NO: 205556 - DNA, 1234 bp, Zea Mays
attccttaagggcagcgcatggttaggcaccaaatccccagcgcatccttaagagaatgggatttggaagaaaccagacctggtgatttttgtgatggacagtagtattggtcaggctgcatttgatcaagcacaggcatttaaacaaagtgtttctgttggtgctgtgattattacaaaaatggatggtcacgcaaaaggcggtggtgcccttagcgcggtcgcagcaacaaaaagtcctgttatattcattggaactggcgagcacattgacgagtttgaagtttttgatgtgaagccatttgttagtcgcctgttaggaatgggagattgggcaggctttatggacaagattcatgaagtcgtacctacggatcaacaacctgagcttctgcagaaactgtctgaaggaagctttactctcaggcttatgtatgagcagttccaaaacattctgaaaatgggtcctattggacaggtcttctctatgttgcctgggtttagcgccgaactaatgccaaaaggacatgagaaggaaagccaggctaagattaagcgctacatgacaatgatggattccatgactgatgcagagcttgacagcacaaatcctaagctgatgactgaatcacggatcattcggattgcacgggggtctggtcgtcctgtcagggatgtcatcgacatgctggaagagtataagcggcttgctaaaatctggggcaagatgaagggtctcaagatcccaaagaaaggggagatgagtgcactgtcccgcaacatgaatgttcagcacatgagcaaggtccttcctccgcagatgcttaaacagattggtggcatgggcggtctgcagtctctgatgaaacagatgggatcgaaggagatgagcggaatgtttggaggcatgggtggcgagcggtaattttacgtcctgtttttggtggatcgtcgctgtgaacttgtgatgctaaattgagagggtttagtgctgcggtctgatcatcgtcagaggtttccatgaagatcagcctgcgccatgttatggaacaggcttgctgtagctccccatgcctgaaatttaatttatatgattatgaacagtacatttgtcctcgaaaaaatgtataagatataatatttgacaaatggaatatgcttatgtagtcttccagtcttgttatgccgttgggttggcaaggatgcgccatgaagcttcgtgccagggcgagcc

SEQ ID NO: 205557 - DNA, 999 bp, Zea Mays
gcaattgtctccctagcagccacgtccatgacgttctcccgtttcgcccgccgtcggtcagcctgtgtccgtggctctcgcctgccacccaagcagccatggcggccgcgctgctccgccgtgcgctccacctccgccgcgtgctcccctcgcttccgcacagcgcctctcccccgccttctcggccactccgaccccgaagacctcccagcagaacgccgccaccaccacgatcgacctctcctccgacgagagtcgccgccgcctcctcaacaggttggtgtaccggagcaagcagcggggtttcctggagctcgacctggtgctgggcacctgggtcgaacagcacgtgcacgccatggacgagcccaacatccgcgcccttctacaagtgctcgacctcgaaaacccagatttgtggaaatggttgactagtcaggagcagccaccagaggatctgatttctaatccggtgttttctgccatcaaatcaaaggtcacagataacctgatcaagcatgcttctcccgagacccgatcaacacctggccaaccttgggttagaggatgggatgacataaagaaaggcaaagatggacctaactatggaaatcagtgacatgttccttgaaatggggatgacagctttacatcctaaataatccccccccccccccccatgttttgtgttcgtgtagattaaggtgaactgtgaccggcatgtgagaagtttgttaaatcgatattggagaatcagcttgtaactacagatggcactcctgatgtgtccctggcagtttgtctgcaactggaaagatggtatacatagcattgtgttacttatggcaatccttgaagcatttggactgaaacttaaatattgaaaatgtggacgacaaacatcatcagaaagaagtgtatttcttgctgcccttattattaaattttaaatgatagtttgtgtaaagaagcctttggtgcaaactcctgtgtattgag

SEQ ID NO: 205558 - DNA, 1998 bp, Zea Mays
atttgttgcttgtactttgtacccgtgatgcgcatttactgttgagatcccaggattcagactggtgccattcgatttgatttggcgcggggtactttcctatggccgcctccatcgcggcctcgcccttctttccagggtcgccggcgccggccgctcctaagaacggccttggagagcgcccagagagcctggacgtccgcggcgttgcggcgaagccgggagcctcgtctaatgccgtgagggcgggcaagacgcgcgcccacgctgccgtccccaaggtgaacggtggcaagtctgcggtggcggatgtggaacacgagaccgtaactgtaccttcgtcggtgccgaggactttctacaaccagcttcccgactggagcatgctccttgctgccatcacgaccatcttcttggccgccgagaagcagtggacgatgcttgattggaagcccaggcggcctgacatgctcactgacacttttgggtttggccggatcatacatgatggcctcatgttcaagcagaacttctccattaggtcctatgagattggggctgataggacggcatctatagagacaatgatgaaccatttgcaggaaacggcacttaatcatgtgaagaccgctgggctgctaggtgatggattcggctccacaccagagatgagtaaacggaacttattctgggtggttagccagatgcaggctatcgtcgagcgttatccatgctggggtgatactgttgaagtaaatacatgggttagtgctaatggtaaaaatggaatgcgtagggattggcatatacgtgattctatgacaggccacacaatactgaaggcgacaagtaaatgggttatgatgaacaaactcactaggaagcttgcaagaattccagatgaagtgcggactgaaatagagccatactttgttgggcgttctgctattgttgatgaagacaaccgcaagcttccaaaactgccagagggtcaaagcacttctgcagctaaatatgtgaggacaggcctgactcctcgttgggctgatcttgatataaaccagcatgtcaataatgttaaatacattgcgtggattcttgagagtgcaccgattactatttttgagaatcatgagctggccagcattgtgctggattacaaaagggagtgtgtccgcgatagtgtgctgcagtcacacacctctgtccatgaggattgcaacattgagtctggagaaacaaccttgcactgtgagcatgtgctgagccttgaatcaggtccgaccatagtgaaggcccggaccatgtggaggcctaagggaaccaaggcccaagaaacagcggttccatcttcattctgattttgtcagatgttcgagatggtgactttggcagcaaactatctggcagaagatcagaatggttactagcatcctctattggaagcaaatcacacggaccgtgacctaaactaatttaactatgaagtgtgaccaatagaggagatataagtggggtcacaatggaggagaccaaagcggggagatcgaagacaaaggaggcctcctgtgcatggtttgtttctgtttccgcctttcgagttctttcttacgacaatcttgggtcgcacaaatgggtgttgtaagtattgatctgtagctacaaatgtatgatgggggagtgattgcttctcatacatgttccttctggggctatgtccatatgttgtaagccccatgaaaacagatttgtcgcagccatatccattcagaatctcatactatattgtatttgctgatattaaaattgatactactactattctccaggctgctcaagcgtgttgaaacttcgtgtctgggacaaatattgaaactgtacagcttgccatttactttgacttgcataccatgctttctaatttctagactagagctctttgaactgtagacggcttggcgtgaccgatgacaggttgacatgtctaccatgctttcg

SEQ ID NO: 205559 - DNA, 1963 bp, Zea Mays
cgccgctagatttgggattcctgcagcttcttttcttggcctccttctcgtccttgtagtcttgggttgagatcccaggattcagactggtgccattcgatttgatttggcgcggggtactttcctatggccgcctccatcgcggcctcgcccttctttccagggtcgccggcgccggccgctcctaagaacggccttggagagcgcccagagagcctggacgtccgcggcgttgcggcgaagccgggagcctcgtctaatgccgtgagggcgggcaagacgcgcgcccacgctgccgtccccaaggtgaacggtggcaagtctgcggtggcggatgtggaacacgagaccgtaactgtaccttcgtcggtgccgaggactttctacaaccagcttcccgactggagcatgctccttgctgccatcacgaccatcttcttggccgccgagaagcagtggacgatgcttgattggaagcccaggcggcctgacatgctcactgacacttttgggtttggccggatcatacatgatggcctcatgttcaagcagaacttctccattaggtcctatgagattggggctgataggacggcatctatagagacaatgatgaaccatttgcaggaaacggcacttaatcatgtgaagaccgctgggctgctaggtgatggattcggctccacaccagagatgagtaaacggaacttattctgggtggttagccagatgcaggctatcgtcgagcgttatccatgctgggattggcatatacgtgattctatgacaggccacacaatactgaaggcgacaagtaaatgggttatgatgaacaaactcactaggaagcttgcaagaattccagatgaagtgcggactgaaatagagccatactttgttgggcgttctgctattgttgatgaagacaaccgcaagcttccaaaactgccagagggtcaaagcacttctgcagctaaatatgtgaggacaggcctgactcctcgttgggctgatcttgatataaaccagcatgtcaataatgttaaatacattgcgtggattcttgagagtgcaccgattactatttttgagaatcatgagctggccagcattgtgctggattacaaaagggagtgtgtccgcgatagtgtgctgcagtcacacacctctgtccatgaggattgcaacattgagtctggagaaacaaccttgcactgtgagcatgtgctgagccttgaatcaggtccgaccatagtgaaggcccggaccatgtggaggcctaagggaaccaaggcccaagaaacagcggttccatcttcattctgattttgtcagatgttcgagatggtgactttggcagcaaactatctggcagaagatcagaatggttactagcatcctctattggaagcaaatcacacggaccgtgacctaaactaatttaactatgaagtgtgaccaatagaggagatataagtggggtcacaatggaggagaccaaagcggggagatcgaagacaaaggaggcctcctgtgcatggtttgtttctgtttccgcctttcgagttctttcttacgacaatcttgggtcgcacaaatgggtgttgtaagtattgatctgtagctacaaatgtatgatgggggagtgattgcttctcatacatgttccttctggggctatgtccatatgttgtaagccccatgaaaacagatttgtcgcagccatatccattcagaatctcatactatattgtatttgctgatattaaaattgatactactactattctccaggctgctcaagcgtgttgaaacttcgtgtctgggacaaatattgaaactgtacagcttgccatttactttgacttgcataccatgctttctaatttctagactagagctctttgaactgtagacggcttggcgtgaccgatgacaggttgacatgtctaccatgctttcg

SEQ ID NO: 205560 - DNA, 1921 bp, Zea Mays
atcccgaattcggggtaggacaggttgagatcccaggattcagactggtgccattcgatttgatttggcgcggggtactttcctatggccgcctccatcgcggcctcgcccttctttccagggtcgccggcgccggccgctcctaagaacggccttggagagcgcccagagagcctggacgtccgcggcgttgcggcgaagccgggagcctcgtctaatgccgtgagggcgggcaagacgcgcgcccacgctgccgtccccaaggtgaacggtggcaagtctgcggtggcggatgtggaacacgagaccgtaactgtaccttcgtcggtgccgaggactttctacaaccagcttcccgactggagcatgctccttgctgccatcacgaccatcttcttggccgccgagaagcagtggacgatgcttgattggaagcccaggcggcctgacatgctcactgacacttttgggtttggccggatcatacatgatggcctcatgttcaagcagaacttctccattaggtcctatgagattggggctgataggacggcatctatagagacaatgatgaaccatttgcaggaaacggcacttaatcatgtgaagaccgctgggctgctaggtgatggattcggctccacaccagagatgagtaaacggaacttattctgggtggttagccagatgcaggctatcgtcgagcgttatccatgctgggattggcatatacgtgattctatgacaggccacacaatactgaaggcgacaagtaaatgggttatgatgaacaaactcactaggaagcttgcaagaattccagatgaagtgcggactgaaatagagccatactttgttgggcgttctgctattgttgatgaagacaaccgcaagcttccaaaactgccagagggtcaaagcacttctgcagctaaatatgtgaggacaggcctgactcctcgttgggctgatcttgatataaaccagcatgtcaataatgttaaatacattgcgtggattcttgagagtgcaccgattactatttttgagaatcatgagctggccagcattgtgctggattacaaaagggagtgtgtccgcgatagtgtgctgcagtcacacacctctgtccatgaggattgcaacattgagtctggagaaacaaccttgcactgtgagcatgtgctgagccttgaatcaggtccgaccatagtgaaggcccggaccatgtggaggcctaagggaaccaaggcccaagaaacagcggttccatcttcattctgattttgtcagatgttcgagatggtgactttggcagcaaactatctggcagaagatcagaatggttactagcatcctctattggaagcaaatcacacggaccgtgacctaaactaatttaactatgaagtgtgaccaatagaggagatataagtggggtcacaatggaggagaccaaagcggggagatcgaagacaaaggaggcctcctgtgcatggtttgtttctgtttccgcctttcgagttctttcttacgacaatcttgggtcgcacaaatgggtgttgtaagtattgatctgtagctacaaatgtatgatgggggagtgattgcttctcatacatgttccttctggggctatgtccatatgttgtaagccccatgaaaacagatttgtcgcagccatatccattcagaatctcatactatattgtatttgctgatattaaaattgatactactactattctccaggctgctcaagcgtgttgaaacttcgtgtctgggacaaatattgaaactgtacagcttgccatttactttgacttgcataccatgctttctaatttctagactagagctctttgaactgtagacggcttggcgtgaccgatgacaggttgacatgtctaccatgctttcg

SEQ ID NO: 205561 - DNA, 2302 bp, Zea Mays
aacatcccgaattcggggtaggacagatctaataaaaaggaaaatttgccgcctccccagactccatgttttaaaaggtcgcggtgggcaacgagccaacgaccggtgccagcagagacgaccggccccggccccgccccggccgcagctgcccgaagccgccaaacaccgccagtcccccaccacatccgccagaaccctctccctccctccctccctccctcatcggcgcgccgccaatggccgtgtggtgaagcgcacccgacggaagaagcaggcaccaacagccaagccccctttgcccttgcccttgcccttgccctcgccgccgccgtccgcggaaggttgagatcccaggattcagactggtgccattcgatttgatttggcgcggggtactttcctatggccgcctccatcgcggcctcgcccttctttccagggtcgccggcgccggccgctcctaagaacggccttggagagcgcccagagagcctggacgtccgcggcgttgcggcgaagccgggagcctcgtctaatgccgtgagggcgggcaagacgcgcgcccacgctgccgtccccaaggtgaacggtggcaagtctgcggtggcggatgtggaacacgagaccgtaactgtaccttcgtcggtgccgaggactttctacaaccagcttcccgactggagcatgctccttgctgccatcacgaccatcttcttggccgccgagaagcagtggacgatgcttgattggaagcccaggcggcctgacatgctcactgacacttttgggtttggccggatcatacatgatggcctcatgttcaagcagaacttctccattaggtcctatgagattggggctgataggacggcatctatagagacaatgatgaaccatttgcaggaaacggcacttaatcatgtgaagaccgctgggctgctaggtgatggattcggctccacaccagagatgagtaaacggaacttattctgggtggttagccagatgcaggctatcgtcgagcgttatccatgctggggtgatactgttgaagtaaatacatgggttagtgctaatggtaaaaatggaatgcgtagggattggcatatacgtgattctatgacaggccacacaatactgaaggcgacaagtaaatgggttatgatgaacaaactcactaggaagcttgcaagaattccagatgaagtgcggactgaaatagagccatactttgttgggcgttctgctattgttgatgaagacaaccgcaagcttccaaaactgccagagggtcaaagcacttctgcagctaaatatgtgaggacaggcctgactcctcgttgggctgatcttgatataaaccagcatgtcaataatgttaaatacattgcgtggattcttgagagtgcaccgattactatttttgagaatcatgagctggccagcattgtgctggattacaaaagggagtgtgtccgcgatagtgtgctgcagtcacacacctctgtccatgaggattgcaacattgagtctggagaaacaaccttgcactgtgagcatgtgctgagccttgaatcaggtccgaccatagtgaaggcccggaccatgtggaggcctaagggaaccaaggcccaagaaacagcggttccatcttcattctgattttgtcagatgttcgagatggtgactttggcagcaaactatctggcagaagatcagaatggttactagcatcctctattggaagcaaatcacacggaccgtgacctaaactaatttaactatgaagtgtgaccaatagaggagatataagtggggtcacaatggaggagaccaaagcggggagatcgaagacaaaggaggcctcctgtgcatggtttgtttctgtttccgcctttcgagttctttcttacgacaatcttgggtcgcacaaatgggtgttgtaagtattgatctgtagctacaaatgtatgatgggggagtgattgcttctcatacatgttccttctggggctatgtccatatgttgtaagccccatgaaaacagatttgtcgcagccatatccattcagaatctcatactatattgtatttgctgatattaaaattgatactactactattctccaggctgctcaagcgtgttgaaacttcgtgtctgggacaaatattgaaactgtacagcttgccatttactttgacttgcataccatgctttctaatttctagactagagctctttgaactgtagacggcttggcgtgaccgatgacaggttgacatgtctaccatgctttcg

SEQ ID NO: 205562 - DNA, 4591 bp, Zea Mays
atcaccgtgcccccgccgtcccgtgtgcgtcttcctccacgcatcacacatgccacacgcgcgccagcaatcgcccccggtatctcgcccgcgccccaccaactctgcccttgaacccgcctgccaccaatctcgtcgccgggtatcccgcccgccaccaaaccgcgccccctgtcctcgccctcgacggcgctgccctttgtgatggtgcccttccttccccagctcccccaaatgctgccaagtcccccaccaacgccgcccttccttccccggcagcccgcccccactagctccgcgctccgcgtgccccaccagccacgctagctgccgccgggatactcaccacctccgcgcccccaccaaaccgaaaggcgagatccgccgccagttccacgctccgcgcgtcaagagcagccatcacagtgatgccgcgcgagggagaggaaggaaggccgcgtgagtcgccgcagggaaagctgccaggcatcaccgtaaggtgagatccggttgcgcgtgagggagaggaaggaaggccgcgtgagtcgccgccgagaaagccacagggaaagccgccagtgtgagtcgccgccgggaaagccgccagtgtatgatggttcggtcatccagatgtgggtggcgtacaacgttgtcactcatttcctcctgcactgtaccgactgcaaggcgcaagctcactggcgtgttcgacctcctgaagattatgctatacaaggtgtgcgcaaatggctcatcggcgcttcccgattgggagatggaggccagcatcatggagttctacgctgttgcatcttctaagtggcatcaccgagctggacgacaggaaacagagaaaattgtgcctgaaaaaatttaggagcagggatgagcatttatcagaagtggacacaaagagggagcttgagtgtgggctctgcatgcggtgctttgagtattggtaatagctcttttctcctagcttaaaatcatgcataaagtttgattttttgtaggctccacatttaaacaaatttggtcatgttagcttatggatggcataaaagtactatttctcatgggttctgaagcagaattatagtcaagtacttctcgtgttgaaactatggactgggaaacatgacaaatttgcttttagtaaaattacgaagtgttgtcttttttaaaaatattggtgtcatgtttttttaatgaagcagtttcaatgtatgtggtcggtttggagcatttttaggagacatgatatgtgggatagaaaagctgatggagataacctaaacatagacaaacagccacatacctccagcatggacattccagtagtaattgaagaagctgccaacaaatacaaagcaccatatctctgcaggacaaatcaagataatacactgctaaaataagttgtattagaccattaaagtatgagcatttagctaagagttgccctgtgttttttgttttacccatgataactgtcagtacaagtgtacaacaaattttatagtagtactttggaggacaaaactggtgctggtcattttagatattcgtgcctctcaaataccttaagatggcttgaattcttattgttcatatacattatcgtttttaggcacacaataatgaacctctacagattgtttgtggttatcatgctcttcctcaaccacctcatggtggtgaacttgtattccacacccttgaacatgtccaacctctgaaatactcctggcctggattacccttgttgggttttgtagaggcgatttgaacatttaaagtagatacttgacctatcatgactctagcctgcagtatcattcctccatttctctaatcttgaaacttagaatatagatcaatttacatttggcgactgcagaagaagctcaacactcaagaccttttcttatgatataatattgacaaccaagattttcttctatctttatttttttgctgtttgtgaaattccacagataagacctgtatgctctggcgtgagttatttttctcaatcaacaggaagaagtgaagtgagagatttcattagttcttgaaccaaccaaacatttttgaactgtaaatacagtagggcactgtaacaaaagtttattagaactaaagaaacaccaatattttagctactttaaggcaggtccattcaaaaagttttgtttctcaccctgctcaggctttgtacagtcttttttttgtttgctgacgccttcctaggaaaggggatcttctgcgacgatagcgatgaagacgaagacagtgaccaggagagggaggtgaacaaggagatggttgtctaccttatcgatgcctcgcccaaaatgttcacccctgccaccacctagggcaatgaaaagcaggagacacatttccataccattgttaactgcatcacagagtctctgaagacacaaattattggtagaacttatgatgaagtcgcaatatgtctctttaacactatgatgctccagttctgcaacttctttccgacaaaatgtccactcatatatttacaactctataagggtttagtgtgggcgtccacaccccttcaccatgcccccgcctcagcccccgtcaaccacgcaaggactccagcgtgaaagtcgggcccgtcgccggccttgcatcgtcgcgacacactccgtgcctcccttccatcatcgctcgatcgcggtttcgtcgcactccttccttcgatggcactcctttccatcctcgattcctcctgccccagcaccggccagcctcatcaggtcattcctcctcgctgtgccccctccaccgtattcaaccacctcttcctcggcaccaaacgtagacgcctcctccgcgatgccctcagaccgcccgtcctcgcccaacatctccttgccgcatatgcccgcagcggctgcctcgcatcccgcccgcacgccacctccttgcacccgcgcatggatgccactgcacgcctactatggaagggggacgcctactattgaagctcccatccacgatcccattccaaatccagcttcaaatttgccccaatctgcagtcaaccttccacccaacatcttccccttatatattgttgtctctgctataaaagacttgacagaggcgaggcctccaaaccactaccactctccaccgattcactggagtcgcgagacgttggaggccctgagacgttcaagcctcatctgcagtctcctccaaagaggtccacaaatgatttgagagctgtaggtctacaaatgataatgcaacaaattctgattcatgcatttctttactgtgtggaggccatttaattacgcctatttgatttgagagctcgagtagacaagatcatgtaggctctgaaatctatcttctggaggaccaaggccattaaagtacagggttctttcagcagcaatggcctcactatttcttctaaattaccaagattctcggacatgtacactctcacgatagcaagtgtagacccacagtttatcgtagcaaacaagccaatccatttcactaagagcgtgacaaagtgtcacagagcccttcttcttcgctctgccacccacaccgtggcacctcgccgagctccgcatcgaaactgcgttgttgccttctccgtgctctgcgttgaagacatgcagcgcaagcgtcgctgcctcatcccggcctcctctagacgcaagacgacaagaggatgctgctcgagctgtccccttggatcccacgccgaacgccctgtcacctccgtcgacaacatcaagctcctgtccctcccccacctcactgcaatagattcttcggttgtggaacttagggagagttttgagtcgtggtggtgtataaagcagtcgtcaagcacaagctcctccaaagtaccatcaggatcctacagtagaagagttagccaaaacactcgattgttggccatcaatgaattattatatcacgggttgtaaatatgttcttatgccatgaaaattcaacgaatgtcacgcccttttcgtaatagatcatgttaaaagcatgtgacttttatcgactttacaccgactcaagattggtgtaaacacatgccatacaagaggtttgcggaagctattatcatggcctcaaagaaatataagattgcttacaacaagaaacgttctggatgggcggaggatatctttaagtgggaacatacaattcagactggtgttccaattgacttaagagggtttaataccagctacctcgttctacaagttatgaccatgtgggggaatgacagacgaatgaaatttgttgggaatgcaaatattcttcgaaggaactttgtgattgatctgttaagttatgaggacaattcgtgccgatatgccatccctgcaaacatacaacagagacttatcgatatcgctaaaaaggattagctgattagtgtacggttgtcgacacatttgtctgtaattaaaaattctaaattatctttttagaaataatttgtgtgatattgataatgaaaaacacggattttgcatattatatagtgatgtttgtcgttccgtatcaa

SEQ ID NO: 205563 - DNA, 3584 bp, Zea Mays
gtgcgtcttcctccacgcatcacacatgccacacgcgcgccagcaatcgcccccggtatctcgcccgcgccccaccaactctgcccttgaacccgcctgccaccaatctcgtcgccgggtatcccgcccgccaccaaaccgcgccccctgtcctcgccctcgacggcgctgccctttgtgatggtgcccttccttccccagctcccccaaatgctgccaagtcccccaccaacgccgcccttccttccccggcagcccgcccccactagctccgcgctccgcgtgccccaccagccacgctagctgccgccgggatactcaccacctccgcgcccccaccaaaccgaaaggcgagatccgccgccagttccacgctccgcgcgtcaagagcagccatcacagtgatgccgcgcgagggagaggaaggaaggccgcgtgagtcgccgcagggaaagctgccaggcatcaccgtaaggtgagatccggttgcgcgtgagggagaggaaggaaggccgcgtgagtcgccgccgagaaagccacagggaaagccgccagtgtgagtcgccgccgggaaagccgccagtgtatgatggttcggtcatccagatgtgggtggcgtacaacgttgtcactcatttcctcctgcactgtaccgactgcaaggcgcaagctcactggcgtgttcgacctcctgaagattatgctatacaaggtgtgcgcaaatggctcatcggcgcttcccgattgggagatggaggccagcatcatggagttctacgctgttgcatcttctaagtggcatcaccgagctggacgacaggaaacagagaaaattgtgcctgaaaaaatttaggagcagggatgagcatttatcagaagtggacacaaagagggagcttgagtgtgggctctgcatgcggtgctttgagtattggaaaggggatcttctgcgacgatagcgatgaagacgaagacagtgaccaggagagggaggtgaacaaggagatggttgtctaccttatcgatgcctcgcccaaaatgttcacccctgccaccacctagggcaatgaaaagcaggagacacatttccataccattgttaactgcatcacagagtctctgaagacacaaattattggtagaacttatgatgaagtcgcaatatgtctctttaacactgtaagctctttctcacatcagtaagcatacacctgtcacatttgcagttctatgttagatgtagatgagttgcagtattttgcttattttcttaaaagtgaaataatgagctgactatgcaactgtctttttgtattagttattagttattgtcaatgctaaccatttcacttattaagtgataattttgcacatatattagtattactcaagacgatattatgaagtacaactgtgtaaatgttcttacaataaataaaatttagaaggtgcctggatttgtttattagacaataatattttaataacagtttgatgaaaaactacaattccagatgatgctccagttctgcaacttctttccgacaaaatgtccactcatatatttacaactctataagggtttagtgtgggcgtccacaccccttcaccatgcccccgcctcagcccccgtcaaccacgcaaggactccagcgtgaaagtcgggcccgtcgccggccttgcatcgtcgcgacacactccgtgcctcccttccatcatcgctcgatcgcggtttcgtcgcactccttccttcgatggcactcctttccatcctcgattcctcctgccccagcaccggccagcctcatcaggtcattcctcctcgctgtgccccctccaccgtattcaaccacctcttcctcggcaccaaacgtagacgcctcctccgcgatgccctcagaccgcccgtcctcgcccaacatctccttgccgcatatgcccgcagcggctgcctcgcatcccgcccgcacgccacctccttgcacccgcgcatggatgccactgcacgcctactatggaagggggacgcctactattgaagctcccatccacgatcccattccaaatccagcttcaaatttgccccaatctgcagtcaaccttccacccaacatcttccccttatatattgttgtctctgctataaaagacttgacagaggcgaggcctccaaaccactaccactctccaccgattcactggagtcgcgagacgttggaggccctgagacgttcaagcctcatctgcagtctcctccaaagaggtgagtctcacttaatgtttggtaccttctgttttttgggaatgtgggttcattttggatgcttccggggcagtggtaaacactttgctctgtatatattcttgcatctctttaatgtaggtccacaaatgatttgagagctgtaggtctacaaatgataatgcaacaaattctgattcatgcatttctttactgtgtggaggccatttaattacgcctatttgatttgagagctcgagtagacaagatcatgtaggctctgaaatctatcttctggaggaccaaggccattaaagtacagtcacagagcccttcttcttcgctctgccacccacaccgtggcacctcgccgagctccgcatcgaaactgcgttgttgccttctccgtgctctgcgttgaagacatgcagcgcaagcgtcgctgcctcatcccggcctcctctagacgcaagacgacaagaggatgctgctcgagctgtccccttggatcccacgccgaacgccctgtcacctccgtcgacaacatcaagctcctgtccctcccccacctcactgcaatagattcttcggttgtggaacttagggagagttttgagtcgtggtggtgtataaagcagtcgtcaagcacaagctcctccaaagtaccatcaggatcctacagtagaagagttagccaaaacactcgattgttggccatcaatgaattattatatcacgggttgtaaatatgttcttatgccatgaaaattcaacgaatgtcacgcccttttcgtaatagatcatgttaaaagcatgtgacttttatcgactttacaccgactcaagattggtgtaaacacatgccatacaagaggtttgcggaagctattatcatggcctcaaagaaatataagattgcttacaacaagaaacgttctggatgggcggaggatatctttaagtgggaacatacaattcagactggtgttccaattgacttaagagggtttaataccagctacctcgttctacaagttatgaccatgtgggggaatgacagacgaatgaaatttgttgggaatgcaaatattcttcgaaggaactttgtgattgatctgttaagttatgaggacaattcgtgccgatatgccatccctgcaaacatacaacagagacttatcgatatcgctaaaaaggattagctgattagtgtacggttgtcgacacatttgtctgtaattaaaaattctaaattatctttttagaaataatttgtgtgatattgataatgaaaaacacggattttgcatattatatagtgatgtttgtcgttccgtatcaa

SEQ ID NO: 205564 - DNA, 4757 bp, Zea Mays
cttcctccacgcatcacacatgccacacgcgcgccagcaatcgcccccggtatctcgcccgcgccccaccaactctgcccttgaacccgcctgccaccaatctcgtcgccgggtatcccgcccgccaccaaaccgcgccccctgtcctcgccctcgacggcgctgccctttgtgatggtgcccttccttccccagctcccccaaatgctgccaagtcccccaccaacgccgcccttccttccccggcagcccgcccccactagctccgcgctccgcgtgccccaccagccacgctagctgccgccgggatactcaccacctccgcgcccccaccaaaccgaaaggcgagatccgccgccagttccacgctccgcgcgtcaagagcagccatcacagtgatgccgcgcgagggagaggaaggaaggccgcgtgagtcgccgcagggaaagctgccaggcatcaccgtaaggtgagatccggttgcgcgtgagggagaggaaggaaggccgcgtgagtcgccgccgagaaagccacagggaaagccgccagtgtgagtcgccgccgggaaagccgccagtgtatgatggttcggtcatccagatgtgggtggcgtacaacgttgtcactcatttcctcctgcactgtaccgactgcaaggcgcaagctcactggcgtgttcgacctcctgaagattatgctatacaaggtgtgcgcaaatggctcatcggcgcttcccgattgggagatggaggccagcatcatggagttctacgctgttgcatcttctaagtggcatcaccgagctggacgacaggaaacagagaaaattgtgcctgaaaaaatttaggagcagggatgagcatttatcagaagtggacacaaagagggagcttgagtgtgggctctgcatgcggtgctttgagtattggtaatagctcttttctcctagcttaaaatcatgcataaagtttgattttttgtaggctccacatttaaacaaatttggtcatgttagcttatggatggcataaaagtactatttctcatgggttctgaagcagaattatagtcaagtacttctcgtgttgaaactatggactgggaaacatgacaaatttgcttttagtaaaattacgaagtgttgtcttttttaaaaatattggtgtcatgtttttttaatgaagcagtttcaatgtatgtggtcggtttggagcatttttaggagacatgatatgtgggatagaaaagctgatggagataacctaaacatagacaaacagccacatacctccagcatggacattccagtagtaattgaagaagctgccaacaaatacaaagcaccatatctctgcaggacaaatcaagataatacactgctaaaataagttgtattagaccattaaagtatgagcatttagctaagagttgccctgtgttttttgttttacccatgataactgtcagtacaagtgtacaacaaattttatagtagtactttggaggacaaaactggtgctggtcattttagatattcgtgcctctcaaataccttaagatggcttgaattcttattgttcatatacattatcgtttttaggcacacaataatgaacctctacagattgtttgtggttatcatgctcttcctcaaccacctcatggtggtgaacttgtattccacacccttgaacatgtccaacctctgaaatactcctggcctggattacccttgttgggttttgtagaggcgatttgaacatttaaagtagatacttgacctatcatgactctagcctgcagtatcattcctccatttctctaatcttgaaacttagaatatagatcaatttacatttggcgactgcagaagaagctcaacactcaagaccttttcttatgatataatattgacaaccaagattttcttctatctttatttttttgctgtttgtgaaattccacagataagacctgtatgctctggcgtgagttatttttctcaatcaacaggaagaagtgaagtgagagatttcattagttcttgaaccaaccaaacatttttgaactgtaaatacagtagggcactgtaacaaaagtttattagaactaaagaaacaccaatattttagctactttaaggcaggtccattcaaaaagttttgtttctcaccctgctcaggctttgtacagtcttttttttgtttgctgacgccttcctaggaaaggggatcttctgcgacgatagcgatgaagacgaagacagtgaccaggagagggaggtgaacaaggagatggttgtctaccttatcgatgcctcgcccaaaatgttcacccctgccaccacctagggcaatgaaaagcaggagacacatttccataccattgttaactgcatcacagagtctctgaagacacaaattattggtagaacttatgatgaagtcgcaatatgtctctttaacactttattagttattgtcaatgctaaccatttcacttattaagtgataattttgcacatatattagtattactcaagacgatattatgaagtacaactgtgtaaatgttcttacaataaataaaatttagaaggtgcctggatttgtttattagacaataatattttaataacagtttgatgaaaaactacaattccagatgatgctccagttctgcaacttctttccgacaaaatgtccactcatatatttacaactctataagggtttagtgtgggcgtccacaccccttcaccatgcccccgcctcagcccccgtcaaccacgcaaggactccagcgtgaaagtcgggcccgtcgccggccttgcatcgtcgcgacacactccgtgcctcccttccatcatcgctcgatcgcggtttcgtcgcactccttccttcgatggcactcctttccatcctcgattcctcctgccccagcaccggccagcctcatcaggtcattcctcctcgctgtgccccctccaccgtattcaaccacctcttcctcggcaccaaacgtagacgcctcctccgcgatgccctcagaccgcccgtcctcgcccaacatctccttgccgcatatgcccgcagcggctgcctcgcatcccgcccgcacgccacctccttgcacccgcgcatggatgccactgcacgcctactatggaagggggacgcctactattgaagctcccatccacgatcccattccaaatccagcttcaaatttgccccaatctgcagtcaaccttccacccaacatcttccccttatatattgttgtctctgctataaaagacttgacagaggcgaggcctccaaaccactaccactctccaccgattcactggagtcgcgagacgttggaggccctgagacgttcaagcctcatctgcagtctcctccaaagaggtccacaaatgatttgagagctgtaggtctacaaatgataatgcaacaaattctgattcatgcatttctttactgtgtggaggccatttaattacgcctatttgatttgagagctcgagtagacaagatcatgtaggctctgaaatctatcttctggaggaccaaggccattaaagtacagggttctttcagcagcaatggcctcactatttcttctaaattaccaagattctcggacatgtacactctcacgatagcaagtgtagacccacagtttatcgtagcaaacaagccaatccatttcactaagagcgtgacaaagtgtcacagagcccttcttcttcgctctgccacccacaccgtggcacctcgccgagctccgcatcgaaactgcgttgttgccttctccgtgctctgcgttgaagacatgcagcgcaagcgtcgctgcctcatcccggcctcctctagacgcaagacgacaagaggatgctgctcgagctgtccccttggatcccacgccgaacgccctgtcacctccgtcgacaacatcaagctcctgtccctcccccacctcactgcaatagattcttcggttgtggaacttagggagagttttgagtcgtggtggtgtataaagcagtcgtcaagcacaagctcctccaaagtaccatcaggatcctacagtagaagagttagccaaaacactcgattgttggccatcaatgaattattatatcacgggttgtaaatatgttcttatgccatgaaaattcaacgaatgtcacgcccttttcgtaatagatcatgttaaaagcatgtgacttttatcgactttacaccgactcaagattggtgtaaacacatgccatacaagaggtttgcggaagctattatcatggcctcaaagaaatataagattgcttacaacaagaaacgttctggatgggcggaggatatctttaagtgggaacatacaattcagactggtgttccaattgacttaagagggtttaataccagctacctcgttctacaagttatgaccatgtgggggaatgacagacgaatgaaatttgttgggaatgcaaatattcttcgaaggaactttgtgattgatctgttaagttatgaggacaattcgtgccgatatgccatccctgcaaacatacaacagagacttatcgatatcgctaaaaaggattagctgattagtgtacggttgtcgacacatttgtctgtaattaaaaattctaaattatctttttagaaataatttgtgtgatattgataatgaaaaacacggattttgcatattatatagtgatgtttgtcgttccgtatcaa

SEQ ID NO: 205565 - DNA, 4544 bp, Zea Mays
ccacgcatcacacatgccacacgcgcgccagcaatcgcccccggtatctcgcccgcgccccaccaactctgcccttgaacccgcctgccaccaatctcgtcgccgggtatcccgcccgccaccaaaccgcgccccctgtcctcgccctcgacggcgctgccctttgtgatggtgcccttccttccccagctcccccaaatgctgccaagtcccccaccaacgccgcccttccttccccggcagcccgcccccactagctccgcgctccgcgtgccccaccagccacgctagctgccgccgggatactcaccacctccgcgcccccaccaaaccgaaaggcgagatccgccgccagttccacgctccgcgcgtcaagagcagccatcacagtgatgccgcgcgagggagaggaaggaaggccgcgtgagtcgccgcagggaaagctgccaggcatcaccgtaaggtgagatccggttgcgcgtgagggagaggaaggaaggccgcgtgagtcgccgccgagaaagccacagggaaagccgccagtgtgagtcgccgccgggaaagccgccagtgtatgatggttcggtcatccagatgtgggtggcgtacaacgttgtcactcatttcctcctgcactgtaccgactgcaaggcgcaagctcactggcgtgttcgacctcctgaagattatgctatacaaggtgtgcgcaaatggctcatcggcgcttcccgattgggagatggaggccagcatcatggagttctacgctgttgcatcttctaagtggcatcaccgagctggacgacaggaaacagagaaaattgtgcctgaaaaaatttaggagcagggatgagcatttatcagaagtggacacaaagagggagcttgagtgtgggctctgcatgcggtgctttgagtattggtaatagctcttttctcctagcttaaaatcatgcataaagtttgattttttgtaggctccacatttaaacaaatttggtcatgttagcttatggatggcataaaagtactatttctcatgggttctgaagcagaattatagtcaagtacttctcgtgttgaaactatggactgggaaacatgacaaatttgcttttagtaaaattacgaagtgttgtcttttttaaaaatattggtgtcatgtttttttaatgaagcagtttcaatgtatgtggtcggtttggagcatttttaggagacatgatatgtgggatagaaaagctgatggagataacctaaacatagacaaacagccacatacctccagcatggacattccagtagtaattgaagaagctgccaacaaatacaaagcaccatatctctgcaggacaaatcaagataatacactgctaaaataagttgtattagaccattaaagtatgagcatttagctaagagttgccctgtgttttttgttttacccatgataactgtcagtacaagtgtacaacaaattttatagtagtactttggaggacaaaactggtgctggtcattttagatattcgtgcctctcaaataccttaagatggcttgaattcttattgttcatatacattatcgtttttaggcacacaataatgaacctctacagattgtttgtggttatcatgctcttcctcaaccacctcatggtggtgaacttgtattccacacccttgaacatgtccaacctctgaaatactcctggcctggattacccttgttgggttttgtagaggcgatttgaacatttaaagtagatacttgacctatcatgactctagcctgcagtatcattcctccatttctctaatcttgaaacttagaatatagatcaatttacatttggcgactgcagaagaagctcaacactcaagaccttttcttatgatataatattgacaaccaagattttcttctatctttatttttttgctgtttgtgaaattccacagataagacctgtatgctctggcgtgagttatttttctcaatcaacaggaagaagtgaagtgagagatttcattagttcttgaaccaaccaaacatttttgaactgtaaatacagtagggcactgtaacaaaagtttattagaactaaagaaacaccaatattttagctactttaaggcaggtccattcaaaaagttttgtttctcaccctgctcaggctttgtacagtcttttttttgtttgctgacgccttcctaggaaaggggatcttctgcgacgatagcgatgaagacgaagacagtgaccaggagagggaggtgaacaaggagatggttgtctaccttatcgatgcctcgcccaaaatgttcacccctgccaccacctagggcaatgaaaagcaggagacacatttccataccattgttaactgcatcacagagtctctgaagacacaaattattggtagaacttatgatgaagtcgcaatatgtctctttaacactatgatgctccagttctgcaacttctttccgacaaaatgtccactcatatatttacaactctataagggtttagtgtgggcgtccacaccccttcaccatgcccccgcctcagcccccgtcaaccacgcaaggactccagcgtgaaagtcgggcccgtcgccggccttgcatcgtcgcgacacactccgtgcctcccttccatcatcgctcgatcgcggtttcgtcgcactccttccttcgatggcactcctttccatcctcgattcctcctgccccagcaccggccagcctcatcaggtcattcctcctcgctgtgccccctccaccgtattcaaccacctcttcctcggcaccaaacgtagacgcctcctccgcgatgccctcagaccgcccgtcctcgcccaacatctccttgccgcatatgcccgcagcggctgcctcgcatcccgcccgcacgccacctccttgcacccgcgcatggatgccactgcacgcctactatggaagggggacgcctactattgaagctcccatccacgatcccattccaaatccagcttcaaatttgccccaatctgcagtcaaccttccacccaacatcttccccttatatattgttgtctctgctataaaagacttgacagaggcgaggcctccaaaccactaccactctccaccgattcactggagtcgcgagacgttggaggccctgagacgttcaagcctcatctgcagtctcctccaaagaggtccacaaatgatttgagagctgtaggtctacaaatgataatgcaacaaattctgattcatgcatttctttactgtgtggaggccatttaattacgcctatttgatttgagagctcgagtagacaagatcatgtaggctctgaaatctatcttctggaggaccaaggccattaaagtacagcagcaatggcctcactatttcttctaaattaccaagattctcggacatgtacactctcacgatagcaagtgtagacccacagtttatcgtagcaaacaagccaatccatttcactaagagcgtgacaaagtgtcacagagcccttcttcttcgctctgccacccacaccgtggcacctcgccgagctccgcatcgaaactgcgttgttgccttctccgtgctctgcgttgaagacatgcagcgcaagcgtcgctgcctcatcccggcctcctctagacgcaagacgacaagaggatgctgctcgagctgtccccttggatcccacgccgaacgccctgtcacctccgtcgacaacatcaagctcctgtccctcccccacctcactgcaatagattcttcggttgtggaacttagggagagttttgagtcgtggtggtgtataaagcagtcgtcaagcacaagctcctccaaagtaccatcaggatcctacagtagaagagttagccaaaacactcgattgttggccatcaatgaattattatatcacgggttgtaaatatgttcttatgccatgaaaattcaacgaatgtcacgcccttttcgtaatagatcatgttaaaagcatgtgacttttatcgactttacaccgactcaagattggtgtaaacacatgccatacaagaggtttgcggaagctattatcatggcctcaaagaaatataagattgcttacaacaagaaacgttctggatgggcggaggatatctttaagtgggaacatacaattcagactggtgttccaattgacttaagagggtttaataccagctacctcgttctacaagttatgaccatgtgggggaatgacagacgaatgaaatttgttgggaatgcaaatattcttcgaaggaactttgtgattgatctgttaagttatgaggacaattcgtgccgatatgccatccctgcaaacatacaacagagacttatcgatatcgctaaaaaggattagctgattagtgtacggttgtcgacacatttgtctgtaattaaaaattctaaattatctttttagaaataatttgtgtgatattgataatgaaaaacacggattttgcatattatatagtgatgtttgtcgttccgtatcaa

SEQ ID NO: 205566 - DNA, 4492 bp, Zea Mays
ccacgcatcacacatgccacacgcgcgccagcaatcgcccccggtatctcgcccgcgccccaccaactctgcccttgaacccgcctgccaccaatctcgtcgccgggtatcccgcccgccaccaaaccgcgccccctgtcctcgccctcgacggcgctgccctttgtgatggtgcccttccttccccagctcccccaaatgctgccaagtcccccaccaacgccgcccttccttccccggcagcccgcccccactagctccgcgctccgcgtgccccaccagccacgctagctgccgccgggatactcaccacctccgcgcccccaccaaaccgaaaggcgagatccgccgccagttccacgctccgcgcgtcaagagcagccatcacagtgatgccgcgcgagggagaggaaggaaggccgcgtgagtcgccgcagggaaagctgccaggcatcaccgtaaggtgagatccggttgcgcgtgagggagaggaaggaaggccgcgtgagtcgccgccgagaaagccacagggaaagccgccagtgtgagtcgccgccgggaaagccgccagtgtatgatggttcggtcatccagatgtgggtggcgtacaacgttgtcactcatttcctcctgcactgtaccgactgcaaggcgcaagctcactggcgtgttcgacctcctgaagattatgctatacaaggtgtgcgcaaatggctcatcggcgcttcccgattgggagatggaggccagcatcatggagttctacgctgttgcatcttctaagtggcatcaccgagctggacgacaggaaacagagaaaattgtgcctgaaaaaatttaggagcagggatgagcatttatcagaagtggacacaaagagggagcttgagtgtgggctctgcatgcggtgctttgagtattggtaatagctcttttctcctagcttaaaatcatgcataaagtttgattttttgtaggctccacatttaaacaaatttggtcatgttagcttatggatggcataaaagtactatttctcatgggttctgaagcagaattatagtcaagtacttctcgtgttgaaactatggactgggaaacatgacaaatttgcttttagtaaaattacgaagtgttgtcttttttaaaaatattggtgtcatgtttttttaatgaagcagtttcaatgtatgtggtcggtttggagcatttttaggagacatgatatgtgggatagaaaagctgatggagataacctaaacatagacaaacagccacatacctccagcatggacattccagtagtaattgaagaagctgccaacaaatacaaagcaccatatctctgcaggacaaatcaagataatacactgctaaaataagttgtattagaccattaaagtatgagcatttagctaagagttgccctgtgttttttgttttacccatgataactgtcagtacaagtgtacaacaaattttatagtagtactttggaggacaaaactggtgctggtcattttagatattcgtgcctctcaaataccttaagatggcttgaattcttattgttcatatacattatcgtttttaggcacacaataatgaacctctacagattgtttgtggttatcatgctcttcctcaaccacctcatggtggtgaacttgtattccacacccttgaacatgtccaacctctgaaatactcctggcctggattacccttgttgggttttgtagaggcgatttgaacatttaaagtagatacttgacctatcatgactctagcctgcagtatcattcctccatttctctaatcttgaaacttagaatatagatcaatttacatttggcgactgcagaagaagctcaacactcaagaccttttcttatgatataatattgacaaccaagattttcttctatctttatttttttgctgtttgtgaaattccacagataagacctgtatgctctggcgtgagttatttttctcaatcaacaggaagaagtgaagtgagagatttcattagttcttgaaccaaccaaacatttttgaactgtaaatacagtagggcactgtaacaaaagtttattagaactaaagaaacaccaatattttagctactttaaggcaggtccattcaaaaagttttgtttctcaccctgctcaggctttgtacagtcttttttttgtttgctgacgccttcctaggaaaggggatcttctgcgacgatagcgatgaagacgaagacagtgaccaggagagggaggtgaacaaggagatggttgtctaccttatcgatgcctcgcccaaaatgttcacccctgccaccacctagggcaatgaaaagcaggagacacatttccataccattgttaactgcatcacagagtctctgaagacacaaattattggtagaacttatgatgaagtcgcaatatgtctctttaacactggtttagtgtgggcgtccacaccccttcaccatgcccccgcctcagcccccgtcaaccacgcaaggactccagcgtgaaagtcgggcccgtcgccggccttgcatcgtcgcgacacactccgtgcctcccttccatcatcgctcgatcgcggtttcgtcgcactccttccttcgatggcactcctttccatcctcgattcctcctgccccagcaccggccagcctcatcaggtcattcctcctcgctgtgccccctccaccgtattcaaccacctcttcctcggcaccaaacgtagacgcctcctccgcgatgccctcagaccgcccgtcctcgcccaacatctccttgccgcatatgcccgcagcggctgcctcgcatcccgcccgcacgccacctccttgcacccgcgcatggatgccactgcacgcctactatggaagggggacgcctactattgaagctcccatccacgatcccattccaaatccagcttcaaatttgccccaatctgcagtcaaccttccacccaacatcttccccttatatattgttgtctctgctataaaagacttgacagaggcgaggcctccaaaccactaccactctccaccgattcactggagtcgcgagacgttggaggccctgagacgttcaagcctcatctgcagtctcctccaaagaggccatttaattacgcctatttgatttgagagctcgagtagacaagatcatgtaggctctgaaatctatcttctggaggaccaaggccattaaagtacagggttctttcagcagcaatggcctcactatttcttctaaattaccaagattctcggacatgtacactctcacgatagcaagtgtagacccacagtttatcgtagcaaacaagccaatccatttcactaagagcgtgacaaagtgtcacagagcccttcttcttcgctctgccacccacaccgtggcacctcgccgagctccgcatcgaaactgcgttgttgccttctccgtgctctgcgttgaagacatgcagcgcaagcgtcgctgcctcatcccggcctcctctagacgcaagacgacaagaggatgctgctcgagctgtccccttggatcccacgccgaacgccctgtcacctccgtcgacaacatcaagctcctgtccctcccccacctcactgcaatagattcttcggttgtggaacttagggagagttttgagtcgtggtggtgtataaagcagtcgtcaagcacaagctcctccaaagtaccatcaggatcctacagtagaagagttagccaaaacactcgattgttggccatcaatgaattattatatcacgggttgtaaatatgttcttatgccatgaaaattcaacgaatgtcacgcccttttcgtaatagatcatgttaaaagcatgtgacttttatcgactttacaccgactcaagattggtgtaaacacatgccatacaagaggtttgcggaagctattatcatggcctcaaagaaatataagattgcttacaacaagaaacgttctggatgggcggaggatatctttaagtgggaacatacaattcagactggtgttccaattgacttaagagggtattttcttcgtaccttctcagcagtttaatttttttatgataatcattgtataaaacatagttggccaaacattattctataggtttaataccagctacctcgttctacaagttatgaccatgtgggggaatgacagacgaatgaaatttgttgggaatgcaaatattcttcgaaggaactttgtgattgatctgttaagttatgaggacaattcgtgccgatatgccatccctgcaaacatacaacagagacttatcgatatcgctaaaaaggattagctgattagtgtacggttgtcgacacatttgtctgtaattaaaaattctaaattatctttttagaaataatttgtgtgatattgataatgaaaaacacggattttgcatattatatagtgatgtttgtcgttccgtatcaa

SEQ ID NO: 205567 - DNA, 3557 bp, Zea Mays
ccacgcatcacacatgccacacgcgcgccagcaatcgcccccggtatctcgcccgcgccccaccaactctgcccttgaacccgcctgccaccaatctcgtcgccgggtatcccgcccgccaccaaaccgcgccccctgtcctcgccctcgacggcgctgccctttgtgatggtgcccttccttccccagctcccccaaatgctgccaagtcccccaccaacgccgcccttccttccccggcagcccgcccccactagctccgcgctccgcgtgccccaccagccacgctagctgccgccgggatactcaccacctccgcgcccccaccaaaccgaaaggcgagatccgccgccagttccacgctccgcgcgtcaagagcagccatcacagtgatgccgcgcgagggagaggaaggaaggccgcgtgagtcgccgcagggaaagctgccaggcatcaccgtaaggtgagatccggttgcgcgtgagggagaggaaggaaggccgcgtgagtcgccgccgagaaagccacagggaaagccgccagtgtgagtcgccgccgggaaagccgccagtgtatgatggttcggtcatccagatgtgggtggcgtacaacgttgtcactcatttcctcctgcactgtaccgactgcaaggcgcaagctcactggcgtgttcgacctcctgaagattatgctatacaaggtgtgcgcaaatggctcatcggcgcttcccgattgggagatggaggccagcatcatggagttctacgctgttgcatcttctaagtggcatcaccgagctggacgacaggaaacagagaaaattgtgcctgaaaaaatttaggagcagggatgagcatttatcagaagtggacacaaagagggagcttgagtgtgggctctgcatgcggtgctttgagtattggctttgtacagtcttttttttgtttgctgacgccttcctaggaaaggggatcttctgcgacgatagcgatgaagacgaagacagtgaccagcaggagagggaggtgaacaaggagatggttgtctaccttatcgatgcctcgcccaaaatgttcacccctgccaccacctagggcaatgaaaagcaggagacacatttccataccattgttaactgcatcacagagtctctgaagacacaaattattggtagaacttatgatgaagtcgcaatatgtctctttaacactgtaagctctttctcacatcagtaagcatacacctgtcacatttgcagttctatgttagatgtagatgagttgcagtattttgcttattttcttaaaagtgaaataatgagctgactatgcaactgtctttttgtattagttattagttattgtcaatgctaaccatttcacttattaagtgataattttgcacatatattagtattactcaagacgatattatgaagtacaactgtgtaaatgttcttacaataaataaaatttagaaggtgcctggatttgtttattagacaataatattttaataacagtttgatgaaaaactacaattccagatgatgctccagttctgcaacttctttccgacaaaatgtccactcatatatttacaactctataagggtttagtgtgggcgtccacaccccttcaccatgcccccgcctcagcccccgtcaaccacgcaaggactccagcgtgaaagtcgggcccgtcgccggccttgcatcgtcgcgacacactccgtgcctcccttccatcatcgctcgatcgcggtttcgtcgcactccttccttcgatggcactcctttccatcctcgattcctcctgccccagcaccggccagcctcatcaggtcattcctcctcgctgtgccccctccaccgtattcaaccacctcttcctcggcaccaaacgtagacgcctcctccgcgatgccctcagaccgcccgtcctcgcccaacatctccttgccgcatatgcccgcagcggctgcctcgcatcccgcccgcacgccacctccttgcacccgcgcatggatgccactgcacgcctactatggaagggggacgcctactattgaagctcccatccacgatcccattccaaatccagcttcaaatttgccccaatctgcagtcaaccttccacccaacatcttccccttatatattgttgtctctgctataaaagacttgacagaggcgaggcctccaaaccactaccactctccaccgattcactggagtcgcgagacgttggaggccctgagacgttcaagcctcatctgcagtctcctccaaagaggccatttaattacgcctatttgatttgagagctcgagtagacaagatcatgtaggctctgaaatctatcttctggaggaccaaggccattaaagtacagggttctttcagcagcaatggcctcactatttcttctaaattaccaagattctcggacatgtacactctcacgatagcaagtgtagacccacagtttatcgtagcaaacaagccaatccatttcactaagagcgtgacaaagtgtcacagagcccttcttcttcgctctgccacccacaccgtggcacctcgccgagctccgcatcgaaactgcgttgttgccttctccgtgctctgcgttgaagacatgcagcgcaagcgtcgctgcctcatcccggcctcctctagacgcaagacgacaagaggatgctgctcgagctgtccccttggatcccacgccgaacgccctgtcacctccgtcgacaacatcaagctcctgtccctcccccacctcactgcaatagattcttcggttgtggaacttagggagagttttgagtcgtggtggtgtataaagcagtcgtcaagcacaagctcctccaaagtaccatcaggatcctacagtagaagagttagccaaaacactcgattgttggccatcaatgaattattatatcacgggttgtaaatatgttcttatgccatgaaaattcaacgaatgtcacgcccttttcgtaatagatcatgttaaaagcatgtgacttttatcgactttacaccgactcaagattggtgtaaacacatgccatacaagaggtttgcggaagctattatcatggcctcaaagaaatataagattgcttacaacaagaaacgttctggatgggcggaggatatctttaagtgggaacatacaattcagactggtgttccaattgacttaagagggtttaataccagctacctcgttctacaagttatgaccatgtgggggaatgacagacgaatgaaatttgttgggaatgcaaatattcttcgaaggaactttgtgattgatctgttaagttatgaggacaattcgtgccgatatgccatccctgcaaacatacaacagagacttatcgatatcgctaaaaaggattagctgattagtgtacggttgtcgacacatttgtctgtaattaaaaattctaaattatctttttagaaataatttgtgtgatattgataatgaaaaacacggattttgcatattatatagtgatgtttgtcgttccgtatcaa

SEQ ID NO: 205568 - DNA, 4669 bp, Zea Mays
ccacgcatcacacatgccacacgcgcgccagcaatcgcccccggtatctcgcccgcgccccaccaactctgcccttgaacccgcctgccaccaatctcgtcgccgggtatcccgcccgccaccaaaccgcgccccctgtcctcgccctcgacggcgctgccctttgtgatggtgcccttccttccccagctcccccaaatgctgccaagtcccccaccaacgccgcccttccttccccggcagcccgcccccactagctccgcgctccgcgtgccccaccagccacgctagctgccgccgggatactcaccacctccgcgcccccaccaaaccgaaaggcgagatccgccgccagttccacgctccgcgcgtcaagagcagccatcacagtgatgccgcgcgagggagaggaaggaaggccgcgtgagtcgccgcagggaaagctgccaggcatcaccgtaaggtgagatccggttgcgcgtgagggagaggaaggaaggccgcgtgagtcgccgccgagaaagccacagggaaagccgccagtgtgagtcgccgccgggaaagccgccagtgtatgatggttcggtcatccagatgtgggtggcgtacaacgttgtcactcatttcctcctgcactgtaccgactgcaaggcgcaagctcactggcgtgttcgacctcctgaagattatgctatacaaggtgtgcgcaaatggctcatcggcgcttcccgattgggagatggaggccagcatcatggagttctacgctgttgcatcttctaagtggcatcaccgagctggacgacaggaaacagagaaaattgtgcctgaaaaaatttaggagcagggatgagcatttatcagaagtggacacaaagagggagcttgagtgtgggctctgcatgcggtgctttgagtattggtaatagctcttttctcctagcttaaaatcatgcataaagtttgattttttgtaggctccacatttaaacaaatttggtcatgttagcttatggatggcataaaagtactatttctcatgggttctgaagcagaattatagtcaagtacttctcgtgttgaaactatggactgggaaacatgacaaatttgcttttagtaaaattacgaagtgttgtcttttttaaaaatattggtgtcatgtttttttaatgaagcagtttcaatgtatgtggtcggtttggagcatttttaggagacatgatatgtgggatagaaaagctgatggagataacctaaacatagacaaacagccacatacctccagcatggacattccagtagtaattgaagaagctgccaacaaatacaaagcaccatatctctgcaggacaaatcaagataatacactgctaaaataagttgtattagaccattaaagtatgagcatttagctaagagttgccctgtgttttttgttttacccatgataactgtcagtacaagtgtacaacaaattttatagtagtactttggaggacaaaactggtgctggtcattttagatattcgtgcctctcaaataccttaagatggcttgaattcttattgttcatatacattatcgtttttaggcacacaataatgaacctctacagattgtttgtggttatcatgctcttcctcaaccacctcatggtggtgaacttgtattccacacccttgaacatgtccaacctctgaaatactcctggcctggattacccttgttgggttttgtagaggcgatttgaacatttaaagtagatacttgacctatcatgactctagcctgcagtatcattcctccatttctctaatcttgaaacttagaatatagatcaatttacatttggcgactgcagaagaagctcaacactcaagaccttttcttatgatataatattgacaaccaagattttcttctatctttatttttttgctgtttgtgaaattccacagataagacctgtatgctctggcgtgagttatttttctcaatcaacaggaagaagtgaagtgagagatttcattagttcttgaaccaaccaaacatttttgaactgtaaatacagtagggcactgtaacaaaagtttattagaactaaagaaacaccaatattttagctactttaaggcaggtccattcaaaaagttttgtttctcaccctgctcaggctttgtacagtcttttttttgtttgctgacgccttcctaggaaaggggatcttctgcgacgatagcgatgaagacgaagacagtgaccaggagagggaggtgaacaaggagatggttgtctaccttatcgatgcctcgcccaaaatgttcacccctgccaccacctagggcaatgaaaagcaggagacacatttccataccattgttaactgcatcacagagtctctgaagacacaaattattggtagaacttatgatgaagtcgcaatatgtctctttaacactatgatgctccagttctgcaacttctttccgacaaaatgtccactcatatatttacaactctataagggtttagtgtgggcgtccacaccccttcaccatgcccccgcctcagcccccgtcaaccacgcaaggactccagcgtgaaagtcgggcccgtcgccggccttgcatcgtcgcgacacactccgtgcctcccttccatcatcgctcgatcgcggtttcgtcgcactccttccttcgatggcactcctttccatcctcgattcctcctgccccagcaccggccagcctcatcaggtcattcctcctcgctgtgccccctccaccgtattcaaccacctcttcctcggcaccaaacgtagacgcctcctccgcgatgccctcagaccgcccgtcctcgcccaacatctccttgccgcatatgcccgcagcggctgcctcgcatcccgcccgcacgccacctccttgcacccgcgcatggatgccactgcacgcctactatggaagggggacgcctactattgaagctcccatccacgatcccattccaaatccagcttcaaatttgccccaatctgcagtcaaccttccacccaacatcttccccttatatattgttgtctctgctataaaagacttgacagaggcgaggcctccaaaccactaccactctccaccgattcactggagtcgcgagacgttggaggccctgagacgttcaagcctcatctgcagtctcctccaaagaggtgagtctcacttaatgtttggtaccttctgttttttgggaatgtgggttcattttggatgcttccggggcagtggtaaacactttgctctgtatatattcttgcatctctttaatgtaggtccacaaatgatttgagagctgtaggtctacaaatgataatgcaacaaattctgattcatgcatttctttactgtgtggaggccatttaattacgcctatttgatttgagagctcgagtagacaagatcatgtaggctctgaaatctatcttctggaggaccaaggccattaaagtacagggttctttcagcagcaatggcctcactatttcttctaaattaccaagattctcggacatgtacactctcacgatagcaagtgtagacccacagtttatcgtagcaaacaagccaatccatttcactaagagcgtgacaaagtgagcccttcttcttcgctctgccacccacaccgtggcacctcgccgagctccgcatcgaaactgcgttgttgccttctccgtgctctgcgttgaagacatgcagcgcaagcgtcgctgcctcatcccggcctcctctagacgcaagacgacaagaggatgctgctcgagctgtccccttggatcccacgccgaacgccctgtcacctccgtcgacaacatcaagctcctgtccctcccccacctcactgcaatagattcttcggttgtggaacttagggagagttttgagtcgtggtggtgtataaagcagtcgtcaagcacaagctcctccaaagtaccatcaggatcctacagtagaagagttagccaaaacactcgattgttggccatcaatgaattattatatcacgggttgtaaatatgttcttatgccatgaaaattcaacgaatgtcacgcccttttcgtaatagatcatgttaaaagcatgtgacttttatcgactttacaccgactcaagattggtgtaaacacatgccatacaagaggtttgcggaagctattatcatggcctcaaagaaatataagattgcttacaacaagaaacgttctggatgggcggaggatatctttaagtgggaacatacaattcagactggtgttccaattgacttaagagggtttaataccagctacctcgttctacaagttatgaccatgtgggggaatgacagacgaatgaaatttgttgggaatgcaaatattcttcgaaggaactttgtgattgatctgttaagttatgaggacaattcgtgccgatatgccatccctgcaaacatacaacagagacttatcgatatcgctaaaaaggattagctgattagtgtacggttgtcgacacatttgtctgtaattaaaaattctaaattatctttttagaaataatttgtgtgatattgataatgaaaaacacggattttgcatattatatagtgatgtttgtcgttccgtatcaa

SEQ ID NO: 205569 - DNA, 3208 bp, Zea Mays
ccacgcatcacacatgccacacgcgcgccagcaatcgcccccggtatctcgcccgcgccccaccaactctgcccttgaacccgcctgccaccaatctcgtcgccgggtatcccgcccgccaccaaaccgcgccccctgtcctcgccctcgacggcgctgccctttgtgatggtgcccttccttccccagctcccccaaatgctgccaagtcccccaccaacgccgcccttccttccccggcagcccgcccccactagctccgcgctccgcgtgccccaccagccacgctagctgccgccgggatactcaccacctccgcgcccccaccaaaccgaaaggcgagatccgccgccagttccacgctccgcgcgtcaagagcagccatcacagtgatgccgcgcgagggagaggaaggaaggccgcgtgagtcgccgcagggaaagctgccaggcatcaccgtaaggtgagatccggttgcgcgtgagggagaggaaggaaggccgcgtgagtcgccgccgagaaagccacagggaaagccgccagtgtgagtcgccgccgggaaagccgccagtgtatgatggttcggtcatccagatgtgggtggcgtacaacgttgtcactcatttcctcctgcactgtaccgactgcaaggcgcaagctcactggcgtgttcgacctcctgaagattatgctatacaaggtgtgcgcaaatggctcatcggcgcttcccgattgggagatggaggccagcatcatggagttctacgctgttgcatcttctaagtggcatcaccgagctggacgacaggaaacagagaaaattgtgcctgaaaaaatttaggagcagggatgagcatttatcagaagtggacacaaagagggagcttgagtgtgggctctgcatgcggtgctttgagtattgtcttttttttgtttgctgacgccttcctaggaaaggggatcttctgcgacgatagcgatgaagacgaagacagtgaccaggagagggaggtgaacaaggagatggttgtctaccttatcgatgcctcgcccaaaatgttcacccctgccaccacctagggcaatgaaaagcaggagacacatttccataccattgttaactgcatcacagagtctctgaagacacaaattattggtagaacttatgatgaagtcgcaatatgtctctttaacactatgatgctccagttctgcaacttctttccgacaaaatgtccactcatatatttacaactctataagggtttagtgtgggcgtccacaccccttcaccatgcccccgcctcagcccccgtcaaccacgcaaggactccagcgtgaaagtcgggcccgtcgccggccttgcatcgtcgcgacacactccgtgcctcccttccatcatcgctcgatcgcggtttcgtcgcactccttccttcgatggcactcctttccatcctcgattcctcctgccccagcaccggccagcctcatcaggtcattcctcctcgctgtgccccctccaccgtattcaaccacctcttcctcggcaccaaacgtagacgcctcctccgcgatgccctcagaccgcccgtcctcgcccaacatctccttgccgcatatgcccgcagcggctgcctcgcatcccgcccgcacgccacctccttgcacccgcgcatggatgccactgcacgcctactatggaagggggacgcctactattgaagctcccatccacgatcccattccaaatccagcttcaaatttgccccaatctgcagtcaaccttccacccaacatcttccccttatatattgttgtctctgctataaaagacttgacagaggcgaggcctccaaaccactaccactctccaccgattcactggagtcgcgagacgttggaggccctgagacgttcaagcctcatctgcagtctcctccaaagaggccatttaattacgcctatttgatttgagagctcgagtagacaagatcatgtaggctctgaaatctatcttctggaggaccaaggccattaaagtacagggttctttcagcagcaatggcctcactatttcttctaaattaccaagattctcggacatgtacactctcacgatagcaagtgtagacccacagtttatcgtagcaaacaagccaatccatttcactaagagcgtgacaaagtgtcacagagcccttcttcttcgctctgccacccacaccgtggcacctcgccgagctccgcatcgaaactgcgttgttgccttctccgtgctctgcgttgaagacatgcagcgcaagcgtcgctgcctcatcccggcctcctctagacgcaagacgacaagaggatgctgctcgagctgtccccttggatcccacgccgaacgccctgtcacctccgtcgacaacatcaagctcctgtccctcccccacctcactgcaatagattcttcggttgtggaacttagggagagttttgagtcgtggtggtgtataaagcagtcgtcaagcacaagctcctccaaagtaccatcaggatcctacagtagaagagttagccaaaacactcgattgttggccatcaatgaattattatatcacgggttgtaaatatgttcttatgccatgaaaattcaacgaatgtcacgcccttttcgtaatagatcatgttaaaagcatgtgacttttatcgactttacaccgactcaagattggtgtaaacacatgccatacaagaggtttgcggaagctattatcatggcctcaaagaaatataagattgcttacaacaagaaacgttctggatgggcggaggatatctttaagtgggaacatacaattcagactggtgttccaattgacttaagagggtttaataccagctacctcgttctacaagttatgaccatgtgggggaatgacagacgaatgaaatttgttgggaatgcaaatattcttcgaaggaactttgtgattgatctgttaagttatgaggacaattcgtgccgatatgccatccctgcaaacatacaacagagacttatcgatatcgctaaaaaggattagctgattagtgtacggttgtcgacacatttgtctgtaattaaaaattctaaattatctttttagaaataatttgtgtgatattgataatgaaaaacacggattttgcatattatatagtgatgtttgtcgttccgtatcaa

SEQ ID NO: 205570 - DNA, 3486 bp, Zea Mays
ccacgcatcacacatgccacacgcgcgccagcaatcgcccccggtatctcgcccgcgccccaccaactctgcccttgaacccgcctgccaccaatctcgtcgccgggtatcccgcccgccaccaaaccgcgccccctgtcctcgccctcgacggcgctgccctttgtgatggtgcccttccttccccagctcccccaaatgctgccaagtcccccaccaacgccgcccttccttccccggcagcccgcccccactagctccgcgctccgcgtgccccaccagccacgctagctgccgccgggatactcaccacctccgcgcccccaccaaaccgaaaggcgagatccgccgccagttccacgctccgcgcgtcaagagcagccatcacagtgatgccgcgcgagggagaggaaggaaggccgcgtgagtcgccgcagggaaagctgccaggcatcaccgtaaggtgagatccggttgcgcgtgagggagaggaaggaaggccgcgtgagtcgccgccgagaaagccacagggaaagccgccagtgtgagtcgccgccgggaaagccgccagtgtatgatggttcggtcatccagatgtgggtggcgtacaacgttgtcactcatttcctcctgcactgtaccgactgcaaggcgcaagctcactggcgtgttcgacctcctgaagattatgctatacaaggtgtgcgcaaatggctcatcggcgcttcccgattgggagatggaggccagcatcatggagttctacgctgttgcatcttctaagtggcatcaccgagctggacgacaggaaacagagaaaattgtgcctgaaaaaatttaggagcagggatgagcatttatcagaagtggacacaaagagggagcttgagtgtgggctctgcatgcggtgctttgagtattgtcttttttttgtttgctgacgccttcctaggaaaggggatcttctgcgacgatagcgatgaagacgaagacagtgaccaggagagggaggtgaacaaggagatggttgtctaccttatcgatgcctcgcccaaaatgttcacccctgccaccacctagggcaatgaaaagcaggagacacatttccataccattgttaactgcatcacagagtctctgaagacacaaattattggtagaacttatgatgaagtcgcaatatgtctctttaacactttattagttattgtcaatgctaaccatttcacttattaagtgataattttgcacatatattagtattactcaagacgatattatgaagtacaactgtgtaaatgttcttacaataaataaaatttagaaggtgcctggatttgtttattagacaataatattttaataacagtttgatgaaaaactacaattccagatgatgctccagttctgcaacttctttccgacaaaatgtccactcatatatttacaactctataagggtttagtgtgggcgtccacaccccttcaccatgcccccgcctcagcccccgtcaaccacgcaaggactccagcgtgaaagtcgggcccgtcgccggccttgcatcgtcgcgacacactccgtgcctcccttccatcatcgctcgatcgcggtttcgtcgcactccttccttcgatggcactcctttccatcctcgattcctcctgccccagcaccggccagcctcatcaggtcattcctcctcgctgtgccccctccaccgtattcaaccacctcttcctcggcaccaaacgtagacgcctcctccgcgatgccctcagaccgcccgtcctcgcccaacatctccttgccgcatatgcccgcagcggctgcctcgcatcccgcccgcacgccacctccttgcacccgcgcatggatgccactgcacgcctactatggaagggggacgcctactattgaagctcccatccacgatcccattccaaatccagcttcaaatttgccccaatctgcagtcaaccttccacccaacatcttccccttatatattgttgtctctgctataaaagacttgacagaggcgaggcctccaaaccactaccactctccaccgattcactggagtcgcgagacgttggaggccctgagacgttcaagcctcatctgcagtctcctccaaagaggtccacaaatgatttgagagctgtaggtctacaaatgataatgcaacaaattctgattcatgcatttctttactgtgtggaggccatttaattacgcctatttgatttgagagctcgagtagacaagatcatgtaggctctgaaatctatcttctggaggaccaaggccattaaagtacagggttctttcagcagcaatggcctcactatttcttctaaattaccaagattctcggacatgtacactctcacgatagcaagtgtagacccacagtttatcgtagcaaacaagccaatccatttcactaagagcgtgacaaagtgtcacagagcccttcttcttcgctctgccacccacaccgtggcacctcgccgagctccgcatcgaaactgcgttgttgccttctccgtgctctgcgttgaagacatgcagcgcaagcgtcgctgcctcatcccggcctcctctagacgcaagacgacaagaggatgctgctcgagctgtccccttggatcccacgccgaacgccctgtcacctccgtcgacaacatcaagctcctgtccctcccccacctcactgcaatagattcttcggttgtggaacttagggagagttttgagtcgtggtggtgtataaagcagtcgtcaagcacaagctcctccaaagtaccatcaggatcctacagtagaagagttagccaaaacactcgattgttggccatcaatgaattattatatcacgggttgtaaatatgttcttatgccatgaaaattcaacgaatgtcacgcccttttcgtaatagatcatgttaaaagcatgtgacttttatcgactttacaccgactcaagattggtgtaaacacatgccatacaagaggtttgcggaagctattatcatggcctcaaagaaatataagattgcttacaacaagaaacgttctggatgggcggaggatatctttaagtgggaacatacaattcagactggtgttccaattgacttaagagggtttaataccagctacctcgttctacaagttatgaccatgtgggggaatgacagacgaatgaaatttgttgggaatgcaaatattcttcgaaggaactttgtgattgatctgttaagttatgaggacaattcgtgccgatatgccatccctgcaaacatacaacagagacttatcgatatcgctaaaaaggattagctgattagtgtacggttgtcgacacatttgtctgtaattaaaaattctaaattatctttttagaaataatttgtgtgatattgataatgaaaaacacggattttgcatattatatagtgatgtttgtcgttccgtatcaa

SEQ ID NO: 205571 - DNA, 4473 bp, Zea Mays
ccacgcatcacacatgccacacgcgcgccagcaatcgcccccggtatctcgcccgcgccccaccaactctgcccttgaacccgcctgccaccaatctcgtcgccgggtatcccgcccgccaccaaaccgcgccccctgtcctcgccctcgacggcgctgccctttgtgatggtgcccttccttccccagctcccccaaatgctgccaagtcccccaccaacgccgcccttccttccccggcagcccgcccccactagctccgcgctccgcgtgccccaccagccacgctagctgccgccgggatactcaccacctccgcgcccccaccaaaccgaaaggcgagatccgccgccagttccacgctccgcgcgtcaagagcagccatcacagtgatgccgcgcgagggagaggaaggaaggccgcgtgagtcgccgcagggaaagctgccaggcatcaccgtaaggtgagatccggttgcgcgtgagggagaggaaggaaggccgcgtgagtcgccgccgagaaagccacagggaaagccgccagtgtgagtcgccgccgggaaagccgccagtgtatgatggttcggtcatccagatgtgggtggcgtacaacgttgtcactcatttcctcctgcactgtaccgactgcaaggcgcaagctcactggcgtgttcgacctcctgaagattatgctatacaaggtgtgcgcaaatggctcatcggcgcttcccgattgggagatggaggccagcatcatggagttctacgctgttgcatcttctaagtggcatcaccgagctggacgacaggaaacagagaaaattgtgcctgaaaaaatttaggagcagggatgagcatttatcagaagtggacacaaagagggagcttgagtgtgggctctgcatgcggtgctttgagtattggtaatagctcttttctcctagcttaaaatcatgcataaagtttgattttttgtaggctccacatttaaacaaatttggtcatgttagcttatggatggcataaaagtactatttctcatgggttctgaagcagaattatagtcaagtacttctcgtgttgaaactatggactgggaaacatgacaaatttgcttttagtaaaattacgaagtgttgtcttttttaaaaatattggtgtcatgtttttttaatgaagcagtttcaatgtatgtggtcggtttggagcatttttaggagacatgatatgtgggatagaaaagctgatggagataacctaaacatagacaaacagccacatacctccagcatggacattccagtagtaattgaagaagctgccaacaaatacaaagcaccatatctctgcaggacaaatcaagataatacactgctaaaataagttgtattagaccattaaagtatgagcatttagctaagagttgccctgtgttttttgttttacccatgataactgtcagtacaagtgtacaacaaattttatagtagtactttggaggacaaaactggtgctggtcattttagatattcgtgcctctcaaataccttaagatggcttgaattcttattgttcatatacattatcgtttttaggcacacaataatgaacctctacagattgtttgtggttatcatgctcttcctcaaccacctcatggtggtgaacttgtattccacacccttgaacatgtccaacctctgaaatactcctggcctggattacccttgttgggttttgtagaggcgatttgaacatttaaagtagatacttgacctatcatgactctagcctgcagtatcattcctccatttctctaatcttgaaacttagaatatagatcaatttacatttggcgactgcagaagaagctcaacactcaagaccttttcttatgatataatattgacaaccaagattttcttctatctttatttttttgctgtttgtgaaattccacagataagacctgtatgctctggcgtgagttatttttctcaatcaacaggaagaagtgaagtgagagatttcattagttcttgaaccaaccaaacatttttgaactgtaaatacagtagggcactgtaacaaaagtttattagaactaaagaaacaccaatattttagctactttaaggcaggtccattcaaaaagttttgtttctcaccctgctcaggctttgtacagtcttttttttgtttgctgacgccttcctaggaaaggggatcttctgcgacgatagcgatgaagacgaagacagtgaccaggagagggaggtgaacaaggagatggttgtctaccttatcgatgcctcgcccaaaatgttcacccctgccaccacctagggcaatgaaaagcaggagacacatttccataccattgttaactgcatcacagagtctctgaagacacaaattattggtagaacttatgatgaagtcgcaatatgtctctttaacactatgatgctccagttctgcaacttctttccgacaaaatgtccactcatatatttacaactctataagggtttagtgtgggcgtccacaccccttcaccatgcccccgcctcagcccccgtcaaccacgcaaggactccagcgtgaaagtcgggcccgtcgccggccttgcatcgtcgcgacacactccgtgcctcccttccatcatcgctcgatcgcggtttcgtcgcactccttccttcgatggcactcctttccatcctcgattcctcctgccccagcaccggccagcctcatcaggtcattcctcctcgctgtgccccctccaccgtattcaaccacctcttcctcggcaccaaacgtagacgcctcctccgcgatgccctcagaccgcccgtcctcgcccaacatctccttgccgcatatgcccgcagcggctgcctcgcatcccgcccgcacgccacctccttgcacccgcgcatggatgccactgcacgcctactatggaagggggacgcctactattgaagctcccatccacgatcccattccaaatccagcttcaaatttgccccaatctgcagtcaaccttccacccaacatcttccccttatatattgttgtctctgctataaaagacttgacagaggcgaggcctccaaaccactaccactctccaccgattcactggagtcgcgagacgttggaggccctgagacgttcaagcctcatctgcagtctcctccaaagaggccatttaattacgcctatttgatttgagagctcgagtagacaagatcatgtaggctctgaaatctatcttctggaggaccaaggccattaaagtacagggttctttcagcagcaatggcctcactatttcttctaaattaccaagattctcggacatgtacactctcacgatagcaagtgtagacccacagtttatcgtagcaaacaagccaatccatttcactaagagcgtgacaaagtgtcacagagcccttcttcttcgctctgccacccacaccgtggcacctcgccgagctccgcatcgaaactgcgttgttgccttctccgtgctctgcgttgaagacatgcagcgcaagcgtcgctgcctcatcccggcctcctctagacgcaagacgacaagaggatgctgctcgagctgtccccttggatcccacgccgaacgccctgtcacctccgtcgacaacatcaagctcctgtccctcccccacctcactgcaatagattcttcggttgtggaacttagggagagttttgagtcgtggtggtgtataaagcagtcgtcaagcacaagctcctccaaagtaccatcaggatcctacagtagaagagttagccaaaacactcgattgttggccatcaatgaattattatatcacgggttgtaaatatgttcttatgccatgaaaattcaacgaatgtcacgcccttttcgtaatagatcatgttaaaagcatgtgacttttatcgactttacaccgactcaagattggtgtaaacacatgccatacaagaggtttgcggaagctattatcatggcctcaaagaaatataagattgcttacaacaagaaacgttctggatgggcggaggatatctttaagtgggaacatacaattcagactggtgttccaattgacttaagagggtttaataccagctacctcgttctacaagttatgaccatgtgggggaatgacagacgaatgaaatttgttgggaatgcaaatattcttcgaaggaactttgtgattgatctgttaagttatgaggacaattcgtgccgatatgccatccctgcaaacatacaacagagacttatcgatatcgctaaaaaggattagctgattagtgtacggttgtcgacacatttgtctgtaattaaaaattctaaattatctttttagaaataatttgtgtgatattgataatgaaaaacacggattttgcatattatatagtgatgtttgtcgttccgtatcaa

SEQ ID NO: 205572 - DNA, 4940 bp, Zea Mays
ccacgcatcacacatgccacacgcgcgccagcaatcgcccccggtatctcgcccgcgccccaccaactctgcccttgaacccgcctgccaccaatctcgtcgccgggtatcccgcccgccaccaaaccgcgccccctgtcctcgccctcgacggcgctgccctttgtgatggtgcccttccttccccagctcccccaaatgctgccaagtcccccaccaacgccgcccttccttccccggcagcccgcccccactagctccgcgctccgcgtgccccaccagccacgctagctgccgccgggatactcaccacctccgcgcccccaccaaaccgaaaggcgagatccgccgccagttccacgctccgcgcgtcaagagcagccatcacagtgatgccgcgcgagggagaggaaggaaggccgcgtgagtcgccgcagggaaagctgccaggcatcaccgtaaggtgagatccggttgcgcgtgagggagaggaaggaaggccgcgtgagtcgccgccgagaaagccacagggaaagccgccagtgtgagtcgccgccgggaaagccgccagtgtatgatggttcggtcatccagatgtgggtggcgtacaacgttgtcactcatttcctcctgcactgtaccgactgcaaggcgcaagctcactggcgtgttcgacctcctgaagattatgctatacaaggtgtgcgcaaatggctcatcggcgcttcccgattgggagatggaggccagcatcatggagttctacgctgttgcatcttctaagtggcatcaccgagctggacgacaggaaacagagaaaattgtgcctgaaaaaatttaggagcagggatgagcatttatcagaagtggacacaaagagggagcttgagtgtgggctctgcatgcggtgctttgagtattggtaatagctcttttctcctagcttaaaatcatgcataaagtttgattttttgtaggctccacatttaaacaaatttggtcatgttagcttatggatggcataaaagtactatttctcatgggttctgaagcagaattatagtcaagtacttctcgtgttgaaactatggactgggaaacatgacaaatttgcttttagtaaaattacgaagtgttgtcttttttaaaaatattggtgtcatgtttttttaatgaagcagtttcaatgtatgtggtcggtttggagcatttttaggagacatgatatgtgggatagaaaagctgatggagataacctaaacatagacaaacagccacatacctccagcatggacattccagtagtaattgaagaagctgccaacaaatacaaagcaccatatctctgcaggacaaatcaagataatacactgctaaaataagttgtattagaccattaaagtatgagcatttagctaagagttgccctgtgttttttgttttacccatgataactgtcagtacaagtgtacaacaaattttatagtagtactttggaggacaaaactggtgctggtcattttagatattcgtgcctctcaaataccttaagatggcttgaattcttattgttcatatacattatcgtttttaggcacacaataatgaacctctacagattgtttgtggttatcatgctcttcctcaaccacctcatggtggtgaacttgtattccacacccttgaacatgtccaacctctgaaatactcctggcctggattacccttgttgggttttgtagaggcgatttgaacatttaaagtagatacttgacctatcatgactctagcctgcagtatcattcctccatttctctaatcttgaaacttagaatatagatcaatttacatttggcgactgcagaagaagctcaacactcaagaccttttcttatgatataatattgacaaccaagattttcttctatctttatttttttgctgtttgtgaaattccacagataagacctgtatgctctggcgtgagttatttttctcaatcaacaggaagaagtgaagtgagagatttcattagttcttgaaccaaccaaacatttttgaactgtaaatacagtagggcactgtaacaaaagtttattagaactaaagaaacaccaatattttagctactttaaggcaggtccattcaaaaagttttgtttctcaccctgctcaggctttgtacagtcttttttttgtttgctgacgccttcctaggaaaggggatcttctgcgacgatagcgatgaagacgaagacagtgaccaggagagggaggtgaacaaggagatggttgtctaccttatcgatgcctcgcccaaaatgttcacccctgccaccacctagggcaatgaaaagcaggagacacatttccataccattgttaactgcatcacagagtctctgaagacacaaattattggtagaacttatgatgaagtcgcaatatgtctctttaacactgtaagctctttctcacatcagtaagcatacacctgtcacatttgcagttctatgttagatgtagatgagttgcagtattttgcttattttcttaaaagtgaaataatgagctgactatgcaactgtctttttgtattagttattagttattgtcaatgctaaccatttcacttattaagtgataattttgcacatatattagtattactcaagacgatattatgaagtacaactgtgtaaatgttcttacaataaataaaatttagaaggtgcctggatttgtttattagacaataatattttaataacagtttgatgaaaaactacaattccagatgatgctccagttctgcaacttctttccgacaaaatgtccactcatatatttacaactctataagggtttagtgtgggcgtccacaccccttcaccatgcccccgcctcagcccccgtcaaccacgcaaggactccagcgtgaaagtcgggcccgtcgccggccttgcatcgtcgcgacacactccgtgcctcccttccatcatcgctcgatcgcggtttcgtcgcactccttccttcgatggcactcctttccatcctcgattcctcctgccccagcaccggccagcctcatcaggtcattcctcctcgctgtgccccctccaccgtattcaaccacctcttcctcggcaccaaacgtagacgcctcctccgcgatgccctcagaccgcccgtcctcgcccaacatctccttgccgcatatgcccgcagcggctgcctcgcatcccgcccgcacgccacctccttgcacccgcgcatggatgccactgcacgcctactatggaagggggacgcctactattgaagctcccatccacgatcccattccaaatccagcttcaaatttgccccaatctgcagtcaaccttccacccaacatcttccccttatatattgttgtctctgctataaaagacttgacagaggcgaggcctccaaaccactaccactctccaccgattcactggagtcgcgagacgttggaggccctgagacgttcaagcctcatctgcagtctcctccaaagaggtgagtctcacttaatgtttggtaccttctgttttttgggaatgtgggttcattttggatgcttccggggcagtggtaaacactttgctctgtatatattcttgcatctctttaatgtaggtccacaaatgatttgagagctgtaggtctacaaatgataatgcaacaaattctgattcatgcatttctttactgtgtggaggccatttaattacgcctatttgatttgagagctcgagtagacaagatcatgtaggctctgaaatctatcttctggaggaccaaggccattaaagtacagtcacagagcccttcttcttcgctctgccacccacaccgtggcacctcgccgagctccgcatcgaaactgcgttgttgccttctccgtgctctgcgttgaagacatgcagcgcaagcgtcgctgcctcatcccggcctcctctagacgcaagacgacaagaggatgctgctcgagctgtccccttggatcccacgccgaacgccctgtcacctccgtcgacaacatcaagctcctgtccctcccccacctcactgcaatagattcttcggttgtggaacttagggagagttttgagtcgtggtggtgtataaagcagtcgtcaagcacaagctcctccaaagtaccatcaggatcctacagtagaagagttagccaaaacactcgattgttggccatcaatgaattattatatcacgggttgtaaatatgtaagtatgtgttcatttcgaatgtatttataaaggacccttctttgcaatcctaatgactgatattttgcaggttcttatgccatgaaaattcaacgaatgtcacgcccttttcgtaatagatcatgttaaaagcatgtgacttttatcgactttacaccgactcaagattggtgtaaacacatgccatacaagaggtttgcggaagctattatcatggcctcaaagaaatataagattgcttacaacaagaaacgttctggatgggcggaggatatctttaagtgggaacatacaattcagactggtgttccaattgacttaagagggtttaataccagctacctcgttctacaagttatgaccatgtgggggaatgacagacgaatgaaatttgttgggaatgcaaatattcttcgaaggaactttgtgattgatctgttaagttatgaggacaattcgtgccgatatgccatccctgcaaacatacaacagagacttatcgatatcgctaaaaaggattagctgattagtgtacggttgtcgacacatttgtctgtaattaaaaattctaaattatctttttagaaataatttgtgtgatattgataatgaaaaacacggattttgcatattatatagtgatgtttgtcgttccgtatcaa

SEQ ID NO: 205573 - DNA, 4412 bp, Zea Mays
ccacgcatcacacatgccacacgcgcgccagcaatcgcccccggtatctcgcccgcgccccaccaactctgcccttgaacccgcctgccaccaatctcgtcgccgggtatcccgcccgccaccaaaccgcgccccctgtcctcgccctcgacggcgctgccctttgtgatggtgcccttccttccccagctcccccaaatgctgccaagtcccccaccaacgccgcccttccttccccggcagcccgcccccactagctccgcgctccgcgtgccccaccagccacgctagctgccgccgggatactcaccacctccgcgcccccaccaaaccgaaaggcgagatccgccgccagttccacgctccgcgcgtcaagagcagccatcacagtgatgccgcgcgagggagaggaaggaaggccgcgtgagtcgccgcagggaaagctgccaggcatcaccgtaaggtgagatccggttgcgcgtgagggagaggaaggaaggccgcgtgagtcgccgccgagaaagccacagggaaagccgccagtgtgagtcgccgccgggaaagccgccagtgtatgatggttcggtcatccagatgtgggtggcgtacaacgttgtcactcatttcctcctgcactgtaccgactgcaaggcgcaagctcactggcgtgttcgacctcctgaagattatgctatacaaggtgtgcgcaaatggctcatcggcgcttcccgattgggagatggaggccagcatcatggagttctacgctgttgcatcttctaagtggcatcaccgagctggacgacaggaaacagagaaaattgtgcctgaaaaaatttaggagcagggatgagcatttatcagaagtggacacaaagagggagcttgagtgtgggctctgcatgcggtgctttgagtattggtaatagctcttttctcctagcttaaaatcatgcataaagtttgattttttgtaggctccacatttaaacaaatttggtcatgttagcttatggatggcataaaagtactatttctcatgggttctgaagcagaattatagtcaagtacttctcgtgttgaaactatggactgggaaacatgacaaatttgcttttagtaaaattacgaagtgttgtcttttttaaaaatattggtgtcatgtttttttaatgaagcagtttcaatgtatgtggtcggtttggagcatttttaggagacatgatatgtgggatagaaaagctgatggagataacctaaacatagacaaacagccacatacctccagcatggacattccagtagtaattgaagaagctgccaacaaatacaaagcaccatatctctgcaggacaaatcaagataatacactgctaaaataagttgtattagaccattaaagtatgagcatttagctaagagttgccctgtgttttttgttttacccatgataactgtcagtacaagtgtacaacaaattttatagtagtactttggaggacaaaactggtgctggtcattttagatattcgtgcctctcaaataccttaagatggcttgaattcttattgttcatatacattatcgtttttaggcacacaataatgaacctctacagattgtttgtggttatcatgctcttcctcaaccacctcatggtggtgaacttgtattccacacccttgaacatgtccaacctctgaaatactcctggcctggattacccttgttgggttttgtagaggcgatttgaacatttaaagtagatacttgacctatcatgactctagcctgcagtatcattcctccatttctctaatcttgaaacttagaatatagatcaatttacatttggcgactgcagaagaagctcaacactcaagaccttttcttatgatataatattgacaaccaagattttcttctatctttatttttttgctgtttgtgaaattccacagataagacctgtatgctctggcgtgagttatttttctcaatcaacaggaagaagtgaagtgagagatttcattagttcttgaaccaaccaaacatttttgaactgtaaatacagtagggcactgtaacaaaagtttattagaactaaagaaacaccaatattttagctactttaaggcaggtccattcaaaaagttttgtttctcaccctgctcaggctttgtacagtcttttttttgtttgctgacgccttcctaggaaaggggatcttctgcgacgatagcgatgaagacgaagacagtgaccaggagagggaggtgaacaaggagatggttgtctaccttatcgatgcctcgcccaaaatgttcacccctgccaccacctagggcaatgaaaagcaggagacacatttccataccattgttaactgcatcacagagtctctgaagacacaaattattggtagaacttatgatgaagtcgcaatatgtctctttaacactatgatgctccagttctgcaacttctttccgacaaaatgtccactcatatatttacaactctataagggtttagtgtgggcgtccacaccccttcaccatgcccccgcctcagcccccgtcaaccacgcaaggactccagcgtgaaagtcgggcccgtcgccggccttgcatcgtcgcgacacactccgtgcctcccttccatcatcgctcgatcgcggtttcgtcgcactccttccttcgatggcactcctttccatcctcgattcctcctgccccagcaccggccagcctcatcaggtcattcctcctcgctgtgccccctccaccgtattcaaccacctcttcctcggcaccaaacgtagacgcctcctccgcgatgccctcagaccgcccgtcctcgcccaacatctccttgccgcatatgcccgcagcggctgcctcgcatcccgcccgcacgccacctccttgcacccgcgcatggatgccactgcacgcctactatggaagggggacgcctactattgaagctcccatccacgatcccattccaaatccagcttcaaatttgccccaatctgcagtcaaccttccacccaacatcttccccttatatattgttgtctctgctataaaagacttgacagaggcgaggcctccaaaccactaccactctccaccgattcactggagtcgcgagacgttggaggccctgagacgttcaagcctcatctgcagtctcctccaaagaggtccacaaatgatttgagagctgtaggtctacaaatgataatgcaacaaattctgattcatgcatttctttactgtgtggaggccatttaattacgcctatttgatttgagagctcgagtagacaagatcatgtaggctctgaaatctatcttctggaggaccaaggccattaaagtacagtcacagagcccttcttcttcgctctgccacccacaccgtggcacctcgccgagctccgcatcgaaactgcgttgttgccttctccgtgctctgcgttgaagacatgcagcgcaagcgtcgctgcctcatcccggcctcctctagacgcaagacgacaagaggatgctgctcgagctgtccccttggatcccacgccgaacgccctgtcacctccgtcgacaacatcaagctcctgtccctcccccacctcactgcaatagattcttcggttgtggaacttagggagagttttgagtcgtggtggtgtataaagcagtcgtcaagcacaagctcctccaaagtaccatcaggatcctacagtagaagagttagccaaaacactcgattgttggccatcaatgaattattatatcacgggttgtaaatatgttcttatgccatgaaaattcaacgaatgtcacgcccttttcgtaatagatcatgttaaaagcatgtgacttttatcgactttacaccgactcaagattggtgtaaacacatgccatacaagaggtttgcggaagctattatcatggcctcaaagaaatataagattgcttacaacaagaaacgttctggatgggcggaggatatctttaagtgggaacatacaattcagactggtgttccaattgacttaagagggtttaataccagctacctcgttctacaagttatgaccatgtgggggaatgacagacgaatgaaatttgttgggaatgcaaatattcttcgaaggaactttgtgattgatctgttaagttatgaggacaattcgtgccgatatgccatccctgcaaacatacaacagagacttatcgatatcgctaaaaaggattagctgattagtgtacggttgtcgacacatttgtctgtaattaaaaattctaaattatctttttagaaataatttgtgtgatattgataatgaaaaacacggattttgcatattatatagtgatgtttgtcgttccgtatcaa

SEQ ID NO: 205574 - DNA, 2643 bp, Zea Mays
gtcaactttccatactcgttcgactacgacctgcttccattgacatatgggtcctgcagtgttaaagtcccactgatcagccaaaccagcattcccctcaaagccgtcgtccttatccccaatccacaccgtcggcggcccatccaacccgtccccatctgatctccccgtcggcggcggcccccaccgcttccttcccctcgccgtcgcgatactgagcagacactagcagaagtaggtgctccgtaacccgccccccaacaccaaagtggcactcatcacgcccacgcgaggtggtcgacgaagagccgcagaggagggggaggtgctgggtgggatccggcggaccgctcatgtcgagcggcgcggacggatcggatccctgcacgggccttgacccggggacgatcccagagctgccggcccatgaacctcctgtgctgcaggctccgtcgccggcgccgcagcaggaggtggtggtggcatcgcagaccgaggcgccgttgccagctgtcaccatcgtgatctcgcggccaggcgaggatgttcagatgcccgatgcaaagggtggctccccggcatgctccccgcaggccggtgacggcaagcctatggccacctcggtttcgttgaccgcttcggcggccgcgaaggaagccgggctggcaaggtccgactccgacagcttggacgactacgagcaatgcaggagcaacacttgtactcttaataagcccaggttccagttaaggtacctgtggaccaagtggctgtccttgttttggaaggaacaatgtagaatgcattggccttgatggtaccgatttaagttattaagggcctgcttgtttgggattataatctggccagcttatataatctcacttattttaaactaacacttagttcaaaataagtgagattatataatctgggcagattataatcccaaacaaacaatccctaaatccaccatttccttaacataaatacattttttactgttagacatcgcaatgtcatcccaaaattaggtccagtcttgtaaaacacatgtctagaagccctttagtacatactgcctgccattttatttaccttcaaatttttatatatttctgaatcttgccacttgttacgttattttttctggaggatgaatacatttttcacttctgcagagtttgtcaacagaagacagaagaacctctggtcgaccttggatgcagatgtcgtggtgatcttgcaaaagcacatcgcacatgcattgatttttggtttcgtactagaggttcaaacaagtgtgagatatgccagcaggttgctgtcaatatcgcccctccagaaacgcaatcaagtacaagttattgggtttggagggttgattcgacttatggaaggggacgaggaggacgagaaaggggatggtttagcccactttgggttgcatttgcaattctgattggtggtctcttattggatgtgctgatatctgtttctctcggtgtttccgcacttcctgtcaatataataattggtgttcttatagttctcggattgggcaccgcccttcatctagctcttgagtgctgtcacgaatggggctcaaggaggaacgtggccaatattccgaggctggagaacatagcgccgactgggtaccaccctgcagtagtataatcattatgggacttgtaaatagcgtaggaacatctaagctcgtgctggcttttggattattatgttctcgcaactagctttagctcacacgtgttgctcgttaatgtcgagctcaaattcaaagctcgttgattacaatccagttcatactcccactagtccaatccaatgtaaatgcagagttactgatactcggtcatcacgggctagtgctcatgccaaactgccagcaccttaattggatggtctggctacccattcagcatgacagggctaggttccttcttccctccttgtacggtttactctgacaagtcacttgttgtgtttcatctttatctgtggcttgtcggtataggcatttgtgaaggccatttgagctagtgttgtttttgtacatttatgtagagttgtggatataacatttttatatgaattaatctgctgatacgtttcgtgattacgtaaaaccataaatttgacagttcccttttgattcttgacgatccttctagcaaaccttgacttgcaccaatatgttaaaaaaacagagtaacatggcccttatatataaaatggcgacatgtgacaatagttcaagccatttcggcggcatgttgcaattgctcaaactgtcttttttttttttgagagagcttccttttcttttgttttttttttgagagagaagtaacggataagaacctttcgtttttctcattttctttatcaatattgtcacatccttcaaccgaccaatcttgagcattagaagcaaggtagaagtacatcaacattttagttgcttctctttttttcccgagtaatcttgtattgaattgaacaaagagaaggtcacttatgtgttgtgtatttggctcatttcttctcttggtatgcaactacattgcaaatcgaatcaaccaaacaatttagaatagataaggctatttttagtctaac

SEQ ID NO: 205575 - DNA, 1766 bp, Zea Mays
cactccctcatgcagcatcgcggctaacttcccagccactgcttgcaccatcccgattcccccccacccgccgcgcaacaaggcgcaacccagaccccggcccctccagctcggaaaacccccccgacgagccaccgccacgcgacgccccctcactcactcactccgccgcccggcccgccgcgcgaggccggtcctggaacacggcgcgccgcgctcgtacccatgccgtaacgcccgaacccgccaaccgagccgcagccgcctcgccgcgcacacatgcacttcccctcgccgcgcgcgctcgccatggccgcgccggcggtcgcccgccctcgcctcgcccccgtggctcaccccgcctcgacctcttgcctgctggccctctgggaccggaggcgcgggcacggccgcgcggttgcggcggtgagggcgcgcgagcaaggcgcggcgccgcccgacccggcggccttcctgcgccggccggaggtagcgacggtgacgtcgacggaggaggagagggaggccgatgcggggtcctcgtttgatggccccggggaggacgaggcgcccgaggaggaaggggtccgggggaggaggaaggcgccggagagggagtgggtggattgggaggaccttatcctcgaggacaccgtgccgctcgttggcttcgtacggatgatcctccactccggcaagtatgaaagtggcgatcggctgtgtcctgaacatgagaaggcgattctggaacgtttgcttccataccatccacaatataatgagaaaattgggtgtggtattgactacatcacggtagggttacatccagaattcgaaaactcaaggtgtttattcatagttaggaaggatggcgagcagatcgatttttcgttctggaagtgcgtcaaaggtctcattcggcaaaagtaccccatgtacgcggacagtttcattctcaggcatttccgcaggagacaagactactgaagtagttgctcggaaggcggcgacaagagcggctaagaatgaagtacccaactctgtagaatgtcagataagacggactccttaccgaagatttgctcctgctccgccaatggttacatgttgccaaaaccatcgaagtctggtaagagtagcatgatttctattgcatagagcggccccgtttggacagcacattttagaggaaccatacagaaattggaccaattttgcgtaaaagcatagtaggaattaggaaactttccaaagcagaccccgcactatcccgtccccgtgcccggtgcccccctgttcccatccgctgcaacggcaagcacgcagattcgcagacacgatggatctcccgaccccgtctgtcgccgtccctgggatgctcagacctgttatcccggccgccggcaaggatgcgacgtgaagccactccagtcctctccctactcccgctgctcccctcctatcgtcgctctggagacagatctgctcgccgtccccggtcctccttgttgccatcccttacctcctccagggctcgtggccgagacgcgcccccgggcggggaaggttggcgttgtccaagaggcggccgcgcgccccgctgtctggcacatgacgatggatgtgcacggccgcacaggacacgtcgcccgcccttgcacgcgcatcaaaggacaaaggccggtcgcggcgtatggcctgggctccaaacgtgtggccgctggagccccccaagccaaggcacggtgccatctcggccgttgctg

SEQ ID NO: 205576 - DNA, 1423 bp, Zea Mays
cccgcatggacgtcgtcgccacctctatttccatcaaccctctctcccgcgtcgccaccccatctcagtaccaaatcatttttctcttctgctcagcgccccggcatccaatcccccctcccgttggccgtgctctctccggtatcccaccatggatatgccaaatgacacttgctcttcaccaaaactccacacaagactgaggctatgggaatttgcggactgttatgtttttgaaccagttggtcttaatgatcttttactgtcagtcaaccggatcaatggatcaatgaatctagtggaggaattgccacagcatggcccctctataaatccaaaagttcaaatagtgtttggtgtaataggagtgctaaaacttgcagttgggacatatattctggtgatcactgaccgtgattgtgctggatcctacttgggacatgcagttttcaaagtgagaggtctgagagctctgccgtgtaataattccctttctgcttctgctgaacagaaaaaagtgggcatagaattttcagaactcttggatgctgcagagaggactttgggcctgtacttctcctacgattccaacttaacagtaacttcacagaggctacatgaactaggtgatgaattcaaatcacttccactttggagacaggcagaaccaaggtttctatggaatggctacttgttggagcctctgattgagaataaattgcaccagtacttgttaccagttattcaaggaagttttcagaatattcacgctgaagttaggtcagaaaaggtaaatgtgactctgattgcacgaaggtgcagatggaggataggtactaggatgtggagacgaggcgctgatcctaagggttatgctgcaaattttgttgaatcagagcagataatgcaatcaaaaggatttacagcatcctatgtacaagttcgaggttctatgccttttctgtgggagcagattgttgacctgacatataaacctggttttgatgttgtaagagtagaagaggcggcttctgtacttgagcgccactttcatgatttacaaaagaaatatggagctgttgttgctgttgatcttgtcaatacacatggtggcgaaggccgactctacgaaagatacgcaaaatctattgaaccgatacttagtgaagatataagatttgtgcattttgatttccatcgaatatgtggtcatattcactttgagcgcctttctcaactctatgatcaaattgaggattatctcaagaagcacaagtacttcctgttgaccgataaagacgagaaaattgcgcagcaaactggcactgtcagaacaaattgtgttgattgtttagatcgtactaatgtaactcaggatggttgtgcattatttcattaagaatgaagagaaacccaactttac

SEQ ID NO: 205577 - DNA, 1703 bp, Zea Mays
caagcatgaagatgaaaactgttagctgtatcccaccatggatatgccaaatgacacttgctcttcaccaaaactccacacaagactgaggctatgggaatttgcggactgttatgtttttgaaccagttggtcttaatgatcttttactgtcagtcaaccggatcaatggatcaatgaatctagtggaggaattgccacagcatggcccctctataaatccaaaagttcaaatagtgtttggtgtaataggagtgctaaaacttgcagttgggacatatattctggtgatcactgaccgtgattgtgctggatcctacttgggacatgcagttttcaaagtgagaggtctgagagctctgccgtgtaataattccctttctgcttctgctgaacagaaaaaagtgggcatagaattttcagaactcttggatgctgcagagaggactttgggcctgtacttctcctacgattccaacttaacagtaacttcacagaggctacatgaactaggtgatgaattcaaatcacttccactttggagacaggcagaaccaaggtttctatggaatggctacttgttggagcctctgattgagaataaattgcaccagtacttgttaccagttattcaaggaagttttcagaatattcacgctgaagttaggtcagaaaaggtaaatgtgactctgattgcacgaaggtgcagatggaggataggtactaggatgtggagacgaggcgctgatcctaagggttatgctgcaaattttgttgaatcagagcagataatgcaatcaaaaggatttacagcatcctatgtacaagttcgaggttctatgccttttctgtgggagcagattgttgacctgacatataaacctggttttgatgttgtaagagtagaagaggcggcttctgtacttgagcgccactttcatgatttacaaaagaaatatggagctgttgttgctgttgatcttgtcaatacacatggtggcgaaggccgactctacgaaagatacgcaaaatctattgaaccgatacttagtgaagatataagatttgtgcattttgatttccatcgaatatgtggtcatattcactttgagcgcctttctcaactctatgatcaaattgaggattatctcaagaagcacaagtacttcctgttgaccgataaagacgagaaaattgcgcagcaaactggcactgtcagaacaaattgtgttgattgtttagatcgtactaatgtaactcagagcatgattgggagaaaacttctggaaagtcagctccaagaaataggggtttttgttgctaatgatactgtcagtgactttccagattttgatgcaaattacaaaattctgtgggccaatcatggagatgcaataagcactcaatactctggaactcctgctttgaaaggagactttgttcgatatggcaagagaactactcagggaattttaaatgatttatggaatgcacttgctagatactacctgaacaactttgcagatggtactaaacaggacggcttgcctctgtgcttccttcttgtcgtgatatctatcgactccactacctcctcctccaccatcggcgccatgtgccatctccttgctgggttgactgttgtcgctccctacatgacaatcgatgtccgctctcatctccatgacgtcctcaagctaggag

SEQ ID NO: 205578 - DNA, 2387 bp, Zea Mays
ggcctctgaggcgaactgctagattgccgagaataactacaaaacaaagcatcttgcaaagattttgatccatttggtttgttgcttgcaagagtgcacctcaacaacttctgtatcttctgtcgtatatcagagggcaatcaacgcggcatacatatcatccatatttctcaagttcatcattgaaaatgcaaaaactgacagttggcaagagctatgccttgacattgacaggagtgagaaggggttggaaaaaattccagcagaaaacacggtggagtattttctgatgagaggtgtgctggactatattggtagtgtggatgtaagtccggagttatgctacctacatcatgaactcctgaacttgatgctagttcttatgtcaactcagttgtgttctggaccatctccagagccaaaggatgtgcatcctttcattgatgcagctatgcttcaggacagctccatcgtggcttcagtggtgcaaaaattgttgctcaattttgttacacgtccaaaaattcctctaaatgcttcgcaccctgttttctctgatgatggtaggcctggtgttctccaacgagttggctcagcagctgcaaactttgtcttgttgccatattactacctcgtaagctcaactcctgagggtgcgacaagtcaattggcagataacagtttacttgttcttcttatcatgatccactaccgaaagtgcatttcaactaatgagtccattccaaccaacaatgtatacacgatggactcaaataccaatgacaaggatgctccagtttttcatgataacccttactgcaaggcattaaacagtgctaaggacatacaatatgatcgtgctgatgttgaaggaaatgctcaagatcgacctgttgtcaggttgtcttttgcatcgttgtttgatgcttttggaaggtgcttaaatgatgagagctcggttctgttgctctattctttggtctatgggaactgcgactttcaggaatatgtcctggttagaacagacttggacactttgctgatgcctatcttggaaatgctctacaatgcatcaaggaagacttcaaatcagatttacatgctgttgattattctccttatcctcagtcaagattcaaccttcaatgctagtgtgcaccaattggtgcttcctgcagttccttggtaccatgagcgcctgatgcatcaaacgtcactgggatctttgatggttgtaatactaattcggaccattaagtacaacctctccaagctaaaggatgtctaccttcacacaaactgtcttgctattttagcaaacatggctcctcatgtgcataggctgagtgcttatgcatcacaaaggctagttagtctcttcgacatgctttctcgcaagtatgccaaactagctgagctaaaaaacgacaagtctctgaaagttatatatgatcagatggaagcagacatagcagatgatatgtctatagagcttcacatatatacagatttcttaagaattgttctggagataattattgccatccttacatatgcattgcccagaaatcctgaggttgtgtatgctgtattgcatcgacaagaggtgtttgagccatttaaaaaccatccacgtttcagtgaactgcttgagaacatatacacagtattggatttcttcaatagccgaatggacatgcaacaattagatggggaatggtctgtggataaggtgcttgaagtcatcaacaaaacttgccgttcatggcgtggagaagggatgaagatgtttacccagttacggtttacatatgagcaagaaagccaccctgaggagttcttcatcccatatgcatggcgccttgtcctatcacggggattctccttcaatcccgatgccataaatctcttccctgtggagattcaccttgaagaggcaccggccggtggacaaaaggtttaatatgaatggtccgaaccagagttctgacaagaacataaaggcatatttttgtttcattgtggcaaagagcacgatgtaaataggccgcatataccatataccaggtagtcaaatgtacacattcttttgtattaaatcattatatgtgtaagacgaaagggggtggacggattgcgcaagggtgcagagattgtgctagttataggggggagattactatgtagggtatatgcaattctttcgtaagttatcgttgtattgtacccttagttcaaaaggcttgtaaccacttatttattgaaaagttgtagagtctgcgatctaagggcatgtacagtggagagacaccaaaacggttctccaagcacaggagacaactaagagactctattgtacaatggagtgtctataaacgtagtctatt

SEQ ID NO: 205579 - DNA, 706 bp, Zea Mays
gccaattcttcctccgtgacagctgctgatgtttgacgatcaagacctgggcttctttgccaatttcctgggcatcttcatctttgtcttggttattgcgtaccacttcgtgatggcagacccgaagtacgaaggaaactgatgtcctctagtgcaaagatcctattatctgcaggccgaaatagggctatactgttagctaatgctagtgagatcgcttgacactttgagtgcatatcatggaagctggacatgcagttcctggcattttggttttgcccatgttttaatctgctgaattagtaaatcctggagaattcaaaagcgttttcaagtactgcagttggtggttgtttctggtcctagtgtatgcatgccagaatcttatgaataatattctttgttttgttgcctatttagctgtttagttggttgttagcctgtcaagaaactggggaacggctccgttactagactacattgagtcgtctctcacattggagtctgggagcaccaccaggcagaggcagccatgttcttatgttgttttgtgctgtctgctcaagctttcgttcatctcacctgaggcctcccttcgttgaagagagagcttggatgagagctctgtttttccttctttttttattatttactattcaaaaagtcgagaccagaaaaaagaagacagagatattaaataacacag

SEQ ID NO: 205580 - DNA, 730 bp, Zea Mays
cgaggaggaaggggtaacgccgacgcgcgcagttggctggatctggatcgagatgtttgacgatcaagacctgggcttctttgccaatttcctgggcatcttcatctttgtcttggttattgcgtaccacttcgtgatggcagacccgaagtacgaaggaaactgatgtcctctagtgcaaagatcctattatctgcaggccgaaatagggctatactgttagctaatgctagtgagatcgcttgacactttgagtgcatatcatggaagctggacatgcagttcctggcattttggttttgcccatgttttaatctgctgaattagtaaatcctggagaattcaaaagcgttttcaagtactgcagttggtggttgtttctggtcctagtgtatgcatgccagaatcttatgaataatattctttgttttgttgcctatttagctgtttagttggttgttagcctgtcaagaaactggggaacggctccgttactagactacattgagtcgtctctcacattggagtctgggagcaccaccaggcagaggcagccatgttcttatgttgttttgtgctgtctgctcaagctttcgttcatctcacctgaggcctcccttcgttgaagagagagcttggatgagagctctgtttttccttctttttttattatttactattcaaaaagtcgagaccagaaaaaagaagacagagatattaaataacacag

SEQ ID NO: 205581 - DNA, 707 bp, Zea Mays
agttcagttctgattggtataatttacagatgtttgacgatcaagacctgggcttctttgccaatttcctgggcatcttcatctttgtcttggttattgcgtaccacttcgtgatggcagacccgaagtacgaaggaaactgatgtcctctagtgcaaagatcctattatctgcaggccgaaatagggctatactgttagctaatgctagtgagatcgcttgacactttgagtgcatatcatggaagctggacatgcagttcctggcattttggttttgcccatgttttaatctgctgaattagtaaatcctggagaattcaaaagcgttttcaagtactgcagttggtggttgtttctggtcctagtgtatgcatgccagaatcttatgaataatattctttgttttgttgcctatttagctgtttagttggttgttagcctgtcaagaaactggggaacggctccgttactagactacattgagtcgtctctcacattggagtctgggagcaccaccaggcagaggcagccatgttcttatgttgttttgtgctgtctgctcaagctttcgttcatctcacctgaggcctcccttcgttgaagagagagcttggatgagagctctgtttttccttctttttttattatttactattcaaaaagtcgagaccagaaaaaagaagacagagatattaaataacacag

SEQ ID NO: 205582 - DNA, 748 bp, Zea Mays
aaggccatggccacggggcgcttcttcgactgtgctgggagtaggaacaccaagaaagtggcctcatttgatgtttgacgatcaagacctgggcttctttgccaatttcctgggcatcttcatctttgtcttggttattgcgtaccacttcgtgatggcagacccgaagtacgaaggaaactgatgtcctctagtgcaaagatcctattatctgcaggccgaaatagggctatactgttagctaatgctagtgagatcgcttgacactttgagtgcatatcatggaagctggacatgcagttcctggcattttggttttgcccatgttttaatctgctgaattagtaaatcctggagaattcaaaagcgttttcaagtactgcagttggtggttgtttctggtcctagtgtatgcatgccagaatcttatgaataatattctttgttttgttgcctatttagctgtttagttggttgttagcctgtcaagaaactggggaacggctccgttactagactacattgagtcgtctctcacattggagtctgggagcaccaccaggcagaggcagccatgttcttatgttgttttgtgctgtctgctcaagctttcgttcatctcacctgaggcctcccttcgttgaagagagagcttggatgagagctctgtttttccttctttttttattatttactattcaaaaagtcgagaccagaaaaaagaagacagagatattaaataacacag

SEQ ID NO: 205583 - DNA, 1117 bp, Zea Mays
ggaaagcgtcccggacgcggtgtttacgtgacgtttgtgcactgtggcaccttccagcaggtctcgggcgtggttgcgaaaaatgaggcggctgaaaacaaagcgtattctctcctcccgcattcacttgttgcaaccatcgccttctccctcgccgcgagagtgctcaacctggtgtcctggataaggcaacgggataggaagcgataattggcggagagtgaaggttcccgtcctaggccgaagtcctcgttgttgccggaagaagtaccgcatgacttcgccgggtagcggcggatcgacgactgcaatatgtacgaagtaacctatactccaagattggaactgtcaacagatcaagcatggaacaactaggaagggttctagaatcctaacgaggcaatgcaaggcatacaagaccttgttcaggatgagctgccgccaatgagttctaaaaagaaaacagttcacaagaggctcaaaaatttcactgcaactgaggatgaatgtcttgtatcaacgtacttaaatgttagcacagacccaattgtgggtgtgaaccaaccaataaaaggctactaacagaggatcgctaactactgcgaagaacacaagaaaactccagtttctccgaccatatcctccctacagcattggtgggcagacattcaaagggacacttcaaggttttgtggattctttgcccaagttgaaaggcgcaaacagagtggtgtgaacgaatctgacaaggttggtttatggtttggttactctatacaactggcagtgcattcaagttcatgcattgctggttgatgctaaaggacgaaatgaagtggacaactcaattggtcgggcgtcaactaattctgagtccaacaaggcaacaagtgagaagccatgcactgagaaccattaacaacataactcacttcgggtccattccctgtggagaggtcgtcgaacacgggagagatataacaccctaaatctaggaaaaataaaggatgctttaaatatgtgattatggcaagatttgtttatttaaattcatatttgagaacataatttattatgaaagagcaattaatgaagtgagaataaatcaatattaaat

SEQ ID NO: 205584 - DNA, 2690 bp, Zea Mays
gacagatgggcagaggagcgtgaggaatgggacgatcgaaggttgaaggagatcctgacaggaaacaggacggccctgatgtcatcagatgccagtgagaattgccaaatgctacatgtcatctctgttgcaactccaggctgctgtttatagagaagactacaggactgctcataaactgaggctggctattgctgctacatcaaaaaatgacgctgtgggcagagctatctcggacttaaatatggccatagatgaggagcgctacaaggatgcagcatatatcagagatcatgctggcgcaggactgacagctggcttctgacagccctggtctccctatatttgaaatatactttgcagaggcaaatggtggatataacctacaggcagtgcatctgaaaccagatggtagcgattctgaccaagtgccaaacatgttaagggagaaacttggcattgacagtataaacatatctagcagtccattagggtctaagcatgaagaatttgatggaagtgtaaacatggatgataaagatagtgatgatagcaacatcgctgctggccctggttcgaaaaacttgtcaagcgatctaactgcagttcccaggattaaaatcttgaaagtggtacccatgcagaatgttgatcatgactacataatcaatatctttgatcagatttcagaggaagatgatgacaatgatgatcatgaagttgaaaatgaatcttcagaagatgttgataatgatgataacagtggagtagcagaaacagtttctgcagaagagaatggtgatgaatctggtgacgaaagtgatattgaaaccttggtttcatttgattttgtcagtgagaataacgtctatgcttctcgtccatctgctgaagcttttgaacgaatgccggctagattagaaaaaagagatcgcttctcattttccttctatactgaagaatacagtaaaaagctagatgctggaaaggcccggcagacttcaaaggaaacagttggtttgcatgccgatcagcaggattatgatggttttgtccagcttgatcgtgtaaagttgagtggcagcaacaaaaaactatcgatactacaacttggcatcaagcaaaataacaaggttcagcaaaaactgcatggagttacccactttagtcgtattcagatgcctatattttcagatcctcttaccggtttatatgtgaccacatcaggatttgactcagaaattcttagtttgcaacgaaaatttggtcaatggcgggatgatggttcatctgaggagcatagtgacctattgttctatgagcatgttgaagctgtaaaattaacaggggacaatctcatgccagctggtcaggttgtcttccgtgcaaaagttggtgaacgctatcagctccctcataagggaattatccctagagaacttggagtgattgctaggtacaaggggcaaaggaaaattgcagatcctggtttccaaaaccctcgatgggttgatggagagcttttgataatagatggaaagttcatcagagatggtcctgtgatagctttcttttactggacatctaattttcatcgtttcgaattctttagacggttgaggcttcctgaatagttcccatctaaaagtagttaaagattctgatgtgaagagggcgcctggcatgaatcaaggggcatctccacccactctgaaaggctgccatgagggtggaaaatagctcacagtcgcaggaagaggaatagcatcctgccaacatgggtgagctgcgggcgcatcataccaattccgcttctgctatgctccgtccaccaggtcaccagcttgtgaccgaggcatcaaaccgccagattttgtgtttctcagagcaagtagaactaaagcacctcaaagatgtaaatttatgcactcccaaatttaggattttgagcgcaatcttggcagttttcatacatgcgaagtgaactagtacgagcaatagttttgtatagcgtgatcaaacagtggcagcaatcagtagcagaggcatacagaccaacacggccacacagatttgttaatatatctaagtttgtttaaccttgcccatttcttaagcaagaactctatttttaatttttaagctcccattcaaacaagcaaggaaaaggctgtgctgtcgcttgtcgctgcagcaatagacaagactgtattcaggagatgatgtaaaacaggggacgtgaaactgtagatgtgtcatctacattgtttgatactttttgcagagtacttcatgaagtactgaagttttaaataggggataagatagagaatttgttaaagattaggcagcaagttttaaataggggatgagatagagaatttgttaaagatagcctgcctaagactactgcctcacttgttccacactctatttacaatggctgtgttacgaagggcagataagatctgttacatctgtccgctcactttggacactgtgtgcttattgagagatgtcatggactgtcttctccggcgaggttatacgctttgtcgcaggcttggttttagggtagcagcccggactgtcttctccggtgaggttgtacgctctgtcgcaggcttggttctagggtagcagctctaggcgattgagagttattgcaagagagattggtttgataattc

SEQ ID NO: 205585 - DNA, 2987 bp, Zea Mays
ctccatgacaaagtgaggttggccaatgacaatgttgctctcttgtggcgccaccctcgtgttccccggttgtcatgtcgagagcgccgcctaccactgcaacacggtcgatggccaagggtggatgagggagaccatactacctcgcagctcagtcggacagatgggcagaggagcgtgaggaatgggacgatcgaaggttgaaggagatcctgacaggaaacaggacggccctgatgtcatcagatgccagtgagaattgccaaatgctacatgtcatctctgttgcaactccaggctgctgtttatagagaagactacaggactgctcataaactgaggctggctattgctgctacatcaaaaaatgacgctgtgggcagagctatctcggacttaaatatggccatagatgaggagcgctacaaggatgcagcatatatcagagatcatgctggcgcaggactgctggggtggtggtctggaatttctggaaatttgtctgatccatatggtcttattattcgtataagtgctgaacatggtcgatatgtggcaagaagttatgatacaagacagctggcttctgacagccctggtctccctatatttgaaatatactttgcagaggcaaatggtggatataacctacaggcagtgcatctgaaaccagatggtagcgattctgaccaagtgccaaacatgttaagggagaaacttggcattgacagtataaacatatctagcagtccattagggtctaagcatgaagaatttgatggaagtgtaaacatggatgataaagatagtgatgatagcaacatcgctgctggccctggttcgaaaaacttgtcaagcgatctaactgcagttcccaggattaaaatcttgaaagtggtacccatgcagaatgttgatcatgactacataatcaatatctttgatcagatttcagaggaagatgatgacaatgatgatcatgaagttgaaaatgaatcttcagaagatgttgataatgatgataacagtggagtagcagaaacagtttctgcagaagagaatggtgatgaatctggtgacgaaagtgatattgaaaccttggtttcatttgattttgtcagtgagaataacgtctatgcttctcgtccatctgctgaagcttttgaacgaatgccggctagattagaaaaaagagatcgcttctcattttccttctatactgaagaatacagtaaaaagctagatgctggaaaggcccggcagacttcaaaggaaacagttggtttgcatgccgatcagcaggattatgatggttttgtccagcttgatcgtgtaaagttgagtggcagcaacaaaaaactatcgatactacaacttggcatcaagcaaaataacaaggttcagcaaaaactgcatggagttacccactttagtcgtattcagatgcctatattttcagatcctcttaccggtttatatgtgaccacatcaggatttgactcagaaattcttagtttgcaacgaaaatttggtcaatggcgggatgatggttcatctgaggagcatagtgacctattgttctatgagcatgttgaagctgtaaaattaacaggggacaatctcatgccagctggtcaggttgtcttccgtgcaaaagttggtgaacgctatcagctccctcataagggaattatccctagagaacttggagtgattgctaggtacaaggggcaaaggaaaattgcagatcctggtttccaaaaccctcgatgggttgatggagagcttttgataatagatggaaagttcatcagagatggtcctgtgatagctttcttttactggacatctaattttcatcgtttcgaattctttagacggttgaggcttcctgaatagttcccatctaaaagtagttaaaggagttgcctggcattacattttccgaggacagattctgatgtgaagagggcgcctggcatgaatcaaggggcatctccacccactctgaaaggctgccatgagggtggaaaatagctcacagtcgcaggaagaggaatagcatcctgccaacatgggtgagctgcgggcgcatcataccaattccgcttctgctatgctccgtccaccaggtcaccagcttgtgaccgaggcatcaaaccgccagattttgtgtttctcagagcaagtagaactaaagcacctcaaagatgtaaatttatgcactcccaaatttaggattttgagcgcaatcttggcagttttcatacatgcgaagtgaactagtacgagcaatagttttgtatagcgtgatcaaacagtggcagcaatcagtagcagaggcatacagaccaacacggccacacagatttgttaatatatctaagtttgtttaaccttgcccatttcttaagcaagaactctatttttaatttttaagctcccattcaaacaagcaaggaaaaggctgtgctgtcgcttgtcgctgcagcaatagacaagactgtattcaggagatgatgtaaaacaggggacgtgaaactgtagatgtgtcatctacattgtttgatactttttgcagagtacttcatgaagtactgaagttttaaataggggataagatagagaatttgttaaagattaggcagcaagttttaaataggggatgagatagagaatttgttaaagatagcctgcctaagactactgcctcacttgttccacactctatttacaatggctgtgttacgaagggcagataagatctgttacatctgtccgctcactttggacactgtgtgcttattgagagatgtcatggactgtcttctccggcgaggttatacgctttgtcgcaggcttggttttagggtagcagcccggactgtcttctccggtgaggttgtacgctctgtcgcaggcttggttctagggtagcagctctaggcgattgagagttattgcaagagagattggtttgataattc

SEQ ID NO: 205586 - DNA, 3006 bp, Zea Mays
ctccatgacaaagtgaggttggccaatgacaatgttgctctcttgtggcgccaccctcgtgttccccggttgtcatgtcgagagcgccgcctaccactgcaacacggtcgatggccaagggtggatgagggagaccatactacctcgcagctcagtcggacagatgggcagaggagcgtgaggaatgggacgatcgaaggttgaaggagatcctgacaggaaacaggacggccctgatgtcatcagatgccagtgagaattgccaaatgctacatgtcatctctgttgcaactccaggctgctgtttatagagaagactacaggactgctcataaactgaggctggctattgctgctacatcaaaaaatgacgctgtgggcagagctatctcggacttaaatatggccatagatgaggagcgctacaaggatgcagcatatatcagagatcatgctggcgcaggactgctggggtggtggtctggaatttctggaaatttgtctgatccatatggtcttattattcgtataagtgctgaacatggtcgatatgtggcaagaagttatgatacaagacagctggcttctgacagccctggtctccctatatttgaaatatactttgcagaggcaaatggtggatataacctacaggcagtgcatctgaaaccagatggtagcgattctgaccaagtgccaaacatgttaagggagaaacttggcattgacagtataaacatatctagcagtccattagggtctaagcatgaagaatttgatggaagtgtaaacatggatgataaagatagtgatgatagcaacatcgctgctggccctggttcgaaaaacttgtcaagcgatctaactgcagttcccaggattaaaatcttgaaagtggtacccatgcagaatgttgatcatgactacataatcaatatctttgatcagatttcagaggaagatgatgacaatgatgatcatgaagttgaaaatgaatcttcagaagatgttgataatgatgataacagtggagtagcagaaacagtttctgcagaagagaatggtgatgaatctggtgacgaaagtgatattgaaaccttggtttcatttgattttgtcagtgagaataacgtctatgcttctcgtccatctgctgaagcttttgaacgaatgccggctagattagaaaaaagagatcgcttctcattttccttctatactgaagaatacagtaaaaagctagatgctggaaaggcccggcagacttcaaaggaaacagttggtttgcatgccgatcagcaggattatgatggttttgtccagcttgatcgtgtaaagttgagtggcagcaacaaaaaactatcgatactacaacttggcatcaagcaaaataacaaggttcagcaaaaactgcatggagttacccactttagtcgtattcagatgcctatattttcagatcctcttaccggtttatatgtgaccacatcaggatttgactcagaaattcttagtttgcaacgaaaatttggtcaatggcgggatgatggttcatctgaggagcatagtgacctattgttctatgagcatgttgaagctgtaaaattaacaggggacaatctcatgccagctggtcaggttgtcttccgtgcaaaagttggtgaacgctatcagctccctcataagggaattatccctagagaacttggagtgattgctaggtacaaggggcaaaggaaaattgcagatcctggtttccaaaaccctcgatgggttgatggagagcttttgataatagatggaaagttcatcagagatggtcctgtgatagctttcttttactggacatctaattttcatcgtttcgaattctttagacggttgaggcttcctgaatagttcccatctaaaagtagttaaagttgcatttggagccaacaggagttgcctggcattacattttccgaggacagattctgatgtgaagagggcgcctggcatgaatcaaggggcatctccacccactctgaaaggctgccatgagggtggaaaatagctcacagtcgcaggaagaggaatagcatcctgccaacatgggtgagctgcgggcgcatcataccaattccgcttctgctatgctccgtccaccaggtcaccagcttgtgaccgaggcatcaaaccgccagattttgtgtttctcagagcaagtagaactaaagcacctcaaagatgtaaatttatgcactcccaaatttaggattttgagcgcaatcttggcagttttcatacatgcgaagtgaactagtacgagcaatagttttgtatagcgtgatcaaacagtggcagcaatcagtagcagaggcatacagaccaacacggccacacagatttgttaatatatctaagtttgtttaaccttgcccatttcttaagcaagaactctatttttaatttttaagctcccattcaaacaagcaaggaaaaggctgtgctgtcgcttgtcgctgcagcaatagacaagactgtattcaggagatgatgtaaaacaggggacgtgaaactgtagatgtgtcatctacattgtttgatactttttgcagagtacttcatgaagtactgaagttttaaataggggataagatagagaatttgttaaagattaggcagcaagttttaaataggggatgagatagagaatttgttaaagatagcctgcctaagactactgcctcacttgttccacactctatttacaatggctgtgttacgaagggcagataagatctgttacatctgtccgctcactttggacactgtgtgcttattgagagatgtcatggactgtcttctccggcgaggttatacgctttgtcgcaggcttggttttagggtagcagcccggactgtcttctccggtgaggttgtacgctctgtcgcaggcttggttctagggtagcagctctaggcgattgagagttattgcaagagagattggtttgataattc

SEQ ID NO: 205587 - DNA, 3030 bp, Zea Mays
ctccatgacaaagtgaggttggccaatgacaatgttgctctcttgtggcgccaccctcgtgttccccggttgtcatgtcgagagcgccgcctaccactgcaacacggtcgatggccaagggtggatgagggagaccatactacctcgcagctcagtcggacagatgggcagaggagcgtgaggaatgggacgatcgaaggttgaaggagatcctgacaggaaacaggacggccctgatgtcatcagatgccagtgagaattgccaaatgctacatgtcatctctgttgcaactccaggctgctgtttatagagaagactacaggactgctcataaactgaggctggctattgctgctacatcaaaaaatgacgctgtgggcagagctatctcggacttaaatatggccatagatgaggagcgctacaaggatgcagcatatatcagagatcatgctggcgcaggactgctggggtggtggtctggaatttctggaaatttgtctgatccatatggtcttattattcgtataagtgctgaacatggtcgatatgtggcaagaagttatgatacaagacagctggcttctgacagccctggtctccctatatttgaaatatactttgcagaggcaaatggtggatataacctacaggcagtgcatctgaaaccagatggtagcgattctgaccaagtgccaaacatgttaagggagaaacttggcattgacagtataaacatatctagcagtccattagggtctaagcatgaagaatttgatggaagtgtaaacatggatgataaagatagtgatgatagcaacatcgctgctggccctggttcgaaaaacttgtcaagcgatctaactgcagttcccaggattaaaatcttgaaagtggtacccatgcagaatgttgatcatgactacataatcaatatctttgatcagatttcagaggaagatgatgacaatgatgatcatgaagttgaaaatgaatcttcagaagatgttgataatgatgataacagtggagtagcagaaacagtttctgcagaagagaatggtgatgaatctggtgacgaaagtgatattgaaaccttggtttcatttgattttgtcagtgagaataacgtctatgcttctcgtccatctgctgaagcttttgaacgaatgccggctagattagaaaaaagagatcgcttctcattttccttctatactgaagaatacagtaaaaagctagatgctggaaaggcccggcagacttcaaaggaaacagttggtttgcatgccgatcagcaggattatgatggttttgtccagcttgatcgtgtaaagttgagtggcagcaacaaaaaactatcgatactacaacttggcatcaagcaaaataacaaggttcagcaaaaactgcatggagttacccactttagtcgtattcagatgcctatattttcagatcctcttaccggtttatatgtgaccacatcaggatttgactcagaaattcttagtttgcaacgaaaatttggtcaatggcgggatgatggttcatctgaggagcatagtgacctattgttctatgagcatgttgaagctgtaaaattaacaggggacaatctcatgccagctggtcaggttgtcttccgtgcaaaagttggtgaacgctatcagctccctcataagggaattatccctagagaacttggagtgattgctaggtacaaggggcaaaggaaaattgcagatcctggtttccaaaaccctcgatgggttgatggagagcttttgataatagatggaaagttcatcagagatggtcctgtgatagctttcttttactggacatctaattttcatcgtttcgaattctttagacggttgaggcttcctgaatagttcccatctaaaagtagttaaagcaggccattctgatttttgcatagttgcatttggagccaacaggagttgcctggcattacattttccgaggacagattctgatgtgaagagggcgcctggcatgaatcaaggggcatctccacccactctgaaaggctgccatgagggtggaaaatagctcacagtcgcaggaagaggaatagcatcctgccaacatgggtgagctgcgggcgcatcataccaattccgcttctgctatgctccgtccaccaggtcaccagcttgtgaccgaggcatcaaaccgccagattttgtgtttctcagagcaagtagaactaaagcacctcaaagatgtaaatttatgcactcccaaatttaggattttgagcgcaatcttggcagttttcatacatgcgaagtgaactagtacgagcaatagttttgtatagcgtgatcaaacagtggcagcaatcagtagcagaggcatacagaccaacacggccacacagatttgttaatatatctaagtttgtttaaccttgcccatttcttaagcaagaactctatttttaatttttaagctcccattcaaacaagcaaggaaaaggctgtgctgtcgcttgtcgctgcagcaatagacaagactgtattcaggagatgatgtaaaacaggggacgtgaaactgtagatgtgtcatctacattgtttgatactttttgcagagtacttcatgaagtactgaagttttaaataggggataagatagagaatttgttaaagattaggcagcaagttttaaataggggatgagatagagaatttgttaaagatagcctgcctaagactactgcctcacttgttccacactctatttacaatggctgtgttacgaagggcagataagatctgttacatctgtccgctcactttggacactgtgtgcttattgagagatgtcatggactgtcttctccggcgaggttatacgctttgtcgcaggcttggttttagggtagcagcccggactgtcttctccggtgaggttgtacgctctgtcgcaggcttggttctagggtagcagctctaggcgattgagagttattgcaagagagattggtttgataattc

SEQ ID NO: 205588 - DNA, 1422 bp, Zea Mays
acgaggcccatctcccacgacaaatgaaaaccctaatctccagcaccccggcggcctccagcgctcccgctccttgctcgcctccacccgcggcaaccaccgccctgcggcccccgccgcttgccagcctccaccgcgccgcgagtcgcgttgttcctgcaccagctggtcctggagcacgggaggacgagcatgtcctggttcggccccaaccccaaggtgaccatcgtcgacccggacctggccaaggacgtgctgtccaacaagttcggccacttcgagaagctcaaggtcccggtgctgtccaagatgctgggctccggcgtggccagccacgagggcgagaagtgggtcaagcaccggaggatcctcaaccctgcgttccatcttgagaagctcaagcgcatgctgccggcgttttctacgtgctgcgaggagctggtgagcaggtgggcggcggagtcccttggctccgacggctcatgcgagctggacgtctggccggagctgcagaacctgacgggagacgtcatttctcgcaccgcgttcagcagcagctacagcgaagggagaaggatcttccagctacaggccgagcaagcttcgcttgtcatgaccaacattcggaagatcatgatccccgactacatgaagatgcgcaggaacaacagggaggtggagtcaatcctgcgagagataatcgggaagaggatccaggcgatggaacgaggcgagggcaccaaagacgacctggtgggtctactgttggagacaaacatgagagacgacatggggatgacgatcgaagacgtgatcgaggagtgcaaggtgttctacttcgccgggatggagaccatgtcggtgctgctacgtggacgatggtggtgctcagcatgcacccggagtggcaggaccgcgcgagggaggaggtgacggctctgttcggcagggacggcaagcccgagtacgacggtctaagccgcctcaaagtcgtgaccatggtgctctacgaggtgctccggctgtacccgtcggccacctccgtcgtccggcaaacgtacaaggagatggaggtcggaggcgtcacctaccccgccggcgtgatcctggagctgcccgtgctgctcatccaccacgacccggacatctggggaggcgcgcgagttcaggcctgacaggttctccgagggcgtgtctagggcctccaaggaccccggcgcgttcctcccgttcggctagggcccgcgcatctgcatcggccagaacttcgcgctgttggaggccaagatggcgctctgcatgatcctccagtggttcgagttcgggctcgcgccatcctacgctcatgcgccgcataccgtgataaccttgcatcctatgcacggccattgagcgacgaggcactccgcgtcagcactcccg

SEQ ID NO: 205589 - DNA, 1143 bp, Zea Mays
aaaccgccaagaatggaatggatagatctgcagcaacccctcccagaacctctgactttgcttcccatcgcttcgtttccaagaggagaatgtttctctcccttgcccagtcgcctgcctgcgccgtcgtctccttcccatggaggtcctcgtcccaactcatcccacgggtcccctcccgctgcaccctcgcatgccacgcagcggtgcccaaagtgcccctccccatcgcctcgccggcctccctcggggacgaccctagcaagtgggaccccgccgagtgcgacgctctcctccgcggcggggagcaggtcgcctccgtgctgcaggagatggtcacgctgatggaggacatggagatggatggtgcatttgagcaggttgctgtggagctggtggcacaaggagttattgggaagagggtggatgagatggagtcaggttttcttatggcacttgattacatgatacaacttgcacagaaggacacagatgatgagcgtaagtctattcttgaggtaattaagcagacagtgctagaccatctgacgaagaaatgtcctccacatgtccaggttgttgggctactttgccagactgaaaagaaagagagcagacatgaattgttgcgccgcgtagctgctggtggaggtgtttttaagaacgataaaggtcttaagtgccaaattcctggggcaaatcttaatgacattgcaaatcaggcagatgatctagtagagtcaatggaatctagggacaccattcctgatcgaaaacttcttgcaagattagttatagtaagagaagaagctcggaatatgatgggaggtggcctgttagatgagagaaatgatcgtggtttgactaccctccctgaggcagaggtaaactttttgagcaagctcgttgctcttaaacctgggaaggcattggaaaggatgataaagaatgttatgaatggcagaggggaaggtgctgataacgttgaacaaccaagtgctgattcacattctgaacaggagagtctaacaggagtattaggaaggggaagtgtatctggccacaagccacggccagtccgccctggaatgttccttgagactgtttccaagtgttttctttttgtctgcaattttgtcgcat

SEQ ID NO: 205590 - DNA, 1154 bp, Zea Mays
ggtggtatataaatactgcaaaagtcggccacaagctccaagccacggcccaatcgccggccgacactcacaagaacctgcctccctctggatcgctatctcttttctagtgcccagggaaagctagctagctcacagtcacagctgagctgagggaagaaagcaaggagagggagccagggaggaaggggaaaaacacgcggagagggtgagcaagaaagaaccgaggcggatcgccttctgttcctcctgccggctccgcgagaggaggcactgctcagtcccgtgattcctacaggggggaagaaagaggtggaacaacgccccggggcagagcagagatgatgcgggagacgtacatggacgtgctgccgccggtggaccacatagccgcacggagcaactggttcccggcggcggcgcgtctgtggacggcggcggagaacaagcagttcgagcgggcgctcgccgggctcgacctctgccgcccggactgggaggaggtggcgcgggccatccccggccggacggtgcgcgaggtcgtcagccacttcaagcacctcgaggtcgacgtccagcagatcgagagcgggcaggttcccttgccggcctacggcggcggggccagctcgttcaccctgcagtgggacggctacggccccggtccgggggacttcaggcacgggtaccgcttcgccggaggctgcgggaggcggcaccacggccgcacgccggagcaggagcggaagaagggcgtgccatggacggaggaggagcacaggttgttcctcctaggcctgaagaaatacggcaagggggactggaggaacatatcgcgcaactttgtccagaccagaacgcctactcaggtggccagccacgcgcagaagtacttcatcaggctcaactccggcggcaaggacaagaggaggtccagcatccacgacatcaccacggtcaacctgacggacgaccagccgccctcgccgtcccagtcctccctgatcaccagccagtcgaacgcaccagctccatctccagctccggctccagccgcggggatatgccaggtcccattggcggccgacgtcaagcgacacggtgccggaactctgcccttcagctcaccgaaccggacctctgcggggatatcc

SEQ ID NO: 205591 - DNA, 1395 bp, Zea Mays
ggtggtatataaatactgcaaaagtcggccacaagctccaagccacggcccaatcgccggccgacactcacaagaacctgcctccctctggatcgctatctcttttctagtgcccagggaaagctagctagctcacagtcacagctgagctgagggaagaaagcaaggagagggagccagggaggaaggggaaaaacacgcggagagggtgagcaagaaagaaccgaggcggatcgccttctgttcctcctgccggctccgcgagaggaggcactgctcaggggggaagaaagaggtggaacaacgccccggggcagagcagagatgatgcgggagacgtacatggacgtgctgccgccggtggaccacatagccgcacggagcaactggttcccggcggcggcgcgtctgtggacggcggcggagaacaagcagttcgagcgggcgctcgccgggctcgacctctgccgcccggactgggaggaggtggcgcgggccatccccggccggacggtgcgcgaggtcgtcagccacttcaagcacctcgaggtcgacgtccagcagatcgagagcgggcaggttcccttgccggcctacggcggcggggccagctcgttcaccctgcagtgggacggctacggccccggtccgggggacttcaggcacgggtaccgcttcgccggaggctgcgggaggcggcaccacggccgcacgccggagcaggagcggaagaagggcgtgccatggacggaggaggagcacaggttgttcctcctaggcctgaagaaatacggcaagggggactggaggaacatatcgcgcaactttgtccagaccagaacgcctactcaggtggccagccacgcgcagaagtacttcatcaggctcaactccggcggcaaggacaagaggaggtccagcatccacgaccaggacgcctactcaggtggtcagccatgcgcagaagtacttcatgaggcacaactccggcggcaaggacaagagaagatccagcatccacgacatcaccacagttaagctgagcgacgaccaggaccagcctccgtcctcgccatcccagtcctctctgatcactgaccagttcaacgaattagctctgacacccggcgctgcggattcgccctccaattaacctttgcggctttgccggactactgggatatgtatatgccaatctttggaatggggtttgcaagatcaacgcctgcagtgtggcccgttcaattggatggaagctagaacatattttttttgggtgcagttcagtgtgcagcaccatgaatctatcagatggctatctacttgtttagtacactgggagtgtttccatgtttgttgtatcatcttgtgtaataaacctggaatttaataaaa

SEQ ID NO: 205592 - DNA, 1944 bp, Zea Mays
tttgcttgcagttttgcactaggcattgattgcatctctagtgcccgtcctccgtcctccggagcggctatgggcgaagagagggagttcgtgggcgctaggttggacgccggcctccgcgctgcccgcttctcgtcgccgccgtctgccgacgagtttgcggcagatgtcgagcccaagaacgtccctgcggtctttcgcggcgtggttaaggagtgggcggcctcctcccgttgggatcctctacatggcggcctcgattacctgctggaaaaagtgggacctgacgtggctgtggaagctatgatgtcaaacactggccatgtgttctacggggatctcagaagccatgagaggctagtgattcatccaaagagcagggaatgcttggggagccagctagttcaagggagacatgttcgaacagttcagagaacttggagcaagtctatttggcacagagaacaaagaaggatgctcattacaagttctggaaggcgacatccaagagcctatatttctgagaggaaaatcattttcgtcaataaacttttggatgaataagggtcacttgagatcaagtactcattacgatccccaccataaccttctctgtgtggtatctggtcgcaaaaaagttactttgtggcctccatctgcatccccattcttatacccgttgcctgtgtatggcgaggcctccaaccacagctctgttagtgtggaggagccagattattcaatatatacaagggcaagatacatgaaggaatattctgaaacagtaattctaaactgcagcgatgttgttttcataccagaaggctggtatcaccaagttgacagtgacgacttaacaatagcagttaacttttggtggaagtcaagaataatgactcaaatgttagaacatatggatgcctactatctacgccgaattatgagcagattggtggaccaggagatgagcataatggcgcagaagagtccttttggtcatttgaaagattgcacggatattcagcatatggccaaaacattgacaggtttccagctattcaatttgcaaaaagattcaccactacgaactctggaaccctccactctgcaagcactctatgaactcatctcactggtccatgatggtgctgaagcggttagccaaatggacaaaatagaagccacatcccagaataaatcctccaaccaaagagatgacacagatacgagtgctgctgcagacgattcatccctcttggacaaagatcctgttgcaaaaatcattttgccagttgaaccacttgaattgcggactatgctgcttgcaatgcatactttcccaaggacgttagaaaatttgattctcaacatgcttggggtaggagcagagatactgactaggaagtttgatgagatggatcaacaaacaacaaaagaagaacagtctgagttctacaagatattctatagcgtgtttgacgaccagtacgctgcaatggatgcgcttctgaacgggaaggaattgttttcttttcagatattccagaatgtcctggacaagtatctcggggtgcatgttgaccgacccagcagatttgttactcgtacaaaccaatgaaatggagcgcctctaccctctagtatacaaaacctgaatcggcttgttgagccaagccaatgaagaacgtattatgctgattactgatgtttgagcgtctcgatagataatgtgtttttattggcttgcaaccatattttagggattttttttggacgaaggcggcagtaactgagagcggtgcgcatatgtgagatgcgtgactgctcttgaatgcgatgattacaaacgaaaattaccgttacgcctcgtttggattcatggaatcgaatttcattctaataatattaattctaacgatattaatttaggcatatataaggaag

SEQ ID NO: 205593 - DNA, 1160 bp, Zea Mays
tgttgctcggcttcaccacgttcaactcccaggaaaacccccagccatcacctgccccagcgttcgctctccatgtttcctagccccagcggccagcctgtccttgctcgtttccaagctgtgctctagcaagcttctctgtagttcttccccaactgctcgctctcagcctgtccggtcctgcgtacttcaacactgttctacagccgtctgagctccacctcgtcgtcgacctgttgtttcagcgtcgtatccctcgacttcatcacagcatcaccggtgctctcgtcgtcgttgagctcttggcgcgacgtgacgtcatcgtcgttttctcgccagtcatgctcgacccacagctccttcgcgtcatcgtcttcgacaacccacaacctctgctctaacctcatcgcactcgcggaatcgtcgtgaagccgctagccgtcctcacacccgacaagctgtcgtgctcggtgtgttttctccgtgcggccttacgtgttcctctcgcttcatcggcttgtcgcgtgttagagcagagctccatgaagaagtggacatcaaagagaaattgctccagtacttgaatacccattggaaaggttttgatgtctttggcttcattagttgcttcatgtggaggtcttcaagcttagtttgcttatgtgtatttcttatggaaaggcttcacctttccaagtattgtaattaagttatgcacttcaaagactaacagaacttgcaaatattataactctttctagcatataaaacttgagttttggaaatgtaaataatgttttgtaagtcttccgctctatctccgaagtgtgtgtatatcaaatgtgaatactgtaatatacatgttttgtgggaaatccttgggccgataacacgggaggtgtaatacccaatttgtaagataatactagatgagacattagttcctatatgtgtaccatctctatttactatcacatgtgaatacctcatttaaaaacaaaggattaataaaagtcatgccactaaattgtgcatcatgctgaggttttattttgtgtgcatcttgtgacaacataaaaataatgtaaaaagaaatatattaaagtccaaagtggaatttaagatataaaagaattctagaatttagaagtggagaaaga

SEQ ID NO: 205594 - DNA, 1207 bp, Zea Mays
gagatagatgttcctggatggagaattcctcacgtcacctgcaactccaactgttgctcggcttcaccacgttcaactcccaggaaaacccccagccatcacctgccccagcgttcgctctccatgtttcctagccccagcggccagcctgtccttgctcgtttccaagctgtgctctagcaagcttctctgtagttcttccccaactgctcgctctcagcctcgtcgtatccctcgacttcatcacagcatcaccggtgctctcgtcgtcgttgagctcttggcgcgacgtgacgtcatcgtcgttttctcgccagtcatgctcgacccacagctccttcgcgtcatcgtcttcgacaacccacaacctctgctctaacctcatcgcactcgcggaatcgtcgtgaagccgctagccgtctgcctcgtcctcacacccgacaagctgtcgtgctcggtgtgttttctccgtgcggccttacgtgttcctctcgcttcatcggcttgtcgcgtgttagagcagagctccatgaagaagtggacatcaaagagaaattgctccagtacttgaatacccattggtgtggttccatctaactggttatctagtagaaggattttggatcttctctgcaacaaaggaaaggttttgatgtctttggcttcattagttgcttcatgtggaggtcttcaagcttagtttgcttatgtgtatttcttatggaaaggcttcacctttccaagtattgtaattaagttatgcacttcaaagactaacagaacttgcaaatattataactctttctagcatataaaacttgagttttggaaatgtaaataatgttttgtaagtcttccgctctatctccgaagtgtgtgtatatcaaatgtgaatactgtaatatacatgttttgtgggaaatccttgggccgataacacgggaggtgtaatacccaatttgtaagataatactagatgagacattagttcctatatgtgtaccatctctatttactatcacatgtgaatacctcatttaaaaacaaaggattaataaaagtcatgccactaaattgtgcatcatgctgaggttttattttgtgtgcatcttgtgacaacataaaaataatgtaaaaagaaatatattaaagtccaaagtggaatttaagatataaaagaattctagaatttagaagtggagaaaga

SEQ ID NO: 205595 - DNA, 1301 bp, Zea Mays
ttcttttctctcatacgaatagagatagatgttcctggatggagaattcctcacgtcacctgcaactccaactgttgctcggcttcaccacgttcaactcccaggaaaacccccagccatcacctgccccagcgttcgctctccatgtttcctagccccagcggccagcctgtccttgctcgtttccaagctgtgctctagcaagcttctctgtagttcttccccaactgctcgctctcagcctgtccggtcctgcgtacttcaacactgttctacagccgtctgagctccacctcgtcgtcgacctgttgtttcagcgtcgtatccctcgacttcatcacagcatcaccggtgctctcgtcgtcgttgagctcttggcgcgacgtgacgtcatcgtcgttttctcgccagtcatgctcgacccacagctccttcgcgtcatcgtcttcgacaacccacaacctctgctctaacctcatcgcactcgcggaatcgtcgtgaagccgctagccgtctgcctcgtcctcacacccgacaagctgtcgtgctcggtgtgttttctccgtgcggccttacgtgttcctctcgcttcatcggcttgtcgcgtgttagagcagagctccatgaagaagtggacatcaaagagaaattgctccagtacttgaatacccattggtgtggttccatctaactggttatctagtagaaggattttggatcttctctgcaacaaaggaaaggttttgatgtctttggcttcattagttgcttcatgtggaggtcttcaagcttagtttgcttatgtgtatttcttatggaaaggcttcacctttccaagtattgtaattaagttatgcacttcaaagactaacagaacttgcaaatattataactctttctagcatataaaacttgagttttggaaatgtaaataatgttttgtaagtcttccgctctatctccgaagtgtgtgtatatcaaatgtgaatactgtaatatacatgttttgtgggaaatccttgggccgataacacgggaggtgtaatacccaatttgtaagataatactagatgagacattagttcctatatgtgtaccatctctatttactatcacatgtgaatacctcatttaaaaacaaaggattaataaaagtcatgccactaaattgtgcatcatgctgaggttttattttgtgtgcatcttgtgacaacataaaaataatgtaaaaagaaatatattaaagtccaaagtggaatttaagatataaaagaattctagaatttagaagtggagaaaga

SEQ ID NO: 205596 - DNA, 1157 bp, Zea Mays
aacgcaaaaacctaaaccgctatggtccatccacatccacagtcgccatcgcccccacctctcaccgtcgtcttcgtgcaccactcggcctccactgccggtcgcgcctcccagccacctcgtgccgctctgccaccccgcgcatcctccaccgcccctatggctgccacgggcgagcgctgcccgagcagtcgaccgccctttccgtgccgccccgcctccccgctaggcctccactgcccactgctccggcgcctacagtggaaggcaaggagaaggacatcgggcggcgatgacgattatcttattgctagcaccgatggggtggggacaaagctgaagcttgctttcgaaactggtattcatgatacaatcgacattgacctggtggcaatgagcgtcaatgacattgtaactctaggtgcaaaaccattgttcttcctagattactatgcaacgagcaagcttgatgttgatcttgcagagaaggttatcaaggggattagggatggctgcgaacaatcagattgtgctctcctaggaggggagacagcagaaatgcctggtttctatgcagagggtgaatatgatctaagtggttttgctctcccaagaaatgatggcataacaactacagttggtgaagctctaatggcaccaaccttcatctatgttaagcaggtgcttgagattattagcaaaggtggtgtgaaaggactagcccacatcactggtggtggctttactagcaatatcccaagagtattcccctctggatgcggggcaaaaaatttactgggtcatgggaaatacctccaatcttcagttggcttcaacaggcaagaacaaatgatcttcaaacttcgcctttgattttcagtagcaactattctgagaaacatcaggcactgcattggcgtactggtcataaaaatgattgcctccagataataagttctgctgcttcaaattcagttctgccagctgtaggaatagggtttgtccgctggtttgctaaggcaagcaacgtacatagactgctcgtcttggatcctttagaaatggaattgagggtatccatggagatgcatgtagctgaactcagtcaagtttatatccattgtgtgtgtgcacgcttatttggcatcgtgttcttc

SEQ ID NO: 205597 - DNA, 1401 bp, Zea Mays
aagcacaaggccgcgcccccggcggcgcctggatctgcgttgcttgcaaccccccccccccccccccccccccacacacacacacacaacagatctgctacagggacaatctgatggtcggcgcatcgcctagaggccggtggtggcgagtcacgcctcctcagccctcatcctcacgtcgtcgccaccgcagatccgcccaacggcccctgacccgacaatgacgattatcttattgctagcaccgatggggtggggacaaagctgaagcttgctttcgaaactggtattcatgatacaatcgacattgacctggtggcaatgagcgtcaatgacattgtaactctaggtgcaaaaccattgttcttcctagattactatgcaacgagcaagcttgatgttgatcttgcagagaaggttatcaaggggattagggatggctgcgaacaatcagattgtgctctcctaggaggggagacagcagaaatgcctggtttctatgcagagggtgaatatgatctaagtggttttgctctcccaagaaatgatggcataacaactacagttggtgaagctctaatggcaccaaccttcatctatgttaagcaggtgcttgagattattagcaaaggtggtgtgaaaggactagcccacatcactggtggtggctttactagcaatatcccaagagtattcccctctggatgcggggcaaaaaatttactgggtcatgggaaatacctccaatcttcagttggcttcaacaggcaagaacaaatgatcttcaaacttcgcctttgattttcagtagcaactattctgagaaacatcaggcactgcattggcgtactggtcataaaaatgattgcctccagataataagttctgctgcttcaaattcagttctgccagctgtaggaatagggtttgtccgctggtttgctaaggcaagcaacgtacatagactgctcgtcttggatcctttaggaatcataaaagcatatagaggaactatgtataggctacaaagaagcataagaagcatttttatagcagaagccaagtgttctgatgattttgttttttcaattgtgttttctgttattggttcagtatgcacatatattgacatgatttatggcatggcatctgccatctttgttatatttatgacatcgttcttgattgatgtgtgcgacatgaatgatagatctttttaacatcctgagcatcattgtgtcactcattatcgtattttgtatatcatttatgggttcacggatatgaaatgtcaggtttcttatttttgagatctgaaccatgtgttgccttttggttgttacataataaatggtcctgtcgatgtgttttacgttcaaaaacttctatgcgacatgcacg

SEQ ID NO: 205598 - DNA, 993 bp, Zea Mays
atctgctacagggacaatctgatggtcggcgcatcgcctagaggccggtggtggcgagtcacgcctcctcagccctcatcctcacgtcgtcgccaccgcagatccgcccaacggcccctgacccgacaatgacgattatcttattgctagcaccgatggggtggggacaaagctgaagcttgctttcgaaactggtattcatgatacaatcgacattgacctggtggcaatgagcgtcaatgacattgtaactctaggtgcaaaaccattgttcttcctagattactatgcaacgagcaagcttgatgttgatcttgcagagaaggttatcaaggggattagggatggctgcgaacaatcagattgtgctctcctaggaggggagacagcagaaatgcctggtttctatgcagagggtgaatatgatctaagtggttttgctctcccaagaaatgatggcataacaactacagttggtgaagctctaatggcaccaaccttcatctatgttaagcaggtgcttgagattattagcaaaggtggtgtgaaaggactagcccacatcactggtggtggctttactagcaatatcccaagagtattcccctctggatgcggggcaaaaaatttactgggtcatgggaaatacctccaatcttcagttggcttcaacaggcaagaacaaatgatcttcaaacttcgcctttgattttcagtagcaactattctgagaaacatcaggcactgcattggcgtactggtcataaaaatgattgcctccagataataagttctgctgcttcaaattcagttctgccagctgtaggaatagggtttgtccgctggtttgctaaggcaagcaacgtacatagactgctcgtcttggatcctttagaaatggaattgagggtatccatggagatgcatgtagctgaactcagtcaagtttatatccattgtgtgtgtgcacgcttatttggcatcgtgttcttc

SEQ ID NO: 205599 - DNA, 1101 bp, Zea Mays
ccgtgaatgacaagatcttcacgaacgtctcgctgaattgtggcatgcgtccgtgacattctgcaccgtccatagcactggctatttttgaacgatcccctcccgttttgactccggccccgcgcgccggcgcccacctccagctccgcgtgtccctcgcttcgtcaaggtgcatgccgcacgttcgccgggtaacccccctccttgcatcctctaacgcacactgccgcgccgccctcggtctcccctctcctctcccttccttcctcttccacggacacgggaggagaagggttgatcacgaccggggaggacgcgtggccagagatgggtctccacggaggcgtcgtcgtgctccgcgcggccgtgctcgccgccgtcctcggcttcgtcgccgctgccgggttcatctcaaacgacgcgctgctggagcgcgggcacgacaccaccggccggagcctgctgcaggccaagaaagattgcccggtgagcttcgagggcgccaactacacggtgatcacgagccggtgtaagggcccgctgtaccagccgacgctgtgctgcggcgcgctcaaggacttcgcgtgcccttactccacctacatcaacgacgtgagcaccaactgcgccgccaccatgttcagctacatcaacctctacggcaagtacccgccgggcctcttcgccaatacctgccacgagggcgacaagggcctcacgtgccccgaggacaccccgcagatcgaacccgggcagaaggccgcgttggccgtctcgttgctgctcatgtcttgctgagagacccgggttgcagatggccgtgacagcgcaaccaactgcgttgctgtaccgcttcttttaccacttctttttttctggatggatgatttccaagatacatggatggatatgtttacatctgaaaaaatgaattcagaaaagggtggtagacatgcaatgcaaaccagctaaagtctgctttcacttgttcaacatggtaaaatttcttgaaatgcagtagtcaaaaattaaacatgcagtgctgtcactagactggagattttgtaactcgtctctggatttacttctcttctactttac

SEQ ID NO: 205600 - DNA, 572 bp, Zea Mays
ggttttcaagttgtagctaggactatcaaggctgagttacagaaaatgagagttgaaatggctggaatgagaagagatgcagagcattattctagacaggagcatgttgagcttgagaagagataccgggagctaactgacttgctgtaccacaagcaaacacaattagaatccatggccagcgaaaaggccggattggagttccaactggagaaatcattgaaacaatttcgtgaagtgcaggtcgaagcagaaaggagtaaagctactcgcagatcagcatcatcgtgggaagaagatactgatatcaaggcattagagcctcttcctctacatcatcggcacatggcaacagcaaatcatcagttacaaaaggctgcgaagcttttagatacaggcgctgttcgtgcaacaagatttttgtggcgacaccccgttgcacgagtcagcgtgctattctatctggcatgaaccacataacttcaatttcctgtgtttaccctcccccccccccccccccctctttttctaccaaatcaacacttctttctgacttaaaatctgtttccgcc

SEQ ID NO: 205601 - DNA, 793 bp, Zea Mays
aattttgcaagagagctgctgatcaaagctcatcaagagtgctggaattggagcacaaggtggctgtgcttgaggttgaatatgcttcattgcaacaagaactgcaggagatggaagctcgtaaccgccgcacacagaaaaaaccttcagaagaagccaatcaagttcttcagatgcaggcttggcaggaagaagttgagcgtgcacgccaaagccaacgagaggcagaagcaaagatatcatcgttggaggctgagttacagaaaatgagagttgaaatggctggaatgagaagagatgcagagcattattctagacaggagcatgttgagcttgagaagagataccgggagctaactgacttgctgtaccacaagcaaacacaattagaatccatggccagcgaaaaggccggattggagttccaactggagaaatcattgaaacaatttcgtgaagtgcaggtcgaagcagaaaggagtaaagctactcgcagatcagcatcatcgtgggaagaagatactgatatcaaggcattagagcctcttcctctacatcatcggcacatggcaacagcaaatcatcagttacaaaaggctgcgaagcttttagatacaggcgctgttcgtgcaacaagatttttgtggcgacaccccgttgcacgagtcagcgtgctattctatctggcatgaaccacataacttcaatttcctgtgtttaccctcccccccccccccccccctctttttctaccaaatcaacacttctttctgacttaaaatctgtttccgcc

SEQ ID NO: 205602 - DNA, 779 bp, Zea Mays
gaggcatcaaatgcactagctagaatccagagagctgctgatcaaagctcatcaagagtgctggaattggagcacaaggtggctgtgcttgaggagatggaagctcgtaaccgccgcacacagaaaaaaccttcagaagaagccaatcaagttcttcagatgcaggcttggcaggaagaagttgagcgtgcacgccaaagccaacgagaggcagaagcaaagatatcatcgttggaggctgagttacagaaaatgagagttgaaatggctggaatgagaagagatgcagagcattattctagacaggagcatgttgagcttgagaagagataccgggagctaactgacttgctgtaccacaagcaaacacaattagaatccatggccagcgaaaaggccggattggagttccaactggagaaatcattgaaacaatttcgtgaagtgcaggtcgaagcagaaaggagtaaagctactcgcagatcagcatcatcgtgggaagaagatactgatatcaaggcattagagcctcttcctctacatcatcggcacatggcaacagcaaatcatcagttacaaaaggctgcgaagcttttagatacaggcgctgttcgtgcaacaagatttttgtggcgacaccccgttgcacgagtcagcgtgctattctatctggcatgaaccacataacttcaatttcctgtgtttaccctcccccccccccccccccctctttttctaccaaatcaacacttctttctgacttaaaatctgtttccgcc

SEQ ID NO: 205603 - DNA, 822 bp, Zea Mays
agaacatcgagctgttgaggcatcaaatgcactagctagaatccagagagctgctgatcaaagctcatcaagagtgctggaattggagcacaaggtggctgtgcttgaggttgaatatgcttcattgcaacaagaactgcaggagatggaagctcgtaaccgccgcacacagaaaaaaccttcagaagaagccaatcaagttcttcaggcttggcaggaagaagttgagcgtgcacgccaaagccaacgagaggcagaagcaaagatatcatcgttggaggctgagttacagaaaatgagagttgaaatggctggaatgagaagagatgcagagcattattctagacaggagcatgttgagcttgagaagagataccgggagctaactgacttgctgtaccacaagcaaacacaattagaatccatggccagcgaaaaggccggattggagttccaactggagaaatcattgaaacaatttcgtgaagtgcaggtcgaagcagaaaggagtaaagctactcgcagatcagcatcatcgtgggaagaagatactgatatcaaggcattagagcctcttcctctacatcatcggcacatggcaacagcaaatcatcagttacaaaaggctgcgaagcttttagatacaggcgctgttcgtgcaacaagatttttgtggcgacaccccgttgcacgagtcagcgtgctattctatctggcatgaaccacataacttcaatttcctgtgtttaccctcccccccccccccccccctctttttctaccaaatcaacacttctttctgacttaaaatctgtttccgcc

SEQ ID NO: 205604 - DNA, 833 bp, Zea Mays
aaattagaacatcgagctgttgaggcatcaaatgcactagctagaatccagagagctgctgatcaaagctcatcaagagtgctggaattggagcacaaggtggctgtgcttgaggttgaatatgcttcattgcaacaagaactgcaggagatggaagctcgtaaccgccgcacacagaaaaaaccttcagaagaagccaatcaagttcttcagatgcaggcttggcaggaagaagttgagcgtgcacgccaaagccaacgagaggcagaagcaaagatatcatcgttggaggctgagttacagaaaatgagagttgaaatggctggaatgagaagagatgcagagcattattctagacaggagcatgttgagcttgagaagagataccgggagctaactgacttgctgtaccacaagcaaacacaattagaatccatggccagcgaaaaggccggattggagttccaactggagaaatcattgaaacaatttcgtgaagtgcaggtcgaagcagaaaggagtaaagctactcgcagatcagcatcatcgtgggaagaagatactgatatcaaggcattagagcctcttcctctacatcatcggcacatggcaacagcaaatcatcagttacaaaaggctgcgaagcttttagatacaggcgctgttcgtgcaacaagatttttgtggcgacaccccgttgcacgagtcagcgtgctattctatctggcatgaaccacataacttcaatttcctgtgtttaccctcccccccccccccccccctctttttctaccaaatcaacacttctttctgacttaaaatctgtttccgcc

SEQ ID NO: 205605 - DNA, 1537 bp, Zea Mays
cgctgttgtaggcatgaacaacctcatgagttactcgtggagaagcaaccggatgtggcgatcgtgtggttctggaaggcaatcaactcaggggacagggtggacagcgccctgaaggacatggccatggtgatgaagcagcaggaccgttccgaggaggcaatcgaggccatcaggtccttcaggcacctctgctccaagcaggctcaggaatccctcgacaacctcctcattgacctctacaagaaatgcgggaaagttgaggagcagatcgagctcctgaaacagaagctcaagtcgatataccttggcgaggccttcaacgggaaggcgacgaagaaagcgcggtcccatggcaagaagtttcaggtctcgatccaacaagagacgtctcgtattctgggcaatcttggctgggcttacatgcagcagaacaacttcgaggccgccgagctggtgtaccgcaaggcgcaagctatcgagcccgatgccaacagggcgtgcaaccttgggctgtgcctgatcaagcagggcaggcacgacgaggcacggcaagcgctcgaggacgtccgattgcgcagaatctatggatcagaagatggaaaggtggttgcccgtgcggagcagcttctccgcgagctaaacccgttgcaatgcgtttcatcgccgttccaggttggcctcagcgtccatgaagggatcatgggtaaaccagacctagtagtgatgaacgagtggacgccgttcaggtcgaggaggctgcctgtgtttgaggagatagcaactttccgggaccaaatggcttgttgatgcattactttgcatggtttaatttatctgtcagtgtcacactcacatccctctagaagtttttgttcgtatagagatcagtatatatcatatagctggggttgatgcaaagcgttgcctttaggatagtatttggttcatgttatatcactgtatggttcagatttcagtgaacaaatgttcgtgcgtgccctgatcttgtacaggatttacagttggctgttgtgaaatggtcgcttctaatcttgtcttgtacaggatttacagtcggcttcaagcatctttaaactgcggtttcaattaaggcaaagccgaatctgacaacagagacagattaaaatcactgcgtcagaaataaagtacagcaactcaccagaggtggattaactaaaagagtctccacaaccattcctgaacgcaattcagcacaccttccggaaaaacctttgtccatctgctagtttgtttctgcaagttcagtgtccagaaccagaggacgaagccaaagtgaggttcctgaacccccgaggcgattgaaatttcagagcattaacaagaaagctcagcttccgttctgcactgctcttgagccctacagtctatacgctagaacaaaaatgttcctttcttgccgaactggtcgtcacgtcccaagggccactgaagatcatttgccactgcagttacaggtgatgcacaacattagcataagtgcctagaatattct

SEQ ID NO: 205606 - DNA, 686 bp, Zea Mays
gtgagtttggaaggttgtttttgttgcatgtgtcattctggcaactatgtacttgtaggtgaccagcaaacagaatcagcttcccccagtaactgtgaccaagacaatgcaaactccagcagagggaatgaagttccagcatcaagatgtagagattttggcattcccagttcagaaagcatatctctaaatgaactgaagaggaaggagcccgaccttgatatggaaacaccggcatcttacaaggaaccaaaaaccaatgttggcggtaggtcatcttcacaaagcaatggtcgcggatcacacaagtccaacaagcgtgaaaagctcgacttcaatcatctaagaccgaagaaatgaaaaatggtgttcgagttagctcttgtactctgtttgtagctgtacccaattggccatctgctgtgttttgtcgattatatctagagagctggtaaccatgtccatgtgaccatgtggcatgcattcttagtgagattatgtggtgttaatcatttttctttctattgatgtgttctactcaactactctgctgtaagatgtgaggctctactgtacagcagtgatgaatgcagttctgcttatgttttatgtcgcctactaagcatgtggtcaaaattgagctacggcatgatcgttcattttgcactaccttgcctcgttttttc

SEQ ID NO: 205607 - DNA, 1068 bp, Zea Mays
gaaattacgtatttggccccgcgccgcacgccctcttctcgtgctccagcggattcgctaggccgcgagcctccaaaaccctaaccctaaatttgggggcgcttgggtcaaagagacggggggaggaatcgagccggcggcttgcggcggcatcagcgatggcggcgaagcgggagatctcgagcaccctcaggaacctcaagtttatgcagcgcggcgcggctgcgcagaaggccgaggagaaggccgaggtggaggtacaggaggaggaggtggtgatggcgccgagtggaggcttcgcctcgtccgcgcaggtcgttaggaagtgcatagttatcatggagggtaatcctcatccaggagctataaagggtcggatgtctttccaaaatttcaatccatctatcgatatgtgtagaaactaaatgaagaggcaagaggtgaccagcaaacagaatcagcttcccccagtaactgtgaccaagacaatgcaaactccagcagagggaatgaagttccagcatcaagatgtagagattttggcattcccagttcagaaagcatatctctaaatgaactgaagaggaaggagcccgaccttgatatggaaacaccggcatcttacaaggaaccaaaaaccaatgttggcggtaggtcatcttcacaaagcaatggtcgcggatcacacaagtccaacaagcgtgaaaagctcgacttcaatcatctaagaccgaagaaatgaaaaatggtgttcgagttagctcttgtactctgtttgtagctgtacccaattggccatctgctgtgttttgtcgattatatctagagagctggtaaccatgtccatgtgaccatgtggcatgcattcttagtgagattatgtggtgttaatcatttttctttctattgatgtgttctactcaactactctgctgtaagatgtgaggctctactgtacagcagtgatgaatgcagttctgcttatgttttatgtcgcctactaagcatgtggtcaaaattgagctacggcatgatcgttcattttgcactaccttgcctcgttttttc

SEQ ID NO: 205608 - DNA, 1952 bp, Zea Mays
ctcgcctgcccgctgctgcgcttcaccccgctctcgcctcccgccgccgcgccgtcccggtcgcgatggccctgcgctccccggatctgcggtggctcggatcgctcacgaggcccggccgccttgcaccatccccactcgccgcgctcgcctccccacggcgccgccgccgcgcaccgtccccttcgccctcgccctccgactcctccaccccatctaccgcccctacatccgacagtgggccgggagcggaggggatggaggggctggagtggaagaagatcagtgccaagaggttcgggatcaaggagtccatgatcccccccgaggcctggaacgtactacaccgcctccgcagcagaggatatgatgtgtaccttgttggtggttgtgttcgagatctcataatgaaaaagacgccaaaggatttcgacataataacaacagctgatcttaggcaggtgaaagacactttcttaggatcagctgttatagtaggaaggcgttttcccatatgtcatgtacatgagaacaattccatcgttgaggtgtcaagttttaatacttgtgcaaggggatcaagtggtagccagatttacaattcaaagagccaaaattgtagcaagaatgattttgttcgctggaagaactgccaaaggagggacttcacaattaatgggttaatgtttaacccatattcagaaaagatctatgattacttgggaggcattgaagatattaagaaagctaaggtccgtactgtaattcctgctggcacttcgtttcaggaggactgtgaattgcagctcgtttagggttcagcttccccaaagaaacagcttattatgtgagaacacttgcttgctcagtggcaagacttgataaggcaaggatactcatggagatgaactatatgcttgcttatggttcagctgaagcttctttgaggttgttgtggaggtttggcctccttgaacatttgttgccctttcaggcagcatatttctcttcgactcgttttaagaggaaggataaaggaactaatatgctacttgtcttattttctaagctggataattttcttgcaccgaacaggccatgtcacaatagtctatggataagccttttagcttttcatgaagcattggcacgcaaaccatgtgatcctttgatagtggctacttttgcactagccttttacctgggaggtgatatgtctttggcagtggatatcggaaaatcaatcaaccgacaacatgatactggctttcgggagctcttagaacccaaagtctggactgataagcatttggcaggtgaagtacaaagctttgctgcattgatgaagcaggcattaactgaaatgactgatgagtatcatgtcgcaaatgctatggcaaaaatccctcaagcaccttcctcagatcttgtatttataccactacaagcctacctgaaggttctcaaatttatcgagtgtgttcaatatggcaaaaaggagcgtggccatgaaccaaaacgcgatgggatgatcaattaccataacctgtctaatggtacacatgcagaaataagaaacctctttacactggtggtttttgacacactgtaccctacagacacggaggatgaaaatgactgcagttcttagagagacatcatgattgggatgaattcaatactttgccagacatcaataaatactccatttgtcccaaaatatatttctttctagtcttttttttggtccacattcatcctaatgatagtgaatgtagacatacatacaaactatattcgtagattaattaatgaatgtttgtttagtttaaaacgaattatattttgggactgagagagtaataaataataaatagccagggacaactggagctgctgcatcagagtgaaggcaaaaacattggacgtcattgcttggtctgatgctgttg

SEQ ID NO: 205609 - DNA, 1811 bp, Zea Mays
cgaatgtgctgagaaagctggtggatgatgcatcaaagtttttgaatgacaaggtcacaaaggcagtgatcacagtccctgcttacttcaacgattcacaaaggacagcaaccaaagatgctggccgcattgctgggctggaggttctgcgtattataaatgagcctaccgccgcatcactagcatatggttttgagaaaaagaacaatgaaacaattctggtttttgacctcggaggtggcaccttcgatgtttcagttcttgaagtcggtgatggtgttttcgaggtgctgtctacatcaggtgacactcaccttggtggtgatgactttgacaagagaattgtagattggctcgctgggaacttcaagaatgatgagggtattgatttgctaaaagataagcaagcactgcagcgattgacagaagcagctgagaaggcaaagatggaactgtcatctttgacccaaacaaacatgagcttgccttttattacagctactgcagatggtcccaagcatattgagactactcttaccagggctaaatttgaagagctatgctcagatctccttgacaggctgaggacccctgtggacaatgcccttagagatgcaaagttgcaattcaaagatattgatgaggttattcttgttggtggctcaactagaataccagctgttcaggagcttgtcaagaaaatgacaggaaaggaccccaatgtgacagtcaaccctgatgaggttgttgcacttggagcagctgtgcaggctggagttctgtctggtgatgttagcgacattgtacttcttgatgtgacccccttgtccctaggtttggagacactgggtggtgtcatgaccaagattatcccacggaatacaaccttgcctacctcaaagtcggaagttttctcaacagcagctgatggccagactagtgtggagatcaatgttctccaaggagaaagagagtttgtgagagacaacaagtctattggtagcttccggcttgatggaatccctcctgccccacgtggtgtaccacagatcgaagtcaagtttgatattgatgctaacggtatcctctctgtcagtgctgtggacaagggtacagggaagaagcaggatatcacaattactggtgctagcactctgccaaaggacgaggtggagaggatggttggcgaagctgagaagtttgcaaaggaggacaaggagaagcgagacgccattgacaccaagaaccaagccgagtcggtcatctaccagaccgagaagcaactgaaggaactaggggacaaggtcccaggtgacgtcaaggggaaagtcgagtcgaagctgcaagagctcaaggatgctgttgctggtggctccacgcagacgatgaaggacgccatgagtgcgttgaaccaggaagtcatgcagatcgggcaggccctctacagccagcagggtgccccaggcgcaggacctggtgcagctgatgcttcttctgctggttcagcgggcacttctgagaagccaggtgacggaggcgatgtgattgacgcagattttactgacagcaaatgagggggcatgctaggtattagatggaggcggttttgccgcgagggagataatttgtttccacaagattgtctaggatgtggatgttctactttttggtagattggcacctaactgtggaatgaatatacataggtccttttcttctgctatcaagagcattcgacgtttgacctggcagtgtttctgggttaataaaaacacaaaaaacgtgtcaaaacaaaaaaaaaaatacaaaaa

SEQ ID NO: 205610 - DNA, 1030 bp, Zea Mays
aataaaaaagaaaaacagaaaataagcacatcctcctccatcaccaaattgacgattatatcgaaaatctggacggcggcggactcgattgtagcagcagccgccgggaacaagatggcggcggcgttgtcgcagctggacgacgagatcgtccgcggcatggccatcggcgctgtcttcaccgactatgccgggaagataaactgcctcgacttccaccgcaaggaagatctcctcgtcacttccagcgaggacgactccatccgcatgtacaacatcaccagcgcgacgttgttaaagactacatatcacaggaaacatggtgctgaccgtgtctgttttagtcatcatccaagttctatcttatgctcttcacgatacaacctagagtctgcagaatcacttcgttatctgtcattgtatgacaaccgttgcttaagatacttcaaaggacacaaagacagggcatactaaggctgcgtggtagaccttctgtcgcatatgatcagcagggacttgtttttgctgtagcaatggaaggaggtgctattaagttatttgattcccggtcatatgacaagggtccatttgacactttcttggttggtggagatacagctgaagtttctgacatcaaatttagcaacgatggcaagtctatgcttttgacaacaactaacaaccatatatatgttctggatgcatatggaggggataaaggtgtggctttagtttagagccatctcccaatgtaacaaatgaagctgctttcactccagatggtcaatatgtaatttcaggatcaggtgatggaaccctgcacgcttggaacatcaatacagtacaagagattgcttgttggaacagtcacattggtccgattacagcattgaagtgggcccctcgtcgagcgatgtttgcaactgcatcaactgccctaactttctggattcccaaccaatcgaattaggatcaggtgcatggagaaagaagggatgtgacttcatatcttgtgcaaaaaggacttcag

SEQ ID NO: 205611 - DNA, 1112 bp, Zea Mays
ttttctttgactgcgtgcatccgtatatagaacttcttgctcattctcaggcctggaacaacggcggggaaggtggagggtcgaccccaccaagcggcggcggcggcctggaactcaaactgggtttcaactgacgctggctggcttggaagctcgaggatggatcgaagactatgagctccttcattgtgccctgtcaggctacctacccctgcaccctgttggttatggtttaaaatggttattgaccaaagttgtcctgcatcaaacaaggctcagcttgatgttaatgtgctgagggatctaatgtattattagcgttatccagctcttgtttacgtgctccatctcaatccatgcacgttaggatggattgtctaatctagttcaaatttcgtatcaatctattccatcccatacaaattaatccatgtggattgggtggtattgagtcggtttaattctatagcaagtcaaaatccatcccaatccatcccaatacacaccaatacacatggaattgaaataaccgaaccaggcctaagatggatatctgaaccctaaaccctaaacacatgtattcatattaaaattaaggtgcatacatgaccttagcacatatattcaaactgtgttgtagtggataggatggaacggctccaggaataacgcaggcaagtaaatttcgccgtttgtgaatccagaacgattcggtaatgacacgctgaaaaccagattaaaccctgaacccaaatagaactaaaagcatgtgcgcctggcgctaggagctcagcaagaacgtagcaatatagagatcgataatcacgtctcaaagatcattactgaaaagatctcatcactgctccaaggattacgcaacgagaggcaagaaagaagggcgaatgacagcgacaaacgagaaagcaaaatcaaatgaaggaaacctaacatagcgtagacgaattgggtacgaaggaatccgccgccgccggcttagcttcacgtctcacaatggaaggcaccagccaccaggaccagccgtccaggtagcccctggccttttaccggcgggctgtgctgcgagcggagaggaaaccctaaggatctgtgaa

SEQ ID NO: 205612 - DNA, 3034 bp, Zea Mays
tctgaatatgccgtcagcctatcgcgacggcgaaggcgaagcggaggagcgggagcagaaacagaagaggcagccatggccgtgatggagaagctcaagatcttcgttgtgaaggagcctgttgtcgcagcttcctgtctcatcgccggattcggtctctttcttccagcagttgtccggccaatcctggattcatgggagaccgcagaaaaagttcctccaccacctctaaatgatgtggttgcgggtgtcaccggcaagaaaaagtagtgaacttgcattgttttctcatgtcgatgctgtcccacattttcttccccatgtttttctggcgtccagattggaaggctctccaaagtcacggtctccaaagtgacagcttgcttgattttaaacagtatcgacagtgttttgtctctacacagattgcagatatagcggtttaaacagttcgctttaatccgaaacgaacaggctattttacctgaatcatatactgcaatgtgtcagttttagaattttccccctaaaacaaaggttgatagaatgtcatcagcaccttttgaattgtgttcttcgttaccaacttaccataattctcagaagctattaaggggtgattgtttcaacttaaatttggatattggccgtgagaacagccaaatgctttcttctcgacccgtttctgtgagaatcactttaatgaaaatcctctgggtcaacgtagtaatcaaagaatccgctgagtcgtcaatgggataaattggtcactttatggatcctaaaacctatagattcatttatctgtacgtaagttttatggtattcatggtttgtttggtttagctgtagatttatagaaatctgattctagttgtgagatgtaaaaaaagttgttgtgagcggacaattgtacaaaaactaaaatttgtttgatagaaacaattgtcaagtatggactgtatatgagtatgacagcttgtaacatggatcacaagaatctaagaaatctagagtaagacatgattctgaagtaaactagagatgtttttagatttttataaatatattttgttgtactcctttggttgagattctagattttttgtaacgaataaaatcttaaccaaacacaccctcagattctctagcaattcagtgataggaatcggggctgattcccggattgatcgcaggttgtagtggtgggtgattgactgattggtggccggggtttggggcgcgatgcacggcggcgggtcgccgtgttcaccgcgcgtgagaggagagaggcgctaggaaaggggcagctaggtcacagtaatctcccggctccctctgggaagccggaacaatcttgtttctgcttgatctatagagtggtgcttacaattatttatactcccttctaatccttatctaatgagatagatctcctattttctctctaacaaatcttatcttctaatccttatctacatgcaatcttatcttctaatccttatctgcatgcaatcttatcttctaatccttatctgcatgctttatgctgttgcccggcgcctatagtggcggccggtcataacatctctccccgcctgcgcaaacagctcgtcctcgagctggaagtctgggtagtgcgcctggaactcgtcgactgtctcccacgttgcgtcgtcttcagggaggccgtgccacttgatcagcacgcgccaaacgccccggcgctgctgcgcctgaagggcgcgctccggccccgggaggatgcgtccatccacgaccgacggaagggaggccggagttgctggaggttcgccatggtgaggcttcagcagccctacgtggaaaacgtcgtggatgcgcgccccgtccggaagctgtagacggtaggcgacgctgccgatgcgttccaccacttgaaatggtcccgcataccgcggcccaagcttgcgcttggcacgggggtccaaggactgcgccgttcggtgcagcaggcgcagccaaacccagtctcccacagcatactccacgtcacggtggttggcgtcgtagtatttcttggacatctgctgggtttgaagaagacgttgacggacttcagcaagtatctcgtcccgactgcgtagaagagtctcagtcgcctctgtccgcgctgaccctggtgtatagggcaggatgggcggcggggaacgaccgtagaccacctcaaagggggtggctcgcagagcggtgtggaaggaggtgttgtagcagtattccgcccacgcgagccagtcgacccacgcacggggtcgatcgcctgtgacgcagcgtaggtacatagcgagcaccttgttgaccacctcggactggccgtccgtctgtggatggaaggcggtgctcatgcgcagcttcacgcctgccatcccgaagaggtcgcgccagacgtgccccgtaaagacggggtctctgtcgctgacgatggaggaggggaagccgtgtagacgaacaatgccctcgaagaacgctcgagcgaccgttgtcgcagtgtaggggtgcccgagcgcgatgaagtgtgcatatttggagaagcgatcgacgaccgttaggatcaccgacttgccacccaccttgggcaatccttcaatgaagtcgatggagatatcagcccagacttgcgagggcacttccagcggttgcagcagccctgccggctgcgatgttgccgttttattgcgctggcatgtggtacaggtgcgcaccaagtcccgcaccaatgcccggtcgccggggatgtagaaatccgctcgtaggcgatgtagagtcttctggatgccctcatggccggcggagtgggccagggagagggcctggtggcgcaggtcagcatggcccggcacgtagatgcggttaccatggagtagtagcccgtcgtcgatgcgccatggaccctgcagctcgcccgcctcaaagtgccgacgcacatcctgagcatcgtccgcgtgcgacgtcgcgcggcggatgtcgtcgatgaaggtgaaagacggccccgagc

SEQ ID NO: 205613 - DNA, 1988 bp, Zea Mays
atgcccccgcctctgccccactcttgttcgtgcgccgaggtgcgcccctgctccctgtttaggccgagtgttggatcctggactcggcagctggctttgcagatgacggcgctgggcggcgagtcgggcttctgggcgcggtcaccgtggtggagcgagcgccgccagagaaaaaccccagctctactgtattatgtccacatgattaccaatagattaccaacaggcgagaatgctgacatgttcaagcaaccggcccgcgtctcctcgaccatcaccaccttgacggtctccgtgaagatgatgagggtcatggacaagctcaaagggaagaagcgcggagatcgtggtgactcctcgaggtcacggtcgactaggggttcagggctctacagcgtcaaggcagcggctagagcagctccttggttgcatggaggagcagggcgcgaagtggcaagccatagtgcacctgggcaagagcgcgaggtggcaggccatagtgcacctgggcaagagcgcgaggtggcaggccatagtgcacctgggcaagagcgcgaggtggcatgccacaatgcacttgagccagagcgtgaggcgataggctcaagtggacctatgctagagcaggaccacaatgcatttgagcaagcgcgcgaggcggcagaccacaatgcacctagtcaggaggacgagctggcacgccaaggttcaccaatgcgtgatgatgatgactatggggaggactacgatggagaggccgatggagaggccgatgacgaggttgttacaacgacacaggcaacgaacttcaggttggggatcggtgatggggttgtgagtcgcgatagctttggtcgtcggtcagtttcctcggcggggagtagatctcgaacttcaacttcgagtgtagaggagtgtaagactacaaagtgcctaaacaaaatgaataaagatgctgatccaatgggaggaaaaaggctgaagatgtatagtgctcagatgggatctccaatgggaccccagttcacccgtccgtcacaatctggacagaccccaaacaccaacgaaacacagggttctgagaccggacaaggaaacccacagatggacattcagtggtcgatgcctcctagaggacagattcttcctcctccacaaccaggtatgggatattggccgccaccaccatggggatatcctacacatccaatggggccttggggacgcccccatggccaacacagccacttccgtcaccagcgcggcgtgagcaccgagcacactcgcgaatggagaactgctggggtgctcggatcaaggatgggagcgctcaccctagcgcctcagttgtcctcggctcccaaaggaaaaattgctgggaagaaggttcaggttgatgaaaggtttactgaaataactaagatagttctaaggctctatcccctgtatttaggggtgttcaacaagtatgaaaataaatcttccaggatcttgatcgagttagatgaccagaaagtagcatggacaatctggaagaaaatccaattggaatctagcgttcttgattcaaaaagtgccatgcgtgtgacagttttatcacactcaccgcatttactctttttcaccagggagaaagaattggctgttgtgaagatcaaccctgtggatgtcgaaattatcgctagtgagcttgagctggacaagaagatcgcggagagagcgctctgtgagcacaagggtgatgtcgtggctgcggttcgattcctgctgcgctagttccgagatttcgtcgccagcatcatatgtttttacacaagaggtctcatttatagattcttgggtattatcattgagtcctatgagacgagcatttctcaaggcgatgaggaaatctaacaatcattaattaagatacatatatctggttgttggcctgggaagaataagatggcaaggctctggatctgcaacacaagaagaattgtcgt

SEQ ID NO: 205614 - DNA, 2302 bp, Zea Mays
ctcggaacagcccaactagcccattcaacattcctgtaagcgcggagtcggcgacgcacggggagaagtcgaacagcggccgcgcgcggggaagttgcccggcggcggcggatctcggaggcagcgacgcgcgggtggaggagctcagtgacagcgccagtgcctatcgagcgagcgaatcgaggagattctccccactgtttctttcctgctgattccgatttcgcgttgaaacaccggggggagaagaattgcgggcgaccataactcggcaagaagcggctccaaaaagggcatctacctttgccgattccggcaccgatggatcccgcggcgtcggggaggttcgacaagctccagagctcgttcaagctctccatccagtgcctcctcaccgcctgctcccgcgaggatgtcaatgacgctttctcgtccttcactgatgctgagaaggagcgtttgcaccggatgctcacccttgtgatgaagaatctgcatgccaacgtagtggatgagtttgacgacttctgccaagaaacacaggtggctgctgcccttgaaaagatagatgactttgttgaaaagcagaatcttgatgcattatcttcagagaagactactgttgaagaaatcgaagaaaaggtatcaagagcaaaaaaggatgaaattgaatatttgactggtttactgaaaaaggttgaagaaagtaacaatgccaagaaagctcgaattgaactcctgaagaaagaggaggatttaactgctgcaagagatgtcctcaataagatgacgcagtggaactctgcactcgtggagaacattaacccttgaatctgtgtgatgacgattcattggcgtcaaaggacatctttgtataggggtgtgttagattggatgacatgtgaatgtgattcatggatcagcctggatgttctgttatgattaagaactgctatctcgtgccaacagaaaaagaagaaaagaaatgggcggtggttgcccgacaagtccttgtcagccgcacagtcttcacacgaccaggggccatgagcaccactcttgccttagccacggcccacgggcagcacagcatctccatctatccaaatggcagccagcagccgtccccttcctccaccctctgccatcctcgcagtcacagcccctcaccatggctgccacactctcctccgtggctgccccttccctccccaagcacatccccgttaccagagctcagcagcaggcgcctccttccatcatctcggcatcaactaagactgccttccatggggtgtcgctggtggtggacaggaggtgggcggccggccaccggagaggcggcggccggcggaggctgctgcaggtgaacgcgaggaccgccgccaagaacatcgaggtggaggtcgagaagccgcttggcttagccttgggccagaagcccggtggtggcgtcgtcatcacttctgtggagtctggagggaatgcagccagagccggtctgaaaaccggggaccaggtcctgtacacaagcagcttcttcggagacgagctgtggcctgcggataagcttgggttcaccaagacagccatccaagcgaagtcagactccgtctacttcgtcgtgagcaggggtgccgaagttgacgtgaagcgcctacctaagaggccggcgccaccccggtttggacggaagctgactgattcacaaaaggagagagcaacgcacgtctgccttgattgtgggtacatatacttcctacccaagccttttgacgaacagcccgacgactacggttgcccacagtgcaacgcgccgaagaagcggtttgcgaggtacgacgctgccaccgggaaggccatcggcggcgctctgccgcctatcgccgtgatcgtaagtttggtgatcggcatcgctggggtaggagctctgctcgtgtacggcctgcagtagcctgctcgttcttgttcagaacctttttttttttttgctgtgctcaagaagctcagctgactgctgctgtactctgtctcacaagacattccgagtgatatacatacataaaagggaagaaggaaatacacagtatttgaggctaaaaacgaacctcgtatagacactactgtgggttggggtacagtgcaagaatcgaaacggaactggagattcagaaccaaatggaaacaaagaaccagtcttggtgaccatcagatgaataaacgttcgatcttcaacaagcgagtagcagaatatggcgatttagagagtgatgagccgtgtacctgcagacccatggcttgg

SEQ ID NO: 205615 - DNA, 2336 bp, Zea Mays
ctcggaacagcccaactagcccattcaacattcctgtaagcgcggagtcggcgacgcacggggagaagtcgaacagcggccgcgcgcggggaagttgcccggcggcggcggatctcggaggcagcgacgcgcgggtggaggagctcagtgacagcgccagtgcctatcgagcgagcgaatcgaggagattctccccactgtttctttcctgctgattccgatttcgcgttgaaacaccggggggagaagaattgcgggcgaccataactcggcaagaagcggctccaaaaagggcatctacctttgccgattccggcaccgatggatcccgcggcgtcggggaggttcgacaagctccagagctcgttcaagctctccatccagtgcctcctcaccgcctgctcccgcgaggatgtcaatgacgctttctcgtccttcactgatgctgagaaggagcgtttgcaccggatgctcacccttgtgatgaagaatctgcatgccaacgtagtggatgagtttgacgacttctgccaagaaacacaggtggctgctgcccttgaaaagatagatgactttgttgaaaagcagaatcttgatgcattatcttcagagaagactactgttgaagaaatcgaagaaaaggtatcaagagcaaaaaaggatgaaattgaatatttgactggtttactgaaaaaggttgaagaaagtaacaatgccaagaaagctcgaattgaactcctgaagaaagaggaggatttaactgctgcaagagatgtcctcaataagatgacgcagtggaactctgcactcgtggagaacattaacccttgaatctgtgtgatgacgattcattggcgtcaaaggacatctttgtataggggtgtgttagattggatgacatgtgaatgtgattcatggatcagcctggatgttctgttatgattaagaactgctatgtatcgtgcaatagacacatcgtctgtactttggatgttattatcagaaaaagaagaaaagaaatgggcggtggttgcccgacaagtccttgtcagccgcacagtcttcacacgaccaggggccatgagcaccactcttgccttagccacggcccacgggcagcacagcatctccatctatccaaatggcagccagcagccgtccccttcctccaccctctgccatcctcgcagtcacagcccctcaccatggctgccacactctcctccgtggctgccccttccctccccaagcacatccccgttaccagagctcagcagcaggcgcctccttccatcatctcggcatcaactaagactgccttccatggggtgtcgctggtggtggacaggaggtgggcggccggccaccggagaggcggcggccggcggaggctgctgcaggtgaacgcgaggaccgccgccaagaacatcgaggtggaggtcgagaagccgcttggcttagccttgggccagaagcccggtggtggcgtcgtcatcacttctgtggagtctggagggaatgcagccagagccggtctgaaaaccggggaccaggtcctgtacacaagcagcttcttcggagacgagctgtggcctgcggataagcttgggttcaccaagacagccatccaagcgaagtcagactccgtctacttcgtcgtgagcaggggtgccgaagttgacgtgaagcgcctacctaagaggccggcgccaccccggtttggacggaagctgactgattcacaaaaggagagagcaacgcacgtctgccttgattgtgggtacatatacttcctacccaagccttttgacgaacagcccgacgactacggttgcccacagtgcaacgcgccgaagaagcggtttgcgaggtacgacgctgccaccgggaaggccatcggcggcgctctgccgcctatcgccgtgatcgtaagtttggtgatcggcatcgctggggtaggagctctgctcgtgtacggcctgcagtagcctgctcgttcttgttcagaacctttttttttttttgctgtgctcaagaagctcagctgactgctgctgtactctgtctcacaagacattccgagtgatatacatacataaaagggaagaaggaaatacacagtatttgaggctaaaaacgaacctcgtatagacactactgtgggttggggtacagtgcaagaatcgaaacggaactggagattcagaaccaaatggaaacaaagaaccagtcttggtgaccatcagatgaataaacgttcgatcttcaacaagcgagtagcagaatatggcgatttagagagtgatgagccgtgtacctgcagacccatggcttgg

SEQ ID NO: 205616 - DNA, 2418 bp, Zea Mays
ctcggaacagcccaactagcccattcaacattcctgtaagcgcggagtcggcgacgcacggggagaagtcgaacagcggccgcgcgcggggaagttgcccggcggcggcggatctcggaggcagcgacgcgcgggtggaggagctcagtgacagcgccagtgcctatcgagcgagcgaatcgaggagattctccccactgtttctttcctgctgattccgatttcgcgttgaaacaccggggggagaagaattgcgggcgaccataactcggcaagaagcggctccaaaaagggcatctacctttgccgattccggcaccgatggatcccgcggcgtcggggaggttcgacaagctccagagctcgttcaagctctccatccagtgcctcctcaccgcctgctcccgcgaggatgtcaatgacgctttctcgtccttcactgatgctgagaaggagcgtttgcaccggatgctcacccttgtgatgaagaatctgcatgccaacgtagtggatgagtttgacgacttctgccaagaaacacagaggtggctgctgcccttgaaaagatagatgactttgttgaaaagcagaatcttgatgcattatcttcagagaagactactgttgaagaaatcgaagaaaaggtatcaagagcaaaaaaggatgaaattgaatatttgactggtttactgaaaaaggttgaagaaagtaacaatgccaagaaagctcgaattgaactcctgaagaaagaggaggatttaactgctgcaagagatgtcctcaataagatgacgcagtggaactctgcactcgtggagaacattaacccttgaatctgtgtgatgacgattcattggcgtcaaaggacatctttgtataggggtgtgttagattggatgacatgtgaatgtgattcatggatcagcctggatgttctgttatgattaagaactgctatgtatcgtgcaatagacacatcgtctgtactttggatgttattatcaggtcccaaacttcattatatccaatatgttacaatatcattttggtgacttaactacaatgtcagctcgtgccaacagaaaaagaagaaaagaaatgggcggtggttgcccgacaagtccttgtcagccgcacagtcttcacacgaccaggggccatgagcaccactcttgccttagccacggcccacgggcagcacagcatctccatctatccaaatggcagccagcagccgtccccttcctccaccctctgccatcctcgcagtcacagcccctcaccatggctgccacactctcctccgtggctgccccttccctccccaagcacatccccgttaccagagctcagcagcaggcgcctccttccatcatctcggcatcaactcagaagactgccttccatggggtgtcgctggtggtggacaggaggtgggcggccggccaccggagaggcggcggccggcggaggctgctgcaggtgaacgcgaggaccgccgccaagaacatcgaggtggaggtcgagaagccgcttggcttagccttgggccagaagcccggtggtggcgtcgtcatcacttctgtggagtctggagggaatgcagccagagccggtctgaaaaccggggaccaggtcctgtacacaagcagcttcttcggagacgagctgtggcctgcggataagcttgggttcaccaagacagccatccaagcgaagtcagactccgtctacttcgtcgtgagcaggggtgccgaagttgacgtgaagcgcctacctaagaggccggcgccaccccggtttggacggaagctgactgattcacaaaaggagagagcaacgcacgtctgccttgattgtgggtacatatacttcctacccaagccttttgacgaacagcccgacgactacggttgcccacagtgcaacgcgccgaagaagcggtttgcgaggtacgacgctgccaccgggaaggccatcggcggcgctctgccgcctatcgccgtgatcgtaagtttggtgatcggcatcgctggggtaggagctctgctcgtgtacggcctgcagtagcctgctcgttcttgttcagaacctttttttttttttgctgtgctcaagaagctcagctgactgctgctgtactctgtctcacaagacattccgagtgatatacatacataaaagggaagaaggaaatacacagtatttgaggctaaaaacgaacctcgtatagacactactgtgggttggggtacagtgcaagaatcgaaacggaactggagattcagaaccaaatggaaacaaagaaccagtcttggtgaccatcagatgaataaacgttcgatcttcaacaagcgagtagcagaatatggcgatttagagagtgatgagccgtgtacctgcagacccatggcttgg

SEQ ID NO: 205617 - DNA, 2339 bp, Zea Mays
ctcggaacagcccaactagcccattcaacattcctgtaagcgcggagtcggcgacgcacggggagaagtcgaacagcggccgcgcgcggggaagttgcccggcggcggcggatctcggaggcagcgacgcgcgggtggaggagctcagtgacagcgccagtgcctatcgagcgagcgaatcgaggagattctccccactgtttctttcctgctgattccgatttcgcgttgaaacaccggggggagaagaattgcgggcgaccataactcggcaagaagcggctccaaaaagggcatctacctttgccgattccggcaccgatggatcccgcggcgtcggggaggttcgacaagctccagagctcgttcaagctctccatccagtgcctcctcaccgcctgctcccgcgaggatgtcaatgacgctttctcgtccttcactgatgctgagaaggagcgtttgcaccggatgctcacccttgtgatgaagaatctgcatgccaacgtagtggatgagtttgacgacttctgccaagaaacacaggtggctgctgcccttgaaaagatagatgactttgttgaaaagcagaatcttgatgcattatcttcagagaagactactgttgaagaaatcgaagaaaaggtatcaagagcaaaaaaggatgaaattgaatatttgactggtttactgaaaaaggttgaagaaagtaacaatgccaagaaagctcgaattgaactcctgaagaaagaggaggatttaactgctgcaagagatgtcctcaataagatgacgcagtggaactctgcactcgtggagaacattaacccttgaatctgtgtgatgacgattcattggcgtcaaaggacatctttgtataggggtgtgttagattggatgacatgtgaatgtgattcatggatcagcctggatgttctgttatgattaagaactgctatgtatcgtgcaatagacacatcgtctgtactttggatgttattatcagaaaaagaagaaaagaaatgggcggtggttgcccgacaagtccttgtcagccgcacagtcttcacacgaccaggggccatgagcaccactcttgccttagccacggcccacgggcagcacagcatctccatctatccaaatggcagccagcagccgtccccttcctccaccctctgccatcctcgcagtcacagcccctcaccatggctgccacactctcctccgtggctgccccttccctccccaagcacatccccgttaccagagctcagcagcaggcgcctccttccatcatctcggcatcaactcagaagactgccttccatggggtgtcgctggtggtggacaggaggtgggcggccggccaccggagaggcggcggccggcggaggctgctgcaggtgaacgcgaggaccgccgccaagaacatcgaggtggaggtcgagaagccgcttggcttagccttgggccagaagcccggtggtggcgtcgtcatcacttctgtggagtctggagggaatgcagccagagccggtctgaaaaccggggaccaggtcctgtacacaagcagcttcttcggagacgagctgtggcctgcggataagcttgggttcaccaagacagccatccaagcgaagtcagactccgtctacttcgtcgtgagcaggggtgccgaagttgacgtgaagcgcctacctaagaggccggcgccaccccggtttggacggaagctgactgattcacaaaaggagagagcaacgcacgtctgccttgattgtgggtacatatacttcctacccaagccttttgacgaacagcccgacgactacggttgcccacagtgcaacgcgccgaagaagcggtttgcgaggtacgacgctgccaccgggaaggccatcggcggcgctctgccgcctatcgccgtgatcgtaagtttggtgatcggcatcgctggggtaggagctctgctcgtgtacggcctgcagtagcctgctcgttcttgttcagaacctttttttttttttgctgtgctcaagaagctcagctgactgctgctgtactctgtctcacaagacattccgagtgatatacatacataaaagggaagaaggaaatacacagtatttgaggctaaaaacgaacctcgtatagacactactgtgggttggggtacagtgcaagaatcgaaacggaactggagattcagaaccaaatggaaacaaagaaccagtcttggtgaccatcagatgaataaacgttcgatcttcaacaagcgagtagcagaatatggcgatttagagagtgatgagccgtgtacctgcagacccatggcttgg

SEQ ID NO: 205618 - DNA, 2352 bp, Zea Mays
ctcggaacagcccaactagcccattcaacattcctgtaagcgcggagtcggcgacgcacggggagaagtcgaacagcggccgcgcgcggggaagttgcccggcggcggcggatctcggaggcagcgacgcgcgggtggaggagctcagtgacagcgccagtgcctatcgagcgagcgaatcgaggagattctccccactgtttctttcctgctgattccgatttcgcgttgaaacaccggggggagaagaattgcgggcgaccataactcggcaagaagcggctccaaaaagggcatctacctttgccgattccggcaccgatggatcccgcggcgtcggggaggttcgacaagctccagagctcgttcaagctctccatccagtgcctcctcaccgcctgctcccgcgaggatgtcaatgacgctttctcgtccttcactgatgctgagaaggagcgtttgcaccggatgctcacccttgtgatgaagaatctgcatgccaacgtagtggatgagtttgacgacttctgccaagaaacacaggtggctgctgcccttgaaaagatagatgactttgttgaaaagcagaatcttgatgcattatcttcagagaagactactgttgaagaaatcgaagaaaaggtatcaagagcaaaaaaggatgaaattgaatatttgactggtttactgaaaaaggttgaagaaagtaacaatgccaagaaagctcgaattgaactcctgaagaaagaggaggatttaactgctgcaagagatgtcctcaataagatgacgcagtggaactctgcactcgtggagaacattaacccttgaatctgtgtgatgacgattcattggcgtcaaaggacatctttgtataggggtgtgttagattggatgacatgtgaatgtgattcatggatcagcctggatgttctgttatgattaagaactgctatgtatcgtgcaatagacacatcgtctgtactttggatgttattatcagctcgtgccaacagaaaaagaagaaaagaaatgggcggtggttgcccgacaagtccttgtcagccgcacagtcttcacacgaccaggggccatgagcaccactcttgccttagccacggcccacgggcagcacagcatctccatctatccaaatggcagccagcagccgtccccttcctccaccctctgccatcctcgcagtcacagcccctcaccatggctgccacactctcctccgtggctgccccttccctccccaagcacatccccgttaccagagctcagcagcaggcgcctccttccatcatctcggcatcaactcagaagactgccttccatggggtgtcgctggtggtggacaggaggtgggcggccggccaccggagaggcggcggccggcggaggctgctgcaggtgaacgcgaggaccgccgccaagaacatcgaggtggaggtcgagaagccgcttggcttagccttgggccagaagcccggtggtggcgtcgtcatcacttctgtggagtctggagggaatgcagccagagccggtctgaaaaccggggaccaggtcctgtacacaagcagcttcttcggagacgagctgtggcctgcggataagcttgggttcaccaagacagccatccaagcgaagtcagactccgtctacttcgtcgtgagcaggggtgccgaagttgacgtgaagcgcctacctaagaggccggcgccaccccggtttggacggaagctgactgattcacaaaaggagagagcaacgcacgtctgccttgattgtgggtacatatacttcctacccaagccttttgacgaacagcccgacgactacggttgcccacagtgcaacgcgccgaagaagcggtttgcgaggtacgacgctgccaccgggaaggccatcggcggcgctctgccgcctatcgccgtgatcgtaagtttggtgatcggcatcgctggggtaggagctctgctcgtgtacggcctgcagtagcctgctcgttcttgttcagaacctttttttttttttgctgtgctcaagaagctcagctgactgctgctgtactctgtctcacaagacattccgagtgatatacatacataaaagggaagaaggaaatacacagtatttgaggctaaaaacgaacctcgtatagacactactgtgggttggggtacagtgcaagaatcgaaacggaactggagattcagaaccaaatggaaacaaagaaccagtcttggtgaccatcagatgaataaacgttcgatcttcaacaagcgagtagcagaatatggcgatttagagagtgatgagccgtgtacctgcagacccatggcttgg

SEQ ID NO: 205619 - DNA, 3165 bp, Zea Mays
gtccaaccaaggaacccaagccaaactagctagcctgcactagcttgcacccttaagaaatacagcgagagagatgatgagagtggccgtggtcggtggtggcctaagcgggctagtggcggcgcatgagctggcgaggagcggcggcgcacgcgtcaccgtgtacgagaaggaggaccatctcggcggcgccaagaccgtcgccgtcaatggtggatcaggccctgttctggtcgacctcgacttcatggtcttcaaccgggtgacgttctcaaacatgatggaatggtttgaacgtctgggggtggaaatggagaaatcggacatgtcattctcagcaagcttacggttaaacgaaggtaaaggctttgagtggggtacccgcaatggtatatctagtgttctggtgcagaagagtaatttgcttagccccagattctggctcatgatcaatgagatattcaagttcaagaaccatgccctcaagtaccaagaggactatgcacgaaaccctgacaagaatgagactttcggtcaatttattcagtcacatagatattcacagctgttccaggatgcttaccttatcccaatgtgcgcatgcatttggtcctgtccaccacagaacatatttggcttccctgctggttttgtgctttcatttttttgtgataatcatcttctcgagttgtttagtcccctacagtggctaaatgtcaaaggtggttctgggtgctacgtgaaaaaggtaagagaggaattggagagcatgggttgtcaaattaaaaccggatgtgaagtgagatcagtttcaagatttaatggaggttaccggattttggaggctgatggctcagaagagatgtatgacaggatcatattttgtgttcatgctcctgatgctctaaaaatactaggagaagaagcaacacctcatgaacggagagttctaggagctttccagtatatctacagcgatttgtatttccactgtgatgaaagttttatgccacgtaattcttctgcatggagtgcgatgaacttcttggggactacaagcagtggtgtttgtgttacctactggttaaatatacttcagaacattgaatctgccggacctttccttgcaacacttaaccctcctcgtgttcccgatcatgtattgctaaaatggcacactaggcacccgattccttccatggctgctgcaagggctactcttgagctcaatagcatacaagggaagaggggaatatggttctgtgtcccatatcaacaaggttatggaaatcatgaggacagcgtgaaggctgggaaagcagtaactttagggttgcttggcaagaaatgtgaccttttggtgaacccgaaacccatgatcgtcccatcatggactgaggccggcgtacgatatatggtggcaaaaaatctaggaaaattcataaccattggtaacttcagcatgctcgaagatggaggcacttctcttagttttggcaaaacatgtgaaagatgtcaactaaaatgtgtgatacgggttcacaacccccagttctattggaagattgcaaccgaaggagaccctggttttgcatattcctacatcaatggttatatctcgtttgttgataaaaaagaaggcatccagaatattgtcgagattattattgctaacagaggtgaacggaaaaggttgagcagtacccgtgccaggaataaaagtggttatgtaaaaaagggctggtggacacccttgtttaaaaaaaatggagctgcaatggcaaaatatgttttgcatgaagtcttaaggagaaacactatatcaaaagctcgtaaaaatatctctgcacactatgacctggcggaagatgagagtttagaagcagcgcagctacgtaaacttgacaatctaattaataaggctaaggtggatccggggcatcatgtccttgacattggctgtggttggggctcgttagcaatacgtttggtgaagagaactggctgcaagtgcacgggaattacattatcggaggagcaactgaaatacggaaagagaaaggtgaaagaatttggattagaggaccacataactctcctgctttgtgattaccgtcaaataccgaacggccagaagtttgataggattataagttgtgggatgcttgaacacgttggccatgagttctacgaagatttctttgcctcctgcgagtatcatttggccgaacacggcctacttgtcctccagtccatcgcggtcccagaggaactgtacgacaaaatgaggacgaagcctgacttcctgaaggaatatatcttcccaggtggctgcataccttctttagctcggattgcatctgccatgtctaacgcatcaaggctgtgcatacaacacgttgagaatattgggtaccactattaccccactctgattcactggagggagaactttgaggctaatgaagaaaaagttttggccctaggatttgatgaaaaattcatccgtacttgggagtactatttaaactactgtgcagctatgttcaaatcacacatgggtttagattaccagatagtgtttgctcgcgcaggcgatgcgaagttgccgagctatgtcgccattgcgtaaatggaggaggacgtcgtgtttatgttttatatgtgagacagaacattgtattttctttgttagttaggaagtccaacattcgccaaataaaaatggtttgctagagatgactcgagggtgagacaagtgtcaaagccgcatgatgattaggttgtcaacttccgagagtttttcttggcggggcaaaggtttcctatgatcctttttgtattgaatgtgataaagaagtttaaggttaagtttcatcatttgaatcctttgtgattttctttttattttttttgtgtgggtacgaaagtctcaaaaggtagaagttaactagaacatgtttgtgcatacgtattgagtgcacattcaaccgaggaaggtgtctgtgtgtggtgtaaccttcacatgtcagttcaggccttcagggtttataccttttgttggctatttgttgaataacagtgctatcatgtgcagtgttcggcctacagtttccattcaaaatttccatagtgggccggtaaaacccgtcaaattattgaaag

SEQ ID NO: 205620 - DNA, 3232 bp, Zea Mays
ccaaccaaggaacccaagccaaactagctagcctgcactagcttgcacccttaagaaatacagcgagagagatgatgagagtggccgtggtcggtggtggcctaagcgggctagtggcggcgcatgagctggcgaggagcggcggcgcacgcgtcaccgtgtacgagaaggaggaccatctcggcggcgccaagaccgtcgccgtcaatggtggatcaggccctgttctggtcgacctcgacttcatggtcttcaaccgggtgacgttctcaaacatgatggaatggtttgaacgtctgggggtggaaatggagaaatcggacatgtcattctcagcaagcttacggttaaacgaaggtaaaggctttgagtggggtacccgcaatggtatatctagtgttctggtgcagaagagtaatttgcttagccccagattctggctcatgatcaatgagatattcaagttcaagaaccatgccctcaagtaccaagaggactatgcacgaaaccctgacaagaatgagactttcggtcaatttattcagtcacatagatattcacagctgttccaggatgcttaccttatcccaatgtgcgcatgcatttggtcctgtccaccacagaacatatttggcttccctgctggttttgtgctttcatttttttgtgataatcatcttctcgagttgtttagtcccctacagtggctaaatgtcaaaggtggttctgggtgctacgtgaaaaaggtaagagaggaattggagagcatgggttgtcaaattaaaaccggatgtgaagtgagatcagtttcaagatttaatggagaaacaggttaccggattttggaggctgatggctcagaagagatgtatgacaggatcatattttgtgttcatgctcctgatgctctaaaaatactaggagaagaagcaacacctcatgaacggagagttctaggagctttccagtatatctacagcgatttgtatttccactgtgatgaaagttttatgccacgtaattcttctgcatggagtgcgatgaacttcttggggactacaagcagtggtgtttgtgttacctactggttaaatatacttcagaacattgaatctgccggacctttccttgcaacacttaaccctcctcgtgttcccgatcatgtattgctaaaatggcacactaggcacccgattccttccatggctgctgcaagggctactcttgagctcaatagcatacaagggaagaggggaatatggttctgtgtcccatatcaacaaggttatggaaatcatgaggacagcgtgaaggctgggaaagcagtaactttagggttgcttggcaagaaatgtgaccttttggtgaacccgaaacccatgatcgtcccatcatggactgaggccggcgtacgatatatggtggcaaaaaatctaggaaaattcataaccattggtaacttcagcatgctcgaagatggaggcacttctcttagttttggcaaaacatgtgaaagatgtcaactaaaatgtgtgatacgggttcacaacccccagttctattggaagattgcaaccgaaggagaccctggttttgcatattcctacatcaatggttatatctcgtttgttgataaaaaagaaggcatccagaatattgtcgagattattattgctaacagaggtgaacggaaaaggttgagcagtacccgtgccaggaataaaagtggttatgtaaaaaagggctggtggacacccttgtttaaaaaaaatggagctgcaatggcaaaatatgttttgcatgaagtcttaaggagaaacactatatcaaaagctcgtaaaaatatctctgcacactatgacctgagtaatgatttctttgctctttttctggatccgacgatgacttactcttgtggtattttcaaggcggaagatgagagtttagaagcagcgcagctacgtaaacttgacaatctaattaataaggctaaggtggatccggggcatcatgtccttgacattggctgtggttggggctcgttagcaatacgtttggtgaagagaactggctgcaagtgcacgggaattacattatcggaggagcaactgaaatacggaaagagaaaggtgaaagaatttggattagaggaccacataactctcctgctttgtgattaccgtcaaataccgaacggccagaagtttgataggattataagttgtgggatgcttgaacacgttggccatgagttctacgaagatttctttgcctcctgcgagtatcatttggccgaacacggcctacttgtcctccagtccatcgcggtcccagaggaactgtacgacaaaatgaggacgaagcctgacttcctgaaggaatatatcttcccaggtggctgcataccttctttagctcggattgcatctgccatgtctaacgcatcaaggctgtgcatacaacacgttgagaatattgggtaccactattaccccactctgattcactggagggagaactttgaggctaatgaagaaaaagttttggccctaggatttgatgaaaaattcatccgtacttgggagtactatttaaactactgtgcagctatgttcaaatcacacatgggtttagattaccagatagtgtttgctcgcgcaggcgatgcgaagttgccgagctatgtcgccattgcgtaaatggaggaggacgtcgtgtttatgttttatatgtgagacagaacattgtattttctttgttagttaggaagtccaacattcgccaaataaaaatggtttgctagagatgactcgagggtgagacaagtgtcaaagccgcatgatgattaggttgtcaacttccgagagtttttcttggcggggcaaaggtttcctatgatcctttttgtattgaatgtgataaagaagtttaaggttaagtttcatcatttgaatcctttgtgattttctttttattttttttgtgtgggtacgaaagtctcaaaaggtagaagttaactagaacatgtttgtgcatacgtattgagtgcacattcaaccgaggaaggtgtctgtgtgtggtgtaaccttcacatgtcagttcaggccttcagggtttataccttttgttggctatttgttgaataacagtgctatcatgtgcagtgttcggcctacagtttccattcaaaatttccatagtgggccggtaaaacccgtcaaattattgaaag

SEQ ID NO: 205621 - DNA, 3120 bp, Zea Mays
aaggaacccaagccaaactagctagcctgcactagcttgcacccttaagaaatacagcgagagagatgatgagagtggccgtggtcggtggtggcctaagcgggctagtggcggcgcatgagctggcgaggagcggcggcgcacgcgtcaccgtgtacgagaaggaggaccatctcggcggcgccaagaccgtcgccgtcaatggtggatcaggccctgttctggtcgacctcgacttcatggtcttcaaccgggtgacgttctcaaacatgatggaatggtttgaacgtctgggggtggaaatggagaaatcggacatgtcattctcagcaagcttacggttaaacgaaggtaaaggctttgagtggggtacccgcaatggtatatctagtgttctggtgcagaagagtaatttgcttagccccagattctggctcatgatcaatgagatattcaagttcaagaaccatgccctcaaatcccaatgtgcgcatgcatttggtcctgtccaccacagaacatatttggcttccctgctggttttgtgctttcatttttttgtgataatcatcttctcgagttgtttagtcccctacagtggctaaatgtcaaaggtggttctgggtgctacgtgaaaaaggtaagagaggaattggagagcatgggttgtcaaattaaaaccggatgtgaagtgagatcagtttcaagatttaatggaggttaccggattttggaggctgatggctcagaagagatgtatgacaggatcatattttgtgttcatgctcctgatgctctaaaaatactaggagaagaagcaacacctcatgaacggagagttctaggagctttccagtatatctacagcgatttgtatttccactgtgatgaaagttttatgccacgtaattcttctgcatggagtgcgatgaacttcttggggactacaagcagtggtgtttgtgttacctactggttaaatatacttcagaacattgaatctgccggacctttccttgcaacacttaaccctcctcgtgttcccgatcatgtattgctaaaatggcacactaggcacccgattccttccatggctgctgcaagggctactcttgagctcaatagcatacaagggaagaggggaatatggttctgtgtcccatatcaacaaggttatggaaatcatgaggacagcgtgaaggctgggaaagcagtaactttagggttgcttggcaagaaatgtgaccttttggtgaacccgaaacccatgatcgtcccatcatggactgaggccggcgtacgatatatggtggcaaaaaatctaggaaaattcataaccattggtaacttcagcatgctcgaagatggaggcacttctcttagttttggcaaaacatgtgaaagatgtcaactaaaatgtgtgatacgggttcacaacccccagttctattggaagattgcaaccgaaggagaccctggttttgcatattcctacatcaatggttatatctcgtttgttgataaaaaagaaggcatccagaatattgtcgagattattattgctaacagaggtgaacggaaaaggttgagcagtacccgtgccaggaataaaagtggttatgtaaaaaagggctggtggacacccttgtttaaaaaaaatggagctgcaatggcaaaatatgttttgcatgaagtcttaaggagaaacactatatcaaaagctcgtaaaaatatctctgcacactatgacctgagtaatgatttctttgctctttttctggatccgacgatgacttactcttgtggtattttcaaggcggaagatgagagtttagaagcagcgcagctacgtaaacttgacaatctaattaataaggctaaggtggatccggggcatcatgtccttgacattggctgtggttggggctcgttagcaatacgtttggtgaagagaactggctgcaagtgcacgggaattacattatcggaggagcaactgaaatacggaaagagaaaggtgaaagaatttggattagaggaccacataactctcctgctttgtgattaccgtcaaataccgaacggccagaagtttgataggattataagttgtgggatgcttgaacacgttggccatgagttctacgaagatttctttgcctcctgcgagtatcatttggccgaacacggcctacttgtcctccagtccatcgcggtcccagaggaactgtacgacaaaatgaggacgaagcctgacttcctgaaggaatatatcttcccaggtggctgcataccttctttagctcggattgcatctgccatgtctaacgcatcaaggctgtgcatacaacacgttgagaatattgggtaccactattaccccactctgattcactggagggagaactttgaggctaatgaagaaaaagttttggccctaggatttgatgaaaaattcatccgtacttgggagtactatttaaactactgtgcagctatgttcaaatcacacatgggtttagattaccagatagtgtttgctcgcgcaggcgatgcgaagttgccgagctatgtcgccattgcgtaaatggaggaggacgtcgtgtttatgttttatatgtgagacagaacattgtattttctttgttagttaggaagtccaacattcgccaaataaaaatggtttgctagagatgactcgagggtgagacaagtgtcaaagccgcatgatgattaggttgtcaacttccgagagtttttcttggcggggcaaaggtttcctatgatcctttttgtattgaatgtgataaagaagtttaaggttaagtttcatcatttgaatcctttgtgattttctttttattttttttgtgtgggtacgaaagtctcaaaaggtagaagttaactagaacatgtttgtgcatacgtattgagtgcacattcaaccgaggaaggtgtctgtgtgtggtgtaaccttcacatgtcagttcaggccttcagggtttataccttttgttggctatttgttgaataacagtgctatcatgtgcagtgttcggcctacagtttccattcaaaatttccatagtgggccggtaaaacccgtcaaattattgaaag

SEQ ID NO: 205622 - DNA, 3984 bp, Zea Mays
gaaaacaccacacgcggatacgagggcaaaggggcaacgcgtccaaccggccggacctcaccggctcatccctcatcgccctagtccccaagggccaagtccccaaccccggctgacgactgtgcccgtctccttccctgattcatccgcaagcccacccgtcggcgatcgtccatgacggaggatcgagcgcacaaggtcgccgacgagcccgccgcctcaggcaggcaaagacctgaaaggaagaagaggaagtgggatcaacccgcggaggacttggtctccgcggcggtgacggctgctgccgtgtcggggatgcctgtgatgaatttcggtgctcttcctggcgttgtactgcctggcgtcaccgcatatggagctgctacattgccaagtgtagtccctgttccgtattcattgccgccccatattgcaccatcggtgctccagaatgctgctgcagcagcccagaaattgagtcaggcaaaaataccagatgaggtcattgcacgggaaattgttataaacgatgcagatccatctgtgcgatataagcttacaaaacgacaaacacaagaagagattcagaaatgcacaaacactgtcatcattaccaggggaaaatatcaccctccaaatttacttcctgatggtgagaagcccctctatctacatatctctgctggatctcagttgaaagatactgctgagcgcattaaggcagttgatcgtgcagcttcaatgattgaggaaatattgaaacaaggaacaacctcagagtccatatcggtccctttctcctctagcactggacaaatccatcattgaatatcacagctcgaatccgtggtccaaatgatcagtacataaatcatatcatgaaagaaacaggggttactgttgtactaagaggaaaagattcggagaatcttggcagttgtcatagtgaagtatgcatttaaagaacctagaagctgcaaaagttttggcagagaacctcctggatacagtagcagcagaattcggtgcttccagaatttcttcttcaaaagtatatggtgctgttccacctcctcagcagttgttagctggtgtcgacacctcaggaacgaaatcagatgttcactatattgtagggcccaatgtgttatcgggagctacacattcctttgcatctactggagttattgctcctgttgttgctcctgcagtgacagtgcaatcaggggctccaacatattctggggttccactacccagtaacatggcctatcctattccaccagcaaacggtggggcattttacagtggttatggggacatttatccccaagcaactccgttgcagcagctggcattcacactcaagcatgcctcatcgtcggcaactcaggctgttccagtgacgtccacaccaacaagcatggctacaaaggggaactcaatcttggatgcggagatggataaacgatcccgaaggaaattccaggaactaccggtttcgaagggcccagcaacagaaagtcaggtacagtttttttttctggtatagcctcgactagttcttaactacaggagctacagcagcctcttcttttgtacttgttctgctgtctcctctattcacctagttttctctgtattacctctcaggcgattaatctaaattccatggcaaccccttccttccctgtgctgttcactagatgcctatcctgatttgatgagatcttccatatactcacatccttgtttgttctctcctttcttagcttagcttgtgccatctttttataccccatcaattcttaccaacacaacttccaaggcgatttcaatatcaggatttggaatttctggcatatttgcttttgtttgtaaattagatgtacactgttgctgtcaactatactaaaaactttgtatgccattgtgagtttgtgacatctattaacattaaaatattctgcataaaaacatttgcccttttgtttatgatggcaccatcaaacatgggaagcacttctaattatccaggagttttgatacaacacagcacatattccacatgcaattcatgatcttatgttttatacgtgtacctgaaagaatataatcatcttattgtttagtccttgtttagcactttggaaattaataactactgtataaatctactttctttgaaggaactttgcttgctcttgtagttcttgcagttccctcaacggagactacaattcaaatttgacattactattaaaaacaatagttggattgtcagattggcatcatcatgtttgttgtattcttatacctgcttctaacatctcatttcattccaggtattttctctgaccttgtctgaagctcacaggtggcaatagatatacatgtgggtttttcacaggcttgtaacaaatcggagtttgcattggctgtggagtgtaactgacaagatgcagagctcttcaaatatcttgttacttttttcagcaaatagaaatttaacctttgtgttttatctgtttctgtttgcttacagagttcactgatgttgattaacattgctagcatgccttaagttttgaaattggttggttggtatagtcttgttattagttgttgttagtaggttttgatacattttatttctttccactctttagagaaagttttgcatttgcaaaatcttcacattcagtggaagctccaagcaatataaatatacaaattacacaaggtccttccatatgaaacttcacttagttaagcagactcgactcatctttgttatgttattatagactctcccaatatgaaaattatatttacagcgcatctgcttctatattaagataacattctgaacttgtcaagggtcatgctaactagtattgtgcttccatgtgagatatgcttatatttgttctgtgtgcaaaattgtttctgatttcattcttatgcatgccattgcgttacctactctataacacaagaatttgatggatgaatcttcttgttttctttcatctttccagaactcacaacaggggtccaaatttgttaagacaggtttagatagttcaggtaacattgggagctcatcaattgcacctccgaagaaagttcaccctggatcaaatggaatgcttccgcaagaagaagcggatatgccatcacatctctctatatccactaagatgctaccaccacccctgaagagcatgctgccactgccacccagaagcatgcccccaccaccacctaagagcatgcctccaccgccaccaaaatttccttcagatgagtttttgtcaagaaacgagaacaagttttttcctttaaaggagccaacagcacctccaaggtcctttgatgcaatatcagtcttgccatctgaacgacgaccaagggagcctaaggaggaaaaaacaaaaggcacacctgtgtctgatactttgctgaaacttattgattatggagatgacgacgatgacggcgatattgatgtgacagacaacacacctaagggcaatccaactcctggttcagagcagaaaccattttgggctgtttaaaactgggtctgctaacgtagtctagtgtgaattcttgttgataaggatgcttgctgccttggtgcatcttctgaattgaagaggcaatcgagctccttgttcgtgtactgtagtaattctaacaggcaatgagatttctttgaacttgtattcattctggcctagtcaaaatgaaccgtttgttgttttggttcagatacgatgatgtttcgtttttagattcgacgttggttgctgaactcgtagcattttaatgtcggtattatataattgttagagcctatgtcaattttgtatccactgtcgtgcaaatttaatttttgtaatcagcctaaggtcacgacattgcttggaaacactttttttaatgaaggaaaatggcaggacatatggtatggtaatt

SEQ ID NO: 205623 - DNA, 2800 bp, Zea Mays
gcggatacgagggcaaaggggcaacgcgtccaaccggccggacctcaccggctcatccctcatcgccctagtccccaagggccaagtccccaaccccggctgacgactgtgcccgtctccttccctgattcatccgcaagcccacccgtcggcgatcgtccatgacggaggatcgagcgcacaaggtcgccgacgagcccgccgcctcaggcaggcaaagacctgaaaggaagaagaggaagtgggatcaacccgcggaggacttggtctccgcggcggtgacggctgctgccgtgtcggggatgcctgtgatgaatttcggtgctcttcctggcgttgtactgcctggcgtcaccgcatatggagctgctacattgccaagtgtagtccctgttccgtattcattgccgccccatattgcaccatcggtgctccagaatgctgctgcagcagcccagaaattgagtcaggcaaaaataccagatgaggtcattgcacgggaaattgttataaacgatgcagatccatctgtgcgatataagcttacaaaacgacaaacacaagaagagattcagaaatgcacaaacactgtcatcattaccaggggaaaatatcaccctccaaatttacttcctgatggtgagaagcccctctatctacatatctctgctggatctcagttgaaagatactgctgagcgcattaaggcagttgatcgtgcagcttcaatgattgaggaaatattgaaacaaggaacaacctcagagtccatatcggtccctttctcctctagcactggacaagtaatcctctctatatctccgtagcatgagcaaatttacccgtttttgggagcgaattgaggctgttcgtccttttagtgcctcagtttttttgggttttgatgcagatccatcattgaatatcacagctcgaatccgtggtccaaatgtatgactatgtgatcctggttttatttgatcattttgttactagcacatctcagttaattttgttaattactcaatttatgtgctgttgtctttcaattttttgaaagatctaatcataaagctttctctggcatcccaatttggatgggagaaactgcttttctgctgttggtgcttgtgctcttttgttattatataggatcagtacataaatcatatcatgaaagaaacaggggttactgttgtactaagaggaaaagattcggagaatcttggcagttgtcatagtgaagcctcacaacaacctctacacctatacctcacaagtatgcatttaaagaacctagaagctgcaaaagttttggcagagaacctcctggatacagtagcagcagaattcggtgcttccagaatttcttcttcaaaagtatatggtgctgttccacctcctcagcagttgttagctggtgtcgacacctcaggaacgaaatcagatgttcactatattgtagggcccaatgtgttatcgggagctacacattcctttgcatctactggagttattgctcctgttgttgctcctgcagtgacagtgcaatcaggggctccaacatattctggggttccactacccagtaacatggcctatcctattccaccagcaaacggtggggcattttacagtggttatggggacatttatccccaagcaactccgttgcagcagctggcattcacactcaagcatgcctcatcgtcggcaactcaggctgttccagtgacgtccacaccaacaagcatggctacaaaggggaactcaatcttggatgcggagatggataaacgatcccgaaggaaattccaggaactaccggtttcgaagggcccagcaacagaaagtcagaactcacaacaggggtccaaatttgttaagacaggtttagatagttcaggtaacattgggagctcatcaattgcacctccgaagaaagttcaccctggatcaaatggaatgcttccgcaagaagaagcggatatgccatcacatctctctatatccactaagatgctaccaccacccctgaagagcatgctgccactgccacccagaagcatgcccccaccaccacctaagagcatgcctccaccgccaccaaaatttccttcagatgagtttttgtcaagaaacgagaacaagttttttcctttaaaggagccaacagcacctccaaggtcctttgatgcaatatcagtcttgccatctgaacgacgaccaagggagcctaaggaggaaaaaacaaaaggcacacctgtgtctgatactttgctgaaacttattgattatggagatgacgacgatgacggcgatattgatgtgacagacaacacacctaagggcaatccaactcctggttcagagcagaaaccattttgggctgtttaaaactgggtctgctaacgtagtctagtgtgaattcttgttgataaggatgcttgctgccttggtgcatcttctgaattgaagaggcaatcgagctccttgttcgtgtactgtagtaattctaacaggcaatgagatttctttgaacttgtattcattctggcctagtcaaaatgaaccgtttgttgttttggttcagatacgatgatgtttcgtttttagattcgacgttggttgctgaactcgtagcattttaatgtcggtattatataattgttagagcctatgtcaattttgtatccactgtcgtgcaaatttaatttttgtaatcagcctaaggtcacgacattgcttggaaacactttttttaatgaaggaaaatggcaggacatatggtatggtaatt

SEQ ID NO: 205624 - DNA, 2910 bp, Zea Mays
gcggatacgagggcaaaggggcaacgcgtccaaccggccggacctcaccggctcatccctcatcgccctagtccccaagggccaagtccccaaccccggctgacgactgtgcccgtctccttccctgattcatccgcaagcccacccgtcggcgatcgtccatgacggaggatcgagcgcacaaggtcgccgacgagcccgccgcctcaggcaggcaaagacctgaaaggaagaagaggaagtgggatcaacccgcggaggacttggtctccgcggcggtgacggctgctgccgtgtcggggatgcctgtgatgaatttcggtgctcttcctggcgttgtactgcctggcgtcaccgcatatggagctgctacattgccaagtgtagtccctgttccgtattcattgccgccccatattgcaccatcggtgctccagaatgctgctgcagcagcccagaaattgagtcaggcaaaaataccagatgaggtcattgcacgggaaattgttataaacgatgcagatccatctgtgcgatataagcttacaaaacgacaaacacaagaagagattcagaaatgcacaaacactgtcatcattaccaggggaaaatatcaccctccaaatttacttcctgatggtgagaagcccctctatctacatatctctgctggatctcagttgaaagatactgctgagcgcattaaggcagttgatcgtgcagcttcaatgattgaggaaatattgaaacaaggaacaacctcagagtccatatcggtccctttctcctctagcactggacaagctgttcgtccttttagtgcctcagtttttttgggttttgatgcagatccatcattgaatatcacagctcgaatccgtggtccaaatgatcagtacataaatcatatcatgaaagaaacaggggttactgttgtactaagaggaaaagattcggagaatcttggcagttgtcatagtgaagcctcacaacaacctctacacctatacctcacaagtatgcatttaaagaacctagaagctgcaaaagttttggcagagaacctcctggatacagtagcagcagaattcggtgcttccagaatttcttcttcaaaagtatatggtgctgttccacctcctcagcagttgttagctggtgtcgacacctcaggaacgaaatcagatgttcactatattgtagggcccaatgtgttatcgggagctacacattcctttgcatctactggagttattgctcctgttgttgctcctgcagtgacagtgcaatcaggggctccaacatattctggggttccactacccagtaacatggcctatcctattccaccagcaaacggtggggcattttacagtggttatggggacatttatccccaagcaactccgttgcagcagctggcattcacactcaagcatgcctcatcgtcggcaactcaggctgttccagtgacgtccacaccaacaagcatggctacaaaggggaactcaatcttggatgcggagatggataaacgatcccgaaggaaattccaggaactaccggtttcgaagggcccagcaacagaaagtcagagaaagttttgcatttgcaaaatcttcacattcagtggaagctccaagcaatataaatatacaaattacacaaggtccttccatatgaaacttcacttagttaagcagactcgactcatctttgttatgttattatagactctcccaatatgaaaattatatttacagcgcatctgcttctatattaagataacattctgaacttgtcaagggtcatgctaactagtattgtgcttccatgtgagatatgcttatatttgttctgtgtgcaaaattgtttctgatttcattcttatgcatgccattgcgttacctactctataacacaagaatttgatggatgaatcttcttgttttctttcatctttccagaactcacaacaggggtccaaatttgttaagacaggtttagatagttcaggtaacattgggagctcatcaattgcacctccgaagaaagttcaccctggatcaaatggaatgcttccgcaagaagaagcggatatgccatcacatctctctatatccactaagatgctaccaccacccctgaagagcatgctgccactgccacccagaagcatgcccccaccaccacctaagagcatgcctccaccgccaccaaaatttccttcagatgagtttttgtcaagaaacgagaacaagttttttcctttaaaggagccaacagcacctccaaggtcctttgatgcaatatcagtcttgccatctgaacgacgaccaagggagcctaaggaggaaaaaacaaaaggcacacctgtgtctgatactttgctgaaacttattgattatggagatgacgacgatgacggcgatattgatgtgacagacaacacacctaagggcaatccaactcctggttcagagcagaaaccattttgggctgtttaaaactgggtctgctaacgtagtctagtgtgaattcttgttgataaggatgcttgctgccttggtgcatcttctgaattgaagaggcaatcgagctccttgttcgtgtactgtagtaattctaacaggcaatgagatttctttgaacttgtattcattctggcctagtcaaaatgaaccgtttgttgttttggttcagatacgatgatgtttcgtttttagattcgacgttggttgctgaactcgtagcattttaatgtcggtattatataattgttagagcctatgtcaattttgtatccactgtcgtgcaaatttaatttttgtaatcagcctaaggtcacgacattgcttggaaacactttttttaatgaaggaaaatggcaggacatatggtatggtaatt

SEQ ID NO: 205625 - DNA, 2782 bp, Zea Mays
cgagggcaaaggggcaacgcgtccaaccggccggacctcaccggctcatccctcatcgccctagtccccaagggccaagtccccaaccccggctgacgactgtgcccgtctccttccctgattcatccgcaagcccacccgtcggcgatcgtccatgacggaggatcgagcgcacaaggtcgccgacgagcccgccgcctcaggcaggcaaagacctgaaaggaagaagaggaagtgggatcaacccgcggaggacttggtctccgcggcggtgacggctgctgccgtgtcggggatgcctgtgatgaatttcggtgctcttcctggcgttgtactgcctggcgtcaccgcatatggagctgctacattgccaagtgtagtccctgttccgtattcattgccgccccatattgcaccatcggtgctccagaatgctgctgcagcagcccagaaattgagtcaggcaaaaataccagatgaggtcattgcacgggaaattgttataaacgatgcagatccatctgtgcgatataagcttacaaaacgacaaacacaagaagagattcagaaatgcacaaacactgtcatcattaccaggggaaaatatcaccctccaaatttacttcctgatggtgagaagcccctctatctacatatctctgctggatctcagttgaaagatactgctgagcgcattaaggcagttgatcgtgcagcttcaatgattgaggaaatattgaaacaaggaacaacctcagagtccatatcggtccctttctcctctagcactggacaagctgttcgtccttttagtgcctcagtttttttgggttttgatgcagatccatcattgaatatcacagctcgaatccgtggtccaaatgtatgactatgtgatcctggttttatttgatcattttgttactagcacatctcagttaattttgttaattactcaatttatgtgctgttgtctttcaattttttgaaagatctaatcataaagctttctctggcatcccaatttggatgggagaaactgcttttctgctgttggtgcttgtgctcttttgttattatataggatcagtacataaatcatatcatgaaagaaacaggggttactgttgtactaagaggaaaagattcggagaatcttggcagttgtcatagtgaagcctcacaacaacctctacacctatacctcacaagtatgcatttaaagaacctagaagctgcaaaagttttggcagagaacctcctggatacagtagcagcagaattcggtgcttccagaatttcttcttcaaaagtatatggtgctgttccacctcctcagcagttgttagctggtgtcgacacctcaggaacgaaatcagatgttcactatattgtagggcccaatgtgttatcgggagctacacattcctttgcatctactggagttattgctcctgttgttgctcctgcagtgacagtgcaatcaggggctccaacatattctggggttccactacccagtaacatggcctatcctattccaccagcaaacggtggggcattttacagtggttatggggacatttatccccaagcaactccgttgcagcagctggcattcacactcaagcatgcctcatcgtcggcaactcaggctgttccagtgacgtccacaccaacaagcatggctacaaaggggaactcaatcttggatgcggagatggataaacgatcccgaaggaaattccaggaactaccggtttcgaagggcccagcaacagaaagtcaggtattttctctgaccttgtctgaagctcacaggtggcaatagatatacataactcacaacaggggtccaaatttgttaagacaggtttagatagttcaggtaacattgggagctcatcaattgcacctccgaagaaagttcaccctggatcaaatggaatgcttccgcaagaagaagcggatatgccatcacatctctctatatccactaagatgctaccaccacccctgaagagcatgctgccactgccacccagaagcatgcccccaccaccacctaagagcatgcctccaccgccaccaaaatttccttcagatgagtttttgtcaagaaacgagaacaagttttttcctttaaaggagccaacagcacctccaaggtcctttgatgcaatatcagtcttgccatctgaacgacgaccaagggagcctaaggaggaaaaaacaaaaggcacacctgtgtctgatactttgctgaaacttattgattatggagatgacgacgatgacggcgatattgatgtgacagacaacacacctaagggcaatccaactcctggttcagagcagaaaccattttgggctgtttaaaactgggtctgctaacgtagtctagtgtgaattcttgttgataaggatgcttgctgccttggtgcatcttctgaattgaagaggcaatcgagctccttgttcgtgtactgtagtaattctaacaggcaatgagatttctttgaacttgtattcattctggcctagtcaaaatgaaccgtttgttgttttggttcagatacgatgatgtttcgtttttagattcgacgttggttgctgaactcgtagcattttaatgtcggtattatataattgttagagcctatgtcaattttgtatccactgtcgtgcaaatttaatttttgtaatcagcctaaggtcacgacattgcttggaaacactttttttaatgaaggaaaatggcaggacatatggtatggtaatt

SEQ ID NO: 205626 - DNA, 2059 bp, Zea Mays
cactctcactcacactctgtttctctctctctcgtggagacgactgggcgaccgccggcgccgacctacgccaggtgcccaagccttcgacgggaccatcgccgacgacgagcactcacgagctggatctgatctaattacagaaatgtcttcagtcgggagcggcagtggcaccagggctgcgaatggtgcagctgccatcagtgctgccgcgacggcagcaggctcggccgacgccagattccacccccaactactacagcagcaggacaggcaaagtagatgggctggctgcttttcaggcttatcatgtttcggatcgcagaagggcgggaaaagaattgttcctgcagcacgtacttctgatgggaatggatcaaatgctcgcggaaatggtctccagtctggtgccaattcaaaccaaaatatgcctatgaatttatctcttctggctccaccatcatcaccggcatccttctcaaactctgcacttccttcgactgctcaatcgccaaattgctttctgtctgtatccgcaaactctcctggtggcccaacgtctaatatgttcgccgttgggccatatgctaatgaacctcaacttgtctcaccacctgtcttctcaacttacacaactgagccatccacagcaccgttgaccccaccacctgaactagcccatgcaactacaccttcttctccagatgttccatatgctagatttctttcttcttctatggatatcaaaactgctagcaaggagcataacatgcctttcttatcaacaacctattctggtggttcaggactccaagcatcctacccactttaccctgaaagcccttgtagcagcctcatctcaccggcttcagtaactccgaggactggtctatcctcacctatacctgagcaagaggttcctcctgcccattggaagacctctaggtccgcgtgcgacacaccatatttcagggcttcgcccattcctgagcaagaaaccactgcacaatggaagacctctagatctgcttgtgacacaccgtatgccaggacctcaccaaccaatatttttggtctggattcaaataccccgagaaactatatgctagatagcaatttctttcggccagcggcatctgctcagttctacctggaccaggctcagcaggcatttccacataatggcgggagggttagcgtatccagggagaagcaagatgccgatgaaatcgaagcttaccgagcttcatttgggtttagtgccgatgaaattgtccaatctcaatcttatgttgggataccagatgcggttgacgagtcattcagtatatcaccatttggaaacaatgctcctgctactgagatctgcccattcagtgatctgcctagtgaggttcagaaggcggataaatcatgcacctacgttaaagatggcacgagcccaaagaaatcagcaaaccaactctcgattgattctccaaataaagttctgcgcttggacgtgttcaaagtaacaaaagggggtcatctgtctgaggacgagggtattgcgagagatggtcatcctttcagaaggacaacggatgaaatatctctaaaaccgatagaggtaaggaagaaatctcctcctggccattcttgctcagacgcagagattgagtacagaaggacaaggagtctgagggatgccaacggtgttttatcgcggcgtagcgcattggcaagacaactgcactaataagtcactagtatgcatggcaatttcatagttcatgtagagcagtgtgtgcattgaatttgagctgtcattagagtgatctgtaggcgaagagtagcctttatcgtatatgaggattatattatcagattgtgtgttctgggtatgtgatgatgagctttgtactctgtttgaactccaagatcctctttgtagacacctgcagtctttcccaggagcagtgaaatgaaatatcgttggcaaattacaggaactgtgttctggtcttcctgaatcctgatgatgtaggctgcgtttgaattctgcagcatgttgattggg

SEQ ID NO: 205627 - DNA, 2038 bp, Zea Mays
cactctcactcacactctgtttctctctctctcgtggagacgactgggcgaccgccggcgccgacctacgccaggtgcccaagccttcgacgggaccatcgccgacgacgagcactcacgagaaatgtcttcagtcgggagcggcagtggcaccagggctgcgaatggtgcagctgccatcagtgctgccgcgacggcagcaggctcggccgacgccagattccacccccaactactacagcagcaggacaggcaaagtagatgggctggctgcttttcaggcttatcatgtttcggatcgcagaagggcgggaaaagaattgttcctgcagcacgtacttctgatgggaatggatcaaatgctcgcggaaatggtctccagtctggtgccaattcaaaccaaaatatgcctatgaatttatctcttctggctccaccatcatcaccggcatccttctcaaactctgcacttccttcgactgctcaatcgccaaattgctttctgtctgtatccgcaaactctcctggtggcccaacgtctaatatgttcgccgttgggccatatgctaatgaacctcaacttgtctcaccacctgtcttctcaacttacacaactgagccatccacagcaccgttgaccccaccacctgaactagcccatgcaactacaccttcttctccagatgttccatatgctagatttctttcttcttctatggatatcaaaactgctagcaaggagcataacatgcctttcttatcaacaacctattctggtggttcaggactccaagcatcctacccactttaccctgaaagcccttgtagcagcctcatctcaccggcttcagtaactccgaggactggtctatcctcacctatacctgagcaagaggttcctcctgcccattggaagacctctaggtccgcgtgcgacacaccatatttcagggcttcgcccattcctgagcaagaaaccactgcacaatggaagacctctagatctgcttgtgacacaccgtatgccaggacctcaccaaccaatatttttggtctggattcaaataccccgagaaactatatgctagatagcaatttctttcggccagcggcatctgctcagttctacctggaccaggctcagcaggcatttccacataatggcgggagggttagcgtatccagggagaagcaagatgccgatgaaatcgaagcttaccgagcttcatttgggtttagtgccgatgaaattgtccaatctcaatcttatgttgggataccagatgcggttgacgagtcattcagtatatcaccatttggaaacaatgctcctgctactgagatctgcccattcagtgatctgcctagtgaggttcagaaggcggataaatcatgcacctacgttaaagatggcacgagcccaaagaaatcagcaaaccaactctcgattgattctccaaataaagttctgcgcttggacgtgttcaaagtaacaaaagggggtcatctgtctgaggacgagggtattgcgagagatggtcatcctttcagaaggacaacggatgaaatatctctaaaaccgatagaggtaaggaagaaatctcctcctggccattcttgctcagacgcagagattgagtacagaaggacaaggagtctgagggatgccaacggtgttttatcgcggcgtagcgcattggcaagacaactgcactaataagtcactagtatgcatggcaatttcatagttcatgtagagcagtgtgtgcattgaatttgagctgtcattagagtgatctgtaggcgaagagtagcctttatcgtatatgaggattatattatcagattgtgtgttctgggtatgtgatgatgagctttgtactctgtttgaactccaagatcctctttgtagacacctgcagtctttcccaggagcagtgaaatgaaatatcgttggcaaattacaggaactgtgttctggtcttcctgaatcctgatgatgtaggctgcgtttgaattctgcagcatgttgattggg

SEQ ID NO: 205628 - DNA, 1656 bp, Zea Mays
gcatccttcctctctgcaccagacttgaactcagcaaggcatttatggtgctggatgcctgattactgaaggttctcgtggtgaaggtggtatccttagaaatagtgaaggtgaacggttcatggaacgatatgctcctactgcaaaagatcttgcttctcgtgatgttgtttcaagatcaatgacaatggaaattagagaaggacgtggtgtagggccattgaaggatcacatttatttgcatctgaaccatctgccgcctgaggttctcaaagaaaggctccctggcatttctgaaactgctgctatttttgctggtgttgacgtcaccaaggagcccattccagttttgcctactgtgcattacaatatgggtggtatcccaacgaactaccatggggaggtagtggatatcaagggtaataatccagatgctgttatccctggtctaatggctgctggtgaagcagcctgtgcatctgtccatggtgcaaataggctaggcgcaaattcacttcttgacatagttgtttttggcagagcttgtgcaaacagggtagcagatatttctaaaccaggtgagaagcagaaacctctggagaaagatgctggagagaagaccatagcctggttggacaagctgaggaatgcgaatgggtcattgccaacttccaagatccgtctcaacatgcaacgtgttatgcaaaataatgctgctgtgttccgtacacaagaaacacttgaagaaggttgtgaactgattagcaaaacatgggaaagtttccatgatgtgaagctcagtgaccgaagtctcatttggaactctgacttgatagagaccctggaactggaaaatctgttgataaacgcatgcataactatgtattcggcagaggctcggaaggaaagcagaggagctcatgctcgtgaagatttcacgacaagagatgacgagaagtggatgaaacactccctgggatattgggagaacgagaaggttcgattggcatacaggccagtgcacatgaaaacattggacgatgaagtagagtcattcccgccaaaagcacgtgtctattgatcgattcaagcctaacacctcgggaattccgtgtaaggtgttaataaagcagatgggcgttcctggctgagaacatgacctggatttgtgtccctcattttctgtgtttctgtattctgcctagtttgctagaaataaaagggtaagatagaacacatgctaatccctggctgatgtttgtgtacatgaaattttgcatgggttgttacctgttaatgctctgcctggtatcattaacccatgattcatgaatgttttggtgattcatggcatggtgcgacgttgtcaaacaacgtagatttgtacgcctgttccttggatatagtataatatatatgtacacatgtgttggagcagaaaaaagccacttctccagtttagacagtagtagtataatgcagtcttatggagagctgctgctacgtactggcacaactacagctatagactagagtgtattttctggatgctaaataggagagccagagctgttttacccccgaagttttcttgttatatgaaccgtactgtatgagagcatcaaatgctagcagatcttaaagaaaaatgttgag

SEQ ID NO: 205629 - DNA, 871 bp, Zea Mays
gtctcctcgccatcgaagacctccacgaggacctctacagaaaattttgattgacatagagagtcccattttgacctttgtaccactgctttaatttgaatgtggtacaaggagaaacataccaaagttcgagaacttttggtagacatagcgggtcctagtttggcctttctaccagtgctttcatttcaatgcggtacaaggagaaacataccaaagtttgagatttatggcatacacacaatgataccagtatcagtgtgtgtctgttgccggagatagaaggactgaccttccttgagtggacacactttatcttcctgaaaaaagtaaagatggtggatttcatctccatcatgagcatgttctaggtcaggtcaaggctctacacttctttcatctggtactctaattagatctactacatatttaaaggtggaatagattgtaggctgataaacttggatatttttgagcatgtaaagctttcgaaagtctttttacagtctgtcaattacgccagttcgaaccaggaaatccaggcgcattgctgccagagtagtagtgctagacctttctgtagtagtcaatgtcacagttttgcttgatcaagctttgtttactgtctttgctaattcctagccacacatgtattgcgccattatgttgtcgttccttctctactctgaaattactagccacacatttgttgtgttattgtgcatttcttctgttatttatgcactgttactccaataattattgtcgagcatgctgtcactattactgtgttggatgccaggttctttttataggatagcaatataagtttgcagttgtattaagttgttcccttgatcttagatatgga

SEQ ID NO: 205630 - DNA, 1430 bp, Zea Mays
catctccttcccttccctggtcccccatctttccccaccgcccctcctccccctacaacctgaccacattcatcccgtctcctcgccatcgaagacctccacgaggacctctacaggtctatcttcgcgctctacctcgctggccgttgcagggcctcctggagttcattgcctcgacagattggtcacacgcgaggctcgacatcaagcgccactgcggcgagcacctcgacccacatttaatgaacccctttgttagtgtgtccttctgtggcgtcaagccagagttctgatatgggatctgatctcgtgtcgcacccgcaaaactcgatatcaagcgctgttgcggcaagcacctccatccgcagctatggaaccctttcgtcgacgtgaccaggtccttccctggggtcaagcgagagttctaagatacgatgtagtcccaccttgctacccttccccaatggccccattgcatgttggctcctggctgacctctgtaccatgcgactcccttgcgcggccgcgcgtgaacactgtcgcctcgctcccagatccttatctggggattgcagctgcttcagatacatgactaccagaaaattttgattgacatagagagtcccattttgacctttgtaccactgctttaatttgaatgtggtacaaggagaaacataccaaagttcgagaacttttggtagacatagcgggtcctagtttggcctttctaccagtgctttcatttcaatgcggtacaaggagaaacataccaaagtttgagatttatggcatacacacaatgataccagtatcagtgtgtgtctgttgccggagatagaaggactgaccttccttgagtggacacactttatcttcctgaaaaaagtaaagatggtggatttcatctccatcatgagcatgttctaggtcaggtcaaggctctacacttctttcatctggtactctaattagatctactacatatttaaaggtggaatagattgtaggctgataaacttggatatttttgagcatgtaaagctttcgaaagtctttttacagtctgtcaattacgccagttcgaaccaggaaatccaggcgcattgctgccagagtagtagtgctagacctttctgtagtagtcaatgtcacagttttgcttgatcaagctttgtttactgtctttgctaattcctagccacacatgtattgcgccattatgttgtcgttccttctctactctgaaattactagccacacatttgttgtgttattgtgcatttcttctgttatttatgcactgttactccaataattattgtcgagcatgctgtcactattactgtgttggatgccaggttctttttataggatagcaatataagtttgcagttgtattaagttgttcccttgatcttagatatgga

SEQ ID NO: 205631 - DNA, 1337 bp, Zea Mays
catctccttcccttccctggtcccccatctttccccaccgcccctcctccccctacaacctgaccacattcatcccgtctcctcgccatcgaagacctccacgaggacctctacaggtctatcttcgcgctctacctcgctggccgttgcagggcctcctggagttcattgcctcgacagattggtcacacgcgaggctcgacatcaagcgccactgcggcgagcacctcgacccacatttaatgaacccctttgttagtgtgtccttctgtggcgtcaagccagagttctgatatgggatctgatctcgtgtcgcacccgcaaaactcgatatcaagcgctgttgcggcaagcacctccatccgcagctatggaaccctttcgtcgacgtgaccaggtccttccctggggtcaagcgagagttctaagatacgatgtagtcccaccttgctacccttccccaatggccccattgcatgttggctcctggctgacctctgtaccatgcgactcccttgcgcggccgcgcgtgaacactgtcgcctcgctcccagatccttatctggggattgcagctgcttcagatacatgactaccagaacttttggtagacatagcgggtcctagtttggcctttctaccagtgctttcatttcaatgcggtacaaggagaaacataccaaagtttgagatttatggcatacacacaatgataccagtatcagtgtgtgtctgttgccggagatagaaggactgaccttccttgagtggacacactttatcttcctgaaaaaagtaaagatggtggatttcatctccatcatgagcatgttctaggtcaggtcaaggctctacacttctttcatctggtactctaattagatctactacatatttaaaggtggaatagattgtaggctgataaacttggatatttttgagcatgtaaagctttcgaaagtctttttacagtctgtcaattacgccagttcgaaccaggaaatccaggcgcattgctgccagagtagtagtgctagacctttctgtagtagtcaatgtcacagttttgcttgatcaagctttgtttactgtctttgctaattcctagccacacatgtattgcgccattatgttgtcgttccttctctactctgaaattactagccacacatttgttgtgttattgtgcatttcttctgttatttatgcactgttactccaataattattgtcgagcatgctgtcactattactgtgttggatgccaggttctttttataggatagcaatataagtttgcagttgtattaagttgttcccttgatcttagatatgga

SEQ ID NO: 205632 - DNA, 1456 bp, Zea Mays
gaagatgaggtttgggatgttactaggagtcaagtttttgttgagatgagggagcatgagcgacgtgtgtggtcggtggacttctcaattgtggacccaacaaaattggtcagtgggagtgatgatggatctgtgaagctgtgggatatgaatcaggctgggagtattggcactattaaaacaagggcaaatgtgtgttctgtgcaatttcaacctgatactgctcgctccattgccatcggctctgcagaccacaaaatttactgctatgatctacgtcacatacgagctccttattgtacactagttgggcacacaaagactgtaagctatgttaagtatctggatgcatcgacaatagtatctgcatctactgacaactcattgaagctttgggacttatcgatgagtccaggaaggataattgacagtccagttcaaacatttaaggggcatacaaatacaaagaacttcgttggcctttccatatctgacggttacattgctactggctctgaaacaaatgaggtttttgtgtaccacaaagaatttcccatgccagtgttggcctataaattcagcgtgacggaccctatatcagggcaggagattgatgaccagtcacagttcatttcatgcgtctgttggagagggcagtcttcaaccctactttctgcaaactccagcggcaacattaagatcttagaaatggactgaggattggagttgggcatctgctgagtctcagctataaatggactgacttcttaccaagttgtgtgcgtgtgaatttgtggcaacggagttgccaacggtgcgtggtgcagagttgggagaggtaggagtagctgtaacaggtttagcatggtttgataggattaaactagcgtggtagcaaaagtagcataaataggaaacagaattgaggtgtggggtagtactgcaaggaaaggttttgtacatcattggttcgaggtatacttgtacagccaatcaatccagtttttacctagcagcaccaggcttttgctcgtcgtagtgttacttgaaaggcaaaaagtataaagtggtctacatctgttgaatcagataacagcatttgcctcattagctctgtttttttttattccccatattggccatatattattgaatcagataacaacatgtgttgtaggagcatggacacgcgcagcgggacggccgcgaggccctaccgtcatcaactcatgcttacgactttgcgagtcccttgcaaatgatgaggggaagacgatgtcgcacggcgcaacagtgacacaaccaccggtgatatgcagttctaatatctcctctttactacccccatgcgagggagatggagaactccatatatggggccaatctttatttactttgtttctttataaaactaattcattttaaactttataacttaataattggtaaatgtgcg

SEQ ID NO: 205633 - DNA, 278 bp, Zea Mays
tctcactgcataatgactccagtatcgctctatataacaagtggatccgatctagtcgccagtcgtcgtcgttaaaaccgagaagagaccaggccgaaggaaaacaatcctgaaaccaagccatgggtctgcaggaggaatttgaggagcatgctgagaaggcaaagaccttgcctgagagcacgagcaatgagaacaagctgatcctctacgggctctacaagcaagccacggttggagatgtgaataccgctgtgcttacatgtttgttcgttaat

SEQ ID NO: 205634 - DNA, 2970 bp, Zea Mays
ctcgctacagagacgaccatgtgaaagaatttaaatctagagtacaacgtgaaggaatggcgttgccgtcggccaccgtgctgtggacggccagcatcaccttccggcttgcacagaacatggtggtgttgttcttcctggcggcgctactggcggccccggcgcgttcgtcgtcgccgtcgtccaacaacggcgccggtcttcagcagcccaccctgaccctctgctccggtcactccactgtcgccaagagcggcgagttcgccagcttcctcgcagccgtgtgcgccggagcctacggcggcggcgtcgcccacatgtcccacagcatgtcctcgtacgtcgccgccgagaaccggaccatgtacggggtcgcgcagtgccgccccgacgtgtcggcctccgactgtactgcctgcctcgctgcagcctcgtccaagctcatcaccgggaccgcgtgcgcgacgtcggcggtctggcacgacgcctgcttcctccggtactcggaccgcgacaccggccggttccgcgaggacgaacacacggagaccgtgttcaacgcgagccgcgcgctgtcgtcgttgccgccccacgttggcgccaacaaagcggtggtggtgaggcgcctacttgccgccgtcgcggacagcacgaggagcggccacatgtgcagcgacatcggtgtcggcactggtgcggcaggcggcggccggatctacggactcacgcggtgcgccgccgagatctcgtgcgcagactgccgccgctgcctcggcggcgctctcgcggtggtagagcgcgagtacaacggcagcgcggggatgcaggtcctgcggctcagctgcatggccaggtacgagagctaccccttctacaacaccaagttcttgacccggcgattgctggcgtcggcgacgagcgggagcccccggccgactcatggaggaatcgtctttaactcttctatatcttttgggccttttgggctcgtgcactctggcggtcctaacccaccgccttcaccgccagtatcacctccaccaccagcattcacgaccatctccgtgcctgctagtgtgggcactgcacaacccaccccaccgccttcacggcctgcacaagcacagccatcaccacctccaccagcagcatccatgatcgtctccgggcctgcgactgcgactccgagggctgcacaagcacaacccaccccagcgcccccaggcggtcataacccaccgcctgcatcacctccaccagcatccatcatgaacatctccgggcctgcgactgcgactccgactccgagggctgcacaacccaccccagcgcctcctggcggtcctaccccacagcctgtagctgccgcaacgaatggtaaaactaaattgtcattgtagtctactctatctatgcatccttgccttttgttcatgaaacctgtttcagaaaacaaagggaagggaacattgaatacaccaaaatggcagatcgtctctattgcaactgggttggtggctgctttcatcatcctcgcactcaccgtatggtgccgtcggaaacagcaactgtctcagagagaacatgtcatagaaccccatgttttgaatcatcaagcagatggagtgccaggtgagactatgcatcacctagaaaagaaacatttgggctccgaagaagacgacgacggaggaagaacaagctgccaactctacagctacctggttcttgaggctgctacatgtcgcttctcaagtagaaacaagctagggagcggtggatttggaacggtatacaagggcacgcttgagaatgggaaggacgtagcagtgaaaaggctcagggactccaagagggcgatacaagaactagagagggagatctccatcgtggctagcttgcgccataagaacatcgtgaggtttttagggtactgcttccaagaggaagggaggttcttcatctacgagtatgtgcttaacaacagccttgataaattttggtacaaaggtaagttcattactcccactattaattatgtttaagcgggtgctcgttttaatctcaatccatatggattgaaggggattcgattagtttaaatctctagcaagtcaacatctatcctaatttctctcaattccctccaatccatatgagaggggaataagcaaacaaggtctaacagggtagagattaccaaggagaaaacaaacacccaaaaagttggcttgcaattgcagcatcttctcaatgccagaagctagagtgggctacatggttcaacatcatcttaggggttgctcgcggccttctgtttctccatgacatggggatcattcatcgggacctcaagccacacaatatacttcttgaccgtaacttcaacccaaagatcgctgatttcgatctcatgaggatgtatgatcaacagaaaactcacgagagcactgagaaggtcgctggaacatttgggtacatggctccagagtgcacgtccggacgaaaattcctactttcgatcaagtctgacgtgtacagctacggggtgttagtgctggagatcatcaccggccacaagatctacactttcgaaggccaaaactctgaaggcctcgtcgaatacgtgtggcagcactggtccactggatagagaagagagcgagcgacgtcatggatgctgacttaggtgtggaagggcatgagcacgcgccacggcaagcgctgcggtgcgtgcacgtcgcgcttctctgcgtgcagtctgaccggtcgaggcggccaaccatggggcaggtcatcgccatgcttagcagtggcgacgacgggacagatgacctgccggagccatctctgcccgggtacgtcctccgtccaatggcggcgtcaggtgtccagctatgctttgggtgcaggtagcgccgcttgatgacgtacgacggtccatggccagtacaaacatagacaaaaaaa

SEQ ID NO: 205635 - DNA, 2837 bp, Zea Mays
acgaccatgtgaaagaatttaaatctagagtacaacgtgaaggaatggcgttgccgtcggccaccgtgctgtggacggccagcatcaccttccggcttgcacagaacatggtggtgttgttcttcctggcggcgctactggcggccccggcgcgttcgtcgtcgccgtcgtccaacaacggcgccggtcttcagcagcccaccctgaccctctgctccggtcactccactgtcgccaagagcggcgagttcgccagcttcctcgcagccgtgtgcgccggagcctacggcggcggcgtcgcccacatgtcccacagcatgtcctcgtacgtcgccgccgagaaccggaccatgtacggggtcgcgcagtgccgccccgacgtgtcggcctccgactgtactgcctgcctcgctgcagcctcgtccaagctcatcaccgggaccgcgtgcgcgacgtcggcggtctggcacgacgcctgcttcctccggtactcggaccgcgacaccggccggttccgcgaggacgaacacacggagaccgtgttcaacgcgagccgcgcgctgtcgtcgttgccgccccacgttggcgccaacaaagcggtggtggtgaggcgcctacttgccgccgtcgcggacagcacgaggagcggccacatgtgcagcgacatcggtgtcggcactggtgcggcaggcggcggccggatctacggactcacgcggtgcgccgccgagatctcgtgcgcagactgccgccgctgcctcggcggcgctctcgcggtggtagagcgcgagtacaacggcagcgcggggatgcaggtcctgcggctcagctgcatggccaggtacgagagctaccccttctacaacaccaagttcttgacccggcgattgctggcgtcggcgacgagcgggagcccccggccgactcatggaggaatcgtctttaactcttctatatcttttgggccttttgggctcgtgcactctggcggtcctaacccaccgccttcaccgccagtatcacctccaccaccagcattcacgaccatctccgtgcctgctagtgtgggcactgcacaacccaccccaccgccttcacggcctgcacaagcacagccatcaccacctccaccagcagcatccatgatcgtctccgggcctgcgactgcgactccgagggctgcacaagcacaacccaccccagcgcccccaggcggtcataacccaccgcctgcatcacctccaccagcatccatcatgaacatctccgggcctgcgactgcgactccgactccgagggctgcacaacccaccccagcgcctcctggcggtcctaccccacagcctgtagctgccgcaacgaatgaaaacaaagggaagggaacattgaatacaccaaaatggcagatcgtctctattgcaactgggttggtggctgctttcatcatcctcgcactcaccgtatggtgccgtcggaaacagcaactgtctcagagagaacatgtcatagaaccccatgttttgaatcatcaagcagatggagtgccaggtgagactatgcatcacctagaaaagaaacatttgggctccgaagaagacgacgacggaggaagaacaagctgccaactctacagctacctggttcttgaggctgctacatgtcgcttctcaagtagaaacaagctagggagcggtggatttggaacggtatacaagggcacgcttgagaatgggaaggacgtagcagtgaaaaggctcagggactccaagagggcgatacaagaactagagagggagatctccatcgtggctagcttgcgccataagaacatcgtgaggtttttagggtactgcttccaagaggaagggaggttcttcatctacgagtatgtgcttaacaacagccttgataaattttggtacaaagcatcttctcaatgccagaagctagagtgggctacatggttcaacatcatcttaggggttgctcgcggccttctgtttctccatgacatggggatcattcatcgggacctcaagccacacaatatacttcttgaccgtaacttcaacccaaagatcgctgatttcgatctcatgaggatgtatgatcaacagaaaactcacgagagcactgagaaggtcgctggaacatttgggtacatggctccagagtgcacgtccggacgaaaattcctactttcgatcaagtctgacgtgtacagctacggggtgttagtgctggagatcatcaccggccacaagatctacactttcgaaggccaaaactctgaaggcctcgtcgaatacgcccttggcatcccttccctgaatcgaattgaattcagagctggtgtggcagcactggtccactggatagagaagagagcgagcgacgtcatggatgctgacttaggtgtggaagggcatgagcacgcgccacggcaagcgctgcggtgcgtgcacgtcgcgcttctctgcgtgcagtctgaccggtcgaggcggccaaccatggggcaggtcatcgccatgcttagcagtggcgacgacgggacagatgacctgccggagccatctctgcccgggtacgtcctccgtccaatggcggcgtcaggtgtccagctatgctttgggtgcaggtagcgccgcttgatgacgtacgacggtccatggccagtacaaacataggtaataatctctggtctctccatcaacaaaatggatgtaatcctagcaaggcttaaatttgatcaactataaactttagcggacccagtgtttgatcatagcctgagcaaatttcattgagctaatcaaatcgtgtattttggaacacgg

SEQ ID NO: 205636 - DNA, 2938 bp, Zea Mays
gatagaatctatcgatctgcttattttcttaaactgttgtatagtggtgcaaaatcccaaaaattatggccaacaacgaagataacatcaaaaacagtgtctgtctgcaagcttctcctgagaaatttaagctttctaatgctcaagttttgtctaccaaactaggaagaagaattgagtgagaaaaatctgctgcacttttgtcatatatactgagcgaacttagatgacatcagacgttgcagttatctgaaagcatcattggtcacctaaccaaatgttactcttggagatagttgttccccattactaggtctagcagagaataacggaattatacgacacaataggttactaaaagtcgtatttgggatcaagttgcctcaagtatctaggcatgtggcttagcacgcactcagcacaatactttctggtgtttgcttctctcgcttggtcacagtctatcatgaaaagttcagtaggaactcatgtaaccttctacgaattgcaggtgaacaatgcacttatggatctgataaaggccaccggatctgcgatgaaacctgaagagtggtcagcccagcctgagaacacatcggagaccggggcactcatttccgcgaggcccattaccgtcacgatgcgaacagatgaaggggtgatagtcatggggtttgagcacatcaggaacattgtaaggataatgaagccagaccaaaatacgtgtaaattattctttgagaccttgttgtgggagtcgagatgatactttttcacttctcccccatacctggagatgatgattttagagtagcatctccaacacatgtgaaactcttcggaggaaaggcctgctcatagtggcagaataatccgacacggataacactgaacaaacagtgcccgcctggacagaagtgtctgggccacggttggtgtatgcacatgtacctgtataaagagtatctgtaacttgctgcttctatttcacggccacatgctgtgctggtgctgtccaccatgcttctgtaccatactgaaatttcaaaaccattctttgttgctcatttccgtgtggcttgctccgctgtctgttttctgcagtagcagatgtaggtgctctgagtgggttattgcagcagcagttaatctgttccgatcgagctgacatcatcatctttcttgcaaagacatacactgcgcttaagcggccgaaacgctgcaaacgtgaagatgctgcaatacatttcagcaaatagtagcatagggtaaaactgaaaagcgaacgagagcggcagccacagatctgggtttcacgacgtacaacacgataatatccagggcctagacgatctggctgggacggcgtgccaaccttaagccttgttcggttaatcccgttacccatggattggatgagataaagccttgttcggttaatcccgttacccatggattgggtgaaaccttaagccttgttcggttaatcccgttacccatggattggatgagataaagccttgttcggttaatcccgttacccatggattgggtgagattgaaaaaaattaagaaaggatttgacttagttgggatttaaactcatccaatctcactcaatccatgtggattgggagctaaccgaacaagcccttagtgtgtctgtaggacacgttagctttagggggtgtttggttagagggactaaagattagtctctagctttttgtctcatttagtcccttttttaccaaacactagaactaaaatttggactaaaataatttagtctttagtccttcgcatatgtgctaaaagagactaaaccatattaattccatatttacccttcatttagttcaattgtactaatagcaggagaatgttaaaagtcattttagtcttcttataagtcatttagtatattcttactatttttagccctataactaaatatgttagggactaaactttaatcccctaactaaactttagtccctagactaaagaaatcaaacatagtcttagttcactaaagagcatacgggtaaaacacctgaaatgacgtgcgttatctattatctctgctagctcgcggaccatccagatccagtgccacctctgatgttcttatctgacggctcagtgctcacgtagatggtgcgggctgaagaggactccatggcccggttgagcttcctaaacagagggctgacggcgtcctccttccttgtcctcctgttgttctttcattcaggtctctctcatctttcatctgcatgaacggccgctgtgcttccatgcctgcgctgcgctgcgctggttaaatagaaaatacgcggtcgtgtggaaataagctgatgcctctgcgccctgcttcttccattttgtcaaggtccgtccgacactgaatgaattctatagtttttggagaaagaatgaatatatcctgattcctgaaccccgatccacaaccgggaaagggcaccttagctgatgtattgacgtcaggcgacataagcaaacggatcaaagaagcacgccgccagttacgagacgtgctggtgaccacccttacacacacacaaactaaaaacaccacgcgagcagcggatccagaaagatacggaggatggacttattccttttattttctgtatttaaaatcgcatttttaaatttcaagtataaaattatagcagaaacttaagaggggcttccggcttccggcctccggggaccgtagcgggggctcgatcgagcccggacagcggccgccccggtgctggatgcgcccctctcatctcatgagaagtaagctagaatgaattggtgttacagagatagtgcggaggagggagggctaataaccttggcaaaatcagggactcagggtggacggctgcgctgccgcttgccgatgcctggcgtccggcga

SEQ ID NO: 205637 - DNA, 4960 bp, Zea Mays
gggccggccggtttgactcggcggcggacggcgacgcgccgacgtgtctccgccgccccgctcacatccgcccccgcgccatccgtccacgtgttcgcgcctctggaacggactcccccgcctgcaccttcttttccctcgcgccgcggcgcccgttctttccgagtcccgcggatataactacaaccagccgcccccttcctccgcagctccgctccccttcccccctcgtttttcctctgcgcactttttctcgtttccagccttccaggcagccacgcctcgcccgttctcggatcccctccaaaacggtcaaagccaaaccagccaaatcgcgcgcggcggcggcggcgacgagaacgagacggacgcgcgcgcgctagctgaatcaggtcaggaaggaggagagccgccggcgagcacagcagcaatgccttactgcgaggtgggcaggtacgcggacggcgacaagtgggagggcgtccgcgtctactaccgccgctacggccgcggcgccaccaaggtgctcctcatcatcgggttggcggggacgcacgactcgtggggcccgcagattaaggggctgacggggtcgctggagccggccgacgacgaggccctgcggccggacgaggaggccgccggcggcgacggcgacggcatcgaggtctgctgcttcgacaaccgcggcgccggccgcagctccgtgcccccgaacaaatcctactactcgacggcaatcatggcgacggatgccttggccttgatggatcatttggggtggaagaaagctcacgtctttggccactccatgggtgccatgattgcttgcaagcttgcggcgattgcgcctcacaggctatgttcgctggcattgcttaatgtcactggaggtggctttcagtgcttcccaaaggtagatgggcagatgctttctcttgcattccgtttcttaagggcaaaaacaccagaggaaagagcccttgtggacttggaaacgcattatacgaaggaataccttgaggagactgttgggtcgtgtaccagaagaatggtcctctatcaagaatatgtgaagggcatatcgtcgacagggatgcaatctaattgtggttttgaagggcaaatcaatgcatgttggactcacaacatgactactaaggagctagatacaatacgatctgccggctttctagtttcagttattcatggaaggtacgatatcattgcgcaattgtgccatgcaaaacgtctagcagaaagccttcttcctgttgcaagaatggtagaacttcatggtgcacatctagtgagccatgaaagaccagacgaggtaaagtgagaactctcataaaacagcaacatgtgccactgaaacattaagggcattgatgtgattggttgttttgcttatttgcttaattaaactgaaactccccaaaattgctaagcaatgaaggtaacatcccaagctgtggctttgcaagtttctcaaaattgagctagctaacactaaacttttgtctaaccaaactaggaaggagcaccgaatgagaaatttctgttgcaacttgtccatagttgctgaacgagcaagatgccagccatctcagttaactgaaagcatatttcatcacctaaacgtgcaacagaataccagaattgccgagtgaactaagacgacaccagacatctcagttatccgaaagcatcatccatcacctaaacgtgaaacagaatacatgttgcttttgaaggcagctgttccccattactaggtttagcatgaaaagacagaattataggatccaataggttaccaaaagttataacgaaaccaagttgcctcaagtatctaggtatgtggcttactggcttaccacatgctcaagcatggcacacatctagggaaccatgaaaaactagatgaggtaaaatgcggacttcaataaaacaatagcgaaatgtgccactgaaatgctaggaaggacattgatagaatctatcgatctgcttattttcttaaactgttgtatagtggtgcaaaatcccaaaaattatggccaacaacgaagataacatcaaaaacagtgtctgtctgcaagcttctcctgagaaatttaagctttctaatgctcaagttttgtctaccaaactaggaagaagaattgagtgagaaaaatctgctgcacttttgtcatatatactgagcgaacttagatgacatcagacgttgcagttatctgaaagcatcattggtcacctaaccaaatgttactcttggagatagttgttccccattactaggtctagcagagaataacggaattatacgacacaataggttactaaaagtcgtatttgggatcaagttgcctcaagtatctaggcatgtggcttagcacgcactcagcacaatactttctggtgtttgcttctctcgcttggtcacagtctatcatgaaaagttcagtaggaactcatgtaaccttctacgaattgcaggtgaacaatgcacttatggatctgataaaggccaccggatctgcgatgaaacctgaagagtggtcagcccagcctgagaacacatcggagaccggggcactcatttccgcgaggcccattaccgtcacgatgcgaacagatgaaggggtgatagtcatggggtttgagcacatcaggaacattgtaaggataatgaagccagcaagggttgcaccaattgactcgtgaggaccaaaatacgtgtaaattattctttgagaccttgttgtgggagtcgagatgatactttttcacttctcccccatacctggagatgatgattttagagtagcatctccaacacatgtgaaactcttcggaggaaaggcctgctcatagtggcagaataatccgacacggataacactgaacaaacagtgcccgcctggacagaagtgtctgggccacggttggtgtatgcacatgtacctgtataaagagtatctgtaacttgctgcttctatttcacggccacatgctgtgctggtgctgtccaccatgcttctgtaccatactgaaatttcaaaaccattctttgttgctcatttccgtgtggcttgctccgctgtctgttttctgcagtagcagatgtaggtgctctgagtgggttattgcagcagcagttaatctgttccgatcgagctgacatcatcatctttcttgcaaagacatacactgcgcttaagcggccgaaacgctgcaaacgtgaagatgctgcaatacatttcagcaaatagtagcatagggtaaaactgaaaagcgaacgagagcggcagccacagatctgggtttcacgacgtacaacacgataatatccagggcctagacgatctggctgggacggcgtgccaaccttaagccttgttcggttaatcccgttacccatggattggatgagataaagccttgttcggttaatcccgttacccatggattgggtgaaaccttaagccttgttcggttaatcccgttacccatggattggatgagataaagccttgttcggttaatcccgttacccatggattgggtgagattgaaaaaaattaagaaaggatttgacttagttgggatttaaactcatccaatctcactcaatccatgtggattgggagctaaccgaacaagcccttagtgtgtctgtaggacacgttagctttagggggtgtttggttagagggactaaagattagtctctagctttttgtctcatttagtcccttttttaccaaacactagaactaaaatttggactaaaataatttagtctttagtccttcgcatatgtgctaaaagagactaaaccatattaattccatatttacccttcatttagttcaattgtactaatagcaggagaatgttaaaagtcattttagtcttcttataagtcatttagtatattcttactatttttagccctataactaaatatgttagggactaaactttaatcccctaactaaactttagtccctagactaaagaaatcaaacatagtcttagttcactaaagagcatacgggtaaaacacctgaaatgacgtgcgttatctattatctctgctagctcgcggaccatccagatccagtgccacctctgatgttcttatctgacggctcagtgctcacgtagatggtgcgggctgaagaggactccatggcccggttgagcttcctaaacagagggctgacggcgtcctccttccttgtcctcctgttgttctttcattcaggtctctctcatctttcatctgcatgaacggccgctgtgcttccatgcctgcgctgcgctgcgctggttaaatagaaaatacgcggtcgtgtggaaataagctgatgcctctgcgccctgcttcttccattttgtcaaggtccgtccgacactgaatgaattctatagtttttggagaaagaatgaatatatcctgattcctgaaccccgatccacaaccgggaaagggcaccttagctgatgtattgacgtcaggcgacataagcaaacggatcaaagaagcacgccgccagttacgagacgtgctggtgaccacccttacacacacacaaactaaaaacaccacgcgagcagcggatccagaaagatacggaggatggacttattccttttattttctgtatttaaaatcgcatttttaaatttcaagtataaaattatagcagaaacttaagaggggcttccggcttccggcctccggggaccgtagcgggggctcgatcgagcccggacagcggccgccccggtgctggatgcgcccctctcatctcatgagaagtaagctagaatgaattggtgttacagagatagtgcggaggagggagggctaataaccttggcaaaatcagggactcagggtggacggctgcgctgccgcttgccgatgcctggcgtccggcga

SEQ ID NO: 205638 - DNA, 870 bp, Zea Mays
gggaaagaagagaacaaaaataaagcaagaggcgagaggagagagcaacgacgccatcggagggaggaaagagaagaagacgatccgctagcgtgtgcgtggcgacgagatgtggcggaggcgagtgggcgccctcctccgatctccacgaacttcttcctcggcctcctcggcctgccagagccgccgccaccatcttctccccagcgaggaacctcttgctctcaaccgtcttgccaggctcttcacgtcccaggctggaagtgatggtggcgatacccagaagccctttattgcttttgtcttaggtggtcctgggagtggcaaaggaacacagtgcactaagattgcttcggattttggatttgcccatctgagcgctggtgatattctccgacatgaaatagcatctggcagtgagaaaggggagttgatcctagaaatcataaaggaagggaggattgttccgtctgagataactgtggaactcatcagaaaagcgatggaaatgaacaatgctaaaagggttcttattgatggcttcccaaggtgtgaggaaaacagaatcgccttcgaaaggattgttggaacagaaccagacattgtgattttctttgactgtcctgaggatgagatggttaaacgccttctaggccgtaaccaggggagagttgatgataacattgagacaatcaagaagcgtctaaaagtgtttgaaagtttgaacattcctgtcgttgactactactcttcaaggggaaaagttcacaagataaatgccacgggcactgcagatgaaatatttgaagcagtccgtaggctgttttcttccttaagaggcccttttcggagttcgtgtccaatccacct

SEQ ID NO: 205639 - DNA, 1554 bp, Zea Mays
atacaactccatccatcaggcttaggccatccgagttcttttcagcgtccagttgtgcagggcggtcgcacacacaccacacacgcgccccgtccattccattctcatcgcgatcgaggtggcctggcactggtactggcactgccctcgctggccccaggccatggcctgtcttcgctagcttccttccttacagtataaatattttggtgcgccactgcgccagctccggcctgtcccttagttgtaccatcgtgtccttttcctcctacctcctccttggctggccctcttccccgtcttcctccctcttccttcgtctctccgtttcaagccctaccgacaggcatttgcttctgctccagtgatcagccccctcccctcctggcctcctctccacccggccaaaaactgatctttttttttcggttctggtaccatagctattagtagtcgtagcggctaacttgcaagccgattgtctctagcacgcaagtgtttttccctcccctgagattggtgggtgatcgagagttcgagacagtgtacacatacatactctgctcgtctgctgaggatcgatcgcttggtctcgttgttgcgtagataggtactagaggactatagctactagtaggactaggagaggatccgagggagagagagtaaggccaagatgatgcgcgcgaaccgggagcagagagtggccttctcgtcgacgaaggaggccgccgcggtgcccaaggaggaggtgtgggaggtccggcccggcgggatgctggtgcagaagcggagccccgacgcggacccgccccccggcggcgcgcccgtgcccaccatccgcgtcaaggaccgctccaagatggtcatgctcgaggaccccgccgccaaggccaagcgcctcctcgaggagcgccggaccggcaaggccgagcgcgccgccaaggccatcgcccgcgccgccctcgacgtcgacaagctcgcaaccaaggtgtcggcgctggagacgatcgtgagcaagggcggcaaggtcgtggacgcggacgtggtgacgctgaccgaggcgctgatgaacgagctggtgaagctggactccgtcgccgccgaaggggaggtgaaggcggcgcggcgggcgcaggagaagcgggtgcagaagtacgtggagacgctggacgccatccgcgccaagaacaaggcggcggcggcggcggcgccggccaaggcccgcagcggcagcaacaaggcgcggccgccgcgcccgcccccggcttcggcgcacgcgcatcagagccagcagcagcgccggcagttccagccgccggcgccggtgtcgcagacccagacggcgagctgggagacgttcgacctcctgtcgtcagtgccgtcgacgtcggcggcccccgtgacgaccatggcccccgcgaccagcaccacgccgtccccgcgcttcgactgggagctcttctagatggctcctcaaggcgccagcctgccacacccccctggcctggcccccatctctcgccacttgtgtgcctgtccattggctcggcc

SEQ ID NO: 205640 - DNA, 1740 bp, Zea Mays
atggcgctcgcaaaaaccctcctactcgtgcttgtcgtcgccgccgcatggacggcggcggcggccgcgcggcaccgcaggagccacgaggattactatgagaatgtgtttgatcgtcagcaagctgaccgggtggagtccctgccggggcagccatcggaggtcgggttccggcatttcgccggctacgtgacggccaacgagtcccacggccgcgcgctcttctactggttcttcgaggcggcgcacgacgtggcgaagaagcccctcgtgctctggctcaacggaggaccgggatgctcgtcggtgggatatggagcactggaggagctgggtccgttcttggtgcagaaggggaagccagagatcagcctcaaccctaattcatggaacaaagaggcaaacctgttgttcgtcgagtctcctgcaggcgttggattctcctacactaacaccaccaaggatctcacccaatttggcgatgagctcactgccacggacgctcatgccttcctcttgaactggtttaagaggttcccgcagttcaggcaccacgatttctacctcgccggggagagctacgcggggcactacgttcctcagcttggcgtgaagatcttggagggcaacaagaaggcgcacaggaaggatcggatcaagctcaagggcatcatgatcggcaacgcggccatcgactcgagctccgacgaccgcggcctcgcggagtacgcgtgggaccacgcagtcatctcggacgaggtgtacggtgccatcaagaaggagtgcaccttctccgacgacggcgacgagagcgacaagtgcggccaggcctggaacgacttcttcaacgtcatgcgggacatcgacctctacagcctctacacaccggcgtgcacggacgccatggccaacgccagccgcagcaactcctcctcggcatcccgacgccgctcatggaacctcgccgacacgccgctcgctaaggttcaccgggggatgccgtacaacacgtacgacccgtgcgtggacaaccacgtgttcgactacctgaaccgcgccgacgtgcagaaggcgctgcacgccaacgtgaccggcatcccctacagctgggagccctgcagcgacgcgctgagcaactggacggactcgccggcgtccacgctgccggccatcaagcagctggtggacgccaagctccgcgtgtgggtactgagcggcgacacggacgaccgcgtgccggtgacgtcgacgcggtactcgctgcgcaagcttgggctggccaccgccaaggagtggcgcgagtggttcaccaccgaccaggtcggcggctacacgctcgtctacgacggcctcaccctcgtcaccgtccgcggcgccggccacatggtgcccatgatcacccccgtccaggccagccaagtcttcgcgcacttcctccacgggagcgagatgccggccaagcctgtcgtctagatgccatggaaaatatacgatcggtcgatcagaccgatcagggtttgcatactacatatagctactagagtagaggttcattgagttaatagctagctagattggttaggctatagcaatagccagctttagaaaacactttgttacattaataataatctgttcattccgaaagcgtgagattccatcttgatgtgtactgatgcgaagaggttggagcacacagcatccgttcacggatatatatggtgaagtgcaccggattca

SEQ ID NO: 205641 - DNA, 1185 bp, Zea Mays
cctgatttgatgcggttccagctaagcttgcccccttcgacccgaccaagaagaagaaaaagaagaaggttgtcatccaagaaccttctgatgaagtggacaagcttgcagagaagacagaaacactggcagtcgcagaacccgctgaacttaacttcactggaatgaagaagaaaaagaagaagccggtggatcttgattcaactcttgatgagcttggagatggggaggacactcaagatgatcaagctgtagaggaacaaggggaaggcattgtgctgggaagtgtccctacatacccttgggagggaactgatcgggattataaatatgaagagggtgttcaacattctacgtgagaacaacccagatcttgctggggataggcgtaggaccgttatgaggccaccacaagttcttagggagggaacaaagaagacagtttttgttaactttatggatttgtgtaaaacgatgcataggcaacctgagcatgtgatgatgtttttacttgctgaaatgggaacaagcgggtcacttgatgggcagcaaaggttggtgatcaaaggaagatttgcccccaaaaactttgaagcaatcctgaggagatacatcaatgagtacgtcatctgcaatggatgcaagagccctgataccattctgtccaaggaaaatcgtctgttcttccttcgctgcgaacagtgtggatcttcaaggtccgttgctccaatcaaagctggattcgttgctcaagtcggtcgtcggaaggcatgagcatctatatgtggatggtgttggggtcaataccaactcaacaatagttgattatttgttgactagagattctgcggcgcaatgttgagcaagatatatcaacgatgccctttgtctgcattcaaaggattcatctattgatgtcacaagcctatgaaaactggcgagtgtgaatcctgatctacgactccctgcgatcataatcctgtgactgctggttagtgtcaaatgcagtctgttaaacttcttgatgcggtcactaatacaagttcatcaaagttttgtccgaatgccataattctgtcataaaatttactttctctgtaatacacaatgaatctaagtgtttacttcattattcgatccttggaattcagctgattcattcaaacaaacattctctttagcttc

SEQ ID NO: 205642 - DNA, 1901 bp, Zea Mays
agagagagagagagagagagagagcaaagggaagtcatcataggtattttgagaacattccatgcatacttgcctggctcgcatttgcctgcgagatcaccaatcaaacaagccacccgtgcttcctgctaccctgctacgctgcacaatcatcctgcggaatttagtaacggcgagttattccaaagttccgatccccaagttgtttattctcctatagtttgtcggtttgtgtggttcagattcctcccgctctcgcgcaagtggtacactgtgtttccagctaccattttctccactaactaattttattttcagtgtctctcgtttcttttatttgcgcgtcaagtttcagccattccttgctcaaaggaaaagtttgagccattccctgggaaggtaggtgagggtactggacaaatccgaaatgcaaatgggcatatgctacatataaccgtaggcttgcttgctactgccagagactcgggtacatggtatcgggttacagtccaaacaggaaattctaaggccgatggaagataaggatatgggtacagtcacccagtcctgccatgacgcgaaagcttatagaaatcaggtggcataaatactgtgcagggctaaaggttggtgggtcgaacggaccaggccatcaggttatctagaaagctctcatgctcttccatttctaggctagcctaggtctggaccagttagagtagacacgcaagtatcaatcgattcataagaggaggaggccattgagggagccaagtagaaggcagtcactgcaaacaacggtatgcattgcaaggaggaaatatagctttcagccgttgcttttcatatgcgtttcagaaagtttgatcatctccctttcgatttttttaaagaaagtttaatcatcattcttgctcagaatcaagttcttagctcttagacacatttagtatcttgttgttagaaagctggtgagcaactttgtcaagcctcaagagctcatggaagatggcagtgctccaagacggtctactccacccacccgcagaagcagatctgccgagttccacaatttttcagaaaggaggagaagggataagatcaacgagaagctgaaagcattacaggagcttcttccaaactgcaacaagaccgacaaagtttcgatgctagacgaagcaatcgactacctaaaatcccttcagctacagcttcagatgctggtcatggggaagggaatgtcaccagtggttcctcttgagctgcagcaatacatgcattacatcacggctgaccctgcccagttgcctccattgcgcccatccggccagcagcaccggcaatttcagataactcaagccaacccccagcgacaatctaacgtcgagtcggatttcttgagccagatgcagaacttgcactcttctgagccgcctcagaactttctcaggccgccgaaattgcaactttatacaccggtatgttgcggcaaagaaaatcaacagtcaaaaggcctacagtactaccacttcaggcccattccgtcaggcagcatgggctagactggtttcagcgaaccattcatagggcacataaaagtcactatagcctggaatctagctccatgctggctctgaacagattgaactcattacacgtgcaaacaggagcagcccgaatctatgacactttggcgtcccgtccggcgtccgggtggtactcatcagaagcagggttctccctttgcttgaacagatcttgcagcacgaatttcagttcgcgtttttgcagcaggcatctagtctcttccacagaccttgctcatcttcagcaaggctgaaagcacgctgtccatgtcaggccggtccgccggatcggacgcggcgcacgacagggccagg

SEQ ID NO: 205643 - DNA, 2002 bp, Zea Mays
agagagagagagagagagagagagcaaagggaagtcatcataggtattttgagaacattccatgcatacttgcctggctcgcatttgcctgcgagatcaccaatcaaacaagccacccgtgcttcctgctaccctgctacgctgcacaatcatcctgcggaatttagtaacggcgagttattccaaagttccgatccccaagttgtttattctcctatagtttgtcggtttgtgtggttcagattcctcccgctctcgcgcaagtggtacactgtgtttccagctaccattttctccactaactaattttattttcagtgtctctcgtttcttttatttgcgcgtcaagtttcagccattccttgctcaaaggaaaagtttgagccattccctgggaaggtaggtgagggtactggacaaatccgaaatgcaaatgggcatatgctacatataaccgtaggcttgcttgctactgccagagactcgggtacatggtatcgggttacagtccaaacaggaaattctaaggccgatggaagataaggatatgggtacagtcacccagtcctgccatgacgcgaaagcttatagaaatcaggtggcataaatactgtgcagggctaaaggttggtgggtcgaacggaccaggccatcaggttatctagaaagctctcatgctcttccatttctaggctagcctaggtctggaccagttagagtagacacgcaagtatcaatcgattcataagaggaggaggccattgagggagccaagtagaaggcagtcactgcaaacaacgtatcttgttgttagaaagctggtgagcaactttgtcaagcctcaagagctcatggaagatggcagtgctccaagacggtctactccacccacccgcagaagcagatctgccgagttccacaatttttcagaaaggaggagaagggataagatcaacgagaagctgaaagcattacaggagcttcttccaaactgcaacaagaccgacaaagtttcgatgctagacgaagcaatcgactacctaaaatcccttcagctacagcttcagatgctggtcatggggaagggaatgtcaccagtggttcctcttgagctgcagcaatacatgcattacatcacggctgaccctgcccagttgcctccattgcgcccatccggccagcagcaccggcaatttcagataactcaagccaacccccagcgacaatctaacgtcgagtcggatttcttgagccagatgcagaacttgcactcttctgagccgcctcagaactttctcaggccgccgaaattgcaactttatacaccgaggggtggcctacccaacacgagccacaacactggatggatttctgggagttcctcgtataacttcatggagtgatgtgctcctaatgacaaaatttgacacggcaggcgtgcagccttgaactcggaagagatcgttcagtttgggacctgcagcatggttcacctgagagaattccatgaatgtgtagtactagttaactagctagctagttgtgttattaaataaaacgttgtgattgtgatgctgctcattttgctatctgaatcttaccgtccaattctcctccatgttcatgcaaaggctgacaggtggcgtctgaatttatctgtgcagcagtatgctactacttgttagattgatcgcatctacctttaactcccgcgttctgatggaggcgtaattaacttatagttgtgaccctcttttacatcaaatatataaataatataatgtacagtataatgtagagtataaatagtgttttgcatatacatgatttgctagccacaacatgagagagtgttttcagggacattattccttctccccaccaataagccattgctgtaaatttgagagacatctgcgttgggactagaattcacattatcatgtctgatgtgattgatggacactgttgtttgcatccaatccaatgagatgaataatat

SEQ ID NO: 205644 - DNA, 293 bp, Zea Mays
ctacagcatgcgcaaatccacacttctctctcttcctcgcatattctggacaacgatcatactttccctttcgtccgttcccttcctctggccaccctatttcgcccacggcggcgatcgatctggagattccggggccctcctgcaaacggtgccggtcgggtagcagggggtgttctcatcacggtaagcgccgccggcagaatcggcggtccgaatctccaggaaccggcgattccacctcaacgactcccacatctgtgcgaagatgttcggtgctactgcctgattgc

SEQ ID NO: 205645 - DNA, 2759 bp, Zea Mays
gtatgtatctcatcaattgattggattttcgcattgagatatgcatcaagatcaaaaatcctatatacatttgcaattgattttcatatggctatgatggatcggacggcgcagacagagtcgagatccgtggagccatcgggtaactaaactcccccgccaccgcgtcgcgccacgcccacgcccgcgcgctcgcctcgccttccatttaaaccaggccgcagcttcccccgcgcttcctcacgggttcacgcgccggagcggatcggcagttcaggagagcgctctgagtctgaggacgtacaggatggtggaggcgccagcgccgtcggatctgagcgcggcggcgcaggtgagcgcgctgtcgctgcaggtggatctcctgcagctgccgccggaggtgcccgcgccgggggcgcccgcgctgcgcggcgtcctcgaccacctcttcgcgcactggctctctctccccgaaactgccgcgcttctcgccagcctcgtgcacaaggccaaggctagcggcgccgcggcggcgggggcctcgatgctgccctccatgatgctgcaggggggagccgccgtgccgccgctctctccgaggtccccgcgcctctcgcggaggcccagcagcctaggctccggcccgccccaccgctccgcgtcgccgctccgcccgccagccgcgcgctccgccaaggaggtcataccgcagttttattttcaagatggacggccaccgccgtacgaggtgaggaagcaatgcatatcaaccgttgatcagctcttcgccggccactcaaatggtcttcgggctccagaatttcggatggttaccagggaactctgcaaactaccgacattctttactactgttctcttcgacaagatagacaaggagggcactggattcgtgacaagggaggccttcattgttttctgggtgaatagcaatttgatgagtatggatagtgcaacccaagtattcacaattctgaagcaacagaatcgcaattacctcgcaaaggaggatttcaaaccgattctgaaagaccttttggacaatcatcctggtttggagttcttaaagagcacacctgaatttcaggaaagatatgctgagactgtcgtgtatagaatattctattgcttgaatcgaattggaagtggacagctaacacttagggagctgaagcatggaaatctactcagtgcactcaggcatgctgatgatgaagaagatatcaataaagttttaaggtatttctcatatgagcatttctatgtgatatattgcaagttctgggagctggacaccgatcatgacttctttattgacaaagaaaatcttattaagtatggaaatcatgcattgacatataggattgtagatagaattttttcagaggttcctaggaaatttacaagcaaggttgaagggaaaatgggctacgaagattttgtccattttatattgtctgaagaggataaatcatcagcgccaagccaagaatattggttcaaatgtatagatttggacggcaatggcatacttacacatattgaactacagttcttctttgaggagcaacttcatcgcatggagtgcatggcccaggaacctgttctatttgaggacatcttgtgtcagctcattgatatgattggacctgagaatgatagctatttgacattgaaagacttccgaaggtgcaaactgtctggacatttctttaacattctttttaatctgaacaaatttatggcatttgaagctagggatccatttctcatccgtcaaatgcgtgaagagccatcattaacagactgggatcgttttgcacgaagagagtatgtaagattggcgatggaagaagatggtgaagatgcttccaatgctagtggagatgtttgggatgagtcacttgaatctcctttctagattgaaaaatacactgggaagacataccagatattcacatgcagccctaataatcaagtcaaagtcatgaacagttatttgatatattatctttacagaaactatagttgaggcagctgcatgcttgctggcaccatccaaattttgaccggaagcaaagacagataatcccacctagtttgctatggagtccattttgttcttggtgacagtgagaagttttgccacttgatccatgatatgatccagttttgctgctaaactacaacagattgattcatggcagcaacaagagaacagcatcttgtgattattccgaaggcacatccaaagcctagtgacaaataagaagatgagcagggtccttgcagcagatgcaatcatcatatgatggatagtgaatagttggcgtcataattttaattttcatagtgtctcgattaggtgtgtcaaaattttctttctttgttgtactttatttagcttgtagtcacatgaacaatgagctgaaataccatatcacaggtttattgtcattttcgtcacacactgctctatttgaagtgtaatacacaggtgttctgaggattcaaatagaccaatcttgtgcaaatgttagtactgtactatataatagtgataccgaagagtaacatatgagatcaacgcaactccaaaccattgttttgagctgaaaggatgtgtggatggacctccaatcggaagtgcaaaaactgtctctgacagtctaggctataaagcaaatgctacacccagcagcgctgcactaggcaaatcaaccggtacattttgaccagct

SEQ ID NO: 205646 - DNA, 2795 bp, Zea Mays
ctctatttatagttagttttctccttcgttgttgcttctttatttgtccctgctttttcaaggctaagtggtcctttaagcctcttttctcaatcacatttgttcttacatcccgattttcatatggctatgatggatcggacggcgcagacagagtcgagatccgtggagccatcgggtaactaaactcccccgccaccgcgtcgcgccacgcccacgcccgcgcgctcgcctcgccttccatttaaaccaggccgcagcttcccccgcgcttcctcacgggttcacgcgccggagcggatcggcagttcaggagagcgctctgagtctgaggacgtacaggatggtggaggcgccagcgccgtcggatctgagcgcggcggcgcaggtgagcgcgctgtcgctgcaggtggatctcctgcagctgccgccggaggtgcccgcgccgggggcgcccgcgctgcgcggcgtcctcgaccacctcttcgcgcactggctctctctccccgaaactgccgcgcttctcgccagcctcgtgcacaaggccaaggctagcggcgccgcggcggcgggggcctcgatgctgccctccatgatgctgcaggggggagccgccgtgccgccgctctctccgaggtccccgcgcctctcgcggaggcccagcagcctaggctccggcccgccccaccgctccgcgtcgccgctccgcccgccagccgcgcgctccgccaaggaggtcataccgcagttttattttcaagatggacggccaccgccgtacgaggtgaggaagcaatgcatatcaaccgttgatcagctcttcgccggccactcaaatggtcttcgggctccagaatttcggatggttaccagggaactctgcaaactaccgacattctttactactgttctcttcgacaagatagacaaggagggcactggattcgtgacaagggaggccttcattgttttctgggtgaatagcaatttgatgagtatggatagtgcaacccaagtattcacaattctgaagcaacagaatcgcaattacctcgcaaaggaggatttcaaaccgattctgaaagaccttttggacaatcatcctggtttggagttcttaaagagcacacctgaatttcaggaaagatatgctgagactgtcgtgtatagaatattctattgcttgaatcgaattggaagtggacagctaacacttagggagctgaagcatggaaatctactcagtgcactcaggcatgctgatgatgaagaagatatcaataaagttttaaggtatttctcatatgagcatttctatgtgatatattgcaagttctgggagctggacaccgatcatgacttctttattgacaaagaaaatcttattaagtatggaaatcatgcattgacatataggattgtagatagaattttttcagaggttcctaggaaatttacaagcaaggttgaagggaaaatgggctacgaagattttgtccattttatattgtctgaagaggataaatcatcagcgccaagccaagaatattggttcaaatgtatagatttggacggcaatggcatacttacacatattgaactacagttcttctttgaggagcaacttcatcgcatggagtgcatggcccaggaacctgttctatttgaggacatcttgtgtcagctcattgatatgattggacctgagaatgatagctatttgacattgaaagacttccgaaggtgcaaactgtctggacatttctttaacattctttttaatctgaacaaatttatggcatttgaagctagggatccatttctcatccgtcaaatgcgtgaagagccatcattaacagactgggatcgttttgcacgaagagagtatgtaagattggcgatggaagaagatggtgaagatgcttccaatgctagtggagatgtttgggatgagtcacttgaatctcctttctagattgaaaaatacactgggaagacataccagatattcacatgcagccctaataatcaagtcaaagtcatgaacagttatttgatatattatctttacagaaactatagttgaggcagctgcatgcttgctggcaccatccaaattttgaccggaagcaaagacagataatcccacctagtttgctatggagtccattttgttcttggtgacagtgagaagttttgccacttgatccatgatatgatccagttttgctgctaaactacaacagattgattcatggcagcaacaagagaacagcatcttgtgattattccgaaggcacatccaaagcctagtgacaaataagaagatgagcagggtccttgcagcagatgcaatcatcatatgatggatagtgaatagttggcgtcataattttaattttcatagtgtctcgattaggtgtgtcaaaattttctttctttgttgtactttatttagcttgtagtcacatgaacaatgagctgaaataccatatcacaggtttattgtcattttcgtcacacactgctctatttgaagtgtaatacacaggtgttctgaggattcaaatagaccaatcttgtgcaaatgttagtactgtactatataatagtgataccgaagagtaacatatgagatcaacgcaactccaaaccattgttttgagctgaaaggatgtgtggatggacctccaatcggaagtgcaaaaactgtctctgacagtctaggctataaagcaaatgctacacccagcagcgctgcactaggcaaatcaaccggtacattttgaccagct

SEQ ID NO: 205647 - DNA, 1591 bp, Zea Mays
cctccacattaatccatctctaagtctaatcctccatccgatcatctacgtatttttctaaactttaaaattgtgtgtgttttttctaaacttcgatttattcgattggaactaaaactaaaccaaaagaacataaactaaaaaaatagtttcgtctatcctgaatacatattgcggttctagtttcatggaaactagaaatttcaaaaaaaaaaactgagaaagctaaccaagccgaatgccaggcggtattcgactattcgcggtgccaaaattttgaaaccgctgccagtgtcagtatttcaaaaatgtccatcccgtacggtcagccgacttgcccctttggcctctgtgttcgtacttcgctcggcagaaacctcttgctccagggggcgaacgcgccgccgcctccgacagccccctccagccgcgtcaaatcagcgccctcctctgctgcgccggcggtctcccgccgcaaagacgaagccccgcactcccttatcgcagatccgtgcccgccgccatgacggagtattgggtgagccaaggaaacaaatggtgcgacttctgtaagatttatatagcaaacaattccttcagcatcaggacacatgaacttggtaagcgccacaaggacaatgtcaccaaacgactgtcaacaatgcaaaaagagagtgagacaaaggaaaaggaacagcagcaagctgcacgagccctacagcagatagaagcaaaagctaaaaagagttatcaaaaagatttagagaataaccagaggaatgttgatggagacacttctgcagcacctggagatggatgggtgcttgactcggcgtcaggatattaccatgacaaatctactggactttactacgattcaaactctggcttctattattctgacagtttaggcaagtgggttacccaagaagaggcgtacaagtctgtgcaagcttcgaaatcagacgctggccaatcctcagcttcacaaacaaaagctcctgctgccgcagaaacagctgtccccgcgattaaaggaggtgcagctccaggccgggtggtaacgaaaccgttgaacccaatgagaccgattaagggcactcctgctccgtctgctgttgctgttaacaagaggaagagggatgacggcaagcccaaggcggtctccaaggaggaggaagcggccctcaaagcgcgggaagcagcaaggaagagagtggaggatagagagaagccgctgatgggattatacaagacaaggaatgccggtaatggtgtggcactggatttcagagcttttctgcatcagcaatgtgtgtccacacggtgtaatacctcatcagtggttcttgagtgaatcaagttccaatttgaatcttgtacaaggatatgttcattgttttttttacgcggatggagtgtcgtactcgtaccatatcatatactgcgaaatgaggatgtggtgaccgttctcgagatgttcaatagtgtgtttctgtcctcgacaacggagacagtattgaccagtatctgactgaacaaaagcgcttccggaaaattaattaagaaaagaataaccgtgtccgggctc

SEQ ID NO: 205648 - DNA, 1558 bp, Zea Mays
tcactccaaccaccaaccagaacgcccgacggccgtgccggttccctgcctccgccgcgccgcgtcgccacctcgcgcgcactaatccttgccattgctctgcgtggcaacattcaaatggatacgggaagcgggcccggcctccagtaccttctgtgcctcgcctgggtcgcggccaccctccccatcgccgctgccgcgctgccgatccccagggccgccggcggccgtttcatccatggcctgctctgcgccttttcatcccgcgggaagacagtcaggccttcgtcctcgtcctcgtccaagaggttcaccgttccacaaaaattcttcttccatttttatgtggtcggtgtggttgtgacgactagcttgctacttgcaatatggttctatgcatacatgaaaatgacacctttgattccagaaccatcaagttattactccacaattgctagccatcttgttggtggttcaaattcattctctttgacaaatttctggttgtcacgccccatgaaacacaagtatcatgtctggcgtactgtatttgtactgatattgatggaaattcaggtcctgagacgcctatatgagactgaacatgtcttccactacagcccttcagctcgaatgcacatcataggatatctaacggctactatgtggctgcacctttatcgcttgctagttcttgtcttcctgaaacaatacagtatcttcggtatcaaatagctgagttcattgtgaagggtcgggcaaaaatgccagatctagcaattgtcccatcacatcttttgaagcctcttctaaagctggggtggtgccagtggattggtgctattattttcatctggggctcactccatcagatccactgccatgcaattcttggatcattgcgtgaacacaaagattctgatgaatatgtaattccttgcggcgactggtttagtcgtgtgtcgtgccctcattaccttgctgaactagtaatatatttttggcatgttgatagctagcggtggatcagacatttcggtgtggttcctatacctttttgtgataacaaacttgtcctttgcagcggtacaaacacataaatggtatcttcggaaatttgaagattaccctcgttctcgttacgcaatcattccatttgtatgctagacgtgtccagaaatgccaaaagcatctgttgctgttttcatccgcttgcacaagtccgacatgcaaacagatattcatgtaaatgtgactgtaccaattgaagcgctgcaatgtttaacttaagtagttctgatcattctgaatgtacttataatgttatgtttgtgtatgtagattgtaatagacaattagacagacatttgatgtacaataggattaattaacactttctagcattgaaaataaagtcctccaggactagagactgtactccctccaatctaaattgtaagacattctggcacttttagatacatggttttgctatgcatttagatatacacaatgtttggatctacgtatttagaaaagccacaatttggaacggagt

SEQ ID NO: 205649 - DNA, 2008 bp, Zea Mays
gaaaagagtaacccagttttctctgaagccgagatgtcaaaacagcagaaactggatatatgtcccgcagattgatgaaaggcttggaagatctctcagttttctatgatcagacagttcgaaatgctagcggtggtatagttcaatttttgtatggagatgatggcatggatcctgcaaagatggaaggaaaagatggcatgcccttaaatttggatcaattgtttatgaaagtcatggccacatgtcctcaaaggggatcagatacattatctccagtgggcatcaaacagatgttagaggataagttcttgcagcatgacacctcatctgatggtggctgtagtgcagagttcaagaaaaacttaactgaattccttgataaacgtatagaattaatgaaatgcacaagaagggcactccatctacatgaggatcatgtagaaaagaaagattcttgcctagaagaatctattgctgctattatatctggtatatctgcaaaacaacttcaggttttcttggacacttgcttatctcgttatcagtcaaagaagattgaagcaggagcatctattggagcaattggagctcaaagtattggggagccagggactcagatgacactgaaaacatttcattttgcgggagtagctagcatgaatgttactcttggtgttcctcgaatcaaggaaattatcaatgctgctaaaaagataagcacacctattatcaccgctcagcttttgtcaaggaaagatgtgctttctgcgcgcattgtgaaaggatctatggagaaagcagtgcttggcgaggttgcagcaaccattcagactgtcctgaaatcaagtctgccaaacttggttgtcaaacttgatatgcaacttatagaaactctccacatgggaatatctgctgattctgtgaagctgtcaattttgaatcatccaaagcttaagttaaaatctgagcatgtccgagtcattgatagagccaagttgcgaatatatccagctggaactgacaagctcaaacttcagcttgaactgcataacctcaaatccatccttccaaaagtgattgtgaagggcattccaactgttgaaagggttgttattgatgaagttaaagtcaacaacgcgacagaaagataccaattgttggttgaaggaacaaacctcctggcagtcatgggtaccccaggagttgatgctaggaagacgaaaagtaatcacatcatggaaacgaaccaaacacttggaattgaagctgctaggagatctattattgatgagattcaatacacaatgaaaagtcatggcatgaacattgatcggagacatatgatgctcttggcagatttaatgacatacaagggtgaaattctcggcattactagatacggcattgcaaagatgaaaagcagtgtgctgatgcttgcttcatttgagaaaaccgcagaacatctattcaatgcctcatacagtggtcgtcaggatcagatagagggagttagtgaatgcattatcatgggcattcccatgcagctcggtaccggtattctcaaagtcaggcaaaggctcgaccatgtgcctgaattcaagtaccaaccggacccgatactgtcgtgatacatacatgtggactgaagctggaactctgtacatatatatagctgggtcatacatgcatagcgtagcgtagcctagggcaaccctggcggcttgtcatttctccggtgaacatctaactagtctcgttccatctccatgaggcagactctaggtcaacaactccctcttcggctgcatcggcaaatgcgagagtaaaattgtggcaaacacttgctacatcttctaggcagtggtacatgatcgtgttacatatctctgcaggctaatgaagcctgggaagaatcattgtttttttcttgactagataaatatctgtgttgtaaaggaaaaataataatacaatgagaattaagaattacacgcgtgtttgccaa

SEQ ID NO: 205650 - DNA, 2699 bp, Zea Mays
caacaattggctggaactgctgcctagataacttgtgtaaggatagaggaagtcccaaatagcgacaatgaaaggaagatatttcacaaggcagcagcacatgagtttccaacatgtcctcctcagagcaatggacccagcaagttcctgcacttgcatgcattggcttcctctgtggtgtgggaagctattaactgatgtgcaagatttatagggaaccatggtttttccattggtgtggacgatgtccaaccaggagaacatctaaatcggcaaaagaaaaaggaaatagacggagggtacaaaaaatgccatgatcttatttctttgtttgcgaaaggcgcgctcgcattgcatcctggttgcaacgcagcccaaacgctggagcataacatcactggtgtgttaaatgaaatcagatcaattgctggaaatgtgtgcatggatacgcttcactggaggaacagcccattgattatgtctcagtgtggttccaaaggttctccaatcaatatcagtcagatggttgcatgtgttggacagcaatcagttggagggcgtcgtgccccagatggttttctaaacagaactcttcctcactttcctataaattcaaagacccctgcagctaaaggttttgttgctaattcattctatactggtttgactgctactgagtttttcttccacacaatgggtggacgagaaggtcttgttgacacggcggtcaaaacagcagaaactggatatatgtcccgcagattgatgaaaggcttggaagatctctcagttttctatgatcagacagttcgaaatgctagcggtggtatagttcaatttttgtatggagatgatggcatggatcctgcaaagatggaaggaaaagatggcatgcccttaaatttggatcaattgtttatgaaagtcatggccacatgtcctcaaaggggatcagatacattatctccagtgggcatcaaacagatgttagaggataagttcttgcagcatgacacctcatctgatggtggctgtagtgcagagttcaagaaaaacttaactgaattccttgataaacgtatagaattaatgaaatgcacaagaagggcactccatctacatgaggatcatgtagaaaagaaagattcttgcctagaagaatctattgctgctattatatctggtatatctgcaaaacaacttcaggttttcttggacacttgcttatctcgttatcagtcaaagaagattgaagcaggagcatctattggagcaattggagctcaaagtattggggagccagggactcagatgacactgaaaacatttcattttgcgggagtagctagcatgaatgttactcttggtgttcctcgaatcaaggaaattatcaatgctgctaaaaagataagcacacctattatcaccgctcagcttttgtcaaggaaagatgtgctttctgcgcgcattgtgaaaggatctatggagaaagcagtgcttggcgaggttgcagcaaccattcagactgtcctgaaatcaagtctgccaaacttggttgtcaaacttgatatgcaacttatagaaactctccacatgggaatatctgctgattctgtgaagctgtcaattttgaatcatccaaagcttaagttaaaatctgagcatgtccgagtcattgatagagccaagttgcgaatatatccagctggaactgacaagctcaaacttcagcttgaactgcataacctcaaatccatccttccaaaagtgattgtgaagggcattccaactgttgaaagggttgttattgatgaagttaaagtcaacaacgcgacagaaagataccaattgttggttgaaggaacaaacctcctggcagtcatgggtaccccaggagttgatgctaggaagacgaaaagtaatcacatcatggaaacgaaccaaacacttggaattgaagctgctaggagatctattattgatgagattcaatacacaatgaaaagtcatggcatgaacattgatcggagacatatgatgctcttggcagatttaatgacatacaagggtgaaattctcggcattactagatacggcattgcaaagatgaaaagcagtgtgctgatgcttgcttcatttgagaaaaccgcagaacatctattcaatgcctcatacagtggtcgtcaggatcagatagagggagttagtgaatgcattatcatgggcattcccatgcagctcggtaccggtattctcaaagtcaggcaaaggctcgaccatgtgcctgaattcaagtaccaaccggacccgatactgtcgtgatacatacatgtggactgaagctggaactctgtacatatatatagctgggtcatacatgcatagcgtagcgtagcctagggcaaccctggcggcttgtcatttctccggtgaacatctaactagtctcgttccatctccatgaggcagactctaggtcaacaactccctcttcggctgcatcggcaaatgcgagagtaaaattgtggcaaacacttgctacatcttctaggcagtggtacatgatcgtgttacatatctctgcaggctaatgaagcctgggaagaatcattgtttttttcttgactagataaatatctgtgttgtaaaggaaaaataataatacaatgagaattaagaattacacgcgtgtttgccaa

SEQ ID NO: 205651 - DNA, 3747 bp, Zea Mays
tggaattggaattggtattggtaaagtcgaattccagcgtttggatgttcacggaattcggaactggaaatccatcccaattcccctggattgctggcaataccttcaacttcaagttgttgaatatgtgaatagtgatgccccttctcttcctgagtcacaacatcggggccttgttcaacgactcaaagggaagactggacgatttcgtggcaatttgtccggaaaacgtactgagtacacaggaagaaccgtcatatctcctgatccaaatttgaaaataacagaggtggctattcctgtgttgatggctcgagtcttgacttatcctgaaagggtttcaaactataacattgagaagctgagacaatgtatacgaaatggaccattcaaatatccaggggctaattttgttacacaacctgatggcatgaagcagagcttaaagtatggtgatagaaggattactgctcgggatttaaagtgtggatgtatagttgaaagacatttagaagatggagatgttgtcctctttaatagacagccgagcctgcatagaatgtcaattatgtgtcacagggcaaggataatgccatggagaacactcagatttaatgagtctgtttgcaacccttacaatgctgattttgacggagatgaaatgaatttgcatgtccctcagacagaggaagctcgcactgaagcgcttatgctcatgggggttcagaataatttatgtactcctaagaatggtgagatactggttgcttccacgcaagacttcttgacctcatctttcctagttacaagaaaagatactttctatgatagatcttcctttactcttttgtgctcataccttggtgatggaatggagaacattgatttgccaacaccagccttgattaaacctgttgagctttggactggtaaacaactatttagtgtgttagtccgacctaatgcgcacacaaaggtgtttctgaatcttgctgttcaagaaaaaatttattcaaagaaaaagggaaaaaaagaggggggagaggaggtaaaggaaacaatgtgtggaagggaaacaatgtgtcccaatgatggttatgtttatttccgaaatagtgaactgttatctggacaagtagggaaggccactttaggtaatgggaacaaggatggcctttactctgttcttttaagagattataattctcatgctgcagcaagctgtatgaatcgtttggcaaaatttagtgcaagatttatagggaaccatggtttttccattggtgtggacgatgtccaaccaggagaacatctaaatcggcaaaagaaaaaggaaatagacggagggtacaaaaaatgccatgatcttatttctttgtttgcgaaaggcgcgctcgcattgcatcctggttgcaacgcagcccaaacgctggagcataacatcactggtgtgttaaatgaaatcagatcaattgctggaaatgtgtgcatggatacgcttcactggaggaacagcccattgattatgtctcagtgtggttccaaaggttctccaatcaatatcagtcagatggttgcatgtgttggacagcaatcagttggagggcgtcgtgccccagatggttttctaaacagaactcttcctcactttcctataaattcaaagacccctgcagctaaaggttttgttgctaattcattctatactggtttgactgctactgagtttttcttccacacaatgggtggacgagaaggtcttgttgacacggcggtcaaaacagcagaaactggatatatgtcccgcagattgatgaaaggcttggaagatctctcagttttctatgatcagacagttcgaaatgctagcggtggtatagttcaatttttgtatggagatgatggcatggatcctgcaaagatggaaggaaaagatggcatgcccttaaatttggatcaattgtttatgaaagtcatggccacatgtcctcaaaggggatcagatacattatctccagtgggcatcaaacagatgttagaggataagttcttgcagcatgacacctcatctgatggtggctgtagtgcagagttcaagaaaaacttaactgaattccttgataaacgtatagaattaatgaaatgcacaagaagggcactccatctacatgaggatcatgtagaaaagaaagattcttgcctagaagaatctattgctgctattatatctggtatatctgcaaaacaacttcaggttttcttggacacttgcttatctcgttatcagtcaaagaagattgaagcaggagcatctattggagcaattggagctcaaagtattggggagccagggactcagatgacactgaaaacatttcattttgcgggagtagctagcatgaatgttactcttggtgttcctcgaatcaaggaaattatcaatgctgctaaaaagataagcacacctattatcaccgctcagcttttgtcaaggaaagatgtgctttctgcgcgcattgtgaaaggatctatggagaaagcagtgcttggcgaggttgcagcaaccattcagactgtcctgaaatcaagtctgccaaacttggttgtcaaacttgatatgcaacttatagaaactctccacatgggaatatctgctgattctgtgaagctgtcaattttgaatcatccaaagcttaagttaaaatctgagcatgtccgagtcattgatagagccaagttgcgaatatatccagctggaactgacaagctcaaacttcagcttgaactgcataacctcaaatccatccttccaaaagtgattgtgaagggcattccaactgttgaaagggttgttattgatgaagttaaagtcaacaacgcgacagaaagataccaattgttggttgaaggaacaaacctcctggcagtcatgggtaccccaggagttgatgctaggaagacgaaaagtaatcacatcatggaaacgaaccaaacacttggaattgaagctgctaggagatctattattgatgagattcaatacacaatgaaaagtcatggcatgaacattgatcggagacatatgatgctcttggcagatttaatgacatacaagggtgaaattctcggcattactagatacggcattgcaaagatgaaaagcagtgtgctgatgcttgcttcatttgagaaaaccgcagaacatctattcaatgcctcatacagtggtcgtcaggatcagatagagggagttagtgaatgcattatcatgggcattcccatgcagctcggtaccggtattctcaaagtcaggcaaaggctcgaccatgtgcctgaattcaagtaccaaccggacccgatactgtcgtgatacatacatgtggactgaagctggaactctgtacatatatatagctgggtcatacatgcatagcgtagcgtagcctagggcaaccctggcggcttgtcatttctccggtgaacatctaactagtctcgttccatctccatgaggcagactctaggtcaacaactccctcttcggctgcatcggcaaatgcgagagtaaaattgtggcaaacacttgctacatcttctaggcagtggtacatgatcgtgttacatatctctgcaggctaatgaagcctgggaagaatcattgtttttttcttgactagataaatatctgtgttgtaaaggaaaaataataatacaatgagaattaagaattacacgcgtgtttgccaa

SEQ ID NO: 205652 - DNA, 3998 bp, Zea Mays
cttaagtgaagaaggaccatttgatgtgttctgctactccctgttttagtgctcaataacactaggacaggattgtgaattactaaaccttggtgataggccagagaaacttattgtgacagagattgcagtgccacctgttcctatacggccttctgttgttgttggtaatagtagaacaagcaacgaagacagcattacagttattttgaagagcattgttaatacaaactccatccttaaggagacccttcatactgggggtccattcaccaagtgctttgattgctggcaataccttcaacttcaagttgttgaatatgtgaatagtgatgccccttctcttcctgagtcacaacatcggggccttgttcaacgactcaaagggaagactggacgatttcgtggcaatttgtccggaaaacgtactgagtacacaggaagaaccgtcatatctcctgatccaaatttgaaaataacagaggtggctattcctgtgttgatggctcgagtcttgacttatcctgaaagggtttcaaactataacattgagaagctgagacaatgtatacgaaatggaccattcaaatatccaggggctaattttgttacacaacctgatggcatgaagcagtaagttctaacttgacgaacttctgaattgttatccagctcagcttcttctatcatccttatgccttttcaggagcttaaagtatggtgatagaaggattactgctcgggatttaaagtgtggatgtatagttgaaagacatttagaagatggagatgttgtcctctttaatagacagccgagcctgcatagaatgtcaattatgtgtcacagggcaaggataatgccatggagaacactcagatttaatgagtctgtttgcaacccttacaatgctgattttgacggagatgaaatgaatttgcatgtccctcagacagaggaagctcgcactgaagcgcttatgctcatgggggttcagaataatttatgtactcctaagaatggtgagatactggttgcttccacgcaagacttcttgacctcatctttcctagttacaagaaaagatactttctatgatagatcttcctttactcttttgtgctcataccttggtgatggaatggagaacattgatttgccaacaccagccttgattaaacctgttgagctttggactggtaaacaactatttagtgtgttagtccgacctaatgcgcacacaaaggtgtttctgaatcttgctgttcaagaaaaaatttattcaaagaaaaagggaaaaaaagaggggggagaggaggtaaaggaaacaatgtgtggaagggaaacaatgtgtcccaatgatggttatgtttatttccgaaatagtgaactgttatctggacaagtagggaaggccactttaggtaatgggaacaaggatggcctttactctgttcttttaagagattataattctcatgctgcagcaagctgtatgaatcgtttggcaaaatttagtgcaagatttatagggaaccatggtttttccattggtgtggacgatgtccaaccaggagaacatctaaatcggcaaaagaaaaaggaaatagacggagggtacaaaaaatgccatgatcttatttctttgtttgcgaaaggcgcgctcgcattgcatcctggttgcaacgcagcccaaacgctggagcataacatcactggtgtgttaaatgaaatcagatcaattgctggaaatgtgtgcatggatacgcttcactggaggaacagcccattgattatgtctcagtgtggttccaaaggttctccaatcaatatcagtcagatggttgcatgtgttggacagcaatcagttggagggcgtcgtgccccagatggttttctaaacagaactcttcctcactttcctataaattcaaagacccctgcagctaaaggttttgttgctaattcattctatactggtttgactgctactgagtttttcttccacacaatgggtggacgagaaggtcaaaacagcagaaactggatatatgtcccgcagattgatgaaaggcttggaagatctctcagttttctatgatcagacagttcgaaatgctagcggtggtatagttcaatttttgtatggagatgatggcatggatcctgcaaagatggaaggaaaagatggcatgcccttaaatttggatcaattgtttatgaaagtcatggccacatgtcctcaaaggggatcagatacattatctccagtgggcatcaaacagatgttagaggataagttcttgcagcatgacacctcatctgatggtggctgtagtgcagagttcaagaaaaacttaactgaattccttgataaacgtatagaattaatgaaatgcacaagaagggcactccatctacatgaggatcatgtagaaaagaaagattcttgcctagaagaatctattgctgctattatatctggtatatctgcaaaacaacttcaggttttcttggacacttgcttatctcgttatcagtcaaagaagattgaagcaggagcatctattggagcaattggagctcaaagtattggggagccagggactcagatgacactgaaaacatttcattttgcgggagtagctagcatgaatgttactcttggtgttcctcgaatcaaggaaattatcaatgctgctaaaaagataagcacacctattatcaccgctcagcttttgtcaaggaaagatgtgctttctgcgcgcattgtgaaaggatctatggagaaagcagtgcttggcgaggttgcagcaaccattcagactgtcctgaaatcaagtctgccaaacttggttgtcaaacttgatatgcaacttatagaaactctccacatgggaatatctgctgattctgtgaagctgtcaattttgaatcatccaaagcttaagttaaaatctgagcatgtccgagtcattgatagagccaagttgcgaatatatccagctggaactgacaagctcaaacttcagcttgaactgcataacctcaaatccatccttccaaaagtgattgtgaagggcattccaactgttgaaagggttgttattgatgaagttaaagtcaacaacgcgacagaaagataccaattgttggttgaaggaacaaacctcctggcagtcatgggtaccccaggagttgatgctaggaagacgaaaagtaatcacatcatggaaacgaaccaaacacttggaattgaagctgctaggagatctattattgatgagattcaatacacaatgaaaagtcatggcatgaacattgatcggagacatatgatgctcttggcagatttaatgacatacaagggtgaaattctcggcattactagatacggcattgcaaagatgaaaagcagtgtgctgatgcttgcttcatttgagaaaaccgcagaacatctattcaatgcctcatacagtggtcgtcaggatcagatagagggagttagtgaatgcattatcatgggcattcccatgcagctcggtaccggtattctcaaagtcaggcaaaggctcgaccatgtgcctgaattcaagtaccaaccggacccgatactgtcgtgatacatacatgtggactgaagctggaactctgtacatatatatagctgggtcatacatgcatagcgtagcgtagcctagggcaaccctggcggcttgtcatttctccggtgaacatctaactagtctcgttccatctccatgaggcagactctaggtcaacaactccctcttcggctgcatcggcaaatgcgagagtaaaattgtggcaaacacttgctacatcttctaggcagtggtacatgatcgtgttacatatctctgcaggctaatgaagcctgggaagaatcattgtttttttcttgactagataaatatctgtgttgtaaaggaaaaataataatacaatgagaattaagaattacacgcgtgtttgccaa

SEQ ID NO: 205653 - DNA, 3952 bp, Zea Mays
cttcaagggtcttaagtgaagaaggaccatttgatgtgttctgctactccctgttttagtgctcaataacactaggacaggattgtgaattactaaaccttggtgataggccagagaaacttattgtgacagagattgcagtgccacctgttcctatacggccttctgttgttgttggtaatagtagaacaagcaacgaagacagcattacagttattttgaagagcattgttaatacaaactccatccttaaggagacccttcatactgggggtccattcaccaagtgctttgattgctggcaataccttcaacttcaagttgttgaatatgtgaatagtgatgccccttctcttcctgagtcacaacatcggggccttgttcaacgactcaaagggaagactggacgatttcgtggcaatttgtccggaaaacgtactgagtacacaggaagaaccgtcatatctcctgatccaaatttgaaaataacagaggtggctattcctgtgttgatggctcgagtcttgacttatcctgaaagggtttcaaactataacattgagaagctgagacaatgtatacgaaatggaccattcaaatatccaggggctaattttgttacacaacctgatggcatgaagcagagcttaaagtatggtgatagaaggattactgctcgggatttaaagtgtggatgtatagttgaaagacatttagaagatggagatgttgtcctctttaatagacagccgagcctgcatagaatgtcaattatgtgtcacagggcaaggataatgccatggagaacactcagatttaatgagtctgtttgcaacccttacaatgctgattttgacggagatgaaatgaatttgcatgtccctcagacagaggaagctcgcactgaagcgcttatgctcatgggggttcagaataatttatgtactcctaagaatggtgagatactggttgcttccacgcaagacttcttgacctcatctttcctagttacaagaaaagatactttctatgatagatcttcctttactcttttgtgctcataccttggtgatggaatggagaacattgatttgccaacaccagccttgattaaacctgttgagctttggactggtaaacaactatttagtgtgttagtccgacctaatgcgcacacaaaggtgtttctgaatcttgctgttcaagaaaaaatttattcaaagaaaaagggaaaaaaagaggggggagaggaggtaaaggaaacaatgtgtggaagggaaacaatgtgtcccaatgatggttatgtttatttccgaaatagtgaactgttatctggacaagtagggaaggccactttaggtaatgggaacaaggatggcctttactctgttcttttaagagattataattctcatgctgcagcaagctgtatgaatcgtttggcaaaatttagtgcaagatttatagggaaccatggtttttccattggtgtggacgatgtccaaccaggagaacatctaaatcggcaaaagaaaaaggaaatagacggagggtacaaaaaatgccatgatcttatttctttgtttgcgaaaggcgcgctcgcattgcatcctggttgcaacgcagcccaaacgctggagcataacatcactggtgtgttaaatgaaatcagatcaattgctggaaatgtgtgcatggatacgcttcactggaggaacagcccattgattatgtctcagtgtggttccaaaggttctccaatcaatatcagtcagatggttgcatgtgttggacagcaatcagttggagggcgtcgtgccccagatggttttctaaacagaactcttcctcactttcctataaattcaaagacccctgcagctaaaggttttgttgctaattcattctatactggtttgactgctactgagtttttcttccacacaatgggtggacgagaaggtcttgttgacacggcggtcaaaacagcagaaactggatatatgtcccgcagattgatgaaaggcttggaagatctctcagttttctatgatcagacagttcgaaatgctagcggtggtatagttcaatttttgtatggagatgatggcatggatcctgcaaagatggaaggaaaagatggcatgcccttaaatttggatcaattgtttatgaaagtcatggccacatgtcctcaaaggggatcagatacattatctccagtgggcatcaaacagatgttagaggataagttcttgcagcatgacacctcatctgatggtggctgtagtgcagagttcaagaaaaacttaactgaattccttgataaacgtatagaattaatgaaatgcacaagaagggcactccatctacatgaggatcatgtagaaaagaaagattcttgcctagaagaatctattgctgctattatatctggtatatctgcaaaacaacttcaggttttcttggacacttgcttatctcgttatcagtcaaagaagattgaagcaggagcatctattggagcaattggagctcaaagtattggggagccagggactcagatgacactgaaaacatttcattttgcgggagtagctagcatgaatgttactcttggtgttcctcgaatcaaggaaattatcaatgctgctaaaaagataagcacacctattatcaccgctcagcttttgtcaaggaaagatgtgctttctgcgcgcattgtgaaaggatctatggagaaagcagtgcttggcgaggttgcagcaaccattcagactgtcctgaaatcaagtctgccaaacttggttgtcaaacttgatatgcaacttatagaaactctccacatgggaatatctgctgattctgtgaagctgtcaattttgaatcatccaaagcttaagttaaaatctgagcatgtccgagtcattgatagagccaagttgcgaatatatccagctggaactgacaagctcaaacttcagcttgaactgcataacctcaaatccatccttccaaaagtgattgtgaagggcattccaactgttgaaagggttgttattgatgaagttaaagtcaacaacgcgacagaaagataccaattgttggttgaaggaacaaacctcctggcagtcatgggtaccccaggagttgatgctaggaagacgaaaagtaatcacatcatggaaacgaaccaaacacttggaattgaagctgctaggagatctattattgatgagattcaatacacaatgaaaagtcatggcatgaacattgatcggagacatatgatgctcttggcagatttaatgacatacaagggtgaaattctcggcattactagatacggcattgcaaagatgaaaagcagtgtgctgatgcttgcttcatttgagaaaaccgcagaacatctattcaatgcctcatacagtggtcgtcaggatcagatagagggagttagtgaatgcattatcatgggcattcccatgcagctcggtaccggtattctcaaagtcaggcaaaggctcgaccatgtgcctgaattcaagtaccaaccggacccgatactgtcgtgatacatacatgtggactgaagctggaactctgtacatatatatagctgggtcatacatgcatagcgtagcgtagcctagggcaaccctggcggcttgtcatttctccggtgaacatctaactagtctcgttccatctccatgaggcagactctaggtcaacaactccctcttcggctgcatcggcaaatgcgagagtaaaattgtggcaaacacttgctacatcttctaggcagtggtacatgatcgtgttacatatctctgcaggctaatgaagcctgggaagaatcattgtttttttcttgactagataaatatctgtgttgtaaaggaaaaataataatacaatgagaattaagaattacacgcgtgtttgccaa

SEQ ID NO: 205654 - DNA, 4697 bp, Zea Mays
gtaaaagtgatctaggtctcccgcgccgccgccgccgccgcctaagctgcttccacctccgctttctgtgcagaggactcctcgccggagaatagccggcggcggctcgagacgaaactacggtgctcgtctcccgccgcccgccgcccttcactccccagcatacctagtccctactctaatccgtacagagcaacgcatcaagtgatggcgaagccggaggagaagctgcgctgcaccaaggaacccttcatcgaggacgtcggcacccggaggataaagagcatccggttcagcgtgctctcgggcagcgagattcgcaagtcagcggaggtacaggtctggaacaaccggatctatgaccgcgacatgacgccggttcccaatgggttgctcgacccgcgaatgggaatcccgactaagagaggcaaatgcaatacctgccatggtgaatttagtgactgtccaggtcatttcggctacttgaagctcgcgcttccagtttttaacgtgggcttctttaactgtattctggacgtgttgaagtgcatctgcaagagctgtagtagagttcttcttatcgagaaagaccgcagggagtttctaaagaagatgagaaatcccagggcagatgcactacagaaaagtgctacaatgaaaaaagtgagggacaaatgcaaactatcctgctgcccccgttgtgattacagaaatggtgtagttaaaaaaggcagagcgggcttgatagtagttcatgattgtagcaaagttttggatggacatacagaagaattgaagaatgcactacaaaataagaaagaaaaggattgtgaattactaaaccttggtgataggccagagaaacttattgtgacagagattgcagtgccacctgttcctatacggccttctgttgttgttggtaatagtagaacaagcaacgaagacagcattacagttattttgaagagcattgttaatacaaactccatccttaaggagacccttcatactgggggtccattcaccaagtgctttgattgctggcaataccttcaacttcaagttgttgaatatgtgaatagtgatgccccttctcttcctgagtcacaacatcggggccttgttcaacgactcaaagggaagactggacgatttcgtggcaatttgtccggaaaacgtactgagtacacaggaagaaccgtcatatctcctgatccaaatttgaaaataacagaggtggctattcctgtgttgatggctcgagtcttgacttatcctgaaagggtttcaaactataacattgagaagctgagacaatgtatacgaaatggaccattcaaatatccaggggctaattttgttacacaacctgatggcatgaagcagagcttaaagtatggtgatagaaggattactgctcgggatttaaagtgtggatgtatagttgaaagacatttagaagatggagatgttgtcctctttaatagacagccgagcctgcatagaatgtcaattatgtgtcacagggcaaggataatgccatggagaacactcagatttaatgagtctgtttgcaacccttacaatgctgattttgacggagatgaaatgaatttgcatgtccctcagacagaggaagctcgcactgaagcgcttatgctcatgggggttcagaataatttatgtactcctaagaatggtgagatactggttgcttccacgcaagacttcttgacctcatctttcctagttacaagaaaagatactttctatgatagatcttcctttactcttttgtgctcataccttggtgatggaatggagaacattgatttgccaacaccagccttgattaaacctgttgagctttggactggtaaacaactatttagtgtgttagtccgacctaatgcgcacacaaaggtgtttctgaatcttgctgttcaagaaaaaatttattcaaagaaaaagggaaaaaaagaggggggagaggaggtaaaggaaacaatgtgtggaagggaaacaatgtgtcccaatgatggttatgtttatttccgaaatagtgaactgttatctggacaagtagggaaggccactttaggtaatgggaacaaggatggcctttactctgttcttttaagagattataattctcatgctgcagcaagctgtatgaatcgtttggcaaaatttagtgcaagatttatagggaaccatggtttttccattggtgtggacgatgtccaaccaggagaacatctaaatcggcaaaagaaaaaggaaatagacggagggtacaaaaaatgccatgatcttatttctttgtttgcgaaaggcgcgctcgcattgcatcctggttgcaacgcagcccaaacgctggagcataacatcactggtgtgttaaatgaaatcagatcaattgctggaaatgtgtgcatggatacgcttcactggaggaacagcccattgattatgtctcagtgtggttccaaaggttctccaatcaatatcagtcagatggttgcatgtgttggacagcaatcagttggagggcgtcgtgccccagatggttttctaaacagaactcttcctcactttcctataaattcaaagacccctgcagctaaaggttttgttgctaattcattctatactggtttgactgctactgagtttttcttccacacaatgggtggacgagaaggtcttgttgacacggcggtcaaaacagcagaaactggatatatgtcccgcagattgatgaaaggcttggaagatctctcagttttctatgatcagacagttcgaaatgctagcggtggtatagttcaatttttgtatggagatgatggcatggatcctgcaaagatggaaggaaaagatggcatgcccttaaatttggatcaattgtttatgaaagtcatggccacatgtcctcaaaggggatcagatacattatctccagtgggcatcaaacagatgttagaggataagttcttgcagcatgacacctcatctgatggtggctgtagtgcagagttcaagaaaaacttaactgaattccttgataaacgtatagaattaatgaaatgcacaagaagggcactccatctacatgaggatcatgtagaaaagaaagattcttgcctagaagaatctattgctgctattatatctggtatatctgcaaaacaacttcaggttttcttggacacttgcttatctcgttatcagtcaaagaagattgaagcaggagcatctattggagcaattggagctcaaagtattggggagccagggactcagatgacactgaaaacatttcattttgcgggagtagctagcatgaatgttactcttggtgttcctcgaatcaaggaaattatcaatgctgctaaaaagataagcacacctattatcaccgctcagcttttgtcaaggaaagatgtgctttctgcgcgcattgtgaaaggatctatggagaaagcagtgcttggcgaggttgcagcaaccattcagactgtcctgaaatcaagtctgccaaacttggttgtcaaacttgatatgcaacttatagaaactctccacatgggaatatctgctgattctgtgaagctgtcaattttgaatcatccaaagcttaagttaaaatctgagcatgtccgagtcattgatagagccaagttgcgaatatatccagctggaactgacaagctcaaacttcagcttgaactgcataacctcaaatccatccttccaaaagtgattgtgaagggcattccaactgttgaaagggttgttattgatgaagttaaagtcaacaacgcgacagaaagataccaattgttggttgaaggaacaaacctcctggcagtcatgggtaccccaggagttgatgctaggaagacgaaaagtaatcacatcatggaaacgaaccaaacacttggaattgaagctgctaggagatctattattgatgagattcaatacacaatgaaaagtcatggcatgaacattgatcggagacatatgatgctcttggcagatttaatgacatacaagggtgaaattctcggcattactagatacggcattgcaaagatgaaaagcagtgtgctgatgcttgcttcatttgagaaaaccgcagaacatctattcaatgcctcatacagtggtcgtcaggatcagatagagggagttagtgaatgcattatcatgggcattcccatgcagctcggtaccggtattctcaaagtcaggcaaaggctcgaccatgtgcctgaattcaagtaccaaccggacccgatactgtcgtgatacatacatgtggactgaagctggaactctgtacatatatatagctgggtcatacatgcatagcgtagcgtagcctagggcaaccctggcggcttgtcatttctccggtgaacatctaactagtctcgttccatctccatgaggcagactctaggtcaacaactccctcttcggctgcatcggcaaatgcgagagtaaaattgtggcaaacacttgctacatcttctaggcagtggtacatgatcgtgttacatatctctgcaggctaatgaagcctgggaagaatcattgtttttttcttgactagataaatatctgtgttgtaaaggaaaaataataatacaatgagaattaagaattacacgcgtgtttgccaa

SEQ ID NO: 205655 - DNA, 4591 bp, Zea Mays
gtaaaagtgatctaggtctcccgcgccgccgccgccgccgcctaagctgcttccacctccgctttctgtgcagaggactcctcgccggagaatagccggcggcggctcgagacgaaactacggtgctcgtctcccgccgcccgccgcccttcactccccagcatacctagtccctactctaatccgtacagagcaacgcatcaagtgatggcgaagccggaggagaagctgcgctgcaccaaggaacccttcatcgaggacgtcggcacccggaggataaagagcatccggttcagcgtgctctcgggcagcgagattcgcaagtcagcggaggtacaggtctggaacaaccggatctatgaccgcgacatgacgccggttcccaatgggttgctcgacccgcgaatgggaatcccgactaagagaggcaaatgcaatacctgccatggtgaatttagtgactgtccaggtcatttcggctacttgaagctcgcgcttccagtttttaacgtgggcttctttaactgtattctggacgtgttgaagtgcatctgcaagagctgtagtagagttcttcttatcgagaaagaccgcagggagtttctaaagaagatgagaaatcccagggcagatgcactacagaaaagtgctacaatgaaaaaagtgagggacaaatgcaaactatcctgctgcccccgttgtgattacagaaatggtgtagttaaaaaaggcagagcgggcttgatagtagttcatgattgtagcaaagttttggatggacatacagaagaattgaagaatgcactacaaaataagaaagaaaaggtgtctgctagttcagttctagtgttagaccctgcaactgttctatctctattcagaagaatgattgatgaggattgtgaattactaaaccttggtgataggccagagaaacttattgtgacagagattgcagtgccacctgttcctatacggccttctgttgttgttggtaatagtagaacaagcaacgaagacagcattacagttattttgaagagcattgttaatacaaactccatccttaaggagacccttcatactgggggtccattcaccaagtgctttgattgctggcaataccttcaacttcaagttgttgaatatgtgaatagtgatgccccttctcttcctgagtcacaacatcggggccttgttcaacgactcaaagggaagactggacgatttcgtggcaatttgtccggaaaacgtactgagtacacaggaagaaccgtcatatctcctgatccaaatttgaaaataacagaggtggctattcctgtgttgatggctcgagtcttgacttatcctgaaagggtttcaaactataacattgagaagctgagacaatgtatacgaaatggaccattcaaatatccaggggctaattttgttacacaacctgatggcatgaagcagagcttaaagtatggtgatagaaggattactgctcgggatttaaagtgtggatgtatagttgaaagacatttagaagatggagatgttgtcctctttaatagacagccgagcctgcatagaatgtcaattatgtgtcacagggcaaggataatgccatggagaacactcagatttaatgagtctgtttgcaacccttacaatgctgattttgacggagatgaaatgaatttgcatgtccctcagacagaggaagctcgcactgaagcgcttatgctcatgggggttcagaataatttatgtactcctaagaatggtgagatactggttgcttccacgcaagacttcttgacctcatctttcctagttacaagaaaagatactttctatgatagatcttcctttactcttttgtgctcataccttggtgatggaatggagaacattgatttgccaacaccagccttgattaaacctgttgagctttggactggtaaacaactatttagtgtgttagtccgacctaatgcgcacacaaaggtaatgggaacaaggatggcctttactctgttcttttaagagattataattctcatgctgcagcaagctgtatgaatcgtttggcaaaatttagtgcaagatttatagggaaccatggtttttccattggtgtggacgatgtccaaccaggagaacatctaaatcggcaaaagaaaaaggaaatagacggagggtacaaaaaatgccatgatcttatttctttgtttgcgaaaggcgcgctcgcattgcatcctggttgcaacgcagcccaaacgctggagcataacatcactggtgtgttaaatgaaatcagatcaattgctggaaatgtgtgcatggatacgcttcactggaggaacagcccattgattatgtctcagtgtggttccaaaggttctccaatcaatatcagtcagatggttgcatgtgttggacagcaatcagttggagggcgtcgtgccccagatggttttctaaacagaactcttcctcactttcctataaattcaaagacccctgcagctaaaggttttgttgctaattcattctatactggtttgactgctactgagtttttcttccacacaatgggtggacgagaaggtcttgttgacacggcggtcaaaacagcagaaactggatatatgtcccgcagattgatgaaaggcttggaagatctctcagttttctatgatcagacagttcgaaatgctagcggtggtatagttcaatttttgtatggagatgatggcatggatcctgcaaagatggaaggaaaagatggcatgcccttaaatttggatcaattgtttatgaaagtcatggccacatgtcctcaaaggggatcagatacattatctccagtgggcatcaaacagatgttagaggataagttcttgcagcatgacacctcatctgatggtggctgtagtgcagagttcaagaaaaacttaactgaattccttgataaacgtatagaattaatgaaatgcacaagaagggcactccatctacatgaggatcatgtagaaaagaaagattcttgcctagaagaatctattgctgctattatatctggtatatctgcaaaacaacttcaggttttcttggacacttgcttatctcgttatcagtcaaagaagattgaagcaggagcatctattggagcaattggagctcaaagtattggggagccagggactcagatgacactgaaaacatttcattttgcgggagtagctagcatgaatgttactcttggtgttcctcgaatcaaggaaattatcaatgctgctaaaaagataagcacacctattatcaccgctcagcttttgtcaaggaaagatgtgctttctgcgcgcattgtgaaaggatctatggagaaagcagtgcttggcgaggttgcagcaaccattcagactgtcctgaaatcaagtctgccaaacttggttgtcaaacttgatatgcaacttatagaaactctccacatgggaatatctgctgattctgtgaagctgtcaattttgaatcatccaaagcttaagttaaaatctgagcatgtccgagtcattgatagagccaagttgcgaatatatccagctggaactgacaagctcaaacttcagcttgaactgcataacctcaaatccatccttccaaaagtgattgtgaagggcattccaactgttgaaagggttgttattgatgaagttaaagtcaacaacgcgacagaaagataccaattgttggttgaaggaacaaacctcctggcagtcatgggtaccccaggagttgatgctaggaagacgaaaagtaatcacatcatggaaacgaaccaaacacttggaattgaagctgctaggagatctattattgatgagattcaatacacaatgaaaagtcatggcatgaacattgatcggagacatatgatgctcttggcagatttaatgacatacaagggtgaaattctcggcattactagatacggcattgcaaagatgaaaagcagtgtgctgatgcttgcttcatttgagaaaaccgcagaacatctattcaatgcctcatacagtggtcgtcaggatcagatagagggagttagtgaatgcattatcatgggcattcccatgcagctcggtaccggtattctcaaagtcaggcaaaggctcgaccatgtgcctgaattcaagtaccaaccggacccgatactgtcgtgatacatacatgtggactgaagctggaactctgtacatatatatagctgggtcatacatgcatagcgtagcgtagcctagggcaaccctggcggcttgtcatttctccggtgaacatctaactagtctcgttccatctccatgaggcagactctaggtcaacaactccctcttcggctgcatcggcaaatgcgagagtaaaattgtggcaaacacttgctacatcttctaggcagtggtacatgatcgtgttacatatctctgcaggctaatgaagcctgggaagaatcattgtttttttcttgactagataaatatctgtgttgtaaaggaaaaataataatacaatgagaattaagaattacacgcgtgtttgccaa

SEQ ID NO: 205656 - DNA, 2767 bp, Zea Mays
atgaatgcaggaggagtactcggcaccaacctcctgtcctgggctgggcccctcgctagcgcttacactattctgcggtcagaccagagaagagaaggccgcatctaccaccgccagtcgcgacccccgtggttccatccatccgcgggcccgcgcggcatctaccaccggcgcggaccgaggacttggacttgcgctcgccttgcatttgcacgtgacgtgaacgcgacgtcgctcgctcgaccactgcaccaccgtggctgctcggtcgagagtgtatacaactgctctccatttggaggcagcagattgaatgatcatttcatcctcgcagtcgcagacatacattgtcccgttctctcgcggcgggcgcctgacgatctcgtcctccgcgtccgccctcctcgttgcccacgcacgcctgaaggcgacggcggcgctggctgcgcggaggaagcccgagcggacattccgtttgctcgcaggccggattgcaaggccccctctcccaaattgcaaggatagtcaggaagctaattaacagtgttcgaaagatggtccaccgcgagccggccgaggcggcggcggcggcagcagcaggaggcgagaccagcatctctacgcagcctccctcatcatcccagcaggctgcgccaccaccggccgtgttagtgtacaaggtcgggtatcctccccggaggagcctggccacggagttcaccagcacgctgagggagaccttcttccacgacagcccgctgaagcagtgcaaggaccagtccgtgtccacgaagctccagatgggcctgcagctcttgttcccggtcttgggttggggcaggacctacagcctgagcatgttcaagggcgatctcgttgccgggctgacaattgcgagcctctgcattccccaggggaaaaggaacaagaagtatttctgggtgcctgctatcgctcctgtaacttcggttattcttgccacccttttcgtgtacctctttcgcgctgacaagcaaggtgttcagattgtgaacaagatcaaaaagggcgtcaacccgtcatctgtgcacaagatctacttcaccggtccattcgtcgcgaaagggttcaagatcggcgctgtttgcggcatgatcggcttaacagaagccgttgccatcggaaggacgttcgccgccatgaaggactaccagctagatgggaacaaggagatggtagcacttgggacgatgaacatcgtaggctcaatgacgtcttgctacatcgcaacaggttttccacagtgaactgaaacacagtgaactgatgaagagcgtatataaatttgctagctgcgactgcgactcttttcaggctctttctctcgctcggcggtcaacttcatggccgggtgccggacgccagtgtccaacgtggtcatgtccacggttgtgctcctcaccttgctgctcatcacgccgctgttcaagtacaccccgaacgcgatcctgggctcgatcatcatctctgccgtcatcggcctcgtcgactacgaggcggcgatcctcatctggaaagtcgacaagatggacttcgtcgcctgcatgggggccttcttcggcgtggttttcaagtctgtcgagataggcctcttgattgctgtgtcaatctcgtttgccaaaatacttgtccaagtaacaagacccaggactgtgctgctgggaaaccttccaggcaccacgatctacaggaacacggagcagtatccgcatgcgaggcatgttcctggggtggtcatagtcagggtggattctgccatttacttctccaactccaactatgtccgagagcggtagagacacatccatccaaaccgtgcgttattgtcgtcgtcctcacaaactcttgtgtgctgtgctgtgctgtgtgtgctccatttcagaatccttaggtggttgacggacgaagaagatagagtcagcgcagaggggctgcctagaatcagtttcttggtagtagagatgtcacctgttatagatatcgatacgagtggtatccatgcccttgaagacctgtacaagaatctccaaaagcgaggcattcagcttctcttatcaaaccctggctctgccgtgattgaaaagctccagtcgtccaaactcaccgagcacatcggaaatggtcatatcttcctcacggtcgcagacgccgtgcgtttctgcacttccaagtcgatgcaggagccttgaactgaaatggatttgtttgcgtccacattctgttctctaatctctactgtatacgttatgtatcatgtattcatgtaatcagaataatatacatatgcaagtttacgaatgacaggaatagtttcgaatgctgtgctcacagttgcttaacgcaaaagctagtgtgcgatagtattccaaatgaacattattatttacagacaagaggataggatcaatcttgaacgtataactataatttgatcaatgtagaaaccgaaggaaacatataaaacaaaactgaattcgacttgtgtggtcagccagacaggcattcccttaagtgttcagtcgctcttactccaaccagtccattttacaagccgtagtcttgacaatgacgaggtcttacatgttttactttagactattctagcaggcttcctatttcactctgtatttcaaactttactctgcaaacaatgtaattgttggaggccttcggcttccaaaggtactcaaaaatatgatttaacaatgtttctggagtatgatacatg

SEQ ID NO: 205657 - DNA, 957 bp, Zea Mays
attccccaggaacacggagcagtatccgcatgcgaggcatgttcctggggtggtcatagtcagggtggattctgccatttacttctccaactccaactatgtccgagagcgaatccttaggtggttgacggacgaagaagatagagtcagcgcagaggggctgcctagaatcagtttcttggtagtagagatgtcacctgttatagatatcgatacgagtggtatccatgcccttgaagacctgtacaagaatctccaaaagcgaggcattcagcttctcttatcaaaccctggctctgccgtgattgaaaagctccagtcgtccaaactcaccgagcacatcggaaatggtcatatcttcctcacggtcgcagacgccgtgcgtttctgcacttccaagtcgatgcaggagccttgaactgaaatggatttgtttgcgtccacattctgttctctaatctctactgtatacgttatgtatcatgtattcatgtaatcagaataatatacatatgcaagtttacgaatgacaggaatagtttcgaatgctgtgctcacagttgcttaacgcaaaagctagtgtgcgatagtattccaaatgaacattattatttacagacaagaggataggatcaatcttgaacgtataactataatttgatcaatgtagaaaccgaaggaaacatataaaacaaaactgaattcgacttgtgtggtcagccagacaggcattcccttaagtgttcagtcgctcttactccaaccagtccattttacaagccgtagtcttgacaatgacgaggtcttacatgttttactttagactattctagcaggcttcctatttcactctgtatttcaaactttactctgcaaacaatgtaattgttggaggccttcggcttccaaaggtactcaaaaatatgatttaacaatgtttctggagtatgatacatg

SEQ ID NO: 205658 - DNA, 3424 bp, Zea Mays
aaataccattccacccaaacccacttctttcgtccttccagaatccagacccgaaatcagatcaccataattcttcgaagccgcaagcccgaaaggaaccccaagaatcgccgagagatccgaagcgaggtggagagatcgagatggcggacgtggggagcctcgagaggatgggccgggagctcaagtgccccatctgcttgagcctgctcacttcggcggtgtccatcacctgcaatcacatcttctgcaacgcctgcctgacggagtctaagaaatctgcctcctgctgccccgtgtgcaaggttccattccaccggagagaaatacggccagcgcctcacatggataatttggtggccgttttcaaaagtatggaagctgcagcagagtgtagtgagtacactgctggaaagcctagaaggtcgaataaaaagaagctagcatccaagaaagaaaagaatacagtcaaagctactgcaaattctgcatcttgttctactgcaaagccttcaatctccaagaacaaaagaatacacgtgacaccattccctgaatctgagacgccgataaggcccaagaagattatgaagtctgacgagcaaaaacgtaaagaggataaagataacacactgaattctgatataccagataacccttcattgtcaccttttttctggctgaaggaacaagaagaaaacgtaggtggcactgctgaaactttgagtgaaccactatcattggacacagccttgtgtcacaatgtgcctaccttcagtgatatcaaagattctgatgatgaaatgcctaatgatatgactcctaatagcaaagttgaggtttcagaattattcgacagtgaaatctttgaatggagccaaagaccttgctcccccgagctgcgttctaccccactgaaaaaacagggtcaatcgaagaatactctagatcaaatcacagaggtggatgatggaggatatatgaatcttggtgatttatttgataagttagaccatgaaagtaatgtaactcaacctgccaatgctgaagaagctaagaagagaaagttggcaagagctaggaacagaaaaaactcaaaactgcccagtcgtgttaaactatgtacaaaaggatctgatgctgagcaccaagttaaaaatatccctgtaagtattgctgcaaagccaaaccagaaggacatcaataaaaaaaagagatgtactttgaatggaggaaacaaggtctctggcaacaacactaaagttgtcttctctagtgataaatatatgtatacattttcccctcaatcaggcgggttggacattgaagcacctgagaaccagccttcagaaaggatcctcaaaaagcctaaaaacagtcgaagcaaacttcacatagcaggggatagtgcagtgaagaccgcaaagaataaatctgaacaaagagtaaagcaaaccataagatgttctgggggtgttgtagatgaaaatctaagagttctttctgaggctgaaaatgaaatagaatcgtttcagcttcacagactcgcaaaaggttgcacccaacataaacccttcgatgatagaagtaaacaaaacatggaatcaaacattggtccaaatacaccaagcattttacctgggaggtgccaatttgatgaggccatacacacaattcctacagtgaagaatgtctctgttaagaacggtagggcaaaatcaattgaacaaccagattacccaggatctatcagattatgcactgcacacaatactgccctgaagaaatgtgagggtaaagcttctaagctttcctgtgctttctgccagtctgatgataccacacaggaatctggagagatggttcactaccataatggaaagcaagtgccagcagcatttgatgcaggggctggtgtagtacattgccacaaaaactgcctggagtgggctcctgatgtctactttgaagatgactctgtctttaatcttgcaaatgagttggctagaagtaaaagaatcaaatgtgcttgctgtggaattaaaggtgctgcacttggatgctttgagacgagttgccgaaaaagcttccatctcacctgtgctagattaatcccagagtgcagatgggataatgaaaactttgtgatgctatgccctttgcaccaatcttcaaagttgcccagagaaacttctgggtttaaaaataagtcgcacaggaaactagcacgaaaaagttcatctgaagtaaacactagtcaaagccatgataataagtggacatggccatctggatcaccaccgaaatgggttctatgctgttcagccctttctgccgcagaaaagggtatcgtatcagaactcgcaaaaatagctggtgtgccaatctcaacaagttggagtcctaatgttacccatgttattgcatcaaccaacatgtctggttcttgcaagcgcacactgaagtttctgatggcaatcttgaatggcaaatgggttatctccatggactgggttaaaacttgcatggaacttatggaacctgctgatgaaatgaaatttgaagtttccactgatgtacatgggactgctgacggtcccaggttaggtagacaacgagttatcaacaagcaacctaaattattcgatggcattcaattctatctccatggagactataccaagtcgtacagaggctacctgcaagaccttgtggttgcagccggtggaactgtcttgcagaggaagcccgtgtcaagaaaccatcagaagttgcttgacgagagctccctcatcctcatcgtatacagcatcgagaatcaggacaaggcaaaaccaggatcaagcgatggcatggatactggtcgtagccaagctgatgctcaggctctggcctgtgcctctggtggcaaagctgtgagcagcgcatggatcatcgactctatagcggcttgcaaccttcgaccttccatgctaccctagatgtgtacttgcattgcatgcacggtaggtttgactaatggacagaaaaatagtgtaaggccctgtttcaaatctctagagctagtttttagctaataagttatcaattgtgttaagacaactaacaactatctgagaggtatcccgttctaaaactctcaagtaactttagcgacttactatcagttttagagcttttgaacatagactaagtagtagaacgagacttaagtttcttgatgtataaacactatattttaccatgcaatagttaatgctatgtttttaattaaagcaccggcaccgctggaatgtcggagtttgtaacaggtttttatacataaagtggctgccgacgaattcaaccgcttatccgttggttcctgcagtaagtgtttgtaagttgctacgtttttatttatactaaagtgtagaatataaaa

SEQ ID NO: 205659 - DNA, 3473 bp, Zea Mays
aaataccattccacccaaacccacttctttcgtccttccagaatccagacccgaaatcagatcaccataattcttcgaagccgcaagcccgaaaggaaccccaagaatcgccgagagatccgaagcgaggtggagagatcgagatggcggacgtggggagcctcgagaggatgggccgggagctcaagtgccccatctggcttgagcctgctcacttcggcggtgtccatcacctgcaatcacatcttctgcaacgcctgcctgacggagtctaagaaatctgcctcctgctgccccgtgtgcaaggttccattccaccggagagaaatacggccagcgcctcacatggataatttggtggccgttttcaaaagtatggaagctgcagcaggtattagtgtcgtgtcaacacagctgactcctgcacccaaagctgcagagtgtagtgagtacactgctggaaagcctagaaggtcgaataaaaagaagctagcatccaagaaagaaaagaatacagtcaaagctactgcaaattctgcatcttgttctactgcaaagccttcaatctccaagaacaaaagaatacacgtgacaccattccctgaatctgagacgccgataaggcccaagaagattatgaagtctgacgagcaaaaacgtaaagaggataaagataacacactgaattctgatataccagataacccttcattgtcaccttttttctggctgaaggaacaagaagaaaacgtaggtggcactgctgaaactttgagtgaaccactatcattggacacagccttgtgtcacaatgtgcctaccttcagtgatatcaaagattctgatgatgaaatgcctaatgatatgactcctaatagcaaagttgaggtttcagaattattcgacagtgaaatctttgaatggagccaaagaccttgctcccccgagctgcgttctaccccactgaaaaaacagggtcaatcgaagaatactctagatcaaatcacagaggtggatgatggaggatatatgaatcttggtgatttatttgataagttagaccatgaaagtaatgtaactcaacctgccaatgctgaagaagctaagaagagaaagttggcaagagctaggaacagaaaaaactcaaaactgcccagtcgtgttaaactatgtacaaaaggatctgatgctgagcaccaagttaaaaatatccctgtaagtattgctgcaaagccaaaccagaaggacatcaataaaaaaaagagatgtactttgaatggaggaaacaaggtctctggcaacaacactaaagttgtcttctctagtgataaatatatgtatacattttcccctcaatcaggcgggttggacattgaagcacctgagaaccagccttcagaaaggatcctcaaaaagcctaaaaacagtcgaagcaaacttcacatagcaggggatagtgcagtgaagaccgcaaagaataaatctgaacaaagagtaaagcaaaccataagatgttctgggggtgttgtagatgaaaatctaagagttctttctgaggctgaaaatgaaatagaatcgtttcagcttcacagactcgcaaaaggttgcacccaacataaacccttcgatgatagaagtaaacaaaacatggaatcaaacattggtccaaatacaccaagcattttacctgggaggtgccaatttgatgaggccatacacacaattcctacagtgaagaatgtctctgttaagaacggtagggcaaaatcaattgaacaaccagattacccaggatctatcagattatgcactgcacacaatactgccctgaagaaatgtgagggtaaagcttctaagctttcctgtgctttctgccagtctgatgataccacacaggaatctggagagatggttcactaccataatggaaagcaagtgccagcagcatttgatgcaggggctggtgtagtacattgccacaaaaactgcctggagtgggctcctgatgtctactttgaagatgactctgtctttaatcttgcaaatgagttggctagaagtaaaagaatcaaatgtgcttgctgtggaattaaaggtgctgcacttggatgctttgagacgagttgccgaaaaagcttccatctcacctgtgctagattaatcccagagtgcagatgggataatgaaaactttgtgatgctatgccctttgcaccaatcttcaaagttgcccagagaaacttctgggtttaaaaataagtcgcacaggaaactagcacgaaaaagttcatctgaagtaaacactagtcaaagccatgataataagtggacatggccatctggatcaccaccgaaatgggttctatgctgttcagccctttctgccgcagaaaagggtatcgtatcagaactcgcaaaaatagctggtgtgccaatctcaacaagttggagtcctaatgttacccatgttattgcatcaaccaacatgtctggttcttgcaagcgcacactgaagtttctgatggcaatcttgaatggcaaatgggttatctccatggactgggttaaaacttgcatggaacttatggaacctgctgatgaaatgaaatttgaagtttccactgatgtacatgggactgctgacggtcccaggttaggtagacaacgagttatcaacaagcaacctaaattattcgatggcattcaattctatctccatggagactataccaagtcgtacagaggctacctgcaagaccttgtggttgcagccggtggaactgtcttgcagaggaagcccgtgtcaagaaaccatcagaagttgcttgacgagagctccctcatcctcatcgtatacagcatcgagaatcaggacaaggcaaaaccaggatcaagcgatggcatggatactggtcgtagccaagctgatgctcaggctctggcctgtgcctctggtggcaaagctgtgagcagcgcatggatcatcgactctatagcggcttgcaaccttcgaccttccatgctaccctagatgtgtacttgcattgcatgcacggtaggtttgactaatggacagaaaaatagtgtaaggccctgtttcaaatctctagagctagtttttagctaataagttatcaattgtgttaagacaactaacaactatctgagaggtatcccgttctaaaactctcaagtaactttagcgacttactatcagttttagagcttttgaacatagactaagtagtagaacgagacttaagtttcttgatgtataaacactatattttaccatgcaatagttaatgctatgtttttaattaaagcaccggcaccgctggaatgtcggagtttgtaacaggtttttatacataaagtggctgccgacgaattcaaccgcttatccgttggttcctgcagtaagtgtttgtaagttgctacgtttttatttatactaaagtgtagaatataaaa

SEQ ID NO: 205660 - DNA, 3473 bp, Zea Mays
aaataccattccacccaaacccacttctttcgtccttccagaatccagacccgaaatcagatcaccataattcttcgaagccgcaagcccgaaaggaaccccaagaatcgccgagagatccgaagcgaggtggagagatcgagatggcggacgtggggagcctcgagaggatgggccgggagctcaagtgccccatctgcttgagcctgctcacttcggcggtgtccatcacctgcaatcacatcttctgcaacgcctgcctgacggagtctaagaaatctgcctcctgctgccccgtgtgcaaggttccattccaccggagagaaatacggccagcgcctcacatggataatttggtggccgttttcaaaagtatggaagctgcagcaggtattagtgtcgtgtcaacacagctgactcctgcacccaaagctgcagagtgtagtgagtacactgctggaaagcctagaaggtcgaataaaaagaagctagcatccaagaaagaaaagaatacagtcaaagctactgcaaattctgcatcttgttctactgcaaagccttcaatctccaagaacaaaagaatacacgtgacaccattccctgaatctgagacgccgataaggcccaagaagattatgaagtctgacgagcaaaaacgtaaagaggataaagataacacactgaattctgatataccagataacccttcattgtcaccttttttctggctgaaggaacaagaagaaaacgtaggtggcactgctgaaactttgagtgaaccactatcattggacacagccttgtgtcacaatgtgcctaccttcagtgatatcaaagattctgatgatgaaatgcctaatgatatgactcctaatagcaaagttgaggtttcagaattattcgacagtgaaatctttgaatggagccaaagaccttgctcccccgagctgcgttctaccccactgaaaaaacaggggtcaatcgaagaatactctagatcaaatcacagaggtggatgatggaggatatatgaatcttggtgatttatttgataagttagaccatgaaagtaatgtaactcaacctgccaatgctgaagaagctaagaagagaaagttggcaagagctaggaacagaaaaaactcaaaactgcccagtcgtgttaaactatgtacaaaaggatctgatgctgagcaccaagttaaaaatatccctgtaagtattgctgcaaagccaaaccagaaggacatcaataaaaaaaagagatgtactttgaatggaggaaacaaggtctctggcaacaacactaaagttgtcttctctagtgataaatatatgtatacattttcccctcaatcaggcgggttggacattgaagcacctgagaaccagccttcagaaaggatcctcaaaaagcctaaaaacagtcgaagcaaacttcacatagcaggggatagtgcagtgaagaccgcaaagaataaatctgaacaaagagtaaagcaaaccataagatgttctgggggtgttgtagatgaaaatctaagagttctttctgaggctgaaaatgaaatagaatcgtttcagcttcacagactcgcaaaaggttgcacccaacataaacccttcgatgatagaagtaaacaaaacatggaatcaaacattggtccaaatacaccaagcattttacctgggaggtgccaatttgatgaggccatacacacaattcctacagtgaagaatgtctctgttaagaacggtagggcaaaatcaattgaacaaccagattacccaggatctatcagattatgcactgcacacaatactgccctgaagaaatgtgagggtaaagcttctaagctttcctgtgctttctgccagtctgatgataccacacaggaatctggagagatggttcactaccataatggaaagcaagtgccagcagcatttgatgcaggggctggtgtagtacattgccacaaaaactgcctggagtgggctcctgatgtctactttgaagatgactctgtctttaatcttgcaaatgagttggctagaagtaaaagaatcaaatgtgcttgctgtggaattaaaggtgctgcacttggatgctttgagacgagttgccgaaaaagcttccatctcacctgtgctagattaatcccagagtgcagatgggataatgaaaactttgtgatgctatgccctttgcaccaatcttcaaagttgcccagagaaacttctgggtttaaaaataagtcgcacaggaaactagcacgaaaaagttcatctgaagtaaacactagtcaaagccatgataataagtggacatggccatctggatcaccaccgaaatgggttctatgctgttcagccctttctgccgcagaaaagggtatcgtatcagaactcgcaaaaatagctggtgtgccaatctcaacaagttggagtcctaatgttacccatgttattgcatcaaccaacatgtctggttcttgcaagcgcacactgaagtttctgatggcaatcttgaatggcaaatgggttatctccatggactgggttaaaacttgcatggaacttatggaacctgctgatgaaatgaaatttgaagtttccactgatgtacatgggactgctgacggtcccaggttaggtagacaacgagttatcaacaagcaacctaaattattcgatggcattcaattctatctccatggagactataccaagtcgtacagaggctacctgcaagaccttgtggttgcagccggtggaactgtcttgcagaggaagcccgtgtcaagaaaccatcagaagttgcttgacgagagctccctcatcctcatcgtatacagcatcgagaatcaggacaaggcaaaaccaggatcaagcgatggcatggatactggtcgtagccaagctgatgctcaggctctggcctgtgcctctggtggcaaagctgtgagcagcgcatggatcatcgactctatagcggcttgcaaccttcgaccttccatgctaccctagatgtgtacttgcattgcatgcacggtaggtttgactaatggacagaaaaatagtgtaaggccctgtttcaaatctctagagctagtttttagctaataagttatcaattgtgttaagacaactaacaactatctgagaggtatcccgttctaaaactctcaagtaactttagcgacttactatcagttttagagcttttgaacatagactaagtagtagaacgagacttaagtttcttgatgtataaacactatattttaccatgcaatagttaatgctatgtttttaattaaagcaccggcaccgctggaatgtcggagtttgtaacaggtttttatacataaagtggctgccgacgaattcaaccgcttatccgttggttcctgcagtaagtgtttgtaagttgctacgtttttatttatactaaagtgtagaatataaaa

SEQ ID NO: 205661 - DNA, 3474 bp, Zea Mays
aaataccattccacccaaacccacttctttcgtccttccagaatccagacccgaaatcagatcaccataattcttcgaagccgcaagcccgaaaggaaccccaagaatcgccgagagatccgaagcgaggtggagagatcgagatggcggacgtggggagcctcgagaggatgggccgggagctcaagtgccccatctgcttgagcctgctcacttcggcggtgtccatcacctgcaatcacatcttctgcaacgcctgcctgacggagtctaagaaatctgcctcctgctgccccgtgtgcaaggttccattccaccggagagaaatacggccagcgcctcacatggataatttggtggccgttttcaaaagtatggaagctgcagcaggtattagtgtcgtgtcaacacagctgactcctgcacccaaagctgcagagtgtagtgagtacactgctggaaagcctagaaggtcgaataaaaagaagctagcatccaagaaagaaaagaatacagtcaaagctactgcaaattctgcatcttgttctactgcaaagccttcaatctccaagaacaaaagaatacacgtgacaccattccctgaatctgagacgccgataaggcccaagaagattatgaagtctgacgagcaaaaacgtaaagaggataaagataacacactgaattctgatataccagataacccttcattgtcaccttttttctggctgaaggaacaagaagaaaacgtaggtggcactgctgaaactttgagtgaaccactatcattggacacagccttgtgtcacaatgtgcctaccttcagtgatatcaaagattctgatgatgaaatgcctaatgatatgactcctaatagcaaagttgaggtttcagaattattcgacagtgaaatctttgaatggagccaaagaccttgctcccccgagctgcgttctaccccactgaaaaaacagagggtcaatcgaagaatactctagatcaaatcacagaggtggatgatggaggatatatgaatcttggtgatttatttgataagttagaccatgaaagtaatgtaactcaacctgccaatgctgaagaagctaagaagagaaagttggcaagagctaggaacagaaaaaactcaaaactgcccagtcgtgttaaactatgtacaaaaggatctgatgctgagcaccaagttaaaaatatccctgtaagtattgctgcaaagccaaaccagaaggacatcaataaaaaaaagagatgtactttgaatggaggaaacaaggtctctggcaacaacactaaagttgtcttctctagtgataaatatatgtatacattttcccctcaatcaggcgggttggacattgaagcacctgagaaccagccttcagaaaggatcctcaaaaagcctaaaaacagtcgaagcaaacttcacatagcaggggatagtgcagtgaagaccgcaaagaataaatctgaacaaagagtaaagcaaaccataagatgttctgggggtgttgtagatgaaaatctaagagttctttctgaggctgaaaatgaaatagaatcgtttcagcttcacagactcgcaaaaggttgcacccaacataaacccttcgatgatagaagtaaacaaaacatggaatcaaacattggtccaaatacaccaagcattttacctgggaggtgccaatttgatgaggccatacacacaattcctacagtgaagaatgtctctgttaagaacggtagggcaaaatcaattgaacaaccagattacccaggatctatcagattatgcactgcacacaatactgccctgaagaaatgtgagggtaaagcttctaagctttcctgtgctttctgccagtctgatgataccacacaggaatctggagagatggttcactaccataatggaaagcaagtgccagcagcatttgatgcaggggctggtgtagtacattgccacaaaaactgcctggagtgggctcctgatgtctactttgaagatgactctgtctttaatcttgcaaatgagttggctagaagtaaaagaatcaaatgtgcttgctgtggaattaaaggtgctgcacttggatgctttgagacgagttgccgaaaaagcttccatctcacctgtgctagattaatcccagagtgcagatgggataatgaaaactttgtgatgctatgccctttgcaccaatcttcaaagttgcccagagaaacttctgggtttaaaaataagtcgcacaggaaactagcacgaaaaagttcatctgaagtaaacactagtcaaagccatgataataagtggacatggccatctggatcaccaccgaaatgggttctatgctgttcagccctttctgccgcagaaaagggtatcgtatcagaactcgcaaaaatagctggtgtgccaatctcaacaagttggagtcctaatgttacccatgttattgcatcaaccaacatgtctggttcttgcaagcgcacactgaagtttctgatggcaatcttgaatggcaaatgggttatctccatggactgggttaaaacttgcatggaacttatggaacctgctgatgaaatgaaatttgaagtttccactgatgtacatgggactgctgacggtcccaggttaggtagacaacgagttatcaacaagcaacctaaattattcgatggcattcaattctatctccatggagactataccaagtcgtacagaggctacctgcaagaccttgtggttgcagccggtggaactgtcttgcagaggaagcccgtgtcaagaaaccatcagaagttgcttgacgagagctccctcatcctcatcgtatacagcatcgagaatcaggacaaggcaaaaccaggatcaagcgatggcatggatactggtcgtagccaagctgatgctcaggctctggcctgtgcctctggtggcaaagctgtgagcagcgcatggatcatcgactctatagcggcttgcaaccttcgaccttccatgctaccctagatgtgtacttgcattgcatgcacggtaggtttgactaatggacagaaaaatagtgtaaggccctgtttcaaatctctagagctagtttttagctaataagttatcaattgtgttaagacaactaacaactatctgagaggtatcccgttctaaaactctcaagtaactttagcgacttactatcagttttagagcttttgaacatagactaagtagtagaacgagacttaagtttcttgatgtataaacactatattttaccatgcaatagttaatgctatgtttttaattaaagcaccggcaccgctggaatgtcggagtttgtaacaggtttttatacataaagtggctgccgacgaattcaaccgcttatccgttggttcctgcagtaagtgtttgtaagttgctacgtttttatttatactaaagtgtagaatataaaa

SEQ ID NO: 205662 - DNA, 2080 bp, Zea Mays
cctaaccccgtcctgtgtgtgattccctcgtttgctccgttcccagctttcctcctcctcgcacaggctcccctctaaaaccctctgcctccactgtaaatctttgcaaagctgatttctaacagcaagaattcgctgtttctgttaccgcaccctccaggggcctatacatccagcgcctgcctggcttgcttcattcgtggatctgagagcattttgctgcattcagtaacattctcggaggggatttctccgtgctgcttctgtggatttctctgagaattgtcagcgggatttaggaagaccctcccatggagatgactgacatgaaaccagaggagatgagccaccctcccatggaccagctgctcggaatggagtactgcatagactccaacccgtcctggggaggagctgttttgctgggcttccagcatttcatcctttgcttggggacggcagtgatgatccccaccttgttggttcccctcatgggaggaaatgctcatgacaaggcaaaggtagtacagacagtgctattcgtgactggaataaatacaatgctccaaactctgtttggaactcgtctaccgaccgtcatcggtgggtcttatgcattcctagtcccagtcatgtcagtaatcagtgaccactcactgatacaaattgctgataaccatacaaggttcaaaatgaccatgagagccatacagggggccctgataatatcatcctgcattcagataatacttggcttcagccaattgtggggggtatgctccaggttcttcagcccacttgggatggttccagttattgcattggttgggcttggccttttcgagagagggttcccagtgattggaacatgcgtggagatcggtgttcctatgcttgtcttgtttgtggcactttcccagtatctgaagcatgtacaagtgcatccttttccgatattggagaggttctcagtgctcatcaccattgcagttgtctggttatatgcccacatcctcaccgtgagtggggcatacaaacatagttcgcaggtcacccagctcaactgccgaaccgaccgtgccagcctcatcacaaccatgccatggtttgatattccatacccactgcaatggggtcccccgagtttcagtgcagatcattcattcggcatgatggctgctgtgttggtgtcattggtagagtctaccggagcgtttaaggctgctgcccggttggcaagtgcgacgccgcccccaccatttgtcctaagcaggggaattggatggcagggaatcgggctgctattagatggcctatttggtactgccagcggctctactgtctctgtggagaacgtgggtctcctaggatcaaccaggattggtagcagaagagtcattcagatctccgctggtttcatgatcttcttctctatcctagggaaattcggagggctgttcgcctcaattccattcacggtgtttgctgctatatactgtgtattgtttggctacgtcggtgctgtggggctctcctttatgcagttcaccaacatgaactcgatgcgcaacctcttcattatcggcacgtcactgttcctcggtatctccatcccggagtacttcttccactatgatcatggaccgtcacatactagagctggatggttcaatgacctcatcaacaccatcttctcctcacccccgaccgttggtttcatcatctcggtggtcctagataacacgctggacgtgaggaacagagccaaggaccgtgggatgccttggtgggctaggttcaggacatttcgtggggatagtcggaacgaggagttctacaatctgccgttcaacctcaaccggtttttcccaccatcgtaagaacattgtacatgcttcagtttgttgttggaaccgtagagacaccaaaaccaagtatcattgtaattatggtttggcttccaagggttgtacatgcttcagtttgttgttggagatgactgctgagcaatgagaatcaattacttcgaggccactttcttgctcttgtgttaatctgtcagtattctgttataaagaac

SEQ ID NO: 205663 - DNA, 552 bp, Zea Mays
cgtttctgatcgaaacgaagcattcccccgttcctgtctctgcttactcacctctcccatgagacgaagcataaaatcaaataggatatgtgggttggaaataggtcgtgaaattgattgaaatacctggggcttgagcgtgatatatagagggtggtagagaccaagcgacgttgggcgagcggcgccgccggggctgcgttggtcccttcaccggtgatgagcatccaccagatacaggaatgaacaacattgtgtaggcacctcgtccagacatctaaggcgaaaaatgctgcgcctgcaccaccatagtgcacctgtctctccgcacgctgcgatttgtccaccgagtaggcttgcttgttcttgcatatgtaacaagccaaacagcagaatcaccgcttcccaggggtggtcttccataaggcggcgaatcaccactgttgccagtggccagtcagtaccaggatacacacctgatgatggcgatcaatgccttgaaacaggcaacaagctctcttttgctactgtgaaggaggctttcatatgaat

SEQ ID NO: 205664 - DNA, 1594 bp, Zea Mays
cgtttctgatcgaaacgaagcattcccccgttcctgtctctgcttactcacctctcccatgagacgaagcataaaatcaaataggatatgtgggttggaaataggtcgtgaaattgattgaaatacctggggcttgagcgtgatatatagagggtggtagagaccaagcgacgttgggcgagcggcgccgccggggctgcgttggtcccttcaccggtgatgagcatccaccagatacaggaatgaacaacattgtgtaggcacctcgtccagacatctaaggcgaaaaatgctgcgcctgcaccaccatagtgcacctgtctctccgcacgctgcgatttgtccaccgagtaggcttgcttgttcttgcatatgtaacaagccaaacagcagaatcaccgcttcccaggggtggtcttccataaggcggcgaatcaccactgttgccagtggccagtcagtaccaggatacacacctgatgatggcgatcaatgccttgaaacaggcaacaagctctcttttgctactgtgaaggaggctttcatcagcctgaactctgtgggtgtcagaagtgagctaattcttctagctctaccagcagtcttgggtcaagctattgatccaatagcgcaacttatggagactgcatacatcggtagattaggtgcactggaattggcatcggctggtattggtatatcgatttttaatattgtgtcaaagatcttcaacataccactgttgagcattgcaacctcatttgtggcagaggatatttctaggagtgctaccaagcatcctagttcaggcaaattggagctgacatctgtatcatctgccctgatcttagctgctggaattggtataatggaagcattagcattgttcctaggatcaggattgtttcttaaactaatgggcgtgtcacctgtatctccaatgcacagacctgctaaactctttctttcattgagagctctcggagcacctgcaaatgtgattatgttggcagtccaaggtatctttcggggattcaaggatacaaagactccggtgttttatataggtttgggcaatctttctgctgtagcccttcttcctctacttatatatggctttaagcttggcataactggtgctgcaatttctacagttgtgtcacagtacattattacagttcttcttctttggtctctaagtaaaagagctgttttgcttcctccgcgaatagatcaattagagtttggtggatatctaaaatctggtgaacttctgatgcagccactccactagttaatgatatttagtagtagattcatggtgcattctatatgaaacttcttcataatgtgtttttaccggctttcgtagcatcttttggtatactcattgttcggtttgtcggagttttggatctttcttgcttggagctttgagctattttggttaattttagaagtttggcccattaataacttcatttctgccagcatcatgtatttaatttggtccaagcagaaaaagggcactgaatgtctatgttctagatttctagcgaaagaccacatcgatctttatgatgtctttattctc

SEQ ID NO: 205665 - DNA, 2280 bp, Zea Mays
cgtttctgatcgaaacgaagcattcccccgttcctgtctctgcttactcacctctcccatgagacgaagcataaaatcaaataggatatgtgggttggaaataggtcgtgaaattgattgaaatacctggggcttgagcgtgatatatagagggtggtagagaccaagcgacgttgggcgagcggcgccgccggggctgcgttggtcccttcaccggtgatgagcatccaccagatacaggaatgaacaacattgtgtaggcacctcgtccagacatctaaggcgaaaaatgctgcgcctgcaccaccatagtgcacctgtctctccgcacgctgcgatttgtccaccgagtaggcttgcttgttcttgcatatgtaacaagccaaacagcagaatcaccgcttcccaggggtggtcttccataaggcggcgaatcaccactgttgccagtggccagtcagtaccaggatacacacctgatgatggcgatcaatgccttgaaacaggcaacaagctctcttttgctactgtgaaggaggctttcatcagcctgaactctgtgggtgtcagaagtgagctaattcttctagctctaccagcagtcttgggtcaagctattgatccaatagcgcaacttatggagactgcatacatcggtagattaggtgcactggaattggcatcggctggtattggtatatcgatttttaatattgtgtcaaagatcttcaacataccactgttgagcattgcaacctcatttgtggcagaggatatttctaggagtgctaccaagcatcctagttcaggcaaattggagctgacatctgtatcatctgccctgatcttagctgctggaattggtataatggaagcattagcattgttcctaggatcaggattgtttcttaaactaatgggcgtgtcacctgtatctccaatgcacagacctgctaaactctttctttcattgagagctctcggagcacctgcaaatgtgattatgttggcagtccaaggtatctttcggggattcaaggatacaaagactccggtgttttatataggtttgggcaatctttctgctgtagcccttcttcctctacttatatatggctttaagcttggcataactggtgctgcaatttctacagttgtgtcacagtacattattacagttcttcttctttggtctctaagtaaaagagctgttttgcttcctccgcgaatagatcaattagagtttggtggatatctaaaatctggtggaatgctgttgggaagaactctttcgattctgctaactatgaccattggtacatcaatggctgctcggcaaggcccaacagcgatggctgctcatcagatttgtttgcaagtatggcttgctgtatccttgcttgcagatgcattagctgtttctgcccaggcgctgatagcaagctcttatgcaatattggactacaaaaaagttcaaaagacagcaatgtttgcgttgcagataggagtgtttagtgggttagctttggccattggattgtatgcctcatttggcaatatagctagactgtttaccagtgacccagaggtcctaacggttgtcaaatcttgtgcactgtcagccaattaatgccctggccttcatctttgacggtctacattatggtgtatcagattttgaatatgtggctcaagctactatcgtggtgggtgttacgtcttcactcgtcctgttatgggctccgtctgtattcggcctggctggagtttgggctggtttgactacactcatggggttgcgtatggctgcaggcatcctgaggttgctacagaaagcgggcccttggtcgtttctgcacgaggagccataagctgaggtgtatcaactaccagcctgcgcagtttggagctgctaacttactgctgggagtttacatcactgcaaagattatccgagtgtcatggaggactcgctgaagatgttacccctgttactcctccggctcagaacaaaatctgacttcattgcatttcttaaaatcagtctgctagatggcatggtttggtttggattggtttggtgaaggcgtgaggcccatctgaacatcggtgcggcctctatttttttttggcgaactcctttgtatgctatagcagctgtgcagtttctgtagaagaaaagatacaaggatcatttatagcatcgatatatgatgtatgcaactcctctgaattgtactcggtgtaaattattttagaaccgttttgttgattaggtac

SEQ ID NO: 205666 - DNA, 1333 bp, Zea Mays
atttgacacagcttttggtgctccgccaaaagaaaaagggccgagcctctctccctgttttaagagggctagaggacacgacgcctctcccagtagatgtagatgacaaacaagccatctcacctggccccggcggcaacaacaacacgccatggccctagatacctgctcttacgacgactgttgggtgttgcctccgctggattgctgggactgggcctcggagctgctgttccacactctcgaaggcgctggagctgccgccgtcttcccggagacgccaggtgtgcagtgctcgccgtcggaggcgtccagtggctacctgcacgacgccatcgctccagtgagcgcccgtcgcaacaagcggcagcggatggcggcggcgacgacgacgcctccctctcggcgtccggcgaccgtctgcggggaccttcagtgccttcttgcgggcttgcgggattctagcgccgacgccgagggaggagcagatttccgccatgatttgaacaccacgacggccgcggagacggagacacgctgcagctttgtctcaggcgggggcgacggggcaggtgcatcgagcagggaggagcagcagcggggccccagcgcgcaggtgctgctaccaacgccagcggcagcggcgaagggcggagatgaggaggcaaaggcgtccgctgtagtcccccctcgtcgcttccccgccaccgtgcgagccgctgctcccctgcagctgcaaaaggctgccgcggggacggcacacgcggcagcgcgtcgcgacgatcgcccgcgacccgtcgtcgaccgcgaacactccttccgtgcgggtgcgggtgcgggtgcggccgccacgacggcgcccgcctctgcctgccactcgttactgtcaggggaggacgagaagagaggtgtcggagtgctgtacccctttgcagtcgtcaagccgctggggttagacgacggccgcatgacgacgctggacgacgtcaaccagagaatcctcaagagaccggcaagaccagttcggcaccccgttggcccgttcgcgttcggccccgccgtgtcggctcacggcctgagtctgtccggcaaggcagtcgttagcctgaccaagatcaggacgagaggaaacggcaccataaccatcattagaacaagatgattgctgtcataccatcaaccattaccatttcctttctctatttttcctttttttaggttgcgatgcctgctgttaggtataaccatggtagattagtagctacggatgtaaatacaccctcgcgttggcttctgccttctcttatctagtttaataagacgctaaaactcc

SEQ ID NO: 205667 - DNA, 1355 bp, Zea Mays
atggcatgttcatgtgtggttttgtacagctcgatctcaagattcccgaacacgatacgagcgacagctctttactagatcaatcaatggaggatttaaaatttttcggcggatcggagtgctgctgagccctagtgtgttctccccgttttggccttgccggttgccgcggggcggcggggcctctctatatatagcgccccggtctcgccgcattgcttcgtcactcgagctcgagcgatcccactcccgatcagcagctgatcgctcactcttgcagctcgatcattctttagctgctctagctctagccctagctagtagctagccactcggtcgtgtagtcatcagccttctgatcgtcacccatggccactgccgaggtccagaccccgaccgtcgtggcgaccgaggaagcgccggcggtggagaccccggctccgcccgccgtcgtgcccgaggaggctgcccccgccgccgaggccaaggtggaggagccagctgccccggcggagaccgagccagctgccgccgctgagcccgaggctgctgctgcggaggaggagcccgcggcggccgagccggccgctgaggagcccgagaaggccgagccggccgctgaggtggccgagaaggccagcgagtgaggccgtgcgccgtgcgcgcactgcggcggcggacagcgggtcgggagatcgatggctcagcgcgcgcgcgcctacatggcacgggcttgctgttcagtacaacgcgaacgtgacggtttctctccatctctgtgtgtgtgacagtgtgtcgtagctatagcagtggctgtcgcgtggactgcccggtgcggactgcgagtgacatgggctaaataaagtgtgcgtcgtctggtctggtggtggtagtggggcgcggtgccccatgtgtgccgctgcagcttgtgtctctgttttgcttcatgttctctgtctatctactctcatgtatggcagtttgggtgatcttctttatagatgcagccagttgttcatcggcaaacctgcaaagctttttgtgtaagtgcggcatcagttcagaacgccggatccacccaaggagcaggtcgggcctgcaactacaagcattccaccacgccatcatgctgggtccttgaacccaacggcgcatctctaggataggatgctcatgccactatttgtgatccgccagatctagtgactagtgagcgtcttctgccaacgtacggtaggctcgggcatggctgatggcgattagctaaggagatactactccatgatggtccatgacatgagcttgtttgacaataatgtttctcaaacctatacaatactttgcattgtcttaac

SEQ ID NO: 205668 - DNA, 3408 bp, Zea Mays
cactaaagcagtgacaaaattttgagtggttcgtctgcaattcagatcttttataatggcttcaaagtaattgtctcatcagatactctcatactccgcatatacttagaagagatgggccccacaaggcatagagcgagagacgacccaccgagccatggccccacggtttcctggtttcctccgcctcactggtcctcccctctcctctccccccttccctcgctccagcgagtaccgacgcctcccacagctggagaccgtactttactggcactggcagtaatcttcccacccgcctcggcgcctcctccctctctcccaacatcgcccgctctctcctcgctgttctccgctgtcatctcccccggagaagcgtggctcctgtagccggcctcctacctgcccctcctccgcgcgccgagcaccagacgacgcgacacggccgagcacggtcgctgcttccgcggcggcgccgctccactctcgtgctgcagctagcggaacagagatccgtggggacatgaacagggtttctcctctctgttggtatgaactaaattgatcgatggtcctattgaatatagagctactattatatggcatattctgtcatgcaaatgatggtggttgtaagttgtgattgaggaactccattgtttgagaaatggatgaaacaccaactagttctgggcaatctgaagatagttcatgtgaacctaattggtggccaccagacttattagagaagatagagtctgcttccatatcaaggaaacatgatgttttgggtaatctaaggtcctcatcctggaaggcatcacaattactgtggtcaacaggatcttattcagggttaatccctaatggtttctattcaatcatcccggataaaaagttgaaggagactttcccaacaattccatcggtagatgacctgcaaactcttgaagcagatgggcttaaggctgacataattattgtagacactgagagggataagaaggttttcatgttgaagcagcttagtgctgcacttgtgaaagggttaagctctagcccagcattagtgataaagaaaatagcaggtttggtttttgactgcttcaagcgacaaaatcctgacgccagtccagcaaaaggctcgattgaagatactcatttctttggatataaaggaccacaacttctagggcagataagacatggatcatgccgacctcgagctattctatttaaagttcttgcagatgctgttggccttgagagtaaacttgtagttggtctacctgatgacggtgccgttggatttgtggactcctacaaacatatgtctgtgtgactcagctgaaaatgactcctgtgattctccccttgagcccaacagccctctgtatggattgtctgataaagttgaaactgaaggaattgaatcttcatcaaatctatctggacgatcactgcgtaatatgatgttgagatcaaggacattttctgaggggaaattaagcacgtcatgtagtgaaccgaatatagcgaatgccttttggaggcacagtcaaaggagaggagttgccgaggaaccccgtggtgctagttccagtcctgagcatccattaatgagagcaaggggaagatctatacttggtggtgagaagcaatcatttcaagaatacacagaatctggagctgcttcaagatcagatggtcttgggggcacttcaacctctaatgctcgaagaataaggcgtagaagcattagcatcacccctgagattggagatgacattgtgagggcagttcgggctatgaacgaaacactaaagcaaaatcgccttcaaagggatcatgtcgaaggttcatgctcatatgttacggaagaccaaagcaacgccaatgactgcccaaataaagatgatgcatctcggataattggtgctactgacagtgactcaagaaaccgaactggtcctactcaaaaggccatgtcattgccttcttcgcctcatgaatataggggtcaagatacccaaaaaggtgatgattttataagtaaagagaagatggcattggcatggaacaaagttttccagagctccccatttcttaacaagcccttgctgccgtttgaggaatggaacatagatttctctgagataacaattggcacgcgggttggaataggattcttcggagaagttttccgtggtatatggaatggaaccgatgttgccatcaaagtatttctagaacaggacttgacaactgaaaacatggaagatttttgcaacgagatatacatcctgagccggttgcgacatccaaacgttatattgtttcttggtgcatgcattacacctccacacttgtcaatggttactgaatatatggaaatgggatcactgtattatctcatccatatgagtggtcagaaaaagaaacttagttggcgtaggaggttgaaaattattcgtgatatatgcagggggttgatgtgcatacaccgcatgaagatagttcacagggatctcaaaagtgcaaactgcctggtgaacaaacattggactgttaagatatgtgactttggtctatctcgagtgatgattgatagtcctatgactgataattcctctgctggcaccccggaatggatggcccctgagcttatacggaatgaaccttttacagagaaatgtgatatattcagccttggtgttatcatgtgggagctgtgcacattgagtcgcccatgggaaggcatctccccagttcaagtggtgtacgcagttgctaatgaaggttcgcggcttgagattcctgaaggacctctcggcaggttgattgcagattgctgggcagagcctgagaatcggccgagctgccaggagatcctaacccgtttgctggactgcgaatacactgtcagctgaaatggaagctgctcgctcgtccactcaattcctgcacaggtggaaacatttcttgtataaaacctgtaaaaaaggctgccgattctgcggacttgaggtcacatatcgaagcgctgtgtttttttttaaacaatggcgaccctttctcaaaaaaaatgtaaaaatgattccctggttatagaagaacatgtctgattcgatagacgtgccttgcatcgcagggcaagctggttgttgtaccttattctagataagtagcacgcccgcgaatgctgttcggctttcaaatagctgcagctgcaaatttttacctgttgctacagtatttcctttctatataaccaggcggcagcagcagccgaatgttgccagtacgttggagatggcataagcaactccatgttgtgaactgttccctcgcgaccataaagaacatgccatcctagatttggaataaaaatattgtcaaaatttgtat

SEQ ID NO: 205669 - DNA, 3293 bp, Zea Mays
cccacaaggcatagagcgagagacgacccaccgagccatggccccacggtttcctggtttcctccgcctcactggtcctcccctctcctctccccccttccctcgctccagcgagtaccgacgcctcccacagctggagaccgtactttactggcactggcagtaatcttcccacccgcctcggcgcctcctccctctctcccaacatcgcccgctctctcctcgctgttctccgctgtcatctcccccggagaagcgtggctcctgtagccggcctcctacctgcccctcctccgcgcgccgagcaccagacgacgcgacacggccgagcacggtcgctgcttccgcggcggcgccgctccactctcgtgctgcagctagcggaacagagatccgtggggacatgaacagggtttctcctctctgttggtatgaactaaattgatcgatggtcctattgaatatagagctactattatatggcatattctgtcatgcaaatgatggtggttgtaagttgtgattgaggaactccattgtttgagaaatggatgaaacaccaactagttctgggcaatctgaagatagttcatgtgaacctaattggtggccaccagacttattagagaagatagagtctgcttccatatcaaggaaacatgatgttttgggtaatctaaggtcctcatcctggaaggcatcacaattactgtggtcaacaggatcttattcagggttaatccctaatggtttctattcaatcatcccggataaaaagttgaaggagactttcccaacaattccatcggtagatgacctgcaaactcttgaagcagatgggcttaaggctgacataattattgtagacactgagagggataagaaggttttcatgttgaagcagcttagtgctgcacttgtgaaagggttaagctctagcccagcattagtgataaagaaaatagcaggtttggtttttgactgcttcaagcgacaaaatcctgacgccagtccagcaaaaggctcgattgaagatactcatttctttggatataaaggaccacaacttctagggcagataagacatggatcatgccgacctcgagctattctatttaaagttcttgcagatgctgttggccttgagagtaaacttgtagttggtctacctgatgacggtgccgttggatttgtggactcctacaaacatatgtctgtgtgactcagctgaaaatgactcctgtgattctccccttgagcccaacagccctctgtatggattgtctgataaagttgaaactgaaggtgcagaattgaatcttcatcaaatctatctggacgatcactgcgtaatatgatgttgagatcaaggacattttctgaggggaaattaagcacgtcatgtagtgaaccgaatatagcgaatgccttttggaggcacagtcaaaggagaggagttgccgaggaaccccgtggtgctagttccagtcctgagcatccattaatgagagcaaggggaagatctatacttggtggtgagaagcaatcatttcaagaatacacagaatctggagctgcttcaagatcagatggtcttgggggcacttcaacctctaatgctcgaagaataaggcgtagaagcattagcatcacccctgagattggagatgacattgtgagggcagttcgggctatgaacgaaacactaaagcaaaatcgccttcaaagggatcatgtcgaaggttcatgctcatatgttacggaagaccaaagcaacgccaatgactgcccaaataaagatgatgcatctcggataattggtgctactgacagtgactcaagaaaccgaactggtcctactcaaaaggccatgtcattgccttcttcgcctcatgaatataggggtcaagatacccaaaaaggtgatgattttataagtaaagagaagatggcattggcatggaacaaagttttccagagctccccatttcttaacaagcccttgctgccgtttgaggaatggaacatagatttctctgagataacaattggcacgcgggttggaataggattcttcggagaagttttccgtggtatatggaatggaaccgatgttgccatcaaagtatttctagaacaggacttgacaactgaaaacatggaagatttttgcaacgagatatacatcctgagccggttgcgacatccaaacgttatattgtttcttggtgcatgcattacacctccacacttgtcaatggttactgaatatatggaaatgggatcactgtattatctcatccatatgagtggtcagaaaaagaaacttagttggcgtaggaggttgaaaattattcgtgatatatgcagggggttgatgtgcatacaccgcatgaagatagttcacagggatctcaaaagtgcaaactgcctggtgaacaaacattggactgttaagatatgtgactttggtctatctcgagtgatgattgatagtcctatgactgataattcctctgctggcaccccggaatggatggcccctgagcttatacggaatgaaccttttacagagaaatgtgatatattcagccttggtgttatcatgtgggagctgtgcacattgagtcgcccatgggaaggcatctccccagttcaagtggtgtacgcagttgctaatgaaggttcgcggcttgagattcctgaaggacctctcggcaggttgattgcagattgctgggcagagcctgagaatcggccgagctgccaggagatcctaacccgtttgctggactgcgaatacactgtcagctgaaatggaagctgctcgctcgtccactcaattcctgcacaggtggaaacatttcttgtataaaacctgtaaaaaaggctgccgattctgcggacttgaggtcacatatcgaagcgctgtgtttttttttaaacaatggcgaccctttctcaaaaaaaatgtaaaaatgattccctggttatagaagaacatgtctgattcgatagacgtgccttgcatcgcagggcaagctggttgttgtaccttattctagataagtagcacgcccgcgaatgctgttcggctttcaaatagctgcagctgcaaatttttacctgttgctacagtatttcctttctatataaccaggcggcagcagcagccgaatgttgccagtacgttggagatggcataagcaactccatgttgtgaactgttccctcgcgaccataaagaacatgccatcctagatttggaataaaaatattgtcaaaatttgtat

SEQ ID NO: 205670 - DNA, 3383 bp, Zea Mays
cgagagacgacccaccgagccatggccccacggtttcctggtttcctccgcctcactggtcctcccctctcctctccccccttccctcgctccagcgagtaccgacgcctcccacagctggagaccgtactttactggcactggcagtaatcttcccacccgcctcggcgcctcctccctctctcccaacatcgcccgctctctcctcgctgttctccgctgtcatctcccccggagaagcgtggctcctgtagccggcctcctacctgcccctcctccgcgcgccgagcaccagacgacgcgacacggccgagcacggtcgctgcttccgcggcggcgccgctccactctcgtgctgcagctagcggaacagagatccgtggggacatgaacagggtttctcctctctgttggtatgaactaaattgatcgatggtcctattgaatatagagctactattatatggcatattctgtcatgcaaatgatggtggttgtaagttgtgattgaggaactccattgtttgagaaatggatgaaacaccaactagttctgggcaatctgaagatagttcatgtgaacctaattggtggccaccagacttattagagaagatagagtctgcttccatatcaaggaaacatgatgttttgggtaatctaaggtcctcatcctggaaggcatcacaattactgtggtcaacaggatcttattcagggttaatccctaatggtttctattcaatcatcccggataaaaagttgaaggagactttcccaacaattccatcggtagatgacctgcaaactcttgaagcagatgggcttaaggctgacataattattgtagacactgagagggataagaaggttttcatgttgaagcagcttagtgctgcacttgtgaaagggttaagctctagcccagcattagtgataaagaaaatagcaggtttggtttttgactgcttcaagcgacaaaatcctgacgccagtccagcaaaaggctcgattgaagatactcatttctttggatataaaggaccacaacttctagggcagataagacatggatcatgccgacctcgagctattctatttaaagttcttgcagatgctgttggccttgagagtaaacttgtagttggtctacctgatgacggtgccgttggatttgtggactcctacaaacatatgtctgtggtagtttcgctaaactctatggaactgctagtggatcttatgcgatttccaggccagttgattccattttcagctaaggctatctttatatcgcatatatctgctgcgggtgaaagtgactcagctgaaaatgactcctgtgattctccccttgagcccaacagccctctgtatggattgtctgataaagttgaaactgaaggaattgaatcttcatcaaatctatctggacgatcactgcgtaatatgatgttgagatcaaggacattttctgaggggaaattaagcacgtcatgtagtgaaccgaatatagcgaatgccttttggaggcacagtcaaaggagaggagttgccgaggaaccccgtggtgctagttccagtcctgagcatccattaatgagagcaaggggaagatctatacttggtggtgagaagcaatcatttcaagaatacacagaatctggagctgcttcaagatggtcttgggggcacttcaacctctaatgctcgaagaataaggcgtagaagcattagcatcacccctgagattggagatgacattgtgagggcagttcgggctatgaacgaaacactaaagcaaaatcgccttcaaagggatcatgtcgaaggttcatgctcatatgttacggaagaccaaagcaacgccaatgactgcccaaataaagatgatgcatctcggataattggtgctactgacagtgactcaagaaaccgaactggtcctactcaaaaggccatgtcattgccttcttcgcctcatgaatataggggtcaagatacccaaaaaggtgatgattttataagtaaagagaagatggcattggcatggaacaaagttttccagagctccccatttcttaacaagcccttgctgccgtttgaggaatggaacatagatttctctgagataacaattggcacgcgggttggaataggattcttcggagaagttttccgtggtatatggaatggaaccgatgttgccatcaaagtatttctagaacaggacttgacaactgaaaacatggaagatttttgcaacgagatatacatcctgagccggttgcgacatccaaacgttatattgtttcttggtgcatgcattacacctccacacttgtcaatggttactgaatatatggaaatgggatcactgtattatctcatccatatgagtggtcagaaaaagaaacttagttggcgtaggaggttgaaaattattcgtgatatatgcagggggttgatgtgcatacaccgcatgaagatagttcacagggatctcaaaagtgcaaactgcctggtgaacaaacattggactgttaagatatgtgactttggtctatctcgagtgatgattgatagtcctatgactgataattcctctgctggcaccccggaatggatggcccctgagcttatacggaatgaaccttttacagagaaatgtgatatattcagccttggtgttatcatgtgggagctgtgcacattgagtcgcccatgggaaggcatctccccagttcaagtggtgtacgcagttgctaatgaaggttcgcggcttgagattcctgaaggacctctcggcaggttgattgcagattgctgggcagagcctgagaatcggccgagctgccaggagatcctaacccgtttgctggactgcgaatacactgtcagctgaaatggaagctgctcgctcgtccactcaattcctgcacaggtggaaacatttcttgtataaaacctgtaaaaaaggctgccgattctgcggacttgaggtcacatatcgaagcgctgtgtttttttttaaacaatggcgaccctttctcaaaaaaaatgtaaaaatgattccctggttatagaagaacatgtctgattcgatagacgtgccttgcatcgcagggcaagctggttgttgtaccttattctagataagtagcacgcccgcgaatgctgttcggctttcaaatagctgcagctgcaaatttttacctgttgctacagtatttcctttctatataaccaggcggcagcagcagccgaatgttgccagtacgttggagatggcataagcaactccatgttgtgaactgttccctcgcgaccataaagaacatgccatcctagatttggaataaaaatattgtcaaaatttgtat

SEQ ID NO: 205671 - DNA, 3376 bp, Zea Mays
caccgagccatggccccacggtttcctggtttcctccgcctcactggtcctcccctctcctctccccccttccctcgctccagcgagtaccgacgcctcccacagctggagaccgtactttactggcactggcagtaatcttcccacccgcctcggcgcctcctccctctctcccaacatcgcccgctctctcctcgctgttctccgctgtcatctcccccggagaagcgtggctcctgtagccggcctcctacctgcccctcctccgcgcgccgagcaccagacgacgcgacacggccgagcacggtcgctgcttccgcggcggcgccgctccactctcgtgctgcagctagcggaacagagatccgtggggacatgaacagggtttctcctctctgttggtatgaactaaattgatcgatggtcctattgaatatagagctactattatatggcatattctgtcatgcaaatgatggtggttgtaagttgtgattgaggaactccattgtttgagaaatggatgaaacaccaactagttctgggcaatctgaagatagttcatgtgaacctaattggtggccaccagacttattagagaagatagagtctgcttccatatcaaggaaacatgatgttttgggtaatctaaggtcctcatcctggaaggcatcacaattactgtggtcaacaggatcttattcagggttaatccctaatggtttctattcaatcatcccggataaaaagttgaaggagactttcccaacaattccatcggtagatgacctgcaaactcttgaagcagatgggcttaaggctgacataattattgtagacactgagagggataagaaggttttcatgttgaagcagcttagtgctgcacttgtgaaagggttaagctctagcccagcattagtgataaagaaaatagcaggtttggtttttgactgcttcaagcgacaaaatcctgacgccagtccagcaaaaggctcgattgaagatactcatttctttggatataaaggaccacaacttctagggcagataagacatggatcatgccgacctcgagctattctatttaaagttcttgcagatgctgttggccttgagagtaaacttgtagttggtctacctgatgacggtgccgttggatttgtggactcctacaaacatatgtctgtggtagtttcgctaaactctatggaactgctagtggatcttatgcgatttccaggccagttgattccattttcagctaaggctatctttatatcgcatatatctgctgcgggtgaaagtgactcagctgaaaatgactcctgtgattctccccttgagcccaacagccctctgtatggattgtctgataaagttgaaactgaaggtgcagaattgaatcttcatcaaatctatctggacgatcactgcgtaatatgatgttgagatcaaggacattttctgaggggaaattaagcacgtcatgtagtgaaccgaatatagcgaatgccttttggaggcacagtcaaaggagaggagttgccgaggaaccccgtggtgctagttccagtcctgagcatccattaatgagagcaaggggaagatctatacttggtggtgagaagcaatcatttcaagaatacacagaatctggagctgcttcaagatggtcttgggggcacttcaacctctaatgctcgaagaataaggcgtagaagcattagcatcacccctgagattggagatgacattgtgagggcagttcgggctatgaacgaaacactaaagcaaaatcgccttcaaagggatcatgtcgaaggttcatgctcatatgttacggaagaccaaagcaacgccaatgactgcccaaataaagatgatgcatctcggataattggtgctactgacagtgactcaagaaaccgaactggtcctactcaaaaggccatgtcattgccttcttcgcctcatgaatataggggtcaagatacccaaaaaggtgatgattttataagtaaagagaagatggcattggcatggaacaaagttttccagagctccccatttcttaacaagcccttgctgccgtttgaggaatggaacatagatttctctgagataacaattggcacgcgggttggaataggattcttcggagaagttttccgtggtatatggaatggaaccgatgttgccatcaaagtatttctagaacaggacttgacaactgaaaacatggaagatttttgcaacgagatatacatcctgagccggttgcgacatccaaacgttatattgtttcttggtgcatgcattacacctccacacttgtcaatggttactgaatatatggaaatgggatcactgtattatctcatccatatgagtggtcagaaaaagaaacttagttggcgtaggaggttgaaaattattcgtgatatatgcagggggttgatgtgcatacaccgcatgaagatagttcacagggatctcaaaagtgcaaactgcctggtgaacaaacattggactgttaagatatgtgactttggtctatctcgagtgatgattgatagtcctatgactgataattcctctgctggcaccccggaatggatggcccctgagcttatacggaatgaaccttttacagagaaatgtgatatattcagccttggtgttatcatgtgggagctgtgcacattgagtcgcccatgggaaggcatctccccagttcaagtggtgtacgcagttgctaatgaaggttcgcggcttgagattcctgaaggacctctcggcaggttgattgcagattgctgggcagagcctgagaatcggccgagctgccaggagatcctaacccgtttgctggactgcgaatacactgtcagctgaaatggaagctgctcgctcgtccactcaattcctgcacaggtggaaacatttcttgtataaaacctgtaaaaaaggctgccgattctgcggacttgaggtcacatatcgaagcgctgtgtttttttttaaacaatggcgaccctttctcaaaaaaaatgtaaaaatgattccctggttatagaagaacatgtctgattcgatagacgtgccttgcatcgcagggcaagctggttgttgtaccttattctagataagtagcacgcccgcgaatgctgttcggctttcaaatagctgcagctgcaaatttttacctgttgctacagtatttcctttctatataaccaggcggcagcagcagccgaatgttgccagtacgttggagatggcataagcaactccatgttgtgaactgttccctcgcgaccataaagaacatgccatcctagatttggaataaaaatattgtcaaaatttgtat

SEQ ID NO: 205672 - DNA, 3285 bp, Zea Mays
cctctcctctccccccttccctcgctccagcgagtaccgacgcctcccacagctggagaccgtactttactggcactggcagtaatcttcccacccgcctcggcgcctcctccctctctcccaacatcgcccgctctctcctcgctgttctccgctgtcatctcccccggagaagcgtggctcctgtagccggcctcctacctgcccctcctccgcgcgccgagcaccagacgacgcgacacggccgagcacggtcgctgcttccgcggcggcgccgctccactctcgtgctgcagctagcggaacagagatccgtggggacatgaacagggtttctcctctctgttgagctactattatatggcatattctgtcatgcaaatgatggtggttgtaagttgtgattgaggaactccattgtttgagaaatggatgaaacaccaactagttctgggcaatctgaagatagttcatgtgaacctaattggtggccaccagacttattagagaagatagagtctgcttccatatcaaggaaacatgatgttttgggtaatctaaggtcctcatcctggaaggcatcacaattactgtggtcaacaggatcttattcagggttaatccctaatggtttctattcaatcatcccggataaaaagttgaaggagactttcccaacaattccatcggtagatgacctgcaaactcttgaagcagatgggcttaaggctgacataattattgtagacactgagagggataagaaggttttcatgttgaagcagcttagtgctgcacttgtgaaagggttaagctctagcccagcattagtgataaagaaaatagcaggtttggtttttgactgcttcaagcgacaaaatcctgacgccagtccagcaaaaggctcgattgaagatactcatttctttggatataaaggaccacaacttctagggcagataagacatggatcatgccgacctcgagctattctatttaaagttcttgcagatgctgttggccttgagagtaaacttgtagttggtctacctgatgacggtgccgttggatttgtggactcctacaaacatatgtctgtggtagtttcgctaaactctatggaactgctagtggatcttatgcgatttccaggccagttgattccattttcagctaaggctatctttatatcgcatatatctgctgcgggtgaaagtgactcagctgaaaatgactcctgtgattctccccttgagcccaacagccctctgtatggattgtctgataaagttgaaactgaaggaattgaatcttcatcaaatctatctggacgatcactgcgtaatatgatgttgagatcaaggacattttctgaggggaaattaagcacgtcatgtagtgaaccgaatatagcgaatgccttttggaggcacagtcaaaggagaggagttgccgaggaaccccgtggtgctagttccagtcctgagcatccattaatgagagcaaggggaagatctatacttggtggtgagaagcaatcatttcaagaatacacagaatctggagctgcttcaagatcagatggtcttgggggcacttcaacctctaatgctcgaagaataaggcgtagaagcattagcatcacccctgagattggagatgacattgtgagggcagttcgggctatgaacgaaacactaaagcaaaatcgccttcaaagggatcatgtcgaaggttcatgctcatatgttacggaagaccaaagcaacgccaatgactgcccaaataaagatgatgcatctcggataattggtgctactgacagtgactcaagaaaccgaactggtcctactcaaaaggccatgtcattgccttcttcgcctcatgaatataggggtcaagatacccaaaaaggtgatgattttataagtaaagagaagatggcattggcatggaacaaagttttccagagctccccatttcttaacaagcccttgctgccgtttgaggaatggaacatagatttctctgagataacaattggcacgcgggttggaataggattcttcggagaagttttccgtggtatatggaatggaaccgatgttgccatcaaagtatttctagaacaggacttgacaactgaaaacatggaagatttttgcaacgagatatacatcctgagccggttgcgacatccaaacgttatattgtttcttggtgcatgcattacacctccacacttgtcaatggttactgaatatatggaaatgggatcactgtattatctcatccatatgagtggtcagaaaaagaaacttagttggcgtaggaggttgaaaattattcgtgatatatgcagggggttgatgtgcatacaccgcatgaagatagttcacagggatctcaaaagtgcaaactgcctggtgaacaaacattggactgttaagatatgtgactttggtctatctcgagtgatgattgatagtcctatgactgataattcctctgctggcaccccggaatggatggcccctgagcttatacggaatgaaccttttacagagaaatgtgatatattcagccttggtgttatcatgtgggagctgtgcacattgagtcgcccatgggaaggcatctccccagttcaagtggtgtacgcagttgctaatgaaggttcgcggcttgagattcctgaaggacctctcggcaggttgattgcagattgctgggcagagcctgagaatcggccgagctgccaggagatcctaacccgtttgctggactgcgaatacactgtcagctgaaatggaagctgctcgctcgtccactcaattcctgcacaggtggaaacatttcttgtataaaacctgtaaaaaaggctgccgattctgcggacttgaggtcacatatcgaagcgctgtgtttttttttaaacaatggcgaccctttctcaaaaaaaatgtaaaaatgattccctggttatagaagaacatgtctgattcgatagacgtgccttgcatcgcagggcaagctggttgttgtaccttattctagataagtagcacgcccgcgaatgctgttcggctttcaaatagctgcagctgcaaatttttacctgttgctacagtatttcctttctatataaccaggcggcagcagcagccgaatgttgccagtacgttggagatggcataagcaactccatgttgtgaactgttccctcgcgaccataaagaacatgccatcctagatttggaataaaaatattgtcaaaatttgtat

SEQ ID NO: 205673 - DNA, 3266 bp, Zea Mays
cgacgcctcccacagctggagaccgtactttactggcactggcagtaatcttcccacccgcctcggcgcctcctccctctctcccaacatcgcccgctctctcctcgctgttctccgctgtcatctcccccggagaagcgtggctcctgtagccggcctcctacctgcccctcctccgcgcgccgagcaccagacgacgcgacacggccgagcacggtcgctgcttccgcggcggcgccgctccactctcgtgctgcagctagcggaacagagatccgtggggacatgaacagggtttctcctctctgttggtatgaactaaattgatcgatggtcctattgaatatagagctactattatatggcatattctgtcatgcaaatgatggtggttgtaagttgtgattgaggaactccattgtttgagaaatggatgaaacaccaactagttctgggcaatctgaagatagttcatgtgaacctaattggtggccaccagacttattagagaagatagagtctgcttccatatcaaggaaacatgatgttttgggtaatctaaggtcctcatcctggaaggcatcacaattactgtggtcaacaggatcttattcagggttaatccctaatggtttctattcaatcatcccggataaaaagttgaaggagactttcccaacaattccatcggtagatgacctgcaaactcttgaagcagatgggcttaaggctgacataattattgtagacactgagagggataagaaggttttcatgttgaagcagcttagtgctgcacttgtgaaagggttaagctctagcccagcattagtgataaagaaaatagcaggtttggtttttgactgcttcaagcgacaaaatcctgacgccagtccagcaaaaggctcgattgaagatactcatttctttggatataaaggaccacaacttctagggcagataagacatggatcatgccgacctcgagctattctatttaaagttcttgcagatgctgttggccttgagagtaaacttgtagttggtctacctgatgacggtgccgttggatttgtggactcctacaaacatatgtctgtggtagtttcgctaaactctatggaactgctagtggatcttatgcgatttccaggccagttgattccattttcagctaaggctatctttatatcgcatatatctgctgcgggtgaaagtgactcagctgaaaatgactcctgtgattctccccttgagcccaacagccctctgtatggattgtctgataaagttgaaactgaaggaattgaatcttcatcaaatctatctggacgatcactgcgtaatatgatgttgagatcaaggacattttctgaggggaaattaagcacgtcatgtagtgaaccgaatatagcgaatgccttttggaggcacagtcaaaggagaggagttgccgaggaaccccgtggtgctagttccagtcctgagcatccattaatgagagcaaggggaagatctatacttggtggtgagaagcaatcatttcaagaatacacagaatctggagctgcttcaagatcagatggtcttgggggcacttcaacctctaatgctcgaagaataaggcgtagaagcattagcatcacccctgagattggagatgacattgtgagggcagttcgggctatgaacgaaacactaaagcaaaatcgccttcaaagggatcatgtcgaaggttcatgctcatatgttacggaagaccaaagcaacgccaatgactgcccaaataaagatgatgcatctcggataattggtgctactgacagtgactcaagaaaccgaactggtcctactcaaaaggccatgtcattgccttcttcgcctcatgaatataggggtcaagatacccaaaaaggtgatgattttataagtaaagagaagatggcattggcatggaacaaagttttccagagctccccatttcttaacaagcccttgctgccgtttgaggaatggaacatagatttctctgagataacaattggcacgcgggttggaataggattcttcggagaagttttccgtggtatatggaatggaaccgatgttgccatcaaagtatttctagaacaggacttgacaactgaaaacatggaagatttttgcaacgagatatacatcctgagttatattgtttcttggtgcatgcattacacctccacacttgtcaatggttactgaatatatggaaatgggatcactgtattatctcatccatatgagtggtcagaaaaagaaacttagttggcgtaggaggttgaaaattattcgtgatatatgcagggggttgatgtgcatacaccgcatgaagatagttcacagggatctcaaaagtgcaaactgcctggtgaacaaacattggactgttaagatatgtgactttggtctatctcgagtgatgattgatagtcctatgactgataattcctctgctggcaccccggaatggatggcccctgagcttatacggaatgaaccttttacagagaaatgtgatatattcagccttggtgttatcatgtgggagctgtgcacattgagtcgcccatgggaaggcatctccccagttcaagtggtgtacgcagttgctaatgaaggttcgcggcttgagattcctgaaggacctctcggcaggttgattgcagattgctgggcagagcctgagaatcggccgagctgccaggagatcctaacccgtttgctggactgcgaatacactgtcagctgaaatggaagctgctcgctcgtccactcaattcctgcacaggtggaaacatttcttgtataaaacctgtaaaaaaggctgccgattctgcggacttgaggtcacatatcgaagcgctgtgtttttttttaaacaatggcgaccctttctcaaaaaaaatgtaaaaatgattccctggttatagaagaacatgtctgattcgatagacgtgccttgcatcgcagggcaagctggttgttgtaccttattctagataagtagcacgcccgcgaatgctgttcggctttcaaatagctgcagctgcaaatttttacctgttgctacagtatttcctttctatataaccaggcggcagcagcagccgaatgttgccagtacgttggagatggcataagcaactccatgttgtgaactgttccctcgcgaccataaagaacatgccatcctagatttggaataaaaatattgtcaaaatttgtat

SEQ ID NO: 205674 - DNA, 3281 bp, Zea Mays
cgacgcctcccacagctggagaccgtactttactggcactggcagtaatcttcccacccgcctcggcgcctcctccctctctcccaacatcgcccgctctctcctcgctgttctccgctgtcatctcccccggagaagcgtggctcctgtagccggcctcctacctgcccctcctccgcgcgccgagcaccagacgacgcgacacggccgagcacggtcgctgcttccgcggcggcgccgctccactctcgtgctgcagctagcggaacagagatccgtggggacatgaacagggtttctcctctctgttggtatgaactaaattgatcgatggtcctattgaatatagagctactattatatggcatattctgtcatgcaaatgatggtggttgtaagttgtgattgaggaactccattgtttgagaaatggatgaaacaccaactagttctgggcaatctgaagatagttcatgtgaacctaattggtggccaccagacttattagagaagatagagtctgcttccatatcaaggaaacatgatgttttgggtaatctaaggtcctcatcctggaaggcatcacaattactgtggtcaacaggatcttattcagggttaatccctaatggtttctattcaatcatcccggataaaaagttgaaggagactttcccaacaattccatcggtagatgacctgcaaactcttgaagcagatgggcttaaggctgacataattattgtagacactgagagggataagaaggttttcatgttgaagcagcttagtgctgcacttgtgaaagggttaagctctagcccagcattagtgataaagaaaatagcaggtttttgactgcttcaagcgacaaaatcctgacgccagtccagcaaaaggctcgattgaagatactcatttctttggatataaaggaccacaacttctagggcagataagacatggatcatgccgacctcgagctattctatttaaagttcttgcagatgctgttggccttgagagtaaacttgtagttggtctacctgatgacggtgccgttggatttgtggactcctacaaacatatgtctgtggtagtttcgctaaactctatggaactgctagtggatcttatgcgatttccaggccagttgattccattttcagctaaggctatctttatatcgcatatatctgctgcgggtgaaagtgactcagctgaaaatgactcctgtgattctccccttgagcccaacagccctctgtatggattgtctgataaagttgaaactgaaggaattgaatcttcatcaaatctatctggacgatcactgcgtaatatgatgttgagatcaaggacattttctgaggggaaattaagcacgtcatgtagtgaaccgaatatagcgaatgccttttggaggcacagtcaaaggagaggagttgccgaggaaccccgtggtgctagttccagtcctgagcatccattaatgagagcaaggggaagatctatacttggtggtgagaagcaatcatttcaagaatacacagaatctggagctgcttcaagatcagatggtcttgggggcacttcaacctctaatgctcgaagaataaggcgtagaagcattagcatcacccctgagattggagatgacattgtgagggcagttcgggctatgaacgaaacactaaagcaaaatcgccttcaaagggatcatgtcgaaggttcatgctcatatgttacggaagaccaaagcaacgccaatgactgcccaaataaagatgatgcatctcggataattggtgctactgacagtgactcaagaaaccgaactggtcctactcaaaaggccatgtcattgccttcttcgcctcatgaatataggggtcaagatacccaaaaaggtgatgattttataagtaaagagaagatggcattggcatggaacaaagttttccagagctccccatttcttaacaagcccttgctgccgtttgaggaatggaacatagatttctctgagataacaattggcacgcgggttggaataggattcttcggagaagttttccgtggtatatggaatggaaccgatgttgccatcaaagtatttctagaacaggacttgacaactgaaaacatggaagatttttgcaacgagatatacatcctgagccggttgcgacatccaaacgttatattgtttcttggtgcatgcattacacctccacacttgtcaatggttactgaatatatggaaatgggatcactgtattatctcatccatatgagtggtcagaaaaagaaacttagttggcgtaggaggttgaaaattattcgtgatatatgcagggggttgatgtgcatacaccgcatgaagatagttcacagggatctcaaaagtgcaaactgcctggtgaacaaacattggactgttaagatatgtgactttggtctatctcgagtgatgattgatagtcctatgactgataattcctctgctggcaccccggaatggatggcccctgagcttatacggaatgaaccttttacagagaaatgtgatatattcagccttggtgttatcatgtgggagctgtgcacattgagtcgcccatgggaaggcatctccccagttcaagtggtgtacgcagttgctaatgaaggttcgcggcttgagattcctgaaggacctctcggcaggttgattgcagattgctgggcagagcctgagaatcggccgagctgccaggagatcctaacccgtttgctggactgcgaatacactgtcagctgaaatggaagctgctcgctcgtccactcaattcctgcacaggtggaaacatttcttgtataaaacctgtaaaaaaggctgccgattctgcggacttgaggtcacatatcgaagcgctgtgtttttttttaaacaatggcgaccctttctcaaaaaaaatgtaaaaatgattccctggttatagaagaacatgtctgattcgatagacgtgccttgcatcgcagggcaagctggttgttgtaccttattctagataagtagcacgcccgcgaatgctgttcggctttcaaatagctgcagctgcaaatttttacctgttgctacagtatttcctttctatataaccaggcggcagcagcagccgaatgttgccagtacgttggagatggcataagcaactccatgttgtgaactgttccctcgcgaccataaagaacatgccatcctagatttggaataaaaatattgtcaaaatttgtat

SEQ ID NO: 205675 - DNA, 3039 bp, Zea Mays
aaaatatgcctatcctcaatatcaggttgcagcaccaaatcagataaagcatcccagaggtatgaactaaattgatcgatggtcctattgaatatagagctactattatatggcatattctgtcatgcaaatgatggtggttgtaagttgtgattgaggaactccattgtttgagaaatggatgaaacaccaactagttctgggcaatctgaagatagttcatgtgaacctaattggtggccaccagacttattagagaagatagagtctgcttccatatcaaggaaacatgatgttttgggtaatctaaggtcctcatcctggaaggcatcacaattactgtggtcaacaggatcttattcagggttaatccctaatggtttctattcaatcatcccggataaaaagttgaaggagactttcccaacaattccatcggtagatgacctgcaaactcttgaagcagatgggcttaaggctgacataattattgtagacactgagagggataagaaggttttcatgttgaagcagcttagtgctgcacttgtgaaagggttaagctctagcccagcattagtgataaagaaaatagcaggtttggtttttgactgcttcaagcgacaaaatcctgacgccagtccagcaaaaggctcgattgaagatactcatttctttggatataaaggaccacaacttctagggcagataagacatggatcatgccgacctcgagctattctatttaaagttcttgcagatgctgttggccttgagagtaaacttgtagttggtctacctgatgacggtgccgttggatttgtggactcctacaaacatatgtctgtggtagtttcgctaaactctatggaactgctagtggatcttatgcgatttccaggccagttgattccattttcagctaaggctatctttatatcgcatatatctgctgcgggtgaaagtgactcagctgaaaatgactcctgtgattctccccttgagcccaacagccctctgtatggattgtctgataaagttgaaactgaaggtgcagaattgaatcttcatcaaatctatctggacgatcactgcgtaatatgatgttgagatcaaggacattttctgaggggaaattaagcacgtcatgtagtgaaccgaatatagcgaatgccttttggaggcacagtcaaaggagaggagttgccgaggaaccccgtggtgctagttccagtcctgagcatccattaatgagagcaaggggaagatctatacttggtggtgagaagcaatcatttcaagaatacacagaatctggagctgcttcaagatcagatggtcttgggggcacttcaacctctaatgctcgaagaataaggcgtagaagcattagcatcacccctgagattggagatgacattgtgagggcagttcgggctatgaacgaaacactaaagcaaaatcgccttcaaagggatcatgtcgaaggttcatgctcatatgttacggaagaccaaagcaacgccaatgactgcccaaataaagatgatgcatctcggataattggtgctactgacagtgactcaagaaaccgaactggtcctactcaaaaggccatgtcattgccttcttcgcctcatgaatataggggtcaagatacccaaaaaggtgatgattttataagtaaagagaagatggcattggcatggaacaaagttttccagagctccccatttcttaacaagcccttgctgccgtttgaggaatggaacatagatttctctgagataacaattggcacgcgggttggaataggattcttcggagaagttttccgtggtatatggaatggaaccgatgttgccatcaaagtatttctagaacaggacttgacaactgaaaacatggaagatttttgcaacgagatatacatcctgagccggttgcgacatccaaacgttatattgtttcttggtgcatgcattacacctccacacttgtcaatggttactgaatatatggaaatgggatcactgtattatctcatccatatgagtggtcagaaaaagaaacttagttggcgtaggaggttgaaaattattcgtgatatatgcagggggttgatgtgcatacaccgcatgaagatagttcacagggatctcaaaagtgcaaactgcctggtgaacaaacattggactgttaagatatgtgactttggtctatctcgagtgatgattgatagtcctatgactgataattcctctgctggcaccccggaatggatggcccctgagcttatacggaatgaaccttttacagagaaatgtgatatattcagccttggtgttatcatgtgggagctgtgcacattgagtcgcccatgggaaggcatctccccagttcaagtggtgtacgcagttgctaatgaaggttcgcggcttgagattcctgaaggacctctcggcaggttgattgcagattgctgggcagagcctgagaatcggccgagctgccaggagatcctaacccgtttgctggactgcgaatacactgtcagctgaaatggaagctgctcgctcgtccactcaattcctgcacaggtggaaacatttcttgtataaaacctgtaaaaaaggctgccgattctgcggacttgaggtcacatatcgaagcgctgtgtttttttttaaacaatggcgaccctttctcaaaaaaaatgtaaaaatgattccctggttatagaagaacatgtctgattcgatagacgtgccttgcatcgcagggcaagctggttgttgtaccttattctagataagtagcacgcccgcgaatgctgttcggctttcaaatagctgcagctgcaaatttttacctgttgctacagtatttcctttctatataaccaggcggcagcagcagccgaatgttgccagtacgttggagatggcataagcaactccatgttgtgaactgttccctcgcgaccataaagaacatgccatcctagatttggaataaaaatattgtcaaaatttgtat

SEQ ID NO: 205676 - DNA, 3000 bp, Zea Mays
ccaaatcagataaagcatcccagaggtatgaactaaattgatcgatggtcctattgaatatagagctactattatatggcatattctgtcatgcaaatgatggtggttgtaagttgtgattgaggaactccattgtttgagaaatggatgaaacaccaactagttctgggcaatctgaagatagttcatgtgaacctaattggtggccaccagacttattagagaagatagagtctgcttccatatcaaggaaacatgatgttttgggtaatctaaggtcctcatcctggaaggcatcacaattactgtggtcaacaggatcttattcagggttaatccctaatggtttctattcaatcatcccggataaaaagttgaaggagactttcccaacaattccatcggtagatgacctgcaaactcttgaagcagatgggcttaaggctgacataattattgtagacactgagagggataagaaggttttcatgttgaagcagcttagtgctgcacttgtgaaagggttaagctctagcccagcattagtgataaagaaaatagcaggtttggtttttgactgcttcaagcgacaaaatcctgacgccagtccagcaaaaggctcgattgaagatactcatttctttggatataaaggaccacaacttctagggcagataagacatggatcatgccgacctcgagctattctatttaaagttcttgcagatgctgttggccttgagagtaaacttgtagttggtctacctgatgacggtgccgttggatttgtggactcctacaaacatatgtctgtggtagtttcgctaaactctatggaactgctagtggatcttatgcgatttccaggccagttgattccattttcagctaaggctatctttatatcgcatatatctgctgcgggtgaaagtgactcagctgaaaatgactcctgtgattctccccttgagcccaacagccctctgtatggattgtctgataaagttgaaactgaaggaattgaatcttcatcaaatctatctggacgatcactgcgtaatatgatgttgagatcaaggacattttctgaggggaaattaagcacgtcatgtagtgaaccgaatatagcgaatgccttttggaggcacagtcaaaggagaggagttgccgaggaaccccgtggtgctagttccagtcctgagcatccattaatgagagcaaggggaagatctatacttggtggtgagaagcaatcatttcaagaatacacagaatctggagctgcttcaagatcagatggtcttgggggcacttcaacctctaatgctcgaagaataaggcgtagaagcattagcatcacccctgagattggagatgacattgtgagggcagttcgggctatgaacgaaacactaaagcaaaatcgccttcaaagggatcatgtcgaaggttcatgctcatatgttacggaagaccaaagcaacgccaatgactgcccaaataaagatgatgcatctcggataattggtgctactgacagtgactcaagaaaccgaactggtcctactcaaaaggccatgtcattgccttcttcgcctcatgaatataggggtcaagatacccaaaaaggtgatgattttataagtaaagagaagatggcattggcatggaacaaagttttccagagctccccatttcttaacaagcccttgctgccgtttgaggaatggaacatagatttctctgagataacaattggcacgcgggttggaataggattcttcggagaagttttccgtggtatatggaatggaaccgatgttgccatcaaagtatttctagaacaggacttgacaactgaaaacatggaagatttttgcaacgagatatacatcctgagccggttgcgacatccaaacgttatattgtttcttggtgcatgcattacacctccacacttgtcaatggttactgaatatatggaaatgggatcactgtattatctcatccatatgagtggtcagaaaaagaaacttagttggcgtaggaggttgaaaattattcgtgatatatgcagggggttgatgtgcatacaccgcatgaagatagttcacagggatctcaaaagtgcaaactgcctggtgaacaaacattggactgttaagatatgtgactttggtctatctcgagtgatgattgatagtcctatgactgataattcctctgctggcaccccggaatggatggcccctgagcttatacggaatgaaccttttacagagaaatgtgatatattcagccttggtgttatcatgtgggagctgtgcacattgagtcgcccatgggaaggcatctccccagttcaagtggtgtacgcagttgctaatgaaggttcgcggcttgagattcctgaaggacctctcggcaggttgattgcagattgctgggcagagcctgagaatcggccgagctgccaggagatcctaacccgtttgctggactgcgaatacactgtcagctgaaatggaagctgctcgctcgtccactcaattcctgcacaggtggaaacatttcttgtataaaacctgtaaaaaaggctgccgattctgcggacttgaggtcacatatcgaagcgctgtgtttttttttaaacaatggcgaccctttctcaaaaaaaatgtaaaaatgattccctggttatagaagaacatgtctgattcgatagacgtgccttgcatcgcagggcaagctggttgttgtaccttattctagataagtagcacgcccgcgaatgctgttcggctttcaaatagctgcagctgcaaatttttacctgttgctacagtatttcctttctatataaccaggcggcagcagcagccgaatgttgccagtacgttggagatggcataagcaactccatgttgtgaactgttccctcgcgaccataaagaacatgccatcctagatttggaataaaaatattgtcaaaatttgtat

SEQ ID NO: 205677 - DNA, 2291 bp, Zea Mays
attcaactctaactgttgatcactttttttgtggaaaaaccattgatcactttagtccagttctctttatcttttgtatcattgctttaatttcttgttgtgaaacctttattgctgagatgaggacaaaatggtattattatggttgaacgaacaattctaggtgctatctattatgatagatgtgaagattgcttttggagaactaacctttgttctttggaggccggtcaaggaggcagcaaaatgtgcctctgaacctgcgggtcaagtttttttgcagtagacgttgcatggcccgggaggaggacatcatcgccgcacacgtgttcctggagagccataatgttatgctcatcgacaggcctagatggggatgacataccagagcacgggaggacaccatcgctgctcacctgttcctggagagccataacgttaggctcatcgatagtgaagaacaatttggagtataagtaacatgattcctgagcatccattaatgagagcaaggggaagatctatacttggtggtgagaagcaatcatttcaagaatacacagaatctggagctgcttcaagatcagatggtcttgggggcacttcaacctctaatgctcgaagaataaggcgtagaagcattagcatcacccctgagattggagatgacattgtgagggcagttcgggctatgaacgaaacactaaagcaaaatcgccttcaaagggatcatgtcgaaggttcatgctcatatgttacggaagaccaaagcaacgccaatgactgcccaaataaagatgatgcatctcggataattggtgctactgacagtgactcaagaaaccgaactggtcctactcaaaaggccatgtcattgccttcttcgcctcatgaatataggggtcaagatacccaaaaaggtgatgattttataagtaaagagaagatggcattggcatggaacaaagttttccagagctccccatttcttaacaagcccttgctgccgtttgaggaatggaacatagatttctctgagataacaattggcacgcgggttggaataggattcttcggagaagttttccgtggtatatggaatggaaccgatgttgccatcaaagtatttctagaacaggacttgacaactgaaaacatggaagatttttgcaacgagatatacatcctgagccggttgcgacatccaaacgttatattgtttcttggtgcatgcattacacctccacacttgtcaatggttactgaatatatggaaatgggatcactgtattatctcatccatatgagtggtcagaaaaagaaacttagttggcgtaggaggttgaaaattattcgtgatatatgcagggggttgatgtgcatacaccgcatgaagatagttcacagggatctcaaaagtgcaaactgcctggtgaacaaacattggactgttaagatatgtgactttggtctatctcgagtgatgattgatagtcctatgactgataattcctctgctggcaccccggaatggatggcccctgagcttatacggaatgaaccttttacagagaaatgtgatatattcagccttggtgttatcatgtgggagctgtgcacattgagtcgcccatgggaaggcatctccccagttcaagtggtgtacgcagttgctaatgaaggttcgcggcttgagattcctgaaggacctctcggcaggttgattgcagattgctgggcagagcctgagaatcggccgagctgccaggagatcctaacccgtttgctggactgcgaatacactgtcagctgaaatggaagctgctcgctcgtccactcaattcctgcacaggtggaaacatttcttgtataaaacctgtaaaaaaggctgccgattctgcggacttgaggtcacatatcgaagcgctgtgtttttttttaaacaatggcgaccctttctcaaaaaaaatgtaaaaatgattccctggttatagaagaacatgtctgattcgatagacgtgccttgcatcgcagggcaagctggttgttgtaccttattctagataagtagcacgcccgcgaatgctgttcggctttcaaatagctgcagctgcaaatttttacctgttgctacagtatttcctttctatataaccaggcggcagcagcagccgaatgttgccagtacgttggagatggcataagcaactccatgttgtgaactgttccctcgcgaccataaagaacatgccatcctagatttggaataaaaatattgtcaaaatttgtat

SEQ ID NO: 205678 - DNA, 2242 bp, Zea Mays
attcaactctaactgttgatcactttttttgtggaaaaaccattgatcactttagtccagttctctttatcttttgtatcattgctttaatttcttgttgtgaaacctttattgctgagatgaggacaaaatggtattattatggttgaacgaacaattctaggtgctatctattatgatagatgtgaagattgcttttggagaactaacctttgttctttggaggccggtcaaggaggcagcaaaatgtgcctctgaacctgcgggtcaagtttttttgcagtagacgttgcatggcccgggaggaggacatcatcgccgcacacgtgttcctggagagccataatgttatgctcatcgacaggcctagatggggatgacataccagagcacgggaggacaccatcgctgctcacctgttcctggagagccataactcctgagcatccattaatgagagcaaggggaagatctatacttggtggtgagaagcaatcatttcaagaatacacagaatctggagctgcttcaagatcagatggtcttgggggcacttcaacctctaatgctcgaagaataaggcgtagaagcattagcatcacccctgagattggagatgacattgtgagggcagttcgggctatgaacgaaacactaaagcaaaatcgccttcaaagggatcatgtcgaaggttcatgctcatatgttacggaagaccaaagcaacgccaatgactgcccaaataaagatgatgcatctcggataattggtgctactgacagtgactcaagaaaccgaactggtcctactcaaaaggccatgtcattgccttcttcgcctcatgaatataggggtcaagatacccaaaaaggtgatgattttataagtaaagagaagatggcattggcatggaacaaagttttccagagctccccatttcttaacaagcccttgctgccgtttgaggaatggaacatagatttctctgagataacaattggcacgcgggttggaataggattcttcggagaagttttccgtggtatatggaatggaaccgatgttgccatcaaagtatttctagaacaggacttgacaactgaaaacatggaagatttttgcaacgagatatacatcctgagccggttgcgacatccaaacgttatattgtttcttggtgcatgcattacacctccacacttgtcaatggttactgaatatatggaaatgggatcactgtattatctcatccatatgagtggtcagaaaaagaaacttagttggcgtaggaggttgaaaattattcgtgatatatgcagggggttgatgtgcatacaccgcatgaagatagttcacagggatctcaaaagtgcaaactgcctggtgaacaaacattggactgttaagatatgtgactttggtctatctcgagtgatgattgatagtcctatgactgataattcctctgctggcaccccggaatggatggcccctgagcttatacggaatgaaccttttacagagaaatgtgatatattcagccttggtgttatcatgtgggagctgtgcacattgagtcgcccatgggaaggcatctccccagttcaagtggtgtacgcagttgctaatgaaggttcgcggcttgagattcctgaaggacctctcggcaggttgattgcagattgctgggcagagcctgagaatcggccgagctgccaggagatcctaacccgtttgctggactgcgaatacactgtcagctgaaatggaagctgctcgctcgtccactcaattcctgcacaggtggaaacatttcttgtataaaacctgtaaaaaaggctgccgattctgcggacttgaggtcacatatcgaagcgctgtgtttttttttaaacaatggcgaccctttctcaaaaaaaatgtaaaaatgattccctggttatagaagaacatgtctgattcgatagacgtgccttgcatcgcagggcaagctggttgttgtaccttattctagataagtagcacgcccgcgaatgctgttcggctttcaaatagctgcagctgcaaatttttacctgttgctacagtatttcctttctatataaccaggcggcagcagcagccgaatgttgccagtacgttggagatggcataagcaactccatgttgtgaactgttccctcgcgaccataaagaacatgccatcctagatttggaataaaaatattgtcaaaatttgtat

SEQ ID NO: 205679 - DNA, 1098 bp, Zea Mays
gcagttttgcctgtggtcaatggtcgtcgcttcattggtcaaaccttgagagccccggttcagcaatcgcagttccacaaggcggcgatggacggcggcggggtcgatacggccacgacggcggcctggatggagaagcaccggcacatgtacgagcgggccacccggcacccgttcaccgtctccatccgcgacggtaccgtcgacatgtctgccttcaagcgctggctgaaaattgaagtggctaagctttgaccttttcatgtctgattcttgagccaggactatctgtttgtaagggaatttgttgcattcatagcaagtgtactgctcaaatgctgcaagcaagaagacagctcggacatggaaatcatcctgggtggagtagcgtctatcagcgacgagatctcttggttcaagaacgaagctactgtatggggcgtcgatctagcaagtgtttcccccttaaaagccaatctagagtaccacaggtttctccggagctttactgagccagagattagctatgctgttgctgtaactaccttctggacgatcgaaaccgtgtaccaggacagctttggtttctgcatacaagacggcaacaagacgccgccggagctcctgggcacctgccagagatggggcagcgccgggttcagacagtactgccagtctctgcagagcatcgtggatcgttgcttggctaacgcaccggctgatgctgtccagagtgctgaagaggccttcgtccgggtactcgagctggaaattggtttctgggatatgagctcttctcggtcctaattaccagcgtgttctctgagtccaaacatctacgcaaataatcgaacgaaataaatggtgcttcgggctcagacccaggttttccccatgtcaccttattcctatctttggttttcgcgtgacagtactttccgctgccggttcagaaaggactgatatgatgctgccatgtgggatccgatcagatttgctgcatgcacaggtgaaactccatcttacactcaatttttgtaagcatgctataacaaaaaaaactagacgttgtagagagattctacaagtagattaagg

SEQ ID NO: 205680 - DNA, 971 bp, Zea Mays
gcagttttgcctgtggtcaatggtcgtcgcttcattggtcaaaccttgagagccccggttcagcaatcgcagttccacaaggcggcgatggacggcggcggggtcgatacggccacgacggcggcctggatggagaagcaccggcacatgtacgagcgggccacccggcacccgttcaccgtctccatccgcgacggtaccgtcgacatgtctgccttcaagcgctggctgagccaggactatctgtttgtaagggaatttgttgcattcatagcaagtgtactgctcaaatgctgcaagcaagaagacagctcggacatggaaatcatcctgggtggagtagcgtctatcagcgacgagatctcttggttcaagaacgaagctactgtatggggcgtcgatctagcaagtgtttcccccttaaaagccaatctagagtaccacaggacagctttggtttctgcatacaagacggcaacaagacgccgccggagctcctgggcacctgccagagatggggcagcgccgggttcagacagtactgccagtctctgcagagcatcgtggatcgttgcttggctaacgcaccggctgatgctgtccagagtgctgaagaggccttcgtccgggtactcgagctggaaattggtttctgggatatgagctcttctcggtcctaattaccagcgtgttctctgagtccaaacatctacgcaaataatcgaacgaaataaatggtgcttcgggctcagacccaggttttccccatgtcaccttattcctatctttggttttcgcgtgacagtactttccgctgccggttcagaaaggactgatatgatgctgccatgtgggatccgatcagatttgctgcatgcacaggtgaaactccatcttacactcaatttttgtaagcatgctataacaaaaaaaactagacgttgtagagagattctacaagtagattaagg

SEQ ID NO: 205681 - DNA, 1741 bp, Zea Mays
gcagttttgcctgtggtcaatggtcgtcgcttcattggtcaaaccttgagagccccggttcagcaatcgcagttccacaaggcggcgatggacggcggcggggtcgatacggccacgacggcggcctggatggagaagcaccggcacatgtacgagcgggccacccggcacccgttcaccgtctccatccgcgacggtaccgtcgacatgtctgccttcaagcgctggctgaaaattgaagtggctaagctttgaccttttcatgtctgattcttggttcgtggtgtcgggcatcgagatctgtacatcaatctaaatactaccaagaagtcttggagttgctaccaagttaacaaaaattagtgtgcacggctatgaaattgagtgactagttgcgtgattcgagtcagaggtgtttctgggagaactgtgaatttaaaattgaacctgaaagcgtgaaggcaaacgatctttatcggcatatactgatactgcgtctgtgaagatcttgtgtttccagtggactagtcactctgaatgttgttattctgctgttgcttcctgttgacaaaaataactccagaatagaattggctcttagttgacactgtccaattatgatagtataaagtgatgaaggatcttgttcagagaactgtgcaaaaaagaactcaactgagtcaactcctagttgagcatagtattctgtaatttttttttaaaagttactctatatgatcttgggttctttttctagttgaaagcattttggttggtcataattacagctgtctacacaatgatcaatatgtgctggctaattttctttccgtgattttcttaaataaatttcattttggttatgagtaccatgaggggagaaaaaaaataaacagactggtttcttcgtcatatgcagagccaggactatctgtttgtaagggaatttgttgcattcatagcaagtgtactgctcaaatgctgcaagcaagaagacagctcggacatggaaatcatcctgggtggagtagcgtctatcagcgacgagatctcttggttcaagaacgaagctactgtatggggcgtcgatctagcaagtgtttcccccttaaaagccaatctagagtaccacaggtttctccggagctttactgagccagagattagctatgctgttgctgtaactaccttctggacgatcgaaaccgtgtaccaggacagctttggtttctgcatacaagacggcaacaagacgccgccggagctcctgggcacctgccagagatggggcagcgccgggttcagacagtactgccagtctctgcagagcatcgtggatcgttgcttggctaacgcaccggctgatgctgtccagagtgctgaagaggccttcgtccgggtactcgagctggaaattggtttctgggatatgagctcttctcggtcctaattaccagcgtgttctctgagtccaaacatctacgcaaataatcgaacgaaataaatggtgcttcgggctcagacccaggttttccccatgtcaccttattcctatctttggttttcgcgtgacagtactttccgctgccggttcagaaaggactgatatgatgctgccatgtgggatccgatcagatttgctgcatgcacaggtgaaactccatcttacactcaatttttgtaagcatgctataacaaaaaaaactagacgttgtagagagattctacaagtagattaagg

SEQ ID NO: 205682 - DNA, 1075 bp, Zea Mays
gcagttttgcctgtggtcaatggtcgtcgcttcattggtcaaaccttgagagccccggttcagcaatcgcagttccacaaggcggcgatggacggcggcggggtcgatacggccacgacggcggcctggatggagaagcaccggcacatgtacgagcgggccacccggcacccgttcaccgtctccatccgcgacggtaccgtcgacatgtctgccttcaagcgctggctgagccaggactatctgtttgtaagggaatttgttgcattcatagcaagtgtactgctcaaatgctgcaagcaagaagacagctcggacatggaaatcatcctgggtggagtagcgtctatcagcgacgagatctcttggttcaagaacgaagctactgtatggggcgtcgatctagcaagtgtttcccccttaaaagccaatctagagtaccacaggtttctccggagctttactgagccagagattagctatgctgttgctgtaactaccttctggacgatcgaaaccgtgtaccaggacagctttggtttctgcatacaagacggcaacaagacgccgccggagctcctgggcacctgccagagatggggcagcgccgggttcagacagtactgccagtctctgcagagcatcgtggatcgttgcttggctaacgcaccggctgatgctgtccagagtgctgaagaggccttcgtccgggtactcgagctggaaattggtttctgggatatgagctcttctcggtcctaattaccagcgtgttctctgagtccaaacatctacgcaaataatcgaacgaaataaatggtgcttcgggctcagacccaggttttccccatgtcaccttattcctatctttggttttcgcgtgacagtactttccgctgccggttcagaaaggactgatatgatgctgccatgtgggatccgatcagatttgctgcatgcacaggagtacgctgggatgaacatcgacacatatctaatcagatcttatatttccgtgggggtctggagaaaatttgctcggaagccaaacatgttaagacctaagcatgtgtta

SEQ ID NO: 205683 - DNA, 985 bp, Zea Mays
gtttcttgatttaaacatatgattatgatggatgcagcgtaatagaggtcagtttacatcttcaaaaccaaagcctgatgaaatagcagcatcagaaatggcagctgcagatggctctctgaattgggcactagttgaaggccgacctccatctgctgctgaatgtcatcactgtggtattaatgcaacagctacaccaatgatgcgtcggggacctgatggaccaagaacactatgcaacgcttgtggcctcatgtgggcaaataagggtctcctgagggacctatccaaatctcctgtacctcttcactctatacaacaatcagctccaattctaaatggtggtaacggaagtgccatgtctgcgcttggctctgagctagagaatgctgcagcagccatgggcaatggccacgagccataaggtagtggtgtttagccatgtgctaaagccacgagcatcatcgcgcaatgatctctgcagtaggcggtcagttggagcctgcttagatatatggaatcctgcgcctgtaggttttaagagctgcgacagtgttttgtcccgtgtagtcatgtttgcagccgtcgcagctatagcaagtttgtttcttgtcttgagtcgtgactgttaagaactgatgaagttcattacttacgtgcgtgtagttatacttagatatgagatgttctagccatgcagcaacgttttctatcaatgtcagtaattagggagcgagcgtttgtctcatggattgggcctcgaaacaaagaatcgacgcccaggagctaaactacagaaacatttcagctagagtaggtctggaatgatggaagagaagacaacaatgcaaatgaaattgataaaataacttaatataatatgggacaactatggttcaaatgaaaaagtatggttgacttagatttatgagacatgagatcttacatatataatggtcttgtttagaaagcttgctatacaaac

SEQ ID NO: 205684 - DNA, 852 bp, Zea Mays
ctgcctccctcgtgagggctgttcttgagccagcaatgcaaggaaaagacatgattggccgtgctcgaacagggactgggaagaccctggcttttggtattcctatcatggacaagatcctaagctacaacgagaagactgggttcgtttctctttcacatgtggaattcttttaatttatctaccagggagatagaatatattgtaataattgcatagtacgatgcatgcagaaatggcaggaatcctttagccataatcttggcaccaacaagagaacttgctcggcaggttgagaaggagtttagagaatctgctcccttggacaccctctgtgtatatggaggtgttcctatcaatcagcaaatgagagctcttaactatggtgttgacatagtggtcggaacaccaggtcgagttattgaccttctgagaaggggtgttttaaacctttcacagatccagtttgtggtcctagatgaagctgatcaaatgctggctgtgggtttcgatgaagatgttgaggtgatcatggagcaattgccacagaatcgtcaaagcatgctgttctctgcaacaatgcctagttggataagaaaaatttcgaacaagtacttaaaggatccagttataattgaccttgtgagtgacttcttttattatttgcgtgtgatttttgtcttactttctctagcttgtcttgtgacaatcgtgcattcttttgtatgcatgtatatatgaagtcctgcattgaatagatcttcctgggtctagaaacattgctgaagcatctgatgaacaccaacactttcatttctaaaaagtataccaaatcagcacctggacattatc

SEQ ID NO: 205685 - DNA, 1931 bp, Zea Mays
gtgtagcactctcctctgatccggagtcgagtcgattcgagtccactccgctgtccgctcgcaccaactcctccatccaattccaactcggcaactcctccaggcagcccggtgggtgggtcatcctctccccacgtccaccacggcgatggcgctcgcgcccccgcattgctgacccactcccaccgcggactctccctccctccccgtggtttggttttggtaggtgggggaggttggtaggcgccggggcgtgcctgtcggctggcggtttcgggaagcgctgccgcgatccttgcccggatctgggcgccacgatggaggacgccggccgcgagggcggcactgccgcggagaatgggaccgagggggagggctacgtcctcgtcaaggccgcccccgagggggagggggaccccaccgccgccgccgccggaggcgatcgcgaggatctcgctgcctccgccccggcgatggcgatggcggtggcggctgcggacgaggccgcggcaccggccaagaagggtggatccggggccacgaaggcgaggctgcagaacggcagggtccccgccggaacttccgccgccgccgccgccgccgggccgagggtgaagaagcccggggtcctctcacagagcgcctccttcccggcgcggggcgcggtggcggtcgcggccaagaaggccgcggcggcggttgctacgcccaagcaggccaagggcgccgtgcccattggatcagagacggcggcaggccgggcggtggagaagaaggcgagtttggcgcggacacctgttgctcgccggccgatggtcagatgaaaatacggacaaaccattgaaacaaacacagccagggaaaacagaggatgatgtgcactccaccacatcaagtaccaatactccccgtgcagcagctcgtaagagtgctgctgctgctgctgctggttttagtttcagattggaggagcgtgctgagaagagaaaggagttcttccaaaagcttgaagaaaaaatccatgcgaaggagctggaaaaaacaaatttgcaggagaaatctaaggagagccaagaggctgagatcaaactactgaggaagagcctaacatttaaagccacacctatgccaagcttttacaaggagcagccacccaaagttgagttgaaaaagattcccccaacacgtgccaggtcaccaaggctcggccggcacaaggcagccagttctgctactgctcctgctcctgcagatggttctgtatcatgtgggagcccacggagcactgcaaattcgggcaaggtaaatgaaatcatggagaacatcaaacctcgtgtccctgctagaaaatctattcagaggccagtcacgaaaactccattgcaagtgtctgccaccacaaaggctgaaccaagacccatagctacaaagccgaaaatcgcaaactcgaaacctaaggtttcaagggcaaaggttgcgcaggcgcaaggaaactcagctgaagtccctccttcagaaccttctgcctcggaagagctagtagtcgaacatggcgttggagaagctacaggtcctgatctggcttcacaattggttgcttcgaatgaagtcccagtccatggttgatcaattgcgcattttgcctatttatttccttcttgcagttctgtgaatagtgagggtgtgtgcttcattgaaagttgaatcgctcaaagtgccatggtttatcgtttctggagtaggcatccaaatttttttttcagcttgtcattgagcatgccatgtatattgcttgatattgtgttcatgtttaaaattcccaatcttgtgtatattggatttatatgtctttggacatcctaggattgttgcaatacgtcaatgcaatttgtgcattattttgtagtcgttttacttttagccttttccct

SEQ ID NO: 205686 - DNA, 2319 bp, Zea Mays
gtctggcagttgaaggggagtcccgggctagctgtcaggacggctcagctccagctttgcggccctccagctctccccagttcaagttcaatattggcgagcatgcgagtttgccctcttccgtcgtcgtcatcatcatcgtcctcgcgatcccggcgtccctgtttcggcctacgcctcccgtagacaacagttgcgccctgctctccggcaagctatggccaagctgagctgcttccccgctctgctccccggcaagaggaagaagaagacacgcaagatcaccgatgctatcaaggccagcggcaacgagtgccccaaggtgaagccggtcgaagtcgaactcatcgacccgacgcttggtgcaggcgtcgtccaggacgtcgtccccgccgagctctcggtccccgtggaggaccgcaacaataaggaagcggctgatcaactggtgttggtgaaggagagcgatctgtcagatttcgacttcagcttccacgcggccatgaagcccgtccggtccgacagtgacgtggcactggacacctcggccgacgctgcggtggcggacacatcgccgaagctgaagcggtcttgctccaacatcgagactaagcgaccaggctcgcgttccgcgcccgagatgccggcccggtcgcgctcctacggcgatctgggcaacctggtcgccggcctcgccctggacgcgacggcgaccccgcacggcgcgccggaggccagtccggcgtccgtgaagacgtcgcgcactgccgaccgcgtgatgctgaagaagcggtcgtccagccaggtgctgccctcgcgcagccggaagctctggtggcggctcttcctctggagccaccgcaacctgcacatgccgcggtcggcgcgcacggcccaccgatcgttctcgcctggccgccacgacgggtacacctcggacacgttcgaggagggcccggccgccgaccgcaagaacaagacggtcatggtcgacgagtcgccgccagcagcgtctgtgcccaaccagtgggtcgccttctgcgccgagagctccatccacgaccgcgtcagcgcgtgggtcagcagcatcgaaagcgagcctccgttcgatatcgccgaggaggatgacgacaactacgacggagaggacgatgaggagaatggcgagtgtgcggcgtcgcagccgcgccatctcgagctcggggagccatcgtccgggaagggcggaaacagcaaatccaagcgctgcgcaacgacggccgacgaggtcgtccaggccaacaccgtggtgcagtccctgaacgccttctcgtcggtggcgcacatctcagggatgggcctcaaggtggtgccgatgatcgcgcccttctcaaccctccgggccgtcaacctctccagcaacctcatcgttcatatctcccctggatcgctgcccaagggcctccactctcttgatctgtccaggaacaagattgccagcgtcgagggcctccgggagctcacaaagctacgcgtgctcaacctcagctacaacaggatttcgcggattgggcatggtctgtcgaactgcacggccatccgggagctgtacctggcgggcaacaagatcagcgacgtggagggtctgcaccggctgctgaagctggcggtgctggacctgagcttcaacaagattacgacggccaaggcgctggggcagctggtggccaactaccactccctcctggcgctcaacctcgtaggcaacccggtgcaggccaacatcggcgacgacgccctgcgccgggcggtcacgggcctcctcccgagccttgcctacctcaacaagcagcccgtgaagccgcagcgcatcgcgcgggaggtggccacggacagcatcgcgcgcgccgcgctcagcggctcggacagccggagcatccggaagaggacgtcgcggcggctcacgcagagcccccgctcgtcgtcgttgaccagggcccgtggcggcggcggcggcggttcacccacaccaagaaacacctctcgtcgtcgttgaccagaagaaccaactgcgtgattcgcgttgctctttggagacgggagacggtggcgtgactgcgtgcaggcagactcagacgacaccatgattcggcacggcgccagcatgatatgagacaaaccaagtatataaagcaagtatgatgtgagagaattgcgatgcaacacataatgtacatacttgttagggagatattgcttagattaatactacgaccgatgcatctttgtacctgaaaatatcaatttgagcctggttgaagatgaacatccatccaacat

SEQ ID NO: 205687 - DNA, 1662 bp, Zea Mays
ctgccattcaccgaaagcaccctttaaaacgcacaactccataaaccctagcggacaaagccacttgctcacaccagaaccctctccgcaatctccccgcctcgctcccgcctccacccaatggcgtctctccctaacggtggcggcgccgccgcctctggctcatgcggcgcgcgccctgtggacaaggaggtggacttcgccaactacttctgcacgtacgcctacctttaccaccagaaggagatgctctgcgaccgcgtccgcatggacgcgtaccactccgccgtcttccgcaacgcgccccacttccagggcaaggtggtccttgacgtgggcaccgggagcggcatccttgctatctggagcgcgcaggccggggccaggaaggtgtacgccgtcgaggcgactaacatggcggagcacgcgcgcgagcttgctcgcgccaacggcgtcacggatatcgttgaggtgatacagggcaccgtggaagacgttgaccttccggagaaagttgatgtcattatatcagagtggatgggctactttcttttgagagagtccatgtttgattccgtcatttgcgcacgtgaccgctggttgaagccagatggtgtgatgtatcctagccatgctcggatgtggctagcacccataagaactggtttgggtgacaagaagagggaagattttgatattgctatggatgactggagcctgtttgttcaggacactcaaacttattatggtgtcaacatgaatgctttgacaaaggcatatcgtgcagaacatgaaaaatactatttgaagtcttcaatatggaacaatcttcatccaaaccaagttatcggtcaacctgcagctatcaaggaaattgattgcttgacagccactgtcgatgagatccgagaagtcagagcacaagtcacattgccaatcagaatggaagctagattatcagcactggctggatggtttgatgttcattttcgaggtagtgctcaaaaccctggggtggaggaagttgaattaactacagcgccagatgagcatggtggaactcattggggtcagcaggtattcttgctgactccacctctgagtgtgactaaaggagacaacgttaacgtttccttctcgatggttcgctcgaaggaaaatcatcggcttatggatatggagttcacatatgaattgcacgagttatctggcaggaagcacccagcagtcaaaaccaagatgtacttagagtagaacaaggttcgccagcataatgatctgtgacacagatgctcacacatgaagcatgctgcattgctttagttgataacatggttcaatcttacccttgttcatcatcaatcagatggaaagacggaacctcacgacgccgttgctgaaacctttgctcagaagctgagcatgtagtgtgcttgttacacccatgatgggtacattgagaccatttatgttgtattagtaatatattgtttgattgcccaattaacggggtgagccattgtttcatcacaacatcgatgtgttagcagataaccacatcgccgttttaagcaaacattgagtgcggaattttgttgtctttgtgaagtccgatgaaagcatcttcttctgatcaaaaggatagagtgcgttggattaata

SEQ ID NO: 205688 - DNA, 2258 bp, Zea Mays
gtgcgactcgtcgaatttctcactccgatgtgctaacctagtgggatttctttctcctcaaatcacacgctgccgccggctgatcagatccagcgcctaacccggcggctccggcgacggtgagtcgccggcgtccatgacaccggccgcggcgtggtgcgcgcagcaccgcctccggttcctcctaccgtccctcttcctcgcgcccgtcctcttcttcctcctgtcgccgccgtcctctccgcccttcgtcagcctccccgcctccggagagctgcctcctttaagctcgcggctcatatgggcgcagcggtggttggtggagtggcgcccgtgcgggtggtggcggacggcgccattgcaagctccgtccaggaggaacgggtacatccgaatagattgctacggcggtctcaaccagctgcgacgtgatgtacgttaagagacctcgttatgtgacggaattggggttgcacgacttctgaacgcaacaatggttctacccaagtttgaggttgccgcctattggaatgaatctagatgtttttgatgttgattacttcattgagcagactagaggatatgtggaagttgttaaggacttgcctgcagagatagcgtccagagaaccatttaaggttgactgcagtaaacggaaaggacattttgattacgttgaaacggtacttccagctctcttggagcatcaatacatctcattgacacctgccatgaatcaaagaagggatagaaaccccgcatatgcaaaagcttcatactgtcaaggctgttacagcgctctcaggttgaataagaatgtggaatccaaagctgttgagctcctccaagccataccaaaacccttcttatcccttcacctgagattcgaaccagatatggtcgcttacagtcggtgttcatacactggcctttcttccaaatcaatggactccattgaagctgcacgcagggagggtaggaaggtattgaccggtgacgctgcccgcctgtggaggaaccgtggcaagtgccctctgacaccaagcgaaacagcattcatcctccaggcgctaggcattcctacaaacacaaacatttatttagctgctggtgacgggctaatggaactcgagggtttcacgtccgtttacaagaacacgtacaccaaatcgtctctcctgacccatgaagctttcgagaacatgcatggcaacacaaaggctgctctcgactactatgtttcggtcaacagcgacgcctatgtcgccacattctttggaaatatggacaagatggtaactgcgatgagaacaatgcaaggtctccagaggacactggtcttgagcaggagggccttcgcaaactacactgccgctgggctagcagggcagcaactggctaaggctatgtgggacgctcatcgagaggagtatgtcagaggcagggggtcggctctgcccgagtactgcttttgtgagttcaaattgtagcgctagtggctaagtgatatgaggtttacctagacggacacctgttggcttggcgcaactgttagatctcgctgtgattgtgtagacatgaatgagctgttactgcaaacgagatttcagtcagatgagcttcaactgggtacagctgagagacattgatgtgttatgacctggccttctgtgcgagtcagctgcgctgtagtatctagaccaagtggaaatgctcttgtcatatcccataacagagatgcagttcaggtgctgccggacgtgaaacagtagtgtgtgtctgtgagctacaacacgcgggaaggttcgagtatgatgatccatcagccgagctaagaggaaaggggtacttaactggtttggaggacaagcgggcgacagttttggaaattctgttactcttctctaacaaactgtattcttctcccttccagtctcttcatctgttttcgttgtaattctgtatgctgttgaacttgtggagaaagaagaggaacaattttcttctgagatttgtgtgtgcgtttgcaccgttttatcactggtgatcctgtcagagctctctggttggcttcattggaattggctgcctttgggtttgggggacatgttctgccgcacacaccggccagaacattttccgacgtctgggtttttgccaaactctttgatttttttttattttagctcatccctccatcctaaaatagttgacatttctctgttctgaaatagtttttaatcttaccttctaacgac

SEQ ID NO: 205689 - DNA, 942 bp, Zea Mays
ttccgagcacgtaaccgcaacaaggagtagttctaggatgcggcacgcaacgtggcccagtgagcgtgtggaacgtgccacccatcacccatgtcgcatggcagtggatggatagctagacccgaaaatcgtcctgacgggaggcttgcctgtccccggcctgagggctcagggctttgaaaagggaaagggcagagttgctgcacgaactgctcaagaccggagctggcttcgaccccctcccggttcttacccaggaaacactgatcatctggggcgacaaagaccaggtgttccccgtcgacctcggccacaggctgcacaggcttctgggcgagaggtccaggctagagatcgtcagggacgcagggcacgcgctgcagctggagggcgccgaccacgtcaaccgctccatcaagtcgttcctcctggacgagcgggtcggcccgggagccggcgcgggccgcaagtaggacgaggccttctcccgtccaggcccacaaccaaacggaggcctgctcgcaggtgcctgcgtacttgcgttgcagagctgcaacagtgcgaacgccagctgtagttaagcagcggagcggcaatgacctgcacgcacgcagacgcccccaccgccccgcaatcatgcagcgctggggctactggttacaaaagtacagagaagcgtcgctccggactagtttgttttgtacaataatgtctgaaagaacgagcttgtgcggccgaaattcggagagctgtctttatctggtgcgcacagtctgtctctttgtttcttcatgctcagcctcatgagataacgatatatttatgacagctccaacaataatttgtaagctaaattcaagcattttattttatatttcaataaagaaagggagaaaagctacctcctgatcaaaaactggttttgtgcacgtattttaggtt

SEQ ID NO: 205690 - DNA, 1663 bp, Zea Mays
gtcgtgccaggcagcgtgttacggttaagattagcaatagtacatgcatccttttgcccggcaaaacggcgtagcatagtggcttcgataattacgagaagggcagggcaggtcgggatggtctctctctctcacccccaccgatctgggaaggcattgtcttgttgtactttcccttccggcagtggcctcgattcgcatctccttttcccgtccatgcgcgcgccggcgggcggtgccagtgccaccgcgctcgcggcggccatgaacattaagcagccgctgcacggcgcatcgacgctgttcgcgctgctctccctctcgctgctcctcctccgcctgctcctccggctccgcctggccgccttccgcgacgcggcgctgtcgctccacctgctggcgcgcctccgcctccgccccgtcctcctctgcctcccgtcagcctgccacgacggcggcgccggcgccggcgccaccacgctgcgcgtctggtgccccgccgccccatcctccaagccgccgctgctcctcctccacggcttcggcggggacgccaagtggacgtgggcgcgcaacctcccgcgcctgtcccgccacttccacgtgtacgtgccggacctcgtgttcttcggcgcgcagtcccggtccgcgtcgccgctgcgctccgtggcgttccaggcccgctgcgccgccgaggccagggacgccgtgggcaggctcgtcatcatgaccaccggcgtcgcggccacgcccggggagatgcgggcgatggcggcgcgcgaggaccgcaccgtcgaggatgcgctgctgccggacaccgccgaggggctgcgcttcctcgtaagacgctccatgcatcgccccccgccttggatgccggacttcgtgcttgacgacttcatccagctcatgtacgtggaccagaaaagggaaagggcagagttgctgcacgaactgctcaagaccggagctggcttcgaccccctcccggttcttacccaggaaacactgatcatctggggcgacaaagaccaggtgttccccgtcgacctcggccacaggctgcacaggcttctgggcgagaggtccaggctagagatcgtcagggacgcagggcacgcgctgcagctggagggcgccgaccacgtcaaccgctccatcaagtcgttcctcctggacgagcgggtcggcccgggagccggcgcgggccgcaagtaggacgaggccttctcccgtccaggcccacaaccaaacggaggcctgctcgcaggtgcctgcgtacttgcgttgcagagctgcaacagtgcgaacgccagctgtagttaagcagcggagcggcaatgacctgcacgcacgcagacgcccccaccgccccgcaatcatgcagcgctggggctactggttacaaaagtacagagaagcgtcgctccggactagtttgttttgtacaataatgtctgaaagaacgagcttgtgcggccgaaattcggagatctgtctctttgtttcttcatgctcagcctcatgagataacgatatatttatgacagctccaacaataatttgtaagctaaattcaagcattttattttatatttcaataaagaaagggagaaaagctacctcctgatcaaaaactggttttgtgcacgtattttaggtt

SEQ ID NO: 205691 - DNA, 2133 bp, Zea Mays
caaagaaacagataaaaaaaagaacagagatgctgaaaactgaaaaggaaagaagaaactgttttcccctgctatcaatcctagatccatcccgagccaccttaaggccttgttcgtttgtatcggattgcacccggaatcgttccacctaatcaaagtttatataaattagagaatcaatccggttagaaatcgttccgacccaccaatccagcgcaaacgaacaaggcctaaaagaggataccgatttttgtgcaatgtgtgagaagagacatacggagtcacttttacatacaatacaaactggagctgcgatttgtgccttcttctctttgaaggctagctttgatttgtttggaggagcatgcgggagaggagtcgtgccaggcagcgtgttacggttaagattagcaatagtacatgcatccttttgcccggcaaaacggcgtagcatagtggcttcgataattacgagaagggcagggcaggtcgggatggtctctctctctcacccccaccgatctgggaaggcattgtcttgttgtactttcccttccggcagtggcctcgattcgcatctccttttcccgtccatgcgcgcgccggcgggcggtgccagtgccaccgcgctcgcggcggccatgaacattaagcagccgctgcacggcgcatcgacgctgttcgcgctgctctccctctcgctgctcctcctccgcctgctcctccggctccgcctggccgccttccgcgacgcggcgctgtcgctccacctgctggcgcgcctccgcctccgccccgtcctcctctgcctcccgtcagcctgccacgacggcggcgccggcgccggcgccaccacgctgcgcgtctggtgccccgccgccccatcctccaagccgccgctgctcctcctccacggcttcggcggggacgccaagtggacgtgggcgcgcaacctcccgcgcctgtcccgccacttccacgtgtacgtgccggacctcgtgttcttcggcgcgcagtcccggtccgcgtcgccgctgcgctccgtggcgttccaggcccgctgcgccgccgaggccatgcgcctcctcggcgtgccccgctacgacgtcgcggggatcagctacggcggcttcgtcgcctaccggatggccgccgccgaggccagggacgccgtgggcaggctcgtcatcatgaccaccggcgtcgcggccacgcccggggagatgcgggcgatggcggcgcgcgaggaccgcaccgtcgaggatgcgctgctgccggacaccgccgaggggctgcgcttcctcgtaagacgctccatgcatcgccccccgccttggatgccggacttcgtgcttgacgacttcatccagaaaagggaaagggcagagttgctgcacgaactgctcaagaccggagctggcttcgaccccctcccggttcttacccaggaaacactgatcatctggggcgacaaagaccaggtgttccccgtcgacctcggccacaggctgcacaggcttctgggcgagaggtccaggctagagatcgtcagggacgcagggcacgcgctgcagctggagggcgccgaccacgtcaaccgctccatcaagtcgttcctcctggacgagcgggtcggcccgggagccggcgcgggccgcaagtaggacgaggccttctcccgtccaggcccacaaccaaacggaggcctgctcgcaggtgcctgcgtacttgcgttgcagagctgcaacagtgcgaacgccagctgtagttaagcagcggagcggcaatgacctgcacgcacgcagacgcccccaccgccccgcaatcatgcagcgctggggctactggttacaaaagtacagagaagcgtcgctccggactagtttgttttgtacaataatgtctgaaagaacgagcttgtgcggccgaaattcggagagctgtctttatctggtgcgcacagtctgtctctttgtttcttcatgctcagcctcatgagataacgatatatttatgacagctccaacaataatttgtaagctaaattcaagcattttattttatatttcaataaagaaagggagaaaagctacctcctgatcaaaaactggttttgtgcacgtattttaggtt

SEQ ID NO: 205692 - DNA, 960 bp, Zea Mays
tttttcccaattcccaccacttgagcagaagctgcacaaccaagagccaacagagcaacgcccaggcacacacgacacgaaccaggcagctgcggagggaggaaccctagcggaacaggtgacggcggcgcgctaccggtgacgggggatacggcggcatcgtcccctcctccatccccggcgcggcggcgccagcagccggcctgcaggctgtttgaagagctcgccatttaatctcaatggaagccaagtttttccgtttcctgaagctcgttggggtcggcttcaaagcgaggtcagagagccaaggccgtgagttgttccttaaactgggcttcagccatgagggtgcaccagttcgccggcgccatccggagctctaaggctccagaggtgtacaaggggaaggggatcctgtacattgacgaggttatcaagctgaagcccggaaagaagcgaaaaaataagtgacgatccgaaggcgttacaactttgtctctgtcttttaaccccatgcttcgcatttgtagtgatctggatctggggtctgctgtgttgtgttgtgtacttgcgttgtgctacacagatcaccattatcttacctttacctcagctgcatgtaggaccatgagtgggaataagttaccagtttgttgatatgagctggaacgttgctttgcgaattggattggattaccgagtgggatgttttgtttcaaacttgaagtctttcaatagattgttgcaaatcaagtgtgaactgtgaacatgacccgagaactgaagctaggactgcttgggcacccaatacccaaatttaaaccattatccatcttattagatcgtatagataatttctatgtatatatctggccaaactatcctgtacggctgtacaaagtagccgctcatgaaaattgtactccagctgtttcaaaatataattgatttaacttttta

SEQ ID NO: 205693 - DNA, 1141 bp, Zea Mays
ctttgcacccgtcaaattcaagaaatggaaacacaaattctccaacgagtcatgctcaactacagaaacttagcgcgatgactcctacatcatgggcacagatggttgtggatctttatcctccagggtcaaacagcagggattggacttgcactcactgcagggttgttcagccacctcgtactcggcactgccatgactgtgataaatgcgtccttcaatttgatcatcactgcatatggcttggaacatgcattggcaaaaagaaccattgtcgtttttggtggtacatatctgaagaaacaatcttgtgtatctggactgctgttctctacattgagtcattgcgtttagatgtcgacaaggcctggtggaaggattttgtcggtgtgatcctgttggcagtgcttatctttatcctgatattcctactactattgtggttgtttcattcgtacattgctgtaacaaatcaaacaacctacgaagttgccagaaggaagcgaatattctacctaaggggagtacctgaaagagtccacccattcagtagaggcatatgcagaaatctctatgacttctgctgttctagccagaagggatatattctggaagctgtgcccccaagggaggagctggaagctagagctgctcgttacacgtgccgagacgtcatttgctgccgttgctgctgatagctgtactaccatagcattgtgcccatatagccagttccactgttctttgttcaaacctttcgttaatggaagcaaattttagtgacctgcggccgttagtgaactctcggagttcactatttgtgcatatgtcatttaaacagtgagaaaaatgtgtgccctttggtccagctgttcacagtttgtctgtaaaattctgtgtggccttgcatccaaataggttttcaggacaggtagaattgatctgcacattcgaggtctggttggtaatttcggaatttagtctaccgttttaaagcctttcttatttgtgttactagcgaaatattttatttatcttgataggtttttgtaacgttgtactgatacatcatgtggtactatttgcataatttgttgtttcggcattttagatgatgaatatagctgcaggctgtaaagca

SEQ ID NO: 205694 - DNA, 2466 bp, Zea Mays
cccaaatcaccccagtccccactccccactccatccaccgtacacaacaaacagacgccgaccgccgaacaatggccttgtcaacgcgatagcaaccggcaacggcaagcaaccatctgggcactcggctctcccccctcccacgctctgctctccgcagcaagccagcaaacagtctcccgtgccacctcagcccgctgcctgcgaggctgcgaccttctcccttcactcccctcgccgacggagcaaacggcgatcggaagtcgagcgccgtcacctgagggacagatggcggcggcggaggggcaggtgaggcgggacatgtgggggcaggagtatcggacgtcatccgccgactgcgcggcggcgctcgacgcctactacgccgccttcatgtccttcggccgcggccgcgtggcggccgtcctccgcgccgccgcggccgacccgacctgcgccctcgccgccgcgcacgccgcgcaatcagtcgcccccagggaccccgcgggggccgccgccttcctcaacgccgccgcggacaacctcgggaaagcaacggagtacgagagggccgttttcgggacgctctccgtgctggtgggcgagaagagggacgaggaggtggcgatcgagcggcacttcgagcttctcgagcaattccccagggatctcctgtctctcaagagagcgcagctcatctgtttctatatgggaaagccagatttgtccctgaaattcgttcaacaagttttgccgaagaatcaagatcagaatttcatatatggcatgcttgccttccctttgcttgagcttggacggatggatgaagctgagagagctgctcgaagaggcttggctataaacaagaatgacttctggtcacagcataatttgtgccatgtttttcagcaggaatgtcgtttcagagaagctactgagttcatggaatcatgttctccgtcatgggaggcatgcacatcatttctgttaactcacaactggtggcatgtagctgtttgttacttagaagctgagtcccctttgtgtaaagttctggagatatatgatcacaacatcatgaaggaacttgagaaaagtgattgtgagacagcagaggtgtatttgaatggtctagggttgctgctgcgattattcatacgcggtcatatagattcagctaaagagaggttaacgacattgctagatgcactaaagaatgagtctatatggcatgtggaatggctccttgacttgcttatattgtgggcactatcaagtatgggtgagctaaaaagtgcacataatatgttggaatcattgaagtcaagggtacgtttaatggacaggaatcggcagcaagcgatgcagaaggcaatcaagctggcggaggctgcttatgaatatgggaaaggagatcacatgaaagtctatgacactctgggtccagactttgatgcgcttggttataaaatgattggtgcatcagatgaacaagtggatgtcttcaatgaagtttggtacactgttctaataaatgctggagagacttccaaagcaattgagattcttggcaaacaaattaggaaacgagagggtgcacctttcttgtggcgcttgctggagaaatcatactcattggctggcagaagcgcagatgcttcagtagcatctaaaaagttaccagtatgcaccataggaagtctacagtcagtatatataccgcataatcaacagttcagaatactggaacatgtgcagtgtatcaatatgaccatgcacgccacatgctgcacgaagtgagacccagcttgagtcttgtcaattgatgctggcttaaattcatctgtcacatcaaaggcattaaaccacggttgccacactgataaacatgacaaagagaatatgatcaagcaaccttgaggtttcaacccaggcaagaaaccaacttactgcagaggagaccatggaggggatgacagctttactagagaccaaggttttcaaattgtccgattaatcgtcctggtcggttgcacgaacttgattaggaactccaacccaattaggatgtctgatcatccgatcgactgagtacccgtcgcctaatcgcgactaatcgtccattttggtagctactcgaccaggaatatggaaaggcatctgactctggctgggaagcatctgactctgactaatcgtccactacaatctgatggaagatcaatggtaggggaagagtctgtcccagatggtggtggagggtcagctactgctgatgcattccatttggatgagaatctgctacttaaggtcttgtaagttcgattagttaaatatctactgccgtttgagtttgattacctgctgctgttcagactttaccctttagaggtgctactcaaggtggctgctactctgctgtaatgctgtttgaaacgttgagtactgctaaatagctactgctgt

SEQ ID NO: 205695 - DNA, 2358 bp, Zea Mays
gctccctgtggagagagaaaagaagctctgccacccgtccacacattcctgtgatagatcgcattcatgcagctggctactgaatgcgcgttgtgctgcgtaggacacgtatggcgagctagcctacagataagcctggggaatggtttcatatgcatccggctcgcgcaggtttctggcatcgagcagtctgcgagatctcgattcgtctggaagacatcgctactaccccagccacagtacccattgggtatttatctgctcccttgctgaagctggaatgtgcagctcgatcggttagcgctacgagtcctcgctgaatccagccaaatgatccccttgagcttgccagttagagcacggtgagtcagcaaagattaaaatagcctccggtgagtcgatgactgttcccagtttaatttcttagaacaagattaaaatagcctcaccctcacagcaggcttttatacggttcagatctgcagatctgtctgtctcccattaattcttctttgctttttttgtattttttttttggaagcgcagcacctaatataatgctggccttccgtcagaagtaacagctagctaagagaagcacaagaaaaatctggtagcttgagttctgactcgaactcagagatggcttatgcaagccccgggactgatgatacgtcgacagatctagatactgacgagaagaatcacatgttggagctagggcagcttgtgtcccttacagcttctgattccggcaacaaagcaaaggacaagctactaggtcaaaagaaccgtgaagctgctaggaaaagccgtctaagaaagaaggcatacgttgagcaacttgagaatagcaggctgaaacttagccagctggagcaggaactccagcgtgctcgccaacagggcatcttcattcctactccgggagacgaccagcagccaaactctactagtgaaaaagcaggtgctttggcgtttgacaaggactacgctggatgggaagacgagcacaggaagcagataagcgagctgagggccgcgctcagcgcacacgccggtgacgacgagctccggcgcatcgtggacggcgtcatggcgcatcaccacgaagcgttcaggctcaagtgcgtggcagccagggccgacgccttccacgtgctgtcggggatgtggaagacccccgtggagaggtgctttatgtggctgggcggatttcgaccgtcagagattctaaagtacagttcctcgcaagccatctggaccccctcaccgagcggcagctcgcgagcgtacacggcctgcagcagtcctcgcagcaagccgaagagggcatctcgcagcgggtgcaagcgctgcagcagtcggtcgcggagaccctcgcgtcgtcagggtccccgtgcctgcctgtgcctgcaggtcgtgctcctccgcctggcgacgacgccgctccagactgctcggggacgatggcggcggcggttgcgaagcttgtcgctcttgaaagcttggtgcatgaggctgacggtctgcggaggcagactcttgagcagatgcagcgcgtgctgaccacccgccagtccgcgcgggcgctgcttgtgatcagtgactacctttcccggctacgcgctctgagttctctctggatcgcacgaccacgggaatgaattcagctcggcttatgtatctttgtttgacccggccgtggagaaaaataagaatcgaagatgcctccgctccttccatcatcactgcatgtaattgtaatctgaacatcattataaacagccgtaaccgttggccatcatcagggttaaagacgcatctgctcggagtcgacggagctgtgactagctagctgagcgtggccgatcgtgcactgcagcatgaatatgcatgcccacgaacgatatgacgagcgagcgggccatcgctgtcgctgtaccgtggcgtacgctgctggctacctgcagagatgagtgcgtacatgacgagaaggcttggtcgtagtgttcggatcacgaactgaagcaaatcaagtcatgcgttcgtgggcgtgaagaccagagagaaggagcgtaggcgctgcatcacctcggagtataaaagatgctgcacaataccgtcgtgaagggcggagacgacagcatccttaaccctagccgctatctgccactgccagcccacacggccaccgttcgcagccgccaggagaccgagtggaggcgaccagagggagagggttttcagccacacgccagacacgcaggccgccactgttgacttcagctcgacgtcgagaacgaccaatcagtcgaggattgaagaagaacactgaacacgggggattttctttgg

SEQ ID NO: 205696 - DNA, 2074 bp, Zea Mays
tgcgcgttgtgctgcgtaggacacgtatggcgagctagcctacagataagcctggggaatggtttcatatgcatccggctcgcgcaggtttctggcatcgagcagtctgcgagatctcgattcgtctggaagacatcgctactaccccagccacagtacccattgggtatttatctgctcccttgctgaagctggaatgtgcagctcgatcggttagcgctacgagtcctcgctgaatccagccaaatgatccccttgagcttgccagttagagcacgaagtaacagctagctaagagaagcacaagaaaaatctggtagcttgagttctgactcgaactcagagatggcttatgcaagccccgggactgatgatacgtcgacagatctagatactgacgagaagaatcacatgttggagctagggcagcttgtgtcccttacagcttctgattccggcaacaaagcaaaggacaagctactaggtcaaaaggcactgcgccgtctggcccagaaccgtgaagctgctaggaaaagccgtctaagaaagaaggcatacgttgagcaacttgagaatagcaggctgaaacttagccagctggagcaggaactccagcgtgctcgccaacagggcatcttcattcctactccgggagacgaccagcagccaaactctactagtgaaaaaggtgctttggcgtttgacaaggactacgctggatgggaagacgagcacaggaagcagataagcgagctgagggccgcgctcagcgcacacgccggtgacgacgagctccggcgcatcgtggacggcgtcatggcgcatcaccacgaagcgttcaggctcaagtgcgtggcagccagggccgacgccttccacgtgctgtcggggatgtggaagacccccgtggagaggtgctttatgtggctgggcggatttcgaccgtcagagattctaaagttcctcgcaagccatctggaccccctcaccgagcggcagctcgcgagcgtacacggcctgcagcagtcctcgcagcaagccgaagagggcatctcgcagcgggtgcaagcgctgcagcagtcggtcgcggagaccctcgcgtcgtcagggtccccgtgcctgcctgtgcctgcaggtcgtgctcctccgcctggcgacgacgccgctccagactgctcggggacgatggcggcggcggttgcgaagcttgtcgctcttgaaagcttggtgcatgaggctgacggtctgcggaggcagactcttgagcagatgcagcgcgtgctgaccacccgccagtccgcgcgggcgctgcttgtgatcagtgactacctttcccggctacgcgctctgagttctctctggatcgcacgaccacgggaatgaattcagctcggcttatgtatctttgtttgacccggccgtggagaaaaataagaatcgaagatgcctccgctccttccatcatcactgcatgtaattgtaatctgaacatcattataaacagccgtaaccgttggccatcatcagggttaaagacgcatctgctcggagtcgacggagctgtgactagctagctgagcgtggccgatcgtgcactgcagcatgaatatgcatgcccacgaacgatatgacgagcgagcgggccatcgctgtcgctgtaccgtggcgtacgctgctggctacctgcagagatgagtgcgtacatgacgagaaggcttggtcgtagtgttcggatcacgaactgaagcaaatcaagtcatgcgttcgtgggcgtgaagaccagagagaaggagcgtaggcgctgcatcacctcggagtataaaagatgctgcacaataccgtcgtgaagggcggagacgacagcatccttaaccctagccgctatctgccactgccagcccacacggccaccgttcgcagccgccaggagaccgagtggaggcgaccagagggagagggttttcagccacacgccagacacgcaggccgccactgttgacttcagctcgacgtcgagaacgaccaatcagtcgaggattgaagaagaacactgaacacgggggattttctttgg

SEQ ID NO: 205697 - DNA, 1384 bp, Zea Mays
acgaacaggtctagcccatagcaacaccctcgccccctcccttctcagcctcaggcggtcaggcccactggccgtacccgcgacgtcttcctcctcggctccgccgccttccgccgatcgcctccgccgaatcgaatagaagaatcgagcgccgctgctggcgaggggctcggcgcacagcgcgggatggcgagcggcagcagcaacggggagccaagcacggcgccgcaggcgaaccggtggtacgacctccggctgggctcctcctgccgtgacccatcccccaccgccaagttctgcactctccgctagtaccaaagataaccgggttactgtggaattctataataatcagcctggcaaaccaaaggtgacatttgagggaagccaagaagagtacaaggataatgatggtgtcttattttttgatggtgagacctttcgcctagagaggttgcatagggctgtcaagaggttaaggcatgtccgagttccaggagagtctgcagcagttaatttggcagctacaactactggaatgggtgcagaatcacagtctcctccattacctaaagtcaacaagtcacagagcatgaacaaacctgctgttcactcagttccagttgaggttgagcgtattgacattggtgaaccagaaaatccaggcccaaaatacaacaacaggagtacatatcaatctgttaccgtagacccatttgccctttcacctgatccaaatgagcaagagaaccttgacatacttggtgacgatgatggcaatgcttcaccaaacaacttggctgcaggacaagaggcatctgttcgtggttttgacatcaacttaccaaatcaggacgatatggatgatgaaattgctgatgtagatgtaaatgatgacacggatctgtggatcaatgcagccgatgcgctgcgagctcaagtgaacgcagaggagcatcaggagcagcaggacagctcaagctctagtgggagcagcagcagcagcagcggaagtgagagcggcagtggaagtgggagcagcagcagtggtagcgatggtagtgatgctgattcggcaagttccggaggtgatgttgatatatgagcttgatacgcaagcttttgttttgacacatgccttgcttcacaagttttcattcacaaggtaggtgtaggatatgtatatgttcagctaatattgctccagtgagtgcattaaattttcactaacaatggtggcctgggtccgtttttatgtttgctagacctggattggaagaatagaatctgtaaacatatctgtacaactatttgcttatgggaccatggatgttacaattgttcggttgaaatgacaaaaggtatactgctatgcttgcctatt

SEQ ID NO: 205698 - DNA, 1333 bp, Zea Mays
acgaacaggtctagcccatagcaacaccctcgccccctcccttctcagcctcaggcggtcaggcccactggccgtacccgcgacgtcttcctcctcggctccgccgccttccgccgatcgcctccgccgaatcgaatagaagaatcgagcgccgctgctggcgaggggctcggcgcacagcgcgggatggcgagcggcagcagcaacggggagccaagcacggcgccgcaggcgaaccggtggtacgacctccggctgggctcctcctgccgtgacccatcccccaccgccaagttctgcactctccgctatgaatttaagccagcatcaattgacaagactcaagctgggtctctgcagagtaccaaagataaccgggttactgtggaattctataataatcagcctggcaaaccaaaggtgacatttgagggaagccaagaagagtacaaggataatgatggtgtcttattttttgatggtgagacctttcgcctagagaggttgcatagggctgtcaagaggttaaggcatgtccgagttccaggagagtctgcagcagttaatttggcagctacaactactggaatgggtgcagaatcacagtctcctccattacctaaagtcaacaagtcacagagcatgaacaaacctgctgttcactcagttccagttgaggttgagcgtattgacattggtgaaccagaaaatccaggcccaaaatacaacaacaggagtacatatcaatctgttaccgtagacccatttgccctttcacctgatccaaatgagcaagagaaccttgacatacttggtgacgatgatggcaatgcttcaccaaacaacttggctgcaggacaagaggcatctgttcgtggttttgacatcaacttaccaaatcaggacgatatggatgatgaaattgctgatgtagatgtaaatgatgacacggatctgtggatcaatgcagccgatgcgctgcgagctcaagtgaacgcagaggagcatcaggagcagcaggacagctcaagctctagtgggagcagcagcagcagcagcggaagtgagagcggcagtggaagtgggagcagcagcagtggtagcgatggtagtgatgctgattcggcaagttccggaggtgatgttgatatatgagcttgatacgcaagcttttgttttgacacatgccttgcttcacaagttttcattcacaagacctggattggaagaatagaatctgtaaacatatctgtacaactatttgcttatgggaccatggatgttacaattgttcggttgaaatgacaaaagggctgggaaaaaatccgtaacc

SEQ ID NO: 205699 - DNA, 2385 bp, Zea Mays
atgacggaagtggaggcgccgctcatcaccgaggtggagggggtggagggccgtggcttctgcggttccgcgtccaccggagggggcagctctggtctcggcagcggcgtgcggggcacgaggcagtaccaccgccgctcggacgcgctcgcctacggcgaccgctaccagaaggcggcagcactcgtcgacctcgcagaagatggtgtcggtatacccgaggatgtcttgaatgacacaaggtttgagagggccatgcgattttatttcgtgtatctccgattggattggctctggtcacttaacctatttgctttgattctattgaatttcctagagaagcctctctggtgtcaaaagtacgccccacatacttgtgatcaaagggatctttactttcttgggcagttgccatacttaagcaaaacagaatcactcatatatgaggcgctaacccttgtcattcttgtcttggatatcttctacccactttcctacgaaggtttaaatctattctggaagaactccatgaataaattgaaggttcttcttctcttcatcttagcatgcgacatacttgtgtttatgcttagttctggacctttcagagtagctccgtacattcgtgttgtgtttctaattatgacaatcagctggctagcctatgtaacatttgaggacacaccacaaggaaagaccattttcacatcatacggtacaacattatatcagatgtttgtcctgttcaccacatccaataatcctgacgtatgggtccctgcttacaacttgcaaaacaacttgctcaaatggactctataaggaaaagtattctacagaaggcatttgatctcatcgatactaacggtcagggttaccttaacaaagaacagtgcatatcgttactggatgagctaaacaagtacaggtcgttgcccaaaacctggagggaagattttgaactaatcttttccgagcttgatcggagtggtgatttcaaggttacctccgaggaatttgctgacctatgcaatactattgcaataaaattccagaaagaaccaccaccttcatatctggagaagtacccatctttctaccattcaccacagtgtgaaaggttgaagtcctttgtacggagtcgcctgtttgagtatattgttgtctttgttcttctggtgaacctaattgctgtcgttattgaaacaacgctagatatagagaacagctcttcacagaaagtgtggcaagaagtggaatttgtctttggatggatctatgttgtggagatggcacttaaaatattttcattaggatttggcgcctattggatggagggtcagaataaatttgattttgtgattacttggactatttttattggagagactctgacatttgccttcccatcaacgcttccttttctttctaatggagagtggattcgatatcttctccttggaaggatgttgcgtttaacaagaattttgttgcaaattcggcgtttcagagcatttgttgcaacattctttaccctcatgtctagcttgttgccatacttggggactgtgttttgcatactttgtgtatattgctccataggtttacagttttttggtggcatcgtgtatgcaggaaacttgaagttggaagaaacagatctctttgggaacgattatcttcttttcaacttcaatgactacccaagtggtatggttactctgttcaatttgttagtcatgggcaattggcaagtctggatggagagctatgcacacctgactggaagttcttggagcctggtttattttatcagtttttaccttatttcagtattactgctgcttaatctgattgtggcatttgtgttggaggcgttttttgctgagatggaactggagaaagctggagaagctgatacgcaggattctaccccacaaggaagaaacaagcggcgatccatgcgtgtgaggacgaagggtactatggttgacattcttctgcaccatatgttgagcaatgaacttgatggatctcaaaactcggattgattactcatcttaatggtaccagatcactagtactaccctgctgttcttttaactttgaccacggcttccgttatgaacacctgtctcatctatactctacagcatccgagacttcgattggtaatttatataccatacgtatagcttaaagtgacacaacggatactgacagatgcttatttatctgcaatttcagtcaatatatatacccctacattttttttttgtttttatatgtatcttctacagccttctgatttctgacagtgtggaatatgccgtattgagtagacagtattggttgtattaagcaactcgtatgaagcgaaataac

SEQ ID NO: 205700 - DNA, 2400 bp, Zea Mays
ggagcgatgacggaagtggaggcgccgctcatcaccgaggtggagggggtggagggccgtggcttctgcggttccgcgtccaccggagggggcagctctggtctcggcagcggcgtgcggggcacgaggcagtaccaccgccgctcggacgcgctcgcctacggcgaccgctaccagaaggcggcagcactcgtcgacctcgcagaagatggtgtcggtatacccgaggatgtcttgaatgacacaagaagcctctctggtgtcaaaagtacgccccacatacttgtgatcaaagggatctttactttcttgggcagttgccatacttaagcaaaacagaatcactcatatatgaggcgctaacccttgtcattcttgtcttggatatcttctacccactttcctacgaaggtttaaatctattctggaagaactccatgaataaattgaaggttcttcttctcttcatcttagcatgcgacatacttgtgtttatgcttagttctggacctttcagagtagctccgtacattcgtgttgtgtttctaattatgacaatcagctggctagcctatgtaacatttgaggacacaccacaaggaaagaccattttcacatcatacggtacaacattatatcagatgtttgtcctgttcaccacatccaataatcctgacgtatgggtccctgcttacaagagctctcgttggaacgccctgtttattgttatttatgtgctgttaggagtttatttcctaacaaatttaattcttgctgtcatttatgatagctttaaagagcagcttgcaaaacaacttgctcaaatggactctataaggaaaagtattctacagaaggcatttgatctcatcgatactaacggtcagggttaccttaacaaagaacagtgcatatcgttactggatgagctaaacaagtacaggtcgttgcccaaaacctggagggaagattttgaactaatcttttccgagcttgatcggagtggtgatttcaaggttacctccgaggaatttgctgacctatgcaatactattgcaataaaattccagaaagaaccaccaccttcatatctggagaagtacccatctttctaccattcaccacagtgtgaaaggttgaagtcctttgtacggagtcgcctgtttgagtatattgttgtctttgttcttctggtgaacctaattgctgtcgttattgaaacaacgctagatatagagaacagctcttcacagaaagtgtggcaagaagtggaatttgtctttggatggatctatgttgtggagatggcacttaaaatattttcattaggatttggcgcctattggatggagggtcagaataaatttgattttgtgattacttggactatttttattggagagactctgacatttgccttcccatcaacgcttccttttctttctaatggagagtggattcgatatcttctccttggaaggatgttgcgtttaacaagaattttgttgcaaattcggcgtttcagagcatttgttgcaacattctttaccctcatgtctagcttgttgccatacttggggactgtgttttgcatactttgtgtatattgctccataggtttacagttttttggtggcatcgtgtatgcaggaaacttgaagttggaagaaacagatctctttgggaacgattatcttcttttcaacttcaatgactacccaagtggtatggttactctgttcaatttgttagtcatgggcaattggcaagtctggatggagagctatgcacacctgactggaagttcttggagcctggtttattttatcagtttttaccttatttcagtattactgctgcttaatctgattgtggcatttgtgttggaggcgttttttgctgagatggaactggagaaagctggagaagctgatacgcaggattctaccccacaaggaagaaacaagcggcgatccatgcgtgtgaggacgaagggtactatggttgacattcttctgcaccatatgttgagcaatgaacttgatggatctcaaaactcggattgattactcatcttaatggtaccagatcactagtactaccctgctgttcttttaactttgaccacggcttccgttatgaacacctgtctcatctatactctacagcatccgagacttcgattggtaatttatataccatacgtatagcttaaagtgacacaacggatactgacagatgcttatttatctgcaatttcagtcaatatatatacccctacattttttttttgtttttatatgtatcttctacagccttctgatttctgacagtgtggaatatgccgtattgagtagacagtattggttgtattaagcaactcgtatgaagcgaaataac

SEQ ID NO: 205701 - DNA, 2458 bp, Zea Mays
cgggatcccgggcaaccaaaggagccctcaaggtggagcgatgacggaagtggaggcgccgctcatcaccgaggtggagggggtggagggccgtggcttctgcggttccgcgtccaccggagggggcagctctggtctcggcagcggcgtgcggggcacgaggcagtaccaccgccgctcggacgcgctcgcctacggcgaccgctaccagaaggcggcagcactcgtcgacctcgcagaagatggtgtcggtatacccgaggatgtcttgaatgacacaaggtttgagagggccatgcgattttatttcgtgtatctccgattggattggctctggtcacttaacctatttgctttgattctattgaatttcctagagaagcctctctggtgtcaaaagtacgccccacatacttgtgatcaaagggatctttactttcttgggcagttgccatacttaagcaaaacagaatcactcatatatgaggcgctaacccttgtcattcttgtcttggatatcttctacccactttcctacgaaggtttaaatctattctggaagaactccatgaataaattgaaggttcttcttctcttcatcttagcatgcgacatacttgtgtttatgcttagttctggacctttcagagtagctccgtacattcgtgttgtgtttctaattatgacaatcagctggctagcctatgtaacatttgaggacacaccacaaggaaagaccattttcacatcatacggtacaacattatatcagatgtttgtcctgttcaccacatccaataatcctgacgtatgggtccctgcttacaagagctctcgttggaacgccctgtttattgttatttatgtgctgttaggagtttatttcctaacaaatttaattcttgctgtcatttatgatagctttaaagagcagcttgcaaaacaacttgctcaaatggactctataaggaaaagtattctacagaaggcatttgatctcatcgatactaacggtcagggttaccttaacaaagaacagtgcatatcgttactggatgagctaaacaagtacaggttacctccgaggaatttgctgacctatgcaatactattgcaataaaattccagaaagaaccaccaccttcatatctggagaagtacccatctttctaccattcaccacagtgtgaaaggttgaagtcctttgtacggagtcgcctgtttgagtatattgttgtctttgttcttctggtgaacctaattgctgtcgttattgaaacaacgctagatatagagaacagctcttcacagaaagtgtggcaagaagtggaatttgtctttggatggatctatgttgtggagatggcacttaaaatattttcattaggatttggcgcctattggatggagggtcagaataaatttgattttgtgattacttggactatttttattggagagactctgacatttgccttcccatcaacgcttccttttctttctaatggagagtggattcgatatcttctccttggaaggatgttgcgtttaacaagaattttgttgcaaattcggcgtttcagagcatttgttgcaacattctttaccctcatgtctagcttgttgccatacttggggactgtgttttgcatactttgtgtatattgctccataggtttacagttttttggtggcatcgtgtatgcaggaaacttgaagttggaagaaacagatctctttgggaacgattatcttcttttcaacttcaatgactacccaagtggtatggttactctgttcaatttgttagtcatgggcaattggcaagtctggatggagagctatgcacacctgactggaagttcttggagcctggtttattttatcagtttttaccttatttcagtattactgctgcttaatctgattgtggcatttgtgttggaggcgttttttgctgagatggaactggagaaagctggagaagctgatacgcaggattctaccccacaaggaagaaacaagcggcgatccatgcgtgtgaggacgaagggtactatggttgacattcttctgcaccatatgttgagcaatgaacttgatggatctcaaaactcggattgattactcatcttaatggtaccagatcactagtactaccctgctgttcttttaactttgaccacggcttccgttatgaacacctgtctcatctatactctacagcatccgagacttcgattggtaatttatataccatacgtatagcttaaagtgacacaacggatactgacagatgcttatttatctgcaatttcagtcaatatatatacccctacattttttttttgtttttatatgtatcttctacagccttctgatttctgacagtgtggaatatgccgtattgagtagacagtattggttgtattaagcaactcgtatgaagcgaaataac

SEQ ID NO: 205702 - DNA, 2572 bp, Zea Mays
gcaaaataaaagaacaaataattgacctctttgtgtactttttcccctaaattcaaagcctttttgagtcactgagatattgataatgtacactgatgctcagctcaactagaaacactgagataataataaaataataataaatttgagatagctctagacatcctatgaaatatgcttcgaatgtaggtgcagatcgacgtccacaccaagagcctagaatctcaattttgcagtggaactggaagagaaacctgctcccaattccatgctgaggcagaagatggtgtcggtatacccgaggatgtcttgaatgacacaaggtttgagagggccatgcgattttatttcgtgtatctccgattggattggctctggtcacttaacctatttgctttgattctattgaatttcctagagaagcctctctggtgtcaaaagtacgccccacatacttgtgatcaaagggatctttactttcttgggcagttgccatacttaagcaaaacagaatcactcatatatgaggcgctaacccttgtcattcttgtcttggatatcttctacccactttcctacgaaggtttaaatctattctggaagaactccatgaataaattgaaggttcttcttctcttcatcttagcatgcgacatacttgtgtttatgcttagttctggacctttcagagtagctccgtacattcgtgttgtgtttctaattatgacaatcagctggctagcctatgtaacatttgaggacacaccacaaggaaagaccattttcacatcatacggtacaacattatatcagatgtttgtcctgttcaccacatccaataatcctgacgtatgggtccctgcttacaagagctctcgttggaacgccctgtttattgttatttatgtgctgttaggagtttatttcctaacaaatttaattcttgctgtcatttatgatagctttaaagagcagcttgcaaaacaacttgctcaaatggactctataaggaaaagtattctacagaaggcatttgatctcatcgatactaacggtcagggttaccttaacaaagaacagtgcatatcgttactggatgagctaaacaagtacaggtcgttgcccaaaacctggagggaagattttgaactaatcttttccgagcttgatcggagtggtgatttcaaggttacctccgaggaatttgctgacctatgcaatactattgcaataaaattccagaaagaaccaccaccttcatatctggagaagtacccatctttctaccattcaccacagtgtgaaaggttgaagtcctttgtacggagtcgcctgtttgagtatattgttgtctttgttcttctggtgaacctaattgctgtcgttattgaaacaacgctagatatagagaacagctcttcacagaaagtgtggcaagaagtggaatttgtctttggatggatctatgttgtggagatggcacttaaaatattttcattaggatttggcgcctattggatggagggtcagaataaatttgattttgtgattacttggactatttttattggagagactctgacatttgccttcccatcaacgcttccttttctttctaatggagagtggattcgatatcttctccttggaaggatgttgcgtttaacaagaattttgttgcaaattcggcgtttcagagcatttgttgcaacattctttaccctcatgtctagcttgttgccatacttggggactgtgttttgcatactttgtgtatattgctccataggtttacagttttttggtggcatcgtgtatgcaggaaacttgaagttggaagaaacagatctctttgggaacgattatcttcttttcaacttcaatgactacccaagtggtatggttactctgttcaatttgttagtcatgggcaattggcaagtctggatggagagctatgcacacctgactggaagttcttggagcctggtttattttatcagtttttaccttatttcagtattactgctgcttaatctgattgtggcatttgtgttggaggcgttttttgctgagatggaactggagaaagctggagaagctgatacgcaggattctaccccacaaggaagaaacaagcggcgatccatgcgtgtgaggacgaagggtactatggttgacattcttctgcaccatatgttgagcaatgaacttgatggatctcaaaactcggattgattactcatcttaatggtaccagatcactagtactaccctgctgttcttttaactttgaccacggcttccgttatgaacacctgtctcatctatactctacagcatccgagacttcgattggtaatttatataccatacgtatagcttaaagtgacacaacggatactgacagatgcttatttatctgcaatttcagtcaatatatatacccctacattttttttttgtttttatatgtatcttctacagccttctgatttctgacagtgtggaatatgccgtattgagtagacagtattggttgtattaagcaactcgtatgaagcgaaataac

SEQ ID NO: 205703 - DNA, 1822 bp, Zea Mays
cccgcttcaactgccatggaagtagccgatcctgccatggagctcggtgtccgtggctgaccaccagctactagcccgaacagcagaagatggtgtcggtatacccgaggatgtcttgaatgacacaaggtttgagagggccatgcgattttatttcgtgtatctccgattggattggctctggtcacttaacctatttgctttgattctattgaatttcctagagaagcctctctggtgtcaaaagtacgccccacatacttgtgatcaaagggatctttactttcttgggcagttgccatacttaagcaaaacagaatcactcatatatgaggtttaaatctattctggaagaactccatgaataaattgaaggttcttcttctcttcatcttagcatgcgacatacttgtgtttatgcttagttctggacctttcagagtagctccgtacattcgtgttgtgtttctaattatgacaatcagctggctagcctatgtaacatttgaggacacaccacaaggaaagaccattttcacatcatacggtacaacattatatcagatgtttgtcctgttcaccacatccaataatcctgacgtatgggtccctgcttacaagagctctcgttggaacgccctgtttattgttatttatgtgctgttaggagtttatttcctaacaaatttaattcttgctgtcatttatgatagctttaaagagcagcttgcaaaacaacttgctcaaatggactctataaggaaaagtattctacagaaggcatttgatctcatcgatactaacggtcagggttaccttaacaaagaacagtgcatatcgttactggatgagctaaacaagtacaggtcgttgcccaaaacctggagggaagattttgaactaatcttttccgagcttgatcggagtggtgatttcaaggttacctccgaggaatttgctgacctatgcaatactattgcaataaaattccagaaagaaccaccaccttcatatctggagaagtacccatctttctaccattcaccacagtgtgaaaggttgaagtcctttgtacggagtcgcctgtttgagtatattgttgtctttgttcttctggtgaacctaattgctgtcgttattgaaacaacgctagatatagagaacagctcttcacagaaagtgtggcaagaagtggaatttgtctttggatggatctatgttgtggagatggcacttaaaatattttcattaggatttggcgcctattggatggagggtcagaataaatttgattttgtgattacttggactatttaacaaattttcttttggaaagcgcaggagagctgcgtttcattgatcaaagagagaaagaaggctccatacaaccccaactcatacgggccatgtatgagagaagggaacacacacctctaggataagcaacagaaagaaaacacacacttgacctgaccctaaccaggaactaattagttccacaaatgctgaaggcttggagatttttggctcctgccaggcaccacaggctgtgctcatccccaaacttagacaaaatcagactaacagagggagattcagccttaaaaatacaatcattctgatgcttccatatactccaggctcctaagaagatcagggagttcaatccttttcttttctccttattgatttttctcgaaacctttctccaccattcagtaaaattattatcttgttgtctgggggcccaggttgagaggttcagagtagagaacagagaaaaccagacttgtctggcaaccacacaagaagctaacagatg

SEQ ID NO: 205704 - DNA, 2866 bp, Zea Mays
ggcttatcgggtcaggactcaggacgtcaggtcacacccgcaaagccaacaacgcctccacggcgactccggctcctccacggctccagctccaggccccagctcaccctcccccctcccctcgaggcggaccgcccccacgtcgccggcgatcgaatcggcggccgtagcctcgcgcttccagcgtcggagagtgcgcccgtccggcggatgagatggcgctgcggcacctcgtcacgggccagaataactgcgtgccggacggcgcctcgtcgtccaaccccctcaacgccctcgccaacgccttcctcggccagtcctccaaggcgcagtcaataaaggaacttcctggttctgttaatgtcccatctacatctgactttagcgtgtctgctcctttgtcaaacatccctggttcagaaaatgagttcaaacaagaccagcgacctcttgcacggggtgctgactttattcgaggtggtcctgctaatgattggattgagtcttttcggcctccgagggttcctcaacttggtgtagaagcacaatttccagattttgagcaaatttataacaatgcagggacaacctttcagtttcagccgccattggatggtccaccacaaagagtgttgtccggtgtcttgcattcctttctcacaagtggcccagctggtgtgccatttcaaccacttccggtaccagctgctcttggtttatctgaaagcgacaaacaatgcattcgtgatcgtagctgcataatggcacggcatattttttctgaccaaccagaagaatatatacagagtcaggtcaatactttgctgcattcgcttgatattgacaaccgtatgagaggacctatgcatgggcaatacccagaactacaggagtactggaagcagtcccaaagttctacgcgtcctgccccaatgcataatgctgctgataaatggattactgagtttggcaagcaaaataataatccagaaaattgggcgaactctttcgaacaacaatatggccccaatgggtgggcctctgagtttgaacagcatcagtctcagatggccatgcgccagatgggaggagcgaacatggccaacctggctgctatggagcaatcccgagtgcttgcacaaactttagcaagtaataatgatcccaagtttcagttcttccagtttgtttcaaagatgagccgaggtgaacttattatagaagataatcaagtaaaagaaggttcagcatcccaatccagtggctgggctgatgaatttcaaacaccgtacattgctaatgcaaactcatgggcagatcagtttgcacatgaagagctttcacaaggggcggataagtgggttagcgagttctctagtcaacctaatcatggtgcactaaatgagaactgggttgatgagttctcgaaattaaatgttactgacgaatgggcagaggaattcagtggaggtggttttggcgaaagctctgctgatccatgggtagatgagttccaagaacacttgtcatctttcaaacaaagtccgggcgcctctcgaggggtttatgttttttctgagaacaacccgtatgttggtcaccctaatccaatgcaggaaggacaggagctcttccgcaagggcctcttaagtgaagctgttcttgctttagaggctgaagttttgaagaatcctgataacacagaaggttggaggttgttaggcgtaacacatgcagaaaatgatgatgaccaacaggccattgcagcaatgatgcgtgcgttggaagctaatccaacaaaccttgaagttcttcttgctcttggtgttagtcacacaaatgaattggagcagggggaagcattaagatatctttataggtggcttcagaatcaaccaaaatatggtggccttgtccctctgcagtcaactgattcaccttatggtcctgatgttgttagattgtttaatgaagctgctcagatgtcacctgaagatgcagatgttcatatagttctgggagtcttatacaacctatcaagagagtatgataaagctatagcttcatttaagacagcactacagctcaaaccacaggactattcactctggaacaagcttggtgcaacccaagcaaacagcatccagagtgctgatgcaatattggcgtatcagcaggctctggacttgaaacccaactacgtgcgtgcatgggcgaatatgggaatcagctatgccaaccagggtttgtatgaggattccattcgatactatgtaagggcagttgcaatgaacccaaaagctgacaatgcctggcagtacctgaggatctctcttagcaatgcttcgcgagcggacatgattgctgcatgcgacgcccgcaaccttgacgctcttcagaaagagtttcctctgtgagccctccggtccaaggcattagagcttccatggaaggaagcagcacactagcaagccgagtgactgcacctgtggtcatggaaatggaattggaaaccagtagcgttttgtatttgcctgttgattcttatatttatttttaggaagtgggggaatgtgtagcaactaggaagcgagggaacaacatccagttgatgtgaagcattcatggcacagtaggcaatagtggcaaaggggtactatacatacacacttacgggacgcacaacataaataaagaatggttgattaataaactatttattttggggacacacccctaggatcaacccctacttgtttcgagtttgaatactgatttgtatcaacaggcaataaataatgcgctttgtaaccttttatatcataatgtaatgcgcacgcccaaatcagttgtgtctaagaaaaaa

SEQ ID NO: 205705 - DNA, 2696 bp, Zea Mays
cttatcgggtcaggactcaggacgtcaggtcacacccgcaaagccaacaacgcctccacggcgactccggctcctccacggctccagctccaggccccagctcaccctcccccctcccctcgaggcggaccgcccccacgtcgccggcgatcgaatcggcggccgtagcctcgcgcttccagcgtcggagagtgcgcccgtccggcggatgagatggcgctgcggcacctcgtcacgggccagaataactgcgtgccggacggcgcctcgtcgtccaaccccctcaacgccctcgccaacgccttcctcggccagtcctccaaggcgcagtcaataaaggaacttcctggttctgttaatgtcccatctacatctgactttagcgtgtctgctcctttgtcaaacatccctggttcagaaaatgagttcaaacaagaccagcgacctcttgcacggggtgctgactttattcgaggtggtcctgctaatgattggattgagtcttttcggcctccgagggttcctcaacttggtgtagaagcacaatttccagattttgagcaaatttataacaatgcagggacaacctttcagtttcagccgccattggatggtccaccacaaagagtgttgtccggtgtcttgcattcctttctcacaagtggcccagctggtgtgccatttcaaccacttccggtaccagctgctcttggtttatctgaaagcgacaaacaatgcattcgtgatcgtagctgcataatggcacggcatattttttctgaccaaccagaagaatatatacagagtcaggtcaatactttgctgcattcgcttgatattgacaaccgtatgagaggacctatgcatgggcaatacccagaactacaggagtactggaagcagtcccaaagttctacgcgtcctgccccaatgcataatgctgctgataaatggattactgagtttggcaagcaaaataataatccagaaaattgggcgaactctttcgaacaacaatatggccccaatgggtgggcctctgagtttgaacagtctcagatggccatgcgccagatgggaggagcgaacatggccaacctggctgctatggagcaatcccgagtgcttgcacaaactttagcaagtaataatgatcccaagtttcagctttcacaaggggcggataagtgggttagcgagttctctagtcaacctaatcatggtgcactaaatgagaactgggttgatgagttctcgaaattaaatgttactgacgaatgggcagaggaattcagtggaggtggttttggcgaaagctctgctgatccatgggtagatgagttccaagaacacttgtcatctttcaaacaaagtccgggcgcctctcgaggggtttatgttttttctgagaacaacccgtatgttggtcaccctaatccaatgcaggaaggacaggagctcttccgcaagggcctcttaagtgaagctgttcttgctttagaggctgaagttttgaagaatcctgataacacagaaggttggaggttgttaggcgtaacacatgcagaaaatgatgatgaccaacaggccattgcagcaatgatgcgtgcgttggaagctaatccaacaaaccttgaagttcttcttgctcttggtgttagtcacacaaatgaattggagcagggggaagcattaagatatctttataggtggcttcagaatcaaccaaaatatggtggccttgtccctctgcagtcaactgattcaccttatggtcctgatgttgttagattgtttaatgaagctgctcagatgtcacctgaagatgcagatgttcatatagttctgggagtcttatacaacctatcaagagagtatgataaagctatagcttcatttaagacagcactacagctcaaaccacaggactattcactctggaacaagcttggtgcaacccaagcaaacagcatccagagtgctgatgcaatattggcgtatcagcaggctctggacttgaaacccaactacgtgcgtgcatgggcgaatatgggaatcagctatgccaaccagggtttgtatgaggattccattcgatactatgtaagggcagttgcaatgaacccaaaagctgacaatgcctggcagtacctgaggatctctcttagcaatgcttcgcgagcggacatgattgctgcatgcgacgcccgcaaccttgacgctcttcagaaagagtttcctctgtgagccctccggtccaaggcattagagcttccatggaaggaagcagcacactagcaagccgagtgactgcacctgtggtcatggaaatggaattggaaaccagtagcgttttgtatttgcctgttgattcttatatttatttttaggaagtgggggaatgtgtagcaactaggaagcgagggaacaacatccagttgatgtgaagcattcatggcacagtaggcaatagtggcaaaggggtactatacatacacacttacgggacgcacaacataaataaagaatggttgattaataaactatttattttggggacacacccctaggatcaacccctacttgtttcgagtttgaatactgatttgtatcaacaggcaataaataatgcgctttgtaaccttttatatcataatgtaatgcgcacgcccaaatcagttgtgtctaagaaaaaa

SEQ ID NO: 205706 - DNA, 2852 bp, Zea Mays
ctcaggacgtcaggtcacacccgcaaagccaacaacgcctccacggcgactccggctcctccacggctccagctccaggccccagctcaccctcccccctcccctcgaggcggaccgcccccacgtcgccggcgatcgaatcggcggccgtagcctcgcgcttccagcgtcggagagtgcgcccgtccggcggatgagatggcgctgcggcacctcgtcacgggccagaataactgcgtgccggacggcgcctcgtcgtccaaccccctcaacgccctcgccaacgccttcctcggccagtcctccaaggcgcagtcaataaaggaacttcctggttctgttaatgtcccatctacatctgactttagcgtgtctgctcctttgtcaaacatccctggttcagaaaatgagttcaaacaagaccagcgacctcttgcacggggtgctgactttattcgaggtggtcctgctaatgattggattgagtcttttcggcctccgagggttcctcaacttggtgtagaagcacaatttccagattttgagcaaatttataacaatgcagggacaacctttcagtttcagccgccattggatggtccaccacaaagagtgttgtccggtgtcttgcattcctttctcacaagtggcccagctggtgtgccatttcaaccacttccggtaccagctgctcttggtttatctgaaagcgacaaacaatgcattcgtgatcgtagctgcataatggcacggcatattttttctgaccaaccagaagaatatatacagagtcaggtcaatactttgctgcattcgcttgatattgacaaccgtatgagaggacctatgcatgggcaatacccagaactacaggagtactggaagcagtcccaaagttctacgcgtcctgccccaatgcataatgctgctgataaatggattactgagtttggcaagcaaaataataatccagaaaattgggcgaactctttcgaacaacaatatggccccaatgggtgggcctctgagtttgaacagtctcagatggccatgcgccagatgggaggagcgaacatggccaacctggctgctatggagcaatcccgagtgcttgcacaaactttagcaagtaataatgatcccaagtttcagaattctaagttcttccagtttgtttcaaagatgagccgaggtgaacttattatagaagataatcaagtaaaagaaggttcagcatcccaatccagtggctgggctgatgaatttcaaacaccgtacattgctaatgcaaactcatgggcagatcagtttgcacatgaagagctttcacaaggggcggataagtgggttagcgagttctctagtcaacctaatcatggtgcactaaatgagaactgggttgatgagttctcgaaattaaatgttactgacgaatgggcagaggaattcagtggaggtggttttggcgaaagctctgctgatccatgggtagatgagttccaagaacacttgtcatctttcaaacaaagtccgggcgcctctcgaggggtttatgttttttctgagaacaacccgtatgttggtcaccctaatccaatgcaggaaggacaggagctcttccgcaagggcctcttaagtgaagctgttcttgctttagaggctgaagttttgaagaatcctgataacacagaaggttggaggttgttaggcgtaacacatgcagaaaatgatgatgaccaacaggccattgcagcaatgatgcgtgcgttggaagctaatccaacaaaccttgaagttcttcttgctcttggtgttagtcacacaaatgaattggagcagggggaagcattaagatatctttataggtggcttcagaatcaaccaaaatatggtggccttgtccctctgcagtcaactgattcaccttatggtcctgatgttgttagattgtttaatgaagctgctcagatgtcacctgaagatgcagatgttcatatagttctgggagtcttatacaacctatcaagagagtatgataaagctatagcttcatttaagacagcactacagctcaaaccacaggactattcactctggaacaagcttggtgcaacccaagcaaacagcatccagagtgctgatgcaatattggcgtatcagcaggctctggacttgaaacccaactacgtgcgtgcatgggcgaatatgggaatcagctatgccaaccagggtttgtatgaggattccattcgatactatgtaagggcagttgcaatgaacccaaaagctgacaatgcctggcagtacctgaggatctctcttagcaatgcttcgcgagcggacatgattgctgcatgcgacgcccgcaaccttgacgctcttcagaaagagtttcctctgtgagccctccggtccaaggcattagagcttccatggaaggaagcagcacactagcaagccgagtgactgcacctgtggtcatggaaatggaattggaaaccagtagcgttttgtatttgcctgttgattcttatatttatttttaggaagtgggggaatgtgtagcaactaggaagcgagggaacaacatccagttgatgtgaagcattcatggcacagtaggcaatagtggcaaaggggtactatacatacacacttacgggacgcacaacataaataaagaatggttgattaataaactatttattttggggacacacccctaggatcaacccctacttgtttcgagtttgaatactgatttgtatcaacaggcaataaataatgcgctttgtaaccttttatatcataatgtaatgcgcacgcccaaatcagttgtgtctaagaaaaaa

SEQ ID NO: 205707 - DNA, 1223 bp, Zea Mays
ctgagctctgctatccttgcacagggctccgaacacgcgtttccatggctctcctccgactccaagagcagtgctcgctcctccgaatctccagctcccaccacccaaaccccatcgatatcccaagaaatcctcgcaagaaccaacttttagtgcccaatgcggccaagattgccaacgcctccgaaattccggttcctcgcatccccactagcacttccaaggccgcaatcctggcccggaaggccgcgctttggcgggacgcccttgtccccgttgccgccgccttcgcgtcctgtccgctcccttccctcgcggcggagggcgacgggaaagagtacgtcttcaagaagtacaagcccgtgagcgccatcgacgcgttccgcaagcttcgcgacgtgccggaggtcgagttcgacgaggaggacgagaaggggtttgtcaaggaggtgctagcgaggttcccagacccggcgaacaccgtcgtctgcgtccttgacaactttgatggtaattcttcgaaagttgctgagctactagttgagaatggttttaaggaagcctatgcaattaaagggggcttgagaggtccggaagggtggcaggcggttcaagaaaactatcttcccccatctgtccatgttttcccgaagaaaaaaaggggcgcgaaattagctcacacagatgcaagcaatgatggaacatacgttcagcaggagggaagcgaggaatcatcggctcctccaagcagtaccctgacttgaagcctccatcatccccaacaccatcaaaaccgacgaattaagagcaatgcaggacaataacatgtgtggaactcaaaaggtcagaagtagttgtctcctgcacaaacatttttgtatacttccaaccgtggatgtccaggagattgactgggatggcatggaagaggaccagcagtggtgtttggagctcttgctgctgttgaggccatggtgaattcttagttgtgtaatttgcgaagcttgtacccgtatgttgtactattaagtgggggcgaaatgacattttgtacctgacttgatacagtttggggtgccttagcgttctcaatttgacaattgtgcttaactcagttttattatcactggctcagacaccgtatataggtggcatcactataattgtaacagaggttcagttcattcacgctacgtacatgctggaagtggtttacattgggg

SEQ ID NO: 205708 - DNA, 1417 bp, Zea Mays
gagctctgctatccttgcacagggctccgaacacgcgtttccatggctctcctccgactccaagagcagtgctcgctcctccgaatctccagctcccaccacccaaaccccatcgatatcccaagaaatcctcgcaagaaccaacttttagtgcccaatgcggccaagattgccaacgcctccgaaattccggttcctcgcatccccactagcacttccaaggccgcaatcctggcccggaaggccgcgctttggcgggacgcccttgtccccgttgccgccgccttcgcgtcctgtccgctcccttccctcgcggcggagggcgacgggaaagagtacgtcttcaagaagtacaagcccgtgagcgccatcgacgcgttccgcaagcttcgcgacgtgccggaggtgcagctgctggacatcaggcggggcaagagcgtgcggttcatggcgccaccgaagctgaagcttatcgacaagagcaccgtgcaggtcgagttcgacgaggaggacgagaaggggtttgtcaaggaggtgctagcgaggttcccagacccggcgaacaccgtcgtctgcgtccttgacaactttgatggtaattcttcgaaagttgctgagctactagttgagaatggttttaaggaagcctatgcaattaaagggggcttgagaggtccggaagggtggcaggcggttcaagaaaactatcttcccccatctgtccatgttttcccgaagaaaaaaaggggcgcgaaattagctcacacagatgcaagcaatgatggaacatacgttcagcaggagggaagcgaggaatcatcggctcctccaagcaggtttgtagtcaacacaagcgctgaatccaaagatgtttatgaaaatcccaatggaagtacaactgctgcaaaacatgcaactaggagaccgttatcaccatatccaaattaccctgacttgaagcctccatcatccccaacaccatcaaaaccgacgaattaagagcaatgcaggacaataacatgtgtggaactcaaaaggtcagaagtagttgtctcctgcacaaacatttttgtatacttccaaccgtggatgtccaggagattgactgggatggcatggaagaggaccagcagtggtgtttggagctcttgctgctgttgaggccatggtgaattcttagttgtgtaatttgcgaagcttgtacccgtatgttgtactattaagtgggggcgaaatgacattttgtacctgacttgatacagtttggggtgccttagcgttctcaatttgacaattgtgcttaactcagttttattatcactggctcagacaccgtatataggtggcatcactataattgtaacagaggttcagttcattcacgctacgtacatgctggaagtggtttacattgggg

SEQ ID NO: 205709 - DNA, 3352 bp, Zea Mays
gaaaagagttcaggaaggaagctaagctactcctgtcctgtttcaggcacgaccgcggaccgcttctagttctgcatcggcggccttcgcttctcagccttttcctccccccatcccggagacttcttccctggttgctgcacagccttctttttttgcgaggtggagaggtttggggaggagaacacgaacgcatccaaagaccggagcggagcagggtaagggctctctcctgcaggctgcagccgtggaccgtggagggagaagatgcgcaaggggcagctcttgttgctgctgcttttgttcgctgccggatcaacaaccgcctccgccaagaccgacccgcaagatgaggctgctctcagatccttgatgaagagatggaaaaatgtgcctgctagctggggaaagtccagtccttgcgacatgccgtgggatggtattttgtgtgatgaaaatggaagggtcacatcactgaatctgtttgggatgggcatgggaggcactctgagtgatgatataggaagtctgactgagctaacgatcttagatctgtcctcaaacagagatcttggtgggccattgccagctgccattgggaagttgtttaagcttgaatctttagcattgattggttgcagtttcagtggtcctgttccgagcgaactaggaaacttgtcacaactcacattctttgctctgaactcaaacaaactaacgggtagcatcccgccctcattaggcaagctctccaatgtcacctggctggaccttgccgataaccagctgaccggacctctcccaacctccagagataatagaactggattggaccagcttcttaacgcacaacacttccattttaatcgaaacatgctggaaggttcaataccagactctctcttcagctccagcatgcacctcaaacatatcctttttgacctaaacagatttactggacagattccagcttctattggtgcaattccatcactcacagtacttcgtctaaataacaatggtttcatgggaccagttcctgctctcaacaacctgactaatctccaagttttaatgctttcaaataacaagctaagtggaccaattcctaatttgaccgggatgggctcgctagaaaatgtggatatcagtaataacagctttgatccttctaacgtcccaagctggttctcagatttaaagagcataatgacccttacaatgcagtcagttgggctttcggggcaactgccacagaagcttttcagttttcctcaactgcagcatctagtactaagtgataatgaactgaatggcacgcttgacatgggaaacaatatgagcaagcatcttgatcttgtcgatattcaaaacaacaaaatcacctcagttacagtgtacaacagcttcaaaaacctcaagcttgaaggaaacccactctgcaatgattctcttctgtcagacacaagtccatgcatgggcctgcaaactgaagccccacctcagccttatcaatttgatgttcaatgtgcatatccttttatagaaaccatcgtattcagagctccttcctttgccaacgtattcgagtaccttcccgagctacagaagaacctgtctaaacaattgaacagctgtaccccgaactggctaggcttggtaccttacttcgacgaagatgcatacctaaatgtgaatattaaggcatgcccagtaaagcagaaaaggttcaactactctcaagtgttaaactgcttcaacctgacccgtcagacttacaagccacccgagatcatctcgcgctgtgttgattggcattgtgactggatctgttctcctggtcgtggggctcactctggttgtattttacgctgtaaatcaaaagaaacgggctcagaggcttgtgtccatcaacaatccttttgcgtcttggggatcattgggagaagatattggtgcagcaccacaactgaagagtgctaaattcttctcattggaagaactcaagttatgcaccaatgatttccgagaaattaatgcgattggagctggaggctatggaacggtttaccgaggaaaacttccagatgggcagttagtggcaatcaagagatccaaggaagggtccatgcagggtggccttgagttcaagacagaaatagaactcctttccagggttcatcacaataacttggttggactggttggtttctgctttgagaagggcgaaaagatgttagtttacgagttcatacctaatggaacactaagcgaggctttatatggtatgaaaggaatacaattagactggagcaggaggctcaagatagctttggattcagctaaagggctagcatacctccatgaccatgccaatcctcctatcattcacagagatgtgaagtccactaacattctccttaatgagaagatgaccgcaaaggtttcagactttggcctgtcgttgctggtaacagacagtgaggaagggcaactatgcacaaacgtcaaggggacactgggctacctggacccagagtactacatgacccaacaactcacagcaaagagcgatgtctacagcttcggcgtagtgctcctagaactcatagtgggtaagccaccaatacacaacaacaagtacattgtccgtgaggtgaaaatggcactagacgaagacgatggcacgcactatgggctcaaggatgtgatggaccctgttcttcagaaaattgggggcctctttggcttcccacggtttctaaaactagcactgcaatgcgttgaagaggtggcaaccgcccggccctcgatgaacagcattgtgagggagattgaggcgatcatgctggacaatgggctcacaccgggctcaatgtctacgagctcttcattcagcattgaatcaagaacgatgaaggttggacctaagcacccatactccagttcatccatgtcaacctcgacgtttgatatggatagcagggcctttgagtacagtggggtgttcccttcttctcatggtagcttgaagccctgaagatcagaacttttggactccaacaatctgtacgagctgttatatatgtttcagtaggactgtacagaattgatgaactttgattcgttttgcctagagagacaaaagtatcttttggtttttttctttttaaagaagagatgtatataatattggccaaaacttttctccagtgatattgaagcttaggtgaggatgaaccaattataatgaactctcgagaacatgataagtactccctgtgtaattataatttgtttcttcttgtattagccatatatatatatatatatatatatatatatatagcac

SEQ ID NO: 205710 - DNA, 2433 bp, Zea Mays
ggaagttattttgccggcactatatcagcttattgtagcagtacatttggaccgaggagaatatttggcggcatttttactggtttccgagcgatcggcacagaacacgccacggcactgacggccagccacagccagccaacaataggaacctgtcgggacgttccccgatcggcgatcgcgcgcgcgcatcgcaagcaccgaaattagaccgaggaagagggtaaggaaaggtcgaggcacgagggggctagcggcggagatagcgagcacccggcgtcgggcgacggtggcgccatgggtggctgccactccgccatcgcggccaccaagctgaagattctgcgccgcggaggccggggtgccgctgccgtcctccccgtcaccaaccacgacggcccgtgctgctcctccgaccacggcagcaaggagaagaagaagaaaaagaagggcgccaggaagggcaggaaacgcgcctccatcctgggcgacgccggcaccttcgacccggacttctcgcggcggtaccggctcggcgcggagctcgggcgcggcgagttcggcgtcacgcggcggtgcgaggacgccgccacgggggaggccctggcgtgcaagacgatccggcggaagcggctgctcctgcgcctcgccgggcccgacgcgaccgacgtgcagcgcgaggtggagatcacgcggcgcatgtcggaggtgagcgggggcagggtcgcgtgcctgcgcgaggcgtgcgaggacgacgacggtgtgcacctcgtcatggagctctgcgagggcggcgagctcttcgaccgcatcttcgagcggaagcactactccgagcgcgccgccgccaagctcgcccgcaccatcgtcgaggtcgtgcagctgtgccacgagaacggagtgatgcacagggacctgaagccggagaacttcctgttcgtgaacaagtcggaggagtcacctctcaaggccatcgacttcggcctctccgtgttcttcaagcctggagatcggttcaccgaagtggttggcagcgggtgttacatggctccagaggttctcaagagaagctatgggccagagatagacgtgtggagcgctggtgtcatcctgcacatccttctctgcgggttccctccgttttggggaggctccgatgagaaaattgcacagtcgatactccgtggggtaattaacttacagaaggatccatggcccaaggtctcccagagcgcaaaggatcttgtcacgaggatgcttgacccagatccttgtacacggttgacggcaaagcaagtccttgagcacccttggctcaagaatgctgataaggcttcaaatgtgtcactcggagaggttgttcggtcgaggctgaagcagttgtcgtctatgaacaagcttaagaagaaggcacttggagtcgtcgccatgaatttaccgatggaagagattggcaaattcaaagagatgttccatacaatggacaaaaacaaggacggtagtttgtcacttgaagagctgaaggagggtttccggataaacgatcatcctgttccagaggaagagataaagatgttgttacaagcggtgagtgcaaggaccaccatttggtattcttatattatacaaatgtagtactaggatgtctagcatactggcaagtgaactacagtgaatagagtcgaagagggcgatatacatggaactgacacattagattgtgaggaatttgtgacagtcttgcttcacattaaaaagatgagtaatgacgagtatctacctaaagctttcgagttcttcgacaaagacgggaatggttttattgaaatgtccgagttaatggagactctaagtgatggtgaactaaagcctgatgagcaattggttaacgacattattcaagaggttgacaaggataaggatggtcgcatcagttacccagagtttgaattgatgatgaaaagtggatcggactggaggaacgcctctagacgttactcaacagagaatttcagcagcctcagtcaaaaactgtgcaaagatactttatgaaacaagaaagtagtttccaagcagcaattactgactgaagtaccacaccctcaactaaacagcatcagaagacaacgcaaaagcaggattactggatctggtggaaataagggttgaaggagatcacatataccagttgcatgcttgacaaacttcgtcaactagcaagccctctggcattgtcctttgctctggaagtaaaatttactattccaatagaatacatgacttagacatagacagatgtaaaggatgccccagcatccatgcaatccactaaccaaaatttggcattttactactgtcaaatatataaagaaaagaagatgtccatctgagtgcctagaattaaaataccccaacattaatagatcaaaagag

SEQ ID NO: 205711 - DNA, 2363 bp, Zea Mays
aaaaaagtaaaggatcatccttggagtggaaaggaagttattttgccggcactatatcagcttattgtagcagtacatttggaccgaggagaatatttggcggcatttttactggtttccgagcgatcggcacagaacacgccacggcactgacggccagccacagccagccaacaataggaacctgtcgggacgttccccgatcggcgatcgcgcgcgcgcatcgcaagcaccgaaattagaccgaggaagagggtaaggaaaggtcgaggcacgagggggctagcggcggagatagcgagcacccggcgtcgggcgacggtggcgccatgggtggctgccactccgccatcgcggccaccaagctgaagattctgcgccgcggaggccggggtgccgctgccgtcctccccgtcaccaaccacgacggcccgtgctgctcctccgaccacggcagcaaggagaagaagaagaaaaagaagggcgccaggaagggcaggaaacgcgcctccatcctgggcgacgccggcaccttcgacccggacttctcgcggcggtaccggctcggcgcggagctcgggcgcggcgagttcggcgtcacgcggcggtgcgaggacgccgccacgggggaggccctggcgtgcaagacgatccggcggaagcggctgctcctgcgcctcgccgggcccgacgcgaccgacgtgcagcgcgaggtggagatcacgcggcgcatgtcggaggtgagcgggggcagggtcgcgtgcctgcgcgaggcgtgcgaggacgacgacggtgtgcacctcgtcatggagctctgcgagggcggcgagctcttcgaccgcatcttcgagcggaagcactactccgagcgcgccgccgccaagctcgcccgcaccatcgtcgaggtcgtgcagctgtgccacgagaacggagtgatgcacagggacctgaagccggagaacttcctgttcgtgaacaagtcggaggagtcacctctcaaggccatcgacttcggcctctccgtgttcttcaagcctggagatcggttcaccgaagtggttggcagcgggtgttacatggctccagaggttctcaagagaagctatgggccagagatagacgtgtggagcgctggtgtcatcctgcacatccttctctgcgggttccctccgttttggggaggctccgatgagaaaattgcacagtcgatactccgtggggtaattaacttacagaaggatccatggcccaaggtctcccagagcgcaaaggatcttgtcacgaggatgcttgacccagatccttgtacacggttgacggcaaagcaagtccttgagcacccttggctcaagaatgctgataaggcttcaaatgtgtcactcggagaggttgttcggtcgaggctgaagcagttgtcgtctatgaacaagcttaagaagaaggcacttggagtcgtcgccatgaatttaccgatggaagagattggcaaattcaaagagatgttccatacaatggacaaaaacaaggacggtagtttgtcacttgaagagctgaaggagggtttccggataaacgatcatcctgttccagaggaagagataaagatgttgttacaagcgggcgatatacatggaactgacacattagattgtgaggaatttgtgacagtcttgcttcacattaaaaagatgagtaatgacgagtatctacctaaagctttcgagttcttcgacaaagacgggaatggttttattgaaatgtccgagttaatggagactctaagtgatggtgaactaaagcctgatgagcaattggttaacgacattattcaagaggttgacaaggataaggatggtcgcatcagttacccagagtttgaattgatgatgaaaagtggatcggactggaggaacgcctctagacgttactcaacagagaatttcagcagcctcagtcaaaaactgtgcaaagatactttatgaaacaagaaagtagtttccaagcagcaattactgactgaagtaccacaccctcaactaaacagcatcagaagacaacgcaaaagcaggattactggatctggtggaaataagggttgaaggagatcacatataccagttgcatgcttgacaaacttcgtcaactagcaagccctctggcattgtcctttgctctggaagtaaaatttactattccaatagaatacatgacttagacatagacagatgtaaaggatgccccagcatccatgcaatccactaaccaaaatttggcattttactactgtcaaatatataaagaaaagaagatgtccatctgagtgcctagaattaaaataccccaacattaatagatcaaaagag

SEQ ID NO: 205712 - DNA, 1230 bp, Zea Mays
ttgttgtgcactggaacgtgctgcccatgccgtcgtcctgatgctgttgctcggatttgaccgcagacgcctccaagtccaagaatgatctgttaccttctatagaattggttacaaaaatgatagaggatgttgagcttctagaagaaaaggctaaagtggccaaacatgaattgtccgttgctgggacaggcattctggcaaaagttgaggagctcagagaaatgataacttatgcgaaggaagcaaatgatatgcatgctggtaaggttttaggcgagaaagctattttaaccacagaggcacgtgagcttctatcacgacatcagaggctttcggatgagaggaataaatatctggtgataattgaagagatacaccaaattcttgctgaaagattggttgctgcacaacaagaaattgcagcagctgagaaagaaaatgctgaaaaggaggctgctgctcaggcagtactcgatgaacaggaaaaaatgatgaattctatcgtagaagaatcaagaaagctgcagaaagaagctgaggagaacctgaagctgaaggaattcttggttgagcgcggtcaaattgttgatatgctgcaaggtgagatggctgtgacatgtgaggacgtttcgttgctcaagcgagtggtagatgagcgcctaccgttgagcaagttgcagcgctcagctatgtcgagcctctcttcttcactgcattcttctcatcacaagagctggacttcctcggataaagccattagatctccagataagcacacccttgctgaacctgcaagcccagtggggaaagatctggatggcaacgagtgcaccgtggaagtgtcagatggcaacgacagtggtgaaggcattttgaagcgcgtggattccaaggaggatgtcgatggatgggagctttgctgaagatgttcaggaatagcggcgttgccagaggatgctgaagcataaactaacaataattgtgtataaacgcatactagcacggtgctaatctaatcgttttcacatgaatcgggaagtctcgctggctcaccacagttgtacgtgagatgagtccaactggcaactgcagcttgatgtggtatatataaaagtgaaggtttcagctcccttactgtccaaattttatgtcgtttctaattttgttctaggttaaatatctgacttttactatgtcttctaaaaatattaatatctacaatactct

SEQ ID NO: 205713 - DNA, 2310 bp, Zea Mays
ttttatccacctcgctttccttcacttggtttctaatacgcaattcgcggggaacccaaaaccctaatcctctctctccacgccgccagagagccgtgtgggagctcggtcctcggacttctgcatcgatctctgctatgagtgctatctaggtttctcagatgggtgacctcaaggaggttttccgctccctccaagaactcttccctgaggttgatcatcgtatactaaaggctatcgcaattgagcatcgtaaagatgttgattccgcggttgttactgttcttgatgaagtcatgccgttcatgacgggttcagctggagtggatggttctgttgggaatttgtcatctatggatggttctgttgggaatttgtttggtaatcacagcacacatgaagtgggaagttcatcatctgtttggcgtgatatatgtatcaatgagattgatgcaagtgtttactctgtgcaatacacttcttatggggatgtcaaaactggcaagcaagaaaacataaacaacacatatgtgggaagacttgcatcaatcgaaggggtcaatgagcaactaaatctacattcttatcctatcccaaatggtggtcaacatgatttgcttcccaaccttgatgtgctatcttcaaataccgatccagagaaaacgttggccaacacagataatgaagttggatacagtggattatttagtgaatgtttttcccaaccaccgacaggggaagatggtggtaatatcatagccccacaaccctgtgatcaagatcctaatggcatgattccagttggggattactttccacagaacagttcaatggagttcttcagtggctatgaggactacaattttgatgacggccttttgcctattggttctaatgatcaaatatcttttcgaattttgggtactgaaaaagatccttttgcgcctgtgctagatgttcctggtcgagataaagaagaatcatccactgagacttctggatttatagaatcctccaataatgttgcagatatgcttcctgatcttaatctgaaccattttacttctacggcttcaactcactcaaaccattctgttagtattgagtctcttgaggattctgttgctgatgccagaagcaataagaatgatctgttaccttctatagaattggttacaaaaatgatagaggatgttgagcttctagaagaaaaggctaaagtggccaaacatgaattgtccgttgctgggacaggcattctggcaaaagttgaggagctcagagaaatgataacttatgcgaaggaagcaaatgatatggtcttcccctctaacccacatgctggtaaggttttaggcgagaaagctattttaaccacagaggcacgtgagcttctatcacgacatcagaggctttcggatgagaggaataaatatctggtgataattgaagagatacaccaaattcttgctgaaagattggttgctgcacaacaagaaattgcagcagctgagaaagaaaatgctgaaaaggaggctgctgctcaggcagtactcgatgaacaggaaaaaatgatgaattctatcgtagaagaatcaagaaagctgcagaaagaagctgaggagaacctgaagctgaaggaattcttggttgagcgcggtcaaattgttgatatgctgcaaggtgagatggctgtgacatgtgaggacgtttcgttgctcaagcgagtggtagatgagcgcctaccgttgagcaagttgcagcgctcagctatgtcgagcctctcttcttcactgcattcttctcatcacaagagctggacttcctcggataaagccattagatctccagataagcacacccttgctgaacctgcaagcccagtggggaaagatctggatggcaacgagtgcaccgtggaagtgtcagatggcaacgacagtggtgaaggcattttgaagcgcgtggattccaaggaggatgtcgatggatgggagctttgctgaagatgttcaggaatagcggcgttgccagaggatgctgaagcataaactaacaataattgtgtataaacgcatactagcacggtgctaatctaatcgttttcacatgaatcgggaagtctcgctggctcaccacagttgtacgtgagatgagtccaactggcaactgcagcttgatgtggtatatataaaagtgaaggtttcagctcccttactgtccaaattttatgtcgtttctaattttgttctaggttaaatatctgacttttactatgtcttctaaaaatattaatatctacaatactct

SEQ ID NO: 205714 - DNA, 2436 bp, Zea Mays
ttttatccacctcgctttccttcacttggtttctaatacgcaattcgcggggaacccaaaaccctaatcctctctctccacgccgccagagagccgtgtgggagctcggtcctcggacttctgcatcgatctctgctatgagtgctatctaggtttctcagatgggtgacctcaaggaggttttccgctccctccaagaactcttccctgaggttgatcatcgtatactaaaggctatcgcaattgagcatcgtaaagatgttgattccgcggttgttactgttcttgatgaagtcatgccgttcatgacgggttcagctggagtggatggttctgttgggaatttgtcatctatggatggttctgttgggaatttgtttggtaatcacagcacacatgaagtgggaagttcatcatctgtttggcgtgatatatgtatcaatgagattgatgcaagtgtttactctgtgcaatacacttcttatggggatgtcaaaactggcaagcaagaaaacataaacaacacatatgtgggaagacttgcatcaatcgaaggggtcaatgagcaactaaatctacattcttatcctatcccaaatggtggtcaacatgatttgcttcccaaccttgatgtgctatcttcaaataccgatccagagaaaacgttggccaacacagataatgaagttggatacagtggattatttagtgaatgtttttcccaaccaccgacaggggaagatggtggtaatatcatagccccacaaccctgtgatcaagatcctaatggcatgattccagttggggattactttccacagaacagttcaatggagttcttcagtggctatgaggactacaattttgatgacggccttttgcctattggttctaatgatcaaatatcttttcgaattttgggtactgaaaaagatccttttgcgcctgtgctagatgttcctggtcgagataaagaagaatcatccactgagacttctggatttatagaatcctccaataatgttgcagatatgcttcctgatcttaatctgaaccattttacttctacggcttcaactcactcaaaccattctgttagtattgagtctcttgaggattctgttgctgatgccagaagcaataaggaacgtgctgcccatgccgtcgtcctgatgctgttgctcggatttgaccgcagacgcctccaagtccaaggtgacactgtacagtacggctgtagtgtcgagggtgctgttctcggctcctttgataatgatctgttaccttctatagaattggttacaaaaatgatagaggatgttgagcttctagaagaaaaggctaaagtggccaaacatgaattgtccgttgctgggacaggcattctggcaaaagttgaggagctcagagaaatgataacttatgcgaaggaagcaaatgatatggtcttcccctctaacccacatgctggtaaggttttaggcgagaaagctattttaaccacagaggcacgtgagcttctatcacgacatcagaggctttcggatgagaggaataaatatctggtgataattgaagagatacaccaaattcttgctgaaagattggttgctgcacaacaagaaattgcagcagctgagaaagaaaatgctgaaaaggaggctgctgctcaggcagtactcgatgaacaggaaaaaatgatgaattctatcgtagaagaatcaagaaagctgcagaaagaagctgaggagaacctgaagctgaaggaattcttggttgagcgcggtcaaattgttgatatgctgcaaggtgagatggctgtgacatgtgaggacgtttcgttgctcaagcgagtggtagatgagcgcctaccgttgagcaagttgcagcgctcagctatgtcgagcctctcttcttcactgcattcttctcatcacaagagctggacttcctcggataaagccattagatctccagataagcacacccttgctgaacctgcaagcccagtggggaaagatctggatggcaacgagtgcaccgtggaagtgtcagatggcaacgacagtggtgaaggcattttgaagcgcgtggattccaaggaggatgtcgatggatgggagctttgctgaagatgttcaggaatagcggcgttgccagaggatgctgaagcataaactaacaataattgtgtataaacgcatactagcacggtgctaatctaatcgttttcacatgaatcgggaagtctcgctggctcaccacagttgtacgtgagatgagtccaactggcaactgcagcttgatgtggtatatataaaagtgaaggtttcagctcccttactgtccaaattttatgtcgtttctaattttgttctaggttaaatatctgacttttactatgtcttctaaaaatattaatatctacaatactct

SEQ ID NO: 205715 - DNA, 1099 bp, Zea Mays
ctcactcgctctacacgcttcggattcgaattattggtggccttgcagctttcgttaatgctgtgcttgtgctggattgtagctgttcgattttgaaaaggagaacttgtgcctctatggctatcccgatgagacatgggaggttaccttgccagctgaggaagtgcccccagagatccctgaaccagcattaggaatcaactttgctagggatggcatgaatgagaaggactggctggcgctagttgcagtccacagtgattcctggttactatctgtcgcattctactttggtgcacggtttggatttgacagagaagctaggaggcggctctttagcctgataaacaacatgcccacgatatttgaggtggtgacgggagcagtcaagaagcagcaggcaaaggagaagacacctaacagtagcagcaagagcaacaagcctagttcaaaagtggtaaatgccagccactttccgttgccatctgacctgaactattgctgataacaccgacattatgcctgcagcagtcaagagcagagtctcgatcgaaggctaaggtccccaaagacgaagaagagagcggtgacgacgacggggacgaggaggcggaggagcacgacaacaccctgtgtggaacctgcgggaccaacgacggcaaggaccagttctggatctgctgcgataactgtgagaagtggtaccatgggaagtgtgtcaagatcacgcccgcacgggccgagcatatcaagcagtacaagtgcccagactgcaccaacaagagggtcagggcgtgagcaaccgatgcgaccttgctaggaaggaaaggaagaaacgacctccttggcgccaagatatggcgtgtagttccctagtctgtaagcctgcatttttcatttatggttgttttatctgttgattagctgttcgacctagcattgtctaatgcgtggcatgtctcatgtgctgagtgttgacattgccatgggccccgccctctagtctgtaaacgttgtcactgaaggtacctctcggctgaccatttctccattgttggtgttgtgcaatgagtagtgaacgtagtagtcttagcatctg

SEQ ID NO: 205716 - DNA, 1692 bp, Zea Mays
atctcgcctgacacacaagcagccccatatatggcccggtctcctacccagacaacccgtccgtctctcgttctctccttcctatcggctccacacctccacgcaactggaagcttcgctgcaatctgccctactcctcttccgccgcctccaacaccgcagacgcagctgccgcgggcgggagcttggacgtgctacgctgctctcatctcgtttccgcgcagttcaggaattgttctcaatggcccgcgtgtatgttggcaacttggattcacgggtgacttctggggaactcgaagatgagttccgcgtgtttggagttctgcgaagtgtttggattgcacgtaaaccacctggctttgcatttattgattttgacgacaggagggatgcggaggatgctattcgtgatctagatggtaagaatggatggagagttgaactatctcgtaattccagtggtcgtggtggtcgtgatcggtatggtggatctgagtcgaagtgctatgaatgtggtgagactgggcactttgcacgtgaatgtcgtctgcgcattggctctggaggtctaggcagtggaagacgtcgcagtcgcagccgcagtcgcagtcgcagtcgcagcaggagcaggagcagaagccgcagccctagataccgcaggagtccaagctatagtagaaggagctatagccctcgttatcgctctccaaggcgccgtagtccttcgccagctcgcgcgcgcagctatagcaggtcaccatagtacaactgcaacgagtaatggtggcaggtactggtgtagcaggagctaggcctgaagcccgtgcctgatacttcttggtgtgagaacttagtccttggtttggctgtcaggaacaaatttggaactgtcgtcaactgcatgacttcagttcaggcatgttctgcttaaacgactcggccaactacggctctcagttagtcttcatggttttgttcctccattcttggcacgtccttatctgcaaacaaatgtcaacgttccattactagctgccttcgatgtttcatcatgaaattcttcaccgaagatgctacttcatcacaaattagtaacatcctttcccctcatatagttgataaggtttgagtgtactgagcactaacaaatgcagctcgcgaaagtaagaccgtttttcgtcatagaacaagacagctattttaattgcagcactcgtgtgaaaatagatctactctgcatggtggggattggggcgattgaagtgtggccttcagctgcacctagttgggcatcccaggaacctagtcaggctcactacagcaagaggcgcatcctttgactaaacatgttggttttatttcttgtggtttgattcttcacttctgttcattgtgttctgccttcactgcaccctattggtagtggtcgaacaatgcttctgtctgtggtaagttattcttggtacaatggctcttctttaccccctgatcagtgtatgttggactttctgatagagttagcaccaattgtagtataaatatgttctttttttctctggaaggtaattgtaattctatctgaatactcagatttgaggtataatctgctcttgtcaaatgattttttaaagatcattctagtttcacctgtagctttcttccttttattacttactttaggcaatgctggac

SEQ ID NO: 205717 - DNA, 2467 bp, Zea Mays
cttcccaatcaaaccgaggccgtcatccttatctgaatcgcgtgctttccagccctctgcccgctgtgccccacccccacgcccggcgacccgcaggccgcacccacccacccacccgcacccagcgccatgtccaccgcggccaccgcgtgcgccacgcgggcggcggcgcgtccgcccctcaacacggctccggcacgccgcgcgccgccttctgccgtgcgcccgccatcggccacccccgcccgccgcgccgccggctgttgcttctgcgccgccgcctcctcggcgtcgtcgccctccacctgggattggacccgatggagccgccacttcgacgaggtcgaccaggcggagagctacgcatccctcctccagttccagctagaggaggcggtggagaacgaggatttcgcggaggccgccaaactcaagagggacatcatagaggccaccggaaacgacgctgtagcccacgtcatggccgagctcaagaatgctatagaggaacagcggtaccaggacgcgtcaaggttgacaaggcttgctgggaccagcttggtaggttggtgggtgggatatgctaaggacactgatgattccatcgggagaattgtacgaataagccctggtgtcgggagatatgtggcgaagagctacaacccaaggcaattggtcactgcatcttcaggaactccattatttgaaattttccttgtcaaagaagatgatgagacatatacaatgaaggtggtacacatgcgaccaacaaaaggaacttcaggtgcaccatccatatcatcaacaataacagaaagcccagcaaaggtagagaatgaaaattcatcagaaagtagtgctatatctgacagtgttacagaggaggcaaatacagatactacggtaagaggaaatgaggatgctgaagagaaagcacaagatgttggtagcagcaaggatagtagtgtcgaaggattaaaaagtgttttgaatttttttaagtctcggattcctgaattcaaagttcaggtgataaatgttgatgtggctgaggaaactgaattagctgcaaattcgtctgaagaattagtgcaagatgatgtgaaaagtactccagaaagctcattggaagagccagccactgaggaactcgagcaggaggaagatgttccggaagaaaatacggatgaagaaagtaaaagcacggaagtgaagctttttattagtggagtggttcacaataaagaagatgctggagcaaaatcatatgttcgagttccagctgaaataaataacatggaaaaggactcctttgaactgtacattcctggagaaggttctgatcgtgatttggctgaaacaaaggctgcaaaacagaaagttgcagatatggctgctaaattagcctcagagcttatgccgtctgatgttgccaaggcattatggggtacagccaagagttcttcaaagataaataaagaagttcaggagcttttaaggcttacgttaagcaaggcccgagtcaagctgaccgaaaataccatttttaaacgaatcattatggacactaacagcacagatccatttaatggtctctatgtgggagcatttagtccatatggaccagaaattgtgcagcttcgtcggaagttcggccactggaacagtactgatgacgttgagtttttcgagtatgtcgaagcagtaaagttgactggtgatctgagtgttcctgctggccagataacgttccgtgctaagattgggaagggcaagcgacttgagaatcgaggagcatatccagaggaatttgattgccagttacaaaggtcagggtagaatagctcagcctggattcaaaaatcctcgatgggtggatggtgagctgttggtactcaatggcaagagtacaattccacaccttggaggcgcagagctcggtttcctgtatagtgtacctgagcagagttttctggttctcttcgatcggcttaatcttcccgagtgatgagactcctaaagggagcagactcctcacatgtagattgcatgaacgcgcagaggccggccacagctccaagtgaccgaaacaggtctggggggccgtttccccatcgtcttctgccctctgggcttcctgccaatcctttctccgcacctactttttaggagctcatgtgcttaactcgtttcagagtgtgagggaaagtcgacaccattgctggtctaaactaacggaggagtcttaatactaataatatatatgttatagcatggtagtttgctctccaatgccacagttgtagctgtattgggtatgggcatgacagttttgcgagttttacccgtcatcgttgatttcagtaattaccgaattgaataaaaatcgttctggtgtatcgtgatgttacaattataataatataaaacaaggcaaataaagtctcatgatttatgatcgtttttc

SEQ ID NO: 205718 - DNA, 2065 bp, Zea Mays
actcgcatctaaaccctagcccctcaccgttctcaatctcttctcccttgatcggcacagccacaacctccttctccaatactctctccctcgccgccggccacctccgcctcctcccacgcgccacctccgcctcctcccacgcgccacctccgcctcctcccacgcgccacctccgcgacaaaccactgaaggagggagaggactcgctcatatcgtccgatggaggaggactcgatcaaggggatgatctccgcgatatcctgggtgcccaggggcgccgccaagagcgtgcccgtcgttgccgacccgcccactcaggaggagatcgccgaggccatgaagaccttcgacctgggcagagactccgggagcgacgctgacgaggatgatgatgctgccaccatggaactcgacggtgcggcggaaacggtggaggaggttgatgaggctgcccgagccaaggccgtagccaaggcgctctgcaagggctctagcaaggcggacgacgtcgctgatgagctccgcgaactcaacatggacgcgtacgatgatgaagatgaaggtcgatattttcggctctgggctgggggacttgtactatccgagcaacgcaatggacccatatctgaagaagaacaatgaggatgatgaggaggacgacgatgatgatgaggaaatcgaagataagatgatcatgcctactgattttgttattgtctgtgcacatagtgaggacgatatcttctctcttcaggtcaacattcttgaagaaacaaatgatggtgaacaaaatatctttgtgcatcatgacgttcctctcgctgattttccgctatgcacagcttggatggattttaatctgaaaggtggtgaaaaagggaattttgtagccgttggaaccatggatcctgccatagaaatatgggacttagatatggttgatgaagtgcaaccgcacatggtgctaggaggactttcaaaaaagaagaaaaagacaaagggcaaaaaggggaagaagtataagaaaggaagccacagaagttctgtgcttggtcttgcatggaacaaggaagttaggaatgttctagctagtgcaagtgcagacacaactgttaaaatctgggatatagctgttggtaaatgtgcagtcactctagaacaccatgatgacaaggttcaagcagttgcttggagcccacagtcacctgaagttctgcttagcggatcctttgataaaacagttgccatgaatgatatgaaagatggtgggcagaattgtcataaatggtctgttgaagcagacgtcgaaagtttagcttggaatccacacaatgaacattcatttgtggtcagtcttgaaaatgggatggttcaagccttcgataagcgaacagcttcatcaagttcttctggccagtctatgtatacccttcatgcacacgataaggctgtttcttccatctccttcaacccgtctgcccctaactttctcgcaacaggctcagttgataaaatggtgaaactatgggatctatcaaacgacaaaccatcatgcattgcctcccaaaatccaaagcttggagctattttttcggtatcattttcaaatgacagccccttcttgttagcatgtggaggttcaaaaggcaaactgaaggtttgggacacgcttacggagcctgcagtagccaacaagttcagcaaatagaactgccgctgtttgccattataagttatttcccggcacacacatgtttgggtagattgaagttatagtcgaagttttgcccttgtgagttgaggagcccaattgtataatgaactcatgaaatcaatccaagcattgatttatgtattagtggtgggcagaggttttggagtggacgtattaactttatgacggtgcgagttgggttgtgacttcccaattttttgtgaaagaagttagtgatcttcagaccagctcactttatctcgatccaatttgaaactttggacaatagttttacatggaacagctcgactgtataaggctatctttagcagcggtacacatctttgt

SEQ ID NO: 205719 - DNA, 2025 bp, Zea Mays
gcctgtttagcacgaaaaaaacgggccgaaaagcgggctaaacgggccggtaagcacgttttagtgtaaaaaacgggcttaacgggcttagaggtaaacgagccgtgccaggctagcccgccgtgcctagtttcctatcaagcccgcccgcttattctaccgtgccgggctcggaccgggcccaaaaaacgggcttcgtgccgggctcacgggcctcgtgctttttggccatctataccagtagggtacgtacaatccgattgtatttatattctagtatgattgtatgtggactcttaagtgtctcttgtacttagaaaaccaaaccttcaaaccgattgtgcggtcacaccttgtcccccaactcccgcccggatctccatcgccacgcacttctctgctactgatctttagccaaaacaatgccgcggatgacgtggctatgatttcccaaggcaacaatatccacttgagccagttccttgtccagaagctgaaccatccactgatccacccgaaaagcgcgctatttttatacggccaccaccaggtcagcaaggcagccggcgcctagttctctcctccatcgcaactcccacgacccttttccaagtctcgcctccacggctcgtcggctccatccctattcctctcgagtcgcctccgtcccctttgttcaccccagaccccacgcgtgtggctttgaaagagcaccctcatgcatggtctggccggttgaattgaaggagaactgggcgaccggcggttatccaactgtctctaaccggatagagaagaaagtgctccactctccagacaaggtaccgaactcccctcgcattgcgcgtgtcgaatttttgcaaactgcatgggggctggggcgtcgagcgtggtggcgccggacgggtacggccgggggtgggggcagacgtcgctgggcgacatgccggagagctgcatcgcggcggtgctgctctacctcggcccggctgagatctgccaggtggcctgcctcaaccggacgttccgggacgcggcctccgccgactgcatctgggccgccaagttgccctccaactacaggtacctcgccgcactcgcggccgcggccgacgacgactgcgcttgcgatgacgcggccgaaggcagtggcaggtgctgctcctctgcggcgatcaagaaggaggtatacgcgcgcctctgccggcccacccggttcgacggcggcaccaagttacttgagtaggaattttggatcgacaagaacaagggaggtttctgcatgtccatctgctcaaaggctatgtcgatcacagggagagatgatcggaggtattggagccacctatccacagaggaatcaagatttcacggcgtcgcttatcttcagcagatttggtggcttgaggtcggcggggagattgacttctgctttcctgccggttcatacagcctattcttccggctacgtttgggccgaccgcacaagcggatgggccgccgatgccatggctccgagaatatccacggttgggacatcaaaccgacacggttccagctttcaacctcagatgaccagcacactacatctgagtctcacctagttaaccctggaagatggaccctttaccacgtcggtgatttcatcgtatcgagttcagacgaggtgacgggactcaagttctctatgatgcagatcgactgtacgcatacaaaaggcggcctgtgtgttgattcagtctgtatataccccaaagatctcggatatgaggactgcgtgttctgccagaaagttttgtaagagcgcttgagtttcttggctagacttttttttcttctttttcgggtcattcttgtccaaaatggtagtgcgcaaaaaaaaaaatccctgaggacccgtttgtttcgttggaattgaattccattttaataattataatttagacaaaactaattaagtttatatatttatatatgtaatatatttgtatattatcctaaatcatatgagagagatagttatat

SEQ ID NO: 205720 - DNA, 857 bp, Zea Mays
cacgctcatctggaagttgatgcaacgaacctaatgacgtaactgacgccctaccatgcacaacggaaattgagccaggaattttggatcgacaagaacaagggaggtttctgcatgtccatctgctcaaaggctatgtcgatcacagggagagatgatcggaggtattggagccacctatccacagaggaatcaagatttcacggcgtcgcttatcttcagcagatttggtggcttgaggtcggcggggagattgacttctgctttcctgccggttcatacagcctattcttccggctacgtttgggccgaccgcacaagcggatgggccgccgatgccatggctccgagaatatccacggttgggacatcaaaccgacacggttccagctttcaacctcagatgaccagcacactacatctgagtctcacctagttaaccctggaagatggaccctttaccacgtcggtgatttcatcgtatcgagttcagacgaggtgacgggactcaagttctctatgatgcagatcgactgtacgcatacaaaaggcggcctgtgtgttgattcagtctgtatataccccaaagatctcggatatgaggactgcgtgttctgccagaaagttttgtaagagcgcttgagtttcttggctagacttttttttcttctttttcgggtcattcttgtccaaaatggtagtgcgcaaaaaaaaaaatccctgaggacccgtttgtttcgttggaattgaattccattttaataattataatttagacaaaactaattaagtttatatatttatatatgtaatatatttgtatattatcctaaatcatatgagagagatagttatat

SEQ ID NO: 205721 - DNA, 1368 bp, Zea Mays
gttcatccacactgttcaggaaatattgtatcatttaattcaaggaagtaatggtggtggttcatctagaactcattcgattccaagttctagctatggccatgatcggacatcaaatgcacaaaaattgtcaggagatgtaaactgtgagtgtgagttgcaactagcagttgatgaagctttagctagagagttgcatgaaatggagagcaaactagccaacacttcacttaatgacaataatggaagaaagacaacatcatcttcagcatttgatagaggcaataattctgcaagtagacctcctcaggtattggaggaggatgtgattgatccagataatatgacgtatgaggaactgcaacagctaggggaagccattggtacccaaagcaaagggctgcctgaaagtgtcatagcactcttgccaacttcaacttacaaaactgggatattctccagaaaggaaaaacatgatgaatgtgtgatctgttgtatggcatacaagaaccgagataggctgactaaattgccatgtggacatcactaccatcaagcttgtgttgctaaatggttacagatcaataaggaattttggatcgacaagaacaagggaggtttctgcatgtccatctgctcaaaggctatgtcgatcacagggagagatgatcggaggtattggagccacctatccacagaggaatcaagatttcacggcgtcgcttatcttcagcagatttggtggcttgaggtcggcggggagattgacttctgctttcctgccggttcatacagcctattcttccggctacgtttgggccgaccgcacaagcggatgggccgccgatgccatggctccgagaatatccacggttgggacatcaaaccgacacggttccagctttcaacctcagatgaccagcacactacatctgagtctcacctagttaaccctggaagatggaccctttaccacgtcggtgatttcatcgtatcgagttcagacgaggtgacgggactcaagttctctatgatgcagatcgactgtacgcatacaaaaggcggcctgtgtgttgattcagtctgtatataccccaaagatctcggatatgaggactgcgtgttctgccagaaagttttgtaagagcgcttgagtttcttggctagacttttttttcttctttttcgggtcattcttgtccaaaatggtagtgcgcaaaaaaaaaaatccctgaggacccgtttgtttcgttggaattgaattccattttaataattataatttagacaaaactaattaagtttatatatttatatatgtaatatatttgtatattatcctaaatcatatgagagagatagttatat

SEQ ID NO: 205722 - DNA, 1291 bp, Zea Mays
cgccacgcccccacatagaaaacaggcctcctcgcctccgtccgtccagctctggtccgagcccatggaaatcgttgccatatcagatcagctccgccatggacccccatctatctgcgaccctcggtgacgcgctccgcccaccgccgcccgggaatggctcgagcgctgctcctgctgcgagtagctgtagcccgctaccctcctctcccggcctcacccgcgctcctccagccgctgctgcgccgccacgcgccctcccagtacaggtcccagctccgcttcctctcctccctctcctcctcgtccgtgtccaccagctcagatgctcccagcgacggcgggggcggccgcgacggggaagaggatggcgcgaagagcggcggccgcgtcgactacttggggatgagcgacgaggagctcatggagcagtgcgatatgggcacgttcaaggcgtccggccccggcggccagcaccgcaacaagcgcgagtccgccgtccggctgaaacaccttcccaccggcatcatcgcccaggctgtggaggatcggtcacaacataagaaccgagcgtctgctttatctcggcttcgaaccctgattgctcttaaagggaatgcaagctttattagacctgctgtttgctgttgaaggttctgtatcagatgcagcaaagattttaggcctaagcactggtgctttgtcaagattgattctgtcagatgattctctccgaacggccgcgaatgaactgcgagcttcgaagggactgaagcctttgagatgaaatcctttgtaaaatcctcagcttcaagtgcaccatatcccataggtgccatgttcgacagatgtcaggaggcattatttctagggaaaacctttgaggtttcatgcggtttgtttaagggatgttcgtcgtcattagattgccgtaaatatgttcagtaggcagctagtatatcttcagaatatcctcgtttcgtattacatatacccccaatgttctccagcagggcaacaccattacaccacttaaccaatatttttccttgaggacctgttaacctcaaacttttatttgccagccaaaagttgttgaagcggctgtgctgaattgctgatttaattggctgtaactacctcatgggtacacaattctaatcttgtttcctttcagcgtttgatgatgcttttatatcaaattggtgctcttaaatttaaatgcaccatggatctgtttttagcttccattgtcattgcatgaaaactgaaattataatcatagttcgag

SEQ ID NO: 205723 - DNA, 2791 bp, Zea Mays
ccaaccggcccttggtcgtggcgtcgctgtccgagcgccagacaagagacaggggagatgaaaaagaggcggtggtggttcgagtgtgaatatgccggtggggagggctctgcctccccaggatacttcgccccccgttccaccgcgagcccttccggcttccgcctctgttccgccgctccagcctccaggatccgtggggagatcgatttcggcgtcgtcgttgacaagaggcggcggctctcaccagaggaggacggcagcggtgggtgcagcaattctgcggtagcagatggagacaacagtcacgtggtgtgtgttcagagagggcggaacactgaggagacgagacccaggaaaggtgccaattcgagcaccactccttcttgccaggttgacggctgccaagctgatcttagtggtgccagggactaccataagaggcacaaggtgtgtgaagcgcataccaggacaacagtggtctgcatcaataatgtagagcatcggttctgtcagcagtgcagcaggtttcaccttcttcacgaatttgatgatggtaagaagagctgccgatcacgtctggcacaacataatggaaggagaaggaaagttcaaccgcaacctgctgtgaacgggaattccatgaatgaagatcagtctctaagtagcaccttattccttctgttaaaacaactttccgggctcgagtctggtagctcttctgagcaaatcaaccatcctaattctttggttaaccttttgaagaaccttgctgctattgctagcacacatgcatatcaagatgttctaaagaatgcaacttcaatatcatcaaatgatggtaataatgctgcaaatggctctataatgcatgagcaaaccatacggtcaattcctgtcaggagagaatcattagcagaagagcctgcggtgaaaagacgagtacaggactttgatttgaacgattcatgcattgaagaagccgagagccgaacagataaaattgtgttcaaactctttggaaaagagccaaaagattttcctgtagatctacgggaacagatcctaaactggttgtcgcattatccaactgatatggaaagttatattagacctggttgtgttattctaactatttaccttcacctccctaattggatgtgggatgagtttaatgatgacccagcttcatggatagaaaatcttattagcttatccaatgatggattctggagaacaggatggttgtatgctagggtacaggactgcctaacactgagttgcaatggtagtcttatgtttgcatctccctggcaaccggtaattggtgacaagcatcagagactgtgtgtaactccaattgcagttgattgttcttcgtcagtaaaattctctgtgaaaggtttcaatatagttcagccaaccacaaaattactttgtgtgtttgatgaaaaatatttaattcaagaagagacacaaatgctacttgaagattcaactatgcagcaaggccctcaatgcctgaccttctcttgttcctttccttgtacaagtggaagaggattcatagagattgaagactatgatcaaagcagcctttctgttccctttgttgtcacggacaaagatgtatgttctgagattcggatgttggagcatggattggatttagtttcatttgatcaaacctccaaaagaatagatgatctgatgatttatcgcagtcgagcattacattttttgcatgaaatcggatggcttcttcaaaggagccatgtgcgagctacgtctgagcagcgacaatattgtcctgaccgcttccctgttgcaagatttagatggctgctatcctttgcagttgatcaggaatggtgtgctgttctaaggaagcttctgaacaccatgttccagggtgatattgatgtattgtcaccaattgaatttgccttgggagaaaatctattgcatactgcggtcaaaaaacgctcaaagcctttagttgaatttctattaagatacaccacaacaaatattgctccagtgggcggtggagatggtgctccagttcagttcttgttcactcctgcgatgactgaactgtcaaatatcacacctcttcatattgcagccacaatcagtgatgctattggtgttttagatgctttaactgatgatcctcagcagttgggaatcaaagcgtggaagaatgctcgtgacgccactggcttcactcctgaggaatatgctgcaaagagaggcaacatatcctatattcaaatggtacaggacaaaattgacagaagggtgaccagagctcatgtctcggttaccatccccagcacaattgatactgtcggaaagcatggtagccgaatgaagcctgccgatcaaatcacatttggtgttgagaaaaaacaactaagcatcaaccaaacattgagctgcagacagtgtgtccagcaggcccagcagcttgcattccatccccggacaaataggtttctgtctaataggactgcgatgctttccttggtctccattgctgccgtctgcgtctgtgtgggattgatcatgaagagcctgccacaagttggttgtatgaagcctttcctctgggacaatatacgttggggccccaattgatagactgcagaagagccagcccgattgtatcagtgtatgatgaagatgtttgcgccgagcgaagctagtttcttgtaatgttatccataccatctcccattggcttcgcaggtgggctatgctacagaagtcagattctcgccttttt

SEQ ID NO: 205724 - DNA, 3237 bp, Zea Mays
ccaaccggcccttggtcgtggcgtcgctgtccgagcgccagacaagagacaggggagatgaaaaagaggcggtggtggttcgagtgtgaatatgccggtggggagggctctgcctccccaggatacttcgccccccgttccaccgcgagcccttccggcttccgcctctgttccgccgctccagcctccaggatccgtgagaggaaaagtagtagccccatccccaaccggtcctaacccacggtacccaatacttgactcggctctctccatgagctactgttccatctccatttcttcaatcatttctcgcctttcatgttcaagggcgttgcttgccaaccacggtatcgttctagccgccggggccgaacgaagtcggggatgtaattgaatccagcgatctttggatgctcgtcatacgtgccaacagcagggtcaatttccctcgaaagagaaggccgaggaaatggaagccggtttcctgtggaaagagatcggtgaccaagccggtgcggcgagaatgtccggtgggaacaagaacaggagcctcgactgggatttgaacgactggaggtgggacgccaacctgttcctggccacaccagcggccgccgcgccatccgagtccatcagcagggagctgagccgaggtcagggggagatcgatttcggcgtcgtcgttgacaagaggcggcggctctcaccagaggaggacggcagcggtgggtgcagcaattctgcggtagcagatggagacaacagtcacgtggtgtgtgttcagagagggcggaacactgaggagacgagacccaggaaagggactaccataagaggcacaaggtgtgtgaagcgcataccaggacaacagtggtctgcatcaataatgtagagcatcggttctgtcagcagtgcagcaggtttcaccttcttcacgaatttgatgatggtaagaagagctgccgatcacgtctggcacaacataatggaaggagaaggaaagttcaaccgcaacctgctgtgaacgggaattccatgaatgaagatcagtctctaagtagcaccttattccttctgttaaaacaactttccgggctcgagtctggtagctcttctgagcaaatcaaccatcctaattctttggttaaccttttgaagaaccttgctgctattgctagcacacatgcatatcaagatgttctaaagaatgcaacttcaatatcatcaaatgatggtaataatgctgcaaatggctctataatgcatgagcaaaccatacggtcaattcctgtcaggagagaatcattagcagaagagcctgcggtgaaaagacgagtacaggactttgatttgaacgattcatgcattgaagaagccgagagccgaacagataaaattgtgttcaaactctttggaaaagagccaaaagattttcctgtagatctacgggaacagatcctaaactggttgtcgcattatccaactgatatggaaagttatattagacctggttgtgttattctaactatttaccttcacctccctaattggatgtgggatgagtttaatgatgacccagcttcatggatagaaaatcttattagcttatccaatgatggattctggagaacaggatggttgtatgctagggtagtcttatgtttgcatctccctggcaaccggtaattggtgacaagcatcagagactgtgtgtaactccaattgcagttgattgttcttcgtcagtaaaattctctgtgaaaggtttcaatatagttcagccaaccacaaaattactttgtgtgtttgatgaaaaatatttaattcaagaagagacacaaatgctacttgaagattcaactatgcagcaaggccctcaatgcctgaccttctcttgttcctttccttgtacaagtggaagaggattcatagagattgaagactatgatcaaagcagcctttctgttccctttgttgtcacggacaaagatgtatgttctgagattcggatgttggagcatggattggatttagtttcatttgatcaaacctccaaaagaatagatgatctgatgatttatcgcagtcgagcattacattttttgcatgaaatcggatggcttcttcaaaggagccatgtgcgagctacgtctgagcagcgacaatattgtcctgaccgcttccctgttgcaagatttagatggctgctatcctttgcagttgatcaggaatggtgtgctgttctaaggaagcttctgaacaccatgttccagggtgatattgatgtattgtcaccaattgaatttgccttgggagaaaatctattgcatactgcggtcaaaaaacgctcaaagcctttagttgaatttctattaagatacaccacaacaaatattgctccagtgggcggtggagatggtgctccagttcagttcttgttcactcctgcgatgactgaactgtcaaatatcacacctcttcatattgcagccacaatcagtgatgctattggtgttttagatgctttaactgatgatcctcagcagttgggaatcaaagcgtggaagaatgctcgtgacgccactggcttcactcctgaggaatatgctgcaaagagaggcaacatatcctatattcaaatggtacaggacaaaattgacagaagggtgaccagagctcatgtctcggttaccatccccagcacaattgatactgtcggaaagcatggtagccgaatgaagcctgccgatcaaatcacatttggtgttgagaaaaaacaactaagcatcaaccaaacattgagctgcagacagtgtgtccagcaggcccagcagcttgcattccatccccggacaaataggtttctgtctaataggactgcgatgctttccttggtctccattgctgccgtctgcgtctgtgtgggattgatcatgaagagcctgccacaagttggttgtatgaagcctttcctctgggacaatatacgttggggccccaattgatagactgcagaagagccagcccgattgtatcagtgtatgatgaagatgtttgcgccgagcgaagctagtttcttgtaatgtacatgtttcttatactaaatgtctaacttatttctgtttatagtaaaacctgtgaacttgcctagcttgtaactccattgcatttgcatcctgactgaagtaaagcttttacttgttttggttgagaggaagaaaaccttttacttctaaa

SEQ ID NO: 205725 - DNA, 3251 bp, Zea Mays
ccaaccggcccttggtcgtggcgtcgctgtccgagcgccagacaagagacaggggagatgaaaaagaggcggtggtggttcgagtgtgaatatgccggtggggagggctctgcctccccaggatacttcgccccccgttccaccgcgagcccttccggcttccgcctctgttccgccgctccagcctccaggatccgtgagaggaaaagtagtagccccatccccaaccggtcctaacccacgggcgttgcttgccaaccacggtatcgttctagccgccggggccgaacgaagtcggggatgtaattgaatccagcgatctttggatgctcgtcatacgtgccaacagcagggtcaatttccctcgaaagagaaggccgaggaaatggaagccggtttcctgtggaaagagatcggtgaccaagccggtgcggcgagaatgtccggtgggaacaagaacaggagcctcgactgggatttgaacgactggaggtgggacgccaacctgttcctggccacaccagcggccgccgcgccatccgagtccatcagcagggagctgagccgaggtcagggggagatcgatttcggcgtcgtcgttgacaagaggcggcggctctcaccagaggaggacggcagcggtgggtgcagcaattctgcggtagcagatggagacaacagtcacgtggtgtgtgttcagagagggcggaacactgaggagacgagacccaggaaaggtgccaattcgagcaccactccttcttgccaggttgacggctgccaagctgatcttagtggtgccagggactaccataagaggcacaaggtgtgtgaagcgcataccaggacaacagtggtctgcatcaataatgtagagcatcggttctgtcagcagtgcagcaggtttcaccttcttcacgaatttgatgatggtaagaagagctgccgatcacgtctggcacaacataatggaaggagaaggaaagttcaaccgcaacctgctgtgaacgggaattccatgaatgaagatcagtctctaagtagcaccttattccttctgttaaaacaactttccgggctcgagtctggtagctcttctgagcaaatcaaccatcctaattctttggttaaccttttgaagaaccttgctgctattgctagcacacatgcatatcaagatgttctaaagaatgcaacttcaatatcatcaaatgatggtaataatgctgcaaatggctctataatgcatgagcaaaccatacggtcaattcctgtcaggagagaatcattagcagaagagcctgcggtgaaaagacgagtacaggactttgatttgaacgattcatgcattgaagaagccgagagccgaacagataaaattgtgttcaaactctttggaaaagagccaaaagattttcctgtagatctacgggaacagatcctaaactggttgtcgcattatccaactgatatggaaagttatattagacctggttgtgttattctaactatttaccttcacctccctaattggatgtgggatgagtttaatgatgacccagcttcatggatagaaaatcttattagcttatccaatgatggattctggagaacaggatggttgtatgctagggtacaggactgcctaacactgagttgcaatggtagtcttatgtttgcatctccctggcaaccggtaattggtgacaagcatcagagactgtgtgtaactccaattgcagttgattgttcttcgtcagtaaaattctctgtgaaaggtttcaatatagttcagccaaccacaaaattactttgtgtgtttgatgaaaaatatttaattcaagaagagacacaaatgctacttgaagattcaactatgcagcaaggccctcaatgcctgaccttctcttgttcctttccttgtacaagtggaagaggattcatagagattgaagactatgatcaaagcagcctttctgttccctttgttgtcacggacaaagatgtatgttctgagattcggatgttggagcatggattggatttagtttcatttgatcaaacctccaaaagaatagatgatctgatgatttatcgcagtcgagcattacattttttgcatgaaatcggatggcttcttcaaaggagccatgtgcgagctacgtctgagcagcgacaatattgtcctgaccgcttccctgttgcaagatttagatggctgctatcctttgcagttgatcaggaatggtgtgctgttctaaggaagcttctgaacaccatgttccagggtgatattgatgtattgtcaccaattgaatttgccttgggagaaaatctattgcatactgcggtcaaaaaacgctcaaagcctttagttgaatttctattaagatacaccacaacaaatattgctccagtgggcggtggagatggtgctccagttcagttcttgttcactcctgcgatgactgaactgtcaaatatcacacctcttcatattgcagccacaatcagtgatgctattggtgttttagatgctttaactgatgatcctcagcagttgggaatcaaagcgtggaagaatgctcgtgacgccactggcttcactcctgaggaatatgctgcaaagagaggcaacatatcctatattcaaatggtacaggacaaaattgacagaagggtgaccagagctcatgtctcggttaccatccccagcacaattgatactgtcggaaagcatggtagccgaatgaagcctgccgatcaaatcacatttggtgttgagaaaaaacaactaagcatcaaccaaacattgagctgcagacagtgtgtccagcaggcccagcagcttgcattccatccccggacaaataggtttctgtctaataggactgcgatgctttccttggtctccattgctgccgtctgcgtctgtgtgggattgatcatgaagagcctgccacaagttggttgtatgaagcctttcctctgggacaatatacgttggggccccaattgatagactgcagaagagccagcccgattgtatcagtgtatgatgaagatgtttgcgccgagcgaagctagtttcttgtaatgtacatgtttcttatactaaatgtctaacttatttctgtttatagtaaaacctgtgaacttgcctagcttgtaactccattgcatttgcatcctgactgaagtaaagcttttacttgttttggttgagaggaagaaaaccttttacttctaaa

SEQ ID NO: 205726 - DNA, 5953 bp, Zea Mays
cgagtcttgaagccgtgtgccgtgaagcgaccggccagccgatctgatatctgactgacccgcgccgcctgtcgccgtctgcccccacccttcccctccaaatccaacagcgggagcaaagccaaaccaaaccagcttactgctccgctccgctttgttgccaatttccgctccaagcgtcgcggtcgtgaagtctcgttgcgatggattcgaggccccgcgagactgacgcccccggcgacccggccaacggcgccgcccctccgctggccgcggcggtgacggccgcgaccggggacgtcgagatcatcaggccccgcaacgacaagcgtgggtaccgccgcgtcgtgctccctaactcgctcgagtgcctgctcatcagcgaccccgacaccgataaggcggcggcgtcaatgaatgtttcggtggggtacttctgcgaccccgatgggctggaagggctcgcacacttcctcgagcatatgcttttctatgccagtgaaaaatatccagaagaagacagttactcaaagtacattgcagagcatggtggttcaacgaatgctttcacatcttctgaacacacaaacttctattttgatgtgaacagtgatagcctgcacgatgctttagataggtttgcccaattttttatcaagccattgatgtccccagatgctacacttagggaaataaaagctgttgactctgaaaatcagaaaaacctcttgtcagatccttggcgaatgagtcagcttcagaagcatctttgtgcagagaatcatccttatcataagtttagcactggaaattggaacacacttgaagttaaagcaaaggagaaaggattggacacaaggcttgagcttattaaattttatgattcacactactcagctaacttgatgcaactcgttgtgtatggaaaagatagccttgataacctgcagaaccttgttgaaaataagttttgcgatattagagatgttgggaggaagccattttcatttcctggtcatccatgtacacctgaacatctccaggtccttgtcaaagcagttcccattaaacaagggcacactttgagaatcttatttccaatcactcccaatatccgttgttacaaagaaggcccttgcaagtacattagccatctgattggtcatgaaggagaaggatctcttttttacgtacttaagaagttgggatgggctatgagtttggaagctggtgaaggggattggagtcatgatttttcattcttctgcgttgttattcagctcacagatgtaggccaggaacacatggaggatactctcggactattgttcagatatataaagttgctgcagaactctggaactcctaagtggatatttgatgagcttcaagctatctgtgagacaggattccactaccgagacaagagcccccctatcaattatgttgtaaatatttcttctaacatgcagatttttccaccaaaagattggttgattgcgtcatctgtgccatcaaagttttcaccagatgctattcagaatgttttaaatgaactgactcctgagactgtaagaatattctgggaatcgaaaaagtttgaagggaaaacaaaattagcagagccatggtatggtacatcatattctgtcgaagttgtccctccatcaatcatacaggtacatttttggacatcattactttctgtgttgaagctagaaaagtacctgtgtcttgtatacggcaattattttgcagaaatgggtagggaaagcccctgaggaagatctacacctgccaaagcgtaacatcttcattccaagtgatctttcactgagaagtgtagaggaaaaggtaagttttcctgccatgctgaggaagacacaattttcgagactctggtacaagcccgatacaatgtttttcacacccaaggcttatatcaagatggattttcactgtccactatctcaaagctcacctgagtcggcagttcttactgatgtattcacaaggttgcttatggattatttgaatgattatgcttatgacgcccaagttgctggcctctattatgttgttaagccaaatgacactggttttcaggtaactatggttggcttcaatgacaaaatgagaacccttttggagactgttattggaaaaattgcagaatttgaagttaaggctgaccgtttttctgtgataaaggaagctatgacaaaggagtatgagaatttcaagtttcggcagccataccaacaagtcctatattattgttcgctaatactggaggaccaaacatggccatgggatgaggaattttctgcactttctcaccttgaagctagtgatctgggaatttttttgccccatttgctatcaaaaaccttcatcgagtgttattttgcaggtaatattgaacccaatgaagcaaacaatatcgttcaacatgttgaagatgtcttattcaatgcaccaattagtgcttgcaagccactatccccatcgcagcatcttgccaagaggattgtaaagcttgagaagggtttgagatactattatccagcaatgtgctcaaatcaccaagatgaaaattctgctcttctgcactatattcagactcatcaggataatgttaagcaaaatgttctacttcaactacttgctcttgttggcaagcagccagcttttcatcaattgcgatcagttgagcaacttggctacatagcgcttcttaggcaaagaaatgattcaggtgtccgtgggttgcaatttataatccagtcaacggtgaaggatcctgctaatctggatgccagagttgaaaattttctcaacatgtttgaaagcaatgtctacaatatgtctgatgcagagttcaagagtaatgtaagtgctcttattgatatgaaactggagaaatacaaaaacatacgcgaagaatcagctttcttctatggagagatttctgaaggaaccctcaaatttgatagaaaagaagcagaggttgctgcactgagggagctcaagaaggaagagttggtaggcttcttcaatgatcatgtcaaggtcaatgcaccacaaaagaagattcttagtatacaagtgtacggtggtctccattctgccgagtacgaaaccatagtgcaaaatgctccgccaccgccgtcgtgtgagataactgatatttatggcttcaggaggtcgaggcctttatatggatcattcaggggaggcgttggtcagatgaagctatagttcaacattttctcatcattctgtaaaattctgaaaaagagtcatctttctgttcaactgcatctacgttgattgttttttcattgcgaacactctagtaggccatttatctacggttttttcactatattcattaagatattatgagatttcacattgccttgtaaagacaaatctctagccatgtttggttggtctgagatacaccatatattagactaaaaaggaaaaaaaaagaaatattcggttaatcaacctagcttggattaatatagacgacatgtgggtatataataagttttgactttttcctcgatgaagacctgaatttctaaagaaataacaaaacactagctatgccagtgccattgagctaaaaggaacgaaattagctatgccagtgccactgggtatttcctatatattaaagcggagtcgaaaactgtcacctggtgcgtccacgtcattctcttttatgccgtccatccgattgagtaacaacggctaaaaacacctgcagctgacagtaacagacgcatcgctgctccattctccatgactgttctggaagctccaagcgttggcgaaaaaagtaagatatttctgcgaggcaaggaatccctcccccgcttctactctttcggttcgccggttcgccgtctcgcacacccacttcctacaccgccaccgagcactcgctcagtttcatacccatcctcgaagtcgcctctgtctagttcctgctcttccaccaccgcctgtgatgtatccccgaggcccggatgggggacgagatgcctcgtctcgccctatgcttgccactcccgccggcaacgacacgcgcgaggaggatgagatcaccaccgcggaggctcatgtggagaaagacgccgcgcggatggacgctgccctcctcatgcggactacgcccaagatggacgagtttcacaccgggggcgatctggactcaagtggaagtggaagcggcatctcggggccaagcgcctccaaaagacagctacaaagaaggggatcgtggcggcaacgagtcagcagcaacagagaagaatgtggtcgtggctgtaatgggtcagcaggtacaccatccacgctcatcatttcctttgtgtttctgtttgatctatttttttaaaatttctttatcagtttgattagcatccacttgcatccgctcatagtttgattcgtgttcgttggatgggcctcaaaattaccagttgcttcgactacactctctgaatttcgcagatcaagataaaacccgacacaaaggaatgaatagcacacaaaaaatcacagtattatttagtcatattggacacgaataagttaaatttcttaaattttagatccacatttttgtattttggtctagactatcaaaaaaatcctagaaatgtccctctgcctctcgcgcgtgaattctcctctgccgaagggaagacactcaaaggcgagctactgatcttcaactgcttttctggattctctttgcaatatgctttgttggggctagatctgaaatcaatgtttttaataatctagcacaaataggaaatgttgcatgtgttgccgacagaaccatctcactctctctttagtttctgcaattttttggacgaccgagaggtgctgccgtttatgagtaactttccagtgggaaaacagtatgccacaacatcatggtcagagtttggacattgcatgaagcacttgctggacaattgagaagaactcatgcctacttgcaggcatcatctcaaccatacaatgggattcattgaaatatcaggagggttgttgtacacgtgagtggaggtcgaacccttcttgtagggctcttaatgtatgaagtacgccatgctagctattgaatcaagttcaatgggattcgttaaaatataaggagggttgttgtacaagtgagacaaggtcagcccttcttgcagggctcttaatataagctcagcctgtactacacgttcatccacgtcgagctcgtcggctcccaacgcaaccccttcttctctcacgagatcagtggtgaggacgacactggggatagagacctagggttctccaagtgggcctagaaactccatggcaacgtctcaggaaaaatgggcgcattgaagtcttgaaggactttcaggaatactaattttgagaattcgtggaaataaaaatagggttggctttatcaaactgcacaaaaaaatcagcagcacttctctttatcatgcaaggaaaatcaaacttaggagcatcttccaatttcgtcagcagctgagccgattgtgatctctgatcactatacaaccatggaaataaataatgcagctttgctctgcaaattttatacaatagttcttgaatcgatattgactactactatattcacaacgtcatccacaaacatcattctaagaaaactaacaacatatgatggtatgtaaagcatgtttagtgtcaaaaaatgatatgatatatgttaagtacattctataagtttttttttcttggaccatctcgcagtcacacgctaagatactacatatgactatctgcacaaatccttcaccacagttcaaactggccagatgtactccgcatggacatatgtttaggacaacgcattactgtttttctgtcattcaatgctattggccct

SEQ ID NO: 205727 - DNA, 3444 bp, Zea Mays
cgagtcttgaagccgtgtgccgtgaagcgaccggccagccgatctgatatctgactgacccgcgccgcctgtcgccgtctgcccccacccttcccctccaaatccaacagcgggagcaaagccaaaccaaaccagcttactgctccgctccgctttgttgccaatttccgctccaagcgtcgcggtcgtgaagtctcgttgcgatggattcgaggccccgcgagactgacgcccccggcgacccggccaacggcgccgcccctccgctggccgcggcggtgacggccgcgaccggggacgtcgagatcatcaggccccgcaacgacaagcgtgggtaccgccgcgtcgtgctccctaactcgctcgagtgcctgctcatcagcgaccccgacaccgataaggcggcggcgtcaatgaatgtttcggtggggtacttctgcgaccccgatgggctggaagggctcgcacacttcctcgagcatatgcttttctatgccagtgaaaaatatccagaagaagacagttactcaaagtacattgcagagcatggtggttcaacgaatgctttcacatcttctgaacacacaaacttctattttgatgtgaacagtgatagcctgcacgatgctttagataggtttgcccaattttttatcaagccattgatgtccccagatgctacacttagggaaataaaagctgttgactctgaaaatcagaaaaacctcttgtcagatccttggcgaatgagtcagcttcagaagcatctttgtgcagagaatcatccttatcataagtttagcactggaaattggaacacacttgaagttaaagcaaaggagaaaggattggacacaaggcttgagcttattaaattttatgattcacactactcagctaacttgatgcaactcgttgtgtatggaaaagatagccttgataacctgcagaaccttgttgaaaataagttttgcgatattagagatgttgggaggaagccattttcatttcctggtcatccatgtacacctgaacatctccaggtccttgtcaaagcagttcccattaaacaagggcacactttgagaatcttatttccaatcactcccaatatccgttgttacaaagaaggcccttgcaagtacattagccatctgattggtcatgaaggagaaggatctcttttttacgtacttaagaagttgggatgggctatgagtttggaagctggtgaaggggattggagtcatgatttttcattcttctgcgttgttattcagctcacagatgtaggccaggaacacatggaggatactctcggactattgttcagatatataaagttgctgcagaactctggaactcctaagtggatatttgatgagcttcaagctatctgtgagacaggattccactaccgagacaagagcccccctatcaattatgttgtaaatatttcttctaacatgcagatttttccaccaaaagattggttgattgcgtcatctgtgccatcaaagttttcaccagatgctattcagaatgttttaaatgaactgactcctgagactgtaagaatattctgggaatcgaaaaagtttgaagggaaaacaaaattagcagagccatggtatggtacatcatattctgtcgaagttgtccctccatcaatcatacagaaatgggtagggaaagcccctgaggaagatctacacctgccaaagcgtaacatcttcattccaagtgatctttcactgagaagtgtagaggaaaaggtaagttttcctgccatgctgaggaagacacaattttcgagactctggtacaagcccgatacaatgtttttcacacccaaggcttatatcaagatggattttcactgtccactatctcaaagctcacctgagtcggcagttcttactgatgtattcacaaggttgcttatggattatttgaatgattatgcttatgacgcccaagttgctggcctctattatgttgttaagccaaatgacactggttttcaggtaactatggttggcttcaatgacaaaatgagaacccttttggagactgttattggaaaaattgcagaatttgaagttaaggctgaccgtttttctgtgataaaggaagctatgacaaaggagtatgagaatttcaagtttcggcagccataccaacaagtcctatattattgttcgctaatactggaggaccaaacatggccatgggatgaggaattttctgcactttctcaccttgaagctagtgatctgggaatttttttgccccatttgctatcaaaaaccttcatcgagtgttattttgcaggtaatattgaacccaatgaagcaaacaatatcgttcaacatgttgaagatgtcttattcaatgcaccaattagtgcttgcaagccactatccccatcgcagcatcttgccaagaggattgtaaagcttgagaagggtttgagatactattatccagcaatgtgctcaaatcaccaagatgaaaattctgctcttctgcactatattcagactcatcaggataatgttaagcaaaatgttctacttcaactacttgctcttgttggcaagcagccagcttttcatcaattgcgatcagttgagcaacttggctacatagcgcttcttaggcaaagaaatgattcaggtgtccgtgggttgcaatttataatccagtcaacggtgaaggatcctgctaatctggatgccagagttgaaaattttctcaacatgtttgaaagcaatgtctacaatatgtctgatgcagagttcaagagtaatgtaagtgctcttattgatatgaaactggagaaatacaaaaacatacgcgaagaatcagctttcttctatggagagatttctgaaggaaccctcaaatttgatagaaaagaagcagagaaggaagagttggtaggcttcttcaatgatcatgtcaaggtcaatgcaccacaaaagaagattcttagtatacaagtgtacggtggtctccattctgccgagtacgaaaccatagtgcaaaatgctccgccaccgccgtcgtgtgagataactgatatttatggcttcaggaggtcgaggcctttatatggatcattcaggggaggcgttggtcagatgaagctatagttcaacattttctcatcattctgtaaaattctgaaaaagagtcatctttctgttcaactgcatctacgttgattgttttttcattgcgaacactctagtaggccatttatctacggttttttcactatattcattaagatattatgagatttcacattgccttgtaaagacaaatctctagccatgtttggttggtctgagatacaccatatattagactaaaaaggaaaaaaaaagaaatattcggttaatcaacctagcttggattaatatagacgacatgtgg

SEQ ID NO: 205728 - DNA, 1413 bp, Zea Mays
cgagtcttgaagccgtgtgccgtgaagcgaccggccagccgatctgatatctgactgacccgcgccgcctgtcgccgtctgcccccacccttcccctccaaatccaacagcgggagcaaagccaaaccaaaccagcttactgctccgctccgctttgttgccaatttccgctccaagcgtcgcggtcgtgaagtctcgttgcgatggattcgaggccccgcgagactgacgcccccggcgacccggccaacggcgccgcccctccgctggccgcggcggtgacggccgcgaccggggacgtcgagatcatcaggccccgcaacgacaagcgtgggtaccgccgcgtcgtgctccctaactcgctcgagtgcctgctcatcagcgaccccgacaccgataaggcggcggcgtcaatgaatgtttcggtggggtacttctgcgaccccgatgggctggaagggctcgcacacttcctcgagcatatgcttttctatgccagtgaaaaatatccagaagaagacagttactcaaagtacattgcagagcatggtggttcaacgaatgctttcacatcttctgaacacacaaacttctattttgatgtgaacagtgatagcctgcacgatgctttagataggtttgcccaattttttatcaagccattgatgtccccagatgctacacttagggaaataaaagctgttgactctgaaaatcagaaaaacctcttgtcagatccttggcgaatgagtcagcttcagaagcatctttgtgcagagaatcatccttatcataagtttagcactggaaattggaacacacttgaagttaaagcaaaggagaaaggattggacacaaggcttgagcttattaaattttatgattcacactactcagctaacttgatgcaactcgttgtgtatggaaaagatagccttgataacctgcagaaccttgttgaaaataagttttgcgatattagagatgttgggaggaagccattttcatttcctggtcatccatgtacacctgaacatctccaggtccttgtcaaagcagttcccattaaacaagggcacactttgagaatcttatttccaatcactcccaatatccgttgttacaaagaaggcccttgcaagtacattagccatctgattggtcatgaaggagaaggatctcttttttacgtacttaagaagttgggatgggctatgagtttggaagctggtgaaggggattggagtcatgatttttcattcttctgcgttgttattcagctcacagatgtaggccaggaacacatggaggatactctcggactattgttcagatatataaagttgctgcagaactctggaactcctaagtggatatttgatgagttagctgaacctacaagacagatctgat

SEQ ID NO: 205729 - DNA, 3098 bp, Zea Mays
caccacgccactccagggaacaaaggtgtctgaactcagagctatggcatgcatgcgcagggccccttgtgtccctgcctgtggttgggagccgggtcgtctactttcctcagggccatagtgagcaggttgctgcatcaactaataaagaagttgatgctcaaatcccaaactatccaaacctacctccacagttaatatgccagcttcataatgtcacaatgcatgctgatgcagagactgaagaggtgtatgcccaaatgacactgcaaccattgagcccggaagagcaaaaggatccttttcttccaattgaattgggtgctggtagcaagcagccaaccaattacttctgcaagacgttgactgcaagtgatacgagtacccatggtggattctctgttccgcgccgagcagctgagaaagtcttccctccattggatttttcacaacagcctccagtgcaagagctggttgcaagagatctgcatgataatgaatggaaatttcgtcatatttttcgtggtcagccaaaaaggcatctactgacgactggttggagtgtttttgtaagcgcgaaaagactagtagcaggggattctatcatatttatctggaatgataataaccagcttctcttgggaattcgccgtgcaagtcgtccacagactgtaatgccctcttctgtgctatcaagcgatagcatgcacattggtcttcttgctgcagcagctcatgctgcagccacaaacagtcgtttcactattttctacaaccctcgggctagcccttctgagtttgtcattccactggctaagtatgtgaaagctgtttaccacacgcgcgtatctgttggaatgcggtttcggatgctttttgagacagaggaatcaagtgtcagaagatacatgggtacaatcacaggcataagtgatctggactcagagcgctggccaaactcgcactggcgttctgtgaaggttggttgggatgagtctacagctggtgataaacagccaagagtttcactctgggagattgagccactgacaacctttccgatgtacccaactgcttttccattaaggctaaagcgtccgtgggcttcaggactacctatgttcaatggtgggaggagcgacgagttcgctcgttattcttctctcatgtggcttcgagatggaaaccgaggggctcagtcactgaacttccagggacttggagcatcaccatggcttcagccaagaatagataatccattgttgagtctgaagccagatacttaccagcagatggctgccgccgcactagaagaaattagagctggggatcatttgaagcaggcatcttctctcctgccagttcagcagactcaaactttgaatggtggattagatcatttgtatggaaatcctgttctacagcagatgcagttccaatctcagcagtcaacactgcaagctgtgcagcaaggttatggtcagaatgcaaacgactctgggtatgttcaaaatcaactgcagcagctgcagctgcaaaagcagcaggagccaccaccaccacagcagcagcagcagacacaagtccttcagcgacaagcacatcaggaaatgcaacagcacctctcagctagttgtcatgatattgctaatgtagcttctggtgtgtccatgtctggatctgcttgtcaatcacaatcttctctgctttctgggtcatcgttctaccaacagaacatctttgatggaaatggtggtccagatctgcatctgcacaacagtttccacaacttttcaagccaagagtcctccaaccttcttaacctcccaagaagtggccaattaatggcatcagagggatggccttcaaagaggttggctgtggaatctcttgctggtcatgagatccaacctctgcagcacaagcttgagaaagttagtcaccagagtactgtgtctcactgttctggcaccttgccgccactatcagcaagagacggttctagtgcccaggcttgtggtacaaatgttcagagtcacctgcttccatcatcatttgcaatccatgatggattgtcaaccatcaggagtggtggtgttggcagtggaactgatgcgataaccatagcttcgttgagatatagtgatgcgaatttgctacctgaaaactccatagcaacttccagttgtttgggtgaatcaggaaccttcaattctcttgacgatgtttgtggtgtaaacccatcacaaggtggaacctttgtgaaggtttacaaatcagggtccctcgggagatcgctcgacatcaccagattcggcagctactacgagttgcgtgtcgagctcgagcggttatttggtctcgaaggccaactggaggaccctgcaagatcaggctggcagcttgtattcgtcgaccgggaaaacgatgttcttctcctcggcgacgacccgtggcaggagtttgtgaatagcgtagggtgcataaagatcctctcgccgcaagacctgcagcagatggcccgcggcggcggaggtgaccttctgtctgcgcctggagcgaggatgctgcagggcagtgtctgtgacgactattctgcaggccacgacgtgcagaacctcaccggcagcattgcgcctgtggtgcctctggactactgaagaggactgaggcgaaggccgggatctgaagctctgaaccaaaaccggcaatccagcatttgcaggatttgccatccgcaagtcgtttcgttcctgtgttatgatcctctcagtctcaggccctgttgatcgggaataacctagtcgtttaatatagctagatgatgatccatgtatcattatggtaatggacatgctgtacgatagctactgtagctctaaatgcaggcaaggcaagaattgatctatcaaagaacgaatgaatgcaggcactcactgtagaggtgatgtagccctgtactcctaagtcctaagatatattctcatagctaaaactgatggttccatgtggcattggcacccaagctattgaaaccagtcacctttgccgattctttcttcacctcaatttgcggttgttcggtcctgctgcatgcc

SEQ ID NO: 205730 - DNA, 826 bp, Zea Mays
ctggagcctgaaaacgttccagaccagagagcttgatacataggagtagttgtttgcaggaaatggagggcgttgacctcggatgatgaactgtggcgcaagctgttcaacgacaggtggggagcggacgctgcagcgttctacgcgccggagggctccaagtcttggaaggacgtcttcgccgtgcaggaccggtgcgaccgatacggactgtaagccgccactcgcccatctgctccagctccactgcttccgattgccatcagcagctggtgttactgctgtcgaccaacagttcagccgcctcctttccctttgtttttgtttggcctgtgagtgtgtgtgtgtgacctcctttccctttgtttttgtttggcctgtgagtgtgtgtgtgtgaccgcgccgcgtcctttccaggggtgtcaggatcatcagggaagggaaggactactacctgatctaccagggcgagatccagaggtacttgggctcccgccaggacacggatggcgactgcggcgaggacgcgccacggcgggacgctggagacgagcatcggcagatatccgaccggatcctgttcttcctcggggatctggagaaagcctgcgccgacgccaaacgtgttaaggcctgaacacgcgctacccttgtgcccctgatcatcatcagcacaatattccacgctgagtcttgttaatttgtgcatgtctcgtgcatagtttctcaccatcaattcatgtagttggaaatcatgctcacatcgacactgaaattataattcaagtacagtcgtttagagggtaaaactacctgatccccacaa

SEQ ID NO: 205731 - DNA, 2347 bp, Zea Mays
gtgtaccctgataattgcagtagcatcggtaatttcgaggaaataatggcattcataagatcatatgtggtgcctgaagggtttccagacagtgttactccttcatatgtaccttacatgacctggagggctctgaagcatttctttggtggagcgatgggagtgtttacgacaagaaccttgctgagttctgttggagtctctcaaagcaaggtaacaccaggtgccattgctatcaactggatcctcaaggatggtgctgggcgtgtcgggaaaatgctttttgcacgtcaaggaaagaagtttgactatgacctaaagcagttgcggttttctagtgatctcttgttggaaataggagctgggatagaattaactactgctgcattccctcagtttttcttgcctatggcttgcgtagccaatgttgtaaagaacgtcgctgctgttacatcaacttcaactcgcactccaatctataaggcctatgctagaggagaaaatattggagatgtcactgctaaaggcgaatctgttgggaacattgcagatctgctcggtactggtttgagtatctttatctcaaaaaggaatccctcactggtgacttcgtttgccttcctttcctgtggatatctcctgagttcatatcaagaggtgaggtctgttgtgctgaataccctaaacagggcaaggtttaccgtcgcagtggattccttcattaaaactggtcacattccctccttgaaggaaggaaactcacaggagacgatatttaatccaccttggcggcatgagccagtcgcaataggttcaaggtttggagaagcatttcaagagccagcttcatttcttgccatacgacctctgtttgaggacgagagatacatggtaacatataacccaacaaaggataaagtatatgctttgctcaaggaccaggcaaaatcagacgacattattaaagctgctttccatgctcatgtgctattgcattttattaatgcatcacatgctcggagactgaagcagaagcagaagcaggcaaaccctgaccgatcagagtatctgtactctagaaacatggatttcctggcacacatcgctgaatcttgcaaaatagtttcctcatcatatggaacattcaagaagaaagctagggaacagggttggataatgtcagaatctctgctcaaccctggcaaggctcgattatgtgcagcaaaaccacaatgaatgtactgtttcagtttagtatcgatgagatgataccaatctcatgtttgtaagaccaacttttctaacgagacgggatggctaagttcttaggagctgaactaacatatgttggtgcctagcactaggcgtgaacctttgatctgaagcttgccaaattccaggaagaggaagagttttacgatttgtaagttccatctctttcgtgtctatgcgttgtagggtgcacttctagtttctgatcgtttttgtgtttgaaattatgggcatataaacaggaagaatgcctgaacatgtaataaaacatgcagtggataagtggtgcgctggttcgcgactcgcgagtaaagggctcaacgagggtgacttcaaacttctaactgcagagactagagcttgtatttatgtttgctgcggtatcagatttggtgtagccattcctgatgtaacctgtttcccttccgtgttggtcggctgcggggcttcttgtttggaagtctttggagttgctacgttttttacccgccacttggccgacttgtggcacttgagtgttcatctccttggcttctagaccccgttagagcatcaccagcagctgcgggagatgctcttagcaagttccagtttatcagtgaagagtcaatcactgatgtcgtccatagctccttcaaaccttgtacatacatgatcggtaataactgcaagccttctttctgttgatatggcgtgctggtgtggacctgtagtatggtatccactgctgtgttattgtgtatgctcttttttacaaaaaaaagaagaagttattgttgtgtatttgtgtttgtcagatgagtgagccccaccgttactgatcagtgtgtgtcggtactgattagtgtatttgtgtttcttacatgcatgctgaggaaagtacgccgaagtttctgttatagtctactcagtggtaacgagattgagagagagacaaaatgacagaaccgttgtctttattgcagagtgtcatgtatttatacagggaatataaagtctcccaaggggtgtgtcccttgggataaactgccagttgatcacaggacaatattttgtaacagtttcacaacaaaac

SEQ ID NO: 205732 - DNA, 2269 bp, Zea Mays
atcggtttttgtaaatagaaggcatacatcagattgctggttcgatatttgggaaataatggcattcataagatcatatgtggtgcctgaagggtttccagacagtgttactccttcatatgtaccttacatgacctggagggctctgaagcatttctttggtggagcgatgggagtgtttacgacaagaaccttgctgagttctgttggagtctctcaaagcaaggtaacaccaggtgccattgctatcaactggatcctcaaggatggtgctgggcgtgtcgggaaaatgctttttgcacgtcaaggaaagaagtttgactatgacctaaagcagttgcggttttctagtgatctcttgttggaaataggagctgggatagaattaactactgctgcattccctcagtttttcttgcctatggcttgcgtagccaatgttgtaaagaacgtcgctgctgttacatcaacttcaactcgcactccaatctataaggcctatgctagaggagaaaatattggagatgtcactgctaaaggcgaatctgttgggaacattgcagatctgctcggtactggtttgagtatctttatctcaaaaaggaatccctcactggtgacttcgtttgccttcctttcctgtggatatctcctgagttcatatcaagaggtgaggtctgttgtgctgaataccctaaacagggcaaggtttaccgtcgcagtggattccttcattaaaactggtcacattccctccttgaaggaaggaaactcacaggagacgatatttaatccaccttggcggcatgagccagtcgcaataggttcaaggtttggagaagcatttcaagagccagcttcatttcttgccatacgacctctgtttgaggacgagagatacatggtaacatataacccaacaaaggataaagtatatgctttgctcaaggaccaggcaaaatcagacgacattattaaagctgctttccatgctcatgtgctattgcattttattaatgcatcacatgctcggagactgaagcagaagcagaagcaggcaaaccctgaccgatcagagtatctgtactctagaaacatggatttcctggcacacatcgctgaatcttgcaaaatagtttcctcatcatatggaacattcaagaagaaagctagggaacagggttggataatgtcagaatctctgctcaaccctggcaaggctcgattatgtgcagcaaaaccacaatgaatgtactgtttcagtttagtatcgatgagatgataccaatctcatgtttgtaagaccaacttttctaacgagacgggatggctaagttcttaggagctgaactaacatatgttggtgcctagcactaggcgtgaacctttgatctgaagcttgccaaattccaggaagaggaagagttttacgatttgaagaatgcctgaacatgtaataaaacatgcagtggataagtggtgcgctggttcgcgactcgcgagtaaagggctcaacgagggtgacttcaaacttctaactgcagagactagagcttgtatttatgtttgctgcggtatcagatttggtgtagccattcctgatgtaacctgtttcccttccgtgttggtcggctgcggggcttcttgtttggaagtctttggagttgctacgttttttacccgccacttggccgacttgtggcacttgagtgttcatctccttggcttctagaccccgttagagcatcaccagcagctgcgggagatgctcttagcaagttccagtttatcagtgaagagtcaatcactgatgtcgtccatagctccttcaaaccttgtacatacatgatcggtaataactgcaagccttctttctgttgatatggcgtgctggtgtggacctgtagtatggtatccactgctgtgttattgtgtatgctcttttttacaaaaaaaagaagaagttattgttgtgtatttgtgtttgtcagatgagtgagccccaccgttactgatcagtgtgtgtcggtactgattagtgtatttgtgtttcttacatgcatgctgaggaaagtacgccgaagtttctgttatagtctactcagtggtaacgagattgagagagagacaaaatgacagaaccgttgtctttattgcagagtgtcatgtatttatacagggaatataaagtctcccaaggggtgtgtcccttgggataaactgccagttgatcacaggacaatattttgtaacagtttcacaacaaaac

SEQ ID NO: 205733 - DNA, 2962 bp, Zea Mays
caatttatgtcagatgtttttttatgtctgccattattcttccaatggtcgacaaaatatagcgtaatttatcaaccttaaataaatactcagtgtctagagctgcttttggcagtgagatgagtaccattactctctctgtgtttaaaaagttaaatttattttagaacagaggaagtgattaacaaaaacaagacaagctctaaattatattcgatttctttaggaaacatttcacccccaaaaaatttaattcctgtcaagccaaacgggtccataaaagccgctcgtctcctccccatcttggcattgttcgcgtcgtccgccttctctctctctctaacccactgccagccacctctgcgaccgtcgcgaccactcgccaagtaaattttcttccgcccacctgactacgcctcgacctcggcctcggcgccgcctccgtccgccggacgcggcagccatggcgccagcggtggggctcaagcgctccgccacgcagaccatcactctgccgccgcccgacacgcggctggctgtgcgcgatgtcatgcgctccacgatcccgtcgcagcccgccgtggcgccggcgtccacggagaggcaggcgcccgccgcggcgttgcaggggttcctgtgcctggaggaggtggacgggaggcggtggagctacgtggtggacggtggggccgcgaaggggaggagcaggggcggggccgtccccgctggggccgccgtcagggccgtgccgctgcagtcgccgcttccgcctgccgaggaaataatggcattcataagatcatatgtggtgcctgaagggtttccagacagtgttactccttcatatgtaccttacatgacctggagggctctgaagcatttctttggtggagcgatgggagtgtttacgacaagaaccttgctgagttctgttggagtctctcaaagcaaggtaacaccaggtgccattgctatcaactggatcctcaaggatggtgctgggcgtgtcgggaaaatgctttttgcacgtcaaggaaagaagtttgactatgacctaaagcagttgcggttttctagtgatctcttgttggaaataggagctgggatagaattaactactgctgcattccctcagtttttcttgcctatggcttgcgtagccaatgttgtaaagaacgtcgctgctgttacatcaacttcaactcgcactccaatctataaggcctatgctagaggagaaaatattggagatgtcactgctaaaggcgaatctgttgggaacattgcagatctgctcggtactggtttgagtatctttatctcaaaaaggaatccctcactggtgacttcgtttgccttcctttcctgtggatatctcctgagttcatatcaagaggtgaggtctgttgtgctgaataccctaaacagggcaaggtttaccgtcgcagtggattccttcattaaaactggtcacattccctccttgaaggaaggaaactcacaggagacgatatttaatccaccttggcggcatgagccagtcgcaataggttcaaggtttggagaagcatttcaagagccagcttcatttcttgccatacgacctctgtttgaggacgagagatacatggtaacatataacccaacaaaggataaagtatatgctttgctcaaggaccaggcaaaatcagacgacattattaaagctgctttccatgctcatgtgctattgcattttattaatgcatcacatgctcggagactgaagcagaagcagaagcaggcaaaccctgaccgatcagagtatctgtactctagaaacatggatttcctggcacacatcgctgaatcttgcaaaatagtttcctcatcatatggaacattcaagaagaaagctagggaacagggttggataatgtcagaatctctgctcaaccctggcaaggctcgattatgtgcagcaaaaccacaatgaatgtactgtttcagtttagtatcgatgagatgataccaatctcatgtttgtaagaccaacttttctaacgagacgggatggctaagttcttaggagctgaactaacatatgttggtgcctagcactaggcgtgaacctttgatctgaagcttgccaaattccaggaagaggaagagttttacgattttggataagtggtgcgctggttcgcgactcgcgagtaaagggctcaacgagggtgacttcaaacttctaactgcagagactagagcttgtatttatgtttgctgcggtatcagatttggtgtagccattcctgatgtaacctgtttcccttccgtgttggtcggctgcggggcttcttgtttggaagtctttggagttgctacgttttttacccgccacttggccgacttgtggcacttgagtgttcatctccttggcttctagaccccgttagagcatcaccagcagctgcgggagatgctcttagcaagttccagtttatcagtgaagagtcaatcactgatgtcgtccatagctccttcaaaccttgtacatacatgatcggtaataactgcaagccttctttctgttgatatggcgtgctggtgtggacctgtagtatggtatccactgctgtgttattgtgtatgctcttttttacaaaaaaaagaagaagttattgttgtgtatttgtgtttgtcagatgagtgagccccaccgttactgatcagtgtgtgtcggtactgattagtgtatttgtgtttcttacatgcatgctgaggaaagtacgccgaagtttctgttatagtctactcagtggtaacgagattgagagagagacaaaatgacagaaccgttgtctttattgcagagtgtcatgtatttatacagggaatataaagtctcccaaggggtgtgtcccttgggataaactgccagttgatcacaggacaatattttgtaacagtttcacaacaaaac

SEQ ID NO: 205734 - DNA, 3950 bp, Zea Mays
aacaatccgtggtatccagagtcagtctagaccgccatacggaggttgggcgtccgacgcgcgccggcggtgcttccagagcccctgcccccctgccgcgcgtccccctccgacttcacccgtgagtcttcttcctcccggtcatgccccttcttccctgagtaggaggcgacagatcagaatcctcctagctcgtgcggcaccgtgcgaggagcacggttcggctccggtgcccccacgcgtggaaggagcgcgggcgaggtgttggcggctccggcggcgcggtgtgcaaggcgagagcgtctccgggctgaggccaccgaaggtcgagcgcgcaggagggctatctgcttccgcgtgcggagctcttatctcagcacgacccacccctcccgacgggatagagtattgaagtacacaagtgcatatgcagctggatttggagtggtaaagacgggaaccgaagagctggtggattagaggtgtggggagatgtaccgtgggggccttgaccgcttcaagaaggcacagaccttggagcccttctcagtgaagtctgagtcaggcaccaagaaggcacctgcagctgcaggaacagctaaagcactggctccgttgacactgccactggattctaattttgtgccaggtcagaaccaccaaagtcctcaaggcaccatctcaagggtggctgggcaagatggtgatgctccagggcatgttgggacacaggtcggtggagggcagtcgacgtggcaacctccagactgggcgattgagccgcgcccaggggtctactatcttgatgtggtgaaagatggggaggtcattgacaggatcaatctggacaacaggaggcatctattcgggaggcaggttcctgcttgtgacttcgtgttggaccatcagtctgtgtcgcgtcagcatgctgctgttattccacacaggaatggaaggttagaatcctcatgtccgatcacttgcaattctattatatgttcttatgtattccatgtttagtaaggcacatttctttggactttatttattccacgaatgtcaaattttatagcatctccgccatctcacaattaacttcttttgtgacttgtgagtaccaacaggccaataaatgtgcctgccttttatagtttgatgtgttcatgcatcataccacgcatgaaaatcaaccttgttatcataggcaaaatcattttcagtggagtaccactgaatgcacacatggaaaatgaaatcgatcttagttgtcaactaggtctttgcccgtgtgtcgcaacaggagataaaaaacaatcaacatgctaagttgctaacatggtggtttgagatcaccaaacactataacacacctaactgtactaattcaagatacattgaaatacatgagtatcatcttacatatcgatatctactcaagcataaatagagaacattcaaatacataattctatgtcaaaggaaatcaagtattcagcaggatcgaggaccaatgttttccttgttaaacaacatatgatgtttcacacccccatatacaaacttctctcaggtatgatcatttggcaacaaataatggcaatgtatattccagtgtagaagcaacggtattgtgcaattacaaggaactaaggaagggaacaacatctacagccctggcatacccacattgccaaaaaaaactaaatttgctggctttgcttaatgctcactactaatggtcagcctcatgtatttattgagccaatcaaactcacatcaatttgcgtgcccacctacctgattgccatctgctcaaccaccctaatctcttcagataagattgcatgtttatctatacatgctcattaccattcaacaatttggcaattctgtttccttggaactctggagtcagcagttagcaaggataatcaacaaaaaaacatcatcgagtgattagtcaaagcacaccgaagcagcatcattcccatctcctcactgaattgtccttgtgattctgaacttggagatgaagagggtatctgcagttgaggcggcacaccttgagcagcaccgacgctttctgcctcagctctagtgcaacaaccacttcaccatgacaagtagaggcttcatggtcaacccagtctcaatggcagcaggtgcacactcttttggatccatacgccataccgtccacaacatcgacagcgcctgtcttgtgcatgcctctgaaactctcatcagcaagtggacaacattgggtattgtccacagacaacccttaagagccttcctcccctctggaactgcagacagggcatccaagatgtccaaggccgtctcgatacactctgttgctaactccggcagtaattcccccagctgttgtaccgcacctacactaacaatcatactcctcgctggcctgtgcactgcacaggttgaattcagcacctcgagctttgcgaccacaatctgtatgcctcttgtcccggatgaggcacatgacaccaaacaagaggctctgacccgctaccatctgtttgtctctggccaaaaccccctctcatccataaggactacacacatttgaggtgtggcgacatgggcttggtacagctatggcatagggccctcttgagctcgcggcgccacagggacctatctgcaaatgcagcagcgtctatctctggggcaggcagggtgccagttgggcaaagcaggaaggtagcagggcacacgtaggaaggtgtggtttttctgttgtttattgggaaaaagaaactggtgtggaagggcggacaagctggagaggcattccgaaggggtgtgtggaccatctatgttatcgacttaggatcggttcatggcacctttgttgcgaatgagagattaacaaaagacaacccagttgaacttgaagttggtcagtcacttcgctttgctgcatctaccagaacctatatcctgcgaaagaacgcagctgctctattcccaactcctagccttccatcggatgttagtttgccatctcctccggaccccaatgatgaagatgctgttgtggcatacaatacagtacttaaccgatatggtataagtaaatctgacatattatccagttccaaagattcttcaggaggcgcctctagtgcaaatgatggtaaacatgcagttgaaaggctcttaaagagaggtaaaaagcgcagagtgtcatttagagatcaggttggtggagaacttatccaagtggttgggatttcagatggtgcagatgttgaaactgaaccgggccccataggtgtaaaggaaggcagtcttgttgggaagtatgaatctcttgtacaggttactgtcataccaaagggaaaggagcaagcatcacgaaaagaatgtacctctacctcaccgagtggggtaacagataagctacaagaggtgcttaaaaaagtaaagagcgcaacaagacctggaatctacgatgacctttatggggattctgttccagcaaaagtgggctcatcttgggcatacaaatcagatgatcaacctgttgaggagaagacgcgtggcatgaatttaaacatgaattcagccgatgacagtgacgacttgtttggtgactagtgattcagaattgtcagtggatacaaaaaaatatatattcttcagaattttgtggcagggttgtttcatttgctagatgctttttttttcttagtttatacatgattgtaccctgctgcaaatcaaggtatgttcttttgcctaatgttagcaacctaaggacatgctttcttgtagtgatgctcttggtgagtttaaccttgtttgcccctattttttcttaatcactttggtgattttttacctccgctgtttcctttagccaaccagctgttataagtccttactgttgttcatgatactctttgggctttgtttgg

SEQ ID NO: 205735 - DNA, 2095 bp, Zea Mays
ctcctattttcctatccaacaaatgcgtattgtcgaggccaaggccaaggccaagcaacaatccgtggtatccagagtcagtctagaccgccatacggaggttgggcgtccgacgcgcgccggcggtgcttccagagcccctgcccccctgccgcgcgtccccctccgacttcacccgtgagtcttcttcctcccggtcatgccccttcttccctgagtaggaggcgacagatcagaatcctcctagctcgtgcggcaccgtgcgaggagcacggttcggctccggtgcccccacgcgtggaaggagcgcgggcgaggtgttggcggctccggcggcgcggtgtgcaaggcgagagcgtctccgggctgaggccaccgaaggtcgagcgcgcaggagggctatctgcttccgcgtgcggagctcttatctcagcacgacccacccctcccgacgggatagagctggatttggagtggtaaagacgggaaccgaagagctggtggattagaggtgtggggagatgtaccgtgggggccttgaccgcttcaagaaggcacagaccttggagcccttctcagtgaagtctgagtcaggcaccaagaaggcacctgcagctgcaggaacagctaaagcactggctccgttgacactgccactggattctaattttgtgccaggtcagaaccaccaaagtcctcaaggcaccatctcaagggtggctgggcaagatggtgatgctccagggcatgttgggacacaggtcggtggagggcagtcgacgtggcaacctccagactgggcgattgagccgcgcccaggggtctactatcttgatgtggtgaaagatggggaggtcattgacaggatcaatctggacaacaggaggcatctattcgggaggcaggttcctgcttgtgacttcgtgttggaccatcagtctgtgtcgcgtcagcatgctgctgttattccacacaggaatggaagcatctatgttatcgacttaggatcggttcatggcacctttgttgcgaatgagagattaacaaaagacaacccagttgaacttgaagttggtcagtcacttcgctttgctgcatctaccagaacctatatcctgcgaaagaacgcagctgctctattcccaactcctagccttccatcggatgttagtttgccatctcctccggaccccaatgatgaagatgctgttgtggcatacaatacagtacttaaccgatatggtataagtaaatctgacatattatccagttccaaagattcttcaggaggcgcctctagtgcaaatgatggtaaacatgcagttgaaaggctcttaaagagaggtaaaaagcgcagagtgtcatttagagatcaggttggtggagaacttatccaagtggttgggatttcagatggtgcagatgttgaaactgaaccgggccccataggtgtaaaggaaggcagtcttgttgggaagtatgaatctcttgtacaggttactgtcataccaaagggaaaggagcaagcatcacgaaaagaatgtacctctacctcaccgagtggggtaacagataagctacaagaggtgcttaaaaaagtaaagagcgcaacaagacctggaatctacgatgacctttatggggattctgttccagcaaaagtgggctcatcttgggcatacaaatcagatgatcaacctgttgaggagaagacgcgtggcatgaatttaaacatgaattcagccgatgacagtgacgacttgtttggtgactagtgattcagaattgtcagtggatacaaaaaaatatatattcttcagaattttgtggcagggttgtttcatttgctagatgctttttttttcttagtttatacatgattgtaccctgctgcaaatcaaggtatgttcttttgcctaatgttagcaacctaaggacatgctttcttgtagtgatgctcttggtgagtttaaccttgtttgcccctattttttcttaatcactttggtgattttttacctccgctgtttcctttagccaaccagctgttataagtccttactgttgttcatgatactctttgggctttgtttgg

SEQ ID NO: 205736 - DNA, 1757 bp, Zea Mays
gccactgacgacgtacttacgtgatctcggaggtggtggcgacgttcctgctggtgttcgtgacctgcggggcggcgtccatctacggcgaggacaacgcgcgcatctcgcagctggggcagtcggtggcgggcggcctcatcgtcaccgtcatgatctacgccaccggccacatctccggcgcgcacatgaaccccgccgtcacgctctccttcgcgtgcttccgccatttcccctggatccaggtgcccttctactgggcggcgcagttcacgggggccatgtgcgcggcgttcgtgctgaaggcggtgctccagcccatcgccgtgatcggcaccaccacgccgtcggggccgcactggcacgcgctcgccatcgagatcgtcgtcaccttcaacatgatgttcgtcacctgcgccgtcgccaccgactccagggcggtgggtgagttggccgggttagcagtcggttccgcggtttgcattacgtccatcttcgctgggtaatatgagcaccaacaaccacgaatcacgccacgtcacactaacctaattacgacgaccctcattagcaaggacgacattactgtagcactgatcgcgacgagttaattcaaacatggtagactttcgacaaagggctactagctagctagctagctagtactagtagagtagtggtgtcacactgaagacatcgtacgtctgcatagagaggtcctcgcgcggtagctaggacgaaagcaagcgcgcgaagcgactttataagctgaaatgacgttgttcttcggtatatatgacccagcggcatttttctcctttttttttaaagaaaaaggctttacaactatccatatagaattttaaaaattctctgaccctagtactagtgttgatagaatacatgcatggaacaaacccgggattgctggctctagcagtctagctaggcggatcactgcagactgcacacacatgcatgcactgagcagccactcacacacacacacgtgtacgtttaagctaattaagacgtacgtgtgggggaaacgagtggcatttgcaggcccgtgtccggcggatcgatgaacccggcgaggacgctggcgcccgccgtggccagcaacgtcttcacgggcctctggatctacttcctcggccccgtcgtcggcacgctctccggagcctgggtctacacctacatccgcttcgaggaggcccccgcagccgccaagcccgacacccagaggctctcctccttcaagctccgacgcatgcagagccagtccgccctcgccgccgacgagttcgacaccgtctgacgcccgcccgcccgcccgcccgaagagatcgagtactactgtgtgtgctccctcgctctgttcaagatctcaggtgggagagagctatagctagctgcgcgcgcgcgtgtgtgctggtaggtacatagtccgtgtacgcgtacctacctacgtgtttgtgttttttgtgtcccgtcggccgtcgcctacaccacgtagcagcggatcggagcagtgtcacatgtttttatgtatcttcggctttgtgccacgtcagagttgcaaaggttaattgatgcagccgattatgcttgcccgtgttggtttttgtctattgtacttgatatacatgttctttttgtcatgtacacaacttcgaccatctaatgtgttcttttgagagatctctaaggggttaaataaaaaaatcaagggacgtctctttgtgaaaattcta

SEQ ID NO: 205737 - DNA, 1215 bp, Zea Mays
caaatacattgaggatagcacgagaaaggggcgccaagcaaaccgggtcggccagcagacaccgccatgaggactctactacctgtggccgccggtcgcgggaccgtcgcctgcgcggccacgcccgtcccccggaggtcgctgctcctctccaccgctgccgcaggtgcggcgctgcagccggagcaggtggctgggacgaggccgttgaggctgaccaggagcgtggcgagcgccgtggcaaagcccaggacctcggccgacgaggccatctcgtgggcgaagaaggacaaccgccggctcctccacgtcgtctaccgggtcggcgacctcgacaagacgatcaagttctacaccgagtgcctggggatgaagctgctcaggaagagagacataccagaggagaagtacagcaacgcgttcctcgggtacgggcccgaggaatcgcatttcgtcgtcgagctcacttacaattacggggttgacaaatatgacataggcgaagggttcggccatttcggcatcgcagtcgaggacgtggccaagacggtagagctcataagagcaaaggctggaaaggtcatcagggaagccggtcctgtcaagggcggcgagaccgtcatcgccttcgtggaggaccccgacggctacaagtttgagatcatcgagaggcctggaactccggaacccttgtgccaggtgatgctccgcgtcggcgaccttgaccgtgccataagcttctatgagaaggcctgcggcatggaactgctccggaagcgagatagccctgagtacaagtacacagtggcaatgatgggttacggccctgaagacaaggacgcggtgctggagctgacctacaactatggtgtcaccgagtatgccaaggggaatgcatatgcccagatcgccattggcaccgacgatgtctacaggaccgcggaggcggcgaagctgtccggaggccaggtggtgcgggagccggggcccttgccagggatcaacaccaagatcacagccatcctggaccctgatggctggaaattggtcttcgtcgacaacatggacttcgccaaggaactggagtagccacgccaacgacctcggacgccctgcaacaggattaactcgcactgctgttggtcaagaacaggtaccacaagatgaggcgcttagaggatgctgtgacgagttcgtgagaggtctaggtcgtcg

SEQ ID NO: 205738 - DNA, 1318 bp, Zea Mays
caaatacattgaggatagcacgagaaaggggcgccaagcaaaccgggtcggccagcagacactgccatgaggactctactaccggtggccgccggccgcgggaccgtcgcctgcgcggccacgcccgtcccccggaggtcgctgctcctctccaccgctgccgcaggtgcggcgctgcagccggagcaggtggctggaacgaggccgttgaggctgaccaggagcgaggccagcgccgtggcaaagcccaggacctcggccgacgaggccatctcctgggcgaagaaagacaaccgccgcctcctccacgtcgtctaccgggtcggcgacctcgacaagacgatcaagttctacaccgagtgcctggggatgaagctgctcaggaagagggacattccagaggagaagtacagcaacgcgttcctcgggtacgggcccgaggaatcgcatttcgtcgtcgagctcacttacaattacggggttgacaaatatgacataggcgaagggttcggccatttcggcatcgcagtcgaggacgtggccaagacagtagagctcataagagcaaaggctggaaaggtcatcagggaggccggtcctgtcaagggcggcgagaccgtcatcgccttcgtggaggaccccgacggctacaagtttgagatcatcgagaggcctggaactccggagcccttgtgccaggtgatgctccgcgtcggcgaccttgaccgtgccataagcttctatgagaaggcctgcggcatggaactgctccggaagcgagatagccctgagtacaaggtgatgatgcggggttgcaaaagtacacagtggcaatgatgggttacggccctgaagacaaggacgcggtgctggagctgacctacaactatggtgtcaccgagtatgccaaggggaatgcatatgcccagatcgccattggcaccgacgatgtctacaggaccgcggaggcggcgaagctgtccggaggccaggtggtgcgggagccggggcccttgccagggatcaacaccaagatcacagccatcctggaccctgatggctggaaattggtcttcgtcgacaacatggacttcgccaaggaactggagtagccacgccaacgacctcggacgccctgcaacaggattaactcgcactgctgttggtccgtaattaaaatgaaagctatcctagtgaaatcccaaattttcatcatgcatagaatacaagggatgagtataaaatctgatggcataccaggaattttctcatgacttataatgtgtccactcgtgttaaaaacaaaaaaagacatctg

SEQ ID NO: 205739 - DNA, 1302 bp, Zea Mays
gttagtttcacctgtacagagtttgttgcttcccttttctctactagtttcgttggtcatccatggatttgtgaccatggagttgctcctgatcgtcctcttgatccagctgtcctgtcacgcatcaagcagttctcagcgatgaacaagttaaagaagatggctttgcaggtaattgctgagagcctttcggaggaggagattgcagggctgaaggaaatgttcatggcaatggatacagataatagcggtgcaattacatatgatgaactgaaggaaggattgagaaagtatggctccacattaaaggatactgaaattcgtgatctcatggaggcggcggatatagacaacagtgggaccattgattatatagaattcattgctgctacattgcacctcaataaactggaacgtgaggaacatctagttgcagcattttcgtattttgacaaagatggcagtggttacattactgtggatgagcttcaacaagcgtgcaaagagcataacatgccagctgcttttcttgatgatgtgattaaagaagctgaccaggataatgatgggcgcattgattacggggaatttgttgccatgatgacaaagggcaatatgggagttgggaggagaacgatgagaaacagcttgaacataagcatgagggatacgcctgctggtgccctctgaagtctgagcatccaagaaatttgttgcagtatgagagaacgcctggaattccgggtagggtaactcaactcctgctctttcctcgatgagaagtgtgaattgttatgcgttagttggattgcaaatgttcgtagacgtcgggcgtgtttgattttcttgtgcccttgcctcacctaacctagctgggcaagggtaccctcgccagccgaggcaagctgaagcggctcacctgatacctggccaagcatggaaaaatctttacggcacgggaaacgaggcagatggtaaagaatccaatccaaacacaaacaggctggattttgtccagacaggcgaggcaagcgcttggcgtcttggcgaggaaaccaaacgttcctgttgccctcactaattgcaagttttcatatgcagctgggccatcacgccaaaaaaaaaaacttctctacgtgtaaacgtgtatattcgacatcctgatataaataggaatttcaagctggctcaagcatatgtcatacttaatcatttgctttcgctcattcattgtttggtgcaatgcgtcacacgccgtcttgggatccatccatccaactattggctactggcatggaaaag

SEQ ID NO: 205740 - DNA, 2659 bp, Zea Mays
ccggagcagcggcacacacagcgcgactgcagcaaagcagccttcgcttcgctttcctcgcagcgtgaccgactgaccgcgaagccgccgtgaaccctcctcatccccgtcccccctgctccggcttcgccgggctcctctctcccacttgcgccaacattcaagccccgaccccaattcacatccgaggcgctcgcccctttccatctccatcgcccacgcccacgcccgcgcgtctcgtgtccacgcctcgccgcgacttctcccccctaaaccccgcgagaggccgaggtacatgagagagtgatcggcctcgccttcgcgcccacgctcgcgccgagagtgtgatgggcaacacgtgcggcgtcacgcttagatccaagtacttcgccagcttccgcggcagcgcgtcgcagcgccgtgacgcgccggggtactcacctgtcgccacctccgcggccgccgatgaaccctcgccgcatgggaacgggaagcgagccacgcgtccgtcccaggctgcagcggcggcggacgggtcagccccgccccccgccccaggcatgcggcgcggggtgccggcccccgcggagctcacggccaacgtgctgggccacccgaccccgagcctccgcgaccactacgcgctcggccgcaagctggggcaggggcagttcggcaccacctacctctgcacggacctcgccacgggcgtggactacgcctgcaagagtatagccaagcggaagctcatcaccaaggaggatgtcgaggacgtgcgccgcgagatccagattatgcaccacctggctggccaccggaacgtcgtcgccatcaagggcgcgtacgaggaccagctgtacgtccacatcgttatggagttctgcgcgggcggggagctcttcgaccgtatcatacagcgggggcattacagcgagcgcaaggccgcggagctcacgcgcattatcgttggggtcgtcgaggcttgccactcgctcggggtaatgcacagggatctcaagccagagaacttcctgctctcgaacaaggatgacgatatgtcgctcaaggccatcgacttcggcctctccgtgttcttcaagcctggtcaaatttttaccgatgttgtgggaagcccttactatgtagctccagaagtgctgcgcaaacgatatggaccagaagctgatgtgtggacagctggagttattctttacatacttctatgtggtgtaccgccattttgggcagagacacagcaaggaattttcgatgctgttctgaaaggtgtaattgattttgatttggatccctggcctgtgatctctgagagtgcgaaggatcttataaggagaatgctgaatcctatcccatcagagcgcctaacagcacatgaagttctatgtcatccatggatttgtgaccatggagttgctcctgatcgtcctcttgatccagctgtcctgtcacgcatcaagcagttctcagcgatgaacaagttaaagaagatggctttgcaggtaattgctgagagcctttcggaggaggagattgcagggctgaaggaaatgttcatggcaatggatacagataatagcggtgcaattacatatgatgaactgaaggaaggattgagaaagtatggctccacattaaaggatactgaaattcgtgatctcatggaggcggcggatatagacaacagtgggaccattgattatatagaattcattgctgctacattgcacctcaataaactggaacgtgaggaacatctagttgcagcattttcgtattttgacaaagatggcagtggttacattactgtggatgagcttcaacaagcgtgcaaagagcataacatgccagctgcttttcttgatgatgtgattaaagaagctgaccaggataatgatgggcgcattgattacggggaatttgttgccatgatgacaaagggcaatatgggagttgggaggagaacgatgagaaacagcttgaacataagcatgagggatacgcctgctggtgccctctgaagtctgagcatccaagaaatttgttgcagtatgagagaacgcctgggttgtttcaggaattccgggtagggtaactcaactcctgctctttcctcgatgagaagtgtgaattgttatgcgttagttggattgcaaatgttcgtagacgtcgggcgtgtttgattttcttgtgcccttgcctcacctaacctagctgggcaagggtaccctcgccagccgaggcaagctgaagcggctcacctgatacctggccaagcatggaaaaatctttacggcacgggaaacgaggcagatggtaaagaatccaatccaaacacaaacaggctggattttgtccagacaggcgaggcaagcgcttggcgtcttggcgaggaaaccaaacgttcctgttgccctcactaattgcaagttttcatatgcagctgggccatcacgccaaaaaaaaaaacttctctacgtgtaaacgtgtatattcgacatcctgatataaataggaatttcaagctggctcaagcatatgtcatacttaatcatttgctttcgctcattcattgtttggtgcaatgcgtcacacgccgtcttgggatccatccatccaactattggctactggcatggaaaag

SEQ ID NO: 205741 - DNA, 2676 bp, Zea Mays
ggcaattgtatatcctcctccgatccagccggagcagcggcacacacagcgcgactgcagcaaagcagccttcgcttcgctttcctcgcagcgtgaccgactgaccgcgaagccgccgtgaaccctcctcatccccgtcccccctgctccggcttcgccgggctcctctctcccacttgcgccaacattcaagccccgaccccaattcacatccgaggcgctcgcccctttccatctccatcgcccacgcccacgcccgcgcgtctcgtgtccacgcctcgccgcgacttctcccccctaaaccccgcgagaggccgaggtacatgagagagtgatcggcctcgccttcgcgcccacgctcgcgccgagagtgtgatgggcaacacgtgcggcgtcacgcttagatccaagtacttcgccagcttccgcggcagcgcgtcgcagcgccgtgacgcgccggggtactcacctgtcgccacctccgcggccgccgatgaaccctcgccgcatgggaacgggaagcgagccacgcgtccgtcccaggctgcagcggcggcggacgggtcagccccgccccccgccccaggcatgcggcgcggggtgccggcccccgcggagctcacggccaacgtgctgggccacccgaccccgagcctccgcgaccactacgcgctcggccgcaagctggggcaggggcagttcggcaccacctacctctgcacggacctcgccacgggcgtggactacgcctgcaagagtatagccaagcggaagctcatcaccaaggaggatgtcgaggacgtgcgccgcgagatccagattatgcaccacctggctggccaccggaacgtcgtcgccatcaagggcgcgtacgaggaccagctgtacgtccacatcgttatggagttctgcgcgggcggggagctcttcgaccgtatcatacagcgggggcattacagcgagcgcaaggccgcggagctcacgcgcattatcgttggggtcgtcgaggcttgccactcgctcggggtaatgcacagggatctcaagccagagaacttcctgctctcgaacaaggatgacgatatgtcgctcaaggccatcgacttcggcctctccgtgttcttcaagcctggtcaaatttttaccgatgttgtgggaagcccttactatgtagctccagaagtgctgcgcaaacgatatggaccagaagctgatgtgtggacagctggagttattctttacatacttctatgtggtgtaccgccattttgggcagagacacagcaaggaattttcgatgctgttctgaaaggtgtaattgattttgatttggatccctggcctgtgatctctgagagtgcgaaggatcttataaggagaatgctgaatcctatcccatcagagcgcctaacagcacatgaagttctatgtcatccatggatttgtgaccatggagttgctcctgatcgtcctcttgatccagctgtcctgtcacgcatcaagcagttctcagcgatgaacaagttaaagaagatggctttgcaggtaattgctgagagcctttcggaggaggagattgcagggctgaaggaaatgttcatggcaatggatacagataatagcggtgcaattacatatgatgaactgaaggaaggattgagaaagtatggctccacattaaaggatactgaaattcgtgatctcatggaggcggcggatatagacaacagtgggaccattgattatatagaattcattgctgctacattgcacctcaataaactggaacgtgaggaacatctagttgcagcattttcgtattttgacaaagatggcagtggttacattactgtggatgagcttcaacaagcgtgcaaagagcataacatgccagctgcttttcttgatgatgtgattaaagaagctgaccaggataatgatgggcgcattgattacggggaatttgttgccatgatgacaaagggcaatatgggagttgggaggagaacgatgagaaacagcttgaacataagcatgagggatacgcctgctggtgccctctgaagtctgagcatccaagaaatttgttgcagtatgagagaacgcctggaattccgggtagggtaactcaactcctgctctttcctcgatgagaagtgtgaattgttatgcgttagttggattgcaaatgttcgtagacgtcgggcgtgtttgattttcttgtgcccttgcctcacctaacctagctgggcaagggtaccctcgccagccgaggcaagctgaagcggctcacctgatacctggccaagcatggaaaaatctttacggcacgggaaacgaggcagatggtaaagaatccaatccaaacacaaacaggctggattttgtccagacaggcgaggcaagcgcttggcgtcttggcgaggaaaccaaacgttcctgttgccctcactaattgcaagttttcatatgcagctgggccatcacgccaaaaaaaaaaacttctctacgtgtaaacgtgtatattcgacatcctgatataaataggaatttcaagctggctcaagcatatgtcatacttaatcatttgctttcgctcattcattgtttggtgcaatgcgtcacacgccgtcttgggatccatccatccaactattggctactggcatggaaaag

SEQ ID NO: 205742 - DNA, 3867 bp, Zea Mays
ggcgtccatccaccccgacccatccaatccgttccattcctacgtcggctcggacctcggagacacagggatcgtcttcgtccccggcctctcgccttcctccacccccctctcctctctctcgctggctcgtggccaacccacccacccacctccgctccgccccgcttccatcgatccattccgcgatcgcccaagtaaagttctgtaattagtcacattcctgcacaatgtcgactgcgaaagtggtgcttgagcctgcatttcaaggagctggccataaaccagggacagagatatggaggatcgaggatttcaagccagtcgctttgccaaaatcagactatggcaaattctactgtggagattcttatatagttctgcagacgacatgtaaaggaggtgcttttatttttgacatccatttctggatcggaaaagattccagccaggatgaagctggaactgcggcgatcaagacagttgagcttgacagcatgctcgggggccgtgcggtgcagcacagggagccacagtgctacgagtctgataaattcctctcgtattttaaaccgtgcatcatacccatggagggcggctttgcttctgggttcaaaaagccagaagtggacaagtttgaaacacgtctatatatctgcaaagggaagagagctatcagagttaaagaggttccattttctcgttcatcgttgaaccatgatgatgtctttatcttggatactgagaacaaaatatatcaattcaacggtgcaaactccaacatccaagaaagagccaaagccttggaagtgatccagcatttaaaggaggaataccatgacggagtgtgcgctgttgcaatcgtcgatgatgggaaactgcaagcagaatcagattcaggagaattctgggtcctttttggaggttttgcgccaatagggaaaaaagcaataagtgatgatgatgttgttcttgaaactacatcaccaaagcttttcagtatcagtaacggccaactgaagttagaagacgctgtccttacaaaatcaattttggagaacaccaagtgctttttacttgactgcggggctgagctattcgtgtgggttggtcgggtaacacaggtagaggacaggaaagctgccagtgcagcagttgagaaatacattattaaagaaaatagaccaaagacaacaagaataactcaagtgatccaaggttacgagaatcatacgttcaagtctaagtttgagtcatggcctgtaagtaacacgtcagggagtgccagcacggaggaaggccgagggaaagttacagcactcttgaagcagaaaggtgttgatgtcaaaggaatctcaaaaactagtgtgccagtaaatgacgaagttcctcctttgctggatggcggtggaaagcttgaggtttggtgtattgatggcagtgccaagactgctcttccaaaggaagaacttggaaaattctacagcggagactgctatgttgttctctacacttatcattctgctgaaaaaaaagaagagttctatctagcttattggattgggaaaaatagtgtacaggaagatcaagaggcggcttttcaaatagctaatacaacttttaattctttgaaaggaagacctgtccagggtcgtatttatcaaggaaaagagccaccacaatttgtggctattttccagccaatggttattcttaagggtggtactagctctggttataagaaatttgtagaagagaagggtctgaaagatgaaacgtattgttctgatggcactgctctcattcaaatttctggaacagcggttcataacaataaaacgcttcaagttgatgcggtcgcaacatccttgagttccacagattgttttgttttgcaagctaaaaactcgatgtttatatggaatgggaatgcaagttcttttgaacaacaacagtgggctgctaaagttgctgaatttctgaagaccggtgttgctgtcaagcattgcaaggagggcactgagagctctattttctggtcttctattggtggaaagcagagttatacaaatagaaatgctgcacctgatgttgttattagagagcctcatttgtataccttctctctgaggaatgtgaccctaatttttcattttcattttttggcttcaatcgcgataacatcgtcaccatttgtcagggaagctggagatgatctgttgaccgaagacatgatgatacttgatacacactgtgaggtttttgtttggatgggtcagtgtgtggagacaaaagaaaaacagaaagcatttgacattggccagaaatacgtacaacatgccgtggcctttgaaggtatttctcctgatgtgcctctctataaagtcaatgaagggaatgaaccttgcttcttcaggacatacttctcctgggatagcgcacgatccgtgattcatggaaactcttttgagaagaaactttcagttcttttcggaatgcgttcagagggtggcaataagggctcaggtgatggtgggccaactcaaagggcatcagccttggccgctctttcatctgcattgaatccatcgtcgcaaggaaaacagtcagatgagaagcccacaagctcagatgacagcgagcatactcaacgagcttcagcaatggctgccttgtcctctgcccttaatccatcgacaaaacctagcagcacacagacacaatctcattcaggtcaagggtctcaaagagccgctgctgttgcagcactgtccaatgttttgactgcagagggatctcatagcccccgccacagtaggtcgtccccaacagcagatgcagacaagactgaattagttcctacttctccccatcaattagaaacagggactgcagaagatgtccgaacagagcctgatgtctcacaggaacaaacagctaaagaaaatggaggccagacaacctttagctatgaacgattgatatcaaagtccactgaccctgttagtgggataaacaacaagcgcagagaggcaaggttattcacaataaagagtaaatggacatatttggtggacagtgaattcgagaccgtatttggcatgactaaggaggagttctacgagcagccaaggtggaagcaagagttgcagaaaaagaaagccgatcttttctgagacaaggctggcttcgaactaataaaagcccttacgtcgcacaggattgtccagcattctcatcatgctcgttccgcgtatgatgatcgatcaccagcagctttatccgtgagttgtataggctactcttttatctgcacatggtttgggagcattatatatatatcccccttgcccgtccattattctgaggtcgttcttgatgttgacctttcacgtgttttctttttttattgtattataaaaaatcaaactggtgtaaatggcattactagtgagatttttgtaagtaatggtgcatgggcaccaaggtgtatgcaacatatttttgttgtaagacttcagcttctattgttctggtggtgttctattgaccactggtctaatcatctttactggcttaggtaatggccaacatatcatggaccatgcaaaacactgtttcacattatagattactttatttataaaataaagtttgaaataaaagacgtagataagtaagctgctggagatagcattaccgctgagcactgcagctgtgctcaatgatgatatggttggtttgacaccctactagtcttcttgatggtgtggctgcggctctggaaggagaggaacaggctattttcaaagtatgaatctgtatggtgatgataaaaatttccaattagcctttcataaaaaagaa

SEQ ID NO: 205743 - DNA, 3837 bp, Zea Mays
ggcgtccatccaccccgacccatccaatccgttccattcctacgtcggctcggacctcggagacacagggatcgtcttcgtccccggcctctcgccttcctccacccccctctcctctctctcgctggctcgtggccaacccacccacccacctccgctccgccccgcttccatcgatccattccgcgatcgcccaagtaaagttctgtaattagtcacattcctgcacaatgtcgactgcgaaagtggtgcttgagcctgcatttcaaggagctggccataaaccagggacagagatatggaggatcgaggatttcaagccagtcgctttgccaaaatcagactatggcaaattctactgtggagattcttatatagttctgcagacgacatgtaaaggaggtgcttttatttttgacatccatttctggatcggaaaagattccagccaggatgaagctggaactgcggcgatcaagacagttgagcttgacagcatgctcgggggccgtgcggtgcagcacagggagccacagtgctacgagtctgataaattcctctcgtattttaaaccgtgcatcatacccatggagggcggctttgcttctgggttcaaaaagccagaagtggacaagtttgaaacacgtctatatatctgcaaagggaagagagctatcagagttaaagaggttccattttctcgttcatcgttgaaccatgatgatgtctttatcttggatactgagaacaaaatatatcaattcaacggtgcaaactccaacatccaagaaagagccaaagccttggaagtgatccagcatttaaaggaggaataccatgacggagtgtgcgctgttgcaatcgtcgatgatgggaaactgcaagcagaatcagattcaggagaattctgggtcctttttggaggttttgcgccaatagggaaaaaagcaataagtgatgatgatgttgttcttgaaactacatcaccaaagcttttcagtatcagtaacggccaactgaagttagaagacgctgtccttacaaaatcaattttggagaacaccaagtgctttttacttgactgcggggctgagctattcgtgtgggttggtcgggtaacacaggtagaggacaggaaagctgccagtgcagcagttgagaaatacattattaaagaaaatagaccaaagacaacaagaataactcaagtgatccaaggttacgagaatcatacgttcaagtctaagtttgagtcatggcctgtaagtaacacgtcagggagtgccagcacggaggaaggccgagggaaagttacagcactcttgaagcagaaaggtgttgatgtcaaaggaatctcaaaaactagtgtgccagtaaatgacgaagttcctcctttgctggatggcggtggaaagcttgaggtttggtgtattgatggcagtgccaagactgctcttccaaaggaagaacttggaaaattctacagcggagactgctatgttgttctctacacttatcattctgctgaaaaaaaagaagagttctatctagcttattggattgggaaaaatagtgtacaggaagatcaagaggcggcttttcaaatagctaatacaacttttaattctttgaaaggaagacctgtccagggtcgtatttatcaaggaaaagagccaccacaatttgtggctattttccagccaatggttattcttaagggtggtactagctctggttataagaaatttgtagaagagaagggtctgaaagatgaaacgtattgttctgatggcactgctctcattcaaatttctggaacagcggttcataacaataaaacgcttcaagttgatgcggtcgcaacatccttgagttccacagattgttttgttttgcaagctaaaaactcgatgtttatatggaatgggaatgcaagttcttttgaacaacaacagtgggctgctaaagttgctgaatttctgaagaccggtgttgctgtcaagcattgcaaggagggcactgagagctctattttctggtcttctattggtggaaagcagagttatacaaatagaaatgctgcacctgatgttgttattagagagcctcatttgtataccttctctctgaggaatgtgaccctaatttttcattttcattttttggcttcaatcgcgataacatcgtcaccatttgtcagggaagctggagatgatctgttgaccgaagacatgatgatacttgatacacactgtgaggtttttgtttggatgggtcagtgtgtggagacaaaagaaaaacagaaagcatttgacattggccagaaatacgtacaacatgccgtggcctttgaaggtatttctcctgatgtgcctctctataaagtcaatgaagggaatgaaccttgcttcttcaggacatacttctcctgggatagcgcacgatccgtgattcatggaaactcttttgagaagaaactttcagttcttttcggaatgcgttcagagggtggcaataagggctcaggtgatggtgggccaactcaaagggcatcagccttggccgctctttcatctgcattgaatccatcgtcgcaaggaaaacagtcagatgagaagcccacaagctcagatgacagcgagcatactcaacgagcttcagcaatggctgccttgtcctctgcccttaatccatcgacaaaacctagcagcacacagacacaatctcattcaggtcaagggtctcaaagagccgctgctgttgcagcactgtccaatgttttgactgcagagggatctcatagcccccgccacagtaggtcgtccccaacagcagatgcagacaagactgaattagttcctacttctccccatcaattagaaacagggactgcagaagatgtccgaacagagcctgatgtctcacaggaacaaacagctaaagaaaatggaggccagacaacctttagctatgaacgattgatatcaaagtccactgaccctgttagtgggataaacaacaagcgcagagagacatatttggtggacagtgaattcgagaccgtatttggcatgactaaggaggagttctacgagcagccaaggtggaagcaagagttgcagaaaaagaaagccgatcttttctgagacaaggctggcttcgaactaataaaagcccttacgtcgcacaggattgtccagcattctcatcatgctcgttccgcgtatgatgatcgatcaccagcagctttatccgtgagttgtataggctactcttttatctgcacatggtttgggagcattatatatatatcccccttgcccgtccattattctgaggtcgttcttgatgttgacctttcacgtgttttctttttttattgtattataaaaaatcaaactggtgtaaatggcattactagtgagatttttgtaagtaatggtgcatgggcaccaaggtgtatgcaacatatttttgttgtaagacttcagcttctattgttctggtggtgttctattgaccactggtctaatcatctttactggcttaggtaatggccaacatatcatggaccatgcaaaacactgtttcacattatagattactttatttataaaataaagtttgaaataaaagacgtagataagtaagctgctggagatagcattaccgctgagcactgcagctgtgctcaatgatgatatggttggtttgacaccctactagtcttcttgatggtgtggctgcggctctggaaggagaggaacaggctattttcaaagtatgaatctgtatggtgatgataaaaatttccaattagcctttcataaaaaagaa

SEQ ID NO: 205744 - DNA, 3766 bp, Zea Mays
cggagacacagggatcgtcttcgtccccggcctctcgccttcctccacccccctctcctctctctcgctggctcgtggccaacccacccacccacctccgctccgccccgcttccatcgatccattccgcgatcggccttacacgtctaacagtacatgagtttctaactggtgcgagcccaagtaaagttctgtaattagtcacattcctgcacaatgtcgactgcgaaagtggtgcttgagcctgcatttcaaggagctggccataaaccagggacagagatatggaggatcgaggatttcaagccagtcgctttgccaaaatcagactatggcaaattctactgtggagattcttatatagttctgcagacgacatgtaaaggaggtgcttttatttttgacatccatttctggatcggaaaagattccagccaggatgaagctggaactgcggcgatcaagacagttgagcttgacagcatgctcgggggccgtgcggtgcagcacagggagccacagtgctacgagtctgataaattcctctcgtattttaaaccgtgcatcatacccatggagggcggctttgcttctgggttcaaaaagccagaagtggacaagtttgaaacacgtctatatatctgcaaagggaagagagctatcagagttaaagaggttccattttctcgttcatcgttgaaccatgatgatgtctttatcttggatactgagaacaaaatatatcaattcaacggtgcaaactccaacatccaagaaagagccaaagccttggaagtgatccagcatttaaaggaggaataccatgacggagtgtgcgctgttgcaatcgtcgatgatgggaaactgcaagcagaatcagattcaggagaattctgggtcctttttggaggttttgcgccaatagggaaaaaagcaataagtgatgatgatgttgttcttgaaactacatcaccaaagcttttcagtatcagtaacggccaactgaagttagaagacgctgtccttacaaaatcaattttggagaacaccaagtgctttttacttgactgcggggctgagctattcgtgtgggttggtcgggtaacacaggtagaggacaggaaagctgccagtgcagcagttgagaaatacattattaaagaaaatagaccaaagacaacaagaataactcaagtgatccaaggttacgagaatcatacgttcaagtctaagtttgagtcatggcctgtaagtaacacgtcagggagtgccagcacggaggaaggccgagggaaagttacagcactcttgaagcagaaaggtgttgatgtcaaaggaatctcaaaaactagtgtgccagtaaatgacgaagttcctcctttgctggatggcggtggaaagcttgaggtttggtgtattgatggcagtgccaagactgctcttccaaaggaagaacttggaaaattctacagcggagactgctatgttgttctctacacttatcattctgctgaaaaaaaagaagagttctatctagcttattggattgggaaaaatagtgtacaggaagatcaagaggcggcttttcaaatagctaatacaacttttaattctttgaaaggaagacctgtccagggtcgtatttatcaaggaaaagagccaccacaatttgtggctattttccagccaatggttattcttaagggtggtactagctctggttataagaaatttgtagaagagaagggtctgaaagatgaaacgtattgttctgatggcactgctctcattcaaatttctggaacagcggttcataacaataaaacgcttcaagttgatgcggtcgcaacatccttgagttccacagattgttttgttttgcaagctaaaaactcgatgtttatatggaatgggaatgcaagttcttttgaacaacaacagtgggctgctaaagttgctgaatttctgaagaccggtgttgctgtcaagcattgcaaggagggcactgagagctctattttctggtcttctattggtggaaagcagagttatacaaatagaaatgctgcacctgatgttgttattagagagcctcatttgtataccttctctctgaggaatgtgaccctaatttttcattttcattttttggcttcaatcgcgataacatcgtcaccatttgtcagggaagctggagatgatctgttgaccgaagacatgatgatacttgatacacactgtgaggtttttgtttggatgggtcagtgtgtggagacaaaagaaaaacagaaagcatttgacattggccagaaatacgtacaacatgccgtggcctttgaaggtatttctcctgatgtgcctctctataaagtcaatgaagggaatgaaccttgcttcttcaggacatacttctcctgggatagcgcacgatccgtgggtggcaataagggctcaggtgatggtgggccaactcaaagggcatcagccttggccgctctttcatctgcattgaatccatcgtcgcaaggaaaacagtcagatgagaagcccacaagctcagatgacagcgagcatactcaacgagcttcagcaatggctgccttgtcctctgcccttaatccatcgacaaaacctagcagcacacagacacaatctcattcaggtcaagggtctcaaagagccgctgctgttgcagcactgtccaatgttttgactgcagagggatctcatagcccccgccacagtaggtcgtccccaacagcagatgcagacaagactgaattagttcctacttctccccatcaattagaaacagggactgcagaagatgtccgaacagagcctgatgtctcacaggaacaaacagctaaagaaaatggaggccagacaacctttagctatgaacgattgatatcaaagtccactgaccctgttagtgggataaacaacaagcgcagagagacatatttggtggacagtgaattcgagaccgtatttggcatgactaaggaggagttctacgagcagccaaggtggaagcaagagttgcagaaaaagaaagccgatcttttctgagacaaggctggcttcgaactaataaaagcccttacgtcgcacaggattgtccagcattctcatcatgctcgttccgcgtatgatgatcgatcaccagcagctttatccgtgagttgtataggctactcttttatctgcacatggtttgggagcattatatatatatcccccttgcccgtccattattctgaggtcgttcttgatgttgacctttcacgtgttttctttttttattgtattataaaaaatcaaactggtgtaaatggcattactagtgagatttttgtaagtaatggtgcatgggcaccaaggtgtatgcaacatatttttgttgtaagacttcagcttctattgttctggtggtgttctattgaccactggtctaatcatctttactggcttaggtaatggccaacatatcatggaccatgcaaaacactgtttcacattatagattactttatttataaaataaagtttgaaataaaagacgtagataagtaagctgctggagatagcattaccgctgagcactgcagctgtgctcaatgatgatatggttggtttgacaccctactagtcttcttgatggtgtggctgcggctctggaaggagaggaacaggctattttcaaagtatgaatctgtatggtgatgataaaaatttccaattagcctttcataaaaaagaa

SEQ ID NO: 205745 - DNA, 1244 bp, Zea Mays
tatttatcaattcgatgttggatatggactacattttgaaataagttcctgaagcctttgctctatggagggaaaatagatgtcacaagccagctgaaaagttcaagaaacgaggtaaaagagagaagtgtaatgaagttagttagagatactggggtgcaacaaagaaatagccttttgggcgatcttggtacctcaaagaagcatgcaactgggaaaaggagcaatgctctaatttctggaatggaaaatgcaaatgaaactggtactagaaacagatcatttgcacagaaacaatctcattctagtcaggtggagaaccatggaactgctgactctcctgatagcttgaagccatcattgctcaaactcaaatttaagcgtccacattttgagcagctaaacacccaggcctctcaaccagaggagccgacctcctgggtttctcagcaggaggagcagttaaatgttgctaaaggccagagatcaaagaggaagaggccttcgatggagaaggcagatggtttggacggtataactccagccaagaggcatcagcagagcacagatgaagtgatggacgcaaactggattctacgcaagttgggcaaggatgcgatcggaaagaggattgaggtccatctaacttctgatggcaaatggcatcaagggatggtgtctaatgtcatgggtggcacactgtgtattcggttagataatggcaggtctgagaacgtggagctggggaagcaggccatccgcttgattgcttcaagatcgaagggcgggaagcgatgaaaccttttccccataatatgcagcttaggacctgttctcgctcaatacattgcgccatgattatggcaggtagagtcctccccccctgaggtttgacatccgctggagcacagcctctcagcctttgctgactggacgagatactgagcgcaacttccatctgttgcgccatgtttcgctagcctagcgtgtaacagacatcgttttttggtgttggaagccccattggctttcgactagattctgttagggtagggaatgaggttttagatcaccttggatgtaagagaagcaggtagcgccgtgtctggagtgttttgtatgtttagttttccgacgagtttctcgacaatttgttattcacttatatttggttgctggtgttatttgctggccaatcaatgtctttttgtgatagtaataatttgtctacaaatacaaataga

SEQ ID NO: 205746 - DNA, 2617 bp, Zea Mays
cctcgccccccgtcgctcccttccatggcgtttcacgtcgcgtgccccatcacttggaagcaggagaagatgaagacgagtgggatcgagaggatcaaggaaatgctgctgtcaaggttatgtgccgtttatgcttttcaggagaaaatgagggcagcacgaaagctgccaaaatgcttccttgcaaactctgcagcaaacggtatcatagaaactgtttgaaaagctggggggaacatagagaccttttccattggagttcatgggtatgtccttcttgccgcagttgtgaggtatgccgacgtcctggtgaccccaacaagttgatgttctgtaaaaggtgtgatggcgcttatcattgttactgtcagcaaccatcacacaagaatgttactcatggaccatatttatgtccaaaacatacaaggtgccacagctgtggatctggtgtgcctggtagtggacacagcacaaggtggtttttggggtacacatgctgtgatgcgtgtggacgattgtttgtgaaaggaaactactgtccaatctgcttgaaggtttatagagactctgaagtgatacctatggtttgctgcgatgtttgtgaaaagtgggtgcatattgagtgtgatggcatcagtgaggaaaagtaccaacaattccaagctgatcaaaaccttcagtacacatgtgcagcatgccgtggtgaatgctcccagatcagagacactgaggatgcaatccgggagctttggaagaggagggatgttgccgatcatgagcttatggctactttacgggctgctgctgcactgccttctcttgaagatgtctcaccaccttatcaaaactctgatgatgagaaactcggtgcatatgcattgaaaaatgagagtagaaatactctaaagttttcattgaaaagtaacagtagtaaacctccaccagatacacctgagcaagagaagattgtttttaagagctctggatcaaataagaagccttccaaaaagaaaagtggtcaggctaataaaacagttgatggccatgatgaaatatttctggagagaaggcatgctgttaaatcatcaaatagctgtttgggagatcaaactataaatgagaatcatgacaggagcccttttaaaaatgatgataatgtctatgtttcatcttcaactcgaagtttagaaaagaatttgaaatctccatccatgaaagctgtggcaaacaatgctgatatgatacccaaagtcaagattaaaggcagtaaggtttcgagtttgcattacaaagatggtgaagaaaatactcctaagaatgacactggaaaagctaccaagttggttatccatcttggttcacggcataaaactaggagtggctctcctaagtcggaactgtccaattctcaaagagagcaagatttgggttcaatacatggagggaaaatagatgtcacaagccagctgaaaagttcaagaaacgaggtaaaagagagaagtgtaatgaagttagttagagatactggggtgcaacaaagaaatagccttttgggcgatcttggtacctcaaagaagcatgcaactgggaaaaggagcaatgctctaatttctggaatggaaaatgcaaatgaaactggtactagaaacagatcatttgcacagaaacaatctcattctagtcaggtggagaaccatggaactgctgactctcctgatagcttgaagccatcattgctcaaactcaaatttaagcgtccacattttgagcagctaaacacccaggcctctcaaccagaggagccgacctcctgggtttctcagcaggaggagcagttaaatgttgctaaaggccagagatcaaagaggaagaggccttcgatggagaaggcagatggtttggacggtataactccagccaagaggcatcagcagagcacagatgaagtgatggacgcaaactggattctacgcaagttgggcaaggatgcgatcggaaagaggattgaggtccatctaacttctgatggcaaatggcatcaagggatggtgtctaatgtcatgggtggcacactgtgtattcggttagataatggcaggtctgagaacgtggagctggggaagcaggccatccgcttgattgcttcaagatcgaagggcgggaagcgatgaaaccttttccccataatatgcagcttaggacctgttctcgctcaatacattgcgccatgattatggcaggtagagtcctccccccctgaggtttgacatccgctggagcacagcctctcagcctttgctgactggacgagatactgagcgcaacttccatctgttgcgccatgtttcgctagcctagcgtgtaacagacatcgttttttggtgttggaagccccattggctttcgactagattctgttagggtagggaatgaggttttagatcaccttggatgtaagagaagcaggtagcgccgtgtctggagtgttttgtatgtttagttttccgacgagtttctcgacaatttgttattcacttatatttggttgctggtgttatttgctggccaatcaatgtctttttgtgatagtaataatttgtctacaaatacaaataga

SEQ ID NO: 205747 - DNA, 3561 bp, Zea Mays
cttcacctctcccctccccgccgctcgcgcctccgaagtccgaacccaattccaaacgcaaattacaccaaaccatccccgaatcatgtcaaaatttccccaatacgcgtccaaaccccacccgaccaccctcccccaaattcgtttcgaatcagattaccgacgcgaccacccatctgggctctggccgcctcgccccccgtcgctcccttccatggcgtttcacgtcgcgtgccccatcacttgcaggagggtgtgcgactgcgagctagggttcggcgccgcagcggcgaggaagggaggagggggtggtgctgcggcggcggtatgggcgggcacggcggcggtgctcgaggggttcctcgtggatccgtggctgctgcggccggctggggccgtggacgaggatgcggcgacggtgcaggtggaagtgccgcccctggagccggaccctgaggatggggaggacgaggcgcgccgggcggcagcgcagcgcggcgccgccgcggcagaggacctcgccaggcgcttcgagagcggtgcctacggatcgccggaagcaggagaagatgaagacgagtgggatcgagaggatcaaggaaatgctgctgtcaaggttatgtgccgtttatgcttttcaggagaaaatgagggcagcacgaaagctgccaaaatgcttccttgcaaactctgcagcaaacggtatcatagaaactgtttgaaaagctggggggaacatagagaccttttccattggagttcatgggtatgtccttcttgccgcagttgtgaggtatgccgacgtcctggtgaccccaacaagttgatgttctgtaaaaggtgtgatggcgcttatcattgttactgtcagcaaccatcacacaagaatgttactcatggaccatatttatgtccaaaacatacaaggtgccacagctgtggatctggtgtgcctggtagtggacacagcacaaggtggtttttggggtacacatgctgtgatgcgtgtggacgattgtttgtgaaaggaaactactgtccaatctgcttgaaggtttatagagactctgaagtgatacctatggtttgctgcgatgtttgtgaaaagtgggtgcatattgagtgtgatggcatcagacgtcatgttcaacagataagtcgtgcggagaaatgcatatgttgtgttagatttgtggctatacaagaagggattgtgttcagaacgatgatatacatgataggctaaggaagcaccaattcaacactgattgagatagtttggacatgtccagagacatcaagatgcaccaatgcgtagtgggatcgtaagaaacggtagtaatgggaagagaggcagaggaaggccaaagttgtcttgggaagaggcaagacttaaaggatgaaatatatccaaaggtttagccttgaataggagcgaatggaaaaaaactattcacacgtctgaacctttttgtggcttctgtttggttcaactctagcctaccccaacttttttgggattaaaaggttttgttgttgttgttgggtgtatgctttactgttgttccatatgttatgcagtgaggaaaagtaccaacaattccaagctgatcaaaaccttcagtacacatgtgcagcatgccgtggtgaatgctcccagatcagagacactgaggatgcaatccgggagctttggaagaggagggatgttgccgatcatgagcttatggctactttacgggctgctgctgcactgccttctcttgaagatgtctcaccaccttatcaaaactctgatgatgagaaactcggtgcatatgcattgaaaaatgagagtagaaatactctaaagttttcattgaaaagtaacagtagtaaacctccaccagatacacctgagcaagagaagattgtttttaagagctctggatcaaataagaagccttccaaaaagaaaagtggtcaggctaataaaacagttgatggccatgatgaaatatttctggagagaaggcatgctgttaaatcatcaaatagctgtttgggagatcaaactataaatgagaatcatgacaggagcccttttaaaaatgatgataatgtctatgtttcatcttcaactcgaagtttagaaaagaatttgaaatctccatccatgaaagctgtggcaaacaatgctgatatgatacccaaagtcaagattaaaggcagtaaggtttcgagtttgcattacaaagatggtgaagaaaatactcctaagaatgacactggaaaagctaccaagttggttatccatcttggttcacggcataaaactaggagtggctctcctaagtcggaactgtccaattctcaaagagagcaagatttgggttcaatacatggagggaaaatagatgtcacaagccagctgaaaagttcaagaaacgaggtaaaagagagaagtgtaatgaagttagttagagatactggggtgcaacaaagaaatagccttttgggcgatcttggtacctcaaagaagcatgcaactgggaaaaggagcaatgctctaatttctggaatggaaaatgcaaatgaaactggtactagaaacagatcatttgcacagaaacaatctcattctagtcaggtggagaaccatggaactgctgactctcctgatagcttgaagccatcattgctcaaactcaaatttaagcgtccacattttgagcagctaaacacccaggcctctcaaccagaggagccgacctcctgggtttctcagcaggaggagcagttaaatgttgctaaaggccagagatcaaagaggaagaggccttcgatggagaaggcagatggtttggacggtataactccagccaagaggcatcagcagagcacagatgaagtgatggacgcaaactggattctacgcaagttgggcaaggatgcgatcggaaagaggattgaggtccatctaacttctgatggcaaatggcatcaagggatggtgtctaatgtcatgggtggcacactgtgtattcggttagataatggcaggtctgagaacgtggagctggggaagcaggccatccgcttgattgcttcaagatcgaagggcgggaagcgatgaaaccttttccccataatatgcagcttaggacctgttctcgctcaatacattgcgccatgattatggcaggtagagtcctccccccctgaggtttgacatccgctggagcacagcctctcagcctttgctgactggacgagatactgagcgcaacttccatctgttgcgccatgtttcgctagcctagcgtgtaacagacatcgttttttggtgttggaagccccattggctttcgactagattctgttagggtagggaatgaggttttagatcaccttggatgtaagagaagcaggtagcgccgtgtctggagtgttttgtatgtttagttttccgacgagtttctcgacaatttgttattcacttatatttggttgctggtgttatttgctggccaatcaatgtctttttgtgatagtaataatttgtctacaaatacaaataga

SEQ ID NO: 205748 - DNA, 1741 bp, Zea Mays
gtcccgtactcgtccaaattctcctcgtctcgtctcccatgtgacccatccaaccgccctctcctctcttcctcttcctcgcaccacctccaccaccaccctcctctcttctcgcctccaccaccaaaaggggtgagaggcacggggaccgcccgcctcgctcgctggcctgcacactggattcggcgccgcggcggtagttgcagcggcggcctggcagggagatgtcttcacgctcggggtactacaagctgaaggttcaatttaccatttatcctctgatcatcgatttgatgcaagtaaagaggaggttgatcgtgtaacaaaatgtggaggtgatgttggaaggctaaatgttgttggtggcgctgagattggtcctcttaggtgttggcctggaggtttgtgcctatctaggtcaataggagatcaagatgttggtgaatttattgttccagttcctcttgtgaagcaagtaaagctgtctactgcgggaggccgacttattattgcaagtgatggtgtttgggatgcattatctccagaagtagcttttaactgttcacgtgaacttcctccagtgcctgcagctgagcaaatcgttaaaactgctgtgcaatcaaaaggactgagggatgataccacctgtattgttgttgatataatagcagagaaaaccaacccttccatgccacttcctagaaggcaaccgggaattggtgtcttcaaaaatatgtttggcaagaaaaaatcatcggattcatcatcacattcccatgcagatagagaatatatggatccagatatcttggaggaaatatttgaggatgggtgtgcgcttctttctagacggctggattctgaataccctgttcgaaatatgttcaaactcttcatatgtgccgtttgtcaaatagagttaaagccaaaccaagggatatctgtacatgaagattcatcagaacctgggagcttgcgtcgctgggatggtccattcctttgccagagctgtcaggaaaagaaagaagcaatggagggaaagcgtcgttcacgaggttcatcaagaaacagtgggtcaagtgaatagctgccgtgtgtagagtgatcagaggtggctgctgcttatagctctcatcccaagcgaggagcatgtcttgtcctcagcaaggttcttgctgaggaatgtaggcagctctgctcagcccttgaccttgatggcacatacaggtttaaagattaacatgccaaaatgatatggcttgtctattctaaggtcaactgttgcaacacaaattactcttggtatagacttctgacaaatagcttggcactgtttctgaattaggcctaggtgcttacatcaattttctcttgttgaatccggctttaattcatgactagagactttagagtattatcagtccttgttgaggttcagcctttgctgacaccaatgtaattaacatctaaaaatattctttgaatcagcttgtgattcatcagcaagacgttagttgtcatgtacaatgtacaaaatcttgctaacaggacaggtgtactgatcctttttgtatatcttattttattttttcttagtaatgtatagtagtcctgagtatgaaatttgtttctgcatgggagattccccagccaaaagtatgctgtaatatgttgtccgtagttcagtcgaaaaaatactccatatgcagaatgatgccaagatgtctgttccttgcgtttg

SEQ ID NO: 205749 - DNA, 1854 bp, Zea Mays
gtcccgtactcgtccaaattctcctcgtctcgtctcccatgtgacccatccaaccgccctctcctctcttcctcttcctcgcaccacctccaccaccaccctcctctcttctcgcctccaccaccaaaaggggtgagaggcacggggaccgcccgcctcgctcgctggcctgcacactggattcggcgccgcggcggtagttgcagcggcggcctggcagggagatgtcttcacgctcggggtactacaagctgaaggttcaatttaccatttatcctctgatcatcgatttgatgcaagtaaagaggaggttgatcgtgtaacaaaatgtggaggtgatgttggaaggctaaatgttgttggtggcgctgaggtgttggcctggaggtttgtgcctatctaggtcaataggagatcaagatgttggtgaatttattgttccagttcctcttgtgaagcaagtaaagactgctgtgcaatcaaaaggactgagggatgataccacctgtattgttgttgatataatagcagagaaaaccaacccttccatgccacttcctagaaggcaaccgggaattggtgtcttcaaaaatatgtttggcaagaaaaaatcatcggattcatcatcacattcccatgcagatagagaatatatggatccagatatcttggaggaaatatttgaggatgggtgtgcgcttctttctagacggctggattctgaataccctgttcgaaatatgttcaaactcttcatatgtgccgtttgtcaaatagagttaaagccaaaccaagggatatctgtacatgaagattcatcagaacctgggagcttgcgtcgctgggatggtccattcctttgccagagctgtcaggaaaagaaagaagcaatggagggaaagcgtcgttcacgaggttcatcaagaaacagtgggtcaagtgaatagctgccgtgtgtagagtgatcaggtaattactgatcaacaacaccccagcaccaccattttgcagcatttcttctgttgtgacactttcttgatcacatgtaatgtctgggagttctgatctagaactagattgaagtattgaaattgccattgtagaggtggctgctgcttatagctctcatcccaagcgaggagcatgtcttgtcctcagcaaggttcttgctgaggaatgtaggcagctctgctcagcccttgaccttgatggcacatacaggtttaaagattaacatgccaaaatgatatggcttgtctattctaaggtcaactgttgcaacacaaattactcttggtatagacttctgacaaatagcttggcactgtttctgaattaggcctaggtgcttacatcaattttctcttgttgaatccggctttaattcatgactagagactttagagtattatcagtccttgttgaggttcagcctttgctgacaccaatgtaattaacatctaaaaatattctttgaatcagcttgtgattcatcagcaagacgttagttgtcatgtacaatgtacaaaatcttgctaacaggacaggtctgtttcctcctctacgttttgtcattacatggatgaaaattaattggtgtgccaattggaggaaagaatttgttctagtaaatgttgatggtagacgtgactttcactcactgcaggtgtactgatcctttttgtatatcttattttattttttcttagtaatgtatagtagtcctgagtatgaaatttgtttctgcatgggagattccccagccaaaagtatgctgtaatatgttgtccgtagttcagtcgaaaaaatactccatatgcagaatgatgccaagatgtctgttccttgcgtttg

SEQ ID NO: 205750 - DNA, 2266 bp, Zea Mays
gtcccgtactcgtccaaattctcctcgtctcgtctcccatgtgacccatccaaccgccctctcctctcttcctcttcctcgcaccacctccaccaccaccctcctctcttctcgcctccaccaccaaaaggggtgagaggcacggggaccgcccgcctcgctcgctggcctgcacactggattcggcgccgcggcggtagttgcagcggcggcctggcagggagatgtcttcacgctcggggtctacgagcggcgggagcaccggtggcggcagcagcgcagggggaggcgccgcggtgccgctggccttgctgctgaggcgggaggtggccagcgagcgcaccgcatcggagcgaccggagctgcactcgggcctcttcagccaggccaagaaaggcgaggacttcacattcctcaagctcgaatgcgagcgcgtccccggcgtcccgtcctcctccttctccgccttcggcctgtttgatgggcacaatgggaacggggccgcaatttacaccaaagagaatctcttgaacaacatcttgaacgcggtccctgctgatctcaacagggaagactggcttgctgcactcccaagagcgctggttgctgcattcgttaaaacggataaagatttccagactaaagattggtcctcttaggtgttggcctggaggtttgtgcctatctaggtcaataggagatcaagatgttggtgaatttattgttccagttcctcttgtgaagcaagtaaagctgtctactgcgggaggccgacttattattgcaagtgatggtgtttgggatgcattatctccagaagtagcttttaactgttcacgtgaacttcctccagtgcctgcagctgagcaaatcgttaaaactgctgtgcaatcaaaaggactgagggatgataccacctgtattgttgttgatataatagcagagaaaaccaacccttccatgccacttcctagaaggcaaccgggaattggtgtcttcaaaaatatgtttggcaagaaaaaatcatcggattcatcatcacattcccatgcagatagagaatatatggatccagatatcttggaggaaatatttgaggatgggtgtgcgcttctttctagacggctggattctgaataccctgttcgaaatatgttcaaactcttcatatgtgccgtttgtcaaatagagttaaagccaaaccaagggatatctgtacatgaagattcatcagaacctgggagcttgcgtcgctgggatggtccattcctttgccagagctgtcaggaaaagaaagaagcaatggagggaaagcgtcgttcacgaggttcatcaagaaacagtgggtcaagtgaatagctgccgtgtgtagagtgatcaggtaattactgatcaacaacaccccagcaccaccattttgcagcatttcttctgttgtgacactttcttgatcacatgtaatgtctgggagttctgatctagaactagattgaagtattgaaattgccattgtagaggtggctgctgcttatagctctcatcccaagcgaggagcatgtcttgtcctcagcaaggttcttgctgaggaatgtaggcagctctgctcagcccttgaccttgatggcacatacaggtttaaagattaacatgccaaaatgatatggcttgtctattctaaggtcaactgttgcaacacaaattactcttggtatagacttctgacaaatagcttggcactgtttctgaattaggcctaggtgcttacatcaattttctcttgttgaatccggctttaattcatgactagagactttagagtattatcagtccttgttgaggttcagcctttgctgacaccaatgtaattaacatctaaaaatattctttgaatcagcttgtgattcatcagcaagacgttagttgtcatgtacaatgtacaaaatcttgctaacaggacaggtctgtttcctcctctacgttttgtcattacatggatgaaaattaattggtgtgccaattggaggaaagaatttgttctagtaaatgttgatggtagacgtgactttcactcactgcaggtgtactgatcctttttgtatatcttattttattttttcttagtaatgtatagtagtcctgagtatgaaatttgtttctgcatgggagattccccagccaaaagtatgctgtaatatgttgtccgtagttcagtcgaaaaaatactccatatgcagaatgatgccaagatgtctgttccttgcgtttg

SEQ ID NO: 205751 - DNA, 2404 bp, Zea Mays
gtcccgtactcgtccaaattctcctcgtctcgtctcccatgtgacccatccaaccgccctctcctctcttcctcttcctcgcaccacctccaccaccaccctcctctcttctcgcctccaccaccaaaaggggtgagaggcacggggaccgcccgcctcgctcgctggcctgcacactggattcggcgccgcggcggtagttgcagcggcggcctggcagggagatgtcttcacgctcggggtctacgagcggcgggagcaccggtggcggcagcagcgcagggggaggcgccgcggtgccgctggccttgctgctgaggcgggaggtggccagcgagcgcaccgcatcggagcgaccggagctgcactcgggcctcttcagccaggccaagaaagctgtttgatgggcacaatgggaacggggccgcaatttacaccaaagagaatctcttgaacaacatcttgaacgcggtccctgctgatctcaacagggaagactggcttgctgcactcccaagagcgctggttgctgcattcgttaaaacggataaagatttccagactaaagcacgttcttcagggacaaccgtgacatttgtcataatagatggattgttcatcactgttgcatcagttggcgattcccgttgtgtactacaagctgaaggttcaatttaccatttatcctctgatcatcgatttgatgcaagtaaagaggaggttgatcgtgtaacaaaatgtggaggtgatgttggaaggctaaatgttgttggtggcgctgagattggtcctcttaggtgttggcctggaggtttgtgcctatctaggtcaataggagatcaagatgttggtgaatttattgttccagttcctcttgtgaagcaagtaaagctgtctactgcgggaggccgacttattattgcaagtgatggtgtttgggatgcattatctccagaagtagcttttaactgttcacgtgaacttcctccagtgcctgcagctgagcaaatcgttaaaactgctgtgcaatcaaaaggactgagggatgataccacctgtattgttgttgatataatagcagagaaaaccaacccttccatgccacttcctagaaggcaaccgggaattggtgtcttcaaaaatatgtttggcaagaaaaaatcatcggattcatcatcacattcccatgcagatagagaatatatggatccagatatcttggaggaaatatttgaggatgggtgtgcgcttctttctagacggctggattctgaataccctgttcgaaatatgttcaaactcttcatatgtgccgtttgtcaaatagagttaaagccaaaccaagggatatctgtacatgaagattcatcagaacctgggagcttgcgtcgctgggatggtccattcctttgccagagctgtcaggaaaagaaagaagcaatggagggaaagcgtcgttcacgaggttcatcaagaaacagtgggtcaagtgaatagctgccgtgtgtagagtgatcaggtaattactgatcaacaacaccccagcaccaccattttgcagcatttcttctgttgtgacactttcttgatcacatgtaatgtctgggagttctgatctagaactagattgaagtattgaaattgccattgtagaggtggctgctgcttatagctctcatcccaagcgaggagcatgtcttgtcctcagcaaggttcttgctgaggaatgtaggcagctctgctcagcccttgaccttgatggcacatacaggtttaaagattaacatgccaaaatgatatggcttgtctattctaaggtcaactgttgcaacacaaattactcttggtatagacttctgacaaatagcttggcactgtttctgaattaggcctaggtgcttacatcaattttctcttgttgaatccggctttaattcatgactagagactttagagtattatcagtccttgttgaggttcagcctttgctgacaccaatgtaattaacatctaaaaatattctttgaatcagcttgtgattcatcagcaagacgttagttgtcatgtacaatgtacaaaatcttgctaacaggacaggtctgtttcctcctctacgttttgtcattacatggatgaaaattaattggtgtgccaattggaggaaagaatttgttctagtaaatgttgatggtagacgtgactttcactcactgcaggtgtactgatcctttttgtatatcttattttattttttcttagtaatgtatagtagtcctgagtatgaaatttgtttctgcatgggagattccccagccaaaagtatgctgtaatatgttgtccgtagttcagtcgaaaaaatactccatatgcagaatgatgccaagatgtctgttccttgcgtttg

SEQ ID NO: 205752 - DNA, 1868 bp, Zea Mays
gtcccgtactcgtccaaattctcctcgtctcgtctcccatgtgacccatccaaccgccctctcctctcttcctcttcctcgcaccacctccaccaccaccctcctctcttctcgcctccaccaccaaaaggggtgagaggcacggggaccgcccgcctcgctcgctggcctgcacactggattcggcgccgcggcggtagttgcagcggcggcctggcagggagatgtcttcacgctcggggtactacaagctgaaggttcaatttaccatttatcctctgatcatcgatttgatgcaagtaaagaggaggttgatcgtgtaacaaaatgtggaggtgatgttggaaggctaaatgttgttggtggcgctgagattggtcctcttaggtgttggcctggaggtttgtgcctatctaggtcaataggagatcaagatgttggtgaatttattgttccagttcctcttgtgaagcaagtaaagactgctgtgcaatcaaaaggactgagggatgataccacctgtattgttgttgatataatagcagagaaaaccaacccttccatgccacttcctagaaggcaaccgggaattggtgtcttcaaaaatatgtttggcaagaaaaaatcatcggattcatcatcacattcccatgcagatagagaatatatggatccagatatcttggaggaaatatttgaggatgggtgtgcgcttctttctagacggctggattctgaataccctgttcgaaatatgttcaaactcttcatatgtgccgtttgtcaaatagagttaaagccaaaccaagggatatctgtacatgaagattcatcagaacctgggagcttgcgtcgctgggatggtccattcctttgccagagctgtcaggaaaagaaagaagcaatggagggaaagcgtcgttcacgaggttcatcaagaaacagtgggtcaagtgaatagctgccgtgtgtagagtgatcaggtaattactgatcaacaacaccccagcaccaccattttgcagcatttcttctgttgtgacactttcttgatcacatgtaatgtctgggagttctgatctagaactagattgaagtattgaaattgccattgtagaggtggctgctgcttatagctctcatcccaagcgaggagcatgtcttgtcctcagcaaggttcttgctgaggaatgtaggcagctctgctcagcccttgaccttgatggcacatacaggtttaaagattaacatgccaaaatgatatggcttgtctattctaaggtcaactgttgcaacacaaattactcttggtatagacttctgacaaatagcttggcactgtttctgaattaggcctaggtgcttacatcaattttctcttgttgaatccggctttaattcatgactagagactttagagtattatcagtccttgttgaggttcagcctttgctgacaccaatgtaattaacatctaaaaatattctttgaatcagcttgtgattcatcagcaagacgttagttgtcatgtacaatgtacaaaatcttgctaacaggacaggtctgtttcctcctctacgttttgtcattacatggatgaaaattaattggtgtgccaattggaggaaagaatttgttctagtaaatgttgatggtagacgtgactttcactcactgcaggtgtactgatcctttttgtatatcttattttattttttcttagtaatgtatagtagtcctgagtatgaaatttgtttctgcatgggagattccccagccaaaagtatgctgtaatatgttgtccgtagttcagtcgaaaaaatactccatatgcagaatgatgccaagatgtctgttccttgcgtttg

SEQ ID NO: 205753 - DNA, 640 bp, Zea Mays
cccaaatccagttgcaactgaaggtgaaccagaagatgatgctaactctgacagcaagcattatgtactggtatttgaaaaggccaacatcacaatcattggactctgaaaacgggagttcatgtgaaacaacctccatcacaacttcagatgattctgcatctgaatcatcgattgatgacaatacaactagataaaagagcagggtcatgaaaataattgatatgacctgtcattttgaaaacttgggattgattgtttgctgtaattttaagggcaaatacattcaagaccgaggcaagggaaatggttaagggctttgggtgtttttttgaggtttaatagtgtgattgggtgaaagatgtttgacatcctgtaaatatatctataactagtgacaataggttgtccaaaatccactatttgagttagaacaatttgagttacaatgtacaataaattagtgtcctatccgttaaagcttttaggcgcatgttgtcatatgcttatggaataactacaacattttccttgaaatatgcttaaattaacacgagcttaaatcgcttgtgatttggcttgatggtgtgatatttttagttggcttattgcagcctgatcggtttctatcattgaaaac

SEQ ID NO: 205754 - DNA, 731 bp, Zea Mays
cgatagttcagatttatttaagacgaagagaagcaaatgaatgcttcatacatcatttctgtggctaggaagcttggttgctccatttttttgttaccagaagatatattggaggtgaaccagaagatgatgctaactctgacagcaagcattatgtactggtatttgaaaaggccaacatcacaatcattggactctgaaaacgggagttcatgtgaaacaacctccatcacaacttcagatgattctgcatctgaatcatcgattgatgacaatacaactagataaaagagcagggtcatgaaaataattgatatgacctgtcattttgaaaacttgggattgattgtttgctgtaattttaagggcaaatacattcaagaccgaggcaagggaaatggttaagggctttgggtgtttttttgaggtttaatagtgtgattgggtgaaagatgtttgacatcctgtaaatatatctataactagtgacaataggttgtccaaaatccactatttgagttagaacaatttgagttacaatgtacaataaattagtgtcctatccgttaaagcttttaggcgcatgttgtcatatgcttatggaataactacaacattttccttgaaatatgcttaaattaacacgagcttaaatcgcttgtgatttggcttgatggtgtgatatttttagttggcttattgcagcctgatcggtttctatcattgaaaac

SEQ ID NO: 205755 - DNA, 2798 bp, Zea Mays
cctgcttctgcctcaccatcattcttctcccctttcctttattttgaaccagcgaacggacgctcctcggggcccaaacccggctggtctctctcctctgagttgcccttgccccacattacaccacaccacccccctcccactccatgctgtcaggagcggaaggccgaagcgccaccgcgcccaccctgatctgcccgcccacctaacgtcggccgtcaatcggccgccgccgcgatggggtttgacgggctggtcgtggtgtcagatccttacctgcagcgccgcttcacgcaggccgaacttcgcgcgctccaggcccagtatgcggcgctgcgggacgcgtcgcctaacgggaggctgcggatgcgggacctccccgccgccatctctggcgtccgcggtgcggccaagagcagggacgccgagaaggagaatagcgcgccggagccaggcccctgccatggcctcactgacgaggagtgggcctccgtgcttaaggccgtcgcgcgtgctgacgagaagccgcaccaggacgcgagcttcgagctcttcctccgcgtctacgctgagatgcagctgcgactcaaggcagtaagcgtctgctccggccgcgccggaggaatcgtgcgctcctcctcctcctctgctgttgccttcctcacggcggccaccaccacactgcttcacaccatcagcgagtccgagaaggcgtcctatgttggccacatcaacgcttatctcgcggatgatccgtccctgaagagcgccctccccatcgatccggcgaccgatcacatcttccatatcaccaaggacggcgtgctcctatgcaaactcatcaacttggctgtaccgggcaccatcgatgagcgagccatcaataccaagagggtccttaatctttgggagaagaacgagaaccacacgctttgcctcaattctgccaaagcgatcggctgcactgtcgtcaacatcggcacacaagacctcgccgaagggaggcctcatctggtcctgggcttaatatctcaaataatcaagatacaactgttggcaaatgttaatctgaaaagcacacctcaattagttgaattggttgaggacagtaaggagatggaggagcttatgagtttatctcctgaaaagattctactaaggtggatgaactttcaactgaagaaagcaggtttccagaaaagagtaacaaatttttcatcagatataaaagatagtgaagcctatgcttgtctattgaatgtcctagcacctgaatgcagtgcaaaaccatctgcgatgtctgtaaaagatctacttcatagagcaaggttaattcttgagcatgcagataggatgggctgcaaaaggtacctgactccaaaagacatagttgatggtttacccaatctaaatcttgccttcgtggctcatattttccaaaaaagaaatgggttgtccaaacaaatgaaacaagtttcctttgtggatggactctctgatgatgctcaagtttccagggaagaaaggtcattccggctgtggattaacagccttggaatttcaacttacatcaacaatgtgtttgaagaccttagaaatggatgggttctccttgaggtgattgacaagattgctccaggctcagttaattggaagatggcaaatcgcccaccaatcaaattaccattcaggaaagttgaaaactgcaatcaagttttgaagattggaaaagaactaaaattttctttggtgaatattgctggaaatgatattgttcaagggaacaaaaaactgatattaggaccatataatgaaattgcatttatcctagcttttctatggcaattgatgcggtacaacattctacaactgctgaagaatcttagatttcactcaaatggaaaagagatcacagataatgacatattggcatgggccaataagaaagtaaaagattctggaaagcaccactcttatatgcaaagtttcaaggataaaagcctttcaagtggcacctttttccttgacttactaagtgctgtggagcctcgagttgtgaattggagccttgtgaccaaaggggaaaaagacgaagagaagcaaatgaatgcttcatacatcatttctgtggctaggaagcttggttgctccatttttttgttaccagaagatatattggaggtgaaccagaagatgatgctaactctgacagcaagcattatgtactggtatttgaaaaggccaacatcacaatcattggactctgaaaacgggagttcatgtgaaacaacctccatcacaacttcagatgattctgcatctgaatcatcgattgatgacaatacaactagataaaagagcagggtcatgaaaataattgatatgacctgtcattttgaaaacttgggattgattgtttgctgtaattttaagggcaaatacattcaagaccgaggcaagggaaatggttaagggctttgggtgtttttttgaggtttaatagtgtgattgggtgaaagatgtttgacatcctgtaaatatatctataactagtgacaataggttgtccaaaatccactatttgagttagaacaatttgagttacaatgtacaataaattagtgtcctatccgttaaagcttttaggcgcatgttgtcatatgcttatggaataactacaacattttccttgaaatatgcttaaattaacacgagcttaaatcgcttgtgatttggcttgatggtgtgatatttttagttggcttattgcagcctgatcggtttctatcattgaaaac

SEQ ID NO: 205756 - DNA, 649 bp, Zea Mays
cacggttggctccacgccactaggaggacttatcctgttcttgtcatccacgccgatgccacgaggcatcaagactcatccacgcgaccaaccgaccacgccggagctggacgcatccatgccgccacccgccatcgcctccagcctctaggcgatcaggcagccatccacgccgccgccacccaccatttaccaatttggttgtattgtctccttgatggcctgattaacatctctgtcttcaggagaatagacgttcattatctgtatctattatttggtctgttgtgatcaatcaaaattgatgactcacaaagaagttcagcatcgataaatctcatcgtcattgtcgtcattatcatttaataactgatgaatttgctcgcctggcttcttatgagtaggcctgaaggatgaggaagggggctgcatcctcagaggcaatggatttcatatgtgacgcagagtggcaggttgatcaatgtcatgatggccaaggcgcaccctgctggcaaagtgtaccacatgagggccaagcgacaaatggctcaaagccttggtcagatactcagattgctaagttcaaacgtcgatatgagcaagaagaagaggaaagcaaagacagggacggttacttgttcacttgctg

SEQ ID NO: 205757 - DNA, 2966 bp, Zea Mays
ctgtttcctacgcgactgtccggctccgcacatcagcctgggggcctggcgccctgtcgctcactcccactcaccgaacgggcacttataagtcgcaacggggtttactcctgctcgttaccgtgaaaaacaagcaccaccgtagctcagttacacacgacaccggcagacccgctcgccttcgtctcctcctcctccacctcccgctctcactctactggccggccctcgcctcggtgcgttcccgatgatcacgttcgcggacctgacggagccggcagcggccggcgccgaacggtgcgtggaccggcagctgtggctggcgtgcgcgggcggcatgtgcaccgtgccgcccgtgggcgccagcgtctactacttcccgcaggggcacgcggagcacgcgctcggcctcgccggtgcggccgacctctccgcggcgcgcgtcccggcgctggtcccctgccgcgtcacggcagtgcgctacatggctgacccagacaccgatgaggtcttcgccaggatccgcctcgtcccgctgcgcggcggggacgcggacgcggacgcgggtggcgtcgaggacgacgcggccgcggcggacgagcaggagaagccggcctcgttcgccaagacgctgacacagtccgacgccaacaacggcggcgggttctccgtgccgaggtactgcgcggagacgatcttcccgcggctggactacgccgccgacccgcccgtgcagaccgtcgtcgccaaggacgtgcacggggccgcctggaagttccgccacatctaccggggcacgccgcgccggcacctgctcaccacggggtggagcacgttcgtcaaccagaagaagctcgtcgcaggggactccatcgtgttcctccgcggcgacagcggggacctgcacgtcggcatccggcgtgccaagcgcgggttctgcggcgccggtggaggcggaggcgacgactcccctgcggccgggtgggaccattacgcgggcctcatgcgagggaatgtgagcccgtgcgcggccgccaaggcacggggcaaggtgcgaccagaggacgtggccgaggcggcgaggctggcggccgccgggcagtcgtttgaggtggtgtactaccctcgcgccagcacgcccgagttctgcgttcgcgccgccgcggtccgcgtggcgatgagggtgcagtggtccccagggatgcggttcaagatggcgttcgagaccgaggactcctccaggattagctggttcatgggcaccgtcgccggcgtccaggtcaccgatcccatccgctggccgcagtcgccttggcgccttcttcaggtgacctgggacgagccggacctcctgcagaacgtgaagcgggtgagcccatggctggtcgagctggtgtccagcatgccggccatccacctcgcgtccttctcgcctccgcgcaagaagccccggatcccggcgtacccggagttccccttcgaagggcagctcctgaacccggcgttcccgcccaacccactgccgcacggccagcaccaccaccatttccttcactcccactcccaccagcaccaccacccacccttcttcccgttcccggccggcagtgctcctgcagccatacagggagccaggcatgcgcaattcgttccacctttctcagaactccacctcacccacttgcagccgagcctgctgtaccccaggctccgccgtcccgaccatgtcggtccgacgaccccgatcccggcaagagtcagcacggacctgaccatcggaggcgcggcggcggcggcgcgcgacgacgacgacgacgacttcccgtgcgctcctccgtcgacgggtgccaacaggcagaagcccgacgccaagccggcggggctagtgctcttcggacgcacgatactaaccgagcagcagatgagccgcagcggcgcaacctccccagcggcgaccggcaacagctccacgtgctggaacgccgagaaggggcccaacgcctcggagggctcggggggatccggcgtcatccagaccagcccggccaaggccgcgtcgtcggagcggccgccgtggctcgggggcgacggcagccagcagcagcaggcctccggcgagctcgggctggggctggagcccgggcagtgcaaggtgttcgtggagtcggacacggtgggccgcaacctcgacctcgcggcgctgcgctcgttcgacgagctgtacggccggctgtccgggatgttcggcgtcgcgggggcggagctgcgcagccgcgtgctgtaccgcggcgccgccggcgacgagcccttcagcgatttcgtcaggtcggcgcggaggctcaccgtattgaccgatgctgggagcgacaaccttggaagctaaacgacgacgaggagcagtgagagagaaccgttccattccagccgcgagggtttatgttcttcggtactggtactgttagactgtactagtactgtacaggtgaggccgggagctaaggttttgttcaaaatccgttccaagtctgaactctgaagacatagagagagagggagagaggtttcagatcgtaaggcagcgccaccatgaccaggcacgttgccttcatctcgtgtgtgtccatccaaaaaatcgctgtaaaacttggggggtaattaaaaccctactagtactactactactcatcttgttccttgtctctctctctgtatcctcgttctgtcgttcattctcatgggcgcttgaatgccccccttctggccaaggccaatgcatctgaacggcgtgtacgggccaaagggggcaaagccgtagcgggagcagcaacactgcgcgcgcgcagacgcaggttttgaatgtgctggcgctgctactgctgccgcaggcggcagcagctgttgctgctgccgggataccatcactattcactgcttgctccgtgtccgtggccaccaggcgacttgtt

SEQ ID NO: 205758 - DNA, 1650 bp, Zea Mays
gatataggattggaaagatggcgtcaaaaggtccccggtcaaagttagaccatgagacaagagctaggcgtcagaaggctcttgaagctccaagggagcctcgacgaccaaaagttcactgggaccatgtccttgctgagatgatgtggctgtcaaaggagtttgattctgagagaaaatggaagttgtccatggccaaaaagattgctcaaagagcaaataagagcatagttgaccaagcaacaaagggcgagagaaaacagaaggagaaagaacatagaatgcgaaaagttgcccttaatatttcaaaggatgtgaagaagttctggatcaaaatagaaaagctggcaagttcatttttgacttctaatgtcatgagaaagcaggttgtttataagcaccagctggagcttgaggagagaaagaagaaggcacttgataagcaacttgattttcttttaggtcagactgaaaggtattcgacaatgttggcggaaaatcttgtggatatgccctatcccgaaaacctagaaaacaggacttcacagataaaccaacgatcccatcaagaggaagtaccagaaaagaacttaaatgcaaccatttctgatgattttgataatatggaagtcgatgatgattatgagagctccttggacgaagagccagaagatgatgagcacacaattgatgaggatgaagctcagatcactgaagctgagcgcaacgaagaactagctgctttagaggcagaagctgatctaccacttgatgttattctcaagatgtacacaaaaactaaagggaaggcagtccagatagcaaagacatgctaagtaacttaggttcgaagattttgattgtagattctttgaagcaggctaatgggcgtgatcatgaacctgctcactcttcaagtgaagatggcaattcttctgaggaagtggatgatggccattcttatgctgagtttgtgaagaagaatcattgctgtgtaccttcctggtgcggcgccttcgcagttaggctcatggctctatccttggctgcagctatcgaggacaaagattacattgctactgaagaagtaaaggatgatgaagcaactttgtctgaagaggaagaattggcaaaaaaagaagatcctgattatctggaagaggttaagttactgcagaaggagagcgagataccactagaagaacttctcgcgaggtaccgagaggatggctgtgcagatcatgaaacagcggagttgaagaattcaccccattttgttgaagaggtcaatactgacatgtctttggatgatcaatctgtgagcattttggaagcgaaaagtgatttatttgtggatcaccaatccagggatgtgctggaaactgaggacacggctccacgatcagaaatcgcatcagagccttgtgctaaacaaaattttgatgaagagaataatctcactgatgttaagacagtcaatggagataagagtgatgatgtaaagagtgatgatgtaattgctgatgctgcagctgctgcaagatcagcacaaccaactggcaacaccttcttgactacaaaagtgcgcacgaaattcccattccttcttaagcattctcttcgtgaataccagcatatagggctggattg

SEQ ID NO: 205759 - DNA, 1952 bp, Zea Mays
ctgccacgctccaagccttgcactgcactgcactgcgctgcgcccgatccgaagcgaaacgccctctaactgcactgctgcgtgcgtacagtgcacctctttggttgggtgggttaaagcttaacgccaccactaaacccaggccagcacaacgccgtggccatgtaaatacgggggtgcccagtccagtggcctcctcgccagccttcgccgcgcgtccgacccaaacccaaccacaccgccctcccctagctcgtcgcgtcccgacccgatgccgtagctagcagcggccctgcagccagccacccacccacgcctgcagccgtcgcatgtcggacaacaccgtagccaaggcggcggcagcgaccatgacgcccgccgccgcctccgacccgtcgccgtcgtcctcgtccggcgtcggggcgtccccgctcgcgctgctccgcccgcacgcgcacggccacatgacgccgccgtcgccggcgctcgcggccccgccgccgtccccggcgtccgcgccccgggactaccgcaagggcaactggacgctccaggagacgctcgtcctcatcacggccaagcgcctggacgacgaccgccgcgccggaggcgcccatgcccacgcccacgccctggccgggtcgcccaccacgccgcgctcggcggagcagcgctggaagtgggtggagaactactgctggaaccacggctgcctccgcagccagaaccagtgcaacgacaagtgggacaacctcctccgcgactacaagaaggtccgcgactacgagtcccgcgccgccgccgccgcgccggccgccgcgccggccacgagggctctcccgtcctactgggccatggagcgccacgagcgcaaggaccgtaacctgcccaccaacctggcgcccgaggtgttcgacgcgctcaccgacgtgctctcccgccgcgccgcgcgccgagggggcgcggcgatcacggccgccccgccgccaccccagctcgcgctgcctgctccgcctccgcctccgccgcttcctcctccatcgccaccgaagccccccatcgtccagccccgcgctccgcctcctccgctgccgcttccggcggccgtgcctccgccggcgacgtccgtttccgcggaggagctgacggggtcgtcggagtccggtgaggacgacgacgggtcggacgccgtggcggagccggagccgaagcggcggcggctgaaccggctggggtccagcgtggtgcgcagcgcgacggtgctggcgcgcaccctggtggcgtgcgaggagaagcgggagcggcggcaccgggaggtcctggagctggaggagcggcggctgcggctggaggaggagcgcacggaggtgcggcgccagggcttcgcgggcctcgtctccgccgtcaacagcctctccagcgccatccacgccctcgtctccgaccaccgcagcggcgactccgcctcccggtgatcgggccgggcaggccggcaactaacgctcggccttgaccgtccgtcgttgtcaacacctctcccagctcagctcggctcggctcatctgccgccgcgccggcgttcgttgtgcgatccgtcgtccgtcgcggccgggcggctatatctgggctccgacgacaacatgatccaggtatcgaccgacaaaccgaccgaccgaccaggatgtaaataaggtgaagcgtgattcattgtttgttggaggctgtgtgactccgaattcttttggaggtggtggaatggaagcgtgtgtgtagcattgcattggtccgtctcgctcgcgtgcatgtagtagtagtaagtacaacgtgtcctcctgctgctgctgctgctagtgctaggtatctgctttgagctccctccctccccttttttttgtgcatgcattgactcgttgttgactggagatggagcttgcgttgcgatcaaaaaaaaa

SEQ ID NO: 205760 - DNA, 3105 bp, Zea Mays
gtcagttacagatctgacgctaccttccgttcgattcccttcgcgtctttcttcctctgctggactcaagtactgcaaattagagcagaaaatcctgtgtaagcaatttccattcgcgctgtcatctcttcctcgatcgaaggtctagatcaagatgagcccatgtctacttcgatcagtttagcctagtcagtgtagaactgtttggcttccgagttcagatatttagctagcatagccaagtgaattttgttcctccagtgggtcatcaaggtgtgcatgtgtcctgggagagagagaagaaaatccagtctgcaggatggatgcaatggcacctgaagaatatgcctcgcaatccaagctactgcaagaattcaccaacgtcccaagcatcgacagtgcttccatcctcaaaaccaacgatgaggacagatccagagcgatgttctccattagccagccagacttactggcgaacaccaacaggaaatacgttttgtattctcatattacgacgagagccggcaccggcaccacctctccggatttccagtggtctcctttccccactgaaacaaccggagtgtccgccaccgttccgtccccttccgggtcgaagctcctcgtagtgcgaaacggggagagaggatgccccaccaagctcgaaatcgtttgtcagtcacatgtggagaaggagatacacgtagcaggttctgtgcacggtcctctctacacggatgaatggtttcatggtgtttcttggaatcaagaagagaccttggtagcatacgtcgctgaagctccagccacaccaagaccagctttcaatcgttccggatacacgagggaagaaggttgttccgagggagactgcagtgcctggaaagggcagggcgtgtgggaggaggactggggtgaaacgtactccaagaaaggaagaccctcactgtttgttcttgacattcccagaggagaagtggtagcggctaaaggtgtcccaacatcgttgagcgttgggcaggttgtttgggctccggaatcaccaggtggcaggcacaagtatctggttttcgttggatggtcagagcgcaacgggttcttccagaacactgctagaaaactcggcatcaagtactgctccaacaggccatgtgctctctatgcagccccttgccctatccaaggaccagagccgcctggcaatccaccggctacgaccagtgatggtaaatcaggctccggcggtgcggtggcgcgcaacctaaccccaggcttcagcagtgcattgtttccacggttcagccgggatggaaggcttctggtcttcctgtcttcaaaacaagccgtggacagcggtgcacacaacgcaacggattccctgcatgtgatcaactggccttcggactggaaaatggatgaacaactcgatgttactcaagtggtacctgttgtaatgtgccctgaagacgacgacggcggctgttttccaggcctctactgttcatccgtgctacccgatccttggctctccgacggacgtacagtgatattgacatcttcctggagaagtgccgaagtgatactatcggttgatgtgttaagtggcaaagtggcaagaataactccggaagactcgtgctactcgtggcgtgctcttgcgttagatggcaccaatgttcttgctgtgtcaagtagtcccatcgaccctccttccatcagctatggacgacgtctcgccgtgacaccagctgagggtgaagcacgtagatggacctgggatgaagttactagtccattcatggcatccaacagcaaggttaagtccttgttgctgcatcacagcgtcagcatacttaaaatccctgtccctagcccatctgctgacctctctgacggtggcaagcttccactcgaggccatattcgtgtcctgcagctgcaagggtagctcgcgcagtccaactgttgtggtccttcacggcggcccacactcggtgtccgtatcaagctactcaaaatcctcggcgttccttgcttcgcttggattcaacctgcttgttgtaaactaccgaggcacgccaggttatggagaggaagccttgcagtcgctccctggaaaagttggatcccaggatgttgaggactgccttgcagcgctagacttcgccgtcgaggaagagctggtagatgcgtctagagtagctgttgtcgggatctcgcatggtgggttcctgacaacacatctcatcggtcaggctccggacaggttcgccgtggcagctgctcggaaccctgtctgcaacctgtcgctgatggccggcaccaccgacatcccggactggtgttacgtagtggcctgcggaacccaagcgaagcgatacgcctctgaagcgccttcgcccggccatcttcgtctcttctaccagagatcgccgatcgcccatgtctctaaagtcaaagcgccccttcttatgcttcttggcggagctgaccttcgagtgcctgcttctaatggcctacagtacgcaaggagcctgatagaaagaggaggcgatgtcaaaatcatgatgttcccagaggacatacacgaaatcaatttaccgcggtccgatttcgaaagcttcctcaacattggggtatggttcaagaaacatctgaatgcagtggcatgaagcagatccggcttggtggttcatctaggcgaccatgtacagcattgctactttaagtttgtcaagaattcaaacttttttgtgaaaaaataaatgctcattcatactggtttcatacgacgttctagtgagtgttccaaagacatcgcctagccgtccagtcatatctagctgactagcttgtcttggagaacaatggcgccttgtagcctaacctgacatgtacaatgatgtttaatatagggtctcttaagttgtttaaaatggacattccgtgaagagacgtctctgactcgcaacccaagtaacaacagatgtctcacttttcgctgtacgaattcgtcgtctgatctattgatccgatgttgtacatgtacatttacttttgtatttattaatagactacgattatagacacttcgttatataataga

SEQ ID NO: 205761 - DNA, 2260 bp, Zea Mays
ctcctctccacgtggccacctgcctcttacccaacggctatttcaccatgtccccatccccagccgcagccggcctcccgcgtccccgcctgtcgctagttctctcgccttgaccgcagaaataaaacgaaaaaaaaacagcgcgccaccgccaccaaccaaacagaggaaaaggaggggaggaagaagcggaggagagagaaaccctaatcgagatgggcaagcttctctgcgacccctccgccgccgccgtcgccgaggccctgccgccgtccccagcccccgctccgcctccgccgctcctcgcttggtcctccccggccccggcctcctcccccgaggcctccatctcgcccacaggctgggacgcggtctgggcgctcgaggaccagcagcgccgccgcctccaccggatctgggagcggggcgtcgcgtggaaaccctcctcgccgggcgccggcgaggccgcgctgcctcccgtggtcttccgcctcgaccacggcggggaggtcgacgccgatggcaactgcctcttcaccgccgcgcggacggcagccgctgccaaggccgacgcgcgcgagctgaggcaccgcgcagtgcgccgattcgccgaggtctacgccgccgctggggaggacgacaagaacgccgtcgacgccgccgtgaggcacctctacgcgccggatctcaaggccgggtggggtgtccatgtcgtgcaggagatcaaggtgctcgtgcccaaggcccagcgccacgcgctcgactccgccatccaggagctcgtcgatctcggtatccaaaggtaccgtgctcgcggatctgcccttgctcgctgctctagctcaaatcttttgattttctcgccacttcaagatctaaaagccttgtcatttttttcccgtatgcctttttgatgatttcgccattcttgctcttggtctaatcagacgctcgtgcaatgtcgttttctcgccaccttcgcaataaaatattctccgtttcccagcccaaaatatatttgttcttgacttcttgagattatcaaagattatttggttcagctaatttacatatagcagttcgtgtctctttagcccttcctgaatttcataacacatccacaaacacggattgacgaaatcttgtgggctttggcatcgtggagatgcaggacacatcgcttcacaaggtgtctgcgttgtatccttgaaattaaaaggtcaatgaaatgaaggatggaatcgtccttttaagtattgcgacgcaagtgttgatgtaatgggagcccacgcttgtccaccctgttatttccaatacatcacttaatactcccatgttgaccctgggaaatagcagctgaaactatctacaaggaaagatgcatcactgtagacaatggggatagttggaccaagtacatgtccatttctggttcttcagaggacgagcatgacattatcaccctgcagtacacagaggaggggttactgacaatagatgagaaccgagatggccgtgcagctgcatttggcgatgatattgccattgaatgcctagctactgaattcaagagagaagtttacgtggtgcaagcccatggagcggatgcaatggttgacgaggataactgtgtgttcttcctcccacaccgtcctcgaggagaagtttgcgagccaccgatttttcttttcatgaaaggaacagcatggtgtggtgctggtgctgaccattacgagcctttgatcgccactgtcctccagcatgttactccagacaaggcagctgtcatcctttgagaatgactgcagttttttctacctcccttagcttttagtcagcggtggagttgagacaattttgttattggagctagagtgctgaattgaggagcgacatcaatatgcccaagagattagagagacggccaacctgagtatcttgctctgttgcggggttttgcctgcttatgaagctgtgtatggtgattttgttgttgtatgtttatgagtaggctctgactagcgaggatattctgagtgtagaacgtcgaatctagattttttgagggtctgatgttgtttgccattgtcggccggcatttttgtattgcttattgtgaggattttcgtttcttgacgcctgtttctagggacatcatgattggacatttggaatgcaaacaattcctttgtggtgttgggttaactcttctctctcaataatttttattgctgaacgtagagtaattattgaaattgcg

SEQ ID NO: 205762 - DNA, 1503 bp, Zea Mays
ctgccaaagcgtagttctgcgacatctaaaggagtgtggaaggcggctgccttgtccgcccggcctcttccgtctcggagcgagaaatcagcggcatcgccgcgcgcatccgaagcgcacacgacaatgcagggcggatccagcggcatcgtctatggtggcctcaagtaccaggcacggtgtatcgccgacgtgcgcgcggacgccagctcgaccaccttcctcgccgggaccctcagcctcaaggaggagaacgaggtgcacctgatccggctttcgccggcggagagtgagctggtgtgcgatggagtcttctaccaccccaacgagatctgggatctcaaatcatgtcccttcgatcacagggtcttctccacagtctacacatctggtgagggctttggtgcgtcagtttggaagatcccagagcttaatgggcaatcaaactcaccgcagcttgagcagctctttgagcttagtgggcatacgggcaagattagacgtgtgatctggtggccacttggaaagcatgataaactaattagcattgatgaccgaaatatttttctttggaacgtagacatgtcaaataaatcagctaaggtgatctcacagggatcagctgacatgcttccaaatttgagtggtggggcttgggatccacacaatcataattcaattgcttcaatatctgattcatcacttcatttgtgggatctacgttctatggaaaaatcatctgcaattgaacatgcacatatacgggatgtggattataaccccaagaagcaacacattattgcaacaacagaagatgactttggaatttgcttgtgggatctcagaatgcttaagcttcctctgaaagacctccctgggcactcacattggacatgggctattcagcacaatcctgagtatgatgagctgcttctgagtgctggaacagattcaactgtaaatttatggttggctaaagttagcaacaatgattctgaacctaatagcccttctggttcacccaatagacaagaagaaccattacttaactcatatactgactatgaagacagcatctatggtattgcatggagctcccatgatccatcattattcgcttctttgtcctatgatggaagggttgtcttggaatcagtcaagccctacttgcagagaaaatgaatcttgctggtctaacttttggattgtaagcaatggcagaaaaaacataataaggatgttgcagaaatcatcctgcttgacatcaggtcttcaaccctcttgattgaagccagcaatggctccaaaacactcagatctagcttcagttgagatattacagcacagatgttgtatatttgaaaagtgttcacaaaaagatattgcggtatatgatgaggtggagttggactgaatttgtaaaaccattcagaatttcaaattcccaggattagcttgttttatgaaatattctgttgcgcattgaaaattcggttctttgca

SEQ ID NO: 205763 - DNA, 1541 bp, Zea Mays
ctgccaaagcgtagttctgcgacatctaaaggagtgtggaaggcggctgccttgtccgcccggcctcttccgtctcggagcgagaaatcagcggcatcgccgcgcgcatccgaagcgcacacgacaatgcagggcggatccagcggcatcgtctatggtggcctcaagtaccaggcacggtgtatcgccgacgtgcgcgcggacgccagctcgaccaccttcctcgccgggaccctcagcctcaaggaggagaacgaggtgcacctgatccggctttcgccggcggagagtgagctggtgtgcgatggagtcttctaccaccccaacgagatctgggatctcaaatcatgtcccttcgatcacagggtcttctccacagtctacacatctggtgagggctttggtgcgtcagtttggaagatcccagagcttaatgggcaatcaaactcaccgcagcttgagcagctctttgagcttagtgggcatacgggcaagattagacgtgtgatctggtggccacttggaaagcatgataaactaattagcattgatgaccgaaatatttttctttggaacgtagacatgtcaaataaatcagctaaggtgatctcacagggatcagctgacatgcttccaaatttgagtggtggggcttgggatccacacaatcataattcaattgcttcaatatctgattcatcacttcatttgtgggatctacgttctatggaaaaatcatctgcaattgaacatgcacatatacgggatgtggattataaccccaagaagcaacacattattgcaacaacagaagatgactttggaatttgcttgtgggatctcagaatgcttaagcttcctctgaaagacctccctgggcactcacattgcccttctggttcacccaatagacaagaagaaccattacttaactcatatactgactatgaagacagcatctatggtattgcatggagctcccatgatccatcattattcgcttctttgtcctatgatggaagggttgtcttggaatcagtcaagccctacttgcagagaaaatgaatcttgctggtctaacttttggattgtaagcaatggcagaaaaaacataataaggatgttgcagaaatcatcctgcttgacatcaggtcttcaaccctcttgattgaagccagcaatggctccaaaacactcagatctagcttcagttgagatattacagcacagttgagattgtcagcagtttcctttcctgtatcttcaaattttgtccactaggatttcatgttcagttgctagaaatttggctgtgaagatctgatctgtatgttaataactgttgcccatctgtctgaaatagttttctatacttgattcttaggatgttgtatatttgaaaagtgttcacaaaaagatattgcggtatatgatgaggtggagttggactgaatttgtaaaaccattcagaatttcaaattcccaggattagcttgttttatgaaatattctgttgcgcattgaaaattcggttctttgca

SEQ ID NO: 205764 - DNA, 1736 bp, Zea Mays
ctgccaaagcgtagttctgcgacatctaaaggagtgtggaaggcggctgccttgtccgcccggcctcttccgtctcggagcgagaaatcagcggcatcgccgcgcgcatccgaagcgcacacgacaatgcagggcggatccagcggcatcgtctatggtggcctcaagtaccaggcacggtgtatcgccgacgtgcgcgcggacgccagctcgaccaccttcctcgccgggaccctcagcctcaaggaggagaacgagtaggtgcacctgatccggctttcgccggcggagagtgagctggtgtgcgatggagtcttctaccaccccaacgagatctgggatctcaaatcatgtcccttcgatcacagggtcttctccacagtctacacatctggtgagggctttggtgcgtcagtttggaagatcccagagcttaatgggcaatcaaactcaccgcagcttgagcagctctttgagcttagtgggcatacgggcaagattagacgtgtgatctggtggccacttggaaagcatgataaactaattagcattgatgaccgaaatatttttctttggaacgtagacatgtcaaataaatcagctaaggtgatctcacagggatcagctgacatgcttccaaatttgagtggtggggcttgggatccacacaatcataattcaattgcttcaatatctgattcatcacttcatttgtgggatctacgttctatggaaaaatcatctgcaattgaacatgcacatatacgggatgtggattataaccccaagaagcaacacattattgcaacaacagaagatgactttggaatttgcttgtgggatctcagaatgcttaagcttcctctgaaagacctccctgggcactcacattgcccttctggttcacccaatagacaagaagaaccattacttaactcatatactgactatgaagacagcatctatggtattgcatggagctcccatgatccatcattattcgcttctttgtcctatgatggaagggttgtcttggaatcagtcaagccctacttgcagagaaaatgaatcttgctggtctaacttttggattgtaaggtgtaggatatgattcctcatttcctttatcttgtccttattgccaaagttatctcatgtcctaataaactgttctctgtccctgcagcctacaggcttgcttgttgtttatatttgatgcgttatagttttgccttatattctgtaccctcttgacaaccatttatgtgatgatgtgttttactgttgtagcaatggcagaaaaaacataataaggatgttgcagaaatcatcctgcttgacatcaggtcttcaaccctcttgattgaagccagcaatggctccaaaacactcagatctagcttcagttgagatattacagcacagttgagattgtcagcagtttcctttcctgtatcttcaaattttgtccactaggatttcatgttcagttgctagaaatttggctgtgaagatctgatctgtatgttaataactgttgcccatctgtctgaaatagttttctatacttgattcttaggatgttgtatatttgaaaagtgttcacaaaaagatattgcggtatatgatgaggtggagttggactgaatttgtaaaaccattcagaatttcaaattcccaggattagcttgttttatgaaatattctgttgcgcattgaaaattcggttctttgca

SEQ ID NO: 205765 - DNA, 2389 bp, Zea Mays
ctgccaaagcgtagttctgcgacatctaaaggagtgtggaaggcggctgccttgtccgcccggcctcttccgtctcggagcgagaaatcagcggcatcgccgcgcgcatccgaagcgcacacgacaatgcagggcggatccagcggcatcgtctatggtggcctcaagtaccaggcacggtgtatcgccgacgtgcgcgcggacgccagctcgaccaccttcctcgccgggaccctcagcctcaaggaggagaacgaggtgcacctgatccggctttcgccggcggagagtgagctggtgtgcgatggagtcttctaccaccccaacgagatctgggatctcaaatcatgtcccttcgatcacagggtcttctccacagtctacacatctggtgagggctttggtgcgtcagtttggaagatcccagagcttaatgggcaatcaaactcaccgcagcttgagcagctctttgagcttagtgggcatacgggcaagattagacggtggactcctgtttctgttggtttttggctgctctagagatatttgatctacttactgtactaaattctcatatgttttgaatttgagactttgtgtccaacatttgttggatgaaatgcaactctgtggttaatgttccttcctgacccacatggtgtttatttgtagttacttgatgattgtggccgcacttgtgtgactgcattacttgttcttgcatcacttgttcactagtcactacacatgaacattgagataagagtatagttactaagaaagatgcaataaatgttctgtcctgtcttccatgctgcacctgtttcacattacaccagcacgttttaaacaatatacaaggattatgtcccacagtgctcatgaaggacataatggatgagaatattttatttcaacttctgctgttatgtctttctataatcttttaaactagtctcacttgctctatattcttaaaagctgctagcgatgtgtatcatctttattggttcttgacacctctaagctgctcattttgtagtgtgatctggtggccacttggaaagcatgataaactaattagcattgatgaccgaaatatttttctttggaacgtagacatgtcaaataaatcagctaaggtgatctcacagggatcagctgacatgcttccaaatttgagtggtggggcttgggatccacacaatcataattcaattgcttcaatatctgattcatcacttcatttgtgggatctacgttctatggaaaaatcatctgcaattgaacatgcacatatacgggatgtggattataaccccaagaagcaacacattattgcaacaacagaagatgactttggaatttgcttgtgggatctcagaatgcttaagcttcctctgaaagacctccctgggcactcacattggacatgggctattcagcacaatcctgagtatgatgagctgcttctgagtgctggaacagattcaactgtaaatttatggttggctaaagttagcaacaatgattctgaacctaatagcccttctggttcacccaatagacaagaagaaccattacttaactcatatactgactatgaagacagcatctatggtattgcatggagctcccatgatccatcattattcgcttctttgtcctatgatggaagggttgtcttggaatcagtcaagccctacttgcagagaaaatgaatcttgctggtctaacttttggattgtaaggtgtaggatatgattcctcatttcctttatcttgtccttattgccaaagttatctcatgtcctaataaactgttctctgtccctgcagcctacaggcttgcttgttgtttatatttgatgcgttatagttttgccttatattctgtaccctcttgacaaccatttatgtgatgatgtgttttactgttgtagcaatggcagaaaaaacataataaggatgttgcagaaatcatcctgcttgacatcaggtcttcaaccctcttgattgaagccagcaatggctccaaaacactcagatctagcttcagttgagatattacagcacagttgagattgtcagcagtttcctttcctgtatcttcaaattttgtccactaggatttcatgttcagttgctagaaatttggctgtgaagatctgatctgtatgttaataactgttgcccatctgtctgaaatagttttctatacttgattcttaggatgttgtatatttgaaaagtgttcacaaaaagatattgcggtatatgatgaggtggagttggactgaatttgtaaaaccattcagaatttcaaattcccaggattagcttgttttatgaaatattctgttgcgcattgaaaattcggttctttgca

SEQ ID NO: 205766 - DNA, 2318 bp, Zea Mays
ctgccaaagcgtagttctgcgacatctaaaggagtgtggaaggcggctgccttgtccgcccggcctcttccgtctcggagcgagaaatcagcggcatcgccgcgcgcatccgaagcgcacacgacaatgcagggcggatccagcggcatcgtctatggtggcctcaagtaccaggcacggtgtatcgccgacgtgcgcgcggacgccagctcgaccaccttcctcgccgggaccctcagcctcaaggaggagaacgaggtgcacctgatccggctttcgccggcggagagtgagctggtgtgcgatggagtcttctaccaccccaacgagatctgggatctcaaatcatgtcccttcgatcacagggtcttctccacagtctacacatctggtgagggctttggtgcgtcagtttggaagatcccagagcttaatgggcaatcaaactcaccgcagcttgagcagctctttgagcttagtgggcatacgggcaagattagacggtggactcctgtttctgttggtttttggctgctctagagatatttgatctacttactgtactaaattctcatatgttttgaatttgagactttgtgtccaacatttgttggatgaaatgcaactctgtggttaatgttccttcctgacccacatggtgtttatttgtagttacttgatgattgtggccgcacttgtgtgactgcattacttgttcttgcatcacttgttcactagtcactacacatgaacattgagataagagtatagttactaagaaagatgcaataaatgttctgtcctgtcttccatgctgcacctgtttcacattacaccagcacgttttaaacaatatacaaggattatgtcccacagtgctcatgaaggacataatggatgagaatattttatttcaacttctgctgttatgtctttctataatcttttaaactagtctcacttgctctatattcttaaaagctgctagcgatgtgtatcatctttattggttcttgacacctctaagctgctcattttgtagtgtgatctggtggccacttggaaagcatgataaactaattagcattgatgaccgaaatatttttctttggaacgtagacatgtcaaataaatcagctaaggtgatctcacagggatcagctgacatgcttccaaatttgagtggtggggcttgggatccacacaatcataattcaattgcttcaatatctgattcatcacttcatttgtgggatctacgttctatggaaaaatcatctgcaattgaacatgcacatatacgggatgtggattataaccccaagaagcaacacattattgcaacaacagaagatgactttggaatttgcttgtgggatctcagaatgcttaagcttcctctgaaagacctccctgggcactcacattggacatgggctattcagcacaatcctgagtatgatgagctgcttctgcccttctggttcacccaatagacaagaagaaccattacttaactcatatactgactatgaagacagcatctatggtattgcatggagctcccatgatccatcattattcgcttctttgtcctatgatggaagggttgtcttggaatcagtcaagccctacttgcagagaaaatgaatcttgctggtctaacttttggattgtaaggtgtaggatatgattcctcatttcctttatcttgtccttattgccaaagttatctcatgtcctaataaactgttctctgtccctgcagcctacaggcttgcttgttgtttatatttgatgcgttatagttttgccttatattctgtaccctcttgacaaccatttatgtgatgatgtgttttactgttgtagcaatggcagaaaaaacataataaggatgttgcagaaatcatcctgcttgacatcaggtcttcaaccctcttgattgaagccagcaatggctccaaaacactcagatctagcttcagttgagatattacagcacagttgagattgtcagcagtttcctttcctgtatcttcaaattttgtccactaggatttcatgttcagttgctagaaatttggctgtgaagatctgatctgtatgttaataactgttgcccatctgtctgaaatagttttctatacttgattcttaggatgttgtatatttgaaaagtgttcacaaaaagatattgcggtatatgatgaggtggagttggactgaatttgtaaaaccattcagaatttcaaattcccaggattagcttgttttatgaaatattctgttgcgcattgaaaattcggttctttgca

SEQ ID NO: 205767 - DNA, 2392 bp, Zea Mays
ctgccaaagcgtagttctgcgacatctaaaggagtgtggaaggcggctgccttgtccgcccggcctcttccgtctcggagcgagaaatcagcggcatcgccgcgcgcatccgaagcgcacacgacaatgcagggcggatccagcggcatcgtctatggtggcctcaagtaccaggcacggtgtatcgccgacgtgcgcgcggacgccagctcgaccaccttcctcgccgggaccctcagcctcaaggaggagaacgagtaggtgcacctgatccggctttcgccggcggagagtgagctggtgtgcgatggagtcttctaccaccccaacgagatctgggatctcaaatcatgtcccttcgatcacagggtcttctccacagtctacacatctggtgagggctttggtgcgtcagtttggaagatcccagagcttaatgggcaatcaaactcaccgcagcttgagcagctctttgagcttagtgggcatacgggcaagattagacggtggactcctgtttctgttggtttttggctgctctagagatatttgatctacttactgtactaaattctcatatgttttgaatttgagactttgtgtccaacatttgttggatgaaatgcaactctgtggttaatgttccttcctgacccacatggtgtttatttgtagttacttgatgattgtggccgcacttgtgtgactgcattacttgttcttgcatcacttgttcactagtcactacacatgaacattgagataagagtatagttactaagaaagatgcaataaatgttctgtcctgtcttccatgctgcacctgtttcacattacaccagcacgttttaaacaatatacaaggattatgtcccacagtgctcatgaaggacataatggatgagaatattttatttcaacttctgctgttatgtctttctataatcttttaaactagtctcacttgctctatattcttaaaagctgctagcgatgtgtatcatctttattggttcttgacacctctaagctgctcattttgtagtgtgatctggtggccacttggaaagcatgataaactaattagcattgatgaccgaaatatttttctttggaacgtagacatgtcaaataaatcagctaaggtgatctcacagggatcagctgacatgcttccaaatttgagtggtggggcttgggatccacacaatcataattcaattgcttcaatatctgattcatcacttcatttgtgggatctacgttctatggaaaaatcatctgcaattgaacatgcacatatacgggatgtggattataaccccaagaagcaacacattattgcaacaacagaagatgactttggaatttgcttgtgggatctcagaatgcttaagcttcctctgaaagacctccctgggcactcacattggacatgggctattcagcacaatcctgagtatgatgagctgcttctgagtgctggaacagattcaactgtaaatttatggttggctaaagttagcaacaatgattctgaacctaatagcccttctggttcacccaatagacaagaagaaccattacttaactcatatactgactatgaagacagcatctatggtattgcatggagctcccatgatccatcattattcgcttctttgtcctatgatggaagggttgtcttggaatcagtcaagccctacttgcagagaaaatgaatcttgctggtctaacttttggattgtaaggtgtaggatatgattcctcatttcctttatcttgtccttattgccaaagttatctcatgtcctaataaactgttctctgtccctgcagcctacaggcttgcttgttgtttatatttgatgcgttatagttttgccttatattctgtaccctcttgacaaccatttatgtgatgatgtgttttactgttgtagcaatggcagaaaaaacataataaggatgttgcagaaatcatcctgcttgacatcaggtcttcaaccctcttgattgaagccagcaatggctccaaaacactcagatctagcttcagttgagatattacagcacagttgagattgtcagcagtttcctttcctgtatcttcaaattttgtccactaggatttcatgttcagttgctagaaatttggctgtgaagatctgatctgtatgttaataactgttgcccatctgtctgaaatagttttctatacttgattcttaggatgttgtatatttgaaaagtgttcacaaaaagatattgcggtatatgatgaggtggagttggactgaatttgtaaaaccattcagaatttcaaattcccaggattagcttgttttatgaaatattctgttgcgcattgaaaattcggttctttgca

SEQ ID NO: 205768 - DNA, 2416 bp, Zea Mays
agtccacaaagcccagcaagcagcccaaccgatcccaatcccaaattcccaacacgaagcccagccagcccttccccactaggctagctagctagtagtatcttttttagtacgtggccagccgacaggcgcttgtcggagtcgagcacttgagtccccttctctccttcccttcacctcccgattgccgccgccaccaccaggcaccaggcccaccaccgcgtctcccaaccccaagcactcgacgccatggtgtcggatgccagcaagaagaaggccgcccagaagaaggccgccgcggctgccaagaggggaggcaaggccgcggcggcgtcctcctcgtcgtcgtctgcggccgcggccgcggccgtcgacaaggcggcgaacggcgtcgcggcgctcaagctatcggaccggacctgcaccggcgtcctcgcgtctcacccgctctcccgcgatatccacatagagtctctctctttaacattccatgggcatgaccttattgtggattctgagttggagctgaactacgggaggcgatacggtttgcttgggatgaacggctgtgggaaatctactcttctcacagcaataggctgcagagaacttcctatccctgaacacatggacatataccatctaagccatgagattgaagcttctgacatgtccgcactgcaagctgttgttacttgtgacgaagaaagagtgaaattggaaaaggaagctgaaattttggctgcacaggatgatggtggtggtgaagctttggaacgtgtttatgagcgtctagatgcaatggatgctggaactgcagaaaagcgggctgctgaattattattcggtctgggctttaacaaacaaatgcagacaaagaaaactaaagatttctctggaggttggcgtatgaggattgctttggcaagagcactttttatgaatccaacgatccttttgcttgatgagcccacaaaccatctagatcttgaggcttgtgtctggttggaagagacactgaagaaatttgaccgcatacttgttgtcatatcacactctcaagattttctaaatggagtgtgcactaacattatccatatgcaaagcaagaagctcaagttatacactggtaactacgatcagtatgttcaaactcgctctgagcttgaagagaatcaaatgaagcagtacaaatgggagcaggaacagattgcttcaatgaaggagtacattgctcgcttcggtcatggttctgcaaagcttgctcgtcaggctcagagcaaagagaaaactcttgcaaagatggagcgaggtggtctcacagagaaggttgttagggacagagttctagtgttccggtttacagatgttggcaagcttcctccgcccgtgcttcaatttgttgaagtcaagtttggggaagagcactcttctgaagcttatgactggtgaccttgttccattagatggcatggttcggcgccacaatcacctgcgcattgcgcagtaccatcagcatctggcggagaagctggacctggacatgtcagccctggcttacatgatgaaggaataccctgggactgaagaagaaaagatgcgtgccgctgttggcaggttcggcctgtcaggaaaggcgcaggtgatgccgatgaagaatctttctgatgggcaaaggagccgcgtcatctttgcatggctggcatataggcagccgcaactgctactgcttgatgagccgacaaaccatctggatatcgagaccattgactcactggcagaggcgctgaatgagtgggatggtggtttggtcttggtgagccacgatttcaggctgatcaaccaggtcgctcaggagatctgggtgtgtgagaatcaagaggtgacaaggtgggaaggcgatatcatggatttcaaggcacacttgaagagcaaggctggtttatctgattagaatgcttttctagtaaccatgaactttttaactctgtatgatgaagtccctgttttacagtagcgaactatcaaatatactgttagggatagtttggtaactacaaatccggagggggttggaggggctagaatccccttcttattcaattttgaataagtctattctctccaatcctctccggttttctggctcccaaactaaccccttcgggattgaagggtattgaagaggaaattagttcatttccaccttaattccctcccaatcccgaaggggatttgaggttcacaaagtagcgaatgtgtcagactcctacttccctcgcaaccatactaccttgtactacctgaaatttttatttatatatatatttgaaatgttattatgtgttccgtaagctttgtaggttttgtaagtttggatttgtcaaagttactgcatattatgatcattgtgaac

SEQ ID NO: 205769 - DNA, 1908 bp, Zea Mays
ttggaatcgccgacatgtttgattgatcgctagagatctccactgctttgtttcattccacggcggactgacctgttggttttgatatagagtctctctctttaacattccatgggcatgaccttattgtggattctgagttggagctgaactacgggaggcgatacggtttgcttgggatgaacggctgtgggaaatctactcttctcacagcaataggctgcagagaacttcctatccctgaacacatggacatataccatctaagccatgagattgaagcttctgacatgtccgcactgcaagctgttgttacttgtgacgaagaaagagtgaaattggaaaaggaagctgaaattttggctgcacaggatgatggtggtggtgaagctttggaacgtgtttatgagcgtctagatgcaatggatgctggaactgcagaaaagcgggctgctgaattattattcggtctgggctttaacaaacaaatgcagacaaagaaaactaaagatttctctggaggttggcgtatgaggattgctttggcaagagcactttttatgaatccaacgatccttttgcttgatgagcccacaaaccatctagatcttgaggcttgtgtctggttggaagagacactgaagaaatttgaccgcatacttgttgtcatatcacactctcaagattttctaaatggagtgtgcactaacattatccatatgcaaagcaagaagctcaagttatacactggtaactacgatcagtatgttcaaactcgctctgagcttgaagagaatcaaatgaagcagtacaaatgggagcaggaacagattgcttcaatgaaggagtacattgctcgcttcggtcatggttctgcaaagcttgctcgtcaggctcagagcaaagagaaaactcttgcaaagatggagcgaggtggtctcacagagaaggttgttagggacagagttctagtgttccggtttacagatgttggcaagcttcctccgcccgtgcttcaatttgttgaagtcaagtttgggtatacaccagataatctcatatacaagagccttgactttggtgttgatcttgactctagaatcgcattggttggtcccaacggggcagggaagagcactcttctgaagcttatgactggtgaccttgttccattagatggcatggttcggcgccacaatcacctgcgcattgcgcagtaccatcagcatctggcggagaagctggacctggacatgtcagccctggcttacatgatgaaggaataccctgggactgaagaagaaaagatgcgtgccgctgttggcaggttcggcctgtcaggaaaggcgcaggtgatgccgatgaagaatctttctgatgggcaaaggagccgcgtcatctttgcatggctggcatataggcagccgcaactgctactgcttgatgagccgacaaaccatctggatatcgagaccattgactcactggcagaggcgctgaatgagtgggatggtggtttggtcttggtgagccacgatttcaggctgatcaaccaggtcgctcaggagatctgggtgtgtgagaatcaagaggtgacaaggtgggaaggcgatatcatggatttcaaggcacacttgaagagcaaggctggtttatctgattagaatgcttttctagtaaccatgaactttttaactctgtatgatgaagtccctgttttacagtagcgaactatcaaatatactcgaatgtgtcagactcctacttccctcgcaaccatactaccttgtactacctgaaatttttatttatatatatatttgaaatgttattatgtgttccgtaagctttgtaggttttgtaagtttggatttgtcaaagttactgcatattatgatcattgtgaac

SEQ ID NO: 205770 - DNA, 811 bp, Zea Mays
tttgaattggaatatcttaaagatgtcgtcgttttgataatgaaaaatgtatcgaatacaattcttccaagagatatacgtgtactgggttggtgtcatgttccagcatattttaatgcaagatgcggtcgctggcgctcatgctgacgtggtccgtcgccaccgtgctcactctcctcgccgtgggctcgccccatccaccacctcagcaatgctagaacggaaaaccaggttgtgcaaaagagtacttgcgactttgaaggtcttatggtcagtaatagaggatatgacgaagtacatatcaccagaggatgcaaaaagattgatatctaaagaggtatatactagagcgaagagcgaacaacaatctaagattgcagcaagaaaggtccagcaagaaccagattatgtacatgtatatgtgtggatagaactaaccgccgatattatcctaaatctaagcacggtcacccacaaaaaatgtgtaatttgcttcttcccagacatacgaaatgtgttatgcggactatgttggctattggaaaggcattctaaatgccgtctgtaatgtttgatggttacaaactattgtcgtgctatgtaatatgcggtcttgacataaccgctaggtttgtgatgttgttgcatgttacagctgcaactttatattattgtgccatgtgttatttgtgttcttttcttttttgctatcattatgtctctctctattacaagagaaaataatgtagtatctataactttggttaagcttcattttcagcggttgatcctaacacctccaactgtaggg

SEQ ID NO: 205771 - DNA, 1485 bp, Zea Mays
agctaataggtcgagtgcttcgctaccagccagccagtagtatcgagtatactactcacgccatcttgcactcctccgacaccgaggcagctccaagccatggccatggagaaggctgcctcctccctcttaggcggaggcggcggggagccggcagcgactgtgaaatctatcttcatataccctatcaagtcctgcaggggtctcgccgtgtcacaggcgctcatcatctctaccgggttccggtgggatcggcagtgggtggtggtgaacggcaaagggcgagcatacacccagagggtggaacccaagctcgctctggtccaggtagagttgccgccggaggccttcgccgaggactggcagcccacgccctacgaccacctggttatcagagcacccggaatggacacgctgaagatacctctagcagcggaacacaccacaatcgatgatgtctctgtgtgggagtggtctggctctgcgtacgatgaaggggctgaagtgtctgagtggttctccacttactttgggaagccaagtcgactagtgcgcttcaaagaagcatcggaaactaggccaaccgatccagattatgcccaaggttataagatcatgttcaccgattgcttcccatttctgatagcttctcagggttcactggatgcactaaatgagattcttaaagaacctgtaccaatgaaccgcttcagaccaaatattttagtggatggatgccacccatactcagaggacctgtggaaaaccataaagataaacaacctaacattcctaggtgtgaagttatgcaaccgctgcaaggtgccaaccattaatcaagaggatggagtacctggtactgaaccaactgaaactctacagacttttcggtccgaccaagtgcttcgtccaagccacaaaaataaacgacaggtgtactttgggcagaatttagtctgcaaggaatctctatcaggtgaaggaaaggtcatcaaggttggcgatccagtttatgttgtgcaggcattcgcttcttctaatgaagccccagcctgattcagggttaaaagtagtgacagggtgttcaaaataagtgagtttgtcttgcacactggataaacaaaaaacagtgggctgttgaaactgttaatgagacaataaaacacttgccgctggacagtaattatgaattagctgtaccttcatcaggggcttatttacttctatgatattacataccttgtacatcagaataatacaaaacaataagaagtgccaaaaaaggaggtgagttagaagagactgtctaaataggatggaatggatggctgatggagtcttttgtaccctatacaaaatcagtgacccactgcaagttccttcagtaacatcagaacagcatgtttgtctatagttccaaggatcttccaaagctcttcaggccacgattgatactaaagaaattgtcacatgaacagtgcagtg

SEQ ID NO: 205772 - DNA, 2252 bp, Zea Mays
agctaataggtcgagtgcttcgctaccagccagccagtagtatcgagtatactactcacgccatcttgcactcctccgacaccgaggcagctccaagccatggccatggagaaggctgcctcctccctcttaggcggaggcggcggggagccggcagcgactgtgaaatctatcttcatataccctatcaagtcctgcaggggtctcgccgtgtcacaggcgctcatcatctctaccgggttccggtgggatcggcagtgggtggtggtgaacggcaaagggcgagcatacacccagagggtggaacccaagctcgctctggtccaggtagagttgccgccggaggccttcgccgaggactggcagcccacgccctacgaccacctggttatcagagcacccggaatggacacgctgaagatacctctagcagcggaacacaccacaatcgatgatgtctctgtgtgggagtggtctggctctgcgtacgatgaaggggctgaagtgtctgagtggttctccacttactttgggaagccaagtcgactagtgcgcttcaaagaagcatccgaaactaggccaactgatccatattacggccaaggccaaggttacaagatcatgttcaccgatcgcttcccatttctgatagcctctcagggttcattggacgcactaaatgagattcttaaagaacctgtaccaatgaaccgcttcagaccaaatattttagtggatggatgcaacccatactcagaggacctgtggaaaaccataaagataaggaacaattggatctataccattaaaagatccaaactttaggtgccaagcattaatcaagaggatggaatacctggcactgaaccaaatgaaactctacagacatttcggtccgaccaagtgcttcgtccaagccacaaaaataaacgacaggtgtactttggggtgaatttagtctgcaaggaatctctatcaggaaaggacgaaggaaagatcatcaagggttccggtgggatcggcagtgggtggtggtgaacgccaaagggcgagcatacacccagagggtggagcccaagcttgctctggtccaggtggagttgccgccggaggccttcgctgagaactggcagcccacgcccgacgaccacctggttatcagagcacccggaatggacacactgaagatacctctaataacggaacacaccacaatcgatgatgtctctgtctgggagtggtctggctctgcgtatgatgaaggggctgaagcgtctgaatggttctccacttactttgggaagccaagtcgactagtgcgcttcaaagaagcatcggaaactaggccaaccgatccagattatgcccaaggttataagatcatgttcaccgattgcttcccatttctgatagcttctcagggttcactggatgcactaaatgagattcttaaagaacctgtaccaatgaaccgcttcagaccaaatattttagtggatggatgccacccatactcagaggacctgtggaaaaccataaagataaacaacctaacattcctaggtgtgaagttatgcaaccgctgcaaggtgccaaccattaatcaagaggatggagtacctggtactgaaccaactgaaactctacagacttttcggtccgaccaagtgcttcgtccaagccacaaaaataaacgacaggtgtactttgggcagaatttagtctgcaaggaatctctatcaggtgaaggaaaggtcatcaaggttggcgatccagtttatgttgtgcaggcattcgcttcttctaatgaagccccagcctgattcagggttaaaagtagtgacagggtgttcaaaataagtgagtttgtcttgcacactggataaacaaaaaacagtgggctgttgaaactgttaatgagacaataaaacacttgccgctggacagtaattatgaattagctgtaccttcatcaggggcttatttacttctatgatattacataccttgtacatcagaataatacaaaacaataagaagtgccaaaaaaggaggtgagttagaagagactgtctaaataggatggaatggatggctgatggagtcttttgtaccctatacaaaatcagtgacccactgcaagttccttcagtaacatcagaacagcatgtttgtctatagttccaaggatcttccaaagctcttcaggccacgattgatactaaagaaattgtcacatgaacagtgcagtg

SEQ ID NO: 205773 - DNA, 1411 bp, Zea Mays
gtatcatcctgctggcgcggcacaagacgccaccgagccaagaatttgcatcctcatcctgcggctgtcagtgtcaagcagccaggctcaggggtaaggtttcagcaattcagctccctcgcctccgccgcggcaccggcactacgagtgcttcgctaccagccagccagcacactctacgagtcgccatcttccactccaccgaggcagctccaagccatggccatggagaaggccgcctccttcctctcctccctcttaggcggcggcggccttcgctgagaactggcagcccacgcccgacgaccacctggttatcagagcacccggaatggacacactgaagatacctctaataacggaacacaccacaatcgatgatgtctctgtctgggagtggtctggctctgcgtatgatgaaggggctgaagcgtctgaatggttctccacttactttgggaagccaagtcgactagtgcgcttcaaagaagcatcggaaactaggccaaccgatccagattatgcccaaggttataagatcatgttcaccgattgcttcccatttctgatagcttctcagggttcactggatgcactaaatgagattcttaaagaacctgtaccaatgaaccgcttcagaccaaatattttagtggatggatgccacccatactcagaggacctgtggaaaaccataaagataaacaacctaacattcctaggtgtgaagttatgcaaccgctgcaaggtgccaaccattaatcaagaggatggagtacctggtactgaaccaactgaaactctacagacttttcggtccgaccaagtgcttcgtccaagccacaaaaataaacgacaggtgtactttgggcagaatttagtctgcaaggaatctctatcaggtgaaggaaaggtcatcaaggttggcgatccagtttatgttgtgcaggcattcgcttcttctaatgaagccccagcctgattcagggttaaaagtagtgacagggtgttcaaaataagtgagtttgtcttgcacactggataaacaaaaaacagtgggctgttgaaactgttaatgagacaataaaacacttgccgctggacagtaattatgaattagctgtaccttcatcaggggcttatttacttctatgatattacataccttgtacatcagaataatacaaaacaataagaagtgccaaaaaaggaggtgagttagaagagactgtctaaataggatggaatggatggctgatggagtcttttgtaccctatacaaaatcagtgacccactgcaagttccttcagtaacatcagaacagcatgtttgtctatagttccaaggatcttccaaagctcttcaggccacgattgatactaaagaaattgtcacatgaacagtgcagtg

SEQ ID NO: 205774 - DNA, 1410 bp, Zea Mays
gtatcatcctgctggcgcggcacaagacgccaccgagccaagaatttgcatcctcatcctgcggctgtcagtgtcaagcagccaggctcaggggtaaggtttcagcaattcagctccctcgcctccgccgcggcaccggcactacgagtgcttcgctaccagccagccagcacactctacgagtcgccatcttccactccaccgaggcagctccaagccatggccatggagaaggccgcctccttcctctcctccctcttaggcggcggcggcggggagccggcggcgactgtgaaatctatcttcatataccctatcaaagcacccggaatggacacactgaagatacctctaataacggaacacaccacaatcgatgatgtctctgtctgggagtggtctggctctgcgtatgatgaaggggctgaagcgtctgaatggttctccacttactttgggaagccaagtcgactagtgcgcttcaaagaagcatcggaaactaggccaaccgatccagattatgcccaaggttataagatcatgttcaccgattgcttcccatttctgatagcttctcagggttcactggatgcactaaatgagattcttaaagaacctgtaccaatgaaccgcttcagaccaaatattttagtggatggatgccacccatactcagaggacctgtggaaaaccataaagataaacaacctaacattcctaggtgtgaagttatgcaaccgctgcaaggtgccaaccattaatcaagaggatggagtacctggtactgaaccaactgaaactctacagacttttcggtccgaccaagtgcttcgtccaagccacaaaaataaacgacaggtgtactttgggcagaatttagtctgcaaggaatctctatcaggtgaaggaaaggtcatcaaggttggcgatccagtttatgttgtgcaggcattcgcttcttctaatgaagccccagcctgattcagggttaaaagtagtgacagggtgttcaaaataagtgagtttgtcttgcacactggataaacaaaaaacagtgggctgttgaaactgttaatgagacaataaaacacttgccgctggacagtaattatgaattagctgtaccttcatcaggggcttatttacttctatgatattacataccttgtacatcagaataatacaaaacaataagaagtgccaaaaaaggaggtgagttagaagagactgtctaaataggatggaatggatggctgatggagtcttttgtaccctatacaaaatcagtgacccactgcaagttccttcagtaacatcagaacagcatgtttgtctatagttccaaggatcttccaaagctcttcaggccacgattgatactaaagaaattgtcacatgaacagtgcagtg

SEQ ID NO: 205775 - DNA, 1351 bp, Zea Mays
gtatcatcctgctggcgcggcacaagacgccaccgagccaagaatttgcatcctcatcctgcggctgtcagtgtcaagcagccaggctcagggggttccggtgggatcggcagtgggtggtggtgaacgccaaagggcgagcatacacccagagggtggagcccaagcttgctctggtccaggtggagttgccgccggaggccttcgctgagaactggcagcccacgcccgacgaccacctggttatcagagcacccggaatggacacactgaagatacctctaataacggaacacaccacaatcgatgatgtctctgtctgggagtggtctggctctgcgtatgatgaaggggctgaagcgtctgaatggttctccacttactttgggaagccaagtcgactagtgcgcttcaaagaagcatcggaaactaggccaaccgatccagattatgcccaaggttataagatcatgttcaccgattgcttcccatttctgatagcttctcagttgtactgcagggttcactggatgcactaaatgagattcttaaagaacctgtaccaatgaaccgcttcagaccaaatattttagtggatggatgccacccatactcagaggacctgtggaaaaccataaagataaacaacctaacattcctaggtgtgaagttatgcaaccgctgcaaggtgccaaccattaatcaagaggatggagtacctggtactgaaccaactgaaactctacagacttttcggtccgaccaagtgcttcgtccaagccacaaaaataaacgacaggtgtactttgggcagaatttagtctgcaaggaatctctatcaggtgaaggaaaggtcatcaaggttggcgatccagtttatgttgtgcaggcattcgcttcttctaatgaagccccagcctgattcagggttaaaagtagtgacagggtgttcaaaataagtgagtttgtcttgcacactggataaacaaaaaacagtgggctgttgaaactgttaatgagacaataaaacacttgccgctggacagtaattatgaattagctgtaccttcatcaggggcttatttacttctatgatattacataccttgtacatcagaataatacaaaacaataagaagtgccaaaaaaggaggtgagttagaagagactgtctaaataggatggaatggatggctgatggagtcttttgtaccctatacaaaatcagtgacccactgcaagttccttcagtaacatcagaacagcatgtttgtctatagttccaaggatcttccaaagctcttcaggccacgattgatactaaagaaattgtcacatgaacagtgcagtg

SEQ ID NO: 205776 - DNA, 1554 bp, Zea Mays
gtatcatcctgctggcgcggcacaagacgccaccgagccaagaatttgcatcctcatcctgcggctgtcagtgtcaagcagccaggctcaggggtaaggtttcagcaattcagctccctcgcctccgccgcggcaccggcactacgagtgcttcgctaccagccagccagcacactctacgagtcgccatcttccactccaccgaggcagctccaagccatggccatggagaaggccgcctccttcctctcctccctcttaggcggcggcggcggggagccggcggcgactgtgaaatctatcttcatataccctatcaagtcctgcaggggtcttgccgtgtcacaggcgcccatcacctccactgggttccggtgggatcggcagtgggtggtggtgaacgccaaagggcgagcatacacccagagggtggagcccaagcttgctctggtccaggtggagttgccgccggaggccttcgctgagaactggcagcccacgcccgacgaccacctggttatcagagcacccggaatggacacactgaagatacctctaataacggaacacaccacaatcgatgatgtctctgtctgggagtggtctggctctgcgtatgatgaaggggctgaagcgtctgaatggttctccacttactttgggaagccaagtcgactagtgcgcttcaaagaagcatcggaaactaggccaaccgatccagattatgcccaaggttataagatcatgttcaccgattgcttcccatttctgatagcttctcagggttcactggatgcactaaatgagattcttaaagaacctgtaccaatgaaccgcttcagaccaaatattttagtggatggatgccacccatactcagaggacctgtggaaaaccataaagataaacaacctaacattcctaggtgtgaagttatgcaaccgctgcaagacttttcggtccgaccaagtgcttcgtccaagccacaaaaataaacgacaggtgtactttgggcagaatttagtctgcaaggaatctctatcaggtgaaggaaaggtcatcaaggttggcgatccagtttatgttgtgcaggcattcgcttcttctaatgaagccccagcctgattcagggttaaaagtagtgacagggtgttcaaaataagtgagtttgtcttgcacactggataaacaaaaaacagtgggctgttgaaactgttaatgagacaataaaacacttgccgctggacagtaattatgaattagctgtaccttcatcaggggcttatttacttctatgatattacataccttgtacatcagaataatacaaaacaataagaagtgccaaaaaaggaggtgagttagaagagactgtctaaataggatggaatggatggctgatggagtcttttgtaccctatacaaaatcagtgacccactgcaagttccttcagtaacatcagaacagcatgtttgtctatagttccaaggatcttccaaagctcttcaggccacgattgatactaaagaaattgtcacatgaacagtgcagtg

SEQ ID NO: 205777 - DNA, 4670 bp, Zea Mays
atcgccgcggttgctgcacttgggctcttcctcgccaagaggaacacaaacagagctcagaacgtcacaagaagtttatcggagaagttgcttgcattcggtgtgcctggttttgcagcctgcctttctttgcttggattgactatgctagctaagaagaaatttgaagggaaggatgttaaaaattatgaactattcttcacatgctcccagtttattgcatggatgtctctaagtcttgtccgtgtcagtggggcttggtttgaaatcctctataacccaataatgtgcttcttctggatattgaaggttattctagagatacctcatttgcaatacaagcttatcttactgaaggcagcgtcatcttttatcgagattatctcattttgtactgcaaccatatttggactctttgtcactgtggctgctgtaataggccaatcaggcatcaaaagagaagcgaactctattgaagccccactcattccaaataatgaaaaggctgagggtgaaactacagacatgataaaggactacagtttgtgggaactgttgactttcaaattcgttaatccagtgatggacattggtatcacaagacaacttgacttcacagatttacttgagttaccaaatgagctcagagctacctcctgttatgacaaacttctgtcttcctggactgctgaatatcaaaaccaccatgataactcatctctacttagagccatgtctaattcttatggatggacatacttgcgtttgggccttcttaaggtattaaatgacagcatcggttttgttagccctctgttgcttaacaagtttataagacttcttcagcaaggttctgatggcatggatggatatattcttgccatttccttaggattgacttctattatcaagtcctttttagatagccaatactcatttcgtctagcaaagctcaagttgatgttacgatcaagcatcatggggataatttattggaagtgcctatgtctcagtctagctgagcgttctaggttttctgaaggtgagatacaaaccttcatgtctgttgatgctgatcgcacaataaacttgtgtaacagccttcatgatgcctggagcttgccactacagattggagttgctctttatctgttatatacacaagtcaattatgcttttctatctgggcttgcaataacaatcatactaataccagtgaacaaatggatttctacaaggattgctggtgcaacagaaaagatgatgaagcaaaaagacaggaggataagctgtgcaggggagctcttagcacatattagaacagtgaagatgtacagttgggagaaactattcactgaacgtttggtggaaagaagagaatcagaagtgaagcatctcgcggtatttacttgtgttgcactctttaacacactaatatcaccgctaaactcatttccatgggttattaatgggatgattgatgctgttatctctagcagacggctgagtaattatttatctactccagagcatcactcatccgagttaaatgcctctgctgaccttttaaaccaccactttaagagatataccaaagtaactcataatccaatggccatcgtctttcagaatgtatcctgttcttggtctagcagctctgttgctgagctgaacatagttctcagagatatatctttgcagctacaaaaagggttctttattgcaattgtaggcgaggttggttctggtaaatcatctttattgaacacagtcattggagagactcgtgtcatcagtggttctattagctcctgtggttcaattgcctatgtaccacaggtaccatggatcttatctggctctttacgagataatattttgcttggtaaagaatttgatccaaggagatacgaagaagtaatagaggcatgtgcgcttcatgttgacatatcggcaatgaccagaggagatatgtcacatattggagagaaaggtaccaacttatctggtggacaaagagctcgtctagcattggcaagggctttgtaccacaattctgatgtatacttgtttgatgacatccttagcgcggttgactcccaagttgcttcgtgcatcctggaaaaggctattatggggcaccaactaatgcagaaaacaagattactaagcacacacaatcttcaggccatttttgctgcagatatgattgtagtcatggctaatgggctcatcaagtggttcgggacaccgaaatctttcttggcaactccatattcaagaacctctaagccagataattcaagtcctacctcatttgcagcttctgtgaaagataaaacaccaatggtaacatgtgaactgaaacctgatgctgtacttgaagattcagtggtttgttatgaggagacaaaagatcgggtagaagaagaggcaaggaaacaaggcaaggttgagcttggtgtctacaaaaaatatgcagcatttgtggggtggtcaactgttgttttaatattcctaagcgcattcttaatgcaaacatctcgtaacggcaatgatatttggttaacttactgggttgataccagcacaggcaccaacaacacgaggttttatcttattatccttgctatgtttggcatcatcaattctcttttcactttgggaagggcattttcttttgcattcggtggcctccgtgcagcaatccatattcatgcatctcttcttgaaaatatcatcagtgcaccgatttgtttctttgaccaaaatcccagtggtcggatcctaaacagattatcgtcagacctctatgccgttgatgattctcttcctttcatcctcaatatatttgtggccaacttcttcagcttattcggcactctggttgttttgtcttattcacaggtttccttcttactcgtcttacttccactctggcttatctataggaagttgcagttctattacaggtctacatcacgtgaagtacggcgacttgatagcgttgctcgttcaccaatctattcatctttcacagagacacttgatggttcatcaacaataagagctttccagaatgaagggttcttctttgaaagattcatccaacatgtgacactatatcagaaaacgtcctacactgagctcgttgctagtttgtggctctcgttgagactccagttgttggcaggttttatcattctgtttatcgccatgatggctactatcagcttccatagcagttctcttgtcaactttgcaacacctggactggtgggcctggctttatcatatgcagcaccggtagtatcattgctcaatggcttcttaaccacctttacagagacagaaaaggaaatgatctccgtggaaagggttgacgagtacattggcatacctcaagaagaactccagggatcagaacctccaccgagaagctggccaacggaagggaagatcgagtttgaacatgtaacactgaagtacaagccagagctcccacctgctttaagtgacgtttcgttccttattgcatcaggcatgcaggttggaataataggaaggactggagcaggcaaatcaagtatactgaatgcacttttccgcttagttccaatttggaacggccgcatattagtagatggcattgatttggctaaagttgccgtccgagaactccgtggacattttgcagtggtcccacagagcccctttttgtttgatgggtctttgagggaaaacctggatcctttcaatacaaaaacagatcttaggatatgggaagttcttgaaaactgccatatgaagggacaggtagaatcaataggtggacttgacattcatgtgaaagaaagcggtgcatctttttcagtagggcagcggcagctcctatgccttgcccgagccatcctaaaatcatccaaggtgctttgtctagatgaatgcacagccaatgttgacaaccaaacagcctccctgttgcaaaatactatttctgctgaatgcaaaggcatgactgttctcaccatagcgcatcgtatttcaacagtgatgaagatggacaatattctagttcttgatcaaggaaaactggttgaagaaggaaacccagaagcccttatgaatcacagacactcaagattcgctcagcatgtcaaggcctctcagatgtgattatgggagcatggtttcctactatgttatgctaggcctttttacttttttagagttagaacttagacaatatttactatggagcaatgagcttgtaagaacagttccgaattgacaccactagctaatatggctaatagaggctttgaccctctccgaatcattgaacatgatgatcccctagctgttaaaattccatgctttgttactaacagggaatggatctcagaacctgtttctaaacaagtactgttcataaaacccttatttcatcgattgcttttcagttctcatggtttttgttttggtaaggagtagctgtattcaagtctagtggcatggtgcttgattgctcgctaaaagttaggcaatgcaaggatggattgaaatgcaaaaggcacaacgggcaatgagggaaaatgcaggggatttaataaccatctgcagtttcatttcacaagcacaactgaacgaggtagcaaagtaaccctaac

SEQ ID NO: 205778 - DNA, 4490 bp, Zea Mays
tggatattgaaggttattctagagatacctcatttgcaatacaagcttatcttactgaaggcagcgtcatcttttatcgagattatctcattttgtactgcaaccatatttggactctttgtcactgtggctgctgtaataggccaatcaggcatcaaaagagaagcgaactctattgaagccccactcattccaaataatgaaaaggctgagggtgaaactacagacatgataaaggactacagtttgtgggaactgttgactttcaaattcgttaatccagtgatggacattggtatcacaagacaacttgacttcacagatttacttgagttaccaaatgagctcagagctacctcctgttatgacaaacttctgtcttcctggactgctgaatatcaaaaccaccatgataactcatctctacttagagccatgtctaattcttatggatggacatacttgcgtttgggccttcttaaggtattaaatgacagcatcggttttgttagccctctgttgcttaacaagtttataagacttcttcagcaaggttctgatggcatggatggatatattcttgccatttccttaggattgacttctattatcaagtcctttttagatagccaatactcatttcgtctagcaaagctcaagttgatgttacgatcaagcatcatggggataatttattggaagtgcctatgtctcagtctagctgagcgttctaggttttctgaaggtgagatacaaaccttcatgtctgttgatgctgatcgcacaataaacttgtgtaacagccttcatgatgcctggagcttgccactacagattggagttgctctttatctgttatatacacaagtcaattatgcttttctatctgggcttgcaataacaatcatactaataccagtgaacaaatggatttctacaaggattgctggtgcaacagaaaagatgatgaagcaaaaagacaggaggataagctgtgcaggggagctcttagcacatattagaacagtgaagatgtacagttgggagaaactattcactgaacgtttggtggaaagaagagaatcagaagtgaagcatctcgcgacaagaaaatatctggatgcttggtgcgtctatttctgggcaaccacaccgacattgttctccctttccaccttttctatttttgcaataacgggacacgcattggatgctgccacggtatttacttgtgttgcactctttaacacactaatatcaccgctaaactcatttccatgggttattaatgggatgattgatgctgttatctctagcagacggctgagtaattatttatctactccagagcatcactcatccgagttaaatgcctctgctgaccttttaaaccaccactttaagagatataccaaagtaactcataatccaatggccatcgtctttcagaatgtatcctgttcttggtctagcagctctgttgctgagctgaacatagttctcagagatatatctttgcagctacaaaaagggttctttattgcaattgtaggcgaggttggttctggtaaatcatctttattgaacacagtcattggagagactcgtgtcatcagtggttctattagctcctgtggttcaattgcctatgtaccacaggtaccatggatcttatctggctctttacgagataatattttgcttggtaaagaatttgatccaaggagatacgaagaagtaatagaggcatgtgcgcttcatgttgacatatcggcaatgaccagaggagatatgtcacatattggagagaaaggtaccaacttatctggtggacaaagagctcgtctagcattggcaagggctttgtaccacaattctgatgtatacttgtttgatgacatccttagcgcggttgactcccaagttgcttcgtgcatcctggaaaaggctattatggggcaccaactaatgcagaaaacaagattactaagcacacacaatcttcaggccatttttgctgcagatatgattgtagtcatggctaatgggctcatcaagtggttcgggacaccgaaatctttcttggcaactccatattcaagaacctctaagccagataattcaagtcctacctcatttgcagcttctgtgaaagataaaacaccaatggtaacatgtgaactgaaacctgatgctgtacttgaagattcagtggtttgttatgaggagacaaaagatcgggtagaagaagaggcaaggaaacaaggcaaggttgagcttggtgtctacaaaaaatatgcagcatttgtggggtggtcaactgttgttttaatattcctaagcgcattcttaatgcaaacatctcgtaacggcaatgatatttggttaacttactgggttgataccagcacaggcaccaacaacacgaggttttatcttattatccttgctatgtttggcatcatcaattctcttttcactttgggaagggcattttcttttgcattcggtggcctccgtgcagcaatccatattcatgcatctcttcttgaaaatatcatcagtgcaccgatttgtttctttgaccaaaatcccagtggtcggatcctaaacagattatcgtcagacctctatgccgttgatgattctcttcctttcatcctcaatatatttgtggccaacttcttcagcttattcggcactctggttgttttgtcttattcacaggtttccttcttactcgtcttacttccactctggcttatctataggaagttgcagttctattacaggtctacatcacgtgaagtacggcgacttgatagcgttgctcgttcaccaatctattcatctttcacagagacacttgatggttcatcaacaataagagctttccagaatgaagggttcttctttgaaagattcatccaacatgtgacactatatcagaaaacgtcctacactgagctcgttgctagtttgtggctctcgttgagactccagttgttggcaggttttatcattctgtttatcgccatgatggctactatcagcttccatagcagttctcttgtcaactttgcaacacctggactggtgggcctggctttatcatatgcagcaccggtagtatcattgctcaatggcttcttaaccacctttacagagacagaaaaggaaatgatctccgtggaaagggttgacgagtacattggcatacctcaagaagaactccagggatcagaacctccaccgagaagctggccaacggaagggaagatcgagtttgaacatgtaacactgaagtacaagccagagctcccacctgctttaagtgacgtttcgttccttattgcatcaggcatgcaggttggaataataggaaggactggagcaggcaaatcaagtatactgaatgcacttttccgcttagttccaatttggaacggccgcatattagtagatggcattgatttggctaaagttgccgtccgagaactccgtggacattttgcagtggtcccacagagcccctttttgtttgatgggtctttgagggaaaacctggatcctttcaatacaaaaacagatcttaggatatgggaagttcttgaaaactgccatatgaagggacaggtagaatcaataggtggacttgacattcatgtgaaagaaagcggtgcatctttttcagtagggcagcggcagctcctatgccttgcccgagccatcctaaaatcatccaaggtgctttgtctagatgaatgcacagccaatgttgacaaccaaacagcctccctgttgcaaaatactatttctgctgaatgcaaaggcatgactgttctcaccatagcgcatcgtatttcaacagtgatgaagatggacaatattctagttcttgatcaaggaaaactggttgaagaaggaaacccagaagcccttatgaatcacagacactcaagattcgctcagcatgtcaaggcctctcagatgtgattatgggagcatggtttcctactatgttatgctaggcctttttacttttttagagttagaacttagacaatatttactatggagcaatgagcttgtaagaacagttccgaattgacaccactagctaatatggctaatagaggctttgaccctctccgaatcattgaacatgatgatcccctagctgttaaaattccatgctttgttactaacagggaatggatctcagaacctgtttctaaacaagtactgttcataaaacccttatttcatcgattgcttttcagttctcatggtttttgttttggtaaggagtagctgtattcaagtctagtggcatggtgcttgattgctcgctaaaagttaggcaatgcaaggatggattgaaatgcaaaaggcacaacgggcaatgagggaaaatgcaggggatttaataaccatctgcagtttcatttcacaagcacaactgaacgaggtagcaaagtaaccctaac

SEQ ID NO: 205779 - DNA, 1512 bp, Zea Mays
tgaactcaacagctacgctacgccctcgggaaggagagaaaagacagggaaggaatgtccagctggaggcttccgcggccagtagtgggactgggagcgaagcgcatccgcacttccgcagaggatcctcggttcggttggagttggaggcccaaaagacctcccgcacccaacaaaactccagcctcacatctctccctctccctctccctcttcctctctgcggtccaaacaatctctccctctctctctctctctctctcttcttcctctctgcgctccaaacaatctcgccctctccttctctactctccaaaacaaacgaaacgaagcaagaaaccgagaaatctccctcccctgtggctgtggcggtggcggtggcggcgaggatcatgtcggcggctgcggcagcggaagtggggaaggagaagggcgccgccacccccggccccggccccggccccggtggcgcgtgcgagctgtgcggcgccgcggccagggtgtactgcggcgccgacgaggccacgctctgctggggctgcgacgcgcaggtgcacggcgccaacttcctggtggcgcgccacgcgcgctcgctgctgtgccggggctgcgcgcgccccacgccgtggcgcgccgcgggcccgcgcctcggccccaccgtctccctctgcgtccgctgcgtccgccgcggcccggcgggggccgtgggcgtcggcggcgatgaggagatggggggagcgggcgacggagacgccgaggatgacgacgacgaggacgacgactccgaggaggaggaggaggaggaggaggaggaaggggagggggagaaccaggtcgtgccgtggacggaggacgccgaggccacgccgccgcccgtcgggagctccacgtccagcagcagccgggaggcccccgccaacggcgcagagcgcgcagcgaaggaaaacgccccgtgctccacctcgcagccaggcctgtgccaccacgcgtcgtccgcgcgccacggcggccggagcgacgaggccacctcgtcccggagcggcggccgggtcctcgcctcccgccacaggaagagatcgccctcggatttcttcagctctgatgggtcgccgcagcccgggaatggcacaccggcggcgaggaattgctccgacgccggcattgccaggaatgatggcagctgaagcatgcggcactgtcgtcgctgctcacctggcaaatacatacaatctgggcaagttgcaacatggcgaagatggatctggaattgttaatcgcccatttgggcgggcgtggggttattaggatattgttcgtgtatggatgcccagtgatcttgtcagatgggtgttcttagacgggggggaaatatcctgcctggtagggggaacgcggaagtaacgtcatttgaaaatgtgcaggctggtctataggtcagtgacagcaacgtactggttttgatgctgccatggtcacggatgtacgtacgcttgctgctgctcgcaggcccgg

SEQ ID NO: 205780 - DNA, 1623 bp, Zea Mays
gttctcttgttcttggcttaccgttttctcgagatgggaaactgaaggcggacatctgccatgcataccagatcatgaagaagggcggactcaaggatgagaacatcattgtctttatgtacgatgacatcgcgcatagcccggagaatccgaggcctggtgtcatcatcaaccatccccagggtggcgacgtctatgctggggtgccaaaggattacactggtcgagatgtcaacgtcgacaatttcttcgctgttctgcttggcaacaaaactgcactcaggggtgggagcggcaaggttgtggacagtggccccaatgatcatatctttgttttctacagtgaccatgggggtcctggtgtccttggaatgcctacgtatccatatctctatggtgatgacctcgtagatgtcctgaagaagaagcatgctgccgggacctacaaaagcctggtcttttaccttgaagcatgcgaatctgggagcatctttgagggcctcctgccgaatgacatcaatgtgtatgcgaccaccgcgtcaaatgcagacgagagcagctgggggacgtactgccctggcgagttcccgagccctccaccggagtatgacacttgtttgggagacctgtacagtgttgcttggatggaagacagtgatttccacaatctgcgaactgaatccctcaagcagcagtacaagttggtcaaggataggacagcggttcatgacacgttcagctatggttcccatgtgatgcaatatggcgcattggagctgaatgttcagcgtttgttttcgtacattggcacagaccctgctaacgatggcaacacttttatagaagataactcactgccatcgttctcaaaagccgttaatcagcgcgacgctgaccttgtctacttctggcagaagtaccgcaaattggctgatagctcgcatgcgaaaaatgaggctcggaaggaactgcttgaagtgatggcccacaggtctcatgttgacagcagcgttgagctcattggaagccttctctttggctccgaggacggtccaagggttctgaaagccgtccgtgcacctggtgaacctctggttgatgattggagctgcctcaagtccatagttcgcacttttgaggcgcgatgcgggtccttggcgcagtatgggatgaagcacatgcgatccttcgcgaacatgtgcaacgctggcatccttcctgaagcagtgtcgaaggtggccgctcaggcctgcagcagcattccgtccaacccctggagctctatccacaagggttttagcgcttaagaaccataggtgaggcgaactccatgacgctgcagctctcagggaggtcttagttcttgaacgaccataggtgaagcagacttatgtataccctgccacattgcgtacctatggccagtttccggtgtacatatatagtcggaaatttattcggcaattgtattggtcgttggtgtatatattccctatagtttgttagcagatgtgtttgtttgtaatcccgtaataaatgaagaatgcatgatgttcatgcggaactttacctgattcttgttgggcaatggatgaatggactatccatagtgggattcttgcc

SEQ ID NO: 205781 - DNA, 5562 bp, Zea Mays
atcgtctcgctcgactactacatggctccgcccctcccgggcttcgccttctcccgcagccctttcctcggagaggaggtggaggaagtgccggtggtaaggatctacggctccacccccgcggggcagaagacttgcctccacatccaccgggtgctgccatatttttatataccttgttcggaggagctgctttgtaatctagaaaaaggtgattcatatataactggtctcttgagtgaccttgagaaagctttgcaggctcgcggtccatcaaaaaggaagcatgtgcatggatgtaaccttgttagagcaaagaagttgtacggctaccattcgtccgaggagctttttatgaagatctatctatattaccctcatgaagtttctcgagctgcttcccttgttttgagtggtgctgtttctaatagatcatttcagccttatgaatcccacattccatatcttcttcactttttggttgactacaacttgtatggaatggggcacatacatgtcaaaaacttcaagtttcgtcctccattgccagttgattttcatcctaagtcatctcttcgcaggaaggcacagtcagataatttagaaataaatagtccaacagtttggatatcttcaacagtgtcgcattcttctatcctgggtagttctgccccttcgcatcatttgggaggaaccaatttgagcttcgctattcgacagagttcttcaatgcttgaagctgattctagagtagaaggtatcctaaatgagaaatataagatgtacacttctctttctcaaacaacagaagatacaaaaatggttcagtcacttgtagcagtttgggaggaacttgaacgattaagactgttggaggaaacaaaatatgctgatctgggtagacctttaagggaagaagttcttaaagattttcttcatggtattaagtatgagagtgccctttctgtgttgttttcacaagaggggccacatcacaaagtttccaccatagaagagtctgaaaggctagaaaggtgcttaaaatcgttgactgatattattgggactgttacattctcacaggataactactgtggtaatattgatgttggtaattctgctgatgtgcaaaacgacaaacccgatgcaagtctttgctcagggtcattagaacaaaacatgcagattatatctccagagagaaacagtgaatatcctgtgtcttcatctgtacaccaaagaacactatctcagttatctgataaaggtgaaaagcatctggatgctgaggctcttggacttttaagctggctggcctcttcacaagctgcagaggaatcaactgatgatgaattaactaatgaagtcatcctcagccctttgtttgccaataagtccattgaagttgctgtggagtctgctcaattggattttgatagcgcttctcagcaggagtgtcaggatattcttgattcagttgaccccattagggcagtagaagaaccaaacatacatacatcttacctcgattctgtgaagtccaattctgctgcttctctgggcaattctattcctcagcttgatgggtcatctgatgagaacccaaaagtctcccaggaatatgatagaagtaaggtcactaggaaatcagtagtatcggcaagttacacatctactaagaagccttcaaaatcagccagtaagtattcaggaactgaacatctctggggttctttgcctctttcttccagaaaaaagaggcaacatggagatgctgatgattcatgcagtgcaatgtcaccgcagaaggatttaagtgcatctaagaagagtacaattgataaggactatcatgataccataggcagcactgattcagaatcttctagttttttaggtgtacatgattcagtttgtcattctgtgagggatttgatgaggcggaggagatcttttcggcgtgaacagttggagtttggttgttctggagctgcaacatgcaccatggataaagagagcgaaactgtgaattctgggggattggaatttcatgatttcacaagtgacatcccaaacttagcactgacacggatggcttttgttcagaagcctccattgaaggatgatgcatgttctggtttggagagcccttcagattgtgagcaacgtggatctgaaaaatcgggattagctgatcttctaccatttttcaatcagaatatggaggagaataagcagaatgaatcatttcaagatatggaaagcacaggggatgtattgggtgtcccaactcattttcaaaatgatggatcagccctatatttgctgacacatgcactttcgccaccatctgcaggagctgtgggccattggctaacccaacaatctagttccagtattttctcgggttacaccaactatgatggagtcgcagctgataaggaagaggcacacagttctactttatcacggaattctcctaccagatttaccaaggagaattctgcaaataaaatgcatggagatgtgatgggatcggctctatcttacaaagaaagtaaacatttggacgaatggcatgatttttcccagatatcagctggaaatgagaaggataggctcacacctctaagtcaaattggatttcgtgaccctgctagtataggtggcgggcaacaactgactatacttagcgtggaggttttaacagaaagcagaggagagctgcgtcctgatccacggtttgatgccattaatgctgtgtctttggccatcgaagatgatgctgacaatactgttgatgttcatgtgtttatacgtggcaacaatgtcaaatcacataggagaaatctggatggtattgctggctgtaatataaatgtcttccctgaagaaaaggacgttttgaacaatcttattagtgcaatatgttcaattgatcctgatatcctagtcggatgggagattcagttaggatctttaggatttcttgccgaaagagctgcttatctgggtataggcttactgaaaagaatttcaagaacaccacatgagttgaatcatccacctaagatcccagttgataactctagtcaggtgctttctgaaacatcttctgcggatgatattattgatgatgtcagtgagaatgattggagccatactcatgcgagcggtatacatgttggtggaagaattgtgcttaatttatggcgtctcatgcgtgcagaagttaagcttaataattactcccttgaagctgtagctgatgaagtactgaggcgaaagataccactgataccaagcaggatattgaaccgatggtttgcaacaggtcctggacgaggaagacaccgatgcatagaatacattagcaatagagctagaatcaaccttgaaataatgaatcaaatggacctggtgaatcgaacatctgaacttgctcgtgtatttggtattgattttttttctgttctttctcgggggtctcagtatcgtgttgaatctatgctcctgagattggctcatacacagaactaccttgcaatttctcctggaaatcaacaggttgcttctcagccagccatggagtgtttgccgcttgtaatggaaccagagtcggccttctaccctgatccagttgttgtgttggattttcagtccctctatccttcgatgataatagcatataacctttgttattctacatgcttgggaaaagttttcccatcaaagtcagatgtacttggtgtcagctcatattcagcagatccacatacacttgtagatctgaaaaatcagctgctgcttactccaaatggggtcctgtatgttcaacctgagataagaaaaggtgtacttcctcgccttctagaggagatattgtcaacaagaattatggtgaaacaagcaatgaaaaagttgagtccatcacagcaagttcttcacaggatattcaatgcacggcagcttgctttgaagctgatagctaatgtcacgtatggttacacagctgctggattcagtggtcgaatgccttgtgcagagcttgcagacagcattgttcagtgtggccgtagaacactcgaaacagcaatatcatttgtcaaccagcatcctttgtggaaagctagggttgtgtatggtgatactgacagtatgtttgttctcctaaaagggcgttctagggaagaagcattcaggatagggaaggagatcgcctcatcaataactgcaatgaatcctgatccagtcacattaaagtttgagaaagtgtaccagccatgcttccttcttacaaagaagagatatgttggctatagctacgagagtcctgaacagaatgagcctgtctttgatgcgaaggggatagaaacagttcggagggacacatgcccagcagttgcaaagattttggaacggtctatcagaataatgtttgaagaacaggatttgaccaaagtcaggacatatttggagcgtcagtggacacacatattatcaggaaaagtctctattctagatttcatttttgcgaaggaggtccgtttaggcacttatagtgcaagggcttccacgctgccccctgcagcaattgttgcaacaaaagctatgttgtctgacccaagggcagagcctcggtatgcagagagagtgccatatgttgtaatccatggggaaccaggagctcgtcttgccgacatggttattgatccttatggtctgctagaagttggctccccttatagattaaatgaacaatattacataaccaagcagattattcctgcattgcagcgtgtttttggacttcttggtgctgacctgaacaagtggtttaatgagatgcctcgccccatacgatcaactcttgcgaaacgccaatttgctgctgctcatggttcattctctcgtgatggcagtttcatccgattaggattgaataataaaacctcagccaaaggaggcagaatagatacatactacatgtcaagccactgctcaatttgtggtgatatgattcaaggatcagagtccttctgcaacaattgcttgaaaagcgaagctgttgttgccacagtagtcgctggcagaacttcaaagttggagcgagaaatccaacatcttgctgctatatgtggccattgtggcggtgcagactggattgttgaaagtggagtcaagtgtatttcccttgcatgcccagtcttctatgaacggaggaaagttcagagggagctggtagtcgtctcagagtcggcaggagaagcagggtattaccctttctgctgcgctgaactcttttgagaacatttttttggggctgcgtttctctgtccataccgtgtaaattgtggaatctgtaacctttacatcacacgtgtgtatagttgttgtatgtaacactgaagaacatgtactggtgaaagaatacatacaatgtataccgtgtcgctcgctgttcagttaagggtttgttcgattagctcccaatccacatggattaagtgagattaggtgggtttaaatcccagctaagtcaaaccttttcttaattttttc

SEQ ID NO: 205782 - DNA, 5959 bp, Zea Mays
tcgccttctcccgcagccctttcctcggagaggaggtggaggaagtgccggtggtaaggatctacggctccacccccgcggggcagaagacttgcctccacatccaccgggtgctgccatatttttatataccttgttcggaggagctgctttgtaatctagaaaaaggtgattcatatataactggtctcttgagtgaccttgagaaagctttgcaggctcgcggtccatcaaaaaggaagcatgtgcatggatgtaaccttgttagagcaaagaagttgtacggctaccattcgtccgaggagctttttatgaagatctatctgtatccactgtttactcgtttttataaacccaacattgcttctacaaatgtgtatattgtcaacattacttgtcacatcttttctatctcatatcgagcggatttagaaattttgaatatagcttgctccatcctctcattaccaagcaaatcaacataaatgtgctgaattagagttaatgctttggtcatctggtccacctcttgaattctaacaagtgccttgcttgtccagaccaaaatggtttcacataaatcctctattgctgatgtaattttggggtatcatggcaacaaccttatagagtggtgttttgattataaaacttcattatgcaatcgacttccttgatctagtctctagatattaccctcatgaagtttctcgagctgcttcccttgttttgagtggtgctgtttctaatagatcatttcagccttatgaatcccacattccatatcttcttcactttttggttgactacaacttgtatggaatggggcacatacatgtcaaaaacttcaagtttcgtcctccattgccagttgattttcatcctaagtcatctcttcgcaggaaggcacagtcagataatttagaaataaatagtccaacagtttggatatcttcaacagtgtcgcattcttctatcctgggtagttctgccccttcgcatcatttgggaggaaccaatttgagcttcgctattcgacagagttcttcaatgcttgaagctgattctagagtagaaggtctcgctatcacattctaacactattgtttggtaatatccttaacatgcattataaatttcagttccaccttcaggtatcctaaatgagaaatataagatgtacacttctctttctcaaacaacagaagatacaaaaatggttcagtcacttgtagcagtttgggaggaacttgaacgattaagactgttggaggaaacaaaatatgctgatctgggtagacctttaagggaagaagttcttaaagattttcttcatggtattaagtatgagagtgccctttctgtgttgttttcacaagaggggccacatcacaaagtttccaccatagaagagtctgaaaggctagaaaggtgcttaaaatcgttgactgatattattgggactgttacattctcacaggataactactgtggtaatattgatgttggtaattctgctgatgtgcaaaacgacaaacccgatgcaagtctttgctcagggtcattagaacaaaacatgcagattatatctccagagagaaacagtgaatatcctgtgtcttcatctgtacaccaaagaacactatctcagttatctgataaaggtgaaaagcatctggatgctgaggctcttggacttttaagctggctggcctcttcacaagctgcagaggaatcaactgatgatgaattaactaatgaagtcatcctcagccctttgtttgccaataagtccattgaagttgctgtggagtctgctcaattggattttgatagcgcttctcagcaggagtgtcaggatattcttgattcagttgaccccattagggcagtagaagaaccaaacatacatacatcttacctcgattctgtgaagtccaattctgctgcttctctgggcaattctattcctcagcttgatgggtcatctgatgagaacccaaaagtctcccaggaatatgatagaagtaaggtcactaggaaatcagtagtatcggcaagttacacatctactaagaagccttcaaaatcagccagtaagtattcaggaactgaacatctctggggttctttgcctctttcttccagaaaaaagaggcaacatggagatgctgatgattcatgcagtgcaatgtcaccgcagaaggatttaagtgcatctaagaagagtacaattgataaggactatcatgataccataggcagcactgattcagaatcttctagttttttaggtgtacatgattcagtttgtcattctgtgagggatttgatgaggcggaggagatcttttcggcgtgaacagttggagtttggttgttctggagctgcaacatgcaccatggataaagagagcgaaactgtgaattctgggggattggaatttcatgatttcacaagtgacatcccaaacttagcactgacacggatggcttttgttcagaagcctccattgaaggatgatgcatgttctggtttggagagcccttcagattgtgagcaacgtggatctgaaaaatcgggattagctgatcttctaccatttttcaatcagaatatggaggagaataagcagaatgaatcatttcaagatatggaaagcacaggggatgtattgggtgtcccaactcattttcaaaatgatggatcagccctatatttgctgacacatgcactttcgccaccatctgcaggagctgtgggccattggctaacccaacaatctagttccagtattttctcgggttacaccaactatgatggagtcgcagctgataaggaagaggcacacagttctactttatcacggaattctcctaccagatttaccaaggagaattctgcaaataaaatgcatggagatgtgatgggatcggctctatcttacaaagaaagtaaacatttggacgaatggcatgatttttcccagatatcagctggaaatgagaaggataggctcacacctctaagtcaaattggatttcgtgaccctgctagtataggtggcgggcaacaactgactatacttagcgtggaggttttaacagaaagcagaggagagctgcgtcctgatccacggtttgatgccattaatgctgtgtctttggccatcgaagatgatgctgacaatactgttgatgttcatgtgtttatacgtggcaacaatgtcaaatcacataggagaaatctggatggtattgctggctgtaatataaatgtcttccctgaagaaaaggacgttttgaacaatcttattagtgcaatatgttcaattgatcctgatatcctagtcggatgggagattcagttaggatctttaggatttcttgccgaaagagctgcttatctgggtataggcttactgaaaagaatttcaagaacaccacatgagttgaatcatccacctaagatcccagttgataactctagtcaggtgctttctgaaacatcttctgcggatgatattattgatgatgtcagtgagaatgattggagccatactcatgcgagcggtatacatgttggtggaagaattgtgcttaatttatggcgtctcatgcgtgcagaagttaagcttaataattactcccttgaagctgtagctgatgaagtactgaggcgaaagataccactgataccaagcaggatattgaaccgatggtttgcaacaggtcctggacgaggaagacaccgatgcatagaatacattagcaatagagctagaatcaaccttgaaataatgaatcaaatggacctggtgaatcgaacatctgaacttgctcgtgtatttggtattgattttttttctgttctttctcgggggtctcagtatcgtgttgaatctatgctcctgagattggctcatacacagaactaccttgcaatttctcctggaaatcaacaggttgcttctcagccagccatggagtgtttgccgcttgtaatggaaccagagtcggccttctaccctgatccagttgttgtgttggattttcagtccctctatccttcgatgataatagcatataacctttgttattctacatgcttgggaaaagttttcccatcaaagtcagatgtacttggtgtcagctcatattcagcagatccacatacacttgtagatctgaaaaatcagctgctgcttactccaaatggggtcctgtatgttcaacctgagataagaaaaggtgtacttcctcgccttctagaggagatattgtcaacaagaattatggtgaaacaagcaatgaaaaagttgagtccatcacagcaagttcttcacaggatattcaatgcacggcagcttgctttgaagctgatagctaatgtcacgtatggttacacagctgctggattcagtggtcgaatgccttgtgcagagcttgcagacagcattgttcagtgtggccgtagaacactcgaaacagcaatatcatttgtcaaccagcatcctttgtggaaagctagggttgtgtatggtgatactgacagtatgtttgttctcctaaaagggcgttctagggaagaagcattcaggatagggaaggagatcgcctcatcaataactgcaatgaatcctgatccagtcacattaaagtttgagaaagtgtaccagccatgcttccttcttacaaagaagagatatgttggctatagctacgagagtcctgaacagaatgagcctgtctttgatgcgaaggggatagaaacagttcggagggacacatgcccagcagttgcaaagattttggaacggtctatcagaataatgtttgaagaacaggatttgaccaaagtcaggacatatttggagcgtcagtggacacacatattatcaggaaaagtctctattctagatttcatttttgcgaaggaggtccgtttaggcacttatagtgcaagggcttccacgctgccccctgcagcaattgttgcaacaaaagctatgttgtctgacccaagggcagagcctcggtatgcagagagagtgccatatgttgtaatccatggggaaccaggagctcgtcttgccgacatggttattgatccttatggtctgctagaagttggctccccttatagattaaatgaacaatattacataaccaagcagattattcctgcattgcagcgtgtttttggacttcttggtgctgacctgaacaagtggtttaatgagatgcctcgccccatacgatcaactcttgcgaaacgccaatttgctgctgctcatggttcattctctcgtgatggcagtttcatccgattaggattgaataataaaacctcagccaaaggaggcagaatagatacatactacatgtcaagccactgctcaatttgtggtgatatgattcaaggatcagagtccttctgcaacaattgcttgaaaagcgaagctgttgttgccacagtagtcgctggcagaacttcaaagttggagcgagaaatccaacatcttgctgctatatgtggccattgtggcggtgcagactggattgttgaaagtggagtcaagtgtatttcccttgcatgcccagtcttctatgaacggaggaaagttcagagggagctggtagtcgtctcagagtcggcaggagaagcagggtattaccctttctgctgcgctgaactcttttgagaacatttttttggggctgcgtttctctgtccataccgtgtaaattgtggaatctgtaacctttacatcacacgtgtgtatagttgttgtatgtaacactgaagaacatgtactggtgaaagaatacatacaatgtataccgtgtcgctcgctgttcagttaagggtttgttcgattagctcccaatccacatggattaagtgagattaggtgggtttaaatcccagctaagtcaaaccttttcttaattttttc

SEQ ID NO: 205783 - DNA, 5374 bp, Zea Mays
atgacgccaaaggctccaagaataactagagaattgaagcctgattggagatcacggggaatcttctccacagccctgctccaccagtcatcaaggctgcaaagagcattgtctggtgattcatatataactggtctcttgagtgaccttgagaaagctttgcagagtggtgttttgattataaaacttcattatgcaatcgacttccttgatctagtctctagatattaccctcatgaagtttctcgagctgcttcccttgttttgagtggtgctgtttctaatagatcatttcagccttatgaatcccacattccatatcttcttcactttttggttgactacaacttgtatggaatggggcacatacatgtcaaaaacttcaagtttcgtcctccattgccagttgattttcatcctaagtcatctcttcgcaggaaggcacagtcagataatttagaaataaatagtccaacagtttggatatcttcaacagtgtcgcattcttctatcctgggtagttctgccccttcgcatcatttgggaggaaccaatttgagcttcgctattcgacagagttcttcaatgcttgaagctgattctagagtagaaggtatcctaaatgagaaatataagatgtacacttctctttctcaaacaacagaagatacaaaaatggttcagtcacttgtagcagtttgggaggaacttgaacgattaagactgttggaggaaacaaaatatgctgatctgggtagacctttaagggaagaagttcttaaagattttcttcatggtattaagtatgagagtgccctttctgtgttgttttcacaagaggggccacatcacaaagtttccaccatagaagagtctgaaaggctagaaaggtgcttaaaatcgttgactgatattattgggactgttacattctcacaggataactactgtggtaatattgatgttggtaattctgctgatgtgcaaaacgacaaacccgatgcaagtctttgctcagggtcattagaacaaaacatgcagattatatctccagagagaaacagtgaatatcctgtgtcttcatctgtacaccaaagaacactatctcagttatctgataaaggtgaaaagcatctggatgctgaggctcttggacttttaagctggctggcctcttcacaagctgcagaggaatcaactgatgatgaattaactaatgaagtcatcctcagccctttgtttgccaataagtccattgaagttgctgtggagtctgctcaattggattttgatagcgcttctcagcaggagtgtcaggatattcttgattcagttgaccccattagggcagtagaagaaccaaacatacatacatcttacctcgattctgtgaagtccaattctgctgcttctctgggcaattctattcctcagcttgatgggtcatctgatgagaacccaaaagtctcccaggaatatgatagaagtaaggtcactaggaaatcagtagtatcggcaagttacacatctactaagaagccttcaaaatcagccagtaagtattcaggaactgaacatctctggggttctttgcctctttcttccagaaaaaagaggcaacatggagatgctgatgattcatgcagtgcaatgtcaccgcagaaggatttaagtgcatctaagaagagtacaattgataaggactatcatgataccataggcagcactgattcagaatcttctagttttttaggtgtacatgattcagtttgtcattctgtgagggatttgatgaggcggaggagatcttttcggcgtgaacagttggagtttggttgttctggagctgcaacatgcaccatggataaagagagcgaaactgtgaattctgggggattggaatttcatgatttcacaagtgacatcccaaacttagcactgacacggatggcttttgttcagaagcctccattgaaggatgatgcatgttctggtttggagagcccttcagattgtgagcaacgtggataatatggaggagaataagcagaatgaatcatttcaagatatggaaagcacaggggatgtattgggtgtcccaactcattttcaaaatgatggatcagccctatatttgctgacacatgcactttcgccaccatctgcaggagctgtgggccattggctaacccaacaatctagttccagtattttctcgggttacaccaactatgatggagtcgcagctgataaggaagaggcacacagttctactttatcacggaattctcctaccagatttaccaaggagaattctgcaaataaaatgcatggagatgtgatgggatcggctctatcttacaaagaaagtaaacatttggacgaatggcatgatttttcccagatatcagctggaaatgagaaggataggctcacacctctaagtcaaattggatttcgtgaccctgctagtataggtggcgggcaacaactgactatacttagcgtggaggttttaacagaaagcagaggagagctgcgtcctgatccacggtttgatgccattaatgctgtgtctttggccatcgaagatgatgctgacaatactgttgatgttcatgtgtttatacgtggcaacaatgtcaaatcacataggagaaatctggatggtattgctggctgtaatataaatgtcttccctgaagaaaaggacgttttgaacaatcttattagtgcaatatgttcaattgatcctgatatcctagtcggatgggagattcagttaggatctttaggatttcttgccgaaagagctgcttatctgggtataggcttactgaaaagaatttcaagaacaccacatgagttgaatcatccacctaagatcccagttgataactctagtcaggtgctttctgaaacatcttctgcggatgatattattgatgatgtcagtgagaatgattggagccatactcatgcgagcggtatacatgttggtggaagaattgtgcttaatttatggcgtctcatgcgtgcagaagttaagcttaataattactcccttgaagctgtagctgatgaagtactgaggcgaaagataccactgataccaagcaggatattgaaccgatggtttgcaacaggtcctggacgaggaagacaccgatgcatagaatacattagcaatagagctagaatcaaccttgaaataatgaatcaaatggacctggtgaatcgaacatctgaacttgctcgtgtatttggtattgattttttttctgttctttctcgggggtctcagtatcgtgttgaatctatgctcctgagattggctcatacacagaactaccttgcaatttctcctggaaatcaacaggttgcttctcagccagccatggagtgtttgccgcttgtaatggaaccagagtcggccttctaccctgatccagttgttgtgttggattttcagtccctctatccttcgatgataatagcatataacctttgttattctacatgcttgggaaaagttttcccatcaaagtcagatgtacttggtgtcagctcatattcagcagatccacatacacttgtagatctgaaaaatcagctgctgcttactccaaatggggtcctgtatgttcaacctgagataagaaaaggtgtacttcctcgccttctagaggagatattgtcaacaagaattatggtgaaacaagcaatgaaaaagttgagtccatcacagcaagttcttcacaggatattcaatgcacggcagcttgctttgaagctgatagctaatgtcacgtatggttacacagctgctggattcagtggtcgaatgccttgtgcagagcttgcagacagcattgttcagtgtggccgtagaacactcgaaacagcaatatcatttgtcaaccagcatcctttgtggaaagctagggttgtgtatggtgatactgacagtatgtttgttctcctaaaagggcgttctagggaagaagcattcaggatagggaaggagatcgcctcatcaataactgcaatgaatcctgatccagtcacattaaagtttgagaaagtgtaccagccatgcttccttcttacaaagaagagatatgttggctatagctacgagagtcctgaacagaatgagcctgtctttgatgcgaaggggatagaaacagttcggagggacacatgcccagcagttgcaaagattttggaacggtctatcagaataatgtttgaagaacaggatttgaccaaagtcaggacatatttggagcgtcagtggacacacatattatcaggaaaagtctctattctagatttcatttttgcgaaggaggtccgtttaggcacttatagtgcaagggcttccacgctgccccctgcagcaattgttgcaacaaaagctatgttgtctgacccaagggcagagcctcggtatgcagagagagtgccatatgttgtaatccatggggaaccaggagctcgtcttgccgacatggttattgatccttatggtctgctagaagttggctccccttatagattaaatgaacaatattacataaccaagcagattattcctgcattgcagcgtgtttttggacttcttggtgctgacctgaacaagtggtttaatgagatgcctcgccccatacgatcaactcttgcgaaacgccaatttgctgctgctcatggttcattctctcgtgatggcagtttcatccgattaggattgaataataaaacctcagccaaaggaggcagaatagatacatactacatgtcaagccactgctcaatttgtggtgatatgattcaaggatcagagtccttctgcaacaattgcttgaaaagcgaagctgttgttgccacagtagtcgctggcagaacttcaaagttggagcgagaaatccaacatcttgctgctatatgtggccattgtggcggtgcagactggattgttgaaagtggagtcaagtgtatttcccttgcatgcccagtcttctatgaacggaggaaagttcagagggagctggtagtcgtctcagagtcggcaggagaagcagggtattaccctttctgctgcgctgaactcttttgagaacatttttttggggctgcgtttctctgtccataccgtgtaaattgtggaatctgtaacctttacatcacacgtgtgtatagttgttgtatgtaacactgaagaacatgtactggtgaaagaatacatacaatgtataccgtgtcgctcgctgttcagttaagggtttgttcgattagctcccaatccacatggattaagtgagattaggtgggtttaaatcccagctaagtcaaaccttttcttaattttttc

SEQ ID NO: 205784 - DNA, 5392 bp, Zea Mays
gacacatttgtcctatcaacgacatacatgtgattcatatataactggtctcttgagtgaccttgagaaagctttgcaggctcgcggtccatcaaaaaggaagcatgtgcatggatgtaaccttgttagagcaaagaagttgtacggctaccattcgtccgaggagctttttatgaagatctatctatattaccctcatgaagtttctcgagctgcttcccttgttttgagtggtgctgtttctaatagatcatttcagccttatgaatcccacattccatatcttcttcactttttggttgactacaacttgtatggaatggggcacatacatgtcaaaaacttcaagtttcgtcctccattgccagttgattttcatcctaagtcatctcttcgcaggaaggcacagtcagataatttagaaataaatagtccaacagtttggatatcttcaacagtgtcgcattcttctatcctgggtagttctgccccttcgcatcatttgggaggaaccaatttgagcttcgctattcgacagagttcttcaatgcttgaagctgattctagagtagaagttccaccttcaggtatcctaaatgagaaatataagatgtacacttctctttctcaaacaacagaagatacaaaaatggttcagtcacttgtagcagtttgggaggaacttgaacgattaagactgttggaggaaacaaaatatgctgatctgggtagacctttaagggaagaagttcttaaagattttcttcatggtattaagtatgagagtgccctttctgtgttgttttcacaagaggggccacatcacaaagtttccaccatagaagagtctgaaaggctagaaaggtgcttaaaatcgttgactgatattattgggactgttacattctcacaggataactactgtggtaatattgatgttggtaattctgctgatgtgcaaaacgacaaacccgatgcaagtctttgctcagggtcattagaacaaaacatgcagattatatctccagagagaaacagtgaatatcctgtgtcttcatctgtacaccaaagaacactatctcagttatctgataaaggtgaaaagcatctggatgctgaggctcttggacttttaagctggctggcctcttcacaagctgcagaggaatcaactgatgatgaattaactaatgaagtcatcctcagccctttgtttgccaataagtccattgaagttgctgtggagtctgctcaattggattttgatagcgcttctcagcaggagtgtcaggatattcttgattcagttgaccccattagggcagtagaagaaccaaacatacatacatcttacctcgattctgtgaagtccaattctgctgcttctctgggcaattctattcctcagcttgatgggtcatctgatgagaacccaaaagtctcccaggaatatgatagaagtaaggtcactaggaaatcagtagtatcggcaagttacacatctactaagaagccttcaaaatcagccagtaagtattcaggaactgaacatctctggggttctttgcctctttcttccagaaaaaagaggcaacatggagatgctgatgattcatgcagtgcaatgtcaccgcagaaggatttaagtgcatctaagaagagtacaattgataaggactatcatgataccataggcagcactgattcagaatcttctagttttttaggtgtacatgattcagtttgtcattctgtgagggatttgatgaggcggaggagatcttttcggcgtgaacagttggagtttggttgttctggagctgcaacatgcaccatggataaagagagcgaaactgtgaattctgggggattggaatttcatgatttcacaagtgacatcccaaacttagcactgacacggatggcttttgttcagaagcctccattgaaggatgatgcatgttctggtttggagagcccttcagattgtgagcaacgtggatctgaaaaatcgggattagctgatcttctaccatttttcaatcagaatatggaggagaataagcagaatgaatcatttcaagatatggaaagcacaggggatgtattgggtgtcccaactcattttcaaaatgatggatcagccctatatttgctgacacatgcactttcgccaccatctgcaggagctgtgggccattggctaacccaacaatctagttccagtattttctcgggttacaccaactatgatggagtcgcagctgataaggaagaggcacacagttctactttatcacggaattctcctaccagatttaccaaggagaattctgcaaataaaatgcatggagatgtgatgggatcggctctatcttacaaagaaagtaaacatttggacgaatggcatgatttttcccagatatcagctggaaatgagaaggataggctcacacctctaagtcaaattggatttcgtgaccctgctagtataggtggcgggcaacaactgactatacttagcgtggaggttttaacagaaagcagaggagagctgcgtcctgatccacggtttgatgccattaatgctgtgtctttggccatcgaagatgatgctgacaatactgttgatgttcatgtgtttatacgtggcaacaatgtcaaatcacataggagaaatctggatggtattgctggctgtaatataaatgtcttccctgaagaaaaggacgttttgaacaatcttattagtgcaatatgttcaattgatcctgatatcctagtcggatgggagattcagttaggatctttaggatttcttgccgaaagagctgcttatctgggtataggcttactgaaaagaatttcaagaacaccacatgagttgaatcatccacctaagatcccagttgataactctagtcaggtgctttctgaaacatcttctgcggatgatattattgatgatgtcagtgagaatgattggagccatactcatgcgagcggtatacatgttggtggaagaattgtgcttaatttatggcgtctcatgcgtgcagaagttaagcttaataattactcccttgaagctgtagctgatgaagtactgaggcgaaagataccactgataccaagcaggatattgaaccgatggtttgcaacaggtcctggacgaggaagacaccgatgcatagaatacattagcaatagagctagaatcaaccttgaaataatgaatcaaatggacctggtgaatcgaacatctgaacttgctcgtgtatttggtattgattttttttctgttctttctcgggggtctcagtatcgtgttgaatctatgctcctgagattggctcatacacagaactaccttgcaatttctcctggaaatcaacaggttgcttctcagccagccatggagtgtttgccgcttgtaatggaaccagagtcggccttctaccctgatccagttgttgtgttggattttcagtccctctatccttcgatgataatagcatataacctttgttattctacatgcttgggaaaagttttcccatcaaagtcagatgtacttggtgtcagctcatattcagcagatccacatacacttgtagatctgaaaaatcagctgctgcttactccaaatggggtcctgtatgttcaacctgagataagaaaaggtgtacttcctcgccttctagaggagatattgtcaacaagaattatggtgaaacaagcaatgaaaaagttgagtccatcacagcaagttcttcacaggatattcaatgcacggcagcttgctttgaagctgatagctaatgtcacgtatggttacacagctgctggattcagtggtcgaatgccttgtgcagagcttgcagacagcattgttcagtgtggccgtagaacactcgaaacagcaatatcatttgtcaaccagcatcctttgtggaaagctagggttgtgtatggtgatactgacagtatgtttgttctcctaaaagggcgttctagggaagaagcattcaggatagggaaggagatcgcctcatcaataactgcaatgaatcctgatccagtcacattaaagtttgagaaagtgtaccagccatgcttccttcttacaaagaagagatatgttggctatagctacgagagtcctgaacagaatgagcctgtctttgatgcgaaggggatagaaacagttcggagggacacatgcccagcagttgcaaagattttggaacggtctatcagaataatgtttgaagaacaggatttgaccaaagtcaggacatatttggagcgtcagtggacacacatattatcaggaaaagtctctattctagatttcatttttgcgaaggaggtccgtttaggcacttatagtgcaagggcttccacgctgccccctgcagcaattgttgcaacaaaagctatgttgtctgacccaagggcagagcctcggtatgcagagagagtgccatatgttgtaatccatggggaaccaggagctcgtcttgccgacatggttattgatccttatggtctgctagaagttggctccccttatagattaaatgaacaatattacataaccaagcagattattcctgcattgcagcgtgtttttggacttcttggtgctgacctgaacaagtggtttaatgagatgcctcgccccatacgatcaactcttgcgaaacgccaatttgctgctgctcatggttcattctctcgtgatggcagtttcatccgattaggattgaataataaaacctcagccaaaggaggcagaatagatacatactacatgtcaagccactgctcaatttgtggtgatatgattcaaggatcagagtccttctgcaacaattgcttgaaaagcgaagctgttgttgccacagtagtcgctggcagaacttcaaagttggagcgagaaatccaacatcttgctgctatatgtggccattgtggcggtgcagactggattgttgaaagtggagtcaagtgtatttcccttgcatgcccagtcttctatgaacggaggaaagttcagagggagctggtagtcgtctcagagtcggcaggagaagcagggtattaccctttctgctgcgctgaactcttttgagaacatttttttggggctgcgtttctctgtccataccgtgtaaattgtggaatctgtaacctttacatcacacgtgtgtatagttgttgtatgtaacactgaagaacatgtactggtgaaagaatacatacaatgtataccgtgtcgctcgctgttcagttaagggtttgttcgattagctcccaatccacatggattaagtgagattaggtgggtttaaatcccagctaagtcaaaccttttcttaattttttc

SEQ ID NO: 205785 - DNA, 5327 bp, Zea Mays
ctcagagcaggctctcatgccaacaccgccttcgctccgctccactccacttcatgtgtcccagccatccttggcgtgggatcaagcaggactggttgctgccctcaactagttttctttcgagaacccttagctgtgggtgatggactccgagccatatgacgtctgatgatgagtggtgctgtttctaatagatcatttcagccttatgaatcccacattccatatcttcttcactttttggttgactacaacttgtatggaatggggcacatacatgtcaaaaacttcaagtttcgtcctccattgccagttgattttcatcctaagtcatctcttcgcaggaaggcacagtcagataatttagaaataaatagtccaacagtttggatatcttcaacagtgtcgcattcttctatcctgggtagttctgccccttcgcatcatttgggaggaaccaatttgagcttcgctattcgacagagttcttcaatgcttgaagctgattctagagtagaaggtctcgctatcacattctaacactattgtttgaagatacaaaaatggttcagtcacttgtagcagtttgggaggaacttgaacgattaagactgttggaggaaacaaaatatgctgatctgggtagacctttaagggaagaagttcttaaagattttcttcatggtattaagtatgagagtgccctttctgtgttgttttcacaagaggggccacatcacaaagtttccaccatagaagagtctgaaaggctagaaaggtgcttaaaatcgttgactgatattattgggactgttacattctcacaggataactactgtggtaatattgatgttggtaattctgctgatgtgcaaaacgacaaacccgatgcaagtctttgctcagggtcattagaacaaaacatgcagattatatctccagagagaaacagtgaatatcctgtgtcttcatctgtacaccaaagaacactatctcagttatctgataaaggtgaaaagcatctggatgctgaggctcttggacttttaagctggctggcctcttcacaagctgcagaggaatcaactgatgatgaattaactaatgaagtcatcctcagccctttgtttgccaataagtccattgaagttgctgtggagtctgctcaattggattttgatagcgcttctcagcaggagtgtcaggatattcttgattcagttgaccccattagggcagtagaagaaccaaacatacatacatcttacctcgattctgtgaagtccaattctgctgcttctctgggcaattctattcctcagcttgatgggtcatctgatgagaacccaaaagtctcccaggaatatgatagaagtaaggtcactaggaaatcagtagtatcggcaagttacacatctactaagaagccttcaaaatcagccagtaagtattcaggaactgaacatctctggggttctttgcctctttcttccagaaaaaagaggcaacatggagatgctgatgattcatgcagtgcaatgtcaccgcagaaggatttaagtgcatctaagaagagtacaattgataaggactatcatgataccataggcagcactgattcagaatcttctagttttttaggtgtacatgattcagtttgtcattctgtgagggatttgatgaggcggaggagatcttttcggcgtgaacagttggagtttggttgttctggagctgcaacatgcaccatggataaagagagcgaaactgtgaattctgggggattggaatttcatgatttcacaagtgacatcccaaacttagcactgacacggatggcttttgttcagaagcctccattgaaggatgatgcatgttctggtttggagagcccttcagattgtgagcaacgtggatgtagaagtcctaggcctttagctgaaaaatcgggattagctgatcttctaccatttttcaatcagaatatggaggagaataagcagaatgaatcatttcaagatatggaaagcacaggggatgtattgggtgtcccaactcattttcaaaatgatggatcagccctatatttgctgacacatgcactttcgccaccatctgcaggagctgtgggccattggctaacccaacaatctagttccagtattttctcgggttacaccaactatgatggagtcgcagctgataaggaagaggcacacagttctactttatcacggaattctcctaccagatttaccaaggagaattctgcaaataaaatgcatggagatgtgatgggatcggctctatcttacaaagaaagtaaacatttggacgaatggcatgatttttcccagatatcagctggaaatgagaaggataggctcacacctctaagtcaaattggatttcgtgaccctgctagtataggtggcgggcaacaactgactatacttagcgtggaggttttaacagaaagcagaggagagctgcgtcctgatccacggtttgatgccattaatgctgtgtctttggccatcgaagatgatgctgacaatactgttgatgttcatgtgtttatacgtggcaacaatgtcaaatcacataggagaaatctggatggtattgctggctgtaatataaatgtcttccctgaagaaaaggacgttttgaacaatcttattagtgcaatatgttcaattgatcctgatatcctagtcggatgggagattcagttaggatctttaggatttcttgccgaaagagctgcttatctgggtataggcttactgaaaagaatttcaagaacaccacatgagttgaatcatccacctaagatcccagttgataactctagtcaggtgctttctgaaacatcttctgcggatgatattattgatgatgtcagtgagaatgattggagccatactcatgcgagcggtatacatgttggtggaagaattgtgcttaatttatggcgtctcatgcgtgcagaagttaagcttaataattactcccttgaagctgtagctgatgaagtactgaggcgaaagataccactgataccaagcaggatattgaaccgatggtttgcaacaggtcctggacgaggaagacaccgatgcatagaatacattagcaatagagctagaatcaaccttgaaataatgaatcaaatggacctggtgaatcgaacatctgaacttgctcgtgtatttggtattgattttttttctgttctttctcgggggtctcagtatcgtgttgaatctatgctcctgagattggctcatacacagaactaccttgcaatttctcctggaaatcaacaggttgcttctcagccagccatggagtgtttgccgcttgtaatggaaccagagtcggccttctaccctgatccagttgttgtgttggattttcagtccctctatccttcgatgataatagcatataacctttgttattctacatgcttgggaaaagttttcccatcaaagtcagatgtacttggtgtcagctcatattcagcagatccacatacacttgtagatctgaaaaatcagctgctgcttactccaaatggggtcctgtatgttcaacctgagataagaaaaggtgtacttcctcgccttctagaggagatattgtcaacaagaattatggtgaaacaagcaatgaaaaagttgagtccatcacagcaagttcttcacaggatattcaatgcacggcagcttgctttgaagctgatagctaatgtcacgtatggttacacagctgctggattcagtggtcgaatgccttgtgcagagcttgcagacagcattgttcagtgtggccgtagaacactcgaaacagcaatatcatttgtcaaccagcatcctttgtggaaagctagggttgtgtatggtgatactgacagtatgtttgttctcctaaaagggcgttctagggaagaagcattcaggatagggaaggagatcgcctcatcaataactgcaatgaatcctgatccagtcacattaaagtttgagaaagtgtaccagccatgcttccttcttacaaagaagagatatgttggctatagctacgagagtcctgaacagaatgagcctgtctttgatgcgaaggggatagaaacagttcggagggacacatgcccagcagttgcaaagattttggaacggtctatcagaataatgtttgaagaacaggatttgaccaaagtcaggacatatttggagcgtcagtggacacacatattatcaggaaaagtctctattctagatttcatttttgcgaaggaggtccgtttaggcacttatagtgcaagggcttccacgctgccccctgcagcaattgttgcaacaaaagctatgttgtctgacccaagggcagagcctcggtatgcagagagagtgccatatgttgtaatccatggggaaccaggagctcgtcttgccgacatggttattgatccttatggtctgctagaagttggctccccttatagattaaatgaacaatattacataaccaagcagattattcctgcattgcagcgtgtttttggacttcttggtgctgacctgaacaagtggtttaatgagatgcctcgccccatacgatcaactcttgcgaaacgccaatttgctgctgctcatggttcattctctcgtgatggcagtttcatccgattaggattgaataataaaacctcagccaaaggaggcagaatagatacatactacatgtcaagccactgctcaatttgtggtgatatgattcaaggatcagagtccttctgcaacaattgcttgaaaagcgaagctgttgttgccacagtagtcgctggcagaacttcaaagttggagcgagaaatccaacatcttgctgctatatgtggccattgtggcggtgcagactggattgttgaaagtggagtcaagtgtatttcccttgcatgcccagtcttctatgaacggaggaaagttcagagggagctggtagtcgtctcagagtcggcaggagaagcagggtattaccctttctgctgcgctgaactcttttgagaacatttttttggggctgcgtttctctgtccataccgtgtaaattgtggaatctgtaacctttacatcacacgtgtgtatagttgttgtatgtaacactgaagaacatgtactggtgaaagaatacatacaatgtataccgtgtcgctcgctgttcagttaagggtttgttcgattagctcccaatccacatggattaagtgagattaggtgggtttaaatcccagctaagtcaaaccttttcttaattttttc

SEQ ID NO: 205786 - DNA, 5281 bp, Zea Mays
ctcagagcaggctctcatgccaacaccgccttcgctccgctccactccacttcatgtgtcccagccatccttggcgtgggatcaagcaggactggttgctgccctcaactagttttctttcgagaacccttagctgtgggtgatggactccgagccatatgacgtctgatgatgagtggtgctgtttctaatagatcatttcagccttatgaatcccacattccatatcttcttcactttttggttgactacaacttgtatggaatggggcacatacatgtcaaaaacttcaagtttcgtcctccattgccagttgattttcatcctaagtcatctcttcgcaggaaggcacagtcagataatttagaaataaatagtccaacagtttggatatcttcaacagtgtcgcattcttctatcctgggtagttctgccccttcgcatcatttgggaggaaccaatttgagcttcgctattcgacagagttcttcaatgcttgaagctgattctagagtagaaggtatcctaaatgagaaatataagatgtacacttctctttctcaaacaacagaagatacaaaaatggttcagtcacttgtagcagtttgggaggaacttgaacgattaagactgttggaggaaacaaaatatgctgatctgggtagacctttaagggaagaagttcttaaagattttcttcatggtattaagtatgagagtgccctttctgtgttgttttcacaagaggggccacatcacaaagtttccaccatagaagagtctgaaaggctagaaaggtgcttaaaatcgttgactgatattattgggactgttacattctcacaggataactactgtggtaatattgatgttggtaattctgctgatgtgcaaaacgacaaacccgatgcaagtctttgctcagggtcattagaacaaaacatgcagattatatctccagagagaaacagtgaatatcctgtgtcttcatctgtacaccaaagaacactatctcagttatctgataaaggtgaaaagcatctggatgctgaggctcttggacttttaagctggctggcctcttcacaagctgcagaggaatcaactgatgatgaattaactaatgaagtcatcctcagccctttgtttgccaataagtccattgaagttgctgtggagtctgctcaattggattttgatagcgcttctcagcaggagtgtcaggatattcttgattcagttgaccccattagggcagtagaagaaccaaacatacatacatcttacctcgattctgtgaagtccaattctgctgcttctctgggcaattctattcctcagcttgatgggtcatctgatgagaacccaaaagtctcccaggaatatgatagaagtaaggtcactaggaaatcagtagtatcggcaagttacacatctactaagaagccttcaaaatcagccagtaagtattcaggaactgaacatctctggggttctttgcctctttcttccagaaaaaagaggcaacatggagatgctgatgattcatgcagtgcaatgtcaccgcagaaggatttaagtgcatctaagaagagtacaattgataaggactatcatgataccataggcagcactgattcagaatcttctagttttttaggtgtacatgattcagtttgtcattctgtgagggatttgatgaggcggaggagatcttttcggcgtgaacagttggagtttggttgttctggagctgcaacatgcaccatggataaagagagcgaaactgtgaattctgggggattggaatttcatgatttcacaagtgacatcccaaacttagcactgacacggatggcttttgttcagaagcctccattgaaggatgatgcatgttctggtttggagagcccttcagattgtgagcaacgtggataatatggaggagaataagcagaatgaatcatttcaagatatggaaagcacaggggatgtattgggtgtcccaactcattttcaaaatgatggatcagccctatatttgctgacacatgcactttcgccaccatctgcaggagctgtgggccattggctaacccaacaatctagttccagtattttctcgggttacaccaactatgatggagtcgcagctgataaggaagaggcacacagttctactttatcacggaattctcctaccagatttaccaaggagaattctgcaaataaaatgcatggagatgtgatgggatcggctctatcttacaaagaaagtaaacatttggacgaatggcatgatttttcccagatatcagctggaaatgagaaggataggctcacacctctaagtcaaattggatttcgtgaccctgctagtataggtggcgggcaacaactgactatacttagcgtggaggttttaacagaaagcagaggagagctgcgtcctgatccacggtttgatgccattaatgctgtgtctttggccatcgaagatgatgctgacaatactgttgatgttcatgtgtttatacgtggcaacaatgtcaaatcacataggagaaatctggatggtattgctggctgtaatataaatgtcttccctgaagaaaaggacgttttgaacaatcttattagtgcaatatgttcaattgatcctgatatcctagtcggatgggagattcagttaggatctttaggatttcttgccgaaagagctgcttatctgggtataggcttactgaaaagaatttcaagaacaccacatgagttgaatcatccacctaagatcccagttgataactctagtcaggtgctttctgaaacatcttctgcggatgatattattgatgatgtcagtgagaatgattggagccatactcatgcgagcggtatacatgttggtggaagaattgtgcttaatttatggcgtctcatgcgtgcagaagttaagcttaataattactcccttgaagctgtagctgatgaagtactgaggcgaaagataccactgataccaagcaggatattgaaccgatggtttgcaacaggtcctggacgaggaagacaccgatgcatagaatacattagcaatagagctagaatcaaccttgaaataatgaatcaaatggacctggtgaatcgaacatctgaacttgctcgtgtatttggtattgattttttttctgttctttctcgggggtctcagtatcgtgttgaatctatgctcctgagattggctcatacacagaactaccttgcaatttctcctggaaatcaacaggttgcttctcagccagccatggagtgtttgccgcttgtaatggaaccagagtcggccttctaccctgatccagttgttgtgttggattttcagtccctctatccttcgatgataatagcatataacctttgttattctacatgcttgggaaaagttttcccatcaaagtcagatgtacttggtgtcagctcatattcagcagatccacatacacttgtagatctgaaaaatcagctgctgcttactccaaatggggtcctgtatgttcaacctgagataagaaaaggtgtacttcctcgccttctagaggagatattgtcaacaagaattatggtgaaacaagcaatgaaaaagttgagtccatcacagcaagttcttcacaggatattcaatgcacggcagcttgctttgaagctgatagctaatgtcacgtatggttacacagctgctggattcagtggtcgaatgccttgtgcagagcttgcagacagcattgttcagtgtggccgtagaacactcgaaacagcaatatcatttgtcaaccagcatcctttgtggaaagctagggttgtgtatggtgatactgacagtatgtttgttctcctaaaagggcgttctagggaagaagcattcaggatagggaaggagatcgcctcatcaataactgcaatgaatcctgatccagtcacattaaagtttgagaaagtgtaccagccatgcttccttcttacaaagaagagatatgttggctatagctacgagagtcctgaacagaatgagcctgtctttgatgcgaaggggatagaaacagttcggagggacacatgcccagcagttgcaaagattttggaacggtctatcagaataatgtttgaagaacaggatttgaccaaagtcaggacatatttggagcgtcagtggacacacatattatcaggaaaagtctctattctagatttcatttttgcgaaggaggtccgtttaggcacttatagtgcaagggcttccacgctgccccctgcagcaattgttgcaacaaaagctatgttgtctgacccaagggcagagcctcggtatgcagagagagtgccatatgttgtaatccatggggaaccaggagctcgtcttgccgacatggttattgatccttatggtctgctagaagttggctccccttatagattaaatgaacaatattacataaccaagcagattattcctgcattgcagcgtgtttttggacttcttggtgctgacctgaacaagtggtttaatgagatgcctcgccccatacgatcaactcttgcgaaacgccaatttgctgctgctcatggttcattctctcgtgatggcagtttcatccgattaggattgaataataaaacctcagccaaaggaggcagaatagatacatactacatgtcaagccactgctcaatttgtggtgatatgattcaaggatcagagtccttctgcaacaattgcttgaaaagcgaagctgttgttgccacagtagtcgctggcagaacttcaaagttggagcgagaaatccaacatcttgctgctatatgtggccattgtggcggtgcagactggattgttgaaagtggagtcaagtgtatttcccttgcatgcccagtcttctatgaacggaggaaagttcagagggagctggtagtcgtctcagagtcggcaggagaagcagggtattaccctttctgctgcgctgaactcttttgagaacatttttttggggctgcgtttctctgtccataccgtgtaaattgtggaatctgtaacctttacatcacacgtgtgtatagttgttgtatgtaacactgaagaacatgtactggtgaaagaatacatacaatgtataccgtgtcgctcgctgttcagttaagggtttgttcgattagctcccaatccacatggattaagtgagattaggtgggtttaaatcccagctaagtcaaaccttttcttaattttttc

SEQ ID NO: 205787 - DNA, 2766 bp, Zea Mays
ttgacaggagggcatattggctgactaggatggtgacaatggcaactgataaatctggatggtattgctggctgtaatataaatgtcttccctgaagaaaaggacgttttgaacaatcttattagtgcaatatgttcaattgatcctgatatcctagtcggatgggagattcagttaggatctttaggatttcttgccgaaagagctgcttatctgggtataggcttactgaaaagaatttcaagaacaccacatgagttgaatcatccacctaagatcccagttgataactctagtcaggtgctttctgaaacatcttctgcggatgatattattgatgatgtcagtgagaatgattggagccatactcatgcgagcggtatacatgttggtggaagaattgtgcttaatttatggcgtctcatgcgtgcagaagttaagcttaataattactcccttgaagctgtagctgatgaagtactgaggcgaaagataccactgataccaagcaggatattgaaccgatggtttgcaacaggtcctggacgaggaagacaccgatgcatagaatacattagcaatagagctagaatcaaccttgaaataatgaatcaaatggacctggtgaatcgaacatctgaacttgctcgtgtatttggtattgattttttttctgttctttctcgggggtctcagtatcgtgttgaatctatgctcctgagattggctcatacacagaactaccttgcaatttctcctggaaatcaacaggttgcttctcagccagccatggagtgtttgccgcttgtaatggaaccagagtcggccttctaccctgatccagttgttgtgttggattttcagtccctctatccttcgatgataatagcatataacctttgttattctacatgcttgggaaaagttttcccatcaaagtcagatgtacttggtgtcagctcatattcagcagatccacatacacttgtagatctgaaaaatcagctgctgcttactccaaatggggtcctgtatgttcaacctgagataagaaaaggtgtacttcctcgccttctagaggagatattgtcaacaagaattatggtgaaacaagcaatgaaaaagttgagtccatcacagcaagttcttcacaggatattcaatgcacggcagcttgctttgaagctgatagctaatgtcacgtatggttacacagctgctggattcagtggtcgaatgccttgtgcagagcttgcagacagcattgttcagtgtggccgtagaacactcgaaacagcaatatcatttgtcaaccagcatcctttgtggaaagctagggttgtgtatggtgatactgacagtatgtttgttctcctaaaagggcgttctagggaagaagcattcaggatagggaaggagatcgcctcatcaataactgcaatgaatcctgatccagtcacattaaagtttgagaaagtgtaccagccatgcttccttcttacaaagaagagatatgttggctatagctacgagagtcctgaacagaatgagcctgtctttgatgcgaaggggatagaaacagttcggagggacacatgcccagcagttgcaaagattttggaacggtctatcagaataatgtttgaagaacaggatttgaccaaagtcaggacatatttggagcgtcagtggacacacatattatcaggaaaagtctctattctagatttcatttttgcgaaggaggtccgtttaggcacttatagtgcaagggcttccacgctgccccctgcagcaattgttgcaacaaaagctatgttgtctgacccaagggcagagcctcggtatgcagagagagtgccatatgttgtaatccatggggaaccaggagctcgtcttgccgacatggttattgatccttatggtctgctagaagttggctccccttatagattaaatgaacaatattacataaccaagcagattattcctgcattgcagcgtgtttttggacttcttggtgctgacctgaacaagtggtttaatgagatgcctcgccccatacgatcaactcttgcgaaacgccaatttgctgctgctcatggttcattctctcgtgatggcagtttcatccgattaggattgaataataaaacctcagccaaaggaggcagaatagatacatactacatgtcaagccactgctcaatttgtggtgatatgattcaaggatcagagtccttctgcaacaattgcttgaaaagcgaagctgttgttgccacagtagtcgctggcagaacttcaaagttggagcgagaaatccaacatcttgctgctatatgtggccattgtggcggtgcagactggattgttgaaagtggagtcaagtgtatttcccttgcatgcccagtcttctatgaacggaggaaagttcagagggagctggtagtcgtctcagagtcggcaggagaagcagggtattaccctttctgctgcgctgaactcttttgagaacatttttttggggctgcgtttctctgtccataccgtgtaaattgtggaatctgtaacctttacatcacacgtgtgtatagttgttgtatgtaacactgaagaacatgtactggtgaaagaatacatacaatgtataccgtgtcgctcgctgttcagttaagggtttgttcgattagctcccaatccacatggattaagtgagattaggtgggtttaaatcccagctaagtcaaaccttttcttaattttttc

SEQ ID NO: 205788 - DNA, 1063 bp, Zea Mays
gccaaagctttattcactgggtgcagtgctaaaggtgttcatcaatgtgccgtggtggtatctagccgccaacaagatgatgagcccgttcctcacacagcgcaccaagagcaagttcgtctttgctagcccagccaaatcagcagcgactctattcagatacatcgcaccggaacaagttcctgtccaatttggaggcctcttcaaggaggatgatcctgagttcaccacctctgacactgtctccgagctcactatcaaaccatcctcaaaagaaaccgttgagatccctgtcaccgagaactccacaattgtatgggaactccgggtgctgagttgggaagtgagctatggcgccgagttcacccccgacgcggagggtgggtacaccgtcattgtacagaagacaaggaaggtgcctgctaacgaggaaccgatcatgaagggaagcttcaaggcaggcgagcctggcaaacttgtgctaactgtgaacaaccctgcatccaagaagaagacgctcctttacagatcgaaggtgaagagcaccagcgagtgagtgtgaggtcacgccgctagctgcctgggccctacagttaaaacgatctacagcatgatagaagagagaaggaaccttttggtttggttcgttaatttactgggttttttttttgggttcgcattctacattttgtttggttgaaaccaaagtgagcttgtttttgtgacagtagatgggagaagtataatggcattgtgtgatggatggttgttgatgagggcagggaggacgaaaatgtgggggaatgaaaggttggagaatgtctgttcctctgtagatgtgttctgtacattgcatctcttggattctcattgatatgttaaaatttaggagtacttggtcacatcattattcaatccatgttactctgcatgttcctcttttctcttcgtgtccttttcccttgttaatggaacactgtctgctgccgctcccaccatttatatatatatgctcatttgcagcaacaaggggatgtactcagaagtgacaaataatggccgt

SEQ ID NO: 205789 - DNA, 1432 bp, Zea Mays
cattgccatccctaaaccagacagacagtttcggcctcagcccaactggtgccgtgacgtctcctctcctctcttcgtctcatccccagcccacccacaacaatgccctcctcccttcccacctgacctgcgccgcgccgcgccgcgctgcgcagccatccttgttctgtcccgggtacgccgccacacacatcagttcaagcgcttctctccctccctcctcttcgtggatcggaatcgacgcctggaagtggatgacgatggcgggttcttgcgccgcggtgcccgttgccggtctcccctcgttgaggacgccgatgccaactcacctcagacttggcggctttatgccctgttcctcggccgcgcggagtcgcggcgccgccgtgctgggatgcgctcttggggccaggaagcagacgccgggagttctgaaccagttgctctgcagatacatgcgaagagatgggcatgaaggtgatgtgagcaatcaaggaagggatggtgctgttatgtttgggccagatgatgatggtgtaaagattcctactcaggtagagactcttgtaaagggcactgcagcggttgctgaaccagaatacaagcagatcccagatgtagattacctacagaaaaatcatatattcacatctggggcttctggaacaaatgcagctgttattaggggcgctttaagagctgaaaagccagagttgcttactgtaattttacctcaaagtctaaagaagcagcctcctgaaagccaagaactgttgtctaaagtacaaaacttactcgagaaaccacagtatgatcatttgccactaattgaggctagcaggttatgcaatatggacatcatctctaaggtccaacaggtaatctgcttcgcgttccacgacagcaaactgctgatggaaacatgccaggaggccatgaaccttcggaagatcgtgacactcttctacttggattagctccggtagggatctagtctcctttttttttgggtccgtggcgtaggctaacgttggggggataaaaagcaagctgaacagtttagttagtttcggaatatattggataggtggtgcggtgaccttctattggaggagaaagtcattttgtttctcccattgttttgattcttgtcacaaagaaaccaataatcttgtcgatatgcctaattcgtcattgaagggaataagattattagctggagtatatttgttgttgacctcaaggattatagttagttcgtgctccagtttttccatctattttatgtcagtttcctgcttttttatttgagatgagatgtttatcttgattgatgtcttatttttcatttttcaagtgcattattaatatggttatatctttcaaaaagcgagttgggtaaaattaaatttcaacctcttggccgcgcttg

SEQ ID NO: 205790 - DNA, 2262 bp, Zea Mays
cgcgatacggcgataccggccgtcgccgtctcatgggctccggctccgactctcacggtctcactctcacctgctataagaaaaagggcccaacaactaccacgtcaaaacgttatgtttattcgatttcgtgtcccgtccgtttgacgaccgagccctccccctgccccccttttccagtttccttctcccttcctgccgctacggcggtggcggcaacgactcgcgcgggccggtcctaggttctcccggagcgggtgggcgggcgggcggttcggcgggatgggcacgccggagttccccaacctgggaaagcactgcagcgtcggcgactgcaaccagatcgacttcctccccttcacctgcgaccgctgcgaccatgtcttttgccttgatcaccgaagttatacatcacaccaatgcccaaatgcaaacatgaaagacgtcactgtcctcatctgcccactctgtgctaaaggtgttcgcctcaatccaagtgaagacccaaatatcacctgggatactcatgttaacactgattgtgatccatcaaattaccaaaaagtgatgaagaaaaagaaatgccctgttcctgggtgcagagagacactgacattttccaacaccatcagatgcaaagattgcaccagagaacactgcctaaagcacagatttgggcctgatcataagtgcccaggaccaagaaaagtggattctggctttccctttgtaagcatgctaaggagaagtcagaaagcggagacacgctcaaatagcagtaacaacaatggttcttcgtggtggagctccagtcttgtgaatgcagcaacgaatttcaaatcatcagccgaagctggaatgcagaagctgagcaccgtgactagccaagccttccagaaggctaaggatgggatcgccccaaatagcagcagcagcagtggtgaccttgtggagcaatgtgttcactgcccagcaagattttccaccgtgggggccttaattgaacatgttgagaaatcccaccagatcaactcacaaccaagtgaggccaggaatgaggattcacgaacactgcaattcaattatggttcattcaaacataaggcattggataaatccttaactaaaaaggttcctaaaaatcgtttgacttcaaatactaaactaacacaatgttgctctattgtagggatttttgaagcactaactgcattccccttctccccttctcccttcctgctgtgcgaagccgtgccccaaaccctctaccatcttatttcagttcccactctctaccatcttccaggaaaaaacactagcaatcttacatgagttccaagttttgcaggtcgttgctgtttgtgaatgtggtttggattatgacagacttcagttctgtccgacagatatgcaaaaaaagtactttgagaaacaatttgagttggctgaagcagtaaagctgcccattttcttcacatgtgtgctgctggtgaagacttctatgaaatcatgacacaaaatttgcacagattccctggtggggttacacattccttcactgactcaacagaagatcaggataggctactttcttttgagaagatgtttatcggtgttaatggttcctctctgaaaactaacggaaatcttgaggttgtacgaggcattcctgtcgagaggttgatgatggaaacagattctccatattgtgacataataaatactcatgctggaagccagtatgtaaaatctgtctggccatccaagaagaaagaaaagtatgagccagattcaacagtaaaaggtcgcaatgaaccttgtttagtcaggcaagttcttgaggtagtggcgggaagcaaagaaatttctgacatagaaggcctgagtagaactctgtaccacaacacatgcaggctcttctttcctcaggatcttgacgcgtctactaatgcgcagcttgagagtggtactgccgtccaggattgctgatgtcagagtgattttttttaaaaaatgtttccttttggttggcgtttggtttcgtacaacttccaatatgcctatgaaatgtttttggtcttataattttccctcgctgccaattttgccatgtttcatgagcctgatgacatgtcaggcaagtcctgactatgtacaagtaccctactgagactatgccctaaaatcatttagggctgagcatgtacaagtacagtttgatggctatgttgttcactacaatcaaacaacaactaagctcta

SEQ ID NO: 205791 - DNA, 2322 bp, Zea Mays
cgacgatggggctgggggctgcgatggcactgggcgacccaccggcggactacgcatccatcgcggcggtggggctgtttgtggcactcatgtgtgtcggcatcatcgtcgggcacctgctcgaggagaaccgctggatgaacgagtccatcaccacgctcttcatcgtgttaagccaagatgagacaccattcttgtacagcctcgtgtttggtgaaggtgttgtcaatgacacaacttctgttgtgttgttcaatgcaatccagaactttgatcctggaaatatcagcggtgccaaattactgaacttcattagcagtttcctttatttgttcggctccagcaccattcttggagtagcttctggacttcttagtgcttataccattaagaagttgtactttggcagcccggtaaagtctatcgctttgagcaacaccattttagccttggtgctggtttcaagagctgcttttgttttcccactatcctttctatcaaatttgaccaaaaaaactccaaatggaaagatatcttttaggcagcaggttattgtttggtgggcgggtctcatgagaggtgttgtgtctattgcgttggcttacaataaggcgtttgacttaatgtttccaaggttctgtggaagtgcgaggcattttgggaggtgtgcgaggcattttgggagggacatcatcatgcccaacttgaagtcgtccgtgaccacaacagcgagcgcggtggagtacatggatgaagtattgaaggcgttgccgctaggtgaggccaggaatgaggattcacgaacactgcaattcaattatggttcattcaaacataagggatttttgaagcactaactgcattccccttctccccttctcccttcctgctgtgcgaagccgtgccccaaaccctctaccatcttatttcagttcccactctctaccatcttccaggaaaaaacactagcaatcttacatgagttccaagttttgcaggtcgttgctgtttgtgaatgtggtttggattatgacagacttcagttctgtccgacagatatgcaaaaaaagtactttgagaaacaatttgagttggctgaagcagtaaagctgcccattttcttcacatgtgtgctgctggtgaagacttctatgaaatcatgacacaaaatttgcacagattccctggtggggttacacattccttcactgactcaacagaagatcaggataggctactttcttttgagaagatgtttatcggtgttaatggttcctctctgaaaactaacggaaatcttgaggttgtacgaggcattcctgtcgagaggttgatgatggaaacagattctccatattgtgacataataaatactcatgctggaagccagtatgtaaaatctgtctggccatccaagaagaaagaaaagtatgagccagattcaacagtaaaaggtcgcaatgaaccttgtttagtcagggatttttgaagcactgactgcattcccctttctcccttcctgctgtgcgaagccgtgccccaaaccctctaccatcttatttcagtccccactctctaccatcctccagggaaaaaacactagcaatcttacatgaattccaagttttgcatgtcgttgctgttggtgaatgtggtttggattatgacagacttcagttctgtccggcagatatgcaaaagaagtactttgagaaacaatttgagttggctgaagcagtaaaactgcccatgtttcttcacatgtgtgctgttggtgaagacttatgtgaaatcatgacacggaatttgcacagattccctggtgggttacccatttctttcactgactccgcagacgatcgggttaggctactttcttttgagaagaggcaagttcttgaggtagtggcgggaagcaaagaaatttctgacatagaaggcctgagtagaactctgtaccacaacacatgcaggctcttctttcctcaggatcttgacgcgtctactaatgcgcagcttgagagtggtactgccgtccaggattgctgatgtcagagtgattttttttaaaaaatgtttccttttggttggcgtttggtttcgtacaacttccaatatgcctatgaaatgtttttggtcttataattttccctcgctgccaattttgccatgtttcatgagcctgatgacatgtcaggcaagtcctgactatgtacaagtaccctactgagactatgccctaaaatcatttagggctgagcatgtacaagtacagtttgatggctatgttgttcactacaatcaaacaacaactaagctcta

SEQ ID NO: 205792 - DNA, 1627 bp, Zea Mays
atggggctgggggctgcgatggcactgggcgacccaccggcggactacgcatccatcgcggcggtggggctgtttgtggcactcatgtgtgtcggcatcatcgtcgggcacctgctcgaggagaaccgctggatgaacgagtccatcaccacgctcttcatcgtgttaagccaagatgagacaccattcttgtacagcctcgtgtttggtgaaggtgttgtcaatgacacaacttctgttgtgttgttcaatgcaatccagaactttgatcctggaaatatcagcggtgccaaattactgaacttcattagcagtttcctttatttgttcggctccagcaccattcttggagtagcttctggacttcttagtgcttataccattaagaagttgtactttggcagcccggtaaagtctatcgctttgagcaacaccattttagccttggtgctggtttcaagagctgcttttgttttcccactatcctttctatcaaatttgaccaaaaaaactccaaatggaaagatatcttttaggcagcaggcgtttgacttaatgtttccaaggttctgtggaagtgcgaggcattttgggaggtgtgcgaggcattttgggagggacatcatcatgcccaacttgaagtcgtccgtgaccacaacagcgagcgcggtggagtacatggatgaagtattgaaggcgttgccgctaggtgaggccaggaatgaggattcacgaacactgcaattcaattatggttcattcaaacataagggatttttgaagcactaactgcattccccttctccccttctcccttcctgctgtgcgaagccgtgccccaaaccctctaccatcttatttcagttcccactctctaccatcttccaggaaaaaacactagcaatcttacatgagttccaagttttgcaggtcgttgctgtttgtgaatgtggtttggattatgacagacttcagttctgtccgacagatatgcaaaaaaagtactttgagaaacaatttgagttggctgaagcagtaaagctgcccattttcttcacatgtgtgctgctggtgaagacttctatgaaatcatgacacaaaatttgcacagattccctggtggggttacacattccttcactgactcaacagaagatcaggataggctactttcttttgagaagatgtttatcggcaagttcttgaggtagtggcgggaagcaaagaaatttctgacatagaaggcctgagtagaactctgtaccacaacacatgcaggctcttctttcctcaggatcttgacgcgtctactaatgcgcagcttgagagtggtactgccgtccaggattgctgatgtcagagtgattttttttaaaaaatgtttccttttggttggcgtttggtttcgtacaacttccaatatgcctatgaaatgtttttggtcttataattttccctcgctgccaattttgccatgtttcatgagcctgatgacatgtcaggcaagtcctgactatgtacaagtaccctactgagactatgccctaaaatcatttagggctgagcatgtacaagtacagtttgatggctatgttgttcactacaatcaaacaacaactaagctcta

SEQ ID NO: 205793 - DNA, 2062 bp, Zea Mays
atggggctgggggctgcgatggcactgggcgacccaccggcggactacgcatccatcgcggcggtggggctgtttgtggcactcatgtgtgtcggcatcatcgtcgggcacctgctcgaggagaaccgctggatgaacgagtccatcaccacgctcttcatcgtgttaagccaagatgagacaccattcttgtacagcctcgtgtttggtgaaggtgttgtcaatgacacaacttctgttgtgttgttcaatgcaatccagaactttgatcctggaaatatcagcggtgccaaattactgaacttcattagcagtttcctttatttgttcggctccagcaccattcttggagtagcttctggacttcttagtgcttataccattaagaagttgtactttggcagcccggtaaagtctatcgctttgagcaacaccattttagccttggtgctggtttcaagagctgcttttgttttcccactatcctttctatcaaatttgaccaaaaaaactccaaatggaaagatatcttttaggcagcaggttctgtggaagtgcgaggcattttgggaggtgtgcgaggcattttgggagggacatcatcatgcccaacttgaagtcgtccgtgaccacaacagcgagcgcggtggagtacatggatgaagtattgaaggcgttgccgctagggatttttgaagcactaactgcattccccttctccccttctcccttcctgctgtcgttgctgtttgtgaatgtggtttggattatgacagacttcagttctgtccgacagatatgcaaaaaaagtactttgagaaacaatttgagttggctgaagcagtaaagctgcccattttcttcacatgtgtgctgctggtgaagacttctatgaaatcatgacacaaaatttgcacagattccctggtggggttacacattccttcactgactcaacagaagatcaggataggctactttcttttgagaagatgtttatcggtgttaatggttcctctctgaaaactaacggaaatcttgaggttgtacgaggcattcctgtcgagaggttgatgatggaaacagattctccatattgtgacataataaatactcatgctggaagccagtatgtaaaatctgtctggccatccaagaagaaagaaaagtatgagccagattcaacagtaaaaggtcgcaatgaaccttgtttagtcagggatttttgaagcactgactgcattcccctttctcccttcctgctgtgcgaagccgtgccccaaaccctctaccatcttatttcagtccccactctctaccatcctccagggaaaaaacactagcaatcttacatgaattccaagttttgcatgtcgttgctgttggtgaatgtggtttggattatgacagacttcagttctgtccggcagatatgcaaaagaagtactttgagaaacaatttgagttggctgaagcagtaaaactgcccatgtttcttcacatgtgtgctgttggtgaagacttatgtgaaatcatgacacggaatttgcacagattccctggtgggttacccatttctttcactgactccgcagacgatcgggttaggctactttcttttgagaagaggcaagttcttgaggtagtggcgggaagcaaagaaatttctgacatagaaggcctgagtagaactctgtaccacaacacatgcaggctcttctttcctcaggatcttgacgcgtctactaatgcgcagcttgagagtggtactgccgtccaggattgctgatgtcagagtgattttttttaaaaaatgtttccttttggttggcgtttggtttcgtacaacttccaatatgcctatgaaatgtttttggtcttataattttccctcgctgccaattttgccatgtttcatgagcctgatgacatgtcaggcaagtcctgactatgtacaagtaccctactgagactatgccctaaaatcatttagggctgagcatgtacaagtacagtttgatggctatgttgttcactacaatcaaacaacaactaagctcta

SEQ ID NO: 205794 - DNA, 1160 bp, Zea Mays
cagaaagttcaagggtcacaaccaagtgaggccaggaatgaggattcacgaacactgcaattcaattatggttcattcaaacataagggatttttgaagcactaactgcattccccttctccccttctcccttcctgctgtgcgaagccgtgccccaaaccctctaccatcttatttcagttcccactctctaccatcttccaggaaaaaacactagcaatcttacatgagttccaagttttgcaggtcgttgctgtttgtgaatgtggtttggattatgacagacttcagttctgtccgacagatatgcaaaaaaagtactttgagaaacaatttgagttggctgaagcagtaaagctgcccattttcttcacatgtgtgctgctggtgaagacttctatgaaatcatgacacaaaatttgcacagattccctggtggggttacacattccttcactgactcaacagaagatcaggataggctactttcttttgagaagatgtttatcggtgttaatggttcctctctgaaaactaacggaaatcttgaggttgtacgaggcattcctgtcgagaggttgatgatggaaacagattctccatattgtgacataataaatactcatgctggaagccagtatgtaaaatctgtctggccatccaagaagaaagaaaagtatgagccagattcaacagtaaaaggtcgcaatgaaccttgtttagtcaggcaagttcttgaggtagtggcgggaagcaaagaaatttctgacatagaaggcctgagtagaactctgtaccacaacacatgcaggctcttctttcctcaggatcttgacgcgtctactaatgcgcagcttgagagtggtactgccgtccaggattgctgatgtcagagtgattttttttaaaaaatgtttccttttggttggcgtttggtttcgtacaacttccaatatgcctatgaaatgtttttggtcttataattttccctcgctgccaattttgccatgtttcatgagcctgatgacatgtcaggcaagtcctgactatgtacaagtaccctactgagactatgccctaaaatcatttagggctgagcatgtacaagtacagtttgatggctatgttgttcactacaatcaaacaacaactaagctcta

SEQ ID NO: 205795 - DNA, 921 bp, Zea Mays
cagaaagttcaagggtcacaaccaagtgaggccaggaatgaggattcacgaacactgcaattcaattatggttcattcaaacataaggcattggataaatccttaactaaaaaggttcctaaaaatcgtttgacttcaaatactaaactaacacaatgttgctctattgtagggatttttgaagcactaactgcattccccttctccccttctcccttcctgctgtcgttgctgtttgtgaatgtggtttggattatgacagacttcagttctgtccgacagatatgcaaaaaaagtactttgagaaacaatttgagttggctgaagcagtaaagctgcccattttcttcacatgtgtgctgctggtgaagacttctatgaaatcatgacacaaaatttgcacagattccctggtggggttacacattccttcactgactcaacagaagatcaggataggctactttcttttgagaagatgtttatcggcaagttcttgaggtagtggcgggaagcaaagaaatttctgacatagaaggcctgagtagaactctgtaccacaacacatgcaggctcttctttcctcaggatcttgacgcgtctactaatgcgcagcttgagagtggtactgccgtccaggattgctgatgtcagagtgattttttttaaaaaatgtttccttttggttggcgtttggtttcgtacaacttccaatatgcctatgaaatgtttttggtcttataattttccctcgctgccaattttgccatgtttcatgagcctgatgacatgtcaggcaagtcctgactatgtacaagtaccctactgagactatgccctaaaatcatttagggctgagcatgtacaagtacagtttgatggctatgttgttcactacaatcaaacaacaactaagctcta

SEQ ID NO: 205796 - DNA, 1387 bp, Zea Mays
agaaagttcaagggtcacaaccaagttctgtggaagtgcgaggcattttgggaggtgtgcgaggcattttgggagggacatcatcatgcccaacttgaagtcgtccgtgaccacaacagcgagcgcggtggagtacatggatgaagtattgaaggcgttgccgctaggtgaggccaggaatgaggattcacgaacactgcaattcaattatggttcattcaaacataaggcattggataaatccttaactaaaaaggttcctaaaaatcgtttgacttcaaatactaaactaacacaatgttgctctattgtagggatttttgaagcactaactgcattccccttctccccttctcccttcctgctgtgcgaagccgtgccccaaaccctctaccatcttatttcagttcccactctctaccatcttccaggaaaaaacactagcaatcttacatgagttccaagttttgcaggtcgttgctgtttgtgaatgtggtttggattatgacagacttcagttctgtccgacagatatgcaaaaaaagtactttgagaaacaatttgagttggctgaagcagtaaagctgcccattttcttcacatgtgtgctgctggtgaagacttctatgaaatcatgacacaaaatttgcacagattccctggtggggttacacattccttcactgactcaacagaagatcaggataggctactttcttttgagaagatgtttatcggtgttaatggttcctctctgaaaactaacggaaatcttgaggttgtacgaggcattcctgtcgagaggttgatgatggaaacagattctccatattgtgacataataaatactcatgctggaagccagtatgtaaaatctgtctggccatccaagaagaaagaaaagtatgagccagattcaacagtaaaaggtcgcaatgaaccttgtttagtcaggcaagttcttgaggtagtggcgggaagcaaagaaatttctgacatagaaggcctgagtagaactctgtaccacaacacatgcaggctcttctttcctcaggatcttgacgcgtctactaatgcgcagcttgagagtggtactgccgtccaggattgctgatgtcagagtgattttttttaaaaaatgtttccttttggttggcgtttggtttcgtacaacttccaatatgcctatgaaatgtttttggtcttataattttccctcgctgccaattttgccatgtttcatgagcctgatgacatgtcaggcaagtcctgactatgtacaagtaccctactgagactatgccctaaaatcatttagggctgagcatgtacaagtacagtttgatggctatgttgttcactacaatcaaacaacaactaagctcta

SEQ ID NO: 205797 - DNA, 1169 bp, Zea Mays
gaaagttcaagggtcacaaccaagttctgtggaagtgcgaggcattttgggaggtgtgcgaggcattttgggagggacatcatcatgcccaacttgaagtcgtccgtgaccacaacagcgagcgcggtggagtacatggatgaagtattgaaggcgttgccgctaggtgaggccaggaatgaggattcacgaacactgcaattcaattatggttcattcaaacataaggcattggataaatccttaactaaaaaggttcctaaaaatcgtttgacttcaaatactaaactaacacaatgttgctctattgtagggatttttgaagcactaactgcattccccttctccccttctcccttcctgctgtgcgaagccgtgccccaaaccctctaccatcttatttcagttcccactctctaccatcttccaggaaaaaacactagcaatcttacatgagttccaagttttgcaggtcgttgctgtttgtgaatgtggtttggattatgacagacttcagttctgtccgacagatatgcaaaaaaagtactttgagaaacaatttgagttggctgaagcagtaaagctgcccattttcttcacatgtgtgctgctggtgaagacttctatgaaatcatgacacaaaatttgcacagattccctggtggggttacacattccttcactgactcaacagaagatcaggataggctactttcttttgagaagatgtttatcggcaagttcttgaggtagtggcgggaagcaaagaaatttctgacatagaaggcctgagtagaactctgtaccacaacacatgcaggctcttctttcctcaggatcttgacgcgtctactaatgcgcagcttgagagtggtactgccgtccaggattgctgatgtcagagtgattttttttaaaaaatgtttccttttggttggcgtttggtttcgtacaacttccaatatgcctatgaaatgtttttggtcttataattttccctcgctgccaattttgccatgtttcatgagcctgatgacatgtcaggcaagtcctgactatgtacaagtaccctactgagactatgccctaaaatcatttagggctgagcatgtacaagtacagtttgatggctatgttgttcactacaatcaaacaacaactaagctcta

SEQ ID NO: 205798 - DNA, 1025 bp, Zea Mays
aagaaccgtgcgccgctggaaaattgtgaacacctacaatagcgtaggcaatgaagcacggaacctatagctgacctagcgagctgatcggctctactcccttctcttgttcctttcttctctccgggctcacctaccggatcatcctccatggccaccctcgccttgccgccgaccaccaaggctgccggccaggacgccacccaggaaagcctagcagagaatcctgccaaggacgccgcagatccgggcagcatggagtccgagtgggttcttctcggaaaatcggacatcgtcccggccgatgtggccgccgccgccgccgcggggcaccaccacctcaacttctcgccgctgccgatgatccctatctgggtgcagatggttctcgggggcgtggtttacacggctgtgccgttctacaagagggtgctgaaggtcgaaggtgaaacgttggccaatgtagaaactgcagtggaggtcgtggagcatgtcgccgaggtgacggagaagttggctgcagatgcggccagttccctgccagagaacggatccctgcacaaggttgccgtggaggtggagtgcgttgctgaagcggtggataaggatgcacatgaggttgaagcagtcatcgataaggttgaggaggtgagcgagaagatcgatgctacagtggaaccggtcatcgaagagcttgagaaggacctgataccgaaccccagatcctctagtggatcagatgcccagaaatgacagttcatgtaaattgggagggaaagctggcgtgtgcgtgtccctggctgtctgtaaatttgtaaatctctcttcgttgtttcctaatgccctatgcgtgtaaactgtaaatacaactaagatacctcatgaactgcaacgacgccacggaatagtaagacgtggtacatgattgtgtcattgtgtgtgtgtggctgtgcgtgctcgaatctggacatctgattgtcaaaagtactggcaacatttacttgcaaaccaaacgccatgttagc

SEQ ID NO: 205799 - DNA, 1965 bp, Zea Mays
ctcgggttcctcttcctgctgcgattcatcccgttcttgccgtctacgggagcgcgtttcctggtcaactaaggccggcatgaagggctgctcagagcgcttgctgtttctgctgctgctgctggcatcgtcgtcgttactgtccgctgtgattgccgcgcagcagacttgccccgccgacctcgacagcaaatgcgatggtggcgcgtctgatgatgattgggagggggagttcttccccggcgtcccgaaaatcaagtatgagggtccaacaagcaagaaccctcttgcttataagtggtataacaaggaggaagtgattctcggtaagaagatgaaggattggatgcgcttcagtgttgcattctggcacacgttccgtggtactggcgctgatcctttcggtgctcctacaaagacttggccttgggaggacggcacaaattctttggccatggctaagagaagaatgagagctcactttgagttcatggagaagttgggagttgacaaatggtgcttccatgacagggatattgccccggatgggaagactcttgaagaaacaaattctaacttggatgagatagtccagctggcaaagcagctgcagggtgagaccaatataaagccattgtggggtaccgcacagctctttatgcatccacgttacatgcatggcgctgctacgagcccagaggttaaagtatatgcttatgcggctgcacaagttaagaaagctttggaggtcactcactacctaggtggtgaaaactatgtgttctggggtggaagagagggttaccaaactcttctgaatactgatatgaagagagaacttgaccatctggctaactttcttcaagctgctgttgactacaagaagaagattggattcaacggaacactattgatagagcctaaaccacaggaaccaacaaaacaccagtatgactgggatgttgcgactacgtttgcttttctacagaagtacggtcttacaggagagttcaagattaatgttgagtgcaaccatgctactctatctggacacagctgccatcatgaattggagactgcacggattaatgggctgcttggaaatatcgatgcaaacactggtgatcctcaagttggttgggacacagatcagttcatgacagacattgcagaggctactttggttatgtcaagtgtagttaagaatggtggacttgcacctggtggtttcaactttgatgccaaattgcggagggaaagtactgatgttgaggacatgtttcttgcccatatctccggaatggacaccctggcacgtggcctccgtaacgttgccaagctgattggggatggttccctagatgatcttgtccgcaagcggtaccagagctttgatagtgagattggtgccttgatcgaggctgggaaaggagactttgagacgctagaaaagaaggttctagagtggggtgagcccactgttgcatccggcaaacaggaactggcggagattctgttccagtctgccctatagatgatggtgccatgtccataggtccaggaataagcaagggtgcgccctcctccgaacacgcactcgtcctcctcaccacggggatgttatggttccgtgcgatggactacctacaatacagcatggaactgagataattaggatgtaatctgtcagaaaatttccagaattgttacctccttttgtttagagtggattagtggaatcaaactggagttagttaaagcttatcctacattttggtgtggcgatcgtgtttggtacttccttgaatgctgtttcatagtgtggcaacgatgttgctgcttagtcctacaactggtggtagtaatgtatcatagttcgaacgtttcttcacaataaattatgatctttaataaattttattagttcaaaaataaataaaaatagagttcgattttaatctaatt

SEQ ID NO: 205800 - DNA, 1915 bp, Zea Mays
cccttttaagggagcgcgtttcctggtcaactaaggccggcatgaagggctgctcagagcgcttgctgtttctgctgctgctgctggcatcgtcgtcgttactgtccgctgtgcagacttgccccgccgacctcgacagcaaatgcgatggtggcgcgtctgatgatgattgggagggggagttcttccccggcgtcccgaaaatcaagtatgagggtccaacaagcaagaaccctcttgcttataagtggtataacaaggaggaagtgattctcggtaagaagatgaaggattggatgcgcttcagtgttgcattctggcacacgttccgtggtactggcgctgatcctttcggtgctcctacaaagacttggccttgggaggacggcacaaattctttggccatggctaagagaagaatgagagctcactttgagttcatggagaagttgggagttgacaaatggtgcttccatgacagggatattgccccggatgggaagactcttgaagaaacaaattctaacttggatgagatagtccagctggcaaagcagctgcagggtgagaccaatataaagccattgtggggtaccgcacagctctttatgcatccacgttacatgcatggcgctgctacgagcccagaggttaaagtatatgcttatgcggctgcacaagttaagaaagctttggaggtcactcactacctaggtggtgaaaactatgtgttctggggtggaagagagggttaccaaactcttctgaatactgatatgaagagagaacttgaccatctggctaactttcttcaagctgctgttgactacaagaagaagattggattcaacggaacactattgatagagcctaaaccacaggaaccaacaaaacaccagtatgactgggatgttgcgactacgtttgcttttctacagaagtacggtcttacaggagagttcaagattaatgttgagtgcaaccatgctactctatctggacacagctgccatcatgaattggagactgcacggattaatgggctgcttggaaatatcgatgcaaacactggtgatcctcaagttggttgggacacagatcagttcatgacagacattgcagaggctactttggttatgtcaagtgtagttaagaatggtggacttgcacctggtggtttcaactttgatgccaaattgcggagggaaagtactgatgttgaggacatgtttcttgcccatatctccggaatggacaccctggcacgtggcctccgtaacgttgccaagctgattggggatggttccctagatgatcttgtccgcaagcggtaccagagctttgatagtgagattggtgccttgatcgaggctgggaaaggagactttgagacgctagaaaagaaggttctagagtggggtgagcccactgttgcatccggcaaacaggaactggcggagattctgttccagtctgccctatagatgatggtgccatgtccataggtccaggaataagcaagggtgcgccctcctccgaacacgcactcgtcctcctcaccacggggatgttatggttccgtgcgatggactacctacaatacagcatggaactgagataattaggatgtaatctgtcagaaaatttccagaattgttacctccttttgtttagagtggattagtggaatcaaactggagttagttaaagcttatcctacattttggtgtggcgatcgtgtttggtacttccttgaatgctgtttcatagtgtggcaacgatgttgctgcttagtcctacaactggtggtagtaatgtatcatagttcgaacgtttcttcacaataaattatgatctttaataaattttattagttcaaaaataaataaaaatagagttcgattttaatctaatt

SEQ ID NO: 205801 - DNA, 1933 bp, Zea Mays
ggaatccccttttaagggagcgcgtttcctggtcaactaaggccggcatgaagggctgctcagagcgcttgctgtttctgctgctgctgctggcatcgtcgtcgttactgtccgctgtgattgccgcgcagcagacttgccccgccgacctcgacagcaaatgcgatggtggcgcgtctgatgatgattgggagggggagttcttccccggcgtcccgaaaatcaagtatgagggtccaacaagcaagaaccctcttgcttataagtggtataacaaggaggaagtgattctcggtaagaagatgaaggattggatgcgcttcagtgttgcattctggcacacgttccgtggtactggcgctgatcctttcggtgctcctacaaagacttggccttgggaggacggcacaaattctttggccatggctaagagaagaatgagagctcactttgagttcatggagaagttgggagttgacaaatggtgcttccatgacagggatattgccccggatgggaagactcttgaagaaacaaattctaacttggatgagatagtccagctggcaaagcagctgcagggtgagaccaatataaagccattgtggggtaccgcacagctctttatgcatccacgttacatgcatggcgctgctacgagcccagaggttaaagtatatgcttatgcggctgcacaagttaagaaagctttggaggtcactcactacctaggtggtgaaaactatgtgttctggggtggaagagagggttaccaaactcttctgaatactgatatgaagagagaacttgaccatctggctaactttcttcaagctgctgttgactacaagaagaagattggattcaacggaacactattgatagagcctaaaccacaggaaccaacaaaacaccagtatgactgggatgttgcgactacgtttgcttttctacagaagtacggtcttacaggagagttcaagattaatgttgagtgcaaccatgctactctatctggacacagctgccatcatgaattggagactgcacggattaatgggctgcttggaaatatcgatgcaaacactggtgatcctcaagttggttgggacacagatcagttcatgacagacattgcagaggctactttggttatgtcaagtgtagttaagaatggtggacttgcacctggtggtttcaactttgatgccaaattgcggagggaaagtactgatgttgaggacatgtttcttgcccatatctccggaatggacaccctggcacgtggcctccgtaacgttgccaagctgattggggatggttccctagatgatcttgtccgcaagcggtaccagagctttgatagtgagattggtgccttgatcgaggctgggaaaggagactttgagacgctagaaaagaaggttctagagtggggtgagcccactgttgcatccggcaaacaggaactggcggagattctgttccagtctgccctatagatgatggtgccatgtccataggtccaggaataagcaagggtgcgccctcctccgaacacgcactcgtcctcctcaccacggggatgttatggttccgtgcgatggactacctacaatacagcatggaactgagataattaggatgtaatctgtcagaaaatttccagaattgttacctccttttgtttagagtggattagtggaatcaaactggagttagttaaagcttatcctacattttggtgtggcgatcgtgtttggtacttccttgaatgctgtttcatagtgtggcaacgatgttgctgcttagtcctacaactggtggtagtaatgtatcatagttcgaacgtttcttcacaataaattatgatctttaataaattttattagttcaaaaataaataaaaatagagttcgattttaatctaatt

SEQ ID NO: 205802 - DNA, 1404 bp, Zea Mays
cgcacacagaccgaccagccgcagcccgtagcgcacctgcctgcgcccgccgcctccgtcatccactcaacctcgcccctcggccactgccgcccggcgcccgcccgcctgccgcaccggccgaatcatccgacggcccttaagctgaggcggtgtggcctaagttgcagcgcggcggtcgccccgagtcgtccacttcggccccgacaggctgtccacggtggcgcgaactgcccctcgccggttcggccccgcccgcccgtagcagctcaccagagaactagcctctcgtcggccttccccaggtctgcgcgtggcgcggcgccgcagcaaagctccacgcgtgcgtgtccgccacccgccgtcccgcccgggccgccgtcgttgctcgtcggtgaacgacgtctcgctggcttcagggtatcagcgcgttcttcgagcggcagcaacgacaaacgggagaaggaagagaactcgtggagaaggcgaagcgggacgatgcagcccaagatcagcgcgttcttcgagcggcaggagacggacccagatccgattagtggcgacggtgaggggaacgggcagggaaacgtcggcgcggcgacggaggcgaagcggaaggccaatggctgcaggctcgatgggctcgtcagcaagaagaggaactacgcgcagctccatctggaactagggcagcctgatttcgtcctccacacgtgctccgtgtgcggcatgatgtacgcccgagggaacgacgaagacgagaaggttcacagggcgtaccacaagagctactccgagggagtccctttcaagggttggaaaaaagagacagtgatagcgaggtccgagggcggtgatcgggttgttcttgcaactgacgagaactcttgtatgtcgaaaagtaagtggtatggtctatgcaagttatgtgatgtcaaacaaatatggcaggtcagagaggtgatcacagtggtggagaaggagctgggatttggtgaagggaaactcctgcataagctttgcaaggtgtatctatacatatctgcacaaaggatcgtggggtgccttgtcactgaaccgataaaaacaggacatagagttatcccaagctccacggaaggaagccctaatgatttgccagttagtagtactgagcgaggaaaaaatggtcatacattagagttcggcagtattagtttcaagagggaaatcataaggcggcacagtcgttcggtcaagaacaaagaagagtgccaggaccctggtgccatactttgcgaaacggaagctgttcctgcgctttgtggattcgagccatctgggtggcaccatcgtgcagaagaaaacgaattgcctcaaaactaatggacgttgcaagatcattttcaagcatgcagtgttctg

SEQ ID NO: 205803 - DNA, 808 bp, Zea Mays
cgcgggtgctgctgcggaggcccaggaccgaaattgaactgcagttggtgaggtggcggcggaccgggtggcggcgggggcgggggcccagcgtggtagggcggcaccggcatcctgttgtagggcgcctgcggcggcggcgtgtacggattcatctgcgacgggtagccgccctgcggaggcggcggtgcgtacgacctgtaagacgccatcgcgcggcagctagggttcctcggaacccgagccctagcacacagacaccgcgcctgcggacactgctcgctccccttctcctccgtcgccgccaccgcagaagcctctaccacgcgcgaccagctcgccgccgcgcccgccggggccgacggcctgcacgcgctcgccgagcaggtggtgcagctcgtgctcgccgacggctccggcgccagcagcccgcgcgtcgccttcgccgacggcgtcttcgtcgactcctcgctgaagctcaagccggccttcgaggaggtccccgtgggaaagtacagggccgacacccagtccgtcgacttccagaaaagtggtcatatcaaccagaacttatcaaggaagtgtgaagcattagttgtgtcaggtttggcagaatatggtgatgaaatagatgggattgtcccagctgatatcatgaagattcagcctatcctacaatggtcgtgatagatgagattcttcttgcaaacaagggagattgacctaaaattgcaaaacagttggtggatgtctacgcgcgcagtttaagatgtaatctctactattcttaagaagataccgtaggcgt

SEQ ID NO: 205804 - DNA, 1376 bp, Zea Mays
gtgccggctccatcttcttcgacccgcacgagcacggctgccatttcatcgaacaagcgccataccggacatggcaaccggatcccctcgccgccgtcctctgccgctcctcctcctgttcctgctcctcttcgccgccaacggcagggccaatgccgcccgccccggcggccccagccccataaagaacgtggtggtgctggcgctggagaaccggtcgttcgaccacatgctgggctggatgcgccgcctgttgggcctccccgtcgacgggctcaacggcacggagtgcaaccccaattccaactccacatcctccatctgcgtgtccgccgacgccgacctcgtcgtccccgacgacccgggccactccttcgaggacgtcctggagcaggtgttcggcaacgtctccgccgccgctgcgcagccgcagccctccatgtcgggcttcgtccgcagcgcgctctccgtcaacgcggtcctctcctccgccgtgatgcgcgccttccgcccctccctcctcccggccttctccgcgctcgcgccccaattcgccgtcttcgaccgctggttctcctccatcccggggcccacgcagcccaaccggctgttcctctactccgccacctcccgcggcgccgtcgcgcacgacaagctcgacctcctcctcggctacccgcagcgcaccatcttcgagtccctcgccgccgacggccacgacttcgccgtctacttcaagaccatccccaccgttctcttctaccgccgcctccgcgcgctccgctacgccgcccgcgccttccaccgctacgacgccgccttcaaggaacacgcccgacgcggcgtcctcccggcgctctccgtcatcgagcccaggtacttcgacctcacggggacccccgccgacgacgaccacccggcgcacgacgtcgccaacgggcagcgtctcgtcaaggacgtgtacgaggcgctccgggccagcccgcagtggaaccagacgctgctcatcgtcacctacgacgagcacggtggcttctacgaccacgtcgccacgcccaccgccggcgtgcccagccccgacggcatccggggcccgccgcccttcttcttcaagttcgaccgcctcggcgtcagggtgcccaccatcatggtctcgccgtggatcaagaagggcaccgtcgtcggccgcgccctcgggcccacggacacctccgagttcgaacactcctccattccggccaccatcaagaagatcttcaacctctcgtccgatttcctcaccaagagagacgcgtgggccggtaccttcgaccacatcttcaccgagctcgaccaaccaagaacagattgcccaggttaccctttgttactttcag

SEQ ID NO: 205805 - DNA, 1171 bp, Zea Mays
gtcaaattgctagggtgcatgttggaagttatggtctattggtaaggttgacatcattggagtaagttgctattcttcgaaggacctgtggacatggaaaaacgaagggcttgtcctccgtggcgaggagaagaatgtaacacatgatcttcacaaatccaatgtcctggagagacccaaggtgatatacaatgatcggactggcaagtatgtgatgtggatgcacgtagatgatgctaactacaccaaagcttcagttggtgtggccatcagtgactctccgacaggcccattcacttacctctacagcaagcgtccgcatgactgtgagagtagagacatgaccatcttcaaggatgatgatgggaaggcctacctgatatactcttccgaggacaacagcgagctccacattggcccgctaaccgatgactaccttgacgtcactgatgccatgcgaaggcttctcatcgcgcagcatcgagaagctcctgcgctcttcaagcatgaaggcacctactatatggtgacctctggctgtacaagctgggctccaaatactgcgctggcccacgcagcgacatcagtgatgggaccttgggagacactggggaacccctgtgtgggagggaatgaggtcttcagatcaacgacattcttctcccagagcacatttgtcttgccagttccagggctgccgggctcattcatcttcatggctgatcggtggaacccgtctgatcttagagattcgcggtatgtttggctgcctctgacgatcgggggagtccctgatgaagccgcagactacagcttcatgttccctctctggtcccgggtgtccatttactggcacagacggtggcgtctccctgaggagtggagggattattgaaactctgaagtttctttttttttcataagaatcgaaggtcttatacgctgttacattgatagataccaaagtaaagtattgacatttgacacgttggtctacattgtataggtcagatgtagatgcagggttcgtaaatgtttagttttttgagtttgcactcaaatcaaataaaactattgtggccttttgggcgaggtagtttctagaataatctgtctgcattggtcttttcatttgatctataccctccgtcctcgaataaatcagttccta

SEQ ID NO: 205806 - DNA, 2017 bp, Zea Mays
cgcggttcttgctgaactatccggcctccttacgaatctatggccgccgatcatgatgagctgttttaccggactcttgatacagttctccatttctgtcgcttcatttttggccgtggccagggagcgggtagcaggccgtgattagctgctacaattcaggccccattcatgctgctccactccaatcgcatctttcttgattcggcgcgccaatcagcctcttcttttcataaattccaaccgctgtttctttccgttctagcttgtgcagttttcagcttaactcctccacttttgctgcagcgcgtatcggttggagtagataagcggcgccatgggtatgaggagcaggcacccaaaggcgttgggtttccgctgccacccggcaagccaccggtccctaactctggcactatggagcctagcggcattggtcgtcgttgtgaatttccatcttctcatcgttcataaggaggacgatgagagtatgagcacacacgagatccgccgatcgattatgagggagctggaggtggtggaggaggagaagttccggctagctcctccccggagccggaggaatccccgggctgtgcgccgcaagggagagaagaagaagcctacaatagtggatgagttcctggatgagtcttcggctgtgcatgacatgttcttcccagaactgaatacggctgtagatccaatcaatggtgcaaatggcagcaagtacttctactacccaggcagaatttggttggacactgacggaaaaccaattcaagctcatggaggaggtgtcctctatgataagaggaccaccacctatttcttctacggggagaataaggatggcaaaacctacagagctcataggaagggagcagacagggttgacatcattggagtaagttgctattcttcgaaggacctgtggacatggaaaaacgaagggcttgtcctccgtggcgaggagaagaatgtaacacatgatcttcacaaatccaatgtcctggagagacccaaggtgatatacaatgatcggactggcaagtatgtgatgtggatgcacgtagatgatgctaactacaccaaagcttcagttggtgtggccatcagtgactctccgacaggcccattcacttacctctacagcaagcgtccgcatgactgtgagagtagagacatgaccatcttcaaggatgatgatgggaaggcctacctgatatactcttccgaggacaacagcgagctccacattggcccgctaaccgatgactaccttgacgtcactgatgccatgcgaaggcttctcatcgcgcagcatcgagaagctcctgcgctcttcaagcatgaaggcacctactatatggtgacctctggctgtacaagctgggctccaaatactgcgctggcccacgcagcgacatcagtgatgggaccttgggagacactggggaacccctgtgtgggagggaatgaggtcttcagatcaacgacattcttctcccagagcacatttgtcttgccagttccagggctgccgggctcattcatcttcatggctgatcggtggaacccgtctgatcttagagattcgcggtatgtttggctgcctctgacgatcgggggagtccctgatgaagccgcagactacagcttcatgttccctctctggtcccgggtgtccatttactggcacagacggtggcgtctccctgaggagtggagggattattgaaactctgaagtttctttttttttcataagaatcgaaggtcttatacgctgttacattgatagataccaaagtaaagtattgacatttgacacgttggtctacattgtataggtcagatgtagatgcagggttcgtaaatgtttagttttttgagtttgcactcaaatcaaataaaactattgtggccttttgggcgaggtagtttctagaataatctgtctgcattggtcttttcatttgatctataccctccgtcctcgaataaatcagttccta

SEQ ID NO: 205807 - DNA, 1872 bp, Zea Mays
cgcggttcttgctgaactatccggcctccttacgaatctatggccgccgatcatgatgagctgttttaccggactcttgatacagttctccatttctgtcgcttcatttttggccgtggccagggagcgggtagcaggccgtgattagctgctacaattcacgcgtatcggttggagtagataagcggcgccatgggtatgaggagcaggcacccaaaggcgttgggtttccgctgccacccggcaagccaccggtccctaactctggcactatggagcctagcggcattggtcgtcgttgtgaatttccatcttctcatcgttcataaggaggacgatgagagtatgagcacacacgagatccgccgatcgattatgagggagctggaggtggtggaggaggagaagttccggctagctcctccccggagccggaggaatccccgggctgtgcgccgcaagggagagaagaagaagcctacaatagtggatgagttcctggatgagtcttcggctgtgcatgacatgttcttcccagaactgaatacggctgtagatccaatcaatggtgcaaatggcagcaagtacttctactacccaggcagaatttggttggacactgacggaaaaccaattcaagctcatggaggaggtgtcctctatgataagaggaccaccacctatttcttctacggggagaataaggatggcaaaacctacagagctcataggaagggagcagacagggttgacatcattggagtaagttgctattcttcgaaggacctgtggacatggaaaaacgaagggcttgtcctccgtggcgaggagaagaatgtaacacatgatcttcacaaatccaatgtcctggagagacccaaggtgatatacaatgatcggactggcaagtatgtgatgtggatgcacgtagatgatgctaactacaccaaagcttcagttggtgtggccatcagtgactctccgacaggcccattcacttacctctacagcaagcgtccgcatgactgtgagagtagagacatgaccatcttcaaggatgatgatgggaaggcctacctgatatactcttccgaggacaacagcgagctccacattggcccgctaaccgatgactaccttgacgtcactgatgccatgcgaaggcttctcatcgcgcagcatcgagaagctcctgcgctcttcaagcatgaaggcacctactatatggtgacctctggctgtacaagctgggctccaaatactgcgctggcccacgcagcgacatcagtgatgggaccttgggagacactggggaacccctgtgtgggagggaatgaggtcttcagatcaacgacattcttctcccagagcacatttgtcttgccagttccagggctgccgggctcattcatcttcatggctgatcggtggaacccgtctgatcttagagattcgcggtatgtttggctgcctctgacgatcgggggagtccctgatgaagccgcagactacagcttcatgttccctctctggtcccgggtgtccatttactggcacagacggtggcgtctccctgaggagtggagggattattgaaactctgaagtttctttttttttcataagaatcgaaggtcttatacgctgttacattgatagataccaaagtaaagtattgacatttgacacgttggtctacattgtataggtcagatgtagatgcagggttcgtaaatgtttagttttttgagtttgcactcaaatcaaataaaactattgtggccttttgggcgaggtagtttctagaataatctgtctgcattggtcttttcatttgatctataccctccgtcctcgaataaatcagttccta

SEQ ID NO: 205808 - DNA, 2112 bp, Zea Mays
ctccatccttcatcgtcatcgaccccgtaacccaaccgaaggcacgctgcccgggcacaggccaggtgttcggggcttcgggcgcccctccactccattctcaacacgcccccacgccgtacccaccacaatgtgacgggcgacctttccagagcgacgccgctgctcgctgttagccaaggaagccagacacccggccataccaattaccaaaaccactcatcaggtcgcgttgccagccgcacaaaccaagacagacccccctaatctctctggcatcgcggctcgtgctaagctaatcgaggcgcccccaaccacctctggccaagatctcgataaggactagcccatgcttagcctttcatttgtcctcttcgcttctctggatcaacctgccaatgcgcgtatcggttggagtagataagcggcgccatgggtatgaggagcaggcacccaaaggcgttgggtttccgctgccacccggcaagccaccggtccctaactctggcactatggagcctagcggcattggtcgtcgttgtgaatttccatcttctcatcgttcataaggaggacgatgagagtatgagcacacacgagatccgccgatcgattatgagggagctggaggtggtggaggaggagaagttccggctagctcctccccggagccggaggaatccccgggctgtgcgccgcaagggagagaagaagaagcctacaatagtggatgagttcctggatgagtcttcggctgtgcatgacatgttcttcccagaactgaatacggctgtagatccaatcaatggtgcaaatggcagcaagtacttctactacccaggcagaatttggttggacactgacggaaaaccaattcaagctcatggaggaggtgtcctctatgataagaggaccaccacctatttcttctacggggagaataaggatggcaaaacctacagagctcataggaagggagcagacagggttgacatcattggagtaagttgctattcttcgaaggacctgtggacatggaaaaacgaagggcttgtcctccgtggcgaggagaagaatgtaacacatgatcttcacaaatccaatgtcctggagagacccaaggtgatatacaatgatcggactggcaagtatgtgatgtggatgcacgtagatgatgctaactacaccaaagcttcagttggtgtggccatcagtgactctccgacaggcccattcacttacctctacagcaagcgtccgcatgactgtgagagtagagacatgaccatcttcaaggatgatgatgggaaggcctacctgatatactcttccgaggacaacagcgagctccacattggcccgctaaccgatgactaccttgacgtcactgatgccatgcgaaggcttctcatcgcgcagcatcgagaagctcctgcgctcttcaagcatgaaggcacctactatatggtgacctctggctgtacaagctgggctccaaatactgcgctggcccacgcagcgacatcagtgatgggaccttgggagacactggggaacccctgtgtgggagggaatgaggtcttcagatcaacgacattcttctcccagagcacatttgtcttgccagttccagggctgccgggctcattcatcttcatggctgatcggtggaacccgtctgatcttagagattcgcggtatgtttggctgcctctgacgatcgggggagtccctgatgaagccgcagactacagcttcatgttccctctctggtcccgggtgtccatttactggcacagacggtggcgtctccctgaggagtggagggattattgaaactctgaagtttctttttttttcataagaatcgaaggtcttatacgctgttacattgatagataccaaagtaaagtattgacatttgacacgttggtctacattgtataggtcagatgtagatgcagggttcgtaaatgtttagttttttgagtttgcactcaaatcaaataaaactattgtggccttttgggcgaggtagtttctagaataatctgtctgcattggtcttttcatttgatctataccctccgtcctcgaataaatcagttccta

SEQ ID NO: 205809 - DNA, 3698 bp, Zea Mays
cgacggaggaagccaagccggcagacgtctgcttctcttttgttcgtttttaccctcgcttcgcgtcgcgtcttccttctccctcctccgcatccggctgctgcccctgagcctgcccccaccccctcggcgcccccgccggagcgccgcctctacccttcgatcccggttccacgatgcagccgccgatggggagcgagaggaggacgccgcccggccgccctgtttcagccttcgtgccgggcgccgctgtcccgcctccaccgtttgccgccggtggcccgttcgctccgccgccgcggcagggagtgccgcctcctcagtctggtgctgcggcgcctgctttcggggctgcaccacccgccgcaatggggggtgggttcaggggtccaccgccgtcgcagggcccctacggtgcgggcacactgccccacggcccttttgcttccgcgccaccgcctcagggctctttcacctccgcgccaccgtctcagggctcctttgcctccgctccaccgtcccagagtccctttacttcccctccaccgtctcagggccccttcgctgctggaccaccgcctacgggcccttttgctgctacaccagcaccttttcgccctccaccgtcatcccttgcgcagccacaatctcccacgggaggcgctttgcctgcaccaccaacatatgcgaggccgccaccgccactacagtcacaagggtattaccctggtgcaccacctgcgaaccctcaatactcaatgtcaaggccagcatttcaacaaccaatgcagaatatgccacctcctccaatgggaccagctaccacatttggtaatcaggcagcttatccaagtgccgggcctccagtcggaggcacacttcagagcttagtggaggacttccagtcactgtcactgagctctacgcctgggtcacttgaccctggtgttgatgtaaaagggctgccaaggccattggatggtgacgaggaaccagttaagcttatggaggcatacccattgaattgccacccgaggtacttccgtctgacaacccatgcgattccggcatctcagtcattggtctccaggtggcatttgcctcttggagctgtggtgcacccacttgcagaatcacctgatggggatgaagtcccagttatcaactttgggtctgccggtgtcattcgctgtcgaagatgcaggacgtatataaatccttatgcgacatttgcagatgctggaaggaaatggcgctgcaatctttgcgcgttgctcaatgacgttcctggagagtacttttgtggtcttgatgctagtggcagaaggtacgatactgatcaaagacctgaactctctaagggaactgtagagtttgttgctccaacagaatatatggtgcggccaccgatgccgccttcctatttctttattattgatgtgtctgtatccgcagtacagagtggattgcttgaggttgttgcaaagaccatcaaatcatgccttgatgaacttccaggctttccacgaacacagattggattcttaacctttgacagcaccttgcattttcataacttcaagtcttctttgtcacagcctcaaatgatggtggttactgatttggatgatgtttttctgccattgcctgatgacctcttggttaatttggtcgactcaagacatgttgtggaatcatttcttgatagcttgccaaatatgtttcatgacaatgtaaatgtggagtctgctcttggtccagcacttaaagcagctttcatggttatgagtcaaattggggggaagttgcttgtcttccagagtactttgccatctcttggtattggtcgtttgaggttacgaggagacgatgtccgtgcatatggaacggataaggagcatactctgagggtaccagaagattccttctacaaacagatggctgctgaattcacaaaatatcagattgcagtggacatattttctttcagcgataagtactcagatatagcgtctttaggatctttggcgaagtatactggtggtcaggtgtaccactatgcatcattccagacacctacacatggtgacaaacttaaacttgagcttagtagggaccttacacgagagactgcatgggaatctgttatgcgtatcagatgtggaaaaggagtacggttcacaacctatcatggtcatttcatgctacggtccacagacctgttagcccttccagctgttgactctgataaagcttttgcaatgcaactgtcgctagaggagacattaatgaccacccagactgtatacttccaagtggcgttgctatatacatcatcctctggtgaaaggcgtatcagggtccacacagcagctgcacctgtggtcacagatcttagtgaaatgtatcgtcaagcagatactggtgccattgtgtcattgttgggtagaattgcgattgaaaattcactgtctgataagctggacagtgtccggcagcagttacagttgaagctcgttaaaagtttgaaggaataccgcaatttatatgttgtacaacaccggataggcgggagactgatttttcccgaatctctaaggtttttgccattgtacatcctggctatctgcaaatctcttgctcttcgtggaggttatgcagatgtttctcttgacgaacgatgcgctgctggtttctgcatgatgatattgcctgtaaaaaggctgctcaattttatctatccttctctgtacagagttgatgaagtactcacaatggaaccaaacaaggttgatgatgtttcattgaagcgattgccattaacgtttcagtgtttagatactggaggtttgtacctccttgatgatggcttcactttcctagtgtggttaggtaggatgctcccgcctgaacttgtgaacaacattcttggagtgagcttggcaaacttccctgacctatcaaagattgtattgagagagtgtgacaatgaattgtcaagaaatttcatgaaaatactaagatccctgcgggagaaggatccttcctatcaccagctatgccgtgtggtgcgacagggtgaacagccaagagaaggctatctgcttctatctaaccttgttgaggaccagatggctggaacaagtagttacgttgattggatacagcaaattcaccgtcaaacgcaaagctaatgacgaagaaccaacaggaagtgatgcttggaatttttgccttagtgtaaactgctgcaggatgtagattcagctgctgccggttccaaatcaatctcgcaaccccgtggcagatcttgttcagaagccagcggcccaacatgccggcttgtaagcagcatttgtctggcaaaaaaaatgctgttaatatctgtccatgtgattattctatttttgcacagtgagaatacagctgttgtatcggaataagtaggcaacaataccgtgggtattatacaactgggttcgtgtagtggcctgtgcgtttattaatcgcgttctttcctcatctggattcagttacttgccatttgggttataaatagttcatcgtgtaaactaactttttggctactttagtctgtttgtaatgggatatctcatttaatttaactgacattccattattcggacgttcctttatccgtggtttatttgtataaccactaaaacttgtagctttag

SEQ ID NO: 205810 - DNA, 4782 bp, Zea Mays
cagtcagtcagtcgctgccgtcgtcgcgccggcctcgatacgttcccgggaagtcggaggcgccgcgctcgtcacgccgccggctccgacgagatggaggatggcgtatctacttatactgtggatgaggcacttgtgtccatggggtttgggaaattccatgcattcgtgcttgcatactctgggatggctaaaatctctgaagcaatggagatgatgcttttgtcatttgttgggcaatcagttcaagctgagtgggggctttctgcacatgaagaaagcctcataacaagtgttgtctttgtggggatgcttgtaggagcatatgcttggggcatagtttcagataactatggaagaagggttgggttcaacttcacagctattgttactggaggagctggccttcttagcgcttttgctccaaattacttatctttgattgtactgagatttatggtcggtgttggactgggtggtgggccagttttaggttcttggttcctagagttcatccctgctcctaaccgaggaacatggatggttatgttctcagcattttggactgttggcacaataatggaagcttctcttgcttgggccgttatgccagcttttggctggaggtggctgctggcactctcatcattgccatcgtttgccctgctactcttctacccagtgacacttgagtcaccaagatacctatgcatgaagggtagaatagctgaagcagttcatgttctggaaacaatgtcacgcgtgaactgtgtttctctcccctctggccgacttgtctctggccatcgggtggaacttcatgatatcggggattcttcagaaacggcacagttggtgacatctaataagaataacactgctgatcgtggtagcaaatccgagattggaggcctcagtgccatcttaaagcttctatctccaaacttaatcagatcgactcttctactctggactgtctttcttggtcatgcctttctgtactatggtcttgttctactcacatcagaactaaatcatggaaataggatctgtggatcagaagagggggcagaagtgacaacaacagcccacatacatgatgagaatctctacagaaatgtatttataacaagctttggagaggtccctggtcttctcctgtcggctgccattgttgacatgatcgggcgcaagctctcgatgtcttccatgctttacatcagttgcctgtgcatatctccgcttatgttcgcccagacggaatcgctgacgaccatctttttgttctgtgcccgggtttgcatctctgcaagcttcactgttctgcacatctacgcccctgagatatacccaactgctgttagggccacgggtgtcgggtttgcaagctcgattgctcgctttggtggaatcctgtgccctctcgtggccgtcggcctggtgcacgcgtgccaccagatggcagctatcctgatattcatcacggtgatgctggcttcaggcatcgccgtgtcatacttccccctggaaacaagcggccgaaagctgagcgaccacgtcgccgccgcgtaagagctgattaattgaagaactgactttttgagagggatacaccaatacagaatcaaggcccaaggggccattattttttttgttcagttgttgacaaaggatacagtgggaaagaaagtgcaaaggaggcactagattgttacgttattatactgttgcttctcaatagaaatctacagatcactatatgatttttgttctcttgtcaatatggtattagtatgaattctaaacgccctcaaaattcattttttgtttcaaaagtgaaacgtctttttatatatgaattgggaaactaaaaaatgaaattccgttgccgggactcgaacccgggtctttcgggtgagagccgaatatcctgaccagctagactacaacggattctgtttatgttgtgcatagtaatttataagattacgtagagctattcacagtaatggcttagcgacattctcgctgctgcaatggcgacggtctcgttccatcactgtcccccgtcattctcgctgctccaatggcgacggtctcgttccatcccccgtctcttcctcctccgtctcctaattttggaaaggccatagtttcccatcgcgagacctgtatccccatggatccatgagagaaaggcggaggagatcaggcgacgtacgcgcgtgggggtctcctcctgcacgctctcagctgaaccgccccgtgctcccctgggcgcgccgcgcgcaatggcccgacgacggcgccccctaccgccgccgctgctcgtctggttggccgtcctcttctctgcggtggcgcccgctgtcgccaagaccgacaagtctgacgttgctgcgctcaatgtgatgttcaatagcatgaacaagccatcgcaattgtccggttggaaatcgagcggcggtgatccctgcgatgacgatgacgagtggaaagggatagagtgcagcggctcatctgtcacagaaattaacttgtcagggcttgaactcagtggctcgctaggatatcagctatcaagcttgaaatcagtaaccaaatttgatctcagcaataacaatctcaacggcgatcttccatatcagcttccaccaaacgtggttgaattaaatctttacggaaactctttaactggaggagttccttattcgatatctcagatgggtgatctggaaacactaaatttgggcaagaaccacctaagcgggcagttgacggatatgttttcagaacttccaaagctctcaacattggatctctccttcaaccgcttctcaggcagcctgcccaagagttttcagcacctaaaagacctcaagacgctgaatgtggagagcaaccaattcagtggtcatatagatgttctagcgaaacttcctctcgaggatctgaatctgcagaacaacaagtttactgggtggatccctagtaaactaaaagacatcagcaatctacagattggagggaaccagtggtcgtccggatcagctcctcctggtatggagaagggctctgcactggagggctcttcaggcggaggtggtcgaagtggagtaaacggtatcgccatcgcagctgtggtgatagcggtgcttgttgcagctctgattctcttgtctgtgttgaagaggaaccgttcttcttcctcgtctcattacctcatggatgagtcagcgatcaacatgaagccactggagcattcatcgtcaattagcagtacgacaccgtctgcaatgcctatcaagccgattagtgacaacgagttcgagaacaaactaaactattcgaggcggagcacagatccagtcaaccttgttgcttattcatcatcagacctccaagcagccactggaagcttccatagtagcaggttactaggtcaggggacaatcggtggtgtttacaaggcaaaatatgctgatggaacggtgctggccgttaagaagtttgatccattgagcttctcgggaagcagcgacttcatggatcttgtgaacagcatttccaagctgcatcatccaaacatctccgtgcttgttggttactgctcagagcctgggcactacatgttggtctatgactacaacatgaatggatccctctatgactttctgcacttgtccgacgactacagcaagccgctgacctgggacacccgcgtaaggattgctgttggtacagcttgtgctctggagtacctacatgacgcgtgttcacctccagtgatccacaagaacatcaaggcatccaacgtcttgctcgatgctgacctcaaccctcacctcactgactgcggccttgcatacttctatgaggatccgagtcagagcctgggaccagggtacgatcctccagagtgcacaaggccatcaggttacgttatgaagagcgatgtctactgctttggtgtcgtcatgcttcagctgttgaccggccggaagccctacgacagctcgaagcctagagcggagcagtccttggtcaagtttgtcggtccacagcttcatgacaccaacgccttggaagctctggcggatccaggccttcgtggcctatatccaccgaaagcattgtcccgtttcgccgatgtcctctcccgctgcgtccagtcggatccagaactccggccatccatgtcagaggtggtgcagttgcttctccagtgcgtccagcgcacaaccagcaacaggaggctgggtggccaccgcaccgtctcgcagcgaagcgacgattctgattggtgatgctctgtttctgcctccatcctgctgctgcggcccagttgctgaaactgtctcagaacagaaccgtaggtgtgcggcccttggcatgccgctgtacaaaagaaaatgctttattagacaatctggttgctcgaacagtgtggcaacaaataagtcggttgatttaggtaaaggtaaaagcagattgggtgttctagtgagtagtgacattgtatttgtactcataaacttaaaaacatatgaccagctaatttttaaaaatatataaaccatcttagaacaactccagcagggcctctcagatccctattctacttttgagaatgcaagagccaaaaaaaaaaaaaacccgaccctgaatagttggaggcactcaaatctccttctcgagcctttatttggtccgctctctctttgcgtgattggtccgcccgtccgtgtatggagctgcacttgcagagaattaaaagtgggc

SEQ ID NO: 205811 - DNA, 4787 bp, Zea Mays
cagtcagtcagtcgctgccgtcgtcgcgccggcctcgatacgttcccgggaagtcggaggcgccgcgctcgtcacgccgccggctccgacgagatggaggatggcgtatctacttatactgtggatgaggcacttgtgtccatggggtttgggaaattccatgcattcgtgcttgcatactctgggatggctaaaatctctgaagcaatggagatgatgcttttgtcatttgttgggcaatcagttcaagctgagtgggggctttctgcacatgaagaaagcctcataacaagtgttgtctttgtggggatgcttgtaggagcatatgcttggggcatagtttcagataactatggaagaagggttgggttcaacttcacagctattgttactggaggagctggccttcttagcgcttttgctccaaattacttatctttgattgtactgagatttatggtcggtgttggactgggtggtgggccagttttaggttcttggttcctagagttcatccctgctcctaaccgaggaacatggatggttatgttctcagcattttggactgttggcacaataatggaagcttctcttgcttgggccgttatgccagcttttggctggaggtggctgctggcactctcatcattgccatcgtttgccctgctactcttctacccagtgacacttgagtcaccaagatacctatgcatgaagggtagaatagctgaagcagttcatgttctggaaacaatgtcacgcgtgaactgtgtttctctcccctctggccgacttgtctctggccatcgggtggaacttcatgatatcggggattcttcagaaacggcacagttggtgacatctaataagaataacactgctgatcgtggtagcaaatccgagattggaggcctcagtgccatcttaaagcttctatctccaaacttaatcagatcgactcttctactctggactgtctttcttggtcatgcctttctgtactatggtcttgttctactcacatcagaactaaatcatggaaataggatctgtggatcagaagagggggcagaagtgacaacaacagcccacatacatgatgagaatctctacagaaatgtatttataacaagctttggagaggtccctggtcttctcctgtcggctgccattgttgacatgatcgggcgcaagctctcgatgtcttccatgctttacatcagttgcctgtgcatatctccgcttatgttcgcccagacggaatcgctgacgaccatctttttgttctgtgcccgggtttgcatctctgcaagcttcactgttctgcacatctacgcccctgagatatacccaactgctgttagggccacgggtgtcgggtttgcaagctcgattgctcgctttggtggaatcctgtgccctctcgtggccgtcggcctggtgcacgcgtgccaccagatggcagctatcctgatattcatcacggtgatgctggcttcaggcatcgccgtgtcatacttccccctggaaacaagcggccgaaagctgagcgaccacgtcgccgccgcgtaagagctgattaattgaagaactgactttttgagagggatacaccaatacagaatcaaggcccaaggggccattattttttttgttcagttgttgacaaaggatacagtgggaaagaaagtgcaaaggaggcactagattgttacgttattatactgttgcttctcaatagaaatctacagatcactatatgatttttgttctcttgtcaatatggtattagtatgaattctaaacgccctcaaaattcattttttgtttcaaaagtgaaacgtctttttatatatgaattgggaaactaaaaaatgaaattccgttgccgggactcgaacccgggtctttcgggtgagagccgaatatcctgaccagctagactacaacggattctgtttatgttgtgcatagtaatttataagattacgtagagctattcacagtaatggcttagcgacattctcgctgctgcaatggcgacggtctcgttccatcactgtcccccgtcattctcgctgctccaatggcgacggtctcgttccatcccccgtctcttcctcctccgtctcctaattttggaaaggccatagtttcccatcgcgagacctgtatccccatggatccatgagagaaaggcggaggagatcaggcgacgtacgcgcgtgggggtctcctcctgcacgctctcagctgaaccgccccgtgctcccctgggcgcgccgcgcgcaatggcccgacgacggcgccccctaccgccgccgctgctcgtctggttggccgtcctcttctctgcggtggcgcccgctgtcgccaagaccgacaagtctgacgttgctgcgctcaatgtgatgttcaatagcatgaacaagccatcgcaattgtccggttggaaatcgagcggcggtgatccctgcgatgacgatgacgagtggaaagggatagagtgcagcggctcatctgtcacagaaattaacttgtcagggcttgaactcagtggctcgctaggatatcagctatcaagcttgaaatcagtaaccaaatttacagtgatctcagcaataacaatctcaacggcgatcttccatatcagcttccaccaaacgtggttgaattaaatctttacggaaactctttaactggaggagttccttattcgatatctcagatgggtgatctggaaacactaaatttgggcaagaaccacctaagcgggcagttgacggatatgttttcagaacttccaaagctctcaacattggatctctccttcaaccgcttctcaggcagcctgcccaagagttttcagcacctaaaagacctcaagacgctgaatgtggagagcaaccaattcagtggtcatatagatgttctagcgaaacttcctctcgaggatctgaatctgcagaacaacaagtttactgggtggatccctagtaaactaaaagacatcagcaatctacagattggagggaaccagtggtcgtccggatcagctcctcctggtatggagaagggctctgcactggagggctcttcaggcggaggtggtcgaagtggagtaaacggtatcgccatcgcagctgtggtgatagcggtgcttgttgcagctctgattctcttgtctgtgttgaagaggaaccgttcttcttcctcgtctcattacctcatggatgagtcagcgatcaacatgaagccactggagcattcatcgtcaattagcagtacgacaccgtctgcaatgcctatcaagccgattagtgacaacgagttcgagaacaaactaaactattcgaggcggagcacagatccagtcaaccttgttgcttattcatcatcagacctccaagcagccactggaagcttccatagtagcaggttactaggtcaggggacaatcggtggtgtttacaaggcaaaatatgctgatggaacggtgctggccgttaagaagtttgatccattgagcttctcgggaagcagcgacttcatggatcttgtgaacagcatttccaagctgcatcatccaaacatctccgtgcttgttggttactgctcagagcctgggcactacatgttggtctatgactacaacatgaatggatccctctatgactttctgcacttgtccgacgactacagcaagccgctgacctgggacacccgcgtaaggattgctgttggtacagcttgtgctctggagtacctacatgacgcgtgttcacctccagtgatccacaagaacatcaaggcatccaacgtcttgctcgatgctgacctcaaccctcacctcactgactgcggccttgcatacttctatgaggatccgagtcagagcctgggaccagggtacgatcctccagagtgcacaaggccatcaggttacgttatgaagagcgatgtctactgctttggtgtcgtcatgcttcagctgttgaccggccggaagccctacgacagctcgaagcctagagcggagcagtccttggtcaagtttgtcggtccacagcttcatgacaccaacgccttggaagctctggcggatccaggccttcgtggcctatatccaccgaaagcattgtcccgtttcgccgatgtcctctcccgctgcgtccagtcggatccagaactccggccatccatgtcagaggtggtgcagttgcttctccagtgcgtccagcgcacaaccagcaacaggaggctgggtggccaccgcaccgtctcgcagcgaagcgacgattctgattggtgatgctctgtttctgcctccatcctgctgctgcggcccagttgctgaaactgtctcagaacagaaccgtaggtgtgcggcccttggcatgccgctgtacaaaagaaaatgctttattagacaatctggttgctcgaacagtgtggcaacaaataagtcggttgatttaggtaaaggtaaaagcagattgggtgttctagtgagtagtgacattgtatttgtactcataaacttaaaaacatatgaccagctaatttttaaaaatatataaaccatcttagaacaactccagcagggcctctcagatccctattctacttttgagaatgcaagagccaaaaaaaaaaaaaacccgaccctgaatagttggaggcactcaaatctccttctcgagcctttatttggtccgctctctctttgcgtgattggtccgcccgtccgtgtatggagctgcacttgcagagaattaaaagtgggc

SEQ ID NO: 205812 - DNA, 4878 bp, Zea Mays
cgctgccgtcgtcgcgccggcctcgatacgttcccgggaagtcggaggcgccgcgctcgtcacgccgccggctccgacgagatggaggatggcgtatctacttatactgtggatgaggcacttgtgtccatggggtttgggaaattccatgcattcgtgcttgcatactctgggatggctaaaatctctgaagcaatggagatgatgcttttgtcatttgttgggcaatcagttcaagctgagtgggggctttctgcacatgaagaaagcctcataacaagtgttgtctttgtggggatgcttgtaggagcatatgcttggggcatagtttcagataactatggaagaagggttgggttcaacttcacagctattgttactggaggagctggccttcttagcgcttttgctccaaattacttatctttgattgtactgagatttatggtcggtgttggactgggtggtgggccagttttaggttcttggttcctagagttcatccctgctcctaaccgaggaacatggatggttatgttctcagcattttggactgttggcacaataatggaagcttctcttgcttgggccgttatgccagcttttggctggaggtggctgctggcactctcatcattgccatcgtttgccctgctactcttctacccagtgacacttgagtcaccaagatacctatgcatgaagggtagaatagctgaagcagttcatgttctggaaacaatgtcacgcgtgaactgtgtttctctcccctctggccgacttgtctctggccatcgggtggaacttcatgatatcggggattcttcagaaacggcacagttggtgacatctaataagaataacactgctgatcgtggtagcaaatccgagattggaggcctcagtgccatcttaaagcttctatctccaaacttaatcagatcgactcttctactctggactgtctttcttggtcatgcctttctgtactatggtcttgttctactcacatcagaactaaatcatggaaataggatctgtggatcagaagagggggcagaagtgacaacaacagcccacatacatgatgagaatctctacagaaatgtatttataacaagctttggagaggtccctggtcttctcctgtcggctgccattgttgacatgatcgggcgcaagctctcgatgtcttccatgctttacatcagttgcctgtgcatatctccgcttatgttcgcccagacggaatcgctgacgaccatctttttgttctgtgcccgggtttgcatctctgcaagcttcactgttctgcacatctacgcccctgagatatacccaactgctgttagggccacgggtgtcgggtttgcaagctcgattgctcgctttggtggaatcctgtgccctctcgtggccgtcggcctggtgcacgcgtgccaccagatggcagctatcctgatattcatcacggtgatgctggcttcaggcatcgccgtgtcatacttccccctggaaacaagcggccgaaagctgagcgaccacgtcgccgccgcgtaagagctgattaattgaagaactgactttttgagagggatacaccaatacagaatcaaggcccaaggggccattattttttttgttcagttgttgacaaaggatacagtgggaaagaaagtgcaaaggaggcactagattgttacgttattatactgttgcttctcaatagaaatctacagatcactatatgatttttgttctcttgtcaatatggtattagtatgaattctaaacgccctcaaaattcattttttgtttcaaaagtgaaacgtctttttatatatgaattgggaaactaaaaaatgaaattccgttgccgggactcgaacccgggtctttcgggtgagagccgaatatcctgaccagctagactacaacggattctgtttatgttgtgcatagtaatttataagattacgtagagctattcacagtaatggcttagcgacattctcgctgctgcaatggcgacggtctcgttccatcactgtcccccgtcattctcgctgctccaatggcgacggtctcgttccatcccccgtctcttcctcctccgtctcctaattttggaaaggccatagtttcccatcgcgagacctgtatccccatggatccatgagagaaaggcggaggagatcaggcgacgtacgcgcgtgggggtctcctcctgcacgctctcagctgaaccgccccgtgctcccctgggcgcgccgcgcgcaatggcccgacgacggcgccccctaccgccgccgctgctcgtctggttggccgtcctcttctctgcggtggcgcccgctgtcgccaagaccgacaagtctgacgttgctgcgctcaatgtgatgttcaatagcatgaacaagccatcgcaattgtccggttggaaatcgagcggcggtgatccctgcgatgacgatgacgagtggaaagggatagagtgcagcggctcatctgtcacagaaattaacttgtcagggcttgaactcagtggctcgctaggatatcagctatcaagcttgaaatcagtaaccaaatttgatctcagcaataacaatctcaacggcgatcttccatatcagcttccaccaaacgtggttgaattaaatctttacggaaactctttaactggaggagttccttattcgatatctcagatgggtgatctggaaacactaaatttgggcaagaaccacctaagcgggcagttgacggatatgttttcagaacttccaaagctctcaacattggatctctccttcaaccgcttctcaggcagcctgcccaagagttttcagcacctaaaagacctcaagacgctgaatgtggagagcaaccaattcagtggtcatatagatgttctagcgaaacttcctctcgaggatctatagtggaaactacgcttcgtctttctgagaactaaagctataatggcttcccctttgtgctcaaggaatctgcagaacaacaagtttactgggtggatccctagtaaactaaaagacatcagcaatctacagattggagggaaccagtggtcgtccggatcagctcctcctggtatggagaagggctctgcactggagggctcttcaggcggaggtggtcgaagtggagtaaacggtatcgccatcgcagctgtggtgatagcggtgcttgttgcagctctgattctcttgtctgtgttgaagaggaaccgttcttcttcctcgtctcattacctcatggatgagtcaggtcacaaccggtcatttgccccgctagttgatgatggcagaacgatcaacatgaagccactggagcattcatcgtcaattagcagtacgacaccgtctgcaatgcctatcaagccgattagtgacaacgagttcgagaacaaactaaactattcgaggcggagcacagatccagtcaaccttgttgcttattcatcatcagacctccaagcagccactggaagcttccatagtagcaggttactaggtcaggggacaatcggtggtgtttacaaggcaaaatatgctgatggaacggtgctggccgttaagaagtttgatccattgagcttctcgggaagcagcgacttcatggatcttgtgaacagcatttccaagctgcatcatccaaacatctccgtgcttgttggttactgctcagagcctgggcactacatgttggtctatgactacaacatgaatggatccctctatgactttctgcacttgtccgacgactacagcaagccgctgacctgggacacccgcgtaaggattgctgttggtacagcttgtgctctggagtacctacatgacgcgtgttcacctccagtgatccacaagaacatcaaggcatccaacgtcttgctcgatgctgacctcaaccctcacctcactgactgcggccttgcatacttctatgaggatccgagtcagagcctgggaccagggtacgatcctccagagtgcacaaggccatcaggttacgttatgaagagcgatgtctactgctttggtgtcgtcatgcttcagctgttgaccggccggaagccctacgacagctcgaagcctagagcggagcagtccttggtcaagtttgtcggtccacagcttcatgacaccaacgccttggaagctctggcggatccaggccttcgtggcctatatccaccgaaagcattgtcccgtttcgccgatgtcctctcccgctgcgtccagtcggatccagaactccggccatccatgtcagaggtggtgcagttgcttctccagtgcgtccagcgcacaaccagcaacaggaggctgggtggccaccgcaccgtctcgcagcgaagcgacgattctgattggtgatgctctgtttctgcctccatcctgctgctgcggcccagttgctgaaactgtctcagaacagaaccgtaggtgtgcggcccttggcatgccgctgtacaaaagaaaatgctttattagacaatctggttgctcgaacagtgtggcaacaaataagtcggttgatttaggtaaaggtaaaagcagattgggtgttctagtgagtagtgacattgtatttgtactcataaacttaaaaacatatgaccagctaatttttaaaaatatataaaccatcttagaacaactccagcagggcctctcagatccctattctacttttgagaatgcaagagccaaaaaaaaaaaaaacccgaccctgaatagttggaggcactcaaatctccttctcgagcctttatttggtccgctctctctttgcgtgattggtccgcccgtccgtgtatggagctgcacttgcagagaattaaaagtgggc

SEQ ID NO: 205813 - DNA, 4922 bp, Zea Mays
cgctgccgtcgtcgcgccggcctcgatacgttcccgggaagtcggaggcgccgcgctcgtcacgccgccggctccgacgagatggaggatggcgtatctacttatactgtggatgaggcacttgtgtccatggggtttgggaaattccatgcattcgtgcttgcatactctgggatggctaaaatctctgaagcaatggagatgatgcttttgtcatttgttgggcaatcagttcaagctgagtgggggctttctgcacatgaagaaagcctcataacaagtgttgtctttgtggggatgcttgtaggagcatatgcttggggcatagtttcagataactatggaagaaggcagggtcttcctcactttttccattggctattggaatttgattatgaatgttctaacccttcaatctttttcgaaactttatggagtgttgcacactgttccatggttgggttcaacttcacagctattgttactggaggagctggccttcttagcgcttttgctccaaattacttatctttgattgtactgagatttatggtcggtgttggactgggtggtgggccagttttaggttcttggttcctagagttcatccctgctcctaaccgaggaacatggatggttatgttctcagcattttggactgttggcacaataatggaagcttctcttgcttgggccgttatgccagcttttggctggaggtggctgctggcactctcatcattgccatcgtttgccctgctactcttctacccagtgacacttgagtcaccaagatacctatgcatgaagggtagaatagctgaagcagttcatgttctggaaacaatgtcacgcgtgaactgtgtttctctcccctctggccgacttgtctctggccatcgggtggaacttcatgatatcggggattcttcagaaacggcacagttggtgacatctaataagaataacactgctgatcgtggtagcaaatccgagattggaggcctcagtgccatcttaaagcttctatctccaaacttaatcagatcgactcttctactctggactgtctttcttggtcatgcctttctgtactatggtcttgttctactcacatcagaactaaatcatggaaataggatctgtggatcagaagagggggcagaagtgacaacaacagcccacatacatgatgagaatctctacagaaatgtatttataacaagctttggagaggtccctggtcttctcctgtcggctgccattgttgacatgatcgggcgcaagctctcgatgtcttccatgctttacatcagttgcctgtgcatatctccgcttatgttcgcccagacggaatcgctgacgaccatctttttgttctgtgcccgggtttgcatctctgcaagcttcactgttctgcacatctacgcccctgagatatacccaactgctgttagggccacgggtgtcgggtttgcaagctcgattgctcgctttggtggaatcctgtgccctctcgtggccgtcggcctggtgcacgcgtgccaccagatggcagctatcctgatattcatcacggtgatgctggcttcaggcatcgccgtgtcatacttccccctggaaacaagcggccgaaagctgagcgaccacgtcgccgccgcgtaagagctgattaattgaagaactgactttttgagagggatacaccaatacagaatcaaggcccaaggggccattattttttttgttcagttgttgacaaaggatacagtgggaaagaaagtgcaaaggaggcactagattgttacgttattatactgttgcttctcaatagaaatctacagatcactatatgatttttgttctcttgtcaatatggtattagtatgaattctaaacgccctcaaaattcattttttgtttcaaaagtgaaacgtctttttatatatgaattgggaaactaaaaaatgaaattccgttgccgggactcgaacccgggtctttcgggtgagagccgaatatcctgaccagctagactacaacggattctgtttatgttgtgcatagtaatttataagattacgtagagctattcacagtaatggcttagcgacattctcgctgctgcaatggcgacggtctcgttccatcactgtcccccgtcattctcgctgctccaatggcgacggtctcgttccatcccccgtctcttcctcctccgtctcctaattttggaaaggccatagtttcccatcgcgagacctgtatccccatggatccatgagagaaaggcggaggagatcaggcgacgtacgcgcgtgggggtctcctcctgcacgctctcagctgaaccgccccgtgctcccctgggcgcgccgcgcgcaatggcccgacgacggcgccccctaccgccgccgctgctcgtctggttggccgtcctcttctctgcggtggcgcccgctgtcgccaagaccgacaagtctgacgttgctgcgctcaatgtgatgttcaatagcatgaacaagccatcgcaattgtccggttggaaatcgagcggcggtgatccctgcgatgacgatgacgagtggaaagggatagagtgcagcggctcatctgtcacagaaattaacttgtcagggcttgaactcagtggctcgctaggatatcagctatcaagcttgaaatcagtaaccaaatttacagtgatctcagcaataacaatctcaacggcgatcttccatatcagcttccaccaaacgtggttgaattaaatctttacggaaactctttaactggaggagttccttattcgatatctcagatgggtgatctggaaacactaaatttgggcaagaaccacctaagcgggcagttgacggatatgttttcagaacttccaaagctctcaacattggatctctccttcaaccgcttctcaggcagcctgcccaagagttttcagcacctaaaagacctcaagacgctgaatgtggagagcaaccaattcagtggtcatatagatgttctagcgaaacttcctctcgaggatctgaatctgcagaacaacaagtttactgggtggatccctagtaaactaaaagacatcagcaatctacagattggagggaaccagtggtcgtccggatcagctcctcctggtatggagaagggctctgcactggagggctcttcaggcggaggtggtcgaagtggagtaaacggtatcgccatcgcagctgtggtgatagcggtgcttgttgcagctctgattctcttgtctgtgttgaagaggaaccgttcttcttcctcgtctcattacctcatggatgagtcaggtcacaaccggtcatttgccccgctagttgatgatggcagaacgatcaacatgaagccactggagcattcatcgtcaattagcagtacgacaccgtctgcaatgcctatcaagccgattagtgacaacgagttcgagaacaaactaaactattcgaggcggagcacagatccagtcaaccttgttgcttattcatcatcagacctccaagcagccactggaagcttccatagtagcaggttactaggtcaggggacaatcggtggtgtttacaaggcaaaatatgctgatggaacggtgctggccgttaagaagtttgatccattgagcttctcgggaagcagcgacttcatggatcttgtgaacagcatttccaagctgcatcatccaaacatctccgtgcttgttggttactgctcagagcctgggcactacatgttggtctatgactacaacatgaatggatccctctatgactttctgcacttgtccgacgactacagcaagccgctgacctgggacacccgcgtaaggattgctgttggtacagcttgtgctctggagtacctacatgacgcgtgttcacctccagtgatccacaagaacatcaaggcatccaacgtcttgctcgatgctgacctcaaccctcacctcactgactgcggccttgcatacttctatgaggatccgagtcagagcctgggaccagggtacgatcctccagagtgcacaaggccatcaggttacgttatgaagagcgatgtctactgctttggtgtcgtcatgcttcagctgttgaccggccggaagccctacgacagctcgaagcctagagcggagcagtccttggtcaagtttgtcggtccacagcttcatgacaccaacgccttggaagctctggcggatccaggccttcgtggcctatatccaccgaaagcattgtcccgtttcgccgatgtcctctcccgctgcgtccagtcggatccagaactccggccatccatgtcagaggtggtgcagttgcttctccagtgcgtccagcgcacaaccagcaacaggaggctgggtggccaccgcaccgtctcgcagcgaagcgacgattctgattggtgatgctctgtttctgcctccatcctgctgctgcggcccagttgctgaaactgtctcagaacagaaccgtaggtgtgcggcccttggcatgccgctgtacaaaagaaaatgctttattagacaatctggttgctcgaacagtgtggcaacaaataagtcggttgatttaggtaaaggtaaaagcagattgggtgttctagtgagtagtgacattgtatttgtactcataaacttaaaaacatatgaccagctaatttttaaaaatatataaaccatcttagaacaactccagcagggcctctcagatccctattctacttttgagaatgcaagagccaaaaaaaaaaaaaacccgaccctgaatagttggaggcactcaaatctccttctcgagcctttatttggtccgctctctctttgcgtgattggtccgcccgtccgtgtatggagctgcacttgcagagaattaaaagtgggc

SEQ ID NO: 205814 - DNA, 1112 bp, Zea Mays
aagaaaaacgaaaaacgaaaaactagagggtggaggacaacggtgtccagcaaaagagagagaagaggaggggaggaggtggaagtagcaagaatggcgtgctccaccaatctctgcttctcggcgtcgattcctcctcttccagcctcttcttcttcttctgtctcctcccccttcctcacggtggagcgtgtgtcctatgttccgtccttgtccaggtggacaatccgatacaagcaattggggcatgcatatcagagaagccacgttctggcctttgctagtgcagatggtaaaagaagctcaggtgagaatgttgtgatggttgatccactggaagctaagcgtctagctgctaaacaaatgcaagaaattagggccaaagaaaagctgaagaggcgcagtcaagcagaagctatcaatgggccattggcaatgataggactgactgctggattgatagtggaagctcagacaggaaaaggcatcttagggcagctagctggatatctgacggctatttctagtttatttggacaataatagtgggccatctttggagatttattttttcacgttccttggccaggagagctcttatctgttgcatccacccaatttttgtgggggagttaatccgagcccagacttgtatgtttatcaagcacgcatgggctgaacattaattatacatgtaacggggtcgttctatgtagcccaaccatttctgatgatagaacctgctaaagagcagttcttcatcatacttaaatgtgaaatgttaagtctttgagaactctcctttttgcccaaaccattgagcctgtaacatgtcgattggactcagaagtctctgactggttgtttgtatatgcaggagctgatgacacctgcaatggaatgatgagtctattgcttcgatttaacgtgtgattacatatatcttgaacttattataagccagtatgtcgcctgtagagtgtagacaggtacttttataatatataatcacaacttccatatgtactgatacattttatctttgttctgcttgctactgttttaattgaatacaagacatactatggaatatttaaatttgtcatttgtag

SEQ ID NO: 205815 - DNA, 942 bp, Zea Mays
aagaaaaacgaaaaacgaaaaactagagggtggaggacaacggtgtccagcaaaagagagagaagaggaggggaggaggtggaagtagcaagaatggcgtgctccaccaatctctgcttctcggcgtcgattcctcctcttccagcctcttcttcttcttctgtctcctcccccttcctcacggtggagcgtgtgtcctatgttccgtccttgtccaggtggacaatccgatacaagcaattggggcatgcatatcagagaagccacgttctggcctttgctagtgcagatgtatgcatcaggcatttcgagtaggccatctattttttagggttggtaggattatgacatataataatgtttattgaacataactttatgtgcttttgaatttttttagaagtttaagttcaatttcttaggcctatatcccaaccaggataccgttattccttagtactctttactttatgcattatactaacccaggtcctggagaaagttattcaactttctttagtgccagttgctgcattcttattctgtataatacattctctcttggtagctatattgtttttttaatgaatcaggcatcacagggtaaaagaagctcaggtgagaatgttgtgatggttgatccactggaagctaagcgtctagctgctaaacaaatgcaagaaattagggccaaagaaaagctgaaggagctgatgacacctgcaatggaatgatgagtctattgcttcgatttaacgtgtgattacatatatcttgaacttattataagccagtatgtcgcctgtagagtgtagacaggtacttttataatatataatcacaacttccatatgtactgatacattttatctttgttctgcttgctactgttttaattgaatacaagacatactatggaatatttaaatttgtcatttgtag

SEQ ID NO: 205816 - DNA, 648 bp, Zea Mays
aagaaaaacgaaaaacgaaaaactagagggtggaggacaacggtgtccagcaaaagagagagaagaggaggggaggaggtggaagtagcaagaatggcgtgctccaccaatctctgcttctcggcgtcgattcctcctcttccagcctcttcttcttcttctgtctcctcccccttcctcacggtggagcgtgtgtcctatgttccgtccttgtccaggtggacaatccgatacaagcaattggggcatgcatatcagagaagccacgttctggcctttgctagtgcagatgtatgcatcaggcatttcgaaggcgcagtcaagcagaagctatcaatgggccattggcaatgataggactgactgctggattgatagtggaagctcagacaggaaaaggcatcttagggcaggagctgatgacacctgcaatggaatgatgagtctattgcttcgatttaacgtgtgattacatatatcttgaacttattataagccagtatgtcgcctgtagagtgtagacaggtacttttataatatataatcacaacttccatatgtactgatacattttatctttgttctgcttgctactgttttaattgaatacaagacatactatggaatatttaaatttgtcatttgtag

SEQ ID NO: 205817 - DNA, 1024 bp, Zea Mays
caagccaccaccaagtcaccaacccgagtccgatgtatacgcgcggcaacaataatatcctttcctttcttttgtataaaaaacacccgcctccgtctccatctccggtgagcaggaagagggggagggaggaggccaagagcgcagcggcgaagccatagccaagctcacccgatccagtccctgccgctcccagcgtgccacagccagtcccgcgctagctcagctcagctcagattcacgagctcgtctcccagatccagcttcgtctggtgctggtgggcggcgtggtttggtgctttgggggcctgcgtgttaagtttctgcgttctccgggctatctgcctgtcttgctgcggcctgcggcggcggggtggagatgggggtggccggggagaagttccagctggggacggtgggggcgctcagcctctcggtggtgtcctccgtctccatcgtcatctgcaacaaggctctcatgagctccctccgcttcaactttgccaccactttgacaagctggcatcttctggtcaccttctgctctctccatgtagcattatgtatgaaactctttgagcacaaacctttcgatgcaaggaccgtcatgggattcggagtgctcaatggcatatctattggacttctaaacttgagtttgggtttcaattctgttggtttctatcagatgacaaagctggctattattccctgtactgttatactggagacccttttcttcaggaagaaatttagtcggaacatcaagctttcccttagtgtgctccttcttggtgttggtgttgcaactataactgatctgcaactcaaccttgtgggatctgtattgtccctactggcaatcatcacaacctgcattgctcagatcgtatccttttgattgtacattgctcattattttcttttatatggcatatctgtccaagaatcatttgcatacaacaattgcatgtgtttgaggttgttaatattacaaaaggggcgcaaagcgctaatatatgaa

SEQ ID NO: 205818 - DNA, 1359 bp, Zea Mays
gcgcatccctcgtcctcgtgtctctttttgtccttgttcttctccgtcgccggtgcgctcgcctcctgcctccctccccctttgcgagcgatcgtgaggggatcgagatggcctcagcctcacaccaatccgagcccctcgactccgctgccaccagcgacaccgacgccccctcagataacatcccagaattaccatgccccccctgtcatatcgttaccaaacctggtcaactcccagtcgagtttcttgaaccctcagctgcccagaagttggtaattggatttgactgtgaaggtgttgatctctgtcgcaatggtgctctctgtattatgcagcttgcattccctgacgctgtttacctagttgatgctattgagggtggaaaagaacttattcaagcttgtaagcccgcacttgagtctgatcatatcaccaaagttattcatgattgtaaaagggacagcgaggctttgtattttcagtttggcatcaaactgcacaatgtgatggatacacagatcgcttattctctgatacaagagcaggagcagaaaggaaaaaagaagacatctgatgattacaattacatatcttttgtcagtcttcttgctgataaacgatactgtggaccctaacttttggacaattaggccattgtctgatatgatggttcgagctgccacagacgatgtccgcttccttctcaatatctacgagaaaatgatggaaaagttaaacaaagtatctttatggcgtctggcagttcgcagtgagctgtactgtaggtgcttttgcttaaatgacaaccagtttgcagattggtcacctcttcctcctgttcctgatggcattgaagctgatgtttatgttcctgaagttgatatcctatcagtcttagatgttcctcatgggaaaatgggacgagttattggcagaaaggggtcaacgataatggttgtgaaagaatcttgcaatgttgaaatccatattggtggtgctaaggggcctccagacagggttttcatcattggatcagtgaatgaagtcaggaaagccgaggccatcttcagaggccgaatgctggagttctagagatgttaccctttgcgccccatgtttcgactgctttatatcttttgaacgcaaaaagggggaaatacacaaaaggcgtatgcggtgccgtggatctcttgcccatccgtgaatcatgtgaagaaagtataaatgatttcaacttggcctatgtcagtgttgcgcttcctgtctcaactactcgccatctggttatacactctcgtttctggcctgtttcaggatgcggaagtatgctttagatttcactctcttaagcctcta

SEQ ID NO: 205819 - DNA, 1386 bp, Zea Mays
gcgcatccctcgtcctcgtgtctctttttgtccttgttcttctccgtcgccggtgcgctcgcctcctgcctccctccccctttgcgagcgatcgtgaggggatcgagatggcctcagcctcacaccaatccgagcccctcgactccgctgccaccagcgacaccgacgccccctcagataacatcccagaattaccatgccccccctgtcatatcgttaccaaacctggtcaactcccagtcgagtttcttgaaccctcagctgcccagaagttggtaattggatttgactgtgaaggtgttgatctctgtcgcaatggtgctctctgtattatgcagcttgcattccctgacgctgtttacctagttgatgctattgagggtggaaaagaacttattcaagcttgtaagcccgcacttgagtctgatcatatcaccaaagttattcatgattgtaaaagggacagcgaggctttgtattttcagtttggcatcaaactgcacaatgtgatggatacacagatcgcttattctctgatacaagagcaggagcagaaaggaaaaaagaagacatctgatgattacaattacatatcttttgtcagtcttcttgctgataaacgatactgtggcataccatatcctgaaaaggaagaagttcgtatccttctaaggcaggaccctaacttttggacaattaggccattgtctgatatgatggttcgagctgccacagacgatgtccgcttccttctcaatatctacgagaaaatgatggaaaagttaaacaaagtatctttatggcgtctggcagttcgcagtgagctgtactgtaggtgcttttgcttaaatgacaaccagtttgcagattggtcacctcttcctcctgttcctgatggcattgaagctgatgtttatgttcctgaagttgatatcctatcagtcttagatgttcctcatgggaaaatgggacgagttattggcagaaaggggtcaacgataatgtgttgaaatccatattggtggtgctaaggggcctccagacagggttttcatcattggatcagtgaatgaagtcaggaaagccgaggccatcttcagaggccgaatgctggagttctagagatgttaccctttgcgccccatgtttcgactgctttatatcttttgaacgcaaaaagggggaaatacacaaaaggcgtatgcggtgccgtggatctcttgcccatccgtgaatcatgtgaagaaagtataaatgatttcaacttggcctatgtcagtgttgcgcttcctgtctcaactactcgccatctggttatacactctcgtttctggcctgtttcaggatgcggaagtatgctttagatttcactctcttaagcctcta

SEQ ID NO: 205820 - DNA, 6989 bp, Zea Mays
cctctcctccctcttccttccgtcctcgtcctccccacccaatccaaccccctccccgccgtccccgaggctggctgtagccgtctctccggctctggctcgcaatccaacctccaatcgctcgcgaatgccgcctcctcgccgcggccccaaccccgccctaatccccaccccgtcgcctccgcattagccatttcccagccaacaatctcttctcctcgcgttagggttagggcaccccatctatctattgcgacagacaaaacgacatggacgagtaccaccaccaccaccagcgcatgggcgccgccgccgacttccgccgcgacctcgaggacctcgtctgcgaccacctcggcggctgcttctccccggccccgtcctcctcctcctcctgctccgccgcggcgggcggaggcgccgcggaccatgagcccgacggcgaggccgagtcgtcggcggtgcgcaggcggaggcgggagtcgcgcctcctcagccgctgggtcgcgcgccaggctgaggaggtgctctcctccatggagcgcgaggtcgagcgccgcaaccgcgaggccgagctcctcgcgctcgcgcgcctccacccggtctccaccctcgacccctcctccttcctcctctcctcgaccgccgcgccgccgccgccgcgcccgcaggcgccctccctcaacgcgccctcctcgctcctgcagatgtggcgcgagctcgagcacccccgcgccgacgccgcccaccccttcgaccgcgagccttccccggacaacgccgaccgtgaccgcgagcgcgtgcgccagatcgcgcgacgcctcacggacaccgccgccgccgctgccaccgccaccgccggtggggagtggctcggcgagacggagcggcagagggtcaggctcgtaagggagtgggtacagatggcgagccagccgcgcgactcccgtgcgggcacgcgcagggacgagcctgcagccgggaccgacagggacaggcgaggggagctggagcctcctcggctacgaggccggcaggcgcgattggatgtcatcagccgtatggccagggagcgtcagcgcgagctgcagggcatatcagggtaccatgtggtgtcggagtttcctcgccgcagccgcaaccgcatccagggactgcttaggggaaggttcttaaggaatggggcgcttgaagaggagcgaccaccatctgtggcagcgagggagcttgggcagttgaggcagagccatcgtatgcccgccttgagaccagagagtattgcaagtagtcaagatgttagccaatctgatgcttctgtggttgagagtgttagattactagataacgatgaatctcagcaaggggctgaggtggcttttactgatagtgaggataccacccaaactgtgctggagaatgtggatttacaagaaatgggtgcagatggtgctgaggcacactcaccaagtatacctatggatgacatggttatgatgcaagagtctctaactcaaggtgacaacatgcagcaagatgggacagaagatgacacgggattctggcagacatctttggatgccagtcttaataggtggcccagtgagattggtggaggtgccgacagaacttgggaagataatgcagaagacttacacagtgaaaccatggaggaggatgacagggagcatggtcatctacaagaagagcatgatggatggcatgataacgagtctcatggtaccatggagaactggcaagatgattaccaagattccgcacttgatacaggccccattcctaggaacgaaaataggtttatcccacctgacgatgacaatgtgtacagcatggaacttagagaattacttagcaggcgaagtgtgtccaatcttcttagtaatggttttggtgaaagtttggagcgattaataaggtcatatgttcaacagcgtggtcatggtcccctcaactggaatcttgatgcagccatgcacccttcaaatggaccaaatgcaaatcaggaacaagaacggaaccctgaaactcagcaattccaggctcctgtcaatagacctgcccttgttatccctcctccacctttgccaccacgacaaccattatggcacagagaactgcgtcataacaactggaacagcagacacagggaatgggatgctattaatgatttaagagctgacatgggtagacttcagcaagggatgagcagcatgcagaggatgctggaagcgtgcatggacatgcagctggaattgcagcgttctgtgagacaagaagtgtcagctgccttgaatcggtttgcaggacctgaaggattgtcgatggatctgtgtgacgatggatcaaaatggaatcaggtgaggacaggaacctgctgcgtatgctgtgattcacagattgattctctactgtacaggtgtgggcacatgtgtacttgctcgaaatgtgcaaatgagctggtgcgcagcggcggcaagtgcccgctctgccgggctcccatcgtggaggtggtccgcgcatactcggtaatgtaaggtggtggaagatacagtcagtaggaaaggaataagttgacggcaagcgaagttttgctgcaagtgaagaaaagcttgtttaggaaatggaccccctcccaatcccccaaaaaagaactctgtttttcctcctttgtgaatctataggggaggctacttacgttgcctgcatattcgttgccttgctgctcgtgtcgccgagacgcaggcggcaaagggcgtgccattaatttttggaagagcttgcgttgggaagtggtgtccccagtgcaagctgtttcactgtatatttatacactgactgatcctcaactgaagcagacaccagcaatgcattggtatataccaggttccttgatcactctctggtcctcccagtgagcattgagctgtgatgtgtcagtgtttggtgcgttacatctgcgtatcagtccgtagtgtggtagtgggtatgtagctttcagctcccgttgcctttggttgagtcgacttctctttcaaatgcacggtccgtgatgtttcgagctgctgttgtacgctacacggagaatgtacgcttacaaacatatcacatatgaatattgatgaaatatagtacagtattattgtgctgtgcatacgtctttcgcactcaggagcaacaggcatggtctgcaagatgacgtgcgacgcgtttgcaatcgcaaccatgctggggctgggccaaacagacgacaaccccataaacaggaataccagtgacgcaaaaaaaaagtatcagtgccatagaaatgtgagaatacaaagaattcttcaaaataaaaaaggcttactttgtacagtgctgaaaaaaacatatcaaaacagtattataaattcgagtgtgcactctgcttcccccattcctcaaaaatcgaaaataaataaaaacagatcgcgtctccattcgagtgtgcccgtcgtgattgggattcgggctcgtgattttcggcgcggggccgacggggtcatgtgaatgtgatcaggccgttgcagtcttgggagtctccagatcacacacgagtcccgtccgccgctgtagcagtactgcagtagaaatcctgtcctgtcgctccctccaccacacactgaactgaacacgcgcgcgcgcacgccattcccctcccgtagcgtgcggcgtgccgtcaatccaaaccaccaaaagcaatgccgccgccgtccgcaaacggcgccaccgccgccgccgccgccgcgagggacgacatgtccccggcggaggccaggctggcgatgatggagctggcgaacatggtgtcggtgccgatggcgctggcggccgtgatccggctgggcgtgccggccgcggtgtgggcgggcggcgccaacgcgcccatgtcagcggccgacctcctcccgccgggccacccggacccgtccgtcctggagcggctgctccgcctgctggcgtcccgcggcgttttctccgagtccaccgagtccacgcccaccacgcggcggcggctattcgcgctcaccgcggtgggccgcaccctggtgccggggcccgcctcgggcgcgtcctacgccgactacgtgctgcagcaccaccaggacgcgctggtggcggcgtggccccgcctgcacgaggccgtgcttgaccccgcggggcccgagccgttcgcgcgcgccaacgccggggtcaccgcctacgcctactacggcaaggaccaggacgccaaccgggtcatgctccgcgccatggcgggggtatccgagcccttcatgggtgccctcctcgacggctacggcgccgccggcgggtttcgcggcgtcgccacgctcgtagacgtcgggggaagctccggcgcctgcctcgagatgatcatgcgcagggtccccacaatcaccgagggcatcaacttcgacctccccgacgtcgtcgccgcagcgccgcccatcgccggagtgaggcatgttggcggagatatgttcaagtccatcccctccggtgatgccattttcatgaagtgggttctgacgacgtggaccgacgacgagtgcacggccatcctgaggaactgccacgccgctctgccggacggcggcaagctcgtggcctgcgagccggtggtgccggaggagacggacagcagcaccaggacgagggcgctgctggagaacgacatcttcgtcatgaccacctaccggacgcaggggagggagcgctccgaggaggagttccgccacctcggcgtcgacgccgcaggcttcaccgccttccgagccatctatctcgaccccttctatgctgtcctcgagtataccaagtgatctccactccatccgcccaaatctccttgcgagttgaatagcagaataacgaacagataaataaagctattccattcacgttggaatccgaatctctgcctactgtactcaacgttagcttctgtaaccaggatatctctttcaagcatttccaagcttttgatgacaaaatcataattttgagctcattattcaagcattatattctatacgaaagccttggacaacaagattcactctcgctattacatttgcgactgcaagttcaactcccttctattcagacagaccagaccagcagcagtgattagtaatgcaactggtaaggatccggagtgtcataacaagttcaacccatcaaccaagtacataaccatccacaacaattattgtttcttagctaaccacacagagccgtggccaccattttaagcgcctgctgcatcattccactttcttatcttctgccgccgcagcaccagcaccgtgcggttcggccaggggttttgattcactcgcaccctgcaaacacagcaccgtaggatgagcacaaaaagggcatggaagtaggatgaacatgtaggatgggcatacctcatcgttcttctgagctgcaggcttgtatggacatgcaggtgggactctttcaggtctccggtactcccatccaaatagccgatacaccttgctctggatacgataccgtccaataacataagcaacacaactttattaaaaaaacaaacggtgatcttcttcactggtgtggccagatgcacatgtaaatctacgaggctatgcccagttagaaagcacgccgccgtcggaattgctgcttcacaaagcaggtgtgcggttgtcacagaattgttggtaagcgactgaccatataaacctagaaaatataacgccaagctggctgttccaattcacatactcgaatctttgcgattcacagctacatcttccctagaggatcattgatttaatgttgttccagctaatacctcaaggcctaggcaaacttacgcatgagtacatggctagaactgggccggcatcactgaaccaatatgttgtaaaaaggtgcatattacttccccgcacaaaaaaaaacgatgtcttccatgccacctgccaacaaattgaaaataccgttccctttatttgctaaagtgtaaggacgttgatttattctcaacagttacctgtgtagtgctatccaatcaaaacaaggtatatttatgttaggagtggctgccatgtggggccattgccagggggcaagtggatttctacatctataaaaggacagttgtatgggctaataggaatcatcaattaccaattatcagaaatcaaacactatcatcccttatctcgtctctccagtttactactagctttctctctgctctctctacttgctatttctctctaggagcatctgtgacgctaacaatttagttattcatccactgcatctagaagttgagttttcagtttactgcacaagaagctgacatctagtgtcaacaatccgatacctgggctctcaaaaagctggacgcactgcgcacagggattcacagctcaaaatgcatactgctcatccatccatttactggacgaggagatcattgcgatgcaaatctgatgaggtgatctgggtctgggtgggtatgaactgctgacaggaaacgtgatcatgaaatccagaccaagtcgtcatagagaatgaaagcatctccggccgtagctggctcatacgaacgaatcacaaccgataaccggcagctaggtctgtctagttttgtttgtctgtaggaacggttgagttgacctctactttcctgctccgacgaatccacgagcccaagacagtagactagtagacaaacacgctccaagacccacaaggaccgctgaattgatagaaaccccaaccaccaccacgccgatgttctggatggatcttacagaaacccggggggtcggggagagagagagaggagggaggaaggaaccgtacgatgatgaggtcgatgaggtaagggagggcgttgaccaccgggatcaggaagagcggcagcaggcacgcgacgcagacctagggcaagcacatcc

SEQ ID NO: 205821 - DNA, 1424 bp, Zea Mays
ctccgggtcctccttctccttcgcgtccgccgccacctcgcagctcgtcttggaccggatcatggcgccgacgtcggtggaggtggcgccgctgacctccggccggctctcccacagcagcgggcctctcaactgcggcgggtcgctctccgacagcccgcccgtctcgccggagatcgacgacaccaagttctgcagagcggtgagtctgagcacgccgaagccgcagccgtacgcccgcggcgggagcaagacggtggggcggtggctcaaggaccgcagggagaggaggaaggaggaggcgcgggcgcacaacgcgcaggtgcacgccgccgtctccgtggcggccgtggccgcggccatcgccgcagtggcggcgggcaagggtgcgcgcacggacatggcggtggcgtcggccgcgacgctggtggccgcgcagtgcgtggaggccgcggaggccctgggcgccgagcgcgagcagctggcggccgccgtggcgtcggccgtcagcgtcaggacccctagcgacgtcgccaccgtcacggccgccgccgccacagcgctacgtggcgcggcgacgctcagggccagggcgctgaaggaggcgtggaacgtcgcggcggtgacccctgtggagaagggcgcgatgaccggaggcggcgggcatcacctgcacggcggcggctacaagcacgatggccagcagcagcggcagcggctcctcagggaggtggagagcagcaacagcagcagcagctgcttgagcgacgagctggtgctgggcgaggagaacaacttcctaggcatctgcacgcaggagctgctcgcgcgcggcaccgagctgctcaagcgcacccgcaaagggtcgttgcattggaaggtcgtctctgtgtacatcaaccgcgcggggctggtgatgctgaagatgaagagtcggcacgtcggtggcaccatcacgaagaagaagaagagcgtggtggtggacgtgtgccgggacgtggcagcgtggcccgggcggcacctgctggacagcggcgagcaccggcgctacttcggcctgcgcaccgcggagcagcgggtaatcgagttcgagtgcggcagccagcgcgagcatgaggtgtggaccaagggcgtcgcgcgcctcctggccgacgcccggaagcgctgagcgtctggtactgacagtgacaggtacccgggtcgccatgtaatgtaaagttaggtcgctgtaaagagcatgcatgcaaatgcagatgcagagatgatgttgtgtgatggcatcccgtcatcatgcatggtgattggggagttactgactatagaggagttaatgttgcctctaatcagttgaacttgctgaatgtacatttcacatcaccggacgtttcgatccatttatttttagaggaattgaaatttcgtac

SEQ ID NO: 205822 - DNA, 409 bp, Zea Mays
gaggaatatacccattgtttcgtccgtttcctttgcccgaacgtgcgctgtctctcgatcctgcatctctgcacctgctcgcctccccagggaggcagggacaatcgacttcgccgggcgccggctagccccaccggcgacgacaggcacagtggaccacggaggagaaagtactctgctttgaatgggaagtgccatgaacaaagacaaagttcatgacaaggagactcacggaacaagtagtgatataactgagaaaacacctgtggaaacggtgaagggtcccaatctgcttgagcgagcaaaggaagagatcgaggcccttgccggagctgttcatactaagatggagcaccattccagtccccacgcgaagaaggatgtatgatgcggatctctgagatctgaa

SEQ ID NO: 205823 - DNA, 1534 bp, Zea Mays
cagaatttcacgcatcgcacggggaacaccgatcgatcgatccctcgagaagcagagacaagtagcccgcccgcccgcccgcacacatagagacagagagaatcaagccgccgccgaccagtgacatggcgccctgggccattgccatccacggcggcgcgggcgtggacccgaacctcccggagcaccggcaggaggaggcgaagcgcgtgctggcgcggtgcctgcaggtgggcgtggacctgctgcgcgcgggcgcgcaggcgctggacgtcgtggaggccgtggtgcgcgagctggagacggaccccttcttcaactcggggcgcgggtccgcgctcacccgcgccggcaccgtggagatggaggccagcatcatggacggccgcggccgccgctgcggcgccgtgtccggcgtctccaccgtcaagaaccccgtgtccctggcgcgccgcgtcatggacaactcgccccactcgtacctcgccttcgacggcgccgaggagttcgcccgtgcgcagggcctggagaccgtggacaacagctacttcatcacggatgacaacgtcggcatgctcaagctcgccaaggaggccggcagcatcctgttcgactaccggatcccgctggcggggacggacacgtgcagcgcgctggcgggcgcggcggacagcaacggcggcggcgtgcacaaggcggggatggtcatgaacgggctgcccatcagcgtgtacgcgccggagacggtggggtgcgcggtggtggacgcgtcgggggcctgcgcggcggccacgtccacgggcgggctcatgaacaagatggccggccgcatcggggactcgccgctcatcggctccggcacctacgcgtgcggcgcctgcgccgtgtcgtgcacgggcgagggcgaggccatcatccgctgcacgctcgcgcgcgacgtggccgccgtcatggagtacaagggactgcccctgcagcaggccgtcgactactgcgtcaaggagcgcctcgaccagggattcgccggcctcatcgccgtctccggcaccggcgaggtggcgtacggattcaactgcaccggcatgttccggggctgcgccaccgaggacgggttcatggaggtcggcatctgggagtgagctggaggccccgccatctaaacacaaatcaaaatcagtgtgcgtgcagctgcatgtggccatcctgcgattgccatgtgtttaatctccgggtcacaggtgttgtcgatgatccaccactagtagtagcgattgcatggagattggtgctcgggtcaataatgatggtgattgtgacggagtgccctgcaaaataattaataattcgtgtgaaaaagttgattatatggttcctgacactatgatgttcggcctttttttttgtcttcatctgtctttcattcgattattaaacatgtcctcattgggttgatagaaatctgggctgatagttggcccaagcccaacccaagtttcggtaccccaaatggttcctagagttttgggccccaata

SEQ ID NO: 205824 - DNA, 1422 bp, Zea Mays
ccaccatgtgctgaacaaattcagtgaaccactgccctgtcttcttgtctattttttagggcacaatccagtgaggggatctctgctctcaagcttttgctggtcccttggtacctctgcagtttctgttgcggtttgagttcctctctcaatccccaggtcgatttgcccttgttcttcacagccaacgcccaacctggtgatcatacccaccgaaaccaacaccctgctgtggccaaagcgttccagtgagttgcatgcccgtgtagtcttcgttccgtggtcttcaaagaggcaggctgcattagaggagaggacaaaaaggtactttatgcaaaggctgacttgggaaaacaagtacagggagcgtgtacaatctgcaatacagaagtgtaatgctagtgagaagagacgattggggctgcttgaatctgagaaaagacgggtacagagtaggctcttgcagattcaacttgctgtgaagactgcctctaaccagagaaaatctgagaggagcaagttaaatgagcaattagaagaaaagcttcagaagcatttggcgaggctatgcttcacaccattggttatatttatgtccagcaagcagcaagagaactcggaaaaagtagagtttacataggtgtaccatttatagctgaatgagttagagacaaaggacaccacattaaatcacaggttaatgctgcttcaggttccaacaacttgataaaggagccaaggtggtagtggtcttattcaagctggtggccttgctgcagaactggacggtgatggtatcacagaaggataaagaaagagtggcagagcttatcaggaacatggtaaacaacattgaacaaaattagagtgttgttttctctattgtggttgaattttggctaggtagcaggagcctggtgttgttttgcatgaactgctgaaggtaaatgcagctgtggttgtatatttgtcgcatttttttgctggtaggtttttagatgagtttgcatagtggttgtttagattctggtgagtattaagttagtttgtgttttttaggtgttagagatcttcctacagtaagctgtaccaatgatctttggtctaaaaagggaaactggaagggggcactggagaagaaaattataaacaattaaacattgtcgaaattatcaacaagctagagagatatcaggcaatatatctgaactgaaacaatcgaccttgaatatgatcagccaacaaaacaaagacatctttatgcctcaataaagatactatttagttgcgtatgtgatctcatcaataccactttcgaaagctgcaccatcactttttcctccccccaccccaacacacacacacacacaaaaagagttcgagggtcataaactaatatgtttatgtgacaccttatttccg

SEQ ID NO: 205825 - DNA, 1482 bp, Zea Mays
cacgcaatcatgctgcacacaagaggactgttttaatgaaattcatgcacatgatatgccaaatggcttgggtttgaatcattcttccaactggtcgaccatgaactccaatagatcatcaaaaatcaagcccttatgggaggggagctgtgacgatgttgacatgtgtgagtttgcagacaaggatgaatatgcaccagtaggatctagctataatcctatgtcagaaccatttgataactgggaaaacaagtttgacacaagcccagagcaaagttctcatgaaccaatggaatttggtgaattggccaaacatgctgaaagcagcataactgagaatgattttacgtgtcctgttgagggaagttgtgaagatgatgtacttacagagtcaaaaataaaggcatttcttgaggagaaggctcttgacctgaaaaagctacaaacacctttgtatgaggagttctacaacactgtgcacggagggagttgccaaacttccaagggaaaattcccaatcagtccaaaattgccccctcgaggaaagtcacctccaagtaagacgaggggaggtgcatgtgacactttgaataacacagctcccgaaagctgcagcaagcaatttcctagaagcagtgtggtggagagcagccgaattttgagagaaattgcttctcctcaacttaatgagtttgctgataaactccatcttgatgcccaagatagcccaagcatcagcttcaccgaaaggcagaggaagtggaaagaagagttggaccaggaacttgagagggagagagtgatgagattagctggctgtggtaaaactccatctccaaatagaggttccaacgtgaaaaaggagtgtcatgctgaccattgaacagacagcagcattcgtcgtctctttatatcatcccacagaagacacaacaaatgatagtaaagtacacagtgtgccagagattggtggcaacagcagtacagcctgtgccaccttatcatttgcggtgttagccaagctatgatcgcagaaccgtcctgtacaaaatgacagatttacgttgaagtggatcggtacagggggcactcatcacccattcaccctcaaatcaggatcattgtcgctgctgcctagaaggacgtcatgctgacacttccctgattttaaggccgcatttatcattctttttgatgcagtgctatacgtcgggcttcggttatgtatggtttatgttgagaaaacggtcttgccaaaattgtgtttgtaagcccagattggcgtggggcttggttttgtatggagcttgtttgcgaaagtgtgtaataagatagtgatgcgagatacgggtcattctgcatttctgcttgcagaatgaatctgagcttttctgaagctacaactgactgtaattaataatttcaatcaaatcgtgagtcctgtgcctgtatgttacacccggatttaagagataaaaccag

SEQ ID NO: 205826 - DNA, 893 bp, Zea Mays
gttcagccttaaagattgattactctcaagttattgatacagcatacatatttaagtatgcaaatttaccaactactgcatcaccttccttgaacagtctgtgcaaggctattttggggtattcagttcgagaagaaggagaaccacataattgcttgaaggatgcagaagctgcgatgaatctagttcttgcaaagcttaagaatgagtttaatgaccccattgaaattgctgcaagtagtgtaactgaatctgatgtggtgaagttgctcgctcatagaattccagtgtacctgccttgtcaagagctgtgcaaaattttctctgggaaccccaatattgatgacaagattgattcgagaatacgaggtgaattttattccacatgtatttcattcaatgacgtagatgaggtggacaaggcatttgaagaactggatggccaaaagaccaaggactcaggtgggagacttcaaaagcatgtactgctgaagcttgacaatggagatgtcgtgagcttctatgttcggaagatggtatacgattcctggcccaaacagatcgaagttccaaggaagagaccagagcctactgaggatccagagccaaagaaagagcatgccaagggggttcagcaaaagaagagaaataactttgtgagagatactgaggatccagagccaaagaagagaccagagcctattgaggatccagagccaaagaaagagcatgccgagggggcacaggcagacctggaggcgtcggctacggcggcgattccagaaacggcgcggttgagaaggacagcgacgagggaggcgccgccgacgaggatgggcaggccgcggaccagcgtgacgtttcgccggacccaaccctccacccactcttga

SEQ ID NO: 205827 - DNA, 1800 bp, Zea Mays
ctctctccccaccattcagctgccgctgcccccgattgagccgccgccgcctcagattcgccgtcgccacctcagattcgccgccgccgccgccgatttggacgctgtcgccggcgattcagcctccgccgccctggatttggcctccgccgctcccgattcggcgctgccaccctgaaacagcgccgcccctttcccttcccctatgccctatgccctcttgctgcttctcacctaggcgacggggacgccttggatccttcgggcgcctggacgcctaggcgacgcctttaaaacaagggtcttctctgtattaaatattttctgatgtacagtagctaccttgttaattcatgcctccagcatgattctccgttgtgctccatctgtttgttgcttgaccttgcgccttgttattctgccatttggttgaggatagattaatcctcaattgtctgacaattgttcacgtctaatttaggttttttcggcatttgggtttgttcacaagatagctacttttgagaaagcagctggtttccaggcacttatccagtatactgatgccccaactgctcttgaagctaaaaactcattggatggaagaagcatcccaaaatatttacttccagaacatatcggtgcctgccacatgcgcataaccttttctgcgcataaggatttgaatatcaaatttcagtcgcatcgcagcagggattacaccaatccttaccttcctgtgaaccaaacagcaattgaggggattgtgcagcccacggtgggccctgatgggaaggtaaaggagcctgagagcaatgtacttttagcatcaattgagaacatgcaatatgctgtgacagtggatgttctgcacactgtgttttctgcttttggagctgttcaaaaaattgcaatgtttgagaagaatggtggaatgcaggctctaatccaatatccagagaggtgtcggagttcgtgaaggcttaaaatggacatctgcaactttccacagctataaagttgtttttaatataactaccgcagccgttgctaaacaagctttggagggacactgcatatatgatggtggttactgcacatgatgagagaagcagggactacactctttcagaccctaacgtgcagctgcaagctgctgcacaaacgccagttctaaggtctccgggagtggcatggcagaacactgcatcagtaccagctgctcctttttatgcaagcacagcgacttcaactcctattggagttggacaggtggctgcttggaatcctaacatgcaggcagggagttttgcatctgcatcgactgcataccccaaccaaccattaatggccaactccatgcctcactatcctgctattggatcgagttccggtgccccaccagtagcatttcaggcttcgcagcagatgacacagtatagcatgccccctggtgctccgccgcacgcaccaccagctggccaatcgatttactacccgaagtaagcggttttggttcaatattatcagagagcaatcaggcattgttacctgcgacaattgtggtccgcaaatgcaatcttgcgaattttgcaagtgcgctgtagcacttgtaacttgcgagcgcccttcgcaagaatgcatcagcgtctgctgtgtctgtaaaactgtcaaagatagtgtttacctattagcttgcatggtatattggtggtgagatatgttggagtagttttgatgcctcaagaatctcttacgcatcttttttttttaaaaaaaactgcgctttgcttttggtct

SEQ ID NO: 205828 - DNA, 1285 bp, Zea Mays
caacaggccacctagtccaacgagccccattccaattcggcaattcccatttccccttcccaacaggccaaccccctctacctatctttttcctcagcaaccgtgctcggttcctcctccctcgaaacggctcccacccccgcgccgcgataagaaaacccaccaaaccctaaccctagcagcggtgccacaaccgcccgcgttcccggccggagaggaagccgagccagcaaggatgccgcccgggtcggcgacgcaatttcggtacacgcagacgccgtccaaggtgctgcatcttcggaacatgccatgggagtgcaccgaggaggagctcgtcgacctctgcaaacccttcggccgggtcgtaaacaccatgtgcaacgtcggcgctaaccgcaaccaggcattcgtcgagtttgcagatcaaaaccaggcaatttcaatggtgtcctattatgcttcatcttcagaacctgctcaagttcgtggtaaaactgtatatatccaatattcaaacaggcaagaaattactaacaataaaggcactggggattcttctggcaatgttctacttgtcacttttgaaggtgttcagcctaatgatgttaccatagaagttattcatttggttttttcggcatttgggtttgttcacaagatagctacttttgagaaagcagctggtttccaggcacttatccagtatactgatgccccaactgctcttgaagctaaaaactcattggatggaagaagcatcccaaaatatttacttccagaacatatcggtgcctgccacatgcgcataaccttttctgcgcataaggatttgaatatcaaatttcagtcgcatcgcagcagggattacaccaatccttaccttcctgtgaaccaaacagcaattgaggggattgtgcagcccacggtgggccctgatgggaaggtaaaggagcctgagagcaatgtacttttagcatcaattgagaacatgcaatatgctgtgacagtggatgttctgcacactgtgttttctgcttttggagctgttcaaaaaattgcaatgtttgagaagaatggtggaatgcaggctctaatccaatatccagagaggtgtcggagttcgtgaaggcttaaaatggacatctgcaactttccacagctataaagttgtttttaatataactaccgcagccgttgctaaacaagctttggagggacactgcatatatgatggtggttactgactaatgaataacgaattctgctcaattagtaaaaaaagaat

SEQ ID NO: 205829 - DNA, 1281 bp, Zea Mays
caacaggccacctagtccaacgagccccattccaattcggcaattcccatttccccttcccaacaggccaaccccctctacctatctttttcctcagcaaccgtgctcggttcctcctccctcgaaacggctcccacccccgcgccgcgataagaaaacccaccaaaccctaaccctagcagcggtgccacaaccgcccgcgttcccggccggagaggaagccgagccagcaaggatgccgcccgggtcggcgacgcaatttcggtacacgcagacgccgtccaaggtgctgcatcttcggaacatgccatgggagtgcaccgaggaggagctcgtcgacctctgcaaacccttcggccgggtcgtaaacaccatgtgcaacgtcggcgctaaccgcaaccaggcattcgtcgagtttatcaaaaccaggcaatttcaatggtgtcctattatgcttcatcttcagaacctgctcaagttcgtggtaaaactgtatatatccaatattcaaacaggcaagaaattactaacaataaaggcactggggattcttctggcaatgttctacttgtcacttttgaaggtgttcagcctaatgatgttaccatagaagttattcatttggttttttcggcatttgggtttgttcacaagatagctacttttgagaaagcagctggtttccaggcacttatccagtatactgatgccccaactgctcttgaagctaaaaactcattggatggaagaagcatcccaaaatatttacttccagaacatatcggtgcctgccacatgcgcataaccttttctgcgcataaggatttgaatatcaaatttcagtcgcatcgcagcagggattacaccaatccttaccttcctgtgaaccaaacagcaattgaggggattgtgcagcccacggtgggccctgatgggaaggtaaaggagcctgagagcaatgtacttttagcatcaattgagaacatgcaatatgctgtgacagtggatgttctgcacactgtgttttctgcttttggagctgttcaaaaaattgcaatgtttgagaagaatggtggaatgcaggctctaatccaatatccagagaggtgtcggagttcgtgaaggcttaaaatggacatctgcaactttccacagctataaagttgtttttaatataactaccgcagccgttgctaaacaagctttggagggacactgcatatatgatggtggttactgactaatgaataacgaattctgctcaattagtaaaaaaagaat

SEQ ID NO: 205830 - DNA, 2157 bp, Zea Mays
atccccaatcgaaacggctcgcagctcatctcaatccgatccgatggcccgcgccgccgctcgcctcctccccatcttcctcccatggcggcgtcctcccccgccctgcctcctccgccggggcttcctaaaccctagcagccccagaacctccgcgcgcgtcgacaccctcgttctccctggagacgagcgcttgcccttcccctcgcccccacgcctcccgaaccagctgcgtcctgactacgggagtggcggcggaggcggcgctccctcgaccatcgcggccatcgtcacctcactcggcggaggccctgcagcggtggggatcgtgcggatctccggccccgatgccgtcgccgtcgccgaccgcgttttccgcccagccgggaccaggagggcgtcgacgccgtggcaaccgcgcagccactttgttgagtacggactcgcgctcgacgcggacggcagcgttattgacgaggttttggtggtgccaatgctctccccgaggtcctacacgcgagaggatgttgtggagcttcagtgccatggcaacgatctctgcttgcgccgcgtgctcagggcttgcttggaagctggagccagacttgctgatcctggtgagttcacccttcgtgcattcctgaatgggaggttggacttggcccaagcggagaatgtgtctaggcttatttcagcaaagtcagcagctgcagcggactcagctttggctggcatccagattttgaagatgagatgcctcctttggacccagtgatgcttgtcagcaaaattaattgtatgaggaaggaggttcaggatgctttggacacttccaattatgataaattgttacaatctggtctacagatagcaataattggccgtccaaatgttggaaagtccagcctccttaatgcttggagtaagagtgaaagggctattgttactgaaatagccggaactacacgggatgtagtagaagcaaatgtctcaattaatggtgtacctgttactcttttggacactgctggtataagagaaactgatgatgttgtggaaaaaattggcgtgaaaagatccgaggctgctgcaatgggagctgatcttattgtaatggcaataagtgcagttgatggatggactgatgatgacactaaacttatggagcatgtttcggtaaataggaagtcctcaggttctgcagttccgatggttcttgtaatcaacaaggtagattgtgcgccatttgttcctggagaacagttcaaacaattcagtggcctcttcagaaaacacgtacagacatgtgcagtcaccggtaaaggcatttctgatttggagagcgctgtaatagaggtcaggggtattgagcatgtgccttctgagggacgaaggtggaccgtaaatcagaggcaatttgaacagctgttgaggactaaagaagctttcgcacgtctagagtcatcaatcaacgagcagttaccaatggacttttggactgtggacttgagggaagctgcgcttgcccttgcaacaatcagcggggaggacatctccgaagaagttttgagtagcatattcagcaaattctgcatcgggaaatgatctcgcaagatgctgcatccagtagtttggagcagaagctttttccttgactgagaacaggaaccaacatgctgagtggcacttggttcgcggcatcagaatggtgaacaggcgtgcttgttctctgaggtgccacaaagaacacaagggaggtgaagccctgtccatcctagtgcacaccgtatagatgctaaggatggaaccatcgagttcctgtcttcgacgtcggatacgaatcctgtatactcgtggttgatatgagaaaattttattagacctaattgagaacgcaaacagtttcattcatccgtcttgctgtacgggacgcaacatacccgaattgtgaccaggagacattaaggtgccgtctggttcagacgttgtaacaggaatcgtaatgagatcccttaccggcggtaatgtaatggttattggctgatcccttaccggcggtaatgtaatggttattggctgtaattagattggatagtaccagatactacttgaaagagctcagtcaaataaaggtatcggtctaatccgtttgcgttg

SEQ ID NO: 205831 - DNA, 1940 bp, Zea Mays
ctcagtttccacagtggcttgctcgtcgggggcctcaacatcgccaacgacgtcacccagctcatcggcaacacaccaatggtgtatctcaacaacgtcgtcaagggctctgtcgccaatgtcgctgctaagctcgagattatggagccctgctgtagcgtcaaggacaggatagggtacagtatgataaatgatgctgaacagaagggcttgattactcctggaaagagtgttttggtggaagcaacaagtggaaacacaggcattggtcttgctttcattgctgcttccaaaggatataagctgatactaacaatgccttcatcaatgagcatggagagaagagtcctccttagagcttttggtgccgaacttgtccttactgatgctgcaaaagggatgaaaggggccttagataaggctacagagattttaaacaagacaccaaattcttacatgcttcaacagttcgataaccctgccaaccctcaggtacattatgagactactggtccagagatctgggaggattcaaaggggaaggtggatatattcattggtggaattggaacaggggggacaatatctggtgccggccgttttctcaaggagaaaaatcctggaattaaggttattggtattgagccttctgaaagtaacatactctccggtggaaaacctggtccacataagatccagggaatcggcgcaggatttgttccaaggaacttggatagcgatattcttgatgaagtaattgagatatcaagtgatgaagctgttgagacagcaaaacagttggctgttcaggaaggattactggttggaatctcctctggagcagccgccgctgctgccataaaggttgccaaaagaccagagaatgctggaaagctgatagtggttgtgtttccgagcttcggcgagaggtacctttcatctgtcctctatcagtccataagagaagaatgtgagaacatgcaacctgagccatgagggagccgtcactttaagcgggcatagtaaatgtttctgaaataagacgcgtagccagcatcagtttgctccacttggaatcatttggccatgctcactctatcctttcgctagcctctatgaccggacctaaactggtgtgtgagaaacatccacgactgtcctcccaactgctttcctaaagccaaacgataacactctcaataattgtctatacgattgaagctgatttgattggtaattgtaaacagcttgtctttggatctttgaagtcaaacaaagtcagttggttgaatcagatggatattgtatgccttttgtgtgtgtgtgtgtgtgaaaaaaaaatctgagttgtgtcattgacggatttccccccaggtggagacgcaacacatctgaagtcctttagcatggaccaaaacaaaatctggcggatactgctggctcaccaagcgtctgcggtggtcaatttactgctgtagtcatgtgctcatggcaaaactgcaggagagaacataccgattgacgcgccaaaagaacgtgcagctggccccgtcgatcccgttcccgtccacgcgacttgtggtttcgacacctccgctcgcatgtttgcctgtgccacgcacgactccttcgactctgcctgagctacgcgtggcctcggcaaccccacctgcgccaagcgtgacccggcgcctccggccttgctggcgagcaggaaccgcttcgctgatcccgcccccgtctacgaccgccgcgggagcattcctccctcggcgcccactgagccgagcccctcaaccagtgcgaccagattcgccgtcgtttatcatcgccgcgggctggccacgcctgcggcccctgagccgtcggtgtatcacctggtcgccattcaccgtgactccgggcacattcactcgatatatcagaccatgtaggttgag

SEQ ID NO: 205832 - DNA, 5815 bp, Zea Mays
ggagcaagggcatgaactcaaaagtgccaggaaggaagccatccaaccgcggagatgtgggagcccaggaggtcgtagcgaggggtttccttgattggtgaatcttcgatcaaggatggagcaccgggctttgctgctcggcgtggcgctggcctttctgctggcctctggctcccagggcttgaaccatgaaggttggcttctcctagcgctgaagagccagatgaacgacactctccaccacctcgacaactgggacgcgagggatctaacaccatgcatctggaagggcgtcagctgctcgtcgacgcccaacccagtggtggtgtctctcgacctcagcaacatgaacctgtcaggcacagttgcgcctagcattggtagcctgtctgagctgaccctccttgatctgtcctttaatgggttctatggtaccatccctccagagattgggaacctgtcgaaattggaagtgcttaacttgtacaacaacagttttgttggtacaataccccctgagctcgggaagctagataggctggtcacgtttaatctgtgcaacaacaagcttcatggcccgatacctgatgaggttggaaatatgacagcacttcaggaattggtaggatacagtaataatctcactggctcactacctcgttcacttggcaagctgaagaacctgaaaaatattaggttgggtcagaatcttatatcaggcaacattcctgttgagataggtgcatgcctgaacataactgtgtttggtcttgcgcaaaacaagctcgagggtcctttacctaaagagattgggaggttgaccttgatgaccgacttaatcctatgggggaatcagctttctggtgttattcctccagagataggaaactgtacaagtctgagcacaattgccctctatgacaataatctagttggccccattcctgcaacaattgtgaaaattacgaatcttcagaagctatacctttacaggaattcattaaatggtacaattccatctgacattgggaatctttctcttgcaaaagagatcgacttttcagagaatttcttaactggagggataccaaaggagctggccgacatcccaggcttgaatttactctacctcttccagaaccagcttacaggccctattcctacagagttgtgtgggttgaaaaacttgagtaaacttgatctgtcgatcaattcactgaatggcacgattccagttggatttcagtacatgagaaatctaatccaactgcaactcttcaacaatatgctttctggcaacatacctccaaggtttggcatttatagccgtctttgggtggtggatttctcaaacaacagtataacagggcagataccgaaagatctttgcaggcaatcaaaccttattttgttgaatttggggtctaacatgcttacaggaaacattcctcgtgggatcactaactgtaaaacattggtgcagcttcgtctcagtgacaacagtctgacaggaagtttccccactgatctctgcaatctggtaaatttgacaacagttgaactaggtcgaaacaaatttagtgggcctattcctcctcagataggcagttgcaagtctcttcaaaggctggaccttacaaataattatttcacgtcagagttgcctcgagaaattggtaatttgtcaaaactcgttgtcttcaatatctcatctaatagactaggaggaaacataccactagagattttcaattgtacagtgttgcaacgccttgatctcagccagaatagctttgaaggttcgttgccaaatgaagttggtaggctgccacagctggagctgctatcttttgctgacaataggctaactggccagataccacccattcttggtgaactatcacatttaacagcactacagattggtggcaatcagttatctggtgaaataccaaaggagctgggtctgctgtcgagcttgcagatcgccctgaatttgagttacaacaacctctctggcgatattccatcagagcttggtaaccttgcactgttggaaagtttatttcttaataacaacaagctgatgggtgaaatcccaaccacatttgctaatctgtccagtttgcttgagctcaacgtctcctacaattatctctctggtgccctcccgccaataccgctttttgataatatgtctgtgacctgttttattggaaataaaggattatgtggtggacaacttggtagatgtggatcccgaccatcctctagttctcagtcatccaaatcagtcagtcccccattgggcaagatcatagcaattgttgctgctgtcattggagggatttcacttattcttattgcaataattgtgcaccatatcagaaaaccaatggagacagtggcccctttgcaagataagcaaccttttccagcttgttctaatgtgcatgtttctgctaaggatgcatatacatttcaggaattgctcaccgccacaaataactttgacgagagttgtgtgatcggaaggggtgcatgtgggacggtgtacagagccatcctgaaggctggacagacaattgcagtcaagaaacttgcttctaacagggaagggagcaacactgacaacagctttcgtgcagagatcatgactcttggaaagataagacatcgtaatattgtgaagctttacggttttgtataccaccagggttccaaccttctactctacgaatacatgtcaagaggtagtcttggtgagctacttcatggacaatcatcctcttcacttgattgggagacacgcttcctgatagcacttggtgcggctgaagggctttcatacctacatcacgactgcaagcctcgtatcatccaccgtgatatcaaatctaataacattttacttgatgaaaactttgaagcccatgttggtgattttgggttagcaaaggtgattgacatgccatactcgaagtcaatgtctgcaattgcaggttcatacggctatatagcaccagaatatgcttataccatgaaggttactgagaaatgtgatatatatagttatggcgtcgtgctgctggagctgctaactgggcgtgcccctgtgcaacccttggaactaggaggcgatctggtaacatgggtaaagaactacatcaaggacaattgtttgggtccagggatcctcgataaaaaaatggatttacaagatcaaagtgttgtcgatcatatgatcgaggtcatgaaaattgctttggtatgtactagcttgactccgtacgagagaccaccaatgcggcatgttgtagtcatgttaagcgagtctaaagataggacgagggtcagctctgcatcctcgcctgcctctgatgattcttcaaagaaggatgactcataatgtatttataatatgttcgattagccaaaggtaatacacatttttttactgacttttcctagtattgatagtaattagtagggttcttgtaatctgcattcattatttgtgtcagcatttcgtagggagaaatatgatagtggttcatagtttcgtagtgtcattgtatgccgttgtctcagaaaggtttcagactagcatgaagcatttgaggcacgtgacggtcttactgatgccgttgtctctcagaaaggcttcctcttctctgcagatgttcattgttcagttaattctatatgcgtcggtgcattcttactcgagttacaagtacactaggaacacctgtcaggtagccaattctgtaatattctccaacatgaactgcagtgcagatcatatgtaatcatcgatcatatgcaatcgctctttgtagctgttaacctgtagcctctgatcgttgttgctgagtcgtctttctcttccccttggcatgtccgtaccaaaaaataagttatgaaaccacgaagtcgcgcccaccaacggacgctgcctctaaaaaagcagatcagcgcgttgtcgcagcgtcggagcacaagcgacatcgctccccgggggccgtcggccggcgaccggcgacttccgcagtagaaccaactccacccacccatccacttggccagcagcttcttgcctgcatcaattgccatggcggcggtggaagcgaagaggagcccacactttgttctctttcccttcctggctcacggccacgtccctgtcttcctccgcctggctggcctcctccgcgcgctccgcccagggctcgaggtcacgctcgtctccaccccgcggctcctgggctccctcacgctcccgcctgcctccccacccgtgcgcctccacgcgctcccgttcgtccccgccgaccacggcctgcccccaggcgctgactccctcgccgatgtccagatccaccagttcatcaccttcttcacggcctccgagtcgctccgccctgcgttcgagaagttcgtctccggcatcggttccccagtctgcatcgtcgccgatgccttcttcgggtggacggccgaagtcgcgcgcgcgcggggcgcgtcccacgcggtgttccttcccggcggcgcgttcggcaacgccgtgttcttctccgtgtgggagcacctcccgcacgcccttacggccgccgacgagttcccgctgccggatttcccagacgtcgttctccaccgcacgcagatcccgaggttcatcctctctgccacgggggcggacccctggacggccttcttccggcgcgtcatcgcctcctgccgcaagaccgacgctctccttgtcaacaccgtccgggaactggaaccctccggcctcgacatgctccggagaagcttcggcgtccagccatggccaatcgggccagtcctcgcagagccgacggccccgtcgtcagactcgcgggacgacgccagcatcatccggtggctggacacgcacccgccgcgctcggtgctgtacatatcattcggatcgcagaacagcatcagcgcggatcagatgatggagctcgcgctggggctggaggcgagcggtcgccccttcctctgggcgctccgcccgccgctggggttcgacgcgaaggacgtgttcaggcccgagtggctcccggctggcttcgaggagcgaacggcgagggcgaatgtgggactgctggcgcgcgggtgggcgccgcagatgcggatcctgtcgcacccgtccaccggcgcgttcctgagccactgcgggtggaactccgtcctcgagagcctgtcccgcggcgtgccgctgatcgggtggccgttgggcgccgagcagttcttcaacgcaaatctcgcggtcgagtggggcgtctgcgtggagctggcgcgcgggaacctggagagctccgcggtggagagcagggcggtggtcgaggccgagcggacggtgatgggggacacggcgaagggtgatgagatgaggagggtggtggcggcgatcgcacgcaccatggaggccgcgtgggaagcgcctggcgggtcggcggcggagagcctggaagggttcctgcgatgcgttgaaccctgagatgccccgctttgagatggttgcgcgaggaatctgcaactaagtacgcgcgcgggaaatctgtgttaagaattcctcaactacaaaggacgacggattgatgggattacggctcctgttgcattgtaacagaaacggatttgtttggttcattaacgtgtagcctgcaggattggatagcgcttctgggtagagataacgagcagacagtggtgcaaacgtttacgggcataaaaaacggtgaaccaaacaacaccttaaaatttgtcatgaaaacttcagata

SEQ ID NO: 205833 - DNA, 961 bp, Zea Mays
aacaggtgcatagaaagccctcgaggccccagtccattccctaataatcggctatcctgtcagtttccctctcccctcccgaaaccggattccgtaccgaatctggtctcgccttggagccgaggttgcacgcggttcgtcctgcggccatggaggacgaggagcacgaggtgtacggacaggagatccctgttgacggcgaggacgtcgacatgtccgccggcgacgacgcgaccaagcttcaggagctcgatgagatgaagcgccggctcaaggagatggaggaggaagccgccgcgctccgcgagatgcaggctaaggtcgccaaggatatgcaaggttgactatgcatgcactccagaagaagtgcagcagcatttcaattcttgtggaactgttaacagagtgacaatcctgactgacaagtttgggcaaccaaaaggttttgcttatgtggaatttgttgaagttgaagctgttcaggaagctattaagttgaatgaatcagaattgcatggtcgccagctcaaggtggcaccgaagaggactaacgttcctgggatgaagcaaccccgcggtcgaggtttcaatccataccggccatatggttatagtccttatggttatggctatggctacgggagattccccagattccgccgcccgcgaagaccttatttttgaagctcgtatgtccatatggtttgcagaacatggacgatgagacggcttgaccttatattcccgcgtcctattacttcatagcttattcgggatgttctcagacatgttattcccatattgacgatgcttaagatttgtactgtattgtttcagtgacagttacgcaaaacgattatgatctagttacgcggaaaggtactgttgtgacgctgcttggggtgatgtgctcagctaacacatatattcaaggcaaacgacagatcgaattcgataaaat

SEQ ID NO: 205834 - DNA, 1007 bp, Zea Mays
aacaggtgcatagaaagccctcgaggccccagtccattccctaataatcggctatcctgtcagtttccctctcccctcccgaaaccggattccgtaccgaatctggtctcgccttggagccgaggttgcacgcggttcgtcctgcggccatggaggacgaggagcacgaggtgtacggacaggagatccctgttgacggcgaggacgtcgacatgtccgccggcgacgacgcgaccaagcttcaggagctcgatgagatgaagcgccggctcaaggagatggaggaggaagccgccgcgctccgcgagatgcaggctaaggtcgccaaggatatgcaagatcccaatgcaaccacatctgaaaacaaagaggagatggattctcggttgactatgcatgcactccagaagaagtgcagcagcatttcaattcttgtggaactgttaacagagtgacaatcctgactgacaagtttgggcaaccaaaaggttttgcttatgtggaatttgttgaagttgaagctgttcaggaagctattaagttgaatgaatcagaattgcatggtcgccagctcaaggtggcaccgaagaggactaacgttcctgggatgaagcaaccccgcggtcgaggtttcaatccataccggccatatggttatagtccttatggttatggctatggctacgggagattccccagattccgccgcccgcgaagaccttatttttgaagctcgtatgtccatatggtttgcagaacatggacgatgagacggcttgaccttatattcccgcgtcctattacttcatagcttattcgggatgttctcagacatgttattcccatattgacgatgcttaagatttgtactgtattgtttcagtgacagttacgcaaaacgattatgatctagttacgcggaaaggtactgttgtgacgctgcttggggtgatgtgctcagctaacacatatattcaaggcaaacgacagatcgaattcgataaaat

SEQ ID NO: 205835 - DNA, 1329 bp, Zea Mays
aacaggtgcatagaaagccctcgaggccccagtccattccctaataatcggctatcctgtcagtttccctctcccctcccgaaaccggattccgtaccgaatctggtctcgccttggagccgaggttgcacgcggttcgtcctgcggccatggaggacgaggagcacgaggtgtacggacaggagatccctgttgacggcgaggacgtcgacatgtccgccggcgacgacgcgaccaagcttcaggagctcgatgagatgaagcgccggctcaaggagatggaggaggaagccgccgcgctccgcgagatgcaggctaaggtcgccaaggatatgcaagatcccaatgcaaccacatctgaaaacaaagaggagatggattctcggtcggtattcgttggaaatgttagtctgctgtcatcaagcctttctatcaaagttttggcatctggttcagtttcagcacaagttctagtgttagcttcgtgggggaaagaaaaaaaagaaggaaaaaaaatccaagaaagttcttgaaaaaagaaagaaaaatagaaaaacaatttgaaaaagcaaaaaaaaaagtatacaaaaatggaaaaaaaatagtgatgatgtcataggctaggaattatcccccagggtagccagcagagaatgggtcaggcacattcatggtactgatgtggagtgatatcattagccatttactggcaatagcatgttgactatgcatgcactccagaagaagtgcagcagcatttcaattcttgtggaactgttaacagagtgacaatcctgactgacaagtttgggcaaccaaaaggttttgcttatgtggaatttgttgaagttgaagctgttcaggaagctattaagttgaatgaatcagaattgcatggtcgccagctcaagaggactaacgttcctgggatgaagcaaccccgcggtcgaggtttcaatccataccggccatatggttatagtccttatggttatggctatggctacgggagattccccagattccgccgcccgcgaagaccttatttttgaagctcgtatgtccatatggtttgcagaacatggacgatgagacggcttgaccttatattcccgcgtcctattacttcatagcttattcgggatgttctcagacatgttattcccatattgacgatgcttaagatttgtactgtattgtttcagtgacagttacgcaaaacgattatgatctagttacgcggaaaggtactgttgtgacgctgcttggggtgatgtgctcagctaacacatatattcaaggcaaacgacagatcgaattcgataaaat

SEQ ID NO: 205836 - DNA, 1335 bp, Zea Mays
aacaggtgcatagaaagccctcgaggccccagtccattccctaataatcggctatcctgtcagtttccctctcccctcccgaaaccggattccgtaccgaatctggtctcgccttggagccgaggttgcacgcggttcgtcctgcggccatggaggacgaggagcacgaggtgtacggacaggagatccctgttgacggcgaggacgtcgacatgtccgccggcgacgacgcgaccaaggagctcgatgagatgaagcgccggctcaaggagatggaggaggaagccgccgcgctccgcgagatgcaggctaaggtcgccaaggatatgcaagatcccaatgcaaccacatctgaaaacaaagaggagatggattctcggtcggtattcgttggaaatgttagtctgctgtcatcaagcctttctatcaaagttttggcatctggttcagtttcagcacaagttctagtgttagcttcgtgggggaaagaaaaaaaagaaggaaaaaaaatccaagaaagttcttgaaaaaagaaagaaaaatagaaaaacaatttgaaaaagcaaaaaaaaaagtatacaaaaatggaaaaaaaatagtgatgatgtcataggctaggaattatcccccagggtagccagcagagaatgggtcaggcacattcatggtactgatgtggagtgatatcattagccatttactggcaatagcatgttgactatgcatgcactccagaagaagtgcagcagcatttcaattcttgtggaactgttaacagagtgacaatcctgactgacaagtttgggcaaccaaaaggttttgcttatgtggaatttgttgaagttgaagctgttcaggaagctattaagttgaatgaatcagaattgcatggtcgccagctcaaggtggcaccgaagaggactaacgttcctgggatgaagcaaccccgcggtcgaggtttcaatccataccggccatatggttatagtccttatggttatggctatggctacgggagattccccagattccgccgcccgcgaagaccttatttttgaagctcgtatgtccatatggtttgcagaacatggacgatgagacggcttgaccttatattcccgcgtcctattacttcatagcttattcgggatgttctcagacatgttattcccatattgacgatgcttaagatttgtactgtattgtttcagtgacagttacgcaaaacgattatgatctagttacgcggaaaggtactgttgtgacgctgcttggggtgatgtgctcagctaacacatatattcaaggcaaacgacagatcgaattcgataaaat

SEQ ID NO: 205837 - DNA, 1420 bp, Zea Mays
cgcaacgcatctttgcatggacgagaaagggtcgatgaggtggactgggattaaaggcgtgcgttcgctctgctttcgcgatggcgggtcttgcgagaccgtttcagagctttgacttggacagcgccaggccgccagccaactagccaaggcagcgggagtgaggcgaggcggcgataaatacgcgcgcccgcgcgcgctcccggtcagccatcttcgttagttacatagagccgcgccgccgcaagagaggagagagcgcctccaacgccacctggaggagaggacagcgcgccagggagggggaggaggaagaagaacatggggaagggcgtcctggaggtgcacctcgtcgacgccaaggggctctccggcaacgatttcttagggaagctggacccctacgtgatcatgcagtaccggagccaggagcgcaagagcagcgtcgcccgagaccaaggaaggaacccgtgctggaacgaggtgttcaagttccagatcaactcggccgcggccaacgtgcagcacaagctcatcctccggatcatggaccacgacaacttctccagcgacgacttcctcggcgaggcgacgtgagtgcctacctgcccgaatgagatctgcgatcgacgtgacggacatcgtcagcctgggcgccgagcgcggcacgtaccacctcaacgcggccaagcacaacgtggtcctcgccgacaagacgtaccacggcgagatcaaggtcgccatcaccttcacctccacccagacccaggttcaggaagatggaggagcaattggaggatggaggcacagtagctttaatcagtgaaagtgataggcgtcgtggactctctcaagttctttggttgcttggtggtgtttcgggttggatgtagtttttgtttatgtccacgagcaatctgtgcctaacatttctagggttcaattcaatgattcaatccaaccatatctcgttggaaatcatgtctgtactgaagaccggtcaaacccgttgatcgactccctaagcttcttgattctgtgtcagaaatggttctagttaatttcagtggggaacagggtggagaataggtatatagttaattcccaagggactctaaatctaagatattaccatttggttgataagaagtaacaatgaacaacgaatctagggagacagattccatgtacccgagaggatggtcggggatgaatactcactcaatccaacagtccaacaagaagccagttaataagttggcacgttaactgaacaattccaagagattctttagagcaacatcaataggagcccacagataaaaccctacttttgaatggatttcaaaaggagcatgcaagcaacccaattaaaaagtaaacttgcatgcaatgggatctacggcatacatgaggggat

SEQ ID NO: 205838 - DNA, 1244 bp, Zea Mays
cgagaagcgcctggacggaagaagcgccagcagcggagacgagaagcgcctggacggaagaactcacgagatgaaaaaatggcgcatgggctacgagagacttgaactgggccaataggacacgtttggggaaccaaaactttctctatttgtagttgcaaaatttctagaaaagctttcctctcaaacggagagatgtactcggatcagatctccaccgggcgcaagcgctccatccatgaccgccttgacggcgacctccctgccggcacgggcgccggcggccgtgtccgtcacacggtgtccaagaggcaacgacagatagatgaaaaatggaagcatgatctgtatcgggaagatgatgaaccagcttcaaatccgaaggatttgcgattgaagcttcagaggcgaagttttcaacaagattttaccagcacaagaagttctggtgtgcgtgatctacgtgagaagctatctggtataatgaacccacagccatcaaatgctgacccaccaaagccaaagccaaagccagtatcggaggttgttaacatctcaaggcgtcaaattgctgatgaaatgcatgcacgccaaaataagaaaccaccaaagcagacttcatcgaagaagacatctcagccaaaggctgaaagtccactcgacagtttcctgagttcccttgggcttgagaagtactcaattaccttccaggcagaagaggttgacatggcagccctaaggcatatgacggacagtgatctaaaagctttgggcattccaatgggtcctcggaagaagattatccttgccttggaatcgagagcataagggaatgacaagggagtacagtgtaggaaggtgggggatatgctaggcatgctcgtgtgcaagttcgacaaaaactttgtatccacatatcttggaaagggtacaacaacaatgattttatgggtctcttgtaacgcataccctgtcctgttgagcatgttcagcgaagtttaggattgctagaaggcaggccacggcgtctattgctgtaacttgtttccgtgttaattaagtggtgcggtatacatgttgaggcagttgggttcgtcttggaatgctatatcctataactacttgggtgtttggttcgaagaatgagatattacatcatcttctcacttttcactatttgtttggtttgtggaatggaatgagtttatccatcactccttactaactcattccttagttagtac

SEQ ID NO: 205839 - DNA, 2583 bp, Zea Mays
cctgtccccgcctctgccaacgctcctgccccgcacacccacccgccgctcccgcgttgtccgcccccgtcatgaattgccctcttccatgtgcaccacagaaatctcggcgcgagatccccccgaaacctcgccataccctactgcgaggcgtaccattcggcagcgaggccctccttggcgggaacggcgtggtagtcatggaggctaagacgctccacctcgacgtgtgcgttgaaccacacgctgtgcttgtccttgcataacctggtgaggatttggccgcatcgtcccgctgagcatcacgtgcgacggcaggccctgctgctcccaggtgtcggtgcgagataggagagcgcgaacctggccgagctccatgtgaggcagtcccagggcacacgggcctcgcggtggcccaaggacgtcgggcggaagtcgcgccgagctacttccctgtctacgccaaggacgcccaacgcagagaagaggatgcccaccagcgacgtcccgtgctgcgaccgccacgcgaagaaggctgacggcatgccccgctccgatatgcccaacagctgggaccgggaaaaagacatgggacaaatagaagacatctaaagctttccaaggcagatgcctccagaggatatctactctctggtcatatgatcgatgcatagatcacttcagacaatcaaataacagtagtatacatagaaatgcaacatgtaagtatttcctttatatgtctaacagtagtttacaaatatattccacatataaccatattagcttaattgatctatgtataaattatgattattagaataaattttaattccaaatatccaaacatggcctaaataaatactgaattggacattgtatttaaatagacaacagggaacaagagcatatcaccagacacacactagaactcataaaacagggatactatgctattagtctctcttaaatgcagtacatggaagcaaggtttatgatcagatttttgtataccagagaacactcaagtctcccaactgcccgcctgccgaggtgagctccgaatgcctgccctccacctctgatccgtgttgcggcttcgctcctgtgtggagcaagttaattttttttaacatgcctcaacatagatgtcgtccaattacgactgaagcaaaaaaatattgcaaggctaaacactcgggtcaattgctatgtctgggttggatgtggctccaccagctctgcctccctacttcctctactgctgcggctactgctacatcatctatcgtgcctgtttttctaggaatcttaatggcatcaggctggcattttgttcaactcattaggtgcgtcaacactgaaattcactcttacggtcatgttttgttattgcattagagtttgcagcatgaatcagggacatccaatgttgttagatctattaatgcgatgttctctgtcttatttttatcctacaagtcatttcgagatatgtggttgctgatcagatgcgggcaatgtcaattttattattggaattgtttaacttgacactcattcaccttctggactgaaaaccaagacagtactgcatctatttagttaaacatatattacttggctgctaacacaactaagagaaatactgaaaatcaatccttcagtctatccttccataggattttaatttgtgcatgatagagagttttacatgtcagaaatttatagatgtcagagagttcattgcagttcatctccttcactgcatcttgcatattttttctctctttcagctggttacagtaacaaggaaccaccattttaatgcaaaggtaagcatctgcattttactcgagttacatgtcactgctaccccttaattcccggggtgcctttgatttgcgacatccaggagcagatgcgacaggatcacaagtaggaggagcggcgacgatgctgtagcgagagacacgggtgccaaggtcgttgtgctgcggtggtggcaggacaggaaggaaacgaaaaagcaggagccagggctgttcaacaacgtgaccgagtcgctgaggcgaggaagagtaaggtgaaggcactcgtcgacgcctttgagactgacagagcgtcatctcgctgcaggaaaccagcaagcctgctgctgctccagctatgaaagtaggtgtcgtgccatgagtgcttcttgacctgcagtgtgcatgatcacctttcttggaatttttggtcttttttggttgttagtgaccgtaaaagtggcgcttgttgaggtttgctcgttcccatgtaaactgagttttctcatgggagtttccatacttttgtagtgctagaaaaaaggaaagtctgtacaggttttgtgtctatgcaaggcttgagaagttggcattgtactgataagtgataagtaaacaagttattgtaatgatttaaactagattgttttgaaaggaaatggaatgcataaagcaaattaaactttgtattatgttactaattcatgaaaaatggtactaaacttccgtcaacgtttttatgtttctcatttcactcgctctatttttcgtt

SEQ ID NO: 205840 - DNA, 336 bp, Zea Mays
agtttaactgggcccccgtgtggcactggacttggtggggcccgtgtccatggtcgtctcccttgtccatcgtctatcttctcccccaaatcgcattctcatcgcaccgcacgagctacggatctgcggcccgacgactacgacgacggggaggtaggggacgaatcgttgcaagcaacgaggtcagaactaaggaggccgatccatcctccagcctccgatcccatccgacgacatggtctgcgtcgcgtgcctgctgccgctcttcctgatcccggtggtcaacgccctcccttacctcatcgacctcatcatctgatgccggcccagttctag

SEQ ID NO: 205841 - DNA, 1249 bp, Zea Mays
acgggtaaattcaggtacccacccgtcaccactacggcactacccttcagccccagatttctccaagcctccgggacgaggcgcatccgtccatgggggccaaggcggcacaccggcgtggggtgctggacctggaggcgcagttcgccttcttccggtcgcagcaccggcaccccgtgaacgcggcggcgcacgtgctgctcacctggcccatcctcttcaccaacctcttgatcctccacttcctgccgctgccgctgcccgtctcccccgcgctggccctcgcgctcgcatacgccgccgcctacctcgctgtcgaccgcagagccggcgcagtcgcggggctgctcttcctcgccgcatgggccgccagccgcgccctcgcggcccgcctcggcttcgctctctcctggaagcttgtcctcgtcacgcagctcttctgctggacctggcagttcctcggccacggcctcttcgagaagaaggggccgagtgttagtgatcttcctgaggtgttcttgatggagccgttcctcatcttcctgcaggtaaccacaggcacagctgacaaacatatactgaacaaactgttcggctatgagccgtatcctgggttctgcaagaacgtggacaggaagatcgaagccgatctcagggcgagcgagagctcaagcagaggaaggacaacctgattgattgggaattcgggagtgatcctccggagcggtgcgcgaaattgtaccatctatacatgtagcatattgcctgccatttgtgttgttttattcaggtatatgatatctgcgcaccattatatagtgtagtaaacatcagtcatgtgtgttgaagtcagcttgaatcccgggaggaaggtagagagcggtaataatctcctcgtttactgccctataatttgctatgtttaaattactatgtttaagatgaactaaattttacatgatccaccccccttcatagaaaggggaggatgagtgtcaacacaaccaaacgacatttgggttatcatcggtagcatatctcttatcctagctaatctcttatggtccaacatattagccatcacaaatttaagattcttaatcctctttatccaagataccagcaaatcacagatcgccagaaatccttcgctccagaagatcgcaaaatccacacatctgtccatcggagacatgggagattgaacaggcagcggatgttctcttttctagtaaattgctcgcccttc

SEQ ID NO: 205842 - DNA, 3107 bp, Zea Mays
cggaaattagcgtcaagctgcaagcctgcaagtgactcatgcgccggccgcttcaatcgtcggcgccttccactcgcggtcgcaggagctcagctcgtcgtatcttatctatcgccattcgccagccaaaaccccacccgagaggcggagactgcgttgcgtggacggcggactaaaccctaccgcccttcgtctctggtccatgatggggccctcgaccatggcggcgcgggcagcgggctgctgctcctcggcggcgctcgccttcttccgtctccaccccctccgatgcgccgtccgcccggccgccgctctcgttggagggtgctcctctggcctccgcggcggctgccggagccgcctggcgcatagcatcgtggacttggttatggaggagctccgctcccgccggcgcgtccgggtctcggcgaagataggattgcagggcacgaaggaattgcctgacaataagatagtcaagagaacattacagaaaggattgctgcttgaatttcagaaagatcctgagagatctttgcttgctgtagttgaaaggcctgatggaaagaaaaactggatggtgactgatcagaatggtgtcatgtcttcgataaagccccagcaggttacatatgttgtacctggtatcatgaattttgactattcaaaaatagacgaatttcttgagaaaacgcaaaatcttttgaatgtgcttggatggagctgtctgagaaggataaatcaataacagttgaggaatttgcagagatagtgtatggtaccaaggagtctttggaaagctactgtgcacatctcttgttgtcaagggatgtagtgtattttgtcaaggtagagagcagagattattccatgtaccaacctcgttcacctgctcaggtagaggaactcctacgacggaagcttgctaaagaggccgctgataaggaactggaagaatttgtccatttactcaagtctgccaaagcattgcctatggagtccaagcctcctaaagcgtcatggttggtggaagaaaaagtcaggcaaaaaatcgagtctcttcaagcatatgcagttgatgcatgtgatgatgaacaaagaagactagcaggaaatattctcaaagctatgggattcacgaggacatcatcagctgctctaaagcttcttataaatgttggatacttccctgtgcatgtcaatctcgaccttttcaggtacgatgtccgtataaggtacacagatgaagttttgtcagctgcagaggagcttctggtggacagccctgacacagacatgcatatcaggaaggatctttcaactttgaaagtgtacgccattgatgtagatgaggctgatgaacttgatgacgcattgagcgcaaccaggcttcctgatggtagaataaaggtctggatacatgttgctgacccaacatgcttggtcaaacctcatagcatcattgatagggaggcaatgcacagaggaacatcaatctttctaccaaccactacttttccgatgttcccagagaggcttgccatgaattctatgagcttgcagcagggtaaagaatgcaaatctgtaactgtatctgttattttaaacctagacgggagaatatactttagaaaattcagtcatcaaacctacttatatgttgacatatgagagtgcaactgaattgctttacatgaacctggaagaagaggaagaactaaggattcttcaagaagctgctaggattcgtgaacagtggcgtcgtagccagggttcaatagacactgcgatgatagagccacgtataaaggtgtcaaatcctgatgatcctgaaccaaatatcaatctatatgttgaagatcaagccaatccagcaatgcagcttgtatctgaaatgatgatactttgcggtgaggcagtggctgctttcggttttgacaacaacctccctttgccatatagaggtcacccccagtccaacacagcagtgtcagtgttctctcatctacctgaggggcctgcaaggagctttgccaatatcagcgtgctccgtgctgcagaaatggattttcaaaaacctgtaccacatggtgtacttggtattcctggttacgtgcagttcacctctcctatccgaagatatgttgacctgctagctcattatcaggttaaagcttttcttagaggtgactctccaccatattcagctggcgatctagaaggaatgacatttattgcgagcatgcatgttaaagtagctaggaggcttcatagcaatagcttacggtactggctgttggaatacttgaggcgacaaccaaaggggagaaagtacagagcactgattctgaagtttgtcaaggatcgtatgggagctctgcttttggtggaggttgggatgcaagttacaacgacaatttcacgtgggaaagtgggagatcaagtcagtgttactgtggaaacagctcatccacgtgatgatatattatcagtcagagaggttgtagaggacaccaaggattctgagtaaatgcatgtgacgatagcttatcagacaaagaggttatagaggacaccgaggattctgagtaaatgcttgcaaagctcactcgcactttgcagtcttgtgttcctctgccgtttactgctgttcatttttgtggcagtgatataggcgatttattaccttggaaaatatctgctgattcttcaagttagcgacttgcgtagcatggctacaatacaaatggtaaaaggactagggtattggtcttggtgccaaagctcattccaattcgaggacgaaatgatgaaatcataggtggttttcattggtatacagaatacagtccgacagttcgtttcttccgaggtaggttctctttgtgccgaacaaggttccaagtgctgataactgggaattttgtatagctgaacacgcatgcaacatttttgtacctgaatttggtacctctgacgttgtcggcacattctgctatatttgaacactgaggtggatgatcgatgtacagaataataataattccaatatcatttccttatatgccctcaattatttaattgtaatatactccttcggttctttt

SEQ ID NO: 205843 - DNA, 2690 bp, Zea Mays
gtcattttctcatacatggtgatgcctgcccctccttaacaacaagataatctcatattctctctctcttttccccccttctttgcttcctagctacctcctcctttatttccctctctctctctctctctctaactttttatgatactagtagcaataaggaggaacagcacaagagaccagttcatccctggttgcctctcacagtcatcttcttgacaagagagagaaagagaggagagagtaactccagtactggagacacagacacccaccaaggccaaagcagaagcacaaacgagagaagagagcccccccctcttccacacaacaccaagaaccttctcttcctcctcttgtatatatccatcaatcgcatgagccctcctccaagctagccgggcatgaagagaggagagaccgcggggtgggaactgcaagcgtcgtgcgatcaggagagaggggcgtcagccgaaggtagacggcgggcgatggaggcgagctcggccgcgtcgccggacctgtcgctgcacatcagcctgcctagcagcgcggcggggtccggcccgtccggcaggcgcgccgccgtggggggaggaacgggaggaggaggaggcgccgggggagacccgtggcggaggctgaacgggtccacagcgtccacggagctgtccctgtcgccgccggtcgagcaggagcacgcggacgcgctgccgtggcgacaccggccgtcggcggcggccgcgtcctccgcgggccaccacgtcggcgggcgccacgctgatgcccgccatgccgatgcttcagccgctggacggcgggggcgggctaggcgccggcgccggcgcaggagggggagcgtcggtggcgctgccaatccgagggatacctatctacaacggcccggggggcttcccgttccttccgccggcctccggggccgacggcgcccccctccaccaccaccagcagcagcagaagctcgggttctacggctcgtaccacccgagcacgtggccctcgtcgctcggctccacgtcgccgtcgccgtcgccgctcgcgccgggcacgccgccgtccccgctgctggacccagcgtcggcggcgttcctgtccccggccgcgcatcaccaccaccggatgctgtcggcatcgggccggctcaacggcatgctcaccgacaccctccgcggctacggcgctggcggcgtcggcggactgggcggcatcgtcggcgggcaccaccaccaccaccaccacctccacggcgcgcagccgttcggcctgggctcccggttcatgcccaagctccccgccaagcgcagcatgcgcgcgccgcgcatgcggtggacgagcacgctccacgcccgcttcgtccacgccgtcgagctcctcggaggccacgagagggctacgcccaagtcggtgctggagctcatggacgtgaaggatctgaccctagcccacgtcaagagccatctccagatgtatcggaccgtgaagagcactgacaagcctgcggcgtcatcaggggcgaacgacggcggctccggcgacgaggacttcgccggcggtggccaggctggctccggcggcgagaacatgtgcgcgaggccgttcggggagcaccggtccacctccgagggtgcggcgagctcggtgggcggcggcggcgggggcgacatggaccagtcttcggcaggcaacggcagcaccaggtggagcaactcgtcaagggacccatggctgtcgtcgaattcatgcaacatggatgctcatcgcttggcagcgttgtcttctccgattgagctcgcaggtgtcgaaccaggagctgatgagcagcccgagcctggagttcacgcttgggaggccggactggcagggcacggatcatgactagcagtagcaatagctaagctactagctgctagccatgcgtcgaccgtacgtggagctctagctagctagaaggctaacttcttcattgaggccgggtggttatagtagcagcactactactgatatcaggcggtgcgcgcgtgtgcatgcctgatgatcccccaagcaactcgtagacgacgacgacgacgacaggttttttcgcctgcgaagtcgaacagatcaatcaacaagtacagcagcagcagcaaccgcgcgcgtctccatcgatgggtgtggagatcatggtgagtacgtacgtgccgacggacggagcaccggcctggaagaagggattttaaagacttactgggtcactctctctatttcttctctgtcagagagagggagggagagttgagtgggctgcctttgggtgagtggtttgttagattggccatgccatgttcctgatttccttttctttcttgcttctctctctttttgtttccttgtgccatgtcgagcgggcgcgagattgtgtcagcgcagccggcggtgcagcagggggtatgcatgatgggagtcgtcgtagctggctggctagctgatgatggcgagagagaggcgtaaagctagccttgtgtggtggtgtgggagtgagtgagtgagtcgtgtgcgttcgtccaatgcatgtttggtccgtgtggtgtgtgaagctagctatacctagcgtatcattagcacatgcaaagctggaaaggagagaaaagaaagaaaagggaatgagttctcatgaagcaatatctaac

SEQ ID NO: 205844 - DNA, 4403 bp, Zea Mays
ggaaattgtaccaaaaatcgtagaaaaatccaaaaatcatgggacatgttttatgggatgtgtaaaatcaggagctctctggtgaagttagttttaggctttttagagctgtcagtatattttagtattttaaaagtgctcttggaaggacaattggaatttgagaaattagaattgggcactaaaaattatggatttttttggagaagttttttattaggatatgagtacttggtaaaaatttggggatgtttggaatcaatttgttcagaaagtcttgtagggccccaaaatagagtggttaatccctaatcaagtgtgggttaatcatttggaaaaggagataagtttacctagtaagagttgttctttggatgaaggaaccaaaggaagattaatacttaagtaagttcgatttggccacttttagcaactgttgggggtgtagaaccatgtgtatactttgtcatgtgctttagttgtagtgtttctattccccacctttccttgtgagagtttgcatttcatatcattacataagcatacatgtatttgtaattgaattgtagaacacctagaagaagtggtgtttgaaggagtcaactccagtggttgctgatcaagtggaggagccatctaactgtgtattggataaagggatctaaagcctcttcactgcaacaaaggtcactcgaagaaaacttatcaagttttgtaagctacagtggaaccaacccatggaagatgaaaccacataggaatcggaggagtatctagaagggcgtgttcttgagtttctagtgccctgtcaacctaaggtttgtgtagttcatttctgatataaaccaatagggacacacccttgccttataggagtaatggggaaaggaactggtgacgcgtttcttttttccattatctaacctagagttttaaatttcgggaagagatttctttttaggagaaaggttgtaacacccctggtgttacgtgaactaaaactctgacatgtcatcataagcatttgcattaacttgcttgttacatgtagaatgcattcactagatcaataattttacaataatgtgatgttgtgtgcagagtggaggacctagttaaggacctaagctaaacaggagtaggtcatcccttgagcaagtaacaaattgacttggagttttgaagtgcgaaagggaaatcctagagtctatagcaaatttgttttcaaagatagatcaagtggaagaaatacttggaccgaaggattaacttctaaatcctaaggcttgaaaaccttgattggaattgagtgtaagcaaacaactcctaaatcaaggatactttggatctgagttctataagccaaagttagatttgagattaaagagaaactttgctttaggaggatggataagtttgcttttgatatgtggattagaagtgttgaagtacttagggtggttgagtatctctaacccctaaactggagcccaaaagtggatttggagatctagccacattttgcaagaggtaaaaataccaagttggtaggatttccaaagttgcacaattttgttatttggagatttccaagttgtgtgaagaaaattggagtaaatcacaaaagttcagttttgagctcaaattggaattgctgaaaatagtagcaactaggcaattttggtcctttataacttatgatatataaacattttgaagatggtcattataacaaagttatagagctacatgaggagtataagttcggttgagtcacctagctctaaagcgatttggaacttagagaaaaactggtccaaagtagagctaacagactttctggatttcagacttggtagaattcaaagtctgaatttcagcaattggagcaaactttgagctattgtagtttggaatccaagaggttttggttaatgactactatatcaaaattgtagcataagtataggagagcaacttttattaagtgtgacagccctggaactatatacaactaggataaaaggtgatccaaagtggggttgtcagactttttgagttttcagattgggaacagtgaactgaaactgagatttcagtatatgtagctatttttggagctcaattgtgcctaatccatgaggttttgggctgtagagtatgtagaggaattcaagaccacctaatggtgaacaactttattaaaggatgatggacatgatcccacataaaaagtgaagtaacagctactcaaaggatggactgtcaggtggctagtgacttagtgtattcagaatttaaagtctgaaatcagtagtgatgcaaagtttagagccctattgtgaccaacccttgtggttttggactatgaactatgtggcaacgttggagcccatagtacagagaatatgttttataaataggtttggacttggttctgcataaaagtgggagtaaaacacctctaaacttgctctatcagccaaaaggtatgcagatttagttgactgtttctaagtaatttagtgtgtttttacccacatttggagctctatggtaattaatatatggagtatgagccctatttcatgtagaaaagttaaataccatttgaaggagagtaagtcttatgcaaagtgttagccttgctgctgtgtaaaatttggagataatggtactgcaatcctctatgtcaggtttggcatggagctgtgtcagttagctgaaatcagtgtttcagtatttttgttaaactttggagcactataaccattgatctgtgtggttataagccaaggaccctatagcaaagtgataggggactagatagtgaacaagtttgtttaggaatgcttgagctgtccttgtttggaatagggagaaaaaggtgttcaaactgcctttatcagacatgtgaagtgcaggtctgatgcagtaatttgagttttggttcagtgtctttctatggattttggagcttgtttgtgattgatccaaggggtttaagcctaaggtccctgtagaggaatggtagagggtcatttggtcgacaagttttgttaaacttgatctgcctattgctatgtaaaactgggagtaagttgtgtccgaaagttccctgtcaagatgaggttgtgatgtgcagtaactgaaaattggaggtttcagtgatcttttcctgtgtttggggcatcataacttttgatccctgcatttttggccttggactgctgcaacaaactaatagagctatagttggagaataatcttggttaaaagggatgggtgtgttgtcgaggggatttgggtgatagaggggcttaaacagggaggtatgcagagggagcagcatgactgatggagtaaattcagagttgtatttagtaaactgaagaagctttatccctccctgttgtgcccatctgatgctatggatcgtgatatggatggatataaggatgtatggtctaactcaggttctagagtttttttcccacgaaatatccacttttggactgatttggggatagtggagagagtaattcagttaactgaaccttgaatcagatttggcggtgaagaaaagatctcctctccctgctggtttctctagtgtgctcgagttgagatgtggttgggctggtcaacaaaggttctagagacctcacacgctactggactaaatatcaagtccctgaatcaatttgagtctatccccaagtagagaaaatatctgttttgtttgctagctgcaaaactggacaaaactgatatttgggttgtgttgtgctgagccaaccgggtattgtgcataggagccaggtgtattgaccctgcagtgctggccccctgttagtttttcatcacagcgaggtaggcaagtccattggatctgtccttagctccactcctatacttaagtgctggtctctgctaattccgagctctagccaaaaacctctacaaagatgttggagacctggtgttcatgctgatgttaactctccccagcccctcccaagttggcactgtccaaagcttgcacgccgtgacctaccagtagtgaccatgccggtcagtttggccatctcgccgtggccaggacaactcagcaaagtacacgatcatgctatgtttgttctgtgatcaccttgtcatggccaggtgatgaggagtactctaggtgtttcggaggctggagggcgtttccagttctgggggaggattagttaggcttgtgtataagctttggagggttcctaccttcctgttattgtaaaaggttatgcactttgagtatatcaggacttgtaataaatgtaactcttcctatgtaataaccttcagttttagaaataaaaataatgttttgtaaagtcttctgctcttatctccgaagtgtg

SEQ ID NO: 205845 - DNA, 532 bp, Zea Mays
caatccattcctaggggagtgacgcttctcagctcaaggaagcaatggcacttgcgaacagcattgcttcaatgaagctctgctgattggtggtagtaactggtgcactgcccatggaactcatgcgtggctgctgctggattactctttgattttagctttctatttacccattatacttaaacagaagttcaatggtgcttgcagtttcatttatacttaccatacaattggaagcacaggacatgtaacagtataaagcttgttgtgtgcccgattgaacgaaaggttctatgcatatacgattgggagtcactttgtaggcgtttaggagtcgaatcatttccttccctgctaaggctattttcagatcctctatccaattccctatcttactctattttaaatttcactctgtaaatagtgttatttattatttatagtgtcctctatcttaccatatctactatagacagtctaactgtggctaggagagagctggaacatcatgaagcctatttttttgtttctt

SEQ ID NO: 205846 - DNA, 2165 bp, Zea Mays
gttgggccaagcttgggcgcttgcaccatttggaccaggcacatgattgttaggcaaccgaaaactgttgtgctgcatgagtggacctggctagtggatgcatttattctttgggacacttatggttatccaattgatttgactgaggtcatggcaatcgactatgggctaactgttgataagaaggggtttaatgcttctatggaagaagcgaggcaaaaagctagaaatgctcgtaacaagtctggagggaactctattgctatggatgcgaatgctacagcgcagttgcgcaaactggggcttgccagcacggacgatagcccaaagtttctgtggcccaaggaacatgaaagcgtggtgaaggctatctatactggctcagaatacattactacagctactggtgatggggactttggtcttgtgctggaaagtacaagtttctatgctgaacaaggaggccagatatttgacactgggagcattgaggggtcatttggaactttcaatgtgaacaacgtccaagtgtttgctggctatgttctacatattggctcatttacaaaaggttcgaaggttttgtctcttggagatagtgtgatatgcaaggttgattacaaccggcgcacactgattgctccaaatcatacgtgtacccacatgttgaactttgctctaagggaagtacttggtgatcatgttgaccagaagggttcaattgttctaccagagaagctaagatttgatttctctcatggaaaacctgtccagcctgaagatctgaggaaaatcgagttcatagtgaaccagcaaataaaggacgagctgggtgtgtatgcacttgaaataaaactagaggatgcgaagcgcataaatggtcttcgtgctgtgtttggtgaaatctaccctgatccagtaagagttgtatcagttggtcgcaaagttgaagatctgcttgcagatcctgatagcaaagagtggctatccatatcgactgaactatgtggaggtacacatatcacaaacacaagagatgctaaagcatttgcactcttatctgaggagggtattgcaaaaggagttaggaggataacagccgtgactgctggatgtgccacccaggctatggagttggcgtcatctatcgattctgatatcaataaagcatctcagttggagggagctttgttggaaaagaaaattgcttccatcaagagtgggctggatgcagctgctatccctgctgcgagaaaagctgatttgagaggcaaggtttcaaagttagaggacgaacttaggaaggcaaagaagaaaatgggggagcaaaatatacaaaaggctgtgaagtccgcaatggatgctgcagaagctgctctttcaggaaataaaccgttttgtgttactcatgtggatgtgggtcttgataccacggctgtccgtgaggcggttatcaaagtcatggaccagaagggtttgcctataatgttattcagcaccgatgaggcatcaaacaaagccgttatctatgctggtgtgcctcccaatgctcctagcggcttcaaggtgttggactggctaacaccttcaattgcgccactcaagggaagaggcggtggcggcaagaacggcgtcgcccagggccaggggagtgacgcttctcagctcaaggaagcaatggcacttgcgaacagcattgcttcaatgaagctctgctgattggtggtagtaactggtgcactgcccatggaactcatgcgtggctgctgctggattactctttgattttagctttctatttacccattatacttaaacagaagttcaatggtgcttgcagtttcatttatacttaccatacaattggaagcacaggacatgtaacagtataaagcttgttgtgtgcccgattgaacgaaaggttctatgcatatacgattgggagtcactttgtaggcgtttaggagtcgaatcatttccttccctgctaaggctattttcagatcctctatccaattccctatcttactctattttaaatttcactctgtaaatagtgttatttattatttatagtgtcctctatcttaccatatctactatagacagtctaactgtggctaggagagagctggaacatcatgaagcctatttttttgtttctt

SEQ ID NO: 205847 - DNA, 2284 bp, Zea Mays
aagttttgtgctcattattcaattggcttgtaaatgtttttgtccaactgatgggtgatgtatttcccgagttaaaagacaacgaaaagaagatcaaatgtattattagagatgaagaagaaagctttgagaacactctagcaaagggttatgaaaaatttaagaaagctgcagacgctgttaaggataatggtggaactatacttagtggacaggatgcatttattctttgggacacttatggttatccaattgatttgactgaggtcatggcaatcgactatgggctaactgttgataagaaggggtttaatgcttctatggaagaagcgaggcaaaaagctagaaatgctcgtaacaagtctggagggaactctattgctatggatgcgaatgctacagcgcagttgcgcaaactggggcttgccagcacggacgatagcccaaagtttctgtggcccaaggaacatgaaagcgtggtgaaggctatctatactggctcagaatacattactacagctactggtgatggggactttggtcttgtgctggaaagtacaagtttctatgctgaacaaggaggccagatatttgacactgggagcattgaggggtcatttggaactttcaatgtgaacaacgtccaagtgtttgctggctatgttctacatattggctcatttacaaaaggttcgaaggttttgtctcttggagatagtgtgatatgcaaggttgattacaaccggcgcacactgattgctccaaatcatacgtgtacccacatgttgaactttgctctaagggaagtacttggtgatcatgttgaccagaagggttcaattgttctaccagagaagctaagatttgatttctctcatggaaaacctgtccagcctgaagatctgaggaaaatcgagttcatagtgaaccagcaaataaaggacgagctgggtgtgtatgcacttgaaataaaactagaggatgcgaagcgcataaatggtcttcgtgctgtgtttggtgaaatctaccctgatccagtaagagttgtatcagttggtcgcaaagttgaagatctgcttgcagatcctgatagcaaagagtggctatccatatcgactgaactatgtggaggtacacatatcacaaacacaagagatgctaaagcatttgcactcttatctgaggagggtattgcaaaaggagttaggaggataacagccgtgactgctggatgtgccacccaggctatggagttggcgtcatctatcgattctgatatcaataaagcatctcagttggagggagctttgttggaaaagaaaattgcttccatcaagagtgggctggatgcagctgctatccctgctgcgagaaaagctgatttgagaggcaaggtttcaaagttagaggacgaacttaggaaggcaaagaagaaaatgggggagcaaaatatacaaaaggctgtgaagtccgcaatggatgctgcagaagctgctctttcaggaaataaaccgttttgtgttactcatgtggatgtgggtcttgataccacggctgtccgtgaggcggttatcaaagtcatggaccagaagggtttgcctataatgttattcagcaccgatgaggcatcaaacaaagccgttatctatgctggtgtgcctcccaatgctcctagcggcttcaaggtgttggactggctaacaccttcaattgcgccactcaagggaagaggcggtggcggcaagaacggcgtcgcccagggccaggggagtgacgcttctcagctcaaggaagcaatggcacttgcgaacagcattgcttcaatgaagctctgctgattggtggtagtaactggtgcactgcccatggaactcatgcgtggctgctgctggattactctttgattttagctttctatttacccattatacttaaacagaagttcaatggtgcttgcagtttcatttatacttaccatacaattggaagcacaggacatgtaacagtataaagcttgttgtgtgcccgattgaacgaaaggttctatgcatatacgattgggagtcactttgtaggcgtttaggagtcgaatcatttccttccctgctaaggctattttcagatcctctatccaattccctatcttactctattttaaatttcactctgtaaatagtgttatttattatttatagtgtcctctatcttaccatatctactatagacagtctaactgtggctaggagagagctggaacatcatgaagcctatttttttgtttctt

SEQ ID NO: 205848 - DNA, 1867 bp, Zea Mays
cgatggataaagcaatacctggtttcctgatgctgaaacttttctgtaacaatctgtcatttttcttctcacgatcaagctcagagattatgatacaagcatgactggttcttgaacactatacaaggctttggagagatgggatgtgctgcttccaggttagaagatgaggaggctgtcaagatgtgccgggacagaagggacttgatcaagcaggcactggagcagcacaaccgatttgcatcttcccacattgcttacattgagtccctgaagcgtgtttcggtggctctccaacggtttgttgccggagatgatcaccatgagctaatcttcgatacattcatctcccctatcaagcaacagaagccagagatgcttggtctgccttatggttcatatgagaagagaactattcatgtttcaaggtacctgaggtcagggcctaacccatcagtgtccattgaggagcacccacgtccggtggaaacagtccgtgtcgagtcaaattaccctatggacaacgacagtggcatggtggatagattcctaccaacacactcttcaccagtgagatcgtcttcatactacccgccaccttataacaggccaagctaccaacctccattggaccaggaaacagttagaaattcttcctattgcatgccttatgacaggccaagctatgcacctccatcaccccaggagacaatgaggacttcttattatgcatcttatgacaggccaagctacccaccaccatcaccccaggagccactgagaaattcatatcacgtgccatatgacaggccaagctacccacctccgtcaccccaggagcaggaatcatcaccgtgggacttcttctggaacccattctcatcactggacagctttacatatccccgccctcggagtagctatgacaatgtggtcactgatgatgaactcgtgaggttacaacgggtacgagaggaggaaggaatcccagaacttgaagaggaagatgatgagtgtcaagagcatgtacagatggacagaaaagaggaaaaagaagagcacgacaatgcagatgatgatgaagacgatgatgaagacgatggcgaggaatgtgagcattcagatgagtgtatggtttctaatgtgaattttgatgccaatatgaagcaagaaacaaagggatttgaatccaaaggtattcagtgtactgaagcaccagaaccttgcaagacagtagaacttgagataaaggcacacaagaaagagttgatgagaaacagagtagcaaatgcagaagaaactcctggtttcacagtatatctgaatcgaaggccagcaagcttggttgaggccatgaaggatatcgactgtcagttctcggggatatgtgacgctgctcggaaaatctcagtaatgttggagcgaagatgctgaacccagttgcacttttgcgttctgcgtcatcccgttcatcatcatctcgtttccttcttgctccctctagctcaatagatgatctctttaacaatgagactagcagctgctactctgaagaatcttgcagtaccatgtctggaagtcaccactctaccttggatagactctatacatgggagaagaaattatacaaagaagtaaaggcaggtgagcggttaagaatcgagtatgagaagaggctgacacatttgaggaaccaagatgtgaaaggcgaagaacctatctctgttgataagacttgtgcagcattgagaagcttgcatactcggctgaaggtgtcaatacacacagttcagtcggtatcaaggaggattgaaattctaagggatgaggagctgcatcctcagcttatggagttgattcaaggtct

SEQ ID NO: 205849 - DNA, 4156 bp, Zea Mays
cccgaatatatccaaaccatgcttagtacatgtttcgatagaatgaatgaatgcccgtccgattaattagaatacactcgttctccccaagaaggggatccactgccctagccttgtgcagcgcggcatggcatcatgcggcggcggtgtctgtctcaagagagatcgacgagaggaggaggagaacgacgacgacaagggcgagacgagcggccgcaacaagagaccaagctccggcgcttattacacgggcgcgggagtcgatgctcagagaacggatgacgacgacagcgccgccgccgattacatgtacgagtacgacgacggctacgaggaagaagaatccgctgctgagcaacccaagggcgacgacgcctcggcgcgcgacacggagcagaggtacgccgtgctgaccgaggacgacgtccgcgcgcggcaagaggcggacacggccagggtcgcggaggtgctgtcgatcccggcgggcttcgcgcgcgcgctgctgcgccacttcaagtggcgcgtcgggcgggcgcaggaggagtggttctcggacgcccagcaccagcagcgcgtccgcggcgccgtcggcctagtccccgcggcttgtccggacggcgacgccctggtccccgccgcgcgcagcccgcggccgcgggtgtgcggcatctgcttcgacgcgtttcccgcgggcgggacgcggtcggccgggtgcgccgcccactactactgcgacggctgctggtgcggctacgtcgcggcggcggtaggcgacggcgcgcgctgcctggcgctgcggtgccccgacccgtcgtgcgcggcggccgtcgtccgggagctggtcgacgaggtggcgcgcgacgacgaccgggcccggtacgcgcggttctggctccgctcctacgtggaggagagcgggggccggatcaggtggtgcggcggcgccggctgcacccggtccgtggagctcctcggcggctgcgacgcggaggccgtggcctccgcggtcgacgtcgtctgcgggtgcaggcacgccttctgctggcgctgcggcgaggaggcgcaccggcccgtgtcgtgcggcacggtgcgcgcgtggctggccaagaacgcgtccgactcggagacggccaactgggtggtggccaacaccaagcgctgccccatgtgccgccgccccatcgagaagaaccacggctgcaaccacatgacgtgcggcgcgccctgccaccaccagttctgctggctctgcctcgacccctgggaccaccacaggggctgcacgcgctacgactcccgccgccgccgccgccatgggccggtcgacgaggtggaggacgaggaggagcaggcgcagcggaccctggccaaggcgtcgctggacaggtacctgtaccactacgagcggtgggagggcaacggcaagtcgctgcgcaaggcgctcgcggacgcggacgagctggagcggtcggagctccagcggatggccaggctgctcgacctcccggcgatggacctcggcttcgtgaccgaggcctaccgccagatcgccgacggccgccgcgtgctgcggtgggcgcacgcctacgactacttcctgtccctggacccggagcgcgacgcggccaagcgcggcctgttcgacgacctgcagagccaggccaaccgctggctcgagtgcctgcacggctgcgccgagctggagaggaagcacctcttcggcgctgccgacgccgacgccgaggacgagcccaccgtcgccgccgccgcgttcatggcgtacaaggagaggctcgccaacctcaccggagtcacgcgcaggttcatcgggaacctcgtcagagcgttcaagaccaacctgccggaagtggtggtgacgctgacgccgccggcatccgacttgcaacacatagagtggaccaacgacggagagacaaacaacggttggcattggaggcatcctttctacagaagcaactgtgacactacctgtttccaacgtgtcttctttacaagggacatcagcactgcgaccttcatcgtcgtctctagtagtctcacaggaaacggacattgcaaatgatagcgtgcaagaacgacacagccctacaagaaaccttgcccaggcccagcatccagttcgtcctggcggtcatggcggcttcctcagcaatccatacccgagtttctttggagaggctacctcaaccgcgggaccattgcaactctacatgccaaacatggtggtgtcaggtggcacgacatcgacgccctctctcgccttctctctgtctgcgcttggacagcctattacgagcacagctcttggcggctcctttggctcaaacactcgcactgcatggggcaattcagatatggctgctgcgtcgtcctctcagcctgaccgcatgggcatggatcaacaagcaggaaccggttctgccatgaatctgacaattgggctgcatcccaatgcccagcagccaccaccaaaatatgtcaaaatctgggagggtgacttatacgggcaaaggcaagggcagcctgtgtttattagtaaactcgaaagttggggtggaacagtgtccagaaaagttgcagaggattggccagaaactatgcagattgttcgcctcatagcccaggagcatatgaacaagaaatattctgaaagtcaatacgttggaaacacagactttctaatatttcgggctttaaatcagcatgggtttcttggacaactacaagagaggaaactgtgtggtgtgatacagttaccgtcgcaaactctactactttcaatgtatgacaaaacaagccgtatggttggcatgctcttccctaagaacatgctgatgttcaggccagaggccttaactcagccatcaccagtgcagcaggaagaacttatacaccaccaacaacaacaactacagcagcaacagagaaacatacatcgtcttcaacgacaactcatacagaagcagcagcagcaacatatgcagaagctactaccacaacgacttcaataccaagagcagctacatttacagcaacagatgacgcaacaaatacaacagcaacaacaatctctataccagcaacatcaacaaatgcagcatcaacagcaactgtggcaacaaatacaacaacagaagcatcagttgcaacacatggatccccaacaacaacagctgttgtctcagatggtgggtacagaattaggcagtgatgatgacacaagggaagattgggtcacaggggctgggccgcatgcctagggaatcagggagggttaatgagggcttacactcactcacttgagggttaagatgtttcctagtgtttgtcgttaaatcattaactgataacttcaaaaaaataaaccagtcatttgtatagttatacggatggggtaagagtttaaataacaccgttatgttatcgaatagctagtatattgtattgagctgggagctagatttttgcaaactccccatgtttcttcaccaaaatctttaatcatcgatcaaagatcggtaatccagtgatgcactggctcaggacacgcttaacgcacaccaccttcttggaagctgcagcctgcagatgagctacaaaacgggcaggtcgtcgatgttggtccagtgaaggaaactgagcaatttaaagttacaaaccatttttttattcaaattaattcacttcttttgaaacaatacaaactccaaacaacgcaaatagagagagagagaaaagggaaaagaaataacatctgcaacttgcgcgagcattgttgggcttccacgagcataacagcacggcatctctgttcgttctagaaacacaagaccacatcaggcttctcctgcttccacgtcacatcgaccagcagcttcccgccacttccccattcaaatccagcctcgcagccatccaacaggcaattatgcgttgctaatcaggaaggcactgatgaggagcacagtttttactcttactatactctcttttgcaactttatactttattagggcaactttttcttttcttttcttttcttttctttttctttcacttttacggtgccagacttcggatgcaacatgtatacaagagatccttctaaagataaaacgtggttttccaaaaaaaa

SEQ ID NO: 205850 - DNA, 4042 bp, Zea Mays
ccccgaatatatccaaaccatgcttagtacatgtttcgatagaatgaatgaatgcccgtccgattaattagaatacactcgttctccccaagaaggggatccactgccctagccttgtgcagcgcggcatggcatcatgcggcggcggtgtctgtctcaagagagatcgacgagaggaggaggagaacgacgacgacaagggcgagacgagcggccgcaacaagagaccaagctccggcgcttattacacgggcgcgggagtcgatgctcagagaacggatgacgacgacagcgccgccgccgattacatgtacgagtacgacgacggctacgaggaagaagaatccgctgctgagcaacccaagggcgacgacgcctcggcgcgcgacacggagcagaggtacgccgtgctgaccgaggacgacgtccgcgcgcggcaagaggcggacacggccagggtcgcggaggtgctgtcgatcccggcgggcttcgcgcgcgcgctgctgcgccacttcaagtggcgcgtcgggcgggcgcaggaggagtggttctcggacgcccagcaccagcagcgcgtccgcggcgccgtcggcctagtccccgcggcttgtccggacggcgacgccctggtccccgccgcgcgcagcccgcggccgcgggtgtgcggcatctgcttcgacgcgtttcccgcgggcgggacgcggtcggccgggtgcgccgcccactactactgcgacggctgctggtgcggctacgtcgcggcggcggtaggcgacggcgcgcgctgcctggcgctgcggtgccccgacccgtcgtgcgcggcggccgtcgtccgggagctggtcgacgaggtggcgcgcgacgacgaccgggcccggtacgcgcggttctggctccgctcctacgtggaggagagcgggggccggatcaggtggtgcggcggcgccggctgcacccggtccgtggagctcctcggcggctgcgacgcggaggccgtggcctccgcggtcgacgtcgtctgcgggtgcaggcacgccttctgctggcgctgcggcgaggaggcgcaccggcccgtgtcgtgcggcacggtgcgcgcgtggctggccaagaacgcgtccgactcggagacggccaactgggtggtggccaacaccaagcgctgccccatgtgccgccgccccatcgagaagaaccacggctgcaaccacatgacgtgcggcgcgccctgccaccaccagttctgctggctctgcctcgacccctgggaccaccacaggggctgcacgcgctacgactcccgccgccgccgccgccatgggccggtcgacgaggtggaggacgaggaggagcaggcgcagcggaccctggccaaggcgtcgctggacaggtacctgtaccactacgagcggtgggagggcaacggcaagtcgctgcgcaaggcgctcgcggacgcggacgagctggagcggtcggagctccagcggatggccaggctgctcgacctcccggcgatggacctcggcttcgtgaccgaggcctaccgccagatcgccgacggccgccgcgtgctgcggtgggcgcacgcctacgactacttcctgtccctggacccggagcgcgacgcggccaagcgcggcctgttcgacgacctgcagagccaggccaaccgctggctcgagtgcctgcacggctgcgccgagctggagaggaagcacctcttcggcgctgccgacgccgacgccgaggacgagcccaccgtcgccgccgccgcgttcatggcgtacaaggagaggctcgccaacctcaccggagtcacgcgcaggttcatcgggaacctcgtcagagcgttcaagaccaacctgccggaagtggtggtgacgctgacgccgccggcatccgacttgcaacacatagtgaagagtggaccaacgacggagagacaaacaacggttggcattggaggcatcctttctacagaagcaactgtgacactacctgtttccaacgtgtcttctttacaagggacatcagcactgcgaccttcatcgtcgtctctagtagtctcacaggaaacggacattgcaaatgatagcgtgcaagaacgacacagccctacaagaaaccttgcccaggcccagcatccagttcgtcctggcggtcatggcggcttcctcagcaatccatacccgagtttctttggagaggctacctcaaccgcgggaccattgcaactctacatgccaaacatggtggtgtcagatatggctgctgcgtcgtcctctcagcctgaccgcatgggcatggatcaacaagcaggaaccggttctgccatgaatctgacaattgggctgcatcccaatgcccagcagccaccaccaaaatatgtcaaaatctgggagggtgacttatacgggcaaaggcaagggcagcctgtgtttattagtaaactcgaaagttggggtggaacagtgtccagaaaagttgcagaggattggccagaaactatgcagattgttcgcctcatagcccaggagcatatgaacaagaaatattctgaaagtcaatacgttggaaacacagactttctaatatttcgggctttaaatcagcatgggtttcttggacaactacaagagaggaaactgtgtggtgtgatacagttaccgtcgcaaactctactactttcaatgtatgacaaaacaagccgtatggttggcatgctcttccctaagaacatgctgatgttcaggccagaggccttaactcagccatcaccagtgcagcaggaagaacttatacaccaccaacaacaacaactacagcagcaacagagaaacatacatcgtcttcaacgacaactcatacagaagcagcagcagcaacatatgcagaagctactaccacaacgacttcaataccaagagcagctacatttacagcaacagatgacgcaacaaatacaacagcaacaacaatctctataccagcaacatcaacaaatgcagcatcaacagcaactgtggcaacaaatacaacaacagaagcatcagttgcaacacatggatccccaacaacaacagctgttgtctcagatggtgggtacagaattaggcagtgatgatgacacaagggaagattgggtcacaggggctgggccgcatgcctagggaatcagggagggttaatgagggcttacactcactcacttgagggttaagatgtttcctagtgtttgtcgttaaatcattaactgataacttcaaaaaaataaaccagtcatttgtatagttatacggatggggtaagagtttaaataacaccgttatgttatcgaatagctagtatattgtattgagctgggagctagatttttgcaaactccccatgtttcttcaccaaaatctttaatcatcgatcaaagatcggtaatccagtgatgcactggctcaggacacgcttaacgcacaccaccttcttggaagctgcagcctgcagatgagctacaaaacgggcaggtcgtcgatgttggtccagtgaaggaaactgagcaatttaaagttacaaaccatttttttattcaaattaattcacttcttttgaaacaatacaaactccaaacaacgcaaatagagagagagagaaaagggaaaagaaataacatctgcaacttgcgcgagcattgttgggcttccacgagcataacagcacggcatctctgttcgttctagaaacacaagaccacatcaggcttctcctgcttccacgtcacatcgaccagcagcttcccgccacttccccattcaaatccagcctcgcagccatccaacaggcaattatgcgttgctaatcaggaaggcactgatgaggagcacagtttttactcttactatactctcttttgcaactttatactttattagggcaactttttcttttcttttcttttcttttctttttctttcacttttacggtgccagacttcggatgcaacatgtatacaagagatccttctaaagataaaacgtggttttccaaaaaaaa

SEQ ID NO: 205851 - DNA, 3871 bp, Zea Mays
cgcgtgaccgctgatcctgatcgtgccaagtcgtttttgtttggttttatcccctttccttcttccccgaatatatccaaaccatgcttagtacatgtttcgatagaatgaatgaatgcccgtccgattaattagaatacactcgttctccccaagaaggggatccactgccctagccttgtgcagcgcggcatggcatcatgcggcggcggtgtctgtctcaagagagatcgacgagaggaggaggagaacgacgacgacaagggcgagacgagcggccgcaacaagagaccaagctccggcgcttattacacgggcgcgggagtcgatgctcagagaacggatgacgacgacagcgccgccgccgattacatgtacgagtacgacgacggctacgaggaagaagaatccgctgctgagcaacccaagggcgacgacgcctcggcgcgcgacacggagcagaggtacgccgtgctgaccgaggacgacgtccgcgcgcggcaagaggcggacacggccagggtcgcggaggtgctgtcgatcccggcgggcttcgcgcgcgcgctgctgcgccacttcaagtggcgcgtcgggcgggcgcaggaggagtggttctcggacgcccagcaccagcagcgcgtccgcggcgccgtcggcctagtccccgcggcttgtccggacggcgacgccctggtccccgccgcgcgcagcccgcggccgcgggtgtgcggcatctgcttcgacgcgtttcccgcgggcgggacgcggtcggccgggtgcgccgcccactactactgcgacggctgctggtgcggctacgtcgcggcggcggtaggcgacggcgcgcgctgcctggcgctgcggtgccccgacccgtcgtgcgcggcggccgtcgtccgggagctggtcgacgaggtggcgcgcgacgacgaccgggcccggtacgcgcggttctggctccgctcctacgtggaggagagcgggggccggatcaggtggtgcggcggcgccggctgcacccggtccgtggagctcctcggcggctgcgacgcggaggccgtggcctccgcggtcgacgtcgtctgcgggtgcaggcacgccttctgctggcgctgcggcgaggaggcgcaccggcccgtgtcgtgcggcacggtgcgcgcgtggctggccaagaacgcgtccgactcggagacggccaactgggtggtggccaacaccaagcgctgccccatgtgccgccgccccatcgagaagaaccacggctgcaaccacatgacgtgcggcgcgccctgccaccaccagttctgctggctctgcctcgacccctgggaccaccacaggggctgcacgcgctacgactcccgccgccgccgccgccatgggccggtcgacgaggtggaggacgaggaggagcaggcgcagcggaccctggccaaggcgtcgctggacaggtacctgtaccactacgagcggtgggagggcaacggcaagtcgctgcgcaaggcgctcgcggacgcggacgagctggagcggtcggagctccagcggatggccaggctgctcgacctcccggcgatggacctcggcttcgtgaccgaggcctaccgccagatcgccgacggccgccgcgtgctgcggtgggcgcacgcctacgactacttcctgtccctggacccggagcgcgacgcggccaagcgcggcctgttcgacgacctgcagagccaggccaaccgctggctcgagtgcctgcacggctgcgccgagctggagaggaagcacctcttcggcgctgccgacgccgacgccgaggacgagcccaccgtcgccgccgccgcgttcatggcgtacaaggagaggctcgccaacctcaccggagtcacgcgcaggttcatcgggaacctcgtcagagcgttcaagaccaacctgccggaagtggtggtgacgctgacgccgccggcatccgacttgcaacacatagtgaagagtggaccaacgacggagagacaaacaacggttggcattggaggcatcctttctacagaagcaactgtgacactacctgtttccaacgtgtcttctttacaagggacatcagcactgcgaccttcatcgtcgtctctagtagtctcacaggaaacggacattgcaaatgatagcgtgcaagaacgacacagccctacaagaaaccttgcccaggcccagcatccagttcgtcctggcggtcatggcggcttcctcagcaatccatacccgagtttctttggagaggctacctcaaccgcgggaccattgcaactctacatgccaaacatggtggtgtcaggtggcacgacatcgacgccctctctcgccttctctctgtctgcgcttggacagcctattacgagcacagctcttggcggctcctttggctcaaacactcgcactgcatggggcaattcagatatggctgctgcgtcgtcctctcagcctgaccgcatgggcatggatcaacaagcaggaaccggttctgccatgaatctgacaattgggctgcatcccaatgcccagcagccaccaccaaaatatgtcaaaatctgggagggtgacttatacgggcaaaggcaagggcagcctgtgtttattagtaaactcgaaagttggggtggaacagtgtccagaaaagttgcagaggattggccagaaactatgcagattgttcgcctcatagcccaggagcatatgaacaagaaatattctgaaagtcaatacgttggaaacacagactttctaatatttcgggctttaaatcagcatgggtttcttggacaactacaagagaggaaactgtgtggtgtgatacagttaccgtcgcaaactctactactttcaatgtatgacaaaacaagccgtatggttggcatgctcttccctaagaacatgctgatgttcaggccagaggccttaactcagccatcaccagtgcagcaggaagaacttatacaccaccaacaacaacaactacagcagcaacagagaaacatacatcgtcttcaacgacaactcatacagaagcagcagcagcaacatatgcagaagctactaccacaacgacttcaataccaagagcagctacatttacagcaacagatgacgcaacaaatacaacagcaacaacaatctctataccagcaacatcaacaaatgcagcatcaacagcaactgtggcaacaaatacaacaacagaagcatcagttgcaacacatggatccccaacaacaacagctgttgtctcagatggacacgcttaacgcacaccaccttcttggaagctgcagcctgcagatgagctacaaaacgggcaggtcgtcgatgttggtccagtgaaggaaactgagcaatttaaagttacaaaccatttttttattcaaattaattcacttcttttgaaacaatacaaactccaaacaacgcaaatagagagagagagaaaagggaaaagaaataacatctgcaacttgcgcgagcattgttgggcttccacgagcataacagcacggcatctctgttcgttctagaaacacaagaccacatcaggcttctcctgcttccacgtcacatcgaccagcagcttcccgccacttccccattcaaatccagcctcgcagccatccaacaggcaattatgcgttgctaatcaggaaggcactgatgaggagcacagtttttactcttactatactctcttttgcaactttatactttattagggcaactttttcttttcttttcttttcttttctttttctttcacttttacggtgccagacttcggatgcaacatgtatacaagagatccttctaaagataaaacgtggttttccaaaaaaaa

SEQ ID NO: 205852 - DNA, 2510 bp, Zea Mays
cgagctgcggaaacggcaaaagtggccgcgagacatcgctgtgcagtgcagtgcagcaagcggctagtggacgcacgcgccgctcccaaccgagacgacgagccgcccaaggcgacgagccattactcccgtttccccaaatcccaccacgcaggcagtcaggcacccgcattgtttcaaaaatctcgaatcggcccctggttctggcagcgcagccgccgccggcggacggagggccctctttccgggtgaggcaagtcgaggcctgctttgcctcgctgtaagctcgccggaagagggaaccggggaggggaaaagacgcgcggcagtggtggagtggaggtgccaaggctgagggaggcgcgccgccgcccatggacgccgcgcggtgggtcgtgtgcctgctcgtgacggtcatctgcttgtcgtgcgccgccgcgaacccgatgtccgtcagtcccaccatgctcaacgagggtgggcatcagcatgccatagcgtacgtccagggcgacaagtactacggcgccaaggcgactatcaatgtgtgggcgcccaagatcgaacagcccaacgagttcagcttgtcccagctctggatcttgggcggctcattcggggaggatctgaacagcatcgaggctggatggcaggttagccctgacctctacggggataacaacacgaggctcttcacgtactggacaagtgatgcgtaccaggcgacagggtgctacaacatgctgtgctcagggttcatccagatcaacaaccagatcgccatgggcgccagcatcttcccgacctcgagctactccggctcccagtatgatatcagcatactgatctggaaggaccccaaggagggcaactggtggatgcagttcggcaaggactacgtgctgggttactggccgtcgttcctcttctcgtacctggcggacagcgcgtcgatggtggagtggggcggggaggtggtgaactcgcaggcggacggcgtgcacacgtcgacgcagatgggcagcgggcacttccccgaggaagggttcggcagggcgagctacttcaagggggtgcaggtggtggacagcagcaacaacctcggggcgcccaggggcggcctgggcaccttcacggagcagtccagctgctacgacgtgcagagcggcagcaacgccgactggggcacctacttctactacggcgggcccgggaggagctccagctgccagtaactggtgggctctctagctaggtagtgatgtgcgtgctgctggcttcacctttgtttgtggtagtttcttcttcttcttccgattagtcattagtgccgccgtgccgggatggcttctgaagagaagcatggcatgtggtggtggtggtgccctaccctacccttgttgtggtggcctgcctccttttcctatatggtagattcacttgttcgtccttgtggttaggactgggcatttttaacccgaaaaccgaacccgaaccgaacccgaacccgaatagaccgaataggtcggttttcggttttcgggttcgggtttcggttcatagatctcttctgttcgggtatcggtttagggttcggtttccagccagccaaacccgattagactcaaagaaccgaactatagtgatcctccctctgtccctcagcccaaaccgcgaaacctagtaacgggctaacggcccaactcaggcacaggcactccgcggtgacataggcgcagtccagtccgcacccgcaccgcacgcagcacgcacccgcaggccgcattgccgcaaccctagccgcatggcgcacgctggtccgccgccgcgccgtcgatccaccgctgctctgccgcacggagtcgcactggtcagccaccgcgccgtcgatccaccgctctgccgcctctgcgcgtcagccgcgctaggcgccaaccttccactccataccggtccaccggcgtcgatccaccgacgactccgtactcggtacttccaccgcatcgcggcaccggtccaccgctctggcgactcggtgttctgcacttctgctccgatttcggcgtcctgctccacggtgcccacgactcgctgcagaccgacccagcacgtaaggtgccgcggatcctggttgcgtccgaggagaggctgcgccggaacgcggagttcctgctcaacgaggtcgggctgccgccgcagtacatcgtccgccgttcggtgcttctcatgtacagcctcgagaggcggatagtgccccggcacctcgtgctgatggttctcaaagagaaggggttggttgagcaggaccggtgcttcttcaacgtggttctcaacgaggctgcacttctgtttgtgaattgtgatggattgatgatgaacctgttaagttatttcctgtggtgtatgaacttgcatgtagttggcattttctaagtcaatttgtcatgtatttgtatgcacttctatgcaattttgtgtgaactgtgaaccactaaacctatttatcaatt

SEQ ID NO: 205853 - DNA, 2492 bp, Zea Mays
cttttggccactccttgagctcgtgctctgattcaataaaagacgacggcttttgagtcatcttttctggttgttcttgaaaggaattcgctttcttgctattcctctcacttttgtgagtgtatgtgtgtgggagtccagacggggacatgatagactgcgtgcacatctcacaccagccagcgtttgatcacccatacctcaagaaccacacgatccagatgaggccgaactaccacccggaagggctgtacgaggaatccaaggcctccagcagcggtggcgagaggcctatggctcagctctggcatcagaacgggaggtgtcccgaaggtacggtccccatcaggagaacgaggaaggacgacctgctgagggcaagctcgatgcgtcggtacggcaggaagcgccgcgccgccgcgaacccgatgtccgtcagtcccaccatgctcaacgagggtgggcatcagcatgccatagcgtacgtccagggcgacaagtactacggcgccaaggcgactatcaatgtgtgggcgcccaagatcgaacagcccaacgagttcagcttgtcccagctctggatcttgggcggctcattcggggaggatctgaacagcatcgaggctggatggcaggttagccctgacctctacggggataacaacacgaggctcttcacgtactggacaagtgatgcgtaccaggcgacagggtgctacaacatgctgtgctcagggttcatccagatcaacaaccagatcgccatgggcgccagcatcttcccgacctcgagctactccggctcccagtatgatatcagcatactgatctggaaggaccccaaggagggcaactggtggatgcagttcggcaaggactacgtgctgggttactggccgtcgttcctcttctcgtacctggcggacagcgcgtcgatggtggagtggggcggggaggtggtgaactcgcaggcggacggcgtgcacacgtcgacgcagatgggcagcgggcacttccccgaggaagggttcggcagggcgagctacttcaagggggtgcaggtggtggacagcagcaacaacctcggggcgcccaggggcggcctgggcaccttcacggagcagtccagctgctacgacgtgcagagcggcagcaacgccgactggggcacctacttctactacggcgggcccgggaggagctccagctgccagtaactggtgggctctctagctaggtagtgatgtgcgtgctgctggcttcacctttgtttgtggtagtttcttcttcttcttccgattagtcattagtgccgccgtgccgggatggcttctgaagagaagcatggcatgtggtggtggtggtgccctaccctacccttgttgtggtggcctgcctccttttcctatatggtagattcacttgttcgtccttgtggttaggactgggcatttttaacccgaaaaccgaacccgaaccgaacccgaacccgaatagaccgaataggtcggttttcggttttcgggttcgggtttcggttcatagatctcttctgttcgggtatcggtttagggttcggtttccagccagccaaacccgattagactcaaagaaccgaactatagtgatcctccctctgtccctcagcccaaaccgcgaaacctagtaacgggctaacggcccaactcaggcacaggcactccgcggtgacataggcgcagtccagtccgcacccgcaccgcacgcagcacgcacccgcaggccgcattgccgcaaccctagccgcatggcgcacgctggtccgccgccgcgccgtcgatccaccgctgctctgccgcacggagtcgcactggtcagccaccgcgccgtcgatccaccgctctgccgcctctgcgcgtcagccgcgctaggcgccaaccttccactccataccggtccaccggcgtcgatccaccgacgactccgtactcggtacttccaccgcatcgcggcaccggtccaccgctctggcgactcggtgttctgcacttctgctccgatttcggcgtcctgctccacggtgcccacgactcgctgcagaccgacccagcacgtaaggtgccgcggatcctggttgcgtccgaggagaggctgcgccggaacgcggagttcctgctcaacgaggtcgggctgccgccgcagtacatcgtccgccgttcggtgcttctcatgtacagcctcgagaggcggatagtgccccggcacctcgtgctgatggttctcaaagagaaggggttggttgagcaggaccggtgcttcttcaacgtggttctcaacgaggctgcacttctgtttgtgaattgtgatggattgatgatgaacctgttaagttatttcctgtggtgtatgaacttgcatgtagttggcattttctaagtcaatttgtcatgtatttgtatgcacttctatgcaattttgtgtgaactgtgaaccactaaacctatttatcaatt

SEQ ID NO: 205854 - DNA, 743 bp, Zea Mays
ttggcattctatttgcagcagtttgctgatgttaatcaagttgctcgtggtgataacactggggaatcaattcctatgctcctaaggataccccgcttctttgatccatggggtggttatgatatgataggctttggtgacattatcttccctggattgcttgttggattcagctatagatttgacagagcaaacagaaagggtgtcttgagtggatattttctctggctaattgtgggatatgcagttggccttttcattacgtatcttgcgctgttcttgatggacgggcatggtcaacctgcgttgttgtaccttgtgccatgtacattgggggttattgttattcttggttggttaagaggtgagctttatgaattatggaacttcggaaaaagtccaggagaaaattttgtcaatgaaccatgacaacaaaatccagggaagatgtattcttcagcgtagtagatagcttgaggatgtttattaggaggcaccgtgtattgcaagatgttatgtttagcattatttcaaagaaggatgctattgtgtttgaaaaaaatgatatacatgtaagatgcaagcatgtactcccacagtcgtaaaataatccaatataagtgccgctatatagttccaaaataagtgtcactagggttggaaacgagttgagcctgacttggctcggtcaatttggatatgtttggttgcctggtctagtgcacgaccaggcccatttgaaa

SEQ ID NO: 205855 - DNA, 1063 bp, Zea Mays
attccctcctttcgggcacaggtatgcatgcttgcttggtcacgcttctagctaggatttttaaggactgtggacaaaagactgtacaactccctgttttgggggaggtcttgatcttatctgttggaattgtaccattttgtgcggtgtttgcaattctctgggctgtgtatcgccatgcttcatttgcttggataggccaagacgttctgggtatctgtttgatgataactgtgcttcagatggcacgtttaccaaatatcaaggttgcatcggcacttcttagtgctgcatttgtgtatgacatcttttgggtgttcatttcacctcttatattccatgaaagcgtcatgattgcagttgctcgtggtgataacactggggaatcaattcctatgctcctaaggataccccgcttctttgatccatggggtggttatgatatgataggctttggtgacattatcttccctggattgcttgttggattcagctatagatttgacagagcaaacagaaagggtgtcttgagtggatattttctctggctaattgtgggatatgcagttggccttttcattacgtatcttgcgctgttcttgatggacgggcatggtcaacctgcgttgttgtaccttgtgccatgtacattgggggttattgttattcttggttggttaagaggtgagctttatgaattatggaacttcggaaaaagtccaggagaaaattttgtcaatgaaccatgacaacaaaatccagggaagatgtattcttcagcgtagtagatagcttgaggatgtttattaggaggcaccgtgtattgcaagatgttatgtttagcattatttcaaagaaggatgctattgtgtttgaaaaaaatgatatacatgtaagatgcaagcatgtactcccacagtcgtaaaataatccaatataagtgccgctatatagttccaaaataagtgtcactagggttggaaacgagttgagcctgacttggctcggtcaatttggatatgtttggttgcctggtctagtgcacgaccaggcccatttgaaa

SEQ ID NO: 205856 - DNA, 1243 bp, Zea Mays
gcatttcatgtttgtatttatatgatggacctgacacgggaacaaaatacagagaagataaagaggtcttcgagatcagcgcgaagggtgcttttatttttattatagtagcttcagttttcctcctcctcctgttctacttcatgtcatcttggttcgtttgggtgctaattgtactattctgcattggtggtattgagggtatgcatgcttgcttggtcacgcttctagctaggatttttaaggactgtggacaaaagactgtacaactccctgttttgggggaggtcttgatcttatctgttggaattgtaccattttgtgcggtgtttgcaattctctgggctgtgtatcgccatgcttcatttgcttggataggccaagacgttctgggtatctgtttgatgataactgtgcttcagatggcacgtttaccaaatatcaaggttgcatcggcacttcttagtgctgcatttgtgtatgacatcttttgggtgttcatttcacctcttatattccatgaaagcgtcatgattgcagttgctcgtggtgataacactggggaatcaattcctatgctcctaaggataccccgcttctttgatccatggggtggttatgatatgataggctttggtgacattatcttccctggattgcttgttggattcagctatagatttgacagagcaaacagaaagggtgtcttgagtggatattttctctggctaattgtgggatatgcagttggccttttcattacgtatcttgcgctgttcttgatggacgggcatggtcaacctgcgttgttgtaccttgtgccatgtacattgggggttattgttattcttggttggttaagaggtgagctttatgaattatggaacttcggaaaaagtccaggagaaaattttgtcaatgaaccatgacaacaaaatccagggaagatgtattcttcagcgtagtagatagcttgaggatgtttattaggaggcaccgtgtattgcaagatgttatgtttagcattatttcaaagaaggatgctattgtgtttgaaaaaaatgatatacatgtaagatgcaagcatgtactcccacagtcgtaaaataatccaatataagtgccgctatatagttccaaaataagtgtcactagggttggaaacgagttgagcctgacttggctcggtcaatttggatatgtttggttgcctggtctagtgcacgaccaggcccatttgaaa

SEQ ID NO: 205857 - DNA, 1389 bp, Zea Mays
tgtgcgagaagtggaagtgcagctatattcaccaaatcgaccaactgtggacctttcagcatgcttcttatggataatggctgtaggcaccatagtctgtgcttcactctggactgaatttgttacatgtgaacaggttgatgagcgttataatcagctgaccagaaaggatggacctgacacgggaacaaaatacagagaagataaagaggtcttcgagatcagcgcgaagggtgcttttatttttattatagtagcttcagttttcctcctcctcctgttctacttcatgtcatcttggttcgtttgggtgctaattgtactattctgcattggtggtattgagggtatgcatgcttgcttggtcacgcttctagctaggatttttaaggactgtggacaaaagactgtacaactccctgttttgggggaggtcttgatcttatctgttggaattgtaccattttgtgcggtgtttgcaattctctgggctgtgtatcgccatgcttcatttgcttggataggccaagacgttctgggtatctgtttgatgataactgtgcttcagatggcacgtttaccaaatatcaaggttgcatcggcacttcttagtgctgcatttgtgtatgacatcttttgggtgttcatttcacctcttatattccatgaaagcgtcatgattgcagttgctcgtggtgataacactggggaatcaattcctatgctcctaaggataccccgcttctttgatccatggggtggttatgatatgataggctttggtgacattatcttccctggattgcttgttggattcagctatagatttgacagagcaaacagaaagggtgtcttgagtggatattttctctggctaattgtgggatatgcagttggccttttcattacgtatcttgcgctgttcttgatggacgggcatggtcaacctgcgttgttgtaccttgtgccatgtacattgggggttattgttattcttggttggttaagaggtgagctttatgaattatggaacttcggaaaaagtccaggagaaaattttgtcaatgaaccatgacaacaaaatccagggaagatgtattcttcagcgtagtagatagcttgaggatgtttattaggaggcaccgtgtattgcaagatgttatgtttagcattatttcaaagaaggatgctattgtgtttgaaaaaaatgatatacatgtaagatgcaagcatgtactcccacagtcgtaaaataatccaatataagtgccgctatatagttccaaaataagtgtcactagggttggaaacgagttgagcctgacttggctcggtcaatttggatatgtttggttgcctggtctagtgcacgaccaggcccatttgaaa

SEQ ID NO: 205858 - DNA, 668 bp, Zea Mays
attcccatccccgtcggccgttgcgctgtcaagtgcgacggcgacggaccacgtgccatgccatgccatgccatgccgcgcacgatctcctcgcgcggagacgacgctgcctctccggtacctgatgccatgatgctctcgcaatctatcaattggattggcagatgcatgtgtcgttcactcgatcgtgacgggagctcgccgtatgaaaggctgtgtagactggcggcaggagatgcaggcatccccgggtcacgcgctcccaccaggtgcttgacggattgcgagggcacaggaagacgcacagcgcaggccagtgagagggctgtggacacatgggagttgctagctacggcctacgggtaaagtcaggttatcttgtcggcgtcacaatgcctttcacggtgggctattctacagaggaaggaggttcgacctatggttgtaacaggatcacgaaccttggtgagggtggccacgacgtttttctcccggaggcacgggtggcgatctaggcttcggatcggttatcattagatcaatgtcttttttggtttttttttagttggctatgtgcattaggcagaggtcggaagttctgtaccaaggatttgtatcctcttgatgtaatgacttggtattttcaatacaagcttcctttatctaaa

SEQ ID NO: 205859 - DNA, 2454 bp, Zea Mays
ccgaggtgacgggctgacggccctgcctatccacctcataccgcctgcccgcctgccgtgttcaaaattcgaacgtcctccgccgccccaacgataccatcttccccagttccccacgccggcacacccaagctcggccactcgtcttgttgcgaccaaacccaaaatccgaacaccctctcgttccccatccccggcgtccggcgctgaccgcgtgatcctcgccccgatggcggccgcctccacacccgcccgttcttccgcgcacctttcgcagccggtgcgcgtcgtgctgcgtgtgcgcccgttcctgtcgtcggaggccgcctcagcgacagcgccttgcgtctccctcctcggctgccaccccggcggtggggtcaccgtccagctcaaggaccagcacacaagtcggagtgaacagtacaaactggatgcgttcttccgtcaagaggacagcgtcagccagatatttgaccaggaggttcgtgcagtgatcccaagcatcttcgaggggatcaacgcgacggtctttgcctatggggcaaccggcagcggcaagacctacacaatgcagggcacagaggattttccagggctaatccccttggcagcttcgaccatcctagcactctgcactggcacatggtgctctgttgagatctcgtactatgaggtgtacatggagcggtgctatgacctgctggagcctaaagcgaaggagatcatggccttggatgacaaagatggtaacatgcagctgaaaggcttaagctgggtccctgtgcgatccatggaggaattccaggagctctattccataggcgtgcagaggagaaaagttgcccacactggactgaacgatgtttctagtcggagccacgctgtgctctcactcagggtcagcagcactgatgtggtgaaagggaagcttaatctcattgatttagctggtagcgaggacaacaaaaggactttgaatgagggcatacgccttcaagaaagctccaagatcaaccagtcattgtttgcgttgtccaatgtcatttcagctctaaataagaatgagcatcggataccatatagacagagtaaactgactcggttacttagagattctctaggaggcggttgccgcactgtgatgatagcttgcctgaatcctgcagaataccaggagtcggccaacacagtaagtctggcggctcgttcatgccatattgagaatttcaccagttcaagcaaacaagaaactcccaaacttaagatcgacatggaagccaaattacgagcatggttggaatcaaaggggaaaacaaagagcatccaaagaatggatggtcttttctccccaattgccagcaagactccattgtctgtgagccatatgaagcaaccaacatcttcaagaattccttgtagagttaaggcaatggatcaggatggtggtaaaatcaagaagatactttttgatccagtagtccatgttcccactgaaaatataccacgagagcacaggcagacagaagtaaatacaccaaagaaagttactccatgcaatgaaaaacatgaagcttctctcaggaaagctctttctccaatttcttcaaacatggtgcctgtagagcagcaaatacctgataatggcaattgccccgttttattggagccccaaactccaatagaaaaacgtaatatagtcgaggagactcctggtgcaacaccactagagagatttaatgcactagggtctaacctaaaggaagctctagttcagcagtaccttgaccttttaaatgttgcaaacaagttgaccttatgtcacaaaaaatatccagttttttccagtctttatttctaatgtttatctccctttacctatgagcagggaagagctacagcagctgaaaggaattggcgcgaggagagcagaatatattctggaattacgggaggactcaccaaaaccattcaaaactcttgaagatttgggaaacatcggcctctcgtcaaagcagatccgagacatccttaagaagacggccactgggatcttcaaatgatgacctcaatggatgatgatgtattggcgctagacattcataggtgtaacagctaaatgactggcttgtgttgctgacggagaagttagttcaatgtttgtgttggtgacttcaggcagtgccctgctgctactttcaactagattcccttgattgtgtgtagaattgcagttgaagtgttgaacaagtaaactatcggagttgtgatgctacttttacgtccaggggagtttttatggaacgagctattcgaacattttatatgatgaagtggagcatcagttttgctcatttgaataatgataacaagcagagtttttatcatttgataatgtcaacatgttccgcaggcagagtttttatgaacgagctattcgaacgttttatatga

SEQ ID NO: 205860 - DNA, 1298 bp, Zea Mays
ctcttgcctaaaagagatcgaacttggattcagtgattttggatggtgaaggtacagagtaaagagtctgcaacctttggtggtgcagtttttatgtgcaaccatctgaccaggaaggagtgctttgacaagaaaatatttggcctctctgatttctgtgctgattttgtagagaaagttaaagctggcacaactttattcttatatgatgttgatcagtgtaagctccatggtgttttcgaagcaacttcagatggggctgtgaacattattcctgatgcatatgtcgcatcaggaaaggggtatccttctcagatacgtttcaagaggatttggttttgcaagcctttgacgcttactgaatttcaagatgctgtccacaattattctgttaaaaacaagtttagttatggtttgtcacaccaacaggttgcaaagcttctccatttgttttcttcacggaacaggttgcagcttcctcaaaacccaatattacaagatgatgtcccaggggaccttgagacttcttcttctctggctagagtaactgacgtgcagtgcagtccatgtggttcattcaggagcacctgtcaaacatgttcctccacctctcttggggaacatatggcaccgatgggtgcaaaattaatcgatcccggggcattaatgcacagaggtctacaatcagacatctcaaaatctcccctgcaatctggagcggagatggccactatcaccatacctggcaaccaagaagcaatgcatgaccaacctactgatgactatatacctcttctccaggaggaaaatacttttgaaggtgttgatggtctatttgcgttgctaaaagatgtgtgccactcttctgaattatctaaacgtagcagtgactctgaaaaccataatacattccaccaagtttgtattaggaaggaagatgaatgctgcccacccatcttaggtcgttccaaactccgtgctgacagtgaagggcgaacaagtgtgttttctcggttagtgagaaagcacgatcgtggtcgtggggaggcaatgaaacagctgtgatgctgtgctcatcaccggatgcacaacctgcaaggacacactatccttgagctgccctcggtttgtgtttgagtgcctttcgttcgtttgttgttagggtaagaacggagtacgtgtcgtgaacctggatgtgttgtagttgcatgttgtattactatttcgggcctatgtttgctgtgtagacgagttatcacgtaattgctacatgtgtgtctgttgttcttgtgcttgtt

SEQ ID NO: 205861 - DNA, 1396 bp, Zea Mays
ctcaatcttcctatcctattttctctcactccatctcaagtcaggcacggtgacttgacgaggcccatctaagcacactacagcaccgggcgaggcggctaggccccctcaccgtccaccggcgactgggccggccgtcgctgccgccctgcctctccaccgtcgccggcgacgagcaccactaggtgtttttgagtctgttgcgagtgttgtggccatgtccatgttcaataggatcttcgggaagcccaaggagcaggccaactccaatgctttggccactctggacaagttaaatgagacacttgatatgctggagaagaaagaaaaggtgctggagaaaaaagcaaacgctgagcttgagagagccaaggagttctcgaaagcaaagaataaaagagcggctatccaatccttgaagaggaaaaaactttatgagcaacaaattgagcagcttggaaattttcagttgagaatccatgatcagatgatcatgttagaagcagctaaagctacaacagagactgttgatgcattgagaactggagctgcagctatgaaagcaatgcaaaaagcaacaaacattgatgatgtcgacaagaccatggatgaaattaacgaacagactgaaaacatgaaacaaattcaggatgctttgtcagctcctcttggagcttttgctgatttcgacgaggatgaactggaagctgaacttgaagaactggagggagcagagttggaatctcagcttcttgagcctgttgcagctcctccggtgcatccagtgcatgtcccagccaacaagcaaccagctcgccctgccccacagaaagttacagctgaagatgatgaacttgctgcactgcaagcggaaatggcattgtgatcaggaacttgcaggttctcatggagaggtgaaacatgtaaatgaagatgaaagctgagtcagctatactatatatttgccatgcgtgtacaaacttggccggatatttggcaaccgcagcagaaaaaagaggctgctccagcccagtgcttgtttcagtgactttggaatctgttgtcgatcgatgacagttcttctgttaatgtcgctcggttagctctacgctaattattcagatcacccaacgtgcattgtttcagtgttttgcttaattggcccatactgtctggagccgtgcatgtaaaagtgttgcagggttcacgtttgatgtggctgttcgcagcgctttcaacctcagttgaaggtccaagcaaggtggtgcggccaacagaagtgggaggtagctaaagattggcgtgagatactgtggagggcaagcagggcagtacgctgttgctctcatgctctgctccactcatctccaagtgtgatctgtgagtgttgtgtgtg

SEQ ID NO: 205862 - DNA, 919 bp, Zea Mays
ctcactccatctcaagtcaggcacggtgacttgacgaggcccatctaagcacactacagcaccgggcgaggcggctaggccccctcaccgtccaccggcgactgggccggccgtcgctgccgccctgcctctccaccgtcgccggcgacgagcaccactagctgttgttttgcctcccaggtgtttttgagtctgttgcgagtgttgtggccatgtccatgttcaataggatcttcgggaagcccaaggagcaggccaactccaatgctttggccactctggacaagttaaatgagacacttgatatgctggagaagaaagaaaaggtgctggagaaaaaagcaaacgctgagcttgagagagccaaggagttctcgaaagcaaagaataaaagagcggctatccaatccttgaagaggaaaaaactttatgagcaacaaattgagcagcttggaaattttcagttgagaatccatgatcagatgatcatgttagaagcagctaaagctacaacagagactgttgatgcattgagaactggagctgcagctatgaaagcaatgcaaaaagcaacaaacattgatgatgtcgacaagaccatggatgaaattaacgaacagactgaaaacatgaaacaaattcaggatgctttgtcagctcctcttggagcttttgctgatttcgacgaggatgaactggaagctgaacttgaagaactggagggagcagagttggaatctcagcttcttgagcctgttgcagctcctccggtgcatccagtgcatgtcccagccaacaagcaaccagctcgccctgccccacagaaagttacagctgaagatgatgaacttgctgcactgcaagcggaaatggcattgtgatcagaaattctcttggaactacacttaattagtccaag

SEQ ID NO: 205863 - DNA, 1391 bp, Zea Mays
ctcactccatctcaagtcaggcacggtgacttgacgaggcccatctaagcacactacagcaccgggcgaggcggctaggccccctcaccgtccaccggcgactgggccggccgtcgctgccgccctgcctctccaccgtcgccggcgacgagcaccactagctgttgttttgcctcccaggtgtttttgagtctgttgcgagtgttgtggccatgtccatgttcaataggatcttcgggaagcccaaggagcaggccaactccaatgctttggccactctggacaagttaaatgagacacttgatatgctggagaagaaagaaaaggtgctggagaaaaaagcaaacgctgagcttgagagagccaaggagttctcgaaagcaaagaataaaagagcggctatccaatccttgaagaggaaaaaactttatgagcaacaaattgagcagcttggaaattttcagttgagaatccatgatcagatgatcatgttagaagcagctaaagctacaacagagactgttgatgcattgagaactggagctgcagctatgaaagcaatgcaaaaagcaacaaacattgatgatgtcgacaagaccatggatgaaattaacgaacagactgaaaacatgaaacaaattcaggatgctttgtcagctcctcttggagcttttgctgatttcgacgaggatgaactggaagctgaacttgaagaactggagggagcagagttggaatctcagcttcttgagcctgttgcagctcctccggtgcatccagtgcatgtcccagccaacaagcaaccagctcgccctgccccacagaaagttacagctgaagatgatgaacttgctgcactgcaagcggaaatggcattgtgatcaggaacttgcaggttctcatggagaggtgaaacatgtaaatgaagatgaaagctgagtcagctatactatatatttgccatgcgtgtacaaacttggccggatatttggcaaccgcagcagaaaaaagaggctgctccagcccagtgcttgtttcagtgactttggaatctgttgtcgatcgatgacagttcttctgttaatgtcgctcggttagctctacgctaattattcagatcacccaacgtgcattgtttcagtgttttgcttaattggcccatactgtctggagccgtgcatgtaaaagtgttgcagggttcacgtttgatgtggctgttcgcagcgctttcaacctcagttgaaggtccaagcaaggtggtgcggccaacagaagtgggaggtagctaaagattggcgtgagatactgtggagggcaagcagggcagtacgctgttgctctcatgctctgctccactcatctccaagtgtgatctgtgagtgttgtgtgtg

SEQ ID NO: 205864 - DNA, 1054 bp, Zea Mays
ctcaagtcaggcacggtgacttgacgaggcccatctaagcacactacagcaccgggcgaggcggctaggccccctcaccgtccaccggcgactgggccggccgtcgctgccgccctgcctctccaccgtcgccggcgacgagcaccactaggtatgccctccccttggtctccctttcctgctgtgcggagccgtgcgcggtgcgcccaaaccttaacgtgatccgtagggacgccctctccttagtcttcccttacctgatgtgcgaaaccgtgcgcccaaaccctaacatactatctgtattcggatctgaaggtgtttttgagtctgttgcgagtgttgtggccatgtccatgttcaataggatcttcgggaagcccaaggagcaggccaactccaatgctttggccactctggacaagttaaatgagacacttgatatgctggagaagaaagaaaaggtgctggagaaaaaagcaaacgctgagcttgagagagccaaggagttctcgaaagcaaagaataaaagagcggctatccaatccttgaagaggaaaaaactttatgagcaacaaattgagcagcttggaaattttcagttgagaatccatgatcagatgatcatgttagaagcagctaaagctacaacagagactgttgatgcattgagaactggagctgcagctatgaaagcaatgcaaaaagcaacaaacattgatgatgtcgacaagaccatggatgaaattaacgaacagactgaaaacatgaaacaaattcaggatgctttgtcagctcctcttggagcttttgctgatttcgacgaggatgaactggaagctgaacttgaagaactggagggagcagagttggaatctcagcttcttgagcctgttgcagctcctccggtgcatccagtgcatgtcccagccaacaagcaaccagctcgccctgccccacagaaagttacagctgaagatgatgaacttgctgcactgcaagcggaaatggcattgtgatcagaaattctcttggaactacacttaattagtccaag

SEQ ID NO: 205865 - DNA, 1264 bp, Zea Mays
gacagactgtagcaataattggtcgctccccgatccatctgggtttcgcctgccagcggcgagatgtccttcttcttccgggccgcatcgcggcagcgcccgttgccgcaggagatcgcgcgctccctcaaggactccctcgttgccctcgacaccaagaccggcgccaaggctctcgaggatgctgagaaaaacatacttacattgaggcatacgcttgctggcgatggagaagtggaaccaaatcaagagcaggctagaaaggatcttgtccactgctggtgtattttgttgagacagaaggttgatgaaagctattgttgtgtccagtatattgaaaatcattttgatcttttggatttccttgttgtttgctataagaacttggaagtcgcgttgaattgtgggaacatgttgcgagaatgcataaaatatcctacacttgcaaatgctctttcagatatatattggagtcaagcagcttcgagttgtttttccagtatgttgaattgtcaaacttcgatattgcatctgatgctctgaacactttcaaggatttgctaaccaaacatgaagatgccgtctctgaatttctgagctcacattatgaacagttttttggactctacacaaaacttttatcttcaactaattatgtgacacgaagacaatcagtgaagagtttctgttggaggccccaaatgctcaaataatgaagcgttacattttggaagttcattacttaaacattatgatgggcctgctaaaggattcaagcaaaaatatcaggatatgtgccttccacatttttaaggtatttgttgccaatccaaacaagcctcgtgagattattcaggttttggttgagaatcacagagaagtgttgaagctactccacaatctccccacaagcaaaggtgaagatgaacagcttgatgaggagagagatttaattatcaaagaaatcgagaagcttgtgcggttgtcagtataaaccctcaggaaattcgagcgtatccttgaagacatactgtgcaatatgctgccttgtatagagcttgtttttcatgtatggaaaaaaagtttggccacaaattgcattcttcacgagaacacttagcatttctgtcagaaaattattttcgtgtagcagaatttgcaacaggaataatctgcattatggtgtggtgttgataccattaaggattggtgaaagtgcctgccatttgaaatgggtacgcttgtcatgtttgttttgatgtct

SEQ ID NO: 205866 - DNA, 1345 bp, Zea Mays
gacagactgtagcaataattggtcgctccccgatccatctgggtttcgcctgccagcggcgagatgtccttcttcttccgggccgcatcgcggcagcgcccgttgccgcaggagatcgcgcgctccctcaaggactccctcgttgccctcgacaccaagaccggcgccaaggctctcgaggatgctgagaaaaacatacttacattgaggcatacgcttgctggcgatggagaagtggaaccaaatcaagagcaggttttgcagatagcccttgagatttgcaaggagggtgttctttccctctttgttcagaatcttccttcattgggttgggaggctagaaaggatcttgtccactgctggtgtattttgttgagacagaaggttgatgaaagctattgttgtgtccagtatattgaaaatcattttgatcttttggatttccttgttgtttgctataagaacttggaagtcgcgttgaattgtgggaacatgttgcgagaatgcataaaatatcctacacttgcaaatgctctttcagatatatattggagtcaagcagcttcgagttgtttttccagtatgttgaattgtcaaacttcgatattgcatctgatgctctgaacactttcaaggatttgctaaccaaacatgaagatgccgtctctgaatttctgagctcacattatgaacagttttttggactctacacaaaacttttatcttcaactaattatgtgacacgaagacaatcagtgaagagtttctgttggaggccccaaatgctcaaataatgaagcgttacattttggaagttcattacttaaacattatgatgggcctgctaaaggattcaagcaaaaatatcaggatatgtgccttccacatttttaaggtatttgttgccaatccaaacaagcctcgtgagattattcaggttttggttgagaatcacagagaagtgttgaagctactccacaatctccccacaagcaaaggtgaagatgaacagcttgatgaggagagagatttaattatcaaagaaatcgagaagcttgtgcggttgtcagtataaaccctcaggaaattcgagcgtatccttgaagacatactgtgcaatatgctgccttgtatagagcttgtttttcatgtatggaaaaaaagtttggccacaaattgcattcttcacgagaacacttagcatttctgtcagaaaattattttcgtgtagcagaatttgcaacaggaataatctgcattatggtgtggtgttgataccattaaggattggtgaaagtgcctgccatttgaaatgggtacgcttgtcatgtttgttttgatgtct

SEQ ID NO: 205867 - DNA, 1334 bp, Zea Mays
gacagactgtagcaataattggtcgctccccgatccatctgggtttcgcctgccagcggcgagatgtccttcttcttccgggccgcatcgcggcagcgcccgttgccgcaggagatcgcgcgctccctcaaggactccctcgttgccctcgacaccaagaccggcgccaaggctctcgaggatgctgagaaaaacatacttacattgaggcatacgcttgctggcgatggagaagtggaaccaaatcaagagcaggttttgcagatagcccttgagatttgcaaggagggtgttctttccctctttgttcagaatcttccttcattgggttgggaggctagaaaggatcttgtccactgctggtgtattttgttgagacagaaggttgatgaaagctattgttgtgtccagtatattgaaaatcattttgatcttttggatttccttgttgtttgctataagaacttggaagtcgcgttgaattgtgggaacatgttgcgagaatgcataaaatatcctacacttgcaaaatatatattggagtcaagcagcttcgagttgtttttccagtatgttgaattgtcaaacttcgatattgcatctgatgctctgaacactttcaaggatttgctaaccaaacatgaagatgccgtctctgaatttctgagctcacattatgaacagttttttggactctacacaaaacttttatcttcaactaattatgtgacacgaagacaatcagtgaagagtttctgttggaggccccaaatgctcaaataatgaagcgttacattttggaagttcattacttaaacattatgatgggcctgctaaaggattcaagcaaaaatatcaggatatgtgccttccacatttttaaggtatttgttgccaatccaaacaagcctcgtgagattattcaggttttggttgagaatcacagagaagtgttgaagctactccacaatctccccacaagcaaaggtgaagatgaacagcttgatgaggagagagatttaattatcaaagaaatcgagaagcttgtgcggttgtcagtataaaccctcaggaaattcgagcgtatccttgaagacatactgtgcaatatgctgccttgtatagagcttgtttttcatgtatggaaaaaaagtttggccacaaattgcattcttcacgagaacacttagcatttctgtcagaaaattattttcgtgtagcagaatttgcaacaggaataatctgcattatggtgtggtgttgataccattaaggattggtgaaagtgcctgccatttgaaatgggtacgcttgtcatgtttgttttgatgtct

SEQ ID NO: 205868 - DNA, 1263 bp, Zea Mays
gacagactgtagcaataattggtcgctccccgatccatctgggtttcgcctgccagcggcgagatgtccttcttcttccgggccgcatcgcggcagcgcccgttgccgcaggagatcgcgcgctccctcaaggactccctcgttgccctcgacaccaagaccggcgccaaggctctcgaggatgctgagaaaaacatacttacattgaggcatacgcttgctggcgatggagaagtggaaccaaatcaagagcaggctagaaaggatcttgtccactgctggtgtattttgttgagacagaaggttgatgaaagctattgttgtgtccagtatattgaaaatcattttgatcttttggatttccttgttgtttgctataagaacttggaagtcgcgttgaattgtgggaacatgttgcgagaatgcataaaatatcctacacttgcaaaatatatattggagtcaagcagcttcgagttgtttttccagtatgttgaattgtcaaacttcgatattgcatctgatgctctgaacactttcaaggatttgctaaccaaacatgaagatgccgtctctgaatttctgagctcacattatgaacagttttttggactctacacaaaacttttatcttcaactaattatgtgacacgaagacaatcagtgaagtttctttcagagtttctgttggaggccccaaatgctcaaataatgaagcgttacattttggaagttcattacttaaacattatgatgggcctgctaaaggattcaagcaaaaatatcaggatatgtgccttccacatttttaaggtatttgttgccaatccaaacaagcctcgtgagattattcaggttttggttgagaatcacagagaagtgttgaagctactccacaatctccccacaagcaaaggtgaagatgaacagcttgatgaggagagagatttaattatcaaagaaatcgagaagcttgtgcggttgtcagtataaaccctcaggaaattcgagcgtatccttgaagacatactgtgcaatatgctgccttgtatagagcttgtttttcatgtatggaaaaaaagtttggccacaaattgcattcttcacgagaacacttagcatttctgtcagaaaattattttcgtgtagcagaatttgcaacaggaataatctgcattatggtgtggtgttgataccattaaggattggtgaaagtgcctgccatttgaaatgggtacgcttgtcatgtttgttttgatgtct

SEQ ID NO: 205869 - DNA, 1588 bp, Zea Mays
catgtccacaaatcctggagatggaattctttccacccaaaaggggaaggtcatgagattgcagatcatttaacataaatggctgactcagaggacattcagcccctagtctgtgacaatggaactggaatggtcaaggctggctttgctggagatgatgctccccgtgctgttttcccaagtatagttggtcgtccacgccacactggtgtcatggttgggatgggacagaaggatgcttatgttggtgatgaggcccaatccaagaggggtatcctgactttgaagtatcccatcgagcatggaatcgtaagcaactgggatgacatggaaaagatctggcatcacaccttctataatgagcttcgtgtagcaccagaagagcacccagttcttcttacagaggctcctcttaaccctaaggctaacagggaaaagatgacacaaatcatgtttgaaactttcagtgttcctgctatgtatgttgctattcaagctgtcctttccctttatgctagtggccgtaccactggtattgtcctggattctggagacggtgtcagccacactgtcccaatctatgaaggctatgccctcccgcatgccattcttcgtctcgatcttgctggtagggacctcactgattccctcatgaagatcctgactgagaggggttactctttcacaaccactgctgagcgggaaattgtccgtgacatcaaggaaaagcttgcatatgtcgcgctcgactacgaacaagaactcgagaccgccaagagcagctcatcagttgagaagagctatgaactgcctgatggacaagtgatcacaataggcgcagagcgcttcagatgcccggaggttctcttccagccatccttcattggtatggaagctccaggaatccacgagacgacctacaactccatcatgaagtgtgacgttgatatcaggaaggacctgtatggcaacattgtcctcagtggtggatccaccatgttccctggcatcgccgaccgcatgagcaaggagatcactgcgctcgcgccaagcagcatgaagatcaaggtcgtcgctccaccagagaggaagtacagtgtctggatcggaggatcaatccttgcatccctgagcacatttcagcagatgtggatctcaagggctgagtatgaggagtctggtccagctattgtccacaggaagtgcttctagacgtcacctagccttaattctcctctggaaataccttcgtttgatgacatatctatgggtggttgctctgctatagctcgcagtttttgtgtttgccaatatatccggtaacattgtggagtcagccgtccactgtatgaagtatgtagtttggttatatatatattgattgtattatttactcgattctatgggttcttggatacctggaatgtgcatgatatttttaaatttttgtaacaatgtgtactccgtaacaaagttcgcgtttgaaacatcgtttctgctgctttaatgtaggtttgttcattctccgactgatttgggcactggcgtgttgcttctccaattttttgtgtggtgcttatgttctcac

SEQ ID NO: 205870 - DNA, 1571 bp, Zea Mays
ataaatttttttggcaaattttggtccttttgcagagcagattgcagatcatttaacataaatggctgactcagaggacattcagcccctagtctgtgacaatggaactggaatggtcaaggctggctttgctggagatgatgctccccgtgctgttttcccaagtatagttggtcgtccacgccacactggtgtcatggttgggatgggacagaaggatgcttatgttggtgatgaggcccaatccaagaggggtatcctgactttgaagtatcccatcgagcatggaatcgtaagcaactgggatgacatggaaaagatctggcatcacaccttctataatgagcttcgtgtagcaccagaagagcacccagttcttcttacagaggctcctcttaaccctaaggctaacagggaaaagatgacacaaatcatgtttgaaactttcagtgttcctgctatgtatgttgctattcaagctgtcctttccctttatgctagtggccgtaccactggtattgtcctggattctggagacggtgtcagccacactgtcccaatctatgaaggctatgccctcccgcatgccattcttcgtctcgatcttgctggtagggacctcactgattccctcatgaagatcctgactgagaggggttactctttcacaaccactgctgagcgggaaattgtccgtgacatcaaggaaaagcttgcatatgtcgcgctcgactacgaacaagaactcgagaccgccaagagcagctcatcagttgagaagagctatgaactgcctgatggacaagtgatcacaataggcgcagagcgcttcagatgcccggaggttctcttccagccatccttcattggtatggaagctccaggaatccacgagacgacctacaactccatcatgaagtgtgacgttgatatcaggaaggacctgtatggcaacattgtcctcagtggtggatccaccatgttccctggcatcgccgaccgcatgagcaaggagatcactgcgctcgcgccaagcagcatgaagatcaaggtcgtcgctccaccagagaggaagtacagtgtctggatcggaggatcaatccttgcatccctgagcacatttcagcagatgtggatctcaagggctgagtatgaggagtctggtccagctattgtccacaggaagtgcttctagacgtcacctagccttaattctcctctggaaataccttcgtttgatgacatatctatgggtggttgctctgctatagctcgcagtttttgtgtttgccaatatatccggtaacattgtggagtcagccgtccactgtatgaagtatgtagtttggttatatatatattgattgtattatttactcgattctatgggttcttggatacctggaatgtgcatgatatttttaaatttttgtaacaatgtgtactccgtaacaaagttcgcgtttgaaacatcgtttctgctgctttaatgtaggtttgttcattctccgactgatttgggcactggcgtgttgcttctccaattttttgtgtggtgcttatgttctcac

SEQ ID NO: 205871 - DNA, 1491 bp, Zea Mays
gtcatgcagtggggttcgctggttctattaggtgttggatccgtagtaggagtaaggttcgccaaagttgctgagactttggtgacctgtggatgctttgatcctgtgtttatttcaagattgcagatcatttaacataaatggctgactcagaggacattcagcccctagtctgtgacaatggaactggaatggtcaaggctggctttgctggagatgatgctccccgtgctgttttcccaagtatagttggtcgtccacgccacactggtgtcatggttgggatgggacagaaggatgcttatgttggtgatgaggcccaatccaagaggggtatcctgactttgaagtatcccatcgagcatggaatcgtaagcaactgggatgacatggaaaagatctggcatcacaccttctataatgagcttcgtgtagcaccagaagagcacccagttcttcttacagaggctcctcttaaccctaaggctaacagggaaaagatgacacaaatcatgtttgaaactttcagtgttcctgctatgtatgttgctattcaagctgtcctttccctttatgctagtggccgtaccactggtattgtcctggattctggagacggtgtcagccacactgtcccaatctatgaaggctatgccctcccgcatgccattcttcgtctcgatcttgctggtagggacctcactgattccctcatgaagatcctgactgagaggggttactctttcacaaccactgctgagcgggaaattgtccgtgacatcaaggaaaagcttgcatatgtcgcgctcgactacgaacaagaactcgagaccgccaagagcagctcatcagttgagaagagctatgaactgcctgatggacaagtgatcacaataggcgcagagcgcttcagatgcccggaggttctcttccagccatccttcattggtatggaagctccaggaatccacgagacgacctacaactccatcatgaagtgtgacgttgatatcaggaaggacctgtatggcaacattgtcctcagtggtggatccaccatgttccctggcatcgccgaccgcatgagcaaggagatcactgcgctcgcgccaagcagcatgaagatcaaggtcgtcgctccaccagagaggaagtacagtgtctggatcggaggatcaatccttgcatccctgagcacatttcagcagatgtggatctcaagggctgagtatgaggagtctggtccagctattgtccacaggaagtgcttctagacgtcacctagccttaattctcctctggaaataccttcgtttgatgacatatctatgggtggttgctctgctatagctcgcagtttttgtgtttgccaatatatccggtaacattgtggagtcagccgtccactgtatgaagtttgttcattctccgactgatttgggcactggcgtgttgcttctccaattttttgtgtggtgcttatgttctcac

SEQ ID NO: 205872 - DNA, 1637 bp, Zea Mays
caagtgggcaaattattccgcgttggcagccgccctcctccccaaggaccccaactttccagtgcggcaccggcctcctttacacctcattgccagtttcccaccgccaggcgccagccactctcacggttgccaccctagcacgcgctcgccgtcgccacgctctatatctcgcgcctctcgccttccactctttctatacccgcccgctcgcctccctggtacgcttcgtgccgccgccgcaacctcctcctccccgtcacagattgcagatcatttaacataaatggctgactcagaggacattcagcccctagtctgtgacaatggaactggaatggtcaaggctggctttgctggagatgatgctccccgtgctgttttcccaagtatagttggtcgtccacgccacactggtgtcatggttgggatgggacagaaggatgcttatgttggtgatgaggcccaatccaagaggggtatcctgactttgaagtatcccatcgagcatggaatcgtaagcaactgggatgacatggaaaagatctggcatcacaccttctataatgagcttcgtgtagcaccagaagagcacccagttcttcttacagaggctcctcttaaccctaaggctaacagggaaaagatgacacaaatcatgtttgaaactttcagtgttcctgctatgtatgttgctattcaagctgtcctttccctttatgctagtggccgtaccactggtattgtcctggattctggagacggtgtcagccacactgtcccaatctatgaaggctatgccctcccgcatgccattcttcgtctcgatcttgctggtagggacctcactgattccctcatgaagatcctgactgagaggggttactctttcacaaccactgctgagcgggaaattgtccgtgacatcaaggaaaagcttgcatatgtcgcgctcgactacgaacaagaactcgagaccgccaagagcagctcatcagttgagaagagctatgaactgcctgatggacaagtgatcacaataggcgcagagcgcttcagatgcccggaggttctcttccagccatccttcattggtatggaagctccaggaatccacgagacgacctacaactccatcatgaagtgtgacgttgatatcaggaaggacctgtatggcaacattgtcctcagtggtggatccaccatgttccctggcatcgccgaccgcatgagcaaggagatcactgcgctcgcgccaagcagcatgaagatcaaggtcgtcgctccaccagagaggaagtacagtgtctggatcggaggatcaatccttgcatccctgagcacatttcagcagatgtggatctcaagggctgagtatgaggagtctggtccagctattgtccacaggaagtgcttctagacgtcacctagccttaattctcctctggaaataccttcgtttgatgacatatctatgggtggttgctctgctatagctcgcagtttttgtgtttgccaatatatccggtaacattgtggagtcagccgtccactgtatgaagtttgttcattctccgactgatttgggcactggcgtgttgcttctccaattttttgtgtggtgcttatgttctcac

SEQ ID NO: 205873 - DNA, 2162 bp, Zea Mays
ctacctctcccgtcgcacctcgccctctcccttgccctgccccagatctcggccttcagtcctcgctgccgccgcgacttgctcgccccgtctccctccggccccgcctcatcgcggccgtggtggccaaggaacacgagctcattggaaaacactcttaaataaagcttccaatgaacaagacaggagctcgacttcgcctagctccgaacaagcggtcgacgaggcggaggtctcgcgtcctgcggatggcaaccgatagtgaagcctcgaaggcagctgaggttgtggttgactggcataaacaggacaaaaagaggatgctccatgcagtttaccgtgttggggatctggaccgcacaatcaagtactacacagaatgctttgggatgaaactgctgaggaaaagggatgttcctgatgagaagtacaccaacgccttccttggctttgggccagagaacaccaactttgcagttgaattgaccaactttgcggaggtctcgcgtcctacgtgcgtcgcgccgttgcctggctccgtcctcgccgttcctctgtagaagctggccgctgaccctcgccgtcgcgccgttttttattagatgaagaatgaatcaacccttgtagaagctaaagatagaagataacactactctgtttttgaatgtctgaagtgtaattttgcagccttgcaactataaaacaaacaatgtatggcttaattattgcagttgcacagtgtgaagatttaaaattgaagtgctatgaagagatggataagaggaagaaactttataatattgttcaagagacaaaaggaaattatcagggtttttttgtcgatgccgacccttaagcaaaaatgaggtgtcatcaagcctgaatgcaaatggtggaacaactaaaaagacatttaagtttgatagagtattcacgccgaaggatgatcaaggtgtgggcgtctccggcggcccgactatacgaagcgagggcgtatcggggctaaggacacgaaaggccaagcgcacagggcgtacggcagtaagcccgcctgcaccgcaccagaccgtcacccgcgacgtgcccatgtcatgacgccacggtggcggcacgctgacccatcgacgtcaccctcttcctcgcttccgctcgacagcctccagtttcctggtcagtcttcgtgccgcctctctgccacacaccgtctctcaggtatgtactgtattgagtaaatacatttgtactataataggttactcagaccttataattttagagaaggaagctggtgatgagctgatcaaatttctctagagaagcattaaaacaaatggttccagtgacagtggggagcttgaagtatttcatatgtctgctcttaaattgggaattacatcttttagggcagcactcactgatagaagagcccttaagaagataattcagaacgaccattttaagataaaagatgtcggtgaaattgtaccacttgttagaaactggggtttaagataaaattgcagctagatatgattgtagtgagtgctttgaggaaatcatggagggctaattacagttacttacaggtacatcctacctggagctttaaaaattgtgtttcatcgcccattgatcaatattatccatcgggttatcaacgtcatccgagcctgtccaatcaggttaacagtgtggctaagtcatatgaaaaaatatagctcaaaagataaccccagtttcttgcaatattaccttcctgtgtatgttccagagatggaatcaccacccctcacagttgaagcgaccgcttttaccgagaaaaatgatggacatgactttggaggatataatcaagatgtgaaagaaaaagaatcctggaggcaagaaaccccctaggcggccggtaaactctaagtctgaaggtttagggttttcatgctctcgactctgatagctaactcagaactgatattcaatgtaaaatattcagtgtgatagaaaaagaagcgagaggtgtgacgtggtatgtttatagctattgtgcagtatacaccttgcttacagggcccacgccaccatgatgtcacatttcaattcattttgtgacctctgatgaagagatttaaacacatctgttctatcctatccatagttttaacttc

SEQ ID NO: 205874 - DNA, 2033 bp, Zea Mays
acaacagccactggagtaggattatactactgctggactggactggaacggaacgggagaattttcagccggagtggcggacaccgatgatggggtctcgcgttcgcatcgtcttcctcctcctcgccttcctcttcgcgcgcgccgccgagccgatcgccgccgccgcacccgccggcagcaggcaccttacgaaggacgagcggtggatgaaccagcgcctcgaccacttctcccccaccgaccaccggcaattcaagcagcgctacttcgagttcctcgactaccatcgggcccccggcggcccggtcttcctgcgcatctgcggcgagtccgcctgcgacggcatccccaacgattacctggccgtgctcgccaagaagttcggcgccgcggtggtgacgccggagcaccggtactacgggaagagttctccattcaagcagctgaccaccgagaacctgaggttcctgtcgtcgaagcaggccctgttcgacctggccgtcttccggcagtactatcaggtttcgacaacccctggttcgtcatcggggtctcctactccggcgctctcagcgcctggttcaggctcaagttcccccatttgacatgtgggagcctcgcgagctcaggggtggttcttgcagtgtacaactacaccgactttgacaagcaggttggagagtcagctggccctgagtgcaaagctgtccttcaggaaataactgaactcgttgacgaacagctccggctggagagtcactcggtgaaggctctatttggagcacagacgctgaaaaatgatggcgacttcctcttcttcctggcggatgcggcagcgacaaccttccaatacgggaacccagatgccttgtgccctccactaataaaggcgaagaagaacaggaaaaacttggtggaagcatatgctcaatttgtgaaagattattacattaaaaaaatggagacaccaccatcctcgtatgatcgagaatatctgaaggaaacaactccacatgattctagttctaggctctggtggttccaagtttgcagtgaggttgcctactttcaagtggcacccaaaaatgacagcgttcgttctgcaaggatcaatacgaggtaccatttggacctatgcagacatgtctttggggaaggcgtttatcccgatgtgttcatgacgaacttgtattatggaggcacaagaatcgctgcttctaaaatcgtgtttacaaatggctcccaagacccatggcgccatgcctccaagcagaaatcatcgaaagacatgccgtcgtacataatgaaatgcagaaactgcggacatgggactgatctgaggggctgtccgcagtggcctttcaggatcgaaggggacgcttcgaactgctcgtctctcgctgtagtcaataccgcaagggagaggatcgccaagcacatcgacctgtggctgtcgcaatgcagcaaaccatcagtaggagcctggtaaccgcggactagtggttcatccactcgggaagagtggaaagaggtttggattggatgtcctggagcaaacttgtgtcgggacttggattacgtgtttgtgcactttgaaaagcagataaagctgatggtgtaaagcagcagtgcccggtaccccaccagggtacgtgatgcaggcaggggtggtgctgtctgtgtcgatgccgtcgtccttttctggcgtggcgctgcagacgaccgacgtgtcacggcgcgtttgggtgcgcggcgcgcgcgcgtcaaaacgtaacaagtactagtacctactactacgtgccatgccaggtgttgcgtcaaaacgtaacaagtttctcccttccgttctttgtccgagcgagtttacaagtactatactaccaaaaaggccaaagcgaacccgcaattttcttatgtatactagtagtagtgaactgctgcaccaacatccggtccacgtaaacatgtgccttttccgacgtgtatgttttatttaatggcatgtgttcacttgtgcatctttttagctg

SEQ ID NO: 205875 - DNA, 2088 bp, Zea Mays
acaacagccactggagtaggattatactactgctggactggactggaacggaacgggagaattttcagccggagtggcggacaccgatgatggggtctcgcgttcgcatcgtcttcctcctcctcgccttcctcttcgcgcgcgccgccgagccgatcgccgccgccgcacccgccggcagcaggcaccttacgaaggacgagcggtggatgaaccagcgcctcgaccacttctcccccaccgaccaccggcaattcaagcagcgctacttcgagttcctcgactaccatcgggcccccggcggcccggtcttcctgcgcatctgcggcgagtccgcctgcgacggcatccccaacgattacctggccgtgctcgccaagaagttcggcgccgcggtggtgacgccggagcaccggtactacgggaagagttctccattcaagcagctgaccaccgagaacctgaggttcctgtcgtcgaagcaggccctgttcgacctggccgtcttccggcagtactatcaggaatcgctgaatgcccggtacaaccgatcaggtttcgacaacccctggttcgtcatcggggtctcctactccggcgctctcagcgcctggttcaggctcaagttcccccatttgacatgtgggagcctcgcgagctcaggggtggttcttgcagtgtacaactacaccgactttgacaagcaggttgatagtccactccgggcataggttggagagtcagctggccctgagtgcaaagctgtccttcaggaaataactgaactcgttgacgaacagctccggctggagagtcactcggtgaaggctctatttggagcacagacgctgaaaaatgatggcgacttcctcttcttcctggcggatgcggcagcgacaaccttccaatacgggaacccagatgccttgtgccctccactaataaaggcgaagaagaacaggaaaaacttggtggaagcatatgctcaatttgtgaaagattattacattaaaaaaatggagacaccaccatcctcgtatgatcgagaatatctgaaggaaacaactccacatgattctagttctaggctctggtggttccaagtttgcagtgaggttgcctactttcaagtggcacccaaaaatgacagcgttcgttctgcaaggatcaatacgaggtaccatttggacctatgcagacatgtctttggggaaggcgtttatcccgatgtgttcatgacgaacttgtattatggaggcacaagaatcgctgcttctaaaatcgtgtttacaaatggctcccaagacccatggcgccatgcctccaagcagaaatcatcgaaagacatgccgtcgtacataatgaaatgcagaaactgcggacatgggactgatctgaggggctgtccgcagtggcctttcaggatcgaaggggacgcttcgaactgctcgtctctcgctgtagtcaataccgcaagggagaggatcgccaagcacatcgacctgtggctgtcgcaatgcagcaaaccatcagtaggagcctggtaaccgcggactagtggttcatccactcgggaagagtggaaagaggtttggattggatgtcctggagcaaacttgtgtcgggacttggattacgtgtttgtgcactttgaaaagcagataaagctgatggtgtaaagcagcagtgcccggtaccccaccagggtacgtgatgcaggcaggggtggtgctgtctgtgtcgatgccgtcgtccttttctggcgtggcgctgcagacgaccgacgtgtcacggcgcgtttgggtgcgcggcgcgcgcgcgtcaaaacgtaacaagtactagtacctactactacgtgccatgccaggtgttgcgtcaaaacgtaacaagtttctcccttccgttctttgtccgagcgagtttacaagtactatactaccaaaaaggccaaagcgaacccgcaattttcttatgtatactagtagtagtgaactgctgcaccaacatccggtccacgtaaacatgtgccttttccgacgtgtatgttttatttaatggcatgtgttcacttgtgcatctttttagctg

SEQ ID NO: 205876 - DNA, 1198 bp, Zea Mays
tcaggcactccggcttgccatttccttcccatctcttgccggcccgggcacggtcagacggtcaccatccgcccgtgcggtggctcggcgcttcccgcgcccgcatcgaagccacccacaccatccacgcgtccctctccggctctccctctcatataccgccccttgcctccgcttcgcccgcccgcccgttgccgtagcttccgtccggaaccgccgcggccggcacgcacccacccgctggcctgacccgctccggcgcatgcggcgagacgccgtcgccgccgcgcccacggcggccggcgcctcgccgccgatccctgccaccgtcctcccgacggatgctgttgtcatcgatgtcgagggagagccgcttccggcggaggcccccgggctggggtgccggatctgccacctcggccctgaggacgatgagtcagcggtgccaggttccgaggtgatgctgctaggctgcggctgcaaggacgagctcggcgccgcgcaccagcaatgcgccgaggcgtggtttaggatcaagggcgataggcgctgtgaaatatgtggttcagatgccaaaaacatcaccgggttggaagtgaaaaaattcatggagcagtggcatggccgaagagtggcacacgcacaaactactgaggagagggaaagccattgttggagacagcagcccttctgaactcaaactggaaagtgcagggtcgatggctgcttggtagaagaacaattccagaagtatggggcacccagtttgacggtctggcatctcagccatttgggattcagaaatctttactattaattatattgctgtgatccttttgtcaatcagcttctttgccggttaactattttgttctgtgtatacgaggatataagcttaaatccgatgagatgcatgagttcagaggaattttcatgtagtttggcagagaataaggtctcacaaatgcattatatttatgtttggcccaatgaagcagccctttgaactgctctgtttacctttattatgagcctggtacatatttctcgaagacctcttgtacttctctttgcttatatgactcttcagtcatcattgctgccatgagagaggttattgtgttctgaaaatgaagagtgatgtgactaggatatatccaaatgtcactctctcccttaccagagatttaggactctg

SEQ ID NO: 205877 - DNA, 1052 bp, Zea Mays
tcaggcactccggcttgccatttccttcccatctcttgccggcccgggcacggtcagacggtcaccatccgcccgtgcggtggctcggcgcttcccgcgcccgcatcgaagccacccacaccatccacgcgtccctctccggctctccctctcatataccgccccttgcctccgcttcgcccgcccgcccgttgccgtagcttccgtccggaaccgccgcggccggcacgcacccacccgctggcctgacccgctccggcgcatgcggcgagacgccgtcgccgccgcgcccacggcggccggcgcctcgccgccgatccctgccaccgtcctcccgacggatgctgttgtcatcgatgtcgagggagagccgcttccggcggaggcccccgggctggggtgccggatctgccacctcggccctgaggacgatgagtcagcggtgccaggttccgaggtgatgctgctaggctgcggctgcaaggacgagctcggcgccgcgcaccagcaatgcgccgaggcgtggtttaggatcaagggcgataggaactcaaactggaaagtgcagggtcgatggctgcttggtagaagaacaattccagaagtatggggcacccagtttgacggtctggcatctcagccatttgggattcagaaatctttactattaattatattgctgtgatccttttgtcaatcagcttctttgccggttaactattttgttctgtgtatacgaggatataagcttaaatccgatgagatgcatgagttcagaggaattttcatgtagtttggcagagaataaggtctcacaaatgcattatatttatgtttggcccaatgaagcagccctttgaactgctctgtttacctttattatgagcctggtacatatttctcgaagacctcttgtacttctctttgcttatatgactcttcagtcatcattgctgccatgagagaggttattgtgttctgaaaatgaagagtgatgtgactaggatatatccaaatgtcactctctcccttaccagagatttaggactctg

SEQ ID NO: 205878 - DNA, 399 bp, Zea Mays
aggagttgtagtcagacctggagcgacagtgaagtgtgacccaggagagttctggtgccatgtttcacaggctattccattattcccaaaagcagatggcattattccgatttccagtgatggggatgaatgtgagaggtcaaatgaagaagatgaagactccaaaggacttctactcgaaagtgaagtagcattcatggactatgttagggaagttcgttattaggcaactgaattgtgggtttgcgtttactgctacaaacgggctctaaggcagcatcacaatgtccgatgcgtatttgattattgtgggttgttggaaagttgctgttttttctgctcaacagaatgtgtaattgagattttcttgaattagaaagttgttgttttgcaacgggt

SEQ ID NO: 205879 - DNA, 2815 bp, Zea Mays
  misc_feature (2814)..(2815): n is a, c, g, or t
ctctctcctctcacgctcactaacctcctccttttctttaagaaaaaattttaaaagaaaagcacagcgccgccaccaccacgctaatcagcagcagctggtagcaacgcgggggttgcgctgctctgcttcccaagcaacgcaccaaagccaacgcggcgcggtactattataccaccacaccacccaccgatcccacagctcataccagcgcaggagcagcgcagcgcagcgcagagcggcgccgcgcgcagcacctccacgcccccagctgcctgcacatgtgagcggccgcggagggcgagagctaggtacatttcgttgtgccgccgctgcggggtccgtgcgcgaccgagatccggtggggcggtggacagagatggaggcgagcgcggggctggtggccggctcgcacaaccggaacgagctggtggtgatccgccgcgagtcaggagcgggcggcggcggaggaggcggcgcggcgcggcgggcggaggcgccgtgccagatatgcggcgacgaggttggggtgggcttcgacggggagcccttcgtggcgtgcaacgagtgcgccttccccgtctgccgcgcctgctacgagtacgagcgccgcgagggctcgcaggcgtgcccgcagtgcaggacccgctacaagcgcctcaagggttgcccgcgggtggctggggacgaggaggaggacggcgtcgacgacctggagggcgagttcggcctgcaggacggcgccggccacgaggacgacccgcagtacgtcgccgagtccatgctgcgggcgcagatgagctacggccgcggcggcgacgcgcacccggacttcaaccccgtccccaacgtgccgctcctcaccaacggccagatggttgatgacatcccgccggagcagcacgcgctcgtgccgtcctacatgggcagcggcggcggcggcaagaggatccacccgctccccttcgcagattccaaccttccagtgcaaccgagatccatggacccgtccaaggatttggccgcctacggctacggcagcgtggcttggaaggaaaggatggagggctggaagcagaagcaggagcgcctgcagcatgtcaggagcgagggtggcggtgattgggatggcgacaatgcagatctgccactaatggatgaagctcggcagccattgtccagaaaagttccaatatcgtcaagccgaataaatccctacaggatgattatcgttatccggttggtggtgttgggtttcttcttccattaccgagtgatgcatccagcgaaagatgcatttgcgttatggctcatatctgtaatctgtgaaatttggtttgccatgtcctggattcttgatcagttcccaaagtggcttccaattgagagagagacttacctggaccgtttgtcgctaaggtttgacaaggaaggtcaaccctctcagcttgctccaattgacttctttgtcagtacggttgatcccacaaaggaacctcccttggtcacagcgaacactgtcctttccatcctttccgtggattatccggttgagaaggtctcctgctatgtttctgatgatggtgctgcaatgcttacgtttgaagcattgtctgaaacatctgaatttgcaaagaaatgggttcctttctccaaaaagtttaatattgagcctcgtgctcctgagtggtacttccaacagaagatagactacctgaaagacaaggttgccgcttcatttgttagggagaggagggcgatgaagagagaatatgaggaattcaaggtaaggatcaatgccttggttgcaaaagcccaaaaggtacccgaggaaggatggacaatgcaagatggaagcctctggcctggaaacaatgtacgcgatcatcctggaatgattcaggtattccttggccaaagtggtggtcgcgatgtggaaggaaatgagttgcctcgccttgtttatgtctcgagagaaaagaggccaggttataaccatcacaagaaggctggtgccatgaatgcactggtccgtgtctctgctgtcttatcaaatgctccatacctattgaacttggactgcgatcactacatcaacaatagcaaggccataaaagaggctatgtgtttcatgatggatcctttggtggggaagaaagtgtgctatgtacagttccctcagaggttcgatggtattgaccgtcatgatcgatatgctaacaggaacgtcgtcttttttgatatcaacatgaaaggtttggatggtattcaagggcccatctatgtgggtactggatgtgttttcagacggcaggcactatatggttatgatgctcctaaaacaaagaagccaccatcaagaacttgcaactgctggcccaagtggtgcctctcttgctgctgcagcaggaacaagaataaaaagaagactacgaaaccaaagacggagaagaagaaaagattatttttcaagaaagcagaaaacccatctcctgcatatgctttgggtgaaattgaggaaggcgctccagatattgagaaggctggaattgtaaatcaacagaaactagaaaagaaatttgggcagtcttctgtttttgttgcatcgacacttcttgagaatggtgggaccctgaagagtgcaagcccagcttctcttctaaaggaagctatacatgttatcagctgcggctatgaagacaagactgactggggaaaagaggtctatataccatatataacctgattcaaagacttttgactgttctatttaaataaagatataatgtgctaagtggatcgtggtttgttgcnn

SEQ ID NO: 205880 - DNA, 1295 bp, Zea Mays
gcggtcgccaggcctggcgccgcggagcagctgcagcggcaccccgtggtgctgatcccgggagcgggcggcaaccagctggaggcgcggctgacggagggctacgagccgtccagcctggtgtgccgggtgtggccactcgtgcgcggccgcggtggctggttccgcctctggttcgacccctccgtgcttgtcgcgccgctcaccaggtgcttcgccgagcggatgacgctctcctatgacgccgacgccgacgactaccgcaacgcgcccggcgtcgagaccagggtctccgacttcggctccacctccaccctccgcggaggacctcgaccccaatctcaagtacccaaagcaaccatttccattcgctcagcttattatatatgctacggtgagttccaaggctcctcacggggtacatgaacactctggcgagcacgctggaggaggccggctacgaggaaggccgcgacctgttcggcgcgccgtacgacttccggtacgggctggccgggccggggcacccgtcgcagcggaccgccgagagcaacctctggctgctgccgacgcccagcgtgttcggcaacaccacgctggtgctgtcgcgggcccacaaccgctcctactccgccaagaacatgacgcagttcctccgggacatcggcttcgaggaaggcgtggagccgtaccgcgcgcggatacggccgctcgtcgaggccctgccggagcccggcgtgcccctgacgtgcctcgtgggcaccggcgtcgacacggtggagagcctcgtgtacggcgaccgcggcttcgacgaggcccccgagaaggtggtctatggcgacggcgacgggacggtgaacctggccagcctcataggcccgatcaaggcgtggtcggactcgccggcgcaggtcgtcgaggtggtggagctgcccaaggtgtcgcattccggcatgctcagcgacaagagcgcgctggagcagatcataaggatcatcgattctatcaacctgaacgccacgagctatcatcattcctcttagaatgttttgctttagtagacaactaacgatgatttcttttcacttaaatcggcgacagcagctagttttttttatttggaaaaaagtttattgttttttctgtaaggattatcgggatttgctttagctggtgcctattagagttctctatgtatttcttaatcgttatgaataaatttttttgggaaaaagtacatttaaccagggttttaaagtagttatccaaatatactattctagatttctcgctaa

SEQ ID NO: 205881 - DNA, 1063 bp, Zea Mays
ctttcttgatggcactagctgtatatcaggttatattcttgaagagaaaatgaagcagcaatcggtgtctgataaattgaacttggagacggacatcagtcattggattgtccgctcatatctcctacattatggataccaagatacattaaatgcttttgatatggcaaatgcaactgacccccccaccaatcgccaaaatggtcatgcagaacctcccgaaacgtatggtcttagccacagaaaacttttgcgtcagcttatcatgagtggagatattgactctacattcaaaagacttggggagtggtatccacaagtgataaaggatgagaaatcggttatttgcttactactccattctcaaagattcatagaatatatcagggctgaacaactggaagatgctgtgcactatggtcgtgctaacctggcaagcttcttgacacacgaagcttttgagtggctgctgaaggatagtgtggccctgctggcgtacgagaagcctgcagaatcatgcttgggatacctgatgggctctccccagcgtgaattcgtggcagacgcagtgaacgcggctgtcctgtcgacgaaccccaccatgaaggaccctgagagctgcctctactcgtgtctcgagaggctactaaggcagctcacagtttgtagccttgagcgacgtgcattcaacaacgaccaaggagatgcattcttactccacaaagaaatgcaaaactatgaaaggtctaggcgctcatagcctcataggcatcaggattgttgcgcttctgaagtctgcagcgcccctcagctttcgcaagggtgagcaccgaattgcatggacacagctcaggcgcttcgggaggtgttctaacctctctgtaatcagaaaactcacagtgagataaagccaacgtttcagatttcccctattttgttggttggctaatatgctgtttgacactatgaatgctaaaaagtaaagacgcttcgacatatgcccctggtacaagatcttgtatcatgtcccacgccacgtttgtctacagcatggacatggtca

SEQ ID NO: 205882 - DNA, 2150 bp, Zea Mays
ggaaaaacgcagcaatacagcaccggtatctccagcggctcggctgacggccctccactgtagtctctcgatcgagctcggctcggtcctcccctgcgaggttccccgtcttcgtccgcgctgcaatccaacctggcgccgccgaacccttctctcgcccggtgctgccgaagccgaacccttctctcgcccggcctgccgtagtcctccactccgccggatcctctctcagctcgagcggtcttggagatccgtccgtcccgggatcatttggcgcggaggtttggcctgggaaaatggcaaacatacgtgcacttctggtcggcttatcgcgggcaaggggatccttagcagaggctggacgatgtgcttccacgaggccatcaattctagcatctctgggcgcacattacaagatccccatgccagcccgctggttctcatctacagggcttcctccacatctggtggtcggaatgccagcactatctcctactatgaatcaaggtaacatcgcgaaatggagaaaacaggaaggggacaagatagaggttggtgatgtgatatgtgagatagaaactgataaagccactcttgagtttgaaagccttgaagaggggtatttggccaagattttagcacctgaaggttctaaagatgttcaagttggacaacccattgctgttacggttgaagacgttgaggatattaagagtataccagctgatacatctttcggtggtgaacaaaaggaagagcaatcaacagaaagtgcaccgcaaaacaaagtagttaatgtgtctgaacaaagctcaacagtgagccggatcagcccggcagctaaattactgatcaaggaacatggactggatacatcatcactgagagcatcaggcccccgtggcacccttctgaaaggggatgttctggcagcattgaagtcaggtatcaattcaagttcaaccaaagaaaagaagtctccagctcaaccttcgtctcagccaactcgagattcccaatctcaagcatcctctatttcacaaaaggatgatacatatgaagatattccgaatagtcagatacgcaaggttgctcgaatcaaaacagacgactccacatttgtatctatccaaagatgttgtgctggatcccttgctcgctttcaggaatgaactaaaagagctacatggcattaaagtttcagtaaatgacatcatcataaaggctgtggcaattgcgttgcggaacgtccctgaagcaaatgcttactggaacaatgataaggaagaaactcaaaagtgcgattcagttgatatatctattgctgttgctacagagaagggcctgatgaccccaataataaggaatgcggatcaaaagactatatctgcaatatccgcagaggttaagcagctggctgaaaaggcaagagctgggaagcttgcacctaacgaatttcaagggggaactttcagtatctcgaatcttgggatgtaccctgtggaccatttctgtgcaatcattaaccctccacagtctggcattctcgcagtgggtagaggaaacaaggttgttgaacctgttgtggacagcgatggaaccgagaaggctgctgcagttacaaagatgagcctgacactatctgctgaccatcgtgtatttgatgggcaagtaggaggcaagtttttcacggagctggcgctgaatttcagcgacatcaggaggctgctattgtaaatgaaaggaggcaattaccgtgttttgacgtattctttgggagcgaaaaccgctcaggaaaagagaacatttggatgcaacccgtggtctgctgcttgatcggcatcccgtacaaaagtaaccaattttgtaataaatttataataagaatgcactggcaccttcacggttttttaacccgttttccattagttgggaggaggcatgtcctgagaatttagcaggtacggtgccattcaacttcgtggttccgcaacaatgaccacccttagattatgcaatctgagcggttctggatggacgcccattttgttgatgaccttgtgatacatggaagtaataacagaatgcttttgttacatttcccccccaaatgcaacagtattctggttgctggtttattgttacggcaa

SEQ ID NO: 205883 - DNA, 2153 bp, Zea Mays
ggaaaaacgcagcaatacagcaccggtatctccagcggctcggctgacggccctccactgtagtctctcgatcgagctcggctcggtcctcccctgcgaggttccccgtcttcgtccgcgctgcaatccaacctggcgccgccgaacccttctctcgcccggtgctgccgaagccgaacccttctctcgcccggcctgccgtagtcctccactccgccggatcctctctcagctcgagcggtcttggagatccgtccgtcccgggatcatttggcgcggaggtttggcctgggaaaatggcaaacatacgtgcacttctggtcggcttatcgcgggcaaggggatccttagcagaggctggacgatgtgcttccacgaggccatcaattctagcatctctgggcgcacattacaagatccccatgccagcccgctggttctcatctacagggcttcctccacatctggtggtcggaatgccagcactatctcctactatgaatcaaggtaacatcgcgaaatggagaaaacaggaaggggacaagatagaggttggtgatgtgatatgtgagatagaaactgataaagccactcttgagtttgaaagccttgaagaggggtatttggccaagattttagcacctgaaggttctaaagatgttcaagttggacaacccattgctgttacggttgaagacgttgaggatattaagagtataccagctgatacatctttcggtggtgaacaaaaggaagagcaatcaacagaaagtgcaccgcaaaacaaagtagttaatgtgtctgaacaaagctcaacagtgagccggatcagcccggcagctaaattactgatcaaggaacatggactggatacatcatcactgagagcatcaggcccccgtggcacccttctgaaaggggatgttctggcagcattgaagtcaggtatcaattcaagttcaaccaaagaaaagaagtctccagctcaaccttcgtctcagccaactcgagattcccaatctcaagcatcctctatttcacaaaaggatgatacatatgaagatattccgaatagtcagatacgcaaggtcattgccaaaaggttgctcgaatcaaaacagacgactccacatttgtatctatccaaagatgttgtgctggatcccttgctcgctttcaggaatgaactaaaagagctacatggcattaaagtttcagtaaatgacatcatcataaaggctgtggcaattgcgttgcggaacgtccctgaagcaaatgcttactggaacaatgataaggaagaaactcaaaagtgcgattcagttgatatatctattgctgttgctacagagaagggcctgatgaccccaataataaggaatgcggatcaaaagactatatctgcaatatccgcagaggttaagcagctggctgaaaaggcaagagctgggaagcttgcacctaacgaatttcaagggggaactttcagtatctcgaatcttgggatgtaccctgtggaccatttctgtgcaatcattaaccctccacagtctggcattctcgcagtgggtagaggaaacaaggttgttgaacctgttgtggacagcgatggaaccgagaaggctgctgcagttacaaagatgagcctgacactatctgctgaccatcgtgtatttgatgggcaagtttttcacggagctggcgctgaatttcagcgacatcaggaggctgctattgtaaatgaaaggaggcaattaccgtgttttgacgtattctttgggagcgaaaaccgctcaggaaaagagaacatttggatgcaacccgtggtctgctgcttgatcggcatcccgtacaaaagtaaccaattttgtaataaatttataataagaatgcactggcaccttcacggttttttaacccgttttccattagttgggaggaggcatgtcctgagaatttagcaggtacggtgccattcaacttcgtggttccgcaacaatgaccacccttagattatgcaatctgagcggttctggatggacgcccattttgttgatgaccttgtgatacatggaagtaataacagaatgcttttgttacatttcccccccaaatgcaacagtattctggttgctggtttattgttacggcaa

SEQ ID NO: 205884 - DNA, 1696 bp, Zea Mays
accggtatctccagcggctcggctgacggccctccactgtagtctctcgatcgagctcggctcggtcctcccctgcgaggttccccgtcttcgtccgcgctgcaatccaacctggcgccgccgaacccttctctcgcccggtgctgccgaagccgaacccttctctcgcccggcctgccgtagtcctccactccgccggatcctctctcagctcgagcggtcttggagatccgtccgtcccgggatcatttggcgcggaggtttggcctgggaaaatggcaaacatacgtgcacttctggtcggcttatcgcgggcaaggggatccttagcagaggctggacgatgtgcttccacgaggccatcaattctagcatctctgggcgcacattacaagatccccatgccagcccgctggttctcatctacagggcttcctccacatctggtggtcggaatgccagcactatctcctactatgaatcaaggtaacatcgcgaaatggagaaaacaggaaggggacaagatagaggttggtgatgtgatatgtgagatagaaactgataaagccactcttgagtttgaaagccttgaagaggggtatttggccaagattttagcacctgaaggttctaaagatgttcaagttggacaacccattgctgttacggttgaagacgttgaggatattaagagtataccagctgatacatctttcggtggtgaacaaaaggaagagcaatcaacagaaagtgcaccgcaaaacaaagtagttaatgtgtctgaacaaagctcaacagtgagccggatcagcccggcagctaaattactgatcaaggaacatggactggatacatcatcactgagagcatcaggcccccgtggcacccttctgaaaggggatgttctggcagcattgaagtcaggtatcaattcaagttcaaccaaagaaaagaagtctccagctcaaccttcgtctcagccaactcgagattcccaatctcaagcatcctctatttcacaaaaggatgatacatatgaagatattccgaatagtcagatacgcaaggtcattgccaaaaggttgctcgaatcaaaacagacgactccacatttgtatctatccaaagatgttgtgctggatcccttgctcgctttcaggaatgaactaaaagagctacatggcattaaagtttcagtaaatgacatcatcataaaggctgtggcaattgcgttgcggaacgtccctgaagcaaatgcttactggaacaatgataaggaagaaactcaaaagtgcgattcagttgatatatctattgctgttgctacagagaagggcctgatgaccccaataataaggaatgcggatcaaaagactatatctgcaatatccgcagaggttaagcagctggctgaaaaggcaagagctgggaagcttgcacctaacgaatttcaagggggaactttcagtatctcgaatcttgggatgtaccctgtggaccatttctgtgcaatcattaaccctccacagtctggcattctcgcagtgggtagaggaaacaaggttgttgaacctgttgtggacagcgatggaaccgagaaggctgctgcagttacaaagatgagcctgacactatctgctgaccatcgtgtatttgatgggcaagtaggagtcactcctcttttcttgcactgtat

SEQ ID NO: 205885 - DNA, 2136 bp, Zea Mays
accggtatctccagcggctcggctgacggccctccactgtagtctctcgatcgagctcggctcggtcctcccctgcgaggttccccgtcttcgtccgcgctgcaatccaacctggcgccgccgaacccttctctcgcccggtgctgccgaagccgaacccttctctcgcccggcctgccgtagtcctccactccgccggatcctctctcagctcgagcggtcttggagatccgtccgtcccgggatcatttggcgcggaggtttggcctgggaaaatggcaaacatacgtgcacttctggtcggcttatcgcgggcaaggggatccttagcagaggctggacgatgtgcttccacgaggccatcaattctagcatctctgggcgcacattacaagatccccatgccagcccgctggttctcatctacagggcttcctccacatctggtggtcggaatgccagcactatctcctactatggtaacatcgcgaaatggagaaaacaggaaggggacaagatagaggttggtgatgtgatatgtgagatagaaactgataaagccactcttgagtttgaaagccttgaagaggggtatttggccaagattttagcacctgaaggttctaaagatgttcaagttggacaacccattgctgttacggttgaagacgttgaggatattaagagtataccagctgatacatctttcggtggtgaacaaaaggaagagcaatcaacagaaagtgcaccgcaaaacaaagtagttaatgtgtctgaacaaagctcaacagtgagccggatcagcccggcagctaaattactgatcaaggaacatggactggatacatcatcactgagagcatcaggcccccgtggcacccttctgaaaggggatgttctggcagcattgaagtcaggtatcaattcaagttcaaccaaagaaaagaagtctccagctcaaccttcgtctcagccaactcgagattcccaatctcaagcatcctctatttcacaaaaggatgatacatatgaagatattccgaatagtcagatacgcaaggtcattgccaaaaggttgctcgaatcaaaacagacgactccacatttgtatctatccaaagatgttgtgctggatcccttgctcgctttcaggaatgaactaaaagagctacatggcattaaagtttcagtaaatgacatcatcataaaggctgtggcaattgcgttgcggaacgtccctgaagcaaatgcttactggaacaatgataaggaagaaactcaaaagtgcgattcagttgatatatctattgctgttgctacagagaagggcctgatgaccccaataataaggaatgcggatcaaaagactatatctgcaatatccgcagaggttaagcagctggctgaaaaggcaagagctgggaagcttgcacctaacgaatttcaagggggaactttcagtatctcgaatcttgggatgtaccctgtggaccatttctgtgcaatcattaaccctccacagtctggcattctcgcagtgggtagaggaaacaaggttgttgaacctgttgtggacagcgatggaaccgagaaggctgctgcagttacaaagatgagcctgacactatctgctgaccatcgtgtatttgatgggcaagtaggaggcaagtttttcacggagctggcgctgaatttcagcgacatcaggaggctgctattgtaaatgaaaggaggcaattaccgtgttttgacgtattctttgggagcgaaaaccgctcaggaaaagagaacatttggatgcaacccgtggtctgctgcttgatcggcatcccgtacaaaagtaaccaattttgtaataaatttataataagaatgcactggcaccttcacggttttttaacccgttttccattagttgggaggaggcatgtcctgagaatttagcaggtacggtgccattcaacttcgtggttccgcaacaatgaccacccttagattatgcaatctgagcggttctggatggacgcccattttgttgatgaccttgtgatacatggaagtaataacagaatgcttttgttacatttcccccccaaatgcaacagtattctggttgctggtttattgttacggcaa

SEQ ID NO: 205886 - DNA, 1804 bp, Zea Mays
gctaaatgtgccacactttgactaaggccatcaattctagcatctctgggcgcacattacaagatccccatgccagcccgctggttctcatctacagggcttcctccacatctggtggtcggaatgccagcactatctcctactatggtaacatcgcgaaatggagaaaacaggaaggggacaagatagaggttggtgatgtgatatgtgagatagaaactgataaagccactcttgagtttgaaagccttgaagaggggtatttggccaagattttagcacctgaaggttctaaagatgttcaagttggacaacccattgctgttacggttgaagacgttgaggatattaagagtataccagctgatacatctttcggtggtgaacaaaaggaagagcaatcaacagaaagtgcaccgcaaaacaaagtagttaatgtgtctgaacaaagctcaacagtgagccggatcagcccggcagctaaattactgatcaaggaacatggactggatacatcatcactgagagcatcaggcccccgtggcacccttctgaaaggggatgttctggcagcattgaagtcaggtatcaattcaagttcaaccaaagaaaagaagtctccagctcaaccttcgtctcagccaactcgagattcccaatctcaagcatcctctatttcacaaaaggatgatacatatgaagatattccgaatagtcagatacgcaaggtcattgccaaaaggttgctcgaatcaaaacagacgactccacatttgtatctatccaaagatgttgtgctggatcccttgctcgctttcaggaatgaactaaaagagctacatggcattaaagtttcagtaaatgacatcatcataaaggctgtggcaattgcgttgcggaacgtccctgaagcaaatgcttactggaacaatgataaggaagaaactcaaaagtgcgattcagttgatatatctattgctgttgctacagagaagggcctgatgaccccaataataaggaatgcggatcaaaagactatatctgcaatatccgcagaggttaagcagctggctgaaaaggcaagagctgggaagcttgcacctaacgaatttcaagggggaactttcagtatctcgaatcttgggatgtaccctgtggaccatttctgtgcaatcattaaccctccacagtctggcattctcgcagtgggtagaggaaacaaggttgttgaacctgttgtggacagcgatggaaccgagaaggctgctgcagttacaaagatgagcctgacactatctgctgaccatcgtgtatttgatgggcaagtaggaggcaagtttttcacggagctggcgctgaatttcagcgacatcaggaggctgctattgtaaatgaaaggaggcaattaccgtgttttgacgtattctttgggagcgaaaaccgctcaggaaaagagaacatttggatgcaacccgtggtctgctgcttgatcggcatcccgtacaaaagtaaccaattttgtaataaatttataataagaatgcactggcaccttcacggttttttaacccgttttccattagttgggaggaggcatgtcctgagaatttagcaggtacggtgccattcaacttcgtggttccgcaacaatgaccacccttagattatgcaatctgagcggttctggatggacgcccattttgttgatgaccttgtgatacatggaagtaataacagaatgcttttgttacatttcccccccaaatgcaacagtattctggttgctggtttattgttacggcaa

SEQ ID NO: 205887 - DNA, 2393 bp, Zea Mays
cgagcacagaggtcgctcctttctgtttcacatatctctgcctatctctgccgcatactgtcgaacagttctcgcgccccagcttcatcccatgttgttgcttagagctagcgccgatttgtctccttcacctcattgtgtggtgcgcggcgcgagcggagttaaatcccgccaagaagatggcttggtgtgcctaccaacgcaactggcaacggccatgttgcttcctgtttactgaaatgcaaggggagagtgcattgctttcagtttttacgcagcagcgaaattaagtgctaggtttatgcgggcgaggcgtctgattgtagcttactagcttcagcttatagagcatctgccaataaaaggttcgctcctgtaagaactgagaactgcctttgctaagattgcttctcttatggggtgttggtttgaggaaccactccatccaaaatgaaatggtgcatcatgggtccatttctcaaatttggtgggatgacttcattccacatattagtactaattaactaactatgaggaataaggtggtgatgtatcaactcatttcattccacaaaccaaacaaaaaagttaggagtgagaagatgatggactagctcattactcaaaccaaacaccccactaatcaccagggaccgggatttcttccaatccatcatatccttttccccggatatttattcaaaactctagtgctcctgggtggcatatatatttcgtgtcactttgttatttgatgcaacattaagaaacaatggtaccagcagcataaaagttattaataaatttctaaatcattttacaaaggtcagcctcctccatcggctggctagagctcatctcattcagaaattggcgcactgtaataccaaacatctttttgattggttaatagctatctgacttagtgacttcacttcaattgaagtaaagactagctttaaacatgcttccttgtttaggtttggcaaaggtcattttaaagaaggggaagacccaaatattccgagatgggagcccaatggtgtatagcggtgctgttaataggataatcggtcgacctcctccgaaatctggcgatattgttctagtagctgatggaacagagaaacctattggatggggtctctataactctgtgtctatgttttgtgttcggttgatgcagctagaagaagaggcaagaaggtgacataggtaccagtttttacaatcacctacattttagcagctcaagctgacatattacttaccttctttcttttcagagatcccacatgcgcacttaatatggaaagactgcttgaagcaaggatttcatccgctgttggtttgcggcacagtttgggtctcccttcagctgacacaaatgcttatcgcctcatcaacagtgaaggagacagattgtctggtctaatagtggacatctttgctgatgttgctgtcattgcttcatctgctgcttgggttgagaaatataggcaagaaatacaatttcttgttagcaaagttaatggcgtcagccatataaagtggaggccatcgacagatattttgaaagaagaaggattggatatatcagagcataaggagcctgcttcaacatgctcaactgtcaaggtcatggagaatggcattgtctacttagtctcattagagggtcagaagacagggttttatgcagatcaacgggaaaaccgctatatcatatcattactttcaaaggatcaaagagtccttgacctttgctgctacagtggcggctttgctcttaacgcagctaagggtggcgctgataatgtcattggcattgattcatcaggatcagcactagaccttgccaatgagaatattgttctcaatgagctaaaccaaggaaaagtctcatttgtaaaaggagatgcaactacattcatgaaaggagctatctcagaaaatgagctatgggacttggtaatccttgaccctccaaagttggcgccacgaaagaagaccttgtgttggcggcttccaaatatctggggtctatgaaagtaataactggggcaagccttacccctgcattttgtagagaggatgcatcaaacccaggacctttggctcagtgaaaaagcttctcaccactacgccaggcctgcccttcgcatttatgtcgtgccaatccaacagaattccctattttatttccccaaaaagtcccgtttctttcagtttttggaatgagatatttacgaaatccccatgaatagaataaaaccttgttttcatgctatttccataagattcctcttaaacatgccatgagctgcagccaatcctttgtcccaatttcaggcagctggtacatatttactcacactaatattatctaatca

SEQ ID NO: 205888 - DNA, 1115 bp, Zea Mays
aggagtacaaagaaaaaaaatgaagacgaaggcacagccgccaccgtttcttgatctcccatcttcatcttcttcgtagcgccggcgctccatcttccgctccctcccttagtcgcgctcggcacgcgggtgacggcggcagtggcggcactcaggatcgggctctcagcgacggcatcagcggtttcccctcccgcttctctccagtcgcctcgcgccctcgcctccggtcctccgcacaccagccggtgaccctccatatagggtgtgagactaccaaaactcgaaaatgaacaagggaaagatttttaagctagccaagggattcagaggaagggcgaaaaattgcataaggatagcaagagagagggtggagaaggcgctgcaatattcatatagggatcgacgcaacaagaagagagacatgcggtctctttggattgagcgcatcaatgctggtacacgcctccatggggtgaactacggcaatttcatgcatgggttaatgaaggagaacatccaactcaacaggaaggtgctctcggagctgtcaatgcacgagccatacagcttcaaggctcttgtcgatgtgtctcggaatgcatttcctggcaacaggcctgttcctgccaaggaggggctagcgagcattctgtaaacgttttcttcccaataattaaacttgatggtttacatctacatctgaaagtgacctgtctgcttgtaacgtgacgaggaggtccgaaattgtcacgggcattgcacgtgttattcctctatttttttcccacctatctaattgcatgctttgtacctcatgcttataagttttctgaagaacgtgttccattcggtcttcaaagcttttagcagaatcaactgtagattacgtttcgtgcttctgacgggcttggcttgtggcaagaggacagggcaaggctatatcagatcgtgcatgagcatgactgcaacacactgttttgctttgcattctagttcaaaataaaataagaggggtgatgactgatgagtaagctgttcgagaaaagcctaaataaccactcattgtcaaaacccattgaaaagtatgtggtttgagactgcatgagcttttg

SEQ ID NO: 205889 - DNA, 1241 bp, Zea Mays
attcaatcctcttttcgcaaagcgatcagctgtccaacatttattatggtccaccagccaaatgaataaacaacactttggaggacacacgtgtggacacaaggagtacaaagaaaaaaaatgaagagtatgaacttttatttagtggcccatctaaaagcccattaattcagcacaagttccactagcccagacgtttctttaacctagccttttcactgctccagcgaaggcacagccgccaccgtttcttgatctcccatcttcatcttcttcgtagcgccggcgctccatcttccgctccctcccttagtcgcgctcggcacgcgggtgacggcggcagtggcggcactcaggatcgggctctcagcgacggcatcagcgatatagggtgtgagactaccaaaactcgaaaatgaacaagggaaagatttttaagctagccaagggattcagaggaagggcgaaaaattgcataaggatagcaagagagagggtggagaaggcgctgcaatattcatatagggatcgacgcaacaagaagagagacatgcggtctctttggattgagcgcatcaatgctggtacacgcctccatggggtgaactacggcaatttcatgcatgggttaatgaaggagaacatccaactcaacaggaaggtgctctcggagctgtcaatgcacgagccatacagcttcaaggctcttgtcgatgtgtctcggaatgcatttcctggcaacaggcctgttcctgccaaggaggggctagcgagcattctgtaaacgttttcttcccaataattaaacttgatggtttacatctacatctgaaagtgacctgtctgcttgtaacgtgacgaggaggtccgaaattgtcacgggcattgcacgtgttattcctctatttttttcccacctatctaattgcatgctttgtacctcatgcttataagttttctgaagaacgtgttccattcggtcttcaaagcttttagcagaatcaactgtagattacgtttcgtgcttctgacgggcttggcttgtggcaagaggacagggcaaggctatatcagatcgtgcatgagcatgactgcaacacactgttttgctttgcattctagttcaaaataaaataagaggggtgatgactgatgagtaagctgttcgagaaaagcctaaataaccactcattgtcaaaacccattgaaaagtatgtggtttgagactgcatgagcttttg

SEQ ID NO: 205890 - DNA, 2714 bp, Zea Mays
aggcaactagtcgatgaggtaaatcttgtacaacattgcataagtgctcactttattcatgggtacaacattcaccacattatcttacacttagttgtaggccactttaggaacatattttttatgccgcttatctaaagcatggagttcccatttatgatttatgtcacttacgtatgatactatcgttatctctcctgttacttgtttcaggtatcagaattcctggattccaaatctgagacggatgttgatgttgactataacagcttgtactcaaagcaggactttctacagggggacgatgatcacgggatgagagtcgctgcagcgacatacttgaaaaattttacccgccgcaatttggaaactcgtctgtgttcatctgaggtttacaaggagttccgtgaccaacttgcccaggctttgcttcgagtggagcctgcaattcttcgagtgctgattgaagttttccgccaagttgttgaaaaagattttgtcaaggataacttgtggcctgagcttatccctcagttgaaactagtgatccagagcagcaacctaattagtccaggccagcatcctgagtggaatactattaatgcactcacagtacttcaatctgttgtaagacccttccagtatttcttgaatccaaaagttgtgaaagagtctgttccacaacagttggagcaaattgcagcagagattcttgtaccattgcaagtgacattccatcacttctctgacaaggttcttttgtcacctgatgggactaacttggaatatgagcagctcctactcatcacatgcaaatgcatgtatttcactgtgaggtcatacatgccatctagggtgaaacaaattttgccttccttttgcaaagacatgttccgtatactagattctttgaactttaatagtcttattgaagatggatctaccatgaagctcaagattgcaaagagatgtctcattatattttgcgcacttgttacacgtcaccggaaacatacagataactagatgccacatattgtcaactgtgcaataaaaatatcaaaacaaagcatccatttaagtaaactcgactctctccccaatcggattgtttcattggcatttgatgtgatttctcgagttttggaaacaggaccgggatggtgactagtttcaccacatttttcttcacttcttgattcagcaatttttccagcattagcattgaatgagaaggatatagaagaatgggaggaggatactgatgagtatatgcaaaagaatcttccttctgaacttgatgacatttctggatggactgaggatttgttcactgccagaaaaagtgcaatcaatttacttggtgttatagcgctatcaaaggttgtgattccttttttattatagtttgttgaacacacatagtactgacttcaggctgagcaaaacattttaagggattgttttgctatattgtattccatgactttgtcattctatatcaagtgatttcaatggctgcatgcagtctttcatatttgaacacacttgctatttttcacagaaccatgtagtttgttgaattaactcaaaaattgagatgttgctgtcatttgcttacacttttttttggtttcagggtccaccagttgcatctgcagcatcaaagcgtaagaaaggtgataaaaataaagggaaatctgaaatgagctcaattggggagttattggtcatcccattcctgtcaaagtttcctataccttctcatggtgaggatgcatcatcagtagcagtgcagaattatttcggtgttttgatggcatatggaggcctccaagattttctgactggaaagaaagatttgacaattacattgatcaggaaccggattctcccattatattctttggatccttgcagcatgcagcccatatttgatttcaacggctaattgggttattggtcagcttgcgatatgcctaccagaggacatgagttctagtatttatcagtccttaatgaaggcgttgaccatggagtatgtggaggacataacttgttatccggtttgtgcctctgcttctggtgctattgcagaactcatcgagaatagctatgttccacctgactggctcattctcctgcaagtggttctgaaaagaataagtactggagatgaaaatgagtctgctcttctgtccaagcttctgggcacaatagttgagggtggacaggaaaaagttctgtctcatattcctgaaattgtatccaacattgctagtactgtaatggagctcctgccccttgtcccagatccttggcctcaggtagtagtgcatctttcttctgtgtggtcaatattttggtactttgtcatgatgaccggcgggaggaacaccgggcgtgtaggagtgatcaagaacagggagaagcacaagggcagcttcgagaccatccacatgctgcttagagctttttgctatgtctagttttctcctatttgttgtataggaaaacatagaatggaattcaaatttggtggccgcaaaatgtggagacttgaattcatataaagttaggcttaacattagtgcaaacagctgtattttagtttagatttagagtacacttatgtatgtgttgtttgacaatgcttatttatgatatattgaatgatacttatttatattatattaattataatgttgttcaat

SEQ ID NO: 205891 - DNA, 3000 bp, Zea Mays
tgggactgcatgaccagttttagttaggcaactagtcgatgaggtaaatcttgtacaacattgcataagtgctcactttattcatgggtacaacattcaccacattatcttacacttagttgtaggccactttaggaacatattttttatgccgcttatctaaagcatggagttcccatttatgatttatgtcacttacgtatgatactatcgttatctctcctgttacttgtttcaggtatcagaattcctggattccaaatctgagacggatgttgatgttgactataacagcttgtactcaaagcaggactttctacaggcacccattcttctttccctccacttgccgctccagttgcagttggtcgaaaaaagtggaaaggaaaggggcaaaatatcctagggttctgcctccatggacatcgagacccacgccgccgccctggcccgcgacgagctgcggcggctcctcgccgccaccctcagtcccgacaaggcgtcggtggacaccgccgcggcggggctcgacgcgctctcttccgacccacgcttccccctcgccatcctcgctgtcgctgcaggggacgatgatcacgggatgagagtcgctgcagcgacatacttgaaaaattttacccgccgcaatttggaaactcgtctgtgttcatctgaggtttacaaggagttccgtgaccaacttgcccaggctttgcttcgagtggagcctgcaattcttcgagtgctgattgaagttttccgccaagttgttgaaaaagattttgtcaaggataacttgtggcctgagcttatccctcagttgaaactagtgatccagagcagcaacctaattagtccaggccagcatcctgagtggaatactattaatgcactcacagtacttcaatctgttgtaagacccttccagtatttcttgaatccaaaagttgtgaaagagtctgttccacaacagttggagcaaattgcagcagagattcttgtaccattgcaagtgacattccatcacttctctgacaaggttcttttgtcacctgatgggactaacttggaatatgagcagctcctactcatcacatgcaaatgcatgtatttcactgtgaggtcatacatgccatctagggtgaaacaaattttgccttccttttgcaaagacatgttccgtatactagattctttgaactttaatagtcttattgaagatggatctaccatgaagctcaagattgcaaagagatgtctcattatattttgcgcacttgttacacgtcaccggaaacatacagataactagatgccacatattgtcaactgtgcaataaaaatatcaaaacaaagcatccatttaagtaaactcgactctctccccaatcggattgtttcattggcatttgatgtgatttctcgagttttggaaacaggaccgggatggtgactagtttcaccacatttttcttcacttcttgattcagcaatttttccagcattagcattgaatgagaaggatatagaagaatgggaggaggatactgatgagtatatgcaaaagaatcttccttctgaacttgatgacatttctggatggactgaggatttgttcactgccagaaaaagtgcaatcaatttacttggtgttatagcgctatcaaaggttgtgattccttttttattatagtttgttgaacacacatagtactgacttcaggctgagcaaaacattttaagggattgttttgctatattgtattccatgactttgtcattctatatcaagtgatttcaatggctgcatgcagtctttcatatttgaacacacttgctatttttcacagaaccatgtagtttgttgaattaactcaaaaattgagatgttgctgtcatttgcttacacttttttttggtttcagggtccaccagttgcatctgcagcatcaaagcgtaagaaaggtgataaaaataaagggaaatctgaaatgagctcaattggggagttattggtcatcccattcctgtcaaagtttcctataccttctcatggtgaggatgcatcatcagtagcagtgcagaattatttcggtgttttgatggcatatggaggcctccaagattttctgactggaaagaaagatttgacaattacattgatcaggaaccggattctcccattatattctttggatccttgcagcatgcagcccatatttgatttcaacggctaattgggttattggtcagcttgcgatatgcctaccagaggacatgagttctagtatttatcagtccttaatgaaggcgttgaccatggagtatgtggaggacataacttgttatccggtttgtgcctctgcttctggtgctattgcagaactcatcgagaatagctatgttccacctgactggctcattctcctgcaagtggttctgaaaagaataagtactggagatgaaaatgagtctgctcttctgtccaagcttctgggcacaatagttgagggtggacaggaaaaagttctgtctcatattcctgaaattgtatccaacattgctagtactgtaatggagctcctgccccttgtcccagatccttggcctcaggtagtagtgcatctttcttctgtgtggtcaatattttggtactttgtcatgatgaccggcgggaggaacaccgggcgtgtaggagtgatcaagaacagggagaagcacaagggcagcttcgagaccatccacatgctgcttagagctttttgctatgtctagttttctcctatttgttgtataggaaaacatagaatggaattcaaatttggtggccgcaaaatgtggagacttgaattcatataaagttaggcttaacattagtgcaaacagctgtattttagtttagatttagagtacacttatgtatgtgttgtttgacaatgcttatttatgatatattgaatgatacttatttatattatattaattataatgttgttcaat

SEQ ID NO: 205892 - DNA, 3343 bp, Zea Mays
ccgacacgtgagatcccttcactagcatctctcttcctcaagcgccatccctggcttctcccatgccgagcgtctccaatgcccaaacctccatggccgacgtcgccctgctcaggtccaaccagctccccttcctgttgttgtgtccagccgatgcccctccctccatcttcctctctgcagcaaccctaccacggttgtgcccctgcttccatggtgagctcgccccagccccaacgtcggacgtgccgtcgccctcacgtccagctcctccatccccctggttccctcctagctccgaccaggtatcagaattcctggattccaaatctgagacggatgttgatgttgactataacagcttgtactcaaagcaggactttctacagggtgaggtgctcgtttcgatgtggctagagtaacttgtgtactctatctcatcgtttttaatttattcgtttatatatatatatatagtgtgatttaatatggtgtaatgtttctcatcctaatgacaccccaaacatacattcttcttccacggctgggtagccaaacaatcccacaacagtaaaattcttctaccaagtgaagaaccatggagaaaatgccttcctaatcattgttcccgctttgcaactaacatttccatttcccgccacactctcccgcgcagcacccattcttctttccctccacttgccgctccagttgcagttggtcgaaaaaagtggaaaggaaaggggcaaaatatcctagggttctgcctccatggacatcgagacccacgccgccgccctggcccgcgacgagctgcggcggctcctcgccgccaccctcagtcccgacaaggcgtcggtggacaccgccgcggcggggctcgacgcgctctcttccgacccacgcttccccctcgccatcctcgctgtcgctgcaggggacgatgatcacgggatgagagtcgctgcagcgacatacttgaaaaattttacccgccgcaatttggaaactcgtctgtgttcatctgaggtttacaaggagttccgtgaccaacttgcccaggctttgcttcgagtggagcctgcaattcttcgagtgctgattgaagttttccgccaagttgttgaaaaagattttgtcaaggataacttgtggcctgagcttatccctcagttgaaactagtgatccagagcagcaacctaattagtccaggccagcatcctgagtggaatactattaatgcactcacagtacttcaatctgttgtaagacccttccagtatttcttgaatccaaaagttgtgaaagagtctgttccacaacagttggagcaaattgcagcagagattcttgtaccattgcaagtgacattccatcacttctctgacaaggttcttttgtcacctgatgggactaacttggaatatgagcagctcctactcatcacatgcaaatgcatgtgaggtcatacatgccatctagggtgaaacaaattttgccttccttttgcaaagacatgttccgtatactagattctttgaactttaatagtcttattgaagatggatctaccatgaagctcaagattgcaaagagatgtctcattatattttgcgcacttgttacacgtcaccggaaacatacagataactagatgccacatattgtcaactgtgcaataaaaatatcaaaacaaagcatccatttaagtaaactcgactctctccccaatcggattgtttcattggcatttgatgtgatttctcgagttttggaaacaggaccgggatggtgactagtttcaccacatttttcttcacttcttgattcagcaatttttccagcattagcattgaatgagaaggatatagaagaatgggaggaggatactgatgagtatatgcaaaagaatcttccttctgaacttgatgacatttctggatggactgaggatttgttcactgccagaaaaagtgcaatcaatttacttggtgttatagcgctatcaaaggttgtgattccttttttattatagtttgttgaacacacatagtactgacttcaggctgagcaaaacattttaagggattgttttgctatattgtattccatgactttgtcattctatatcaagtgatttcaatggctgcatgcagtctttcatatttgaacacacttgctatttttcacagaaccatgtagtttgttgaattaactcaaaaattgagatgttgctgtcatttgcttacacttttttttggtttcagggtccaccagttgcatctgcagcatcaaagcgtaagaaaggtgataaaaataaagggaaatctgaaatgagctcaattggggagttattggtcatcccattcctgtcaaagtttcctataccttctcatggtgaggatgcatcatcagtagcagtgcagaattatttcggtgttttgatggcatatggaggcctccaagattttctgactggaaagaaagatttgacaattacattgatcaggaaccggattctcccattatattctttggatccttgcagcatgcagcccatatttgatttcaacggctaattgggttattggtcagcttgcgatatgcctaccagaggacatgagttctagtatttatcagtccttaatgaaggcgttgaccatggagtatgtggaggacataacttgttatccggtttgtgcctctgcttctggtgctattgcagaactcatcgagaatagctatgttccacctgactggctcattctcctgcaagtggttctgaaaagaataagtactggagatgaaaatgagtctgctcttctgtccaagcttctgggcacaatagttgagggtggacaggaaaaagttctgtctcatattcctgaaattgtatccaacattgctagtactgtaatggagctcctgccccttgtcccagatccttggcctcaggtagtagtgcatctttcttctgtgtggtcaatattttggtactttgtcatgatgaccggcgggaggaacaccgggcgtgtaggagtgatcaagaacagggagaagcacaagggcagcttcgagaccatccacatgctgcttagagctttttgctatgtctagttttctcctatttgttgtataggaaaacatagaatggaattcaaatttggtggccgcaaaatgtggagacttgaattcatataaagttaggcttaacattagtgcaaacagctgtattttagtttagatttagagtacacttatgtatgtgttgtttgacaatgcttatttatgatatattgaatgatacttatttatattatattaattataatgttgttcaat

SEQ ID NO: 205893 - DNA, 3496 bp, Zea Mays
ccgacacgtgagatcccttcactagcatctctcttcctcaagcgccatccctggcttctcccatgccgagcgtctccaatgcccaaacctccatggccgacgtcgccctgctcaggtccaaccagctccccttcctgttgttgtgtccagccgatgcccctccctccatcttcctctctgcagcaaccctaccacggttgtgcccctgcttccatggtgagctcgccccagccccaacgtcggacgtgccgtcgccctcacgtccagctcctccatccccctggttccctcctagctccgaccaggtttgccaggtccgaccgttctgctcgccgcgccctccccatgccagcacgcgagcgccccctcccgtccctgctcctctccatcgacgcccaggccgatgccgagctcccagcccctcccgatggcgtggtcaagcatctaggtatcagaattcctggattccaaatctgagacggatgttgatgttgactataacagcttgtactcaaagcaggactttctacagggtgaggtgctcgtttcgatgtggctagagtaacttgtgtactctatctcatcgtttttaatttattcgtttatatatatatatatagtgtgatttaatatggtgtaatgtttctcatcctaatgacaccccaaacatacattcttcttccacggctgggtagccaaacaatcccacaacagtaaaattcttctaccaagtgaagaaccatggagaaaatgccttcctaatcattgttcccgctttgcaactaacatttccatttcccgccacactctcccgcgcagcacccattcttctttccctccacttgccgctccagttgcagttggtcgaaaaaagtggaaaggaaaggggcaaaatatcctagggttctgcctccatggacatcgagacccacgccgccgccctggcccgcgacgagctgcggcggctcctcgccgccaccctcagtcccgacaaggcgtcggtggacaccgccgcggcggggctcgacgcgctctcttccgacccacgcttccccctcgccatcctcgctgtcgctgcaggggacgatgatcacgggatgagagtcgctgcagcgacatacttgaaaaattttacccgccgcaatttggaaactcgtctgtgttcatctgaggtttacaaggagttccgtgaccaacttgcccaggctttgcttcgagtggagcctgcaattcttcgagtgctgattgaagttttccgccaagttgttgaaaaagattttgtcaaggataacttgtggcctgagcttatccctcagttgaaactagtgatccagagcagcaacctaattagtccaggccagcatcctgagtggaatactattaatgcactcacagtacttcaatctgttgtaagacccttccagtatttcttgaatccaaaagttgtgaaagagtctgttccacaacagttggagcaaattgcagcagagattcttgtaccattgcaagtgacattccatcacttctctgacaaggttcttttgtcacctgatgggactaacttggaatatgagcagctcctactcatcacatgcaaatgcatgtatttcactgtgaggtcatacatgccatctagggtgaaacaaattttgccttccttttgcaaagacatgttccgtatactagattctttgaactttaatagtcttattgaagatggatctaccatgaagctcaagattgcaaagagatgtctcattatattttgcgcacttgttacacgtcaccggaaacatacagataactagatgccacatattgtcaactgtgcaataaaaatatcaaaacaaagcatccatttaagtaaactcgactctctccccaatcggattgtttcattggcatttgatgtgatttctcgagttttggaaacaggaccgggatggtgactagtttcaccacatttttcttcacttcttgattcagcaatttttccagcattagcattgaatgagaaggatatagaagaatgggaggaggatactgatgagtatatgcaaaagaatcttccttctgaacttgatgacatttctggatggactgaggatttgttcactgccagaaaaagtgcaatcaatttacttggtgttatagcgctatcaaaggttgtgattccttttttattatagtttgttgaacacacatagtactgacttcaggctgagcaaaacattttaagggattgttttgctatattgtattccatgactttgtcattctatatcaagtgatttcaatggctgcatgcagtctttcatatttgaacacacttgctatttttcacagaaccatgtagtttgttgaattaactcaaaaattgagatgttgctgtcatttgcttacacttttttttggtttcagggtccaccagttgcatctgcagcatcaaagcgtaagaaaggtgataaaaataaagggaaatctgaaatgagctcaattggggagttattggtcatcccattcctgtcaaagtttcctataccttctcatggtgaggatgcatcatcagtagcagtgcagaattatttcggtgttttgatggcatatggaggcctccaagattttctgactggaaagaaagatttgacaattacattgatcaggaaccggattctcccattatattctttggatccttgcagcatgcagcccatatttgatttcaacggctaattgggttattggtcagcttgcgatatgcctaccagaggacatgagttctagtatttatcagtccttaatgaaggcgttgaccatggagtatgtggaggacataacttgttatccggtttgtgcctctgcttctggtgctattgcagaactcatcgagaatagctatgttccacctgactggctcattctcctgcaagtggttctgaaaagaataagtactggagatgaaaatgagtctgctcttctgtccaagcttctgggcacaatagttgagggtggacaggaaaaagttctgtctcatattcctgaaattgtatccaacattgctagtactgtaatggagctcctgccccttgtcccagatccttggcctcaggtagtagtgcatctttcttctgtgtggtcaatattttggtactttgtcatgatgaccggcgggaggaacaccgggcgtgtaggagtgatcaagaacagggagaagcacaagggcagcttcgagaccatccacatgctgcttagagctttttgctatgtctagttttctcctatttgttgtataggaaaacatagaatggaattcaaatttggtggccgcaaaatgtggagacttgaattcatataaagttaggcttaacattagtgcaaacagctgtattttagtttagatttagagtacacttatgtatgtgttgtttgacaatgcttatttatgatatattgaatgatacttatttatattatattaattataatgttgttcaat

SEQ ID NO: 205894 - DNA, 3367 bp, Zea Mays
cccagttttgctccccgacacgtgagatcccttcactagcatctctcttcctcaagcgccatccctggcttctcccatgccgagcgtctccaatgcccaaacctccatggccgacgtcgccctgctcaggtccaaccagctccccttcctgttgttgtgtccagccgatgcccctccctccatcttcctctctgcagcaaccctaccacggttgtgcccctgcttccatggtgagctcgccccagccccaacgtcggacgtgccgtcgccctcacgtccagctcctccatccccctggttccctcctagctccgaccaggtatcagaattcctggattccaaatctgagacggatgttgatgttgactataacagcttgtactcaaagcaggactttctacagggtgaggtgctcgtttcgatgtggctagagtaacttgtgtactctatctcatcgtttttaatttattcgtttatatatatatatatagtgtgatttaatatggtgtaatgtttctcatcctaatgacaccccaaacatacattcttcttccacggctgggtagccaaacaatcccacaacagtaaaattcttctaccaagtgaagaaccatggagaaaatgccttcctaatcattgttcccgctttgcaactaacatttccatttcccgccacactctcccgcgcagcacccattcttctttccctccacttgccgctccagttgcagttggtcgaaaaaagtggaaaggaaaggggcaaaatatcctagggttctgcctccatggacatcgagacccacgccgccgccctggcccgcgacgagctgcggcggctcctcgccgccaccctcagtcccgacaaggcgtcggtggacaccgccgcggcggggctcgacgcgctctcttccgacccacgcttccccctcgccatcctcgctgtcgctgcaggggacgatgatcacgggatgagagtcgctgcagcgacatacttgaaaaattttacccgccgcaatttggaaactcgtctgtgttcatctgaggtttacaaggagttccgtgaccaacttgcccaggctttgcttcgagtggagcctgcaattcttcgagtgctgattgaagttttccgccaagttgttgaaaaagattttgtcaaggataacttgtggcctgagcttatccctcagttgaaactagtgatccagagcagcaacctaattagtccaggccagcatcctgagtggaatactattaatgcactcacagtacttcaatctgttgtaagacccttccagtatttcttgaatccaaaagttgtgaaagagtctgttccacaacagttggagcaaattgcagcagagattcttgtaccattgcaagtgacattccatcacttctctgacaaggttcttttgtcacctgatgggactaacttggaatatgagcagctcctactcatcacatgcaaatgcatgtatttcactgtgaggtcatacatgccatctagggtgaaacaaattttgccttccttttgcaaagacatgttccgtatactagattctttgaactttaatagtcttattgaagatggatctaccatgaagctcaagattgcaaagagatgtctcattatattttgcgcacttgttacacgtcaccggaaacatacagataactagatgccacatattgtcaactgtgcaataaaaatatcaaaacaaagcatccatttaagtaaactcgactctctccccaatcggattgtttcattggcatttgatgtgatttctcgagttttggaaacaggaccgggatggtgactagtttcaccacatttttcttcacttcttgattcagcaatttttccagcattagcattgaatgagaaggatatagaagaatgggaggaggatactgatgagtatatgcaaaagaatcttccttctgaacttgatgacatttctggatggactgaggatttgttcactgccagaaaaagtgcaatcaatttacttggtgttatagcgctatcaaaggttgtgattccttttttattatagtttgttgaacacacatagtactgacttcaggctgagcaaaacattttaagggattgttttgctatattgtattccatgactttgtcattctatatcaagtgatttcaatggctgcatgcagtctttcatatttgaacacacttgctatttttcacagaaccatgtagtttgttgaattaactcaaaaattgagatgttgctgtcatttgcttacacttttttttggtttcagggtccaccagttgcatctgcagcatcaaagcgtaagaaaggtgataaaaataaagggaaatctgaaatgagctcaattggggagttattggtcatcccattcctgtcaaagtttcctataccttctcatggtgaggatgcatcatcagtagcagtgcagaattatttcggtgttttgatggcatatggaggcctccaagattttctgactggaaagaaagatttgacaattacattgatcaggaaccggattctcccattatattctttggatccttgcagcatgcagcccatatttgatttcaacggctaattgggttattggtcagcttgcgatatgcctaccagaggacatgagttctagtatttatcagtccttaatgaaggcgttgaccatggagtatgtggaggacataacttgttatccggtttgtgcctctgcttctggtgctattgcagaactcatcgagaatagctatgttccacctgactggctcattctcctgcaagtggttctgaaaagaataagtactggagatgaaaatgagtctgctcttctgtccaagcttctgggcacaatagttgagggtggacaggaaaaagttctgtctcatattcctgaaattgtatccaacattgctagtactgtaatggagctcctgccccttgtcccagatccttggcctcaggtagtagtgcatctttcttctgtgtggtcaatattttggtactttgtcatgatgaccggcgggaggaacaccgggcgtgtaggagtgatcaagaacagggagaagcacaagggcagcttcgagaccatccacatgctgcttagagctttttgctatgtctagttttctcctatttgttgtataggaaaacatagaatggaattcaaatttggtggccgcaaaatgtggagacttgaattcatataaagttaggcttaacattagtgcaaacagctgtattttagtttagatttagagtacacttatgtatgtgttgtttgacaatgcttatttatgatatattgaatgatacttatttatattatattaattataatgttgttcaat

SEQ ID NO: 205895 - DNA, 3606 bp, Zea Mays
cttccttttacgttttcctcgccttccggttttcactcccctaccattgcattggcccccctcatgagatgagaatgagatcccctctcgtcgcgtaacacacacacacacaacgaacacacagtttcatctcgcttcctctctatctctctgtcgatcaattcattgcccatcgatcgatctcgagcaagaggaacaaggaaaataggagtactaggggatcgatcaggatgttggacacgacggacgacatcgcggaggggatatcattccaggcgttcgaggacgactgccgcctccttgccagcctcctccacgacgtccttctccgcgagctcggcccccgcttcatcaaaatcctcgagcgcaaccgcatcctcgcgcagagcgccgtctccatgcgcgcggcggggatggaggacacggcggccgtcgtagagcggcagctggagaccgacctggccgcaatgcccctggaggacgcgctctgcctggcccgggccttctcccactacctcaacctcatgggcatcgcggagacccaccacagggttcgtaaagcacgcaacatggaacagctctcaaaatcatgtgatgatatattcaacaagctgattcaaagtggtgtcccttcagaacaactatatgacactgtctgcaagcaagaggtcgaaattgttctgacagctcatcccacccaaataaatcggcgaactctgcaatacaagcacctaagagtagcacatctcttggagttcaacggtcgccctgatctaagccacgaggataaagaaatgctaattgaagatctggtaagggaaatcacagcaatatggcagacggatgaattgaggcgccataaacctacaccagttgacgaagctagggctggtcttcatattgtggagcaatccctttggaaagcggtaccgcactatcttcgccgtgttagcagtgctctaaagaagcacaccggaagcccactaccgctaacctgcacaccaatcaagtttggttcttggatgggtggtgaccgagatgggaatcctaacgttacagcaaaagtgactagggatgtttcgttgttgtcacggtggatggcaatcgacttatacatccaggaattagacaatctcagctttgagttgtctgtcaatggatgcagtgataaggttgcaagcttggctaatgacattttgctcaaagcagccgaggacctaaaggccaatacctggaacaaaacagtaccgcagaacaatgcaaagcttcataacttggctctgcctgcacaacttccttcgggtgctgatcttccttcatgtacagaatgcagtgatggagaatctcaatttaggatgataaatcttccaaggaactcaaatcgtccgggggctcttaatttaacagaaaagtttgaagacagtccattatcatctcctactggtcgtcaatcacacatagctagaactccaagtggccgtcaaccaaggaaattgttcaaagaatctaatataggtcgatcaagtagcttccagaagctacttgagccaagcctatctgacagaccgggaattactccttacagggttgtccttggtaatttgaaagaaaagctggtgaagacacgcagaaggcttgagcttctgcttgaggatctaccatgtgactatgacactgaagaatactgtgaaacatcagatcaacttctggaaccgttgctcttgtgccatcaatctctgcaatcatgtggatctagcgtgctagctgatggccggttagcagatttgatacgaagggttgcaacctttggtatggttcttatgaagctcgatgtacggcaggaatctggtcgtcacacagaagcacttgattccgtcacatcctacttggatcttggtgtttatagtgagtgggatgaagaaaagaagctggatttcttgactagagagctgaaagggaagcgccctctagtgccccaaaacatagaggttgctgctgatgtgaaagaagttctggacaccttcaaagttgctgcagaactagggagtgactcacttggagcatatgtcatttcaatggcctcaaatgcaagtgatgtccttgccgtggagctgttgcagaaggatgcaagacttgcagttagcggggacctaggaaggccatgccctggtggcacgttaagagttgttcccttgttcgagaccgtgaaagatttgcaggcagccgggtcagcaatcaggaagctactgtccatcgactggtacagggagcatatcatcaagaaccacaacggacaccaggaggtaatggtgggctactcggactccggcaaggacgccggccgcttcacggcggcatgggagctgtacaaggctcaggaagacgtcgttgccgcgtgcaacgagttcgggatcaaggtgacgctgttccatggccgtggcggcagcatcggccgaggcggcgggccgacgtacctggccatccagtcacagcctcccggctcagtgatgggcactctccgttcgacggagcaaggcgagatggtgcaggccaagttcggccttccgcagacggccgtgcgtcagctggagatctacacgacggcggtgctgctagcgacgctgcgcccgccgcatccgccgcgcgacgccaactggcggaacgtgatggaggagatctcccgcgtgagctgcgcgcactaccgttccacggtgtacgaggacccggagttcatcacctacttccatgaggcgacgccccaggcggagctggggcacctgaacatcgggagccggcccgcgaagcggaagcccgcgggcggcatctcgagcctgcgcgccatcccctgggtgttcgcctggacgcagacgcggctggtgctccccgcgtggctgggcgtcggcacagggctgcaggacgcgctggaccggggccacggcgaggagctccgcgccatgtacgcggagtggcccttcttccagagcacgttggacctgatcgagatggtgacggcgaaggcggacgcgcccatggcggcgcactacgaggagatgctcgtggcgcgggagcggcgcggcgtgggcgccgggctgcggcgtgagcttgcgcgcacggagcggtgcgtgctggcggtgagcggccacagcaagctgacggcgcacaaccggagcctgcggcggctgatcgagagccggctcgcgtacctcaaccccatcaacatgcttcaggtggaggtgctccgcaggctccgccgcgacgacgacaaccgcaggctccgcgacgcgctgctcatcaccatcaacggcatcgccgccggcatgcgcaacaccggctgacagctgagtgctggtgaccgcggcttcctgcctcgttggctcgttgtttgatcaaccgagaagccgccattttggacttcgtcgtgagctcaactgacagctttggtttttcttttctttcgtgaacggccccacccagagaccagagtcgcattttttttgctgctcgatcgtctgcgtctaaataattttaagtcttgttcgtggaaatatttttgcgcgtctgttgcggtcaactgtttcatgcgcgcggcaagggtggagcgtggag

SEQ ID NO: 205896 - DNA, 982 bp, Zea Mays
tccgcacactgcatcccatcccacgaaaacaagcagagagagaaccccagcgggcaaacgcctccccccccccccccccccccccccttgcctccaggccccagatccggccatccgggtagctccagcccttctccaatggcagtcaaggtctacgtcgtgttttactccacctacgggcacgttgccaagcttgctgaggagatgaagaaaggcgccgcttcagttgaaggcgtggaggtcaaagtatggcaggtcccggagattctgtccgaggaggtgctcggcaagatgggcgcgccacccaagaccgacgcgccggtcatcaccccgcaggagctggcggaggccgacggcgtcctcttcgggttccccacgcggttcggcatgatggcggcgcagatgaaggccttcttcgacgcgaccggcgggctgtggcgcgagcagagcctggccggcaagcccgccggcctcttcttcagcaccggctcccagggtggcggccaggagaccacgccgctgacggcggtgacgcagctgacgcaccacgggatggtgttcgtgcctgtggggtacacgttcggcgccaagatattcgacatggagagcgtgcacggcggcagcccgtacggcgcgggcacgttcgccggggacgggtcgcggtggccgacggaactggagctggagcacgccttccaccagggcaagtacttcgccggcatcgccaagaggctcaagggcggctccgcctgatatcgctcgcaccctcctatacgtatacatacagatatgtcctcgttattacatgtacacgaggtatgatatgcattccatgttttcgtggtggtttcgattgtattgttgtgtgaaatttggtaatcggacccatattaattaataattatggcgtcattcatgtgaccggtgctcctatgttcctcttgcttggtatcgaatggaacaagtgtcttcattgtttcgg

SEQ ID NO: 205897 - DNA, 816 bp, Zea Mays
gaggatgcttgtatctgaagcctgcttactcttggaagaggaagaagaagctctaagacaactgaggaagaacttggtcgtccgagcgaaacccgtgccgagcttctaccaagaacccccaccaaaggttgaacttaagaaggtgcctccaactcgtgccaagtcaccaaagctgacgcggaggaagagctgcagcgacacgcctcacacaccagagggaggaaacggcggcggcggcgcagtgtgctgccggctgcaccgccacagcatcgggaactccaaagacatcggcagcaaggcacaatgctctccaaagactggaccagctgctaagtccagggcgcccccaaatccagggaagacccgagggcttccatgaagaaagcgggacagcagacaagcgccgccgctgtacaaacctgacccgtgaagcatccattgccatgccgtttttcatcttaatccatataccctcacatcacccggaaagatggcctcatgccccggcaacagacagcgtgcctggtgctggattgtttttttttgggcgttgcccttgtaagaacctggctgcctgccagagaccgtgcgctgtgtccgtgtctgtaaatttgctgcaagttttgtatggggtgaccgagtcggtcctgtgtgagaaccaaacggccgggcatattgtcattgcgtggggggcagcattcgctgatactatgtaatgtacctgagtgagctgtaacctgttgtgggcatattggcaaagcgattctgattgatgtcgaaaaaaattgaccaggtcatgcatgattcttttctttt

SEQ ID NO: 205898 - DNA, 1282 bp, Zea Mays
tccaagtcgcccaccgtgacgcccatcgagtcaaccgaacccaagccgtgtggcgactggcgaggcgagtgccccagttcctaactccggtgggcgcgctcccaccgccgcgcggctcaaaacccgccctcagcctcccgcgctccagtccacacgggagcgggtggtgtcgtctgaagcggcgcgatcaaggagtcttcgggcgctccggacgtaacgtgctggcggttgcttatctccggatgtatatataagcggaaatgttctccttgttctatggcctgtggaagtatgtgttcgccaaggacgagttccgtgttctgattcttggtgttgacagagctggcaagacgactttgctggagaagttgaaatcgatatatctcaagggggaaggacttccgcctgaccgtgtcgttccaacagttgggctcaacattggccgcatcgaagacgcaaaggcaaaacttgttttctgggatctaggtggtcaggttagcctacgaacaatctgggagaaatactatgaagaggcccatgccataatgtacgttattgacgctgccacagcatcgtcatttgaagattccaaatctgctctgggttattcgccatgaacatctgagaggagcaccactcttgatagttgcaaacaaacaggatttacctggagccattgatgaggaagaattggctaaatttctgcataaagaactggatgagaggccatatacatttcaggctgtatctgcatatgatggcagggggatcaaatctggcatagactggctggtggaacaaatggaaaaaagcaaacgtaccgagacactgcaggctcgtgctggcgtagctggacaaatttagaatggggtgaatttgttaaagaacaaagcattggataggacggcttccttcgtatcgcgtaagcagccatttgctgcattccgggattatcgttccaggtcgcccagagtgctgcaagaaatgtttggctggttgctcctgtggtggtggtgattggtgaggcgattcgtttggtattattgaggttgcattcatatgtacctaaaggtcgcaagcatacatgtctatatgatgcttttcaattttcgtagcaaactagtagcttcaatacagaggatcaaagagagccgtgttctttaacttgtttgtgataaaaaaaaaggaagaaaggaaagcgaagaaggaattattggtgcatctgaaagtctttattgcatatgtctaaaccattttaaccgatgctggatgagcttttctt

SEQ ID NO: 205899 - DNA, 2122 bp, Zea Mays
ggaggccagacgccgagtcccgtcccgttctgcctccacacgccgccagaacgagaatccccctccccgtcccggcgtccccggctcccgagctccccctccagcctccccttccccggctcggccgcaccccgtccccggttcgttagagcgcgagcgcgcggcagccggccagccccaggcagccggcgccccgcggccaggttggctctcgctctcccctccggcacacctcgtccccggttgtccggctccggctccggatcagcagcgccccgagcacgagcgggaacgcgcgaacgccgggacgcggcagggtgcggcggggcggggcagctaggctctgaggcacggcagacggcttgcagtcaagatctctcaccagctgaattgccgattcacacatccagccatctcgacaacttgggtacacacgggacttcatcttaagagaatttagaacaaaaaagagagcatgtcagacctgcttcctgaagatgtacttgtcaacatcattggtcgtcttgcaccacgctaccttgccatatcccggtgcgtttgcaagacatggtgcaccaccattgatgcccataatctgctgcgtctcatacaattccaacttagaccctgcaatagaggaattggaatggccaccttcgccttgcatcgtacaagtgttgtcatcaaggacaaagttgtgggaggagaggttgtttgttcgagaaggagaggctgcaggtaatgtcgctgacattcggttggattttcaagctgttcaggagaatgctgtctattggcggggagtactttatgtaaattaccaatccaaatttattatgaggatatcattgtcaaatgataaataccaagtaatcaagccacctgtagattttgaatggtttgaatttgaaaatgaatccaggctatccaaaaacctttatttgggaaaatcagagaaaggggtgtactgtgctttgcgttatccgtcaaccgtttccttttcgatttacattctcgatgaatctgacggcaaaacggagtggataatgaagcctcactattatctcgggagtcaaggaattgacgggcctggaccctggactctacaagatatcaactataactgggacacccagtatgaagacagtatggaggaaaagttcgagtgggactccgacagcgataatgttgtcgagaacagaagcaacggtggatatccttgccttcctcgtatagaacttcttgggtttcacccctacaaggatgttgtcttcttgagcgacacgctgagacgaggattggcctatcacctagacagctcaaagatccaagacctgggtaacctccatccaacatattatggaactgaacaggggattcagccatttctactgacggctttcccatacacaccctggaggggatggtttccagaagacacataatggtacatacagagtaccgaacgtaagacataaagaaggcattagctgatctgaaaccgaagttctgaccgggcatggcgaaggtccctccttcacggtttcctgatgctgctgccgctctggatcgacagacttcagcttgagagtagtttagccagctgcttagcgccgtggacgtggggatggacacgtcgcattgcgcgcttagtggctggttttgtgcgttgtttggctaagtttttttttttttggttagaataaaagggagaagagaaaacactccagttgcgcagcaccaaaaccggttcaccactctcttgtcatttgttttgtttgttctcatcggggcgtgccaaaattttgctttctggcagctagcctagcggacccaatggtagattcatccttggggaggatggcagttagggaaaggttgtgctatgcgaccgtggagcgtggatgtggatgatgctggtaggcagaaaaaggtttcggagggcgattgggatcggttgcgagcgaccagattttgatgcgcaccccagcagcatctcagggcagcgtagtcggtctccgcccaaggcgatgcgatggtatttagggtcctaacgaattctgaacaagtatttgaatcataattcattaccacgtctagttctatccctccaactgaacaa

SEQ ID NO: 205900 - DNA, 3636 bp, Zea Mays
gagcacctcccctcgcctctacccgagcacctcccctcaagagcgcctccctcgccggagtcagacacgcctccccccgccgcgcgcatctctgcctaagcgccgctccgcccctcccctacgagagcactcttcgcccaaggttgcaggctgcagccaccaggcctctacggtggaggagaagaatggaggatgctgccaaacggttgagatgagactccgcttcacaagacagtctccacggtttctctgcaatgggtagctcactgcagtctgatggaaattggagagatgcctgctgcttggacccttccctctgcaccaacttgacaatcccacaaatttgcatggtgagttggtgacctcaccctgcaagttgcacgtgccagcggggaattccccaagtatcacctctgtctccgctggatccatcagtgttcagtgaggctatttgtggtgatggcagcgtgggacgtcatttctttgaaccgcatgatcactggtttcattcgagatggtaccagcaaccgagcacttgtagtttacaagtggatggttgcttcaggcctgagagagacccctcacaccttctctgcagttctcggtgcgtgcaacagctgcgaggggctgcaactgcatggccgggtactggcattgggcctgcgctccaacccgttcgtcatgtctgcgttggtcaacctgtatatgcgcgttgaaacaccttgtgctgccctcctgctgtatgacgagatgccattgcagagcacagccatgtccaacgctgttctgggtggcttgtgcaacctgaagttggccgaggacctcttccgatctttgctagacatgagacggcgtggtctggagttgaatggcctttcctactgctacgcgatgaaagcatgctaccaagatgaggactggctggaacaaggcaggcagctgcacggagtggttctcaaggcagggtgggttccgtcgaacattttcctgtcgaactcgcttgtggatctctacgcagcaaccggagacttggtggacgctaagagttctctcgatgacatcccttctgaggacgtcatctcgtggaactccatcgtctctgtctgcgcgagcaaagggcgtacgaaggaagcaactggttacttgaggcagatgctttggcacggcaagacgccctcagtccgctcctttgttgggctcttcgccttatctggtcagaccggacacctccaagttggggttcagatgcacggtatcgctcttaagctcgggttcagctggagcagcgcgcacgtccagactgcactcattagcatgtatgggaactgctgccattttgattgttgcttggcaatcttcaacgaaaccccaagccttgcactggagtgctataatgcaatgatcacgtcatcaattggctgcaaggttttccactccgcgctggaggtcttgtactgtatggttgtcgagggagttatgcctgacaacgtgacgctatctgcgaccatgaaggccatatctttgtcagcttcgccgagtctaatcagctgccagatgctgcattcctgggtcttcaagctgggcttcgaagcggacatggttgtgtgctcctccttgatcagcgcatacgctcgagccggtcaggtgcacagctcccgctcggtgttcgaaagcctgcggagcccaaacgtcgtctgcttcacttcgatgatatctgcgtgcgcgcgacacggagatggcgcaaaaggagtggagctgctcagggagatggtttgtagggggctcaaacctgatgacgtcaccttcctgtgcgcgatcactggatgtgatcaggcaggactgattgaggaaggcaggctggtgtttgagtttatgagagcgacccgcgagctgggccctgacgagaggcacttggcctgcatggttaaccttctcggccgagacgggtttgtggaggaggcgatgaaggtgatgatggagcagcactcgccgctgcggcactacaccaaggcgtggagctcgctcgtccagagttgcaaggcacatggcgaagacgcgctgggaaggagagcggcagatacgctggtagacatgggacgagaggacgcggccaccagcttgcaggtgtcgagatacttctacgagattggggacggcgagaatgtctcgaggattaaaggcatggcaagtgggcaacgggtgaaggagatcagcggtcgcagctcggtcgagatcggccacggaataatctagcagccgaggttaaagaacggtccagaatcttatagagcgctgccttcagatgtacatgaacaagaaagaagtggttgatgccctctcccaccactccaggatagagccttgtatcactgaacttgtttggcaacaacttgagcaacagaatcctctgtttttcaaagcatacgatatgaggctaatgcttaagaatcaaataatggtcttcaacaggcttctccaggatcagttcgagattatgaataaagagttttcttcagggatcccttctatgtctcttcctaatgactctaattccaacctattgaagcaagattcatgctttttgccagagactgctcctggaaatgcaatgccagatggtataatgcacaatggaagttcaagtggtataataaatgacacaccatctggcgatcagttacttaatgctagtaaagacttgcatggccttcatagtcaaatagatgcttcaactagtctacagtcagaccagaatgcaactgctgtgctgtatggtgtagacaacgagacaagcgcaacaataaagaccgagtcttgctactcgagtaatgctgattttgccttctgtgggaacactttcctggaatcatgccagtcgataggtgatgcatctggtggtggatccttcagcagctcagagttgaatgggcaaccactaaacgattcaattttggatatggagtcatcatcatttagcttcttgaaccaaatgccccaaagcttcatgttttcagacctggcagatgatttcaaccaaaatgcagaaataacaccatttctcactcctgagacaaatttctccgattcaacagggggagaccatacaggttgagcgggtcatgcacagcgtaccaaccatttgtacataggcacatgggcagtcgaatctgcattggtgaagaacttgaggaccttttgatctagcttgtttatttctctagtttttgcgtcttgatattgtggtagtttggggcttcgggtctggtgggttgtctagcccatcagaacgcgtaatgggtacggagtattggtcttccagtatgttttcagcgttaatttggctaatttcccccgcttggcttgtacaacaaattttatcagtactgagtaccatgagttgtactgctgtatatgctgcttcccactctctgaattggcagaatgattgatgagaagacactgcttggaggagttgcctcagtttcacactgcatgtatgcagcaagttttggacaagaactcatcagctgcttggaatttcaatagtaaacacctggacacaaaatacaacacaactacatttcctatttactgtgataacagtctaaaaaaatcatccagtttctttgacgagaa

SEQ ID NO: 205901 - DNA, 1665 bp, Zea Mays
cctcgccggagtcagacacgcctccccccgccgcgcgcatctctgcctaagcgccgctccgcccctcccctacgagagcactcttcgcccaaggttgcaggctgcagccaccaggcctctacggtggaggagaagaatggaggatgctgccaaacggttgagatgagactccgcttcacaagacagtctccacggtttctctgcaatgggtagctcactgcagtctgatggaaattggagagatgcctgctgcttggacccttccctctgcaccaacttgacaatcccacaaatttgcatggtccagaatcttatagagcgctgccttcagatgtacatgaacaagaaagaagtggttgatgccctctcccaccactccaggatagagccttgtatcactgaacttgtttggcaacaacttgagcaacagaatcctctgtttttcaaagcatacgatatgaggctaatgcttaagaatcaaataatggtcttcaacaggcttctccaggatcagttcgagattatgaataaagagttttcttcagggatcccttctatgtctcttcctaatgactctaattccaacctattgaagcaagattcatgctttttgccagagactgctcctggaaatgcaatgccagatggtataatgcacaatggaagttcaagtggtataataaatgacacaccatctggcgatcagttacttaatgctagtaaagacttgcatggccttcatagtcaaatagatgcttcaactagtctacagtcagaccagaatgcaactgctgtgctgtatggtgtagacaacgagacaagcgcaacaataaagaccgagtcttgctactcgagtaatgctgattttgccttctgtgggaacactttcctggaatcatgccagtcgataggtgatgcatctggtggtggatccttcagcagctcagagttgaatgggcaaccactaaacgattcaattttggatatggagtcatcatcatttagcttcttgaaccaaatgccccaaagcttcatgttttcagacctggcagatgatttcaaccaaaatgcagaaataacaccatttctcactcctgagacaaatttctccgattcaacagggggagaccatacaggttgagcgggtcatgcacagcgtaccaaccatttgtacataggcacatgggcagtcgaatctgcattggtgaagaacttgaggaccttttgatctagcttgtttatttctctagtttttgcgtcttgatattgtggtagtttggggcttcgggtctggtgggttgtctagcccatcagaacgcgtaatgggtacggagtattggtcttccagtatgttttcagcgttaatttggctaatttcccccgcttggcttgtacaacaaattttatcagtactgagtaccatgagttgtactgctgtatatgctgcttcccactctctgaattggcagaatgattgatgagaagacactgcttggaggagttgcctcagtttcacactgcatgtatgcagcaagttttggacaagaactcatcagctgcttggaatttcaatagtaaacacctggacacaaaatacaacacaactacatttcctatttactgtgataacagtctaaaaaaatcatccagtttctttgacgagaa

SEQ ID NO: 205902 - DNA, 1649 bp, Zea Mays
gtcgcctttgccgctgcatccattcccagtctaccccgcgcgggctccctcgcctacctaccagctttaattgtcgcttcgcgcggatttaattgtcgctgctccttgcggttttgctttgctccggggccttgctgctgcctgctggtaccgtaccgactccgcgtcaaggaacatgctgctttcgggccccatgttcaaattgctaacctagggtttgggtggaacaccaagggtctagacagacatctagaagagtttgtgtatgcttattttgatggattggtccagaatcttatagagcgctgccttcagatgtacatgaacaagaaagaagtggttgatgccctctcccaccactccaggatagagccttgtatcactgaacttgtttggcaacaacttgagcaacagaatcctctgtttttcaaagcatacgatatgaggctaatgcttaagaatcaaataatggtcttcaacaggcttctccaggatcagttcgagattatgaataaagagttttcttcagggatcccttctatgtctcttcctaatgactctaattccaacctattgaagcaagattcatgctttttgccagagactgctcctggaaatgcaatgccagatggtataatgcacaatggaagttcaagtggtataataaatgacacaccatctggcgatcagttacttaatgctagtaaagacttgcatggccttcatagtcaaatagatgcttcaactagtctacagtcagaccagaatgcaactgctgtgctgtatggtgtagacaacgagacaagcgcaacaataaagaccgagtcttgctactcgagtaatgctgattttgccttctgtgggaacactttcctggaatcatgccagtcgataggtgatgcatctggtggtggatccttcagcagctcagagttgaatgggcaaccactaaacgattcaattttggatatggagtcatcatcatttagcttcttgaaccaaatgccccaaagcttcatgttttcagacctggcagatgatttcaaccaaaatgcagaaataacaccatttctcactcctgagacaaatttctccgattcaacagggggagaccatacaggttgagcgggtcatgcacagcgtaccaaccatttgtacataggcacatgggcagtcgaatctgcattggtgaagaacttgaggaccttttgatctagcttgtttatttctctagtttttgcgtcttgatattgtggtagtttggggcttcgggtctggtgggttgtctagcccatcagaacgcgtaatgggtacggagtattggtcttccagtatgttttcagcgttaatttggctaatttcccccgcttggcttgtacaacaaattttatcagtactgagtaccatgagttgtactgctgtatatgctgcttcccactctctgaattggcagaatgattgatgagaagacactgcttggaggagttgcctcagtttcacactgcatgtatgcagcaagttttggacaagaactcatcagctgcttggaatttcaatagtaaacacctggacacaaaatacaacacaactacatttcctatttactgtgataacagtctaaaaaaatcatccagtttctttgacgagaa

SEQ ID NO: 205903 - DNA, 1416 bp, Zea Mays
attctttcacgcttgcgttgcacgtgtctctctgtggcctggcatcgtggcgcgtggctggtgtcgtcgttcacgccgctcaccacgagccttgcttcttcacgtcacctcctcctcacacattttccctctcacctctcaatccatggacaccctccctgctctgatcccccccgatgctcgctgtgggtgccgtttgctgccccaacgccgttccgcgccccctccactccggccatgagctcctcccagtgaatccctctagtcccctgctcatctcccatggtggccgcagggagctctggatccatggccgtcggcctctgggcgtgagcagcccttggctctctcccctgcgacagacttcctccacggtgtctttttccccaaccatggtggccggctccctgctcctccattcggtgcccctggttcagggccggtcgacctccggcgacctcctccccatggcacagcaggccgacgcccctgcctctactccatcttccccattggacagcacgagctcctcctcgccgatacgccagcaaccctgcagcagcgccactcgatctcctctatacgtgaacaacagcaacccggatcccatccacgtcgtatgcgtcgatccgatctgtgcagtcccaacccacgacgtcgcaacacccttgccctccgtcgatgtcacgcttcgctcatcgctcctcgacgaagagccgtaaccgtggtagacatgcatgtgcgatccgaactgatttcaccaggtacgctagctgaaaatcgtgctaagcgaagggtgtggatcaaaacaacccacaagacgatgtcggccaatgagcctgaagatggatggactaagcggatgtcaaaacgaaagttgatcatcaagtggcattcatctaacaacactaacatagtgtttatcccaggcaagccccggtgcatttgccaccttcttgctgttttaaaaatattttatcacttatatgctgcattaggtggtaggagttgaatggttaaacctttgctgcataacttccttgaattattgattatcatccttgatacctgatttgaaaagctagatatgcttagcctgcttatagacaaggaacaaaatattttgatgtatgaatcatgtttttacaaggaaaaaggggctggaatgatgaaggtatcaaaggccttgatgacttcatcatttcagtagggtacctctgacaggtaccaggttttcagaattattttaatatgagaccagacgttgagcaggaaaggtcgcccgtctgtgtcgattaaggaccgcaccgaaagtaggcttgctgatctaggaccctttaactggccacatgcctcgtcatgggtaagcttagcctcggtcggaccaataccagaacagctcgcacgcactgggag

SEQ ID NO: 205904 - DNA, 770 bp, Zea Mays
ctctccctggctccaattccagttgtggagtcaaaggatggaaccatctcagttgcttctgcatttgttgctcatcaggaagctgtacaagacagggatcacaaattcttgacaaaagcagtggaagaagcataccgaggagtcgattgcggcgatggaggtccatttggagcagttgtcgtccgtaatgatgaagtggttgttagctgccataacatggttctgaagcacactgaccctactgcgcatgctgaagtaactgcaattagagaggcttgcaaaaagctcgggaaaatcgagctctctgactgcgaaatttacgcgtcctgcgagccatgcccaatgtgctttggtgcagttcatctctcccgaatcaagaggctggtttatggggccaaggcggaggctgccatcgccattgggtttgacgacttcattgcagatgctctgagaggcactgggttctaccagaaggccaacatggagatcaagaaggccgacggcaatggcgcactgatcgccgagcaggtcttcgaaaagactaaggagaagttccagatgtactgatgcttggctgaagagggatttcggatttgtacaatgctcacccagaaggaataaatacatcgcccaaatgtccattgtttcgaaaaaatttacctcaatcccaatgcttagcattctgatgatgcctgaattccttgtaaacagacacaagattgttctttgctgtaactcatgtgcagttagtggaattcactttcaccctt

SEQ ID NO: 205905 - DNA, 3276 bp, Zea Mays
gatccatggaccagtccgacgtaacccaaaatttaaacggcctgacccgtgtcgcggaggacgcccgaatgtacaccctataccgctggttcccgttcccaagatagagctgccccagacgctccagaatccatccaatacctttccatcgattcttggcatcgccctctctctaaaccccaactcctcgactcgagcaatccctaggtctccgcgcgaggcggtggcggctgtgaggggattttgattgatttggctcgagatggcggaggacaaggtgcggcggatcttcgtcggcgggttgtcctggaagaccacggagcgcacgctcgagcgcaccttcggtcagtacggcaatgtcatcgaggcacagtcttgcaattttaatctgacagcaactgctgattcagagaggctgcagtcacttccatttctatatgttaggatcttaacaaagttgcaggaaaagaaattcactaatcaattgagctcactggttagcatctgtgggatgatggggtcagtaaaagtcaattggagaatacataagagtataagacaactgccgacagctttagagcacagaaaagaatcatcacgggcatgattaatgaactccacgaaccaaacatggtcgccagtgctggaatgaacttgtggcaaaatttggttgcatcattgttctggatcagtttgatacgaaacacagagaaactatttgtcctttcagtagtgaggcaccactggtgatgctggagagtgctgtatgctcatctgtgcctacttctgcttcaaagagcattattctcagtttccattgtgcccttccaattgcaatggaaatgcttagttattcatgcaaaagaaaagccaagattagaaaaaaaaatgcatttagacttttggattatgttttcctgtatacaactgggccaaaagtaatcggtttcagttcagtttactggattggagttcactggtacttgcagcacatggtcctcacctggaagtgttcagactggccaatgtcatttgtggtcacatactcacatgcttgattattcagttctgagttctgatctttggctgtaccgctatagtaatctttaatgttctttaccagtggatggtcaaagcagttttttgatttgcatgcaatatttgagctgtggcataagaattgactgttaactcttgtagaggtgggacaatttcactggttttgcagaatgttcataagctgtttgatttcatatatcaccctactgcatgtgaacttcctattgatagaatttttggttgctcactattatatagttcctatcttcccattggttcattttcatcatatgtataggttgtagtgaaaagggaaacaggccgctcgaggggatttggatttgtcacattctcagaacctcgggctgtggatgctgccattcgtggaatgcataatgcggaactggatggccgtaatatttctgtgaacaaagctcatcctaggattgctgacgatgactatggctatggtggtggtggtggtggtggttactcgtctggtgctagaggtggatatcgtagtggcggtgatgtagttccagcagtgagtgatgaatgtttcaaatgcggccattctggacatgatgtagttccagcagtgagtgatgaatgtttcaaatgcggccgttctggacattgggctcgtgaatgcccttattcagatggcagtggtagaactggaagatattctcccgcttcaaggtatggtggtggcgctgggggacgtggtgaccgcgttggaggatcagatcgttttgctcgctatgatgatgaccgatatgatggtggccggtctgtagacagcagggatacttattatggtgctgggcgagatcgttatgctagggatcgccatctgccagcaacagaccaccattctggtgacaggtacagtggtgcagatcgttacacgtccagtggctttgccatagaaaggagctatgagagagatggaggcaggtccactggaacttactaccgtgatgacccgaggggcactggtggctatggcagaggtggttcacgtggcggcggcggcgggcctgctcgctttggtgggagttaccgagataggcctgctccgtatgaccgtcctagcaggggcggggcagctcgtgcttatgatgatcgttactgaagaatgtttccttgaagtagaacagagatgttggtgtattttagttttgcatcagtatttgcacttgccagcttgatccttcaattctatgctattcagcagcgcagtttgttttagtggtctctgaagacaatggttcagtatgtcagttactatcagtatgttggtaccataatctgtaggcagtgatcctggtccatttgacatgtttgtgtaattgcttggagtctgcactaaataatgaactaatcgcagcatgtgatctttgaatcagcctggtgttctgcttactgagatagctgtgccacattctgcattgtggatgaactttgcaccgataattctgagatgtgctgtgcggcaatgtgcagatcgatctgttcagctcttgatgctgttgggttttgttggtctaatatcaggaaggtttaattctgcttctagtctgggttgagtaagatggtgggaatctgagtctcagaaaaactgtggttcatgcagtcaggtgatggttatgatgttttcctgatgcagatgaatgcgttatgttactgatttactagcgatgtctggtgcagatccgcagataaatttggcttctttgctttgttctctggcttattctaaattttctttcaaagggttgttattcatttgaagattattattttttgttcgcggcttgccactgattggagttggattgcacacataagataacgatgtgttcaccatacaagatgtgatcccacgtcctcttaacagaaacagtgttggcagctgcaagcatacaaaagatgtactacacgacagggattaagttgcagcatatgaccctagctcatcaggatggcgtctgcatcctaggccttcgaggctccgattttgggggggcattggccatcggacgcattgtgggctgtgggggcaagttgccaccaaggaacaccctttgtattagatgatattgggtcggttaaatccatcccaatctattctaatacactctaatccaccacagcgatctttgcaagacctttgaagaagctctaaattgctcgccaccgcaaatttgtcgt

SEQ ID NO: 205906 - DNA, 2876 bp, Zea Mays
caccgctgtcgtcggacatggttctgatagcccattgcaccttcctacataaataaatgaaacacacataacaggagaaaattagaggacttagttaagaatggacgacaaccactgctcaaatcatacaattaacagtgtactgactgaaattgcgcatttactgggattctagttctaaatttttctagtgaaggcgtgcaactacagatgtaacaaacaaataagctactgtgaaaacaatatgcatatgtgcacgcatcgagcaatgcacagacttcggaacttactcgatttggttcctgatcagaaaacaccatgcttatatgcattctctagactataagaaataccgctggactttgaaactcagttgggcggtatggtgtatatgaaccacatagcttttcaccagcggatgatgaatgaatgagaccgattgctaggactcccctcccatgaaacatgcatcaaacacactgatggatcagtacattacatccacatgatgctgctaacagtttcagttacgcaaacaaacctcgagtgcctgcgcaaggaaggagattttgccctcagcaaacagagggtccccggcttctcccagcggcaggagacggcagcttccctcccaacacggcgcgcagcagcaagcctcgatccagagcactccgaccagcacggcgagttggcagttccatcgcataaggggagagttgacatatgccgccgccggatattgaccaagcatctgccgatttgcgctgcaaaattagaacaaaaaaaaatcaatagatccttccgcggccgacgtaatataggacaatagatcccgtggtctgagccggccagggcaaggcaagtggactcgacaggcaggagaagcgtgagaaggaagcgggggtgctgacctgtagagtagagatgctcctcgtcaactggtgtcaaggccacggagccggcggtcggccgcggcccgtgtcggagagggatgaggtggttggatggagcggctcgcggacgggagtggccgacgacgagacgagtctgtgagggctgggcggcgaatggaccagctggccgagcccgagtcagcaattgttgggctgggcctgggcctgttgggcccaaatggacagcattttatcctctagcccactcccagggggtgaggaggaagagggctttacactgaaccccagcgacccaggcgtcagcggcgtgatgcagttcctccgaggcagcggcggcgggggcgggggcggtgggttcccgggggtggcgtgggaggtgttgcggcggcacttctctaagaagcggtccgtggacgtgaggcggatcaaccccaaggtgcccaaggaggaggccgtcgccatttccggccgactcctccagatcctctccgaccatgggcccctcaccgtcggcaacacctggaaccacgccaaggatgctggcatcgctggtctgaacagcaagacgcacatgaagatcctgctgaaatggatgacggggagaaatgtcgtgaagctgacctgcgtgcacgtgggcaacgcgaagaagttcctctactccccgtccactgaaagcagcagcagcgccggcgcatcaccgtcatccacatcggcctcgcagtgacgatttggattttctgttccacatgttttttctcgcacgatactgcaagcttctggaggagaactcatttagaggaagaactgccgactttttttacatgctcttgtttggtgctactgtcctaactagcattgttctgattggagggatgataccttacatttccgagacatttgccagaattctgttcctgagcaattcattgacgtttatgatggtttatgtctggagcaagcacaatcctttcatccatatgagctttctgggcctgttcacctttacggctgcatacttaccatgggtcctattgggcttctctatcctggtgggaagcagcacatgggttgatctcttgggtatgattgctggacatgtgtactactttctggaagatgtatacccacggatgactggccgccgtccgctgaagacaccgtccttcatcaaggcgctatttgctgatgacaatgttgtggtggcacagccacccaatgctgggattggtgctggtgcaaggtttggtgctatgggtctagatccccaggctcaatgatatgaattactttcagtgacctgaggctgtgactgatctgagatgcggcagtctgttcctctgcgcaagttgcggaactgtacaagtcattgttcttgtatttatacaggctagatgagaattcttgtgcataacaaaagattagtagtatccgaggcggccaaaagtttctcacctgttagcagggcccgaaggaaatggtttctgatgtgccaacaggccaaaacccctgtcgccgaaacttgttcttgcaacggtttaacatctgacctactactctttcatgcatcagtgagtttagtctaggaaactgttccaaccgaagttgaagtttgttgctttggcagcgagaatttgtatggagcgttatgatcgcagaattgtgcaaggaatggctcctaacattgtggatgcttggatggtggttcttttccctcctgatcatgttgtgctcatcgatgtggtctcctgcaaggcaagctgctatagaatactactggcggtttcattataaaacgtttcagttcaatgaaacagtatcggatgtataaataaaatgtttcagtttgatgaaacattatagtatatactcggtaagtcgttttagttttttttaagtacgtagatcttactatgcattagacatacactaactataaatctagaaaagcaagctaaatctgtc

SEQ ID NO: 205907 - DNA, 3186 bp, Zea Mays
cgattgctaggactcccctcccatgaaacatgcatcaaacacactgatggatcagtacattacatccacatgatgctgctaacagtttcagttacgcaaacaaacctcgagtgcctgcgcaaggaaggagattttgccctcagcaaacagagggtccccggcttctcccagcggcaggagacggcagcttccctcccaacacggcgcgcagcagcaagcctcgatccagagcactccgaccagcacggcgagttggcagttccatcgcataaggggagagttgacatatgccgccgccggatattgaccaagcatctgccgatttgcgctgcaaaattagaacaaaaaaaaatcaatagatccttccgcggccgacgtaatataggacaatagatcccgtggtctgagccggccagggcaaggcaagtggactcgacaggcaggagaagcgtgagaaggaagcgggggtgctgacctgtagagtagagatgctcctcgtcaactggtgtcaaggccacggagccggcggtcggccgcggcccgtgtcggagagggatgaggtggttggatggagcggctcgcggacgggagtggccgacgacgagacgagtctgtgagggctgggcggcgaatggaccagctggccgagcccgagtcagcaattgttgggctgggcctgggcctgttgggcccaaatggacagcattttatcctctagcccactcccagggggtgaggaggaagagggctttacactgaaccccagcgacccaggcgtcagcggcgtgatgcagttcctccgaggcagcggcggcgggggcgggggcggtgggttcccgggggtggcgtgggaggtgttgcggcggcacttctctaagaagcggtccgtggacgtgaggcggatcaaccccaaggtgcccaaggaggaggccgtcgccatttccggccgactcctccagatcctctccgaccatgggcccctcaccgtcggcaacacctggaaccacgccaaggatgctggcatcgctggtctgaacagcaagacgcacatgaagatcctgctgaaatggatgacggggagaaatgtcgtgaagctgacctgcgtgcacgtgggcaacgcgaagaagttcctctactccccgtccactgaaagcagcagcagcgccggcgcatcaccgtcatccacatcggcctcgcagtgacggatcatgtccatctcaagacatctgaatcatattaacagagtttttgcataaaaccacacacctggcaacagcaaatctaccagaccagtacgacttgagacaccggccacggccactaaaagagaggagaggggcagcaccaaaagagcaccggtgacggcgacggcgacgaaaaaaagacgtcgggcggcggcgcagactcgcacatggccgttggattagatgattttgcaagcttggccgttggattcaccatggatagccgcggtcatcctatgtcaacttcgatccgacgtgtcgtccttctattggtggcacatacgtcatagcgaccggcgtgcacatctgccaggcccacaggttcctcccatgggcgcccacaggtcagtgacacgcgcggtcattgcgaaaggcacgtcgccttctacccttctccgtcctccccgaacactccacccaacccaaccggggcattcaaccaccccgtgtgctccaaccgctcctcgatttgatcaccgattgcgggaggccgactagggtttaccggtgagcgcgcgcgcgagagagagagagagagagtgagggcggaggaaaggggagatggcgcaggcggtggaggaatggtaccggcagatgcccatcatcacgcgctcctacctcaccgccgccgtcgtcaccaccgtcggctgcaccctcgagatcatttcgccgtatcacctgtacctgaacccgaagctcgtggtgcagcactacgagatctggcgcctcgtcaccaactttctctacttccgcaagatggatttggattttctgttccacatgttttttctcgcacgatactgcaagcttctggaggagaactcatttagaggaagaactgccgactttttttacatgctcttgtttggtgctactgtcctaactagcattgttctgattggagggatgataccttacatttccgagacatttgccagaattctgttcctgagcaattcattgacgtttatgatggtttatgtctggagcaagcacaatcctttcatccatatgagctttctgggcctgttcacctttacggctgcatacttaccatggggtatgattgctggacatgtgtactactttctggaagatgtatacccacggatgactggccgccgtccgctgaagacaccgtccttcatcaaggcgctatttgctgatgacaatgttgtggtggcacagccacccaatgctgggattggtgctggtgcaaggtttggtgctatgggtctagatccccaggctcaatgatatgaattactttcagtgacctgaggctgtgactgatctgagatgcggcagtctgttcctctgcgcaagttgcggaactgtacaagtcattgttcttgtatttatacaggctagatgagaattcttgtgcataacaaaagattagtagtatccgaggcggccaaaagtttctcacctgttagcagggcccgaaggaaatggtttctgatgtgccaacaggccaaaacccctgtcgccgaaacttgttcttgcaacggtttaacatctgacctactactctttcatgcatcagtgagtttagtctaggaaactgttccaaccgaagttgaagtttgttgctttggcagcgagaatttgtatggagcgttatgatcgcagaattgtgcaaggaatggctcctaacattgtggatgcttggatggtggttcttttccctcctgatcatgttgtgctcatcgatgtggtctcctgcaaggcaagctgctatagaatactactggcggtttcattataaaacgtttcagttcaatgaaacagtatcggatgtataaataaaatgtttcagtttgatgaaacattatagtatatactcggtaagtcgttttagttttttttaagtacgtagatcttactatgcattagacatacactaactataaatctagaaaagcaagctaaatctgtc

SEQ ID NO: 205908 - DNA, 5413 bp, Zea Mays
cgattgctaggactcccctcccatgaaacatgcatcaaacacactgatggatcagtacattacatccacatgatgctgctaacagtttcagttacgcaaacaaacctcgagtgcctgcgcaaggaaggagattttgccctcagcaaacagagggtccccggcttctcccagcggcaggagacggcagcttccctcccaacacggcgcgcagcagcaagcctcgatccagagcactccgaccagcacggcgagttggcagttccatcgcataaggggagagttgacatatgccgccgccggatattgaccaagcatctgccgatttgcgctgcaaaattagaacaaaaaaaaatcaatagatccttccgcggccgacgtaatataggacaatagatcccgtggtctgagccggccagggcaaggcaagtggactcgacaggcaggagaagcgtgagaaggaagcgggggtgctgacctgtagagtagagatgctcctcgtcaactggtgtcaaggccacggagccggcggtcggccgcggcccgtgtcggagagggatgaggtggttggatggagcggctcgcggacgggagtggccgacgacgagacgagtctgtgagggctgggcggcgaatggaccagctggccgagcccgagtcagcaattgttgggctgggcctgggcctgttgggcccaaatggacagcattttatcctctagcccactcccagggggtgaggaggaagagggctttacactgaaccccagcgacccaggcgtcagcggcgtgatgcagttcctccgaggcagcggcggcgggggcgggggcggtgggttcccgggggtggcgtgggaggtgttgcggcggcacttctctaagaagcggtccgtggacgtgaggcggatcaaccccaaggtgcccaaggaggaggccgtcgccatttccggccgactcctccagatcctctccgaccatgggcccctcaccgtcggcaacacctggaaccacgccaaggtacaacgataaacacgctactgcccctacaaacctgtataaaatatccaaatcactctgctacaacatcagaaaagcagcctaatgcctttttgcgtaccagtagtggtagtaagataaactaggcactgtcttatggaataccacgaaagatggattcaatcgtagccccatcccaacagctatttgttgtggtatctggtacctttgcaattgcaacgtttcccttctgttccaaattttcaatccacggtacctttgctcaatatgcttggacccccacaagggtgtctatttttttttaaactctgtgaacttgagattaaattggatcatctcgtctctgtaatcatacgcacattctgctatacgatcacgttgctaaggaaccgaaatcgggattactttcttcacagtgtatgaatttaggtacctaatcagtcaatcagacaggcagagtggcaaataactcttccatgagatttgacaggcttgggttgcagtctgtagcatgtatacatgatcgttttacctccagttatatataagcgcctgcagatggttctgaaactgtcattgttacccactaaggcctgattcaggttagctttagctacagaagaatgtatagtatctgaacccgaaaatgaaatttaccctgcttgctgccttgtccagagctgtacactgaccctggcgtatttgtaccacaggatgctggcatcgctggtctgaacagcaagacgcacatgaagatcctgctgaaatggatgacggggagaaatgtcgtgaagctgacctgcgtgcacgtgggcaacgcgaagaagttcctctactccccgtccactgaaagcagcagcagcgccggcgcatcaccgtcatccacatcggcctcgcagtgacggtcagtcgccgttaagccttggtgtggttcttgatgttgctttgtggatcgatggaggttgcctctggtcatggtgatcccatgtttaaccttgatgacgaacattggaaaaagcattttgttttatggactggaatagtctgcaaacatcacgatagcaatattgttctgctgctcatcagctgaggatgctgccctgtcctgaactcctgattttgcttttgatctactatgtgatgatttgctcttccttttgtttggatttgattctcacttttttcccctctggaatgtgggaacgctgcatcgcattaagcaatggagtgagttgtggtcgtgccttgctactgcttaattcatctatcagagaaatgtctctgtctgtcagatgcacttgacagaaatcttcaagctggaaattcatacggcacctgcagccgccgtaattagatatgtcggttctgtttgtaaaatttacttgtgaactttgaaagatgaaacgggaaattctgatctttttccgtacaagcagccatcaggcgtgcaaccgtacaagcaggagctactgccatcatctatgactgtcatttgtctgtaataaagataaagataatctaatttctgtttggaattgaaacagatcatgtccatctcaagacatctgaatcatattaacagagtttttgcataaaaccacacacctggcaacagcaaatctaccagaccagtacgacttgagacaccggccacggccactaaaagagaggagaggggcagcaccaaaagagcaccggtgacggcgacggcgacgaaaaaaagacgtcgggcggcggcgcagactcgcacatggccgttggattagatgattttgcaagcttggccgttggattcaccatggatagccgcggtcatcctatgtcaacttcgatccgacgtgtcgtccttctattggtggcacatacgtcatagcgaccggcgtgcacatctgccaggcccacaggttcctcccatgggcgcccacaggtcagtgacacgcgcggtcattgcgaaaggcacgtcgccttctacccttctccgtcctccccgaacactccacccaacccaaccggggcattcaaccaccccgtgtgctccaaccgctcctcgatttgatcaccgattgcgggaggccgactagggtttaccggtgagcgcgcgcgcgagagagagagagagagagtgagggcggaggaaaggggagatggcgcaggcggtggaggaatggtaccggcagatgcccatcatcacgcgctcctacctcaccgccgccgtcgtcaccaccgtcggctgcaccctcgagatcatttcgccgtatcacctgtacctgaacccgaagctcgtggtgcagcactacgagatctggcgcctcgtcaccaactttctctacttccgcaagatggatttggattttctgttccacatgttttttctcgcacgatactgcaagcttctggaggagaactcatttagaggaagaactgccgactttttttacatgctcttgtttggtgctactgtcctaactagcattgttctgattggagggatgataccttacatttccgagacatttgccagaattctgttcctgagcaattcattgacgtttatgatggtttatgtctggagcaagcacaatcctttcatccatatgagctttctgggcctgttcacctttacggctgcatacttaccatgggtaaatgttcttctgccccgtttcttgaatgccacatcaccctatgcattcacattctaagttatttttatagtgaccatatgtctatgaaatcaatcatctttcttatgcggttatgtgattatgtctgaatgttccacgacatgtgaaatgtgcaattctgtttgctgcacatccttttagatgtatgtaacggaaatgcaatacttaatgtatctgggaggtccgcatgacataaacctcacacttattgttttaggctacaattttatctgctaatcatcaaaatatatgctggacttttctgagaacctgtggtgtatagatgttttttatcaacttgaatgctttccttcttttgttatgaaattctaacttgagtacttgacaatatcagtcactaatgttttgacataagaaggaacagcctatttttaacgcgttgaaattgtactggaactttgtaggaaaaggcgataatttcatttgctctgttatcattttgttctagtggtgcctgacctgaatcctgaggtgtgagataaatgaacactgtaacctcttaattcatgtgattggatcattgatggaataaccgttcaccaaatacatataagaaatgtttatatttgcctaaatggacagcaagtttcaggttgggaggaattgtgaaacaggggatcactattaattttgttcttaaagaaggctgtggttttcttcaattagattatttgggagtaaatgctcaattcagtgaaattgagctccaaccaggcagggcatggctattgtcttgattgttttatcttgaatctcaggtcctattgggcttctctatcctggtgggaagcagcacatgggttgatctcttgggtatgattgctggacatgtgtactactttctggaagatgtatacccacggatgactggccgccgtccgctgaagacaccgtccttcatcaaggcgctatttgctgatgacaatgttgtggtggcacagccacccaatgctgggattggtgctggtgcaaggtttggtgctatgggtctagatccccaggctcaatgatatgaattactttcagtgacctgaggctgtgactgatctgagatgcggcagtctgttcctctgcgcaagttgcggaactgtacaagtcattgttcttgtatttatacaggctagatgagaattcttgtgcataacaaaagattagtagtatccgaggcggccaaaagtttctcacctgttagcagggcccgaaggaaatggtttctgatgtgccaacaggccaaaacccctgtcgccgaaacttgttcttgcaacggtttaacatctgacctactactctttcatgcatcagtgagtttagtctaggaaactgttccaaccgaagttgaagtttgttgctttggcagcgagaatttgtatggagcgttatgatcgcagaattgtgcaaggaatggctcctaacattgtggatgcttggatggtggttcttttccctcctgatcatgttgtgctcatcgatgtggtctcctgcaaggcaagctgctatagaatactactggcggtttcattataaaacgtttcagttcaatgaaacagtatcggatgtataaataaaatgtttcagtttgatgaaacattatagtatatactcggtaagtcgttttagttttttttaagtacgtagatcttactatgcattagacatacactaactataaatctagaaaagcaagctaaatctgtc

SEQ ID NO: 205909 - DNA, 3239 bp, Zea Mays
cgattgctaggactcccctcccatgaaacatgcatcaaacacactgatggatcagtacattacatccacatgatgctgctaacagtttcagttacgcaaacaaacctcgagtgcctgcgcaaggaaggagattttgccctcagcaaacagagggtccccggcttctcccagcggcaggagacggcagcttccctcccaacacggcgcgcagcagcaagcctcgatccagagcactccgaccagcacggcgagttggcagttccatcgcataaggggagagttgacatatgccgccgccggatattgaccaagcatctgccgatttgcgctgcaaaattagaacaaaaaaaaatcaatagatccttccgcggccgacgtaatataggacaatagatcccgtggtctgagccggccagggcaaggcaagtggactcgacaggcaggagaagcgtgagaaggaagcgggggtgctgacctgtagagtagagatgctcctcgtcaactggtgtcaaggccacggagccggcggtcggccgcggcccgtgtcggagagggatgaggtggttggatggagcggctcgcggacgggagtggccgacgacgagacgagtctgtgagggctgggcggcgaatggaccagctggccgagcccgagtcagcaattgttgggctgggcctgggcctgttgggcccaaatggacagcattttatcctctagcccactcccagggggtgaggaggaagagggctttacactgaaccccagcgacccaggcgtcagcggcgtgatgcagttcctccgaggcagcggcggcgggggcgggggcggtgggttcccgggggtggcgtgggaggtgttgcggcggcacttctctaagaagcggtccgtggacgtgaggcggatcaaccccaaggtgcccaaggaggaggccgtcgccatttccggccgactcctccagatcctctccgaccatgggcccctcaccgtcggcaacacctggaaccacgccaaggatgctggcatcgctggtctgaacagcaagacgcacatgaagatcctgctgaaatggatgacggggagaaatgtcgtgaagctgacctgcgtgcacgtgggcaacgcgaagaagttcctctactccccgtccactgaaagcagcagcagcgccggcgcatcaccgtcatccacatcggcctcgcagtgacgatcatgtccatctcaagacatctgaatcatattaacagagtttttgcataaaaccacacacctggcaacagcaaatctaccagaccagtacgacttgagacaccggccacggccactaaaagagaggagaggggcagcaccaaaagagcaccggtgacggcgacggcgacgaaaaaaagacgtcgggcggcggcgcagactcgcacatggccgttggattagatgattttgcaagcttggccgttggattcaccatggatagccgcggtcatcctatgtcaacttcgatccgacgtgtcgtccttctattggtggcacatacgtcatagcgaccggcgtgcacatctgccaggcccacaggttcctcccatgggcgcccacaggtcagtgacacgcgcggtcattgcgaaaggcacgtcgccttctacccttctccgtcctccccgaacactccacccaacccaaccggggcattcaaccaccccgtgtgctccaaccgctcctcgatttgatcaccgattgcgggaggccgactagggtttaccggtgagcgcgcgcgcgagagagagagagagagagtgagggcggaggaaaggggagatggcgcaggcggtggaggaatggtaccggcagatgcccatcatcacgcgctcctacctcaccgccgccgtcgtcaccaccgtcggctgcaccctcgagatcatttcgccgtatcacctgtacctgaacccgaagctcgtggtgcagcactacgagatctggcgcctcgtcaccaactttctctacttccgcaagatggatttggattttctgttccacatgttttttctcgcacgatactgcaagcttctggaggagaactcatttagaggaagaactgccgactttttttacatgctcttgtttggtgctactgtcctaactagcattgttctgattggagggatgataccttacatttccgagacatttgccagaattctgttcctgagcaattcattgacgtttatgatggtttatgtctggagcaagcacaatcctttcatccatatgagctttctgggcctgttcacctttacggctgcatacttaccatgggtcctattgggcttctctatcctggtgggaagcagcacatgggttgatctcttgggtatgattgctggacatgtgtactactttctggaagatgtatacccacggatgactggccgccgtccgctgaagacaccgtccttcatcaaggcgctatttgctgatgacaatgttgtggtggcacagccacccaatgctgggattggtgctggtgcaaggtttggtgctatgggtctagatccccaggctcaatgatatgaattactttcagtgacctgaggctgtgactgatctgagatgcggcagtctgttcctctgcgcaagttgcggaactgtacaagtcattgttcttgtatttatacaggctagatgagaattcttgtgcataacaaaagattagtagtatccgaggcggccaaaagtttctcacctgttagcagggcccgaaggaaatggtttctgatgtgccaacaggccaaaacccctgtcgccgaaacttgttcttgcaacggtttaacatctgacctactactctttcatgcatcagtgagtttagtctaggaaactgttccaaccgaagttgaagtttgttgctttggcagcgagaatttgtatggagcgttatgatcgcagaattgtgcaaggaatggctcctaacattgtggatgcttggatggtggttcttttccctcctgatcatgttgtgctcatcgatgtggtctcctgcaaggcaagctgctatagaatactactggcggtttcattataaaacgtttcagttcaatgaaacagtatcggatgtataaataaaatgtttcagtttgatgaaacattatagtatatactcggtaagtcgttttagttttttttaagtacgtagatcttactatgcattagacatacactaactataaatctagaaaagcaagctaaatctgtc

SEQ ID NO: 205910 - DNA, 1719 bp, Zea Mays
acttccaatctctaccttgggcttccaaaaaaaatttgccgttcatccaagcaggccggtccctggcccacatgccgcgcgcacgcgcgcgcacacacgccgacacgcggcacggccagtagggcaggcgcgggccgtgtgtgtgagaaggagaggacggcaccgcgcagcgccgcagcccatccatccaatacgcccaccagccaccacacatcctctctcccttccagtcccaggagcgtggcctcactctcctcgtcgcatcccccctcctcatcttcgcagcgcgggcggcggcaatggcgatggcctccacctacgcgccgggcggaggcgcgcgggcgctcgcgcagggtagatgcagggtccgcggtcccgcggggctgggcttcctcggcccctccaaggccgccggcctcccccgccccctcgccctcgccaggcggatgagcagccccgtcgcggtgggcgccaggctgcgatgcgcggcgtcgtcgtcccccgcggcggcgcggcccgccacggcgccgcgcttcatccagcacaagaaggaggccttctggttctaccgcttcctctccatcgtgtacgaccacgtcatcaatccgggccactggaccgaggacatgcgcgacgacgcgctggaacctgccgacctcttcagccgccacctcacggtcgtcgacgtcggcggcggcacggggttcaccacgctcggcatcgtcaagcacgtcaacccggagaacgtcacgctgctcgaccagtccccgcaccagctcgacaaggcccggcagaaggaggccctcaagggggtcaccatcatggagggcgacgccgaggacctcccgttccccaccgactccttcgaccgatacatctccgccggcagcatcgagtactggccagacccacagcgggggatcaaggaagcctacagggtcctgagatttggtgggctagcttgtgtgatcggcccggtctacccgaccttctggctgtcccgcttcttcgccgacatgtggatgctcttccccaaggaggaagagtacatcgagtggttcaagaaggctgggtttagggatgtcaagctgaagaggattggaccgaagtggtaccgcggtgtccgaaggcatggcctcatcatgggctgctccgtcacaggcgtcaagagagagcgcggtgactctcccttggagcttggtcccaaggcggaggatgtcagcaagccagtgaatccgatcaccttcctcttccgcttcctcgtaggaacgatatgtgctgcctactatgttctggtgcctatttacatgtggataaaggaccagatcgtgccaaaaggcatgccaatctgagtgaagggaatgagctgcatggaagagaggatagccaacaccccgtgtaggagtctccgacaatagatgtgccctctaagagctaatttggtgagagctaatttggtgaaaattgaatagcaagaggattcctctcctatggatcctctcgtaatccttatccaccaaaccagactttaaagttttgttgcatggcctatgtgaccatagtcattttattaaggtgctgcattttgaacgaatttggttgtgtaatatttctacgaactaccagtgtatttgtatatattttctgaacatggccagatacattcatgataaacagccagatagttaggtgttaagtcctgcttgcatatctgtttgt

SEQ ID NO: 205911 - DNA, 1807 bp, Zea Mays
aaaccttgcgtgcgccaccgccaatggcagcaggaatcctctgatcctctttcccgcacatccaaagaggcgccgccgtcctctgaaaaatcctagccgctttctacatggccgagcccgccaaccggcggatggaggccgtccgccgtcacctccttctgccttcacccgcgccgcttcgccctaatccgttaagcagcctcgcggaggtggagcccagcccggtgatcattggcgggatggtgctggatatccatgccaagccttccgtgccgccccatcatggtaccactgtccctggaatggttaaatacatcagtggaggcgtagcaagaaatattgctgagtgcatgtcaaagcttgggacacaacccttcatgataagtgttgttggaaatgatttggcagttctactctgctgaaggggacttccttttgaagtactggaggtcagctggattatgttcagaaggaattctgcaggttgataatgttgcaaccccagtagtatcaaatgtgtttgacggtactggagaattaatcgctggagttgcaagtgttcaagcagttgaaaattttattacttcgagctggatttatcacttccgtcatcatattgctaatgcaccacttgtaatgcttgatgcgaatttatctcctgagtcacttaaagcagcttgcataatggcatatgaatttggggtgcctgtgttatttgagccagtctcagtggtgaagtgtcgaagaattgcaccagttgcagaatatataacttgcacttcccccaatgaaattgagcttgttgccatggcaaattcattatctccatcagtgaaatataattttcacacaatagagcagttcaaggagaaagcagatactgttgaatatatttttcaaatgcttagcccagcaatgttcttcctacttgagaagggcatcaagttgcttatcgtgacacttggctcaaatggtgtttttatttgttgcaaagagcacactaacttcatgaaagaccagcacaagtgcaaacagacgcctttctccagacagctacttgaaaaaatggacgggtgttttccatcgaacaatcttgttaatttgtgcagagaaagctcttcaagaacatgtgtttttcatttacctgcaatatcggcctctgtgataagcctcacaggtgctggcgattgtttggttggtggtgccctttcagctctatgtgcaggcttcgatatcatccagagcgttgcagttggggttgctatagcaaaggcatctgtggaatctgaagccaacatacctgatgacatttctgctgcgagtattgcagatgatgcacaaagtgtattgcattctgctaaggtgctttggtgcaaatgaagaatagaaaaactaccatcccggtgtaaattgaagacagtcaggtgctattgaagctattgaactctgttactgttccaacggcacaagacggataagaatgaaatcgctatatatgatggatttttggttggaagaacagagggatcaccaatcagaattctttctactatagcatatatttttcatgtacattgtgggtgcaagttcgatcaagggagcaaattctgttgtatttttttagttagtgagattatgtgatgaaaaattggttagcgtcaaatttgcaattgcaaagtgactaatataatgacataatataatacactgataagatataattggttgcaagttcaaattcatcattgtgatgtagttatgatacaatttagggtgtgtttcgttgaactgtgattttttaagaaag

SEQ ID NO: 205912 - DNA, 1578 bp, Zea Mays
aaaccttgcgtgcgccaccgccaatggcagcaggaatcctctgatcctctttcccgcacatccaaagaggcgccgccgtcctctgaaaaatcctagccgctttctacatggccgagcccgccaaccggcggatggaggccgtccgccgtcacctccttctgccttcacccgcgccgcttcgccctaatccgttaagcagcctcgcggaggtggagcccagcccggtgatcattggcgggatggtgctggatatccatgccaagccttccgtgccgccccatcatggtaccactgtccctggaatggttaaatacatcagtggaggcgtagcaagaaatattgctgagtgcatgtcaaagcttgggacacaacccttcatgataagtgttgttggaaatgatttggcaggggacttccttttgaagtactggaggtcagctggattatgttcagaagtggcatatgaatttggggtgcctgtgttatttgagccagtctcagtggtgaagtgtcgaagaattgcaccagttgcagaatatataacttgcacttcccccaatgaaattgagcttgttgccatggcaaattcattatctccatcagtgaaatataattttcacacaatagagcagttcaaggagaaagcagatactgttgaatatatttttcaaatgcttagcccagcaatgttcttcctacttgagaagggcatcaagttgcttatcgtgacacttggctcaaatggtgtttttatttgttgcaaagagcacactaacttcatgaaagaccagcacaagtgcaaacagacgcctttctccagacagctacttgaaaaaatggacgggtgttttccatcgaacaatcttgttaatttgtgcagagaaagctcttcaagaacatgtgtttttcatttacctgcaatatcggcctctgtgataagcctcacaggtgctggcgattgtttggttggtggtgccctttcagctctatgtgcaggcttcgatatcatccagagcgttgcagttggggttgctatagcaaaggcatctgtggaatctgaagccaacatacctgatgacatttctgctgcgagtattgcagatgatgcacaaagtgtattgcattctgctaaggtgctttggtgcaaatgaagaatagaaaaactaccatcccggtgtaaattgaagacagtcaggtgctattgaagctattgaactctgttactgttccaacggcacaagacggataagaatgaaatcgctatatatgatggatttttggttggaagaacagagggatcaccaatcagaattctttctactatagcatatatttttcatgtacattgtgggtgcaagttcgatcaagggagcaaattctgttgtatttttttagttagtgagattatgtgatgaaaaattggttagcgtcaaatttgcaattgcaaagtgactaatataatgacataatataatacactgataagatataattggttgcaagttcaaattcatcattgtgatgtagttatgatacaatttagggtgtgtttcgttgaactgtgattttttaagaaag

SEQ ID NO: 205913 - DNA, 1780 bp, Zea Mays
aaaccttgcgtgcgccaccgccaatggcagcaggaatcctctgatcctctttcccgcacatccaaagaggcgccgccgtcctctgaaaaatcctagccgctttctacatggccgagcccgccaaccggcggatggaggccgtccgccgtcacctccttctgccttcacccgcgccgcttcgccctaatccgttaagcagcctcgcggaggtggagcccagcccggtgatcattggcgggatggtgctggatatccatgccaagccttccgtgccgccccatcatggtaccactgtccctggaatggttaaatacatcagtggaggcgtagcaagaaatattgctgagtgcatgtcaaagcttgggacacaacccttcatgataagtgttgttggaaatgatttggcaggggacttccttttgaagtactggaggtcagctggattatgttcagaaggttgataatgttgcaaccccagtagtatcaaatgtgtttgacggtactggagaattaatcgctggagttgcaagtgttcaagcagttgaaaattttattacttcgagctggatttatcacttccgtcatcatattgctaatgcaccacttgtaatgcttgatgcgaatttatctcctgagtcacttaaagcagcttgcataatggcatatgaatttggggtgcctgtgttatttgagccagtctcagtggtgaagtgtcgaagaattgcaccagttgcagaatatataacttgcacttcccccaatgaaattgagcttgttgccatggcaaattcattatctccatcagtgaaatataattttcacacaatagagcagttcaaggagaaagcagatactgttgaatatatttttcaaatgcttagcccagcaatgttcttcctacttgagaagggcatcaagttgcttatcgtgacacttggctcaaatggtgtttttatttgttgcaaagagcacactaacttcatgaaagaccagcacaagtgcaaacagacgcctttctccagacagctacttgaaaaaatggacgggtgttttccatcgaacaatcttgttaatttgtgcagagaaagctcttcaagaacatgtgtttttcatttacctgcaatatcggcctctgtgataagcctcacaggtgctggcgattgtttggttggtggtgccctttcagctctatgtgcaggcttcgatatcatccagagcgttgcagttggggttgctatagcaaaggcatctgtggaatctgaagccaacatacctgatgacatttctgctgcgagtattgcagatgatgcacaaagtgtattgcattctgctaaggtgctttggtgcaaatgaagaatagaaaaactaccatcccggtgtaaattgaagacagtcaggtgctattgaagctattgaactctgttactgttccaacggcacaagacggataagaatgaaatcgctatatatgatggatttttggttggaagaacagagggatcaccaatcagaattctttctactatagcatatatttttcatgtacattgtgggtgcaagttcgatcaagggagcaaattctgttgtatttttttagttagtgagattatgtgatgaaaaattggttagcgtcaaatttgcaattgcaaagtgactaatataatgacataatataatacactgataagatataattggttgcaagttcaaattcatcattgtgatgtagttatgatacaatttagggtgtgtttcgttgaactgtgattttttaagaaag

SEQ ID NO: 205914 - DNA, 1763 bp, Zea Mays
aaaccttgcgtgcgccaccgccaatggcagcaggaatcctctgatcctctttcccgcacatccaaagaggcgccgccgtcctctgaaaaatcctagccgctttctacatggccgagcccgccaaccggcggatggaggccgtccgccgtcacctccttctgccttcacccgcgccgcttcgccctaatccgttaagcagcctcgcggaggtggagcccagcccggtgatcattggcgggatggtgctggatatccatgccaagccttccgtgccgccccatcatggtaccactgtccctggaatggttaaatacatcagtggaggcgtagcaagaaatattgctgagtgcatgtcaaagcttgggacacaacccttcatgataagtgttgttggaaatgatttggcagtactggaggtcagctggattatgttcagaaggttgataatgttgcaaccccagtagtatcaaatgtgtttgacggtactggagaattaatcgctggagttgcaagtgttcaagcagttgaaaattttattacttcgagctggatttatcacttccgtcatcatattgctaatgcaccacttgtaatgcttgatgcgaatttatctcctgagtcacttaaagcagcttgcataatggcatatgaatttggggtgcctgtgttatttgagccagtctcagtggtgaagtgtcgaagaattgcaccagttgcagaatatataacttgcacttcccccaatgaaattgagcttgttgccatggcaaattcattatctccatcagtgaaatataattttcacacaatagagcagttcaaggagaaagcagatactgttgaatatatttttcaaatgcttagcccagcaatgttcttcctacttgagaagggcatcaagttgcttatcgtgacacttggctcaaatggtgtttttatttgttgcaaagagcacactaacttcatgaaagaccagcacaagtgcaaacagacgcctttctccagacagctacttgaaaaaatggacgggtgttttccatcgaacaatcttgttaatttgtgcagagaaagctcttcaagaacatgtgtttttcatttacctgcaatatcggcctctgtgataagcctcacaggtgctggcgattgtttggttggtggtgccctttcagctctatgtgcaggcttcgatatcatccagagcgttgcagttggggttgctatagcaaaggcatctgtggaatctgaagccaacatacctgatgacatttctgctgcgagtattgcagatgatgcacaaagtgtattgcattctgctaaggtgctttggtgcaaatgaagaatagaaaaactaccatcccggtgtaaattgaagacagtcaggtgctattgaagctattgaactctgttactgttccaacggcacaagacggataagaatgaaatcgctatatatgatggatttttggttggaagaacagagggatcaccaatcagaattctttctactatagcatatatttttcatgtacattgtgggtgcaagttcgatcaagggagcaaattctgttgtatttttttagttagtgagattatgtgatgaaaaattggttagcgtcaaatttgcaattgcaaagtgactaatataatgacataatataatacactgataagatataattggttgcaagttcaaattcatcattgtgatgtagttatgatacaatttagggtgtgtttcgttgaactgtgattttttaagaaag

SEQ ID NO: 205915 - DNA, 811 bp, Zea Mays
cctatgtcctatgaatgaatatatcatcggggatggaacgaggagaggacattattgaggagaagcaagctggtggagctgctacgagtgatgagagatcgtcatcccaaaaggtcgccgatggaaagggcgccgagccaccggcggccggagtctcgaaccgcctaaagcctagcgacgacgcagagaagcttgttgcgttcatggaagaccactacgacgacgtcgttgcccgcgtgcaatccttcgacgagttctaccacgccattttcgagctcatcgagatgttctgcgaggaacgtgggcagctgcagtacaggttagcggagaagaaagccctcgaggaggcatacaacaagcaccacaggtcggacggcaaggtgacgaaggaggagttcgaggcgatgagcagggaggtggtgaaggcgggcagcttcagggtggggaaggcgagcctggagcttggcgcgctgctgttcggcgccccggcgtgcgcgctgctggccaagaggatcctgccgggcctgggctggctgtccgacgacgtcgtcgtgcccctcgccacctccggctccgtcgcctacctcatcaagtccaagaggctgtgagcctagctgtgactgtctctgtggaccaagagagggttctgatgtgtattatgagattaatttgcacacgtacgtgcagtggataggactcgatctgcagctgaaacaagcaaagaattatatatataagcatggaatatgtatgatatgtgttagaaatttagtcaatttaatcagaaatctaatcccaaaatagataatgg

SEQ ID NO: 205916 - DNA, 1844 bp, Zea Mays
tggctagcataagatgagggacacgataagacacgagatgccgcgagcgtgcacaggacaaggagtgaggaaccagatccttgcttgcattggcggagcagcatcatgccttccacgacagcgcagcagaagccccacgtcgtgctggtgccgttcccggcgcacggccacatcgcgccgcacgtgcagctggcgcgcgccctccgcgcccgcggcgtccacgccacgctcgtccacaccgagctgtaccaccgccgcctgctgcgcaccaagcagcagcaggccacgggcggcgacgacgccctggacccggacgagggcttctccgtcgaggtcatcccggacgggctatcgctggaggacccaccgcgcacgctgcgtgcgtaccacgaggcgatggagcgcaactgcctcgagccgttcaaggcgctgctgcgggacctgctgctgccgcccaccggcgtgccgccggtcagctgcgtcgtggccgacaccccgatgccgttcgcggccgtggcggcgcgcgaggttggcgtcccggacgtgcagttcttcacggcgtccgcgtgcggcctcatgggctacctccagttccaggagctcttggcgagggaggtcatccctcttagacccacctacgagaccgacggctccctcgacgccccgctggactgggtgcccgggatgaaggccgtgcgcctaagggacctgccgacgttctgccacaccacggacgccgacgactggcttgtgcacttccacgtccaccagatgaagacggccgccgcctccaaggccgtcgtcctcaacactctctacgacatggagaaggacgtcgtcgacgcgctcgcgccgcacttgccgcccatctacaccgtcggcccgctcgcaagcgtcgtcaaagcgtccttgcccgctcctccgcgcggcgccggcgacgacaccagcgtccccgccgccggctcggaggacagggagtgcatggcgagatcgcgtccgggctagcacgctgtggctctccctacctctgggtcctcaggccagaaatggccgccgcggtcgaggtcggcgagaacggcctcgtcgtgccgtggtgcgcgcaggaggcggtgctgagccacccggccgtggggctgttcgtcacccactgtgggtggaactccattctggagagcgtcgtcgccggcgtgccggtgcttggatgccccgtgctgtctgagcagaccacgaactgccgccaggtgtgcaccgcgtggggcatcggcgccgagctgccgcaggaagctggcagcgacgaggttgcggcgctcgtgagggagatgatgaccgggaggaaggggaaggacgcaagggagaagacgctgcagtggaagaggctggctcaagtcagtgcacaaccaggggggctatcttacaataatattggtcggatggtggagaatatcctactcaaacacatctgacttcaaatcatggtcatgtttttgtcatagcgactgaggggagaaagatcgtcaataaccaacagctgaaccgtatctccctgatcctatagcactattaaattaaattctgtacctagcattaaaatatctcataccatatagtccaatataaataaatcagttcatattccacctgattgaatggctgtgcgtgaggttcaggctcgcgcgacgctgaccgaccagatacggcattttccggtgtatgtgtaggtgtcaaatggccttaatggcttgctttgtatccgcttatgcaacatgcgtcttctgcgtgcagtcaaccaaacatgagttgaggcaagtcaacacatataatgggaaacgaatcacgtgagaccc

SEQ ID NO: 205917 - DNA, 2137 bp, Zea Mays
gctgatgttctttctggaattgaaagtttcttaaaacccttgagccgtctccaggtacttatcatatcttatgagactttccgcatgcattcttcaaaatttgaaagacctggcagctgtgaccttctcatatgtgatgaggcccacaggctgaaaaatgatcagacactgacaaataaggctttggctgcccttccatgtacacggcgtattctcttgtccggtaccccaatgcagaatgatttggaagaattcttttcaatggtgaatttcacaaatccaggggttttgggggacgcttcatattttcgtcgttattatgaagcaccaatcatctgtgggagagaacccactgcaagtgcagaagaaaagaaattgggatctgagagatctgcagagcttagtgcaaaagtaaatcagtttatcttgagacgaacaaatgctctgttatccaatcacttgcctccaaagattattgaagtcgtttgctgcaagctgactcctttgcaaacaacactgtacaaccacttcatccattccaaaaacattaaacgcttgatatctgaagaaacaaagcaatccaaaattctagcatatattaccgctcttaagaaattatgcaatcatccaaagctgatctacgacaccataaaaagtaacaattcaggtgtatctggttttgatgactgtctacactttttcccgccagatcttttttcaggaagatctggatcatggactggcggaggaggaatgtgggtagagctatccggaaaaatgcatgtattagcaagattactggggcatctacgtcagaaaaccgatgatcgtattgttcttgtatcaaattatactcagacattggatctatttgttcaattatgccgggaaagaagatacccatatgttagacttgacggatcaacatccatcaataaaaggcagaagctggtgaaccaattcaacgatctatctagggacgagtttgtctttctacttagtagcaaggcaggtggctgtgggcttaacctggtaggtggaaatcgtttggttctcttcgaccctgattggaaccctgccaatgataagcaggctgctgctagagtgtggagagatggacagaaaaagagagtttacatatataggttcttaagcacaggaactatcgaggagaaggtatatcagcgtcaaatgtcgaaagaaggcctgcaaaaagttattcagcaggagcaagcggacaataaaatgcaggggaattctctttcaacagaagatctgcgcgatctttttatttttcatgaacatgtcaggtctgaaatacataaaaatttgaagtgtagccgctgtgacaaggatggagatccagctttggatggtactggttttgcagccactggtcataaggcttcaatacctggagtgcaagattatgctgatattggtgggtttggtgagatatctggatgtttgcagaaaatgaatagcacacatcagcagattggaagacctactgaagaagacttaggaagttggggacatcactgtgacccatcaactgtacctgatactatactgcagtgttctgctggcgaagaggtttcttttgttttcaccaatcaggttgatggaaaacttgttccagttgaatctatggtgcgatcagcagctcatcaacaaaacggaatagcagccaccggagaaaaaggagtgcagatacccaattctcctagcaaacctggaaagcaatccttaaatggcaagaatttgaagatgggatttcatttaaagaattcgtctttgaaatgttcaaccaaatccagaccatcaccaaattgcttgcaagggttgatgaaaaccagcccctttttggatcaacctcaaattaaaaagcttcatgttgcttctgatatatctgacgatgattttgtttgagtgtcaattcagaattacttagtctcatatatgttgatgtgctatctgttgcatatataatgccatcagctttgtcggtgcctattgcatcttttattcaggtttctacaattttcttttaataaaaaataggtcctaataaggtatgtacatagaaaagcaaaaactacttacaatttggaatggagtataaacaatcatttta

SEQ ID NO: 205918 - DNA, 1216 bp, Zea Mays
acacgagaatgcgttccgtttgccgtgtagaaaggcggcgcctcttttggcacccagctgagcattgcatttccttcctccttttcccagtcggaggaatgcaatgccgtaaacgaaagtttcccatccttgtgttttggggggtgggccatcgcggtgttgataagaaaaaggcggactccttgtaccagtttggttttgttttgtacgcgcattggttcctggcttgctcaataaattgcaaccacttccttccgaattccgatctagcggactaccagttcctcccgatcttgggtttgaggaggccccgagccgagcgtcaggcatggagcactgctatttgaggcagccgatctcgagggccgaggcagtgcccgagaggaggtccaggttgtggcagatggacgcgctgccgctgccgccccgggcggaggtcctctgcccccagcctcgccgcgccgcccggatccccttcgccgtttcagtaaacaaggccatccccagtgcgcttccgccgtacagaccagcctccgcctgcgacatactcgatgatcttatcctcagcaagaatgacttctcagatggagcagattcgagcagcggccaggcgggttttttatgcggctcgcctccagtgcgcgctaacaaccctgtcgtccatgacccgcagttcggtaaaagagcgctgccatccatgtctcccctagggagcagctcccacgtcaagcttaaggttgaggcaggctcgccatcctgcggcgttagcagcagcccgaaagtgaggatcgaaggctttgcctgtggcaactcggagacccactacgcagttacgccgctccttgtgtgaatcgaatcgccgtggtggcgtagcctgatcagagtcgcgttttttgcccttctgaatctgctgccatctgaagcttcacaattgcattgagcagtatgatttatgtgtgtctagtaaatgtagctggagttgcatggataatgaaggaggagcctgtgaatagagcgtttttactttttttttggtattcgggaagtaagatgcagcatcgagttttcagttattatggatgcatctttgttttgtcatacgaaggaaactatatatgtagctttgattttttttcctagatatattcatgctgtagccaaatcatccgggcaggtcaaaattctggagcttcaatagtcttctctctctctctat

SEQ ID NO: 205919 - DNA, 1434 bp, Zea Mays
tccgtgtgtctcaagcagtacattggaggggaaataccagaagcttggagctctgccctgactttcttgatcggcttgccaactggcttgtattcatcaccgaaaaccatttcttgtcttgagtgtattggaggataagaaggtgaacaagaagctgacagccaagctgaccctatactcaggatgtgttgtgccttctggtggtgaaaccgtctctttaagcaactgaactgctttaagtataacagaagagctcagtgatttaccctttagaaaatcctctaccttgctagctctgatggcatggtcagctccataagcaccgaacaccaagcatatatcctccatgatgttcttccctgaagctgcatcagttgaagtccttgccaagagagcagcattgacatatgaagcagcattgccaaatggccgaggcgctgcccggaatgtctcaaaggtgatgccatctcaatcccactttgggatgaatatgctgatcagcagggtcctagaatcacatggagactgctgcaagaactcctccaaagtaaggcacaacctttttggaagccgtctggattgtgactgttgtacctgcagccagtagcacagttgctatgtctgactcgaatggcaacctctgcgccatgattatgttgccacctatggttgctgtgttccgaacaaatggcgaagccactttgcttaggtgattggcaatttttctgaagaccagatttccatctgacaacacctcaatggttgtagcctgtagagatggacacaaccgatccaagctcaattcccttaacgctgctgttgatgactgatagctctggtattcctttgatgtcaatgtacttgtcatagaggtcctgatccatgtgtaagggagttcactgccactccccgctcattttttctaaaggagaaatatccatcttcttgttgttttgtaccgttggatactttagcatcattctcatactactaggagtgtaggtaaggagtccacacatgagtttgtaaacaccatgtgtaagggagttcaccaacgtgatgtgcctcacctacaggggtgctgctttgtcaccacccttgtgccttgtccaggtgctacttactagcctcttattttgtttctgaattcaggatcttatgctggtcctacaagtaacattaaagcacttccctccctgttggcattaaaacccctggcgtggttgttgtgttgtactagacaaccatcacttccaatttgttgtagtagctttttcttgctacttcatggatcttgggtcttcggttgttgagttatttgcttcagcaattgggcttctgacttagagcttttggatttgtaagcattgctggttgtcttgaagaagatgatggtgggctcttcccaccactagcagctatagaggaagggga

SEQ ID NO: 205920 - DNA, 2242 bp, Zea Mays
ggttactgagattttgggactgggtcaacaaatgaaaggtgcatttcaagttttgcttctgtgatgtttccacttttattttcagttatttcacctgttttgctaacttattgtctgaaagtctgactaggctcattatacatatttctatgaaaatgaaactgtatggtagttggttgcagactaattgttgattgtaaaatctaggtaacaaagctgctggaagaaccccattggactaggagaccagggtgaagatagctctgggcactgcacgcggaatggcttaccttcactccatgggtagcggcgggaagttcattcacgggaacatgaagtcaagcaacatccttctctcataggaactcggcgcctgcgtcaccgagttcggccttgcccagctcatgtccacgccccacgtccacccactgcacgcggaatggcttaccttcactccgtgtgtctcaagtatgaacgcttatgcttttctggatcaattgaaatgtctttcatcttctatgactatgcatgtgtttttcaagcaatacttggtactcgagcatcagagatcataaagcttgttcctttttgtctccatttatcagtcgagggggagtcaccaacgaacgacccacaattggtaagcctcgttattcgactggatttttttatttcacctctagagaatacttctcattacctaactgctttgttctcttgccatttctgattctgttgttatgatactgatggaatcctcattcgccgctgctaaggagtttgagcaggactagagaggagacgtcagttcttcctcctccgctcatacattggaggggaaataccagaagcttggagctctgccctgactttcttgatcggcttgccaactggcttgtattcatcaccgaaaaccatttcttgtcttgagtgtattggaggataagaaggtgaacaagaagctgacagccaagctgaccctatactcaggatgtgttgtgccttctggtggtgaaaccgtctctttaagcaactgaactgctttaagtataacagaagagctcagtgatttaccctttagaaaatcctctaccttgctagctctgatggcatggtcagctccataagcaccgaacaccaagcatatatcctccatgatgttcttccctgaagctgcatcagttgaagtccttgccaagagagcagcattgacatatgaagcagcattgccaaatggccgaggcgctgcccggaatgtctcaaaggtgatgccatctcaatcccactttgggatgaatatgctgatcagcagggtcctagaatcacatggagactgctgcaagaactcctccaaagtaaggcacaacctttttggaagccgtctggattgtgactgttgtacctgcagccagtagcacagttgctatgtctgactcgaatggcaacctctgcgccatgattatgttgccacctatggttgctgtgttccgaacaaatggcgaagccactttgcttaggtgattggcaatttttctgaagaccagatttccatctgacaacacctcaatggttgtagcctgtagagatggacacaaccgatccaagctcaattcccttaacgctgctgttgatgactgatagctctggtattcctttgatgtcaatgtacttgtcatagaggtcctgatccatgtgtaagggagttcactgccactccccgctcattttttctaaaggagaaatatccatcttcttgttgttttgtaccgttggatactttagcatcattctcatactactaggagtgtaggtaaggagtccacacatgagtttgtaaacaccatgtgtaagggagttcaccaacgtgatgtgcctcacctacaggggtgctgctttgtcaccacccttgtgccttgtccaggtgctacttactagcctcttattttgtttctgaattcaggatcttatgctggtcctacaagtaacattaaagcacttccctccctgttggcattaaaacccctggcgtggttgttgtgttgtactagacaaccatcacttccaatttgttgtagtagctttttcttgctacttcatggatcttgggtcttcggttgttgagttatttgcttcagcaattgggcttctgacttagagcttttggatttgtaagcattgctggttgtcttgaagaagatgatggtgggctcttcccaccactagcagctatagaggaagggga

SEQ ID NO: 205921 - DNA, 1932 bp, Zea Mays
cacaaatttaattggttactgagattttgggactgggtcaacaaatgaaaggtgcatttcaagttttgcttctgtgatgtttccacttttattttcagttatttcacctgttttgctaacttattgtctgaaagtctgactaggctcattatacatatttctatgaaaatgaaactgtatggtagttggttgcagactaattgttgattgtaaaatctaggtaacaaagctgctggaagaaccccattggactaggagaccagggtgaagatagctctgggcactgcacgcggaatggcttaccttcactccatgggtagcggcgggaagttcattcacgggaacatgaagtcaagcaacatccttctctcataggaactcggcgcctgcgtcaccgagttcggccttgcccagctcatgtccacgccccacgtccacccactgcacgcggaatggcttaccttcactccgtgtgtctcaatcgagggggagtcaccaacgaacgacccacaattgtacattggaggggaaataccagaagcttggagctctgccctgactttcttgatcggcttgccaactggcttgtattcatcaccgaaaaccatttcttgtcttgagtgtattggaggataagaaggtgaacaagaagctgacagccaagctgaccctatactcaggatgtgttgtgccttctggtggtgaaaccgtctctttaagcaactgaactgctttaagtataacagaagagctcagtgatttaccctttagaaaatcctctaccttgctagctctgatggcatggtcagctccataagcaccgaacaccaagcatatatcctccatgatgttcttccctgaagctgcatcagttgaagtccttgccaagagagcagcattgacatatgaagcagcattgccaaatggccgaggcgctgcccggaatgtctcaaaggtgatgccatctcaatcccactttgggatgaatatgctgatcagcagggtcctagaatcacatggagactgctgcaagaactcctccaaagtaaggcacaacctttttggaagccgtctggattgtgactgttgtacctgcagccagtagcacagttgctatgtctgactcgaatggcaacctctgcgccatgattatgttgccacctatggttgctgtgttccgaacaaatggcgaagccactttgcttaggtgattggcaatttttctgaagaccagatttccatctgacaacacctcaatggttgtagcctgtagagatggacacaaccgatccaagctcaattcccttaacgctgctgttgatgactgatagctctggtattcctttgatgtcaatgtacttgtcatagaggtcctgatccatgtgtaagggagttcactgccactccccgctcattttttctaaaggagaaatatccatcttcttgttgttttgtaccgttggatactttagcatcattctcatactactaggagtgtaggtaaggagtccacacatgagtttgtaaacaccatgtgtaagggagttcaccaacgtgatgtgcctcacctacaggggtgctgctttgtcaccacccttgtgccttgtccaggtgctacttactagcctcttattttgtttctgaattcaggatcttatgctggtcctacaagtaacattaaagcacttccctccctgttggcattaaaacccctggcgtggttgttgtgttgtactagacaaccatcacttccaatttgttgtagtagctttttcttgctacttcatggatcttgggtcttcggttgttgagttatttgcttcagcaattgggcttctgacttagagcttttggatttgtaagcattgctggttgtcttgaagaagatgatggtgggctcttcccaccactagcagctatagaggaagggga

SEQ ID NO: 205922 - DNA, 2272 bp, Zea Mays
ttctgttacctacttaatcttcaagaacgacatggacagttgctgctgtcggcagggaagaaaattgaacgttacggtagaaatctaaaaagaagagtatagagaaaagcttggacaagagatagtggcggtcactcactttggtagaaggttactcttgcatgtagtacgtacaggtacagtactatagaacactgtagcaactgacgtcgtcctgggggctcgttagtgcaggcaatgctggcgggaacaggaggaataataccaggcaggcaccggagactagaacggtcatcagttcccaggcaccggagactagaatggacagttgggggtaacaaagctgctggaagaaccccattggactaggagaccagggtgaagatagctctgggcactgcacgcggaatggcttaccttcactccatgggtagcggcgggaagttcattcacgggaacatgaagtcaagcaacatccttctctcataggaactcggcgcctgcgtcaccgagttcggccttgcccagctcatgtccacgccccacgtccacccactgcacgcggaatggcttaccttcactccgtgtgtctcaatcgagggggagtcaccaacgaacgacccacaattggtaagcctcgttattcgactggatttttttatttcacctctagagaatacttctcattacctaactgctttgttctcttgccatttctgattctgttgttatgatactgatggaatcctcattcgccgctgctaaggagtttgagcaggactagagaggagacgtcagttcttcctcctccgctcagcagtacattggaggggaaataccagaagcttggagctctgccctgactttcttgatcggcttgccaactggcttgtattcatcaccgaaaaccatttcttgtcttgagtgtattggtaaataatttctgtcaacctcaagattttccttcagaggataagaaggtgaacaagaagctgacagccaagctgaccctatactcaggatgtgttgtgccttctggtggtgaaaccgtctctttaagcaactgaactgctttaagtataacagaagagctcagtgatttaccctttagaaaatcctctaccttgctagctctgatggcatggtcagctccataagcaccgaacaccaagcatatatcctccatgatgttcttccctgaagctgcatcagttgaagtccttgccaagagagcagcattgacatatgaagcagcattgccaaatggccgaggcgctgcccggaatgtctcaaaggtgatgccatctcaatcccactttgggatgaatatgctgatcagcagggtcctagaatcacatggagactgctgcaagaactcctccaaagtaaggcacaacctttttggaagccgtctggattgtgactgttgtacctgcagccagtagcacagttgctatgtctgactcgaatggcaacctctgcgccatgattatgttgccacctatggttgctgtgttccgaacaaatggcgaagccactttgcttaggtgattggcaatttttctgaagaccagatttccatctgacaacacctcaatggttgtagcctgtagagatggacacaaccgatccaagctcaattcccttaacgctgctgttgatgactgatagctctggtattcctttgatgtcaatgtacttgtcatagaggtcctgatccatgtgtaagggagttcactgccactccccgctcattttttctaaaggagaaatatccatcttcttgttgttttgtaccgttggatactttagcatcattctcatactactaggagtgtaggtaaggagtccacacatgagtttgtaaacaccatgtgtaagggagttcaccaacgtgatgtgcctcacctacaggggtgctgctttgtcaccacccttgtgccttgtccaggtgctacttactagcctcttattttgtttctgaattcaggatcttatgctggtcctacaagtaacattaaagcacttccctccctgttggcattaaaacccctggcgtggttgttgtgttgtactagacaaccatcacttccaatttgttgtagtagctttttcttgctacttcatggatcttgggtcttcggttgttgagttatttgcttcagcaattgggcttctgacttagagcttttggatttgtaagcattgctggttgtcttgaagaagatgatggtgggctcttcccaccactagcagctatagaggaagggga

SEQ ID NO: 205923 - DNA, 3856 bp, Zea Mays
ccccgcccgcgagtttggccacggcgcgcgtcttccccccccccccacgcgtcgcgctgccgtgatgcccgccgcccgcgcaatcgacaccgcccgcgatcccccggcgcgcgtcttccccccccccacacccgcgaatcacgctcgcacgcgtcgcgccgccgtgatgcccgccgcccgcacaatccacagccgcctctgcatccgccgcaagatccccctgcgctcgcatgcccccgctcgcctgcgcctcccacgcccacacacccagccaccgccgaccacgctcgcggatctcgcccacaacaacgcgtgaccgagcccccgccgcgtctccttccatcctcgcgtatacgtcggcgtctccttccatatatgccaacggaggcgaccgcggaggccgctcccccgcgtgcacaacatcccacgttcccctctccccccaggtcctaccgcagcgcgttgctcagtaccccagccactgcccgctagcccccccccccgccacacacacacacccatcctcgccggcctcagcaccgcaaacgacgtccgcgcgtcacttccccgcccttcaatggtgtcctcctccccatcactcgggggcagcaaggcgaccgatggggacgtgtccaacttcactgccttcctccaggcctcaccgaagtcattcgtggtcgtcgagttcttcacccactggtcggcctcctttttcctttttgttctcgttgatacgatgcagctgggctccttcaaaatcgatcggcgtattagttgggatcgggatcgttcaacctgtggctctacacccaaatgattatctcgtctcgcttgtggtgtgggcggtacctgaacaatatagctccagcgattttttggtggttttccagtatgctagggttgttttgttagtttatgctgaggcctattggatggggtggatgcccagttctgtccgagtagcgtgctgcagccatgcttcatcggtacttttagatgtacaagagcaaatatgaagtcaaaaggattgtaaacataatgtcctcggatataagcactatggatgtcaagctaaaaatagcactgtagcaacatgttaaattgtacgttcagtcaaaaacaatttctacaactatgtgtgttctgtatggtgggcctcatcaagtcttacttcatcattatttttcccgaaattgtactaaagtgatatactgatattactgtcaaatttctacataggaagtaacttaatgtatatgcaaccttgggatgatctcaaacttgttgtgtctcactccaaaatgcacaaactctagatttacctgtcaacctgctttggaattttgaactttacattagtaatgatttatccaatttgtcccctcgctgccaacctataaaataagcactttgtgtttgtttgtgtaggtgcaatggtcaccagcccagaaggtcatggtcgacccacgcgatgcaacccaattggatgaagctgggtttaggggccttcttcgttggtttgactgagtttcttcttagttaaataaagtggggcaatattttctcaccgacttgtatggtttgttgcctatgctaatcatctttactgataagacttccaatattttttgacacaaatatctgggcatgcagcacaaagccgaccatggcagatgttatcggtttcgatctaggcacaccgaattcatgcatctccgtattggaatgaaagctccatctgctgttctggaggatggaacaacagtggtggtcaagagattgaaggaagtggtggcgggaatgagggaatttgaacagcagatggagctaattggcaaggtttgccagcatcagaacactgtcccattgcgtgcttactactactccaaggatgagaagctcttggtgtatgtcccactaggtagcctttgtgctgctttgcatggtaacaaagctgctggaagaaccccattggactaggagaccagggtgaagatagctctgggcactgcacgcggaatggcttaccttcactccatgggtagcggcgggaagttcattcacgggaacatgaagtcaagcaacatccttctctcataggaactcggcgcctgcgtcaccgagttcggccttgcccagctcatgtccacgccccacgtccacccactgcacgcggaatggcttaccttcactccgtgtgtctcaatcgagggggagtcaccaacgaacgacccacaattggtaagcctcgttattcgactggatttttttatttcacctctagagaatacttctcattacctaactgctttgttctcttgccatttctgattctgttgttatgatactgatggaatcctcattcgccgctgctaaggagtttgagcaggactagagaggagactacattggaggggaaataccagaagcttggagctctgccctgactttcttgatcggcttgccaactggcttgtattcatcaccgaaaaccatttcttgtcttgagtgtattggtaaataatttctgtcaacctcaagattttccttcagaggataagaaggtgaacaagaagctgacagccaagctgaccctatactcaggatgtgttgtgccttctggtggtgaaaccgtctctttaagcaactgaactgctttaagtataacagaagagctcagtgatttaccctttagaaaatcctctaccttgctagctctgatggcatggtcagctccataagcaccgaacaccaagcatatatcctccatgatgttcttccctgaagctgcatcagttgaagtccttgccaagagagcagcattgacatatgaagcagcattgccaaatggccgaggcgctgcccggaatgtctcaaaggtgatgccatctcaatcccactttgggatgaatatgctgatcagcagggtcctagaatcacatggagactgctgcaagaactcctccaaagtaaggcacaacctttttggaagccgtctggattgtgactgttgtacctgcagccagtagcacagttgctatgtctgactcgaatggcaacctctgcgccatgattatgttgccacctatggttgctgtgttccgaacaaatggcgaagccactttgcttaggtgattggcaatttttctgaagaccagatttccatctgacaacacctcaatggttgtagcctgtagagatggacacaaccgatccaagctcaattcccttaacgctgctgttgatgactgatagctctggtattcctttgatgtcaatgtacttgtcatagaggtcctgatccatgtgtaagggagttcactgccactccccgctcattttttctaaaggagaaatatccatcttcttgttgttttgtaccgttggatactttagcatcattctcatactactaggagtgtaggtaaggagtccacacatgagtttgtaaacaccatgtgtaagggagttcaccaacgtgatgtgcctcacctacaggggtgctgctttgtcaccacccttgtgccttgtccaggtgctacttactagcctcttattttgtttctgaattcaggatcttatgctggtcctacaagtaacattaaagcacttccctccctgttggcattaaaacccctggcgtggttgttgtgttgtactagacaaccatcacttccaatttgttgtagtagctttttcttgctacttcatggatcttgggtcttcggttgttgagttatttgcttcagcaattgggcttctgacttagagcttttggatttgtaagcattgctggttgtcttgaagaagatgatggtgggctcttcccaccactagcagctatagaggaagggga

SEQ ID NO: 205924 - DNA, 3491 bp, Zea Mays
ccccgcccgcgagtttggccacggcgcgcgtcttccccccccccccacgcgtcgcgctgccgtgatgcccgccgcccgcgcaatcgacaccgcccgcgatcccccggcgcgcgtcttccccccccccacacccgcgaatcacgctcgcacgcgtcgcgccgccgtgatgcccgccgcccgcacaatccacagccgcctctgcatccgccgcaagatccccctgcgctcgcatgcccccgctcgcctgcgcctcccacgcccacacacccagccaccgccgaccacgctcgcggatctcgcccacaacaacgcgtgaccgagcccccgccgcgtctccttccatcctcgcgtatacgtcggcgtctccttccatatatgccaacggaggcgaccgcggaggccgctcccccgcgtgcacaacatcccacgttcccctctccccccaggtcctaccgcagcgcgttgctcagtaccccagccactgcccgctagcccccccccccgccacacacacacacccatcctcgccggcctcagcaccgcaaacgacgtccgcgcgtcacttccccgcccttcaatggtgtcctcctccccatcactcgggggcagcaaggcgaccgatggggacgtgtccaacttcactgccttcctccaggcctcaccgaagtcattcgtggtcgtcgagttcttcacccactggtcggcctcctttttcctttttgttctcgttgatacgatgcagctgggctccttcaaaatcgatcggcgtattagttgggatcgggatcgttcaacctgtggctctacacccaaatgattatctcgtctcgcttgtggtgtgggcggtacctgaacaatatagctccagcgattttttggtggttttccagtatgctagggttgttttgttagtttatgctgaggcctattggatggggtggatgcccagttctgtccgagtagcgtgctgcagccatgcttcatcggtacttttagatgtacaagagcaaatatgaagtcaaaaggattgtaaacataatgtcctcggatataagcactatggatgtcaagctaaaaatagcactgtagcaacatgttaaattgtacgttcagtcaaaaacaatttctacaactatgtgtgttctgtatggtgggcctcatcaagtcttacttcatcattatttttcccgaaattgtactaaagtgatatactgatattactgtcaaatttctacataggaagtaacttaatgtatatgcaaccttgggatgatctcaaacttgttgtgtctcactccaaaatgcacaaactctagatttacctgtcaacctgctttggaattttgaactttacattagtaatgatttatccaatttgtcccctcgctgccaacctataaaataagcactttgtgtttgtttgtgtaggtgcaatggtcaccagcccagaaggtcatggtcgacccacgcgatgcaacccaattggatgaagctgggtttaggggccttcttcgttggtttgactgagtttcttcttagttaaataaagtggggcaatattttctcaccgacttgtatggtttgttgcctatgctaatcatctttactgataagacttccaatattttttgacacaaatatctgggcatgcagcacaaagccgaccatggcagatgttatcggtttcgatctaggcacaccgaattcatgcatctccgtattggaatgaaagctccatctgctgttctggaggatggaacaacagtggtggtcaagagattgaaggaagtggtggcgggaatgagggaatttgaacagcagatggagctaattggcaaggtttgccagcatcagaacactgtcccattgcgtgcttactactactccaaggatgagaagctcttggtgtatgtcccactaggtagcctttgtgctgctttgcatggtaacaaagctgctggaagaaccccattggactaggagaccagggtgaagatagctctgggcactgcacgcggaatggcttaccttcactccatgggtagcggcgggaagttcattcacgggaacatgaagtcaagcaacatccttctctcataggaactcggcgcctgcgtcaccgagttcggccttgcccagctcatgtccacgccccacgtccacccactgcacgcggaatggcttaccttcactccgtgtgtctcaatcgagggggagtcaccaacgaacgacccacaattggagtttgagcaggactagagaggagacgtcagttcttcctcctccgctcatacattggaggggaaataccagaagcttggagctctgccctgactttcttgatcggcttgccaactggcttgtattcatcaccgaaaaccatttcttgtcttgagtgtattggtaaataatttctgtcaacctcaagattttccttcagaggataagaaggtgaacaagaagctgacagccaagctgaccctatactcaggatgtgttgtgccttctggtggtgaaaccgtctctttaagcaactgaactgctttaagtataacagaagagctcagtgatttaccctttagaaaatcctctaccttgctagctctgatggcatggtcagctccataagcaccgaacaccaagcatatatcctccatgatgttcttccctgaagctgcatcagttgaagtccttgccaagagagcagcattgacatatgaagcagcattgccaaatggccgaggcgctgcccggaatgtctcaaaggtgatgccatctcaatcccactttgggatgaatatgctgatcagcagggtcctagaatcacatggagactgctgcaagaactcctccaaagtaaggcacaacctttttggaagccgtctggattgtgactgttgtacctgcagccagtagcacagttgctatgtctgactcgaatggcaacctctgcgccatgattatgttgccacctatggttgctgtgttccgaacaaatggcgaagccactttgcttaggtgattggcaatttttctgaagaccagatttccatctgacaacacctcaatggttgtagcctgtagagatggacacaaccgatccaagctcaattcccttaacgctgctgttgatgactgatagctctggtattcctttgatgtcaatgtacttgtcatagaggtcctgatccatgtgtaagggagttcactgccactccccgctcattttttctaaaggagaaatatccatcttcttgttgttttgtaccgttggatactttagcatcattctcatactactaggagtgtaggtaaggagtccacacatgagtttgtaaacaccatgtgtaagggagttcaccaacgtgatgtgcctcacctacaggggtgctgctttgtcaccacccttgtgccttgtccagcattgctggttgtcttgaagaagatgatggtgggctcttcccaccactagcagctatagaggaagggga

SEQ ID NO: 205925 - DNA, 1669 bp, Zea Mays
ccacgaagtagcgttggctgttgcaaaagcaaccgtttcaagtttcctccctagtgcacccaggaaatcgccagcacctcccctgttccctctctgtctctggctctctctcctctccgcccctttttatcgcccgatctcacacattttggaaagaggagagagagggagagattagaggggagcgccctgcccaagcaaagagaaaccgcggcgcgagaagagggaggaagggcagacgggcgagcaggatgagagagatcatcagcatccacatcggccaggccgggatccaggtcggcaacgcctgctgggagctctactgcctcgagcacggcatcgagcccgatggcaccatgcccagtgatacctcggttggcgtcgcacatgatgccttcaacacgttcttcagcgagaccggttctggcaagcatgtgccgagggccatcttcgtcgaccttgaacccactgtcattgatgaggttcgcactggctcgtaccgccaactcttccacccagagcagctcatctcgggcaaggaagacgcagctaacaactttgcccgtggccactacactgttgggaaggagattgtcgatctatgcctggaccgtgtgcgcaagcttgcagacaactgcactgggctgcagggattcttggtgttcaatgctgttggtggtgggactggctctggacttgggtcacttttattggagcgcctttcagttgattatggcaagaaatccaagcttggtttcaccatttatccttccccacaggtgtcaacagctgttgtagagccatacaacagtgtcctctccacccactccttgcttgagcacactgatgttgcagtcctcctggacaacgaggctatctatgacatatgcaggaggtcccttgacatcgaaaggccaacctacaccaacttgaacagctctctgttcctgaaatcaccaatgccgtctttgagccctcaagcatgatggccaagtgtgacccaaggcatgggaagtacatggcttgctgcttgatgtaccgtggtgatgttgttcccaaggatgtcaatgctgcagtcgcaaccatcaagaccaagagaactgtccagtttgtggactggtgccccaccggattcaagtgtggcatcaactaccagccaccgtctgttgtccctggaggcgacctggcaaaggtccagcgtgccgtgtgtatgatcagcaacaacactgccgttgctgaggtgttctcgcgcatcgatcacaagttcgaccttatgtacgccaagcgggcgttcgttcactggtacgtcggtgagggtatggaagagggtgagttctccgaggcccgtgaggacttggctgctcttgagaaggactatgaggaagtcggcgcagagggtgcagatgacgagggtgacgagggcgatgactattgagtagccggttaataattagttcgctggtgcttaatggttgagttattttgagtatactctgtatgggtccactccattgcgtgctgctgctgtgtgtttccattttgtattttgtgataaattgttcgtagccccctattggccatgattgttgttcatatcatcctgttttgatttgcaatgctattcatcgaagttcgatgtagtatatttcattctgttgcaaaaaaaaaa

SEQ ID NO: 205926 - DNA, 939 bp, Zea Mays
ccggcgtgcaatcttcgttcagcccactgggagtggagtgactcactcgggtccattctataaaacctctgcccgggggctagggtttcctcccagccgtcatcgtttcgcgtccgcctcagcccgccgcaaggagagttcaggagacatcttcgagaagctgaaatggctcctaaagctgctcctgccaagaagggtgatgccaagacccaggccttgaaggttgccaaggctgtgaagtctggggcagccaagaagaagaccaagaagatccgcacgtctgtgacatttcaccgccccacgaccctgaagaaggctagggaccccaagtacccacgaatcagcactaccggaaggaacaagcttgatcagtaccaaattctcaagtacccccttaccacagaatcagcgatgaagaagattgaagataacaacactctggtcttcattgttgacctcaaggcagacaagaagaagatcaaggctgccgtcaagaagatgtatgacatccaggcaaagaaggtcaacaccttgatcaggcctgatgggaagaagaaggcttacgtgaagctgactcccgactatgatgctcttgatgtggccaacaaaatcggaatcatctaagtgctgcattaggcatctgttgtttcctagttcaatctgttgtgtcctagttctatgtgaaaccagagttttgtagctatggatctcaatcgttccattaccatgtgttatgcacacttctgaatttgatatcatccaagtgaccggttgaactagtttgcgttctgcacttcattacacttggacaccgtcagtctttatgaccagtaattttgtttgtcgtaataggttggttttgcaactcgaccaaataattcgaccaaataaccgtgtatgtgttgtatccgttgttggaccttgcatgatgggaggggc

SEQ ID NO: 205927 - DNA, 122 bp, Zea Mays
gcgctcgcgtgaggccgcttgctccctctcccacttggcaagacatgacattggcgcttgatcaaaagcgatggaagaaagctattgagaaaaagcaacagcgagcttaaggtcaactaaat

SEQ ID NO: 205928 - DNA, 2295 bp, Zea Mays
cgcacgcacgaatcttacgcggcgttcgaacgaatctccccttcctccgtgtagacgtgtagtatacccgttgccctccctccttccttcgttcctcccacggcgacacaccacgcgtcgccgaccaccgccaccgaatcgccgcttcccatcatcatagactatcgaggcgtcgtcacacggcccgctcttccatcagggcgcgtccaccggccaagccgccctgacccccggcgcattctcctctcggtgccgactgccgagatctccccggccctctcccgagaggagtgcccgctcttgacccgacgtccgcgatgacggtggcggcgctgcaggcgatggacgcgctgtcgcggcgggcgaccatgctgcgggactctctgcggcgaagccaggggaacacggacggcatggtcaccatcctcggctccttcgaccaccgcctctccgcgctcgaggccgcaatgcgccccacccaggtgaggacgcacgcgatccggacggcgcatgagaatatcgaccggaccatcaaggccgccgacggcatcctctcccagttcgatctcgctcgccgggctgaggcaacaatattgaggggtccccatgaggatttggagagctacctggaggcagtggatgtgctgaaaggcatttctcgcttcttttcctcaaacaagaacttcaagagtagtgaaggagttctgaatcatgtcaacaatctgttagctaaatctactctgaagattgaagaggaatttaagcagctgatgagtacatacagcaaacctatcgagccagatcgcctgtttgactgtctacccaagtctcttcgtccaacaaaaggtgaccacgagaccgatggaggcagccatcatccatccaaaggcttggaggctgccgtatacaggaccccaacattaattcctcccagaatattgcctctcatgaatgacatagctcagcagttggttcaggctggaaatcagcaaacttgctataaaatctacagagattatcgtgcttcagcactagaggtgagccttcggaagttaggagtggaaaaacttactaaagatgatgtacaaaaaatgcaatgggaggctttggaggctaaaattggaaactggatacattttatgcgaatcgcggtcaaattattactagcaggagaaagaaaaatctgtgatcagatttttgatggtgtgaattttaacaaaggccattgttttgctgaactcacagcaaatagtattataactcttttcagctttggagatgctgttgctaaaagcaaaaggtctcctgaaaagctgtttgtgttgcttgacatgtatgaagtaatgcgtgaacttcaaccagagatcgatgaaatatttgaaggcaaaccttgcactgagatgcgggaagctgcatcaagcttaacaaagcgcttggcgcagactgcccaggaaacatttgcagattttgaggaggcagttgaaaaagatgcttcaaaaactattgttcaggatggaacagtccatcctttgactagctatgtgatcaattatgtcaaattcctattcgattaccagtcaacattgaagctactgtttcaggaatttgatagtggcactgaggcagaatctcagcttgctgcagttaccacaaggataatgcaggccctacagaataacctagatgggaaatctaaacaatataaggatcctgcattgacacacttgtttcttatgaacaacatccactatatggttagatctgttcgcagatcagaagcaaaagatatacttggtgatgactggattcagaggcatcgcaggattgtgcagcaaaatgccaatcaatataaacgtgttgcttgggcaaagattcttcagacactttctgttcaaggtgcgggcagcgggggtgaccttaccagcagtagtgtttcaagagccacaatcaaagaacggtttaagtctttcaatacacaattcgaagagcttcacgcgaagcaatcacaatggatcgtacctgatcaagaactacgagaatccttgaggctcgctgtagccgaagtcctgttgccagcctaccgatcttttatcaaacgctttggcaatcttgtggacaacaacaagaacccgcagaagtacgtgcggtacagcccagaagcagtggaccaacttctaggccagttcttcgaagggcagcaatgggcggagcaaaagcgctgagcaacatagagtgagagtgacggcatgagtacagccagatgccagcataggagcagctccaacgcgacattgt

SEQ ID NO: 205929 - DNA, 2115 bp, Zea Mays
cgcacgcacgaatcttacgcggcgttcgaacgaatctccccttcctccgtgtagacgtgtagtatacccgttgccctccctccttccttcgttcctcccacggcgacacaccacgcgtcgccgaccaccgccaccgaatcgccgcttcccatcatcatagactatcgaggcgtcgtcacacggcccgctcttccatcagggcgcgtccaccggccaagccgccctgacccccggcgcattctcctctcggtgccgactgccgagatctccccggccctctcccgagaggagtgcccgctcttgacccgacgtccgcgatgacggtggcggcgctgcaggcgatggacgcgctgtcgcggcgggcgaccatgctgcgggactctctgcggcgaagccaggggaacacggacggcatggtcaccatcctcggctccttcgaccaccgcctctccgcgctcgaggccgcaatgcgccccacccaggtgaggacgcacgcgatccggacggcgcatgagaatatcgaccggaccatcaaggccgccgacggcatcctctcccagttcgatctcgctcgccgggctgaggcaacaatattgaggggtccccatgaggatttggagagctacctggaggcagtggatgtgctgaaaggcatttctcgcttcttttcctcaaacaagaacttcaagagtagtgaaggagttctgaatcatgtcaacaatctgttagctaaatctactctgaagattgaagaggaatttaagcagctgatgagtacatacagcaaacctatcgagccagatcgcctgtttgactgtctacccaagtctcttcgtccaacaaaaggtgaccacgagaccgatggaggcagccatcatccatccaaaggcttggaggctgccgtatacaggaccccaacattaattcctcccagaatattgcctctcatgaatgacatagctcagcagttggttcaggctggaaatcagcaaacttgctataaaatctacagagattatcgtgcttcagcactagaggtgagccttcggaagttaggagtggaaaaacttactaaagatgatgtacaaaaaatgcaatgggaggctttggaggctaaaattggaaactggatacattttatgcgaatcgcggtcaaattattactagcaggagaaagaaaaatctgtgatcagatttttgatggtgtgaattttaacaaaggccattgttttgctgaactcacagcaaatagtattataactcttttcagctttggagatgctgttgctaaaagcaaaaggtctcctgaaaagctgtttgtgttgcttgacatgtatgaagtaatgcgtgaacttcaaccagagatcgatgaaatatttgaaggcaaaccttgcactgagatgcgggaagctgcatcaagcttaacaaagcgcttggcgcagactgcccaggaaacatttgcagattttgaggaggcagttgaaaaagatgcttcaaaaactattgttcaggatggaacagtccatcctttgactagctatgtgatcaattatgtcaaattcctattcgattaccagtcaacattgaagctactgtttcaggaatttgatagtggcactgaggcagaatctcagcttgctgcagttaccacaaggataatgcaggccctacagaataacctagatgggaaatctaaacaatataaggatcctgcattgacacacttgtttcttatgaacaacatccactatatggttagatctgttcgcagatcagaagcaaaagatatacttggtgatgactggattcagaggcatcgcaggattgtgcagcaaaatgccaatcaatataaacgtgttgcttgggcaaagattcttcagacactttctgttcaaggtgcgggcagcgggggtgaccttaccagcagtagtgtttcaagagccacaatcaaagaacggtttaagtctttcaatacacaattcgaagagcttcacgcgaagcaatcacaatggatcgtacctgatcaagaactacgagaatccttgaggctcgctgtagccgaagtcctgttgccagcctaccgatcttttatcaaacgctttggtatcattgtga

SEQ ID NO: 205930 - DNA, 2137 bp, Zea Mays
tcagcaccggtttacctttggctcagcacggaaatataaaagctaccgagggagattcctcaagttccaattgacaacaggaattcttcaactcagacacacccatcttcaaacagagaatccgttttacctgaaaactttgacgggccttattggacatcaatcatcgtcgaccagaattcccccaaaacactgccttccttcctctcctctataaaaccaacccaccagctcaaagtttcaagcaccagagcaaactaccagcttaagtttccagcaccagagcaagctaagtttccagcaccatagcaacgatgacatccaacttcacgcccaatgtctgggcttggatcgccagcctgcccccattcacccagtggcgcaccaacaccatgtccctttgcatctgcgccacgccatcatcatcatcttcgtcgtcacagccacagccatcgataaacctctcggttacgaaaactacttccatcgcacagcctccttatgttatcttctccgtcttcgcaaactacagcatgccagtttcgctgtggaagtcacagccagtccacctgaaaacaaagacgcagcaaactctagacgaacaggatatcatacacatcttcgtcaacatcgtcaactccgtgctgaagtactgtccagacaagaactcgtcgtttcggttccctggggcacagcctcgtggcaacttcagcgacgtgttcaacatagctttcttgtccctggccttcctgctgtgcatcttcgaggtccctcgcgacctccgtccaggatgcttgggttcactaggagcccagctcactggttcgaggtgcagagatgccgcaaagagccttgtgaggatgctcggtgcaaacctcgaggaccagtggatgcagacgatgaacctcgcagtaaccaactggatagtcgagctgagatcctcgagccgctcgtccgggcccgccgtcgccgctcttctcatacgccgtctcagcaagcgggctctggaaggtgcagctgtactgcccggtcatagccatgggtatggaggaagctgcagagacaccacaggatgagcgtctcctcttctcactcatttatcaacaagtcgagtgtgtcattcagctggcctatagaacgacaagaagggataactggatcgatgtcgaggtgaaggtggacaacgtgtgatgtggactctttggtctccgagacccttatggcggagcgtggatatggctccgaagagaagcacttcccatctcgtgtgatgctgcaaatcacacctacgcaacaatctgatgtgctctctgtttctgtcggcaagtccaacgacaaccccacacacgaattcggcatcgagaagggctttgagggttcatttgaacccccaaacgcatttggcctgaaggcgtcagtaactgaaagccttacactagccatgaagccctggaaattcgagcagtctgtgcatgggaacactgcaaccttgaactggtttcttcatgacggtgtcaatgggagggaggtttattcctcgaaaccttcaaagatttctctgctccaaccgaaggcctggttccgtgacaggtactcaaatgcgtaccgccccttcacaaagcagggcggtgtcattttcgcacgtgacgagtatggagacagtgtctggtggaaggtatgtggtgcagcgttaggacagactatgaactggcaaatccgaggctggatttggctaacctactggcctaacaaacaacggaccttccacaacgaaacgagatggcttgaatttagagaatgcctgcagctcccccttaccaagttttcataaaccacttgtactctgaaatgaatggctgtatagcagtgtagaaccatagacatcgaaaaaatccatgcatatttggggggcacaaaaaagagtatgatactctattgtaactgaatgtactgttacatcgaaatgacttcctcatatgcctgccttgcgatttaatgcaatcctaaaaatttattcctttttcttgagctaatttagagttcaccccacccgaacaaatgtgcaatattaacagccaagagagctcattaaacacgaactcatccctactatagtacaggaactcaacacaaagga

SEQ ID NO: 205931 - DNA, 3396 bp, Zea Mays
aatgctactggcaggcctgatgaaaatttttctatagaagtgaatgggccattgcttttcacttcaaacgaggttattcaagatgtaaggcttctgtctatattcctccaaaagggccagctgagatctaatatctgttatcatcctgagaatttgaccagtctagaggcagaacttcagcttaattttcagaaaagaagaggccatggtttgctgtcaataatccgtcccaaatttagtggcgtgcttggtgaggcacttgatatagctgctcgatggagcggtgatgttggctggggcaacacagattctgggaagatgatttcaacattattacgtcgcctcctattctcatatgtagtggcacaacaatcaaatgaagcacaactcaagaggaggccaaggcgggcacaatactgctcaattactatggaaaaatctatcctggagcaagctaatagcaaatatgaggttcaaggggagtatgtttttcctggaacgcgtgatagatttcctgtggaaagtcagagtaatgggttcatagagaaagcaatgggagggcatcttggtagcataatgtcttcgatgggcaggtggaggatgagactagaggttcctggtgctgaagtagctgaaatgcttcctttagcaaggcttctttcacggagtacagacccagttatccgttcgagatcaaaggaactttttatgcaatgtctgcattctgttgggttcaatgctgaaagtcttaatgatcagctaaaggcattagaaatttatcatgattggttggatgatgacacaatggaagatatagcatttcctggcttagctgaactaagaggctattggcgtggctctctggatgccagtggaggtggcaatggggataccatggcagattttgatttcaatggtgaagattgggaatggggaacttacaagacacagcgagttctcgcatctggttcattcagcaataatgatggtctgcgtcttgataaattatttatccagaaagataatgccacccttcatgctgatggttcgattcttgggccgcttacaaatcttcactttgctgtgcttaacttcccagtcggccttataccagctttagttcaggctatagaatcatcaaccacagactcaattcattttctgaggcaatggttgactcccatcaaaggtattttgcacatggagggagacttgagaggtactctggcaaaaccagaatgtgatgttcaaataaggctgcttgatggcactattggaggcatcgatcttggaagagcagaagtattagcttctgttacccctacaagtcgtttcgtatttgatgcaaatttcgaaccgacaatacaaagtggacatgtaaacattcaaggtagtataccagtcacttatgtagacaacagctcgatagaggaaagtccagaagaggcagatgggaaacaaggtatcataagaatccctgtttgggcaagagacagaggatcatcgaatgagatcagtgaagcaagaatggtgagagacaagacagaggagggctgggaatttcaattagctgaaaaacttaaaggtttaagttataacatgctagaaccaggtgaagtgaggatagatgcagatataaaggatgggggtatgatgctgataactgcattgagtccttatgcaaactggcttcaaggctatgctgatgttttcctgcaggttaaaggcactgttgatcagcctgttgttgatggatcagcaacgtttaaccgggctattgtgaactctccttttcttcggacaccattgacaaattttgcgggtacaattcaagtcatatccaacagactatgcatcagttcaatggaaagcagggttgggaggaaagggagattgtcgatgaaaggaagcctacctcttaaaaatagcgagccatctgccaatgacaagattgatttgaaatgtgaagttctggacatacgagcaaaaaatattttgagtggccaagtagacagccagctacaagttacaggctcaattttgcgaccagatctttctggaatgatccggttgagtcatggtgaagcatatttgccccatgataaaggcaatggtgctgctgtcactaggttgacttcaaacaagtcgagttatcttctttctggttttgaccaatcaaccacttcgcaggatgtctcacgaattctggggtcactgtcaacatcggcagaaagagatcaatcagacacagaaaagactcttgagcatggaagttttaatccaaacattgatgcacggctaaatgatctgaagctcaccttgggaccagaattgaggattgtttatcctttaattctgaattttgctgtcagtggtgacctagagcttaatgggatggttcatccaaagtatctaagacctaagggcatcttaacatttgaaaatggtgaggtcaacctggtagctacgcaggttagacttaaaaatgatcatttaaatgcagcaaaatttgaacctgatcttggtttggatcctgttcttgatctcgttcttgttggatctgaatggcaattcaaaatccaaagtcgagcaagcatgtggcaagacaatctggtggtaacctcaacacgctctgtggaccaggatgttctgtcacctagtgaggctgcaaaggtttttgaatcgcagcttgcggaatcattattagaaggtgacggacagcttgcgttcaagaagcttgcaactgcaacgctggaaactttgatgccaaggatagaaggcaagggtgagtttggacaggcacggtggcgactggtttatgctccgcagatcccaagtttactctctgtggatccaacagttgatccgctaaaatctctggcaaacaatatctcttttgccacggaggtcgaagtgcagctcggaaaacgccttcaggcctctgtcgtcaggcaaatgaaagattcagaaatggcgatgcagtggacgctgatatatcagctaaccagtaggctccgtgttctcttccagtctactccatccaataggcttctcttcgagtattcagcaacatcacaggaatgattcattttttgttattgcgcacagcaagaattggttgtagcagctgcgtcgtacaaagattaggtggcctgataatcgttttttttgtagataagcaagctttgataagttgtacgtgtacaatcgctcagttgtattgtatttacattctttctcggaaacaaagtttctgagcctgtaaataataggtagcgatcttagcgtcgggtgtagagagaagtataaatgaatgaacgtttcctgtctcttgcgttgctgtccatacgtgaaattggctttcgttactgaccagttagagcaactagtcagatg

SEQ ID NO: 205932 - DNA, 6562 bp, Zea Mays
ccgacgcgccgctcgctccccacccaatgtcgcactgcccccgcgcctcactctccctcgcgccgccgtcgcccttcctcttcccccactgcccgtctccgcgccggcggcggcgcccgcgcggtcgcagcctccacctgacctcgcgccccctcctcaccctcgctcgcttcgacccgccgcggctgttccgcctcaaggtctccgactccagcgcctcccccggcgaggccgctcacgcccacgcccaccacagcaaccaccgcgcccacgcccaccacagccccgcgccgtcgctgctcccgtggccgcgggccctgatcggctcgctcgcgccggtatggcgggaggggctcttcctcgtgcgctgctccgtcttcgccgccgtggtctccgtcgccggcgcgctctcctggttcgcgcagctccgggcccgctccttcgtcgaggcccgcctcctgcccgctgcatgctccgcgctcagcgagtacctccagcgggaggtccgcctcggcaaggtgcgcagcatctcgccgatcgggatcacgctgcagacctgctccatcggcccgcacgaggaggagttctcctgcgccgaggtgcccgtcatgaagattagggtacgccccttcgccagtcttaggaggggaagggtcgtcgtggacgccgtgctgtccgagccctccgccctggtggcgcagaagaaggatttctcgtggctcgggattcccgcgccctctgagggcacggtcaagaggcactcgggggaggagggcatagactaccgcaccaagacgaggaggcttgccagggagaaggccgcggagcaatggaacgaggagagggataaagccgcaagggaagccgctgaaaagggatacaccattccgagcggccaatcggttcctctgtccagtaatgagattctggaggctgatgggcctaccgagattgggaagtccagtccacccctttgcgctgatcaaatgcacaagaatgatcatcacttggcaacaggcatcgactctggttcaaagcatgcagatttggagaaatcttttggcttcaaatcgcccattccagggatcaacctctggtctagggtgatttcaagccctagtaggctcaggtacatgagaaaggctcccagcaaggttattccagatgttgataattcttctcagcaaaggattcttagacgcagtgcagatgctgctgtatcatattttcagaacacaggtcacattaatattgatgattcatctcctggaccaggaaaaggctcgtcggatggtggtcatgccaatgttggtggcagtggaatcaattcaaatgatgaaactgtcagcaactctaagactgcatcaacgagtttggctgaatccccatcgcatagtcaactatctagtcagtgcagttcaagtaatttggataacttgttactatggcacaatttggaagatctgcagatcggtcaggccaagaatccttctggaaataagcctgttccacaccaagaaaatatttttgggaattttggttcatgcacacatgctcacaactgggtgccattttggccgttccaattaaagagttgtcctgtcagttttaattcaccttgggcatctctggaccttcaaattgagaaattgaagtcacaatttgccattggtcctggagatttctctgctgaacttacagaaggggttagtgagatccatcctggtggtgttcagaatgcacttccaatcaccctggattctgtgtatttcaatggaggtaacttgatgcttctgggatatggtgatcaagaacccagagaaatgaagcatgctagtggtcatgtcaagttcaaaaacaattataatcgtgtacacgtgcatgtaactgggaattgcatggagtggaggcaagaccgatcttctcaaggagggggttatctttctacagatgtatttgttgacatagctgaggaaacatggcatgctaatctcaatatagtcgatgcatttgccccgctgtttgaaagaattttagaaatacctgttgtttggcacaaaggaagagctaccggtgaggtgcatatctgtatgtcaaagggcgatagttttccaagcattcatggtcagcttgatgtgaaaggtcttgcttttcagatattggatgccccatcatcattttctgatattgtggcaaaattatcatttcgtggtcaaagagtatttctgcacaatgcaagtgggtggtttggtgacgctccagttgaagcttctggagatttgggactaaatcctgaggatggagagtttcatctaatgtgccaggttccatccgttgaagttaacgcacttatgaggacaatgaaaatgaaacctcttatgttcccattggctggttcagttactgctgtatttaactgtcaagggccccttgatgctcctgtttttgttggaagtgggattgtctcaaggaagtctttttcagtatctggtatgcctccatctgctgcttctgaagctgtgatgcaaaacaaagaggctggcgcagttgctgcatttgaccatattccattctctcatgtgtcggccaatttcacgttcaaccttgacaactctgttgctgatttatatggtattagagcatgcctattggatggcggagaaattcgaggggctggtaacgcatggatttgcccagagggggagggtgatgattctgctatggatattaatttgtctgggactattctgcttgataaagtattgcatcgttacattcctggaggaatccaactgattccactcaagattggagagctcaatggagagactagactttctggttcccttattagaccgaagtttgatatcaaatgggctgcaccaaatgcagaagattctttttcagatgcacgtggcaatattgttattgcacatgattacattatggtcaactcttcatcagtctcctttgatttaaatagtcgagttcaaacatcatatattaatgactacttgttgaacaaggagacttatcaaatgaaaaaaatcatgccactaattgtggagggtgttgatttggatttacgtatgcgaggctttgagtttgctcatatagcctcttcaattccttttgattcaccacgtccattacatttgaaagcatctggaagggtcaaatttcaaggaaaaatcatgaaatctagcaatatagctgatggcaatatcaatggtgttcttcaaagtaacattgaccaaaataagcttgagaccaatgcgtcaaagcttgtaggcgacatatctctttctggaattaaactcaaccagctcatgctagcgccacaatctactggttttctttccatatcacgggattctatgatggttcggaatttgacactcgatgagctggagtttgcttcattgcgcggatttgttcaaaaggtgtgttggatgattatgctaaggcagaacttcagcttaattttcagaaaagaagaggccatggtttgctgtcaataatccgtcccaaatttagtggcgtgcttggtgaggcacttgatatagctgctcgatggagcggtgatgttattactatggaaaaatctatcctggagcaagctaatagcaaatatgaggttcaaggggagtatgtttttcctggaacgcgtgatagatttcctgtggaaagtcagagtaatgggttcatagagaaagcaatgggagggcatcttggtagcataatgtcttcgatgggcaggtggaggatgagactagaggttcctggtgctgaagtagctgaaatgcttcctttagcaaggcttctttcacggagtacagacccagttatccgttcgagatcaaaggaactttttatgcaatgtctgcattctgttgggttcaatgctgaaagtcttaatgatcagctaaaggcattagaaatttatcatgattggttggatgatgacacaatggaagatatagcatttcctggcttagctgaactaagaggctattggcgtggctctctggatgccagtggaggtggcaatggggataccatggcagattttgatttcaatggtgaagattgggaatggggaacttacaagacacagcgagttctcgcatctggttcattcagcaataatgatggtctgcgtcttgataaattatttatccagaaagataatgccacccttcatgctgatggttcgattcttgggccgcttacaaatcttcactttgctgtgcttaacttcccagtcggccttataccagctttagttcaggctatagaatcatcaaccacagactcaattcattttctgaggcaatggttgactcccatcaaaggtattttgcacatggagggagacttgagaggtactctggcaaaaccagaatgtgatgttcaaataaggctgcttgatggcactattggaggcatcgatcttggaagagcagaagtattagcttctgttacccctacaagtcgtttcgtatttgatgcaaatttcgaaccgacaatacaaagtggacatgtaaacattcaaggtagtataccagtcacttatgtagacaacagctcgatagaggaaagtccagaagaggcagatgggaaacaaggtatcataagaatccctgtttgggcaagagacagaggatcatcgaatgagatcagtgaagcaagaatggtgagagacaagacagaggagggctgggaatttcaattagctgaaaaacttaaaggtttaagttataacatgctagaaccaggtgaagtgaggatagatgcagatataaaggatgggggtatgatgctgataactgcattgagtccttatgcaaactggcttcaaggctatgctgatgttttcctgcaggttaaaggcactgttgatcagcctgttgttgatggatcagcaacgtttaaccgggctattgtgaactctccttttcttcggacaccattgacaaattttgcgggtacaattcaagtcatatccaacagactatgcatcagttcaatggaaagcagggttgggaggaaagggagattgtcgatgaaaggaagcctacctcttaaaaatagcgagccatctgccaatgacaagattgatttgaaatgtgaagttctggacatacgagcaaaaaatattttgagtggccaagtagacagccagctacaagttacaggctcaattttgcgaccagatctttctggaatgatccggttgagtcatggtgaagcatatttgccccatgataaaggcaatggtgctgctgtcactaggttgacttcaaacaagtcgagttatcttctttctggttttgaccaatcaaccacttcgcaggatgtctcacgaattctggggtcactgtcaacatcggcagaaagagatcaatcagacacagaaaagactcttgagcatggaagttttaatccaaacattgatgcacggctaaatgatctgaagctcaccttgggaccagaattgaggattgtttatcctttaattctgaattttgctgtcagtggtgacctagagcttaatgggatggttcatccaaagtatctaagacctaagggcatcttaacatttgaaaatggtgaggtcaacctggtagctacgcaggttagacttaaaaatgatcatttaaatgcagcaaaatttgaacctgatcttggtttggatcctgttcttgatctcgttcttgttggatctgaatggcaattcaaaatccaaagtcgagcaagcatgtggcaagacaatctggtggtaacctcaacacgctctgtggaccaggatgttctgtcacctagtgaggctgcaaaggtttttgaatcgcagcttgcggaatcattattagaaggtgacggacagcttgcgttcaagaagcttgcaactgcaacgctggaaactttgatgccaaggatagaaggcaagggtgagtttggacaggcacggtggcgactggtttatgctccgcagatcccaagtttactctctgtggatccaacagttgatccgctaaaatctctggcaaacaatatctcttttgccacggaggtcgaagtgcagctcggaaaacgccttcaggcctctgtcgtcaggcaaatgaaagattcagaaatggcgatgcagtggacgctgatatatcagctaaccagtaggctccgtgttctcttccagtctactccatccaataggcttctcttcgagtattcagcaacatcacaggaatgattcattttttgttattgcgcacagcaagaattggttgtagcagctgcgtcgtacaaagattaggtggcctgataatcgttttttttgtagataagcaagctttgataagttgtacgtgtacaatcgctcagttgtattgtatttacattctttctcggaaacaaagtttctgagcctgtaaataataggtagcgatcttagcgtcgggtgtagagagaagtataaatgaatgaacgtttcctgtctcttgcgttgctgtccatacgtgaaattggctttcgttactgaccagttagagcaactagtcagatg

SEQ ID NO: 205933 - DNA, 6794 bp, Zea Mays
ctcagaccactactctccccttcctctcgccgcacgcaaatggtcacctaggcgcgcgaggccgacgcgccgctcgctccccacccaatgtcgcactgcccccgcgcctcactctccctcgcgccgccgtcgcccttcctcttcccccactgcccgtctccgcgccggcggcggcgcccgcgcggtcgcagcctccacctgacctcgcgccccctcctcaccctcgctcgcttcgacccgccgcggctgttccgcctcaaggtctccgactccagcgcctcccccggcgaggccgctcacgcccacgcccaccacagcaaccaccgcgcccacgcccaccacagccccgcgccgtcgctgctcccgtggccgcgggccctgatcggctcgctcgcgccggtatggcgggaggggctcttcctcgtgcgctgctccgtcttcgccgccgtggtctccgtcgccggcgcgctctcctggttcgcgcagctccgggcccgctccttcgtcgaggcccgcctcctgcccgctgcatgctccgcgctcagcgagtacctccagcgggaggtccgcctcggcaaggtgcgcagcatctcgccgatcgggatcacgctgcagacctgctccatcggcccgcacgaggaggagttctcctgcgccgaggtgcccgtcatgaagattagggtacgccccttcgccagtcttaggaggggaagggtcgtcgtggacgccgtgctgtccgagccctccgccctggtggcgcagaagaaggatttctcgtggctcgggattcccgcgccctctgagggcacggtcaagaggcactcgggggaggagggcatagactaccgcaccaagacgaggaggcttgccagggagaaggccgcggagcaatggaacgaggagagggataaagccgcaagggaagccgctgaaaagggatacaccattccgagcggccaatcggttcctctgtccagtaatgagattctggaggctgatgggcctaccgagattgggaagtccagtccacccctttgcgctgatcaaatgcacaagaatgatcatcacttggcaacaggcatcgactctggttcaaagcatgcagatttggagaaatcttttggcttcaaatcgcccattccagggatcaacctctggtctagggtgatttcaagccctagtaggctcaggtacatgagaaaggctcccagcaaggttattccagatgttgataattcttctcagcaaaggattcttagacgcagtgcagatgctgctgtatcatattttcagaacacaggtcacattaatattgatgattcatctcctggaccaggaaaaggctcgtcggatggtggtcatgccaatgttggtggcagtggaatcaattcaaatgatgaaactgtcagcaactctaagactgcatcaacgagtttggctgaatccccatcgcatagtcaactatctagtcagtgcagttcaagtaatttggataacttgttactatggcacaatttggaagatctgcagatcggtcaggccaagaatccttctggaaataagcctgttccacaccaagaaaatatttttgggaattttggttcatgcacacatgctcacaactgggtgccattttggccgttccaattaaagagttgtcctgtcagttttaattcaccttgggcatctctggaccttcaaattgagaaattgaagtcacaatttgccattggtcctggagatttctctgctgaacttacagaaggggttagtgagatccatcctggtggtgttcagaatgcacttccaatcaccctggattctgtgtatttcaatggaggtaacttgatgcttctgggatatggtgatcaagaacccagagaaatgaagcatgctagtggtcatgtcaagttcaaaaacaattataatcgtgtacacgtgcatgtaactgggaattgcatggagtggaggcaagaccgatcttctcaaggagggggttatctttctacagatgtatttgttgacatagctgaggaaacatggcatgctaatctcaatatagtcgatgcatttgccccgctgtttgaaagaattttagaaatacctgttgtttggcacaaaggaagagctaccggtgaggtgcatatctgtatgtcaaagggcgatagttttccaagcattcatggtcagcttgatgtgaaaggtcttgcttttcagatattggatgccccatcatcattttctgatattgtggcaaaattatcatttcgtggtcaaagagtatttctgcacaatgcaagtgggtggtttggtgacgctccagttgaagcttctggagatttgggactaaatcctgaggatggagagtttcatctaatgtgccaggttccatccgttgaagttaacgcacttatgaggacaatgaaaatgaaacctcttatgttcccattggctggttcagttactgctgtatttaactgtcaagggccccttgatgctcctgtttttgttggaagtgggattgtctcaaggaagtctttttcagtatctggtatgcctccatctgctgcttctgaagctgtgatgcaaaacaaagaggctggcgcagttgctgcatttgaccatattccattctctcatgtgtcggccaatttcacgttcaaccttgacaactctgttgctgatttatatggtattagagcatgcctattggatggcggagaaattcgaggggctggtaacgcatggatttgcccagagggggagggtgatgattctgctatggatattaatttgtctgggactattctgcttgataaagtattgcatcgttacattcctggaggaatccaactgattccactcaagattggagagctcaatggagagactagactttctggttcccttattagaccgaagtttgatatcaaatgggctgcaccaaatgcagaagattctttttcagatgcacgtggcaatattgttattgcacatgattacattatggtcaactcttcatcagtctcctttgatttaaatagtcgagttcaaacatcatatattaatgactacttgttgaacaaggagacttatcaaatgaaaaaaatcatgccactaattgtggagggtgttgatttggatttacgtatgcgaggctttgagtttgctcatatagcctcttcaattccttttgattcaccacgtccattacatttgaaagcatctggaagggtcaaatttcaaggaaaaatcatgaaatctagcaatatagctgatggcaatatcaatggtgttcttcaaagtaacattgaccaaaataagcttgagaccaatgcgtcaaagcttgtaggcgacatatctctttctggaattaaactcaaccagctcatgctagcgccacaatctactggttttctttccatatcacgggattctatgatgttgaatgctactggcaggcctgatgaaaatttttctatagaagtgaatgggccattgcttttcacttcaaacgaggttattcaagatgtaaggcttctgtctatattcctccaaaagggccagctgagatctaatatctgttatcatcctgagaatttgaccagtctagaggttcggaatttgacactcgatgagctggagtttgcttcattgcgcggatttgttcaaaaggtgtgttggatgattatgctaaggcagaacttcagcttaattttcagaaaagaagaggccatggtttgctgtcaataatccgtcccaaatttagtggcgtgcttggtgaggcacttgatatagctgctcgatggagcggtgatgttattactatggaaaaatctatcctggagcaagctaatagcaaatatgaggttcaaggggagtatgtttttcctggaacgcgtgatagatttcctgtggaaagtcagagtaatgggttcatagagaaagcaatgggagggcatcttggtagcataatgtcttcgatgggcaggtggaggatgagactagaggttcctggtgctgaagtagctgaaatgcttcctttagcaaggcttctttcacggagtacagacccagttatccgttcgagatcaaaggaactttttatgcaatgtctgcattctgttgggttcaatgctgaaagtcttaatgatcagctaaaggcattagaaatttatcatgattggttggatgatgacacaatggaagatatagcatttcctggcttagctgaactaagaggctattggcgtggctctctggatgccagtggaggtggcaatggggataccatggcagattttgatttcaatggtgaagattgggaatggggaacttacaagacacagcgagttctcgcatctggttcattcagcaataatgatggtctgcgtcttgataaattatttatccagaaagataatgccacccttcatgctgatggttcgattcttgggccgcttacaaatcttcactttgctgtgcttaacttcccagtcggccttataccagctttagttcaggctatagaatcatcaaccacagactcaattcattttctgaggcaatggttgactcccatcaaaggtattttgcacatggagggagacttgagaggtactctggcaaaaccagaatgtgatgttcaaataaggctgcttgatggcactattggaggcatcgatcttggaagagcagaagtattagcttctgttacccctacaagtcgtttcgtatttgatgcaaatttcgaaccgacaatacaaagtggacatgtaaacattcaaggtagtataccagtcacttatgtagacaacagctcgatagaggaaagtccagaagaggcagatgggaaacaaggtatcataagaatccctgtttgggcaagagacagaggatcatcgaatgagatcagtgaagcaagaatggtgagagacaagacagaggagggctgggaatttcaattagctgaaaaacttaaaggtttaagttataacatgctagaaccaggtgaagtgaggatagatgcagatataaaggatgggggtatgatgctgataactgcattgagtccttatgcaaactggcttcaaggctatgctgatgttttcctgcaggttaaaggcactgttgatcagcctgttgttgatggatcagcaacgtttaaccgggctattgtgaactctccttttcttcggacaccattgacaaattttgcgggtacaattcaagtcatatccaacagactatgcatcagttcaatggaaagcagggttgggaggaaagggagattgtcgatgaaaggaagcctacctcttaaaaatagcgagccatctgccaatgacaagattgatttgaaatgtgaagttctggacatacgagcaaaaaatattttgagtggccaagtagacagccagctacaagttacaggctcaattttgcgaccagatctttctggaatgatccggttgagtcatggtgaagcatatttgccccatgataaaggcaatggtgctgctgtcactaggttgacttcaaacaagtcgagttatcttctttctggttttgaccaatcaaccacttcgcaggatgtctcacgaattctggggtcactgtcaacatcggcagaaagagatcaatcagacacagaaaagactcttgagcatggaagttttaatccaaacattgatgcacggctaaatgatctgaagctcaccttgggaccagaattgaggattgtttatcctttaattctgaattttgctgtcagtggtgacctagagcttaatgggatggttcatccaaagtatctaagacctaagggcatcttaacatttgaaaatggtgaggtcaacctggtagctacgcaggttagacttaaaaatgatcatttaaatgcagcaaaatttgaacctgatcttggtttggatcctgttcttgatctcgttcttgttggatctgaatggcaattcaaaatccaaagtcgagcaagcatgtggcaagacaatctggtggtaacctcaacacgctctgtggaccaggatgttctgtcacctagtgaggctgcaaaggtttttgaatcgcagcttgcggaatcattattagaaggtgacggacagcttgcgttcaagaagcttgcaactgcaacgctggaaactttgatgccaaggatagaaggcaagggtgagtttggacaggcacggtggcgactggtttatgctccgcagatcccaagtttactctctgtggatccaacagttgatccgctaaaatctctggcaaacaatatctcttttgccacggaggtcgaagtgcagctcggaaaacgccttcaggcctctgtcgtcaggcaaatgaaagattcagaaatggcgatgcagtggacgctgatatatcagctaaccagtaggctccgtgttctcttccagtctactccatccaataggcttctcttcgagtattcagcaacatcacaggaatgattcattttttgttattgcgcacagcaagaattggttgtagcagctgcgtcgtacaaagattaggtggcctgataatcgttttttttgtagataagcaagctttgataagttgtacgtgtacaatcgctcagttgtattgtatttacattctttctcggaaacaaagtttctgagcctgtaaataataggtagcgatcttagcgtcgggtgtagagagaagtataaatgaatgaacgtttcctgtctcttgcgttgctgtccatacgtgaaattggctttcgttactgaccagttagagcaactagtcagatg

SEQ ID NO: 205934 - DNA, 6711 bp, Zea Mays
ctcagaccactactctccccttcctctcgccgcacgcaaatggtcacctaggcgcgcgaggccgacgcgccgctcgctccccacccaatgtcgcactgcccccgcgcctcactctccctcgcgccgccgtcgcccttcctcttcccccactgcccgtctccgcgccggcggcggcgcccgcgcggtcgcagcctccacctgacctcgcgccccctcctcaccctcgctcgcttcgacccgccgcggctgttccgcctcaaggtctccgactccagcgcctcccccggcgaggccgctcacgcccacgcccaccacagcaaccaccgcgcccacgcccaccacagccccgcgccgtcgctgctcccgtggccgcgggccctgatcggctcgctcgcgccggtatggcgggaggggctcttcctcgtgcgctgctccgtcttcgccgccgtggtctccgtcgccggcgcgctctcctggttcgcgcagctccgggcccgctccttcgtcgaggcccgcctcctgcccgctgcatgctccgcgctcagcgagtacctccagcgggaggtccgcctcggcaaggtgcgcagcatctcgccgatcgggatcacgctgcagacctgctccatcggcccgcacgaggaggagttctcctgcgccgaggtgcccgtcatgaagattagggtacgccccttcgccagtcttaggaggggaagggtcgtcgtggacgccgtgctgtccgagccctccgccctggtggcgcagaagaaggatttctcgtggctcgggattcccgcgccctctgagggcacggtcaagaggcactcgggggaggagggcatagactaccgcaccaagacgaggaggcttgccagggagaaggccgcggagcaatggaacgaggagagggataaagccgcaagggaagccgctgaaaagggatacaccattccgagcggccaatcggttcctctgtccagtaatgagattctggaggctgatgggcctaccgagattgggaagtccagtccacccctttgcgctgatcaaatgcacaagaatgatcatcacttggcaacaggcatcgactctggttcaaagcatgcagatttggagaaatcttttggcttcaaatcgcccattccagggatcaacctctggtctagggtgatttcaagccctagtaggctcaggtacatgagaaaggctcccagcaaggttattccagatgttgataattcttctcagcaaaggattcttagacgcagtgcagatgctgctgtatcatattttcagaacacaggtcacattaatattgatgattcatctcctggaccaggaaaaggctcgtcggatggtggtcatgccaatgttggtggcagtggaatcaattcaaatgatgaaactgtcagcaactctaagactgcatcaacgagtttggctgaatccccatcgcatagtcaactatctagtcagtgcagttcaagtaatttggataacttgttactatggcacaatttggaagatctgcagatcggtcaggccaagaatccttctggaaataagcctgttccacaccaagaaaatatttttgggaattttggttcatgcacacatgctcacaactgggtgccattttggccgttccaattaaagagttgtcctgtcagttttaattcaccttgggcatctctggaccttcaaattgagaaattgaagtcacaatttgccattggtcctggagatttctctgctgaacttacagaaggggttagtgagatccatcctggtggtgttcagaatgcacttccaatcaccctggattctgtgtatttcaatggaggtaacttgatgcttctgggatatggtgatcaagaacccagagaaatgaagcatgctagtggtcatgtcaagttcaaaaacaattataatcgtgtacacgtgcatgtaactgggaattgcatggagtggaggcaagaccgatcttctcaaggagggggttatctttctacagatgtatttgttgacatagctgaggaaacatggcatgctaatctcaatatagtcgatgcatttgccccgctgtttgaaagaattttagaaatacctgttgtttggcacaaaggaagagctaccggtgaggtgcatatctgtatgtcaaagggcgatagttttccaagcattcatggtcagcttgatgtgaaaggtcttgcttttcagatattggatgccccatcatcattttctgatattgtggcaaaattatcatttcgtggtcaaagagtatttctgcacaatgcaagtgggtggtttggtgacgctccagttgaagcttctggagatttgggactaaatcctgaggatggagagtttcatctaatgtgccaggttccatccgttgaagttaacgcacttatgaggacaatgaaaatgaaacctcttatgttcccattggctggttcagttactgctgtatttaactgtcaagggccccttgatgctcctgtttttgttggaagtgggattgtctcaaggaagtctttttcagtatctggtatgcctccatctgctgcttctgaagctgtgatgcaaaacaaagaggctggcgcagttgctgcatttgaccatattccattctctcatgtgtcggccaatttcacgttcaaccttgacaactctgttgctgatttatatggtattagagcatgcctattggatggcggagaaattcgaggggctggtaacgcatggatttgcccagagggggagggtgatgattctgctatggatattaatttgtctgggactattctgcttgataaagtattgcatcgttacattcctggaggaatccaactgattccactcaagattggagagctcaatggagagactagactttctggttcccttattagaccgaagtttgatatcaaatgggctgcaccaaatgcagaagattctttttcagatgcacgtggcaatattgttattgcacatgattacattatggtcaactcttcatcagtctcctttgatttaaatagtcgagttcaaacatcatatattaatgactacttgttgaacaaggagacttatcaaatgaaaaaaatcatgccactaattgtggagggtgttgatttggatttacgtatgcgaggctttgagtttgctcatatagcctcttcaattccttttgattcaccacgtccattacatttgaaagcatctggaagggtcaaatttcaaggaaaaatcatgaaatctagcaatatagctgatggcaatatcaatggtgttcttcaaagtaacattgaccaaaataagcttgagaccaatgcgtcaaagcttgtaggcgacatatctctttctggaattaaactcaaccagctcatgctagcgccacaatctactggttttctttccatatcacgggattctatgatgttgaatgctactggcaggcctgatgaaaatttttctatagaagtgaatgggccattgcttttcacttcaaacgaggttattcaagatgtaaggcttctgtctatattcctccaaaagggccagctgagatctaatatctgttatcatcctgagaatttgaccagtctagaggcagaacttcagcttaattttcagaaaagaagaggccatggtttgctgtcaataatccgtcccaaatttagtggcgtgcttggtgaggcacttgatatagctgctcgatggagcggtgatgttattactatggaaaaatctatcctggagcaagctaatagcaaatatgaggttcaaggggagtatgtttttcctggaacgcgtgatagatttcctgtggaaagtcagagtaatgggttcatagagaaagcaatgggagggcatcttggtagcataatgtcttcgatgggcaggtggaggatgagactagaggttcctggtgctgaagtagctgaaatgcttcctttagcaaggcttctttcacggagtacagacccagttatccgttcgagatcaaaggaactttttatgcaatgtctgcattctgttgggttcaatgctgaaagtcttaatgatcagctaaaggcattagaaatttatcatgattggttggatgatgacacaatggaagatatagcatttcctggcttagctgaactaagaggctattggcgtggctctctggatgccagtggaggtggcaatggggataccatggcagattttgatttcaatggtgaagattgggaatggggaacttacaagacacagcgagttctcgcatctggttcattcagcaataatgatggtctgcgtcttgataaattatttatccagaaagataatgccacccttcatgctgatggttcgattcttgggccgcttacaaatcttcactttgctgtgcttaacttcccagtcggccttataccagctttagttcaggctatagaatcatcaaccacagactcaattcattttctgaggcaatggttgactcccatcaaaggtattttgcacatggagggagacttgagaggtactctggcaaaaccagaatgtgatgttcaaataaggctgcttgatggcactattggaggcatcgatcttggaagagcagaagtattagcttctgttacccctacaagtcgtttcgtatttgatgcaaatttcgaaccgacaatacaaagtggacatgtaaacattcaaggtagtataccagtcacttatgtagacaacagctcgatagaggaaagtccagaagaggcagatgggaaacaaggtatcataagaatccctgtttgggcaagagacagaggatcatcgaatgagatcagtgaagcaagaatggtgagagacaagacagaggagggctgggaatttcaattagctgaaaaacttaaaggtttaagttataacatgctagaaccaggtgaagtgaggatagatgcagatataaaggatgggggtatgatgctgataactgcattgagtccttatgcaaactggcttcaaggctatgctgatgttttcctgcaggttaaaggcactgttgatcagcctgttgttgatggatcagcaacgtttaaccgggctattgtgaactctccttttcttcggacaccattgacaaattttgcgggtacaattcaagtcatatccaacagactatgcatcagttcaatggaaagcagggttgggaggaaagggagattgtcgatgaaaggaagcctacctcttaaaaatagcgagccatctgccaatgacaagattgatttgaaatgtgaagttctggacatacgagcaaaaaatattttgagtggccaagtagacagccagctacaagttacaggctcaattttgcgaccagatctttctggaatgatccggttgagtcatggtgaagcatatttgccccatgataaaggcaatggtgctgctgtcactaggttgacttcaaacaagtcgagttatcttctttctggttttgaccaatcaaccacttcgcaggatgtctcacgaattctggggtcactgtcaacatcggcagaaagagatcaatcagacacagaaaagactcttgagcatggaagttttaatccaaacattgatgcacggctaaatgatctgaagctcaccttgggaccagaattgaggattgtttatcctttaattctgaattttgctgtcagtggtgacctagagcttaatgggatggttcatccaaagtatctaagacctaagggcatcttaacatttgaaaatggtgaggtcaacctggtagctacgcaggttagacttaaaaatgatcatttaaatgcagcaaaatttgaacctgatcttggtttggatcctgttcttgatctcgttcttgttggatctgaatggcaattcaaaatccaaagtcgagcaagcatgtggcaagacaatctggtggtaacctcaacacgctctgtggaccaggatgttctgtcacctagtgaggctgcaaaggtttttgaatcgcagcttgcggaatcattattagaaggtgacggacagcttgcgttcaagaagcttgcaactgcaacgctggaaactttgatgccaaggatagaaggcaagggtgagtttggacaggcacggtggcgactggtttatgctccgcagatcccaagtttactctctgtggatccaacagttgatccgctaaaatctctggcaaacaatatctcttttgccacggaggtcgaagtgcagctcggaaaacgccttcaggcctctgtcgtcaggcaaatgaaagattcagaaatggcgatgcagtggacgctgatatatcagctaaccagtaggctccgtgttctcttccagtctactccatccaataggcttctcttcgagtattcagcaacatcacaggaatgattcattttttgttattgcgcacagcaagaattggttgtagcagctgcgtcgtacaaagattaggtggcctgataatcgttttttttgtagataagcaagctttgataagttgtacgtgtacaatcgctcagttgtattgtatttacattctttctcggaaacaaagtttctgagcctgtaaataataggtagcgatcttagcgtcgggtgtagagagaagtataaatgaatgaacgtttcctgtctcttgcgttgctgtccatacgtgaaattggctttcgttactgaccagttagagcaactagtcagatg

SEQ ID NO: 205935 - DNA, 6674 bp, Zea Mays
ctcagaccactactctccccttcctctcgccgcacgcaaatggtcacctaggcgcgcgaggccgacgcgccgctcgctccccacccaatgtcgcactgcccccgcgcctcactctccctcgcgccgccgtcgcccttcctcttcccccactgcccgtctccgcgccggcggcggcgcccgcgcggtcgcagcctccacctgacctcgcgccccctcctcaccctcgctcgcttcgacccgccgcggctgttccgcctcaaggtctccgactccagcgcctcccccggcgaggccgctcacgcccacgcccaccacagcaaccaccgcgcccacgcccaccacagccccgcgccgtcgctgctcccgtggccgcgggccctgatcggctcgctcgcgccggtatggcgggaggggctcttcctcgtgcgctgctccgtcttcgccgccgtggtctccgtcgccggcgcgctctcctggttcgcgcagctccgggcccgctccttcgtcgaggcccgcctcctgcccgctgcatgctccgcgctcagcgagtacctccagcgggaggtccgcctcggcaaggtgcgcagcatctcgccgatcgggatcacgctgcagacctgctccatcggcccgcacgaggaggagttctcctgcgccgaggtgcccgtcatgaagattagggtacgccccttcgccagtcttaggaggggaagggtcgtcgtggacgccgtgctgtccgagccctccgccctggtggcgcagaagaaggatttctcgtggctcgggattcccgcgccctctgagggcacggtcaagaggcactcgggggaggagggcatagactaccgcaccaagacgaggaggcttgccagggagaaggccgcggagcaatggaacgaggagagggataaagccgcaagggaagccgctgaaaagggatacaccattccgagcggccaatcggttcctctgtccagtaatgagattctggaggctgatgggcctaccgagattgggaagtccagtccacccctttgcgctgatcaaatgcacaagaatgatcatcacttggcaacaggcatcgactctggttcaaagcatgcagatttggagaaatcttttggcttcaaatcgcccattccagggatcaacctctggtctagggtgatttcaagccctagtaggctcaggtacatgagaaaggctcccagcaaggttattccagatgttgataattcttctcagcaaaggattcttagacgcagtgcagatgctgctgtatcatattttcagaacacaggtcacattaatattgatgattcatctcctggaccaggaaaaggctcgtcggatggtggtcatgccaatgttggtggcagtggaatcaattcaaatgatgaaactgtcagcaactctaagactgcatcaacgagtttggctgaatccccatcgcatagtcaactatctagtcagtgcagttcaagtaatttggataacttgttactatggcacaatttggaagatctgcagatcggtcaggccaagaatccttctggaaataagcctgttccacaccaagaaaatatttttgggaattttggttcatgcacacatgctcacaactgggtgccattttggccgttccaattaaagagttgtcctgtcagttttaattcaccttgggcatctctggaccttcaaattgagaaattgaagtcacaatttgccattggtcctggagatttctctgctgaacttacagaaggggttagtgagatccatcctggtggtgttcagaatgcacttccaatcaccctggattctgtgtatttcaatggaggtaacttgatgcttctgggatatggtgatcaagaacccagagaaatgaagcatgctagtggtcatgtcaagttcaaaaacaattataatcgtgtacacgtgcatgtaactgggaattgcatggagtggaggcaagaccgatcttctcaaggagggggttatctttctacagatgtatttgttgacatagctgaggaaacatggcatgctaatctcaatatagtcgatgcatttgccccgctgtttgaaagaattttagaaatacctgttgtttggcacaaaggaagagctaccggtgaggtgcatatctgtatgtcaaagggcgatagttttccaagcattcatggtcagcttgatgtgaaaggtcttgcttttcagatattggatgccccatcatcattttctgatattgtggcaaaattatcatttcgtggtcaaagagtatttctgcacaatgcaagtgggtggtttggtgacgctccagttgaagcttctggagatttgggactaaatcctgaggatggagagtttcatctaatgtgccaggttccatccgttgaagttaacgcacttatgaggacaatgaaaatgaaacctcttatgttcccatatctggtatgcctccatctgctgcttctgaagctgtgatgcaaaacaaagaggctggcgcagttgctgcatttgaccatattccattctctcatgtgtcggccaatttcacgttcaaccttgacaactctgttgctgatttatatggtattagagcatgcctattggatggcggagaaattcgaggggctggtaacgcatggatttgcccagagggggagggtgatgattctgctatggatattaatttgtctgggactattctgcttgataaagtattgcatcgttacattcctggaggaatccaactgattccactcaagattggagagctcaatggagagactagactttctggttcccttattagaccgaagtttgatatcaaatgggctgcaccaaatgcagaagattctttttcagatgcacgtggcaatattgttattgcacatgattacattatggtcaactcttcatcagtctcctttgatttaaatagtcgagttcaaacatcatatattaatgactacttgttgaacaaggagacttatcaaatgaaaaaaatcatgccactaattgtggagggtgttgatttggatttacgtatgcgaggctttgagtttgctcatatagcctcttcaattccttttgattcaccacgtccattacatttgaaagcatctggaagggtcaaatttcaaggaaaaatcatgaaatctagcaatatagctgatggcaatatcaatggtgttcttcaaagtaacattgaccaaaataagcttgagaccaatgcgtcaaagcttgtaggcgacatatctctttctggaattaaactcaaccagctcatgctagcgccacaatctactggttttctttccatatcacgggattctatgatgttgaatgctactggcaggcctgatgaaaatttttctatagaagtgaatgggccattgcttttcacttcaaacgaggttattcaagatgtaaggcttctgtctatattcctccaaaagggccagctgagatctaatatctgttatcatcctgagaatttgaccagtctagaggttcggaatttgacactcgatgagctggagtttgcttcattgcgcggatttgttcaaaaggcagaacttcagcttaattttcagaaaagaagaggccatggtttgctgtcaataatccgtcccaaatttagtggcgtgcttggtgaggcacttgatatagctgctcgatggagcggtgatgttattactatggaaaaatctatcctggagcaagctaatagcaaatatgaggttcaaggggagtatgtttttcctggaacgcgtgatagatttcctgtggaaagtcagagtaatgggttcatagagaaagcaatgggagggcatcttggtagcataatgtcttcgatgggcaggtggaggatgagactagaggttcctggtgctgaagtagctgaaatgcttcctttagcaaggcttctttcacggagtacagacccagttatccgttcgagatcaaaggaactttttatgcaatgtctgcattctgttgggttcaatgctgaaagtcttaatgatcagctaaaggcattagaaatttatcatgattggttggatgatgacacaatggaagatatagcatttcctggcttagctgaactaagaggctattggcgtggctctctggatgccagtggaggtggcaatggggataccatggcagattttgatttcaatggtgaagattgggaatggggaacttacaagacacagcgagttctcgcatctggttcattcagcaataatgatggtctgcgtcttgataaattatttatccagaaagataatgccacccttcatgctgatggttcgattcttgggccgcttacaaatcttcactttgctgtgcttaacttcccagtcggccttataccagctttagttcaggctatagaatcatcaaccacagactcaattcattttctgaggcaatggttgactcccatcaaaggtattttgcacatggagggagacttgagaggtactctggcaaaaccagaatgtgatgttcaaataaggctgcttgatggcactattggaggcatcgatcttggaagagcagaagtattagcttctgttacccctacaagtcgtttcgtatttgatgcaaatttcgaaccgacaatacaaagtggacatgtaaacattcaaggtagtataccagtcacttatgtagacaacagctcgatagaggaaagtccagaagaggcagatgggaaacaaggtatcataagaatccctgtttgggcaagagacagaggatcatcgaatgagatcagtgaagcaagaatggtgagagacaagacagaggagggctgggaatttcaattagctgaaaaacttaaaggtttaagttataacatgctagaaccaggtgaagtgaggatagatgcagatataaaggatgggggtatgatgctgataactgcattgagtccttatgcaaactggcttcaaggctatgctgatgttttcctgcaggttaaaggcactgttgatcagcctgttgttgatggatcagcaacgtttaaccgggctattgtgaactctccttttcttcggacaccattgacaaattttgcgggtacaattcaagtcatatccaacagactatgcatcagttcaatggaaagcagggttgggaggaaagggagattgtcgatgaaaggaagcctacctcttaaaaatagcgagccatctgccaatgacaagattgatttgaaatgtgaagttctggacatacgagcaaaaaatattttgagtggccaagtagacagccagctacaagttacaggctcaattttgcgaccagatctttctggaatgatccggttgagtcatggtgaagcatatttgccccatgataaaggcaatggtgctgctgtcactaggttgacttcaaacaagtcgagttatcttctttctggttttgaccaatcaaccacttcgcaggatgtctcacgaattctggggtcactgtcaacatcggcagaaagagatcaatcagacacagaaaagactcttgagcatggaagttttaatccaaacattgatgcacggctaaatgatctgaagctcaccttgggaccagaattgaggattgtttatcctttaattctgaattttgctgtcagtggtgacctagagcttaatgggatggttcatccaaagtatctaagacctaagggcatcttaacatttgaaaatggtgaggtcaacctggtagctacgcaggttagacttaaaaatgatcatttaaatgcagcaaaatttgaacctgatcttggtttggatcctgttcttgatctcgttcttgttggatctgaatggcaattcaaaatccaaagtcgagcaagcatgtggcaagacaatctggtggtaacctcaacacgctctgtggaccaggatgttctgtcacctagtgaggctgcaaaggtttttgaatcgcagcttgcggaatcattattagaaggtgacggacagcttgcgttcaagaagcttgcaactgcaacgctggaaactttgatgccaaggatagaaggcaagggtgagtttggacaggcacggtggcgactggtttatgctccgcagatcccaagtttactctctgtggatccaacagttgatccgctaaaatctctggcaaacaatatctcttttgccacggaggtcgaagtgcagctcggaaaacgccttcaggcctctgtcgtcaggcaaatgaaagattcagaaatggcgatgcagtggacgctgatatatcagctaaccagtaggctccgtgttctcttccagtctactccatccaataggcttctcttcgagtattcagcaacatcacaggaatgattcattttttgttattgcgcacagcaagaattggttgtagcagctgcgtcgtacaaagattaggtggcctgataatcgttttttttgtagataagcaagctttgataagttgtacgtgtacaatcgctcagttgtattgtatttacattctttctcggaaacaaagtttctgagcctgtaaataataggtagcgatcttagcgtcgggtgtagagagaagtataaatgaatgaacgtttcctgtctcttgcgttgctgtccatacgtgaaattggctttcgttactgaccagttagagcaactagtcagatg

SEQ ID NO: 205936 - DNA, 3469 bp, Zea Mays
cctcaccgcacttgtggcctggcacgtgctgcgcgcacacccaattctagcccacgcaagcggccgatacgagcgcctactacctctggcgctgccgcgcgctggcgaggccatcgaactagattctagcagcatctacgatgaaccctgctccccggcacccaagcacgtgcatatggcaaagcatgagtttggaaattatttcaagttttatcaaagaatggacttttgataagcagttgagacgaggaacaactcttatgaggcgaacataactatgaactagtaactgggagtccttgattctttaaattttcgtttcccttctcttgttggtagatgttctgtacattacttccctttttctctgctctttgcttctccttggtggcttggtagtcctagctgtgttactggttccaaatatatttttggacatttattactccatattactctgagttgctacctatggtgagttatctttgtaagattgtctccagcagttcaccccatatggtcactcaaaacactgttctgccctgtaagcactgttttgcccccgtaagcactgttttgccccgtagactgcactgtttgcagagtggagtttgaatatgaggatgaggatggttaagctgttggagatagcctaacgagtttgtttgtccaacttgcccctgcatgtgtgctgtatgcatattattgttgccattttacatgtttttcatgattttcaaaaaatgggtgctggaaggaagattgaaaccttttttactgcaacaccaagtgcacagacacaaaatcaaaccaatgaaaggtatggaacatatcctgttgctgcccgtaatcttcgggaagatgagctaggaggagtgatttttggctgcaaacacaacacaatcggtgaatgcctctctaaacagctgtttggtttgccttcaagccatttctcatatgtgaagaatgtcaaacctggcatgcctctatttctgttcaattatagcgatcgaaaaatgcatggaatttatgaggctgcaagtgctggcaagcttaacattgaccaatttgcttggagtgatggtggtagaataaagacacaatttcctgcacaggtcctcatctctatgaagactgcctgccttccagttccagaatctcaattccaaagtgtgatcagtggcaattattacaaacctcggcacttcttctttgagctagaccatgaacaaacaagagctttgatatttttgtttaagcctgcccctgttcatgatgtttcaaacaaatgtcatccttccaaatctattcaatctccaatagtcgaagcatatgtcaatcctgatggtgaatatgctagtgagagtagaacgtcaacgagccaccttgacaaggaggcttctaactgggatgatgttacgaccaaggaaggaactgaatttgtcaataatgaccatccacatattaatccaccacatgttgaacaatatggtgaagtggctgttacgcagaaacaacaagatatgtttgttttacgacagcatgaggctgaatcctccaaggacactgtggattctgcttcaaataaatcaatgcctcaagaagcacagtttgatgccactctccccacagacccatctaattccacttcagtgggtgatgtatgtattaaagacctgacatcactggggcaatctcgtggaaatgctgagctgcttcacattgtcaaagagttatccaagaggaaccaagcaatggagaaaaaactgtctgagtcagataaagaaatactgtttctgagggaatcaatgaaggacacaggaagaagaattcaggagctggaatatcagtatgagaaactacaatcaaactataactctttagtcccactccttggtagtcgacatgataatatggaagggccatcaataatcttaatgggtggctacaggggcagtacttgcctgtcatcactagattccttttgccctacgacagacagagtagtgcctctgtgttcaatgagctcagcccgtgcatatgcagccgctgttgcattgaaggaccatctctatatttttggtggtgggaatggcagttcatggtatcacacagtggaatgctacaggatgggcagtaataaatggatagcatgcccccgtttgaaacatgcaaaaggaagccttgctggaactacattgaatgataaaatatttgctattggtggtggagatgggtctgcagttttctcagaagttgaaatgtttgacccagcacttgggagatggatagacaatgtgtcaatgcggcaaaagagatttgctgctgctgctgccgtattaagtggcacactctatgtaactggtggttatgatggcaacacatcagcagaaagatatgacccaagggaaggtttctggactctgctaccaagtatgagtgcaagaagaggatcccactccgtagctgtcatgggggaatccttattcgctgtgggagggtacgatggaaacagcaatatttccaccgtagaaatctttgatccgcgtgccaattcatggaggataggccgttcatgcagcattgcaagaggatacggatgcgcggtgacgatggacggcaatctgtacttcattggtggggtcaacgatgctggagaaactctcgggactgtggaggtctacaatgagaggcaaggctggtcgatctctggctgcaaatccgtagggaagagggcctttgcctgcgctatcaccgtttgacatgatcgcggatctcataccctacctttttttttttttttttttttttgcaaccagcagtcactcatggttcgcagcctttgccctcctgctggtcctactcctaccacgttggtccgagtatacctgggttgagagaaattttgctgcctccccccccccctacttatactacttccgtccgtgaacaaatcaacttctagaggtgaattgagccaaacttttgcaaacgttagaaatgttgaacttaaggtaactataaaagttaatttatttgggggatggagagagtattagacaaagccaccaaatgttctggtggtgcatttgggaattgacaatcacagagcaccaccaaatggctaagggccacagtagcatgttctgctgtgtaatgtccaggcagtctgctgctgtttgcgcttttgagaaactagacatggtgtcatggtaggtgatgagacgtaggaagatggggaccaattgctgaatgctgccgatagctcaaattggcagccggttcataatcgtcgctgcaagggaatcgctctgatcgcttttgtgcgagcggttggtggaatctggactctggggcaatgcaatgtgtttggtgaaccgagtgcaacgctgctaagcaaggaatacgaacctaactcgagggatttggtctgccaaaccatcggagcaaagatgcgcgcgactgtggg

SEQ ID NO: 205937 - DNA, 2834 bp, Zea Mays
aggcattcagcctcaccgcacttgtggcctggcacgtgctgcgcgcacacccaattctagcccacgcaagcggccgatacgagcgcctactacctctggcgctgccgcgcgctggcgaggccatcgaactagattctagcagcatctacgatgaaccctgctccccggcacccaagcactgcacagacacaaaatcaaaccaatgaaaggtatggaacatatcctgttgctgcccgtaatcttcgggaagatgagctaggaggagtgatttttggctgcaaacacaacacaatcggtgaatgcctctctaaacagctgtttggtttgccttcaagccatttctcatatgtgaagaatgtcaaacctggcatgcctctatttctgttcaattatagcgatcgaaaaatgcatggaatttatgaggctgcaagtgctggcaagcttaacattgaccaatttgcttggagtgatggtggtagaataaagacacaatttcctgcacaggtcctcatctctatgaagactgcctgccttccagttccagaatctcaattccaaagtgtgatcagtggcaattattacaaacctcggcacttcttctttgagctagaccatgaacaaacaagagctttgatatttttgtttaagcctgcccctgttcatgatgtttcaaacaaatgtcatccttccaaatctattcaatctccaatagtcgaagcatatgtcaatcctgatggtgaatatgctagtgagagtagaacgtcaacgagccaccttgacaaggaggcttctaactgggatgatgttacgaccaaggaaggaactgaatttgtcaataatgaccatccacatattaatccaccacataaacaacaagatatgtttgttttacgacagcatgaggctgaatcctccaaggacactgtggattctgcttcaaataaatcaatgcctcaagaagcacagtttgatgccactctccccacagacccatctaattccacttcagtgggtgatgtatgtattaaagacctgacatcactggggcaatctcgtggaaatgctgagctgcttcacattgtcaaagagttatccaagaggaaccaagcaatggagaaaaaactgtctgagtcagataaagaaatactgtttctgagggaatcaatgaaggacacaggaagaagaattcaggagctggaatatcagtatgagaaactacaatcaaactataactctttagtcccactccttggtagtcgacatgataatatggaagggccatcaataatcttaatgggtggctacaggggcagtacttgcctgtcatcactagattccttttgccctacgacagacagagtagtgcctctgtgttcaatgagctcagcccgtgcatatgcagccgctgttgcattgaaggaccatctctatatttttggtggtgggaatggcagttcatggtatcacacagtggaatgctacaggatgggcagtaataaatggatagcatgcccccgtttgaaacatgcaaaaggaagccttgctggaactacattgaatgataaaatatttgctattggtggtggagatgggtctgcagttttctcagaagttgaaatgtttgacccagcacttgggagatggatagacaatgtgtcaatgcggcaaaagagatttgctgctgctgctgccgtattaagtggcacactctatgtaactggtggttatgatggcaacacgtacttacaatcagcagaaagatatgacccaagggaaggtttctggactctgctaccaagtatgagtgcaagaagaggatcccactccgtagctgtcatgggggaatccttattcgctgtgggagggtacgatggaaacagcaatatttccaccgtagaaatctttgatccgcgtgccaattcatggaggataggccgttcatgcagcattgcaagaggatacggatgcgcggtgacgatggacggcaatctgtacttcattggtggggtcaacgatgctggagaaactctcgggactgtggaggtctacaatgagaggcaaggctggtcgatctctggctgcaaatccgtagggaagagggcctttgcctgcgctatcaccgtttgacatgatcgcggatctcataccctacctttttttttttttttttttttttgcaaccagcagtcactcatggttcgcagcctttgccctcctgctggtcctactcctaccacgttggtccgagtatacctgggttgagagaaattttgctgcctccccccccccctacttatactacttccgtccgtgaacaaatcaacttctagaggtgaattgagccaaacttttgcaaacgttagaaatgttgaacttaaggtaactataaaagttaatttatttgggggatggagagagtattagacaaagccaccaaatgttctggtggtgcatttgggaattgacaatcacagagcaccaccaaatggctaagggccacagtagcatgttctgctgtgtaatgtccaggcagtctgctgctgtttgcgcttttgagaaactagacatggtgtcatggtaggtgatgagacgtaggaagatggggaccaattgctgaatgctgccgatagctcaaattggcagccggttcataatcgtcgctgcaagggaatcgctctgatcgcttttgtgcgagcggttggtggaatctggactctggggcaatgcaatgtgtttggtgaaccgagtgcaacgctgctaagcaaggaatacgaacctaactcgagggatttggtctgccaaaccatcggagcaaagatgcgcgcgactgtggg

SEQ ID NO: 205938 - DNA, 2888 bp, Zea Mays
cgccgggcatcggccgcctcctaccccctctagtccaccctgtccccggacaggcagcgtcggagcgccggcgttgccaacgccaacgcggaggcgagacgatcgggaaggaggggagcagaggaaggatacagtccggagcttcagctgtctgctgtctgcggtctgcgggagcgatcacgtctacggtctacagtcgacaggttcgtgcccgattcttgtctgctttgctttggggaatggtatggcgcatcgaatccagctattctcatgcgtttttcaagatttttctcattttgtcctcgatttcgccccccttttcagtttatgtagcttgttgcgaacgagcagagtatacaatattgcttcgtctatcgacagttcgacgcgctaaagtaaacaagcttttacagctttatttactgataacttcgcaccctccgcgcagttgcgacctccaactggagctggcttcacatagacttctggaggaggcaacgggattgcgatttggaacatggggagttcggtcggctgcttggtaggcggctccaagtcgaggcaagatcagaattgtcaggtcgtcgcgggttcgtctcacagttcaggtcatgtcttatcaagagctggaaataatgtacaggtattctccctaaacgagttgaagactgccacacaaaactttcacatgttgaattgcattggccgtgggggtttcggagcagtgtataaggcacccaaaccttgtcaggctgattggttgctgcgctgaagggaaaaacagactattggtgtatgagtatgcggagaataatagtttggcgaatgctttgcttggaccaaagaataaatgtatcccattggactggcagaaaagagctgctatatgtattggaactgcttctggccttgcttttcttcatgagaaagcacaaccatgcattgtccaccgtgatatcaaggctagcaacattttacttgataagaaactgctgcccaaaattggagattttggattggccaagatttttcctgataccgttactcacattagcacgcgtgttgcaggaacaatgttagtgcatttctaaatctttttatgtatcttcctctcaaaaagggaacatttccctgtatttacttgcttatatacaatgaacttatgtgtatgtcatgtcgtgtttttttttcattgtgctattctggttttacccagcgattttgttgtttttgctgccagtttaccagggcgccgatcgactaatagtagtctgttataacgtacttgcattgaaatctcaatatataattttcctgcaggggttatttggcaccagagtatgcattgttgggacaattaaccaagaaagcagacatatatagttttggtgtgcttcttctcgaagtgataagtggtgaaaacagcagcaagccgacttgggggcctaatatgcatgttcttgtggaatggacatggaagctgcgagaagaaggaagactcttggaaattgttgatccagaactgaaaaagtacccagaggagcaaatgcttcgtttcatcaaggtggcactgctgtgcacacaagccacgtcccaacagaggccatccatgaagcaggttgtcaatatgctatctaacaaagcagaaattgacctgcaaaatgtagttgcaccaggtgtactgaaagaacctcggcagcgtactggcggctttgggagtttgacagcaggcacgtcctcaaagccaaagcaccaaaggcaatccagctgaatcatacagtacaattgtacaaagaccaacatgaacagctgtcagtttagcacaaccgacgcatcaccaaggtgacgtgatagactgtcagcttgcaagcttgtttgacgtcttcactcttcaaaggtgtcacaaactctagtgatatggaaggcctgatccattttcatcctgttttagagttacgtagtatgcgaaggccgctgtgaattgctgatgtacaggaattgtagctcatcttttttttgttcttttgcaaaagaggaattgtagtttgatttgacgattgattttaccttctggcggccacgttacaaaggacagttattttaggcatcaagttctctatatattagacacatttagtagcagtttatactattcaacgtttttttacaatatactattcaacattgagttgcaactgtacatggttgtttctggcaaccgtactagtaatacaatgaatgtaaaacttaattaaagttgtcggagaaggaatatatataccactagcatataactatgtaatataatttgcaacaaagaggatcacacatgagtgatgagtcgtattgagagtctatactactctactcagtctaccttatctaacaagccatttgcatacttgttggttctaatgccataagccaatctgcttggttcagctatatctaaggagcttttctaagaatggctatgtggataatctaaatatcgtggagattacatgcataaaagataaaagagtccaaagggtttaggtgaagaaagtgacggtctcctactatcgtaacaactcgaccaattttgtgttcacgttgattttagatggtgactaaagtgattctcatagaagcagactaaaaagctggacgttcggcagtctacaacaacttatggtagccaaaagctgaaacaaacaactccgatatctaccgccacatcactgtccaccgatctgtcgaccattgtcagcatttatctttcacaactttttaatgcactatatataccatcggcctacactatatcaacgccacgtccgttttcctttttacagactccatacacaatgaaacacgggttttaattcaaatatcataagtaaaat

SEQ ID NO: 205939 - DNA, 2398 bp, Zea Mays
cgccgggcatcggccgcctcctaccccctctagtccaccctgtccccggacaggcagcgtcggagcgccggcgttgccaacgccaacgcggaggcgagacgatcgggaaggaggggagcagaggaaggatacagtccggagcttcagctgtctgctgtctgcggtctgcgggagcgatcacgtctacggtctacagtcgacagttgcgacctccaactggagctggcttcacatagacttctggaggaggcaacgggattgcgatttggaacatggggagttcggtcggctgcttggtaggcggctccaagtcgaggcaagatcagaattgtcaggtcgtcgcgggttcgtctcacagttcaggtcatgtcttatcaagagctggaaataatgtacaggtattctccctaaacgagttgaagactgccacacaaaactttcacatgttgaattgcattggccgtgggggtttcggagcagtgtataaggcacccaaaccttgtcaggctgattggttgctgcgctgaagggaaaaacagactattggtgtatgagtatgcggagaataatagtttggcgaatgctttgcttggaccaaagaataaatgtatcccattggactggcagaaaagagctgctatatgtattggaactgcttctggccttgcttttcttcatgagaaagcacaaccatgcattgtccaccgtgatatcaaggctagcaacattttacttgataagaaactgctgcccaaaattggagattttggattggccaagatttttcctgataccgttactcacattagcacgcgtgttgcaggaacaatgggttatttggcaccagagtatgcattgttgggacaattaaccaagaaagcagacatatatagttttggtgtgcttcttctcgaagtgataagtggtgaaaacagcagcaagccgacttgggggcctaatatgcatgttcttgtggaatggacatggaagctgcgagaagaaggaagactcttggaaattgttgatccagaactgaaaaagtacccagaggagcaaatgcttcgtttcatcaaggtggcactgctgtgcacacaagccacgtcccaacagaggccatccatgaagcaggttgtcaatatgctatctaacaaagcagaaattgacctgcaaaatgtagttgcaccaggtgtactgaaagaacctcggcagcgtactggcggctttgggagtttgacagcaggcacgtcctcaaagccaaagcaccaaaggcaatccagctgaatcatacagtacaattgtacaaagaccaacatgaacagctgtcagtttagcacaaccgacgcatcaccaaggtgacgtgatagactgtcagcttgcaagcttgtttgacgtcttcactcttcaaaggtgtcacaaactctagtgatatggaaggcctgatccattttcatcctgttttagagttacgtagtatgcgaaggccgctgtgaattgctgatgtacaggaattgtagctcatcttttttttgttcttttgcaaaagaggaattgtagtttgatttgacgattgattttaccttctggcggccacgttacaaaggacagttattttaggcatcaagttctctatatattagacacatttagtagcagtttatactattcaacgtttttttacaatatactattcaacattgagttgcaactgtacatggttgtttctggcaaccgtactagtaatacaatgaatgtaaaacttaattaaagttgtcggagaaggaatatatataccactagcatataactatgtaatataatttgcaacaaagaggatcacacatgagtgatgagtcgtattgagagtctatactactctactcagtctaccttatctaacaagccatttgcatacttgttggttctaatgccataagccaatctgcttggttcagctatatctaaggagcttttctaagaatggctatgtggataatctaaatatcgtggagattacatgcataaaagataaaagagtccaaagggtttaggtgaagaaagtgacggtctcctactatcgtaacaactcgaccaattttgtgttcacgttgattttagatggtgactaaagtgattctcatagaagcagactaaaaagctggacgttcggcagtctacaacaacttatggtagccaaaagctgaaacaaacaactccgatatctaccgccacatcactgtccaccgatctgtcgaccattgtcagcatttatctttcacaactttttaatgcactatatataccatcggcctacactatatcaacgccacgtccgttttcctttttacagactccatacacaatgaaacacgggttttaattcaaatatcataagtaaaat

SEQ ID NO: 205940 - DNA, 4500 bp, Zea Mays
ggaagcaacaaaccttcgtaccatcagtgaactaacaaagaatccgctatggctatcggataagccttatcttctccaacaaacaacaaataaatcccgccataacatgcatgacgatcgtgctcgccaaagtgatccgtgtcttctacccgctcgccgacatgctccgccaggacgacgcctaccgactcgacggccgcatccaccaggacgacaccgatggcggcgctctcaccgtcgagaacgacgagggcgtggaggtcttcgagggcgaagccgaggccgagcgcgtctccttccacccgctcgtcggtcgcatcctccaggacgaacggcgacgcgctcgccgtcgagggcgacgagggcgtggacttctttgaaggcaggcaagcggcggcaattgctgtcgcgggcgaccatgcagcgcaactggagaaggccgatctagccgccgcgatgatgctcctcctcctcgacgctacctcgctccgctactcgcccgccgcgctggtagccgcgcacgagaggttgtgggcctgcagggtctccatcgccgtacgcacgagaggtttgctaatattgtgagagcgaaagaaattatccaactttagacatcagcaaagccatgttcatatatttttcatttcaatgttatgtgtgcaattacatttattcatctactcattcttacatgcatatttatgtagtaaaactggaatagtgttcatatcaacttagcttaggaacatacatgaattatttgtactacaaaccgaactataggttgtatatactttcgtgcctataccattagtgagggaagtagcgtgcacggtcgtactaccatcttcgtgcattgttttggggtttcaactctgtcatgttctcttattaactaatctgttgttcttttgtttcaagtgcccacacgcagagatttcacaagcgtttttatgcggtttcagatgttgatgagtgtcattaatatgaccagcgtttttaggcgttgctgaaagaaaaaaaataaggcagcaatgttgggtcattaatatgcagattcttgcatatagaatcatattatattgaatgtctctcctacttagagtaaaactaattgcttcttgcatatagactcatattataatagatttcaaatcatcatgtgaatagtatgcaagatctttgctatctactgtagactgtagtatgtgacaatgtaggcatggtcctgttccttgtttctgtacagtttctaccatgttcttgcctccatttatggaacgaaacttgcctgagtatggccacaagccatataaaattttactctcgtgagtacttaatacttatgaaaataaattcaaagggtgaatctcatgatactttgaacaattatattgtgaaaataaattcaatgatgtacctaatgatatttatttggtaatgaactgacggaaacaatttgacaagattatatataacatactaatatacatcagtacataccagattaccagctaataatcaattgatctaagacaatctagacaatgtaggtgtgaactaagattgatttatagagtcactcattatatatgattgtgtgttattgttcctgtgcgccgtcgtatcgcacgggcacagtactagtaatcatgtatggatcgcttggggggtttattccgcgtgcgtgtagtttaggtgcggatcgtttctacgatggtcgtcacgcgctgattgtgagtccatcattattggttttctgttaaaaccgaattccgggtacgcccaagcgtatttgtcagatgtaggctccgagaccctcgagcaattcatgtggaataaaccgatccaacgcgtctgatcaagggtcacggctaattcgactcaaaccggcactatgcatgggtctaaaaaatgatcaatgaataggcgcgtcgccacagaagcgagcaaaaaaagcaacagcgacgcggggcagtggagcggttaaaaatccgccgggcatcggccgcctcctaccccctctagtccaccctgtccccggacaggcagcgtcggagcgccggcgttgccaacgccaacgcggaggcgagacgatcgggaaggaggggagcagaggaaggatacagtccggagcttcagctgtctgctgtctgcggtctgcgggagcgatcacgtctacggtctacagtcgacagttgcgacctccaactggagctggcttcacatagacttctggaggaggcaacgggattgcgatttggaacatggggagttcggtcggctgcttggtaggcggctccaagtcgaggcaagatcagaattgtcaggtcgtcgcgggttcgtctcacagttcaggtcatgtcttatcaagagctggaaataatgtacaggtattctccctaaacgagttgaagactgccacacaaaactttcacatgttgaattgcattggccgtgggggtttcggagcagtgtataagggaaacctcaaagatggcactcaaattgcaattaaaaagcttgcagttgagtcaaaacaaagaattagtgaattcttgacagaaattaatgtcatatcaaatgttaggcacccaaaccttgtcaggctgattggttgctgcgctgaagggaaaaacagactattggtgtatgagtatgcggagaataatagtttggcgaatgctttgcttggaccaaagaataaatgtatcccattggactggcagaaaagagctgctatatgtattggaactgcttctggccttgcttttcttcatgagaaagcacaaccatgcattgtccaccgtgatatcaaggctagcaacattttacttgataagaaactgctgcccaaaattggagattttggattggccaagatttttcctgataccgttactcacattagcacgcgtgttgcaggaacaatgggttatttggcaccagagtatgcattgttgggacaattaaccaagaaagcagacatatatagttttggtgtgcttcttctcgaagtgataagtggtgaaaacagcagcaagccgacttgggggcctaatatgcatgttcttgtggaatggacatggaagctgcgagaagaaggaagactcttggaaattgttgatccagaactgaaaaagtacccagaggagcaaatgcttcgtttcatcaaggtggcactgctgtgcacacaagccacgtcccaacagaggccatccatgaagcaggttgtcaatatgctatctaacaaagcagaaattgacctgcaaaatgtagttgcaccaggtgtactgaaagaacctcggcagcgtactggcggctttgggagtttgacagcaggcacgtcctcaaagccaaagcaccaaaggcaatccagctgaatcatacagtacaattgtacaaagaccaacatgaacagctgtcagtttagcacaaccgacgcatcaccaaggtgacgtgatagactgtcagcttgcaagcttgtttgacgtcttcactcttcaaaggtgtcacaaactctagtgatatggaaggcctgatccattttcatcctgttttagagttacgtagtatgcgaaggccgctgtgaattgctgatgtacaggaattgtagctcatcttttttttgttcttttgcaaaagaggaattgtagtttgatttgacgattgattttaccttctggcggccacgttacaaaggacagttattttaggcatcaagttctctatatattagacacatttagtagcagtttatactattcaacgtttttttacaatatactattcaacattgagttgcaactgtacatggttgtttctggcaaccgtactagtaatacaatgaatgtaaaacttaattaaagttgtcggagaaggaatatatataccactagcatataactatgtaatataatttgcaacaaagaggatcacacatgagtgatgagtcgtattgagagtctatactactctactcagtctaccttatctaacaagccatttgcatacttgttggttctaatgccataagccaatctgcttggttcagctatatctaaggagcttttctaagaatggctatgtggataatctaaatatcgtggagattacatgcataaaagataaaagagtccaaagggtttaggtgaagaaagtgacggtctcctactatcgtaacaactcgaccaattttgtgttcacgttgattttagatggtgactaaagtgattctcatagaagcagactaaaaagctggacgttcggcagtctacaacaacttatggtagccaaaagctgaaacaaacaactccgatatctaccgccacatcactgtccaccgatctgtcgaccattgtcagcatttatctttcacaactttttaatgcactatatataccatcggcctacactatatcaacgccacgtccgttttcctttttacagactccatacacaatgaaacacgggttttaattcaaatatcataagtaaaat

SEQ ID NO: 205941 - DNA, 2891 bp, Zea Mays
aacaggtctcatagaagtggaaagatcaaacaagaatttgggattgttaattcataggatatggctgatttagtttgtgctctatgcgacaatggaggtgaaattataagctgtgaaggcaggtgtctgaggtcgtttcatgcaactaacgattctagtgaagactgtccaaccttaggatacagcaggcagcagttagatgcggcggaagtttttaagtgcaagaattgtatttccatgtgcttcttcaacttgtggtcacttctatcatgcgatgtgtgttactcagttactcttccctgaaaacgaggccaaagcaactgagtatacagcaaagatagccagtggggcaaaatttgcatgtcccctccacaaatgtggcatctgcaagcatggggagaacaaagaggatagggagctacagtttgctgtctgtcggcggtgcccaaagtcataccacagaagatgcttgccaagggaaattgtctttgaggacttcactgagaatggtcaacatgttttccaaagggcgtgggatgaccttcttcccaacaatcgcatcttgatatattgcttgaagcatgatattaatccagaatatcgaaccgccacgagaaatcatattaagtttcctaaggaccctactgctctcaagaaacccctcaattgtgtcaatggaatgaacacaaagacattgaagatacgacgtcttgaggagcttccttctgcgccattgtctaatgttaaaagattttcttactcagtgaaaagttctactttaagcaatttgaggaataaaagaaggaaagtgattgtgcctgaagaaaaacctgtggttatgacaaaactccctgagattgacagtgacactgagatgagaatgtatgagtttgcacaaaaagcgtcagctggtataacaatggatgatgtgaagaaaaagctagtggtaccatcaacatatgcaccaaatctgcagaatgctgataacattacactggaaaatgtggaaatatatgttgaggccgttaaaggtgctctgcatatgttagaaaatggtgcatctatagcagatgccaaatctgtctgcccacctaatgttctgtttcaacttgtaaagtggaagaacaagttgagtgtagttcttgcaccatttcttcatggcatgcgatacacatcgtatgggcgccacttcacaaaactggacaaactccagctgatagttgataagctacagtggtatattcaaagtggtgacacggtcgttgatttttgctgtggttcaaatgattttagcttgttattgagggaaatattggaatcttctgggaaaaattgcttctacaaaaattatgatctcatccaaccaaagaatgatttcaattttgagagacgagactggatgactgttcaacctgatgaattgcctacaggatgcagactggtcatgggattgaatcctccctttgggactaaagcctctcttgcgaaccagttcatcaacaaagctctcactttcaagccaaagcttataatactcattgttcccaaggaaactgaaagattggacaagaaatacccaccatatgagctaatatggcaggactcagatcagctctcgggaaagtcattctatctacctggatctctggatgctgacaacaaggtgatggagcaatggaatgtgtcacctcctccgctttctctgtggagtcgtagtgactgggctgagaggcactccgagattgccaaatcaatggggcacatctcgaatgaaattggtgacttgcaaagggatctggctgcatctatacataccacagagcacgtggaggcagatgatgcaggggttgcaggcatgtctccatgtttactagatcagttgttgtctgacacgttccatgacccaacaacttctccaggggactgctggaatgataccagcggccgatcacggcaaccatgcaactacgaaacagcaggacaaggaaggggcgatccaacctacaatcatacaacagaaagctgctctgatatgagcatttcattgtcggagagtgatgttcagagaaaagatcaagctttgccaatgccagagcatggaggcaccggctctgatatgagcatttcattgtcggagagtgatgttcggagaaaaggtcaagcctgggatgctgttggaagtgcatctgcagggaaaccaactgctgatgccgattacgatgaggtaacatcagcctgtggtccgtatcatttctcgggggttgcgggcaaacaggcagctggagttgagtactggatgatacaagactcaccagtcctggaggaaggagagctgagcgatgcaccggctgcggcgggcaggcctgcatctggcacgcgtcataaaccgacggaacacacgccagcagcagcaacacccgaagctgcctcctggtggagtgggcagctggatcatcactcgcggtctgtggccgctaggcataatgccagaactctgccaccaagaaacaccttccccggactgcgcttgcggcaaggatgcaacacctctcgtaagttcctgccccaaggcatgggctatgacgccatccatgaagggccatcgaatggctggatcgaggaagaagactactagtataggtgctaatgtgcctcgccctcgcgttgtcttcacaggtgtgagctagttaattctacggccggctttaggagtatgctgctgaggttatgctaacgttggtagagtcggttctgcggtctgtcattggatcagtattttcgttaactgttgcattcatgccctgtatctgtttctgacgaaacatcttaccatggacttgattgcctttgagcctgaattatccaggatcgatctttcgttgcctgctata

SEQ ID NO: 205942 - DNA, 3180 bp, Zea Mays
cccacacacgctgctcacagcgtctgtgtgcgtgtgggtgtgctgttgctgtgttcgttctccctcctccgaaccacctccactccacctcacgggggttttggttggggttttgctcgctcccagtcccacaaggaaccaaccggagagcgctcaccagcgacgcccgccgcgggggctgacctcggcgtgcatggtagtgctcgaatcgcgcggcgccgcggaggtctcatagaagtggaaagatcaaacaagaatttgggattgttaattcataggatatggctgatttagtttgtgctctatgcgacaatggaggtgaaattataagctgtgaaggcaggtgtctgaggtcgtttcatgcaactaacgattctagtgaagactgtccaaccttaggatacagcaggcagcagttagatgcggcggaagtttttaagtgcaagaattgtgagtatggaatatatcaatgctttgcttgcggaaggctaggctcagctaaaactaatcctcccgaggtatttccatgtgcttcttcaacttgtggtcacttctatcatgcgatgtgtgttactcagttactcttccctgaaaacgaggccaaagcaactgagtatacagcaaagatagccagtggggcaaaatttgcatgtcccctccacaaatgtggcatctgcaagcatggggagaacaaagaggatagggagctacagtttgctgtctgtcggcggtgcccaaagtcataccacagaagatgcttgccaagggaaattgtctttgaggacttcactgagaatggtcaacatgttttccaaagggcgtgggatgaccttcttcccaacaatcgcatcttgatatattgcttgaagcatgatattaatccagaatatcgaaccgccacgagaaatcatattaagtttcctaaggaccctactgctctcaagaaacccctcaattgtgtcaatggaatgaacacaaagacattgaagatacgacgtcttgaggagcttccttctgcgccattgtctaatgttaaaagattttcttactcagtgaaaagttctactttaagcaatttgaggaataaaagaaggaaagtgattgtgcctgaagaaaaacctgtggttatgacaaaactccctgagattgacagtgacactgagatgagaatgtatgagtttgcacaaaaagcgtcagctggtataacaatggatgatgtgaagaaaaagctagtggtaccatcaacatatgcaccaaatctgcagaatgctgataacattacactggaaaatgtggaaatatatgttgaggccgttaaaggtgctctgcatatgttagaaaatggtgcatctatagcagatgccaaatctgtctgcccacctaatgttctgtttcaacttgtaaagtggaagaacaagttgagtgtagttcttgcaccatttcttcatggcatgcgatacacatcgtatgggcgccacttcacaaaactggacaaactccagctgatagttgataagctacagtggtatattcaaagtggtgacacggtcgttgatttttgctgtggttcaaatgattttagcttgttattgagggaaatattggaatcttctgggaaaaattgcttctacaaaaattatgatctcatccaaccaaagaatgatttcaattttgagagacgagactggatgactgttcaacctgatgaattgcctacaggatgcagactggtcatgggattgaatcctccctttgggactaaagcctctcttgcgaaccagttcatcaacaaagctctcactttcaagccaaagcttataatactcattgttcccaaggaaactgaaagattggacaagaaatacccaccatatgagctaatatggcaggactcagatcagctctcgggaaagtcattctatctacctggatctctggatgctgacaacaaggtgatggagcaatggaatgtgtcacctcctccgctttctctgtggagtcgtagtgactgggctgagaggcactccgagattgccaaatcaatggggcacatctcgaatgaaattggtgacttgcaaagggatctggctgcatctatacataccacagagcacgtggaggcagatgatgcaggggttgcaggcatgtctccatgtttactagatcagttgttgtctgacacgttccatgacccaacaacttctccaggggactgctggaatgataccagcggccgatcacggcaaccatgcaactacgaaacagcaggacaaggaaggggcgatccaacctacaatcatacaacagaaagctgctctgatatgagcatttcattgtcggagagtgatgttcagagaaaagatcaagctttgccaatgccagagcatggaggcaccggctctgatatgagcatttcattgtcggagagtgatgttcggagaaaaggtcaagcctgggatgctgttggaagtgcatctgcagggaaaccaactgctgatgccgattacgatgaggtaacatcagcctgtggtccgtatcatttctcgggggttgcgggcaaacaggcagctggagttgagtactggatgatacaagactcaccagtcctggaggaaggagagctgagcgatgcaccggctgcggcgggcaggcctgcatctggcacgcgtcataaaccgacggaacacacgccagcagcagcaacacccgaagctgcctcctggtggagtgggcagctggatcatcactcgcggtctgtggccgctaggcataatgccagaactctgccaccaagaaacaccttccccggactgcgcttgcggcaaggatgcaacacctctcgtaagttcctgccccaaggcatgggctatgacgccatccatgaagggccatcgaatggctggatcgaggaagaagactactagtataggtgctaatgtgcctcgccctcgcgttgtcttcacaggtgtgagctagttaattctacggccggctttaggagtatgctgctgaggttatgctaacgttggtagagtcggttctgcggtctgtcattggatcagtattttcgttaactgttgcattcatgccctgtatctgtttctgacgaaacatcttaccatggacttgattgcctttgagcctgaattatccaggatcgatctttcgttgcctgctata

SEQ ID NO: 205943 - DNA, 1692 bp, Zea Mays
ctcaaaagggtgagagatccaaatctccatgactccatcccatagccccgctcacgctgtcgctgtcacgcacatcatcgtcctcctcccttccccgcaggccccctcgcctcgcgcgtgcgccccccctaccccgtctcctccctgcctgcgcgagcgactagtagaaataggcgcgcgtgccgcctcggccgctcgctcctctggttaatcccccctcgccacgactcgcagccatcccttcacattatccgcgcgcgcgcgagcggacgtagcgtgtgggtagcgtcgccgtgcggacggtctcttggtgccggtgcgggccgcgtgacggtgcgtgtgccgcccgcggggaggaggtcgttcggttggttggccctcggcgacgatggcggtccacggcggagaggcggtctccgtcgcgctcctcttctccctcgctttcttctgcgctcgcctcctgctcgaccgcctcgtctacaagtctaccttttcaacaccaaagcttctaagttgatgaataatgaggccaggcaagcaaagattgtcaagttctcagagtccatttggaaacttacctactatgcttctgttcaagcatgggtcctcatgataataaagcaggaaccatggtcattggatatgatgcaatactttgatggctggccgaaccaacccatcgtgtcttcattgatgcttttctatatgtgccagtgtggattttatatctatagcatcggtgctcttgttgcttgggaaacccgcagaaaagattttgctgtaatgatgtctcatcatgtaataacatctactctaattggagtttcatatctgactggatttttccgaattgggaccatcattctcgctcttcatgatgcaagtgatgtgtttcttgagactgccaaattgtgcaaatacacagaaaaagagctgggtgctagcttgttttttggtctcttcgctatctcctggcttctattgcgtctgatttacttcccattttggataatcaaagcctctagctatcattccatcacattcttgaggaagctggatgaattcccaacaactttgtactacatcttgaacacaatgcttctcacattgcttgtattccatatgtactggtggaaactcatatgtttgatgataatgagacagctgaataataaaggacaagttacagacgatgtccgatctgattctgaggatgaggagtaatgggagattcattctttgacatctgcaacgtggcatttcctcgtcaatacttttctatgcctgcttccagaattgattgcttttaatcttggcaagtctcgggaacgtataggaaagtttaatctctgtatattgccttatgatatcaaacatggctagaccgggaatggatctatacatgatgacgggcatagctagcaagcttacttcaaggttccttaaaaaattttggttcacctttatttgatatggggaaagacatgagagggtgtacagctttttcctgaagcttgcagaacccccctctgtaccatgatcaatatacttcacttgtgagtagatttagttctaattgatgataataaattgattcttttgattgggaatgaatctcacctgaaccttaatgatctcatctgatgtgtattgagcattatgatgctatataattttttttttgaatcaatg

SEQ ID NO: 205944 - DNA, 2354 bp, Zea Mays
ctcaaaagggtgagagatccaaatctccatgactccatcccatagccccgctcacgctgtcgctgtcacgcacatcatcgtcctcctcccttccccgcaggccccctcgcctcgcgcgtgcgccccccctaccccgtctcctccctgcctgcgcgagcgactagtagaaataggcgcgcgtgccgcctcggccgctcgctcctctggttaatcccccctcgccacgactcgcagccatcccttcacattatccgcgcgcgcgcgagcggacgtagcgtgtgggtagcgtcgccgtgcggacggtctcttggtgccggtgcgggccgcgtgacggtgcgtgtgccgcccgcggggaggaggtcgttcggttggttggccctcggcgacgatggcggtccacggcggagaggcggtctccgtcgcgctcctcttctccctcgctttcttctgcgctcgcctcctgctcgaccgcctcgtctacaaggtatacccccgtcccgacaccgccagattcgtgccgggttccgcgagatctctggtctccccggtttcgctcccacgccccaatgccccccggtcgcgactcgcgagtggcgacgcgggcgcggggcgtggtatccgccgccgctcgttgcaccttccttaccgatcagctgattccgctcgtccggcgggggatcatccgagtgcgtgtgacgtaatgctcccgccagtcgttaattgcgttactggtggctggctggccgctactctgttaaggaccaacggcgctggtgcggtttgcagtagtatgtgcagatgtgctcgcagtagagcatggatcaataactttgtccttatgcaaagattgttcgtaatagaaccttgcacctaacaagtctacatctggcatggcttgccaattgcatgatattttcctgaattcctgcaagccagctatacgtcttccctttctctagaaggtttgagcccaacagaggtgatgatgtaaataaggtggcaaggtgatgtatgtacaagttttttttctatataagcacagtggtactcataagctgtgccaatatgcaactcttaattatcttggcattggatcgcttctaaaatttcagtatgaatagtaccttttgatatcatatggcagtttaactacacatcttaacgctatgctttccagccattagcagtctaccttttcaacaccaaagcttctaagttgatgaataatgaggccaggcaagcaaagattgtcaagttctcagagtccatttggaaacttacctactatgcttctgttcaagcatgggtcctcatgataataaagcaggaaccatggtcattggatatgatgcaatactttgatggctggccgaaccaacccatcgtgtcttcattgatgcttttctatatgtgccagtgtggattttatatctatagcatcggtgctcttgttgcttgggaaacccgcagaaaagattttgctgtaatgatgtctcatcatatttttccgaattgggaccatcattctcgctcttcatgatgcaagtgatgtgtttcttgagactgccaaattgtgcaaatacacagaaaaagagctgggtgctagcttgttttttggtctcttcgctatctcctggcttctattgcgtctgatttacttcccattttggataatcaaagcctctagctatcattccatcacattcttgaggaagctggatgaattcccaacaactttgtactacatcttgaacacaatgcttctcacattgcttgtattccatatgtactggtggaaactcatatgtttgatgataatgagacagctgaataataaaggacaagttacagacgatgtccgatctgattctgaggatgaggagtaatgggagattcattctttgacatctgcaacgtggcatttcctcgtcaatacttttctatgcctgcttccagaattgattgcttttaatcttggcaagtctcgggaacgtataggaaagtttaatctctgtatattgccttatgatatcaaacatggctagaccgggaatggatctatacatgatgacgggcatagctagcaagcttacttcaaggttccttaaaaaattttggttcacctttatttgatatggggaaagacatgagagggtgtacagctttttcctgaagcttgcagaacccccctctgtaccatgatcaatatacttcacttgtgagtagatttagttctaattgatgataataaattgattcttttgattgggaatgaatctcacctgaaccttaatgatctcatctgatgtgtattgagcattatgatgctatataattttttttttgaatcaatg

SEQ ID NO: 205945 - DNA, 1124 bp, Zea Mays
agcattgtggctctaggttagaattaatgtcttcattgatgcttttctatatgtgccagtgtggattttatatctatagcatcggtgctcttgttgcttgggaaacccgcagaaaagattttgctgtaatgatgtctcatcatgtaataacatctactctaattggagtttcatatctgactggatttttccgaattgggaccatcattctcgctcttcatgatgcaagtgatgtgtttcttgagactgccaaattgtgcaaatacacagaaaaagagctgggtgctagcttgttttttggtctcttcgctatctcctggcttctattgcgtctgatttacttcccattttggataatcaaagcctctaggtttgttttttacttctctttgtgataactttctgtttctgtagtcttgtagttttggacttattgctgttgccgttgcaatggcagctatcattccatcacattcttgaggaagctggatgaattcccaacaactttgtactacatcttgaacacaatgcttctcacattgcttgtattccatatgtactggtggaaactcatatgtttgatgataatgagacagctgaataataaaggacaagttacagacgatgtccgatctgattctgaggatgaggagtaatgggagattcattctttgacatctgcaacgtggcatttcctcgtcaatacttttctatgcctgcttccagaattgattgcttttaatcttggcaagtctcgggaacgtataggaaagtttaatctctgtatattgccttatgatatcaaacatggctagaccgggaatggatctatacatgatgacgggcatagctagcaagcttacttcaaggttccttaaaaaattttggttcacctttatttgatatggggaaagacatgagagggtgtacagctttttcctgaagcttgcagaacccccctctgtaccatgatcaatatacttcacttgtgagtagatttagttctaattgatgataataaattgattcttttgattgggaatgaatctcacctgaaccttaatgatctcatctgatgtgtattgagcattatgatgctatataattttttttttgaatcaatg

SEQ ID NO: 205946 - DNA, 3388 bp, Zea Mays
atcccagagaaacatctaaaccctagcggcggaaccttccccgtcgctctgtcctcctgtccggacatggcgaagacgaagcccatggcggcggcgggcgagaagaagaagagcaaaggaaagaagaaaggcaagaatggcccggccaaggtggccatgaaggctcgtggcgcggcggcggaggagcggaacaacccgttcgaggccatctggtcgcgccgcaagttcgacgtgctcggcaagaagcgcaagggcgaggagcggcgcgtatcgcgctcacgttccgaggccatccgcaagagggagaacacgctgctcaaggagttcgttgagagcgccaagtcgtccgtgttccacgaccggcgtatcggcgagagggacgacacactgcccgagttcgacaaggccatccttcgccagcaacgcgagcgcttggccaagttgaaacgagaaagcaagtacaatctatcagatgatgatgaagacgaaatcaatattcataatgtgctgctatcggaaaatgatgattttgatgaggaagtgcctctcgatgatgggagcgacgaggaaggtaaaatggtcctctcaaagaagcgtttatctctccaaagtgatgaccatccttcaataactgatctaccacaagaaacacacgggcagaagagcaagaaggaagttatgacggagatcatttcaaagagtaaattttataaggcccaaagagccaaggagagggaagaggatgaacatcttgtcgacaagttagacagtgattttgcatcattggcccagacacgggcgttattgtccttaactgagtcagctaaggtcaaggtgaacaaaactgattcaagcactggcttgactgggaaggagttttctaacaaggcaaaggcagatacatatgaaaaactagtgaaagaaatggtgatggatcaacgtgctcggccttctgatagaactaaaactccagaggaaatagcacaagaagagaaagaacgtcttgagaagctggaggaggagcgccaaaaaagaatgcttggaactgctgatacgtctgatgaggacgatggcaacgaaaatgataaccacatgaagctaggaaactcaaaacctatatctggtgatgatcttggtgattccttctctttggatgagtcaacagtaaagaaaaagggctgggttgatgaaatttacgaaagggaaggtagaaagattggtgatgatgcagcagcatccgatgatggagaaagcgatgatgaaaatgctggtgatgatgaggctgatgatgaagattcggactccagtgacaatgactttggtaatatgtctgctagagattgggagcaaagtgatgatgatgaagttgatgtaggagacgatgaaatggaggatttcaaagagaaggggcaagagatcaatgacaaagtggtgaataaagatgcacacaatttgaaaggagaatctaatgtgaaacctcaagtaaaggatggcagtattccttttgttattgatgcaccaaatgacctgaaagatctatcttctttgttagatggtcgttcagaagccgaaataattgagattattagtcgaatacgtgcttgcaattcaataaggcttgcagctgaaaaccgaaggaaaatgcaaatcctttggcaggttttctatggtgttcttctgcagtactttgcagttttagctacccaaagtccagtgaagttcagaataattgacatacttgttaagcctttaattgagatgagtggagaaactccatattttgctgccatctgtgcaagagagcgacttattcatacacgtacccgtctatgcgaagacattaaggttccagggaagagcagctggccaaatttgaagacattacttctgctgagattatggtctcttatttttccctgctccgacttccgccatgttgttacaactccattgcttctacttatgtgcgaatatctgatgcggtgccctatacaatctggtcgagatgttgctgttggttctttcttgagttcaatggtgcttgtggttactaaagaatctaaaaagttctgccctgaagcaattggtttcctgcaatctcttttggtaacatcacttaaaggaaaagtggaaactcatctgcacaatcaggtgagtattaattcagacgctgattgtattttctgctagttgattgatattaagcaaaaacatcatcttgattatagattaacgatcaatttatggagctcaagactttaaaactgtggctcagtatccatgaccatgtgcatgaggtgaatccagtgaatatcctagaaatagttggcatggatcctgacgccccttatttctcatctgataactttaaggctggtgtacttttatctgtggcagaatgtttaagaggttttgttattatacatgaagggctatcttctttcccggaaatcttccttccaatatcctctttgctgcaagaaattttggatagatctgagttgcctggatcgttacaagacattttccatgaagtcattgacttgatcaaaaagagaagtgatgaacactatgcttcaagggagcccctccgaatgcggaagaagaagcccgaaccaattaagcaattgaatccaaaatttgaagagaactacatcaagggtcttgattatgatcctgatcgagaaagggcacaaatgaagaagctgcggaagcgtgtcaagagtgagatgaagggggcgaagcgtgagctgcaaaaggataattatttcctgtctgctgtgaaggagaaagagaggaggaagcgagatgaagagagagctgagatgtatggaaaagccatggcgttccttcaagaacaggaaagtgctttcaaatctggacagctggggaaaggaaagggtaggaaaaggatgcggtgatactctattgcaggggggcagctcggccagtgtaaatatacgggattgtgtttgctcaccctcttcccgcggtactggagggtggatccagctgattactgtatcgtgagctgctcagagtttgtcgtgcctacaagagcagggtgggcctagtcttatggaacatctccacctgcttactcctaaagctttgcctataaaattgtaacgccacaaacactttacaaggcttctccttggtgaactaccacacctgggaaatgctttatttcttttgtaccgtggagtggcttgcatctatgttatatactggtgccatagtaattttcagaagcacagtgaagagtttttattattttcatttttgttgtactctgacatgtgagccctataagtatggcaattttggcacggttttgcagtagaaaaataaatactattactgttctatgctatttccttttttt

SEQ ID NO: 205947 - DNA, 2896 bp, Zea Mays
ggcatatcctgccttggccttcctcacacagttcgatccagcccaaccgaaccaaatctctagcagacgggaacctgggaacctgaaccctcaaaccccgccccttggcctcccatacctttcgcgccgaacacccgccgtcaccaaaactgacggctcctccccctctcccctctccccttttgtgattggactgaagtgggattcatatatcaggtgtttggattcttctctttcctctgctgtatactagcttcctaaaggatcgatgtcggctatctccaatcagaagaaacgcaccttggaagcccttcagcaacagtatactgctgcaaaagctaagaaattgcaagatgaacaggttaagagtcagaagaagagcaattttaatacccctaagcctaaatttgatgcaccaaggggaagcaaaggtctagtaatcactcctcgacgaacatatgcccagccttctcctcataaagatgtagcattttctagttctaattgtcaacaaaagccttccacgtcctcaggtgaagaaatcaatcctgtgtatgctgaactttcttgtgcttttcatgacactttgtccaaaggatttggatggcacagaggttgttcacaatgttatatatgacataattcagaaaggtggagatgctgggaaaattacaaagggagccaaaaagttgaaactggaaaagggatccttttggatgagggaaatttggatccataccattaaaagatcaccactttggatccataccattactatctcacttacatgtgggtccacatgagtcaatgacatgtggggtccatggtatatatctaaagtttggatcttttaatggtatagatccaattgttcctttggataattatgttcaaaggggttctagattagtggatgaccaagcaagatctttgctaattcattcaaagtgataaaaaggcacatgtctctgaaacaacataagaaatgtggttcatttgatttagatggtacattccacaagtactacctctataagctaatgcatgagatgtggaaggactatatcaaagagcttatggatatgagcccatacgactccacagtatccttttgtctgttattttggacctcttatcttccttttttattttctacatatttttagcggaaataaatccatgtgttatactgaaactcaacaaaataaaagacagtctttgagtgttcttgttatgagcggcagatggctgcgagggttagaggacgatggctagggttagagggcgacagctatggttaggggcgctggggaggtcggccgcagggatttgcccacgaccggcaagagagaagggatttttcttctaatctcttgtttaccttcaattgatacaatcactcttcttatatagtgagggttacttgacccctaagcactagatctaatcttattccaaactaatctatctttatctaaacaaccttgaggggtgtgctacagtgcgccgttactgtagtgggccctcttgggccctgacagttctgctgcttttggtctcaaaattttgactcttgagtcagcggcggagtcgctgtccacccctctgggccgccggctgggctcattggcgaagttcaaaagaaatatttctttatatcaaacaaaaatactataatttgctagctaaattttttgcataatgtgggttgtccagacacctgaaagcttttggctacgctactgtctccacttgaacttttttgtcgtttaatacaaaggcaggagaagctacagatcattgcattaatgagaaagtattttagtggacaaccccacacaagcacaccacccaacatatattgaactgggttctattgagaatgctatagtgataggtggatagtataacgtgatggatttaaacccactatgtctaatgtagcaaatagttaaagggcacggatttccagactttatacaatacaataaaatgagctttcttgtataagctacgtcgagaccactcaaagactctagttttcttgaactgaaatttattgaccatatgaattatgaactaaactaaaaacactaaatcatttgttaccatataagcattatattttatgaaatatcaacgaatttgaagatttgaacaaacaagaaagacaataattaacctgagtgtgaagcaagcgcattcagagtagtggaccaactcgagcttttggaaaactttaatgtaaaccctattattgtgcctgttcctgtaatatgtacccttgagctaattacatgtcctgtcttcaccacaggaaaaataaatttactgagaaccttctttcagcagatcttcatggggcccttctaatagtggcagaacacaaagctgcttcatataaaagtgtaaacggaatcatgattcgagatactgcagagacgtttggaattatatccgaggacaaccgcttccgggtttatcaaaagctggttcagttttcgtacttcaagcagaccgctggaagttcacactgatcggcgacaagctctcgcccagggagaagttgaaggaggatcagcgtcaacaacgtgcgcaatcgctaatcagatagtttccaatgtgccagctgttctctcacaaaatttttgctccacggaatacttgcttttgtttaggtcctgccactgtagcatggtagttttagcgctctagaggcgttgacatttcttagcgacttactggcagctcgagttgtggaggggtgtgtgatcatgagccatgtactccggtgactgattattgattagtataggcgaagcaagtccatttacgtttgtttcatctagtcacacaaacctgtggcaaatatttattacgccttgtttctgtcgcc

SEQ ID NO: 205948 - DNA, 2034 bp, Zea Mays
ggcatatcctgccttggccttcctcacacagttcgatccagcccaaccgaaccaaatctctagcagacgggaacctgggaacctgaaccctcaaaccccgccccttggcctcccatacctttcgcgccgaacacccgccgtcaccaaaactgacggctcctccccctctcccctctccccttttgtgattggactgaagtgggattcatatatcaggtgtttggattcttctctttcctctgctgatttgccgagtatcaatccgggtctccattcggtggtggctgaagcttgatttctccatgtcgctccgtgcagcttcatgaatccatgttctcaagtgtatttgatcatgattctataaacaaccatcttatattactaatctgtaggagtttttttacatgttggtggtccaagctgaaaaaaataatttaggacaaagctagattgtcttttacatttgtgattggaaggagtaggctttttcattatccagtggcagttatagacagttgttgcgctcgtgcagcttcaaatattttgggatgttgccatgttaaggtattagccttttgttgtttcagtatactagcttcctaaaggatcgatgtcggctatctccaatcagaagaaacgcaccttggaagcccttcagcaacagtatactgctgcaaaagctaagaaattgcaagatgaacaggttaagagtcagaagaagagcaattttaatacccctaagcctaaatttgatgcaccaaggggaagcaaaggtctagtaatcactcctcgacgaacatatgcccagccttctcctcataaagatgtagcattttctagttctaattgtcaacaaaagccttccacgtcctcaggtgaagaaatcaatcctgtgtatgctgaactttcttgtgcttttcatgacactttgtccaaaggatttggatggcacagaggttgttcacaatgttatatatgacataattcagaaaggtggagatgctgggaaaattacaaagggagccaaaaagttgaaactggaaaagggatccttttggatgagggaaatttggatccataccattaaaagatcaccactttggatccataccattactatctcacttacatgtgggtccacatgagtcaatgacatgtggggtccatggtatatatctaaagtttggatcttttaatggtatagatccaattgttcctttggataattatgttcaaaggggttctagattagtggatgaccaagcaagatctttgctaattcattcaaagtgataaaaaggcacatgtctctgaaacaacataagaaatgtggttcatttgatttagatggtacattccacaagtactacctctataagctaatgcatgagatgtggaaggactatatcaaagagcttatggatatgagcccatacgactccacagtatccttttgaaaaataaatttactgagaaccttctttcagcagatcttcatggggcccttctaatagtggcagaacacaaagctgcttcatataaaagtgtaaacggaatcatgattcgagatactgcagagacgtttggaattatatccgaggacaaccgcttccgggtttatcaaaagctggttcagttttcgtacttcaagcagaccgctggaagttcacactgatcggcgacaagctctcgcccagggagaagttgaaggaggatcagcgtcaacaacgtgcgcaatcgctaatcagatagtttccaatgtgccagctgttctctcacaaaatttttgctccacggaatacttgcttttgtttaggtcctgccactgtagcatggtagttttagcgctctagaggcgttgacatttcttagcgacttactggcagctcgagttgtggaggggtgtgtgatcatgagccatgtactccggtgactgattattgattagtataggcgaagcaagtccatttacgtttgtttcatctagtcacacaaacctgtggcaaatatttattacgccttgtttctgtcgcc

SEQ ID NO: 205949 - DNA, 2145 bp, Zea Mays
ggcatatcctgccttggccttcctcacacagttcgatccagcccaaccgaaccaaatctctagcagacgggaacctgggaacctgaaccctcaaaccccgccccttggcctcccatacctttcgcgccgaacacccgccgtcaccaaaactgacggctcctccccctctcccctctccccttttgtgattggactgaagtgggattcatatatcaggtgtttggattcttctctttcctctgctggtgaggacgtcggtttcttctttttgtgctgtttcccccctttatcttctcattcagcgatcttcaaattcaatatgttgtccgtcggattggcgctctagtctggtgggtttgctttcagatttgccgagtatcaatccgggtctccattcggtggtggctgaagcttgatttctccatgtcgctccgtgcagcttcatgaatccatgttctcaagtgtatttgatcatgattctataaacaaccatcttatattactaatctgtaggagtttttttacatgttggtggtccaagctgaaaaaaataatttaggacaaagctagattgtcttttacatttgtgattggaaggagtaggctttttcattatccagtggcagttatagacagttgttgcgctcgtgcagcttcaaatattttgggatgttgccatgttaaggtattagccttttgttgtttcagtatactagcttcctaaaggatcgatgtcggctatctccaatcagaagaaacgcaccttggaagcccttcagcaacagtatactgctgcaaaagctaagaaattgcaagatgaacaggttaagagtcagaagaagagcaattttaatacccctaagcctaaatttgatgcaccaaggggaagcaaaggtctagtaatcactcctcgacgaacatatgcccagccttctcctcataaagatgtagcattttctagttctaattgtcaacaaaagccttccacgtcctcaggtgaagaaatcaatcctgtgtatgctgaactttcttgtgcttttcatgacactttgtccaaaggatttggatggcacagaggttgttcacaatgttatatatgacataattcagaaaggtggagatgctgggaaaattacaaagggagccaaaaagttgaaactggaaaagggatccttttggatgagggaaatttggatccataccattaaaagatcaccactttggatccataccattactatctcacttacatgtgggtccacatgagtcaatgacatgtggggtccatggtatatatctaaagtttggatcttttaatggtatagatccaattgttcctttggataattatgttcaaaggggttctagattagtggatgaccaagcaagatctttgctaattcattcaaagtgataaaaaggcacatgtctctgaaacaacataagaaatgtggttcatttgatttagatggtacattccacaagtactacctctataagctaatgcatgagatgtggaaggactatatcaaagagcttatggatatgagcccatacgactccacagaaaaataaatttactgagaaccttctttcagcagatcttcatggggcccttctaatagtggcagaacacaaagctgcttcatataaaagtgtaaacggaatcatgattcgagatactgcagagacgtttggaattatatccgaggacaaccgcttccgggtttatcaaaagctggttcagttttcgtacttcaagcagaccgctggaagttcacactgatcggcgacaagctctcgcccagggagaagttgaaggaggatcagcgtcaacaacgtgcgcaatcgctaatcagatagtttccaatgtgccagctgttctctcacaaaatttttgctccacggaatacttgcttttgtttaggtcctgccactgtagcatggtagttttagcgctctagaggcgttgacatttcttagcgacttactggcagctcgagttgtggaggggtgtgtgatcatgagccatgtactccggtgactgattattgattagtataggcgaagcaagtccatttacgtttgtttcatctagtcacacaaacctgtggcaaatatttattacgccttgtttctgtcgcc

SEQ ID NO: 205950 - DNA, 2871 bp, Zea Mays
ggcatatcctgccttggccttcctcacacagttcgatccagcccaaccgaaccaaatctctagcagacgggaacctgggaacctgaaccctcaaaccccgccccttggcctcccatacctttcgcgccgaacacccgccgtcaccaaaactgacggctcctccccctctcccctctccccttttgtgattggactgaagtgggattcatatatcaggtgtttggattcttctctttcctctgctggtgaggacgtcggtttcttctttttgtgctgtttcccccctttatcttctcattcagcgatcttcaaattcaatatgttgtccgtcggattggcgctctagtctggtgggtttgctttcagatttgccgagtatcaatccgggtctccattcggtggtggctgaagcttgatttctccatgtcgctccgtgcagcttcatgaatccatgttctcaagtgtatttgatcatgattctataaacaaccatcttatattactaatctgtaggagtttttttacatgttggtggtccaagctgaaaaaaataatttaggacaaagctagattgtcttttacatttgtgattggaaggagtaggctttttcattatccagtggcagttatagacagttgttgcgctcgtgcagcttcaaatattttgggatgttgccatgttaaggtattagccttttgttgtttcagtatactagcttcctaaaggatcgatgtcggctatctccaatcagaagaaacgcaccttggaagcccttcagcaacagtatactgctgcaaaagctaagaaattgcaagatgaacaggttaagagtcagaagaagagcaattttaatacccctaagcctaaatttgatgcaccaaggggaagcaaaggtctagtaatcactcctcgacgaacatatgcccagccttctcctcataaagatgtagcattttctagttctaattgtcaacaaaagccttccacgtcctcaggtactacctctataagctaatgcatgagatgtggaaggactatatcaaagagcttatggatatgagcccatacgactccacagtatccttttgtctgttattttggacctcttatcttccttttttattttctacatatttttagcggaaataaatccatgtgttatactgaaactcaacaaaataaaagacagtctttgagtgttcttgttatgagcggcagatggctgcgagggttagaggacgatggctagggttagagggcgacagctatggttaggggcgctggggaggtcggccgcagggatttgcccacgaccggcaagagagaagggatttttcttctaatctcttgtttaccttcaattgatacaatcactcttcttatatagtgagggttacttgacccctaagcactagatctaatcttattccaaactaatctatctttatctaaacaaccttgaggggtgtgctacagtgcgccgttactgtagtgggccctcttgggccctgacagttctgctgcttttggtctcaaaattttgactcttgagtcagcggcggagtcgctgtccacccctctgggccgccggctgggctcattggcgaagttcaaaagaaatatttctttatatcaaacaaaaatactataatttgctagctaaattttttgcataatgtgggttgtccagacacctgaaagcttttggctacgctactgtctccacttgaacttttttgtcgtttaatacaaaggcaggagaagctacagatcattgcattaatgagaaagtattttagtggacaaccccacacaagcacaccacccaacatatattgaactgggttctattgagaatgctatagtgataggtggatagtataacgtgatggatttaaacccactatgtctaatgtagcaaatagttaaagggcacggatttccagactttatacaatacaataaaatgagctttcttgtataagctacgtcgagaccactcaaagactctagttttcttgaactgaaatttattgaccatatgaattatgaactaaactaaaaacactaaatcatttgttaccatataagcattatattttatgaaatatcaacgaatttgaagatttgaacaaacaagaaagacaataattaacctgagtgtgaagcaagcgcattcagagtagtggaccaactcgagcttttggaaaactttaatgtaaaccctattattgtgcctgttcctgtaatatgtacccttgagctaattacatgtcctgtcttcaccacaggaaaaataaatttactgagaaccttctttcagcagatcttcatggggcccttctaatagtggcagaacacaaagctgcttcatataaaagtgtaaacggaatcatgattcgagatactgcagagacgtttggaattatatccgaggacaaccgcttccgggtttatcaaaagctggttcagttttcgtacttcaagcagaccgctggaagttcacactgatcggcgacaagctctcgcccagggagaagttgaaggaggatcagcgtcaacaacgtgcgcaatcgctaatcagatagtttccaatgtgccagctgttctctcacaaaatttttgctccacggaatacttgcttttgtttaggtcctgccactgtagcatggtagttttagcgctctagaggcgttgacatttcttagcgacttactggcagctcgagttgtggaggggtgtgtgatcatgagccatgtactccggtgactgattattgattagtataggcgaagcaagtccatttacgtttgtttcatctagtcacacaaacctgtggcaaatatttattacgccttgtttctgtcgcc

SEQ ID NO: 205951 - DNA, 3238 bp, Zea Mays
ggcatatcctgccttggccttcctcacacagttcgatccagcccaaccgaaccaaatctctagcagacgggaacctgggaacctgaaccctcaaaccccgccccttggcctcccatacctttcgcgccgaacacccgccgtcaccaaaactgacggctcctccccctctcccctctccccttttgtgattggactgaagtgggattcatatatcaggtgtttggattcttctctttcctctgctgatttgccgagtatcaatccgggtctccattcggtggtggctgaagcttgatttctccatgtcgctccgtgcagcttcatgaatccatgttctcaagtgtatttgatcatgattctataaacaaccatcttatattactaatctgtaggagtttttttacatgttggtggtccaagctgaaaaaaataatttaggacaaagctagattgtcttttacatttgtgattggaaggagtaggctttttcattatccagtggcagttatagacagttgttgcgctcgtgcagcttcaaatattttgggatgttgccatgttaaggtattagccttttgttgtttcagtatactagcttcctaaaggatcgatgtcggctatctccaatcagaagaaacgcaccttggaagcccttcagcaacagtatactgctgcaaaagctaagaaattgcaagatgaacaggttaagagtcagaagaagagcaattttaatacccctaagcctaaatttgatgcaccaaggggaagcaaaggtctagtaatcactcctcgacgaacatatgcccagccttctcctcataaagatgtagcattttctagttctaattgtcaacaaaagccttccacgtcctcaggtgaagaaatcaatcctgtgtatgctgaactttcttgtgcttttcatgacactttgtccaaaggatttggatggcacagaggttgttcacaatgttatatatgacataattcagaaaggtggagatgctgggaaaattacaaagggagccaaaaagttgaaactggaaaagggatccttttggatgagggaaatttggatccataccattaaaagatcaccactttggatccataccattactatctcacttacatgtgggtccacatgagtcaatgacatgtggggtccatggtatatatctaaagtttggatcttttaatggtatagatccaattgttcctttggataattatgttcaaaggggttctagattagtggatgaccaagcaagatctttgctaattcattcaaagtgataaaaaggcacatgtctctgaaacaacataagaaatgtggttcatttgatttagatggtacattccacaagtactacctctataagctaatgcatgagatgtggaaggactatatcaaagagcttatggatatgagcccatacgactccacagtatccttttgtctgttattttggacctcttatcttccttttttattttctacatatttttagcggaaataaatccatgtgttatactgaaactcaacaaaataaaagacagtctttgagtgttcttgttatgagcggcagatggctgcgagggttagaggacgatggctagggttagagggcgacagctatggttaggggcgctggggaggtcggccgcagggatttgcccacgaccggcaagagagaagggatttttcttctaatctcttgtttaccttcaattgatacaatcactcttcttatatagtgagggttacttgacccctaagcactagatctaatcttattccaaactaatctatctttatctaaacaaccttgaggggtgtgctacagtgcgccgttactgtagtgggccctcttgggccctgacagttctgctgcttttggtctcaaaattttgactcttgagtcagcggcggagtcgctgtccacccctctgggccgccggctgggctcattggcgaagttcaaaagaaatatttctttatatcaaacaaaaatactataatttgctagctaaattttttgcataatgtgggttgtccagacacctgaaagcttttggctacgctactgtctccacttgaacttttttgtcgtttaatacaaaggcaggagaagctacagatcattgcattaatgagaaagtattttagtggacaaccccacacaagcacaccacccaacatatattgaactgggttctattgagaatgctatagtgataggtggatagtataacgtgatggatttaaacccactatgtctaatgtagcaaatagttaaagggcacggatttccagactttatacaatacaataaaatgagctttcttgtataagctacgtcgagaccactcaaagactctagttttcttgaactgaaatttattgaccatatgaattatgaactaaactaaaaacactaaatcatttgttaccatataagcattatattttatgaaatatcaacgaatttgaagatttgaacaaacaagaaagacaataattaacctgagtgtgaagcaagcgcattcagagtagtggaccaactcgagcttttggaaaactttaatgtaaaccctattattgtgcctgttcctgtaatatgtacccttgagctaattacatgtcctgtcttcaccacaggaaaaataaatttactgagaaccttctttcagcagatcttcatggggcccttctaatagtggcagaacacaaagctgcttcatataaaagtgtaaacggaatcatgattcgagatactgcagagacgtttggaattatatccgaggacaaccgcttccgggtttatcaaaagctggttcagttttcgtacttcaagcagaccgctggaagttcacactgatcggcgacaagctctcgcccagggagaagttgaaggaggatcagcgtcaacaacgtgcgcaatcgctaatcagatagtttccaatgtgccagctgttctctcacaaaatttttgctccacggaatacttgcttttgtttaggtcctgccactgtagcatggtagttttagcgctctagaggcgttgacatttcttagcgacttactggcagctcgagttgtggaggggtgtgtgatcatgagccatgtactccggtgactgattattgattagtataggcgaagcaagtccatttacgtttgtttcatctagtcacacaaacctgtggcaaatatttattacgccttgtttctgtcgcc

SEQ ID NO: 205952 - DNA, 1666 bp, Zea Mays
atatcctgccttggccttcctcacacagttcgatccagcccaaccgaaccaaatctctagcagacgggaacctgggaacctgaaccctcaaaccccgccccttggcctcccatacctttcgcgccgaacacccgccgtcaccaaaactgacggctcctccccctctcccctctccccttttgtgattggactgaagtgggattcatatatcaggtgtttggattcttctctttcctctgctgtatactagcttcctaaaggatcgatgtcggctatctccaatcagaagaaacgcaccttggaagcccttcagcaacagtatactgctgcaaaagctaagaaattgcaagatgaacaggttaagagtcagaagaagagcaattttaatacccctaagcctaaatttgatgcaccaaggggaagcaaaggtctagtaatcactcctcgacgaacatatgcccagccttctcctcataaagatgtagcattttctagttctaattgtcaacaaaagccttccacgtcctcaggtgaagaaatcaatcctgtgtatgctgaactttcttgtgcttttcatgacactttgtccaaaggatttggatggcacagaggttgttcacaatgttatatatgacataattcagaaaggtggagatgctgggaaaattacaaagggagccaaaaagttgaaactggaaaagggatccttttggatgagggaaatttggatccataccattaaaagatcaccactttggatccataccattactatctcacttacatgtgggtccacatgagtcaatgacatgtggggtccatggtatatatctaaagtttggatcttttaatggtatagatccaattgttcctttggataattatgttcaaaggggttctagattagtggatgaccaagcaagatctttgctaattcattcaaagtgataaaaaggcacatgtctctgaaacaacataagaaatgtggttcatttgatttagatggtacattccacaagtactacctctataagctaatgcatgagatgtggaaggactatatcaaagagcttatggatatgagcccgaaaaataaatttactgagaaccttctttcagcagatcttcatggggcccttctaatagtggcagaacacaaagctgcttcatataaaagtgtaaacggaatcatgattcgagatactgcagagacgtttggaattatatccgaggacaaccgcttccgggtttatcaaaagctggttcagttttcgtacttcaagcagaccgctggaagttcacactgatcggcgacaagctctcgcccagggagaagttgaaggaggatcagcgtcaacaacgtgcgcaatcgctaatcagatagtttccaatgtgccagctgttctctcacaaaatttttgctccacggaatacttgcttttgtttaggtcctgccactgtagcatggtagttttagcgctctagaggcgttgacatttcttagcgacttactggcagctcgagttgtggaggggtgtgtgatcatgagccatgtactccggtgactgattattgattagtataggcgaagcaagtccatttacgtttgtttcatctagtcacacaaacctgtggcaaatatttattacgccttgtttctgtcgcc

SEQ ID NO: 205953 - DNA, 1615 bp, Zea Mays
cgggaacctgggaacctgaaccctcaaaccccgccccttggcctcccatacctttcgcgccgaacacccgccgtcaccaaaactgacggctcctccccctctcccctctccccttttgtgattggactgaagtgggattcatatatcaggtgtttggattcttctctttcctctgctgtatactagcttcctaaaggatcgatgtcggctatctccaatcagaagaaacgcaccttggaagcccttcagcaacagtatactgctgcaaaagctaagaaattgcaagatgaacaggttaagagtcagaagaagagcaattttaatacccctaagcctaaatttgatgcaccaaggggaagcaaaggtctagtaatcactcctcgacgaacatatgcccagccttctcctcataaagatgtagcattttctagttctaattgtcaacaaaagccttccacgtcctcaggtgaagaaatcaatcctgtgtatgctgaactttcttgtgcttttcatgacactttgtccaaaggatttggatggcacagaggttgttcacaatgttatatatgacataattcagaaaggtggagatgctgggaaaattacaaagggagccaaaaagttgaaactggaaaagggatccttttggatgagggaaatttggatccataccattaaaagatcaccactttggatccataccattactatctcacttacatgtgggtccacatgagtcaatgacatgtggggtccatggtatatatctaaagtttggatcttttaatggtatagatccaattgttcctttggataattatgttcaaaggggttctagattagtggatgaccaagcaagatctttgctaattcattcaaagtgataaaaaggcacatgtctctgaaacaacataagaaatgtggttcatttgatttagatggtacattccacaagtactacctctataagctaatgcatgagatgtggaaggactatatcaaagagcttatggatatgagcccatacgactccacagaaaaataaatttactgagaaccttctttcagcagatcttcatggggcccttctaatagtggcagaacacaaagctgcttcatataaaagtgtaaacggaatcatgattcgagatactgcagagacgtttggaattatatccgaggacaaccgcttccgggtttatcaaaagctggttcagttttcgtacttcaagcagaccgctggaagttcacactgatcggcgacaagctctcgcccagggagaagttgaaggaggatcagcgtcaacaacgtgcgcaatcgctaatcagatagtttccaatgtgccagctgttctctcacaaaatttttgctccacggaatacttgcttttgtttaggtcctgccactgtagcatggtagttttagcgctctagaggcgttgacatttcttagcgacttactggcagctcgagttgtggaggggtgtgtgatcatgagccatgtactccggtgactgattattgattagtataggcgaagcaagtccatttacgtttgtttcatctagtcacacaaacctgtggcaaatatttattacgccttgtttctgtcgcc

SEQ ID NO: 205954 - DNA, 2781 bp, Zea Mays
ctcaaaccccgccccttggcctcccatacctttcgcgccgaacacccgccgtcaccaaaactgacggctcctccccctctcccctctccccttttgtgattggactgaagtgggattcatatatcaggtgtttggattcttctctttcctctgctgtatactagcttcctaaaggatcgatgtcggctatctccaatcagaagaaacgcaccttggaagcccttcagcaacagtatactgctgcaaaagctaagaaattgcaagatgaacaggttaagagtcagaagaagagcaattttaatacccctaagcctaaatttgatgcaccaaggggaagcaaaggtgaagaaatcaatcctgtgtatgctgaactttcttgtgcttttcatgacactttgtccaaaggatttggatggcacagaggttgttcacaatgttatatatgacataattcagaaaggtggagatgctgggaaaattacaaagggagccaaaaagttgaaactggaaaagggatccttttggatgagggaaatttggatccataccattaaaagatcaccactttggatccataccattactatctcacttacatgtgggtccacatgagtcaatgacatgtggggtccatggtatatatctaaagtttggatcttttaatggtatagatccaattgttcctttggataattatgttcaaaggggttctagattagtggatgaccaagcaagatctttgctaattcattcaaagtgataaaaaggcacatgtctctgaaacaacataagaaatgtggttcatttgatttagatggtacattccacaagtactacctctataagctaatgcatgagatgtggaaggactatatcaaagagcttatggatatgagcccatacgactccacagtatccttttgtctgttattttggacctcttatcttccttttttattttctacatatttttagcggaaataaatccatgtgttatactgaaactcaacaaaataaaagacagtctttgagtgttcttgttatgagcggcagatggctgcgagggttagaggacgatggctagggttagagggcgacagctatggttaggggcgctggggaggtcggccgcagggatttgcccacgaccggcaagagagaagggatttttcttctaatctcttgtttaccttcaattgatacaatcactcttcttatatagtgagggttacttgacccctaagcactagatctaatcttattccaaactaatctatctttatctaaacaaccttgaggggtgtgctacagtgcgccgttactgtagtgggccctcttgggccctgacagttctgctgcttttggtctcaaaattttgactcttgagtcagcggcggagtcgctgtccacccctctgggccgccggctgggctcattggcgaagttcaaaagaaatatttctttatatcaaacaaaaatactataatttgctagctaaattttttgcataatgtgggttgtccagacacctgaaagcttttggctacgctactgtctccacttgaacttttttgtcgtttaatacaaaggcaggagaagctacagatcattgcattaatgagaaagtattttagtggacaaccccacacaagcacaccacccaacatatattgaactgggttctattgagaatgctatagtgataggtggatagtataacgtgatggatttaaacccactatgtctaatgtagcaaatagttaaagggcacggatttccagactttatacaatacaataaaatgagctttcttgtataagctacgtcgagaccactcaaagactctagttttcttgaactgaaatttattgaccatatgaattatgaactaaactaaaaacactaaatcatttgttaccatataagcattatattttatgaaatatcaacgaatttgaagatttgaacaaacaagaaagacaataattaacctgagtgtgaagcaagcgcattcagagtagtggaccaactcgagcttttggaaaactttaatgtaaaccctattattgtgcctgttcctgtaatatgtacccttgagctaattacatgtcctgtcttcaccacaggaaaaataaatttactgagaaccttctttcagcagatcttcatggggcccttctaataggtgatccatatatgctggcttactttattcaactttctttaatccaatcatgcttatatgtctttgaggtatccagtggcagaacacaaagctgcttcatataaaagtgtaaacggaatcatgattcgagatactgcagagacgtttggaattatatccgaggacaaccgcttccgggtttatcaaaagctggttcagttttcgtacttcaagcagaccgctggaagttcacactgatcggcgacaagctctcgcccagggagaagttgaaggaggatcagcgtcaacaacgtgcgcaatcgctaatcagatagtttccaatgtgccagctgttctctcacaaaatttttgctccacggaatacttgcttttgtttaggtcctgccactgtagcatggtagttttagcgctctagaggcgttgacatttcttagcgacttactggcagctcgagttgtggaggggtgtgtgatcatgagccatgtactccggtgactgattattgattagtataggcgaagcaagtccatttacgtttgtttcatctagtcacacaaacctgtggcaaatatttattacgccttgtttctgtcgcc

SEQ ID NO: 205955 - DNA, 1852 bp, Zea Mays
acaccacaaagcaatcgagtgcttccaaaccgggctgacccgcgtcgggacgttccggtccgtttcactcgctgttccaccacgcgctcgcccctgatccaccaccgcggccgcgatgagcaccgcctctggcgacggcgcggacgcaggcggcgacggggccgccgcatcggcgcccgccgggaggcggatcccgcccgcctcgtccatgccgtgggtccgcaatctccgccgcttcgtcggcacgggcgccggcctcggatcggaggccctcatggaactggagactaaaaggatattgcttgagattttcaaggagcggcagcggaagagtgccgaggctggttccatcccaagtttttacaagaagaaacctgaagaaggatccattagctctagagttcaaagagaaaattgtgttattgatgatgctactggtgctgaaaagatgaattatgaagatttctgccatatcgccacagtctgcacggagcagattggtcagaaatgcaaacgatttttcagcccttcaaacttcatgaagtttgagaaggatgattctgggaggattgctatcctaccattttatctttatgtcatgcgaacagtttctcttactcaagcaagaattgatatgagtgagcttgatgaggattctgatggtttccttcagcctcatgaaatggaagcatatattagaggactcatccccaatttggcgcaattgcgcgatatgccccactgcatttgttcagatgtactgccgcatagctgcacgcaagttctttttcttctgtgatccacacagacgggggaaagcatgcataaagaaagtgttgctgagcaattgtcttcaggagctaatggaactacatcaggagagtgaggaagaggtaaccgataccgagcaggcagaaaactggttttccttaacttcagctcagcgcatatgtgacatgtttcttgcactagataaggatacgaacggtacactgagcaaacaagagctcaaggaatatgcagatggcacgttgactgagattttcattgaaagagttttcgatgagcatgttcgccggagcaaagttggaggtggaaacagtcgtgccttgatctcaatggaaggggtttccttacaactgcagatattcatactctatttagagacgtacaccagaaatggattgagggagggaactatgagctttgcatagaagacgtgagggatgaaatctgggacatggtgaaacccgcagatcctctcaggatctcgctatcagaccttctttcttgcaagcaaggtgggactgtcgccagcatgcttatagatgtgcgtggcttctgggcccacgacaacagggagaaccttctccaggaagaggaagagcaagtggaagaggcatgagttctccagctgccaagtaaccgtacctggtgcctcaaaattgcaacatcctcggaactgcctgtaccgcagtatcagtcattgtaacctagatagtgtattaaatctgtcaccaccagtttcctgaagctgaagcttgttcttaagtgtgccatagtggtcttcgaaacttgttgaggctagctagcgccgtttggccatattgacatctatccgtgagggcctgattcctcggcagcctgtatgtacatctagatttgcaccaagcgcgcaatcctcaatcctgactacggcatcacgcctgtaagcatatactccgtatgtaatacattgtgtttagttcgtacatggcttgtgggtcgttacttgaatgcctggtttatgccatttttgctgcatagcagaaccttgctatgtatcagtggggactgtgtgatcttgaacgcc

SEQ ID NO: 205956 - DNA, 1945 bp, Zea Mays
acaccacaaagcaatcgagtgcttccaaaccgggctgacccgcgtcgggacgttccggtccgtttcactcgctgttccaccacgcgctcgcccctgatccaccaccgcggccgcgatgagcaccgcctctggcgacggcgcggacgcaggcggcgacggggccgccgcatcggcgcccgccgggaggcggatcccgcccgcctcgtccatgccgtgggtccgcaatctccgccgcttcgtcggcacgggcgccggcctcggatcggaggccctcatggaactggagactaaaaggatattgcttgagattttcaaggagcggcagcggaagagtgccgaggctggttccatcccaagtttttacaagaagaaacctgaagaaggatccattagctctagagttcaaaggttggccaagtacaggtttctaaagaaacaatcagagcttctgctgaatgctgatgatcttgatgccatgtgggtttgtctcagagaaaattgtgttattgatgatgctactggtgctgaaaagatgaattatgaagatttctgccatatcgccacagtctgcacggagcagattggtcagaaatgcaaacgatttttcagcccttcaaacttcatgaagtttgagaaggatgattctgggaggattgctatcctaccattttatctttatgtcatgcgaacagtttctcttactcaagcaagaattgatatgagtgagcttgatgaggattctgatggtttccttcagcctcatatgtactgccgcatagctgcacgcaagttctttttcttctgtgatccacacagacgggggaaagcatgcataaagaaagtgttgctgagcaattgtcttcaggagctaatggaactacatcaggagagtgaggaagaggtaaccgataccgagcaggcagaaaactggttttccttaacttcagctcagcgcatatgtgacatgtttcttgcactagataaggatacgaacggtacactgagcaaacaagagctcaaggaatatgcagatggcacgttgactgagattttcattgaaagagttttcgatgagcatgttcgccggagcaaagttggaggtggaaacagtcgtgagatggactttgaaagctttcttgattttgttttggctctagaaaacaaagatacccctgaaggcttgacatatttatttaggtgccttgatctcaatggaaggggtttccttacaactgcagatattcatactctatttagagacgtacaccagaaatggattgagggagggaactatgagctttgcatagaagacgtgagggatgaaatctgggacatggtgaaacccgcagatcctctcaggatctcgctatcagaccttctttcttgcaagcaaggtgggactgtcgccagcatgcttatagatgtgcgtggcttctgggcccacgacaacagggagaaccttctccaggaagaggaagagcaagtggaagaggcatgagttctccagctgccaagtaaccgtacctggtgcctcaaaattgcaacatcctcggaactgcctgtaccgcagtatcagtcattgtaacctagatagtgtattaaatctgtcaccaccagtttcctgaagctgaagcttgttcttaagtgtgccatagtggtcttcgaaacttgttgaggctagctagcgccgtttggccatattgacatctatccgtgagggcctgattcctcggcagcctgtatgtacatctagatttgcaccaagcgcgcaatcctcaatcctgactacggcatcacgcctgtaagcatatactccgtatgtaatacattgtgtttagttcgtacatggcttgtgggtcgttacttgaatgcctggtttatgccatttttgctgcatagcagaaccttgctatgtatcagtggggactgtgtgatcttgaacgcc

SEQ ID NO: 205957 - DNA, 1785 bp, Zea Mays
agagaggagaggagatgcggacagatctcgagaaataaccaaatcagaaaacggaaccggaaatgcagcgagggagggagggagggaggctgcccattattaactctccctccccccacgcagaagacgacgaccggaagcaaaacagccagccaaccaaccaaccagaccagggatggatggtgcgcaccaagaaagggggcaccgcaccgagccaatgatctgcaagaagagaggtaggatttaggcacggcacctatagcccctgacgagagagagagggagagagatttggtcttggataagagtggagagactggagacgggtgggtggagtgagagaagtcactcggggagcctccagattctgaatctcccgcaacccgtctcatcgccggagtggagttccaggcgagtgattatcgagccagtaagccatttgcaagcactgaactgaaccctcagagcgttgttgcgatggaccaaatcgctacccccgacgaaacagcacatgcctctgcaccttcagttcataagctgtttgatgctaaattaggccaccatagcgtgatggatggcaccttggcatccacgagtcagtcatcaaacatcaagacccagctgatccggtcatcaagcttgtcaaggagcatatcagttaaccttgagaagaggagccctgaatctgatcctgaaagcccacagtctcacgtctcgcatcctaaatttgcagaacccatgttctcgaattcttcgacgttctgcacaagcttgttttcgtcatcttcgacaacagagccatgccgtcaaatgggcactttacctttcctgcctcacccccctaagtgtgagcagcaggtttcagctggtcactcatcgagctcctctctgcttttaagtggtgataccggtttagatgtggctgaacagtcagatgatctgaacgacttgctcaatctttcgggagatgcttctgatggcagcttccatggagaaaacaatgccttagcttttgacgaacagatggaatttcagttcctgtctgagcagctagaaattgccatcactgacaatgagaagaatcctcatttagatgacatatacggcacaccaccacagctgtcatcacttccagtatcatcttgctccaatcagaatctagggtcaccagttaaagtccagcttagctcatctcagtcatcttctagctctgcaacagctaacaagtcaagattgaggtggacacttgagcttcatgagcgttttgtggaggccgtgaaaaagcttgaaggtcctgaaaaagcaactcccaaaggtgtgctgaaactaatgaaggtagaaggtctaacaatttatcatgtgaagagccatctgcagaagtatcggcttgcaaaatatattcctgagcctaaagacgataagaaggcttcctcggaggataaaaaagcacaattaggaaagggcagcattgattcaagcaaaaacaagtgcaaaggcagttgcagctacggatagaggaacatgcaagatacttgcagaaaatactagaagagcagcagaaggccggcaatgtgccactaaaagctccaaccaaagcacaagcaacaaagtcgtcacctgaatcgacgtcagacgagagaactgaatccgaggtagacaccatttctccgcggccacccaagaacaggaacccgggtgtagacgcagaatgcaaatcgccgggaaggatcaagcgaacgaaggttcaggctgatcttgaaaacgagggcctgtgttcatagcgag

SEQ ID NO: 205958 - DNA, 1469 bp, Zea Mays
ccacgcagaagacgacgaccggaagcaaaacagccagccaaccaaccaaccagaccagggatggatggtgcgcaccaagaaagggggcaccgcaccgagccaatgatctgcaagaagagaggtaggatttaggcacggcacctatagcccctgacgagagagagagggagagagatttggtcttggataagagtggagagactggagacgggtgggtggagtgagagaagtcactcggggagcctccagattctgaatctcccgcaacccgtctcatcgccggagtggagttccaggcgagtgattatcgagccagtaagccatttgcaagcactgaactgaaccctcagagcgttgttgcgatggaccaaatcgctacccccgacgaaacagcacatgcctctgcaccttcagttcataagctgtttgatgctaaattaggccaccatagcgtgatggatggcaccttggcatccacgagtcagtcatcaaacatcaagacccagctgatccggtcatcaagcttgtcaaggagcatatcagttaaccttgagaagaggagccctgaatctgatcctgaaagcccacagtctcacgtctcgcatcctaaatttgcagaacccatgttctcgaattcttcgacgttctgcacaagcttgttttcgtcatcttcgacaacagagccatgccgtcaaatgggcactttacctttcctgcctcacccccctaagtgtgagcagcaggtttcagctggtcactcatcgagctcctctctgcttttaagtggtgataccggtttagatgtggctgaacagtcagatgatctgaacgacttgctcaatctttcgggagatgcttctgatggcagcttccatggagaaaacaatgccttagcttttgacgaacagatggaatttcagttcctgtctgagcagctagaaattgccatcactgacaatgagaagaatcctcatttagatgacatatacggcacaccaccacagctgtcatcacttccagtatcatcttgctccaatcagaatctagggtcaccagttaaagtccagcttagctcatctcagtcatcttctagctctgcaacagctaacaagtcaagattgaggtggacacttgagcttcatgagcgttttgtggaggccgtgaaaaagcttgaaggtcctgaaaaagcaactcccaaaggtgtgctgaaactaatgaaggtagaaggtctaacaatttatcatgtgaagagccatctgcagtatcggcttgcaaaatatattcctgagcctaaagacgataagaaggcttcctcggaggataaaaaagcacaattaggaaagggcagcattgattcaagcaaaaacaagaatttacaagtggcagaagctctaaggatgcaaatagaggttcagaaacagcttcatgaacaattagagatgttttcagcactgatgatttcaattcca

SEQ ID NO: 205959 - DNA, 1186 bp, Zea Mays
cagcaaccgtatccaatctttactgcgagtgattatcgagccagtaagccatttgcaagcactgaactgaaccctcagagcgttgttgcgatggaccaaatcgctacccccgacgaaacagcacatgcctctgcaccttcagttcataagctgtttgatgctaaattaggccaccatagcgtgatggatggcaccttggcatccacgagtcagtcatcaaacatcaagacccagctgatccggtcatcaagcttgtcaaggagcatatcagttaaccttgagaagaggagccctgaatctgatcctgaaagcccacagtctcacgtctcgcatcctaaatttgcagaacccatgttctcgaattcttcgacgttctgcacaagcttgttttcgtcatcttcgacaacagagccatgccgtcaaatgggcactttacctttcctgcctcacccccctaagtgtgagcagcaggtttcagctggtcactcatcgagctcctctctgcttttaagtggtgataccggtttagatgtggctgaacagtcagatgatctgaacgacttgctcaatctttcgggagatgcttctgatggcagcttccatggagaaaacaatgccttagcttttgacgaacagatggaatttcagttcctgtctgagcagctagaaattgccatcactgacaatgagaagaatcctcatttagatgacatatacggcacaccaccacagctgtcatcacttccagtatcatcttgctccaatcagaatctagggtcaccagttaaagtccagcttagctcatctcagtcatcttctagctctgcaacagctaacaagtcaagattgaggtggacacttgagcttcatgagcgttttgtggaggccgtgaaaaagcttgaaggtcctgaaagtaagttggtcattctgctttatctctcacatgttttcaggttatcttaataaatagtttgttcatatatttacagaagcaactcccaaaggtgtgctgaaactaatgaaggtagaaggtctaacaatttatcatgtgaagagccatctgcagataagaaggcttcctcggaggataaaaaagcacaattaggaaagggcagcattgattcaagcaaaaacaagaatttacaagtggcagaagctctaaggatgcaaatagaggttcagaaac

SEQ ID NO: 205960 - DNA, 3587 bp, Zea Mays
cgatcaccagtggaggagtataatgccattgagcgatgaggaacgccgcgtcggcactcccgtggtggtcacttgcaatgaccagagacgcgaggtctccgttgcccagaacatcgctaacaagcaaattgatcgcacctttgcattcgacaaggtgctaggaccaaagtctcaacagcaggacgtcttcaaccatgctgttgtgccacttgtcagcgaggttttggacggttataattgcacaatatttgcatatggccaaactggaactggcaaaacatacacaatggaaggaggagggggcaaagcactgaatgctgacctcccgactgatgccggtgtcattccaagggctgttaagtgcatatttgacatcctcgaggcacagagtgcagagtacagcatgaaggtttcttttcttgagctgtacaatgaggagctcacagatcttctagccgcagaggaatcgaaattctccgatgacaagtccaagaagcctttggcactcatggaggatggcaagggtggagtctttgttagagggctcgaggaagagctagtttcttcagctgccgagatctacaggatactggagagaggctctgcaaagagaaaaactgctgaaactcttctcaacaagcaaagcagtcgctcacactctattttctctatcaccatccatattaaggaatgcacacctgagggtgaggaaatgatcaagtgcggaaagcttaatctcgttgaccttgctggctctgaaaacatatctcggtccggtgctagagacgggcgagctcgcgaagcaggagaaattaacaagagtctgcttacacttgggcgtgtcattaatactcttgtcgagcactctggacacataccatacagggatagcaagttaacaagattgttaagagattctttgggagggaagacaaagacttgcattatagcgaccatttcaccttcagtacactgccttgaggagacgctaagcaccctggattatgcgcatcgtgcaaagcacatcaagaataagccagaggtcaatcagaagatgatgaaatctgcgctcatcaaagatttgtattttcaaatggaccgtctcaagcaagaactatatgctgcaagggagaaaaacggtgtttacattccgagggaacaatacatagcagatgaatctgaaaagaagcatgatggaggaattcttcaggctatgtcagagaaactggatcgtttggagcttgttttggaatcaaaagataagcaattggaagagcttcatggactctatgaatctcagaaagtactgagtgcagatctaagtgatcaacttcagacattacagaaaagaatgaaggaaacagagtgcaccctagcggatcttgaaacgagatacatgaaggcaaatgatactattaaggagaagcaatatttgatagaaaatcttcttaaatcagaaaaagttcttgttggtgaagcacaaacactccgatcagagctggagaatacagcaggggatctacatgggctattttcaaaattagaaaggaaggaaaagatcgaagacaaaaatggaagtataattcaatatttccattcccagctgatccaggaaatgaatgtattgcatagaacagtctcaacctcggtctctcaacaggagagacaactaaaagcacttgaagaagagatgcagtcttttgtcacctcaaagggcaaggttgccggaggacttcaagagcatgtaagaaagctcaaagagagctttaattctaggatagcagaattgcatggttttgcaaatgaactcaagcataaatctatgttgagctttgaaaaccttaattcgcaagttaccacacacacatctagccttgaggattgcatgaaggacctattggttgatgccgatgaactactcattgcactacaaaatgggctttctcagcatgaagtgaactttgctacgtttattgagcaacagcatgaggggctctctagaaatttagagggaacaaagtttgtttcggcaactacaatgaacttcttcagaactatagattcacatgcattgggactcctaaagattttggaagaatcaaagatggaacatcaaaagcaactcttccagcttcagaagaagtttgaggccgttgttgctgacgaagagaagtacttgatggagaaggttgcagggttgtttgcagaatcaaacgctcgaaagaaaaatatggttcaagatgacatatgcagcctcaataggactgtttctgagagttcgaacaatttacaaaccgaaactaccaagctgcatgattttacatcttctatgaaagagcaatgggaaggctacatgaagaaaactgaagaggcattccagcaaaatgtatcatctattgaacagaaaagaggcttcttggcagggaattttcagcagtgcaaggaaaaggtagaatcatgctcagaacaatggattactgcacaaaatttggtgttggcacttggaagaaggaatgcagaagccatcggtttggttataagtgatgggaatgaggtgagcaaccaactgggtgcaagaatttcatctgctgttgctgctggatttgaagataatgacatttcaagcaaatcccttctaagttgtattgacgattcattgaagttggaccatggtattcgcgagaatgtgaaatccatcgtcatgacatccagagcacaacttcatgacttggaacatggtcactatgagatgacaaaagcaataacagggaatgccgataggtctctgggagaagattataaggtggatgaagcaacttgttcaacaccgagaaggcgtgagataaacattccggacagccaatcgatcattgagttggtaacccccctagaagatatcgtgaagtcattttgggacagcagaacaccgacgaagcctgctctaaatgcaaaagggaagcagcagttggtagggtcgacgacccctgaaacacaaagagcccctctttccgcaataaattaggagtttcattactgtatatactacaaacattcttgtgtggtcaagtaatgttgatcaagaatgttgagagaagttactggtaaaggagagctgtgtattctccagattcatccaatgtatgaacggaatcatacatccaatgtattttggagtggagtgcaactccaaaatacagagcaaatcgagcatgaccatttgtcaagttccgtgaaatggactcatttatttgtatctatgctgttgtgcacttgtttttaataccttcgtccttaaaccttcgtccgtgaaatggactcatttattcgcgagaatgtgaaatccatcgtcatgacatccagagcacaacttcatgacttggaacatggtcactatgagatgacaaaagcaataacagggaatgccgataggtctctgggagaagattataaggttagcgatacttatcgtctaaaagaagaaggctaagtaggaaaaagtatgatggaatgacgaagggaatgtaaaaaaggacattgagcaggacatttcaagtacatatacaaagacatgctatatacaattttac

SEQ ID NO: 205961 - DNA, 2075 bp, Zea Mays
gttctctcgttcctctcctttcctaccgcacccgtctcctggcgcacctcgcccttgccccaccccggatctcagcctccagtcctcgctgctgctgctccagcgccacgaattgctcgcctcgtctccctctcccttcgaccccgcctcgtcgtggtcgtggtgaccaaggaacccaagctcggtggtggcggatcgggggccggcgacggcgacgacccgagggaagaagctcacgccgctgcacctggccgcgagcccgcgacactagcggaggacaagcgcgacatcctacggtaggccatcacaggggcgttgggggacgacggagtggctcgggacttgttcgagcacgcgttgagcaacgcgccggagaagcttccattgcagtcctcgccgtcaaaatccgtccgggtgtccacgacactggtcgaggtcctgcgccgcgcgcagtccacgcagaaaaagcgcacgaacgctgctcgatctgctccaggactcacagatctccgtggagtagctccacatccccactcgctagataagatcttccctcgcttgtttcttccgctgctggtccgctgtttgctcactgttctgatgttttttcaggtccacatgccgaaagcaatggcgacgctgaggagatagctgctcgtgaagcctgcccgagcctcctcgtgccagatctggccaaacttgaatcagttgtttactgatttctcccgagcatatgtgtgctgctggcaacttaccacatgggtgtttcgtatctgcctccaaactacccaacctaatgcagatgataaatatgtagctattgataaatatatggttctcattacttgtattatttgtcaagtgttcctagaaaactctcagagattattacagttgaagaggccaaagagttctacccactctttgggctaggtgccaatgtggcactcatcttttctggacacacattgaagtatttctcaaatatgaggaagattaggtcctagagtggatggttggccaaattcgttgaaggacatgacgagcatattggttgtaccgggtcttgtcatcactggtgtctattggggagtgaacagatttgttattgatacctcatcaatgtagcggaaaaagaaggtcaaaccaaagctcatcatgggtgagagcttgaaggttctattgtcatcttggtatgtgagggattttgcaacattggtcgttgattatggaataagcattaaccttatcgaggcactgtgttcagagaaccaatcatctgcaaaaatgtcccatagcttgttgtagatatggaaggaagaccacaatcatagagggaaaagaagagcaagttgagctggaggtgttcaacttcactggtgtaggaggagttgccttatcaatgtacaacactgacgaggtgcacttggtgcttgctactattccattaagaaatggccattgtatcttcgcaccaagaacattattttgaagaaatattatggcaagttcaagtatctccagtttcttgttttaccatatccaatccaatttgtgcatgggcctccgacgatgccacggtgatcaaggtagacatcgtcaatagccatgacacgctgctcgccgtcgtccaggtcatcgccgacctcaacctaataatctggaaggcatacttctcctctgatggcagctgattcatggacgtgttcaatgtcaccgaccgtgaagtaacagggttctcgacgcccaatcatcctacatccagaagacgctgtaggtggatgactggtactatctggaggcacgcaacacggtgggcatcgtggcattggaggactacacctccatcgatctcatgggcacagacccgggcctgctattcgaggctatctgcccagttaacaagaagatggcttttgtcggttatgccagagcatgagcttgttcatgttggtccagatacccgcttgaactacaaagttatcgagctacgaacactctcaaaccaagccatattccagatctagtgtcaagttgaaaacaaagcgaatcgctgaatgaaggatagagacggc

SEQ ID NO: 205962 - DNA, 1878 bp, Zea Mays
gttctctcgttcctctcctttcctaccgcacccgtctcctggcgcacctcgcccttgccccaccccggatctcagcctccagtcctcgctgctgctgctccagcgccacgaattgctcgcctcgtctccctctcccttcgaccccgcctcgtcgtggtcgtggtgaccaaggaacccaagctcggtggtggcggatcgggggccggcgacggcgacgacccgagggaagaagctcacgccgctgcacctggccgcgagcccgcgacactagcggaggacaagcgcgacatcctacggtaggccatcacaggggcgttgggggacgacggagtggctcgggacttgttcgagcacgcgttgagcaacgcgccggagaagcttccattgcagtcctcgccgtcaaaatccgtccgggtgtccacgacactggtcgaggtcctgcgccgcgcgcagtccacgcagaaaaagcgcacgaacgctgctcgatctgctccaggactcacagatctccgtggagtagctccacatccccactcgctagataagatcttccctcgcttgtttcttccgctgctggtccgctgtttgctcactgttctgatgttttttcaggtccacatgccgaaagcaatggcgacgctgaggagatagctgctcgtgaagcctgcccgagcctcctcgtgccagattattacagttgaagaggccaaagagttctacccactctttgggctaggtgccaatgtggcactcatcttttctggacacacattgaagtatttctcaaatatgaggaagattaggtcctagagtggatggttggccaaattcgttgaaggacatgacgagcatattggttgtaccgggtcttgtcatcactggtgtctattggggagtgaacagatttgttattgatacctcatcaatgtagcggaaaaagaaggtcaaaccaaagctcatcatgggtgagagcttgaaggttctattgtcatcttggtatgtgagggattttgcaacattggtcgttgattatggaataagcattaaccttatcgaggcactgtgttcagagaaccaatcatctgcaaaaatgtcccatagcttgttgtagatatggaaggaagaccacaatcatagagggaaaagaagagcaagttgagctggaggtgttcaacttcactggtgtaggaggagttgccttatcaatgtacaacactgacgaggtgcacttggtgcttgctactattccattaagaaatggccattgtatcttcgcaccaagaacattattttgaagaaatattatggcaagttcaagtatctccagtttcttgttttaccatatccaatccaatttgtgcatgggcctccgacgatgccacggtgatcaaggtagacatcgtcaatagccatgacacgctgctcgccgtcgtccaggtcatcgccgacctcaacctaataatctggaaggcatacttctcctctgatggcagctgattcatggacgtgttcaatgtcaccgaccgtgaagtaacagggttctcgacgcccaatcatcctacatccagaagacgctgtaggtggatgactggtactatctggaggcacgcaacacggtgggcatcgtggcattggaggactacacctccatcgatctcatgggcacagacccgggcctgctattcgaggctatctgcccagttaacaagaagatggcttttgtcggttatgccagagcatgagcttgttcatgttggtccagatacccgcttgaactacaaagttatcgagctacgaacactctcaaaccaagccatattccagatctagtgtcaagttgaaaacaaagcgaatcgctgaatgaaggatagagacggc

SEQ ID NO: 205963 - DNA, 2012 bp, Zea Mays
gttctctcgttcctctcctttcctaccgcacccgtctcctggcgcacctcgcccttgccccaccccggatctcagcctccagtcctcgctgctgctgctccagcgccacgaattgctcgcctcgtctccctctcccttcgaccccgcctcgtcgtggtcgtggtgaccaaggaacccaagctcggtggtggcggatcgggggccggcgacggcgacgacccgagggaagaagctcacgccgctgcacctggccgcgagcccgcgacactagcggaggacaagcgcgacatcctacggtaggccatcacaggggcgttgggggacgacggagtggctcgggacttgttcgagcacgcgttgagcaacgcgccggagaagcttccattgcagtcctcgccgtcaaaatccgtccgggtgtccacgacactggtcgaggtcctgcgccgcgcgcagtccacgcagaaaaagcgcacgaacgctgctcgatctgctccaggactcacagatctccgtggagtagctccacatccccactcgctagataagatcttccctcgcttgtttcttccgctgctggtccgctgtttgctcactgttctgatgttttttcaggtccacatgccgaaagcaatggcgacgctgaggagatagctgctcgtgaagcctgcccgagcctcctcgtgccagatctggccaaacttgaatcagttgtttactgatttctcccgagcatatgtgtgctgctggcaacttaccacatggggtattcttcatcttactagatcaagtctcacctaaattgaattgaaactgaatatttttaacaaattgagcagcgacttacagctccaggtttataataactgtagctaacatatattttcaatttgcttctactggcagtggcggtgttgtatgtttcttttcttataaggtggtccaaagcaaaatctgagtcgaaatagtcatgattcgacaactatagaaacaacttcatatatatttgttggatgttgccatattagctgtaaaattggccatgattcttggtatattttcatatgacacagtgtttcgtatctgcctccaaactacccaacctaatgcagatgataaatatgtagctattgataaatatatggttctcattacttgtattatttgtcaagtgttcctagaaaactctcagaggcactgtgttcagagaaccaatcatctgcaaaaatgtcccatagcttgttgtagatatggaaggaagaccacaatcatagagggaaaagaagagcaagttgagctggaggtgttcaacttcactggtgtaggaggagttgccttatcaatgtacaacactgacgaggtgcacttggtgcttgctactattccattaagaaatggccattgtatcttcgcaccaagaacattattttgaagaaatattatggcaagttcaagtatctccagtttcttgttttaccatatccaatccaatttgtgcatgggcctccgacgatgccacggtgatcaaggtagacatcgtcaatagccatgacacgctgctcgccgtcgtccaggtcatcgccgacctcaacctaataatctggaaggcatacttctcctctgatggcagctgattcatggacgtgttcaatgtcaccgaccgtgaagtaacagggttctcgacgcccaatcatcctacatccagaagacgctgtaggtggatgactggtactatctggaggcacgcaacacggtgggcatcgtggcattggaggactacacctccatcgatctcatgggcacagacccgggcctgctattcgaggctatctgcccagttaacaagaagatggcttttgtcggttatgccagagcatgagcttgttcatgttggtccagatacccgcttgaactacaaagttatcgagctacgaacactctcaaaccaagccatattccagatctagtgtcaagttgaaaacaaagcgaatcgctgaatgaaggatagagacggc

SEQ ID NO: 205964 - DNA, 2345 bp, Zea Mays
acctagctctcggaaccgagttttttatgcaatcgagttgtgagttctctcgttcctctcctttcctaccgcacccgtctcctggcgcacctcgcccttgccccaccccggatctcagcctccagtcctcgctgctgctgctccagcgccacgaattgctcgcctcgtctccctctcccttcgaccccgcctcgtcgtggtcgtggtgaccaaggaacccaagctcggtggtggcggatcgggggccggcgacggcgacgacccgagggaagaagctcacgccgctgcacctggccgcgagcccgcgacactagcggaggacaagcgcgacatcctacggtaggccatcacaggggcgttgggggacgacggagtggctcgggacttgttcgagcacgcgttgagcaacgcgccggagaagcttccattgcagtcctcgccgtcaaaatccgtccgggtgtccacgacactggtcgaggtcctgcgccgcgcgcagtccacgcagaaaaagcgcacgaacgctgctcgatctgctccaggactcacagatctccgtggagtagctccacatccccactcgctagataagatcttccctcgcttgtttcttccgctgctggtccgctgtttgctcactgttctgatgttttttcaggtccacatgccgaaagcaatggcgacgctgaggagatagctgctcgtgaagcctgcccgagcctcctcgtgccagatctggccaaacttgaatcagttgtttactgatttctcccgagcatatgtgtgctgctggcaacttaccacatggggtattcttcatcttactagatcaagtctcacctaaattgaattgaaactgaatatttttaacaaattgagcagcgacttacagctccaggtttataataactgtagctaacatatattttcaatttgcttctactggcagtggcggtgttgtatgtttcttttcttataaggtggtccaaagcaaaatctgagtcgaaatagtcatgattcgacaactatagaaacaacttcatatatatttgttggatgttgccatattagctgtaaaattggccatgattcttggtatattttcatatgacacagtgtttcgtatctgcctccaaactacccaacctaatgcagatgataaatatgtagctattgataaatatatggttctcattacttgtattatttgtcaagtgttcctagaaaactctcagagattattacagttgaagaggccaaagagttctacccactctttgggctaggtgccaatgtggcactcatcttttctggacacacattgaagtatttctcaaatatgaggaagattaggtcctagagtggatggttggccaaattcgttgaaggacatgacgagcatattggttgtaccgggtcttgtcatcactggtgtctattggggagtgaacagatttgttattgatacctcatcaatgtagcggaaaaagaaggtcaaaccaaagctcatcatgggtgagagcttgaaggttctattgtcatcttggtatgtgagggattttgcaacattggtcgttgattatggaataagcattaaccttatcgagagggaaaagaagagcaagttgagctggaggtgttcaacttcactggtgtaggaggagttgccttatcaatgtacaacactgacgaggtgcacttggtgcttgctactattccattaagaaatggccattgtatcttcgcaccaagaacattattttgaagaaatattatggcaagttcaagtatctccagtttcttgttttaccatatccaatccaatttgtgcatgggcctccgacgatgccacggtgatcaaggtagacatcgtcaatagccatgacacgctgctcgccgtcgtccaggtcatcgccgacctcaacctaataatctggaaggcatacttctcctctgatggcagctgattcatggacgtgttcaatgtcaccgaccgtgaagtaacagggttctcgacgcccaatcatcctacatccagaagacgctgtaggtggatgactggtactatctggaggcacgcaacacggtgggcatcgtggcattggaggactacacctccatcgatctcatgggcacagacccgggcctgctattcgaggctatctgcccagttaacaagaagatggcttttgtcggttatgccagagcatgagcttgttcatgttggtccagatacccgcttgaactacaaagttatcgagctacgaacactctcaaaccaagccatattccagatctagtgtcaagttgaaaacaaagcgaatcgctgaatgaaggatagagacggc

SEQ ID NO: 205965 - DNA, 2503 bp, Zea Mays
gtgagttctctcgttcctctcctttcctaccgcacccgtctcctggcgcacctcgcccttgccccaccccggatctcagcctccagtcctcgctgctgctgctccagcgccacgaattgctcgcctcgtctccctctcccttcgaccccgcctcgtcgtggtcgtggtgaccaaggaacccaagctcggtggtggcggatcgggggccggcgacggcgacgacccgagggaagaagctcacgccgctgcacctggccgcgagcccgcgacactagcggaggacaagcgcgacatcctacggtaggccatcacaggggcgttgggggacgacggagtggctcgggacttgttcgagcacgcgttgagcaacgcgccggagaagcttccattgcagtcctcgccgtcaaaatccgtccgggtgtccacgacactggtcgaggtcctgcgccgcgcgcagtccacgcagaaaaagcgcacgaacgctgctcgatctgctccaggactcacagatctccgtggagtagctccacatccccactcgctagataagatcttccctcgcttgtttcttccgctgctggtccgctgtttgctcactgttctgatgttttttcaggtccacatgccgaaagcaatggcgacgctgaggagatagctgctcgtgaagcctgcccgagcctcctcgtgccagatctggccaaacttgaatcagttgtttactgatttctcccgagcatatgtgtgctgctggcaacttaccacatggggtattcttcatcttactagatcaagtctcacctaaattgaattgaaactgaatatttttaacaaattgagcagcgacttacagctccaggtttataataactgtagctaacatatattttcaatttgcttctactggcagtggcggtgttgtatgtttcttttcttataaggtggtccaaagcaaaatctgagtcgaaatagtcatgattcgacaactatagaaacaacttcatatatatttgttggatgttgccatattagctgtaaaattggccatgattcttggtatattttcatatgacacagtgtttcgtatctgcctccaaactacccaacctaatgcagatgataaatatgtagctattgataaatatatggttctcattacttgtattatttgtcaagtgttcctagaaaactctcagagattattacagttgaagaggccaaagagttctacccactctttgggctaggtgccaatgtggcactcatcttttctggacacacattgaagtatttctcaaatatgaggaagattaggtcctagagtggatggttggccaaattcgttgaaggacatgacgagcatattggttgtaccgggtcttgtcatcactggtgtctattggggagtgaacagatttgttattgatacctcatcaatgtagcggaaaaagaaggtcaaaccaaagctcatcatgggtgagagcttgaaggttctattgtcatcttggtatgtgagggattttgcaacattggtcgttgattatggaataagcattaaccttatcgaggcactgtgttcagagaaccaatcatctgcaaaaatgtcccatagcttgttgtagatatggaaggaagaccacaatcatagagggaaaagaagagcaagttgagctggaggtgttcaacttcactggtgtaggaggagttgccttatcaatgtacaacactgacgaggtgcacttggtgcttgctactattccattaagaaatggccattgtatcttcgcaccaagaacattattttgaagaaatattatggcaagttcaagtatctccagtttcttgttttaccatatccaatccaatttgtgcatgggcctccgacgatgccacggtgatcaaggtagacatcgtcaatagccatgacacgctgctcgccgtcgtccaggtcatcgccgacctcaacctaataatctggaaggcatacttctcctctgatggcagctgattcatggacgtgttcaatgtcaccgaccgtgaagtaacagggttctcgacgcccaatcatcctacatccagaagacgctgtaggtggatgactggtactatctggaggcacgcaacacggtgggcatcgtggcattggaggactacacctccatcgatctcatgggcacagacccgggcctgctattcgaggctatctgcccagttaacaagaagatggcttttgtcggttatgccagagcatgagcttgttcatgttggtccagatacccgcttgaactacaaagttatcgagctacgaacactctcaaaccaagccatattccagatctagtgtcaagttgaaaacgtcaagaacaggtaccacaggatgaggcgcatgaaggatgctgtgacgagttcgtgagaggtctaggtcgtcgtctcccagtcaactttgggttgttggaccgttatctacttataatgtaattatttatttattttgtacataactccc

SEQ ID NO: 205966 - DNA, 1998 bp, Zea Mays
gttctctcgttcctctcctttcctaccgcacccgtctcctggcgcacctcgcccttgccccaccccggatctcagcctccagtcctcgctgctgctgctccagcgccacgaattgctcgcctcgtctccctctcccttcgaccccgcctcgtcgtggtcgtggtgaccaaggaacccaagctcggtggtggcggatcgggggccggcgacggcgacgacccgagggaagaagctcacgccgctgcacctggccgcgagcccgcgacactagcggaggacaagcgcgacatcctacggtaggccatcacaggggcgttgggggacgacggagtggctcgggacttgttcgagcacgcgttgagcaacgcgccggagaagcttccattgcagtcctcgccgtcaaaatccgtccgggtgtccacgacactggtcgaggtcctgcgccgcgcgcagtccacgcagaaaaagcgcacgaacgctgctcgatctgctccaggactcacagatctccgtggagtagctccacatccccactcgctagataagatcttccctcgcttgtttcttccgctgctggtccgctgtttgctcactgttctgatgttttttcaggtccacatgccgaaagcaatggcgacgctgaggagatagctgctcgtgaagcctgcccgagcctcctcgtgccagatctggccaaacttgaatcagttgtttactgatttctcccgagcatatgtgtgctgctggcaacttaccacatggggtattcttcatcttactagatcaagtctcacctaaattgaattgaaactgaatatttttaacaaattgagcagcgacttacagctccaggtttataataactgtagctaacatatattttcaatttgcttctactggcagtggcggtgttgtatgtttcttttcttataaggtggtccaaagcaaaatctgagtcgaaatagtcatgattcgacaactatagaaacaacttcatatatatttgttggatgttgccatattagctgtaaaattggccatgattcttggtatattttcatatgacacagtgtttcgtatctgcctccaaactacccaacctaatgcagatgataaatatgtagctattgataaatatatgattattacagttgaagaggccaaagagttctacccactctttgggctaggtgccaatgtggcactcatcttttctggacacacattgaagtatttctcaaatatgaggaagattaggtcctagagtggatggttggccaaattcgttgaaggacatgacgagcatattggttgtaccgggtcttgtcatcactggtgtctattggggagtgaacagatttgttattgatacctcatcaatgtagcggaaaaagaaggtcaaaccaaagctcatcatgggtgagagcttgaaggttctattgtcatcttggtatgtgagggattttgcaacattggtcgttgattatggaataagcattaaccttatcgaggtggatcctttgattctattgaaaatgcaatgctcaacatttttattgttgttaacttttctaattaaacagaatgcagagtttttaacaacaaaattgttgcttgatcctacatctaattttgcatgtgcctacatttgcttacatcccattatgatctttgagtttctttagatttctaggttgatgaaagtatttactaattcaactgaacacaaacatgagaacgaaccattacgctatataagcggagtatatatccctccaccaaacttagtagtggagtatatcacttgaaaagcttcactactttagggtgcgtttggttgcaatgatgtgacaggacaaaaagggatgatcctcagataaggttgtttagttcatggtcaggggttgggacaagactatctcaatattgtctctcgaaattagagggacgagaggggacaccaggaaacgtctctgtcctggcttatccctaggtgtt

SEQ ID NO: 205967 - DNA, 1544 bp, Zea Mays
gttctctcgttcctctcctttcctaccgcacccgtctcctggcgcacctcgcccttgccccaccccggatctcagcctccagtcctcgctgctgctgctccagcgccacgaattgctcgcctcgtctccctctcccttcgaccccgcctcgtcgtggtcgtggtgaccaaggaacccaagctcggtggtggcggatcgggggccggcgacggcgacgacccgagggaagaagctcacgccgctgcacctggccgcgagcccgcgacactagcggaggacaagcgcgacatcctacggtaggccatcacaggggcgttgggggacgacggagtggctcgggacttgttcgagcacgcgttgagcaacgcgccggagaagcttccattgcagtcctcgccgtcaaaatccgtccgggtgtccacgacactggtcgaggtcctgcgccgcgcgcagtccacgcagaaaaagcgcacgaacgctgctcgatctgctccaggactcacagatctccgtggagtagctccacatccccactcgctagataagatcttccctcgcttgtttcttccgctgctggtccgctgtttgctcactgttctgatgttttttcaggtccacatgccgaaagcaatggcgacgctgaggagatagctgctcgtgaagcctgcccgagcctcctcgtgccagattattacagttgaagaggccaaagagttctacccactctttgggctaggtgccaatgtggcactcatcttttctggacacacattgaagtatttctcaaatatgaggaagattaggtcctagagtggatggttggccaaattcgttgaaggacatgacgagcatattggttgtaccgggtcttgtcatcactggtgtctattggggagtgaacagatttgttattgatacctcatcaatgtagcggaaaaagaaggtcaaaccaaagctcatcatgggtgagagcttgaaggttctattgtcatcttggtatgtgagggattttgcaacattggtcgttgattatggaataagcattaaccttatcgaggtggatcctttgattctattgaaaatgcaatgctcaacatttttattgttgttaacttttctaattaaacagaatgcagagtttttaacaacaaaattgttgcttgatcctacatctaattttgcatgtgcctacatttgcttacatcccattatgatctttgagtttctttagatttctaggttgatgaaagtatttactaattcaactgaacacaaacatgagaacgaaccattacgctatataagcggagtatatatccctccaccaaacttagtagtggagtatatcacttgaaaagcttcactactttagggtgcgtttggttgcaatgatgtgacaggacaaaaagggatgatcctcagataaggttgtttagttcatggtcaggggttgggacaagactatctcaatattgtctctcgaaattagagggacgagaggggacaccaggaaacgtctctgtcctggcttatccctaggtgtt

SEQ ID NO: 205968 - DNA, 1741 bp, Zea Mays
gttctctcgttcctctcctttcctaccgcacccgtctcctggcgcacctcgcccttgccccaccccggatctcagcctccagtcctcgctgctgctgctccagcgccacgaattgctcgcctcgtctccctctcccttcgaccccgcctcgtcgtggtcgtggtgaccaaggaacccaagctcggtggtggcggatcgggggccggcgacggcgacgacccgagggaagaagctcacgccgctgcacctggccgcgagcccgcgacactagcggaggacaagcgcgacatcctacggtaggccatcacaggggcgttgggggacgacggagtggctcgggacttgttcgagcacgcgttgagcaacgcgccggagaagcttccattgcagtcctcgccgtcaaaatccgtccgggtgtccacgacactggtcgaggtcctgcgccgcgcgcagtccacgcagaaaaagcgcacgaacgctgctcgatctgctccaggactcacagatctccgtggagtagctccacatccccactcgctagataagatcttccctcgcttgtttcttccgctgctggtccgctgtttgctcactgttctgatgttttttcaggtccacatgccgaaagcaatggcgacgctgaggagatagctgctcgtgaagcctgcccgagcctcctcgtgccagatctggccaaacttgaatcagttgtttactgatttctcccgagcatatgtgtgctgctggcaacttaccacatgggtgtttcgtatctgcctccaaactacccaacctaatgcagatgataaatatgtagctattgataaatatatggttctcattacttgtattatttgtcaagtgttcctagaaaactctcagagattattacagttgaagaggccaaagagttctacccactctttgggctaggtgccaatgtggcactcatcttttctggacacacattgaagtatttctcaaatatgaggaagattaggtcctagagtggatggttggccaaattcgttgaaggacatgacgagcatattggttgtaccgggtcttgtcatcactggtgtctattggggagtgaacagatttgttattgatacctcatcaatgtagcggaaaaagaaggtcaaaccaaagctcatcatgggtgagagcttgaaggttctattgtcatcttggtatgtgagggattttgcaacattggtcgttgattatggaataagcattaaccttatcgaggtggatcctttgattctattgaaaatgcaatgctcaacatttttattgttgttaacttttctaattaaacagaatgcagagtttttaacaacaaaattgttgcttgatcctacatctaattttgcatgtgcctacatttgcttacatcccattatgatctttgagtttctttagatttctaggttgatgaaagtatttactaattcaactgaacacaaacatgagaacgaaccattacgctatataagcggagtatatatccctccaccaaacttagtagtggagtatatcacttgaaaagcttcactactttagggtgcgtttggttgcaatgatgtgacaggacaaaaagggatgatcctcagataaggttgtttagttcatggtcaggggttgggacaagactatctcaatattgtctctcgaaattagagggacgagaggggacaccaggaaacgtctctgtcctggcttatccctaggtgtt

SEQ ID NO: 205969 - DNA, 1765 bp, Zea Mays
ccgaacgcacgtgctcctcgtcggtcggaactcggaagggtacgccacgcgagagacgcggggagaagcaggcaggaagccaagaaagcaagcacagagccgagcctacagtccaacaagaggaggggagaactcgtcgcgccgcctccgcctccgcctccggtgaagcagctagccatggcggcggcggcggcggcggcggccttcgatgcctacaccgacaagaacgccatcttccgccgcctcaaggccaagcccgagaacaagatgtgcttcgactgcaacgccaagaaccccacctgggcctccgtcacctacggcatcttcctctgcctcgactgctcggccgtccaccgcagccttggggtccacatcaccttcgtcaggtcaacgaacctcgactcatggactccagatcagctgaaaatgatggcgttcggaggcaacaaccgggcacatgctttcttcaagcagcatggatggactgatggtggcaaggttgaggcgaaatacacatcaagagctgctgaactgtacaggcagatgctcaacaaggagacgcaccagcaccgccggcggagaatctgaatgggaagcatgaacccaagtcccccaaagctgctccacgttcaccaaaagctgctactcatcccacctttgccacttccgtgaagaagcccattggcgcaaagaaggttggaggcaagactggagggcttggtgttcgtaaactcacaacaaagccaaatgaaagcctgtatgagcagaaaccagaagagccaaaacctgctatacctgccttgactgctccaactgcaaaaggtggtccatccttgcattcacgttttgaatatgtggataacgaacaatcatctgtttcaagaaccgggggatctggatctcgtgtaaccggtcatgtagcaccaccaaaatcatctgacttcttccaagagtatgggatgggtaatggattccaaaagaaatcaagcaacgcctcaaaagctcagattgaggaaactgatgaagcaaggaaaaaattctctaatgctaaggcaatttcgtcatctcagttttttggtactcaaaacagagaagagaaagaggctcagctatcccttcagaaattcgcgggttcttcatccatttcaagctctgatctttttggccgtaccaatgtggacgattctaacctggacctaagcgctgcagatctcatcaacagaatatctttccaggcgtcacaggatctgtcttcactcaaggacatagctggagagactggaaagaagctgacatctttcgcctccaatttcatcagcgacctggacagaatcctttgagcaggcgaggccatgccagcaaagcatttttcctaccttgcaccagaatttcccttctagcttggattgggtcacggactcgcgggtgcatcaccgacagttgaaagtagttcttgcacagctacagctttgtagaggattcctattacgcatttgtattttgatctttgttgtgagaattgaaggtatttttattcgtgaatacttcacaacggtgaagcatacactacagtttacatacgttgaggttgcttgtatcttggaaggaaggttcatactatgtcctgtgcgtgtggtaaatgaaagatactcttgtcaaggttgactgtcatgataatggaattcgtatctggtcgttttcgtgccggcgtgtctaaagattcagccaacagcatgagaaagctgaccagatgtttgcggctgtc

SEQ ID NO: 205970 - DNA, 2581 bp, Zea Mays
aatacattagattattggagttttagagtccaaaatataaatatacttaataaacaaaaagattataattagagtccggtataaataaacagtgacttgatgattttataaagtactttgtacttccatagggtgggttacttatgtgcatggtacttgcgtcacgcagtttgaataaacaaaaacaaaaacaaaaaaaatatctagatgaataaataaatcggtcacaaaaacaaaaaaactagatgaaaaataaatctagacggacaaatcagcgacataaacgaaaaatatagacaacaaaaaaacaaattagtgataaaaaaatacgtccacgatggagcttgaacccacaacctcaaagttaaaagtcttgcactctaccgactgagctagacatactttgctgttacatatccgagctcggcgccatagatcttggcgccgagctcgataccacgttggcgccacgtcgttcaggttgggccagcgtagcacgcacctcggcgccatagcctatggcgccgagctgtgttacctcggcgccattggctatggcgccgagtaaagggtccaaaaatgacattaaaattttctaaggtccaaacgtgaatttttttctgaggaagggctaaaatataaaaaattcggtgtgtttgtcgctcggtagccagagccggcctgggcctggcctccgctctttctcttccgcattggccaacaaggcaaagagggaacaaaacaaccgcccttgcaagtgggtccattactccattccatcacaatagaacggcagcaacaaggccgccacagagacgcagacgcgatcgccgccggccgtccccgcccagtgcgctctcgcgctacacgtgccatgccgcacgcagcaatgagtagccgccgccgccgccgccgcggcgcttagcaagcgacgatggagatggcgagcgcgcggaggagggcgaagccgccgcaggcggtcggcggaggcggagaccagctcgcgctgtgggccgcctgcgtgctgctctcctcgctctcgctgctcgtcgccgccgccttctccacgggcttcggcggggccgcgaggctcacgctcgaggccggcccggaccgggaccgggaggccgcgggtgcgctcgtgacgagggcaactggcgccggcagcgggaggtactgcgacgaggacgacgacctgatcgacagcatgtccgtggacggggagtgggtgctgctgcgcggcgccgccgagcggctctacgggcccgggcagtgcccgttcgtcgacgaggggttccggtgcagggagaacggcaggccggacggcgactacgccgagtgggcatggcggccgaggcgctgcgcgctgccgaggttcctaactgccaagtggtcgtggtcaagtcccaagcatatgcatgcatcatatatatttgatgtgtgtatgcgtatcagattcgacgcgaggaggctgctggagatgctccggaaccggcggctggtgttcgtgggcgactccatcgggcggaaccagtgggagtccatgctgtgcatgctggcctcggccgtcgccgacgacagggacaagcaggcgagcccgggcggcgccagcatatacgaggagaacgggagccccatcaccaagcgcaagggcttcctctccttccggttccgcgactacaactgcaccgtggagcactaccggtcgccgtacctggtccgccgcggccgcccgccgcgccactcgccgaagcgcgtcgccacggcgctccggctgggctccatggacgccatggcgccccggtggaaggacgcggacgtcctggtgttcaacacgggacactggtggaaccacgagaggctgcagcagttgacggcaagacgttgcggctcaacatgagcgtggaggacgcctacgagagggcgctgaacacgctgcagaaatgggtccaaaaggaagtgaacacaacaaaaacgctggtcgtcctacgaacatactcgccggcacatgtaagggcgtcaaacggtggtggaggtgggtgtgtcagggagacggcgccggagctgaacacgtcgaggatcgcgctgcaccggtggccgggcctgctcaacccgagcccggctttaattgaagcggcgaagaagcggcagctggcgacgatgcacgtcctgaacgtgaccctgatgacggcgcagcggcgggacggccacccgtcggtgtacaacgtccgcctcccgtcgccggcggcggcgcaggagcaggtgacgacgagggcggccgactgcagccactggtgcctgccaggcgtgccggacgcgtggaacgagctcctctacgctttgattctacataggactaggactacgtcattaggaggttcagactgaggtgttttttattggttataatttatttatagaggaactatatatatcttctaataataatgctaatgatgtgtccggcccagttttttttcatttccctctgggcttggctcacggcctgtcctaccctaggctcacgcacactgtgccggtcctgagtttttctgaggaatatataaaccttcaattaggc

SEQ ID NO: 205971 - DNA, 2593 bp, Zea Mays
ataaacaaatgattgtgttaatcttacattagtagtgatgtacaatgataaattttaattaatattaaaaagtataatttcgaatacattagattattggagttttagagtccaaaatataaatatacttaataaacaaaaagattataattagagtccggtataaataaacagtgacttgatgattttataaagtactttgtacttccatagggtgggttacttatgtgcatggtacttgcgtcacgcagtttgaataaacaaaaacaaaaacaaaaaaaatatctagatgaataaataaatcggtcacaaaaacaaaaaaactagatgaaaaataaatctagacggacaaatcagcgacataaacgaaaaatatagacaacaaaaaaacaaattagtgataaaaaaatacgtccacgatggagcttgaacccacaacctcaaagttaaaagtcttgcactctaccgactgagctagacatactttgctgttacatatccgagctcggcgccatagatcttggcgccgagctcgataccacgttggcgccacgtcgttcaggttgggccagcgtagcacgcacctcggcgccatagcctatggcgccgagctgtgttacctcggcgccattggctatggcgccgagtaaagggtccaaaaatgacattaaaattttctaaggtccaaacgtgaatttttttctgaggaagggctaaaatataaaaaattcggtgtgtttgtcgctcggtagccagagccggcctgggcctggcctccgctctttctcttccgcattggccaacaaggcaaagagggaacaaaacaaccgcccttgcaagtgggtccattactccattccatcacaatagaacggcagcaacaaggccgccacagagacgcagacgcgatcgccgccggccgtccccgcccagtgcgctctcgcgctacacgtgccatgccgcacgcagcaatgagtagccgccgccgccgccgccgcggcgcttagcaagcgacgatggagatggcgagcgcgcggaggagggcgaagccgccgcaggcggtcggcggaggcggagaccagctcgcgctgtgggccgcctgcgtgctgctctcctcgctctcgctgctcgtcgccgccgccttctccacgggcttcggcggggccgcgaggctcacgctcgaggccggcccggaccgggaccgggaggccgcgggtgcgctcgtgacgagggcaactggcgccggcagcgggaggtactgcgacgaggacgacgacctgatcgacagcatgtccgtggacggggagtgggtgctgctgcgcggcgccgccgagcggctctacgggcccgggcagtgcccgttcgtcgacgaggggttccggtgcagggagaacggcaggccggacggcgactacgccgagtgggcatggcggccgaggcgctgcgcgctgccgagattcgacgcgaggaggctgctggagatgctccggaaccggcggctggtgttcgtgggcgactccatcgggcggaaccagtgggagtccatgctgtgcatgctggcctcggccgtcgccgacgacagggacaagcaggcgagcccgggcggcgccagcatatacgaggagaacgggagccccatcaccaagcgcaagggcttcctctccttccggttccgcgactacaactgcaccgtggagcactaccggtcgccgtacctggtccgccgcggccgcccgccgcgccactcgccgaagcgcgtcgccacggcgctccggctgggctccatggacgccatggcgccccggtggaaggacgcggacgtcctggtgttcaacacgggacactggtggaaccacgagaggctgcagcagttaggatgctacttccaggacggcaagacgttgcggctcaacatgagcgtggaggacgcctacgagagggcgctgaacacgctgcagaaatgggtccaaaaggaagtgaacacaacaaaaacgctggtcgtcctacgaacatactcgccggcacatggcgtcaaacggtggtggaggtgggtgtgtcagggagacggcgccggagctgaacacgtcgaggatcgcgctgcaccggtggccgggcctgctcaacccgagcccggctttaattgaagcggcgaagaagcggcagctggcgacgatgcacgtcctgaacgtgaccctgatgacggcgcagcggcgggacggccacccgtcggtgtacaacgtccgcctcccgtcgccggcggcggcgcaggagcaggtgacgacgagggcggccgactgcagccactggtgcctgccaggcgtgccggacgcgtggaacgagctcctctacgctttgattctacataggactaggactacgtcattaggaggttcagactgaggtgttttttattggttataatttatttatagaggaactatatatatcttctaataataatgctaatgatgtgtccggcccagttttttttcatttccctctgggcttggctcacggcctgtcctaccctaggctcacgcacactgtgccggtcctgagtttttctgaggaatatataaaccttcaattaggc

SEQ ID NO: 205972 - DNA, 614 bp, Zea Mays
ttagaacgaatatgtgctggagctcctctcgtgacgctcttctctcccggcgctggagctcccctatcaagtcttgtccgacggcgctccggggcgctcctctccctggtcccggcggtgctcctcttcctgatgttgatgattactcggcccagccagcagtgcttccccgccagcagtgcttccccgccagtgcttcctcgctcctggctgtgcttccccgcgaccggttatcgttccctgagacgctcggtctcgctcccgacctcaacaatggagaccccgccaggagcgatgacgtcggcaccggctgttgtcatccccgatgacaaccatggtccgtcactattgaagatgttgaccactcattgattaaggcaccaacaacgcttgaggagatcggtgctctgcctcctatggatgttgtaaagcttcgttaatggtcaatggccaatgagagtgttatgtacccaatgagagtgttatgtaccttaaacttgtatttctaagtactataagtgaactttcagtgaacttgttgttttcagtgagctttcagtgaactgttaaccggtattagaatcaatgaactttcattgaactgtgaactaggc

SEQ ID NO: 205973 - DNA, 286 bp, Zea Mays
  misc_feature (286)..(286): n is a, c, g, or t
cttttactagtaaatttacaaatatggtggttgagattcctagaggcagcaaggttaagtatgagttggacaagatatctggtctgatcaaggtggatcgtgtcctttactcctctgttgtttacccacataactatggtttcattccacgcacactctgtgaggatagcgaccccatggacgtcctcgtactgatgcaggaacaagttgtccctgggtgttttctgcgagctcgtgctattgggctcatgcctatgatcgatcagggtgagaaagatgataagan

SEQ ID NO: 205974 - DNA, 542 bp, Zea Mays
  misc_feature (542)..(542): n is a, c, g, or t
gcttgctcgtgcttctcaccttttgatgacgctgctttttccgttttcgtgcgcctgccctgccccctgagcgcgttcgtgtgtgtgtgtgtttttgtttctcgccgatgcgcatgcgcccgttcggttgggtccttagcttggccttgacgcttctatgtcatggctggagctgctgctctcaatgagggtatcctttcttccgtgtccgagaaaaatgttgctgctcacccatggcatgatttggagataggaccagaggctcctgaagtgttcaattgtgtggttgagattcctagaggcagcaaggttaagtatgagttggacaagatatctggtctgatcaaggtggatcgtgtcctttactcctctgttgtttacccacataactatggtttcattccacgcacactctgtgaggatagcgaccccatggacgtcctcgtactgatgcaggaacaagttgtccctgggtgttttctgcgagctcgtgctattgggctcatgcctatgatcgatcagggtgagaaagatgataagan

SEQ ID NO: 205975 - DNA, 782 bp, Zea Mays
ccacctcacgtcggcgtcttccatcgaagtggccttttcggcggcgagtgagagggcgaggaataaaactcgcgtcgcgcacgcaccgcaacaataatatccttccacgcgaatattcgccgcttcccacctcccccgccccgcatatccttccgtccgtccgttcgtctcccccctttcccttcccctctatttcaccaccccatcagccgcccgccaccgcgacgatcaccggcgcaatccgttcaccccaccactcatccactccccctccgcgaatctcatttctttactgcggctaggaggaggcggcggcggcgatgaagttcggcaagagcctgagcggacagatcgtggagacgctcccggagtggcgcgacaagttcctgtcctacaaggatctcaagaagcgcctcaagctcatcggcgccgggaacggggctgagcggcagccgaagcgggcccgccgcgacgactccggggaggctgacgcggccgcggccgcggcggcaatgacgccagaggaggcggagttcatgcagctcctggaggctgagctcgacaaattcaactcttttttcgtcgagaaagaggaggagtacatcatccgtcagaaggagctgcaggaccgggtggccagggcggccgggcgggagtccaaggaggagctcatgcgggtgcgcaaggagattgtcgacttccacggcgagatggtgctgctggagaactacagcgccctcaactacacagattagggtttctcctacctcccactgcagcag

SEQ ID NO: 205976 - DNA, 2901 bp, Zea Mays
ccagaaacgaaaaacctgcgacacgaaccaaaaccctcctctccctcagtccctctcgagcctcgatccgcctccgccccacgcacccgacatcgctcgctacgcccacttcatcgccgcgggcgcaatgagcgcgggctggaggacgctgttgctgcgcatcggcgatagatgcgccgagtatgggggctccgccgaccacaaggaacacatcgaaacttgttatggtgtactatcccgagaatatgaacactccagagatgcaatatttgagtttctccttcaatgcacagaacaattgcctcacaagattcctttctttggagttttgattggtttgataaacttagaaaatgaagacttcagtaaggctattgtagataccacacaggctaacctagaggatgccttgcacaatgaaaatcgtgataggattaggatattgctgcgatttctcagtggtctgatgtgcagcaaagttgtagttccaagttcaatcatcgagacatttgagactctattatcatctgctgtaacaatattagatgatgagactggcaatccttcgtggcaacctcgtgcggacttctatgtttattgtattttggcttcacttccatgggctggtccagaattgtttgagcaagttccagatgagttcgagagagttttatttggtatacagtcttacataagtatcaggaggcattttgatgatattgctttctctgtctttgagacagatgaaggccactctcctaacaaaaaggattttatggaagatctgtgggagcgcattcaagctctttcccgtaatggatggaaagttaaaagcgttccaaaaccccacttgccatttgaagctcagctggtggccgggaaatcacatcgcctttcccctataagttgccctccacccactccctcgcagtcatcttctgaaatgttaaaaggtcaggagaaacatgaagccgatatgaagtatcctcagagacttcgtagactacatatcttcccaatgaataaagctgagaacatgcagcctgtagatcgttttgttgtggaagaatgcattttggatgtgctacttttcttcaatggatgtcggaaagaatgtgcattttatctggtcagcttgcctgtgtcttatcgctatgaatacctgatggcggaaaccatattttcacaggcattaccaggtgcattcccttcagttgtggtaggagcagtgcatgctctttttgacagaattagtaacatggatatggagtgccgcaccagacttatactatggttttcacaccacttgtcaaactttcaattcatttggccttggcaggagtggtcttatgtcaaggacctcccaaaatgggctccacaacgggtttttgtccaggaagtactggaaagggaagttcgcttgtcgtactttgaaaaaatcaagcagagtatcgaggatgctgctgagttagaagaactgctacccccaaaagctgggcctaatttcaaattccatagcgatgaaagcaacgaaagcactgatggcctgaagttatccaaggaacttattggcttgattagaggaaagaagtctacatatgatattattttatgggttgaggaacaaataattccaaaaaatggtactgaatttgcacttgatgttgttagccagacgcttcttgacatgggttcaaaaagtttcacccatcttgtcactattttggagagatataataagataatctctaagctatgtccaaatgaggaaatgcagctactgttaatgaatggagtcagtgcttattggaagaacagtacccagatgactgctatagctattgacagaatgatgggttatcgcctgatatccaatttggctatagtcaaatgggttttttctcctgccaatgttgagcaatttcatgtttctgatcgaccatgggagattcttagaaatgctgttagtaaaacatacaatcggatcagtgacctccgcaaagaaattcaatcactcaagaagggtcttcaagttgctaaagaggctagtgcaaaaaacagaaaggagctggaggaggccaaatcagtgcttgagattgtagaggggcaacctgcaccagctgaaagaccaggtaggataaggcgactagaatcacatgtcaaaaatgcagaggatgaggaaagaactcttgaagaatctttagaagcgaagggagttctccttgctcgggctcatgaggaaagcaaggacttgcttaagctactctttaagagctttgttgacgtgctcactgaacgtttgccgcctgtctctgttgatggggaaattcctaatctgcgcagtggagatcaaaatgtaaattttgcagctcaaaattctgaagcagcaacaatggagattgacaatgaaaatggagcagataataatagtgaaccgaatgagcgaaacacaaaaaatgcatataatgttggagagcttgagcagtggtgtctctgtacactgggttatctcaagtcattttcccgccaatatgcaagtgagatttggtcaaacatagcaatgttggatgaggtcttcgttggggatgttcacccacttatccgaaaagctgctttctctggtttgcgcagatttaccaatgaagggtctcatccttgaatttgacaccatacccatattctttatagaactgagtgtattgtacctgtatgatagaggacaacttttctccttgtttaactaatcaaataggcataaacatttttccttggtttcgtatgcctttttttctgttcccttgcttctcggccactaaatgaaaatttttaccaggtaactaagttaatgttcttttctgaagtaacatcagaatatgcatggttcagtgttaatttaaccta

SEQ ID NO: 205977 - DNA, 688 bp, Zea Mays
caaaatcctatttccctctcccacaccacgcgccgcgcctgtctgattctgcccgccagccacgcccgcagatctcgcttcggcgccctgattccgtcgtatgcaagtttacctctgcgcgtccctgctaaccgttccacatagtatcacaaaaaaatggcactaccttggcatcgtcttccccaattcgggtgtatggaattcttggagcaaaggaccagcacacggtcacctccaaagaaagacccaggctgcttctacaaggagctgtacaaagtgcttcacgactgcagattttggatgagatgatggataatggttttccactcacaactgagccaaacatcttgaaagagatgatcaccccacctaatattgtgaacaaaatgttgaatgttgttactggcaagagttctacccttggcagcaaacttccagatgcagctgcttcttttgtaccttggcgaagaacaacagtcaaggatgcaagcaatgaagtctatgttaacatagtcgaggaacttgatgcatatgtgaacagagagggggttcttgtgaaatgcgaagcatacggtgaagtccaagtaaactgcagcctcccaggatgaccacatgtaagcaataggtgctgctaccagcaaaaaggagactgcagcagcagggaagggaagcaaacgatcaacctcgc

SEQ ID NO: 205978 - DNA, 1714 bp, Zea Mays
cttgcttcctcttcctcctccatattggcagcttgctgcccacagcctagcggtcgactctctatttttggactcactgttgtctagccgcttgtttcttgtggacaccttaccttagccttggcgatgagtgatgcttggcagcttgccatatcatatcctgttggaatcgaacctgcttctgattcttccttcttgtagtttacctctgcgcgtccctgctaaccgttccacatagtatcacaaaaaaatggcactaccttggcatcgtcttccccaattcgggtgtatggaattcttggagcaaaggaccagcacacggtcacctccaaagaaagacccaggctgcttctacaaggagctgtacaaagtgcttcacgactgcagattttggatgagatgatggataatggttttccactcacaactgagccaaacatcttgaaagagatgatcaccccacctaatattgtgaacaaaatgttgaatgttgttactggcaagagttctacccttggcagcaaacttccagatgcagctgcttcttttgtaccttggcgaagaacaacagtcaaggatgcaagcaatgaagtctatgttaacatagtcgaggaacttgatgcatatgtgaacagagagggggttcttgtgaaatgcgaagcatacggtgaagtccaagtaaactgcagcctcccaggatgaccacatgtaagcaataggtgctgctaccagcaaaaaggaagccagaggccttgctgctggaccaagattagtccaaaggttatctggttttggggaccatcgatctgcagacaatgtggcaagagtggtagaggaggagcttgcacatgcctctatggtttgtattgatttctcaaagaatgccaagtgatgggtcgtgaaccaagcaatactttccaagacttgataaaggagtacgaagttgtactgaagggtccattcaactacacggctcgtgatgaagctggtataccccgagaatggttcatgatagattagcttgtattgttgagatggaaaaagagaatgcaagtttgggataagcagttgaagtctcatcctccaaagaacgttgaatcagaaatcttgtgtgagcatatcaagaaagagagggagacagcaaaggctggaaaacgaccatactatctgaagaaacctgaacttcgcgaaaggaagctaatgaacaagtacaacgagctcaaggaggcaggaaagcttgatgcattcatggaaaagcggcggaggaagaatgcctccaaagatcatcggttcatgccgtaccgacgcagtggagatgcataatagtttcctgattctggagacgagcgaaaggatgattttaggacggtgttctcatggtggctgggacactggacagtcagtgtctctgttactttgttgccctagccgtacaatcgtcagctccgtgcacaatctctactacttcttaagaatagagtgcaggcgtccacagtggttttttatgtttctcatttcactctctgcattttcagttacaactacactgcatatgctggcagatttgttcatatattactccagctgacattttcactatcgcaacagcatctctactactatttgtttttttgcatataaatgtattttaacatattgattctgtagcaacgcacgggcatattcctagtatataattatccatctaatcaac

SEQ ID NO: 205979 - DNA, 1541 bp, Zea Mays
ctcttccccaatctctctgtcggaaaccgagtcctcttccaccgcacgccaccggccaccgcgtcccctccaacggccaccccgccccctcgctccggcccctccaccggccaccgggcggcccgccccctcgccccggcccctccaccggccgccgcgcgcccgcgcagctccggcggcgcgcgcccccctcggcccggcagcgctaccaccgcgcctcggccccgccgcctccaccgcgcctcggccccgccaccgccctcggactgtagtttgagataagctagcaatttttttaggccagtacgcatcacttctctgttttttttttctgctgaagtaatttgagataaatttgtgttttacctgaagcttctgagctctagactggtgcttccatttttagcacaagctagttatgttagcttctgtttctctaatgaaggtgctagcttccatttgatctgaacacgcctaactgagtggcaagtcttccttgtcaattatgttacccagtcagtaggtttcccttgtggcatgtttaactttttaataaaaaaacaatctgacatgttattgctcagttacaggcttggcaactctgaatcggctataatgaacatgttcagttttagttccttctgccttgtgatgcagcaacttccacaggacctcaagccgccatctcgccacatgacctgattgcagccttgcaggcacagcacagaagcagggttgcgccacctctctgagtgtcataggttggtgcataggcacacacacacaggtagccatggcatcgcgtaagcttctcgtgggcctcacagccaggaggcagctacaatcccgcactcagcaactattctgggccaccagtctccctgaagctaccacttctcggtccctaatggtggctgctgcaatggcgcggttatcggacaggtcttcagctccttttatcttatcttcaagggccatctcgtcgacgcagcctgtgatgcagtctacaggagatgtgtctggctctagcccatctgcagtggatcacaagttagcaatgcaagaggatgagtttcacaaattagcagatgagacgattcatgatttgcttgaaaaacttgaggagtatggtgactccattcagatggatggtttcgacatagagtacgggaatcaggttttgacattaaggcttggggatttggggacatatgttataaacaagcaaactccaaacaaacaaatttggctatcttctcctgtgaggtacagtaatgcatcttagtgtatcagttgttgtttgtttcattatatgtaatagacacctgaacttgattccaatcgtcttgtctgccatgctatattatcctcctttctcaaggtagatgcatattgtattacactattagttaattttactagtatcgtgaacctgtcactgtgtaaggacttgggagtactcagtagatgtcatttttcgaatattgtatatgtccaccctctgtgatttgtggttcagtttattcgatatggttatttgc

SEQ ID NO: 205980 - DNA, 1496 bp, Zea Mays
gccggaggaagcaggagtgatgaacttgggctcgcgccgctccgcgctctgccctctgcgaaccacgacgaggtcttcctgacatggccggcgcccgcggccgcgcgacgccgacgcgaacacctccgcggtcgtcttccccggcgccccgcaccgaggcggtagtcccgccggactgggactccgctgtatcgaccgtctcctcccacccctcgcccccggtggtcgtcgtgtgcgggcccaagaacagcggcaagtccaccttctcccgcgtcctcctcaacgcgctgctccccaggcatggtaaggttgcttatctggacaccgacgtggggcagccagagttcgggccgccgggatgcctctcgttcaatgtcctcgacgaagctattgcagatttgatgaacccaagcctacgggaagctgaaaggtgctacttctttggtgacatttcatcgaaaagagatccagaagcatatctgaattgtctattccattcgtatgactactttgttggaaaatatcgatgcgatgagaatgaaatgctgccactaattgtcaatacacctggatgggtaaaaggtgctggctttgatatgctcgtagagatgctaagatggtgggcaaacaggacctatgatgattaacatcgatgctgcatttcatgatgcctcaaatagatcgttgttaattcagaaagattcatgtggaatgcgtgaacgccgacttgtagagtacttgaaacaatgttttccaagcaacatctctctttcaactaataaggagcttgcttatgccctagcttcacttccaccttatcaagtaccattttcagatgttgcaattgtgcatcttcattgtaaggtacctgctggtgagatatggcatagtctgaatgcaaccatagttggtttggcagtttccaatgcatctgagggaaccagatcaatcccttactgtgttgggcttggcatcataaggggcgtcgatattcaaaaaggcctgttatatttaataactcctgttcctctccagcgcctgcaatgcgttgatcttttgcaacagggtctcattgagatacctactgctcttttgcaggtccgcggatgtgtgtccccctacatgtcgacgaatgtgcttcacaagatatcagaaagggatttgtatgctgggtgatgttggcgcaggcagtgtcggagatagacctgtgtttgctggtttctgacccggagagcatgaaccggactgtagtttcaggctgccagcggttgcctccagctcctaagattagatatgtaacctgtgctgtgcaactcctctgtcaaattagtagtcacggagatctgaatgcaacttcctggattcattgaattgaaatactataattctgtggcaagttactccctttgcttttgcctttgaattgattagtatagagaaagatattgattaattggtatcttggtattatttaaagaaagagtggtatatcttag

SEQ ID NO: 205981 - DNA, 1219 bp, Zea Mays
gttagtacatacgcttgtgctggttgggcgtcagtgctgatttgatgaacccaagcctacgggaagctgaaaggtgctacttctttggtgacatttcatcgaaaagagatccagaagcatatctgaattgtctattccattcgtatgactactttgttggaaaatatcgatgcgatgagaatgaaatgctgccactaattgtcaatacacctggatgggtaaaaggtgctggctttgatatgctcgtagagatgctaaggtatatctgccccacaatagttgttcagatacgcatcacaatcaagaacaaaaatctccctgatggagggttttggttagatggtgggcaaacaggacctatgatgattaacatcgatgctgcatttcatgatgcctcaaatagatcgttgttaattcagaaagattcatgtggaatgcgtgaacgccgacttgtagagtacttgaaacaatgttttccaagcaacatctctctttcaactaataaggagcttgcttatgccctagcttcacttccaccttatcaagtaccattttcagatgttgcaattgtgcatcttcattgtaaggtacctgctggtgagatatggcatagtctgaatgcaaccatagttggtttggcagtttccaatgcatctgagggaaccagatcaatcccttactgtgttgggcttggcatcataaggggcgtcgatattcaaaaaggcctgttatatttaataactcctgttcctctccagcgcctgcaatgcgttgatcttttgcaacagggtctcattgagatacctactgctcttttgcaggtccgcggatgtgtgtccccctacatgtcgacgaatgtgcttcacaagatatcagaaagggatttgtatgctgggtgatgttggcgcaggcagtgtcggagatagacctgtgtttgctggtttctgacccggagagcatgaaccggactgtagtttcaggctgccagcggttgcctccagctcctaagattagatatgtaacctgtgctgtgcaactcctctgtcaaattagtagtcacggagatctgaatgcaacttcctggattcattgaattgaaatactataattctgtggcaagttactccctttgcttttgcctttgaattgattagtatagagaaagatattgattaattggtatcttggtattatttaaagaaagagtggtatatcttag

SEQ ID NO: 205982 - DNA, 3676 bp, Zea Mays
atgtgcactcgataagttttcctggtgtccggtccggctacccctgttccctctcgcagtcgcagacttctcttctcgccaaaccctaatcctgctcctgcctttctcgtctccaaccgttggccgagcagtagcggtggcgatggagggcaaggaagaaggtcggatcttcgtgggcggcctgtcgtggcaaacggacgagcgcaagcttgaggacgcctttggccgcttcggcaaggtcgtcgacgcccaggtacccgtgcccccagtccgtctacgttagtgctcatgcccgccccaggtagttttgctagatccatcgatttcgtgttgtccgcggtgcgatattgttgggtatgatggttggaagatcggtgggtgaggtggaaaggcggatctgtagattgtttttgcgttctgtcgaacagagatgtgtgttttgcgtaggaaggaggattgcgatttctgctcacttttatgtctttcgttgttcagcaagaggcgtaacttggtgagagaaaatatttttcttctctttagtttgcagtagcaaagttgaattctttggcatcactgagagcgaaattaaaatgatgaaacggtacttcttgttgcgatgaaccaagaaattagtatcctgtagacctgtacaaacatgcatccttggattccttgcttcttaaagagagtaaggacctaaatagtctagtgtcatttgtctattatggttcatgtttatttttctatgttgatagcttgctctcagaaattcatgaatactcactgttcttgtttttccatctttctttgcaactgggatctgttctctcggccattctttgtttgctgaggctgaatgagcggcagatttccagagttggaatgcaaagcgaataagcgatgcttgttgctttctagagctgaattgctgatgtggttcattacagttagatgcctgatttgagcactttgtctatgaaattggattgaacaaatggagaacagccattggtcctactgttgctggtgttctgctatttcttagttcagtttcatggtctgatgaaagagagggaatgttactgttgatttttttggctagaattggatgaacaacacctccttagtttctgatctgtgggaattctgctcggccagcacgagttgtgcacacctgcagagaactacaacagggactatgctcatgacactgattgatagatgaagctgtgtgactaattggcagatctgcacacgttactgctccagtgggttgaactgattttattggctgataagatgcaacagtaattatcaatttgttataagtgtttggttgtgttgactgccctgggcatgttttcagttgagttcattggcatccttgctgcagatagaatcatgactgcagttgacttcttttgtttttattgatatgacttgcctacatagctcctcgtcctgctacctttgtcagcatttagtgaactggcagcaattttttttcttttctcgccttttgtgttttgttagaactagatagagcttgcaatgatatatggctgcaactctttacgcaagggcttgtttcttaacagctccagcaaaatttgttttttgcacttttttctgtttaaaactcaagcaacttcttttcttaaggactcccttttgaagttctttcttgtgtaatgcatttttagtaccattgctgcttgagccttgaggacagtaaatgattctgccatccggaccaatgctgggtgctggagcagaaaattgatgctagcctcaccagtgtggaccctttcagccagctccatgcgatgcattgcagttttgggaagacaaactgggtaactaggagcccagcttaccagcagctcagacttccactgttgttaccatggaaatgcaagtcgtttggctttaggtttgtgcattggtttaaatgatctggtatgcaaactagagaatatggcagtggacatacctgctacattgtcctgtcaccagaatatgctgacatttttgagaagttagttcatgtcggtaacggtaaaattggttccttgttggaaatagcccagttctccaaaacatggttcccagaggctctatagctttgctccttgtccgtgttaacgagctttgctgtcttgggactagactttttcatgaaggtagttacagctagatgcatctgtgtcaggattatgatttgttcttgaattaccgagatccaggaataacctaatctcagtgcttctcttctgagatcatggtggagagacacactaaccgccacaggggctttggcttcgtgacatttgaagatcggagggcagttgacagcgctattaaagagatgcatggccaagaaatagatggccgtaccatctcagtgaacaaggctgagcctaagatgaatacagatgacacaaggtatgccggtggtggtggacgaggagagtatcgtggtggtagaggttcccatccaagttcagtggtggcagtggcgttggcaggggagaccgcttttctggttcagataggtttggtgatcgttacatggatgatcgttatgatggtggtcgctatgggtaccgtgatcaagctgatgcaagggacaggtatgctggtggccgagatcgctatgccaatgaccgttacccatctggtggcgatcactttggtggagacaggtatggaggtggtccggattgttatgtgccaagtggttatggtagggagcgagaaagaagctacgagagagatggagttcgtggtggtggtggcggcggcggcggctatgataggagtggcccaaggggtggtggtgggtatgacagggatggtccacgcggcggtggaggaagtgcacgctatgatggaggaaattacagggagaggcctgggccatatgatcgccctagcaggggaggacgttttgatgatcgctactgatgaactgcctgtagactcaagctccttgtcttggtagtttaatgtttgcagttttgcatggccgaatgcttaatgggctatggaagatgcttaatttatccctcttcggcactttaatgtctgctctttatttcaaccagtactggggcactggtttgccttgataagtttatccagctgacagtttttgcatgagatgagtcatgctctgggctattaccctgcctgttggatatttcagtagctgaggtttgcagtgatcgattgtcattgttgatctgaatatctggtatgcgtggactatgtttaaagtgattgcctgtcatcattggtctatatagttggtgagcatatatatgttcagtgtcggtgcttgtcattgttgttggtctggatatctaggcttgcaaggatatatttgcagggctgagttgcaagggcttaacagaacaatagccaaagtaccttatattttagtagctggagaccatgttaattatgctataattagctggagaccatgtaaatttagcttagtttttgtcggcggtctgacttttggtgggattttatcttgaacaaacaccgtccctgacatttaagagtgtagagccgactaacagtagtcaatctctatttcacatttgtctaggatcgacttcgcacttgagaaaaacgattatattgataagaaaggaaaaagataaat

SEQ ID NO: 205983 - DNA, 2827 bp, Zea Mays
cgagtagcagagtctggccgccttgtcgcgacgcgacgcgcgatcccatcccttcccatccagcgcggctccaatcctgtcgcggccattaaaagcttccctcccctgcctctctgctccgctcgtctcttctggaaccgtccctcgctcgtcatctttccgccttcgctacgcaattcctgtccacgctgcgggccagttgtgacgaccgcgaagctcgtcagagaaagaagagaggccggcaggcgggcggcgatcggagatggcgccagagaagccccggaaggagcaggaggaggaggaggatgagttgatgctggaggatggaggcatcgaggagagcccgcgccgcagcttcgaggactgcggtgattccgacgaggaggacgatgacaacgatgaggagcgggacggcgacggcgtcggttcgccgcgctccttccagtcccacaagtggccgcagagctacagggaaacaactgatacttacacaatcgctgcatcaccgagctttggttacttgggcccttctacaagcaaatactcactcctcgatcttggtcgtagcggtctgggttctgacctgaagttgcctctattgtcggacaaggctgacggaaagcaagattctgtcaaaaccctgccgaaaacccttggttcaataagagatgagagggtctcatttcaattgcaacacacgggagaactctacattactcaagggtgcaatgtgacgcaaacagtcttcaatgggattaatgtacttgcaggcgttggccttctttccaccccgtttacaattcatgaagctggatggactggccttgcagttctagtatgttttgcgattgtttgctgttatactgggattcttctgaaacattgttttgagagcaaagatggtatctcaagttatccagacatcggagaggctgcatttggaagaattggccgtctgttgatatctgtaagttttggtgtctttagatgaaaggggtagcttaggagttaggactatctttcaatagtatgtagacatgtctgtgcacttatcatactcacatgcctccatctaaagtagtctgttgatctgcacctaaccttcacttccgtatctgaatgtttgcggtttggcaaaaatagacacctactcaaactctccactctccttttctcttttttgaaatgctaacacctgttcattatgcaaatcacatgaatgaatctaagattttacaatcaataattggcacctcaaggttagaaaaattcgcatccctctttgtttttgtttcatgcaagagatcttttctaaccttaattatgataagtgtaggaaagaaaaactaactgatggttatttttcgtgcagattattttatataccgagctatatacatattgtgtggaattcattattttggagggtgataacctcacaacaatttttcctaaagctggaattgattggtttggcattcatgttgatgggaagcattttttcggagtgttaactgctattttagtgttgccaacagtatggctgcgagatcttcgagtgctctcttacctttcagcgggtggtgtgattgcaactcttctcgtattcctgtccgttggtttagtcggtgctaccgatggtataggcttccattcaactgggaaggtagtaaactggagtggcatgccctttgccattggtatttatggattttgctactctgggcattcagtatttccaaatatctaccagtcaatgtccgatcgctctaagttccctaaggcactgttcatatgttttgcaatttgtacagctatgtatggatcttttgctgtcattggctttctcatgtttggagagaacacattatcccaaatcactttaaaccttccaaagcattcgattgcctcaaaagttgcactatggaccacggtgatcaaccctttcaccaaatatgccttgctgttaaacccactagctcgaagtttagaagagttgcgtcctgaaggttttttgaacgaaacatcatgctctattatactgaggactgcccttgttgcgtcaactgtatgcattgcctttcttctgccgttctttggtcttgtgatggctctcattggatctcttcttagtatacttgtggcggtcataatgccagccctgtgcttcctgaagatcgcacaaaacaaagcaacctgtccacaggtgatcgcgagcgtcggtatcgtaatactgggcgtcgtcagcgccgcgctggggacctactcgtccgtgaaaaagatcgcagaaaactactaggctcttgggacagtttctctccgcagaggctactaccacacggttccacgtacgtccggccggagctggggaatggtcagggtttacgtacacgatctcaaagttttgctagaactaccgaaattccctgtagattattactgttatgattcggaccacaatagtctacttatacaaacaaaaaaaaagaactgcatcatcacgtcacttggaataatgtaatcatgccctcctttttttagccgaggtccctaccatctcgctgtactgtagcaggttgctgtgctggcgactgttccctatacaataaggctctgctttgtgcaattgccaattgaggtatctgtagataagctctctatctgggctttttggggacgatggatcggatctgaaagcttgaaaggtgcccattcctccggcgctccctccctcctcgtaggtgggctgggttgggcctttattatgtctcctgtatcctggaagaccgacctggttttgttatttgctgggtagacgtggacttag

SEQ ID NO: 205984 - DNA, 829 bp, Zea Mays
cctgcatccggatttgaaatctagtagttactagtgtaacctagtggtgtgttcgggaacgtttccgcgggcgggcggcggcccccagtggcgaagatgatccgactaccgacgtacgcagcaggaggcgtccgttgccatcttcttctcctttgagtatatgatactagcaacatccacagtatcaacattcgtgaagtatatattctatgttagtgacatgctaatggaagattatgtgcgctacagaaagatcacttccaacatgaatgaacgctttccagatgctacatcagaagagctcgatgtgagtaatgctacatgtattatttgtcgtgaggaaatggctacagcaaagaaactgctcgatgggcatctgttccatgtgcattgtctaagagaaataggagaacaggctgaagaagaggttcctctacggcttctccatgggagcttcagctccacaggaaggatcctctctactgggactgtgccgtgctgcttgccccaatgtgcaagccaacagtagtgtcgaaggagcacaagatgatgtgtgagcacaaagtggccagcaagaatggagtcatggaacatcgacaggaggggtgcgacagcggcaaccgatgtatcgatcccttggacaatctggttttgacatgatgcaaatcaatctgctgtacattgtattctgcacttgcacagattgtttggctaattacatgattatctcaatgttttggtttggatttagagtacacttatgtatgaaatatttattggtactcatctatattatattaattatattattattaaatatatgtgtgtg

SEQ ID NO: 205985 - DNA, 886 bp, Zea Mays
caatctccaggcccaggaaaaacaaccccggaccgcgtgcgtttcgcttccgcccctgctgtttctgtttcttggcattcaccccctctttctctcgtggcgacgacggcgaccgtcgccttcccctacgcgctaggtgccagggtccgtcgggtccttcgctggcgacgagcaactaccaggtaacctagtggtgtgttcgggaacgtttccgcgggcgggcggcggcccccagtggcgaagatgatccgactaccgacgtacgcagcaggaggcgtccgttgccatcttcttctcctttgagtatatgatactagcaacatccacagtatcaacattcgtgaagtatatattctatgttagtgacatgctaatggaagattatgtgcgctacagaaagatcacttccaacatgaatgaacgctttccagatgctacatcagaagagctcgatgtagaaataggagaacaggctgaagaagaggttcctctacggcttctccatgggagcttcagctccacaggaaggatcctctctactgggactgtgccgtgctgcttgccccaatgtgcaagccaacagtagtgtcgaaggagcacaagatgatgtgtgagcacaaagtggccagcaagaatggagtcatggaacatcgacaggaggggtgcgacagcggcaaccgatgtatcgatcccttggacaatctggttttgacatgatgcaaatcaatctgctgtacattgtattctgcacttgcacagattgtttggctaattacatgattatctcaatgttttggtttggatttagagtacacttatgtatgaaatatttattggtactcatctatattatattaattatattattattaaatatatgtgtgtg

SEQ ID NO: 205986 - DNA, 1355 bp, Zea Mays
cagcaagccaagccaaaaaggagcctcagccgcagccggttccgttgcggttaccgccgatcacatgcccaaggccgcgcctttccgaacgccgagggccgcccgttcccgtgcacagccacacacacacccgcccgccaacgactccccatccctatttgaacccacccgcgcactgcattgatcaccaatcgcatcgcagcagcacgagcagcacgccgtgccgctccaaccatctcgcttccgtgcttagcttcccgccgcgccatggcgtcgaccaaggctcccggccccggcgagaagcaccactccatcgacgcgcagctccgtcagctggtcccaggcaaggtctccgaggacgacaagctcatcgagtacgatgcgctgctcgtcgaccgcttcctcaacatcctccaggacctccacgggcccagccttcgcgaatttgtccaggagtgctacgaggtctcagccgactacgagggcaaaggagacacgacgaagctgggcgagctcggcgccaagctcacggggctggcccccgccgacgccatcctcgtggcgagctccatcctgcacatgctcaacctcgccaacctggccgaggaggtgcagatcgcgcaccgccgccgcaacagcaagctcaagaaaggtgggttcgccgacgagggctccgccaccaccgagtccgacatcgaggagacgctcaagcgcctcgtgtccgaggtcggcaagtcccccgaggaggtgttcgaggcgctcaagaaccagaccgtcgacctcgtcttcaccgcgcatcctacgcagtccgcccgccgctcgctcctgcaaaaaaatgccaggatccgaaattgtctgacccagctgaatgccaaggacatcactgacgacgacaagcaggagctcgatgaggctctgcagagagagatccaagcagccttcagaaccgatgaaatcaggagggcacaacccaccccgcaggacgaaatgcgctatgggatgagctacatccatgagactgtatggaagggtgtgcctaagttcttgcgccgtgtggatacagccctgaagaatatcggcatcaatgagcgccttccctacaatgtttctctcattcggttctcttcttggatgggtggtgaccgcgatggaaatccaagagttaccccggaggtgacaagagatgtatgcttgctggccagaatgatggctgcaaacttgtacatcgatcagattgaagagctgatgtttgagctctctatgtggcgctgcaacgatgagcttcgtgttcgtgccgaagagctccacagttcgtctggttccaaagttaccaagtattacatagtgtatttgct

SEQ ID NO: 205987 - DNA, 2398 bp, Zea Mays
ctgtttctgtttctattctcacgtcacgcgcaggctgcgggcaagcaatggcaggtgggccctgtcgcgctggccgatccagcgctgactcagcccccgcaccgcatacatgagagatgagaagccgccacccgccgctgcggctgcggcgcccgcgccaccacgagtgacccatcgtgctcggatcgtacggcctcaaccgcaaaatccagtatttaagcgctgcggaacactcgtcgagaggagaggacagagcagaggaccaccaccggaccgggctggagctggaggcgtggcggcgccggcgcgtccatcaggaggagaaggggcagggatggtgctgggcggcggcatggcggcagcggccgtaggcggggacgacgccgtcgtcatgcagctgggcggcgccgagggcgaggagaccgtcgtcaccgtcaactgccccgaccagacaggcctgggctgcgacctctgccgcaccatcctcgagttcggcctccgcatcacccgcgccggtacgtctccgctccccatcggccaaatccatcgcttcttctcctcctttccagatttattttttcatcgttatctgtctgcttcttctgctcttcctacaacggaaagcctttccccttttttctatactgccgaagttgccagccaccaccaatcttgctacagttcatgtcgtctccttaataaactcttttacgcatcattgcctgttcctaatcataaacaactgtggagtccagaattctgcgaacctggaaccatttgacccttcgttcgttcattcatcgttgtcgtcgcctaaaattcgattcggttcctttttcgtgtgtggttggttggttctagcagacgtgtccacggacggccactggtgcttcgtggtgttctgggtcgtgccccgctcctcgtccatcaaggtccggtgggcgagcctcaagaaccggctcatgtccatgtgcccttcctcctactccatccccttcttctaccgggacgtgagccagccagagccaggccccttgcagttctacctcctcaagctcatgtcgccggaccgcaaaggattgctgcatgatgtgacgcacatactatcggatctggagctcataatccacagggtgaaggtgtcgaccacaccggacggaagagttgtggacctcttctttatcactgatggcatggaactgctgcacagaaaggagaggcaagaggagacctgctcggcgctaactgcaaccctgggcccttccatcagctgcgaggtcgtaccagcagaagggttccagcaggggttctcttccctcccgccggagatcgccgaggaactgttcagggcggagctagctgacactgacagcgaggtgtgctcgagcccgctcagcgcggagctgaggaaggtccggacgacggccactgtcaacttcgacaactccctgagccccgcgcacacgctggttcagatcgtctgcgctgaccagaaggggctcatttacgatatcttgaggacgatgaaggactgcaacatccagatattttatggccggttcagatcagacaagaaagggtcagccagcaaaggttcatcaggttgccgtgaggtggatcttttcgtgaagcaagtagacgggaagaaggtgactgatcctgcgaaacaggacgcgctgcggtcacgcctgaggtccgagacgctccatccgctcagggtcatggtcgtcggccgtggacccgacacggagctcctcgtcgccaacccggtcgaggcctccgggaagggacggccgcgcgtgttctacgacgccactcttgctctgaaggcgcttgggatctgcatcttctctgctgagatcgggaggcaagcggcgtccgagcgccactgggaggtgtacaggttcctcctggatgacagcaaggagttccccttggcaagcagcctcgctaacaggaactgtgtcgtcgatagggcgaggaagacgctgatgggatgctacaactgagacttgggtgggtgtcgatctgtatctgtctgcaagaatccaacgaagcagtgcaagtgcaatgcaaggcttcccccatccacagatgcatttgcatgctatgctgcttcctggagttgtgcacggggatggtttgaaaccagagttgtggacagcacagactggaatgaatgaacatcttgctgccatggatccattgtctacggaaaaaggagcatgcttggtgtggagggatgctgacacagatacatggaggagccggcctgttgtatagcttattttagtggaacaactgctgcctcaccatcttgccttccccttgtcgttgttctcctcatgtaagcgcagtttgtaaggatgcatgtgttggagttggaaagtgatccgat

SEQ ID NO: 205988 - DNA, 2052 bp, Zea Mays
ctgtttctgtttctattctcacgtcacgcgcaggctgcgggcaagcaatggcaggtgggccctgtcgcgctggccgatccagcgctgactcagcccccgcaccgcatacatgagagatgagaagccgccacccgccgctgcggctgcggcgcccgcgccaccacgagtgacccatcgtgctcggatcgtacggcctcaaccgcaaaatccagtatttaagcgctgcggaacactcgtcgagaggagaggacagagcagaggaccaccaccggaccgggctggagctggaggcgtggcggcgccggcgcgtccatcaggaggagaaggggcagggatggtgctgggcggcggcatggcggcagcggccgtaggcggggacgacgccgtcgtcatgcagctgggcggcgccgagggcgaggagaccgtcgtcaccgtcaactgccccgaccagacaggcctgggctgcgacctctgccgcaccatcctcgagttcggcctccgcatcacccgcgccgcagacgtgtccacggacggccactggtgcttcgtggtgttctgggtcgtgccccgctcctcgtccatcaaggtccggtgggcgagcctcaagaaccggctcatgtccatgtgcccttcctcctactccatccccttcttctaccgggacgtgagccagccagagccaggccccttgcagttctacctcctcaagctcatgtcgccggaccgcaaaggattgctgcatgatgtgacgcacatactatcggatctggagctcataatccacagggtgaaggtgtcgaccacaccggacggaagagttgtggacctcttctttatcactgatggcatggaactgctgcacagaaaggagaggcaagaggagacctgctcggcgctaactgcaaccctgggcccttccatcagctgcgaggtcgtaccagcagaagggttccagcaggggttctcttccctcccgccggagatcgccgaggaactgttcagggcggagctagctgacactgacagcgaggtgtgctcgagcccgctcagcgcggagctgaggaaggtccggacgacggccactgtcaacttcgacaactccctgagccccgcgcacacgctggttcagatcgtctgcgctgaccagaaggggctcatttacgatatcttgaggacgatgaaggactgcaacatccagatattttatggccggttcagatcagacaagaaagggtcagccagcaaaggttcatcaggttgccgtgaggtggatcttttcgtgaagcaagtagacgggaagaaggtgactgatcctgcgaaacaggacgcgctgcggtcacgcctgaggtccgagacgctccatccgctcagggtcatggtcgtcggccgtggacccgacacggagctcctcgtcgccaacccggtcgaggcctccgggaagggacggccgcgcgtgttctacgacgccactcttgctctgaaggcgcttgggatctgcatcttctctgctgagatcgggaggcaagcggcgtccgagcgccactgggaggtgtacaggttcctcctggatgacagcaaggagttccccttggcaagcagcctcgctaacaggaactgtgtcgtcgatagggcgaggaagacgctgatgggatgctacaactgagacttgggtgggtgtcgatctgtatctgtctgcaagaatccaacgaagcagtgcaagtgcaatgcaaggcttcccccatccacagatgcatttgcatgctatgctgcttcctggagttgtgcacggggatggtttgaaaccagagttgtggacagcacagactggaatgaatgaacatcttgctgccatggatccattgtctacggaaaaaggagcatgcttggtgtggagggatgctgacacagatacatggaggagccggcctgttgtatagcttattttagtggaacaactgctgcctcaccatcttgccttccccttgtcgttgttctcctcatgtaagcgcagtttgtaaggatgcatgtgttggagttggaaagtgatccgat

SEQ ID NO: 205989 - DNA, 2049 bp, Zea Mays
ctgtttctgtttctattctcacgtcacgcgcaggctgcgggcaagcaatggcaggtgggccctgtcgcgctggccgatccagcgctgactcagcccccgcaccgcatacatgagagatgagaagccgccacccgccgctgcggctgcggcgcccgcgccaccacgagtgacccatcgtgctcggatcgtacggcctcaaccgcaaaatccagtatttaagcgctgcggaacactcgtcgagaggagaggacagagcagaggaccaccaccggaccgggctggagctggaggcgtggcggcgccggcgcgtccatcaggaggagaaggggcagggatggtgctgggcggcggcatggcggcagcggccgtaggcggggacgacgccgtcgtcatgcagctgggcggcgccgagggcgaggagaccgtcgtcaccgtcaactgccccgaccagacaggcctgggctgcgacctctgccgcaccatcctcgagttcggcctccgcatcacccgcgccgacgtgtccacggacggccactggtgcttcgtggtgttctgggtcgtgccccgctcctcgtccatcaaggtccggtgggcgagcctcaagaaccggctcatgtccatgtgcccttcctcctactccatccccttcttctaccgggacgtgagccagccagagccaggccccttgcagttctacctcctcaagctcatgtcgccggaccgcaaaggattgctgcatgatgtgacgcacatactatcggatctggagctcataatccacagggtgaaggtgtcgaccacaccggacggaagagttgtggacctcttctttatcactgatggcatggaactgctgcacagaaaggagaggcaagaggagacctgctcggcgctaactgcaaccctgggcccttccatcagctgcgaggtcgtaccagcagaagggttccagcaggggttctcttccctcccgccggagatcgccgaggaactgttcagggcggagctagctgacactgacagcgaggtgtgctcgagcccgctcagcgcggagctgaggaaggtccggacgacggccactgtcaacttcgacaactccctgagccccgcgcacacgctggttcagatcgtctgcgctgaccagaaggggctcatttacgatatcttgaggacgatgaaggactgcaacatccagatattttatggccggttcagatcagacaagaaagggtcagccagcaaaggttcatcaggttgccgtgaggtggatcttttcgtgaagcaagtagacgggaagaaggtgactgatcctgcgaaacaggacgcgctgcggtcacgcctgaggtccgagacgctccatccgctcagggtcatggtcgtcggccgtggacccgacacggagctcctcgtcgccaacccggtcgaggcctccgggaagggacggccgcgcgtgttctacgacgccactcttgctctgaaggcgcttgggatctgcatcttctctgctgagatcgggaggcaagcggcgtccgagcgccactgggaggtgtacaggttcctcctggatgacagcaaggagttccccttggcaagcagcctcgctaacaggaactgtgtcgtcgatagggcgaggaagacgctgatgggatgctacaactgagacttgggtgggtgtcgatctgtatctgtctgcaagaatccaacgaagcagtgcaagtgcaatgcaaggcttcccccatccacagatgcatttgcatgctatgctgcttcctggagttgtgcacggggatggtttgaaaccagagttgtggacagcacagactggaatgaatgaacatcttgctgccatggatccattgtctacggaaaaaggagcatgcttggtgtggagggatgctgacacagatacatggaggagccggcctgttgtatagcttattttagtggaacaactgctgcctcaccatcttgccttccccttgtcgttgttctcctcatgtaagcgcagtttgtaaggatgcatgtgttggagttggaaagtgatccgat

SEQ ID NO: 205990 - DNA, 2501 bp, Zea Mays
ctgtttctgtttctattctcacgtcacgcgcaggctgcgggcaagcaatggcaggtgggccctgtcgcgctggccgatccagcgctgactcagcccccgcaccgcatacatgagagatgagaagccgccacccgccgctgcggctgcggcgcccgcgccaccacgagtgacccatcgtgctcggatcgtacggcctcaaccgcaaaatccagtatttaagcgctgcggaacactcgtcgagaggagaggacagagcagaggaccaccaccggaccgggctggagctggaggcgtggcggcgccggcgcgtccatcaggaggagaaggggcagggatggtgctgggcggcggcatggcggcagcggccgtaggcggggacgacgccgtcgtcatgcagctgggcggcgccgagggcgaggagaccgtcgtcaccgtcaactgccccgaccagacaggcctgggctgcgacctctgccgcaccatcctcgagttcggcctccgcatcacccgcgccgcagacgtgtccacggacggccactggtgcttcgtggtgttctgggtcgtgccccgctcctcgtccatcaaggtccggtgggcgagcctcaagaaccggctcatgtccatgtgcccttcctcctactccatccccttcttctaccgggacgtgagccagccagagccaggccccttgcagttctacctcctcaagctcatgtcgccggaccgcaaaggattgctgcatgatgtgacgcacatactatcggatctggagctcataatccacagggtgaaggtgtcgaccacaccggacggaagagttgtggacctcttctttatcactgatggcatggaactgctgcacagaaaggagaggcaagaggagacctgctcggcgctaactgcaaccctgggcccttccatcagctgcgaggtcgtaccagcagaagggttccagcaggggttctcttccctcccgccggagatcgccgaggaactgttcagggcggagctagctgacactgacagcgaggtgtgctcgagcccgctcagcgcggagctgaggaaggtccggacgacggccactgtcaacttcgacaactccctgagccccgcgcacacgctggttcagatcgtctgcgctgaccagaaggggctcatttacgatatcttgaggacgatgaaggactgcaacatccagatattttatggccggttcagatcagacaagaaagggtcagccagcaaaggttcatcaggttgccgtgaggtggatcttttcgtgaagcaagtagacgggaagaaggtgactgatcctgcgaaacaggacgcgctgcggtcacgcctgaggtccgagacgctccatccgctcagggtcatggtcgtcggccgtggacccgacacggagctcctcgtcgccaacccggtcgaggcctccgggaagggacggccgcgcgtgttctacgacgccactcttgctctgaaggcgcttgggatctgcatcttctctgctgagatcgggaggcaagcggcgtccgagcgccactgggaggtgtacaggttcctcctggatgacagcaaggagttccccttggcaagcagcctcgctaacaggaactgtgtcgtcgatagggcgaggaagacgctgatgggatgctacaactgagacttgggtgggtgtcgatctgtatctgtctgcaagaatccaacgaagcagtgcaagtgcaatgcaaggcttcccccatccacagatgcatttgcatgctatgctgcttcctggagttgtgcacggggatggtttgaaaccagagttgtggacagcacagactggaatgaatgaacatcttgctgccatggatccattgtctacggaaaaaggagcatgcttggtgtggaggtgcgatgcaatggcgggagctttttttttttgataatggaagaaacatgttccagccttttgcatcatatcaaggatgcatatggcttcatagcatattcaacctgacaaaagcagcaacaagtagcaatgaagcacatggttctcatgaacaataataagaaactaagaggcctcaatcctagcattgcatcgccatccatgtattgtaaaaatgttcattgccaccacttccaatgcgtgacaaatatctttgatatcttggtgtatctcctctctcctttcctttcttttgcagcagtctccagaatctaagccactaagaccccttgaaaataacatgcatataattgaaggtgccattaaatacaatatcattgtggcttagccagattaaccaaaacatggcagctacccctattacaatgattgagcttttgtttgttcagggatgctgacacagatacatggaggagccggcctgttgtatagcttattttagtggaacaactgctgcctcaccatcttgccttccccttgtcgttgttctcctcatgtaagcgcagtttgtaaggatgcatgtgttggagttggaaagtgatccgat

SEQ ID NO: 205991 - DNA, 3210 bp, Zea Mays
ttggtttggtcccagcaagcacaagagtaggccatggcagtgccagcgcgtccaaccatcatattttgcctgtcaagtctaaagtcttccccacgcccccaccttccttctgtaactgcaggtgcagctatcaggagcatgacttgtcacctcaccttaatctccaagcaccccaatattttatttttcagatcgggttagaaaaaaaaagaaggcaaggtcatatgcaggtgcaggcgtgcagcagtgcgatgccgaccccgctctgtcctcgctttctgtaatcttcctcacacaagtcacaaggctgcctccacttccatccagtaggaacaagtcagacacggaaggaaggaggagaaggcaccggaaatcctcccatcccgctagctggaacctggaagggctgaagctggagctggagtgctggacagtgaccgagagtgagagaggcagcagcggtccggtggctgtggcctccttggttgatgctcacccaccctcagggaggcacgagcgttccctctccggcgagccccaccccggaactcctccgagaaatgcggcggggcagccacagatgacaccttcctcttcttcctgacctgctgcagaggagggcagcctcctgcatttccgggttcccttgcgcttgcgcctcctatttcgtctttccacgagagtgggaaggggaagccggaggatgccggccaagtacctcggcccgggggcgttggcggaggacaggcgccaggacctccaccgccaggtgggctgcgtcaccgggatcttgcaggccttcgaccgccgccaccctctcgcctcctcctcccacaagaggctgcttcccccaacagcaggccatgcagtatccagtaacccaagcaaagagggcgattgcacaagatattcaccccagattgtgctggagaactcgagtaaaacatgggctgatagccaaagagcaccagcaacagaactgtctcaaacctcatattcatcgtcaccctcttcgtcattctcgtccgttgatgacaacaaatcaacacaacaggacctatcatccactgaccgaatgctatttccagagaggccgttcaagagctcgccgaagctcaagagttattttgacagtgacaccgggctcgactaccctgatgacgcgcctacgaagtccaaggacatgcccatagttcaatccagcctgccaactcttggtataagaaatcttgtgaaggattcaatctatatggatagccgtgaattgtcagtcagaatttgcactaaagaagtaacagatcacccatccaactgtggagatcaacctagggaattgaatgggcctccccgtgacagcacacaagaaaaaagcaagggtctcgtggacatcaatgaatcgcttcgagtgctagccaagctcagggaagcctcatggactcctgctgaatctgtccatcatgcaagactttcatatgatgctcctcggttctcatacgatgggaaggaggctgcatcaaaactgagggaggtaccaaggttgtcactggacatcaaggaaagtcaccttcggaatggtgaaattgactctagattgaacccaagcttgagttctacagacagaagcagcaacactgttattgggtccaatgcagcttttgagatccagcagaaacagcctgcctgcaagcggcttcctagcgttgttgcgaagctcatgggtttggaagagttgcctgagcataatcaaagtatagcatcatcacatgcatgcaaaaccgttcaagggagcaagcaagaggccatgttcaaccccttgagcatctcatctcacaacgagcatgctcttcgacaacaaaggaatcatgattcaactgttagaaatttacccaactcaaagtttcctgtcgaaactgcaccatggaagcaacaagaaaggattatccttcctcgcaaactgccaaagggatcaaaaggagcccacggaagagaacaacctgctgcatcagtcatcagtgacatagagaagcggctcaaggatcttgattttcgacaatcgtacaaggaccttagagcgcttaaacatattttggattccatgcaagcaaaaggactattggaaaacaaaaatagggaggaaatatctatgccaaagttatctgatggaaaccacaatggccaagagatagccagtgtgaacatgagagtgaacagtaacaccaacaacgtgtgtatgcctgaagagagcaacgctgaaagctctttcaaatcacctattgtgatcatgaaaccttcaaaatgtgcaaaccttttcaacgaagttgattcttctgtcttccccttagggggttcatctgatcccccacaacaacaaacaagcaatagcacctatagaaggaaagcttcaacgagaaatagaacagctaaagagcaacatgcaaaatttagttcaaaggtgcctacttctcaaccccttgtttcttatgacaggagatcatatggaaggaatgacgatagcagcaacaaccaaaaatctagttcactgctggttactgagagctcatccagaagacagcagctaccaagggacagtagcataagtatgaaaaagaataaacattccactaccccaaggttacaacagagaaaacttggttcagagcggagggctagaccacctattccttgtgctgagtctaacaaaagccaaaatcaatctggagataggaataatgcagaaacagtgtcaccccgaagcaaattcagaaggaaacttttgtgtccacaagaaggtgatgatgacatgccgagtggattgaacaacaggacaaggagcctgaaccagcatggcaatgatatgtccacaaggtcagatggcagtataactgttgcttcagagctggatattataagcaatgacagatctacggaagttgatattcctaattttgatcaaggcattggaactccatccggaaggaacccacaaagagtggtaaataatttccttgcaattttgccttatttctaaagcttcactaactttaacatgatttttttatttccaatacttaactactatggacaaaataataatctgtatttgaaatagtagctggttttggtcttctatcaatctctctccaagaatagttgtagttgggtcaggaaatgagaatgacaaattaaatcatacgacatactattggaaac

SEQ ID NO: 205992 - DNA, 3266 bp, Zea Mays
caaatattcgagaacggagcaggccatgcagtatccagtaacccaagcaaagagggcgattgcacaagatattcaccccagattgtgctggagaactcgagtaaaacatgggctgatagccaaagagcaccagcaacagaactgtctcaaacctcatattcatcgtcaccctcttcgtcattctcgtccgttgatgacaacaaatcaacacaacaggacctatcatccactgaccgaatgctatttccagagaggccgttcaagagctcgccgaagctcaagagttattttgacagtgacaccgggctcgactaccctgatgacgcgcctacgaagtccaaggacatgcccatagttcaatccagcctgccaactcttggtataagaaatcttgtgaaggattcaatctatatggatagccgtgaattgtcagtcagaatttgcactaaagaagtaacagatcacccatccaactgtggagatcaacctagggaattgaatgggcctccccgtgacagcacacaagaaaaaagcaagggtctcgtggacatcaatgaatcgcttcgagtgctagccaagctcagggaagcctcatggactcctgctgaatctgtccatcatgcaagactttcatatgatgctcctcggttctcatacgatgggaaggaggctgcatcaaaactgagggaggtaccaaggttgtcactggacatcaaggaaagtcaccttcggaatggtgaaattgactctagattgaacccaagcttgagttctacagacagaagcagcaacactgttattgggtccaatgcagcttttgagatccagcagaaacagcctgcctgcaagcggcttcctagcgttgttgcgaagctcatgggtttggaagagttgcctgagcataatcaaagtatagcatcatcacatgcatgcaaaaccgttcaagggagcaagcaagaggccatgttcaaccccttgagcatctcatctcacaacgagcatgctcttcgacaacaaaggaatcatgattcaactgttagaaatttacccaactcaaagtttcctgtcgaaactgcaccatggaagcaacaagaaaggattatccttcctcgcaaactgccaaagggatcaaaaggagcccacggaagagaacaacctgctgcatcagtcatcagtgacatagagaagcggctcaaggatcttgattttcgacaatcgtacaaggaccttagagcgcttaaacatattttggattccatgcaagcaaaaggactattggaaaacaaaaatagggaggaaatatctatgccaaagttatctgatggaaaccacaatggccaagagatagccagtgtgaacatgagagtgaacagtaacaccaacaacgtgtgtatgcctgaagagagcaacgctgaaagctctttcaaatcacctattgtgatcatgaaaccttcaaaatgtgcaaaccttttcaacgaagttgattcttctgtcttccccttagggggttcatctgatcccccacaacaacaaacaagcaatagcacctatagaaggaaagcttcaacgagaaatagaacagctaaagagcaacatgcaaaatttagttcaaaggtgcctacttctcaaccccttgtttcttatgacaggagatcatatggaaggaatgacgatagcagcaacaaccaaaaatctagttcactgctggttactgagagctcatccagaagacagcagctaccaagggacagtagcataagtatgaaaaagaataaacattccactaccccaaggttacaacagagaaaacttggttcagagcggagggctagaccacctattccttgtgctgagtctaacaaaagccaaaatcaatctggagataggaataatgcagaaacagtgtcaccccgaagcaaattcagaaggaaacttttgtgtccacaagaaggtgatgatgacatgccgagtggattgaacaacaggacaaggagcctgaaccagcatggcaatgatatgtccacaaggtcagatggcagtataactgttgcttcagagctggatattataagcaatgacagatctacggaagttgatattcctaattttgatcaaggcattggaactccatccggaaggaacccacaaagagtgatgacgagcgtcaaacattaggtgaaccctggaaaccttctgttacaaaggcaacagaggtgggcatgcagtccaagaacaataagctcgctaatgtcgtgagcctgcttcagaagctccagcagcttagcgtgagcaaggatgaggacgcacctccggtcgaccatatggctttcctgtgcgagacagaaagcccggaccaccgttacgtgtctgagatactgctggcctcgggtcttctgatgaaagagctaggttcaggacaggcaggcctccagctccagctccactcctctggctacccgatcaaccctgacttgttccacgtgctggagcaaagaaaggcaggatgggccagcatacctgacggcatccaccagagcaggagcggcgccaagtctgatcccaagagagcgcaccggaagctggtgtttgacaccgcgaacgagcttctcctccagaagtttgagaaggaaaccacagtttacgcggtcagttcctccaccggagcgaaggatcatccacctgcaaaggctcttagcgggcagcaactgctgaagtttgtatcttcagaaatcgaaggcatgggtacggagcgatcgtccacctgccagatggaaggcggcgtgatacctgacgcagagatcctgcagaggctgcagggatggacgagcttcagcagggagctccctgggatggtgctggagatcgagaggtcggtattcaaggagctggtggacgaggtggtgcatggggagtctgccgacggcccggagatgaaggcggcaggcaggcggagaaggcggcggctctttgcttgatatggtttgtgtgaccatcaccatgcaccgggtgggttgtccaagtagatgggcctgatcatgctgtaactttgattgccgtatgaactttttttctctctcaagggagaggtgcacaagttgtactgttgtagtataagcagcgcaggtttgcagaggcatgaaaaatgggcattggtttgtgctgtatagatactctgtataccattgccttttgattccttgtgtttcattggggatgatgctatttcagtaaagaagtgtacaaatggcagggttcatcattttaat

SEQ ID NO: 205993 - DNA, 558 bp, Zea Mays
ccttcatccgctttttatcttaaaataaaccggcgtctcctgccctggctgggacgccgctgctgacagggcacctgatggattgatttcctcgagcagtcagcggcgctaaagagtcacgagcttactggttgtaagcaacgatcgacgaacgaggggtgtagggagtggaaggaagaggctcagcgttcatggagagccgcaaggaggagcaggcggcggtggggtggatgacggtgccggcgttcggggagtgggacgtgaagaacggcgccgtgccggactactccatggacttctccaagatccgcgagatgcgcaagcagaacaggcgcgagctgtcccgggccagcctcggcggcggcgacgacgacgacgacgacctactccagaagaagcagcagcagcagcaggaggagggaagcaaggcccagccgcgcaacaagccctccgccgccgtcgcggacgacgcccaccgtcgagcgctgcacgacgactcccctacgataaaaaggagcagcatgcaggtagttggttgttgggggaaaacacaaggaa

SEQ ID NO: 205994 - DNA, 3257 bp, Zea Mays
cagcattgccgcatccacatccccgtccctggtggtcgcccctcctggagctcgccgccaccatctcgattttgttttcccgaccacagcgccaccgcccaacgctaacctgccgctccacgagtctcgacaaattatcgacgcgactggcacccctccccctccactggtgattgtcgccgtcagcatcttcctccggtcctcccaagagcaagccttctagaagttaaagaagcagccagaaccatgacatcccgtttctggggacagggggacagtgagtctgaggaagaggaggaagaagttgagtcagaacagggcagcgataatgatgatgatggaggtcatggtggtgcgggacgcggtgcccaaaaccgatatttgaagaatcaagaagatgacagcgatgagtctgacacaggtcaccgtgagatccgctccctgagggacaagcacaatgaggagatgagatctattgttgatcagatgcgtaatgcaatgaagatcaatgactgggtgagcttgcaggagagttttgagaagcttaacaaaaatcttgagaaggttgttcgtgtcaatgaatctactaaggtaccaaaaatgtatatcaaagctcttgtgttgctggaggacttcaaggctgaagcccctgcaaacaaggaggccaaggagaagatgagcagcagcaattcaaaggcactcaataagatgagccaaaaactcacgaagaacaacaagcaatataaagagcagatccagaagtgcagggagcatccagagagttttgaagatgaagctgcggatgataaagatatggatgatgatgatgttgatgaaagtgatgcagagatcgaagatcctgataaaatagctatgtcagaatcagaagaggatcacgatgaagaggatggcgacaaggagggttgggaacagaaaaggagtaagaaggataagatgatggataagcagttcttgaaagatccaagtgaaatcacatgggatattgtcgataagaaactcagagagattatagcatcaaggggaaagaaaggtactggaaggatcgagcgtgttgagcagttaacgtttttaacccgtgtggccaaaacaccagctcagaagcttgaaaccctcttccatgtgatttctgcgcagtttgatgttaaccctagtctacttgggcatatgccagtcaatgtgtggaagaagtgtgtcaataatatgcttcttgtgcttgacatactccagcagtatcctaacattgtagtagacacctcatttgagcctgatgagaaagaaactcaaaagggtgcagactacaatggaacaatacatattgtcggtgacctggttgcattccttgagagactggactctgaatttttgaagaccttacagtgcacagatccgtacacaaaagattatgttcagaggcttagagaggaacccctgtttctggttgtcgcacagaatgtccaagattatcttgaaagggttggaaacctcaaagctgctgccaaggttgcactgcgtcgtgttgaactggtttactataaaccccaagaagtgtatgatgcaatgagaaaacttgcagagcagcctgaagactgtgtggatgatgatgatgcagaggctggtgatgaacatcaagcagtagatgacaatagaggaccatcaccatttgttgcaattccagaggttgtgcaccggaagcctacttttccagagagtggtagaactttgatggatggattgatgtccttaatttacaagtatggagatgaaaggaccaaagcccgtgcaatgctgtgtgacatatatcaccatgcgatctctgatgagttttcagtggctcgtgacttgcttttaatgagtcatttgcaagatggtgttcagctcatggacatatcatcacagattttattcaatagagtcatggcccagttagggctgtgtgctttcagggctggtttgataaatgaagcccatggttgcttgactgagctctactttacagggagggtgaaagaattgcttgcacaaggtgtgcaacaaagcagataccatgaaaaaactcctgaacaggaaagacttgagaggaggaggcaaatgccttaccatatgcatataaacctggagcttttggaagccacacacttgatctgtgcgatgctgattgaagtccccaatatggctgccagcacctatgacaagcggaggcctatgagcaaaacattccgaaggcttctcgaagtgagtgaaaggcagacatttgttgggccgcctgagaatgtgagggaccatgtaatggctgccacaagagccctcaaaaagggtgatcaccaaaaggctttcagtgtcataaattcgctggagatttggaagcttttgaggaacagagagcatgttcttgagatgttgaagcttaagatcaaggaggaagctcttagaacctatctttcatcatactcgtcttcctacaagtcgttgagccttaaccagctcaccaccatgtttgatctcagcgagcagcatgcccacagtattgttagcaaaatgatgatgcatgaagagcttcaggctagctggcaccagccaacaaagtgcaccgtgtttcacagcctggatcaaaccaggcttcaggagctactcttccaggttgcagaaaaaatatcggtcctggtggagacaaacgagagggcatacgagttaagaactggtggtactcttgaggggctaccgcccaggcgcaggggcgaggctcaggattcatccaagtggcaggagagctttgtcgcatcacaggggcggcagggtggtggcaaccggtttggatactccggtagaggtgcagcatctggtcaaagtggtggactccagaggggcaggggcaatcatgtttcccgcgggggatacggtggcaatacacgatttcaggatgcaagtgcacacatggtgaacctgaacagggttggtagggttgttagtgtttagaagtgcgtaaatttttgaagcacctgccctttccataattacaaacttcctgttctaagctcagtcatccaactattttctctatttcgttgtaagagtttggtactgtcggggtttgattagtgatagatccggctatcaaaattttggtcttttttcttcgactatgaacaaataatatatagaattttctatgtaaatttatattcttgtttttagcattgaggatattaatcttcataaaaataaattttaaatccgtt

SEQ ID NO: 205995 - DNA, 3252 bp, Zea Mays
cagcattgccgcatccacatccccgtccctggtggtcgcccctcctggagctcgccgccaccatctcgattttgttttcccgaccacagcgccaccgcccaacgctaacctgccgctccacgagtctcgacaaattatcgacgcgactggcacccctccccctccactggtgattgtcgccgtcagcatcttcctccggtcctcccaagagcaagccttctagaagttaaagaagcagccagaaccatgacatcccgtttctggggacagggggacagtgagtctgaggaagaggaggaagaagttgagtcagaacagggcagcgataatgatgatgatggaggtcatggtggtgcgggacgcggtgcccaaaaccgatatttgaagaatcaagaagatgacagcgatgagtctgacacaggtcaccgtgagatccgctccctgagggacaagcacaatgaggagatgagatctattgttgatcagatgcgtaatgcaatgaagatcaatgactgggtgagcttgcaggagagttttgagaagcttaacaaaaatcttgagaaggttgttcgtgtcaatgaatctactaaggtaccaaaaatgtatatcaaagctcttgtgttgctggaggacttcaaggctgaagcccctgcaaacaaggaggccaaggagaagatgagcagcagcaattcaaaggcactcaataagatgagccaaaaactcacgaagaacaacaagcaatataaagagcagatccagaagtgcagggagcatccagagagttttgaagatgaagctgcggatgataaagatatggatgatgatgatgttgatgaaagtgatgcagagatcgaagatcctgataaaatagctatgtcagaatcagaagaggatcacgatgaagaggatggcgacaaggagggttgggaacagaaaaggagtaagaaggataagatgatggataagcagttcttgaaagatccaagtgaaatcacatgggatattgtcgataagaaactcagagagattatagcatcaaggggaaagaaaggtactggaaggatcgagcgtgttgagcagttaacgtttttaacccgtgtggccaaaacaccagctcagaagcttgaaaccctcttccatgtgatttctgcgcagtttgatgttaaccctagtctacttgggcatatgccagtcaatgtgtggaagaagtgtgtcaataatatgcttcttgtgcttgacatactccagcagtatcctaacattgtagtagacacctcatttgagcctgatgagaaagaaactcaaaagggtgcagactacaatggaacaatacatattgtcggtgacctggttgcattccttgagagactggactctgaatttttgaagaccttacagtgcacagatccgtacacaaaagattatgttcagaggcttagagaggaacccctgtttctggttgtcgcacagaatgtccaagattatcttgaaagggttggaaacctcaaagctgctgccaaggttgcactgcgtcgtgttgaactggtttactataaaccccaagaagtgtatgatgcaatgagaaaacttgcagagcagcctgaagactgtgtggatgatgatgatgcagaggctggtgatgaacatcaagcagtagatgacaatagaggaccatcaccatttgttgcaattccagaggttgtgcaccggaagcctacttttccagagagtggtagaactttgatggatggattgatgtccttaatttacaagtatggagatgaaaggaccaaagcccgtgcaatgctgtgtgacatatatcaccatgcgatctctgatgagttttcagtggctcgtgacttgcttttaatgagtcatttgcaagatggtgttcagctcatggacatatcatcacagattttattcaatagagtcatggcccagttagggctgtgtgctttcagggctggtttgataaatgaagcccatggttgcttgactgagctctactttacagggagggtgaaagaattgcttgcacaaggtgtgcaacaaagcagataccatgaaaaaactcctgaacagacttgagaggaggaggcaaatgccttaccatatgcatataaacctggagcttttggaagccacacacttgatctgtgcgatgctgattgaagtccccaatatggctgccagcacctatgacaagcggaggcctatgagcaaaacattccgaaggcttctcgaagtgagtgaaaggcagacatttgttgggccgcctgagaatgtgagggaccatgtaatggctgccacaagagccctcaaaaagggtgatcaccaaaaggctttcagtgtcataaattcgctggagatttggaagcttttgaggaacagagagcatgttcttgagatgttgaagcttaagatcaaggaggaagctcttagaacctatctttcatcatactcgtcttcctacaagtcgttgagccttaaccagctcaccaccatgtttgatctcagcgagcagcatgcccacagtattgttagcaaaatgatgatgcatgaagagcttcaggctagctggcaccagccaacaaagtgcaccgtgtttcacagcctggatcaaaccaggcttcaggagctactcttccaggttgcagaaaaaatatcggtcctggtggagacaaacgagagggcatacgagttaagaactggtggtactcttgaggggctaccgcccaggcgcaggggcgaggctcaggattcatccaagtggcaggagagctttgtcgcatcacaggggcggcagggtggtggcaaccggtttggatactccggtagaggtgcagcatctggtcaaagtggtggactccagaggggcaggggcaatcatgtttcccgcgggggatacggtggcaatacacgatttcaggatgcaagtgcacacatggtgaacctgaacagggttggtagggttgttagtgtttagaagtgcgtaaatttttgaagcacctgccctttccataattacaaacttcctgttctaagctcagtcatccaactattttctctatttcgttgtaagagtttggtactgtcggggtttgattagtgatagatccggctatcaaaattttggtcttttttcttcgactatgaacaaataatatatagaattttctatgtaaatttatattcttgtttttagcattgaggatattaatcttcataaaaataaattttaaatccgtt

SEQ ID NO: 205996 - DNA, 1216 bp, Zea Mays
ttcgatcgtcggtagcttacctctgcctctcacgtgctcaacgttcatcacacatccgccatcgcctccaactgcaagccaccaagcctcctgctcgcatggatgcgccctctggtcctcatcctgttctggcacaggcgccctctcccagctcgtgccggccaatctcgacgtcgggcctctgttcgctggtggtcagcgctcactgggatcggatcggcctcaacaccgtttcacctccaccaagcctcgccggcgtgctctcctagccgcggtcggatctggcctcctgctttccctccggtaccctctcgttcccagctcgtggtgcctctgctcctctcgacgcctaggtagccatggcgtctcctccccttcccttcctctgccatggacgcgagctccaagattctgctcgtccaggccccttcccaggtgctcccgctgagcccctggccgagtttctttccatggccgccgcagcacctgtttcctgcacgctggtcgcccctgcccccagccatggtgccgtcaggccacccgtctcctacctcccaacgccagccctactcccatggccgcgccctctcctcacttgaagtcagcaacaacgcctcggtagtggtcgaacagcacgtcgtcgactccgtgatttttgggcagcctggttgcagtgtcgttaaaccccgtcctctttcgaagacgcgtgacgcttgttaggtatcaaatagaaagactgaaccgaaactatcgccatgttcgcggacaccgcgtcaagtttagtcgtggtacgctagatgattatgcgagctgaaggacatggatcagagcgaaccataagagggtatcggtggattaatcttgtggatgcatcaagccagcaacataatggaagatgctcaccaagtggtcgtcaattaacaacactaacatagtgttatcccaggttgtaattttgttctgttgtggatggtgctaagtgccggtgggctcggccttcttatataagtatatcccatctttagcttctctatcgaggattgtctcttaagctagcatgtattttaaaacttataaatgttttatacattcaaattgtaatctttttgaatcaagttcttttgtaatcaactccgatgatatatattgtaatcttgttataacttgtaaatgttgtaacttgtaaccattctgtaataaagaatttccgctgcaa

SEQ ID NO: 205997 - DNA, 2038 bp, Zea Mays
gcgcgagtctccgaacgacaaacacgagcgcgggcgcgcacaagttcgccaacccccacgccccaccccccaccccccgcgtgctgcgcgtcgttggaaccaaggattggattagcctcgccgaggaggaggtggtggtcggcgaggggctcgcggggatggggatctcgaggccccttgtgatggcgatggcggtggcgctgctgatcgccgtcgccggtgcgaccgccgaggagcaggagcccctgctggcggcggacgcggtggccggcgcggtggaggcggcgctcggggaggtggagaccgcggcgctcagggccgagctggggcaactccgggcgaagatctcggcgctagagtcagacatagaagagcgatctcaagaactgaagaataaggatgatgccatcatgaacctggagaaagccattgaagagaagtcaaaggctattacctctatgctggacgagattgcttccctccagctaatccatgtacaggcaaaagggtctgtagctgccgaggagcaggctaacaaggccaatgccaaggttgttgagcttgagaagcaggttgacaagatcaaaaaggatattgaagcacaaagcagccagaaagcagcactagagtatagggccaacgatgcagagaagaaggtggaagtactgaatgaaaagcttaatacaatccaaaaggaaagtgatgagaaaaaacgcaaaatcaagaagacagaacgtgctcttaaagtcgctgaggaggaattaatgaggttgcagttagaagtaactgctaaatcaaaacagctgtcagaggttcatggagcatggttaccaccttggctaatggcacaatatgcttgttatgcggaggttgtctcaggtcactgggatcaacatgggaaacctgctgtgcagaattttttgcataaggcatcagaaaaatcagcacaggcaaagaaatgggctgaacctcatatcgagactgctaagatgaaatggattcctgttaagcagaaattggttgccctcaagaaaaatgcagaaccttatgtacaaaaggtatcaacaagatcagtagagttttacgagtcatcaagggatgctgtgacacctcatgctgtcaaagttaaagtgtttgttcattcctactaccagaaagccaagaagttttctaagccttacattgatcaaattgctgagattactaaaccacatgttgagaaaattagaactactctgaagccatacactaagagagcagttcatgcatatgggtcatttctcaagtcggcaaccacataccatcgacaggctcaagcaagcatcatggactaccttcaccagcatgatataacaaaatcattggcaactaaggagttagtttggttcctggcttctgctttgctggctctgcctgtcttcattatatacaggcttctagtagggaccttctgctccaaaaagaataaaaggcctcgtagtagtaatggtaaccatggccacaagagatacaagcggcgacatgctgacaagtagatcagtttactgaacactttagggttcagtatgctgtgtaccgtggcagatctttgagcaggattgggtcatgggcacccttaccttgaaagcattgtacaccaccaacatactcttctcttttgcattttcgtcccaggtgtaatatggacttcagtgcagcagaccttttatctgcactttgctgggttcatgtggttatgcctcggcctttgtttgattggtcatttgtttattgtaacttgtgaatgcgtttgaatttgtatgcttgttcttgtcggcgacctacattcgaacttaatacttatgtatacagtggttggtttagctaataactggatgtctcctgttcacttcgttcatgtatggcttggtcgacaccatgatctggtagaatggtggctgactcagctgctgaagtgttacgaacaggattacaggaaaaagagagtgtctataaattgctagccatcctgtatgcttggtgtgttatatcaaaatac

SEQ ID NO: 205998 - DNA, 2080 bp, Zea Mays
gcgcgagtctccgaacgacaaacacgagcgcgggcgcgcacaagttcgccaacccccacgccccaccccccaccccccgcgtgctgcgcgtcgttggaaccaaggattggattagcctcgccgaggaggaggtggtggtcggcgaggggctcgcggggatggggatctcgaggccccttgtgatggcgatggcggtggcgctgctgatcgccgtcgccggtgcgaccgccgaggagcaggagcccctgctggcggcggacgcggtggccggcgcggtggaggcggcgctcggggaggtggagaccgcggcgctcagggccgagctggggcaactccgggcgaagatctcggcgctagagtcagacatagaagagcgatctcaagaactgaagaataaggatgatgccatcatgaacctggagaaagccattgaagagaagtcaaaggctattacctctatgctggacgagattgcttccctccaggtatgcaatttaaaacacaacagctagccttaaaacacaacagctaatccatgtacaggcaaaagggtctgtagctgccgaggagcaggctaacaaggccaatgccaaggttgttgagcttgagaagcaggttgacaagatcaaaaaggatattgaagcacaaagcagccagaaagcagcactagagtatagggccaacgatgcagagaagaaggtggaagtactgaatgaaaagcttaatacaatccaaaaggaaagtgatgagaaaaaacgcaaaatcaagaagacagaacgtgctcttaaagtcgctgaggaggaattaatgaggttgcagttagaagtaactgctaaatcaaaacagctgtcagaggttcatggagcatggttaccaccttggctaatggcacaatatgcttgttatgcggaggttgtctcaggtcactgggatcaacatgggaaacctgctgtgcagaattttttgcataaggcatcagaaaaatcagcacaggcaaagaaatgggctgaacctcatatcgagactgctaagatgaatggattcctgttaagcagaaattggttgccctcaagaaaaatgcagaaccttatgtacaaaaggtatcaacaagatcagtagagttttacgagtcatcaagggatgctgtgacacctcatgctgtcaaagttaaagtgtttgttcattcctactaccagaaagccaagaagttttctaagccttacattgatcaaattgctgagattactaaaccacatgttgagaaaattagaactactctgaagccatacactaagagagcagttcatgcatatgggtcatttctcaagtcggcaaccacataccatcgacaggctcaagcaagcatcatggactaccttcaccagcatgatataacaaaatcattggcaactaaggagttagtttggttcctggcttctgctttgctggctctgcctgtcttcattatatacaggcttctagtagggaccttctgctccaaaaagaataaaaggcctcgtagtagtaatggtaaccatggccacaagagatacaagcggcgacatgctgacaagtagatcagtttactgaacactttagggttcagtatgctgtgtaccgtggcagatctttgagcaggattgggtcatgggcacccttaccttgaaagcattgtacaccaccaacatactcttctcttttgcattttcgtcccaggtgtaatatggacttcagtgcagcagaccttttatctgcactttgctgggttcatgtggttatgcctcggcctttgtttgattggtcatttgtttattgtaacttgtgaatgcgtttgaatttgtatgcttgttcttgtcggcgacctacattcgaacttaatacttatgtatacagtggttggtttagctaataactggatgtctcctgttcacttcgttcatgtatggcttggtcgacaccatgatctggtagaatggtggctgactcagctgctgaagtgttacgaacaggattacaggaaaaagagagtgtctataaattgctagccatcctgtatgcttggtgtgttatatcaaaatac

SEQ ID NO: 205999 - DNA, 3402 bp, Zea Mays
ctgtatctatgatttgtgggtctgagtttaaaatagagaagttcacaactgagagtgacaaaatagcaaattttcctttaaaatgaccgcgcgttttttttaaaaaatgaccgcgcagtagctttggctgaaaaagaaaagaaaaataatcttccttcttccacgatagtcgatacggagcacccataacgttacttttattttgcagttcagcggttcagccccctcaagtcgaggtcgaggtactccgcctccgcaatgccgcccccttccgcctccgcctccccctccgcctcccgcttcgcgaagcactggatagctgacgtcctcgccggcgaagaatccgtcgacttctccctgctcaaggttctggtgggggcctcgtcgaagcccctcgcgggcgccccggaggccacgcgtgagcgggtcgcgctccggtccattcaggaggtgttgtccgtgatagccgctgggggtgatgccgcggccacggcgggggtgcttagtgttgatggcgcccggtcatgcgaggatgggctgtttcggcttatcagagaggttggaagtttcggagaattggagaaggatttgcttccacctttcagtcaagacatccaggaaaatatatgtaccaagaagtttacattaccaggaatttctttccagttggtaagttaaaagaaaatctcaatattataagtagaacaatggcaaattgaatttgtaattttctcttcagctagaaagagttgagccatggatagcatctatggccccacaaccccaaatggaacacaatggcactgaacaatgtgtcaatgatcagtcactgcgcagcagccacggatgtgtaaatatagagaagcctgtgttccatacagacaatgctggggttcagcaagagaccatggcagatgtagtcaatgaaagtgaaacaggaaatctccaaaaggatccacctgcaccaacttttatttttcaccaaccgtgtatgcctgaaagcaggtcttacgtccctccgcaagaagatactatagatgctgttggtctaggcgctaggtcctcagaaaggagtcctattgtggaggggaacatgtccgttggatctgtgcttgcttcagatggctgtgatgtacctttgcagggaagcattactgagccctttttccagcaggataaacatgaccatactgttatagttggaccaaaatcttgtaagcgaaaatctccaattccatcttactgtgctcatggagatggggcagatggtggtggctccagcaatcagtcatctaaggtttccattcgtgaaggacctagcactcatgccacagtaacttcaggttttgacagaatcagcgatgtcttaccaacagatgcacctgaatctgagcatttgcctgagtgcataactgcacaggatacaaccatttcacagcctgacagcaggaaagctcatttgagtgctctgcaacaggaaaggggtgagaaagtaacccaagatctggaagatatctctgcaaatattgggtcagtggaaaaggaccatattcatggggatctgactttgccatctgccagtgttttactttctataagctgcaatggtgctaatcaaggaagtaaatatgaaaccaaccttcaaccagggactgctacagaggatatgatggctttcgaagagcagaatgcagacaagtctcacttagaagtcagtggtatcaacaaggctaatcaagctctgcatgatgatggcggcgtcatgaaaaataatacagtacatggtgggttgattgtgcagactgctccagtgtctcaaaattgcaatgtaaccttacatgataaaacttcagagcaggaaaatgaaaagaacattcaaaaagataattgccatacttatgttccaggctcttctcaggataggggtggagaaagtgcaaagaaaacaacaaatgaactaaagtctggggacatttcttcaaaaatatgtgttcatttcaatgttcaagacatcaatgatactctggaggacttgtctcaacaaggtttgtgcataaaatgtggtgaaggtggtcagttgttggaatgcaatggctgttttttagccgcccatagcagctgttttggttcatcggcgacatttgaaggaaccaattttttctactgcccggtatgcttgtataagaaagccactgaagcatataaaaaggcaaagaaaacatattgtgaaactaggaagaaccttgttgctttccttggcacagcacaagccaccaatcaacctgacaaacaactaaatggagctcagccaggagctgccaacagagatgaagagcctcatgatgagcaacattctaaagggtgtggcgcatcaaaaggggcccatgaaaatgaagtatacaatcttgctcatcaggatgaagagcatcatcagcagaggaagaagcagaaaataaatgctatagtgctccagaataacaataaaacaccagttaaggatccagagaaaaagcagcaagcggtcaacgaagaagctcgcaaagaaggtggtaatgacaactcatctcatgaaacaggagcttcatctccgagaagatgtgatcctccttcgaatcaggacgttgaggctgaccaggacgatagccttacaacttctaatcaatctggtggttctgatgaaatagaagctacatcttctaatgactctgccaagcaatcatcacccccttggcgtggtatgggacacaacaaaaaaggattgcacgaaaaggagccagctgtatcaagtaaatctggaaaaggtattgggaaacaggatcaacatatgcatacttcacgaaggaaaaaaaaaatgcacacctgcaaaagcgctattccaatcctgttgcgccacctggaagacgcaaacaactctgttggacagaaaaagaagtagctattttgaggatctgatgccgtcgacatggaacactgatgtgggtgggcatccttttgtgactggttgtgtcaacctagacctactatgcccgtgagagagattgctaaagagtcaactttcttttggaactgaaccctgcactctagatgatgataacatccggtagctgtgtttcttaaggcaactgtgtgtgtttcatccggcagctgccagtgcctcgcccaatgttctcgaatgaggtaggcgtcgtatgctctaaacacatcacgaataatttcttccagcgtgttttcttcttcttcatctttttagtgaacgcaaccttgtaagtcacgttgcagaagctataaaaacagttagtgaaacctttaaccgtagaaatgaaataccctataagcattgcacgctctattttatttccttcatcggtgatgctacataaacattcaatcgccacttttaat

SEQ ID NO: 206000 - DNA, 4275 bp, Zea Mays
ctgtatctatgatttgtgggtctgagtttaaaatagagaagttcacaactgagagtgacaaaatagcaaattttcctttaaaatgaccgcgcgttttttttaaaaaatgaccgcgcagtagctttggctgaaaaagaaaagaaaaataatcttccttcttccacgatagtcgatacggagcacccataacgttacttttattttgcagttcagcggttcagccccctcaagtcgaggtcgaggtactccgcctccgcaatgccgcccccttccgcctccgcctccccctccgcctcccgcttcgcgaagcactggatagctgacgtcctcgccggcgaagaatccgtcgacttctccctgctcaaggttctggtgggggcctcgtcgaagcccctcgcgggcgccccggaggccacgcgtgagcgggtcgcgctccggtccattcaggaggtgttgtccgtgatagccgctgggggtgatgccgcggccacggcgggggtgcttagtgttgatggcgcccggtcatgcgaggatgggctgtttcggcttatcagagaggttggaagtttcggagaattggagaaggatttgcttccacctttcagtcaagacatccaggaaaatatatgtaccaagaagtttacattaccaggaatttctttccagttgctagaaagagttgagccatggatagcatctatggccccacaaccccaaatggaacacaatggcactgaacaatgtgtcaatgatcagtcactgcgcagcagccacggatgtgtaaatatagagaagcctgtgttccatacagacaatgctggggttcagcaagagaccatggcagatgtagtcaatgaaagtgaaacaggaaatctccaaaaggatccacctgcaccaacttttatttttcaccaaccgtgtatgcctgaaagcaggtcttacgtccctccgcaagaagatactatagatgctgttggtctaggcgctaggtcctcagaaaggagtcctattgtggaggggaacatgtccgttggatctgtgcttgcttcagatggctgtgatgtacctttgcagggaagcattactgagccctttttccagcaggataaacatgaccatactgttatagttggaccaaaatcttgtaagcgaaaatctccaattccatcttactgtgctcatggagatggggcagatggtggtggctccagcaatcagtcatctaaggtttccattcgtgaaggacctagcactcatgccacagtaacttcaggttttgacagaatcagcgatgtcttaccaacagatgcacctgaatctgagcatttgcctgagtgcataactgcacaggatacaaccatttcacagcctgacagcaggaaagctcatttgagtgctctgcaacaggaaaggggtgagaaagtaacccaagatctggaagatatctctgcaaatattgggtcagtggaaaaggaccatattcatggggatctgactttgccatctgccagtgttttactttctataagctgcaatggtgctaatcaaggaagtaaatatgaaaccaaccttcaaccagggactgctacagaggatatgatggctttcgaagagcagaatgcagacaagtctcacttagaagtcagtggtatcaacaaggctaatcaagctctgcatgatgatggcggcgtcatgaaaaataatacagtacatggtgggttgattgtgcagactgctccagtgtctcaaaattgcaatgtaaccttacatgataaaacttcagagcaggaaaatgaaaagaacattcaaaaagataattgccatacttatgttccaggctcttctcaggataggggtggagaaagtgcaaagaaaacaacaaatgaactaaagtctggggacatttcttcaaaaatatgtgttcatttcaatgttcaagacatcaatgatactctggaggacttgtctcaacaaggtttgtgcataaaatgtggtgaaggtggtcagttgttggaatgcaatggctgttttttagccgcccatagcagctgttttggttcatcggcgacatttgaaggaaccaattttttctactgcccggtatgcttgtataagaaagccactgaagcatataaaaaggcaaagaaaacatattgtgaaactaggaagaaccttgttgctttccttggcacagcacaagccaccaatcaacctgacaaacaactaaatggagctcagccaggagctgccaacagagatgaagagcctcatgatgagcaacattctaaagggtgtggcgcatcaaaaggggcccatgaaaatgaagtatacaatcttgctcatcaggatgaagagcatcatcagcagaggaagaagcagaaaataaatgctataggtaagagttatcctaaggaggtactcactgagaaggttattttccagaactctgatcctgcatccattaataaacattcagtgctccagaataacaataaaacaccagttaaggatccagagaaaaagcagcaagcggtcaacgaagaagctcgcaaagaaggtggtaatgacaactcatctcatgaaacaggagcttcatctccgagaagatgtgatcctccttcgaatcaggacgttgaggctgaccaggacgatagccttacaacttctaatcaatctggtggttctgatgaaatagaagctacatcttctaatgactctgccaagcaatcatcacccccttggcgtggtatgggacacaacaaaaaaggattgcacgaaaaggagccagctgtatcaagtaaatctggaaaagtaaaaaaggttaatcgatacagctttgctagatttactaaacatgactgaggtcctattttaggattgaatgatatctgactgtgttggtctacatatgcaaataataaagctctaaatggatattactggggtggcattcacatgtaggcatgtagctttcttttgttcttgctcaaacagtttccattattttgttggctcagtatcatggatgacatgaggcgatcagttttgacactattcgaacttgtaaggtcttaggccttttgagaaaacagagaacattaactatgccatgattcatgacaatgatttaatggaaatccggtgtctttttaaggtcttaggccttttgtcatgcattgtttttcaaattcagatgagatattttcagtttttcacatacacatggttatatctatgatatactccctccgtcccaaaatataattcgttttagctcttggtttttatgtttatattcaagtggatgaagatgaatctagacacatatgtaaaacacatatattaactattgtatgaacctattaattaactaaacgaattttaacttggggcggggagggagtatcaaattagatcagacttaattgcaatatgccaatatagttgcttagcattggtgttttgttatgaattatgcaatgttgaacacgcaccgatggtattacccttccgtgataaaatgtcctgcacatataaaaaaggagaccagagcataaaaaactgagtcaactgacttcttcaaatattcacattttccatctattataggaaagaaaatgttccatttaatgctattccaagaactgagcacatgtcttgcagttccaatcctgttgcgccacctggaagacgcaaacaactctgttggacagaaaaagaagtagctattttgaggatctgatgccgtcgacatggaacactgatgtggtactagaacatagcggaacactgatatggtactaatagcgaatggaggagggtttcttctaaaatagtattttgatgcacagggtgggcatccttttgtgactggttgtgtcaacctagacctactatgcccgtgagagagattgctaaagagtcaactttcttttggaactgaaccctgcactctagatgatgataacatccggtagctgtgtttcttaaggcaactgtgtgtgtttcatccggcagctgccagtgcctcgcccaatgttctcgaatgaggtaggcgtcgtatgctctaaacacatcacgaataatttcttccagcgtgttttcttcttcttcatctttttagtgaacgcaaccttgtaagtcacgttgcagaagctataaaaacagttagtgaaacctttaaccgtagaaatgaaataccctataagcattgcacgctctattttatttccttcatcggtgatgctacataaacattcaatcgccacttttaat

SEQ ID NO: 206001 - DNA, 3555 bp, Zea Mays
ctgtatctatgatttgtgggtctgagtttaaaatagagaagttcacaactgagagtgacaaaatagcaaattttcctttaaaatgaccgcgcgttttttttaaaaaatgaccgcgcagtagctttggctgaaaaagaaaagaaaaataatcttccttcttccacgatagtcgatacggagcacccataacgttacttttattttgcagttcagcggttcagccccctcaagtcgaggtcgaggtactccgcctccgcaatgccgcccccttccgcctccgcctccccctccgcctcccgcttcgcgaagcactggatagctgacgtcctcgccggcgaagaatccgtcgacttctccctgctcaaggttctggtgggggcctcgtcgaagcccctcgcgggcgccccggaggccacgcgtgagcgggtcgcgctccggtccattcaggaggtgttgtccgtgatagccgctgggggtgatgccgcggccacggcgggggtgcttagtgttgatggcgcccggtcatgcgaggatgggctgtttcggcttatcagagaggttggaagtttcggagaattggagaaggatttgcttccacctttcagtcaagacatccaggaaaatatatgtaccaagaagtttacattaccaggaatttctttccagttgctagaaagagttgagccatggatagcatctatggccccacaaccccaaatggaacacaatggcactgaacaatgtgtcaatgatcagtcactgcgcagcagccacggatgtgtaaatatagagaagcctgtgttccatacagacaatgctggggttcagcaagagaccatggcagatgtagtcaatgaaagtgaaacaggaaatctccaaaaggatccacctgcaccaacttttatttttcaccaaccgtgtatgcctgaaagcaggtcttacgtccctccgcaagaagatactatagatgctgttggtctaggcgctaggtcctcagaaaggagtcctattgtggaggggaacatgtccgttggatctgtgcttgcttcagatggctgtgatgtacctttgcagggaagcattactgagccctttttccagcaggataaacatgaccatactgttatagttggaccaaaatcttgtaagcgaaaatctccaattccatcttactgtgctcatggagatggggcagatggtggtggctccagcaatcagtcatctaaggtttccattcgtgaaggacctagcactcatgccacagtaacttcaggttttgacagaatcagcgatgtcttaccaacagatgcacctgaatctgagcatttgcctgagtgcataactgcacaggatacaaccatttcacagcctgacagcaggaaagctcatttgagtgctctgcaacaggaaaggggtgagaaagtaacccaagatctggaagatatctctgcaaatattgggtcagtggaaaaggaccatattcatggggatctgactttgccatctgccagtgttttactttctataagctgcaatggtgctaatcaaggaagtaaatatgaaaccaaccttcaaccagggactgctacagaggatatgatggctttcgaagagcagaatgcagacaagtctcacttagaagtcagtggtatcaacaaggctaatcaagctctgcatgatgatggcggcgtcatgaaaaataatacagtacatggtgggttgattgtgcagactgctccagtgtctcaaaattgcaatgtaaccttacatgataaaacttcagagcaggaaaatgaaaagaacattcaaaaagataattgccatacttatgttccaggctcttctcaggataggggtggagaaagtgcaaagaaaacaacaaatgaactaaagtctggggacatttcttcaaaaatatgtgttcatttcaatgttcaagacatcaatgatactctggaggacttgtctcaacaaggtttgtgcataaaatgtggtgaaggtggtcagttgttggaatgcaatggctgttttttagccgcccatagcagctgttttggttcatcggcgacatttgaaggaaccaattttttctactgcccggtatgcttgtataagaaagccactgaagcatataaaaaggcaaagaaaacatattgtgaaactaggaagaaccttgttgctttccttggcacagcacaagccaccaatcaacctgacaaacaactaaatggagctcagccaggagctgccaacagagatgaagagcctcatgatgagcaacattctaaagggtgtggcgcatcaaaaggggcccatgaaaatgaagtatacaatcttgctcatcaggatgaagagcatcatcagcagaggaagaagcagaaaataaatgctatagtgctccagaataacaataaaacaccagttaaggatccagagaaaaagcagcaagcggtcaacgaagaagctcgcaaagaaggtggtaatgacaactcatctcatgaaacaggagcttcatctccgagaagatgtgatcctccttcgaatcaggacgttgaggctgaccaggacgatagccttacaacttctaatcaatctggtggttctgatgaaatagaagctacatcttctaatgactctgccaagcaatcatcacccccttggcgtggtatgggacacaacaaaaaaggattgcacgaaaaggagccagctgtatcaagtaaatctggaaaaggtattgggaaacaggatcaacatatgcatacttcacgaaggaaaaaaaaaatgcacacctgcaaaagcgctattccaatcctgttgcgccacctggaagacgcaaacaactctgttggacagaaaaagaagtagctattttgagggatgggatggcaaaattctctccacataataatggtaaaataccatggacccagatactgcaatatggccgtcgtgtgtttcacaagacgcgcctgccatgtgatttgagggtcaagtggaggaacatggagaggaagaaatctgatgccgtcgacatggaacactgatgtggtactagaacatagcggaacactgatatggtactaatagcgaatggaggagggtttcttctaaaatagtattttgatgcacagggtgggcatccttttgtgactggttgtgtcaacctagacctactatgcccgtgagagagattgctaaagagtcaactttcttttggaactgaaccctgcactctagatgatgataacatccggtagctgtgtttcttaaggcaactgtgtgtgtttcatccggcagctgccagtgcctcgcccaatgttctcgaatgaggtaggcgtcgtatgctctaaacacatcacgaataatttcttccagcgtgttttcttcttcttcatctttttagtgaacgcaaccttgtaagtcacgttgcagaagctataaaaacagttagtgaaacctttaaccgtagaaatgaaataccctataagcattgcacgctctattttatttccttcatcggtgatgctacataaacattcaatcgccacttttaat

SEQ ID NO: 206002 - DNA, 1133 bp, Zea Mays
ctgcacacagcaacccaagttcccactcagcgagtacttctctacttcctgtcacaaaaaaagatttgcaatctagcatatttatggaagcctttgctccggataaaatttgcgggtcagggagatcagcggtcaccacccaagaaagagtgatggaagcccaaagtagtacttgcttttcaaaagttgtgggacctaacctatggtatggcgatcgcacaagacttacacccaagcaagaagaagctgcgcttggtttgtcacgtgcctgtggctctggcattccagcatacatttgcaccatgaagaagtctaatgttgtcaagagacagatggtattttcaagacagttcagtaagcgacacatattcggtcgtctgggcacttatgggtgtgaaaccagagtttttgcaggcagggacctgttcggcagtaagctcaacttctcaatgatccatggaggactaaggcttcttggtggatggcccctctttgtgaagagccaccgtatcgaagcagaacacgtctgtgctttcatgttccaggaagaggaagagggcgaactgtcacttagggctgatttggtgatttggtgattagggatccctaggggatccatggggaggaatcatcttgcaattcaattttgaatagcaagaggatttcttcccctcgggatccccggtcaccaaatcagtccttagggtgcacgttctgggtactatgccagtgccaacaatctagcctttgcttgtttcgttgatgaggcacgggatgaacgtcgctaacgaattatgcatcagacattagtattggaaacaacaacatgtagctatctagattacagccttataggttgttttgttgttctatctagataactatgtatggacatattgttcttttgtgttggagggagtaagcgttagtgttttgagacacgaagattgttatttttagactgaccgctcgagttgtgcaaataggaactgaattagtggcattgttagcatgtacatgaaaacgtgatttgtgcagtgcagggattagcttgggaatgtcgtcctaaggatggccttatattgggcctgtttggttcaacttttttcttaccagcttttctgaaaatctgg

SEQ ID NO: 206003 - DNA, 5555 bp, Zea Mays
atgataaaaaagagctcgtagtcgtagaagaatccaaatccagttaccccctccccacccaccccaaaagcccaaactccggtgccatcagtgtattctctaatcacctcctctcctccctccgctccttcgtcctccccgcgaagggaggggtgtgtcctgtgcccgccaccgcgtgggatgctcacgcttcgtctccgccaccgcctctccggttgatccgccgctgaggagaacatcagaactgattgaagaacagggttggtaagtggagggagcgagatggggttcgacccactggagtggtactgccagccggtcaaggatggtgtgtggtcgcatgtggttgagaatgcgttcggcgcctacactccatgtggcactgacacccttgtagtctgcatctcatacctcgcactctttggagtttgcttctatcgtatatggaggacgacgagggactacacagtgcagcggtacaagttacgttcaccatactacaactacctgcttggactgctcgtggtgtactgcatagcagagccgctttatcggatcatcactggtacctccatcatgaacttggatgggcagcctggccttgctccatttgagaatttacatcaatgagttcagatggtacatccgatttgtggttatttacatgatggttggcgaagctgctatgttcaatcttgtgctctctgtgaggcagtactacagttcaagttcaatcttttacctatactgcagtgagattgtatgccagttcttgtttggaattctcatggtggtttatctgcctagcttggatccatatccgggttataccccgatcaggaatgaagtgttggttgataatactgattatgaacctcttcccggcggtgagcagatttgccctgagagacatgccaacatatttgccagaatattcttttcatggatgactcctttaatgcaacaaggatttagaaggcccattacagataaggatatctggaaattggatagctgggatgagactgaaactttgtatagccagttccagaaacgctggaatgatgagcttcaaaaaccaaacccttggctgttacgagctcttcatagtagtctttggggaaggttctggctgggtggatttttcaagattggcaatgatgcttctcaatttgttggtccacttgtattgaacctgttgttagagtctatgcaaaaaggtgatccatcttggagcgggtacatctatgctttctcaatctttgcaggagtgtcacttggggttcttgctgaggcacagtactttcagaacgtcatgcgtgtgggtttcaggttgaggtccacattgattgcagctgttttccgcaaatctttgcgactaactaatgatagtcgtagaaagtttgcttctgggaggattaccaatttgatttcaactgatgcggagtcccttcagcaagtgtgccagcagcttcacagcctatggtctgctcctttccgcattgttatttccatggtccttctatatgcacagcttggtcctgcagcattagtcggtgcactcatgctggttcttttgtttccaattcagactgtaatcatcagcaaaatgcaaaaacttactaaagaggggttgcaaaggaccgacaagcgaatcagtctcatgaatgaagtattagctgctatggatacagtcaagtgctatgcttgggagcaaagtttccagtcaaaagtgcaggacatccgtgatgatgaactttcttggttccgcagggctcagttgcttgctgcgctgaatagctttatcctgaacagtataccggtcgttgtcactgttgtttcatttggtgtatattctctactgggaggtgatttgacaccagcaaaggcgtttacttctctttcattatttgcagtcttaaggtttccacttttcatgctcccgaatctgataactcaggtggttaattgtaaggtgtcattgaagcgtctggaagatctcctgttggctgaagagagattacttctgccaaatccacctattgatcctgatcttccagccatttctatcaagaatgggtatttttcatgggaatcagaggctcagagaccaactttatcaaatgtcaatctggatgtacctgttggaagtttagttgcaatagtaggaagcactggtgagggtaaaacttctctcatatctgcaatgcttggagaaataccaccagtatctggatcaggtacctcagtggtcattcgtggatcggtggcttacgttcctcaagtttcctggatcttcaatgctactgtacgtgacaatattttgtttgggtctccctttcaacccccacgatacgagaaagcaattgatgccacttcattgcggcatgaccttgacctactcccaggaggcgatctgacagagattggtgaaagaggagttaatattagtggagggcagaagcaaagagtttcaatggcaagagctgtgtattctgattcagatgtgtacatatttgatgatccactcagtgcattagatgcccatgttggccggcaggtatttgataaatgtatcaaaggcgaactgcagcataaaacccgggttcttgttaccaatcagctgcattttctgccatatgtcgataaaatactgctaattcatgatggtgtaattaaagaggagggtacttttgatgaacttagcaacagtggggagctcttcaagaagctcatggaaaatgctggaaaaatggaggaacaggtggaagaggatgaaagtaaaccaaaggatgttgcaaaacaaactgtgaacggtgatgttacaatagctgatgaaggttcacagaagagccaggatagttctagtaaaacaaaaccaggaaaatctgtccttattaagcaagaggaaagggaaactggggttgtcagtgcgagggtcctttcacgttacaaaaatgcactgggagggatatgggtggtgtccatactcttcttttgctatgcactgactgaagttcttcgcatttcaagtagcacatggttgagcatttggactgatgagggttctctgaaaattcatggctctggttattataatttgatctatggaattctttcctttgggcaggttctagtcacactctcaaattcatactggttgattatatcaagtcttcgggcagccaaaaggcttcatgatgccatgctccgatcaatattgagagctcccatggtattttttcatacaaacccacttggacggatcatcaacagattttcgaaggatatgggtgacattgaccgaaatgtcgctgtatttgtcaatatgtttatggcacaaatatctcagttgctctcaactttcgttctcatcggctttgtcagcaccatgtctctttgggctatcatgccactcctgattttgttttatgcagcttacctctattaccaggcaacatctcgcgaggtgaagcgtctggattccattaccaggtctcctgtgtatgctcagttttcagaggctttgaatggtctgtccacaatccgtgcctataaagcctatgatagaatggcaaatatcaatgggagatcaatggacaacaacattaggttcacacttgtgaacatgggtgcaaataggtggctagctattcgtctggagacattgggtggcatcatgatatggtttacagcaacatttgctgttatgcaaaatcaacgagcagagaatcagaaggcctttgcttctacaatgggtcttcttcttacttacactctcaatattaccaatttactcacagctgttcttcgtcttgctagtcttgctgaaaatagtttaaatgctgttgaacgggtcggaacatacattgagttaccttcggaagctcctcctgtcattgaggatcataggccaccccctggttggccatcatcaggtgtcatcaagtttgaagacgttgtgcttcgatatcgaccagaacttcctcctgttcttcatggcatatcttttgttattaatggaagtgagaaggtaggaatagttggcagaacaggtgctggcaaatctagcatgcttaatgctttgttccgtatcgtggagcttgaacgagggagaatattaattgatgattgtgacacttctaagtttggaatttgggacttgcgcaaagttctaggaataataccacaggcaccagttctattctcaggttctgttcggtttaatctggatccctttaatgagcacaatgatgcggacctctgggaggctctggaaagggctcatctaaaagatgttataaggaggaattctttaggattggatgctgaggtttctgaagctggtgaaaatttcagtgttggacaacgacagctgttgagcttagctcgtgcgctgctgagaagagcaaagatacttgtccttgatgaggcaacagcagcagttgacgtgcggactgatgctcttattcagaaaacaatccgagaagaattcaagagttgcacaatgctcataattgcccaccgtttgaacacggtcattgactgtgacaggttgcttattctaagttctgggcaggttctggaattcgactctcctgagaatcttctaagcaacgaggggagtgctttctccaagatggtgcaaagtacaggacctagcaacgcagaatacctcaagagtcttgtatttgcaagtggagaagagaggtcccggagggaagaaatcaagctgcaagatatccaaaggagatgggttgcatctaaccgatgggctgaagctgcccagtttgcgcttgctagaagcctcacatcatcacatagtgacctccttgcattagaagctgccgagggaaataatattctgaggagaacaaaggatgctgtaatcactctgcaaagcgtactggaagggaagcacaatactgaaatcgatgaatctctaactcagtatcaggtcccagctgatcgatggtggtcttcactttacaaagtgatcgaaggcctcgccacaatgagcagattgggccgcaaccgtctgcagcaaccttcttataattttgagaacaacaattctattgactgggaccaaatgtagatgtagaattctggatcacaacagcattgtggagtaggctggaggtgtagttatttctggcggatttgattcctgcggtgtgtaaacgctgcagcaacacgtaacttgcgaataaggaacgagttttgccacagcaggacgatccttgtaccgtcgtccgcaagggttgtaatttctcagggaccgttacgacacgattgtatgtcaggttttgacagtttgagccaatgcaattcttctaatgaaaaagacaagtgcatgtgaatggttagcatctgcctatcgcctatcgggtatcatgtggagtcgtctggtataccgtcctacacggctacacctgagaacgaagcgaccttacccccaactatcaccttgtagcgatccgaagttgttcatcttcgagtttcagttctctaactccatcgtagctaagcgtttcagcaatgggtcaagagag

SEQ ID NO: 206004 - DNA, 5471 bp, Zea Mays
ccaaaagcccaaactccggtgccatcagtgtattctctaatcacctcctctcctccctccgctccttcgtcctccccgcgaagggaggggtgtgtcctgtgcccgccaccgcgtgggatgctcacgcttcgtctccgccaccgcctctccggttgatccgccgctgaggagaacatcagaactgattgaagaacagggttggtaagtggagggagcgagatggggttcgacccactggagtggtactgccagccggtcaaggatggtgtgtggtcgcatgtggttgagaatgcgttcggcgcctacactccatgtggcactgacacccttgtagtctgcatctcatacctcgcactctttggagtttgcttctatcgtatatggaggacgacgagggactacacagtgcagcggtacaagttacgttcaccatactacaactacctgcttggactgctcgtggtgtactgcatagcagagccgctttatcggatcatcactggtacctccatcatgaacttggatgggcagcctggccttgctccatttgagatggtacatccgatttgtggttatttacatgatggttggcgaagctgctatgttcaatcttgtgctctctgtgaggcagtactacagttcaagttcaatcttttacctatactgcagtgagattgtatgccagttcttgtttggaattctcatggtggtttatctgcctagcttggatccatatccgggttataccccgatcaggaatgaagtgttggttgataatactgattatgaacctcttcccggcggtgagcagatttgccctgagagacatgccaacatatttgccagaatattcttttcatggatgactcctttaatgcaacaaggatttagaaggcccattacagataaggatatctggaaattggatagctgggatgagactgaaactttgtatagccagttccagaaacgctggaatgatgagcttcaaaaaccaaacccttggctgttacgagctcttcatagtagtctttggggaaggttctggctgggtggatttttcaagattggcaatgatgcttctcaatttgttggtccacttgtattgaacctgttgttagagtctatgcaaaaaggtgatccatcttggagcgggtacatctatgctttctcaatctttgcaggagtgtcacttggggttcttgctgaggcacagtactttcagaacgtcatgcgtgtgggtttcaggttgaggtccacattgattgcagctgttttccgcaaatctttgcgactaactaatgatagtcgtagaaagtttgcttctgggaggattaccaatttgatttcaactgatgcggagtcccttcagcaagtgtgccagcagcttcacagcctatggtctgctcctttccgcattgttatttccatggtccttctatatgcacagcttggtcctgcagcattagtcggtgcactcatgctggttcttttgtttccaattcagactgtaatcatcagcaaaatgcaaaaacttactaaagaggggttgcaaaggaccgacaagcgaatcagtctcatgaatgaagtattagctgctatggatacagtcaagtgctatgcttgggagcaaagtttccagtcaaaagtgcaggacatccgtgatgatgaactttcttggttccgcagggctcagttgcttgctgcgctgaatagctttatcctgaacagtataccggtcgttgtcactgttgtttcatttggtgtatattctctactgggaggtgatttgacaccagcaaaggcgtttacttctctttcattatttgcagtcttaaggtttccacttttcatgctcccgaatctgataactcaggtggttaattgtaaggtgtcattgaagcgtctggaagatctcctgttggctgaagagagattacttctgccaaatccacctattgatcctgatcttccagccatttctatcaagaatgggtatttttcatgggaatcagaggctcagagaccaactttatcaaatgtcaatctggatgtacctgttggaagtttagttgcaatagtaggaagcactggtgagggtaaaacttctctcatatctgcaatgcttggagaaataccaccagtatctggatcaggtacctcagtggtcattcgtggatcggtggcttacgttcctcaagtttcctggatcttcaatgctactgtacgtgacaatattttgtttgggtctccctttcaacccccacgatacgagaaagcaattgatgccacttcattgcggcatgaccttgacctactcccaggaggcgatctgacagagattggtgaaagaggagttaatattagtggagggcagaagcaaagagtttcaatggcaagagctgtgtattctgattcagatgtgtacatatttgatgatccactcagtgcattagatgcccatgttggccggcaggtatttgataaatgtatcaaaggcgaactgcagcataaaacccgggttcttgttaccaatcagctgcattttctgccatatgtcgataaaatactgctaattcatgatggtgtaattaaagaggagggtacttttgatgaacttagcaacagtggggagctcttcaagaagctcatggaaaatgctggaaaaatggaggaacaggtggaagaggatgaaagtaaaccaaaggatgttgcaaaacaaactgtgaacggtgatgttacaatagctgatgaaggttcacagaagagccaggatagttctagtaaaacaaaaccaggaaaatctgtccttattaagcaagaggaaagggaaactggggttgtcagtgcgagggtcctttcacgttacaaaaatgcactgggagggatatgggtggtgtccatactcttcttttgctatgcactgactgaagttcttcgcatttcaagtagcacatggttgagcatttggactgatgagggttctctgaaaattcatggctctggttattataatttgatctatggaattctttcctttgggcaggttctagtcacactctcaaattcatactggttgattatatcaagtcttcgggcagccaaaaggcttcatgatgccatgctccgatcaatattgagagctcccatggtattttttcatacaaacccacttggacggatcatcaacagattttcgaaggatatgggtgacattgaccgaaatgtcgctgtatttgtcaatatgtttatggcacaaatatctcagttgctctcaactttcgttctcatcggctttgtcagcaccatgtctctttgggctatcatgccactcctgattttgttttatgcagcttacctctattaccaggcaacatctcgcgaggtgaagcgtctggattccattaccaggtctcctgtgtatgctcagttttcagaggctttgaatggtctgtccacaatccgtgcctataaagcctatgatagaatggcaaatatcaatgggagatcaatggacaacaacattaggttcacacttgtgaacatgggtgcaaataggtggctagctattcgtctggagacattgggtggcatcatgatatggtttacagcaacatttgctgttatgcaaaatcaacgagcagagaatcagaaggcctttgcttctacaatgggtcttcttcttacttacactctcaatattaccaatttactcacagctgttcttcgtcttgctagtcttgctgaaaatagtttaaatgctgttgaacgggtcggaacatacattgagttaccttcggaagctcctcctgtcattgaggatcataggccaccccctggttggccatcatcaggtgtcatcaagtttgaagacgttgtgcttcgatatcgaccagaacttcctcctgttcttcatggcatatcttttgttattaatggaagtgagaaggtaggaatagttggcagaacaggtgctggcaaatctagcatgcttaatgctttgttccgtatcgtggagcttgaacgagggagaatattaattgatgattgtgacacttctaagtttggaatttgggacttgcgcaaagttctaggaataataccacaggcaccagttctattctcaggttctgttcggtttaatctggatccctttaatgagcacaatgatgcggacctctgggaggctctggaaagggctcatctaaaagatgttataaggaggaattctttaggattggatgctgaggtttctgaagctggtgaaaatttcagtgttggacaacgacagctgttgagcttagctcgtgcgctgctgagaagagcaaagatacttgtccttgatgaggcaacagcagcagttgacgtgcggactgatgctcttattcagaaaacaatccgagaagaattcaagagttgcacaatgctcataattgcccaccgtttgaacacggtcattgactgtgacaggttgcttattctaagttctgggcaggttctggaattcgactctcctgagaatcttctaagcaacgaggggagtgctttctccaagatggtgcaaagtacaggacctagcaacgcagaatacctcaagagtcttgtatttgcaagtggagaagagaggtcccggagggaagaaatcaagctgcaagatatccaaaggagatgggttgcatctaaccgatgggctgaagctgcccagtttgcgcttgctagaagcctcacatcatcacatagtgacctccttgcattagaagctgccgagggaaataatattctgaggagaacaaaggatgctgtaatcactctgcaaagcgtactggaagggaagcacaatactgaaatcgatgaatctctaactcagtatcaggtcccagctgatcgatggtggtcttcactttacaaagtgatcgaaggcctcgccacaatgagcagattgggccgcaaccgtctgcagcaaccttcttataattttgagaacaacaattctattgactgggaccaaatgtagatgtagaattctggatcacaacagcattgtggagtaggctggaggtgtagttatttctggcggatttgattcctgcggtgtgtaaacgctgcagcaacacgtaacttgcgaataaggaacgagttttgccacagcaggacgatccttgtaccgtcgtccgcaagggttgtaatttctcagggaccgttacgacacgattgtatgtcaggttttgacagtttgagccaatgcaattcttctaatgaaaaagacaagtgcatgtgaatggttagcatctgcctatcgcctatcgggtatcatgtggagtcgtctggtataccgtcctacacggctacacctgagaacgaagcgaccttacccccaactatcaccttgtagcgatccgaagttgttcatcttcgagtttcagttctctaactccatcgtagctaagcgtttcagcaatgggtcaagagag

SEQ ID NO: 206005 - DNA, 5435 bp, Zea Mays
caaaagcccaaactccggtgccatcagtgtattctctaatcacctcctctcctccctccgctccttcgtcctccccgcgaagggaggggtgtgtcctgtgcccgccaccgcgtgggatgctcacgcttcgtctccgccaccgcctctccggttgatccgccgctgaggagaacatcagaactgattgaagaacagggttggtaagtggagggagcgagatggggttcgacccactggagtggtactgccagccggtcaaggatggtgtgtggtcgcatgtggttgagaatgcgttcggcgcctacactccatgtggcactgacacccttgtagtctgcatctcatacctcgcactctttggagtttgcttctatcgtatatggaggacgacgagggactacacagtgcagcggtacaagttacgttcaccatactacaactacctgcttggactgctcgtggtgtactgcatagcagagccgctttatcggatcatcactggtacctccatcatgaacttggatgggcagcctggccttgctccatttgagattgtctcattgatcattgagtctgttgcttggtgctgtatgcttgtaatgattctgcttgaaacaagaatttacatcaatgagttcagatggtacatccgatttgtggttatttacatgatggttggcgaagctgctatgttcaatcttgtgctctctgtgaggcagtactacagttcaagttcaatcttttacctatactgcagtgagattgtatgccagttcttgtttggaattctcatggtggtttatctgcctagcttggatccatatccgggttataccccgatcaggaatgaagtgttggttgataatactgattatgaacctcttcccggcggtgagcagatttgccctgagagacatgccaacatatttgccagaatattcttttcatggatgactcctttaatgcaacaaggatttagaaggcccattacagataaggatatctggaaattggatagctgggatgagactgaaactttgtatagccagttccagaaacgctggaatgatgagcttcaaaaaccaaacccttggctgttacgagctcttcatagtagtctttggggaaggttctggctgggtggatttttcaagattggcaatgatgcttctcaatttgttggtccacttgtattgaacctgttgttagagtctatgcaaaaaggtgatccatcttggagcgggtacatctatgctttctcaatctttgcaggagtgtcacttggggttcttgctgaggcacagtactttcagaacgtcatgcgtgtgggtttcaggttgaggtccacattgattgcagctgttttccgcaaatctttgcgactaactaatgatagtcgtagaaagtttgcttctgggaggattaccaatttgatttcaactgatgcggagtcccttcagcaagtgtgccagcagcttcacagcctatggtctgctcctttccgcattgttatttccatggtccttctatatgcacagcttggtcctgcagcattagtcggtgcactcatgctggttcttttgtttccaattcagactgtaatcatcagcaaaatgcaaaaacttactaaagaggggttgcaaaggaccgacaagcgaatcagtctcatgaatgaagtattagctgctatggatacagtcaagtgctatgcttgggagcaaagtttccagtcaaaagtgcaggacatccgtgatgatgaactttcttggttccgcagggctcagttgcttgctgcgtcttaaggtttccacttttcatgctcccgaatctgataactcaggtggttaattgtaaggtgtcattgaagcgtctggaagatctcctgttggctgaagagagattacttctgccaaatccacctattgatcctgatcttccagccatttctatcaagaatgggtatttttcatgggaatcagaggctcagagaccaactttatcaaatgtcaatctggatgtacctgttggaagtttagttgcaatagtaggaagcactggtgagggtaaaacttctctcatatctgcaatgcttggagaaataccaccagtatctggatcaggtacctcagtggtcattcgtggatcggtggcttacgttcctcaagtttcctggatcttcaatgctactgtacgtgacaatattttgtttgggtctccctttcaacccccacgatacgagaaagcaattgatgccacttcattgcggcatgaccttgacctactcccaggaggcgatctgacagagattggtgaaagaggagttaatattagtggagggcagaagcaaagagtttcaatggcaagagctgtgtattctgattcagatgtgtacatatttgatgatccactcagtgcattagatgcccatgttggccggcaggtatttgataaatgtatcaaaggcgaactgcagcataaaacccgggttcttgttaccaatcagctgcattttctgccatatgtcgataaaatactgctaattcatgatggtgtaattaaagaggagggtacttttgatgaacttagcaacagtggggagctcttcaagaagctcatggaaaatgctggaaaaatggaggaacaggtggaagaggatgaaagtaaaccaaaggatgttgcaaaacaaactgtgaacggtgatgttacaatagctgatgaaggttcacagaagagccaggatagttctagtaaaacaaaaccaggaaaatctgtccttattaagcaagaggaaagggaaactggggttgtcagtgcgagggtcctttcacgttacaaaaatgcactgggagggatatgggtggtgtccatactcttcttttgctatgcactgactgaagttcttcgcatttcaagtagcacatggttgagcatttggactgatgagggttctctgaaaattcatggctctggttattataatttgatctatggaattctttcctttgggcaggttctagtcacactctcaaattcatactggttgattatatcaagtcttcgggcagccaaaaggcttcatgatgccatgctccgatcaatattgagagctcccatggtattttttcatacaaacccacttggacggatcatcaacagattttcgaaggatatgggtgacattgaccgaaatgtcgctgtatttgtcaatatgtttatggcacaaatatctcagttgctctcaactttcgttctcatcggctttgtcagcaccatgtctctttgggctatcatgccactcctgattttgttttatgcagcttacctctattaccaggcaacatctcgcgaggtgaagcgtctggattccattaccaggtctcctgtgtatgctcagttttcagaggctttgaatggtctgtccacaatccgtgcctataaagcctatgatagaatggcaaatatcaatgggagatcaatggacaacaacattaggttcacacttgtgaacatgggtgcaaataggtggctagctattcgtctggagacattgggtggcatcatgatatggtttacagcaacatttgctgttatgcaaaatcaacgagcagagaatcagaaggcctttgcttctacaatgggtcttcttcttacttacactctcaatattaccaatttactcacagctgttcttcgtcttgctagtcttgctgaaaatagtttaaatgctgttgaacgggtcggaacatacattgagttaccttcggaagctcctcctgtcattgaggatcataggccaccccctggttggccatcatcaggtgtcatcaagtttgaagacgttgtgcttcgatatcgaccagaacttcctcctgttcttcatggcatatcttttgttattaatggaagtgagaaggtaggaatagttggcagaacaggtgctggcaaatctagcatgcttaatgctttgttccgtatcgtggagcttgaacgagggagaatattaattgatgattgtgacacttctaagtttggaatttgggacttgcgcaaagttctaggaataataccacaggcaccagttctattctcaggttctgttcggtttaatctggatccctttaatgagcacaatgatgcggacctctgggaggctctggaaagggctcatctaaaagatgttataaggaggaattctttaggattggatgctgaggtttctgaagctggtgaaaatttcagtgttggacaacgacagctgttgagcttagctcgtgcgctgctgagaagagcaaagatacttgtccttgatgaggcaacagcagcagttgacgtgcggactgatgctcttattcagaaaacaatccgagaagaattcaagagttgcacaatgctcataattgcccaccgtttgaacacggtcattgactgtgacaggttgcttattctaagttctgggcaggttctggaattcgactctcctgagaatcttctaagcaacgaggggagtgctttctccaagatggtgcaaagtacaggacctagcaacgcagaatacctcaagagtcttgtatttgcaagtggagaagagaggtcccggagggaagaaatcaagctgcaagatatccaaaggagatgggttgcatctaaccgatgggctgaagctgcccagtttgcgcttgctagaagcctcacatcatcacatagtgacctccttgcattagaagctgccgagggaaataatattctgaggagaacaaaggatgctgtaatcactctgcaaagcgtactggaagggaagcacaatactgaaatcgatgaatctctaactcagtatcaggtcccagctgatcgatggtggtcttcactttacaaagtgatcgaaggcctcgccacaatgagcagattgggccgcaaccgtctgcagcaaccttcttataattttgagaacaacaattctattgactgggaccaaatgtagatgtagaattctggatcacaacagcattgtggagtaggctggaggtgtagttatttctggcggatttgattcctgcggtgtgtaaacgctgcagcaacacgtaacttgcgaataaggaacgagttttgccacagcaggacgatccttgtaccgtcgtccgcaagggttgtaatttctcagggaccgttacgacacgattgtatgtcaggttttgacagtttgagccaatgcaattcttctaatgaaaaagacaagtgcatgtgaatggttagcatctgcctatcgcctatcgggtatcatgtggagtcgtctggtataccgtcctacacggctacacctgagaacgaagcgaccttacccccaactatcaccttgtagcgatccgaagttgttcatcttcgagtttcagttctctaactccatcgtagctaagcgtttcagcaatgggtcaagagag

SEQ ID NO: 206006 - DNA, 5458 bp, Zea Mays
caaaagcccaaactccggtgccatcagtgtattctctaatcacctcctctcctccctccgctccttcgtcctccccgcgaagggaggggtgtgtcctgtgcccgccaccgcgtgggatgctcacgcttcgtctccgccaccgcctctccggttgatccgccgctgaggagaacatcagaactgattgaagaacagggttggtaagtggagggagcgagatggggttcgacccactggagtggtactgccagccggtcaaggatggtgtgtggtcgcatgtggttgagaatgcgttcggcgcctacactccatgtggcactgacacccttgtagtctgcatctcatacctcgcactctttggagtttgcttctatcgtatatggaggacgacgagggactacacagtgcagcggtacaagttacgttcaccatactacaactacctgcttggactgctcgtggtgtactgcatagcagagccgctttatcggatcatcactggtacctccatcatgaacttggatgggcagcctggccttgctccatttgagattgtctcattgatcattgagtctgttgcttggtgctgtatgcttgtaatgattctgcttgaaacaagaatttacatcaatgagttcagatggtacatccgatttgtggttatttacatgatggttggcgaagctgctatgttcaatcttgtgctctctcttggatccatatccgggttataccccgatcaggaatgaagtgttggttgataatactgattatgaacctcttcccggcggtgagcagatttgccctgagagacatgccaacatatttgccagaatattcttttcatggatgactcctttaatgcaacaaggatttagaaggcccattacagataaggatatctggaaattggatagctgggatgagactgaaactttgtatagccagttccagaaacgctggaatgatgagcttcaaaaaccaaacccttggctgttacgagctcttcatagtagtctttggggaaggttctggctgggtggatttttcaagattggcaatgatgcttctcaatttgttggtccacttgtattgaacctgttgttagagtctatgcaaaaaggtgatccatcttggagcgggtacatctatgctttctcaatctttgcaggagtgtcacttggggttcttgctgaggcacagtactttcagaacgtcatgcgtgtgggtttcaggttgaggtccacattgattgcagctgttttccgcaaatctttgcgactaactaatgatagtcgtagaaagtttgcttctgggaggattaccaatttgatttcaactgatgcggagtcccttcagcaagtgtgccagcagcttcacagcctatggtctgctcctttccgcattgttatttccatggtccttctatatgcacagcttggtcctgcagcattagtcggtgcactcatgctggttcttttgtttccaattcagactgtaatcatcagcaaaatgcaaaaacttactaaagaggggttgcaaaggaccgacaagcgaatcagtctcatgaatgaagtattagctgctatggatacagtcaagtgctatgcttgggagcaaagtttccagtcaaaagtgcaggacatccgtgatgatgaactttcttggttccgcagggctcagttgcttgctgcgctgaatagctttatcctgaacagtataccggtcgttgtcactgttgtttcatttggtgtatattctctactgggaggtgatttgacaccagcaaaggcgtttacttctctttcattatttgcagtcttaaggtttccacttttcatgctcccgaatctgataactcaggtggttaattgtaaggtgtcattgaagcgtctggaagatctcctgttggctgaagagagattacttctgccaaatccacctattgatcctgatcttccagccatttctatcaagaatgggtatttttcatgggaatcagaggctcagagaccaactttatcaaatgtcaatctggatgtacctgttggaagtttagttgcaatagtaggaagcactggtgagggtaaaacttctctcatatctgcaatgcttggagaaataccaccagtatctggatcaggtacctcagtggtcattcgtggatcggtggcttacgttcctcaagtttcctggatcttcaatgctactgtacgtgacaatattttgtttgggtctccctttcaacccccacgatacgagaaagcaattgatgccacttcattgcggcatgaccttgacctactcccaggaggcgatctgacagagattggtgaaagaggagttaatattagtggagggcagaagcaaagagtttcaatggcaagagctgtgtattctgattcagatgtgtacatatttgatgatccactcagtgcattagatgcccatgttggccggcaggtatttgataaatgtatcaaaggcgaactgcagcataaaacccgggttcttgttaccaatcagctgcattttctgccatatgtcgataaaatactgctaattcatgatggtgtaattaaagaggagggtacttttgatgaacttagcaacagtggggagctcttcaagaagctcatggaaaatgctggaaaaatggaggaacaggtggaagaggatgaaagtaaaccaaaggatgttgcaaaacaaactgtgaacggtgatgttacaatagctgatgaaggttcacagaagagccaggatagttctagtaaaacaaaaccaggaaaatctgtccttattaagcaagaggaaagggaaactggggttgtcagtgcgagggtcctttcacgttacaaaaatgcactgggagggatatgggtggtgtccatactcttcttttgctatgcactgactgaagttcttcgcatttcaagtagcacatggttgagcatttggactgatgagggttctctgaaaattcatggctctggttattataatttgatctatggaattctttcctttgggcaggttctagtcacactctcaaattcatactggttgattatatcaagtcttcgggcagccaaaaggcttcatgatgccatgctccgatcaatattgagagctcccatggtattttttcatacaaacccacttggacggatcatcaacagattttcgaaggatatgggtgacattgaccgaaatgtcgctgtatttgtcaatatgtttatggcacaaatatctcagttgctctcaactttcgttctcatcggctttgtcagcaccatgtctctttgggctatcatgccactcctgattttgttttatgcagcttacctctattaccaggcaacatctcgcgaggtgaagcgtctggattccattaccaggtctcctgtgtatgctcagttttcagaggctttgaatggtctgtccacaatccgtgcctataaagcctatgatagaatggcaaatatcaatgggagatcaatggacaacaacattaggttcacacttgtgaacatgggtgcaaataggtggctagctattcgtctggagacattgggtggcatcatgatatggtttacagcaacatttgctgttatgcaaaatcaacgagcagagaatcagaaggcctttgcttctacaatgggtcttcttcttacttacactctcaatattaccaatttactcacagctgttcttcgtcttgctagtcttgctgaaaatagtttaaatgctgttgaacgggtcggaacatacattgagttaccttcggaagctcctcctgtcattgaggatcataggccaccccctggttggccatcatcaggtgtcatcaagtttgaagacgttgtgcttcgatatcgaccagaacttcctcctgttcttcatggcatatcttttgttattaatggaagtgagaaggtaggaatagttggcagaacaggtgctggcaaatctagcatgcttaatgctttgttccgtatcgtggagcttgaacgagggagaatattaattgatgattgtgacacttctaagtttggaatttgggacttgcgcaaagttctaggaataataccacaggcaccagttctattctcaggttctgttcggtttaatctggatccctttaatgagcacaatgatgcggacctctgggaggctctggaaagggctcatctaaaagatgttataaggaggaattctttaggattggatgctgaggtttctgaagctggtgaaaatttcagtgttggacaacgacagctgttgagcttagctcgtgcgctgctgagaagagcaaagatacttgtccttgatgaggcaacagcagcagttgacgtgcggactgatgctcttattcagaaaacaatccgagaagaattcaagagttgcacaatgctcataattgcccaccgtttgaacacggtcattgactgtgacaggttgcttattctaagttctgggcaggttctggaattcgactctcctgagaatcttctaagcaacgaggggagtgctttctccaagatggtgcaaagtacaggacctagcaacgcagaatacctcaagagtcttgtatttgcaagtggagaagagaggtcccggagggaagaaatcaagctgcaagatatccaaaggagatgggttgcatctaaccgatgggctgaagctgcccagtttgcgcttgctagaagcctcacatcatcacatagtgacctccttgcattagaagctgccgagggaaataatattctgaggagaacaaaggatgctgtaatcactctgcaaagcgtactggaagggaagcacaatactgaaatcgatgaatctctaactcagtatcaggtcccagctgatcgatggtggtcttcactttacaaagtgatcgaaggcctcgccacaatgagcagattgggccgcaaccgtctgcagcaaccttcttataattttgagaacaacaattctattgactgggaccaaatgtagatgtagaattctggatcacaacagcattgtggagtaggctggaggtgtagttatttctggcggatttgattcctgcggtgtgtaaacgctgcagcaacacgtaacttgcgaataaggaacgagttttgccacagcaggacgatccttgtaccgtcgtccgcaagggttgtaatttctcagggaccgttacgacacgattgtatgtcaggttttgacagtttgagccaatgcaattcttctaatgaaaaagacaagtgcatgtgaatggttagcatctgcctatcgcctatcgggtatcatgtggagtcgtctggtataccgtcctacacggctacacctgagaacgaagcgaccttacccccaactatcaccttgtagcgatccgaagttgttcatcttcgagtttcagttctctaactccatcgtagctaagcgtttcagcaatgggtcaagagag

SEQ ID NO: 206007 - DNA, 5611 bp, Zea Mays
ctcgattctgtcgagatgataaagccccgttgtttatatcctcttttgccttttttgtgcggtcgtgcctggcgtgtcttagtggactagtggagtgggcatgtggcgccgcttccgccgccgccgctgcagcactactcgttcgtcagaatagtatagggtgcagttgcgtggagatccacccgctcgtggattggcttctcctgcgggttgcaactggagaacatcagaactgattgaagaacagggttggtaagtggagggagcgagatggggttcgacccactggagtggtactgccagccggtcaaggatggtgtgtggtcgcatgtggttgagaatgcgttcggcgcctacactccatgtggcactgacacccttgtagtctgcatctcatacctcgcactctttggagtttgcttctatcgtatatggaggacgacgagggactacacagtgcagcggtacaagttacgttcaccatactacaactacctgcttggactgctcgtggtgtactgcatagcagagccgctttatcggatcatcactggtacctccatcatgaacttggatgggcagcctggccttgctccatttgagattgtctcattgatcattgagtctgttgcttggtgctgtatgcttgtaatgattctgcttgaaacaagaatttacatcaatgagttcagatggtacatccgatttgtggttatttacatgatggttggcgaagctgctatgttcaatcttgtgctctctgtgaggcagtactacagttcaagttcaatcttttacctatactgcagtgagattgtatgccagttcttgtttggaattctcatggtggtttatctgcctagcttggatccatatccgggttataccccgatcaggaatgaagtgttggttgataatactgattatgaacctcttcccggcggtgagcagatttgccctgagagacatgccaacatatttgccagaatattcttttcatggatgactcctttaatgcaacaaggatttagaaggcccattacagataaggatatctggaaattggatagctgggatgagactgaaactttgtatagccagttccagaaacgctggaatgatgagcttcaaaaaccaaacccttggctgttacgagctcttcatagtagtctttggggaaggttctggctgggtggatttttcaagattggcaatgatgcttctcaatttgttggtccacttgtattgaacctgttgttagagtctatgcaaaaaggtgatccatcttggagcgggtacatctatgctttctcaatctttgcaggagtgtcacttggggttcttgctgaggcacagtactttcagaacgtcatgcgtgtgggtttcaggttgaggtccacattgattgcagctgttttccgcaaatctttgcgactaactaatgatagtcgtagaaagtttgcttctgggaggattaccaatttgatttcaactgatgcggagtcccttcagcaagtgtgccagcagcttcacagcctatggtctgctcctttccgcattgttatttccatggtccttctatatgcacagcttggtcctgcagcattagtcggtgcactcatgctggttcttttgtttccaattcagactgtaatcatcagcaaaatgcaaaaacttactaaagaggggttgcaaaggaccgacaagcgaatcagtctcatgaatgaagtattagctgctatggatacagtcaagtgctatgcttgggagcaaagtttccagtcaaaagtgcaggacatccgtgatgatgaactttcttggttccgcagggctcagttgcttgctgcgctgaatagctttatcctgaacagtataccggtcgttgtcactgttgtttcatttggtgtatattctctactgggaggtgatttgacaccagcaaaggcgtttacttctctttcattatttgcagtcttaaggtttccacttttcatgctcccgaatctgataactcaggtggttaattgtaaggtgtcattgaagcgtctggaagatctcctgttggctgaagagagattacttctgccaaatccacctattgatcctgatcttccagccatttctatcaagaatgggtatttttcatgggaatcagaggctcagagaccaactttatcaaatgtcaatctggatgtacctgttggaagtttagttgcaatagtaggaagcactggtgagggtaaaacttctctcatatctgcaatgcttggagaaataccaccagtatctggatcaggtacctcagtggtcattcgtggatcggtggcttacgttcctcaagtttcctggatcttcaatgctactgtacgtgacaatattttgtttgggtctccctttcaacccccacgatacgagaaagcaattgatgccacttcattgcggcatgaccttgacctactcccaggaggcgatctgacagagattggtgaaagaggagttaatattagtggagggcagaagcaaagagtttcaatggcaagagctgtgtattctgattcagatgtgtacatatttgatgatccactcagtgcattagatgcccatgttggccggcaggtatttgataaatgtatcaaaggcgaactgcagcataaaacccgggttcttgttaccaatcagctgcattttctgccatatgtcgataaaatactgctaattcatgatggtgtaattaaagaggagggtacttttgatgaacttagcaacagtggggagctcttcaagaagctcatggaaaatgctggaaaaatggaggaacaggtggaagaggatgaaagtaaaccaaaggatgttgcaaaacaaactgtgaacggtgatgttacaatagctgatgaaggttcacagaagagccaggatagttctagtaaaacaaaaccaggaaaatctgtccttattaagcaagaggaaagggaaactggggttgtcagtgcgagggtcctttcacgttacaaaaatgcactgggagggatatgggtggtgtccatactcttcttttgctatgcactgactgaagttcttcgcatttcaagtagcacatggttgagcatttggactgatgagggttctctgaaaattcatggctctggttattataatttgatctatggaattctttcctttgggcaggttctagtcacactctcaaattcatactggttgattatatcaagtcttcgggcagccaaaaggcttcatgatgccatgctccgatcaatattgagagctcccatggtattttttcatacaaacccacttggacggatcatcaacagattttcgaaggatatgggtgacattgaccgaaatgtcgctgtatttgtcaatatgtttatggcacaaatatctcagttgctctcaactttcgttctcatcggctttgtcagcaccatgtctctttgggctatcatgccactcctgattttgttttatgcagcttacctctattaccaggcaacatctcgcgaggtgaagcgtctggattccattaccaggtctcctgtgtatgctcagttttcagaggctttgaatggtctgtccacaatccgtgcctataaagcctatgatagaatggcaaatatcaatgggagatcaatggacaacaacattaggttcacacttgtgaacatgggtgcaaataggtggctagctattcgtctggagacattgggtggcatcatgatatggtttacagcaacatttgctgttatgcaaaatcaacgagcagagaatcagaaggcctttgcttctacaatgggtcttcttcttacttacactctcaatattaccaatttactcacagctgttcttcgtcttgctagtcttgctgaaaatagtttaaatgctgttgaacgggtcggaacatacattgagttaccttcggaagctcctcctgtcattgaggatcataggccaccccctggttggccatcatcaggtgtcatcaagtttgaagacgttgtgcttcgatatcgaccagaacttcctcctgttcttcatggcatatcttttgttattaatggaagtgagaaggtaggaatagttggcagaacaggtgctggcaaatctagcatgcttaatgctttgttccgtatcgtggagcttgaacgagggagaatattaattgatgattgtgacacttctaagtttggaatttgggacttgcgcaaagttctaggaataataccacaggcaccagttctattctcaggttctgttcggtttaatctggatccctttaatgagcacaatgatgcggacctctgggaggctctggaaagggctcatctaaaagatgttataaggaggaattctttaggattggatgctgaggtttctgaagctggtgaaaatttcagtgttggacaacgacagctgttgagcttagctcgtgcgctgctgagaagagcaaagatacttgtccttgatgaggcaacagcagcagttgacgtgcggactgatgctcttattcagaaaacaatccgagaagaattcaagagttgcacaatgctcataattgcccaccgtttgaacacggtcattgactgtgacaggttgcttattctaagttctgggcaggttctggaattcgactctcctgagaatcttctaagcaacgaggggagtgctttctccaagatggtgcaaagtacaggacctagcaacgcagaatacctcaagagtcttgtatttgcaagtggagaagagaggtcccggagggaagaaatcaagctgcaagatatccaaaggagatgggttgcatctaaccgatgggctgaagctgcccagtttgcgcttgctagaagcctcacatcatcacatagtgacctccttgcattagaagctgccgagggaaataatattctgaggagaacaaaggatgctgtaatcactctgcaaagcgtactggaagggaagcacaatactgaaatcgatgaatctctaactcagtatcaggtcccagctgatcgatggtggtcttcactttacaaagtgatcgaaggcctcgccacaatgagcagattgggccgcaaccgtctgcagcaaccttcttataattttgagaacaacaattctattgactgggaccaaatgtagatgtagaattctggatcacaacagcattgtggagtaggctggaggtgtagttatttctggcggatttgattcctgcggtgtgtaaacgctgcagcaacacgtaacttgcgaataaggaacgagttttgccacagcaggacgatccttgtaccgtcgtccgcaagggttgtaatttctcagggaccgttacgacacgattgtatgtcaggttttgacagtttgagccaatgcaattcttctaatgaaaaagacaagtgcatgtgaatggttagcatctgcctatcgcctatcgggtatcatgtggagtcgtctggtataccgtcctacacggctacacctgagaacgaagcgaccttacccccaactatcaccttgtagcgatccgaagttgttcatcttcgagtttcagttctctaactccatcgtagctaagcgtttcagcaatgggtcaagagag

SEQ ID NO: 206008 - DNA, 5501 bp, Zea Mays
cttttgccttttttgtgcggtcgtgcctggcgtgtcttagtggactagtggagtgggcatgtggcgccgcttccgccgccgccgctgcagcactactcgttcgtcagaatagtatagggtgcagttgcgtggagatccacccgctcgtggattggcttctcctgcgggttgcaactggagaacatcagaactgattgaagaacagggttggtaagtggagggagcgagatggggttcgacccactggagtggtactgccagccggtcaaggatggtgtgtggtcgcatgtggttgagaatgcgttcggcgcctacactccatgtggcactgacacccttgtagtctgcatctcatacctcgcactctttggagtttgcttctatcgtatatggaggacgacgagggactacacagtgcagcggtacaagttacgttcaccatactacaactacctgcttggactgctcgtggtgtactgcatagcagagccgctttatcggatcatcactggtacctccatcatgaacttggatgggcagcctggccttgctccatttgagaatttacatcaatgagttcagatggtacatccgatttgtggttatttacatgatggttggcgaagctgctatgttcaatcttgtgctctctgtgaggcagtactacagttcaagttcaatcttttacctatactgcagtgagattgtatgccagttcttgtttggaattctcatggtggtttatctgcctagcttggatccatatccgggttataccccgatcaggaatgaagtgttggttgataatactgattatgaacctcttcccggcggtgagcagatttgccctgagagacatgccaacatatttgccagaatattcttttcatggatgactcctttaatgcaacaaggatttagaaggcccattacagataaggatatctggaaattggatagctgggatgagactgaaactttgtatagccagttccagaaacgctggaatgatgagcttcaaaaaccaaacccttggctgttacgagctcttcatagtagtctttggggaaggttctggctgggtggatttttcaagattggcaatgatgcttctcaatttgttggtccacttgtattgaacctgttgttagagtctatgcaaaaaggtgatccatcttggagcgggtacatctatgctttctcaatctttgcaggagtgtcacttggggttcttgctgaggcacagtactttcagaacgtcatgcgtgtgggtttcaggttgaggtccacattgattgcagctgttttccgcaaatctttgcgactaactaatgatagtcgtagaaagtttgcttctgggaggattaccaatttgatttcaactgatgcggagtcccttcagcaagtgtgccagcagcttcacagcctatggtctgctcctttccgcattgttatttccatggtccttctatatgcacagcttggtcctgcagcattagtcggtgcactcatgctggttcttttgtttccaattcagactgtaatcatcagcaaaatgcaaaaacttactaaagaggggttgcaaaggaccgacaagcgaatcagtctcatgaatgaagtattagctgctatggatacagtcaagtgctatgcttgggagcaaagtttccagtcaaaagtgcaggacatccgtgatgatgaactttcttggttccgcagggctcagttgcttgctgcgctgaatagctttatcctgaacagtataccggtcgttgtcactgttgtttcatttggtgtatattctctactgggaggtgatttgacaccagcaaaggcgtttacttctctttcattatttgcagtcttaaggtttccacttttcatgctcccgaatctgataactcaggtggttaattgtaaggtgtcattgaagcgtctggaagatctcctgttggctgaagagagattacttctgccaaatccacctattgatcctgatcttccagccatttctatcaagaatgggtatttttcatgggaatcagaggctcagagaccaactttatcaaatgtcaatctggatgtacctgttggaagtttagttgcaatagtaggaagcactggtgagggtaaaacttctctcatatctgcaatgcttggagaaataccaccagtatctggatcaggtacctcagtggtcattcgtggatcggtggcttacgttcctcaagtttcctggatcttcaatgctactgtacgtgacaatattttgtttgggtctccctttcaacccccacgatacgagaaagcaattgatgccacttcattgcggcatgaccttgacctactcccaggaggcgatctgacagagattggtgaaagaggagttaatattagtggagggcagaagcaaagagtttcaatggcaagagctgtgtattctgattcagatgtgtacatatttgatgatccactcagtgcattagatgcccatgttggccggcaggtatttgataaatgtatcaaaggcgaactgcagcataaaacccgggttcttgttaccaatcagctgcattttctgccatatgtcgataaaatactgctaattcatgatggtgtaattaaagaggagggtacttttgatgaacttagcaacagtggggagctcttcaagaagctcatggaaaatgctggaaaaatggaggaacaggtggaagaggatgaaagtaaaccaaaggatgttgcaaaacaaactgtgaacggtgatgttacaatagctgatgaaggttcacagaagagccaggatagttctagtaaaacaaaaccaggaaaatctgtccttattaagcaagaggaaagggaaactggggttgtcagtgcgagggtcctttcacgttacaaaaatgcactgggagggatatgggtggtgtccatactcttcttttgctatgcactgactgaagttcttcgcatttcaagtagcacatggttgagcatttggactgatgagggttctctgaaaattcatggctctggttattataatttgatctatggaattctttcctttgggcaggttctagtcacactctcaaattcatactggttgattatatcaagtcttcgggcagccaaaaggcttcatgatgccatgctccgatcaatattgagagctcccatggtattttttcatacaaacccacttggacggatcatcaacagattttcgaaggatatgggtgacattgaccgaaatgtcgctgtatttgtcaatatgtttatggcacaaatatctcagttgctctcaactttcgttctcatcggctttgtcagcaccatgtctctttgggctatcatgccactcctgattttgttttatgcagcttacctctattaccaggcaacatctcgcgaggtgaagcgtctggattccattaccaggtctcctgtgtatgctcagttttcagaggctttgaatggtctgtccacaatccgtgcctataaagcctatgatagaatggcaaatatcaatgggagatcaatggacaacaacattaggttcacacttgtgaacatgggtgcaaataggtggctagctattcgtctggagacattgggtggcatcatgatatggtttacagcaacatttgctgttatgcaaaatcaacgagcagagaatcagaaggcctttgcttctacaatgggtcttcttcttacttacactctcaatattaccaatttactcacagctgttcttcgtcttgctagtcttgctgaaaatagtttaaatgctgttgaacgggtcggaacatacattgagttaccttcggaagctcctcctgtcattgaggatcataggccaccccctggttggccatcatcaggtgtcatcaagtttgaagacgttgtgcttcgatatcgaccagaacttcctcctgttcttcatggcatatcttttgttattaatggaagtgagaaggtaggaatagttggcagaacaggtgctggcaaatctagcatgcttaatgctttgttccgtatcgtggagcttgaacgagggagaatattaattgatgattgtgacacttctaagtttggaatttgggacttgcgcaaagttctaggaataataccacaggcaccagttctattctcaggttctgttcggtttaatctggatccctttaatgagcacaatgatgcggacctctgggaggctctggaaagggctcatctaaaagatgttataaggaggaattctttaggattggatgctgaggtttctgaagctggtgaaaatttcagtgttggacaacgacagctgttgagcttagctcgtgcgctgctgagaagagcaaagatacttgtccttgatgaggcaacagcagcagttgacgtgcggactgatgctcttattcagaaaacaatccgagaagaattcaagagttgcacaatgctcataattgcccaccgtttgaacacggtcattgactgtgacaggttgcttattctaagttctgggcaggttctggaattcgactctcctgagaatcttctaagcaacgaggggagtgctttctccaagatggtgcaaagtacaggacctagcaacgcagaatacctcaagagtcttgtatttgcaagtggagaagagaggtcccggagggaagaaatcaagctgcaagatatccaaaggagatgggttgcatctaaccgatgggctgaagctgcccagtttgcgcttgctagaagcctcacatcatcacatagtgacctccttgcattagaagctgccgagggaaataatattctgaggagaacaaaggatgctgtaatcactctgcaaagcgtactggaagggaagcacaatactgaaatcgatgaatctctaactcagtatcaggtcccagctgatcgatggtggtcttcactttacaaagtgatcgaaggcctcgccacaatgagcagattgggccgcaaccgtctgcagcaaccttcttataattttgagaacaacaattctattgactgggaccaaatgtagatgtagaattctggatcacaacagcattgtggagtaggctggaggtgtagttatttctggcggatttgattcctgcggtgtgtaaacgctgcagcaacacgtaacttgcgaataaggaacgagttttgccacagcaggacgatccttgtaccgtcgtccgcaagggttgtaatttctcagggaccgttacgacacgattgtatgtcaggttttgacagtttgagccaatgcaattcttctaatgaaaaagacaagtgcatgtgaatggttagcatctgcctatcgcctatcgggtatcatgtggagtcgtctggtataccgtcctacacggctacacctgagaacgaagcgaccttacccccaactatcaccttgtagcgatccgaagttgttcatcttcgagtttcagttctctaactccatcgtagctaagcgtttcagcaatgggtcaagagag

SEQ ID NO: 206009 - DNA, 5498 bp, Zea Mays
gtcttagtggactagtggagtgggcatgtggcgccgcttccgccgccgccgctgcagcactactcgttcgtcagaatagtatagggtgcagttgcgtggagatccacccgctcgtggattggcttctcctgcgggttgcaactggagaacatcagaactgattgaagaacagggttggtaagtggagggagcgagatggggttcgacccactggagtggtactgccagccggtcaaggatggtgtgtggtcgcatgtggttgagaatgcgttcggcgcctacactccatgtggcactgacacccttgtagtctgcatctcatacctcgcactctttggagtttgcttctatcgtatatggaggacgacgagggactacacagtgcagcggtacaagttacgttcaccatactacaactacctgcttggactgctcgtggtgtactgcatagcagagccgctttatcggatcatcactggtacctccatcatgaacttggatgggcagcctggccttgctccatttgagattgtctcattgatcattgagtctgttgcttggtgctgtatgcttgtaatgattctgcttgaaacaagaatttacatcaatgagttcagatggtacatccgatttgtggttatttacatgatggttggcgaagctgctatgttcaatcttgtgctctctgtgaggcagtactacagttcaagttcaatcttttacctatactgcagtgagattgtatgccagcttggatccatatccgggttataccccgatcaggaatgaagtgttggttgataatactgattatgaacctcttcccggcggtgagcagatttgccctgagagacatgccaacatatttgccagaatattcttttcatggatgactcctttaatgcaacaaggatttagaaggcccattacagataaggatatctggaaattggatagctgggatgagactgaaactttgtatagccagttccagaaacgctggaatgatgagcttcaaaaaccaaacccttggctgttacgagctcttcatagtagtctttggggaaggttctggctgggtggatttttcaagattggcaatgatgcttctcaatttgttggtccacttgtattgaacctgttgttagagtctatgcaaaaaggtgatccatcttggagcgggtacatctatgctttctcaatctttgcaggagtgtcacttggggttcttgctgaggcacagtactttcagaacgtcatgcgtgtgggtttcaggttgaggtccacattgattgcagctgttttccgcaaatctttgcgactaactaatgatagtcgtagaaagtttgcttctgggaggattaccaatttgatttcaactgatgcggagtcccttcagcaagtgtgccagcagcttcacagcctatggtctgctcctttccgcattgttatttccatggtccttctatatgcacagcttggtcctgcagcattagtcggtgcactcatgctggttcttttgtttccaattcagactgtaatcatcagcaaaatgcaaaaacttactaaagaggggttgcaaaggaccgacaagcgaatcagtctcatgaatgaagtattagctgctatggatacagtcaagtgctatgcttgggagcaaagtttccagtcaaaagtgcaggacatccgtgatgatgaactttcttggttccgcagggctcagttgcttgctgcgctgaatagctttatcctgaacagtataccggtcgttgtcactgttgtttcatttggtgtatattctctactgggaggtgatttgacaccagcaaaggcgtttacttctctttcattatttgcagtcttaaggtttccacttttcatgctcccgaatctgataactcaggtggttaattgtaaggtgtcattgaagcgtctggaagatctcctgttggctgaagagagattacttctgccaaatccacctattgatcctgatcttccagccatttctatcaagaatgggtatttttcatgggaatcagaggctcagagaccaactttatcaaatgtcaatctggatgtacctgttggaagtttagttgcaatagtaggaagcactggtgagggtaaaacttctctcatatctgcaatgcttggagaaataccaccagtatctggatcaggtacctcagtggtcattcgtggatcggtggcttacgttcctcaagtttcctggatcttcaatgctactgtacgtgacaatattttgtttgggtctccctttcaacccccacgatacgagaaagcaattgatgccacttcattgcggcatgaccttgacctactcccaggaggcgatctgacagagattggtgaaagaggagttaatattagtggagggcagaagcaaagagtttcaatggcaagagctgtgtattctgattcagatgtgtacatatttgatgatccactcagtgcattagatgcccatgttggccggcaggtatttgataaatgtatcaaaggcgaactgcagcataaaacccgggttcttgttaccaatcagctgcattttctgccatatgtcgataaaatactgctaattcatgatggtgtaattaaagaggagggtacttttgatgaacttagcaacagtggggagctcttcaagaagctcatggaaaatgctggaaaaatggaggaacaggtggaagaggatgaaagtaaaccaaaggatgttgcaaaacaaactgtgaacggtgatgttacaatagctgatgaaggttcacagaagagccaggatagttctagtaaaacaaaaccaggaaaatctgtccttattaagcaagaggaaagggaaactggggttgtcagtgcgagggtcctttcacgttacaaaaatgcactgggagggatatgggtggtgtccatactcttcttttgctatgcactgactgaagttcttcgcatttcaagtagcacatggttgagcatttggactgatgagggttctctgaaaattcatggctctggttattataatttgatctatggaattctttcctttgggcaggttctagtcacactctcaaattcatactggttgattatatcaagtcttcgggcagccaaaaggcttcatgatgccatgctccgatcaatattgagagctcccatggtattttttcatacaaacccacttggacggatcatcaacagattttcgaaggatatgggtgacattgaccgaaatgtcgctgtatttgtcaatatgtttatggcacaaatatctcagttgctctcaactttcgttctcatcggctttgtcagcaccatgtctctttgggctatcatgccactcctgattttgttttatgcagcttacctctattaccaggcaacatctcgcgaggtgaagcgtctggattccattaccaggtctcctgtgtatgctcagttttcagaggctttgaatggtctgtccacaatccgtgcctataaagcctatgatagaatggcaaatatcaatgggagatcaatggacaacaacattaggttcacacttgtgaacatgggtgcaaataggtggctagctattcgtctggagacattgggtggcatcatgatatggtttacagcaacatttgctgttatgcaaaatcaacgagcagagaatcagaaggcctttgcttctacaatgggtcttcttcttacttacactctcaatattaccaatttactcacagctgttcttcgtcttgctagtcttgctgaaaatagtttaaatgctgttgaacgggtcggaacatacattgagttaccttcggaagctcctcctgtcattgaggatcataggccaccccctggttggccatcatcaggtgtcatcaagtttgaagacgttgtgcttcgatatcgaccagaacttcctcctgttcttcatggcatatcttttgttattaatggaagtgagaaggtaggaatagttggcagaacaggtgctggcaaatctagcatgcttaatgctttgttccgtatcgtggagcttgaacgagggagaatattaattgatgattgtgacacttctaagtttggaatttgggacttgcgcaaagttctaggaataataccacaggcaccagttctattctcaggttctgttcggtttaatctggatccctttaatgagcacaatgatgcggacctctgggaggctctggaaagggctcatctaaaagatgttataaggaggaattctttaggattggatgctgaggtttctgaagctggtgaaaatttcagtgttggacaacgacagctgttgagcttagctcgtgcgctgctgagaagagcaaagatacttgtccttgatgaggcaacagcagcagttgacgtgcggactgatgctcttattcagaaaacaatccgagaagaattcaagagttgcacaatgctcataattgcccaccgtttgaacacggtcattgactgtgacaggttgcttattctaagttctgggcaggttctggaattcgactctcctgagaatcttctaagcaacgaggggagtgctttctccaagatggtgcaaagtacaggacctagcaacgcagaatacctcaagagtcttgtatttgcaagtggagaagagaggtcccggagggaagaaatcaagctgcaagatatccaaaggagatgggttgcatctaaccgatgggctgaagctgcccagtttgcgcttgctagaagcctcacatcatcacatagtgacctccttgcattagaagctgccgagggaaataatattctgaggagaacaaaggatgctgtaatcactctgcaaagcgtactggaagggaagcacaatactgaaatcgatgaatctctaactcagtatcaggtcccagctgatcgatggtggtcttcactttacaaagtgatcgaaggcctcgccacaatgagcagattgggccgcaaccgtctgcagcaaccttcttataattttgagaacaacaattctattgactgggaccaaatgtagatgtagaattctggatcacaacagcattgtggagtaggctggaggtgtagttatttctggcggatttgattcctgcggtgtgtaaacgctgcagcaacacgtaacttgcgaataaggaacgagttttgccacagcaggacgatccttgtaccgtcgtccgcaagggttgtaatttctcagggaccgttacgacacgattgtatgtcaggttttgacagtttgagccaatgcaattcttctaatgaaaaagacaagtgcatgtgaatggttagcatctgcctatcgcctatcgggtatcatgtggagtcgtctggtataccgtcctacacggctacacctgagaacgaagcgaccttacccccaactatcaccttgtagcgatccgaagttgttcatcttcgagtttcagttctctaactccatcgtagctaagcgtttcagcaatgggtcaagagag

SEQ ID NO: 206010 - DNA, 5227 bp, Zea Mays
tggagatccacccgctcgtggattggcttctcctgcgggttgcaactggagaacatcagaactgattgaagaacagggttggtaagtggagggagcgagatggggttcgacccactggagtggtactgccagccggtcaaggatggtgtgtggtcgcatgtggttgagaatgcgttcggcgcctacactccatgtggcactgacacccttgtagtctgcatctcatacctcgcactctttggagtttgcttctatcgtatatggaggacgacgagggactacacagtgcagcggtacaagttacgttcaccatactacaactacctgcttggactgctcgtggtgtactgcatagcagagccgctttatcggatcatcactggtacctccatcatgaacttggatgggcagcctggccttgctccatttgagatggtacatccgatttgtggttatttacatgatggttggcgaagctgctatgttcaatcttgtgctctctgtgaggcagtactacagttcaagttcaatcttttacctatactgcagtgagattgtatgccagttcttgtttggaattctcatggtggtttatctgcctagcttggatccatatccgggttataccccgatcaggaatgaagtgttggttgataatactgattatgaacctcttcccggcggtgagcagatttgccctgagagacatgccaacatatttgccagaatattcttttcatggatgactcctttaatgcaacaaggatttagaaggcccattacagataaggatatctggaaattggatagctgggatgagactgaaactttgtatagccagttccagaaacgctggaatgatgagcttcaaaaaccaaacccttggctgttacgagctcttcatagtagtctttggggaaggttctggctgggtggatttttcaagattggcaatgatgcttctcaatttgttggtccacttgtattgaacctgttgttagagtctatgcaaaaaggtgatccatcttggagcgggtacatctatgctttctcaatctttgcaggagtgtcacttggggttcttgctgaggcacagtactttcagaacgtcatgcgtgtgggtttcaggttgaggtccacattgattgcagctgttttccgcaaatctttgcgactaactaatgatagtcgtagaaagtttgcttctgggaggattaccaatttgatttcaactgatgcggagtcccttcagcaagtgtgccagcagcttcacagcctatggtctgctcctttccgcattgttatttccatggtccttctatatgcacagcttggtcctgcagcattagtcggtgcactcatgctggttcttttgtttccaattcagactgtaatcatcagcaaaatgcaaaaacttactaaagaggggttgcaaaggaccgacaagcgaatcagtctcatgaatgaagtattagctgctatggatacagtcaagtgctatgcttgggagcaaagtttccagtcaaaagtgcaggacatccgtgatgatgaactttcttggttccgcagggctcagttgcttgctgcgtcttaaggtttccacttttcatgctcccgaatctgataactcaggtggttaattgtaaggtgtcattgaagcgtctggaagatctcctgttggctgaagagagattacttctgccaaatccacctattgatcctgatcttccagccatttctatcaagaatgggtatttttcatgggaatcagaggctcagagaccaactttatcaaatgtcaatctggatgtacctgttggaagtttagttgcaatagtaggaagcactggtgagggtaaaacttctctcatatctgcaatgcttggagaaataccaccagtatctggatcaggtacctcagtggtcattcgtggatcggtggcttacgttcctcaagtttcctggatcttcaatgctactgtacgtgacaatattttgtttgggtctccctttcaacccccacgatacgagaaagcaattgatgccacttcattgcggcatgaccttgacctactcccaggaggcgatctgacagagattggtgaaagaggagttaatattagtggagggcagaagcaaagagtttcaatggcaagagctgtgtattctgattcagatgtgtacatatttgatgatccactcagtgcattagatgcccatgttggccggcaggtatttgataaatgtatcaaaggcgaactgcagcataaaacccgggttcttgttaccaatcagctgcattttctgccatatgtcgataaaatactgctaattcatgatggtgtaattaaagaggagggtacttttgatgaacttagcaacagtggggagctcttcaagaagctcatggaaaatgctggaaaaatggaggaacaggtggaagaggatgaaagtaaaccaaaggatgttgcaaaacaaactgtgaacggtgatgttacaatagctgatgaaggttcacagaagagccaggatagttctagtaaaacaaaaccaggaaaatctgtccttattaagcaagaggaaagggaaactggggttgtcagtgcgagggtcctttcacgttacaaaaatgcactgggagggatatgggtggtgtccatactcttcttttgctatgcactgactgaagttcttcgcatttcaagtagcacatggttgagcatttggactgatgagggttctctgaaaattcatggctctggttattataatttgatctatggaattctttcctttgggcaggttctagtcacactctcaaattcatactggttgattatatcaagtcttcgggcagccaaaaggcttcatgatgccatgctccgatcaatattgagagctcccatggtattttttcatacaaacccacttggacggatcatcaacagattttcgaaggatatgggtgacattgaccgaaatgtcgctgtatttgtcaatatgtttatggcacaaatatctcagttgctctcaactttcgttctcatcggctttgtcagcaccatgtctctttgggctatcatgccactcctgattttgttttatgcagcttacctctattaccaggcaacatctcgcgaggtgaagcgtctggattccattaccaggtctcctgtgtatgctcagttttcagaggctttgaatggtctgtccacaatccgtgcctataaagcctatgatagaatggcaaatatcaatgggagatcaatggacaacaacattaggttcacacttgtgaacatgggtgcaaataggtggctagctattcgtctggagacattgggtggcatcatgatatggtttacagcaacatttgctgttatgcaaaatcaacgagcagagaatcagaaggcctttgcttctacaatgggtcttcttcttacttacactctcaatattaccaatttactcacagctgttcttcgtcttgctagtcttgctgaaaatagtttaaatgctgttgaacgggtcggaacatacattgagttaccttcggaagctcctcctgtcattgaggatcataggccaccccctggttggccatcatcaggtgtcatcaagtttgaagacgttgtgcttcgatatcgaccagaacttcctcctgttcttcatggcatatcttttgttattaatggaagtgagaaggtaggaatagttggcagaacaggtgctggcaaatctagcatgcttaatgctttgttccgtatcgtggagcttgaacgagggagaatattaattgatgattgtgacacttctaagtttggaatttgggacttgcgcaaagttctaggaataataccacaggcaccagttctattctcaggttctgttcggtttaatctggatccctttaatgagcacaatgatgcggacctctgggaggctctggaaagggctcatctaaaagatgttataaggaggaattctttaggattggatgctgaggtttctgaagctggtgaaaatttcagtgttggacaacgacagctgttgagcttagctcgtgcgctgctgagaagagcaaagatacttgtccttgatgaggcaacagcagcagttgacgtgcggactgatgctcttattcagaaaacaatccgagaagaattcaagagttgcacaatgctcataattgcccaccgtttgaacacggtcattgactgtgacaggttgcttattctaagttctgggcaggttctggaattcgactctcctgagaatcttctaagcaacgaggggagtgctttctccaagatggtgcaaagtacaggacctagcaacgcagaatacctcaagagtcttgtatttgcaagtggagaagagaggtcccggagggaagaaatcaagctgcaagatatccaaaggagatgggttgcatctaaccgatgggctgaagctgcccagtttgcgcttgctagaagcctcacatcatcacatagtgacctccttgcattagaagctgccgagggaaataatattctgaggagaacaaaggatgctgtaatcactctgcaaagcgtactggaagggaagcacaatactgaaatcgatgaatctctaactcagtatcaggtcccagctgatcgatggtggtcttcactttacaaagtgatcgaaggcctcgccacaatgagcagattgggccgcaaccgtctgcagcaaccttcttataattttgagaacaacaattctattgactgggaccaaatgtagatgtagaattctggatcacaacagcattgtggagtaggctggaggtgtagttatttctggcggatttgattcctgcggtgtgtaaacgctgcagcaacacgtaacttgcgaataaggaacgagttttgccacagcaggacgatccttgtaccgtcgtccgcaagggttgtaatttctcagggaccgttacgacacgattgtatgtcaggttttgacagtttgagccaatgcaattcttctaatgaaaaagacaagtgcatgtgaatggttagcatctgcctatcgcctatcgggtatcatgtggagtcgtctggtataccgtcctacacggctacacctgagaacgaagcgaccttacccccaactatcaccttgtagcgatccgaagttgttcatcttcgagtttcagttctctaactccatcgtagctaagcgtttcagcaatgggtcaagagag

SEQ ID NO: 206011 - DNA, 3817 bp, Zea Mays
gtatattccttttttgcaataatttcaagacttttttgtacataagatgacttgtgcgaagttctgtcgtgcaccattataccggtcgttgtcactgttgtttcatttggtgtatattctctactgggaggtgatttgacaccagcaaaggcgtttacttctctttcattatttgcagtcttaaggtttccacttttcatgctcccgaatctgataactcaggtggttaattgtaaggtgtcattgaagcgtctggaagatctcctgttggctgaagagagattacttctgccaaatccacctattgatcctgatcttccagccatttctatcaagaatgggtatttttcatgggaatcagaggctcagagaccaactttatcaaatgtcaatctggatgtacctgttggaagtttagttgcaatagtaggaagcactggtgagggtaaaacttctctcatatctgcaatgcttggagaaataccaccagtatctggatcaggtacctcagtggtcattcgtggatcggtggcttacgttcctcaagtttcctggatcttcaatgctactgtacgtgacaatattttgtttgggtctccctttcaacccccacgatacgagaaagcaattgatgccacttcattgcggcatgaccttgacctactcccaggaggcgatctgacagagattggtgaaagaggagttaatattagtggagggcagaagcaaagagtttcaatggcaagagctgtgtattctgattcagatgtgtacatatttgatgatccactcagtgcattagatgcccatgttggccggcaggtatttgataaatgtatcaaaggcgaactgcagcataaaacccgggttcttgttaccaatcagctgcattttctgccatatgtcgataaaatactgctaattcatgatggtgtaattaaagaggagggtacttttgatgaacttagcaacagtggggagctcttcaagaagctcatggaaaatgctggaaaaatggaggaacaggtggaagaggatgaaagtaaaccaaaggatgttgcaaaacaaactgtgaacggtgatgttacaatagctgatgaaggttcacagaagagccaggatagttctagtaaaacaaaaccaggaaaatctgtccttattaagcaagaggaaagggaaactggggttgtcagtgcgagggtcctttcacgttacaaaaatgcactgggagggatatgggtggtgtccatactcttcttttgctatgcactgactgaagttcttcgcatttcaagtagcacatggttgagcatttggactgatgagggttctctgaaaattcatggctctggttattataatttgatctatggaattctttcctttgggcaggttctagtcacactctcaaattcatactggttgattatatcaagtcttcgggcagccaaaaggcttcatgatgccatgctccgatcaatattgagagctcccatggtattttttcatacaaacccacttggacggatcatcaacagattttcgaaggatatgggtgacattgaccgaaatgtcgctgtatttgtcaatatgtttatggcacaaatatctcagttgctctcaactttcgttctcatcggctttgtcagcaccatgtctctttgggctatcatgccactcctgattttgttttatgcagcttacctctattaccaggcaacatctcgcgaggtgaagcgtctggattccattaccaggtctcctgtgtatgctcagttttcagaggctttgaatggtctgtccacaatccgtgcctataaagcctatgatagaatggcaaatatcaatgggagatcaatggacaacaacattaggttcacacttgtgaacatgggtgcaaataggtggctagctattcgtctggagacattgggtggcatcatgatatggtttacagcaacatttgctgttatgcaaaatcaacgagcagagaatcagaaggcctttgcttctacaatgggtcttcttcttacttacactctcaatattaccaatttactcacagctgttcttcgtcttgctagtcttgctgaaaatagtttaaatgctgttgaacgggtcggaacatacattgagttaccttcggaagctcctcctgtcattgaggatcataggccaccccctggttggccatcatcaggtgtcatcaagtttgaagacgttgtgcttcgatatcgaccagaacttcctcctgttcttcatggcatatcttttgttattaatggaagtgagaaggtaggaatagttggcagaacaggtgctggcaaatctagcatgcttaatgctttgttccgtatcgtggagcttgaacgagggagaatattaattgatgattgtgacacttctaagtttggaatttgggacttgcgcaaagttctaggaataataccacaggcaccagttctattctcaggttctgttcggtttaatctggatccctttaatgagcacaatgatgcggacctctgggaggctctggaaagggctcatctaaaagatgttataaggaggaattctttaggattggatgctgaggtttctgaagctggtgaaaatttcagtgttggacaacgacagctgttgagcttagctcgtgcgctgctgagaagagcaaagatacttgtccttgatgaggcaacagcagcagttgacgtgcggactgatgctcttattcagaaaacaatccgagaagaattcaagagttgcacaatgctcataattgcccaccgtttgaacacggtcattgactgtgacaggttgcttattctaagttctgggcaggttctggaattcgactctcctgagaatcttctaagcaacgaggggagtgctttctccaagatggtgcaaagtacaggacctagcaacgcagaatacctcaagagtcttgtatttgcaagtggagaagagaggtcccggagggaagaaatcaagctgcaagatatccaaaggagatgggttgcatctaaccgatgggctgaagctgcccagtttgcgcttgctagaagcctcacatcatcacatagtgacctccttgcattagaagctgccgagggaaataatattctgaggagaacaaaggatgctgtaatcactctgcaaagcgtactggaagggaagcacaatactgaaatcgatgaatctctaactcagtatcaggtcccagctgatcgatggtggtcttcactttacaaagtgatcgaaggcctcgccacaatgagcagattgggccgcaaccgtctgcagcaaccttcttataattttgagaacaacaattctattgactgggaccaaatgtagatgtagaattctggatcacaacagcattgtggagtaggctggaggtgtagttatttctggcggatttgattcctgcggtgtgtaaacgctgcagcaacacgtaacttgcgaataaggaacgagttttgccacagcaggacgatccttgtaccgtcgtccgcaagggttgtaatttctcagggaccgttacgacacgattgtatgtcaggttttgacagtttgagccaatgcaattcttctaatgaaaaagacaagtgcatgtgaatggttagcatctgcctatcgcctatcgggtatcatgtggagtcgtctggtataccgtcctacacggctacacctgagaacgaagcgaccttacccccaactatcaccttgtagcgatccgaagttgttcatcttcgagtttcagttctctaactccatcgtagctaagcgtttcagcaatgggtcaagagag

SEQ ID NO: 206012 - DNA, 1568 bp, Zea Mays
gtactttggccaaaagaagtcaaattggcttgagccgaggttcagccgttcaggtcgccgacgccgcgcacgtcccatccgatggctgccgcagtccacctccggcctctccactcgttcgccttccctctccccgcagtgaaggccgcgcccagctggctcccgctccaggcgaaacccggcgcgcggaggacgggcagccgcgttgctctgctcgtcccctccgcgtctgcccccgcgccagcgtctccatctccctcgggcaaggatggcaccactgcgtcggctgcgacaaagtgggtggagtggatcccgcgcgctgcggcaggcgctgggtcggcagtgggccccgagcaggtgctcaggctcatctctggcgccgcggccacgcccatctgccagttcgttgacagcccgcgaacctttctccattccgtcgacccgcgcgtcaagctggtgtggctcttgtcccttgttgtcctaccagccaggtcaaatatttatatgcggtttggtttggtagtattcctggcccttatttcaatgtgggttttaccaaatcatgtttggaaggattcatattcatcatgctgggatttggtgctgatggtgcaccttcattagtccagatgagaacgcctccaccttctgttctaggcataccgaacattccttgctccacaagtgggtattcttacacaatcttgaaactgggaccactgcaatttacaaggaaaggcctatcattagcaagtacttcagcaagcctctcctttgcaatattccaaagtgcaagtctctgcttgacaacaaccactcctgagcagcttgcttctgctttgtggtggtttatgagtccactgaagcatatcggtgtgccagtgcctgagataatacttacattactactctcattgaggtttatcaatttagtatttgatgaggttcgcaactcagctctagcgattgtagcacgccggataaattggaaaaagctgacagctatggaaactatagatattttcttcagctatgtccaacggatatttaaaaatatatttgatcatgcggagcaaatatccaaggcaatggtagctcgaggatttcgtggtaatccaatcaatcacaagatctactttctcacagaatcatcatttggaattgcggatttcttttcgttgctttgcctattggttgtagtgagcttggcttccttttctgaccaattagtttgatggtaacaaaaaggcagaacatgtcttggatatttttgcgaggcagataatcacggaaaaagctaaaagcacacgtgaactgtttgatgatgtttgttgagttgaccctagttagaaaaaaaacgtgagcgaatatcattgaaaggaaattgtgtccgcaatgtatccttgttgaaatggaattgtgttcccaattgtaagtagtattaggtctatcataagtcaaacttttctagctttaatcgaattaacagaaaactgtagaaaatatgtacagcatcaaataagattcattgtatcacgcacctgcatgaaacatattttaatgatgta

SEQ ID NO: 206013 - DNA, 1940 bp, Zea Mays
gtactttggccaaaagaagtcaaattggcttgagccgaggttcagccgttcaggtcgccgacgccgcgcacgtcccatccgatggctgccgcagtccacctccggcctctccactcgttcgccttccctctccccgcagtgaaggccgcgcccagctggctcccgctccaggcgaaacccggcgcgcggaggacgggcagccgcgttgctctgctcgtcccctccgcgtctgcccccgcgccagcgtctccatctccctcgggcaaggatggcaccactgcgtcggctgcgacaaagtgggtggagtggatcccgcgcgctgcggcaggcgctgggtcggcagtgggccccgagcaggtgctcaggctcatctctggcgccgcggccacgcccatctgccagttcgttgacagcccgcgaacctttctccattccgtcgacccgcgcgtcaagctggtgtggctcttgtcccttgttgtcctaccagccaggtcaaatatttatatgcggtttggtttggtagtattcctggcccttatttcaatgtgggttttaccaaatcatgtttggaaggatcaacttggaagggttactcttctttcaggattcatattcatcatgctgggatttggtgctgatggtgcaccttcattagtccagatgagaacgcctccaccttctgttctaggcataccgaacattccttgctccacaagtgggtattcttacacaatcttgaaactgggaccactgcaatttacaaggaaaggcctatcattagcaagtacttcagcaagcctctcctttgcaatattccaaagtgcaagtctctgcttgacaacaaccactcctgagcagcttgcttctgctttgtggtggtttatgagtccactgaagcatatcggtgtgccagtgcctgagataatacttacattactactctcattgaggtttatcaatttagtatttgatgaggttcgcaactcagctctagcgattgtagcacgccggataaattggaaaaagctgacagctatggaaactatagatattttcttcagctatgtccaacggatatttaaaaatatatttgatcatgcggagcaaatatccaaggcaatggtagctcgaggatttcgtggtaatccaatcaatcacaagatctactttctcacagaatcatcatttggaattgcggatttcttttcgttgctttgcctattggttgtagtgagcttggcttccttttctgaccaattagtttgatggtaacaaaaaggtattcatggatatccacctgtttaattttgttttggtgataacaagaatgttgtggaaatgagctagagtatgatcctccatttgaaactggtgcaaaatctcatactaagggctagtttggaaacttaaatctcattcgggattcctagggattgtgtggaaaaatagctcatttttctctcaatctctgggaatcccagaggagatttaagtttccaaactaatcctaacatgacgttccaagcaggtgagttagttaatgtgcttttatctaaagatgagatgtcaatgtctattgtttctgaatagttttttttttgtgttttccatcatttgtaggcagaacatgtcttggatatttttgcgaggcagataatcacggaaaaagctaaaagcacacgtgaactgtttgatgatgtttgttgagttgaccctagttagaaaaaaaacgtgagcgaatatcattgaaaggaaattgtgtccgcaatgtatccttgttgaaatggaattgtgttcccaattgtaagtagtattaggtctatcataagtcaaacttttctagctttaatcgaattaacagaaaactgtagaaaatatgtacagcatcaaataagattcattgtatcacgcacctgcatgaaacatattttaatgatgta

SEQ ID NO: 206014 - DNA, 1940 bp, Zea Mays
agattacgcgtggaattgtggcggcggcggctgtatcctcccgagctgctccctagacggcggccggtcctctacaggcggctccccagcggctacccagtcggcggtcgggactcccaagacgccgctcgtcttgctccccaggcgctaggcggccgcggctcgtgttcgtccccaggcagccacgcctcctgttcctccccaggcgtcaggcggccgtgtcctccccagccgtcggttcttgacttcgtagggtatttgacactggaccaagattgtttgaggaactattggtgtgatgcaaatgttacatatctcattaatatctgcaaaaaagagatagaagatgacaataggcccatgggagttttcactaggacaggttgaaaaaatttggttacaaagtatgaagaaaaaacaggcctaaagctaacaaagaaacaattgaagaataagttggacaacatgaaaaaggagtatacatggttcatggagttcaagaatgcgaccactggtcttggatggattgaggcaaaacaaactgttgactgctccaaagattggtgggatgaacacctagcaagatgtaacaatccggataaaggtatcaaatgcaaccatgttaggttcagaaaacaaggaccaaaacatcttgatgatctacatatgttgtttgataagatacatgttagcgggacaagtgcatcatgtcctggagatatttcatctgatgactcaagtgatgatgtgctagagatagaaagaactccagaaaatgatgaagtcaaagtggctgtttcgaaaagatccaaaccagtgaaaaggaaacgcaaggcctcatgtactgctgctgaggagaaggaagagaagagtccattctttcgactatataagaacacatgtttgaagatagaaacagcagcagagaagatatccacaagtgttgaagcatcatcaacacatccaacaagccaagtgcctagcattgcagagactatgaagatggtgaaagattgtggggttaaagagaaaacagctctaatgcatacaactacatttttgattgtgaagcctgaatttagagaggtcttctgcatgctggaaacaaatgaaggaaggtttgacttacttgagagggagcatgcaaaggaaatgatgaggcacatgtagaagattttgaattatttatttatattaatgtgttgtgagaactatttgtttgcttgctatatggctgacaacatggcaactttggccaaacaagcaaacaagggtctattgtatcttgctgaactgtcccagcaagcagttgttattggtgaaatgggtgaagagtacaatcagagatacttgcacaaaggagagtacagggaaaccccagaaactggaatacaatgggttacgaattgcatgggtcgtccaaggtacttttataagatgtttcgcatgagcacagatgttttcatggcactacatgacttgctcgtctctagttacgacttaacatcaactaataatgtatcatcaatggagtcactagcaatgtttttgtggatcgttggaggaccacaatcattttcacaagctgaaaatcgttttacccgatcactatggacagtgcacaccaaatttcatgaagtactaaaatgtttgcgcaagttatcgaaagataatattaaaccaagatatcctactttcaaaactgagcatgatagaatcaaagaggaacgtttctggccgtatttccaaggagctatcggagctattgacggttcacatgttcctgtcacagtgccagcagctgaagtgcttaactatacatgtcgacatgggtatacatctcagaatgtgttagcaatttgtgattttgacatgagatttatctttgtcgttgctgggtggccgggttctgcacatgacacacggatcctgaatcatgc

SEQ ID NO: 206015 - DNA, 633 bp, Zea Mays
atgccatcaaaccttcttttcttcattaatcgtttcaaccagccgaagaatggacgttgttttaccatcctagagttgtgcgattcgatcacttatcgagttcggtttcgctgccaaagaaagagctgatgtgaggctttattatggtgatacaagtctgaaatctatgtcataccaggaaaggcttagtaactgggagtcaactggaattaaaataataccagtcttatcacaaccagatgacagctggaaaggtgaacgaggatatgttcaggatgctttcttcagaaacaagaacatagtaaatccatcttctacaggagccatactttgtggaccgaatgaaatgcaggaggaactcaccttatcccttgtagcagatggtgtctcacgagacaaaatcttaacgaactactgaaagcgatctccggtctctgatgtattttatgaccagttaggcctcaacgtgtaaactttattgcttaggcctggctgtgatgttccagtgatatatgaataaactactgaacttgagacgaggatgtaatgttcagtgatatattatatgaataaactactgaatttgaggcgaggacaatactgtggtcaagtttcggtttggttcatataaat

SEQ ID NO: 206016 - DNA, 301 bp, Zea Mays
atgacaaaaattgtttgctacttgaactcaccttatcccttgtagcagatggtgtctcacgagacaaaatcttaacgaactactgaaagcgatctccggtctctgatgtattttatgaccagttaggcctcaacgtgtaaactttattgcttaggcctggctgtgatgttccagtgatatatgaataaactactgaacttgagacgaggatgtaatgttcagtgatatattatatgaataaactactgaatttgaggcgaggacaatactgtggtcaagtttcggtttggttcatataaat

SEQ ID NO: 206017 - DNA, 4013 bp, Zea Mays
cccgcgcgcccaccgccgcgcgcagcaccgcgccgcccacccgcggccaccccagcgccccaaatgccgctccaaccctagcctctcgccatgcctttcgatctcgggcggccatgggaaactgatgccgctcgccggtcgccgtcgcgcgggaggacgtcagctcctcgcacttccccgcatccacctcgtcatggagctctgcgagggcggcgagttcttcgaccgcatcgtcgcgcgggggcactacaccgagcgcgccgccaccaatgtcactcgcaccatcgtcgaggtcgtccatttctgccatcggcacgacgtcatccaccgtgacctcaagccggagaacttccttttcgccaataagaaggagaactcgccgccgcgcagcgcccctctcgatatgccgccctgcttcctcctctcctcttgatccatctgccatcccatccccgctctgccagttgcccctcgcttcctcttcggctcttcatccccctcgatccgtcgcccgtgcttcctcctcactatgtcccgtcccctctccatcttgtcgccctgcctccccgcgtctgcgtctgcgcctgccttcggcgtccagagccatatccgcgttggcctccacctacgcacccgcctctagccataagagctcctcccgtgtctgcctttagagatctgctacctccacatcggtgtctagggctcctccattgcctagatctactagagtgagtgagcctacagagctggcctcatccaggctccagttccaccccacggtcatcctctgttgctctacgtttcatgcttctcacatcctctcctcaatctcatcaactgtgctgaaggaggcagatgaaagtatttccgtctcatcaactgtgctgaagaggaggaaaacacctcacttgttgaagggagcagtggagacccggaggaagatcatttggagtctgcagctactaatcttcagcctggcagtgacacttgcattgcaagggaagagttgccagatcagaaggatctggtgaaactgcaagctgttatccgtggacatctagaggcggcccatgcctcacggccaaagcagatcagatgagattttttggtcttgcgtggttctttttaatctactcacatgatacttcttattcattgccatccaatttaattaattgccctcgattgaattggttcctttgccattttacttaggaggataaaagaagacactaccttggcacatgcctgttgtcacaatggacaaaagaagattagtgttgtgtgagatttttttcattcctttgatctattgcatgctatttgtaccctaatcgacaaaatagatgagactcaattcaggagcaaatcaccagtcctgttcacagtccaattcactatggctaaaatatcaaacttatgctccttgaggtttgttttttccttatcttcctttaatatctgatgactgatggactggtgagttcatgatctgcttcatgcttttccttttatatatggtcactacctcactggttagttcatggtgctttttgtctacttctttgcccaaaaaaaatcccggggcgaatttcagcatgcttttcctgcttccgctgtgcaaattcacaggatgcgtgggaaatgtgttcttgtttcgtcgggtggtgttcttgccattcgttttagctcaacacaaaacaaatgcttcttgttcttcaggtcgccctgtgtttctttctcgccagtttgggccatggattctggtgtgcatttgttcaatatatcttagtatcttatttaacaatcagtacttctctgatgctcaagagatcaatttactcaaagtagcaaactgtatcatagttgtatactttatcaaacgaggaacctgatgcttgtagtataagcctcattttgttccaaacaagacaggcttcggatacaatcacctggaaatcaatcagtaaacttttgctattcagttttttaaataaaaaatttaggccttacgactttcctcgcaatgtgttcacatgtagattaccttattgcattgcctacttttgtccgttgtgtaaaccaatcttttatcatttatcaaatgattttgctcttaacattaacaaattatcgtttggtcatatgcaactaatgacatcacattaccaagattctggggacccatcgctaccttgtgtcaacagtagactgaccagatcaggtaccattttgaaacctgtgtacaatttcatttctcaataactggccgaacataaatagccaaggcatgggtttatgccaatactcataggttaaatgacactttggtcatatgcatagttgccaccctcaaatgcctatctcatgatagaagtaaatggtggtctaaatcaacaacgactttctataagtaccatgactattattcttgaacaaatgtgtgctcatggttctgagtagatattaccattgccattgttttatatggaagtccagtgccttgtcaatctttggtccacgagtaagtgttttggatattcatgttagtgtacactgtaatcaacagagctggttttctttaacagttttgttatgaaatcatggaactggcaacatgatagaatttttcaaggaaaaaaaggtaatatattaattgtgcagcgtgccaatctaatatgagttatattaattgtgcctagaacctgtctagacaatctggagtaatatattaattgtgcagagctgtctagaacctgccgaaacaatctggagtaatatattaattgtgcagcgtgccaatctaatatgagttatgttctttttggtgttcctttcaagggaaacgctcggcggcgaagctaaagcagagcttgcgctacacgcgctgcgagcagtttctgtctaaagggcaaggtctgatctcatatttgagctccccgtggcactgctcgcccggccagccaccatcccggtcttgcgctcggcggcgtgcatgggaagagacgacgataacatggacactgttttctaaatggatcagtatttttgcaagttcagcaggggccagactaataaatcagcttgatagcatccttgcagcggtgccttggactttggcggttagaagagttgcggctctggataaactcgaagctgacctatccaagttcgacgacgggcccttcttcctaggccaattcagcttggcggatgtagcgtacattacgattctggaaagggttcagatatactattcccatcttaggaactacgacatcgccgaaggcaggcccaacctccaggaattcatcgaggagatgaacaagattgaagcgtatgcgcagaccaagaacgatcctctgttcttgcttgatcttgccaagaaccatcttaagattgcctgaagatgtgacaaagcagcattagtccgttgatcggtggaagaccactcgtcagtgttgagttgaatgtttgatcaataaaatacggttgctgactttggacttgcaaagttcactactgataataacacccatgtttcaacaagagtaatgggtacttttgggtatttggcacctgagtatgcagcatctggcaagctcacagaaaaatccgatgtattttctttcggagtcatgcttcttgagcttattactgggcggcgaccaattgacacaacccaattggcactgcttgttataagcacatatgtacttccatttgcatgttgtataatactaataccaattgcaaaattatagttattttttctacccttgttagttaataagcatatttgtggtcaataggttgtattcttattcttgtaaccgtgttaattaatgttatggacttgtagtcttgtattaccttgtgaatatatctgtccctgcctgccatgtgaacgtgcttagcctggaatttgtgatatgtacatatatccatgtgtttgaaatctgtattgtatgtgatattccgtgttgcatgtgatattatgtacgtctaat

SEQ ID NO: 206018 - DNA, 3987 bp, Zea Mays
cccgcgcgcccaccgccgcgcgcagcaccgcgccgcccacccgcggccaccccagcgccccaaatgccgctccaaccctagcctctcgccatgcctttcgatctcgggcggccatgggaaactgatgccgctcgccggtcgccgtcgcgcgggaggacgtcagctcctcgcacttccccgcatccacctcgtcatggagctctgcgagggcggcgagttcttcgaccgcatcgtcgcgcgggggcactacaccgagcgcgccgccaccaatgtcactcgcaccatcgtcgaggtcgtccatttctgccatcggcacgacgtcatccaccgtgacctcaagccggagaacttccttttcgccaataagaaggagaactcgccgccgcgcagcgcccctctcgatatgccgccctgcttcctcctctcctcttgatccatctgccatcccatccccgctctgccagttgcccctcgcttcctcttcggctcttcatccccctcgatccgtcgcccgtgcttcctcctcactatgtcccgtcccctctccatcttgtcgccctgcctccccgcgtctgcgtctgcgcctgccttcggcgtccagagccatatccgcgttggcctccacctacgcacccgcctctagccataagagctcctcccgtgtctgcctttagagatctgctacctccacatcggtgtctagggctcctccattgcctagatctactagagtgagtgagcctacagagctggcctcatccaggctccagttccaccccacggtcatcctctgttgctctacgtttcatgcttctcacatcctctcctcaatctcatcaactgtgctgaaggaggcagatgaaagtatttccgtctcatcaactgtgctgaagaggaggaaaacacctcacttgttgaagggagcagtggagacccggaggaagatcatttggagtctgcagctactaatcttcagcctggcagtgacacttgcattgcaagggaagagttgccagatcagaaggatctggtgaaactgcaagctgttatccgtggacatctagaggcggcccatgcctcacggccaaagcagatcagatgagattttttggtcttgcgtggttctttttaatctactcacatgatacttcttattcattgccatccaatttaattaattgccctcgattgaattggttcctttgccattttacttaggaggataaaagaagacactaccttggcacatgcctgttgtcacaatggacaaaagaagattagtgttgtgtgagatttttttcattcctttgatctattgcatgctatttgtaccctaatcgacaaaatagatgagactcaattcaggagcaaatcaccagtcctgttcacagtccaattcactatggctaaaatatcaaacttatgctccttgaggtttgttttttccttatcttcctttaatatctgatgactgatggactggtgagttcatgatctgcttcatgcttttccttttatatatggtcactacctcactggttagttcatggtgctttttgtctacttctttgcccaaaaaaaatcccggggcgaatttcagcatgcttttcctgcttccgctgtgcaaattcacaggatgcgtgggaaatgtgttcttgtttcgtcgggtggtgttcttgccattcgttttagctcaacacaaaacaaatgcttcttgttcttcaggtcgccctgtgtttctttctcgccagtttgggccatggattctggtgtgcatttgttcaatatatcttagtatcttatttaacaatcagtacttctctgatgctcaagagatcaatttactcaaagtagcaaactgtatcatagttgtatactttatcaaacgaggaacctgatgcttgtagtataagcctcattttgttccaaacaagacaggcttcggatacaatcacctggaaatcaatcagtaaacttttgctattcagttttttaaataaaaaatttaggccttacgactttcctcgcaatgtgttcacatgtagattaccttattgcattgcctacttttgtccgttgtgtaaaccaatcttttatcatttatcaaatgattttgctcttaacattaacaaattatcgtttggtcatatgcaactaatgacatcacattaccaagattctggggacccatcgctaccttgtgtcaacagtagactgaccagatcaggtaccattttgaaacctgtgtacaatttcatttctcaataactggccgaacataaatagccaaggcatgggtttatgccaatactcataggttaaatgacactttggtcatatgcatagttgccaccctcaaatgcctatctcatgatagaagtaaatggtggtctaaatcaacaacgactttctataagtaccatgactattattcttgaacaaatgtgtgctcatggttctgagtagatattaccattgccattgttttatatggaagtccagtgccttgtcaatctttggtccacgagtaagtgttttggatattcatgttagtgtacactgtaatcaacagagctggttttctttaacagttttgttatgaaatcatggaactggcaacatgatagaatttttcaaggaaaaaaagggaaacgctcggcggcgaagctaaagcagagcttgcgctacacgcgctgcgagcagtttctgtctaaagggcaaggtctgatctcatatttgagctccccgtggcactgctcgcccggccagccaccatcccggtcttgcgctcggcggcgtgcatggtgtgctcgtccctgacagtggctagcttctgttttcttaattgatggctagcttctgttttcttaattgatgatttgttttttccttttctgatcgtcaatagggaagagacgacgataacatggacactgttttctaaatggatcagtatttttgcaagttcagcaggggccagactaataaatcagcttgatagcatccttgcagcggtgccttggactttggcggttagaagaggtttataattttatatgatgaaattatgtgcatcttcagttgtttttgcctcactgctctttgcggctctggataaactcgaagctgacctatccaagttcgacgacgggcccttcttcctaggccaattcagcttggcggatgtagcgtacattacgattctggaaagggttcagatatactattcccatcttaggaactacgacatcgccgaaggcaggcccaacctccaggaattcatcgaggagatgaacaagattgaagcgtatgcgcagaccaagaacgatcctctgttcttgcttgatcttgccaagaaccatcttaagattgcctgaagatgtgacaaagcagcattagtccgttgatcggtggaagaccactcgtcagtgttgagttgaatgtttgatcaataaaatacggcatgttgttgctgactttggacttgcaaagttcactactgataataacacccatgtttcaacaagagtaatgggtacttttgggtatttggcacctgagtatgcagcatctggcaagctcacagaaaaatccgatgtattttctttcggagtcatgcttcttgagcttattactgggcggcgaccaattgacacaacccaattggcactgcttgttataagcacatatgtacttccatttgcatgttgtataatactaataccaattgcaaaattatagttattttttctacccttgttagttaataagcatatttgtggtcaataggttgtattcttattcttgtaaccgtgttaattaatgttatggacttgtagtcttgtattaccttgtgaatatatctgtccctgcctgccatgtgaacgtgcttagcctggaatttgtgatatgtacatatatccatgtgtttgaaatctgtattgtatgtgatattccgtgttgcatgtgatattatgtacgtctaat

SEQ ID NO: 206019 - DNA, 3679 bp, Zea Mays
cccgcgcgcccaccgccgcgcgcagcaccgcgccgcccacccgcggccaccccagcgccccaaatgccgctccaaccctagcctctcgccatgcctttcgatctcgggcggccatgggaaactgatgccgctcgccggtcgccgtcgcgcgggaggacgtcagctcctcgcacttccccgcatccacctcgtcatggagctctgcgagggcggcgagttcttcgaccgcatcgtcgcgcgggggcactacaccgagcgcgccgccaccaatgtcactcgcaccatcgtcgaggtcgtccatttctgccatcggcacgacgtcatccaccgtgacctcaagccggagaacttccttttcgccaataagaaggagaactcgccgccgcgcagcgcccctctcgatatgccgccctgcttcctcctctcctcttgatccatctgccatcccatccccgctctgccagttgcccctcgcttcctcttcggctcttcatccccctcgatccgtcgcccgtgcttcctcctcactatgtcccgtcccctctccatcttgtcgccctgcctccccgcgtctgcgtctgcgcctgccttcggcgtccagagccatatccgcgttggcctccacctacgcacccgcctctagccataagagctcctcccgtgtctgcctttagagatctgctacctccacatcggtgtctagggctcctccattgcctagatctactagagtgagtgagcctacagagctggcctcatccaggctccagttccaccccacggtcatcctctgttgctctacgtttcatgcttctcacatcctctcctcaatctcatcaactgtgctgaaggaggcagatgaaagtatttccgtctcatcaactgtgctgaagaggaggaaaacacctcacttgttgaagggagcagtggagacccggaggaagatcatttggagtctgcagctactaatcttcagcctggcagtgacacttgcattgcaagggaagagttgccagatcagaaggatctggtgaaactgcaagctgttatccgtggacatctagaggcggcccatgcctcacggccaaagcagatcagttaggaggataaaagaagacactaccttggcacatgcctgttgtcacaatggacaaaagaagattagtgttgtgtgagatttttttcattcctttgatctattgcatgctatttgtaccctaatcgacaaaatagatgagactcaattcaggagcaaatcaccagtcctgttcacagtccaattcactatggctaaaatatcaaacttatgctccttgaggtttgttttttccttatcttcctttaatatctgatgactgatggactggtgagttcatgatctgcttcatgcttttccttttatatatggtcactacctcactggttagttcatggtgctttttgtctacttctttgcccaaaaaaaatcccggggcgaatttcagcatgcttttcctgcttccgctgtgcaaattcacaggatgcgtgggaaatgtgttcttgtttcgtcgggtggtgttcttgccattcgttttagctcaacacaaaacaaatgcttcttgttcttcaggtcgccctgtgtttctttctcgccagtttgggccatggattctggtgtgcatttgttcaatatatcttagtatcttatttaacaatcagtacttctctgatgctcaagagatcaatttactcaaagtagcaaactgtatcatagttgtatactttatcaaacgaggaacctgatgcttgtagtataagcctcattttgttccaaacaagacaggcttcggatacaatcacctggaaatcaatcagtaaacttttgctattcagttttttaaataaaaaatttaggccttacgactttcctcgcaatgtgttcacatgtagattaccttattgcattgcctacttttgtccgttgtgtaaaccaatcttttatcatttatcaaatgattttgctcttaacattaacaaattatcgtttggtcatatgcaactaatgacatcacattaccaagattctggggacccatcgctaccttgtgtcaacagtagactgaccagatcagggaaacgctcggcggcgaagctaaagcagagcttgcgctacacgcgctgcgagcagtttctgtctaaagggcaaggtctgatctcatgtgagtcatgtctggttggtgtgatacattaatcttaatcaatttttgtgattttggggatttctggtttttggttgacaattcgccagtggtgtacatgacagatttgagctccccgtggcactgctcgcccggccagccaccatcccggtcttgcgctcggcggcgtgcatggtgtgctcgtccctgacagtggctagcttctgttttcttaattgatggctagcttctgttttcttaattgatgatttgttttttccttttctgatcgtcaatagggaagagacgacgataacatggacactgttttctaaatggatcagtatttttgcaagttcagcaggggccagactaataaatcagcttgatagcatccttgcagcggtgccttggactttggcggttagaagaggtttataattttatatgatgaaattatgtgcatcttcagttgtttttgcctcactgctctgtaaggacatataaaattggtatttgtactttctaaggttctccttggaatggtagagttttacagggaaccttccatcatcagttgctgacatagctcgaactcgacgtttcttcttcgccagttgcggctctggataaactcgaagctgacctatccaagttcgacgacgggcccttcttcctaggccaattcagcttggcggatgtagcgtacattacgattctggaaagggttcagatatactattcccatcttaggaactacgacatcgccgaaggcaggcccaacctccaggaattcatcgaggagatgaacaagattgaagcgtatgcgcagaccaagaacgatcctctgttcttgcttgatcttgccaagaaccatcttaagattgcctgaagatgtgacaaagcagcattagtccgttgatcggtggaagaccactcgtcagtgttgagttgaatgtttgatcaataaaatacggcatgttgttgctgactttggacttgcaaagttcactactgataataacacccatgtttcaacaagagtaatgggtacttttgggtatttggcacctgagtatgcagcatctggcaagctcacagaaaaatccgatgtattttctttcggagtcatgcttcttgagcttattactgggcggcgaccaattgacacaacccaattggcactgcttgttataagcacatatgtacttccatttgcatgttgtataatactaataccaattgcaaaattatagttattttttctacccttgttagttaataagcatatttgtggtcaataggttgtattcttattcttgtaaccgtgttaattaatgttatggacttgtagtcttgtattaccttgtgaatatatctgtccctgcctgccatgtgaacgtgcttagcctggaatttgtgatatgtacatatatccatgtgtttgaaatctgtattgtatgtgatattccgtgttgcatgtgatattatgtacgtctaat

SEQ ID NO: 206020 - DNA, 2958 bp, Zea Mays
cccgcgcgcccaccgccgcgcgcagcaccgcgccgcccacccgcggccaccccagcgccccaaatgccgctccaaccctagcctctcgccatgcctttcgatctcgggcggccatgggaaactgatgccgctcgccggtcgccgtcgcgcgggaggacgtcagctcctcgcacttccccgcatccacctcgtcatggagctctgcgagggcggcgagttcttcgaccgcatcgtcgcgcgggggcactacaccgagcgcgccgccaccaatgtcactcgcaccatcgtcgaggtcgtccatttctgccatcggcacgacgtcatccaccgtgacctcaagccggagaacttccttttcgccaataagaaggagaactcgccgccgcgcagcgcccctctcgatatgccgccctgcttcctcctctcctcttgatccatctgccatcccatccccgctctgccagttgcccctcgcttcctcttcggctcttcatccccctcgatccgtcgcccgtgcttcctcctcactatgtcccgtcccctctccatcttgtcgccctgcctccccgcgtctgcgtctgcgcctgccttcggcgtccagagccatatccgcgttggcctccacctacgcacccgcctctagccataagagctcctcccgtgtctgcctttagagatctgctacctccacatcggtgtctagggctcctccattgcctagatctactagagaggcagatgaaagtatttccgtctcatcaactgtgctgaagaggaggaaaacacctcacttgttgaagggagcagtggagacccggaggaagatcatttggagtctgcagctactaatcttcagcctggcagtgacacttgcattgcaagggaagagttgccagatcagaaggatctggtgaaactgcaagctgttatccgtggacatctagaggcggcccatgcctcacggccaaagcagatcagttaggaggataaaagaagacactaccttggcacatgcctgttgtcacaatggacaaaagaagattagtgttgtgtgagatttttttcattcctttgatctattgcatgctatttgtaccctaatcgacaaaatagatgagactcaattcaggagcaaatcaccagtcctgttcacagtccaattcactatggctaaaatatcaaacttatgctccttgaggtttgttttttccttatcttcctttaatatctgatgactgatggactggtgagttcatgatctgcttcatgcttttccttttatatatggtcactacctcactggttagttcatggtgctttttgtctacttctttgcccaaaaaaaatcccggggcgaatttcagcatgcttttcctgcttccgctgtgcaaattcacaggatgcgtgggaaatgtgttcttgtttcgtcgggtggtgttcttgccattcgttttagctcaacacaaaacaaatgcttcttgttcttcaggtcgccctgtgtttctttctcgccagtttgggccatggattctggtgtgcatttgttcaatatatcttagtatcttatttaacaatcagtacttctctgatgctcaagagatcaatttactcaaagtagcaaactgtatcatagttgtatactttatcaaacgaggaacctgatgcttgtagtataagcctcattttgttccaaacaagacaggcttcggatacaatcacctggaaatcaatcagtaaacttttgctattcagttttttaaataaaaaatttaggccttacgactttcctcgcaatgtgttcacatgtagattaccttattgcattgcctacttttgtccgttgtgtaaaccaatcttttatcatttatcaaatgattttgctcttaacattaacaaattatcgtttggtcatatgcaactaatgacatcacattaccaagattctggggacccatcgctaccttgtgtcaacagtagactgaccagatcagggaaacgctcggcggcgaagctaaagcagagcttgcgctacacgcgctgcgagcagtttctgtctaaagggcaaggtctgatctcatttgcggctctggataaactcgaagctgacctatccaagttcgacgacgggcccttcttcctaggccaattcagcggatgtagcgtacattacgattctggaaagggttcagatatactattcccatcttaggaactacgacatcgccgaaggcaggcccaacctccaggaattcatcgaggagatgaacaagattgaagcgtatgcgcagaccaagaacgatcctctgttcttgcttgatcttgccaagaaccatcttaagattgcctgaagatgtgacaaagcagcattagtccgttgatcggtggaagaccactcgtcagtgttgagttgaatgtttgatcaataaaatacggcatgttgttgctgactttggacttgcaaagttcactactgataataacacccatgtttcaacaagagtaatgggtacttttgggtatttggcacctgagtatgcagcatctggcaagctcacagaaaaatccgatgtattttctttcggagtcatgcttcttgagcttattactgggcggcgaccaattgacacaacccaattggcactgcttgttataagcacatatgtacttccatttgcatgttgtataatactaataccaattgcaaaattatagttattttttctacccttgttagttaataagcatatttgtggtcaataggttgtattcttattcttgtaaccgtgttaattaatgttatggacttgtagtcttgtattaccttgtgaatatatctgtccctgcctgccatgtgaacgtgcttagcctggaatttgtgatatgtacatatatccatgtgtttgaaatctgtattgtatgtgatattccgtgttgcatgtgatattatgtacgtctaat

SEQ ID NO: 206021 - DNA, 3800 bp, Zea Mays
cccgcgcgcccaccgccgcgcgcagcaccgcgccgcccacccgcggccaccccagcgccccaaatgccgctccaaccctagcctctcgccatgcctttcgatctcgggcggccatgggaaactgatgccgctcgccggtcgccgtcgcgcgggaggacgtcagctcctcgcacttccccgcatccacctcgtcatggagctctgcgagggcggcgagttcttcgaccgcatcgtcgcgcgggggcactacaccgagcgcgccgccaccaatgtcactcgcaccatcgtcgaggtcgtccatttctgccatcggcacgacgtcatccaccgtgacctcaagccggagaacttccttttcgccaataagaaggagaactcgccgccgcgcagcgcccctctcgatatgccgccctgcttcctcctctcctcttgatccatctgccatcccatccccgctctgccagttgcccctcgcttcctcttcggctcttcatccccctcgatccgtcgcccgtgcttcctcctcactatgtcccgtcccctctccatcttgtcgccctgcctccccgcgtctgcgtctgcgcctgccttcggcgtccagagccatatccgcgttggcctccacctacgcacccgcctctagccataagagctcctcccgtgtctgcctttagagatctgctacctccacatcggtgtctagggctcctccattgcctagatctactagagaggcagatgaaagtatttccgtctcatcaactgtgctgaagaggaggaaaacacctcacttgttgaagggagcagtggagacccggaggaagatcatttggagtctgcagctactaatcttcagcctggcagtgacacttgcattgcaagggaagagttgccagatcagaaggatctggtgaaactgcaagctgttatccgtggacatctagaggcggcccatgcctcacggccaaagcagatcagttaggaggataaaagaagacactaccttggcacatgcctgttgtcacaatggacaaaagaagattagtgttgtgtgagatttttttcattcctttgatctattgcatgctatttgtaccctaatcgacaaaatagatgagactcaattcaggagcaaatcaccagtcctgttcacagtccaattcactatggctaaaatatcaaacttatgctccttgaggtttgttttttccttatcttcctttaatatctgatgactgatggactggtgagttcatgatctgcttcatgcttttccttttatatatggtcactacctcactggttagttcatggtgctttttgtctacttctttgcccaaaaaaaatcccggggcgaatttcagcatgcttttcctgcttccgctgtgcaaattcacaggatgcgtgggaaatgtgttcttgtttcgtcgggtggtgttcttgccattcgttttagctcaacacaaaacaaatgcttcttgttcttcaggtcgccctgtgtttctttctcgccagtttgggccatggattctggtgtgcatttgttcaatatatcttagtatcttatttaacaatcagtacttctctgatgctcaagagatcaatttactcaaagtagcaaactgtatcatagttgtatactttatcaaacgaggaacctgatgcttgtagtataagcctcattttgttccaaacaagacaggcttcggatacaatcacctggaaatcaatcagtaaacttttgctattcagttttttaaataaaaaatttaggccttacgactttcctcgcaatgtgttcacatgtagattaccttattgcattgcctacttttgtccgttgtgtaaaccaatcttttatcatttatcaaatgattttgctcttaacattaacaaattatcgtttggtcatatgcaactaatgacatcacattaccaagattctggggacccatcgctaccttgtgtcaacagtagactgaccagatcaggtaccattttgaaacctgtgtacaatttcatttctcaataactggccgaacataaatagccaaggcatgggtttatgccaatactcataggttaaatgacactttggtcatatgcatagttgccaccctcaaatgcctatctcatgatagaagtaaatggtggtctaaatcaacaacgactttctataagtaccatgactattattcttgaacaaatgtgtgctcatggttctgagtagatattaccattgccattgttttatatggaagtccagtgccttgtcaatctttggtccacgagtaagtgttttggatattcatgttagtgtacactgtaatcaacagagctggttttctttaacagttttgttatgaaatcatggaactggcaacatgatagaatttttcaaggaaaaaaaggtaatatattaattgtgcagcgtgccaatctaatatgagttatattaattgtgcctagaacctgtctagacaatctggagtaatatattaattgtgcagagctgtctagaacctgccgaaacaatctggagtaatatattaattgtgcagcgtgccaatctaatatgagttatgttctttttggtgttcctttcaagggaaacgctcggcggcgaagctaaagcagagcttgcgctacacgcgctgcgagcagtttctgtctaaagggcaaggtctgatctcagatttgagctccccgtggcactgctcgcccggccagccaccatcccggtcttgcgctcggcggcgtgcatggtgtgctcgtccctgacagtggctagcttctgttttcttaattgatggctagcttctgttttcttaattgatgatttgttttttccttttctgatcgtcaatagggaagagacgacgataacatggacactgttttctaaatggatcagtatttttgttgcggctctggataaactcgaagctgacctatccaagttcgacgacgggcccttcttcctaggccaattcagcttggcggatgtagcgtacattacgattctggaaagggttcagatatactattcccatcttaggaactacgacatcgccgaaggcaggcccaacctccaggaattcatcgaggagatgaacaagattgaagcgtatgcgcagaccaagaacgatcctctgttcttgcttgatcttgccaagaaccatcttaagattgcctgaagatgtgacaaagcagcattagtccgttgatcggtggaagaccactcgtcagtgttgagttgaatgtttgatcaataaaatacggttgctgactttggacttgcaaagttcactactgataataacacccatgtttcaacaagagtaatgggtacttttgggtatttggcacctgagtatgcagcatctggcaagctcacagaaaaatccgatgtattttctttcggagtcatgcttcttgagcttattactgggcggcgaccaattgacacaacccaattggcactgcttgttataagcacatatgtacttccatttgcatgttgtataatactaataccaattgcaaaattatagttattttttctacccttgttagttaataagcatatttgtggtcaataggttgtattcttattcttgtaaccgtgttaattaatgttatggacttgtagtcttgtattaccttgtgaatatatctgtccctgcctgccatgtgaacgtgcttagcctggaatttgtgatatgtacatatatccatgtgtttgaaatctgtattgtatgtgatattccgtgttgcatgtgatattatgtacgtctaat

SEQ ID NO: 206022 - DNA, 3548 bp, Zea Mays
cccgcgcgcccaccgccgcgcgcagcaccgcgccgcccacccgcggccaccccagcgccccaaatgccgctccaaccctagcctctcgccatgcctttcgatctcgggcggccatgggaaactgatgccgctcgccggtcgccgtcgcgcgggaggacgtcagctcctcgcacttccccgcatccacctcgtcatggagctctgcgagggcggcgagttcttcgaccgcatcgtcgcgcgggggcactacaccgagcgcgccgccaccaatgtcactcgcaccatcgtcgaggtcgtccatttctgccatcggcacgacgtcatccaccgtgacctcaagccggagaacttccttttcgccaataagaaggagaactcgccgccgcgcagcgcccctctcgatatgccgccctgcttcctcctctcctcttgatccatctgccatcccatccccgctctgccagttgcccctcgcttcctcttcggctcttcatccccctcgatccgtcgcccgtgcttcctcctcactatgtcccgtcccctctccatcttgtcgccctgcctccccgcgtctgcgtctgcgcctgccttcggcgtccagagccatatccgcgttggcctccacctacgcacccgcctctagccataagagctcctcccgtgtctgcctttagagatctgctacctccacatcggtgtctagggctcctccattgcctagatctactagaatgaaagtatttccgtctcatcaactgtgctgaagaggaggaaaacacctcacttgttgaagggagcagtggagacccggaggaagatcatttggagtctgcagctactaatcttcagcctggcagtgacacttgcattgcaagggaagagttgccagatcagaaggatctggtgaaactgcaagctgttatccgtggacatctagaggcggcccatgcctcacggccaaagcagatcagttaggaggataaaagaagacactaccttggcacatgcctgttgtcacaatggacaaaagaagattagtgttgtgtgagatttttttcattcctttgatctattgcatgctatttgtaccctaatcgacaaaatagatgagactcaattcaggagcaaatcaccagtcctgttcacagtccaattcactatggctaaaatatcaaacttatgctccttgaggtttgttttttccttatcttcctttaatatctgatgactgatggactggtgagttcatgatctgcttcatgcttttccttttatatatggtcactacctcactggttagttcatggtgctttttgtctacttctttgcccaaaaaaaatcccggggcgaatttcagcatgcttttcctgcttccgctgtgcaaattcacaggatgcgtgggaaatgtgttcttgtttcgtcgggtggtgttcttgccattcgttttagctcaacacaaaacaaatgcttcttgttcttcaggtcgccctgtgtttctttctcgccagtttgggccatggattctggtgtgcatttgttcaatatatcttagtatcttatttaacaatcagtacttctctgatgctcaagagatcaatttactcaaagtagcaaactgtatcatagttgtatactttatcaaacgaggaacctgatgcttgtagtataagcctcattttgttccaaacaagacaggcttcggatacaatcacctggaaatcaatcagtaaacttttgctattcagttttttaaataaaaaatttaggccttacgactttcctcgcaatgtgttcacatgtagattaccttattgcattgcctacttttgtccgttgtgtaaaccaatcttttatcatttatcaaatgattttgctcttaacattaacaaattatcgtttggtcatatgcaactaatgacatcacattaccaagattctggggacccatcgctaccttgtgtcaacagtagactgaccagatcagggaaacgctcggcggcgaagctaaagcagagcttgcgctacacgcgctgcgagcagtttctgtctaaagggcaaggtctgatctcatatttgagctccccgtggcactgctcgcccggccagccaccatcccggtcttgcgctcggcggcgtgcatggtgtgctcgtccctgacagtggctagcttctgttttcttaattgatggctagcttctgttttcttaattgatgatttgttttttccttttctgatcgtcaatagggaagagacgacgataacatggacactgttttctaaatggatcagtatttttggtatatacacatgcttttactagtagaggagtatttattttcatttgtagcagccaaggaacttgtgcattccttatgaatcatgagaagaccatgaagatgcacacaaatttgcttgacttctgaccagtaataattagcgaaagaaagaaaatccagaaccatgaatcagcttgatagcagtaacaaatttgcttgacttctgacgagtaagaaattggcagcaagttcagcaggggccagactaataaatcagcttgatagcatccttgcagcggtgccttggactttggcggttagaagaggtttataattttatatgatgaaattatgtgcatcttcagttgtttttgcctcactgctctttgcggctctggataaactcgaagctgacctatccaagttcgacgacgggcccttcttcctaggccaattcagcttggcggatgtagcgtacattacgattctggaaagggttcagatatactattcccatcttaggaactacgacatcgccgaaggcaggcccaacctccaggaattcatcgaggagatgaacaagattgaagcgtatgcgcagaccaagaacgatcctctgttcttgcttgatcttgccaagaaccatcttaagattgcctgaagatgtgacaaagcagcattagtccgttgatcggtggaagaccactcgtcagtgttgagttgaatgtttgatcaataaaatacggcatgttgttgctgactttggacttgcaaagttcactactgataataacacccatgtttcaacaagagtaatgggtacttttgggtatttggcacctgagtatgcagcatctggcaagctcacagaaaaatccgatgtattttctttcggagtcatgcttcttgagcttattactgggcggcgaccaattgacacaacccaattggcactgcttgttataagcacatatgtacttccatttgcatgttgtataatactaataccaattgcaaaattatagttattttttctacccttgttagttaataagcatatttgtggtcaataggttgtattcttattcttgtaaccgtgttaattaatgttatggacttgtagtcttgtattaccttgtgaatatatctgtccctgcctgccatgtgaacgtgcttagcctggaatttgtgatatgtacatatatccatgtgtttgaaatctgtattgtatgtgatattccgtgttgcatgtgatattatgtacgtctaat

SEQ ID NO: 206023 - DNA, 3551 bp, Zea Mays
cccgcgcgcccaccgccgcgcgcagcaccgcgccgcccacccgcggccaccccagcgccccaaatgccgctccaaccctagcctctcgccatgcctttcgatctcgggcggccatgggaaactgatgccgctcgccggtcgccgtcgcgcgggaggacgtcagctcctcgcacttccccgcatccacctcgtcatggagctctgcgagggcggcgagttcttcgaccgcatcgtcgcgcgggggcactacaccgagcgcgccgccaccaatgtcactcgcaccatcgtcgaggtcgtccatttctgccatcggcacgacgtcatccaccgtgacctcaagccggagaacttccttttcgccaataagaaggagaactcgccgccgcgcagcgcccctctcgatatgccgccctgcttcctcctctcctcttgatccatctgccatcccatccccgctctgccagttgcccctcgcttcctcttcggctcttcatccccctcgatccgtcgcccgtgcttcctcctcactatgtcccgtcccctctccatcttgtcgccctgcctccccgcgtctgcgtctgcgcctgccttcggcgtccagagccatatccgcgttggcctccacctacgcacccgcctctagccataagagctcctcccgtgtctgcctttagagatctgctacctccacatcggtgtctagggctcctccattgcctagatctactagagaggcagatgaaagtatttccgtctcatcaactgtgctgaagaggaggaaaacacctcacttgttgaagggagcagtggagacccggaggaagatcatttggagtctgcagctactaatcttcagcctggcagtgacacttgcattgcaagggaagagttgccagatcagaaggatctggtgaaactgcaagctgttatccgtggacatctagaggcggcccatgcctcacggccaaagcagatcagttaggaggataaaagaagacactaccttggcacatgcctgttgtcacaatggacaaaagaagattagtgttgtgtgagatttttttcattcctttgatctattgcatgctatttgtaccctaatcgacaaaatagatgagactcaattcaggagcaaatcaccagtcctgttcacagtccaattcactatggctaaaatatcaaacttatgctccttgaggtttgttttttccttatcttcctttaatatctgatgactgatggactggtgagttcatgatctgcttcatgcttttccttttatatatggtcactacctcactggttagttcatggtgctttttgtctacttctttgcccaaaaaaaatcccggggcgaatttcagcatgcttttcctgcttccgctgtgcaaattcacaggatgcgtgggaaatgtgttcttgtttcgtcgggtggtgttcttgccattcgttttagctcaacacaaaacaaatgcttcttgttcttcaggtcgccctgtgtttctttctcgccagtttgggccatggattctggtgtgcatttgttcaatatatcttagtatcttatttaacaatcagtacttctctgatgctcaagagatcaatttactcaaagtagcaaactgtatcatagttgtatactttatcaaacgaggaacctgatgcttgtagtataagcctcattttgttccaaacaagacaggcttcggatacaatcacctggaaatcaatcagtaaacttttgctattcagttttttaaataaaaaatttaggccttacgactttcctcgcaatgtgttcacatgtagattaccttattgcattgcctacttttgtccgttgtgtaaaccaatcttttatcatttatcaaatgattttgctcttaacattaacaaattatcgtttggtcatatgcaactaatgacatcacattaccaagattctggggacccatcgctaccttgtgtcaacagtagactgaccagatcagttttgttatgaaatcatggaactggcaacatgatagaatttttcaaggaaaaaaagggaaacgctcggcggcgaagctaaagcagagcttgcgctacacgcgctgcgagcagtttctgtctaaagggcaaggtctgatctcatatttgagctccccgtggcactgctcgcccggccagccaccatcccggtcttgcgctcggcggcgtgcatggtgtgctcgtccctgacagtggctagcttctgttttcttaattgatggctagcttctgttttcttaattgatgatttgttttttccttttctgatcgtcaatagggaagagacgacgataacatggacactgttttctaaatggatcagtatttttggtatatacacatgcttttactagtagaggagtatttattttcatttgtagcagccaaggaacttgtgcattccttatgaatcatgagaagaccatgaagatgcacacaaatttgcttgacttctgaccagtaataattagcgaaagaaagaaaatccagaaccatgaatcagcttgatagcagtaacaaatttgcttgacttctgacgagtaagaaattggcagcaagttcagcaggggccagactaataaatcagcttgatagcatccttgcagcggtgccttggactttggcggttagaagagttgcggctctggataaactcgaagctgacctatccaagttcgacgacgggcccttcttcctaggccaattcagcttggcggatgtagcgtacattacgattctggaaagggttcagatatactattcccatcttaggaactacgacatcgccgaaggcaggcccaacctccaggaattcatcgaggagatgaacaagattgaagcgtatgcgcagaccaagaacgatcctctgttcttgcttgatcttgccaagaaccatcttaagattgcctgaagatgtgacaaagcagcattagtccgttgatcggtggaagaccactcgtcagtgttgagttgaatgtttgatcaataaaatacggcatgttgttgctgactttggacttgcaaagttcactactgataataacacccatgtttcaacaagagtaatgggtacttttgggtatttggcacctgagtatgcagcatctggcaagctcacagaaaaatccgatgtattttctttcggagtcatgcttcttgagcttattactgggcggcgaccaattgacacaacccaattggcactgcttgttataagcacatatgtacttccatttgcatgttgtataatactaataccaattgcaaaattatagttattttttctacccttgttagttaataagcatatttgtggtcaataggttgtattcttattcttgtaaccgtgttaattaatgttatggacttgtagtcttgtattaccttgtgaatatatctgtccctgcctgccatgtgaacgtgcttagcctggaatttgtgatatgtacatatatccatgtgtttgaaatctgtattgtatgtgatattccgtgttgcatgtgatattatgtacgtctaat

SEQ ID NO: 206024 - DNA, 4127 bp, Zea Mays
cccgcgcgcccaccgccgcgcgcagcaccgcgccgcccacccgcggccaccccagcgccccaaatgccgctccaaccctagcctctcgccatgcctttcgatctcgggcggccatgggaaactgatgccgctcgccggtcgccgtcgcgcgggaggacgtcagctcctcgcacttccccgcatccacctcgtcatggagctctgcgagggcggcgagttcttcgaccgcatcgtcgcgcgggggcactacaccgagcgcgccgccaccaatgtcactcgcaccatcgtcgaggtcgtccatttctgccatcggcacgacgtcatccaccgtgacctcaagccggagaacttccttttcgccaataagaaggagaactcgccgccgcgcagcgcccctctcgatatgccgccctgcttcctcctctcctcttgatccatctgccatcccatccccgctctgccagttgcccctcgcttcctcttcggctcttcatccccctcgatccgtcgcccgtgcttcctcctcactatgtcccgtcccctctccatcttgtcgccctgcctccccgcgtctgcgtctgcgcctgccttcggcgtccagagccatatccgcgttggcctccacctacgcacccgcctctagccataagagctcctcccgtgtctgcctttagagatctgctacctccacatcggtgtctagggctcctccattgcctagatctactagagtgagtgagcctacagagctggcctcatccaggctccagttccaccccacggtcatcctctgttgctctacgtttcatgcttctcacatcctctcctcaatctcatcaactgtgctgaaggaggcagatgaaagtatttccgtctcatcaactgtgctgaagaggaggaaaacacctcacttgttgaagggagcagtggagacccggaggaagatcatttggagtctgcagctactaatcttcagcctggcagtgacacttgcattgcaagggaagagttgccagatcagaaggatctggtgaaactgcaagctgttatccgtggacatctagaggcggcccatgcctcacggccaaagcagatcagatgagattttttggtcttgcgtggttctttttaatctactcacatgatacttcttattcattgccatccaatttaattaattgccctcgattgaattggttcctttgccattttacttaggaggataaaagaagacactaccttggcacatgcctgttgtcacaatggacaaaagaagattagtgttgtgtgagatttttttcattcctttgatctattgcatgctatttgtaccctaatcgacaaaatagatgagactcaattcaggagcaaatcaccagtcctgttcacagtccaattcactatggctaaaatatcaaacttatgctccttgaggtttgttttttccttatcttcctttaatatctgatgactgatggactggtgagttcatgatctgcttcatgcttttccttttatatatggtcactacctcactggttagttcatggtgctttttgtctacttctttgcccaaaaaaaatcccggggcgaatttcagcatgcttttcctgcttccgctgtgcaaattcacaggatgcgtgggaaatgtgttcttgtttcgtcgggtggtgttcttgccattcgttttagctcaacacaaaacaaatgcttcttgttcttcaggtcgccctgtgtttctttctcgccagtttgggccatggattctggtgtgcatttgttcaatatatcttagtatcttatttaacaatcagtacttctctgatgctcaagagatcaatttactcaaagtagcaaactgtatcatagttgtatactttatcaaacgaggaacctgatgcttgtagtataagcctcattttgttccaaacaagacaggcttcggatacaatcacctggaaatcaatcagtaaacttttgctattcagttttttaaataaaaaatttaggccttacgactttcctcgcaatgtgttcacatgtagattaccttattgcattgcctacttttgtccgttgtgtaaaccaatcttttatcatttatcaaatgattttgctcttaacattaacaaattatcgtttggtcatatgcaactaatgacatcacattaccaagattctggggacccatcgctaccttgtgtcaacagtagactgaccagatcaggtaccattttgaaacctgtgtacaatttcatttctcaataactggccgaacataaatagccaaggcatgggtttatgccaatactcataggttaaatgacactttggtcatatgcatagttgccaccctcaaatgcctatctcatgatagaagtaaatggtggtctaaatcaacaacgactttctataagtaccatgactattattcttgaacaaatgtgtgctcatggttctgagtagatattaccattgccattgttttatatggaagtccagtgccttgtcaatctttggtccacgagtaagtgttttggatattcatgttagtgtacactgtaatcaacagagctggttttctttaacagttttgttatgaaatcatggaactggcaacatgatagaatttttcaaggaaaaaaagggaaacgctcggcggcgaagctaaagcagagcttgcgctacacgcgctgcgagcagtttctgtctaaagggcaaggtctgatctcatatttgagctccccgtggcactgctcgcccggccagccaccatcccggtcttgcgctcggcggcgtgcatgggaagagacgacgataacatggacactgttttctaaatggatcagtatttttggtatatacacatgcttttactagtagaggagtatttattttcatttgtagcagccaaggaacttgtgcattccttatgaatcatgagaagaccatgaagatgcacacaaatttgcttgacttctgaccagtaataattagcgaaagaaagaaaatccagaaccatgaatcagcttgatagcagtaacaaatttgcttgacttctgacgagtaagaaattggcagcaagttcagcaggggccagactaataaatcagcttgatagcatccttgcagcggtgccttggactttggcggttagaagaggttctccttggaatggtagagttttacagggaaccttccatcatcagttgctgacatagctcgaactcgacgtttcttcttcgccagttgcggctctggataaactcgaagctgacctatccaagttcgacgacgggcccttcttcctaggccaattcagcttggcggatgtagcgtacattacgattctggaaagggttcagatatactattcccatcttaggaactacgacatcgccgaaggcaggcccaacctccaggaattcatcgaggagatgaacaagattgaagcgtatgcgcagaccaagaacgatcctctgttcttgcttgatcttgccaagaaccatcttaagattgcctgaagatgtgacaaagcagcattagtccgttgatcggtggaagaccactcgtcagtgttgagttgaatgtttgatcaataaaatacggttgctgactttggacttgcaaagttcactactgataataacacccatgtttcaacaagagtaatgggtacttttgggtatttggcacctgagtatgcagcatctggcaagctcacagaaaaatccgatgtattttctttcggagtcatgcttcttgagcttattactgggcggcgaccaattgacacaacccaattggcactgcttgttataagcacatatgtacttccatttgcatgttgtataatactaataccaattgcaaaattatagttattttttctacccttgttagttaataagcatatttgtggtcaataggttgtattcttattcttgtaaccgtgttaattaatgttatggacttgtagtcttgtattaccttgtgaatatatctgtccctgcctgccatgtgaacgtgcttagcctggaatttgtgatatgtacatatatccatgtgtttgaaatctgtattgtatgtgatattccgtgttgcatgtgatattatgtacgtctaat

SEQ ID NO: 206025 - DNA, 3495 bp, Zea Mays
cccgcgcgcccaccgccgcgcgcagcaccgcgccgcccacccgcggccaccccagcgccccaaatgccgctccaaccctagcctctcgccatgcctttcgatctcgggcggccatgggaaactgatgccgctcgccggtcgccgtcgcgcgggaggacgtcagctcctcgcacttccccgcatccacctcgtcatggagctctgcgagggcggcgagttcttcgaccgcatcgtcgcgcgggggcactacaccgagcgcgccgccaccaatgtcactcgcaccatcgtcgaggtcgtccatttctgccatcggcacgacgtcatccaccgtgacctcaagccggagaacttccttttcgccaataagaaggagaactcgccgccgcgcagcgcccctctcgatatgccgccctgcttcctcctctcctcttgatccatctgccatcccatccccgctctgccagttgcccctcgcttcctcttcggctcttcatccccctcgatccgtcgcccgtgcttcctcctcactatgtcccgtcccctctccatcttgtcgccctgcctccccgcgtctgcgtctgcgcctgccttcggcgtccagagccatatccgcgttggcctccacctacgcacccgcctctagccataagagctcctcccgtgtctgcctttagagatctgctacctccacatcggtgtctagggctcctccattgcctagatctactagagaggcagatgaaagtatttccgtctcatcaactgtgctgaagaggaggaaaacacctcacttgttgaagggagcagtggagacccggaggaagatcatttggagtctgcagctactaatcttcagcctggcagtgacacttgcattgcaagggaagagttgccagatcagaaggatctggtgaaactgcaagctgttatccgtggacatctagaggcggcccatgcctcacggccaaagcagatcagttaggaggataaaagaagacactaccttggcacatgcctgttgtcacaatggacaaaagaagattagtgttgtgtgagatttttttcattcctttgatctattgcatgctatttgtaccctaatcgacaaaatagatgagactcaattcaggagcaaatcaccagtcctgttcacagtccaattcactatggctaaaatatcaaacttatgctccttgaggtttgttttttccttatcttcctttaatatctgatgactgatggactggtgagttcatgatctgcttcatgcttttccttttatatatggtcactacctcactggttagttcatggtgctttttgtctacttctttgcccaaaaaaaatcccggggcgaatttcagcatgcttttcctgcttccgctgtgcaaattcacaggatgcgtgggaaatgtgttcttgtttcgtcgggtggtgttcttgccattcgttttagctcaacacaaaacaaatgcttcttgttcttcaggtcgccctgtgtttctttctcgccagtttgggccatggattctggtgtgcatttgttcaatatatcttagtatcttatttaacaatcagtacttctctgatgctcaagagatcaatttactcaaagtagcaaactgtatcatagttgtatactttatcaaacgaggaacctgatgcttgtagtataagcctcattttgttccaaacaagacaggcttcggatacaatcacctggaaatcaatcagtaaacttttgctattcagttttttaaataaaaaatttaggccttacgactttcctcgcaatgtgttcacatgtagattaccttattgcattgcctacttttgtccgttgtgtaaaccaatcttttatcatttatcaaatgattttgctcttaacattaacaaattatcgtttggtcatatgcaactaatgacatcacattaccaagattctggggacccatcgctaccttgtgtcaacagtagactgaccagatcagggaaacgctcggcggcgaagctaaagcagagcttgcgctacacgcgctgcgagcagtttctgtctaaagggcaaggtctgatctcatatttgagctccccgtggcactgctcgcccggccagccaccatcccggtcttgcgctcggcggcgtgcatggtgtgctcgtccctgacagtggctagcttctgttttcttaattgatggctagcttctgttttcttaattgatgatttgttttttccttttctgatcgtcaatagggaagagacgacgataacatggacactgttttctaaatggatcagtatttttggtatatacacatgcttttactagtagaggagtatttattttcatttgtagcagccaaggaacttgtgcattccttatgaatcatgagaagaccatgaagatgcacacaaatttgcttgacttctgaccagtaataattagcgaaagaaagaaaatccagaaccatgaatcagcttgatagcagtaacaaatttgcttgacttctgacgagtaagaaattggcagcaagttcagcaggggccagactaataaatcagcttgatagcatccttgcagcggtgccttggactttggcggttagaagagttgcggctctggataaactcgaagctgacctatccaagttcgacgacgggcccttcttcctaggccaattcagcttggcggatgtagcgtacattacgattctggaaagggttcagatatactattcccatcttaggaactacgacatcgccgaaggcaggcccaacctccaggaattcatcgaggagatgaacaagattgaagcgtatgcgcagaccaagaacgatcctctgttcttgcttgatcttgccaagaaccatcttaagattgcctgaagatgtgacaaagcagcattagtccgttgatcggtggaagaccactcgtcagtgttgagttgaatgtttgatcaataaaatacggcatgttgttgctgactttggacttgcaaagttcactactgataataacacccatgtttcaacaagagtaatgggtacttttgggtatttggcacctgagtatgcagcatctggcaagctcacagaaaaatccgatgtattttctttcggagtcatgcttcttgagcttattactgggcggcgaccaattgacacaacccaattggcactgcttgttataagcacatatgtacttccatttgcatgttgtataatactaataccaattgcaaaattatagttattttttctacccttgttagttaataagcatatttgtggtcaataggttgtattcttattcttgtaaccgtgttaattaatgttatggacttgtagtcttgtattaccttgtgaatatatctgtccctgcctgccatgtgaacgtgcttagcctggaatttgtgatatgtacatatatccatgtgtttgaaatctgtattgtatgtgatattccgtgttgcatgtgatattatgtacgtctaat

SEQ ID NO: 206026 - DNA, 3384 bp, Zea Mays
cccgcgcgcccaccgccgcgcgcagcaccgcgccgcccacccgcggccaccccagcgccccaaatgccgctccaaccctagcctctcgccatgcctttcgatctcgggcggccatgggaaactgatgccgctcgccggtcgccgtcgcgcgggaggacgtcagctcctcgcacttccccgcatccacctcgtcatggagctctgcgagggcggcgagttcttcgaccgcatcgtcgcgcgggggcactacaccgagcgcgccgccaccaatgtcactcgcaccatcgtcgaggtcgtccatttctgccatcggcacgacgtcatccaccgtgacctcaagccggagaacttccttttcgccaataagaaggagaactcgccgccgcgcagcgcccctctcgatatgccgccctgcttcctcctctcctcttgatccatctgccatcccatccccgctctgccagttgcccctcgcttcctcttcggctcttcatccccctcgatccgtcgcccgtgcttcctcctcactatgtcccgtcccctctccatcttgtcgccctgcctccccgcgtctgcgtctgcgcctgccttcggcgtccagagccatatccgcgttggcctccacctacgcacccgcctctagccataagagctcctcccgtgtctgcctttagagatctgctacctccacatcggtgtctagggctcctccattgcctagatctactagaatgaaagtatttccgtctcatcaactgtgctgaagaggaggaaaacacctcacttgttgaagggagcagtggagacccggaggaagatcatttggagtctgcagctactaatcttcagcctggcagtgacacttgcattgcaagggaagagttgccagatcagaaggatctggtgaaactgcaagctgttatccgtggacatctagaggcggcccatgcctcacggccaaagcagatcagttaggaggataaaagaagacactaccttggcacatgcctgttgtcacaatggacaaaagaagattagtgttgtgtgagatttttttcattcctttgatctattgcatgctatttgtaccctaatcgacaaaatagatgagactcaattcaggagcaaatcaccagtcctgttcacagtccaattcactatggctaaaatatcaaacttatgctccttgaggtttgttttttccttatcttcctttaatatctgatgactgatggactggtgagttcatgatctgcttcatgcttttccttttatatatggtcactacctcactggttagttcatggtgctttttgtctacttctttgcccaaaaaaaatcccggggcgaatttcagcatgcttttcctgcttccgctgtgcaaattcacaggatgcgtgggaaatgtgttcttgtttcgtcgggtggtgttcttgccattcgttttagctcaacacaaaacaaatgcttcttgttcttcaggtcgccctgtgtttctttctcgccagtttgggccatggattctggtgtgcatttgttcaatatatcttagtatcttatttaacaatcagtacttctctgatgctcaagagatcaatttactcaaagtagcaaactgtatcatagttgtatactttatcaaacgaggaacctgatgcttgtagtataagcctcattttgttccaaacaagacaggcttcggatacaatcacctggaaatcaatcagtaaacttttgctattcagttttttaaataaaaaatttaggccttacgactttcctcgcaatgtgttcacatgtagattaccttattgcattgcctacttttgtccgttgtgtaaaccaatcttttatcatttatcaaatgattttgctcttaacattaacaaattatcgtttggtcatatgcaactaatgacatcacattaccaagattctggggacccatcgctaccttgtgtcaacagtagactgaccagatcagggaaacgctcggcggcgaagctaaagcagagcttgcgctacacgcgctgcgagcagtttctgtctaaagggcaaggtctgatctcatatttgagctccccgtggcactgctcgcccggccagccaccatcccggtcttgcgctcggcggcgtgcatgggaagagacgacgataacatggacactgttttctaaatggatcagtatttttggtatatacacatgcttttactagtagaggagtatttattttcatttgtagcagccaaggaacttgtgcattccttatgaatcatgagaagaccatgaagatgcacacaaatttgcttgacttctgaccagtaataattagcgaaagaaagaaaatccagaaccatgaatcagcttgatagcagtaacaaatttgcttgacttctgacgagtaagaaattggcagcaagttcagcaggggccagactaataaatcagcttgatagcatccttgcagcggtgccttggactttggcggttagaagagttgcggctctggataaactcgaagctgacctatccaagttcgacgacgggcccttcttcctaggccaattcagcttggcggatgtagcgtacattacgattctggaaagggttcagatatactattcccatcttaggaactacgacatcgccgaaggcaggcccaacctccaggaattcatcgaggagatgaacaagattgaagcgtatgcgcagaccaagaacgatcctctgttcttgcttgatcttgccaagaaccatcttaagattgcctgaagatgtgacaaagcagcattagtccgttgatcggtggaagaccactcgtcagtgttgagttgaatgtttgatcaataaaatacggcatgttgttgctgactttggacttgcaaagttcactactgataataacacccatgtttcaacaagagtaatgggtacttttgggtatttggcacctgagtatgcagcatctggcaagctcacagaaaaatccgatgtattttctttcggagtcatgcttcttgagcttattactgggcggcgaccaattgacacaacccaattggcactgcttgttataagcacatatgtacttccatttgcatgttgtataatactaataccaattgcaaaattatagttattttttctacccttgttagttaataagcatatttgtggtcaataggttgtattcttattcttgtaaccgtgttaattaatgttatggacttgtagtcttgtattaccttgtgaatatatctgtccctgcctgccatgtgaacgtgcttagcctggaatttgtgatatgtacatatatccatgtgtttgaaatctgtattgtatgtgatattccgtgttgcatgtgatattatgtacgtctaat

SEQ ID NO: 206027 - DNA, 3243 bp, Zea Mays
cccgcgcgcccaccgccgcgcgcagcaccgcgccgcccacccgcggccaccccagcgccccaaatgccgctccaaccctagcctctcgccatgcctttcgatctcgggcggccatgggaaactgatgccgctcgccggtcgccgtcgcgcgggaggacgtcagctcctcgcacttccccgcatccacctcgtcatggagctctgcgagggcggcgagttcttcgaccgcatcgtcgcgcgggggcactacaccgagcgcgccgccaccaatgtcactcgcaccatcgtcgaggtcgtccatttctgccatcggcacgacgtcatccaccgtgacctcaagccggagaacttccttttcgccaataagaaggagaactcgccgccgcgcagcgcccctctcgatatgccgccctgcttcctcctctcctcttgatccatctgccatcccatccccgctctgccagttgcccctcgcttcctcttcggctcttcatccccctcgatccgtcgcccgtgcttcctcctcactatgtcccgtcccctctccatcttgtcgccctgcctccccgcgtctgcgtctgcgcctgccttcggcgtccagagccatatccgcgttggcctccacctacgcacccgcctctagccataagagctcctcccgtgtctgcctttagagatctgctacctccacatcggtgtctagggctcctccattgcctagatctactagagtgagtgagcctacagagctggcctcatccaggctccagttccaccccacggtcatcctctgttgctctacgtttcatgcttctcacatcctctcctcaatctcatcaactgtgctgaaggaggcagatgaaagtatttccgtctcatcaactgtgctgaagaggaggaaaacacctcacttgttgaagggagcagtggagacccggaggaagatcatttggagtctgcagctactaatcttcagcctggcagtgacacttgcattgcaagggaagagttgccagatcagaaggatctggtgaaactgcaagctgttatccgtggacatctagaggcggcccatgcctcacggccaaagcagatcagatgagattttttggtcttgcgtggttctttttaatctactcacatgatacttcttattcattgccatccaatttaattaattgccctcgattgaattggttcctttgccattttacttaggaggataaaagaagacactaccttggcacatgcctgttgtcacaatggacaaaagaagattagtgttgtgtgagatttttttcattcctttgatctattgcatgctatttgtaccctaatcgacaaaatagatgagactcaattcaggagcaaatcaccagtcctgttcacagtccaattcactatggctaaaatatcaaacttatgctccttgaggtttgttttttccttatcttcctttaatatctgatgactgatggactggtgagttcatgatctgcttcatgcttttccttttatatatggtcactacctcactggttagttcatggtgctttttgtctacttctttgcccaaaaaaaatcccggggcgaatttcagcatgcttttcctgcttccgctgtgcaaattcacaggatgcgtgggaaatgtgttcttgtttcgtcgggtggtgttcttgccattcgttttagctcaacacaaaacaaatgcttcttgttcttcaggtcgccctgtgtttctttctcgccagtttgggccatggattctggtgtgcatttgttcaatatatcttagtatcttatttaacaatcagtacttctctgatgctcaagagatcaatttactcaaagtagcaaactgtatcatagttgtatactttatcaaacgaggaacctgatgcttgtagtataagcctcattttgttccaaacaagacaggcttcggatacaatcacctggaaatcaatcagtaaacttttgctattcagttttttaaataaaaaatttaggccttacgactttcctcgcaatgtgttcacatgtagattaccttattgcattgcctacttttgtccgttgtgtaaaccaatcttttatcatttatcaaatgattttgctcttaacattaacaaattatcgtttggtcatatgcaactaatgacatcacattaccaagattctggggacccatcgctaccttgtgtcaacagtagactgaccagatcagttttgttatgaaatcatggaactggcaacatgatagaatttttcaaggaaaaaaagggaaacgctcggcggcgaagctaaagcagagcttgcgctacacgcgctgcgagcagtttctgtctaaagggcaagttgcggctctggataaactcgaagctgacctatccaagttcgacgacgggcccttcttcctaggccaattcagcttggcggatgtagcgtacattacgattctggaaagggttcagatatactattcccatcttaggaactacgacatcgccgaaggcaggcccaacctccaggaattcatcgaggagatgaacaagattgaagcgtatgcgcagaccaagaacgatcctctgttcttgcttgatcttgccaagaaccatcttaagattgcctgaagatgtgacaaagcagcattagtccgttgatcggtggaagaccactcgtcagtgttgagttgaatgtttgatcaataaaatacggcatgttgttgctgactttggacttgcaaagttcactactgataataacacccatgtttcaacaagagtaatgggtacttttgggtatttggcacctgagtatgcagcatctggcaagctcacagaaaaatccgatgtattttctttcggagtcatgcttcttgagcttattactgggcggcgaccaattgacacaacccaattggcactgcttgttataagcacatatgtacttccatttgcatgttgtataatactaataccaattgcaaaattatagttattttttctacccttgttagttaataagcatatttgtggtcaataggttgtattcttattcttgtaaccgtgttaattaatgttatggacttgtagtcttgtattaccttgtgaatatatctgtccctgcctgccatgtgaacgtgcttagcctggaatttgtgatatgtacatatatccatgtgtttgaaatctgtattgtatgtgatattccgtgttgcatgtgatattatgtacgtctaat

SEQ ID NO: 206028 - DNA, 2982 bp, Zea Mays
ctttcaccagctctcactcttatccacccgcgcgcccaccgccgcgcgcagcaccgcgccgcccacccgcggccaccccagcgccccaaatgccgctccaaccctagcctctcgccatgcctttcgatctcgggcggccatgggaaactgatgccgctcgccggtcgccgtcgcgcgggaggacgtcagctcctcgcacttccccgcatccacctcgtcatggagctctgcgagggcggcgagttcttcgaccgcatcgtcgcgcgggggcactacaccgagcgcgccgccaccaatgtcactcgcaccatcgtcgaggtcgtccatttctgccatcggcacgacgtcatccaccgtgacctcaagccggagaacttccttttcgccaataagaaggagaactcgccgccgcgcagcgcccctctcgatatgccgccctgcttcctcctctcctcttgatccatctgccatcccatccccgctctgccagttgcccctcgcttcctcttcggctcttcatccccctcgatccgtcgcccgtgcttcctcctcactatgtcccgtcccctctccatcttgtcgccctgcctccccgcgtctgcgtctgcgcctgccttcggcgtccagagccatatccgcgttggcctccacctacgcacccgcctctagccataagagctcctcccgtgtctgcctttagagatctgctacctccacatcggtgtctagggctcctccattgcctagatctactagaatgaaagtatttccgtctcatcaactgtgctgaagaggaggaaaacacctcacttgttgaagggagcagtggagacccggaggaagatcatttggagtctgcagctactaatcttcagcctggcagtgacacttgcattgcaagggaagagttgccagatcagaaggatctggtgaaactgcaagctgttatccgtggacatctagaggcggcccatgcctcacggccaaagcagatcagttaggaggataaaagaagacactaccttggcacatgcctgttgtcacaatggacaaaagaagattagtgttgtgtgagatttttttcattcctttgatctattgcatgctatttgtaccctaatcgacaaaatagatgagactcaattcaggagcaaatcaccagtcctgttcacagtccaattcactatggctaaaatatcaaacttatgctccttgaggtttgttttttccttatcttcctttaatatctgatgactgatggactggtgagttcatgatctgcttcatgcttttccttttatatatggtcactacctcactggttagttcatggtgctttttgtctacttctttgcccaaaaaaaatcccggggcgaatttcagcatgcttttcctgcttccgctgtgcaaattcacaggatgcgtgggaaatgtgttcttgtttcgtcgggtggtgttcttgccattcgttttagctcaacacaaaacaaatgcttcttgttcttcaggtcgccctgtgtttctttctcgccagtttgggccatggattctggtgtgcatttgttcaatatatcttagtatcttatttaacaatcagtacttctctgatgctcaagagatcaatttactcaaagtagcaaactgtatcatagttgtatactttatcaaacgaggaacctgatgcttgtagtataagcctcattttgttccaaacaagacaggcttcggatacaatcacctggaaatcaatcagtaaacttttgctattcagttttttaaataaaaaatttaggccttacgactttcctcgcaatgtgttcacatgtagattaccttattgcattgcctacttttgtccgttgtgtaaaccaatcttttatcatttatcaaatgattttgctcttaacattaacaaattatcgtttggtcatatgcaactaatgacatcacattaccaagattctggggacccatcgctaccttgtgtcaacagtagactgaccagatcagggaaacgctcggcggcgaagctaaagcagagcttgcgctacacgcgctgcgagcagtttctgtctaaagggcaaggtctgatctcatttgcggctctggataaactcgaagctgacctatccaagttcgacgacgggcccttcttcctaggccaattcagcttggcggatgtagcgtacattacgattctggaaagggttcagatatactattcccatcttaggaactacgacatcgccgaaggcaggcccaacctccaggaattcatcgaggagatgaacaagattgaagcgtatgcgcagaccaagaacgatcctctgttcttgcttgatcttgccaagaaccatcttaagattgcctgaagatgtgacaaagcagcattagtccgttgatcggtggaagaccactcgtcagtgttgagttgaatgtttgatcaataaaatacggcatgttgttgctgactttggacttgcaaagttcactactgataataacacccatgtttcaacaagagtaatgggtacttttgggtatttggcacctgagtatgcagcatctggcaagctcacagaaaaatccgatgtattttctttcggagtcatgcttcttgagcttattactgggcggcgaccaattgacacaacccaattggcactgcttgttataagcacatatgtacttccatttgcatgttgtataatactaataccaattgcaaaattatagttattttttctacccttgttagttaataagcatatttgtggtcaataggttgtattcttattcttgtaaccgtgttaattaatgttatggacttgtagtcttgtattaccttgtgaatatatctgtccctgcctgccatgtgaacgtgcttagcctggaatttgtgatatgtacatatatccatgtgtttgaaatctgtattgtatgtgatattccgtgttgcatgtgatattatgtacgtctaat

SEQ ID NO: 206029 - DNA, 3919 bp, Zea Mays
ctttcaccagctctcactcttatccacccgcgcgcccaccgccgcgcgcagcaccgcgccgcccacccgcggccaccccagcgccccaaatgccgctccaaccctagcctctcgccatgcctttcgatctcgggcggccatgggaaactgatgccgctcgccggtcgccgtcgcgcgggaggacgtcagctcctcgcacttccccgcatccacctcgtcatggagctctgcgagggcggcgagttcttcgaccgcatcgtcgcgcgggggcactacaccgagcgcgccgccaccaatgtcactcgcaccatcgtcgaggtcgtccatttctgccatcggcacgacgtcatccaccgtgacctcaagccggagaacttccttttcgccaataagaaggagaactcgccgccgcgcagcgcccctctcgatatgccgccctgcttcctcctctcctcttgatccatctgccatcccatccccgctctgccagttgcccctcgcttcctcttcggctcttcatccccctcgatccgtcgcccgtgcttcctcctcactatgtcccgtcccctctccatcttgtcgccctgcctccccgcgtctgcgtctgcgcctgccttcggcgtccagagccatatccgcgttggcctccacctacgcacccgcctctagccataagagctcctcccgtgtctgcctttagagatctgctacctccacatcggtgtctagggctcctccattgcctagatctactagagtgagtgagcctacagagctggcctcatccaggctccagttccaccccacggtcatcctctgttgctctacgtttcatgcttctcacatcctctcctcaatctcatcaactgtgctgaaggaggcagatgaaagtatttccgtctcatcaactgtgctgaagaggaggaaaacacctcacttgttgaagggagcagtggagacccggaggaagatcatttggagtctgcagctactaatcttcagcctggcagtgacacttgcattgcaagggaagagttgccagatcagaaggatctggtgaaactgcaagctgttatccgtggacatctagaggcggcccatgcctcacggccaaagcagatcagttaggaggataaaagaagacactaccttggcacatgcctgttgtcacaatggacaaaagaagattagtgttgtgtgagatttttttcattcctttgatctattgcatgctatttgtaccctaatcgacaaaatagatgagactcaattcaggagcaaatcaccagtcctgttcacagtccaattcactatggctaaaatatcaaacttatgctccttgaggtttgttttttccttatcttcctttaatatctgatgactgatggactggtgagttcatgatctgcttcatgcttttccttttatatatggtcactacctcactggttagttcatggtgctttttgtctacttctttgcccaaaaaaaatcccggggcgaatttcagcatgcttttcctgcttccgctgtgcaaattcacaggatgcgtgggaaatgtgttcttgtttcgtcgggtggtgttcttgccattcgttttagctcaacacaaaacaaatgcttcttgttcttcaggtcgccctgtgtttctttctcgccagtttgggccatggattctggtgtgcatttgttcaatatatcttagtatcttatttaacaatcagtacttctctgatgctcaagagatcaatttactcaaagtagcaaactgtatcatagttgtatactttatcaaacgaggaacctgatgcttgtagtataagcctcattttgttccaaacaagacaggcttcggatacaatcacctggaaatcaatcagtaaacttttgctattcagttttttaaataaaaaatttaggccttacgactttcctcgcaatgtgttcacatgtagattaccttattgcattgcctacttttgtccgttgtgtaaaccaatcttttatcatttatcaaatgattttgctcttaacattaacaaattatcgtttggtcatatgcaactaatgacatcacattaccaagattctggggacccatcgctaccttgtgtcaacagtagactgaccagatcagtgtacactgtaatcaacagagctggttttctttaacagttttgttatgaaatcatggaactggcaacatgatagaatttttcaaggaaaaaaagggaaacgctcggcggcgaagctaaagcagagcttgcgctacacgcgctgcgagcagtttctgtctaaagggcaaggtctgatctcatatttgagctccccgtggcactgctcgcccggccagccaccatcccggtcttgcgctcggcggcgtgcatggtgtgctcgtccctgacagtggctagcttctgttttcttaattgatggctagcttctgttttcttaattgatgatttgttttttccttttctgatcgtcaatagggaagagacgacgataacatggacactgttttctaaatggatcagtatttttggtatatacacatgcttttactagtagaggagtatttattttcatttgtagcagccaaggaacttgtgcattccttatgaatcatgagaagaccatgaagatgcacacaaatttgcttgacttctgaccagtaataattagcgaaagaaagaaaatccagaaccatgaatcagcttgatagcagtaacaaatttgcttgacttctgacgagtaagaaattggcagcaagttcagcaggggccagactaataaatcagcttgatagcatccttgcagcggtgccttggactttggcggttagaagaggtttataattttatatgatgaaattatgtgcatcttcagttgtttttgcctcactgctctgtaaggacatataaaattggtatttgtactttctaaggttctccttggaatggtagagttttacagggaaccttccatcatcagttgctgacatagctcgaactcgacgtttcttcttcgccagttgcggctctggataaactcgaagctgacctatccaagttcgacgacgggcccttcttcctaggccaattcagcttggcggatgtagcgtacattacgattctggaaagggttcagatatactattcccatcttaggaactacgacatcgccgaaggcaggcccaacctccaggaattcatcgaggagatgaacaagattgaagcgtatgcgcagaccaagaacgatcctctgttcttgcttgatcttgccaagaaccatcttaagattgcctgaagatgtgacaaagcagcattagtccgttgatcggtggaagaccactcgtcagtgttgagttgaatgtttgatcaataaaatacggcatgttgttgctgactttggacttgcaaagttcactactgataataacacccatgtttcaacaagagtaatgggtacttttgggtatttggcacctgagtatgcagcatctggcaagctcacagaaaaatccgatgtattttctttcggagtcatgcttcttgagcttattactgggcggcgaccaattgacacaacccaattggcactgcttgttataagcacatatgtacttccatttgcatgttgtataatactaataccaattgcaaaattatagttattttttctacccttgttagttaataagcatatttgtggtcaataggttgtattcttattcttgtaaccgtgttaattaatgttatggacttgtagtcttgtattaccttgtgaatatatctgtccctgcctgccatgtgaacgtgcttagcctggaatttgtgatatgtacatatatccatgtgtttgaaatctgtattgtatgtgatattccgtgttgcatgtgatattatgtacgtctaat

SEQ ID NO: 206030 - DNA, 4069 bp, Zea Mays
acttaacccaaaatacctagatccctatcccgcgccgcgagtcactttcaccagctctcactcttatccacccgcgcgcccaccgccgcgcgcagcaccgcgccgcccacccgcggccaccccagcgccccaaatgccgctccaaccctagcctctcgccatgcctttcgatctcgggcggccatgggaaactgatgccgctcgccggtcgccgtcgcgcgggaggacgtcagctcctcgcacttccccgcatccacctcgtcatggagctctgcgagggcggcgagttcttcgaccgcatcgtcgcgcgggggcactacaccgagcgcgccgccaccaatgtcactcgcaccatcgtcgaggtcgtccatttctgccatcggcacgacgtcatccaccgtgacctcaagccggagaacttccttttcgccaataagaaggagaactcgccgccgcgcagcgcccctctcgatatgccgccctgcttcctcctctcctcttgatccatctgccatcccatccccgctctgccagttgcccctcgcttcctcttcggctcttcatccccctcgatccgtcgcccgtgcttcctcctcactatgtcccgtcccctctccatcttgtcgccctgcctccccgcgtctgcgtctgcgcctgccttcggcgtccagagccatatccgcgttggcctccacctacgcacccgcctctagccataagagctcctcccgtgtctgcctttagagatctgctacctccacatcggtgtctagggctcctccattgcctagatctactagagtgagtgagcctacagagctggcctcatccaggctccagttccaccccacggtcatcctctgttgctctacgtttcatgcttctcacatcctctcctcaatctcatcaactgtgctgaaggaggcagatgaaagtatttccgtctcatcaactgtgctgaagaggaggaaaacacctcacttgttgaagggagcagtggagacccggaggaagatcatttggagtctgcagctactaatcttcagcctggcagtgacacttgcattgcaagggaagagttgccagatcagaaggatctggtgaaactgcaagctgttatccgtggacatctagaggcggcccatgcctcacggccaaagcagatcagttaggaggataaaagaagacactaccttggcacatgcctgttgtcacaatggacaaaagaagattagtgttgtgtgagatttttttcattcctttgatctattgcatgctatttgtaccctaatcgacaaaatagatgagactcaattcaggagcaaatcaccagtcctgttcacagtccaattcactatggctaaaatatcaaacttatgctccttgaggtttgttttttccttatcttcctttaatatctgatgactgatggactggtgagttcatgatctgcttcatgcttttccttttatatatggtcactacctcactggttagttcatggtgctttttgtctacttctttgcccaaaaaaaatcccggggcgaatttcagcatgcttttcctgcttccgctgtgcaaattcacaggatgcgtgggaaatgtgttcttgtttcgtcgggtggtgttcttgccattcgttttagctcaacacaaaacaaatgcttcttgttcttcaggtcgccctgtgtttctttctcgccagtttgggccatggattctggtgtgcatttgttcaatatatcttagtatcttatttaacaatcagtacttctctgatgctcaagagatcaatttactcaaagtagcaaactgtatcatagttgtatactttatcaaacgaggaacctgatgcttgtagtataagcctcattttgttccaaacaagacaggcttcggatacaatcacctggaaatcaatcagtaaacttttgctattcagttttttaaataaaaaatttaggccttacgactttcctcgcaatgtgttcacatgtagattaccttattgcattgcctacttttgtccgttgtgtaaaccaatcttttatcatttatcaaatgattttgctcttaacattaacaaattatcgtttggtcatatgcaactaatgacatcacattaccaagattctggggacccatcgctaccttgtgtcaacagtagactgaccagatcaggtaccattttgaaacctgtgtacaatttcatttctcaataactggccgaacataaatagccaaggcatgggtttatgccaatactcataggttaaatgacactttggtcatatgcatagttgccaccctcaaatgcctatctcatgatagaagtaaatggtggtctaaatcaacaacgactttctataagtaccatgactattattcttgaacaaatgtgtgctcatggttctgagtagatattaccattgccattgttttatatggaagtccagtgccttgtcaatctttggtccacgagtaagtgttttggatattcatgttagtgtacactgtaatcaacagagctggttttctttaacagttttgttatgaaatcatggaactggcaacatgatagaatttttcaaggaaaaaaagggaaacgctcggcggcgaagctaaagcagagcttgcgctacacgcgctgcgagcagtttctgtctaaagggcaaggtctgatctcatatttgagctccccgtggcactgctcgcccggccagccaccatcccggtcttgcgctcggcggcgtgcatgggaagagacgacgataacatggacactgttttctaaatggatcagtatttttggtatatacacatgcttttactagtagaggagtatttattttcatttgtagcagccaaggaacttgtgcattccttatgaatcatgagaagaccatgaagatgcacacaaatttgcttgacttctgaccagtaataattagcgaaagaaagaaaatccagaaccatgaatcagcttgatagcagtaacaaatttgcttgacttctgacgagtaagaaattggcagcaagttcagcaggggccagactaataaatcagcttgatagcatccttgcagcggtgccttggactttggcggttagaagagagttttacagggaaccttccatcatcagttgctgacatagctcgaactcgacgtttcttcttcgccagttgcggctctggataaactcgaagctgacctatccaagttcgacgacgggcccttcttcctaggccaattcagcttggcggatgtagcgtacattacgattctggaaagggttcagatatactattcccatcttaggaactacgacatcgccgaaggcaggcccaacctccaggaattcatcgaggagatgaacaagattgaagcgtatgcgcagaccaagaacgatcctctgttcttgcttgatcttgccaagaaccatcttaagattgcctgaagatgtgacaaagcagcattagtccgttgatcggtggaagaccactcgtcagtgttgagttgaatgtttgatcaataaaatacggcatgttgttgctgactttggacttgcaaagttcactactgataataacacccatgtttcaacaagagtaatgggtacttttgggtatttggcacctgagtatgcagcatctggcaagctcacagaaaaatccgatgtattttctttcggagtcatgcttcttgagcttattactgggcggcgaccaattgacacaacccaattggcactgcttgttataagcacatatgtacttccatttgcatgttgtataatactaataccaattgcaaaattatagttattttttctacccttgttagttaataagcatatttgtggtcaataggttgtattcttattcttgtaaccgtgttaattaatgttatggacttgtagtcttgtattaccttgtgaatatatctgtccctgcctgccatgtgaacgtgcttagcctggaatttgtgatatgtacatatatccatgtgtttgaaatctgtattgtatgtgatattccgtgttgcatgtgatattatgtacgtctaat

SEQ ID NO: 206031 - DNA, 3941 bp, Zea Mays
acttaacccaaaatacctagatccctatcccgcgccgcgagtcactttcaccagctctcactcttatccacccgcgcgcccaccgccgcgcgcagcaccgcgccgcccacccgcggccaccccagcgccccaaatgccgctccaaccctagcctctcgccatgcctttcgatctcgggcggccatgggaaactgatgccgctcgccggtcgccgtcgcgcgggaggacgtcagctcctcgcacttccccgcatccacctcgtcatggagctctgcgagggcggcgagttcttcgaccgcatcgtcgcgcgggggcactacaccgagcgcgccgccaccaatgtcactcgcaccatcgtcgaggtcgtccatttctgccatcggcacgacgtcatccaccgtgacctcaagccggagaacttccttttcgccaataagaaggagaactcgccgccgcgcagcgcccctctcgatatgccgccctgcttcctcctctcctcttgatccatctgccatcccatccccgctctgccagttgcccctcgcttcctcttcggctcttcatccccctcgatccgtcgcccgtgcttcctcctcactatgtcccgtcccctctccatcttgtcgccctgcctccccgcgtctgcgtctgcgcctgccttcggcgtccagagccatatccgcgttggcctccacctacgcacccgcctctagccataagagctcctcccgtgtctgcctttagagatctgctacctccacatcggtgtctagggctcctccattgcctagatctactagagaggcagatgaaagtatttccgtctcatcaactgtgctgaagaggaggaaaacacctcacttgttgaagggagcagtggagacccggaggaagatcatttggagtctgcagctactaatcttcagcctggcagtgacacttgcattgcaagggaagagttgccagatcagaaggatctggtgaaactgcaagctgttatccgtggacatctagaggcggcccatgcctcacggccaaagcagatcagttaggaggataaaagaagacactaccttggcacatgcctgttgtcacaatggacaaaagaagattagtgttgtgtgagatttttttcattcctttgatctattgcatgctatttgtaccctaatcgacaaaatagatgagactcaattcaggagcaaatcaccagtcctgttcacagtccaattcactatggctaaaatatcaaacttatgctccttgaggtttgttttttccttatcttcctttaatatctgatgactgatggactggtgagttcatgatctgcttcatgcttttccttttatatatggtcactacctcactggttagttcatggtgctttttgtctacttctttgcccaaaaaaaatcccggggcgaatttcagcatgcttttcctgcttccgctgtgcaaattcacaggatgcgtgggaaatgtgttcttgtttcgtcgggtggtgttcttgccattcgttttagctcaacacaaaacaaatgcttcttgttcttcaggtcgccctgtgtttctttctcgccagtttgggccatggattctggtgtgcatttgttcaatatatcttagtatcttatttaacaatcagtacttctctgatgctcaagagatcaatttactcaaagtagcaaactgtatcatagttgtatactttatcaaacgaggaacctgatgcttgtagtataagcctcattttgttccaaacaagacaggcttcggatacaatcacctggaaatcaatcagtaaacttttgctattcagttttttaaataaaaaatttaggccttacgactttcctcgcaatgtgttcacatgtagattaccttattgcattgcctacttttgtccgttgtgtaaaccaatcttttatcatttatcaaatgattttgctcttaacattaacaaattatcgtttggtcatatgcaactaatgacatcacattaccaagattctggggacccatcgctaccttgtgtcaacagtagactgaccagatcaggtaccattttgaaacctgtgtacaatttcatttctcaataactggccgaacataaatagccaaggcatgggtttatgccaatactcataggttaaatgacactttggtcatatgcatagttgccaccctcaaatgcctatctcatgatagaagtaaatggtggtctaaatcaacaacgactttctataagtaccatgactattattcttgaacaaatgtgtgctcatggttctgagtagatattaccattgccattgttttatatggaagtccagtgccttgtcaatctttggtccacgagtaagtgttttggatattcatgttagtgtacactgtaatcaacagagctggttttctttaacagttttgttatgaaatcatggaactggcaacatgatagaatttttcaaggaaaaaaagggaaacgctcggcggcgaagctaaagcagagcttgcgctacacgcgctgcgagcagtttctgtctaaagggcaaggtctgatctcatatttgagctccccgtggcactgctcgcccggccagccaccatcccggtcttgcgctcggcggcgtgcatgggaagagacgacgataacatggacactgttttctaaatggatcagtatttttggtatatacacatgcttttactagtagaggagtatttattttcatttgtagcagccaaggaacttgtgcattccttatgaatcatgagaagaccatgaagatgcacacaaatttgcttgacttctgaccagtaataattagcgaaagaaagaaaatccagaaccatgaatcagcttgatagcagtaacaaatttgcttgacttctgacgagtaagaaattggcagcaagttcagcaggggccagactaataaatcagcttgatagcatccttgcagcggtgccttggactttggcggttagaagaggtttataattttatatgatgaaattatgtgcatcttcagttgtttttgcctcactgctctttgcggctctggataaactcgaagctgacctatccaagttcgacgacgggcccttcttcctaggccaattcagcttggcggatgtagcgtacattacgattctggaaagggttcagatatactattcccatcttaggaactacgacatcgccgaaggcaggcccaacctccaggaattcatcgaggagatgaacaagattgaagcgtatgcgcagaccaagaacgatcctctgttcttgcttgatcttgccaagaaccatcttaagattgcctgaagatgtgacaaagcagcattagtccgttgatcggtggaagaccactcgtcagtgttgagttgaatgtttgatcaataaaatacggcatgttgttgctgactttggacttgcaaagttcactactgataataacacccatgtttcaacaagagtaatgggtacttttgggtatttggcacctgagtatgcagcatctggcaagctcacagaaaaatccgatgtattttctttcggagtcatgcttcttgagcttattactgggcggcgaccaattgacacaacccaattggcactgcttgttataagcacatatgtacttccatttgcatgttgtataatactaataccaattgcaaaattatagttattttttctacccttgttagttaataagcatatttgtggtcaataggttgtattcttattcttgtaaccgtgttaattaatgttatggacttgtagtcttgtattaccttgtgaatatatctgtccctgcctgccatgtgaacgtgcttagcctggaatttgtgatatgtacatatatccatgtgtttgaaatctgtattgtatgtgatattccgtgttgcatgtgatattatgtacgtctaat

SEQ ID NO: 206032 - DNA, 4219 bp, Zea Mays
acttaacccaaaatacctagatccctatcccgcgccgcgagtcactttcaccagctctcactcttatccacccgcgcgcccaccgccgcgcgcagcaccgcgccgcccacccgcggccaccccagcgccccaaatgccgctccaaccctagcctctcgccatgcctttcgatctcgggcggccatgggaaactgatgccgctcgccggtcgccgtcgcgcgggaggacgtcagctcctcgcacttccccgcatccacctcgtcatggagctctgcgagggcggcgagttcttcgaccgcatcgtcgcgcgggggcactacaccgagcgcgccgccaccaatgtcactcgcaccatcgtcgaggtcgtccatttctgccatcggcacgacgtcatccaccgtgacctcaagccggagaacttccttttcgccaataagaaggagaactcgccgccgcgcagcgcccctctcgatatgccgccctgcttcctcctctcctcttgatccatctgccatcccatccccgctctgccagttgcccctcgcttcctcttcggctcttcatccccctcgatccgtcgcccgtgcttcctcctcactatgtcccgtcccctctccatcttgtcgccctgcctccccgcgtctgcgtctgcgcctgccttcggcgtccagagccatatccgcgttggcctccacctacgcacccgcctctagccataagagctcctcccgtgtctgcctttagagatctgctacctccacatcggtgtctagggctcctccattgcctagatctactagagtgagtgagcctacagagctggcctcatccaggctccagttccaccccacggtcatcctctgttgctctacgtttcatgcttctcacatcctctcctcaatctcatcaactgtgctgaaggaggcagatgaaagtatttccgtctcatcaactgtgctgaagaggaggaaaacacctcacttgttgaagggagcagtggagacccggaggaagatcatttggagtctgcagctactaatcttcagcctggcagtgacacttgcattgcaagggaagagttgccagatcagaaggatctggtgaaactgcaagctgttatccgtggacatctagaggcggcccatgcctcacggccaaagcagatcagatgagattttttggtcttgcgtggttctttttaatctactcacatgatacttcttattcattgccatccaatttaattaattgccctcgattgaattggttcctttgccattttacttaggaggataaaagaagacactaccttggcacatgcctgttgtcacaatggacaaaagaagattagtgttgtgtgagatttttttcattcctttgatctattgcatgctatttgtaccctaatcgacaaaatagatgagactcaattcaggagcaaatcaccagtcctgttcacagtccaattcactatggctaaaatatcaaacttatgctccttgaggtttgttttttccttatcttcctttaatatctgatgactgatggactggtgagttcatgatctgcttcatgcttttccttttatatatggtcactacctcactggttagttcatggtgctttttgtctacttctttgcccaaaaaaaatcccggggcgaatttcagcatgcttttcctgcttccgctgtgcaaattcacaggatgcgtgggaaatgtgttcttgtttcgtcgggtggtgttcttgccattcgttttagctcaacacaaaacaaatgcttcttgttcttcaggtcgccctgtgtttctttctcgccagtttgggccatggattctggtgtgcatttgttcaatatatcttagtatcttatttaacaatcagtacttctctgatgctcaagagatcaatttactcaaagtagcaaactgtatcatagttgtatactttatcaaacgaggaacctgatgcttgtagtataagcctcattttgttccaaacaagacaggcttcggatacaatcacctggaaatcaatcagtaaacttttgctattcagttttttaaataaaaaatttaggccttacgactttcctcgcaatgtgttcacatgtagattaccttattgcattgcctacttttgtccgttgtgtaaaccaatcttttatcatttatcaaatgattttgctcttaacattaacaaattatcgtttggtcatatgcaactaatgacatcacattaccaagattctggggacccatcgctaccttgtgtcaacagtagactgaccagatcaggtaccattttgaaacctgtgtacaatttcatttctcaataactggccgaacataaatagccaaggcatgggtttatgccaatactcataggttaaatgacactttggtcatatgcatagttgccaccctcaaatgcctatctcatgatagaagtaaatggtggtctaaatcaacaacgactttctataagtaccatgactattattcttgaacaaatgtgtgctcatggttctgagtagatattaccattgccattgttttatatggaagtccagtgccttgtcaatctttggtccacgagtaagtgttttggatattcatgttagtgtacactgtaatcaacagagctggttttctttaacagttttgttatgaaatcatggaactggcaacatgatagaatttttcaaggaaaaaaagggaaacgctcggcggcgaagctaaagcagagcttgcgctacacgcgctgcgagcagtttctgtctaaagggcaaggtctgatctcatttgagctccccgtggcactgctcgcccggccagccaccatcccggtcttgcgctcggcggcgtgcatggtgtgctcgtccctgacagtggctagcttctgttttcttaattgatggctagcttctgttttcttaattgatgatttgttttttccttttctgatcgtcaatagggaagagacgacgataacatggacactgttttctaaatggatcagtatttttggtatatacacatgcttttactagtagaggagtatttattttcatttgtagcagccaaggaacttgtgcattccttatgaatcatgagaagaccatgaagatgcacacaaatttgcttgacttctgaccagtaataattagcgaaagaaagaaaatccagaaccatgaatcagcttgatagcagtaacaaatttgcttgacttctgacgagtaagaaattggcagcaagttcagcaggggccagactaataaatcagcttgatagcatccttgcagcggtgccttggactttggcggttagaagagttgcggctctggataaactcgaagctgacctatccaagttcgacgacgggcccttcttcctaggccaattcagcttggcggatgtagcgtacattacgattctggaaagggttcagatatactattcccatcttaggaactacgacatcgccgaaggcaggcccaacctccaggaattcatcgaggagatgaacaagattgaagcgtatgcgcagaccaagaacgatcctctgttcttgcttgatcttgccaagaaccatcttaagattgcctgaagatgtgacaaagcagcattagtccgttgatcggtggaagaccactcgtcagtgttgagttgaatgtttgatcaataaaatacggcatgttgttgctgactttggacttgcaaagttcactactgataataacacccatgtttcaacaagagtaatgggtacttttgggtatttggcacctgagtatgcagcatctggcaagctcacagaaaaatccgatgtattttctttcggagtcatgcttcttgagcttattactgggcggcgaccaattgacacaacccaattggcactgcttgttataagcacatatgtacttccatttgcatgttgtataatactaataccaattgcaaaattatagttattttttctacccttgttagttaataagcatatttgtggtcaataggttgtattcttattcttgtaaccgtgttaattaatgttatggacttgtagtcttgtattaccttgtgaatatatctgtccctgcctgccatgtgaacgtgcttagcctggaatttgtgatatgtacatatatccatgtgtttgaaatctgtattgtatgtgatattccgtgttgcatgtgatattatgtacgtctaat

SEQ ID NO: 206033 - DNA, 3050 bp, Zea Mays
ctccgcacaggactccaaccgcctcgccgttgcatcgccgcgggcgtcaacctaggctgctgccggtaccggtgcgtccccagccatggctcggccgccgcaggaggcgatcgacaccttcgtcagcatcaccggcgccgacgaggtcaccgcagtccgcgtgctcgaggaacatggtcatgatctaaatgaagctgtgaatgcttattttaatgaaggagataggaccaccaccagaatcaatcagaatcctgtgcctgccactgccagttatgatgacatgatggagctggatgaaccacttgatcccatgttcaacagacctttgttccctagaactttgggcaacccttttgcccttttggatccaggttttgctgacataactgctggtgatatatttggacgtggaccccgagttacacaacctagggacgtgaggcagatacctattgaagttaaggacagcaatactcaaacaggcagttctggtcagggtcccattattgaggatgttactggacgtgaatctttctatggtccagaggtccatgggaccgttatagttgacgaagatgatgaagacttgccattaacactatctgctcaggatcctaagatcccaagcagtgctttgcacccaaaccatttcatgcctagtgcgcctccagtggttgatgttagtgaccataacaatgatatagaagaggagatgattaaggcagcaattgaagcttcaaaaagggaagctgacgggatgaaaaatgttctaagtagtggtcaatctgaaaacatgtcacgtggcagaggtgatcatgagcttgctcgggcggtttctttgtccttggagacagcagagcgagagagagctctgcgccaagagggaatgtatgtagcagatcactctcctgacttatctgataaagaaggcggtcaaggaggaagtgggataagcgaaaggtgaagtcacatttccaaatgggtagaacagtggtagtgtgtggattattacttatttataatcaattaatggctcaatttctgttcccctatcatttgtttttttgtatggtttcatttgcatggaagccatgcatcgtgtgggatatgatattgtttccctgtttgtgtgggtcacttctcatgcaatgttttagcgagcttttcctaacctttgcgaggactaactacaggagaagtgggaacttctgagcaaacagtagatgaagagaacttccaagaggacaatgaagatggtgaagaacaacctttagttaggactcgttctaggcgacttcgaggcagaactattgagccagcagaaactgttcaaagggctgacagcccgccctcaagtccccaacctcatgttcaaattggtcatcagcgtaatgtggggtttccttcagtagagtggggtggtatttcttctgaagagcgtgatgaagctcttatgcttgaggctgcaatgtttggtgggattcctgaaggagcaccatatccattttccttcccagcccatggcaggtcgactcactatcccctagtagcacgtcctccatcaccatcattaacggcacagcggttgttaagggagcagcaggatgatgagtatcttgctgctctccaagctgatcgagaaaaagagttgaaggctgtgcaggaggctgaacttcgcagggtagaggaagctgcagcaagagaggctgctcttgaacgtcaaaagaaagaagaggaggagaagctaaagaaacaacgtgaggaagaggagttggaatccaagcttgcagccaaacaagcatcactacctaaggagccactacaaaatgacgagggggctgtcacagtggtagtccgcatgcctgatggtagtcgtcgaggacggcgctttctcaaatctgacaggcttcagtatctttttgatttcatagacatcagccggactttcaaaccaggaacttatagactggcgaggtcttatcccaggcgtgccttcactgaattggagagccagatgtcactgagcgatctcggtctcactagcaagcaggaagctctgttcctagaaaaactgtctgcgtagagtacaaggttctggagttatggtcgagtagtatatgcacttataaaatcggtcatttagatcgtgcctggcgtgtgttcatgaaaatactgcagcggttgaatgattactgatctctagagatcccgtcgccatcttctgtgctctgaaacggaggtgtttcgatctgactgtgcagatgggcagttctacattcagatttcagaacaactgtagctcttgcggttttaagacttgagtatggtttactttggagatagtggtttagaccatccgtgttggtctcctgagcggtattcttacgtgatcacgtgtcaaaacgaacagaatcctttgttgcagtcattatagttaaccgtctcgctggaactcgcaacatgtatagcatggtcatgcatggtttggttttacttattttattattattatgctgatgatatagaccgcaagacagagtctgaatatcaaaagaagaagacgacgacgacgacaacgttggagctcgactgctctcactgtgaaatggaaacacttcttattcctctcccctcctgccatccattgcagcacgcgtgccaggtccctgcttcaagcggctcagttggcttgggcgaggtggcaccggccgggcaggctgttgatgatgcccatggtgctgcaggcgcactcgtgcgacacggcgctcagcgcgctgcagcagtccgcgctggggtccggcgcgccgggcaccaggtacgcgcggcacgccaggaggcggttcagctgcggcaggcactgcccgccggcctgcgccccggcgccgcgcagcaccgacgacgggccggtgccgccgccgaggaccagcaggacgaggcacgcggcgaggagtgcgcggggggcggtggctgcttctagcgccattgttgcctcgtcttgtgggggctggggctgcggctgctttctgctctgctggcttgctgtgtgggtg

SEQ ID NO: 206034 - DNA, 1885 bp, Zea Mays
ccaccacctcaactggacatggcgctggccgctcttctcgcgctgctgctcgcgctgtggcgcctggtgtggcggccgcacgccgtggcgcggtcgttcgccaggcagggcatccggggcccgccctacacgttcctggcagggtccttgccggaggcgaagcggctgctgatggccggccggagagggacggcgcccctggacgccggctgccacgacatcatgcccgtcctcttgccgcagtttcacagatgggtcgcggactatgggagaacgttgctgttctggatcgggccgattcccgctgtcttgtctactgatctacagctgattaagcaggttctgacagacaggacgggcctgtatcagaaggacttcatgatccccgtgctcaagttcctcttcggcaacggtgtcatattgataaacggagacgattggaagcggcaccgcaaagtggtcctccctgcgttcaaccatgagacgatcaagagcatgtcggcggtgacggcagaggtaacggagcagatgatgcagcaatggcgcggccagatacacggaagcgaagaggaatccgccgagatagacatgatccacgccttcaacgacctgacctccaaggtcaatggccgcgtcgccttcggcacgagccaccgggaagtcgaggaggtcattgtactgatgcgggagatgcagaagctcgccactgcggccacgctcgatgctccaatactctggtatctgccaactcggcgtaacctgcacgtccggcgtctgaacaaacagctgagaagcaagatcatgtccatcatgcaggcgcggctggccgccgacggagctgataggcgtggtgggcgcggcggcgccgtttccggcggaggcgacctacttgggctgttgctagaggcgtggacgccgcagccgcagcacgggaacggcggcgagacgctgacaaccgacgaggtgatcgacgagtgcaagaccttcttcgccgcggggcaggaaaccacagctacgctcctggtctgggccatgttcctgctcgccgtgcacccggaatggcaggacaaagtcagggaggaggtcgtcagggaattctgcaccagcgacgacggcgaggttccccatgccgatgtcctcgccaagctcaagctgctatacatggtgttgctggagacgtcgcggctctacccgccgatcgtgtacatacagcggagggctgcctgggacgccgtccttggaggcatcaaggtgccccagggcaccgtcatctccatccccattgccatgctgcaccgggacaagcaggtctggggccccgacgccgatgagttcaacccgatgaggttcgagcatggcctcacaaaggccgccaaggatcccaaggcgctgctgtctttctccctgggcccaagagtgtgcactggccagagcttcggcatcgtagaagtgcaggtcgtcatggcgatgatcctcaggaggttctccttctccctctccccaaagtatgttcacaagcccaagtatctcctgtccttgacacccaagcttgggatgcctctcatcgtcaggaatgtggatggctgagagggataatattgtaaaagctcgttttgtgtgtgaaaatgaatacatgactagtgtgtgacaaatggtactctctttgtgttactactgctgtaacaagcccgacagaagaaccatccaatgcaggcccacgaaggggatccagtctgcgccggcctagtactcggcttagggagtttgtgtgagttgtaattgagatataagggaatattgattagggaaaagacatcagacttgtaataagaattctggacagactgtcgctctgcctatctactctgccatctactcttcttcc

SEQ ID NO: 206035 - DNA, 2784 bp, Zea Mays
atggcggcacatcagcatggtacggccggccggggtggtggtggtggtagcatggagatcttcccctacagctacagcagcggccgcgacctggagctggtggacctgccggcggaaccggtggacgtgaagcgccaggactcgctctaccgcgacgccaccatgccggcgcaccacggccacaacggacaggagagctgggtccggacgctacggctggcgttccagtgcgtgggcatcctgtacgccgacctcggcacctcgccgctctacgtgtacgccaacaccttcaagtacggcgtccaccacgaggacgacgtcctcggcgtcctgtccatcatcatctacagcttcgtcctcttcaccatgatcaagatcgtcttcatcgccctctacgccaacgacgacggcgacggtggcacgttcgcgctctactcgctcatctcgcgctacgccaaggtgtgcctcatcccgaaccagcaggcggaagacgagctcgtgtcgaggtacaagcatcgcagcaagccgtcggcgacgcttcggagagcccagtggatgaaggacctgctggagaccagcaagactgcaaaggtctcgctcttcttcctcaccatcctcgccacggcgctcgccatcagcgactgcatgctaacccctccgatatcagctgtcaacggactcaagctgagagcaccgcatctgactacagatgagactgtgtggatcacagtgggcattctggtggttttcttcgcggtccagcgcttgggcaccgacaagatcggctacacgttcgcgccggtggtcttcgtgtggctcctcctcatctccggcatcgggctctacaacacggtcaagtacgacgtcagcacgctgaaggctttcaacgccaagtacatcgtcgactacttccgaaggaacaagaagaaagggtgggtttcgctgggtgaaatcctcctctgcttcacaggcactgaagctctcttcgctgacctgggatacttcagcatcagatctatacagctaagcttcaccttcggcttgttaccttcagtgatgctgacgtacattgggcaagcggcatacatgaggaaacacatagacacgcttgacatatccaacgttttcttccaatccattccaagatctttgttttggccaactttcgtcctggctctcatcacgtcggtcatcggaagccaagccatggtctcgtgtgccttcgcaaccatgtctcatctacaggcgctcaactgtttcccgagggttaagattctgcacacgtcaaggcgttactcaggccagctctacagccccgaagtgaacgtcttcctctgcattgccgcctgcgtcgtcaccgtaagcttcaggacgacaggtttcatagccaaagcacacgagatctgcgtggtcctcgtgatggtgatcacgacgctcctgatgacaatagtgatgctgctggtgtggaaggtgaacatctggtggatcgccgtgttcttcgccgtgttcatgtcgacggagtgcgtgtacacggccgcggtcctgtacaagttcacccacgggccgtacgtgccgctggccatgtcggccgtcctcatgttcgtcatggccgtgtggcactacgtgcacgtcaagcggtacaggcacgagctggagcgcaccgtgtcgcgggacgcggccagggacctgctggagcgcggggacctcaagagggtcccggggctgggcctcttctacaccgagctggtgcaggggatcccgcccatcttccctcacctcgtcggcaagatccccaccatccactccgtcgtcgtcttcatcaccgtgaagagcctgccggtgccccacgtccacgtcacggaccgcttcctcttccgccaggtcgagcccaaggagttcatggtgttccgttgcgtggcgaggtacgggtaccgcgacgcgctcgagacggccgctgatttcgtcagcgtcctcgtcgagtacctccagtactacgtcagggacctcaacctctacggggttgtcggtgatgagccgttcaagatcgtcttccacagtgctcgggtggacagcttttcttgggagaagcactcgtcgggacatgctgtctatgccgaggagatgctcacaccagcccagtccttctccgagctcacaatgcatccggtctccatgagcagtagactggcacatttccagacagggaaaatgaacctggaggagatgttgaagatcgaggaagatcaaaagatcatccaacgcgaggtggacaacggtgttgtttacataattggggagagtgaagtagtagccaagcctcattccaacttgttcaagaagattattgtcaactacgtctacagcttcctaaggaagaactcaaggaatggagagaagatgctatcaattccaagaggccaactgcttaaggttggaataacatatgagatctaaggtcgcacatagactatatatatatttgactagaacgatgtcttttccttccatgtggatatgtgattgtaattaatcttcgcaacgtgcatatatgaaaatcaatatatatttcaatgctggaaggattaagatcattaagagagggatgaattaggctagtacgtctaaaattgcttgcaattattaagttctactatttagtccatccccccctcccagatgctgagatgttttaggcctagtttgggtattctacaaatgtgggggggttgagattgagacagacataaaatgtctaagtaaaggaaaacgaggaaaggaagaaat

SEQ ID NO: 206036 - DNA, 3109 bp, Zea Mays
cagcaattatgtaggtaggtaggtaacaagcagaggtgaaagtcttttcgattttctagagcttctaacaaaaagctgggcagcagttcccaagcctagataggttgttggttggacgtacggttataaaaggaacctcgtagtgacatccgcagctggccgggaagcaacaagcagccaaacgctgtacgcgcactgctgctgcagtgctgcacagagtacgtaattctgcgggagtgaggagcaggggaggctcttgtttcgcgcagcagaggatcggaagcgaagacgacgccggcggcgcgcggccagggagatggcggcacatcagcatggtacggccggccggggtggtggtggtggtagcatggagatcttcccctacagctacagcagcggccgcgacctggagctggtggacctgccggcggaaccggtggacgtgaagcgccaggactcgctctaccgcgacgccaccatgccggcgcaccacggccacaacggacaggagagctgggtccggacgctacggctggcgttccagtgcgtgggcatcctgtacgccgacctcggcacctcgccgctctacgtgtacgccaacaccttcaagtacggcgtccaccacgaggacgacgtcctcggcgtcctgtccatcatcatctacagcttcgtcctcttcaccatgatcaagatcgtcttcatcgccctctacgccaacgacgacggcgacggtggcacgttcgcgctctactcgctcatctcgcgctacgccaaggtgtgcctcatcccgaaccagcaggcggaagacgagctcgtgtcgaggtacaagcatcgcagcaagccgtcggcgacgcttcggagagcccagtggatgaaggacctgctggagaccagcaagactgcaaaggtctcgctcttcttcctcaccatcctcgccacggcgctcgccatcagcgactgcatgctaacccctccgatatcagtactcgcagctgtcaacggactcaagctgagagcaccgcatctgactacagatgagactgtgtggatcacagtgggcattctggtggttttcttcgcggtccagcgcttgggcaccgacaagatcggctacacgttcgcgccggtggtcttcgtgtggctcctcctcatctccggcatcgggctctacaacacggtcaagtacgacgtcagcacgctgaaggctttcaacgccaagtacatcgtcgactacttccgaaggaacaagaagaaagggtgggtttcgctgggtgaaatcctcctctgcttcacaggcactgaagctctcttcgctgacctgggatacttcagcatcagatctatacagctaagcttcaccttcggcttgttaccttcagtgatgctgacgtacattgggcaagcggcatacatgaggaaacacatagacacgcttgacatatccaacgttttcttccaatccattccaagatctttgttttggccaactttcgtcctggctctcatcacgtcggtcatcggaagccaagccatggtctcgtgtgccttcgcaaccatgtctcatctacaggcgctcaactgtttcccgagggttaagattctgcacacgtcaaggcgttactcaggccagctctacagccccgaagtgaacgtcttcctctgcattgccgcctgcgtcgtcaccgtaagcttcaggacgacaggtttcatagccaaagcacacgagatctgcgtggtcctcgtgatggtgatcacgacgctcctgatgacaatagtgatgctgctggtgtggaaggtgaacatctggtggatcgccgtgttcttcgccgtgttcatgtcgacggagtgcgtgtacacggccgcggtcctgtacaagttcacccacgggccgtacgtgccgctggccatgtcggccgtcctcatgttcgtcatggccgtgtggcactacgtgcacgtcaagcggtacaggcacgagctggagcgcaccgtgtcgcgggacgcggccagggacctgctggagcgcggggacctcaagagggtcccggggctgggcctcttctacaccgagctggtgcaggggatcccgcccatcttccctcacctcgtcggcaagatccccaccatccactccgtcgtcgtcttcatcaccgtgaagagcctgccggtgccccacgtccacgtcacggaccgcttcctcttccgccaggtcgagcccaaggagttcatggtgttccgttgcgtggcgaggtacgggtaccgcgacgcgctcgagacggccgctgatttcgtcagcgtcctcgtcgagtacctccagtactacgtcagggacctcaacctctacggggttgtcggtgatgagccgttcaagatcgtcttccacagtgctcgggtggacagcttttcttgggagaagcactcgtcgggacatgctgtctatgccgaggagatgctcacaccagcccagtccttctccgagctcacaatgcatccggtctccatgagcagtagactggcacatttccagacagggaaaatgaacctggaggagatgttgaagatcgaggaagatcaaaagatcatccaacgcgaggtggacaacggtgttgtttacataattggggagagtgaagtagtagccaagcctcattccaacttgttcaagaagattattgtcaactacgtctacagcttcctaaggaagaactcaaggaatggagagaagatgctatcaattccaagaggccaactgcttaaggttggaataacatatgagatctaaggtcgcacatagactatatatatatttgactagaacgatgtcttttccttccatgtggatatgtgattgtaattaatcttcgcaacgtgcatatatgaaaatcaatatatatttcaatgctggaaggattaagatcattaagagagggatgaattaggctagtacgtctaaaattgcttgcaattattaagttctactatttagtccatccccccctcccagatgctgagatgttttaggcctagtttgggtattctacaaatgtgggggggttgagattgagacagacataaaatgtctaagtaaaggaaaacgaggaaaggaagaaat

SEQ ID NO: 206037 - DNA, 5425 bp, Zea Mays
ttctatatttctcccgtacatacaatcctgtcctctgtcctctgctctcctccgaggaagacacataccacaccaccgatgtccgatgcgacgagggagcacataataaaaaaacaataagacaataaaattaaataaaattataaacagagaaaaggacaacgtgaaataccctaggccgtgatcttggcggctgcggcgcgtcggcgatcggcgggggtcgccccgcggccgacgacgtcatgctggggcggcgcggggagatggggtacgaggaaggggagctcgagctggaggagggcgaggcggcctccggcggcggccgtgagctggttattcccgacgcgctcacctgcatcgatgaaagaatccaaaatgtgttgggtcatttacgcaagaaatttgaaggtgaaataactcatatgaatttgggttcgatgtatggatgccatggttcgttcttgccaacatacccacgttcccctttgggctttcctcaatataggaacactgcagatccaaaaaaccatggcagtgcctcgagatccctgcatgtattaacagagaatgcgcaaaagaaccattttgttaagacggaattagacagcagcaggaaaaatgaatactgtcgaatatccaatgagagtgatggcaatcaacagatgttaaacagagcagtcattgggtctgagcagaaagcacgaaaaatacgtatcaagttgaacagcaataaaagtttgccaagaaatactgctgctatatatagtggcctgggcctagatatttccccttcatcatctgcagaagacaacctagatgagactgctggggctctggtgcctgaagttttgcctgatgaatctccacgtgccatacttgagataatgaccagccattatattcctggaggacacttgctctcacccctcaaggaaaatgttctagaattgaaacaaaagcctaaagtgatggtaaaacaagaagcacctgaatttcaagtcaaagtagaattgcatggagactggggctgtacaacctctgctactctggataacaaagataagtgtaccaaggaaatcaagtctgatgaaaagaaagacaagatccccattttcaggagttcaaaaatcagagttaacaaaccatctgctgtgaataagggaactaagcctttacaggatgttttagatgataccggttcaaacttgttgcctacaattgtaaatacagaacatacagttgaggagccagcgaaatttacaggtgcaatttcagataaaatgaagggatcgaaggatggtgcatcaaaaggacacattagtggcaagaacaaaaacattaaggaggaaccttcgcttgatcatggattttctcgtaaaaacagatgtgattctgatgagtacaatggtaaacctcatgccagttcatgtcagttgcaaaacattcccaacaaaacttcgccactggagagggacaaagggaaagtattgcatatggaagatgaaccatctcagtacaaaagcaaggaaaatggagacctgtttagtgcagattccatggctgtcatggtaggaaatgttgatagaaattctttagggatgatgaaagggaagaagaaagtttcttctttgcaagccaccctgtctgggaagttcaagttcaaggcaaaaaaacaattgaatgacaacattgatagaaaaaaatatggtgaagacgagcattatgctttagaccatagaattggtttggataattcatatcaaatagataagagtgtgaggcttgagaaaaagaccatctcatctggggagattgataacaagtcagatgttggaaatgatggtggtgtcaatatctctgccatgtttgatgagaaatcagatgttttgccattagcatctgcatccctgcctgctccagaacccattttaataaatgaacaatgggtgtgctgcgacaagtgtgagaattggcgccttttaccctatgggatgaatccagatatacttcccaaaaaatggcggtgtagcatgcagagttggctgcctggaatgaatagctgcaaaataactgaagacgagaccacaaaagcccttcgggcactttatatggttcctgcacctgaaaataacattaaggatggtggtcatgataatgctatgtcaggcaaaggtacagctattgctccaacttttcagggaaatacacagtccatcagttcactggggaagctaaaaggttcccttgatggagccaatgtggcaaatactttggagtcagctggtatgtcaaagccctcaaagaatctgcatgctccttcaagtagaaacttctctaaactgaaggaaaaaaggaagctggtggaatcatcagataaaggagaaattgttggaaaagaccaatcacgtcgaatgagaagcagtgtaggggttgatcatgataacctgcgagcatcaaagaaaatgaagaaagaatccaatggccctgtgatgaagcatcaaccctctgagtttgaaataagcaaaagtagtcctgccagtgagactctgaaaaacattcagaagcgcagttgcatttctcctggcatgggaaagtatggtttatcttcatcaggtaaacattctcatggtgaggataaagatttctcagctgtggtcattaaaacatcagatacagagaactctggccctcgagactcatccattaagaagagaaaactgaaacaaaggcagtcaagccagcattttcgggatccacactgtagcaacaatgacacaaatggtattacaaaacaaaatattactgaaattaatgctgtgaagaaaaaatccaggtcagaattgaatttgttaaagacagataggatagctactgattctagaggcacagttggtggagttgatgataggatatctactgataaggagtgtttaagtgagcaacttcaagaaaatacccatttccagcatccgtcactcgtagaaggcaccacaaagagggaaatccgtcatgcacaaacacctatagctgcgacttcgagttcatccaagatgtctaactccaacaagtatatagctcattttcaggaaacgagggcctctcctgtagagtcagtttcttcctcacccttgagatcttctgataagaatcctttgggtcgacatagaagctcttcatggacaattacagaaaatgtgcattctcaagagtcagggaagataaattcttcatgctcgaacagaaactatgatcttgggtctgattgtgataaagctaaggctcgtatttctggttgctttaacggagatgtgagtcatcatgttcagaaggatagggactttctgaaagataaacaagatgtgatgaacgcatgtcttataaacaaaggttctggatttggtgctagaaatttccagctgagtcctgaacataaagtcaatccagatgtcctttcatcacatgacaacgatggtcacaagcaaccaacagttcgtcagaatgggaaaacacagccccatttcggttcaaaccaaggtgaccatgcaaatttgacttatgggcatattaagcctggtaaagggaatataccaaataaggaccagaaaacaaatccatctgcagtcaaagcaagcaagcagcagccatccttaaacaatgcatcaaatggtgatgcctcttacaaggcaaggcaaatagaaaaggctgttattgaaaatttggacacgaggaagcacatcactctcaatggtgatgcttcaaatctaacaagtgcatctgttctactgaaggaagctcgagatttgaagcacttgtctaaacgtcttaaggaaaaaggggatgactttgagagtacaagcatgtgctttgaggcgggtctgaaatttctccatgttgcttctctgtgggagaccccaaacattgatagctccaatcaaggggtttctatacaagctatgaaactgtattccgaaacaggaatcctctttggattctgcgctcacgaatttgagcgactcaagaaaatggcgaatgctgctctggcatataaatgtgtggaagtggcatatatgaaggctgctttctttagaagtcctggtgtaattaaagatagacatgcattgcatgcagcatctttgatggttgctccagctgagtctccatcatcttccgcttcagacatcgataatttaaataaccagagcacagttgctaaggctgtttctgcaagaggtgtatactctcctcagattgctagcaattccatatctcggaacaatcatcatttgatgggattgctttcttatgcagaggacacaaataattcatttgagggaaccagaaaatcacaaacttcattttcagcttatctttctggcattgggaagaatcaggtggatgaagttgctcttgtaaggaaagtacttgatttcagttttcataatgtcaagggattgctgcaactgattcgtcattcgttggagtctatcaaccatgaaagtggtaaatgatctaccaagtataggtatcttggaaaagagattaatgatgggaaggttgctttggcaactgtgctatacattggtacctcctccaatctggatgtagaagtaaacaagtttagagagtaatcagttgtgaatggaaagggttcacattgccttctcttggttgcatggaagtattatatgtgggtgatacaaatttcaccagcggcaaactgctaaaacgggtttctttaccaagtcatattgctacttttgttgcccggaatatttcttgtagatgatgactttgactagtgccgaactggcaaagggggttcttaccaagaattagcctgcaaatgttaattgctaagtccaacattcttggtttcagtgtctagtgaatgatcaaatccaagtcctcaatgggaatctaatatacatctaccatagtgttcgagggcagagtctcagttttctttccagggcgccagtgtaagcttaggtcagcacttttgtcctaaagtctccccaccttctattggccttgcggagaaggttctgacagttttggaggtgcttcaggatttagcagtctaatattttacaaatttgcggaggttcagtgaggattgtctgactccaatgatagcgatgtaaaagcccttgctgctgtgctgacgaaagaggattcctttccaatgttacacgatgagtccggttgatttgtgtaacatgttctcgtctccgtccagactgaaaaggcagtggctcgttgagctgtacggcatgaagccttctttccgattttaatactagttctgggtgtactgctccaaagagtagcatctctttgcagtaaaaatggtttgttctgttcaagtatgtgagagaacaagaatgcattgagtgtttttttttctccatcgattggtttgggc

SEQ ID NO: 206038 - DNA, 5499 bp, Zea Mays
ttctatatttctcccgtacatacaatcctgtcctctgtcctctgctctcctccgaggaagacacataccacaccaccgatgtccgatgcgacgagggagcacataataaaaaaacaataagacaataaaattaaataaaattataaacagagaaaaggacaacgtgaaataccctaggccgtgatcttggcggctgcggcgcgtcggcgatcggcgggggtcgccccgcggccgacgacgtcatgctggggcggcgcggggagatggggtacgaggaaggggagctcgagctggaggagggcgaggcggcctccggcggcggccgtgagctggttattcccgacgcgctcacctgcatcgatgaaagaatccaaaatgtgttgggtcatttacgcaagaaatttgaaggtgaaataactcatatgaatttgggttcgatgtatggatgccatggttcgttcttgccaacatacccacgttcccctttgggctttcctcaatataggaacactgcagatccaaaaaaccatggcagtgcctcgagatccctgcatgtattaacagagaatgcgcaaaagaaccattttgttaagacggaattagacagcagcaggaaaaatgaatactgtcgaatatccaatgagagtgatggcaatcaacagatgttaaacagagcagtcattgggtctgagcagaaagcacgaaaaatacgtatcaagttgaacagcaataaaagtttgccaagaaatactgctgctatatatagtggcctgggcctagatatttccccttcatcatctgcagaagacaacctagatgagactgctggggctctggtgcctgaagttttgcctgatgaatctccacgtgccatacttgagataatgaccagccattatattcctggaggacacttgctctcacccctcaaggaaaatgttctagaattgaaacaaaagcctaaagtgatggtaaaacaagaagcacctgaatttcaagtcaaagtagaattgcatggagactggggctgtacaacctctgctactctggataacaaagataagtgtaccaaggaaatcaagtctgatgaaaagaaagacaagatccccattttcaggagttcaaaaatcagagttaacaaaccatctgctgtgaataagggaactaagcctttacaggatgttttagatgataccggttcaaacttgttgcctacaattgtaaatacagaacatacagttgaggagccagcgaaatttacaggtgcaatttcagataaaatgaagggatcgaaggatggtgcatcaaaaggacacattagtggcaagaacaaaaacattaaggaggaaccttcgcttgatcatggattttctcgtaaaaacagatgtgattctgatgagtacaatggtaaacctcatgccagttcatgtcagttgcaaaacattcccaacaaaacttcgccactggagagggacaaagggaaagtattgcatatggaagatgaaccatctcagtacaaaagcaaggaaaatggagacctgtttagtgcagattccatggctgtcatggtaggaaatgttgatagaaattctttagggatgatgaaagggaagaagaaagtttcttctttgcaagccaccctgtctgggaagttcaagttcaaggcaaaaaaacaattgaatgacaacattgatagaaaaaaatatggtgaagacgagcattatgctttagaccatagaattggtttggataattcatatcaaatagataagagtgtgaggcttgagaaaaagaccatctcatctggggagattgataacaagtcagatgttggaaatgatggtggtgtcaatatctctgccatgtttgatgagaaatcagatgttttgccattagcatctgcatccctgcctgctccagaacccattttaataaatgaacaatgggtgtgctgcgacaagtgtgagaattggcgccttttaccctatgggatgaatccagatatacttcccaaaaaatggcggtgtagcatgcagagttggctgcctggaatgaatagctgcaaaataactgaagacgagaccacaaaagcccttcgggcactttatatggttcctgcacctgaaaataacattaaggatggtggtcatgataatgctatgtcaggcaaaggtacagctattgctccaacttttcagggaaatacacagtccatcagttcactggggaagctaaaaggttcccttgatggagccaatgtggcaaatactttggagtcagctggtatgtcaaagccctcaaagaatctgcatgctccttcaagtagaaacttctctaaactgaaggaaaaaaggaagctggtggaatcatcagataaaggagaaattgttggaaaagaccaatcacgtcgaatgagaagcagtgtaggggttgatcatgataacctgcgagcatcaaagaaaatgaagaaagaatccaatggccctgtgatgaagcatcaaccctctgagtttgaaataagcaaaagtagtcctgccagtgagactctgaaaaacattcagaagcgcagttgcatttctcctggcatgggaaagtatggtttatcttcatcaggtaaacattctcatggtgaggataaagatttctcagctgtggtcattaaaacatcagatacagagaactctggccctcgagactcatccattaagaagagaaaactgaaacaaaggcagtcaagccagcattttcgggatccacactgtagcaacaatgacacaaatggtattacaaaacaaaatattactgaaattaatgctgtgaagaaaaaatccaggtcagaattgaatttgttaaagacagataggatagctactgattctagaggcacagttggtggagttgatgataggatatctactgataaggagtgtttaagtgagcaacttcaagaaaatacccatttccagcatccgtcactcgtagaaggcaccacaaagagggaaatccgtcatgcacaaacacctatagctgcgacttcgagttcatccaagatgtctaactccaacaagtatatagctcattttcaggaaacgagggcctctcctgtagagtcagtttcttcctcacccttgagatcttctgataagaatcctttgggtcgacatagaagctcttcatggacaattacagaaaatgtgcattctcaagagtcagggaagataaattcttcatgctcgaacagaaactatgatcttgggtctgattgtgataaagctaaggctcgtatttctggttgctttaacggagatgtgagtcatcatgttcagaaggatagggactttctgaaagataaacaagatgtgatgaacgcatgtcttataaacaaaggttctggatttggtgctagaaatttccagctgagtcctgaacataaagtcaatccagatgtcctttcatcacatgacaacgatggtcacaagcaaccaacagttcgtcagaatgggaaaacacagccccatttcggttcaaaccaaggtgaccatgcaaatttgacttatgggcatattaagcctggtaaagggaatataccaaataaggaccagaaaacaaatccatctgcagtcaaagcaagcaagcagcagccatccttaaacaatgcatcaaatggtgatgcctcttacaaggcaaggcaaatagaaaaggctgttattgaaaatttggacacgaggaagcacatcactctcaatggtgatgcttcaaatctaacaagtgcatctgttctactgaaggaagctcgagatttgaagcacttgtctaaacgtcttaaggaaaaaggggatgactttgagagtacaagcatgtgctttgaggcgggtctgaaatttctccatgttgcttctctgtgggagaccccaaacattgatagctccaatcaaggggtttctatacaagctatgaaactgtattccgaaacaggaatcctctttggattctgcgctcacgaatttgagcgactcaagaaaatggcgaatgctgctctggcatataaatgtgtggaagtggcatatatgaaggctgctttctttagaagtcctggtgtaattaaagatagacatgcattgcatgcagcatctttgatggttgctccagctgagtctccatcatcttccgcttcagacatcgataatttaaataaccagagcacagttgctaaggctgtttctgcaagaggtgtatactctcctcagattgctagcaattccatatctcggaacaatcatcatttgatgggattgctttcttatgcagaggacacaaataattcatttgagggaaccagaaaatcacaaacttcattttcagcttatctttctggcattgggaagaatcaggtggatgaagttgctcttgtaaggaaagtacttgatttcagttttcataatgtcaagggattgctgcaactgattcgtcattcgttggagtctatcaaccatgaaagtggtaaatgatctaccaagtataggtatcttggaaaagagattaatgatgggaaggttgctttggcaactgtgctatacattggtacctcctccaatctggatgtagaagtaaacaagtttagagagtaatcagttgtgaatggaaagggttcacattgccttctcttggttgcatggaagtattatatgtgggtgatacaaatttcaccagcggcaaactgctaaaacgggtttctttaccaagtcatattgctacttttgttgcccggaatatttcttgtagatgatgactttgactagtgccgaactggcaaagggggttcttaccaagaattagcctgcaaatgttaattgctaagtccaacattcttggtttcagtgtctagtgaatgatcaaatccaagtcctcaatgggaatctaatatacatctaccatagtgttcgagggcagagtctcagttttctttccagggcgccagtgtaagcttaggtcagcacttttgtcctaaagtctccccaccttctattggccttgcggagaaggttctgacagttttggaggtgcttcaggatttagcagtctaatattttacaaatttgcggaggttcagtgaggattgtctgactccaatgatagatgatgacactatctgctgcctatctgagtgttgtttgggttcctgactgagcattaccattgtaacgagaaagcgatgtaaaagcccttgctgctgtgctgacgaaagaggattcctttccaatgttacacgatgagtccggttgatttgtgtaacatgttctcgtctccgtccagactgaaaaggcagtggctcgttgagctgtacggcatgaagccttctttccgattttaatactagttctgggtgtactgctccaaagagtagcatctctttgcagtaaaaatggtttgttctgttcaagtatgtgagagaacaagaatgcattgagtgtttttttttctccatcgattggtttgggc

SEQ ID NO: 206039 - DNA, 5770 bp, Zea Mays
ttctatatttctcccgtacatacaatcctgtcctctgtcctctgctctcctccgaggaagacacataccacaccaccgatgtccgatgcgacgagggagcacataataaaaaaacaataagacaataaaattaaataaaattataaacagagaaaaggacaacgtgaaataccctaggccgtgatcttggcggctgcggcgcgtcggcgatcggcgggggtcgccccgcggccgacgacgtcatgctggggcggcgcggggagatggggtacgaggaaggggagctcgagctggaggagggcgaggcggcctccggcggcggccgtgagctggttattcccgacgcgctcacctgcatcgatgaaagaatccaaaatgtgttgggtcatttacgcaagaaatttgaaggtgaaataactcatatgaatttgggttcgatgtatggatgccatggttcgttcttgccaacatacccacgttcccctttgggctttcctcaatataggaacactgcagatccaaaaaaccatggcagtgcctcgagatccctgcatgtattaacagagaatgcgcaaaagaaccattttgttaagacggaattagacagcagcaggaaaaatgaatactgtcgaatatccaatgagagtgatggcaatcaacagatgttaaacagagcagtcattgggtctgagcagaaagcacgaaaaatacgtatcaagttgaacagcaataaaagtttgccaagaaatactgctgctatatatagtggcctgggcctagatatttccccttcatcatctgcagaagacaacctagatgagactgctggggctctggtgcctgaagttttgcctgatgaatctccacgtgccatacttgagataatgaccagccattatattcctggaggacacttgctctcacccctcaaggaaaatgttctagaattgaaacaaaagcctaaagtgatggtaaaacaagaagcacctgaatttcaagtcaaagtagaattgcatggagactggggctgtacaacctctgctactctggataacaaagataagtgtaccaaggaaatcaagtctgatgaaaagaaagacaagatccccattttcaggagttcaaaaatcagagttaacaaaccatctgctgtgaataagggaactaagcctttacaggatgttttagatgataccggttcaaacttgttgcctacaattgtaaatacagaacatacagttgaggagccagcgaaatttacaggtgcaatttcagataaaatgaagggatcgaaggatggtgcatcaaaaggacacattagtggcaagaacaaaaacattaaggaggaaccttcgcttgatcatggattttctcgtaaaaacagatgtgattctgatgagtacaatggtaaacctcatgccagttcatgtcagttgcaaaacattcccaacaaaacttcgccactggagagggacaaagggaaagtattgcatatggaagatgaaccatctcagtacaaaagcaaggaaaatggagacctgtttagtgcagattccatggctgtcatggtaggaaatgttgatagaaattctttagggatgatgaaagggaagaagaaagtttcttctttgcaagccaccctgtctgggaagttcaagttcaaggcaaaaaaacaattgaatgacaacattgatagaaaaaaatatggtgaagacgagcattatgctttagaccatagaattggtttggataattcatatcaaatagataagagtgtgaggcttgagaaaaagaccatctcatctggggagattgataacaagtcagatgttggaaatgatggtggtgtcaatatctctgccatgtttgatgagaaatcagatgttttgccattagcatctgcatccctgcctgctccagaacccattttaataaatgaacaatgggtgtgctgcgacaagtgtgagaattggcgccttttaccctatgggatgaatccagatatacttcccaaaaaatggcggtgtagcatgcagagttggctgcctggaatgaatagctgcaaaataactgaagacgagaccacaaaagcccttcgggcactttatatggttcctgcacctgaaaataacattaaggatggtggtcatgataatgctatgtcaggcaaaggtacagctattgctccaacttttcagggaaatacacagtccatcagttcactggggaagctaaaaggttcccttgatggagccaatgtggcaaatactttggagtcagctggtatgtcaaagccctcaaagaatctgcatgctccttcaagtagaaacttctctaaactgaaggaaaaaaggaagctggtggaatcatcagataaaggagaaattgttggaaaagaccaatcacgtcgaatgagaagcagtgtaggggttgatcatgataacctgcgagcatcaaagaaaatgaagaaagaatccaatggccctgtgatgaagcatcaaccctctgagtttgaaataagcaaaagtagtcctgccagtgagactctgaaaaacattcagaagcgcagttgcatttctcctggcatgggaaagtatggtttatcttcatcaggtaaacattctcatggtgaggataaagatttctcagctgtggtcattaaaacatcagatacagagaactctggccctcgagactcatccattaagaagagaaaactgaaacaaaggcagtcaagccagcattttcgggatccacactgtagcaacaatgacacaaatggtattacaaaacaaaatattactgaaattaatgctgtgaagaaaaaatccaggtcagaattgaatttgttaaagacagataggatagctactgattctagaggcacagttggtggagttgatgataggatatctactgataaggagtgtttaagtgagcaacttcaagaaaatacccatttccagcatccgtcactcgtagaaggcaccacaaagagggaaatccgtcatgcacaaacacctatagctgcgacttcgagttcatccaagatgtctaactccaacaagtatatagctcattttcaggaaacgagggcctctcctgtagagtcagtttcttcctcacccttgagatcttctgataagaatcctttgggtcgacatagaagctcttcatggacaattacagaaaatgtgcattctcaagagtcagggaagataaattcttcatgctcgaacagaaactatgatcttgggtctgattgtgataaagctaaggctcgtatttctggttgctttaacggagatgtgagtcatcatgttcagaaggatagggactttctgaaagataaacaagatgtgatgaacgcatgtcttataaacaaaggttctggatttggtgctagaaatttccagctgagtcctgaacataaagtcaatccagatgtcctttcatcacatgacaacgatggtcacaagcaaccaacagttcgtcagaatgggaaaacacagccccatttcggttcaaaccaaggtgaccatgcaaatttgacttatgggcatattaagcctggtaaagggaatataccaaataaggaccagaaaacaaatccatctgcagtcaaagcaagcaagcagcagccatccttaaacaatgcatcaaatggtgatgcctcttacaaggcaaggcaaatagaaaaggctgttattgaaaatttggacacgaggaagcacatcactctcaatggtgatgcttcaaatctaacaagtgcatctgttctactgaaggaagctcgagatttgaagcacttgtctaaacgtcttaaggaaaaaggggatgactttgagagtacaagcatgtgctttgaggcgggtctgaaatttctccatgttgcttctctgtgggagaccccaaacattgatagctccaatcaaggggtttctatacaagctatgaaactgtattccgaaacaggaatcctctttggattctgcgctcacgaatttgagcgactcaagaaaatggcgaatgctgctctggcatataaatgtgtggaagtggcatatatgaaggctgctttctttagaagtcctggtgtaattaaagatagacatgcattgcatgcagcatctttgatggttgctccagctgagtctccatcatcttccgcttcagacatcgataatttaaataaccagagcacagttgctaaggctgtttctgcaagaggtgtatactctcctcagattgctagcaattccatatctcggaacaatcatcatttgatgggattgctttcttatgcagaggacacaaataattcatttgagggaaccagaaaatcacaaacttcattttcagcttatctttctggcattgggaagaatcaggtggatgaagttgctcttgtaaggaaagtacttgatttcagttttcataatgtcaagggattgctgcaactgattcgtcattcgttggagtctatcaaccatgaaagtggtaaatgatctaccaagtataggtatcttggaaaagagattaatgatgggaaggttgctttggcaactgtgctatacattggtacctcctccaatctggatgtagaagtaaacaagtttagagagtaatcagttgtgaatggaaagggttcacattgccttctcttggttgcatggaagtattatatgtgggtgatacaaatttcaccagcggcaaactgctaaaacgggtttctttaccaagtcatattgctacttttgttgcccggaatatttcttgtagatgatgactttgactagtgccgaactggcaaagggggttcttaccaagaattagcctgcaaatgttaattgctaagtccaacattcttggtttcagtgtctagtgaatgatcaaatccaagtcctcaatgggaatctaatatacatctaccatagtgttcgagggcagagtctcagttttctttccagggcgccagtgtaagcttaggtcagcacttttgtcctaaagtctccccaccttctattggccttgcggagaaggttctgacaggcaagactccaccaattgcttcagtctaatattttacaaatttgcggaggttcagtgaggattgtctgactccaatgataggtgtgtatataggccaactttttagttaattcctgccctttttctcgatacatgtgtgtatattatacgagaaaaggaagaaaacaattttgtcataattttagctaatggttgtaattattgttcagatgttgcaaaattcattctttggtggcctggaaaaaactagtctagccctaaaacttcatcattgtttaggcaccttataactataaatattcttagcgtttgattcattttttccttttggggctgacctaacaacaaatgttagatgatgacactatctgctgcctatctgagtgttgtttgggttcctgactgagcattaccattgtaacgagaaagcgatgtaaaagcccttgctgctgtgctgacgaaagaggattcctttccaatgttacacgatgagtccggttgatttgtgtaacatgttctcgtctccgtccagactgaaaaggcagtggctcgttgagctgtacggcatgaagccttctttccgattttaatactagttctgggtgtactgctccaaagagtagcatctctttgcagtaaaaatggtttgttctgttcaagtatgtgagagaacaagaatgcattgagtgtttttttttctccatcgattggtttgggc

SEQ ID NO: 206040 - DNA, 5645 bp, Zea Mays
ttctatatttctcccgtacatacaatcctgtcctctgtcctctgctctcctccgaggaagacacataccacaccaccgatgtccgatgcgacgagggagcacataataaaaaaacaataagacaataaaattaaataaaattataaacagagaaaaggacaacgtgaaataccctaggccgtgatcttggcggctgcggcgcgtcggcgatcggcgggggtcgccccgcggccgacgacgtcatgctggggcggcgcggggagatggggtacgaggaaggggagctcgagctggaggagggcgaggcggcctccggcggcggccgtgagctggttattcccgacgcgctcacctgcatcgatgaaagaatccaaaatgtgttgggtcatttacgcaagaaatttgaaggtgaaataactcatatgaatttgggttcgatgtatggatgccatggttcgttcttgccaacatacccacgttcccctttgggctttcctcaatataggaacactgcagatccaaaaaaccatggcagtgcctcgagatccctgcatgtattaacagagaatgcgcaaaagaaccattttgttaagacggaattagacagcagcaggaaaaatgaatactgtcgaatatccaatgagagtgatggcaatcaacagatgttaaacagagcagtcattgggtctgagcagaaagcacgaaaaatacgtatcaagttgaacagcaataaaagtttgccaagaaatactgctgctatatatagtggcctgggcctagatatttccccttcatcatctgcagaagacaacctagatgagactgctggggctctggtgcctgaagttttgcctgatgaatctccacgtgccatacttgagataatgaccagccattatattcctggaggacacttgctctcacccctcaaggaaaatgttctagaattgaaacaaaagcctaaagtgatggtaaaacaagaagcacctgaatttcaagtcaaagtagaattgcatggagactggggctgtacaacctctgctactctggataacaaagataagtgtaccaaggaaatcaagtctgatgaaaagaaagacaagatccccattttcaggagttcaaaaatcagagttaacaaaccatctgctgtgaataagggaactaagcctttacaggatgttttagatgataccggttcaaacttgttgcctacaattgtaaatacagaacatacagttgaggagccagcgaaatttacaggtgcaatttcagataaaatgaagggatcgaaggatggtgcatcaaaaggacacattagtggcaagaacaaaaacattaaggaggaaccttcgcttgatcatggattttctcgtaaaaacagatgtgattctgatgagtacaatggtaaacctcatgccagttcatgtcagttgcaaaacattcccaacaaaacttcgccactggagagggacaaagggaaagtattgcatatggaagatgaaccatctcagtacaaaagcaaggaaaatggagacctgtttagtgcagattccatggctgtcatggtaggaaatgttgatagaaattctttagggatgatgaaagggaagaagaaagtttcttctttgcaagccaccctgtctgggaagttcaagttcaaggcaaaaaaacaattgaatgacaacattgatagaaaaaaatatggtgaagacgagcattatgctttagaccatagaattggtttggataattcatatcaaatagataagagtgtgaggcttgagaaaaagaccatctcatctggggagattgataacaagtcagatgttggaaatgatggtggtgtcaatatctctgccatgtttgatgagaaatcagatgttttgccattagcatctgcatccctgcctgctccagaacccattttaataaatgaacaatgggtgtgctgcgacaagtgtgagaattggcgccttttaccctatgggatgaatccagatatacttcccaaaaaatggcggtgtagcatgcagagttggctgcctggaatgaatagctgcaaaataactgaagacgagaccacaaaagcccttcgggcactttatatggttcctgcacctgaaaataacattaaggatggtggtcatgataatgctatgtcaggcaaaggtacagctattgctccaacttttcagggaaatacacagtccatcagttcactggggaagctaaaaggttcccttgatggagccaatgtggcaaatactttggagtcagctggtatgtcaaagccctcaaagaatctgcatgctccttcaagtagaaacttctctaaactgaaggaaaaaaggaagctggtggaatcatcagataaaggagaaattgttggaaaagaccaatcacgtcgaatgagaagcagtgtaggggttgatcatgataacctgcgagcatcaaagaaaatgaagaaagaatccaatggccctgtgatgaagcatcaaccctctgagtttgaaataagcaaaagtagtcctgccagtgagactctgaaaaacattcagaagcgcagttgcatttctcctggcatgggaaagtatggtttatcttcatcaggtaaacattctcatggtgaggataaagatttctcagctgtggtcattaaaacatcagatacagagaactctggccctcgagactcatccattaagaagagaaaactgaaacaaaggcagtcaagccagcattttcgggatccacactgtagcaacaatgacacaaatggtattacaaaacaaaatattactgaaattaatgctgtgaagaaaaaatccaggtcagaattgaatttgttaaagacagataggatagctactgattctagaggcacagttggtggagttgatgataggatatctactgataaggagtgtttaagtgagcaacttcaagaaaatacccatttccagcatccgtcactcgtagaaggcaccacaaagagggaaatccgtcatgcacaaacacctatagctgcgacttcgagttcatccaagatgtctaactccaacaagtatatagctcattttcaggaaacgagggcctctcctgtagagtcagtttcttcctcacccttgagatcttctgataagaatcctttgggtcgacatagaagctcttcatggacaattacagaaaatgtgcattctcaagagtcagggaagataaattcttcatgctcgaacagaaactatgatcttgggtctgattgtgataaagctaaggctcgtatttctggttgctttaacggagatgtgagtcatcatgttcagaaggatagggactttctgaaagataaacaagatgtgatgaacgcatgtcttataaacaaaggttctggatttggtgctagaaatttccagctgagtcctgaacataaagtcaatccagatgtcctttcatcacatgacaacgatggtcacaagcaaccaacagttcgtcagaatgggaaaacacagccccatttcggttcaaaccaaggtgaccatgcaaatttgacttatgggcatattaagcctggtaaagggaatataccaaataaggaccagaaaacaaatccatctgcagtcaaagcaagcaagcagcagccatccttaaacaatgcatcaaatggtgatgcctcttacaaggcaaggcaaatagaaaaggctgttattgaaaatttggacacgaggaagcacatcactctcaatggtgatgcttcaaatctaacaagtgcatctgttctactgaaggaagctcgagatttgaagcacttgtctaaacgtcttaaggaaaaaggggatgactttgagagtacaagcatgtgctttgaggcgggtctgaaatttctccatgttgcttctctgtgggagaccccaaacattgatagctccaatcaaggggtttctatacaagctatgaaactgtattccgaaacaggaatcctctttggattctgcgctcacgaatttgagcgactcaagaaaatggcgaatgctgctctggcatataaatgtgtggaagtggcatatatgaaggctgctttctttagaagtcctggtgtaattaaagatagacatgcattgcatgcagcatctttgatggttgctccagctgagtctccatcatcttccgcttcagacatcgataatttaaataaccagagcacagttgctaaggctgtttctgcaagaggtgtatactctcctcagattgctagcaattccatatctcggaacaatcatcatttgatgggattgctttcttatgcagaggacacaaataattcatttgagggaaccagaaaatcacaaacttcattttcagcttatctttctggcattgggaagaatcaggtggatgaagttgctcttgtaaggaaagtacttgatttcagttttcataatgtcaagggattgctgcaactgattcgtcattcgttggagtctatcaaccatgaaagtggtaaatgatctaccaagtataggtatcttggaaaagagattaatgatgggaaggttgctttggcaactgtgctatacattggtacctcctccaatctggatgtagaagtaaacaagtttagagagtaatcagttgtgaatggaaagggttcacattgccttctcttggttgcatggaagtattatatgtgggtgatacaaatttcaccagcggcaaactgctaaaacgggtttctttaccaagtcatattgctacttttgttgcccggaatatttcttgtagatgatgactttgactagtgccgaactggcaaagggggttcttaccaagaattagcctgcaaatgttaattgctaagtccaacattcttggtttcagtgtctagtgaatgatcaaatccaagtcctcaatgggaatctaatatacatctaccatagtgttcgagggcagagtctcagttttctttccagggcgccagtgtaagcttaggtcagcacttttgtcctaaagtctccccaccttctattggccttgcggagaaggttctgacagttttggaggtgcttcaggatttagcagtctaatattttacaaatttgcggaggttcagtgaggattgtctgactccaatgatagatgttgcaaaattcattctttggtggcctggaaaaaactagtctagccctaaaacttcatcattgtttaggcaccttataactataaatattcttagcgtttgattcattttttccttttggggctgacctaacaacaaatgttagatgatgacactatctgctgcctatctgagtgttgtttgggttcctgactgagcattaccattgtaacgagaaagcgatgtaaaagcccttgctgctgtgctgacgaaagaggattcctttccaatgttacacgatgagtccggttgatttgtgtaacatgttctcgtctccgtccagactgaaaaggcagtggctcgttgagctgtacggcatgaagccttctttccgattttaatactagttctgggtgtactgctccaaagagtagcatctctttgcagtaaaaatggtttgttctgttcaagtatgtgagagaacaagaatgcattgagtgtttttttttctccatcgattggtttgggc

SEQ ID NO: 206041 - DNA, 5739 bp, Zea Mays
ttctatatttctcccgtacatacaatcctgtcctctgtcctctgctctcctccgaggaagacacataccacaccaccgatgtccgatgcgacgagggagcacataataaaaaaacaataagacaataaaattaaataaaattataaacagagaaaaggacaacgtgaaataccctaggccgtgatcttggcggctgcggcgcgtcggcgatcggcgggggtcgccccgcggccgacgacgtcatgctggggcggcgcggggagatggggtacgaggaaggggagctcgagctggaggagggcgaggcggcctccggcggcggccgtgagctggttattcccgacgcgctcacctgcatcgatgaaagaatccaaaatgtgttgggtcatttacgcaagaaatttgaaggtgaaataactcatatgaatttgggttcgatgtatggatgccatggttcgttcttgccaacatacccacgttcccctttgggctttcctcaatataggaacactgcagatccaaaaaaccatggcagtgcctcgagatccctgcatgtattaacagagaatgcgcaaaagaaccattttgttaagacggaattagacagcagcaggaaaaatgaatactgtcgaatatccaatgagagtgatggcaatcaacagatgttaaacagagcagtcattgggtctgagcagaaagcacgaaaaatacgtatcaagttgaacagcaataaaagtttgccaagaaatactgctgctatatatagtggcctgggcctagatatttccccttcatcatctgcagaagacaacctagatgagactgctggggctctggtgcctgaagttttgcctgatgaatctccacgtgccatacttgagataatgaccagccattatattcctggaggacacttgctctcacccctcaaggaaaatgttctagaattgaaacaaaagcctaaagtgatggtaaaacaagaagcacctgaatttcaagtcaaagtagaattgcatggagactggggctgtacaacctctgctactctggataacaaagataagtgtaccaaggaaatcaagtctgatgaaaagaaagacaagatccccattttcaggagttcaaaaatcagagttaacaaaccatctgctgtgaataagggaactaagcctttacaggatgttttagatgataccggttcaaacttgttgcctacaattgtaaatacagaacatacagttgaggagccagcgaaatttacaggtgcaatttcagataaaatgaagggatcgaaggatggtgcatcaaaaggacacattagtggcaagaacaaaaacattaaggaggaaccttcgcttgatcatggattttctcgtaaaaacagatgtgattctgatgagtacaatggtaaacctcatgccagttcatgtcagttgcaaaacattcccaacaaaacttcgccactggagagggacaaagggaaagtattgcatatggaagatgaaccatctcagtacaaaagcaaggaaaatggagacctgtttagtgcagattccatggctgtcatggtaggaaatgttgatagaaattctttagggatgatgaaagggaagaagaaagtttcttctttgcaagccaccctgtctgggaagttcaagttcaaggcaaaaaaacaattgaatgacaacattgatagaaaaaaatatggtgaagacgagcattatgctttagaccatagaattggtttggataattcatatcaaatagataagagtgtgaggcttgagaaaaagaccatctcatctggggagattgataacaagtcagatgttggaaatgatggtggtgtcaatatctctgccatgtttgatgagaaatcagatgttttgccattagcatctgcatccctgcctgctccagaacccattttaataaatgaacaatgggtgtgctgcgacaagtgtgagaattggcgccttttaccctatgggatgaatccagatatacttcccaaaaaatggcggtgtagcatgcagagttggctgcctggaatgaatagctgcaaaataactgaagacgagaccacaaaagcccttcgggcactttatatggttcctgcacctgaaaataacattaaggatggtggtcatgataatgctatgtcaggcaaaggtacagctattgctccaacttttcagggaaatacacagtccatcagttcactggggaagctaaaaggttcccttgatggagccaatgtggcaaatactttggagtcagctggtatgtcaaagccctcaaagaatctgcatgctccttcaagtagaaacttctctaaactgaaggaaaaaaggaagctggtggaatcatcagataaaggagaaattgttggaaaagaccaatcacgtcgaatgagaagcagtgtaggggttgatcatgataacctgcgagcatcaaagaaaatgaagaaagaatccaatggccctgtgatgaagcatcaaccctctgagtttgaaataagcaaaagtagtcctgccagtgagactctgaaaaacattcagaagcgcagttgcatttctcctggcatgggaaagtatggtttatcttcatcaggtaaacattctcatggtgaggataaagatttctcagctgtggtcattaaaacatcagatacagagaactctggccctcgagactcatccattaagaagagaaaactgaaacaaaggcagtcaagccagcattttcgggatccacactgtagcaacaatgacacaaatggtattacaaaacaaaatattactgaaattaatgctgtgaagaaaaaatccaggtcagaattgaatttgttaaagacagataggatagctactgattctagaggcacagttggtggagttgatgataggatatctactgataaggagtgtttaagtgagcaacttcaagaaaatacccatttccagcatccgtcactcgtagaaggcaccacaaagagggaaatccgtcatgcacaaacacctatagctgcgacttcgagttcatccaagatgtctaactccaacaagtatatagctcattttcaggaaacgagggcctctcctgtagagtcagtttcttcctcacccttgagatcttctgataagaatcctttgggtcgacatagaagctcttcatggacaattacagaaaatgtgcattctcaagagtcagggaagataaattcttcatgctcgaacagaaactatgatcttgggtctgattgtgataaagctaaggctcgtatttctggttgctttaacggagatgtgagtcatcatgttcagaaggatagggactttctgaaagataaacaagatgtgatgaacgcatgtcttataaacaaaggttctggatttggtgctagaaatttccagctgagtcctgaacataaagtcaatccagatgtcctttcatcacatgacaacgatggtcacaagcaaccaacagttcgtcagaatgggaaaacacagccccatttcggttcaaaccaaggtgaccatgcaaatttgacttatgggcatattaagcctggtaaagggaatataccaaataaggaccagaaaacaaatccatctgcagtcaaagcaagcaagcagcagccatccttaaacaatgcatcaaatggtgatgcctcttacaaggcaaggcaaatagaaaaggctgttattgaaaatttggacacgaggaagcacatcactctcaatggtgatgcttcaaatctaacaagtgcatctgttctactgaaggaagctcgagatttgaagcacttgtctaaacgtcttaaggaaaaaggggatgactttgagagtacaagcatgtgctttgaggcgggtctgaaatttctccatgttgcttctctgtgggagaccccaaacattgatagctccaatcaaggggtttctatacaagctatgaaactgtattccgaaacaggaatcctctttggattctgcgctcacgaatttgagcgactcaagaaaatggcgaatgctgctctggcatataaatgtgtggaagtggcatatatgaaggctgctttctttagaagtcctggtgtaattaaagatagacatgcattgcatgcagcatctttgatggttgctccagctgagtctccatcatcttccgcttcagacatcgataatttaaataaccagagcacagttgctaaggctgtttctgcaagaggtgtatactctcctcagattgctagcaattccatatctcggaacaatcatcatttgatgggattgctttcttatgcagaggacacaaataattcatttgagggaaccagaaaatcacaaacttcattttcagcttatctttctggcattgggaagaatcaggtggatgaagttgctcttgtaaggaaagtacttgatttcagttttcataatgtcaagggattgctgcaactgattcgtcattcgttggagtctatcaaccatgaaagtggtaaatgatctaccaagtataggtatcttggaaaagagattaatgatgggaaggttgctttggcaactgtgctatacattggtacctcctccaatctggatgtagaagtaaacaagtttagagagtaatcagttgtgaatggaaagggttcacattgccttctcttggttgcatggaagtattatatgtgggtgatacaaatttcaccagcggcaaactgctaaaacgggtttctttaccaagtcatattgctacttttgttgcccggaatatttcttgtagatgatgactttgactagtgccgaactggcaaagggggttcttaccaagaattagcctgcaaatgttaattgctaagtccaacattcttggtttcagtgtctagtgaatgatcaaatccaagtcttcgagggcagagtctcagttttctttccagggcgccagtgtaagcttaggtcagcacttttgtcctaaagtctccccaccttctattggccttgcggagaaggttctgacagttttggaggtgcttcaggatttagcagtctaatattttacaaatttgcggaggttcagtgaggattgtctgactccaatgataggtgtgtatataggccaactttttagttaattcctgccctttttctcgatacatgtgtgtatattatacgagaaaaggaagaaaacaattttgtcataattttagctaatggttgtaattattgttcagatgttgcaaaattcattctttggtggcctggaaaaaactagtctagccctaaaacttcatcattgtttaggcaccttataactataaatattcttagcgtttgattcattttttccttttggggctgacctaacaacaaatgttagatgatgacactatctgctgcctatctgagtgttgtttgggttcctgactgagcattaccattgtaacgagaaagcgatgtaaaagcccttgctgctgtgctgacgaaagaggattcctttccaatgttacacgatgagtccggttgatttgtgtaacatgttctcgtctccgtccagactgaaaaggcagtggctcgttgagctgtacggcatgaagccttctttccgattttaatactagttctgggtgtactgctccaaagagtagcatctctttgcagtaaaaatggtttgttctgttcaagtatgtgagagaacaagaatgcattgagtgtttttttttctccatcgattggtttgggc

SEQ ID NO: 206042 - DNA, 5317 bp, Zea Mays
ttctatatttctcccgtacatacaatcctgtcctctgtcctctgctctcctccgaggaagacacataccacaccaccgatgtccgatgcgacgagggagcacataataaaaaaacaataagacaataaaattaaataaaattataaacagagaaaaggacaacgtgaaataccctaggccgtgatcttggcggctgcggcgcgtcggcgatcggcgggggtcgccccgcggccgacgacgtcatgctggggcggcgcggggagatggggtacgaggaaggggagctcgagctggaggagggcgaggcggcctccggcggcggccgtgagctggttattcccgacgcgctcacctgcatcgatgaaagaatccaaaatgtgttgggtcatttacgcaagaaatttgaaggtgaaataactcatatgaatttgggttcgatgtatggatgccatggttcgttcttgccaacatacccacgttcccctttgggctttcctcaatataggaacactgcagatccaaaaaaccatggcagtgcctcgagatccctgcatgtattaacagagaatgcgcaaaagaaccattttgttaagacggaattagacagcagcaggaaaaatgaatactgtcgaatatccaatgagagtgatggcaatcaacagatgttaaacagagcagtcattgggtctgagcagaaagcacgaaaaatacgtatcaagttgaacagcaataaaagtttgccaagaaatactgctgctatatatagtggcctgggcctagatatttccccttcatcatctgcagaagacaacctagatgagactgctggggctctggtgcctgaagttttgcctgatgaatctccacgtgccatacttgagataatgaccagccattatattcctggaggacacttgctctcacccctcaaggaaaatgttctagaattgaaacaaaagcctaaagtgatggtaaaacaagaagcacctgaatttcaagtcaaagtagaattgcatggagactggggctgtacaacctctgctactctggataacaaagataagtgtaccaaggaaatcaagtctgatgaaaagaaagacaagatccccattttcaggagttcaaaaatcagagttaacaaaccatctgctgtgaataagggaactaagcctttacaggatgttttagatgataccggttcaaacttgttgcctacaattgtaaatacagaacatacagttgaggagccagcgaaatttacaggtgcaatttcagataaaatgaagggatcgaaggatggtgcatcaaaaggacacattagtggcaagaacaaaaacattaaggaggaaccttcgcttgatcatggattttctcgtaaaaacagatgtgattctgatgagtacaatggtaaacctcatgccagttcatgtcagttgcaaaacattcccaacaaaacttcgccactggagagggacaaagggaaagtattgcatatggaagatgaaccatctcagtacaaaagcaaggaaaatggagacctgtttagtgcagattccatggctgtcatggtaggaaatgttgatagaaattctttagggatgatgaaagggaagaagaaagtttcttctttgcaagccaccctgtctgggaagttcaagttcaaggcaaaaaaacaattgaatgacaacattgatagaaaaaaatatggtgaagacgagcattatgctttagaccatagaattggtttggataattcatatcaaatagataagagtgtgaggcttgagaaaaagaccatctcatctggggagattgataacaagtcagatgttggaaatgatggtggtgtcaatatctctgccatgtttgatgagaaatcagatgttttgccattagcatctgcatccctgcctgctccagaacccattttaataaatgaacaatgggtgtgctgcgacaagtgtgagaattggcgccttttaccctatgggatgaatccagatatacttcccaaaaaatggcggtgtagcatgcagagttggctgcctggaatgaatagctgcaaaataactgaagacgagaccacaaaagcccttcgggcactttatatggttcctgcacctgaaaataacattaaggatggtggtcatgataatgctatgtcaggcaaaggtacagctattgctccaacttttcagggaaatacacagtccatcagttcactggggaagctaaaaggttcccttgatggagccaatgtggcaaatactttggagtcagctggtatgtcaaagccctcaaagaatctgcatgctccttcaagtagaaacttctctaaactgaaggaaaaaaggaagctggtggaatcatcagataaaggagaaattgttggaaaagaccaatcacgtcgaatgagaagcagtgtaggggttgatcatgataacctgcgagcatcaaagaaaatgaagaaagaatccaatggccctgtgatgaagcatcaaccctctgagtttgaaataagcaaaagtagtcctgccagtgagactctgaaaaacattcagaagcgcagttgcatttctcctggcatgggaaagtatggtttatcttcatcaggtaaacattctcatggtgaggataaagatttctcagctgtggtcattaaaacatcagatacagagaactctggccctcgagactcatccattaagaagagaaaactgaaacaaaggcagtcaagccagcattttcgggatccacactgtagcaacaatgacacaaatggtattacaaaacaaaatattactgaaattaatgctgtgaagaaaaaatccaggtcagaattgaatttgttaaagacagataggatagctactgattctagaggcacagttggtggagttgatgataggatatctactgataaggagtgtttaagtgagcaacttcaagaaaatacccatttccagcatccgtcactcgtagaaggcaccacaaagagggaaatccgtcatgcacaaacacctatagctgcgacttcgagttcatccaagatgtctaactccaacaagtatatagctcattttcaggaaacgagggcctctcctgtagagtcagtttcttcctcacccttgagatcttctgataagaatcctttgggtcgacatagaagctcttcatggacaattacagaaaatgtgcattctcaagagtcagggaagataaattcttcatgctcgaacagaaactatgatcttgggtctgattgtgataaagctaaggctcgtatttctggttgctttaacggagatgtgagtcatcatgttcagaaggatagggactttctgaaagataaacaagatgtgatgaacgcatgtcttataaacaaaggttctggatttggtgctagaaatttccagctgagtcctgaacataaagtcaatccagatgtcctttcatcacatgacaacgatggtcacaagcaaccaacagttcgtcagaatgggaaaacacagccccatttcggttcaaaccaaggtgaccatgcaaatttgacttatgggcatattaagcctggtaaagggaatataccaaataaggaccagaaaacaaatccatctgcagtcaaagcaagcaagcagcagccatccttaaacaatgcatcaaatggtgatgcctcttacaaggcaaggcaaatagaaaaggctgttattgaaaatttggacacgaggaagcacatcactctcaatggtgatgcttcaaatctaacaagtgcatctgttctactgaaggaagctcgagatttgaagcacttgtctaaacgtcttaaggaaaaaggggatgactttgagagtacaagcatgtgctttgaggcgggtctgaaatttctccatgttgcttctctgtgggagaccccaaacattgatagctccaatcaaggggtttctatacaagctatgaaactgtattccgaaacaggaatcctctttggattctgcgctcacgaatttgagcgactcaagaaaatggcgaatgctgctctggcatataaatgtgtggaagtggcatatatgaaggctgctttctttagaagtcctggtgtaattaaagatagacatgcattgcatgcagcatctttgatggttgctccagctgagtctccatcatcttccgcttcagacatcgataatttaaataaccagagcacagttgctaaggctgtttctgcaagaggtgtatactctcctcagattgctagcaattccatatctcggaacaatcatcatttgatgggattgctttcttatgcagaggacacaaataattcatttgagggaaccagaaaatcacaaacttcattttcagcttatctttctggcattgggaagaatcaggtggatgaagttgctcttgtaaggaaagtacttgatttcagttttcataatgtcaagggattgctgcaactgattcgtcattcgttggagtctatcaaccatgaaagtggtaaatgatctaccaagtataggtatcttggaaaagagattaatgatgggaaggttgctttggcaactgtgctatacattggtacctcctccaatctggatgtagaagtaaacaagtttagagagtaatcagttgtgaatggaaagggttcacattgccttctcttggttgcatggaagtattatatgtgggtgatacaaatttcaccagcggcaaactgctaaaacgggtttctttaccaagtcatattgctacttttgttgcccggaatatttcttgtagatgatgactttgactagtgccgaactggcaaagggggttcttaccaagaattagcctgcaaatgttaattgctaagtccaacattcttggtttcagtgtctagtgaatgatcaaatccaagtcctcaatgggaatctaatatacatctaccatagtgttcgagggcagagtctcagttttctttccagggcgccagtgtaagcttaggtcagcacttttgtcctaaagtctccccaccttctattggccttgcggagaaggttctgacagttttggaggtgcttcaggatttagcagtctaatattttacaaatttgcggaggttcagtgaggattgtctgactccaatgatagggttcggggtcgcgtcctactccggacgatggtacaaacttcgccgaccagatcttcaacctgaccgacaacccacctcaagcttgatggtcttgtagatttattatataatgtttggacatgtttatgcgatgtttggacttgtgttgtatagacttatggatgattatgtatgtgtgtg

SEQ ID NO: 206043 - DNA, 5233 bp, Zea Mays
ttctatatttctcccgtacatacaatcctgtcctctgtcctctgctctcctccgaggaagacacataccacaccaccgatgtccgatgcgacgagggagcacataataaaaaaacaataagacaataaaattaaataaaattataaacagagaaaaggacaacgtgaaataccctaggccgtgatcttggcggctgcggcgcgtcggcgatcggcgggggtcgccccgcggccgacgacgtcatgctggggcggcgcggggagatggggtacgaggaaggggagctcgagctggaggagggcgaggcggcctccggcggcggccgtgagctggttattcccgacgcgctcacctgcatcgatgaaagaatccaaaatgtgttgggtcatttacgcaagaaatttgaaggtgaaataactcatatgaatttgggttcgatgtatggatgccatggttcgttcttgccaacatacccacgttcccctttgggctttcctcaatataggaacactgcagatccaaaaaaccatggcagtgcctcgagatccctgcatgtattaacagagaatgcgcaaaagaaccattttgttaagacggaattagacagcagcaggaaaaatgaatactgtcgaatatccaatgagagtgatggcaatcaacagatgttaaacagagcagtcattgggtctgagcagaaagcacgaaaaatacgtatcaagttgaacagcaataaaagtttgccaagaaatactgctgctatatatagtggcctgggcctagatatttccccttcatcatctgcagaagacaacctagatgagactgctggggctctggtgcctgaagttttgcctgatgaatctccacgtgccatacttgagataatgaccagccattatattcctggaggacacttgctctcacccctcaaggaaaatgttctagaattgaaacaaaagcctaaagtgatggtaaaacaagaagcacctgaatttcaagtcaaagtagaattgcatggagactggggctgtacaacctctgctactctggataacaaagataagtgtaccaaggaaatcaagtctgatgaaaagaaagacaagatccccattttcaggagttcaaaaatcagagttaacaaaccatctgctgtgaataagggaactaagcctttacaggatgttttagatgataccggttcaaacttgttgcctacaattgtaaatacagaacatacagttgaggagccagcgaaatttacaggtgcaatttcagataaaatgaagggatcgaaggatggtgcatcaaaaggacacattagtggcaagaacaaaaacattaaggaggaaccttcgcttgatcatggattttctcgtaaaaacagatgtgattctgatgagtacaatggtaaacctcatgccagttcatgtcagttgcaaaacattcccaacaaaacttcgccactggagagggacaaagggaaagtattgcatatggaagatgaaccatctcagtacaaaagcaaggaaaatggagacctgtttagtgcagattccatggctgtcatggtaggaaatgttgatagaaattctttagggatgatgaaagggaagaagaaagtttcttctttgcaagccaccctgtctgggaagttcaagttcaaggcaaaaaaacaattgaatgacaacattgatagaaaaaaatatggtgaagacgagcattatgctttagaccatagaattggtttggataattcatatcaaatagataagagtgtgaggcttgagaaaaagaccatctcatctggggagattgataacaagtcagatgttggaaatgatggtggtgtcaatatctctgccatgtttgatgagaaatcagatgttttgccattagcatctgcatccctgcctgctccagaacccattttaataaatgaacaatgggtgtgctgcgacaagtgtgagaattggcgccttttaccctatgggatgaatccagatatacttcccaaaaaatggcggtgtagcatgcagagttggctgcctggaatgaatagctgcaaaataactgaagacgagaccacaaaagcccttcgggcactttatatggttcctgcacctgaaaataacattaaggatggtggtcatgataatgctatgtcaggcaaaggtacagctattgctccaacttttcagggaaatacacagtccatcagttcactggggaagctaaaaggttcccttgatggagccaatgtggcaaatactttggagtcagctggtatgtcaaagccctcaaagaatctgcatgctccttcaagtagaaacttctctaaactgaaggaaaaaaggaagctggtggaatcatcagataaaggagaaattgttggaaaagaccaatcacgtcgaatgagaagcagtgtaggggttgatcatgataacctgcgagcatcaaagaaaatgaagaaagaatccaatggccctgtgatgaagcatcaaccctctgagtttgaaataagcaaaagtagtcctgccagtgagactctgaaaaacattcagaagcgcagttgcatttctcctggcatgggaaagtatggtttatcttcatcaggtaaacattctcatggtgaggataaagatttctcagctgtggtcattaaaacatcagatacagagaactctggccctcgagactcatccattaagaagagaaaactgaaacaaaggcagtcaagccagcattttcgggatccacactgtagcaacaatgacacaaatggtattacaaaacaaaatattactgaaattaatgctgtgaagaaaaaatccaggtcagaattgaatttgttaaagacagataggatagctactgattctagaggcacagttggtggagttgatgataggatatctactgataaggagtgtttaagtgagcaacttcaagaaaatacccatttccagcatccgtcactcgtagaaggcaccacaaagagggaaatccgtcatgcacaaacacctatagctgcgacttcgagttcatccaagatgtctaactccaacaagtatatagctcattttcaggaaacgagggcctctcctgtagagtcagtttcttcctcacccttgagatcttctgataagaatcctttgggtcgacatagaagctcttcatggacaattacagaaaatgtgcattctcaagagtcagggaagataaattcttcatgctcgaacagaaactatgatcttgggtctgattgtgataaagctaaggctcgtatttctggttgctttaacggagatgtgagtcatcatgttcagaaggatagggactttctgaaagataaacaagatgtgatgaacgcatgtcttataaacaaaggttctggatttggtgctagaaatttccagctgagtcctgaacataaagtcaatccagatgtcctttcatcacatgacaacgatggtcacaagcaaccaacagttcgtcagaatgggaaaacacagccccatttcggttcaaaccaaggtgaccatgcaaatttgacttatgggcatattaagcctggtaaagggaatataccaaataaggaccagaaaacaaatccatctgcagtcaaagcaagcaagcagcagccatccttaaacaatgcatcaaatggtgatgcctcttacaaggcaaggcaaatagaaaaggctgttattgaaaatttggacacgaggaagcacatcactctcaatggtgatgcttcaaatctaacaagtgcatctgttctactgaaggaagctcgagatttgaagcacttgtctaaacgtcttaaggaaaaaggggatgactttgagagtacaagcatgtgctttgaggcgggtctgaaatttctccatgttgcttctctgtgggagaccccaaacattgatagctccaatcaaggggtttctatacaagctatgaaactgtattccgaaacaggaatcctctttggattctgcgctcacgaatttgagcgactcaagaaaatggcgaatgctgctctggcatataaatgtgtggaagtggcatatatgaaggctgctttctttagaagtcctggtgtaattaaagatagacatgcattgcatgcagcatctttgatggttgctccagctgagtctccatcatcttccgcttcagacatcgataatttaaataaccagagcacagttgctaaggctgtttctgcaagaggtgtatactctcctcagattgctagcaattccatatctcggaacaatcatcatttgatgggattgctttcttatgcagaggacacaaataattcatttgagggaaccagaaaatcacaaacttcattttcagcttatctttctggcattgggaagaatcaggtggatgaagttgctcttgtaaggaaagtacttgatttcagttttcataatgtcaagggattgctgcaactgattcgtcattcgttggagtctatcaaccatgaaagtggtaaatgatctaccaagtataggtatcttggaaaagagattaatgatgggaaggttgctttggcaactgtgctatacattggtacctcctccaatctggatgtagaagtaaacaagtttagagagtaatcagttgtgaatggaaagggttcacattgccttctcttggttgcatggaagtattatatgtgggtgatacaaatttcaccagcggcaaactgctaaaacgggtttctttaccaagtcatattgctacttttgttgcccggaatatttcttgtagatgatgactttgactagtgccgaactggcaaagggggttcttaccaagaattagcctgcaaatgttaattgctaagtccaacattcttggtttcagtgtctagtgaatgatcaaatccaagtcctcaatgggaatctaatatacatctaccatagtgttcgagggcagagtctcagttttctttccagggcgccagtgtaagcttaggtcagcacttttgtcctaaagtctccccaccttctattggccttgcggagaaggttctgacagggttcggggtcgcgtcctactccggacgatggtacaaacttcgccgaccagatcttcaacctgaccgacaacccacctcaagcttgatggtcttgtagatttattatataatgtttggacatgtttatgcgatgtttggacttgtgttgtatagacttatggatgattatgtatgtgtgtg

SEQ ID NO: 206044 - DNA, 5170 bp, Zea Mays
ttctatatttctcccgtacatacaatcctgtcctctgtcctctgctctcctccgaggaagacacataccacaccaccgatgtccgatgcgacgagggagcacataataaaaaaacaataagacaataaaattaaataaaattataaacagagaaaaggacaacgtgaaataccctaggccgtgatcttggcggctgcggcgcgtcggcgatcggcgggggtcgccccgcggccgacgacgtcatgctggggcggcgcggggagatggggtacgaggaaggggagctcgagctggaggagggcgaggcggcctccggcggcggccgtgagctggttattcccgacgcgctcacctgcatcgatgaaagaatccaaaatgtgttgggtcatttacgcaagaaatttgaaggtgaaataactcatatgaatttgggttcgatgtatggatgccatggttcgttcttgccaacatacccacgttcccctttgggctttcctcaatataggaacactgcagatccaaaaaaccatggcagtgcctcgagatccctgcatgtattaacagagaatgcgcaaaagaaccattttgttaagacggaattagacagcagcaggaaaaatgaatactgtcgaatatccaatgagagtgatggcaatcaacagatgttaaacagagcagtcattgggtctgagcagaaagcacgaaaaatacgtatcaagttgaacagcaataaaagtttgccaagaaatactgctgctatatatagtggcctgggcctagatatttccccttcatcatctgcagaagacaacctagatgagactgctggggctctggtgcctgaagttttgcctgatgaatctccacgtgccatacttgagataatgaccagccattatattcctggaggacacttgctctcacccctcaaggaaaatgttctagaattgaaacaaaagcctaaagtgatggtaaaacaagaagcacctgaatttcaagtcaaagtagaattgcatggagactggggctgtacaacctctgctactctggataacaaagataagtgtaccaaggaaatcaagtctgatgaaaagaaagacaagatccccattttcaggagttcaaaaatcagagttaacaaaccatctgctgtgaataagggaactaagcctttacaggatgttttagatgataccggttcaaacttgttgcctacaattgtaaatacagaacatacagttgaggagccagcgaaatttacaggtgcaatttcagataaaatgaagggatcgaaggatggtgcatcaaaaggacacattagtggcaagaacaaaaacattaaggaggaaccttcgcttgatcatggattttctcgtaaaaacagatgtgattctgatgagtacaatggtaaacctcatgccagttcatgtcagttgcaaaacattcccaacaaaacttcgccactggagagggacaaagggaaagtattgcatatggaagatgaaccatctcagtacaaaagcaaggaaaatggagacctgtttagtgcagattccatggctgtcatggtaggaaatgttgatagaaattctttagggatgatgaaagggaagaagaaagtttcttctttgcaagccaccctgtctgggaagttcaagttcaaggcaaaaaaacaattgaatgacaacattgatagaaaaaaatatggtgaagacgagcattatgctttagaccatagaattggtttggataattcatatcaaatagataagagtgtgaggcttgagaaaaagaccatctcatctggggagattgataacaagtcagatgttggaaatgatggtggtgtcaatatctctgccatgtttgatgagaaatcagatgttttgccattagcatctgcatccctgcctgctccagaacccattttaataaatgaacaatgggtgtgctgcgacaagtgtgagaattggcgccttttaccctatgggatgaatccagatatacttcccaaaaaatggcggtgtagcatgcagagttggctgcctggaatgaatagctgcaaaataactgaagacgagaccacaaaagcccttcgggcactttatatggttcctgcacctgaaaataacattaaggatggtggtcatgataatgctatgtcaggcaaaggtacagctattgctccaacttttcagggaaatacacagtccatcagttcactggggaagctaaaaggttcccttgatggagccaatgtggcaaatactttggagtcagctggtatgtcaaagccctcaaagaatctgcatgctccttcaagtagaaacttctctaaactgaaggaaaaaaggaagctggtggaatcatcagataaaggagaaattgttggaaaagaccaatcacgtcgaatgagaagcagtgtaggggttgatcatgataacctgcgagcatcaaagaaaatgaagaaagaatccaatggccctgtgatgaagcatcaaccctctgagtttgaaataagcaaaagtagtcctgccagtgagactctgaaaaacattcagaagcgcagttgcatttctcctggcatgggaaagtatggtttatcttcatcaggtaaacattctcatggtgaggataaagatttctcagctgtggtcattaaaacatcagatacagagaactctggccctcgagactcatccattaagaagagaaaactgaaacaaaggcagtcaagccagcattttcgggatccacactgtagcaacaatgacacaaatggtattacaaaacaaaatattactgaaattaatgctgtgaagaaaaaatccaggtcagaattgaatttgttaaagacagataggatagctactgattctagaggcacagttggtggagttgatgataggatatctactgataaggagtgtttaagtgagcaacttcaagaaaatacccatttccagcatccgtcactcgtagaaggcaccacaaagagggaaatccgtcatgcacaaacacctatagctgcgacttcgagttcatccaagatgtctaactccaacaagtatatagctcattttcaggaaacgagggcctctcctgtagagtcagtttcttcctcacccttgagatcttctgataagaatcctttgggtcgacatagaagctcttcatggacaattacagaaaatgtgcattctcaagagtcagggaagataaattcttcatgctcgaacagaaactatgatcttgggtctgattgtgataaagctaaggctcgtatttctggttgctttaacggagatgtgagtcatcatgttcagaaggatagggactttctgaaagataaacaagatgtgatgaacgcatgtcttataaacaaaggttctggatttggtgctagaaatttccagctgagtcctgaacataaagtcaatccagatgtcctttcatcacatgacaacgatggtcacaagcaaccaacagttcgtcagaatgggaaaacacagccccatttcggttcaaaccaaggtgaccatgcaaatttgacttatgggcatattaagcctggtaaagggaatataccaaataaggaccagaaaacaaatccatctgcagtcaaagcaagcaagcagcagccatccttaaacaatgcatcaaatggtgatgcctcttacaaggcaaggcaaatagaaaaggctgttattgaaaatttggacacgaggaagcacatcactctcaatggtgatgcttcaaatctaacaagtgcatctgttctactgaaggaagctcgagatttgaagcacttgtctaaacgtcttaaggaaaaaggggatgactttgagagtacaagcatgtgctttgaggcgggtctgaaatttctccatgttgcttctctgtgggagaccccaaacattgatagctccaatcaaggggtttctatacaagctatgaaactgtattccgaaacaggaatcctctttggattctgcgctcacgaatttgagcgactcaagaaaatggcgaatgctgctctggcatataaatgtgtggaagtggcatatatgaaggctgctttctttagaagtcctggtgtaattaaagatagacatgcattgcatgcagcatctttgatggttgctccagctgagtctccatcatcttccgcttcagacatcgataatttaaataaccagagcacagttgctaaggctgtttctgcaagaggtgtatactctcctcagattgctagcaattccatatctcggaacaatcatcatttgatgggattgctttcttatgcagaggacacaaataattcatttgagggaaccagaaaatcacaaacttcattttcagcttatctttctggcattgggaagaatcaggtggatgaagttgctcttgtaaggaaagtacttgatttcagttttcataatgtcaagggattgctgcaactgattcgtcattcgttggagtctatcaaccatgaaagtggtaaatgatctaccaagtataggtatcttggaaaagagattaatgatgggaaggttgctttggcaactgtgctatacattggtacctcctccaatctggatgtagaagtaaacaagtttagagagtaatcagttgtgaatggaaagggttcacattgccttctcttggttgcatggaagtattatatgtgggtgatacaaatttcaccagcggcaaactgctaaaacgggtttctttaccaagtcatattgctacttttgttgcccggaatatttcttgtagatgatgactttgactagtgccgaactggcaaagggggttcttaccaagaattagcctgcaaatgttaattgctaagtccaacattcttggtttcagtgtctagtgaatgatcaaatccaagtcctcaatgggaatctaatatacatctaccatagtgttcgagggcagagtctcagttttctttccagggcgccagtgtaagcttagggttcggggtcgcgtcctactccggacgatggtacaaacttcgccgaccagatcttcaacctgaccgacaacccacctcaagcttgatggtcttgtagatttattatataatgtttggacatgtttatgcgatgtttggacttgtgttgtatagacttatggatgattatgtatgtgtgtg

SEQ ID NO: 206045 - DNA, 597 bp, Zea Mays
gcgagggcgccttgttattacttttcgtgggcgaggcgaagagccgaagacagaagactgcagcaaaaccatcagatctagcagaactctctcgacctcatcggcgttggcggagcgcgtgttgaccggagatggcgccgagcgggtggaggaggagcgcggcggcgcgggtcgcctggcgcccggccacggtttgcctgtggctcgcgctcgccgccgccgcactgacgctcgcccaggctaagaaggacctgacggaggttacccacaaggtctacttcgacatcgagatcgacggcaagcccgcaggccggattgtcatggggctttttgggaagactgttcctaagacggcagagaacttccgagctctttgcacaggagagaaaggggttggcaagagtggcaaagccctccactacaagggaagtaagttccacagaatcatccccagcttcatgctccaaggaggtgacttcactctcggggacgggaggggtggtgaatctatctacggcttgaagtttgcggatgagaacttcaagatcaagcacactggtccagattcataacatgttggtgcctggttcttgggtc

SEQ ID NO: 206046 - DNA, 831 bp, Zea Mays
tattatattgttttttatctgacaggacgagctcaatgaagagacttttgagcaccatagaagtggtttaatagctgataaactggaaaaggaaccttcacttagctaccaaactagtgattattggtctcagatcgctgataaaaggtacatgtttgatatgtcaaaactggaagctgaagagcttaagacagttcagaaggctgatgttatagcttggtacaacacatacataagatcatcgtccccaaagcgaagacgtctagcaattcatgtgtatggttgcaactcagatattgctgaggctgctaaactccaggagcaatcttggactataattgatgacgttgaatcattgaaggcttcgtctcaattttattcaagcctttgttgagggaagttgggcatgatctgtcagtgtgtgcaaagcgcgtaacttggacattgccgaggcccgctaaggtgcaagaatttcgtggatcataatagatgatttaggccccttctgcagatcaaccgccatgttatctatggccggcttgaaattgaacagcatcgttgcacctgaccaacatcatcaacgagtatagtgctagttgggtaagaaaaataggattttgtcagtgcattatgtgattttcataacaaacacacatggctttattgttactttgcgccaagaaatgttgatcttccaatatggcgtagtaattgatggatgagtttttgaggaaacataattttgtacttggagatgtaaaatgtttctggaatctttactgaacaattttggaagtcttgtcttattatatactttaccctccagtaacg

SEQ ID NO: 206047 - DNA, 1090 bp, Zea Mays
aacaatttcacacattctaaaaggtttatttcccaattgaacaagacgttggaaaggaggcaacaaggctcagagctattacagatctttttagcaacattattgaagaaccatgctttgatcagctaagaaccaaggagcaacttggttatactgtggactctagcccaaggatgacttaccggatgctggcctattgttttcgagttatgtcctccaaatacagtcctatttatctgcaaagtcggattgataacttcattgatggtctatctgctctgctggacgagctcaatgaagagacttttgagcaccatagaagtggtttaatagctgataaactggaaaaggaaccttcacttagctaccaaactagtgattattggtctcagatcgctgataaaaggtacatgtttgatatgtcaaaactggaagctgaagagcttaagacagttcagaaggctgatgttatagcttggtacaacacatacataagatcatcgtccccaaagcgaagacgtctagcaattcatgtgtatggttgcaactcagatattgctgaggctgctaaactccaggagcaatcttggactataattgatgacgttgaatcattgaaggcttcgtctcaattttattcaagcctttgttgagggaagttgggcatgatctgtcagtgtgtgcaaagcgcgtaacttggacattgccgaggcccgctaaggtgcaagaatttcgtggatcataatagatgatttaggccccttctgcagatcaaccgccatgttatctatggccggcttgaaattgaacagcatcgttgcacctgaccaacatcatcaacgagtatagtgctagttgggtaagaaaaataggattttgtcagtgcattatgtgattttcataacaaacacacatggctttattgttactttgcgccaagaaatgttgatcttccaatatggcgtagtaattgatggatgagtttttgaggaaacataattttgtacttggagatgtaaaatgtttctggaatctttactgaacaattttggaagtcttgtcttattatatactttaccctccagtaacg

SEQ ID NO: 206048 - DNA, 1455 bp, Zea Mays
gccacgtcgttcatgttgtgccagcgtagcacgtacctcggcgccatagcctatggcgccgagatgtgttacgtcggcgccataggctatgacgccgagcaaagggttcaaaaatgacattaaaatcttttaaggtctaaatgtgaatttttttttgagaaagggataaaatacaaaaaattcgggaccggtttaggtgcacgggaccttagtgtgcgcgggagagcctgaaatttgaaggaccttggcgggaaatatgaaatttcaaaacgagagcacactacggtcccctggctgcacgggtggtgaaaaaaatacgagccaaatcccaaaagcgcttgtggggaacggaaacgagggaggtaggatgaattggcagcagcaccggaagaattacccgagcgcgatgcggtcgtccaatgggcagaccacgctcaaatcctttctcttcaagcccagggttgtcgatggagtaccgtcaccaccgccggcggcggtgatggaggcgccgatctgttcgccggagccgccgaaacgggagattgtcagagtcaccaagacgaccattaaggagaaggcgagcgcgttctcctcggtgggctccacggggaaggacgggggcggcggcgctttgagcgccgcggtcttcaagcggttccacagttcagccccacgggcgagagcggaaggcgaccgcgtgcaggcaggggaagacggcgacctcgaactcggcggtgcaggcgacgcccggctggacgtcgaagagaccggggcggagagccgccgcgggcccaggagtaagcggaagagccccattggcggccacgagtacatgagcgaggccaaggccagacgcgtggtggttctcggcgacgatccgaggccgcggtcggcgactacgcgagggcgtgcgaggcgctcccgcggcggtgagggtgagggcggccgcgctctgtacaaccacttggtttgtttcggtggcagacgcgagcggaggcgggtggtggcacggcgacaaggagggcgtggacggggaagagatcggctggacggacgacatgtgggagggtatgggatccgtcacgctcggcggcctggagtggcactagccgtgccgtagtcgcggccgtctgcagagcagaaccgccccgtcacggccacggcaaccggcagagtattactactagttactaggaataaatgaactatattagtcggcaagtgatgctctgtttgtgtttgatattaggaattcaaagaacagtttagtttccagtggaatcatgaaatattgtggctcaccaaactggaccaaaaatatttcagacctgttcgaatttcatgtggttcttgcatgtttaggtatggtaattgcaaaggcagtggggcgattggtgcaaattgtatgaccagtcatattcgatcggtagcgaagttaacaaatattttatcgag

SEQ ID NO: 206049 - DNA, 1372 bp, Zea Mays
atagtcccaacatgtaccttgtagttggtagcttgagtcgtatatatccagtttgcttggcaattagttcagtccagttgctgcacttgctgtgcgtgtcttctacctccagcccagtgtgtgtgtttaataacaaacaagcgcataggcttcttgaatttgagcccagatgaagtgattcggagcttgttctacaacaagaacaacgattcccttattaccgtttcagtttatgcatctgacaatttcagcacattgaagtgcagaacaaccccggttgagtatattagaaggaaccagttagatgctgggtttcccctctttgaatcagagtctctgaaatggcctggatttgtggagtttgatgacgtaaatggaaaagtactcacatattcagcgcaggatggtatatataaggtctttgacttgaagaactactacttcctatattcaataccagatgaaaatgtgcaggagataaagatcagtccaggaatcatgctcttgatatacgacagaacaccaagttatgtcccattgaagatattatctattgaagatgggaaacaactgaaattttttaagcacttgttacatcgcaacaagaaaattgatttcattgagcagttcaatgagaagctccttgtcaagcaagaggacgaaaacttccagatacttgatgtgcggagttctgagctaattgaagtcaatgtctccaagtttatgaccccttcagcattcatttttctttatgagaacaatctcttcttgacattccgaaacagaacagtcgctgtatggaacttccgaggagatcttgtgacttcatttgaggaccatttactttggcatcatgattgtagcaccaacaatatttacatcactagcgaccaggatcttattatctcatactgcaaatcggaggcagtggctgaggatggtacagttggatccatcaacatgagcgagatcatgactggcaagtgtatcgccaagattactgccaacgatcctgccctaagtgcgccccctcgcagaaatggtcgcagcaagcggcggtcctcggtctggagcaccgttccagaagctctggaggacgtcacggcactgttctatgacgaggacaggaatgagatctacaccggcaacagtcatggactggtgcatgtatggtctaactagatggtaacatgtccatacatctcgcccttttgatttgacttggctagcctgactgcattctgtataatccccggcttggggctcacctagattttgtatttggcaatagaatgtgtttccttgagaaattgtgaatgcaaatcgttataaatatctcatgttcgtctaccttgttcgagtaacatagaag

SEQ ID NO: 206050 - DNA, 1925 bp, Zea Mays
ggtccggctgtcctatgcccttcctgtacctctgctaggttggtgcacaagttgtgtactcaaaatatgcaggcacagaattgaaattcaatgacgccgaccatctcattttgaaagatgacataattggtattcttgacagtgatgatgtgaaggatatgaaaccactgaatgatcgcattctgattaagaacagaataggaaagccacacatcggacaggagtcaaaaagttttattatgtctttggcagatgttctgtttattcacgatatgtctaaatgtcttctgtcaagtctggatactagagcaaagcatgtccaggaagctccaatttgtgcgttccttagccgatgtgaactctttgacttggctcagctcaccactgacccattctgagtgaaatcttgtttggcacttgtcttacatttgcaccagatcgattatgcaccgaggaacgagttatcacccattctatagtagggatattcaattacagtgaaatgtcatatacaaaaaccttgtgattgtacatgtacaacattaggtcttgtttaaattaaatgtcacgatcctgcttgccccacgtccaccaaaggtcgaccgggtttatgatcgaggtctagtttggttttctctctaacagtgacctatttggtaggatttaatgattctgagagaaattttaaattaatctaattcacccttctttcttggacatcttagtcctttcagtcgtgttcctatctcttctcttaaggttaaggatgaagatagatatttattaggatatcattttgtggtcttttttcttcgattgacgaataaataagagatataatctgctaagtaaaattttattcttgtttttagcattgagtttataaagattcataaaagttaaaccacaaatttatcaaatatcttattaaatgatatatataaaattcagatatggtttcacctttttgttgtagggagcaaataatgtataaaacaatttatgtagataacataagaaaagatcaatataatacaataaacttagttattataatgtgcttgacaatataaaaaagatcaacatcaaattttatatatatctattttaaaatattaaattgatcctaaaaattgtgatatccacttacatctctccttcacttttatagttttatgtaatttacattgatgtttttacatttctagaattgacacgatacaatatggttggaacctagggtataagacattgtgcatagaatagaaatcacactgggggtaaaatgggctaaatgataggctttaattgttatgacttatgattagcccagttaactttctcttgggcatcttaatctttttagaggtatattaataacttatgtcacaagctatgatacttaactgttatgattttgctcccactaattttgatgttctttaagaacataatcccctgtacttattacggtgtaatgtagataactcatttacttagaatccaaattcctatccttagctagattgtacttttgtcttgaggttatagtcaaatattcatcaatcggtattagccagaatgataaaaaatgaggcatacgagtttctaataacaagctttgttaaactaatttaataaaatatgcgttggccaaaataaaatgtacaacaactttcgccaaaattagtgaaaacaagtcatactttaattagataaaaaataggctaaaagatagaattatgatctacttatttcttaagtcttatttcctttatattaaagccggtccaaaactcagcctttcagcctatccatgtcggcccgaaaacattcagtcgtccgatcgcgcatctacggttccacacaagacctcgcagccttctcgcgtcgtgccgcgaagcttctaggagccccacccccgc

SEQ ID NO: 206051 - DNA, 1030 bp, Zea Mays
ccgcgttgcggcatccttccttccttctcacgaaaaggcaggcaagggaaaggcaaaggacaacccatcccctgcctcctccgttgctctgctgctccccctccttatctaatcctctggttcctggacaccggcctgcaagctccagcagcagcggcgccggcgacgaaaggaggaggattgctaccatcctatatcatatcatacatatacacaaggaggaggagaaggtgtgtagcgaggttgaggtccggaggatgccttccagtgccatgagttccgggctggagccggtgctctgcgcgcctcggccgcgcagggtccagcagctgcacccctgcagcgccgacctcatccttggcgcaccgcccttcccgcgcaacgccaacagcaaggagaagaggactgggaagaggattgagactagagtcagacgtaatgggttgtggtacatcagccaagaagatacagctctggcaatagaggaaggtgtgaagatattttgttgcaccatcgcagactgggacacccatcttttgatagtgaccaaatgcagatttattgaagaagataatagttggctacgcttgcagtttcatgaggaagaacttcagtcaaccagagaagataacatgcatccctcataacaggatgctacgagtgggaatgacatatgagatctagggcaatattagacttggtacaggagcagaggaccacaatgtgatcagagcacccagacagccaaaaagtagggtttttcattatcaatcatgccaggaaaggcaaacgcaaggattggggtactgtcaaataaccagcctaccagagtcaactgaaaaagtacgggatcaaatattctatgtttagatatggagaaactaggggaaagcaaccattagctgagcccctgatacaacctatcaactatctgcttttgaaagtctgaaactcatactgttcagcatgttaagctaaatattgtagtagcatattggcacaaggtaaaatgaagaggaacttgttttct

SEQ ID NO: 206052 - DNA, 1449 bp, Zea Mays
cagcaatgccaggggagatggaagttgatgtttgctgtgtgctgaagagataaccttctttggttgagacgtgaggcagtttccaagtaaccagtcacaatcttccacgtcgcctccctcttgatctaaaaccagccatccgtcttctgggaagaagaggtatagtctcccgatcctagttctgcctctccagttgcatccttcgtcactcactctccctacatcctgtcacgagactggtgttcagacctgagagacctttactcccatggttcagatgtctttgcagaggagcatagccgtatatcctcgttgctccttatctgattcgttccatcgtgtgggtggttcacgaagaagatgggcctcttgtaggtcccagtcatcacgttttgcttataatgcaagaccatccccaattgttctcaagaccgaccatgcaattgatccccctgaaccaaaggatttggatgcaagttcctcagcttcaagaagtggaccttacattgggacttgccatccatcaggcgcagtcggagtgatgggtgcgtcttcctcttcctgcctcagatttttagagaaatttgtgagttggagcactggaggtggagaagaggcacctccgttcatcatctgcaatgacccgcttgtcaagaaagagctgttgccatctggaacccaatccacttctggctgcagtgccagtattgctcttgggaagttaaggcagaagaggctcttcttggagcaatctggagcatgctgtattgttatgccatgccagttcttacatgcctggcatgatgagatttcgcagggttgctcggttccgttcatccatgttggtgattgcgttgtgaaggaactcaaagctgctaacttgaaacctgttgagtatggaagtaatgtccgtgtgggagttctcttcactgacaataaattggctacaaactgttacctagacaagttggagagccagggttttgaggtgctatgtccagataaggcttccatggagcgtacagtgttaccatcagtggctgcattcgggaagggggacatggaaggtgcgagaaacctgttgcgagtgtcgctgcaggttcttcttgtgagagctgtcaattcgataatccttgcgtccgatgaccttgtaggcattttgcctgatgatgaccctcttctcaagaaatgtatagacccactggatgccctggtccgagaggccatcgcatgcgcccgagcaccacagccatgatttgccgccctagctagattactctgtttacaccttggctgctctgctgatgagcacatatgtaaataagttttacacaaggtagaaaaagacggatattggttgaactcattacgcattttcatctatgttagcccatgtaatgttcggatactagttaaaaaatactaaatatagtctaattacaacactaa

SEQ ID NO: 206053 - DNA, 1274 bp, Zea Mays
gccaggggagatggaagttgatgtttgctgtgtgctgaagagataaccttctttggttgagacgtgaggcagtttccaagtaaccagtcacaatcttccacgtcgcctccctcttggagcatagccgtatatcctcgttgctccttatctgattcgttccatcgtgtgggtggttcacgaagaagatgggcctcttgtaggtcccagtcatcacgttttgcttataatgcaagaccatccccaattgttctcaagaccgaccatgcaattgatccccctgaaccaaaggatttggatgcaagttcctcagcttcaagaagtggaccttacattgggacttgccatccatcaggcgcagtcggagtgatgggtgcgtcttcctcttcctgcctcagatttttagagaaatttgtgagttggagcactggaggtggagaagaggcacctccgttcatcatctgcaatgacccgcttgtcaagaaagagctgttgccatctggaacccaatccacttctggctgcagtgccagtattgctcttgggaagttaaggcagaagaggctcttcttggagcaatctggagcatgctgtattgttatgccatgccagttcttacatgcctggcatgatgagatttcgcagggttgctcggttccgttcatccatgttggtgattgcgttgtgaaggaactcaaagctgctaacttgaaacctgttgagtatggaagtaatgtccgtgtgggagttctcttcactgacaataaattggctacaaactgttacctagacaagttggagagccagggttttgaggtgctatgtccagataaggcttccatggagcgtacagtgttaccatcagtggctgcattcgggaagggggacatggaaggtgcgagaaacctgttgcgagtgtcgctgcaggttcttcttgtgagagctgtcaattcgataatccttgcgtccgatgaccttgtaggcattttgcctgatgatgaccctcttctcaagaaatgtatagacccactggatgccctggtccgagaggccatcgcatgcgcccgagcaccacagccatgatttgccgccctagctagattactctgtttacaccttggctgctctgctgatgagcacatatgtaaataagttttacacaaggtagaaaaagacggatattggttgaactcattacgcattttcatctatgttagcccatgtaatgttcggatactagttaaaaaatactaaatatagtctaattacaacactaa

SEQ ID NO: 206054 - DNA, 1168 bp, Zea Mays
cacgagaattccatcgccgcggtattaaaaagtccctcccacgccgccgccacctaaacctcctcactcctcagactcctctccgcacataccctccctacctcgccgtcgccgtcgcatctgccatgggggcgtacaagtacgtctcggagttatggagaaggaagcaatccgacgtgatgcggttcgttcaacgcgtgcgctgttgggagtacaggcagcagccggccatcgtccgcctcacaaggcccacccgccccgacaaggcccgccgcctcggcttcaaggccaagcaggggtatgttgtttaccgcgtccgtgtgaggcgtggtggcaggaagaggcctgtgccgaagggtattgtctatggcaagcccaagcaccagggtatcacccagctcaagttccagaggaacaagagatctgttgctgaggaacgggctggacgaaagcttggtggactcagggttctcaactcctactgggtgaatgaggatagcacctacaagtactttgagatcatcctggttgatgtggcccacactgccatccgcaacgacccaagaatcaactggctatgcaatcctgtgcacaagcatcgtgagctccgtggtctcacctctgcaggcaagaagttccgtggcctgcgtggcaagggccacactcaccacaagaacaggccgtcgaggagggccacactcaccacaagaacaggccgtccaggagggccacctggaagcgcaaccagaccctttccctccgccgctaccgttgagcacacacatcttgatgctctgctactgtggaacccgccccatgcaggctctctgatagtatttggtatatttgtttcattgttaaattttgctacatgtgttacttttgagccccttgaactccgttgtctgtaccatggagcaagtgacgcgtacgagtcgatgaaaatgattgtttagtagtgcattgctgtgtattctgtctggcacgattgatttagggcatgtttgggaacacttctttcaaaaccacggtttatattaccatagtttaccgtatgttatgacatgaacatattgtattttacatcattctaattcaacatctgtttggagccgggaggagaaaggccaagacaaggaaggagaaaggggctagactgcgcctgcgg

SEQ ID NO: 206055 - DNA, 1304 bp, Zea Mays
cacgagaattccatcgccgcggtattaaaaagtccctcccacgccgccgccacctaaacctcctcactcctcagactcctctccgcacataccctccctacctcgccgtcgccgtcgcatctgccatgggtgagttcttggccctaccgctgatgccctctccgattcgcatgtgtggggctttacggtatgttgcaccgtttctcgctgtggcgcaggggcgtacaagtacgtctcggagttatggagaaggaagcaatccgacgtgatgcggttcgttcaacgcgtgcgctgttgggagtacaggcagcagccggccatcgtccgcctcacaaggcccacccgccccgacaaggcccgccgcctcggcttcaaggccaagcaggggtatgttgtttaccgcgtccgtgtgaggcgtggtggcaggaagaggcctgtgccgaagggtattgtctatggcaagcccaagcaccagggtatcacccagctcaagttccagaggaacaagagatctgttgctgaggaacgggctggacgaaagcttggtggactcagggttctcaactcctactgggtgaatgaggatagcacctacaagtactttgagatcatcctggttgatgtggcccacactgccatccgcaacgacccaagaatcaactggctatgcaatcctgtgcacaagcatcgtgagctccgtggtctcacctctgcaggcaagaagttccgtggcctgcgtggcaagggccacactcaccacaagaacaggccgtcgaggagggccacctggaagcgcaaccagaccctgtccctccgccgctaccgttgagcacacacatcttgaattcttgatgctctgctaccgtggaacccgccccatgcagaccctttccctccgccgctaccgttgagcacacacatcttgatgctctgctactgtggaacccgccccatgcaggctctctgatagtatttggtatatttgtttcattgttaaattttgctacatgtgttacttttgagccccttgaactccgttgtctgtaccatggagcaagtgacgcgtacgagtcgatgaaaatgattgtttagtagtgcattgctgtgtattctgtctggcacgattgatttagggcatgtttgggaacacttctttcaaaaccacggtttatattaccatagtttaccgtatgttatgacatgaacatattgtattttacatcattctaattcaacatctgtttggagccgggaggagaaaggccaagacaaggaaggagaaaggggctagactgcgcctgcgg

SEQ ID NO: 206056 - DNA, 382 bp, Zea Mays
gcacgccctcgccgccactcatcctcctatccccattcacctcatctccccctcggacgacgcaaggggtggtcgccgatccctccctcccagacatcaagaatggtgtcgtgccctgggtccaagaaggggcagggtgctggaggagtgatgagctgctcgatggcgatgcgcggacgacgaggaagggcccctgatgcagcgagaacgagaaggtcgtgttcatcagcatcgtgtcttgaatgttctacggcaagcaaaatttatgacctgatcaactatgtaaggagtccatcagtgataatataagaagggaggacctacaattctgatgaaaaaggtttgatcatgagttttatttcattacatatataaattgggt

SEQ ID NO: 206057 - DNA, 768 bp, Zea Mays
cagccacaaaaacctaaccgctctccatcccacatccgtcgtcgccattcctccgcacgcatcgcagaacccgccctcgctgtctccatgcacgccctcgccgccactcatcctcctatccccattcacctcatctccccctcggacgacgcaaggggtggtcgccgatccctccctcccagacatcaagaatggtgtcgtgccctgggtccaagaaggggcagggtgctggaggagtgatgagctgctcgatggcgatgcgcggacgacgaggaagggcccctgatgcagcgagaacgagaaggtcgtgttcatcagcatcgtgatcgagcttcttcgtgttaggagtcttcaagtctctaggtccatgcgtggttattgtgtggaaattttcatgacaagaaagctaatataaaggggatttacttgcctagtccagatctgccagctttccttgatatggtttactgaaagatctgacgtgccttgtcaaacatggtcccaacttttccttgcgaaatttacgagttggcattgtatcaattggaaatcctttttgtatagagggcatcacaatgaaactaatctgtgtcttggacttggcatgttcctttattttggtgaacttagagctaggaatattttctgtgcgaaccgggacactgtttaaggtcatttcaattagttttttgtagcccgctttagatttacttagtttgttattgtttcctttgttagaagatagaattcctctaattttaattacta

SEQ ID NO: 206058 - DNA, 1536 bp, Zea Mays
cgcagctcgtggcccgatccctccgagaaccgctcgaattcgagggcttgattgacgatttggtccgttcgggaggggtgcggcgtggtggtttatcccaatttgggccaatatcttaggtcccgttttaggcatctggaatagctgcacttgatgtgaaaaaactcaaagatgctggtctctgcacagtggaatctgtagcatactctccaaggaaagaccttttgcaaattaaagggattagtgaagccaaagtcgacaagataattgaagcagcttccaagttggttccactcggatttactagtgctagccaacttcatgcacagagacttgagatcatccagcttacaactggatctagagagcttgatcaaattttggacggtggaatagaaacaggatctatcacagagatgtatggtgaatttcgctccgggaagactcagttgtgccacactctctgtgtcacatgtcagctcccattggaccaaggtggtggtgaaggaaaggctttgtatattgatgcagagggtacattcaggcctcaaagaattctccagatagcagacaggtttggcttgaatggcgctgatgtactagagaatgtggcttatgccagagcatataacactgatcatcaatcaagacttttgctagaagcagcctccatgatggtagagaccaggtttgctctcatggttgtggatagtgctacagccctttacagaactgatttctctggtagaggggagctatcagcaaggcagatgcatctggcgaagtttcttaggagccttcaaaagttagcagatgagtttggagtggcagtggtaatcacgaaccaagtagtggctcaagtggatggtgctgcaatgtttgctgggccacagatcaagcccattggagggaacatcatggctcatgcttccacaactaggctctttcttcgcaagggaagaggggaggagcggatctgcaaagtaatcagctctccctgcctggctgaagctgaagcaaggtttcagatatcatctgagggtgtcactgatgtcaaggactgaaagcatcctcatttgcagtccacagcataacttgccaattcagacgaatctctgatctgctgcactcgtgtcggtcccttgtacaatcaaaataccagtacaggcttccagaatgcgaatgcaaatccgttggagtgtggcactgtcatcctgttgtctttaggtaccatctaaagttggcattgttgtaaagtggtagagcgcaaggctctactttgtagccgtggattcgagccctatggtgggcgttatttaatttttttggcgaaaaagcctttaattgagttgtttaggtgatatgaataactctttaggtcatggagttcgactccatgggagtttaagctgggttaaaaaaaattatggtcacgatctttttcacatgggctactgtaacatctcgtctactcctgaaccgatgttaagctttttaggactatagatcatcttcatatatcaacatgagtttttt

SEQ ID NO: 206059 - DNA, 2879 bp, Zea Mays
cttctctcctccgctccgcaccctctttttcactccccctcccccgccggagttgcgtttcatttgaataggcgagcggggaagcatctcctaaacaacctccgcactccccaaccgccccgaacactcgcctccattccgcgccgccgccgccacctcgcgtcgccgtccggatctcttgggctcgtgtgcggcagggatccattgatttctcctctgcgagccatggatatcactcaggttctgctagctgctcaatctccagatgctaaccttcgaacagtagcagaaggcaacctcacacagttccaggagcagaatcttcctaacttcctcctctccttatcaatagagctctcgaacgatgaaaaacctccagagtctagaaggcttgctggtattatccttaagaattctttggacgcaaaggattctgcgaaaaaggagctactgactcagcaatgggtaagcgtggacccatctatcaaattgaagattaaggagtcgttgctggtgacactaggatcttcggttcatgatgcaaggcatacctcttcacaagtcattgccaaggttgcttcaattgagataccacgtcgagaatggcaagatctcattgccaaattactggagaacatgacttctccaggtgcatctgctcctttgaagcaagcaacactagaagcattggggtatgtgtgtgaggagatttctccacaggacttggagcaggaccaagtgaatgctgttctgactgctgttgtccagggaatgaaccaggcagagctcagccctgaagttcgtcttgctgcagttaaagccctatataatgctcttgactttgctgagagtaactttgcaaatgaaatggagaggaattatataatgaaggtggtttgtgagactgctatgtctaaagaagtggagatcagacaggctgcatttgaatgccttgttgcaatagcatccacatattattcacacttagacccttatatgcaaaccatattcgacctgacagctaatgcagtgaaaggcgatgaagaaccggttgcacttcaagctgtcgagttctggagcgctatttgtgatgaagagattgcactccaagacgaatatgagggatctgaggatggcaactctactgtacactttcgctttattgaaaaagccctccctttactcgttccgatgcttctagaaactttgttgaagcaagaggaagatcaagatcaagatgataatgtttggaatatttctatgagtggtgggacgtgcctcggactcatttctagaactgttggtgatgcagttgtccctcttgtgatgccatttgtggaggccaacatcacaaagcctgattggcattgtcgtgaggcagctacctttgcatttggttctatccttgaaggtccctctgttgaaaaacttgctccactggtccaggctgggcttgatttcttgctcaacacaatgaatgatgcaaatagccaagtaaaagatactactgcttggactcttgggagggtatttgagcttttgcattctccagctggtgcaaacccaatcattaataattcaaaccttcctcgtatcatgtctgtgttgcttgagagtagtaaagatgctccaaatgtggccgaaaaagtctgtggagctatttattttcttgcccaaggttatgaagatgcggagtcaatgtcttctgtgctcacgccttatctacctaatatcattgctgcacttctttctgctgcggaccgtgctgattccacccattccaggcttcgtgcttctgcttatgaagcactgaatgagattgtgagggtcagcaacatacctgaaacttcaggcatcataggccaattgttgcaggagatcatgagaagattaaaccttacatttgatctccatatactttcttctggtgataaggagaagcaaagtgatctgcaggctttgctatgtggtgttctgcaggtcatcatccagaaactgagcagcactgatgcaaagtccatagtttctcagactgctgatcagctgatgatgctgtttctgcgtgtctttgcctgccacaattctactgtccatgaagaagcaatgcttgcaattggtgctcttgcatatgctactggtccagattttgtgaaatacatgcctaacttcttcacatacctggaggctggtttgcagaattatgaagaataccaagtgtgttccatctctgttggggtggttggtgatatttgccgtgccttggaagataaaattttgcccttctgtgatcgcattatgactgttcttcttaaggacctatcaagctctatgctcaatcggtctgtgaagcctccgattttctcatgctttggagatattgctcttgctattggtgagaattttgagaaatacctaccatatgccatgccgatgcttcaaggagctgctgaacttcttggtactcttgatcagagtgatgatgatatggttgattatggcaaccagctcagacgtggcatttttgaggcatactctggtatactccagggcatcaagggcccaaaagctcagctgatgatcccatatgcaacacatctactacagttcactgaagctgtcttcaaagataggagcagggatgacagtgtgacaaaggctgcagttgctgtccttggggatcttgcagacacgcttggccagagctcaaaggatctgttcaagacccacctattccatgttgagttcttgagggagtgccaagcacaacagttggatgatgaagttcgggagactgcacaatgggcccaggggatgataaaccaggcggtggtctcctaatcttctacgttatgcaaggatgtatgtggggcaggtcagtg

SEQ ID NO: 206060 - DNA, 2669 bp, Zea Mays
aaaagtagggagaaaccaaaagcgaaaggaaggtaggctgcgtactctacgtccaaaatcacaaacagacagaacatccccacgcaaggcccaagcgcccaactatcatttctccctctctcccacctttccctccccaccaccacctacctacctctttattcgccgtcgcctaccacctccccctcctctccgtgcagacctccgctccgcaccaccaatccgtcgtaaccctagcccagcctggtctcggctggccccgctccgttcatgtgcggcaccaccgcctccccgtgttcgtagtagccgccgcggggaatttccctcccatgggttccgcatacgcccctgagaggacgccgatcgagggagaatgaggtgctgcatctgccgcgtatcctccgccgggtgccgggccatgggcgttgcgggacgggcgaacccgacgtcgtcgctgcgcagccgacgctgcctccgcatgcggccgtcgtacgccccgttctccgagcccttcactgaacgcccggcacccgccgccccgtcctccccttcatcccccgctgctgcgcctagggcgtaggagccgcgggcggaccgccgatatctccgtcgatctcgctggctcctctctctctctgcttcctctctctctccctctcgctcgtagagtcagttgattgtcggggctgatccggaatggaggtgtttggttgtggggatggggtggtcgatgctgaattcgcggaagtagatccaactgggcgatacatgcgctataatttgattttggggaggggagctttcaagactgtttacaaggcatttgatgaggtcgaaggtattgaagttgcatggaatcaaatcaacgtagatgaggtgatgcagtgtccagataatctagacaggctctacagagaagttcatcttttgaagtctctcaagcatggaaatgttatgaagttttattattcgtggattgatgaccagaataagactattaatgtcatcacagagctgttcacgtctggaagtctcaggctttaccgtcagaaacatccacatgttaacttgaaggcaataaagaattgggcaaggcagattcttcatgggttggattacctgcatagccaccaacctccaattatccatagagacttgaagtgtgataatatttttgttaacggaaaccatggggaagttaagattggagatcttggactagctacggtaatgcaaacacctagggctaggagtgttattggtactccagaattcatggcacctgaactttatgatgaaagttatgatgaactagttgatatatactcatttggaatgtgcttgttggagatctttactcttgaatatccatacagtgaatgtacaaatccagctcagatttttaaaaaagtatccacaggtgttaaacctgctgcattggctaagatttctgatcctcaagtaaagcagttcattgagaaatgtttagttcctgcttctgagaggtcgtctgccaaagaactcttgcaagacccatttctttgtcctgacaatgcacatgattctgctggcactaagtttacatctccagcacctaataaaacagtagatatggtgtctttgcatatggaagttgacacttttggatccagccctactaattcaggcaaggaaaatggttgtgttgctccacatacacctgtcctggagttcacaagaaccaacaaaaatacagagctaaagctgaagggtcatgcaagaaatattcatttcctcttctacttggactctgatacagctttgtctgtagctgctgaaatggttgaacaattggagttagcagactgcgatgttaccttcattgctgattttattgatcttttgatagtgaatcttattccgggttggagacctgtaaatgatgcggcaacaaactcgtatacgcaatctgaaagtgaacttgcaatcacttcccataacaatctatcgaagttggtgcctgattatgcattaattgatggtatgatgcatccaaaagatgtgaatgtatcaactggttttcttgattctgtatcaagtgcaactaatataggaggatcaccatgctctgaaggttcggtcatttctgtacagcgtgctgagagtttcaaaagtgtgagtgactatgagcctgaggattatggtactatggactgtggtgggtacaaagagggaatcagtaaagaaaattgcagccatgttgtagatgatggatcgaggttaattttccatacagatcaagatcacttctcttggagttggccaatggccagcagtgcttcgatcatctactcctgataatcaggatgtgctgaatggggagcttgtcttgattgaacctcagtttggttgagatgaattgacaagggtgcgagaagaggctatggaaggagctcgaaataagtgggttgccagataaatgatgtttttgttcaaatctggcatttcatctgaacaatcataagctatgttcgatttatgttagaagtgtaagaaactatactgatcttttttagttaaaacataatatataggtagattgtcgtgaaatcttgtttttttgcaatcgctgacaatcagactaataaaaagtcgtgaaaattatataaaaagttaaaatatatttaatt

SEQ ID NO: 206061 - DNA, 6325 bp, Zea Mays
ctagccaagcagaggagaggggagggcagaattccttgcttgctcggcgggtggtcgaatacgaatactgcggttgccccgccgccccggcaaccgcagcacatctcaccccattcctccgtcagtctccattctctccaatggcgtataaatcgccgctgccgccgaccgccctgcccccatcatcatcatcagtagcagcatcacgttcacgcgcgcggcgatggaggcggggccgtcgagttcggcggcgatgagcgcggcgaggcggaggcgggacgcgctggcgcagacgctggcatcgcggaggctgccggagggtatggcggaagctggggagctggtgcccggagccctcgcccccgaggtcatgcccttcctgcgcgccgccgacgagatcgagccgtacaacccgcgcgtcgcattcctatgtcgcaaatatgctttcaagaaagttcaaacactggacccatcatcaactcaacgaggtgttcgacagttcaaaacttacatgtcaattaagctggaccaggatgacacacaagttctaggcaatgatgcaaatgagattcaacagttttataagaagtactgtgctagtatgagtcatatttcaaaaaagagaaactttgaggagatggctagatattaccaagtggtgtatgctctttatgaagtgctacaggatgtaacaaataaaaacattgatgatcaggtgttgcggtgtgcagacatggttgaggaaaatggtcgtcatttcaagaactacaagtacaacattattcccctcaattttcctggttcttccgaggaaattatggaacttccggagataagaggtgccattgatgcaataagtgacatagatggccttccaatgccagacatgtcttctatccaaaggcatgaggataaatctatccaagatctaattgaatatctttcactagcatttggatttcagaaatcaaatgtagaaaatcaaagagaaaatatggttttgcttctcgcaaatattagtacaagaactgctgcccaggaagggcatcctttggttgatacagtgaatgaattgtggaaaaaaatatttggaaattataagtcatggtgttgctatttgcatattacttcaagtatcataatcagtcatgatattacagaacataagaagcaacagctgaagcttcttcacattggcttgtatcttcttatctggggtgaggcttctaatgttcggtttatgcctgaatgcttgtgctacatattccaccatatggcaaaacagttgcatgacatggttgatgaaaacaattttcaaccaccacaagcacctgtggaagagggatcatttctgaaaaatgtcattgaacctatctttaaggttctgcaaaaagaagcacaaaaaagtagagggggtacagcaggccactcggcttggagaaattatgatgacctgaatgaactattttggtcagagaaatgttttactgagcttaactggccgccggatctttcttccaacttcttttataaagggtgcggcatggcaagaaagcccaagaccaattttgttgaagtacgcacatttctgcacatatttagaagttttaatcgaatgtggatgttttttatacttgctttccaggcaatgctcatagtttcatggagttcttctggatctctttctggaattaccgatggaactgttttaaaaaatgtattaagtgtttttatcacagcagctctactcaactttataacagtaactctggatataatgtttactgtacaagcatggggtagtatggagtggacaaagttagtcagatatttactaaaatttgttgtcgccattgcttggataattattcttccattgacctattctagttccatcaaatacccatccggtgctggcaaaatcctaaatagttggattggggattggtataatcaatcagtttataacattgcgatcgtcatatatatggttccggatattcttgctgccttgtttttcttgttgccacaacttcagaatgtcatggagcgctcagattcacgagtgttggttctcctgatgtggtggattcagcctagattgtatgttggacgtgggatgcacggagatattttgtcaatccttaagtatgtcttcttttgggctgttctgctcatctccaagcttgcattcagtttctatgttgagatatcaccattgattgatccaacaaagttcattcttgaccaacaagttgggaactatgaatggcatcaaatcttccctttcttgccacgcaaccttggtgttgtcattaccatatgggcaccgattgtcatggtttacttcatggacacacaaatatggtatgccattttctccactgtctttggaggtgtttcaggtgccctaagtcatgtgggtgaaatacgaacccttggcatgttgagggccagattcaaatcaattccagaagctttcagtcaatgcaatgcgataaaacagcgagagcaagcatttgagcacagaagcttctttcgtgtttggaattcattcatcaattccttaagagaggaagacttcattagtgatagagagaaggacatgttgatggctccgtcatattcaagcaatttatccatcattcagtggccacctttcctccttgctagcaaggtacccgcagctgttcatatggccatgaattccaaagaaggggatgagcatgagcttattgagaaaatcaaacttgatggagacagatatgatgcagttatagaatgctacaaatccttgatgattatactcaatagccttctgctagacactaatgatcagaatattgtcaatgatattgataaaaaagtgacttatagcatgataaaaaaaactttcttggaagacttcgaaatggcagaaatcggcaaagtaagttctacattggctagattgttgcagctcctgaaaagtgaacctattaatgatgttggagagaggaaaattgttaatgccctgcaagactttatggaaattacgacacgtgatttcatgaaagatggacagagtttcaaagatgaggatgagagaaatcaaagattcatgaacctaaatatgaatatgataaaggaagattattggagggagaagtttgtccggctgcacttattgttgactatgaaggattctgcaatggatgttccaataaacttggatgctcgccgtaggatcaccttctttgcaaactcgctttttatgaaaatgccaagagcaccacgcgtgcatgatatgatttcatttagtgttctgacaccatactacaacgaagaagtactgtattcatcacatgacctgaatagaaaaaatgaagatggtatctcaattttgttctacctacaaaagatctatccagatgaatggaataacttcctagaacgtattggagttgaatcaaataatgaagtgtcgataaaagggcgcatggatgacatccgtttatgggcatcttaccgtggtcaaacacttgccagaactgtgagaggaatgatgtactatagacgagctcttgaactacaatgctatgaagatatgataaatgaccaaggttatggcctagctgatttggatacagctaaagctgcaaggtccaaggccattgctgatattaaattcacttatgttgtctcctgtcaactttatggcgtgcataagacatccaaggattcccgagaaagaggtctctacgagaatatcttaaacctcatgttgacgtatccagcattgcgcattgcttacatcgatgagaaagaagtacaattacgaaatggtaaaatagagaaacagtattactctgttcttgtgaaaggtgatgatgaggaaatctaccggataaggctccctggtaaaccaacagaagttggagaaggcaagcctaataatcaaaatcatgccataatcttcactagaggagaagcacttcaagcaattgacatgaaccaggataactatctagaggaagcatttaaaatgagaaatctcttggaagagttccttcttacacatggaaagtcagagcccaccatattgggtgttcgggagcatatatttacaggaagtgtttcatccctcgcctggtttatgtccagccaggagaccagcttcgtcactattggacaacgtgttcttgccaaccctcttaaggtacgatttcattatggccatcctgatgtttttgatagactctttcatctgacaaggggtggcataagcaaggcatcaaagattatcaaccttagcgaagatatatttgcaggtttcaattcaactctgcgtcgaggaaatgttacacatcatgaatacatacagttgggcaaaggacgtgatgttggaatgaaccaaatatccaactttgaggccaaggtggcaaatggaaatggtgaacaaacactatgccgtgatatttatcgactaggacacagatttgatttctacaggatgctatctctgtattttaccacagttggcttctacttcaatagcatggtggctgttctcacagtgtatgtatttttatatgggaggttataccttgttttgagtggcttagaaaagtcaatactgcaagatccaaatatccaaaacataaaaccatttgaaaatgcacttgccactcaatctgtattccaacttgggatgttgctcgttctcccaatgatgatggagattggccttgagaaaggatttggcagagcattggcagagtttgtaatcatgcaacttcagttagcttctgtattcttcacttttcatcttggaacaaagactcactactatggcaggacgatacttcatggtggagcaaagtatagagctactgggagagggtttgttgtgcgtcatgcaaagttcgctgagaattatcggatgtactcccggagtcactttgtcaaagcactggagctgcttattcttttggttgtctacctagcttatgggagttcatacagaagctcaagtttgtatttgtatgtcacagtttcgatatggttccttgttttctgttggctgtttgcaccttttgtcttcaacccatcctgctttgagtggcacaagactgttgatgactggaatgactggtggaagtggatgggcaatagaggtggtattggattagcgcctgaacaaagttgggaggcttggtgggtgagtgaacatgaccacctgaggaatgcaacaattcgaagcttgctcttggagttcatcctttccctgcggttcttgatctatcagtatggtattgtttaccacttgcacatagtgcatggcaacaaaagcttcttggtatatgcactgtcatggctggttatagcagttgctcttgtgtcactaaaggttgtttcaatggggagagagaagtttgttacaaggattcaactagtgttccgcatcctcaagggcattgtgttccttgtgctcattggtttgcttgtccttttatttgttggttttgaccttgctgtctcggatgttggcgccagtatcttggcattcattcccactggctggtttattcttctggttgcgcaattatgtggaccgctgtttcggaggttgatcatagagccacttcacttgctgtgttgcccatatggtaccggtggtgcatgcagaggtccctgctgtgccaggttcagacagaggaccggtgctgcgcttcggaagatgggaccatgggactccatccaggagatggcgaggatgtacgaatacaccatggggctcctcattttcctgcccattgccgtgctatcgtggttccccttcgtctctgaattccagacacggctgctcttcaaccaggccttcagcagggggctgcagatctctaggatcctcgcggggcagaatggtagcggcacaaagagcgactgatgctttgacattaacggagttatccattccgttgtgccatgtggtatctcgttgctattgtccgctaccgttatgtgtagaatcaagtatgttcatcgtttgaaaaagtgtcgcgcagtttgagtgtgtatgtcggattttaacctcttaattcagttcatattcattggttgtttccatttgatttgcacgtatacgttggaatctgtctgattttcggtgttaaaagtaagtgtttgtttttagctagaactttctctactcctttaaagcaccaattttatatgtcatgctttgcgtacgaagcatgtggattcgtttctttctcgcttctcgtctaccacaaatagaaataggttatgagagaccactcaaacttaacacgacaggaggaag

SEQ ID NO: 206062 - DNA, 1283 bp, Zea Mays
atgccaagttatgctcatcatcatccctaccagcgtgtacaaccgatgagtgtacccactcattgtcctaatcaaaatcctcaagcactaatgggtcataacttgtaccacctgtctccctactcttttggaacctactttgcatcttccggtttgccacgcaaccttggtgttgtcattaccatatgggcaccgattgtcatggtttacttcatggacacacaaatatggtatgccattttctccactgtctttggaggtgtttcaggtgccctaagtcatgtgggtgaaatacgaacccttggcatgttgagggccagattcaaatcaattccagaagctttcagtcaatgcaatgcgataaaacagcgagagcaagcatttgagcacagaagcttctttcgtgtttggaattcattcatcaattccttaagagaggaagacttcattagtgatagagagaaggacatgttgatggctccgtcatattcaagcaatttatccatcattcagtggccacctttcctccttgctagcaaggtacccgcagctgttcatatggccatgaattccaaagaaggggatgagcatgagcttattgagaaaatcaaacttgatggagacagatatgatgcagttatagaatgctacaaatccttgatgattatactcaatagccttctgctagacactaatgatcagaatattgtcaatgatattgataaaaaagtgacttatagcatgataaaaaaaactttcttggaagacttcgaaatggcagaaatcggcaaagtaagttctacattggctagattgttgcagctcctgaaaagtgaacctattaatgatgttggagagaggaaaattgttaatgccctgcaagactttatggaaattacgacacgtgatttcatgaaagatggacagagtttcaaagatgaggatgagagaaatcaaagattcatgaacctaaatatgaatatgataaaggaagattattggagggagaagtttgtccggctgcacttattgttgactatgaaggattctgcaatggatgttccaataaacttggatgctcgccgtaggatcaccttctttgcaaactcgctttttatgaaaatgccaagagcaccacgcgtgcatgatatgatttcatttagtgttctgacaccatactacaacgaagaagtactgtattcatcacatgacctgaatagaaaaaatgaagatggtatctcaattttgttctacctacaaaagatctatccagctaattcttg

SEQ ID NO: 206063 - DNA, 2228 bp, Zea Mays
atgccaagttatgctcatcatcatccctaccagcgtgtacaaccgatgagtgtacccactcattgtcctaatcaaaatcctcaagcactaatgggtcataacttgtaccacctgtctccctactcttttggaacctactttgcatcttccggtttgccacgcaaccttggtgttgtcattaccatatgggcaccgattgtcatggtttacttcatggacacacaaatatggtatgccattttctccactgtctttggaggtgtttcaggtgccctaagtcatgtgggtgaatatgtaagagagaaggacatgttgatggctccgtcatattcaagcaatttatccatcattcagtggccacctttcctccttgctagcaaggtacccgcagctgttcatatggccatgaattccaaagaaggggatgagcatgagcttattgagaaaatcaaacttgatggagacagatatgatgcagttatagaatgctacaaatccttgatgattatactcaatagccttctgctagacactaatgatcagaatattgtcaatgatattgataaaaaagtgacttatagcatgataaaaaaaactttcttggaagacttcgaaatggcagaaatcggcaaaaaaagtgaacctattaatgatgttggagagaggaaaattgttaatgccctgcaagactttatggaaattacgacacgtgatttcatgaaagatggacagagtttcaaagatgaggatgagagaaatcaaagattcatgaacctaaatatgaatatgataaaggaagattattggagggagaagtttgtccggctgcacttattgttgactatgaaggattctgcaatggatgttccaataaacttggatgctcgccgtaggatcaccttctttgcaaactcgctttttatgaaaatgccaagagcaccacgcgtgcatgatatgatttcatttagtgttctgacaccatactacaacgaagaagtactgtattcatcacatgacctgaatagaaaaaatgaagatggtatctcaattttgttctacctacaaaagatctatccagatgaatggaataacttcctagaacgtattggagttgaatcaaataatgaagtgtcgataaaagggcgcatggatgacatccgtttatgggcatcttaccgtggtcaaacacttgccagaactgtgagaggaatgatgtactatagacgagctcttgaactacaatgctatgaagatatgataaatgaccaaggttatggcctagctgatttggatacagctaaagctgcaaggtccaaggccattgctgatattaaattcacttatgttgtctcctgtcaactttatggcgtgcataagacatccaaggattcccgagaaagaggtctctacgagaatatcttaaacctcatgttgacgtatccagcattgcgcattgcttacatcgatgagaaagaagtacaattacgaaatggtaaaatagagaaacagtattactctgttcttgtgaaaggtgatgatgaggaaatctaccggataaggctccctggtaaaccaacagaagttggagaaggcaagcctaataatcaaaatcatgccataatcttcactagaggagaagcacttcaagcaattgacatgaaccaggataactatctagaggaagcatttaaaatgagaaatctcttggaagagttccttcttacacatggaaagtcagagcccaccatattgggtgttcgggagcatatatttacaggaagtgtttcatccctcgcctggtttatgtccagccaggagaccagcttcgtcactattggacaacgtgttcttgccaaccctcttaaggtacgatttcattatggccatcctgatgtttttgatagactctttcatctgacaaggggtggcataagcaaggcatcaaagattatcaaccttagcgaagatatatttgcaggtttcaattcaactctgcgtcgaggaaatgttacacatcatgaatacatacagttgggcaaaggacgtgatgttggaatgaaccaaatatccaactttgaggccaaggtggcaaatggaaatggtgaacaaacactatgccgtgatatttatcgactaggacacagatttgatttctacaggatgctatctctgtattttaccacagttggcttctacttcaatagcatggaaaaaaggtgatatctggg

SEQ ID NO: 206064 - DNA, 2240 bp, Zea Mays
tctggtgaaagggggagaagcacacaaacatggtacgatttcattatggccatcctgatgtttttgatagactctttcatctgacaaggggtggcataagcaaggcatcaaagattatcaaccttagcgaagatatatttgcaggttagtttttctgagattatgcaaaaacttagttgcttatttctgcccattaagtttacagttgttatatcgacaccaaaggtttcaattcaactctgcgtcgaggaaatgttacacatcatgaatacatacagttgggcaaaggacgtgatgttggaatgaaccaaatatccaactttgaggccaaggtggcaaatggaaatggtgaacaaacactatgccgtgatatttatcgactaggacacagatttgatttctacaggatgctatctctgtattttaccacagttggcttctacttcaatagcatggtggctgttctcacagtgtatgtatttttatatgggaggttataccttgttttgagtggcttagaaaagtcaatactgcaagatccaaatatccaaaacataaaaccatttgaaaatgcacttgccactcaatctgtattccaacttgggatgttgctcgttctcccaatgatgatggagattggccttgagaaaggatttggcagagcattggcagagtttgtaatcatgcaacttcagttagcttctgtattcttcacttttcatcttggaacaaagactcactactatggcaggacgatacttcatggtggagcaaagtatagagctactgggagagggtttgttgtgcgtcatgcaaagttcgctgagaattatcggatgtactcccggagtcactttgtcaaagcactggagctgcttattcttttggttgtctacctagcttatgggagttcatacagaagctcaagtttgtatttgtatgtcacagtttcgatatggttccttgttttctgttggctgtttgcaccttttgtcttcaacccatcctgctttgagtggcacaagactgttgatgactggaatgactggtggaagtggatgggcaatagaggtggtattggattagcgcctgaacaaagttgggaggcttggtgggtgagtgaacatgaccacctgaggaatgcaacaattcgaagcttgctcttggagttcatcctttccctgcggttcttgatctatcagtatggtattgtttaccacttgcacatagtgcatggcaacaaaagcttcttggtatatgcactgtcatggctggttatagcagttgctcttgtgtcactaaaggttgtttcaatggggagagagaagtttgttacaaggattcaactagtgttccgcatcctcaagggcattgtgttccttgtgctcattggtttgcttgtccttttatttgttggttttgaccttgctgtctcggatgttggcgccagtatcttggcattcattcccactggctggtttattcttctggttgcgcaattatgtggaccgctgtttcggaggttgatcatagagccacttcacttgctgtgttgcccatatggtaccggtggtgcatgcagaggtccctgctgtgccaggttcagacagaggaccggtgctgcgcttcggaagatgggaccatgggactccatccaggagatggcgaggatgtacgaatacaccatggggctcctcattttcctgcccattgccgtgctatcgtggttccccttcgtctctgaattccagacacggctgctcttcaaccaggccttcagcagggggctgcagatctctaggatcctcgcggggcagaatggtagcggcacaaagagcgactgatgctttgacattaacggagttatccattccgttgtgccatgtggtatctcgttgctattgtccgctaccgttatgtgtagaatcaagtatgttcatcgtttgaaaaagtgtcgcgcagtttgagtgtgtatgtcggattttaacctcttaattcagttcatattcattggttgtttccatttgatttgcacgtatacgttggaatctgtctgattttcggtgttaaaagtaagtgtttgtttttagctagaactttctctactcctttaaagcaccaattttatatgtcatgctttgcgtacgaagcatgtggattcgtttctttctcgcttctcgtctaccacaaatagaaataggttatgagagaccactcaaacttaacacgacaggaggaag

SEQ ID NO: 206065 - DNA, 2313 bp, Zea Mays
ctccaccttaaagtttatctgcttcgacctcccaactcgcactcgattgagccgttgctttgggcgttccatacataaatcgccatcgcggcatcgggccaagcgcgaaattattgcgagtttgctagccccaaccacaccaacaccacccgctccgcgtggccatcttcctcctcgtctccactctccactgcaagagctagacgaattaatgctgaggcgtctagctcttccctcgccggcactggccgcatgctaaggcgagagtggccttcttctcatgaccagtgcatggttggtccgggcgtacgttcccatgttgctccgtagcagaatctcgtcggcgtccatggagaagacgcgccgtcaccgggtgctggctgtgctgctgctgctggtggtggtgctggtctccgctctccctgatctcgggagctgccacaaagatgatgccggacaaggaggaactacgaacccagaggaagatatggtctctgtctccgaagctaggacaacccaccacggtgaccggaccaggaaattcctgcacgagcagcagcagcagaacaggtactggtccggggatttcggcgacaaggtgtcgtcgttgacagactccagccagtaccctccagacagtggaggcagttcttctcaaagcccagcgtcgacgttcaagccagaccagtggcagccatggctaccgtgggcacccaaggccccgccaccgatgagcgttcctccagcgcaggccccggcacctttccccgcgggggtggtctcaaaccctgggcacagcatcgcgctgcccccgcagccggcggtggtggtgccggccgacgccggcagtaggccggcggtgggtgccggcgttccggctggaggagcgggagcgaggccgcgctctggcggtgttggcaggcctgtctacgccatggctgcggccggggcctccctcgccgcggccgcggccgtggcgctcctcgtcctctgctaccggtccagcagcgtggtcaccgtcaggccctgggcgacggggctcagcgggcagctgcagaaggcgttcgtcacgggcgtgccgtcgctcaagaggtcggagctcgaggccgcgtgcgaggacttcagcaacgtcatcggctccctgtcggattacatggtgtataaggggacgctgtccaccggcgtggagatcgccgtggtgtccaccaccaagaactctgccaaggagtggtccaagcactgcgagtcacaattcaggaagaagataacaagcctgtccagagtgaaccacaagaacttcgtcaacctgctgggctactgccaggaagagcagccgtttacgaggatgatggtgttcgagtacgctccaaacggcacgctcttcgagcatctgcacgtcagagaagacggttacctggactggcccactcgcctgcgcgtggcggtcggcgtcgcctactgcctggagcacatgcaccagctgagcccgccggagatcctgcgggcgctggacacgtccaccatctgcctcaccgacgacttcgcggccaagatctccgacgtcttcttctgcgacgagccccgccggcaggaggggagcctgtccctgtcggcgctgtcggaccgggagagcgtggtgtacagctacgggatggtgctgctggagaccatgaccggccggttcacggcgtccgacggcggcctgctagaggcctgggccgcggcctacctgagaggggagcggcagctccgggacgtgatggatcccgccctgcggcggtccttccacgccgccaccgtggacaggctggacggcgtcatcaggggctgcaccgaccgggagcccaggaggcggctgaccatagcggaggtcgccaagcgcctgagggagatcactgccatgtcacccgacgcggccacccccaaggtttcgccgctgtggtgggcggagctggagatcatctgcgcagaggtcaactgaggtcaacctgagacggacgtgccaatgtttgtcgtgaaaaggctgtttcgtggtagatacacaggttgcttctttttgatatttttattttttaggtttatgttgaagtttgtgtccatctgtacatatgaacaaaatgaagtgtgcaaccaagctgattgttttaaaatattattttaataattaattattaaaaagaattgcaaaagttgtacgatttcaagatctgtctgtcttaagagctggttccaaccttcataggtaacgatatctcttcgcaatttatttgagctcttaacaaattttagttaaaaaatgaatagaaataaata

SEQ ID NO: 206066 - DNA, 2212 bp, Zea Mays
gcgaaattattgcgagtttgctagccccaaccacaccaacaccacccgctccgcgtggccatcttcctcctcgtctccactctccactgcaagagctagacgaattaatgctgaggcgtctagctcttccctcgccggcactggccgcatgctaaggcgagagtggccttcttctcatgaccagtgcatggttggtccgggcgtacgttcccatgttgctccgtagcagaatctcgtcggcgtccatggagaagacgcgccgtcaccgggtgctggctgtgctgctgctgctggtggtggtgctggtctccgctctccctgatctcgggagctgccacaaagatgatgccggacaaggaggaactacgaacccagaggaagatatggtctctgtctccgaagctagcaggacaacccaccacggtgaccggaccaggaaattcctgcacgagcagcagcagcagaacaggtactggtccggggatttcggcgacaaggtgtcgtcgttgacagactccagccagtaccctccagacagtggaggcagttcttctcaaagcccagcgtcgacgttcaagccagaccagtggcagccatggctaccgtgggcacccaaggccccgccaccgatgagcgttcctccagcgcaggccccggcacctttccccgcgggggtggtctcaaaccctgggcacagcatcgcgctgcccccgcagccggcggtggtggtgccggccgacgccggcagtaggccggcggtgggtgccggcgttccggctggaggagcgggagcgaggccgcgctctggcggtgttggcaggcctgtctacgccatggctgcggccggggcctccctcgccgcggccgcggccgtggcgctcctcgtcctctgctaccggtccagcagcgtggtcaccgtcaggccctgggcgacggggctcagcgggcagctgcagaaggcgttcgtcacgggcgtgccgtcgctcaagaggtcggagctcgaggccgcgtgcgaggacttcagcaacgtcatcggctccctgtcggattacatggtgtataaggggacgctgtccaccggcgtggagatcgccgtggtgtccaccaccaagaactctgccaaggagtggtccaagcactgcgagtcacaattcaggaagaagataacaagcctgtccagagtgaaccacaagaacttcgtcaacctgctgggctactgccaggaagagcagccgtttacgaggatgatggtgttcgagtacgctccaaacggcacgctcttcgagcatctgcacgtcagagaagacggttacctggactggcccactcgcctgcgcgtggcggtcggcgtcgcctactgcctggagcacatgcaccagctgagcccgccggagatcctgcgggcgctggacacgtccaccatctgcctcaccgacgacttcgcggccaagatctccgacgtcttcttctgcgacgagccccgccggcaggaggggagcctgtccctgtcggcgctgtcggaccgggagagcgtggtgtacagctacgggatggtgctgctggagaccatgaccggccggttcacggcgtccgacggcggcctgctagaggcctgggccgcggcctacctgagaggggagcggcagctccgggacgtgatggatcccgccctgcggcggtccttccacgccgccaccgtggacaggctggacggcgtcatcaggggctgcaccgaccgggagcccaggaggcggctgaccatagcggaggtcgccaagcgcctgagggagatcactgccatgtcacccgacgcggccacccccaaggtttcgccgctgtggtgggcggagctggagatcatctgcgcagaggtcaactgaggtcaacctgagacggacgtgccaatgtttgtcgtgaaaaggctgtttcgtggtagatacacaggttgcttctttttgatatttttattttttaggtttatgttgaagtttgtgtccatctgtacatatgaacaaaatgaagtgtgcaaccaagctgattgttttaaaatattattttaataattaattattaaaaagaattgcaaaagttgtacgatttcaagatctgtctgtcttaagagctggttccaaccttcataggtaacgatatctcttcgcaatttatttgagctcttaacaaattttagttaaaaaatgaatagaaataaata

SEQ ID NO: 206067 - DNA, 6053 bp, Zea Mays
aaacagcaaacttgaaaagagaaggaaatgatttggttgagaggttttatgatcagttcctcccaatgcgtgttacacaggatgcttctttatgtactgcgaactccacgattatccgaatgccattatcgtcaaaatgcctcaaagaacttgaagcaggttgcaatatagtacagcgggtttttgaccgatttacacagaatccatccagtactctcctattcttgaggtcaatcattcaggtatctttatcaacatgggaggatggggcctctcagtcaactctgaattattctgtacttgttgacccatctgttgcttctttgagaaacccattttcggaaaagaaatggagaaaatttcaaatatccagaatattttcaagtacaagtgcagctatcaaaatgcaagctatagatgtgcatgtgattgagagtggctgcagttatattgacaaatggtttgttgccctttctcttggatcgggtcaaacacgaaacatggctcttgacaggcgttatcttgcctataacctaaccccagttgctggagtagcagcgcatatagctcggaatggagtatcaaccaatatacatccatctagttgtatattatctcccttaccactatctgggtttataagcatgccagtcacaactttggggcatttcattgtgaggcacagtggtgggcgctatatttttgacagtccacgtgatgcatctctgccagaacttaaagaggacagggtcaggttggttgaagcatggaataaggaacttatgttatgtgtgcgtgattcatatgttgagatggttctagaatttcaaaagcttaaaacagaccctctatcttctgctattgaaccaaggtctgcacaatctgttagtgctatattacagacatatggtgatagggtatactctttttggccaagatcgaagcagaatccaacttcgttcactgggcgtgtttctactggaactaatatggattcaccaagggcatctaaagcggattggcaatccttaatagagcaagtgataaaacctttctatgtacggttagctgatcttcctgtttggcaactttaccatggaaatcttgttaaagtggatgagggtatgttcttagctcactcaggaaatggagatgacgataacctcccatctgatagtgtttgtagtttcattaaagagcgctatcctgttttttctgtgccgtgggagttggttagtgagattcaggcagttggagttaccataagagagatcaggcctaaaatggtccggggactactaaaagcttctccatccattttacttagatccattgaaacatatatagatgttcttgaatattgcttctcagatatggacccttaccgcttctcggatgatctacctgatgaatcaagagttaacagccaacatgttggaacaacgaattcttcaatatcacattctatgccttcttcgagcagctcactgtcttaccaatcaagtactcagatggcaggtacttctggaggcgatgcacttgaaattatgacatactttggaaaagccctatatgactttggtaggggggttgttgaggatatcagcaaaaccaatagtccagcattccacaggactcaagctgctgaaactaatgtgttgtcatccatcatttctgagcttaaaggtgttccatttccaacatcgacaatgcgtctaacaaagttgggaatggctgaactctggatagccaatgagcagcagcagctattgatgagccctttgctggatcaatttatccattataaatgtctggaaaaacccttcttggctctgctgctttccactcaggttatccataggcctctgaaactgaggagcttttctccccacttactagcaggttatttgaagcgcatacttgatgagcgttggatacggattgtactagagaacaaatcctcatggattccttgggacaataatgctgaatcatcaactactccaactcccaaatggattagaagtttctggaaaatttttagttctttgaacggtgacctctctcttttgtctgattggcccttagttcctgcttatctggataagccagttctctgtcgtgtgaaggaacgccatctaatatttgtgccaccaattagtgattcaccagaccctcctggagatgatgtagctggacagcttgatacaccggactcccccagagaagatactagagcagaacagaatgcagtgcttgatactgcatttaggtcaatgaactcggaatttccatggttaacttctctgcttaaccagttgaatgtaccaatttttgatccctccttcccagagtgtggcgcaatgtgcaatttatttcctccaaatggtcgtactcttggacagacaattgtttataagttggttgcagccaaaaatgctgcacatttaccttcgctaattagcctatcaagtgaagattgcgataaactatttgggttatttgtttcggagttcatattaactaacaaccacttgtatcagagagaagaattggatgtcttgagaacacttccaatgtataagacagttacaggaacatacaccagtctgttaggttccgatcattgcattctttctcctacagcattctttcacccgagcgatgcccggtgcctttcttgctcatcaaatgcacatttgtttcttcaagctttgggggttgaacaattaaatgatcatgaaatactagtgaagtttgcgttgcctggatttggaaataaaacagctcaagagcaggaagacattttgacctacttgtatgctagctggaaagatcttcaactgaactctgctgtagtagaaaccttgaaggagacaaactttgtggcaaatgcaaatgaattttgtaaagagtttttcaaacctgaggaattacttgacccttcagatgctctgttgacttctgtgttttctggggagagaaataagttccctgctgaaaggttcatgtcagatggttggcttgttatactcagaaaagcaggccttaggacatccacagaagctgatatgataatacagtgcgcaagaaaaatagaaaccatgggacatgatattatgtcgtctttagaagatgctgatgactttgaggcagatttcacagacagcaaaaatgaaatcccttttgagatatgctctctggcagaatctgtagtaaatgtgctttttgcaaattttgctactttgtatgatagtgctttttgtgaaaagattggaaaaattgcatttgtgcctgctgaaaaaggttttccaagtattggtggtaagaggggtggtcgaagggtacttgcctcatacaatggagctatcttattaaaagactggccattagcatggagttctgctccaattcttaccaaacaaacaattgttcctcctgagtattcttggggagcatttcggcttaggagtccacctgccttcagtacagtttttaggcacttacagattgttggtagaggcaatggtgcggacacactagcacactggccaacctcagcagagataatgacggtggaagatgcctttctacaggtcttgcaatacttggataaaatatggggaacaatatcttcttcagaaaaaaaagaactggagaaactggcatttataccagttgcaaatggtactcgattggtcccagtgaagtcactttttgctcgtctgacaattaacatgtcaccttttgcttttgagcttccaagtcggtatcttccatttgtttcccttcttagagagattgggatgcaggaaagccttacaaattcatatgcaagagaacttcttttggatatccaaaaggcatgtggttaccagcgcttgaacccaaatgaactccgtgcagttatggaaatcttggaattcatgtgcaatggaatcaaccaaagtatcacagatggatcagatgggccttttgattcagtaataccagatgacggctgtaggctggtcactgctgcatcatgtgtgtatgttgacccatatggttctcgtttactgagtaacataattacatcaagactaagattcacccatccagaccttcctcagaatatctgcaaggccttgagcataaaaaagctctctgatgtcattgtggaggaacttgatggaaaagaagaaattaaagttgtcaatagcattcactcagttactctagacagaataaaagagaagctgcgaagtaaatctttgcaagatgcattaaggattgtgatgatcagcgtaaccaatcatttcccttcatttgaagcccttgctttggttcagatagaacggacactagaggatatatcacagaaactgcaactggttcaacgtctccatactcgctttctcttacttcccaatctccaagatgttacaagaaccatccagcgtccttctattcatgaatggtcaagcaacggaatgcaccgaagcatttgtttcgtcaacaaagctacgggttatattctaatcgcagagcccccaagttttttgacgatatatgatgttatcgcaattattgttagtcacaggttaggggcaccaatgatcttgccgattgcctcagtgtttgcatgcccagatggttcagagaaagaagtccttcaaattcttcacctgggttcagactttggagtttcaaaacgtgaagggagatacgacgcttcccttggagcagaattgttatctcaggatgctcggcaggtgcaattccttccattaagaccgttctatagtggtgaaattgtggcatggaagacaggcaaagagggggaaaagctcaggtatggtagggtccctgaagatgtaagaccctcagctggccaagcactttacagatttccagtagagacagctcctggcgaaactcgcatgatgctttccagtcatgtttactcatttaaaagtgtttcaatggctgatcttctgtctgcaccttcccaagtgaatggtgatgtggcattaggtggccaagagaacctcttggccaccaacactggcactgaagtcaccaaggatgcggatgctggacttgaatatggaaaagtatcttccactgaactggtacaagcggtccatgatatgctttcagctgcaggagtaaggatggatgctgagaaggaaacactctttgaggctactctttccttgcaagatcagcttaaagaatctcaagttgctctcttggtagagcaggagaaggcggaggcggctgtaaaagaggctgatgtcgccaaagcagcatgggcatgccgtatctgcctgaatgctgaggtcaacatgaccatcataccatgcggtcatgtcctatgtaaccgatgctcaagttcggtttcgcggtgcccattttgccggacgcaggtggccagaatgatgaaaatattcaggccataaaaaacattgaaggacgtttggtctgactaaccgcttcagcctgtgaatgtgttacgatatcggggctcggctcccttctggttgtgcgttgcattcctttctggtctgatgcatctcattattctccatcggtgatgattggtaatccgatatggggggtgcaagtatagttacgttgtacaggaacgatgcattgcagtgtacatattccaaaatgaaatcattttacacacttcgaagggcatcgatgtctgaagctggttttctcgtgcaatactttcagagtcaacactacactgccctggttatccattcagcatgtatggtggtgtccaacaaagacccattccttgtgaaaaaatcttagcactggctccttcaatacgaaagaaacgacatactgaaatcagctacgatgataggctgctagcctacgggctaaacgtggtttcgttactgagcagcgggtaaaattgtcaattcgtacaataaactggggcacctcggccctcagtcataggctcatagcatttgatgcaaccaggtgaccaggctactgttccatttgcatgtttctttttccagacttcctcgaatcatgctttcaca

SEQ ID NO: 206068 - DNA, 6058 bp, Zea Mays
ttctcttctgcgttgagattgtagttatggaaatgatttggttgagaggttttatgatcagttcctcccaatgcgtgttacacaggatgcttctttatgtactgcgaactccacgattatccgaatgccattatcgtcaaaatgcctcaaagaacttgaagcaggttgcaatatagtacagcgggtttttgaccgatttacacagaatccatccagtactctcctattcttgaggtcaatcattcaggtatctttatcaacatgggaggatggggcctctcagtcaactctgaattattctgtacttgttgacccatctgttgcttctttgagaaacccattttcggaaaagaaatggagaaaatttcaaatatccagaatattttcaagtacaagtgcagctatcaaaatgcaagctatagatgtgcatgtgattgagagtggctgcagttatattgacaaatggtttgttgccctttctcttggatcgggtcaaacacgaaacatggctcttgacaggcgttatcttgcctataacctaaccccagttgctggagtagcagcgcatatagctcggaatggagtatcaaccaatatacatccatctagttgtatattatctcccttaccactatctgggtttataagcatgccagtcacaactttggggcatttcattgtgaggcacagtggtgggcgctatatttttgacagtccacgtgatgcatctctgccagaacttaaagaggacagggtcaggttggttgaagcatggaataaggaacttatgttatgtgtgcgtgattcatatgttgagatggttctagaatttcaaaagcttaaaacagaccctctatcttctgctattgaaccaaggtctgcacaatctgttagtgctatattacagacatatggtgatagggtatactctttttggccaagatcgaagcagaatccaacttcgttcactgggcgtgtttctactggaactaatatggattcaccaagggcatctaaagcggattggcaatccttaatagagcaagtgataaaacctttctatgtacggttagctgatcttcctgtttggcaactttaccatggaaatcttgttaaagtggatgagggtatgttcttagctcactcaggaaatggagatgacgataacctcccatctgatagtgtttgtagtttcattaaagagcgctatcctgttttttctgtgccgtgggagttggttagtgagattcaggcagttggagttaccataagagagatcaggcctaaaatggtccggggactactaaaagcttctccatccattttacttagatccattgaaacatatatagatgttcttgaatattgcttctcagatatggacccttaccgcttctcggatgatctacctgatgaatcaagagttaacagccaacatgttggaacaacgaattcttcaatatcacattctatgccttcttcgagcagctcactgtcttaccaatcaagtactcagatggcaggtacttctggaggcgatgcacttgaaattatgacatactttggaaaagccctatatgactttggtaggggggttgttgaggatatcagcaaaaccaatagtccagcattccacaggactcaagctgctgaaactaatgtgttgtcatccatcatttctgagcttaaaggtgttccatttccaacatcgacaatgcgtctaacaaagttgggaatggctgaactctggatagccaatgagcagcagcagctattgatgagccctttgctggatcaatttatccattataaatgtctggaaaaacccttcttggctctgctgctttccactcaggttatccataggcctctgaaactgaggagcttttctccccacttactagcaggttatttgaagcgcatacttgatgagcgttggatacggattgtactagagaacaaatcctcatggattccttgggacaataatgctgaatcatcaactactccaactcccaaatggattagaagtttctggaaaatttttagttctttgaacggtgacctctctcttttgtctgattggcccttagttcctgcttatctggataagccagttctctgtcgtgtgaaggaacgccatctaatatttgtgccaccaattagtgattcaccagaccctcctggagatgatgtagctggacagcttgatacaccggactcccccagagaagatactagagcagaacagaatgcagtgcttgatactgcatttaggtcaatgaactcggaatttccatggttaacttctctgcttaaccagttgaatgtaccaatttttgatccctccttcccagagtgtggcgcaatgtgcaatttatttcctccaaatggtcgtactcttggacagacaattgtttataagttggttgcagccaaaaatgctgcacatttaccttcgctaattagcctatcaagtgaagattgcgataaactatttgggttatttgtttcggagttcatattaactaacaaccacttgtatcagagagaagaattggatgtcttgagaacacttccaatgtataagacagttacaggaacatacaccagtctgttaggttccgatcattgcattctttctcctacagcattctttcacccgagcgatgcccggtgcctttcttgctcatcaaatgcacatttgtttcttcaagctttgggggttgaacaattaaatgatcatgaaatactagtgaagtttgcgttgcctggatttggaaataaaacagctcaagagcaggaagacattttgacctacttgtatgctagctggaaagatcttcaactgaactctgctgtagtagaaaccttgaaggagacaaactttgtggcaaatgcaaatgaattttgtaaagagtttttcaaacctgaggaattacttgacccttcagatgctctgttgacttctgtgttttctggggagagaaataagttccctgctgaaaggttcatgtcagatggttggcttgttatactcagaaaagcaggccttaggacatccacagaagctgatatgataatacagtgcgcaagaaaaatagaaaccatgggacatgatattatgtcgtctttagaagatgctgatgactttgaggcagatttcacagacagcaaaaatgaaatcccttttgagatatgctctctggcagaatctgtagtaaatgtgctttttgcaaattttgctactttgtatgatagtgctttttgtgaaaagattggaaaaattgcatttgtgcctgctgaaaaaggttttccaagtattggtggtaagaggggtggtcgaagggtacttgcctcatacaatggagctatcttattaaaagactggccattagcatggagttctgctccaattcttaccaaacaaacaattgttcctcctgagtattcttggggagcatttcggcttaggagtccacctgccttcagtacagtttttaggcacttacagattgttggtagaggcaatggtgcggacacactagcacactggccaacctcagcagagataatgacggtggaagatgcctttctacaggtcttgcaatacttggataaaatatggggaacaatatcttcttcagaaaaaaaagaactggagaaactggcatttataccagttgcaaatggtactcgattggtcccagtgaagtcactttttgctcgtctgacaattaacatgtcaccttttgcttttgagcttccaagtcggtatcttccatttgtttcccttcttagagagattgggatgcaggaaagccttacaaattcatatgcaagagaacttcttttggatatccaaaaggcatgtggttaccagcgcttgaacccaaatgaactccgtgcagttatggaaatcttggaattcatgtgcaatggaatcaaccaaagtatcacagatggatcagatgggccttttgattcagtaataccagatgacggctgtaggctggtcactgctgcatcatgtgtgtatgttgacccatatggttctcgtttactgagtaacataattacatcaagactaagattcacccatccagaccttcctcagaatatctgcaaggccttgagcataaaaaagctctctgatgtcattgtggaggaacttgatggaaaagaagaaattaaagttgtcaatagcattcactcagttactctagacagaataaaagagaagctgcgaagtaaatctttgcaagatgcattaaggattgtgatgatcagcgtaaccaatcatttcccttcatttgaagcccttgctttggttcagatagaacggacactagaggatatatcacagaaactgcaactggttcaacgtctccatactcgctttctcttacttcccaatctccaagatgttacaagaaccatccagcgtccttctattcatgaatggtcaagcaacggaatgcaccgaagcatttgtttcgtcaacaaagctacgggttatattctaatcgcagagcccccaagttttttgacgatatatgatgttatcgcaattattgttagtcacaggttaggggcaccaatgatcttgccgattgcctcagtgtttgcatgcccagatggttcagagaaagaagtccttcaaattcttcacctgggttcagactttggagtttcaaaacgtgaagggagatacgacgcttcccttggagcagaattgttatctcaggatgctcggcaggtgcaattccttccattaagaccgttctatagtggtgaaattgtggcatggaagacaggcaaagagggggaaaagctcaggtatggtagggtccctgaagatgtaagaccctcagctggccaagcactttacagatttccagtagagacagctcctggcgaaactcgcatgatgctttccagtcatgtttactcatttaaaagtgtttcaatggctgatcttctgtctgcaccttcccaagtgaatggtgatgtggcattaggtggccaagagaacctcttggccaccaacactggcactgaagtcaccaaggatgcggatgctggacttgaatatggaaaagtatcttccactgaactggtacaagcggtccatgatatgctttcagctgcaggagtaaggatggatgctgagaaggaaacactctttgaggctactctttccttgcaagatcagcttaaagaatctcaagttgctctcttggtagagcaggagaaggcggaggcggctgtaaaagaggctgatgtcgccaaagcagcatgggcatgccgtatctgcctgaatgctgaggtcaacatgaccatcataccatgcggtcatgtcctatgtaaccgatgctcaagttcggtttcgcggtgcccattttgccggacgcaggtggccagaatgatgaaaatattcaggccataaaaaacattgaaggacgtttggtctgactaaccgcttcagcctgtgaatgtgttacgatatcggggctcggctcccttctggttgtgcgttgcattcctttctggtctgatgcatctcattattctccatcggtgatgattggtaatccgatatggggggtgcaagtatagttacgttgtacaggaacgatgcattgcagtgtacatattccaaaatgaaatcattttacacacttcgaagggcatcgatgtctgaagctggttttctcgtgcaatactttcagagtcaacactacactgccctggttatccattcagcatgtatggtggtgtccaacaaagacccattccttgtgaaaaaatcttagcactggctccttcaatacgaaagaaacgacatactgaaatcagctacgatgataggctgctagcctacgggctaaacgtggtttcgttactgagcagcgggtaaaattgtcaattcgtacaataaactggggcacctcggccctcagtcataggctcatagcatttgatgcaaccaggtgaccaggctactgttccatttgcatgtttctttttccagacttcctcgaatcatgctttcaca

SEQ ID NO: 206069 - DNA, 14325 bp, Zea Mays
aatcaaggacaagaaacacggcgacgaaaaggctaggtagagtcaaatccccgggagaccaaccacccccgcaccgccacgaacacgcccaaatcggagagccataccaaaccaaagccttcgcatccctccggaaccctagcatcctccctcctcgctcctgggatgccccagtagctccgatcggcgcctcaccgccatggatccgggcggcgggggcgggatgctcctggaggacttcggccagcgcgtggacctcacgcgccgcatccgcgaggtgctcgccaactacccggagggcaccaccgcgctgcgggagctcatccagaacgccgacgacgctggcgccgggcgcgtccgcctctgcctcgaccgccgatcgcacgggagggcgtcgctgctgtcccccgcgctcgcgcagtggcagggtcccgcgctgcttgcttacaacgacgcggtgttcaccgacgaggacttcgccagcatctcccgcattggagacagcaggaaggtcgcccagacgtggaagactggccgcttcggggttggttttaactcagtttaccacttgactgatttgccatcgttcgtgagtggcaagtatgttgtcctattcgacccccagggtgcttatctaccaaatgtgtcggcatcaaatcctggaaagcgcatcgactatgtcagttcgtcagcaatcacaatgtaccatgatcagttttcaccctactgtgcgtttggctgcgacatgaaagcatcatttcagggaactctgtttcgttttcctttgaggagctctgagcaagcatcttcaagtcggttatcaagacagtcatacacagaagatgatattttatctctttttgcccaactgtaccaagaaggcgtatataatctgctgttccttaaaaatgttctatcacttgagatgtatgtgtgggaatctggtatgaccgagccaaaaataatatactcttgctacttagggccacagagtgaaaagctgtcctggcatcgccaagcccttgtcaggttctctggcactcctgttgaatcttctaagcagaagctggactctttctcgatggattttatatcagaagcattcttgggcaacaagattgagaagaagagctctacctattttatcatccagggaatggcatctgcatcaagtaaaattggtatttttgcaactgcagctgccaaggaatatgatcttcacttactgccttgggcttctgttgctgcttgcatctccaacacagggcttgaggatactgttctcagacagggtcaagctttctgttttcttcctttgccagtaaggacaggactatctgtgcacgtcaatggttattttgaagtttcatccaaccggcgtgacatttggtatggtgctgacatggacaggggtggtaagcttcgctctgattggaacaggctactgttggaagatgttgtcgctccgttgttcagagaactgctgatgaaattgcggacgctttctgactccacaatatcatattattcactgtggccaactggtttatatgaggatccctggagtatccttgtggagcaaatttacaaggttatttacacctcgccagtcttgcactcagagattgaaggcgggacctggatatcaccggctgatgccttgcttcacgatgagggattctcaggaagcaataatcttaatgaagccctcgtgttggtaggcatgccaattgttcgtgtatctaatgcaataggcgatatgttttcaaaattttatatgcagtctatgctcaaaatagtaagtcctgctatagtgaggcatttcctcaaggattatgctaaacttgctacgctaggaaagtctcataagttaatattattggaatattgtcttactgatgtttacaatactgatatcggtaaatgcatgaatggccttccactgattccactagcaaatatgcggtatgggactttttctgctagttcgcaagaggactattattatgtctgtgataacatcgaatatgagcttctagctgaagttggtgatagaatagttgacagaagcatccctcctgtactactagacaagctgtatcagatagccagtgattcccaggcgaacattaggttcattgatggcccaatcttctgccagctcttacccaggttatttcctcctggatggaagcttaaagatcaagttccctggaacccaggcttgggtgggtcatctcctacagcagcatggtttaaacttttttggcagtatatagggggacgctcgtatgaccttcatttgtttagtgattggcctatactgccatctacctttggccaccttcacagggcatgcacaagctcaaaattaatcaaaacagaatcactgtctagtttgatgaatgaactcctggcaaagtttggttgcaagatactggatgctgaatatttgagtgatcacaaacaattgtcattttatgtatatgatggtgatgcaactggagttcttcagtcaatctttgaggttatctcattggagggtgttgatttgcaatctctgtttcaacgcattactcctggtgaaaaaaatgagctgtaccagtttcttctggatccaaaatggtatttaggagcctgcctttctgtcgtaagtataaaccaatgtaaaaagcttccaatcttcagggtatttgatggaggttctcccagcacttatggtttctcggatttgtttagttcaagaaagtatctgccacctcttggtgttcctgaccatttactcaatgacgactttattttctctatttgcccaagcgatgaagatatcataatgagatattatggcattgaacgcatgccgaaatcgaacttctaccagaggtatgttctgaatagattagacaagctgcaaacggagttgcgtgattcagttcttttaacaatcttacaagatctgcctcagctgtccttggaggatccaatgttcaaggaaaccttgaaaattcttagatttgttcccactatcaatggaactttgaaaagcccacaatctctttatgatccccgggtggaagaactttatgttcttctccaggaatcgggttgctttccccatggtttatttcaaaatccagatgttcttgatatgctgctttgcttggggcttagaacttcagtttctaccgataccatattagaaagtgctcgtcagattgattcacttgtgaacatagatcagcagaaggcccattcaagggctaaggtccttctttcatatcttgaagttcatgctcacaaatggtatgtgaataagctatttgatggtcgtaagaaggtaaacatgctagctaaagttaccactgcgctcagacctcgtgacaaatcttgggaatttgatcttgagaagttctggagtgatctgagattgatttgctggtgtcctgtgttggctactgcaccaagtccagctttgccatggccttcagtatcatcaatgatagctccacctaagcaagtaaggatgcaggaagatatgtggattgtttctgctagctcacgcattctcgatggtgaatgcacctcctcggccttgtcgtacagtttaggttggttgtcgcctccatcagggagcgtgattgcagctcaactgcttgaattgggcaagaacaatgaaattgtgactgatcaagtccttcggcaagaattagctttggtgatgcctaagatttattctttgctgacaaacttgattggttctgatgaaatggatatagtgaaagtggttctagaaggatgcagatggatttgggtgggtgatggatttgcgaaaacagatgaagttgttttaagtggccaccttcatctagcaccatacattcgtgttgttccaattgatttagcagtgttcaaagacttgttcttggaactcggcataaaggagcacctgtaccctgttgattatgctagtattcttggcagaatggccataaggaaagcttcagcttcacttgaagctgaagaactaagaacagctatcctggttgtgcagcatttatctgagttccggtttcaggatcagcaaacacaaatatatttacctgattcttcgtctaggctttgtctatcttctgaacttgtattcaatgacgctccttggttgcttgattttggtcatgacatcagtgggagtgcatcaagcattgctttaagctcaaaaaagtatgttcacaattttgttcatggtaacatttctaatgatgtggcagaaaggcttggtgttcgatctcttcgccgcctattgcttgctgagagttctgattcaatgaatttgagtttatcaggggttgctgaggcgtttggacagcatgaagacttgactacacggctcaagcacattgttgagatgtatgcagatggccctggaattctctttgagttggtacagaatgcagaagatgctaaggcttctgaggttgtgtttttgctggataagactcagtatggaacttcatccattctttcgcctgaaatggctgaatggcaaggacctgctctctactgctttaatgattcagtttttagtccacaggacctatatgccatctcacgaataggtcaagacagtaaacttgagaaaccttttgcaattggaaggtttggtcttggcttcaattgtgtgtatcacttcacagatattcctggatttgtttccggtgagaatattgtcatgttcgatccacatgcctgttatttgccaggaatatctccgtctcatcctggtttaaggatacagtttgtaggaagaaggatcttagatcagtttcctgatcagttcgccccattcttacattttggttgcaatttgcaacagccatttccaggtacactcttccggtttccccttaggaatgcggctgctgcttcgagaagtcaaataaaacgagaacagtatgcaccacaagatgtggaaatgcttttctcttcattctccgaagttgtatctgaggctctactttttctccgcaatgttaaaaaggtaactctatatgtcaaggaaaacaacagtaaggagatgcgacttgttcatcgtgtctccaggcataatagctctcagataggtaaagaacctcatgcacttggtgcaatgcttgcgtttatacatggaagccaaccatcaggaatggatagaaatcagtttttcagtaagttgaataagactaaagacagtgacttgccctggagttgtcagaaggttactattcttgaggaaaacccttcttcacacttgttgcactcatggattttagctgaatgtataggtgggggtcatgctagaaagttgtcaactgcctctgttagtaaatctcacttctttgttccgtgggcatctgttgctgcatatctgcattcagtgagtgtagatgatacaaaaggactatcagctgaagctgaagtcaaccatgataactcagttttcacaaacccagatcttggatcttctaagttcaggaaaaattttgaggctcgggccttttgctttcttcctctaccaatcaatactagcataccagtgcatgtaaatgcttattttgaactctcttcaaatcgaagggatatctggatcggaaatgacatggctgggggaggaagagtacggtcagaatggaatttagcgctgcttgaagatgtcgttgctcctgcttatgggcacctgcttgcagctgttgctgaagagcttggtccctctgacttgtttctttcattttggcctagtgctgcaggtgtggaaccatggtcttccatggtgaggaaactctatgtttctattgcagaacttggaattcacgttttatatacaaaagctcgaggtggtcactggctgtcaacaaggcaggctatttttccagatttcagtttctcaaaggcaatggagctggcagaagttctctctcaagctggtttgcctgtggtatctgtaaccaagccaataattgacagtttcattaatgcatatccatcagttcatctactaaatcctcatttgctgagaaatttgttgatccgacggaagcgtggcttcagaagcagagaagaggctatacttgttcttgagtattgcttgagtgatatgggagatccttccttttgcgataaattgcaaggtttggctctccttcctgtggcaaatggatcattcacaacattcaacaagcgaggggagggtgagagagtattccttacttcacaaatagaatttgaacttcttaaggattccataccacatcttgttattgacaactctttaccagatggtgtttcgaagaagttatatgacatagcttattctgcgtgcatgaacatatatatattcacaagtaatcttctcattgagctgttgcctaggatcttgccacctgaatggcaacatgctaagcagttgtcttggtttcctgagcagcaaggtcagccaagtatggaatggatggtatcactctggaattttttgaggcattcctgtgacgatatttcagtttttgcaaagtggcctataatacctcttgtagatggcaaggttgtgcaacttgggaatgctgcaaatgtaataagagattatggatggagtgaaaatatgcattccttgcttcaaaaactgggatgtttatttctgcgatctgatctgcagatagaacatccccagttagcgaattttgttcaggaatccactgctgctggtgttttgaatgctgtgcagtctgtagcttctaatctccaggatatcaaggaattgtttatgagcacttcattggcagaagcacacgaactccgaagtttcattttccagtcaaagtggttttctggaaatcagatcagctcctcccatatgaatacaatcaggaacctcccaatatttgaatcttataaatctagggaacttgttagcttgacgaatcctagaaaatggcttaaaccagaaggggtgcatgaggatttattggatgcaagctttataagaactgaatctgtgaaggagaggtcaattttggtatcatactttgatatcaaggaacctcaaaaggttgaattttacaaggaccatgtccttcctcgaatgtcagagtttctattgcagccagctattatttcagcagttattcgtgatgtgaaactgttgatagataatgatgattcagcaagagctgcattatgtgagaccccttttgtcttagcagccaatggagcatgggtccagcccttcaggctctatgatcctcgtgtgcccgagttactgaagttgctgcaccaagatactttctttccttcagaaaagttcatgatgactgaagtaattgaattgttgggtagttttggattgaaaagaaatttcgggtttagtactttgcttgacatggcaaggtcagtttcactggtgcagaattcaggacaaggtgatgcgtttgattatgggcaaaagctacttgcctatctaaacattcttgagtccaaaacttcaaagatggagggcggagaaacttttcttgaggatgggaatctggaagcatctgaaattagtgaaactttggaacctaacaatcacggggatgtgtgtgatccaagcgaccaaactagtgtatctttgttctcaaatttcgattatgatatgccagaagatttattttggtcagagctgaaaaatatttcttggtgtccggtgcatgttgcaccattgctcaaaggacttccatggttcatatccgaagatatcatagcacctccagtcatcacaaggccgaaatcacagatgtggcttgtttcatcaaaaatgcgaattcttagtgcagattcctgttccatgtatctgcaaagaaaactaggctggtgtgatccaccaaatgtgagcacattgtcttcccagttagtcgagctctccaagtctcatgatgaactcaaaatgttttctgcagacacagacattgatgctattctgcaaaaggaggtccaagtaatgtactcaaaattgcaagacataattggcactcccagtggcaacgctctaaaaaagtatctggatggatttcaatgggtttatgtaggagataggttcgtggcaccacaggcacttgcttttgattcacctgtaaaatatcatccctatctttacacagttccatccgaactgtcagaatttaaaaagttactctccgagttgggtgtaaggcagacatttgatggaatggattatctgaatgcgcttcgccgtttagaaggagatgtcaaaggagagccgttgtccacagatcaactcagttttgttcactgtgtattggaagcatttgttgactgttaccctgacagtcaagcacctgatgtgttactgaactcattggcgattccggattcacttggggttctgacacctgctagaaaccttgtctataatgatgcaccctggatgaatgctaatcccacttcaaagaattttattcatctcagcattggcaatgaactggctaataggcttggtgtacgatctctccgtggatcatcattgttggatgatgagttaatgaggaatttgccctgcatggaatatgctaaaataagtgagttgttggctttgtatggtgagagtgactttcttttgtttgatcttatagagctagcagactattgcaatgcaaagaaagtgcatctgatttatgacaaaagagaacatccgaaacagtccttactgcagcagagtctaggtgacctccagggttcttcgttgacagtggtctttgaaggaaccataatgaaccgcgaagaagtttgcagcttccaacttcctcctccctggaaactgagagggaacatccttaattatggcttgggacttcttagtagttactttgtttgtgatgcattgactattctttctggaggttacttttacatttttgatcccttgggcttgactggtggtacgacttccactgctacctcatcagcaagatacttctctttgttaggaaatgatttggttgagaggttttatgatcagttcctcccaatgcgtgttacacaggatgcttctttatgtactgcgaactccacgattatccgaatgccattatcgtcaaaatgcctcaaagaacttgaagcaggttgcaatatagtacagcgggtttttgaccgatttacacagaatccatccagtactctcctattcttgaggtcaatcattcaggtatctttatcaacatgggaggatggggcctctcagtcaactctgaattattctgtacttgttgacccatctgttgcttctttgagaaacccattttcggaaaagaaatggagaaaatttcaaatatccagaatattttcaagtacaagtgcagctatcaaaatgcaagctatagatgtgcatgtgattgagagtggctgcagttatattgacaaatggtttgttgccctttctcttggatcgggtcaaacacgaaacatggctcttgacaggcgttatcttgcctataacctaaccccagttgctggagtagcagcgcatatagctcggaatggagtatcaaccaatatacatccatctagttgtatattatctcccttaccactatctgggtttataagcatgccagtcacaactttggggcatttcattgtgaggcacagtggtgggcgctatatttttgacagtccacgtgatgcatctctgccagaacttaaagaggacagggtcaggttggttgaagcatggaataaggaacttatgttatgtgtgcgtgattcatatgttgagatggttctagaatttcaaaagcttaaaacagaccctctatcttctgctattgaaccaaggtctgcacaatctgttagtgctatattacagacatatggtgatagggtatactctttttggccaagatcgaagcagaatccaacttcgttcactgggcgtgtttctactggaactaatatggattcaccaagggcatctaaagcggattggcaatccttaatagagcaagtgataaaacctttctatgtacggttagctgatcttcctgtttggcaactttaccatggaaatcttgttaaagtggatgagggtatgttcttagctcactcaggaaatggagatgacgataacctcccatctgatagtgtttgtagtttcattaaagagcgctatcctgttttttctgtgccgtgggagttggttagtgagattcaggcagttggagttaccataagagagatcaggcctaaaatggtccggggactactaaaagcttctccatccattttacttagatccattgaaacatatatagatgttcttgaatattgcttctcagatatggacccttaccgcttctcggatgatctacctgatgaatcaagagttaacagccaacatgttggaacaacgaattcttcaatatcacattctatgccttcttcgagcagctcactgtcttaccaatcaagtactcagatggcaggtacttctggaggcgatgcacttgaaattatgacatactttggaaaagccctatatgactttggtaggggggttgttgaggatatcagcaaaaccaatagtccagcattccacaggactcaagctgctgaaactaatgtgttgtcatccatcatttctgagcttaaaggtgttccatttccaacatcgacaatgcgtctaacaaagttgggaatggctgaactctggatagccaatgagcagcagcagctattgatgagccctttgctggatcaatttatccattataaatgtctggaaaaacccttcttggctctgctgctttccactcaggttatccataggcctctgaaactgaggagcttttctccccacttactagcaggttatttgaagcgcatacttgatgagcgttggatacggattgtactagagaacaaatcctcatggattccttgggacaataatgctgaatcatcaactactccaactcccaaatggattagaagtttctggaaaatttttagttctttgaacggtgacctctctcttttgtctgattggcccttagttcctgcttatctggataagccagttctctgtcgtgtgaaggaacgccatctaatatttgtgccaccaattagtgattcaccagaccctcctggagatgatgtagctggacagcttgatacaccggactcccccagagaagatactagagcagaacagaatgcagtgcttgatactgcatttaggtcaatgaactcggaatttccatggttaacttctctgcttaaccagttgaatgtaccaatttttgatccctccttcccagagtgtggcgcaatgtgcaatttatttcctccaaatggtcgtactcttggacagacaattgtttataagttggttgcagccaaaaatgctgcacatttaccttcgctaattagcctatcaagtgaagattgcgataaactatttgggttatttgtttcggagttcatattaactaacaaccacttgtatcagagagaagaattggatgtcttgagaacacttccaatgtataagacagttacaggaacatacaccagtctgttaggttccgatcattgcattctttctcctacagcattctttcacccgagcgatgcccggtgcctttcttgctcatcaaatgcacatttgtttcttcaagctttgggggttgaacaattaaatgatcatgaaatactagtgaagtttgcgttgcctggatttggaaataaaacagctcaagagcaggaagacattttgacctacttgtatgctagctggaaagatcttcaactgaactctgctgtagtagaaaccttgaaggagacaaactttgtggcaaatgcaaatgaattttgtaaagagtttttcaaacctgaggaattacttgacccttcagatgctctgttgacttctgtgttttctggggagagaaataagttccctgctgaaaggttcatgtcagatggttggcttgttatactcagaaaagcaggccttaggacatccacagaagctgatatgataatacagtgcgcaagaaaaatagaaaccatgggacatgatattatgtcgtctttagaagatgctgatgactttgaggcagatttcacagacagcaaaaatgaaatcccttttgagatatgctctctggcagaatctgtagtaaatgtgctttttgcaaattttgctactttgtatgatagtgctttttgtgaaaagattggaaaaattgcatttgtgcctgctgaaaaaggttttccaagtattggtggtaagaggggtggtcgaagggtacttgcctcatacaatggagctatcttattaaaagactggccattagcatggagttctgctccaattcttaccaaacaaacaattgttcctcctgagtattcttggggagcatttcggcttaggagtccacctgccttcagtacagtttttaggcacttacaggtgaatgtcacaaaaaaattgaacaagtaatgttagaattatatcccttaactttctgtaatgaaacagattgttggtagaggcaatggtgcggacacactagcacactggccaacctcagcagagataatgacggtggaagatgcctttctacaggtcttgcaatacttggataaaatatggggaacaatatcttcttcagaaaaaaaagaactggagaaactggcatttataccagttgcaaatggtactcgattggtcccagtgaagtcactttttgctcgtctgacaattaacatgtcaccttttgcttttgagcttccaagtcggtatcttccatttgtttcccttcttagagagattgggatgcaggaaagccttacaaattcatatgcaagagaacttcttttggatatccaaaaggcatgtggttaccagcgcttgaacccaaatgaactccgtgcagttatggaaatcttggaattcatgtgcaatggaatcaaccaaagtatcacagatggatcagatgggccttttgattcagtaataccagatgacggctgtaggctggtcactgctgcatcatgtgtgtatgttgacccatatggttctcgtttactgagtaacataattacatcaagactaagattcacccatccagaccttcctcagaatatctgcaaggccttgagcataaaaaagctctctgatgtcattgtggaggaacttgatggaaaagaagaaattaaagttgtcaatagcattcactcagttactctagacagaataaaagagaagctgcgaagtaaatctttgcaagatgcattaaggattgtgatgatcagcgtaaccaatcatttcccttcatttgaagcccttgctttggttcagatagaacggacactagaggatatatcacagaaactgcaactggttcaacgtctccatactcgctttctcttacttcccaatctccaagatgttacaagaaccatccagcgtccttctattcatgaatggtcaagcaacggaatgcaccgaagcatttgtttcgtcaacaaagctacgggttatattctaatcgcagagcccccaagttttttgacgatatatgatgttatcgcaattattgttagtcacaggttaggggcaccaatgatcttgccgattgcctcagtgtttgcatgcccagatggttcagagaaagaagtccttcaaattcttcacctgggttcagactttggagtttcaaaacgtgaagggagatacgacgcttcccttggagcagaattgttatctcaggatgctcggcaggtgcaattccttccattaagaccgttctatagtggtgaaattgtggcatggaagacaggcaaagagggggaaaagctcaggtatggtagggtccctgaagatgtaagaccctcagctggccaagcactttacagatttccagtagagacagctcctggcgaaactcgcatgatgctttccagtcatgtttactcatttaaaagtgtttcaatggctgatcttctgtctgcaccttcccaagtgaatggtgatgtggcattaggtggccaagagaacctcttggccaccaacactggcactgaagtcaccaaggatgcggatgctggacttgaatatggaaaagtatcttccactgaactggtacaagcggtccatgatatgctttcagctgcaggagtaaggatggatgctgagaaggaaacactctttgaggctactctttccttgcaagatcagcttaaagaatctcaagttgctctcttggtagagcaggtaccagtatttgtatgtttccg

SEQ ID NO: 206070 - DNA, 1571 bp, Zea Mays
gaacgtctttggttcgccagaaagctcttgcttatgggtccatctttccacggttgattctggtcgcccggcggccagaagcccagaacctttgctggcaggccgcgaaccaaccaaacagctgaagtctgacgacgagccttggttcagagaaacagggcactgggtttagagcccttcggatctagtattgtcgttcaccggcggcgaccaggccaaaccctagaaccttgccaagatgaggtcgttgcgagcggcgcagaccctagtctcccgttcccttttctcagcgcgccatctaagcggcgcagcctcccccgccacggccgccgccgcgggcgcgcggtggtgtgcagcgccggcgccaccgccccgttcgccgcttccatcctcgagggtgatgcctgccggggttgccggcgcagtatccttctcccttaccttcgctactgtagcggcggcggaggccaaggccaaggagcgaccgcaaccggatctgttgccgcagaacgtggtgctgtaccagtaccaggcgtgccccttctgcaacaagcctttttagattatcatgatataccatataaagttgtggaagttaatccattgagcaaaaaggaactcaagtggtctgattacaagaaagttccaatattgacagtagatggtgaacagcttgttgattcatcagatataatcaatatactacagagcaggatcaaccccaatgaagaactcactagtgacgaggaagcaaaatggcgaaggtgggttgatgagcaccttgtgcatgtcttatctcctaacatatatcggacaacttcagaagctctagaatcttttgactacattgcaaaacatggtaatttcagttttacagagaggtttgccgtgaagtatgctggtgctgcggccatgtacatggtatctaagaaactaaagaagaaatacaacataactgacgagcgtgcttcattgtatgatgctgccaatacatggatcgacgcactgaacggaagagatttcctgggtggctccaagcctaacttggcagatcttgccgtcttcggtgttctgagacctatccgatacttgagagcaggaaaagatatggttgagaacactgaaatcggcgattggtaccgacgcatggaagacgcagttggagaaccatcaagaatacaggatgcagaaggaaactagaattttgacaacattcttttaaatactttagcggtatccgtgcctatgcatggaggctattcaaattttttgccagaatcaagtgtatgcaataatgctctgccagattattaagtatactagcacctgaggaacagtgtttgacttgggaacttggttgtgttactgtgtaaggttttgctcccctagctgttcacgtctgtattgtctgcgatgtggttttgaagattcagcatcagcgattctgctgtgccttgcatacagtttaaagaatttcggaatgctggatctgccgaagcgatagattcatggttgtttaattaattaatgacaatctcatgtggcttattgactgggacatgttccagtaa

SEQ ID NO: 206071 - DNA, 2585 bp, Zea Mays
gggatttgttatggagcggcgaggggatgctgcagatagtctagcgccctcccctgtcctgcgcggctgcgcgccttatccccgccacgctccacctccgccccacacgcgcaagcggcggcaccagtccaccattctcctctcgatccgggatccaaatcggccgcctcatcgcgaccctctgtctccatccgctccggcgtgccacccacgcaggctaacgtctgggctcccctccttatcgccgggctccgcatcgccaatagtctgatggcgccgcagttgcagggctgcaactggatctcctcctggccgcggctccagcagatgtccccttggccgccgcgctcctccgaatcgccgcggtggagcttcctgcgtctcgcgacgcgccgacgcccctgcgcaggcgcggtccgcgccgtcgcgagcgcgggcgcggtgggaaccgagctcctggagatggaggagcaggccgaggacgtggacgagagggagaggctcaggcggacgcggatctcactggcgaacaagggtaacacgccatggaacaagggcaggaagcatagcccagagacgctgcagcgaatccgtgagaggaccaggatcgcaatgcaggaccccaaggtgaagtcatgttaagaaaaagttggtgaatctgggtcatgcacagagtgaggagacacgggtaaggatatcagtgggggtgaggcgaggttggagtttgcgtctacaaaaactaatggtccaggatggttgctttgtggaatggagggacatggtagctgatgcggctagaaagggttttgctggtggagtttcccttgaatggaattcatataaaatcttgagtgagcagatgcggcatgattggttggagaatcttcagaaaaggcgatcaatgccaaggccaagaggtaatagacgagcaccaaaaactcctgagcagaggagaaaaattgcagaagccattgctgcaaagtggttggatcaagaatatcgtgaacgagtttgtagtggaattgctagctatcatggatcatcttctgcaactaaaacaccgagaaagccaagacctgctggagaaccaggtgtaaagaaacagacgacaaggaaaaaacctatgcaagccaaacctgtaattttagaggatgctcatggaaaaagtgcagctcttaagagaaagaaaagcgcaactccctacaaagatccgatggcagttgaaaaattggagatgatatcaaagattcgagctcaaaggacagcacaggaaatagaaaagaaagaagctattaggagggccaggacactgattgcagaagcagaaaaggctgctgatgctctggaaactgctgcagcgatgaacccttttgcccaagcatcacttatagaggctagaaagcttgttacagaggcaagaatatcacttgaatgtgttgatgatgaagagcctcaagaaactgcttccaatgatgtgtcagggagctcagtgttactgaacttgcacgatcaccgtcatggactggagatgcagaatggaagtaatttgttgaagcaagagaataaacctgccaatgggatggaatttcctccaagcagtgtcaatggcctcgctttccatcttgatgtttctgaactcagcggaacaaagcaactatatcagaggatagagaattccatggaaagggcttttcttctcccttcggcttcgtcaaagcttaaaagtgcgaacggagattatggaataatagatttacatgtgaggcagtcgatggtcgatgacacggcaaagcataaaggcatcacagctgaaacttgtcctccagggacactagagctagaagaagatcctcccagtcccaggtctgcagaaaaggctggaaccagggaagattaccctgggggaaaaccggaagaagacgcaccctcatcggaagaaaaggctaggatgaggtgggtacgtgggaggttggtcaaggtaaaaacaaacggacctggggatttagaaatctagtattaggcagcaaatctggcctagataccgttgacaggcaatcgagtttgctcacttccatttagccaccattttgtatgccattcgcatgatttggtgtttacgacctgcacctgctcgatgggaggaaccaagtataaaatgtactagcgttgacaggagtggcgtggtcctggggaactttactgatttgcagtctacagtgaacgtgcaggagcgagcacattacgatcaccctgttttcctcatatgcgttgagattgtagttgtggtaggtaataggagctggatctttttttcttgtaaggccttgttcggttagctctggattgcggtgatttggtgggtttaaatcccaagtaggtcaaactccttaattttttccaatcacattcaattcatgggtaacgggattaagttgtagtcgactgtgaaagcatgattcgaggaagtctggaaaaagaaacatgcaaatggaacagtagcctggtcacctggttgcatcaaatgctatgagcctatgactgagggccgaggtgccccagtttattgtacgaattgacaattttac

SEQ ID NO: 206072 - DNA, 1129 bp, Zea Mays
ccccaatccatacaggcccttattgcccacggcccacggcccaatgccgaaccaggcccagctccattttcgccgccgccgttggccggcaacggcattgccgcgcgcccgccgtatctggcttcggctgccgtcgcctccctccccgccctgcgcaacccctcctcgccgcgccgtcaagacgcctgtcttcttctcatctcgtcggcgctcgtcctccctccctccctcccccaggtcctgcttcctccccatggcgtggatctggatggtcctcgcggcgggagccgtgctcctgtgggcgatctctctgggaaggatcttctcctccgccgcgccgtcctgtgtgcccctgagcccgcagttcatgccccctctccgcggcgacaggaggacccggaacgtgatgctcgtcgtcgcccaccccgacgacgagtccatgttctttgctccaactatccttttcctcaagtcaaaaggtcacaacattcacattctgtgcatgtctcgaggtaatgctgatggtctcggagatactcgtaaagaagaattgtaccatgcctgtgaaacccttaagattccacatgaacaagttgaagtcttggaccacccgaaattgcaggatggatttcatgagaaatgggaccatgaactagtatcagaacttgtcatggagcatgtccaactatgggtcattgacatgattgtgacatttgattcatatggagtatcaggccacccaaaccacagagatgttcattacggcatatgcaagtttctccatgcgaataggcaaggaaatgttgaagcttgggaactagcaagcctgaatattcttcgcaagtacagtggtccggttgacatttggctttcttcgctgatctccgtctcaaggtcaaagcagtcaatctatactctagttaacagtagcccgtccagaagctatgaggcaatggctgcacacagaagtcagtgggtttggtttagaagagtgttcgtcatgctctcaagttatacctacataaacatgctacagaaaatttagcacgtgatacgacgtcatatcagagcgagccgccattgtcgtctccaatgtcgtacttgtattcacaaatcgccaggaatgaag

SEQ ID NO: 206073 - DNA, 1276 bp, Zea Mays
gctgatgaacccttctccttacattctcaatcatgttaggtaacttttggatgatgttatggtcggccttgatcataaggctctgttctattctgctttacgctgtgcccgagaaatgattggggtaaccgatggatccaagaacttgatccgtgctattaacaacaggctcagtgctctgtcatttcacatcagggagtattattgggttgatatgaagaagataaatgagatttatcgctataagactgaggagtattcccatgatgctattaacaaattcaacatctacccagagcaaattccatcttggcttgcagactggattcctgtgaaaggcggttaccttataggcaatctgcagccagctcacatggatttcaggtttttctccctagggaatctgtgggcgattgtctcatctcttgctactcaaaggcaagcagagggtattctgaaccttattgaagccaaatgggatgacatagtagccaacatgcctcttaaaatatgttaccctgcactagagtatgaggaatggcgtatcatcactggcagtgatcccaaaaacacgccctggtcgtatcataatggtggatcttggcctacattgttatggcagttcaccttggcttgtatcaagatgggtaggcgtgacttggcacggagggcagttgaggtggcagaaaagaggctctcagatgacaagtggccagagtattatgacaccaggacaggaaggttcattgggaagcaatcacggctatatcaaacttggagcattgctggatatcttagctctaagatgttattggactgtccggagatggcatccatactagtatgcgatgaagacttcgagctgctggaaggttgtgcttgcagcttgaataagaatgctcgcaccaaatgctcacgtcgtgcggccaagtcgcaggttcttgtgtagttccatgcctgttcttgacccaaaagctgcaacgctccttcaacttgttgtaattgttcgtcacagaagctggcactagttactagttacttaagcagaatgatcacaaaccacctatgccgatttttttggcgagttcgtggttgatccatttatacaggagtatatgttgttgtctgtacattttatctaatggattttatgtatcctgctggtcaactcaagttgattggtagttttttttatgtaagcagacagcatgtaaatatcaccgctcgttacaagtgtactaaaagaaaagttagagagacataatgacggaatgag

SEQ ID NO: 206074 - DNA, 1775 bp, Zea Mays
accaacacggcagtggagcaacatgcccgaccttgtgaagctatgtcccccatcaacttatcgagtacttgagcctttgcattagctgcatcctgcctcaattgtctactgggagaaatgatgccagagtttgtgtgggtgaagggacagtgtaatcagattgcctagcattattctgtgatgtcttggctactatactgagttgggagaagactgtggattgctatagtcctggtcaagggttgatgcctgctagtttcaaagttagatctgtacctttagatggcaatagcgaagcatttgaggaggttcttgacccagattttggagagtcagctattggacgtgtagcacctgttgactctggtctttggtggataattctgttaagggcatatggaaaaattactggagactatgctctacaagaaagggttgatgtgcagacaggcatcaggctaatactgaatttgtgcttgtctgatggatttgacatgtttcctacattgcttgtaactgatggatcatgtatgattgatcggcggatgggaatccatggtcatcctctggagatccaggctctgttctattctgctttacgctgtgcccgagaaatgattggggtaaccgatggatccaagaacttgatccgtgctattaacaacaggctcagtgctctgtcatttcacatcagggagtattattgggttgatatgaagaagataaatgagatttatcgctataagactgaggagtattcccatgatgctattaacaaattcaacatctacccagagcaaattccatcttggcttgcagactggattcctgtgaaaggcggttaccttataggcaatctgcagccagctcacatggatttcaggtttttctccctagggaatctgtgggcgattgtctcatctcttgctactcaaaggcaagcagagggtattctgaaccttattgaagccaaatgggatgacatagtagccaacatgcctcttaaaatatgttaccctgcactagagtatgaggaatggcgtatcatcactggcagtgatcccaaaaacacgccctggtcgtatcataatggtggatcttggcctacattgttatggcagttcaccttggcttgtatcaagatgggtaggcgtgacttggcacggagggcagttgaggtggcagaaaagaggctctcagatgacaagtggccagagtattatgacaccaggacaggaaggttcattgggaagcaatcacggctatatcaaacttggagcattgctggatatcttagctctaagatgttattggactgtccggagatggcatccatactagtatgcgatgaagacttcgagctgctggaaggttgtgcttgcagcttgaataagaatgctcgcaccaaatgctcacgtcgtgcggccaagtcgcaggttcttgtgtagttccatgcctgttcttgacccaaaagctgcaacgctccttcaacttgttgtaattgttcgtcacagaagctggcactagttactagttacttaagcagaatgatcacaaaccacctatgccgatttttttggcgagttcgtggttgatccatttatacaggagtatatgttgttgtctgtacattttatctaatggattttatgtatcctgctggtcaactcaagttgattggtagttttttttatgtaagcagacagcatgtaaatatcaccgctcgttacaagtgtactaaaagaaaagttagagagacataatgacggaatgag

SEQ ID NO: 206075 - DNA, 2732 bp, Zea Mays
cacgctactggatacttccgatgcctgttccgctgtttctcttctcccgtgtcttctcccgtttacctgccgtgtgcgactactaggaggtcgccgccgccgtacgctcagcttctctgcgccggcgacaagcacccaccacaccaggattgtgtttattggatttgagtgtctgattgtgtcagtcaaatttgagttcatcacatccagcccccgcaaccccgtccgtgggcttccccatgcgctgtgtggcactacggtagccgaccctcagcagatcttgcgcggctgtcctcaccagtcgccaacggcctcctcgcccagtcgaccttctcagacagcacccctcgacagcacccaagcaaccgaccgaagtgagcagtgactcagttaggtaagttcagagataatgtttcattttttctacgaattttatgaatacatgctcctcttatatgaactgcaactatctctaccctagaacagacatcaacatgtacatgactattaaatttcctgttacattgttctacctatattgtaacaaatgtcctttcactgttgtcattatgtcaacttagttaattatatgggcactaatatattttttatttataaatacaccaacaatttacgaggagctgcgcccattcgttttcaaaattctaattgtaatgtccacttcttcagtaggtaagttcagaaataatgtttcattttttctacgaattttatgaatacatgctcctcttatatgaactgccactatctctaccctagaacagacatcaacatgtacatgactattaaatttcctattacattgttctacctatattgtagcatatgtcctttcactgttgatttgttcgcttcacacaaaaaatagtgaacgtcgattccagcccaaactttcgtttggtccacccagtcttgctgtagacactgtagttaaaatgctctaccaactttattcaggtctcttattcctagacctgcaatctcctttgccatggtcgatttcaataatttaaaacatgttgataatgagtgccatatatattcttagcgactcttgatcaagttcatatatgaatgaatcacagattcacagtgtacggaagggagccacttaatacttagtaaaacaccatcagagttgggagaagactgtggattgctatagtcctggtcaagggttgatgcctgctagtttcaaagttagatctgtacctttagatggcaatagcgaagcatttgaggaggttcttgacccagattttggagagtcagctattggacgtgtagcacctgttgactctggtctttggtggataattctgttaagggcatatggaaaaattactggagactatgctctacaagaaagggttgatgtgcagacaggcatcaggctaatactgaatttgtgcttgtctgatggatttgacatgtttcctacattgcttgtaactgatggatcatgtatgattgatcggcggatgggaatccatggtcatcctctggagatccaggctctgttctattctgctttacgctgtgcccgagaaatgattggggtaaccgatggatccaagaacttgatccgtgctattaacaacaggctcagtgctctgtcatttcacatcagggagtattattgggttgatatgaagaagataaatgagatttatcgctataagactgaggagtattcccatgatgctattaacaaattcaacatctacccagagcaaattccatcttggcttgcagactggattcctgtgaaaggcggttaccttataggcaatctgcagccagctcacatggatttcaggtttttctccctagggaatctgtgggcgattgtctcatctcttgctactcaaaggcaagcagagggtattctgaaccttattgaagccaaatgggatgacatagtagccaacatgcctcttaaaatatgttaccctgcactagagtatgaggaatggcgtatcatcactggcagtgatcccaaaaacacgccctggtcgtatcataatggtggatcttggcctacattgttatggcagttcaccttggcttgtatcaagatgggtaggcgtgacttggcacggagggcagttgaggtggcagaaaagaggctctcagatgacaagtggccagagtattatgacaccaggacaggaaggttcattgggaagcaatcacggctatatcaaacttggagcattgctggatatcttagctctaagatgttattggactgtccggagatggcatccatactagtatgcgatgaagacttcgagctgctggaaggttgtgcttgcagcttgaataagaatgctcgcaccaaatgctcacgtcgtgcggccaagtcgcaggttcttgtgtagttccatgcctgttcttgacccaaaagctgcaacgctccttcaacttgttgtaattgttcgtcacagaagctggcactagttactagttacttaagcagaatgatcacaaaccacctatgccgatttttttggcgagttcgtggttgatccatttatacaggagtatatgttgttgtctgtacattttatctaatggattttatgtatcctgctggtcaactcaagttgattggtagttttttttatgtaagcagacagcatgtaaatatcaccgctcgttacaagtgtactaaaagaaaagttagagagacataatgacggaatgag

SEQ ID NO: 206076 - DNA, 5013 bp, Zea Mays
gtctcctctcactccctcgctcgctccgcctctccacgctactggatacttccgatgcctgttccgctgtttctcttctcccgtgtcttctcccgtttacctgccgtgtgcgactactaggaggtcgccgccgccgtacgctcagcttctctgcgccggcgacaagcacccaccacaccaggattgtgtttattggatttgagtgtctgattgtgtcagtcaaatttgagttcatcacatccagcccccgcaaccccgtccgtgggcttccccatgcgctgtgtggcactacggtagccgaccctcagcagatcttgcgcggctgtcctcaccagtcgccaacggcctcctcgcccagtcgaccttctcagacagcacccctcgacagcacccaagcaaccgaccgaagtgagcagtgactcagttaggtaagttcagagataatgtttcattttttctacgaattttatgaatacatgctcctcttatatgaactgcaactatctctaccctagaacagacatcaacatgtacatgactattaaatttcctgttacattgttctacctatattgtaacaaatgtcctttcactgttgtcattatgtcaacttagttaattatatgggcactaatatattttttatttataaatacaccaacaatttacgaggagctgcgcccattcgttttcaaaattctaattgtaatgtccacttcttcagtagattcacagtgtacggaagggagccacttaatacttagtaaaacaccatcaggtaaccactttgtagttcaagtgagctgaatcgcccaaattcaagatagtgtatctctacatgctagtatgatttctttaaatatgcattgtgtgagtatatgctagatcacaatcttttactttcacaataggttcttgctgtcagtgaccacaatttggtttagttacaatgactatagcatgacctttacgatcatgccctcaagcatccagttttttttaccatatggatatgtgtggatacaatagcagttagttttattgtctatcccaattaagaatggccacaatgtagcatttgattgacatacacctctaatatatcgtacataagcaagaatatgtgaatacagtagcggtttgtttcattacctgaatttatttattaagaatggccataaaaaagggtgtttcgttacctatatatgaacacatactacactatatacaaattcaaaccaagtgtaactctggcatattgtttctaaaaacactaaccgttagttcatgtgatgttcatcctctttgagatttcatcagactgtgtttctaacaatggacaaaaaaggaataactaatgagttcaaacaatactattatgtccttcactaggaaactggtcagtacatagtttgcctctttatatataatataaatttaacaatgcaatttatagcttctttctccgatatatacaagctaaaaaaataagtgttcaactgtgtaggaacagtgagatcaatgattcaatgcctgcacctagatatgacatgtggtgattctgttgactgtactttaaactcaagttgtgaacaactaaactcaaactatgagtaattcattgtaacatataactgttgtcttttttacaatgttcactattgtcttgtgcatgtatcgggtttgttatgctcctagaaccttcgtagcgacagccgccgaacctcgtggcgcaaaaacaattttttttttgaaaaacaggtattatgctggtaaaggcttatgtggctgtagacatgttcaactaatatcttttttccgcatatttgtcaatgatccaatttgttattttcaaactttatttaccatgaagattactaattgtatattgttataattcaagtttggttatatcccttcatcatataaaaagtatcctacaatcaaaaattacgcgcgctgggcgcgcgccaaccactagtatcatttaagagaaagcaagttcgatactacaaggactcacaagccacacttttgagggccatttcttctttactagattgaatacttgcactggccagtttaatttaccataaaattcctctatatatttcacttgtatgcatgctgtcgcgatcattctcctttgtctagtgctgtgattttacaaggaagctagacagtagtcgtattaccgtttgcattctcggtttgaggcaaccgaattccctttccaacttaatttccaaagctgcatccaaacctcctttgcaaataggcacaaaaatgcaccgtcgttaatcgctattaatcacacaaaacatacgttggaatttggattgtattgctactttttgtatcttcaagcttgtctgctgtgatatccttgcctgaaccaagagccaagggataatggttttttgaaaagaaaaaaaaattaaatgtgaaagagggcaaaagaaaatttcggccacgtgaaccacatcttccttcgccacatccggagctcatgtttattaactgccacgagcccacaaacgtggcgcgccctgcgccgtacgatgccacagtagcctatattttacactttcccaaaccaaaaactatcctgtctgtcttaatcccgttccaatcgctgttacctgataattaccgcagcgatcgaaacgaaccagcctcaaacccatttccttcccgtgcttccttgttcctcctcatcccaaaattcgcaagcgccgattccaatcaggaaaccggaaacctttcttcctccgcaattcaatccggcgggccccgaagccggcgccaatggcggccgccgccatctctcacctccgccggggcgcgcagcaccacgcagtgctatgcatctcgctgtcgcgccgccgcttctcctcctccgccgtggccgcggcctccccgctcgccgcggccgcgcgccgcctcctctccacgacggcagactccgccaccgcgtccacgtcgggggagcactacaagccgccgcccttcgaccccttccgcgccgccaccctatcgccctctgctccgccgctagagtcggcccggctcgaggatgagcccccgagcagtccgccgccgcaggatgaggcggccgcgtccgtggcggcgcacgagcaggcgacgctggcctgccaggagctggaattggagggcctcaaggcgggggtggaggcggtgaagagcagggaggagtcgccggaggagaaggaggcgtggtggctgctcagccgagcggtcgtcaactactgcggtagcgccgtcgggacggtggccgcgaacgatccgtccaccagccagatgctcaattatgaccaggtgttcattagggacttcgtgccatcggccatcgcgttcctcctcaagggtgagagcgatattgtgaagaacttcctgctccacacgttgcagctccagagttgggagaagactgtggattgctatagtcctggtcaagggttgatgcctgctagtttcaaagttagatctgtacctttagatggcaatagcgaagcatttgaggaggttcttgacccagattttggagagtcagctattggacgtgtagcacctgttgactctggtctttggtggataattctgttaagggcatatggaaaaattactggagactatgctctacaagaaagggttgatgtgcagacaggcatcaggctaatactgaatttgtgcttgtctgatggatttgacatgtttcctacattgcttgtaactgatggatcatgtatgattgatcggcggatgggaatccatggtcatcctctggagatccaggctctgttctattctgctttacgctgtgcccgagaaatgattggggtaaccgatggatccaagaacttgatccgtgctattaacaacaggctcagtgctctgtcatttcacatcagggagtattattgggttgatatgaagaagataaatgagatttatcgctataagactgaggagtattcccatgatgctattaacaaattcaacatctacccagagcaaattccatcttggcttgcagactggattcctgtgaaaggcggttaccttataggcaatctgcagccagctcacatggatttcaggtttttctccctagggaatctgtgggcgattgtctcatctcttgctactcaaaggcaagcagagggtattctgaaccttattgaagccaaatgggatgacatagtagccaacatgcctcttaaaatatgttaccctgcactagagtatgaggaatggcgtatcatcactggcagtgatcccaaaaacacgccctggtcgtatcataatggtggatcttggcctacattgttatggcagttcaccttggcttgtatcaagatgggtaggcgtgacttggcacggagggcagttgaggtggcagaaaagaggctctcagatgacaagtggccagagtattatgacaccaggacaggaaggttcattgggaagcaatcacggctatatcaaacttggagcattgctggatatcttagctctaagatgttattggactgtccggagatggcatccatactagtatgcgatgaagacttcgagctgctggaaggttgtgcttgcagcttgaataagaatgctcgcaccaaatgctcacgtcgtgcggccaagtcgcaggttcttgtgtagttccatgcctgttcttgacccaaaagctgcaacgctccttcaacttgttgtaattgttcgtcacagaagctggcactagttactagttacttaagcagaatgatcacaaaccacctatgccgatttttttggcgagttcgtggttgatccatttatacaggagtatatgttgttgtctgtacattttatctaatggattttatgtatcctgctggtcaactcaagttgattggtagttttttttatgtaagcagacagcatgtaaatatcaccgctcgttacaagtgtactaaaagaaaagttagagagacataatgacggaatgag

SEQ ID NO: 206077 - DNA, 4714 bp, Zea Mays
gtctcctctcactccctcgctcgctccgcctctccacgctactggatacttccgatgcctgttccgctgtttctcttctcccgtgtcttctcccgtttacctgccgtgtgcgactactaggaggtcgccgccgccgtacgctcagcttctctgcgccggcgacaagcacccaccacaccaggattgtgtttattggatttgagtgtctgattgtgtcagtcaaatttgagttcatcacatccagcccccgcaaccccgtccgtgggcttccccatgcgctgtgtggcactacggtagccgaccctcagcagatcttgcgcggctgtcctcaccagtcgccaacggcctcctcgcccagtcgaccttctcagacagcacccctcgacagcacccaagcaaccgaccgaagtgagcagtgactcagttagattcacagtgtacggaagggagccacttaatacttagtaaaacaccatcaggtaaccactttgtagttcaagtgagctgaatcgcccaaattcaagatagtgtatctctacatgctagtatgatttctttaaatatgcattgtgtgagtatatgctagatcacaatcttttactttcacaataggttcttgctgtcagtgaccacaatttggtttagttacaatgactatagcatgacctttacgatcatgccctcaagcatccagttttttttaccatatggatatgtgtggatacaatagcagttagttttattgtctatcccaattaagaatggccacaatgtagcatttgattgacatacacctctaatatatcgtacataagcaagaatatgtgaatacagtagcggtttgtttcattacctgaatttatttattaagaatggccataaaaaagggtgtttcgttacctatatatgaacacatactacactatatacaaattcaaaccaagtgtaactctggcatattgtttctaaaaacactaaccgttagttcatgtgatgttcatcctctttgagatttcatcagactgtgtttctaacaatggacaaaaaaggaataactaatgagttcaaacaatactattatgtccttcactaggaaactggtcagtacatagtttgcctctttatatataatataaatttaacaatgcaatttatagcttctttctccgatatatacaagctaaaaaaataagtgttcaactgtgtaggaacagtgagatcaatgattcaatgcctgcacctagatatgacatgtggtgattctgttgactgtactttaaactcaagttgtgaacaactaaactcaaactatgagtaattcattgtaacatataactgttgtcttttttacaatgttcactattgtcttgtgcatgtatcgggtttgttatgctcctagaaccttcgtagcgacagccgccgaacctcgtggcgcaaaaacaattttttttttgaaaaacaggtattatgctggtaaaggcttatgtggctgtagacatgttcaactaatatcttttttccgcatatttgtcaatgatccaatttgttattttcaaactttatttaccatgaagattactaattgtatattgttataattcaagtttggttatatcccttcatcatataaaaagtatcctacaatcaaaaattacgcgcgctgggcgcgcgccaaccactagtatcatttaagagaaagcaagttcgatactacaaggactcacaagccacacttttgagggccatttcttctttactagattgaatacttgcactggccagtttaatttaccataaaattcctctatatatttcacttgtatgcatgctgtcgcgatcattctcctttgtctagtgctgtgattttacaaggaagctagacagtagtcgtattaccgtttgcattctcggtttgaggcaaccgaattccctttccaacttaatttccaaagctgcatccaaacctcctttgcaaataggcacaaaaatgcaccgtcgttaatcgctattaatcacacaaaacatacgttggaatttggattgtattgctactttttgtatcttcaagcttgtctgctgtgatatccttgcctgaaccaagagccaagggataatggttttttgaaaagaaaaaaaaattaaatgtgaaagagggcaaaagaaaatttcggccacgtgaaccacatcttccttcgccacatccggagctcatgtttattaactgccacgagcccacaaacgtggcgcgccctgcgccgtacgatgccacagtagcctatattttacactttcccaaaccaaaaactatcctgtctgtcttaatcccgttccaatcgctgttacctgataattaccgcagcgatcgaaacgaaccagcctcaaacccatttccttcccgtgcttccttgttcctcctcatcccaaaattcgcaagcgccgattccaatcaggaaaccggaaacctttcttcctccgcaattcaatccggcgggccccgaagccggcgccaatggcggccgccgccatctctcacctccgccggggcgcgcagcaccacgcagtgctatgcatctcgctgtcgcgccgccgcttctcctcctccgccgtggccgcggcctccccgctcgccgcggccgcgcgccgcctcctctccacgacggcagactccgccaccgcgtccacgtcgggggagcactacaagccgccgcccttcgaccccttccgcgccgccaccctatcgccctctgctccgccgctagagtcggcccggctcgaggatgagcccccgagcagtccgccgccgcaggatgaggcggccgcgtccgtggcggcgcacgagcaggcgacgctggcctgccaggagctggaattggagggcctcaaggcgggggtggaggcggtgaagagcagggaggagtcgccggaggagaaggaggcgtggtggctgctcagccgagcggtcgtcaactactgcggtagcgccgtcgggacggtggccgcgaacgatccgtccaccagccagatgctcaattatgaccaggtgttcattagggacttcgtgccatcggccatcgcgttcctcctcaagggtgagagcgatattgtgaagaacttcctgctccacacgttgcagctccagagttgggagaagactgtggattgctatagtcctggtcaagggttgatgcctgctagtttcaaagttagatctgtacctttagatggcaatagcgaagcatttgaggaggttcttgacccagattttggagagtcagctattggacgtgtagcacctgttgactctggtctttggtggataattctgttaagggcatatggaaaaattactggagactatgctctacaagaaagggttgatgtgcagacaggcatcaggctaatactgaatttgtgcttgtctgatggatttgacatgtttcctacattgcttgtaactgatggatcatgtatgattgatcggcggatgggaatccatggtcatcctctggagatccaggctctgttctattctgctttacgctgtgcccgagaaatgattggggtaaccgatggatccaagaacttgatccgtgctattaacaacaggctcagtgctctgtcatttcacatcagggagtattattgggttgatatgaagaagataaatgagatttatcgctataagactgaggagtattcccatgatgctattaacaaattcaacatctacccagagcaaattccatcttggcttgcagactggattcctgtgaaaggcggttaccttataggcaatctgcagccagctcacatggatttcaggtttttctccctagggaatctgtgggcgattgtctcatctcttgctactcaaaggcaagcagagggtattctgaaccttattgaagccaaatgggatgacatagtagccaacatgcctcttaaaatatgttaccctgcactagagtatgaggaatggcgtatcatcactggcagtgatcccaaaaacacgccctggtcgtatcataatggtggatcttggcctacattgttatggcagttcaccttggcttgtatcaagatgggtaggcgtgacttggcacggagggcagttgaggtggcagaaaagaggctctcagatgacaagtggccagagtattatgacaccaggacaggaaggttcattgggaagcaatcacggctatatcaaacttggagcattgctggatatcttagctctaagatgttattggactgtccggagatggcatccatactagtatgcgatgaagacttcgagctgctggaaggttgtgcttgcagcttgaataagaatgctcgcaccaaatgctcacgtcgtgcggccaagtcgcaggttcttgtgtagttccatgcctgttcttgacccaaaagctgcaacgctccttcaacttgttgtaattgttcgtcacagaagctggcactagttactagttacttaagcagaatgatcacaaaccacctatgccgatttttttggcgagttcgtggttgatccatttatacaggagtatatgttgttgtctgtacattttatctaatggattttatgtatcctgctggtcaactcaagttgattggtagttttttttatgtaagcagacagcatgtaaatatcaccgctcgttacaagtgtactaaaagaaaagttagagagacataatgacggaatgag

SEQ ID NO: 206078 - DNA, 1382 bp, Zea Mays
cgccgcctccgtcgaacacagagtcacttcgccacgaacaaaagcgcatcgatctcgctgtcgtcactcctcgtcacccagccacgaacagaggcaccacccagcatggccctgcaggcggcgctcctcccatccaccctctcatccgtccccaagaagtgcagcatcgccgtcgcggcgaaggacacggcattccttagcgtatcccagaaggtgcaggcggcgtcgctgtcggtgagaacgcgtcgtcggggttgggcctggcggcggccaaggcgctggcggagaccggcaagtggcacgtggtgatggcctgccgcgacttcctcaaggcggccaaggcggccaagggcgccggcatggcggacggcagctacaccatcatgcacctggacctggcctccctcgacagcgtgcggcagttcgtggacagcttccggcgcgccggcatgccgctcgactcgctcgtctgcaacgccgccatctaccggcccacggcaaggacgccgacgttcacggcggacggatacgagatgagcgtcggcgtcaaccacctgggccacttcctcctggcgcgcctgctcctggacgacatgcagaagtccgactacccgtcccgccgcctcatcatcctcggctccatcaccggcaacaccaacacgctggccgggaacatcccgcccaaggccgggctgggcgacctccgcggcctcgcggcggggctgcgcggccagaacggctctgccatgatcgacggctccgagagcttcgacggcgccaaggcgtacaaggacagcaagatctgcaacatgctcaccatgcaggagctgcaccggcggtaccacgaggagacgggcatcacgttcgcgtcgctctacccggggtgcatcgccaccacggggctgttccgcgagcacatcccgctgttccgcctgctcttcccgcctttccagaagttcgtcaccaagggcttcgtgtcggaggcggagtccggcaagaggctggcgcaggtggtcagcgaccccagcctcaccaagtcgggggtgtactggagctggaacaaggactcggcgtcgttcgagaaccagctgtcgcaggaggccagcgatccggagaaggccaagaagctctgggagatcagcgagaagctcgtggggcttgcctgagctcgccggcacggcgacggcgacatgatgactctgtcgagcagaggagctttcgcttcgttgtattatgtgtaccattagcatccattttgtttgtttctagaagttggtaatgaccgtcggagaagagcctgtaattgttcgatcatgtattattgcttacaaaatttttttcaaaaaccgatgaaataaaacaacaggcttaacatctctaag

SEQ ID NO: 206079 - DNA, 1631 bp, Zea Mays
aaatacatttcgaaataaataaaaaagaaaactattcctaaccctaaggcccactaggggcccatctacctaaacctaacagccgcgcgctgcgctccctggcttctctcccagccgccgcctctattctcctttccctcttctctctcccctcgcctatctcctcccccgacgcgcctgcaccaacagtggaagagctcgctagcgaagcaggcctgggttgcggcgcacagcgtgaacgcgttcggcaagagaccctcctcgagcgtctcaccgaaaaggcggagcgcctccgcctcagcgccattttgcgagaggcaggacaccatggccgtccaggagatgaggtcccgcaggccgacgggcattccgtcgaacacgctgcgcgcggcggccacgacgctacacatgcagtagagcgtgaggagcgagttggcgacgacggaatcagtctcgacctataggaatcgttgaatgcccggtacaaccgatcaagtttcgacaacccctggttcgtcatcggggtctcctactccggcgctctcagcgcctggttcaggctcaagttcccccatttgacatgtgggagcctcgcgagctcaggggtggttcttgcagtgtacaactacaccgactttgacaagcaggttgatagtccgggaataggttggagagtcagctggtcctgagtgcaaagctgtccttcaggaaataactgaactcgttgacgaacagctccggctggagagtcactcggtgaaggctctatttggagcacagatggtaaatccttttgtgcatagcactctgatcctgccaatttcacatacttcaactccgatggtatattttactctgcgtgcagctgaaaaacgatgtcgactttctcttcttcctggcggatgccgcagcgataacattccaatacgggaacctagatgccttgtgccctccattaatacaggcaaagaagaacaggaaaaacttggtggaagcatatgctcaatttgtgtttttagatccatgatatgttgtcggtctgttgtttgtagtcctagatatcttcgtttttgtcactactaaaaacaccgatcggttctgatgtactgctatttattgctctgatatttttgtcatgtatgtgattggtgacttgggctttactagaggaacattcgtggtatagttttgaagagagaagtgagtcataaaattagagatatctgcattcattgtgatctatctttaacacttcatttttactgtagacatcaagtaagtggcgacatcacaacccctacaagtttgtgcctcaaaacaagaggatacaagaagttggagtgcttttgtgaaggcttttgcgaatcacttgaaacgttggtacttttgtgaatgattttgtaaagtgtttgcaaatatgtgcaaaacataataacatgtgtaggttttgtgaatgattttgttgtggtgcttgttgatggtttatgtgatgtggatctatcattgtgcaatactaattaaatttgtatatctatgtgattatgtgtataaaaattggtgatttgtgatgcttttgtatatataacagttgttgaatgctaattaatggtatattatcattattaacgact

SEQ ID NO: 206080 - DNA, 1471 bp, Zea Mays
accacccaggcaggcggcaggccaacgccacccgaaggccgcagcaggcaccacacaacacggacacaagtcaggcgcagcccataaccccccaccccagccgaagccatccgatacgggagggcccatccagcggcccaggtcacgctctcacgccacgcacgcatgctcccccgcctgctcaacgggccccaccgcctgctccttggcgggccccacgcctcgggcgccgcgcccctccaccgccgccgcgtcctcgccggccgccgggccatgtccgcctccgcctcgcccgcgtccgggccgaggcgtccgctgcgcggggtggtcttcgacatggacggcaccctcacggtgccagtcatcgatttcccggccatgtaccgcgaggtgctcggcggggacgccgcctacgccgcggcgcgcggctcggggggaggctccgtcgacatcctccactgcatcgaggactgggcgcccgacaagcagcgccacgcgtacgaggtcatcgcgcgcttcgagcgggagggcctcgaccgcctccagatcatgcccggggcctcggagctgtgtggcttcctggacgcgaagcagatcaggtcagtgcttgctgcctccacatcatggaagatggaactactgtcaagcttgtaagaggtttgatcacccgtaatgtgaaggacacagttgatttgttccaccaaagatttggtatgacgttcactcctgcactgagcagagaatttcgcccctataaaccaaatcctgctccactgcttcacatatgctccgcttggaacattccaccacacgaagtgatcatggttggcgacagtctcaaggatgatgttgtttgtggaaagagggcaggagctttcacttgcttgcttgatgaaacggggcgatatggtcctcacgattctttacctgaggaagtaaaacctgacttcaaggtgtcctcactgacagaagtattcgctgtgctggaggagcacttcgatttggcaccagtgcctgccgagagtagaatatgacagggaagttttattggacctcccttctaatgtgaaatcggctacccaaccaacagcttgaataatgtggaggacgttgatgggactttcaagtatcagaagcccctgctagagcctgcagccagagcccagaaggacgatggctgttccaaggggggattgaatgtctttggaaaggcaatgaagtgattcagttcgttgtaaatctattatattatgttgccccagactaaaccagcttgtgtggtttagtgactgaaatgaccacacgtatctggagattcagaatataacaatcgatttccacggatttcattcgttcaatttggttcccctatctctttcacacagcaattttttttctgaggctagttttcttggtgacgcaacgagcatcagttgcttctgtttgatttcttctgctgggaggtactcct

SEQ ID NO: 206081 - DNA, 686 bp, Zea Mays
cattcttcatctgattccgagctgtagcatataatgggttgctatatactccattcatttttagttgtttgtggaaagagggcaggagctttcacttgcttgcttgatgaaacggggcgatatggtcctcacgattctttacctgaggaagtaaaacctgacttcaaggtgtcctcactgacagaagtattcgctgtgctggaggagcacttcgatttggcaccagtgcctgccgagagtagaatatgacagggaagttttattggacctcccttctaatgtgaaatcggctacccaaccaacagcttgaataatgtggaggacgttgatgggactttcaagtatcagaagcccctgctagagcctgcagccagagcccagaaggacgatggctgttccaaggggggattgaatgtctttggaaaggcaatgaagtgattcagttcgttgtaaatctattatattatgttgccccagactaaaccagcttgtgtggtttagtgactgaaatgaccacacgtatctggagattcagaatataacaatcgatttccacggatttcattcgttcaatttggttcccctatctctttcacacagcaattttttttctgaggctagttttcttggtgacgcaacgagcatcagttgcttctgtttgatttcttctgctgggaggtactcct

SEQ ID NO: 206082 - DNA, 1797 bp, Zea Mays
cgttttcatccctatctgtgtggacggtaaaggtggcgggggcaacggtgccacaagattgtgggccctcttagattggcccacatgtcagccactggctaacccatggccggttgtcgttatccatttaaccgaccaggcccatggccatccactccactagtccacttgcacttgcgacagtgcagtcaatcgcttcgtctccgcgtctcgcgcgccccgccgcataggcgccagtcctccacagaaattcccacacctccacgccgtacggccagagtcgcggtccccgtcgaatccattccatggctccacccgccgcccccaccgcaccgcaccaccgcactcctctctttctcccccgccgcgccgccgccaccgcgcgcgctgccagggccgcttccctcgccgtcagggcccagccgaacaccgccgccgcctccacctccgcccccgagccgccggagaagttcaagccgcctccagggttcaaggtgcccgagcccaagaggttcgagatcaagtccggccagcagagcagtgtcctcggcgctttgctcgccatccccctccgcctcggcaccggcgtcttcgtcctcgggtactcgccatcacttgtttctccatcagagataccatcggaccaatatgcgcttgaattcggagcttggaaggtgaaggaggaatcaaaaataggacagtgcaaacgaccggaaaagccgatcgagatatatgaatttgaaggttgtccattttgtcgaaaggttagagagatggtatcagtcttggacctagatgtactattttacccctgtcctcgaaaaggcccaacattccgacctaaagtccttgaaatgggtggaaagaaacagtttccttacatggtggatccaaacactggggtcgccatgtatgaatcagatgacatcataaaatacctagctgacacatatggtgatggaagtgttccaattatgctatcgcttggtctgttgacagcaattacagcagggcttgctactcttggtcgtattggaaagggaaattcctatactgcttcaagaatcccaccgcagcctatagagatatgggcattcgagggatctcccttctgtagattagtacgagagacgcttgttgagttggaattgccacatctgctacacagctgcgcacgtggcagcctcaaacgacaagaagttttcaagaaaaagggagttttccaggcgccttacatcgaagatcctaacacgggagtccagatgttcgaaagcgcagaaatcatagactacctgaaggcaacatatgtcctgtaccaaagctcatagtgacgttatctccaatagtcattgtaaagttgcatggaccgtgtaaattcaattctttccggtaataaaaggaaaagataaagtaaaccacaagttctgtatgatgcacagccgatttttatctatgcaagtctgaactttgaagttacttcaaactccgttctcctggttaatctagtgaatgagtgagttcccttgtgctggagaagttcggatcttggactggtgttgattgtagactcgactgttctgttcccttgtagttcggatcgtgaaattcgtcatcagtgtttggccatctcttggaagttcaactcggagcgtggcaaatcaaactgttggttcacgaatcaacgtcaagactcaagactcaagagtcaattatggatcaagttgccgtcacggcgtcaccgaagcatcgctacacactgtttgtagctttttctgacgagtttttcgagaatctgac

SEQ ID NO: 206083 - DNA, 2030 bp, Zea Mays
cgttttcatccctatctgtgtggacggtaaaggtggcgggggcaacggtgccacaagattgtgggccctcttagattggcccacatgtcagccactggctaacccatggccggttgtcgttatccatttaaccgaccaggcccatggccatccactccactagtccacttgcacttgcgacagtgcagtcaatcgcttcgtctccgcgtctcgcgcgccccgccgcataggcgccagtcctccacagaaattcccacacctccacgccgtacggccagagtcgcggtccccgtcgaatccattccatggctccacccgccgcccccaccgcaccgcaccaccgcactcctctctttctcccccgccgcgccgccgccaccgcgcgcgctgccagggccgcttccctcgccgtcagggcccagccgaacaccgccgccgcctccacctccgcccccgagccgccggagaagttcaagccgcctccagggttcaaggtgcccgagcccaagaggttcgagatcaagtccggccagcagagcagtgtcctcggcgctttgctcgccatccccctccgcctcggcaccggcgtcttcgtcctcgggtactcgccatcacttgtttctccatcagagataccatcggaccaatatgcgcttgaattcggagcttggaaggtgaaggaggaatcaaaaataggacagtgcaaacgaccggaaaagccgatcgagatatatgaatttgaaggttgtccattttgtcgaaaggttagagagatggtatcagtcttggacctagatgtactattttacccctgtcctcgaaaaggcccaacattccgacctaaagtccttgaaatgggtggaaagaaacagtttccttacatggtggatccaaacactggggtcgccatgtatgaatcagatgacatcataaaatacctagctgacacatatggtgatggaagtgttccaattatgctatcgcttggtctgttgacagtaagtaaataagtaccaagtaattcaaaagtatatgatatgttttaaccagtatacatattagtctaaagtacaaaatacattttaactatgtaacccaactattatctaggaatatatgacatatttacactgggctttctatatgcatcaatatttgcctatctgatgagtagaatgctttattttctgccaattttcagttttgataacttttaatctttgttttgtaggcaattacagcagggcttgctactcttggtcgtattggaaagggaaattcctatactgcttcaagaatcccaccgcagcctatagagatatgggcattcgagggatctcccttctgtagattagtacgagagacgcttgttgagttggaattgccacatctgctacacagctgcgcacgtggcagcctcaaacgacaagaagttttcaagaaaaagggagttttccaggcgccttacatcgaagatcctaacacgggagtccagatgttcgaaagcgcagaaatcatagactacctgaaggcaacatatgtcctgtaccaaagctcatagtgacgttatctccaatagtcattgtaaagttgcatggaccgtgtaaattcaattctttccggtaataaaaggaaaagataaagtaaaccacaagttctgtatgatgcacagccgatttttatctatgcaagtctgaactttgaagttacttcaaactccgttctcctggttaatctagtgaatgagtgagttcccttgtgctggagaagttcggatcttggactggtgttgattgtagactcgactgttctgttcccttgtagttcggatcgtgaaattcgtcatcagtgtttggccatctcttggaagttcaactcggagcgtggcaaatcaaactgttggttcacgaatcaacgtcaagactcaagactcaagagtcaattatggatcaagttgccgtcacggcgtcaccgaagcatcgctacacactgtttgtagctttttctgacgagtttttcgagaatctgac

SEQ ID NO: 206084 - DNA, 2258 bp, Zea Mays
ccgcatccccctgctccatccccccctctccacactgccaactcgctccgaagagggaggaggacgacgccggttgccactgccactgccgcgccgcgccgctcccgtctcccctccctccgcgggaactcgacgccaccatgctgtccacgcgcaccgccgccgtcgccgcctccgcgtcccccgcctccccgtggaagctgggaggacggagcgagggcggcgccagctgcgacggatgccggacctacaggaacaccctgcggaggagggccgcgcccgccaaggtgcgcgccttgccgcccagcgaggagctgcccgtcatgccctgggccacctccgtcgcaagcggttacacccttttgagggatccacaccacaacaagggtcttgctttcacagaggaggaaagggatggacactacttgcgtggactgcttcctccggcagtactatctcaggaactccaaattaagaagttcatgaacaccctgcggcagtaccagacccctttgcagcggtatatagctatgatgaaccttcaggaaacggacgagaggcttttctacaagcttttaattgataatgtggtggagctgcttccttttgtttacacaccaactgtaggtgaggcctgccagaagtatgggtccatctttggacgaccacagggtctgtatgtcagcctgaaggacaaggggaaggtcctagaagttctaaggaactggccacataggaacattcaagttatctgtgttactgatggtgagcgaatcttgggacttggagatttgggttgtcagggaatgggaattcctgtaggcaaacttgctctatacactgctctaggaggagttgacccatcagtttgcttgcctatcacaattgatgttggtacaaataacgagaaactgcttaatgatgagttctacattggactccggcaaaaacgtgcgactggcgaggagtatgatgagcttattgaagagttcatgtctgctgttaagcaattctatggtgagaaagtcctcattcagttgaggactttgccaatcacaatgcctttgatttgcttgaaaaatatagcaagagccatcttgttttcaatgatgatatccagggcacagcatcagtggtccttgcaggtttgttagcagcactcaagatggttggtgggaccctggcagagcagacgtatttgttccttggtgctggggaggctggaactggtattgcagaacttattgctcttgagatttcgaaacagacgaatgctccaattgaagagtgccgcaagaaggtttggctggtggactcaaagggtttgattgttgactctcgtaaaggctcccttcagccattcaagaaaccttgggcgcatgagcacgagcccttgaaaaccttgtatgatgctgttcagtccatcaaacctacagttctgatcgggacatctggagttggaagaacattcacaaaagaaatcattgaggccatgtcttccttcaacgagaggcctatcatcttttcactgtcaaacccaacctcgcattctgaatgcactgctgaacaagcatatacatggagtcagggccgttcaatctttgccagtggcagtccatttgcccccgtggagtacgaaggaaagacttttgtgcctgggcagtcgaacaatgcctacattttccctggactcggcctcggtcttgtgatctctggagccgtccgtgtccacgaggacatgcttctcgccgcctcgaaagcgctagctgatcaggccacacaggacaacttcgagaagggctccatcttcccacccttcaccagcatcagaaagatctctgcgcacatcgctgcagccgtggctgcaaaagcctacgagctcggtctggcgacccgtctgcctccccccagcgacctggtgaaatatgcagagaactgcatgtacactcccgtctaccgcaactaccggtagtgctgcggggatcaattttgcagtaataaaaaatctatcaacgcggatggtactctgttgtttatagtccctgctgctaaccacccttgttgctggtgctgctggagaggcattgtacctgtccatgcatatatgatatatatatgttgtaacgttgtgaaagcaaacaatcttgggtaccaatgtttgttattctttcgctcgattatgatggtctgttatagtggctggacgagtcagatctccgtgatagggaatcaagatgaccaaatctaagccaaaccaa

SEQ ID NO: 206085 - DNA, 2141 bp, Zea Mays
ccgcatccccctgctccatccccccctctccacactgccaactcgctccgaagagggaggaggacgacgccggttgccactgccactgccgcgccgcgccgctcccgtctcccctccctccgcgggaactcgacgccaccatgctgtccacgcgcaccgccgccgtcgccgcctccgcgtcccccgcctccccgtggaagctgggaggacggagcgagggcggcgccagctgcgacggatgccggacctacaggaacaccctgcggaggagggccgcgcccgccaaggtgcgcgccttgccgcccagcgaggagctgcccgtcatgccctgggccacctccgtcgcaagcggttacacccttttgagggatccacaccacaacaagggtcttgctttcacagaggaggaaagggatggacactacttgcgtggactgcttcctccggcagtactatctcaggaactccaaattaagaagttcatgaacaccctgcggcagtaccagacccctttgcagcggtatatagctatgatgaaccttcaggaaacggacgagaggcttttctacaagcttttaattgataatgtggtggagctgcttccttttgtttacacaccaactgtaggtgaggcctgccagaagtatgggtccatctttggacgaccacagggtctgtatgtcagcctgaaggacaaggggaaggtcctagaagttctaaggaactggccacataggaacattcaagttatctgtgttactgatggtgagcgaatcttgggacttggagatttgggttgtcagggaatgggaattcctgtaggcaaacttgctctatacactgctctaggaggagttgacccatcagtttgcttgcctatcacaattgatgttggtacaaataacgagaaactgcttaatgatgagttctacattggactccggcaaaaacgtgcgactggcgaggagtatgatgagcttattgaagagttcatgtctgctgttaagcaattctatggtgagaaagtcctcattcagtttgaggactttgccaatcacaatgcctttgatttgcttgaaaaatatagcaagagccatcttgttttcaatgatgatatccagggcacagcatcagtggtccttgcaggtttgttagcagcactcaagatggttggtgggaccctggcagagcagacgtatttgttccttggtgctggggaggctggaactggtattgcagaacttattgctcttgagatttcgaaacagacgaatgctccaattgaagagtgccgcaagaaggtttggctggtggactcaaagggtttgattgttgactctcgtaaaggctcccttcagccattcaagaaaccttgggcgcatgagcacgagcccttgaaaaccttgtatgatgctgttcagtccatcaaacctacagttctgatcgggacatctggagttggaagaacattcacaaaagaaatcattgaggccatgtcttccttcaacgagaggcctatcatcttttcactgtcaaacccaacctcgcattctgaatgcactgctgaacaagcatatacatggagtcagggccgttcaatctttgccagtggcagtccatttgcccccgtggagtacgaaggaaagacttttgtgcctgggcagtcgaacaatgcctacattttccctggactcggcctcggtcttgtgatctctggagccgtccgtgtccacgaggacatgcttctcgccgcctcgaaagcgctagctgatcaggccacacaggacaacttcgagaagggctccatcttcccacccttcaccagcatcagaaagatctctgcgcacatcgctgcagccgtggctgcaaaagcctacgagctcggtctggcgacccgtctgcctccccccagcgacctggtgaaatatgcagagaactgcatgtacactcccgtctaccgcaactaccggtagtgctgcggggatcaattttgcagtaataaaaaatctatcaacgcggatggtactctgttgtttatagtccctgctgctaaccacccttgttgctggtgctgctggagaggcattgtacctgtccatgcatatatgatatatatatgttgtaacgttgaaaaaaaaaaa

SEQ ID NO: 206086 - DNA, 1250 bp, Zea Mays
caagcttatgcccacgcgagtgagaagtgagaatctcctaggaaagagaaacaacgaagactcgaaacgagtacaccaacctttctttctctcctctcgcttctgcggcgaattttcttgtcccgtgccggccgccgtgtctaccctgcgccaccgccccttccaacgcctgccgtgaagacaaaaggtcttggttaagtttgaagatgtcgtgcttggcatgctgtggcggcgaagatactcaaagaacacctgataatggaggtccataccctggtggctacccaccaagtatccatggtgtcaaggcttaagcatggcaatgtcgtagagttgcttggttactgtgttgatggaaacacccgcatccttgcatatgaatttgctactatgggttctcttcacgatatgcttcatggacgcaaaggtgtgaaaggagctcagcctggtccagtcctgtcctggacacaacgagtgaagattgctgttggagcagcaaaaggccttgagtatcttcatgagaaagcgcagcctcatattatacacagggacatcaagtccagtaatgttcttctatttgatgacgacgtatctaaaatagctgattttgatttgtcaaaccaagctccggatatggcagctcgacttcattcgaccagagttcttggaacatttggctatcatgcacctgagtatgcaatgactggacaacttagctctaagagtgacgtttacagttttggagttgttcttctggagctcctgactggaagaaagcctgtggatcatacattaccaagaggacagcaaagtcttgtgacatgggcaactccacggctttgtgaagataaagttaggcaatgcgttgattcaagacttggagtagaatatcctcctaaatccgttgcaaagtttgcagctgttgctgcactgtgtgtgcaatatgaagctgactttcgacccaacatgagcatcgtggtgaaggcgcttcagcccctgctgaatgcacgtgcatccaacaaccctggatgaatgaatgaatgactgccgttgcttttccctgacgagagtatctgaatcagacaacatgtagcattgaattcagataaatatagtgtttggcttaatacacttggccctagatgttcatcaggagataacctcttgcagtttctggatgttacctagtctttgtatccctaaactgtaacctattgttcggttgcgttccatctggtgttgtttacatc

SEQ ID NO: 206087 - DNA, 1803 bp, Zea Mays
ctcctcaccaacgccaccaaagacacacagtccccagatgtacaacctgtaggggttgcagcgcggcgccggcgcgtcgggtcgtgcccatcacgttgtctccactccgtcgcctctcctctcctctccgtccctgcgccacgcgggggagattaaagcgaagcgcctccccgctcacctctcctctcgtcgtgcgttggatcaaagtatcaaaccaatctcccctcgccgtccggccggcgtgcgcgcggggcctctttttttggagccttgcgccgcggcccgttcctcctgtccgaaataatccgcctcgacgtgttcgcctccccctccccctccctctctcccctcccctcgcgactcgtctcgtgcgtgactgcgtgctcgctctccttttcgctgcgctcatctcggtatctgtgccagcgctcgcctctccccgccggcccgccctccttcctttccttgtctagccgaaggccgaagccactgcgcgcgcgtgcgtgcgacgatgtcgtcggcggtggaggccatctcctgccccaaggtcgacgtccccgccggcccggagccgggggagccggccaaggaagcggcgccgcccgcggagcactgcgacacggcgcccaacggcaagtgcgcgccgcgttgtcacggggaggaggaggaggaggaggaggacgaggaggacgaggagaaggcccccaaggccatcgacctcggtcccatggtcagcatcaaggagcagctcgagaaggacaaggacgacgagagcctgcggcgatggaaggagcagctcctcggcggcgtggacttgaactccgtgggagagacgctggagccggacgtgaagataatgagcctgtccatcctgtcgcccgggcggcccgacatcgtgctgccgctgccggtggagcccaacggcaagggcgtgtggttcaccctcaaggaaggctccccgtaccggctcaagttcaccttctccgtcagcaacaacatcgtctccggcctccgctacaccaacaccgtctggaagacggggctcaaagttgacagagccaaggagatgctcggcacgttcagcccccagctggagccctacacgtacgtgacgccggaggacaccaccccgtcgggaatgtttgcccgggggtcctactctgccaggaccaagttcctcgacgacgaccgcaagtgctacctggagatcaactacaccttcgacatccgccgggagtggccgtcgacgagctgaccatccttccctccctccatcggtggcctgagcagaccagtcgtttcgttctgtgttcttccttttctatgttgcctcgtcctgtcctgtcactaggttttttgtttgttcaccgtcagcttgttcgctgcagcagtccaaacagctgcaacagtgtcggcttgtagccagccgaacacgccccgtgttgctgcgtgcgtgacgcacggtgcgtctatgtgccctttcccatgcgccagttgtctgctgtgttgacaccgttactagacagtgcaaatgtcaggtcggtctaccggactgtgcgtgcgtcagcgtgttcaacttgtcgatcagggtctcgttttttccgaaccgcctgttgagttaagacttcagagcaatgaagctgcgttctgcgtagtaatgccaccgtgatcgtgacctgttgtgcttcgagagttcgactgtagcattgaaatcaagtgtagcatgcttcgagtcctatttttgcgatcaatgttacaaatggccaaaaaaacgaagtatattgtttggagtccaaaaaatcc

SEQ ID NO: 206088 - DNA, 7145 bp, Zea Mays
gggggagaggtcaaggaaggcgagcgacgctcggcaggcagggcatcccgcgaggccgcgacagaggcggcactccgctcccaccaacccacaacaccgatcccctcctcgccgagccgccgccggggataagcgtggggaagtgagcagccaaaatctaagacaccgatccccgggcgtgagtcgcgaaggtagcggcggagaaaagggcggagccacaacgcggtcgtgagcccgcagccaccggttccgtgcggctagacggagagagaggttgcgaggcttgctgttcagccatgtcgacggcgcaagggacagcgttgaggtcggcgccgctgggcgcaggtcgttgggcccgacgcggccgccccgtggcggcgccgtaccgttcgggctggcaagcctacggtggcgtttccctcgagggcagcggattccttggccgcgtgcaccgcaccgaggagcgcgtcgctccgcgggcgccccacgcggcggcacgcgacgccgaggtggtgaggccgctctcaaagctcccgaacagcagcattgggctctacgattcctcattcgagcgtgacgcttgcggcgttgggtttgtcgctgagctatctggcgattacaaacgcgagactgttaatgatgctattgagatgcttgagagaatggctcaccgtggtgcctgcggctgcgagaagaatacaggagatggtgccggcatcatggtcgctctaccacatgacttcttcaaagaggtcgcaaaggatgctgggtttgagctacccccaccaggcgagtatgctgttggaatgttttttatgccaacagatgaaaagcgtcgtgagaaaggcaaagctgagtttatgaaggttgcagaatcactgggacatgtaatactcgggtggcgtctggttccgactgacaactcagacttgggtgaatctgcactcgagactgagccagtcattgagcaggttttcgttaccaagagctcaagatcagaggctgagtttgagcaacagctatatatccttaggagactctcaatcatctctgttcgagcctctctgaacattaagcgtggtggagagagggatttctacatgtgctctctatcttctaggactattgtttacaagggccagcttaaaccgtcccagcttaaggggtactactatgcagacctaggtcatgaaaacttcatgagttatatggctctggttcactcaaggttctccacaaacacctttcccagctgggaccgtgcacaaccaatgcgtgttttaggtcataatggagagatcaatactcttagaggaaacaagaattggatgacagcacgtgagggtctcttagaggctgagaagcttggattatcaaaggagcagctctcaagaattctgccaattgttgatgctacctcttccgattctggcgcatttgataatgttcttgagcttcttgtccgaggtgggcgaagcctgccagaagctgtgatgatgatgatccctgaggcatggcagaatgatgtaaacatggatcctgagaagaaagctctctacgagtttctgtcagcacttatggagccttgggatggacctgctctaatatcgtttactgatggtcgttaccttggagctaccctggaccgtaatggtttgaggcctggtcggttttatgtgacgcacagtgggcgtgtgatcatgggtagtgaggtcggtgttgttgatgttcctcctgaagacgtgctgagaaaaggcaggctaaaccctggaatgatgttattggttgattttgagaatcacactgtagtggatgatgaagctctgaaagcacaatattctaaagctcacccgtatggagaatggctcaagagacaaaaaatatacctcaaggatattgtagaatcagtaccagaaaccgatagagtcgctccaagcatttctagctcactttcacaaaagaatgagaacatagatcatgttggtatcagtgggattttgactcaactgaaggccttcgggtacacggtggaagccctcgagatgttgctactgccaatggctaaggatggagtggaagctcttggttccatgggaaacgatacaccacttgcggtgatgtcaaacagggagaagttgacttttgagtacttcaagcagatgtttgcacaagttacaaaccctccgattgaccctattagagagaaaattgttacatctatggagtgtatgattggcccagaaggtgacttgttggaaacaactgaaaaacaatgcaaccgccttgcacttaaaggtcccttggtttctattgatgaaatggaggctattaaaaagatgaattatcgaggttggcgaagcaaagtgcttgacataacttatccaaaaaagtctggaaggaagggcttggaagagactttgaacagaatttgtgctgaagctcgtaaagccatacgcgagggatacactattttggttctctcagatagaggattttcctcagaccgtgttgctgccagttctctcttagcagtgggagcagtgcatcagcaccttgttgcaaatcttgagaggacacgcataggattgttggttgagtcagctgaacctcgtgaagtgcaccatttctgcaccctggttggatttggcgctgatgctatatgcccttatttggctattgaagcaatttggtgcttacagaatgacgggaagattactcctaatggagatggacaaccttactcaaaggaagagctggtggcgaagtatttctatgcttctaactatggaatgatgaaagttcttgcaaagatgggaatatccacccttgcatcctacaaaggtgcacaaatttttgaagctcttggtctttcttctgaagtggttggcaagtgtttcgaaggcacacctagcagaattgagggtgcaacatttgaaatgcttgcacgagatgctctccgtcttcatgagttagctttcccatcaagagcccttccagctggcagtgcagatgcaaaggcacttcctaacccaggggattaccactggagaaaaaatggtgaaattcatctcaacgacccacttgcaatgggaaagttacaggaagcagctagagtcaacagccgggcagcatacaaggaatattcgaaacgaattcaggagctcaataaggcgtgcaatctacgtggcatgctgaaatttaaacatgtttctgacaagatatctttggatgaggttgaacctgcaagtgagatagtgaaacgcttttgtactggagcgatgagttatggttctatttcattagaagcacatactgcccttgctattgccatgaacaaacttggaggaaaatctaatacaggtgagggaggggaacagccctctcggatggaaccacttcctgatggctcaatgaatccaagacgaagtgcaatcaagcaagttgccagtggacggtttggagtttccagctattacctgactaatgcagatgagctgcagataaaaatggctcagggtgccaagcctggtgaaggtggtgaacttccaggccacaaggttattggtgacattgctgtcacaagacactccacagctggtgtaggactgatcagtccacctccgcatcatgatatttattcgattgaggatcttgcgcagcttatacatgaccttaagaattcaaatcctggagcccgcatcagtgtcaaactagtttctgaggctggtgtgggagttgttgctagtggtgttgtaaaaggacatgcagaccatgttcttatatctggccatgatggtggcactggagcttcaagatggaccggtatcaagaatgctggacttccatgggaacttgggttggctgagacacatcaaactctagtagcaaatgggcttcgtggtcgagctgtcctgcaaacagatggacagttgaagactggtagagatgttgctgttgcttgcttgcttggggcagaggaatttggtttcagcactgccccactgattacacttggctgtattatgatgcgaaaatgccacatgaacacttgtcctgttggtatagctactcaagacccagtgcttcgagaaaagtttgctggagaaccagagcatgtcatcaactttttcttcatgcttgctgaggagctaagagaaatcatggcaaaccttgggttccgcaccattactgaaatggttggacgttctgatatgcttgaggttgatccagaagtagtgaagagtaatgagaaacttgagaacattgatctctcactaatcttgaaaccagcttcagagattcgtccaggtgttgctcagtactgtgttgagaagcaagaccatggcctagacatggcattagataacaaactaatagatctgtcaagaactgctattgaaaagcaagttcgtgttttcattgagactccaatccagaacacgaatcgagcagttggaactatgctcagtcatcaagtcacaaaacgttatcacatgaatggattgcctgctggtacaattcatgtgaagtttactggaagtgctggtcaaagttttggcgcttttctttgtcctggaatcactcttgaactggaaggagacagcaatgattatgttggtaaaggattatctggtggaaaaattgttgtgtacccaccaaggaacagttcttttagtccagaggacaatattgtcattggtaatgtggctctgtatggtgctaccatgggagaggcatatttcaatggtatggcagcagaaagattttgtgttcgcaactcaggtgctcaagcagtggttgaaggaattggagatcacgggtgtgagtacatgactggaggcactgttgttatcctcggaaaaacagggcggaactttgctgctggcatgagtggaggcattgcctatgtttatgatgttgatgggaaattcagtgctcgctgcaacaatgagttagttgatctatatcatgtggaggaagaggatgacatcatcacattgaaaatgatgattgagcaacatcgtcgcaacactgagagtgttttggctagagatatactctccgattttgataaccttcttccaaaatttgtaaaagtatatccaagggactataagagggttctagaaagcatgaaggtggaaaaggctgttgctaagcatgcaaaggagcctaagatggcaaatggaatttctgtgacaactaagaaagtacaacctgatcagtcagcaagccgaccaacacatgttgccaatgccaaaaagtacaggggctttattacatatgagcgagagagtatttcatacagagatccaaaagagcgtgttagagattggaaggaagttgcaatcgaatctacacctggtccactattaaatacacaatctgctcgttgcatggactgtggcactcctttctgtcatcaggaaagctcaggtgctggttgtcctcttggaaataagatcccagaattcaatgaattagttcaccagaacagatggcgcgaagcattggatcgactacttgagacaaacaacttccctgaattcactggacgagtttgccctgctccttgtgaggggtcatgtgttcttgggattattgagaatccggtgtctatcaaaagtatagaatgtgcaatcatagacaaaggttttgaagagggatggatgattccacgacctccacttcaaagaacaggaaggaaggtggccattgttggcagtggaccatctggtttggctgctgcagatcaactaaataaaatgggccacttcgtaactgtgttcgaacgtgcagatcgaattggaggtttaatgatgtatggtgtgccaaacatgaagacagacaagattggcgttgtccagcgccgtgttaatttaatggctgaagagggtgtcacatttgtggtgaatgccaatgttggtagtgatcctttgtactcgattgaacgtctacgttctgaaaatgatgcggttattttggcttgtggagcaacaaaaccgagagatctcaccatccctggacgcgagctatctggagttcattttgcaatggaatttctccatgcaaatacgaaaagtttactcgacagcaacctggaggatggtaaatatatctccgcccgtgggaaaaaggtggtggttattggtggaggtgatacaggcacagattgcattggcacatctattaggcatggttgcaccagccttgtaaatcttgaactcctgtcaaaaccaccaagcactagagctgctgacaacccatggccccagtggccaagaattttccgtgttgactatgggcatcaagaagctgctaccaagtttgggaaggatccaagaacttacggagtcttgacaaagcgttttattggcgatggaaatggcaaggtgaaggcccttgaggtagtgcgtgtgaagtgggagaaagtagatggaagatttcaactcaaggagatggaaggatcagaagagattattgaggctgatctcgtcctcctagctatgggattcttgggtcctgaagcgacaatagctgagaaattgggtttggagaaggacaacagatcaaacttcaaagcgcagtttggagacttcgctaccagtgtcgatggtgtgtttgccgccggggactgcagacgtggacaatcactggtggtttgggccatcacggaggggcggcaggctgctgcagcggtagacaagtacttgtcaaggtatgatcagaatgctgctgctacaggcgacagcactccctccgggacagggctcgttcagccggttgcggcatagtagcataaactggagcaagttttacgtttgtcagtgtatcctgtggttccacacagcaaacaccgttcttgtagttgtctaaaagaaacagagaaatccgggctcattaaggaatgaaagcccttctatattttttttgacgatagataaacagttgaaagttttggtggctattgtctcttttttctgctgcatgtggttttgtagtccaaacaatgtacagtttcccctttcttaaatagatgtaaatttgtcgtgtgatatgtcggttattttctatgtgtttgcaagcgcgactgagccaccagtctgtatgaggccgagtctcggtttcggtcgacttataccgtt

SEQ ID NO: 206089 - DNA, 5971 bp, Zea Mays
atgtgacctccgattaggtggtgggaaggaaatgtgtttggtttgaggttcactcaaggttctccacaaacacctttcccagctgggaccgtgcacaaccaatgcgtgttttaggtcataatggagagatcaatactcttagaggaaacaagaattggatgacagcacgtgagggtctcttagaggctgagaagcttggattatcaaaggagcagctctcaagaattctgccaattgttgatgctacctcttccgattctggcgcatttgataatgttcttgagcttcttgtccgaggtgggcgaagcctgccagaagctgtgatgatgatgatccctgaggcatggcagaatgatgtaaacatggatcctgagaagaaagctctctacgagtttctgtcagcacttatggagccttgggatggacctgctctaatatcgtttactgatggtcgttaccttggagctaccctggaccgtaatggtttgaggcctggtcggttttatgtgacgcacagtgggcgtgtgatcatgggtagtgaggtcggtgttgttgatgttcctcctgaagacgtgctgagaaaaggcaggctaaaccctggaatgatgttattggttgattttgagaatcacactgtagtggatgatgaagctctgaaagcacaatattctaaagctcacccgtatggagaatggctcaagagacaaaaaatatacctcaaggatattgtagaatcagtaccagaaaccgatagagtcgctccaagcatttctagctcactttcacaaaagaatgagaacatagatcatgttggtatcagtgggattttgactcaactgaaggccttcgggtacacggtggaagccctcgagatgttgctactgccaatggctaaggatggagtggaagctcttggttccatgggaaacgatacaccacttgcggtgatgtcaaacagggagaagttgacttttgagtacttcaagcagatgtttgcacaagttacaaaccctccgattgaccctattagagagaaaattgttacatctatggagtgtatgattggcccagaaggtgacttgttggaaacaactgaaaaacaatgcaaccgccttgcacttaaaggtcccttggtttctattgatgaaatggaggctattaaaaagatgaattatcgaggttggcgaagcaaagtgcttgacataacttatccaaaaaagtctggaaggaagggcttggaagagactttgaacagaatttgtgctgaagctcgtaaagccatacgcgagggatacactattttggttctctcagatagaggattttcctcagaccgtgttgctgccagttctctcttagcagtgggagcagtgcatcagcaccttgttgcaaatcttgagaggacacgcataggattgttggttgagtcagctgaacctcgtgaagtgcaccatttctgcaccctggttggatttggcgctgatgctatatgcccttatttggctattgaagcaatttggtgcttacagaatgacgggaagattactcctaatggagatggacaaccttactcaaaggaagagctggtggcgaagtatttctatgcttctaactatggaatgatgaaagttcttgcaaagatgggaatatccacccttgcatcctacaaaggtgcacaaatttttgaagctcttggtctttcttctgaagtggttggcaagtgtttcgaaggcacacctagcagaattgagggtgcaacatttgaaatgcttgcacgagatgctctccgtcttcatgagttagctttcccatcaagagcccttccagctggcagtgcagatgcaaaggcacttcctaacccaggggattaccactggagaaaaaatggtgaaattcatctcaacgacccacttgcaatgggaaagttacaggaagcagctagagtcaacagccgggcagcatacaaggaatattcgaaacgaattcaggagctcaataaggcgtgcaatctacgtggcatgctgaaatttaaacatgtttctgacaagatatctttggatgaggttgaacctgcaagtgagatagtgaaacgcttttgtactggagcgatgagttatggttctatttcattagaagcacatactgcccttgctattgccatgaacaaacttggaggaaaatctaatacaggtgagggaggggaacagccctctcggatggaaccacttcctgatggctcaatgaatccaagacgaagtgcaatcaagcaagttgccagtggacggtttggagtttccagctattacctgactaatgcagatgagctgcagataaaaatggctcagggtgccaagcctggtgaaggtggtgaacttccaggccacaaggttattggtgacattgctgtcacaagacactccacagctggtgtaggactgatcagtccacctccgcatcatgatatttattcgattgaggatcttgcgcagcttatacatgaccttaagaattcaaatcctggagcccgcatcagtgtcaaactagtttctgaggctggtgtgggagttgttgctagtggtgttgtaaaaggacatgcagaccatgttcttatatctggccatgatggtggcactggagcttcaagatggaccggtatcaagaatgctggacttccatgggaacttgggttggctgagacacatcaaactctagtagcaaatgggcttcgtggtcgagctgtcctgcaaacagatggacagttgaagactggtagagatgttgctgttgcttgcttgcttggggcagaggaatttggtttcagcactgccccactgattacacttggctgtattatgatgcgaaaatgccacatgaacacttgtcctgttggtatagctactcaagacccagtgcttcgagaaaagtttgctggagaaccagagcatgtcatcaactttttcttcatgcttgctgaggagctaagagaaatcatggcaaaccttgggttccgcaccattactgaaatggttggacgttctgatatgcttgaggttgatccagaagtagtgaagagtaatgagaaacttgagaacattgatctctcactaatcttgaaaccagcttcagagattcgtccaggtgttgctcagtactgtgttgagaagcaagaccatggcctagacatggcattagataacaaactaatagatctgtcaagaactgctattgaaaagcaagttcgtgttttcattgagactccaatccagaacacgaatcgagcagttggaactatgctcagtcatcaagtcacaaaacgttatcacatgaatggattgcctgctggtacaattcatgtgaagtttactggaagtgctggtcaaagttttggcgcttttctttgtcctggaatcactcttgaactggaaggagacagcaatgattatgttggtaaaggattatctggtggaaaaattgttgtgtacccaccaaggaacagttcttttagtccagaggacaatattgtcattggtaatgtggctctgtatggtgctaccatgggagaggcatatttcaatggtatggcagcagaaagattttgtgttcgcaactcaggtgctcaagcagtggttgaaggaattggagatcacgggtgtgagtacatgactggaggcactgttgttatcctcggaaaaacagggcggaactttgctgctggcatgagtggaggcattgcctatgtttatgatgttgatgggaaattcagtgctcgctgcaacaatgagttagttgatctatatcatgtggaggaagaggatgacatcatcacattgaaaatgatgattgagcaacatcgtcgcaacactgagagtgttttggctagagatatactctccgattttgataaccttcttccaaaatttgtaaaagtatatccaagggactataagagggttctagaaagcatgaaggtggaaaaggctgttgctaagcatgcaaaggagcctaagatggcaaatggaatttctgtgacaactaagtacaacctgatcagtcagcaagccgaccaacacatgttgccaatgccaaaaagtacaggggctttattacatatgagcgagagagtatttcatacagagatccaaaagagcgtgttagagattggaaggaagttgcaatcgaatctacacctggtccactattaaatacacaatctgctcgttgcatggactgtggcactcctttctgtcatcaggaaagctcaggtgctggttgtcctcttggaaataagatcccagaattcaatgaattagttcaccagaacagatggcgcgaagcattggatcgactacttgagacaaacaacttccctgaattcactggacgagtttgccctgctccttgtgaggggtcatgtgttcttgggattattgagaatccggtgtctatcaaaagtatagaatgtgcaatcatagacaaaggttttgaagagggatggatgattccacgacctccacttcaaagaacaggaaggaaggtggccattgttggcagtggaccatctggtttggctgctgcagatcaactaaataaaatgggccacttcgtaactgtgttcgaacgtgcagatcgaattggaggtttaatgatgtatggtgtgccaaacatgaagacagacaagattggcgttgtccagcgccgtgttaatttaatggctgaagagggtgtcacatttgtggtgaatgccaatgttggtagtgatcctttgtactcgattgaacgtctacgttctgaaaatgatgcggttattttggcttgtggagcaacaaaaccgagagatctcaccatccctggacgcgagctatctggagttcattttgcaatggaatttctccatgcaaatacgaaaagtttactcgacagcaacctggaggatggtaaatatatctccgcccgtgggaaaaaggtggtggttattggtggaggtgatacaggcacagattgcattggcacatctattaggcatggttgcaccagccttgtaaatcttgaactcctgtcaaaaccaccaagcactagagctgctgacaacccatggccccagtggccaagaattttccgtgttgactatgggcatcaagaagctgctaccaagtttgggaaggatccaagaacttacggagtcttgacaaagcgttttattggcgatggaaatggcaaggtgaaggcccttgaggtagtgcgtgtgaagtgggagaaagtagatggaagatttcaactcaaggagatggaaggatcagaagagattattgaggctgatctcgtcctcctagctatgggattcttgggtcctgaagcgacaatagctgagaaattgggtttggagaaggacaacagatcaaacttcaaagcgcagtttggagacttcgctaccagtgtcgatggtgtgtttgccgccggggactgcagacgtggacaatcactggtggtttgggccatcacggaggggcggcaggctgctgcagcggtagacaagtacttgtcaaggtatgatcagaatgctgctgctacaggcgacagcactccctccgggacagggctcgttcagccggttgcggcatagtagcataaactggagcaagttttacgtttgtcagtgtatcctgtggttccacacagcaaacaccgttcttgtagttgtctaaaagaaacagagaaatccgggctcattaaggaatgaaagcccttctatattttttttgacgatagataaacagttgaaagttttggtggctattgtctcttttttctgctgcatgtggttttgtagtccaaacaatgtacagtttcccctttcttaaatagatgtaaatttgtcgtgtgatatgtcggttattttctatgtgtttgcaagcgcgactgagccaccagtctgtatgaggccgagtctcggtttcggtcgacttataccgtt

SEQ ID NO: 206090 - DNA, 5952 bp, Zea Mays
gggaaggaaatgtgtttggtttgaggttcactcaaggttctccacaaacacctttcccagctgggaccgtgcacaaccaatgcgtgttttaggtcataatggagagatcaatactcttagaggaaacaagaattggatgacagcacgtgagggtctcttagaggctgagaagcttggattatcaaaggagcagctctcaagaattctgccaattgttgatgctacctcttccgattctggcgcatttgataatgttcttgagcttcttgtccgaggtgggcgaagcctgccagaagctgtgatgatgatgatccctgaggcatggcagaatgatgtaaacatggatcctgagaagaaagctctctacgagtttctgtcagcacttatggagccttgggatggacctgctctaatatcgtttactgatggtcgttaccttggagctaccctggaccgtaatggtttgaggcctggtcggttttatgtgacgcacagtgggcgtgtgatcatgggtagtgaggtcggtgttgttgatgttcctcctgaagacgtgctgagaaaaggcaggctaaaccctggaatgatgttattggttgattttgagaatcacactgtagtggatgatgaagctctgaaagcacaatattctaaagctcacccgtatggagaatggctcaagagacaaaaaatatacctcaaggatattgtagaatcagtaccagaaaccgatagagtcgctccaagcatttctagctcactttcacaaaagaatgagaacatagatcatgttggtatcagtgggattttgactcaactgaaggccttcgggtacacggtggaagccctcgagatgttgctactgccaatggctaaggatggagtggaagctcttggttccatgggaaacgatacaccacttgcggtgatgtcaaacagggagaagttgacttttgagtacttcaagcagatgtttgcacaagttacaaaccctccgattgaccctattagagagaaaattgttacatctatggagtgtatgattggcccagaaggtgacttgttggaaacaactgaaaaacaatgcaaccgccttgcacttaaaggtcccttggtttctattgatgaaatggaggctattaaaaagatgaattatcgaggttggcgaagcaaagtgcttgacataacttatccaaaaaagtctggaaggaagggcttggaagagactttgaacagaatttgtgctgaagctcgtaaagccatacgcgagggatacactattttggttctctcagatagaggattttcctcagaccgtgttgctgccagttctctcttagcagtgggagcagtgcatcagcaccttgttgcaaatcttgagaggacacgcataggattgttggttgagtcagctgaacctcgtgaagtgcaccatttctgcaccctggttggatttggcgctgatgctatatgcccttatttggctattgaagcaatttggtgcttacagaatgacgggaagattactcctaatggagatggacaaccttactcaaaggaagagctggtggcgaagtatttctatgcttctaactatggaatgatgaaagttcttgcaaagatgggaatatccacccttgcatcctacaaaggtgcacaaatttttgaagctcttggtctttcttctgaagtggttggcaagtgtttcgaaggcacacctagcagaattgagggtgcaacatttgaaatgcttgcacgagatgctctccgtcttcatgagttagctttcccatcaagagcccttccagctggcagtgcagatgcaaaggcacttcctaacccaggggattaccactggagaaaaaatggtgaaattcatctcaacgacccacttgcaatgggaaagttacaggaagcagctagagtcaacagccgggcagcatacaaggaatattcgaaacgaattcaggagctcaataaggcgtgcaatctacgtggcatgctgaaatttaaacatgtttctgacaagatatctttggatgaggttgaacctgcaagtgagatagtgaaacgcttttgtactggagcgatgagttatggttctatttcattagaagcacatactgcccttgctattgccatgaacaaacttggaggaaaatctaatacaggtgagggaggggaacagccctctcggatggaaccacttcctgatggctcaatgaatccaagacgaagtgcaatcaagcaagttgccagtggacggtttggagtttccagctattacctgactaatgcagatgagctgcagataaaaatggctcagggtgccaagcctggtgaaggtggtgaacttccaggccacaaggttattggtgacattgctgtcacaagacactccacagctggtgtaggactgatcagtccacctccgcatcatgatatttattcgattgaggatcttgcgcagcttatacatgaccttaagaattcaaatcctggagcccgcatcagtgtcaaactagtttctgaggctggtgtgggagttgttgctagtggtgttgtaaaaggacatgcagaccatgttcttatatctggccatgatggtggcactggagcttcaagatggaccggtatcaagaatgctggacttccatgggaacttgggttggctgagacacatcaaactctagtagcaaatgggcttcgtggtcgagctgtcctgcaaacagatggacagttgaagactggtagagatgttgctgttgcttgcttgcttggggcagaggaatttggtttcagcactgccccactgattacacttggctgtattatgatgcgaaaatgccacatgaacacttgtcctgttggtatagctactcaagacccagtgcttcgagaaaagtttgctggagaaccagagcatgtcatcaactttttcttcatgcttgctgaggagctaagagaaatcatggcaaaccttgggttccgcaccattactgaaatggttggacgttctgatatgcttgaggttgatccagaagtagtgaagagtaatgagaaacttgagaacattgatctctcactaatcttgaaaccagcttcagagattcgtccaggtgttgctcagtactgtgttgagaagcaagaccatggcctagacatggcattagataacaaactaatagatctgtcaagaactgctattgaaaagcaagttcgtgttttcattgagactccaatccagaacacgaatcgagcagttggaactatgctcagtcatcaagtcacaaaacgttatcacatgaatggattgcctgctggtacaattcatgtgaagtttactggaagtgctggtcaaagttttggcgcttttctttgtcctggaatcactcttgaactggaaggagacagcaatgattatgttggtaaaggattatctggtggaaaaattgttgtgtacccaccaaggaacagttcttttagtccagaggacaatattgtcattggtaatgtggctctgtatggtgctaccatgggagaggcatatttcaatggtatggcagcagaaagattttgtgttcgcaactcaggtgctcaagcagtggttgaaggaattggagatcacgggtgtgagtacatgactggaggcactgttgttatcctcggaaaaacagggcggaactttgctgctggcatgagtggaggcattgcctatgtttatgatgttgatgggaaattcagtgctcgctgcaacaatgagttagttgatctatatcatgtggaggaagaggatgacatcatcacattgaaaatgatgattgagcaacatcgtcgcaacactgagagtgttttggctagagatatactctccgattttgataaccttcttccaaaatttgtaaaagtatatccaagggactataagagggttctagaaagcatgaaggtggaaaaggctgttgctaagcatgcaaaggagcctaagatggcaaatggaatttctgtgacaactaagaagtacaacctgatcagtcagcaagccgaccaacacatgttgccaatgccaaaaagtacaggggctttattacatatgagcgagagagtatttcatacagagatccaaaagagcgtgttagagattggaaggaagttgcaatcgaatctacacctggtccactattaaatacacaatctgctcgttgcatggactgtggcactcctttctgtcatcaggaaagctcaggtgctggttgtcctcttggaaataagatcccagaattcaatgaattagttcaccagaacagatggcgcgaagcattggatcgactacttgagacaaacaacttccctgaattcactggacgagtttgccctgctccttgtgaggggtcatgtgttcttgggattattgagaatccggtgtctatcaaaagtatagaatgtgcaatcatagacaaaggttttgaagagggatggatgattccacgacctccacttcaaagaacaggaaggaaggtggccattgttggcagtggaccatctggtttggctgctgcagatcaactaaataaaatgggccacttcgtaactgtgttcgaacgtgcagatcgaattggaggtttaatgatgtatggtgtgccaaacatgaagacagacaagattggcgttgtccagcgccgtgttaatttaatggctgaagagggtgtcacatttgtggtgaatgccaatgttggtagtgatcctttgtactcgattgaacgtctacgttctgaaaatgatgcggttattttggcttgtggagcaacaaaaccgagagatctcaccatccctggacgcgagctatctggagttcattttgcaatggaatttctccatgcaaatacgaaaagtttactcgacagcaacctggaggatggtaaatatatctccgcccgtgggaaaaaggtggtggttattggtggaggtgatacaggcacagattgcattggcacatctattaggcatggttgcaccagccttgtaaatcttgaactcctgtcaaaaccaccaagcactagagctgctgacaacccatggccccagtggccaagaattttccgtgttgactatgggcatcaagaagctgctaccaagtttgggaaggatccaagaacttacggagtcttgacaaagcgttttattggcgatggaaatggcaaggtgaaggcccttgaggtagtgcgtgtgaagtgggagaaagtagatggaagatttcaactcaaggagatggaaggatcagaagagattattgaggctgatctcgtcctcctagctatgggattcttgggtcctgaagcgacaatagctgagaaattgggtttggagaaggacaacagatcaaacttcaaagcgcagtttggagacttcgctaccagtgtcgatggtgtgtttgccgccggggactgcagacgtggacaatcactggtggtttgggccatcacggaggggcggcaggctgctgcagcggtagacaagtacttgtcaaggtatgatcagaatgctgctgctacaggcgacagcactccctccgggacagggctcgttcagccggttgcggcatagtagcataaactggagcaagttttacgtttgtcagtgtatcctgtggttccacacagcaaacaccgttcttgtagttgtctaaaagaaacagagaaatccgggctcattaaggaatgaaagcccttctatattttttttgacgatagataaacagttgaaagttttggtggctattgtctcttttttctgctgcatgtggttttgtagtccaaacaatgtacagtttcccctttcttaaatagatgtaaatttgtcgtgtgatatgtcggttattttctatgtgtttgcaagcgcgactgagccaccagtctgtatgaggccgagtctcggtttcggtcgacttataccgtt

SEQ ID NO: 206091 - DNA, 1741 bp, Zea Mays
tcagcctctgcatattatgtgggaaagctcaggtgctggttgtcctcttggaaataagatcccagaattcaatgaattagttcaccagaacagatggcgcgaagcattggatcgactacttgagacaaacaacttccctgaattcactggacgagtttgccctgctccttgtgaggggtcatgtgttcttgggattattgagaatccggtgtctatcaaaagtatagaatgtgcaatcatagacaaaggttttgaagagggatggatgattccacgacctccacttcaaagaacaggaaggaaggtggccattgttggcagtggaccatctggtttggctgctgcagatcaactaaataaaatgggccacttcgtaactgtgttcgaacgtgcagatcgaattggaggtttaatgatgtatggtgtgccaaacatgaagacagacaagattggcgttgtccagcgccgtgttaatttaatggctgaagagggtgtcacatttgtggtgaatgccaatgttggtagtgatcctttgtactcgattgaacgtctacgttctgaaaatgatgcggttattttggcttgtggagcaacaaaaccgagagatctcaccatccctggacgcgagctatctggagttcattttgcaatggaatttctccatgcaaatacgaaaagtttactcgacagcaacctggaggatggtaaatatatctccgcccgtgggaaaaaggtggtggttattggtggaggtgatacaggcacagattgcattggcacatctattaggcatggttgcaccagccttgtaaatcttgaactcctgtcaaaaccaccaagcactagagctgctgacaacccatggccccagtggccaagaattttccgtgttgactatgggcatcaagaagctgctaccaagtttgggaaggatccaagaacttacggagtcttgacaaagcgttttattggcgatggaaatggcaaggtgaaggcccttgaggtagtgcgtgtgaagtgggagaaagtagatggaagatttcaactcaaggagatggaaggatcagaagagattattgaggctgatctcgtcctcctagctatgggattcttgggtcctgaagcgacaatagctgagaaattgggtttggagaaggacaacagatcaaacttcaaagcgcagtttggagacttcgctaccagtgtcgatggtgtgtttgccgccggggactgcagacgtggacaatcactggtggtttgggccatcacggaggggcggcaggctgctgcagcggtagacaagtacttgtcaaggtatgatcagaatgctgctgctacaggcgacagcactccctccgggacagggctcgttcagccggttgcggcatagtagcataaactggagcaagttttacgtttgtcagtgtatcctgtggttccacacagcaaacaccgttcttgtagttgtctaaaagaaacagagaaatccgggctcattaaggaatgaaagcccttctatattttttttgacgatagataaacagttgaaagttttggtggctattgtctcttttttctgctgcatgtggttttgtagtccaaacaatgtacagtttcccctttcttaaatagatgtaaatttgtcgtgtgatatgtcggttattttctatgtgtttgcaagcgcgactgagccaccagtctgtatgaggccgagtctcggtttcggtcgacttataccgtt

SEQ ID NO: 206092 - DNA, 5399 bp, Zea Mays
gtatggtagtggtactggtagcctctcacatttttatatgcttgctcgcccgccatggataccgaaaccaccgtactgctgtctcctactagattttaatcactaccaggcgccgttctcctctctctctctttccccgtctcaagcttgcattttctctctctctctctttccccggtggtgcggtgcggtgcgggtgctggactgctggcctctgcgtccgcatccggcgggcaagtgcgaaagctgccaactctttccctgctcggttttcccttctccaggccagccacaccacttcttcgccaagctcgcatccatttccaaactcttacctccatcccccacctgccctcctttatctcccaaatcggtcttcttgcgctggtggaattcctcgtcggcggtggcgagtgaggcgctgctggtggtatgcaggagctaggaggtaggcaacaaccatacgaaggcaagggcgagcggagccgaggcacaccgcgcgttctgcgccgaccagcactgcccgatctcgcgcgggggaggggggattcgtgagcgccggcggcagccatgccggagtcctggagacccgccgaggcggatgccctgcagccggcggcaggcacggcgtccgcgtccggcccctcggctcggagcccgggcaatggcgccaaggggcgcggggcgggggagccccccggcgctgcggcgacgcgggtgccgttccacaggctgttcgcgttcgcggactccgccgacgtggcgctcatgctgctgggcgcgctcggggccgtggccaacggcgccgccttgcccttcatgaccgtgctcttcggcaacctcatcgacgcctttggtggcgcgctcagcgtccacgacgtcgtcagccgggtgtccatggtctcgctcgacttcgtctacctcgccatggcctccgccgtcgcttccttcgtccaggtcacctgctggatgatcaccggcgagcgtcaggcggcgcggatacggaacctgtacctcaagacgatcctcaggcaggagatcgccttcttcgacaagtacaccagcaccggcgaggtcgtgggcaggatgtccggcgacacggtgctcatccaggacgccatgggcgagaagggctggctgctcaccctggtcatgatggcgaccatcccgccgctcgtcctggcgggcgcggtcatgtccaacgtcgtcaccaagatggcgtccctgggccaggcggcctacgcggaatcgtcggtggtggtggagcagaccatcggttccatcagaacggtcgcgtctttcaccggcgagaaacgggcggtggacaagtacaacatgtccttgaagaacgcgtacaagtccggcgtccgagagggcctcgccactgggcttggaatgggcacggtcatggtgctcctcttctgcggctactcgctagggatttggtatggcgctaagctcatcctggagaaggggtacacgggagccaaggtcatgaacgtcatctttgcagtcctcactggttctctggctctaggtcaggcgtctccaagcatgaaggcgtttgcaggtgggcaggctgccgcacacaaaatgttcgagacgatcaacagaacgccagaaatcgacgcgtacagcaccacggggaggaagctggaggacgttcgaggggacatcgagttcagggatgtctatttctcctacccgacaaggcccaacgaacagatattcaagggtttctccctcgccatacctagtggcacgacgatcgcgttggtaggccagagcgggagcggtaaatccacggtcatcagcctgatcgaacggttttatgaccctcagcttggcgatgttctgatagatggtgtgaatctcaaggagttccagttgaggtggatcagaagtaaaatcggccttgtcagccaggagccggtcctttttgctgccagcataaaggagaacatagcttatggcaaagacaacgcgacggatcaggaaatcagagctgctgctgagcttgccaatgctgccaaattcatagataaaatgcctcagggttttgatacttccgttggtgagcatgggacacagctttctggtgggcagaagcaaagaattgcgattgcaagggctattctgaaagatccaagaatcctactattggatgaagctacaagtgctctggatgccgagtctgaaaggattgtgcaggaagctctcgacagggtcatgacaaacaggacgacagtcatagtcgcacaccgtctgagcactgttcgaaatgctgataccattgctgttattcatcagggaacactggttgaaaaaggtccacacagtgagcttctaagagatccagaaggagcttatagccaactgataaggctacaggaagcaaaccagcagaacaatgggaaggttgatgccaatgctcgtccaggcaaacaaatatcaataaacaagtcagctagcaggaggtcgtcccgtgataacagtagccaccattcattctcagtcccattcggtatgcctcatgggattgacattcaggatggttcatctaacaaactgtgtgatgagatgccacaggaagtgcctctcagccggcttgcatctctcaacaaggcagagatcccggtccttatactaggctccattgcctcagtcatcagtggagttatcttcccgatctttgcgatactcctgtcaaatgtgataaaagcgttctatgagcctccacatctcctaaggagggattcacagttctgggcttccatgttcttggtgtttggtgcagtgtacttcttgtcactccctgtcagttcgtaccttttctccatagcagggtgcaggttgattagaaggatccgactgatgacatttgagaaggtggtaaatatggaggtcgagtggtttgatcacccagaaaactcaagtggagcaataggtgcaaggttgtcagctgatgcagcaaaagttagaggccttgtgggggatgcgcttcaattggttgtacaaaactcttcgacactagttgctggtttggttattgcatttgtgtcaaactgggagctatccctcatcatcttagctttaataccactcattggcctaaatggatggatccagatgaagtttattcacggtttcagtgcagacgcaaagatgatgtatgaagaggcaagccaggtggctaatgatgcagtaggcagcataagaacagtggcctcattctcagctgaagagaaggtcatggatttgtacaagaagaaatgtgaaggtcctctaagaacaggaatcaggacagggattataagtggaatcggttttggagtttcctttttcttgctatttggggtatatgcagctagcttttatgctggtgctcggcttgttgaggacaggaagacaacctttcctaaagttttcagggttttcctagctcttgcaatggcggcaattggagtgtcgcaatcaagtacccttacatcagattcttccaaagcaaaatcagctgcatcttctatatttgcaattgtagatcgaaaatcaaggatagacccaagtgaggatgcaggggtaactgttgaggcactacaaggaaacatcgtattccagcatgttagcttcaagtatcctaccaggccagatgttcagatattccgggacctttgcttgacaattcatgctggaaagactgttgcactcgttggagagagtggtagtggcaaatcaacggcaatttcattgctccagaggttctatgacccagatgtaggccatatactactagatggcgtggacatacagaagttccagcttaggtggttaaggcaacaaatgggcctggttagtcaagaaccagctttgtttaatgacacaataagggcaaacattgcctatggaaaagatggacaagcaacagaatctgagatcatatctgctgcagaattggcaaatgctcacaagtttatcagttcggcgctgcagggatatgacacagtggttggagagcgtggagcccagttgtcaggagggcagaagcagcgagtggcgatcgcccgtgcaattgtgaaggaccctaggatcctgcttctggacgaagcgactagtgcgctggatgctgagtccgagcggatcgtccaggacgcactggacagggtgatggtgaaccggacaacagtgatcgtcgctcaccgtctgtcaacaatacaaaatgcagatttgattgcggtcgtgaggaatggggttatcatcgagaagggaaagcacgatgccttgatcaacatcaaggatggcgcctatgcgtccctcgtcgcccttcactcggcagcctcttcatagcaggtgatggtatgggatcctgcatacgtctgctaagacatatatgaacagagcgagctggcacaacctgtgtagcaatccaggtgctagtctctgttcctctatttgatggcatacataattgcttatacctaagcggagaaatgttacaaatagcaaggaccagatgtaaatgcaaggagctggtccttaagataactttttataatctataaatcttaatatgtatatgtagcttcgaacatagaaaccaaatagatgatggttatgctataactcatgatgttcttgctgtcgtttcccccctttatagcttatatgcaagtaatgataaccctgctcaggaaagaaagggcagctcccaaacgtttaatgataaccatatggctggaaaaactgagatgaaatgctgaagaatggcttctgcggaagcataaatttcatggcaaaggctatcaggttgcaacttctaaggtctggccaaaacagtatgtttttaatgtgaaaagggcatactaaacggaaacacaagttctattttgtaaaaaaaaacctcaactgaaggggcgggcatcctgatcaactgactctgaaacgaagtaactagtaatccaagtgatttccatttggctgacggggctcgttcggttgcgcatggattagagaaggattaaatcccttccgatttaattttaactaaaaagagatttaatcctctgttgcaattcctgtaatccccttcaaactgaaccaggcctgacggggaagtgtacaatattttttttttcacgctgacaaccaaactgtacacacgtgtttctgctcttgcaaaagagcgagcacatgagttaatttctggcaagatttactgaaacctatgaggaaaaaaatatatcgtacccctcccaatttgcattttctagaaactagaaaagcggagaactaatttggcaatagcactagcgactttggctatcaacaataatcagtaggagaaaagacgggggaatttgtgaagcagtaaaacggaaaaactagacacgattgcttaagct

SEQ ID NO: 206093 - DNA, 2239 bp, Zea Mays
aggaagacgagcagggagagggaggtagggcaaaaggaagagaatccgagaataaattcagagagggagggagggagggccatgatgatggcaggcgtggcgtcgtaggtggttaaagcgaagggcgcccctcgtcgtccggtctatgagctggtaccagaactgctcataatattcaggggaaaaaaaaggcaacatggcggaatcgaaggtcgcaagtctggatgcccgaacgacgaagatcagaaacgtccccatcgcagtgaccccagaagggttctggtgctgcccgtcgcaagccgtgctccagaagacggcgaagagccaaaacccgcaggcgaagacgaagcccaaagggggtgcctcgcctctcgcaccaaaggcggcaccaccaatccagagggcacccacaatctcgtccgagagaaggacgcactcgactccgaccagggctaagaccaactcagaggagcagaggtgcttgccgccggcagaggacgctgcggctaataataatgccactaatccgccgaaggcggtgaacgagaggccacagaagcagcacaaggtatctgtggggttcggccagctcgagacgagtgacttgaaggtggtgctgtatggcaaggacggcgttgcggtgaagatgagcgtccacaagaacaccctagctggaaacagtaccttctttgctgacaagctctccgggcagtctccggcgtcgagtatagaagtgactgactgtgaggatgtggagatttatgtcgagacagttgggttgatgtactgcagtgatgtcaagcagaggcttatcaagcaaaccgttcctcgtgttcttcgagtcttgaaggttgcagagctgctgggtttcccagcatgtgtcatgtcatgcttagactacttggaagcggtcccttgggtcggggaagaagaggagaatgtggtctcgtctgtccggaacctgcagagcgagagctatggcgtcagtcctgtgctgaagagggtagcaccatctgatcgaacaaccccaccaaacgatacgttttcacatatcatcgaactggtcttgagaagcagcgaggacagggggcggcgcgagatgaaatctctggtgcagaagcttctgaaggagagtagcactggctgcatgagtgggtcttccgacctgtgttctgcggtcctctacagatcatgccggaactgcctggattccttactaatcctgtttcagcaagcaaccgacagtgatttcgctgagcaggctcttaataccaaagaaccagttttccgacaagttgctctagaagcagataacctgctctggttagctgagatcttggctgacaggaatgccgctgacgagttcgcggtcatatgggctagccaacgtgagctggctgggctgcactctaggttgccagtcaagtcgcgccaccttgtcagctgtgtcacggcgaggctgttcgtgggcatcgggaaaggggagatgcttccttcgaaggacacgaggcggcttctcttggacgtctggttgcagcctctcatggatgactacaactggttgcagcacggctgcaggtcgttcgaccggaaagtggtggaggaaggtgttgggcggaccatcctgacgctccctttggaggatcagcagacgatcctgctctcgtggcttgggagcttcctgaaggttggggacagctgccccaatctccagaaggcctttgaggtttggtggaggagaactttcgtaaggccctatgctgagcagcaaggtaatcgatcgcaatcaggtcggagttgagatgtcaattggttgcagaagaagatagtcttgtttcctagtgtagtatatttgatgagaagttagggtggcggtttcttcttgcgtggtagcccgcgtgggagatccccagtatgtggaggaaatgcggttagtactcttgacctgcgtgaggcttgaggaagttcgcgttgtgcttgtgatgcttcgtatgtatgtcaagatctctgaattctgggtgcagaatttgtatcgtcaggcatctgttttgatgctctgttctgcttctcacaacgttgcacgatgttaattaaggatctgttatgtaaaagaactcgacgccttcaatgcaactgtaaagattttgcagaatgtgttcttctaaagtggagacatatcggtttctatttgtgttgtatggatgattgtccagtttgaaacggtgatgtgtgttaggaa

SEQ ID NO: 206094 - DNA, 1831 bp, Zea Mays
cacaaagccaaattccccagctctcattcctcactccgatccgatcctcgcagatcagtagatcactacaccgcgcggcgtagcaagctaagagcgagaggattcttggagctcagctctcatcaccagcagctataggtacgtgcacgcagtgcatggcgcaggagggctccgaggcctccgtcgccagctccccgccgccgccggcctcctcgtcctcctcctcgtggtggcgcgacatgcacccggcggcggctgcctacggcggcgcgtggccgccgcccccgcccaccgcggcgaggtggcccccgatggcggcctcgtcgtcgcgccaccagcagcagcagcagcaacacggcggcggccgcacgacgtcctccggcggcggcgccgacgacgacctctcggcctccaacgccaccatgacgtcgtcgtccttcaccaacacctccgccaccaaccgatccggcctcagcatggacgacgactccggcggtggcggacctgctgaggcggccgccgccgccgccgcagagagccaccacctctggaaccaagtcctcatcatgggcggcggcggcggcgaggttgggaggagcatgcacgacgcccacgacgacagcgagaacttcctcgagctgctcaactcgaggacgctcgtgccggagctcttcgccgaccctccggcctgcgactacctcaagaagatggagtacggcagcagccacggcggcggcgggtggccggaccaccaccagttcacgacagcagccgcgctggagaagcacctgagctccggctacggcggcggcgcgctcgcgcaccagcaccagcacgcggcggccggaggcgcgccggagcggctcacggcgaacctgtccgacctcgtgagcaactggtccatcgcgccgccgaacccgtgcctcggcgacgcgcaccaccaccaccgcaccggcgtcgtcgccgcggcatgcgataacgacaacgccaaggccggcatgttcctgggctccggcggcggcgtctgcaatcacgagataggcggacacggcgcgatgctggagggagcggcgacgggcggcggcggcggcggcggccaggagtttctccggcccgccgcaggcgcagggtacagctccatgctcgggctcagcaggaacaacaggacgatgtatatggaggcgccgtggggaagcaatgccgccggcgcgacgaggagcctgtcggacctgatatctttcggcggagctccgctgggaaaagcagaggaaccggcgccgcccacgtcaacgaaggcgctggcggagtacaagaagcaagggcacgacatcccttcgccggcatcatcgcaggtgcctaaagtgaagttaggagacaagatcactgcactgcaacagatcgtttcaccatttggaaagaccgatacggcatcagttctgtatgaggcgataaattacatcaagtggttgcacgaacaagttcagttgctgagtgatccatacatgaagactagtagcaaggactacaactacaacgcatggggaaggttagaagataaggagggcgccgagatggtggacctgcgaagtagaggcctgtgcttggtgcccgtctcatgcacgcctcaggcgtacagggacagcaacgacggcccagactactggacgcccccatataggagctgcttgtaccgatgatgaactgattcaattcctgctgccgtgcatgcgtacgtgtaatacgtagctgtttattccatccattggttatataccttactcagtggtaataaatttgtggtgaatatatatatattattgtttaaagctag

SEQ ID NO: 206095 - DNA, 1194 bp, Zea Mays
atgttgatggcaaaaaatcatgtaatatatgcaaataaggtctgtacaacggggatgatggaatggtgataataaatccactactccagcaactccttgtagctcactgtcaggtcggatgcgtgcattactgaactacgaagcacctgagttgcaggattctggggtcgtttcagaaaggggtgatgtatacagctttggtgtagtgatgctggaacttcttactgggcgtaaaccatatgacagttcacgcccgcgtcatgagcaacatcttgttagatgggccagttctcagcttcatgacatagaatccctgtccaagatggtggacccatctatacgtggacaatgttctgagaaagcattgtcacgtttcgctgacataatcagccgctgtatccagcagccagaattcaggccaccaatgtctgaaattgtacaagacctagctagacttgtaaatgccaccggtgaggaatcagagtaacccccaaaaaaagcatggagccatggaaggcatacaatacaaacgtcgcgaccaagttacgtgctgtacaatttttttgggaagataattgtcttgcttggtctggggagaatactgtgaagatgtattttcctcagagagcattgcacactaatgtcagattggaatttcatttagacctggctggggagtggaggtgcagccatctgtgcacctgattgttgatcaaatccatgtaatatttttgcagacatgatattatatatagcgacagtggcggagcctccgccaagcgccaaggcccggcctgatcgggcacgtgtccaggcttccgccgaggaacacttgggtgggctctcgatcggcctagcacacggatgtttggatgggtcaggcagtggtgtcgatttcaggccggctccgccactgtactgtatagcaaggtgtatatatagcaagaccccggattcttgtaataatagtcagggattcgttaaatttgttactctaaagctagtcatttacttgttcgcccgtttatcatgttggatggtatctactctcagcagtcgaagaaaaaaaaaactgctcagagtgcttgtagggaatagagatttggttgttgctgctctaaagctcaacggggcgttctccttccagttcatgcctgccgaaacttgagaaacgtttatctgtgggtctattcc

SEQ ID NO: 206096 - DNA, 1092 bp, Zea Mays
ctcactgtcaggtcggatgcgtgcattactgaactacgaagcacctgagttgcaggattctggggtcgtttcagaaaggggtgatgtatacagctttggtgtagtgatgctggaacttcttactgggcgtaaaccatatgacagttcacgcccgcgtcatgagcaacatcttgttagatgggccagttctcagcttcatgacatagaatccctgtccaagatggtggacccatctatacgtggacaatgttctgagaaagcattgtcacgtttcgctgacataatcagccgctgtatccagcagccagaattcaggccaccaatgtctgaaattgtacaagacctagctagacttgtaaatgccaccggtgaggaatcagagtaacccccaaaaaaagcatggagccatggaaggcatacaatacaaacgtcgcgaccaagttacgtgctgtacaatttttttgggaagataattgtcttgcttggtctggggagaatactgtgaagatgtattttcctcagagagcattgcacactaatgtcagattggaatttcatttagacctggctggggagtggaggtgcagccatctgtgcacctgattgttgatcaaatccatgtaatatttttgcagacatgatattatatatagcgacagtggcggagcctccgccaagcgccaaggcccggcctgatcgggcacgtgtccaggcttccgccgaggaacacttgggtgggctctcgatcggcctagcacacggatgtttggatgggtcaggcagtggtgtcgatttcaggccggctccgccactgtactgtatagcaaggtgtatatatagcaagaccccggattcttgtaataatagtcagggattcgttaaatttgttactctaaagctagtcatttacttgttcgcccgtttatcatgttggatggtatctactctcagcagtcgaagaaaaaaaaaactgctcagagtgcttgtagggaatagagatttggttgttgctgctctaaagctcaacggggcgttctccttccagttcatgcctgccgaaacttgagaaacgtttatctgtgggtctattcc

SEQ ID NO: 206097 - DNA, 3196 bp, Zea Mays
ccatctcctctgtctccgcctcgtcgcttccgcccactcttcctcgccgctgcctcacggccccattgctccgagcgcggcgccggtcgcgatccgaccgggggtgcgcggcgccgaatggtgtgatcgaccccgtcgggaattgggatcgaggtcatgcagcgggctccggagcgccgccgcggcgccgggccgctcctgctgctggcgctgctcgtcgcattggcggccgcgcccagactcgtgcgcgcggtcaccgacgctaccgacgtctctgccataaacggactgtacatgtcactgggatcaccacttctacctggatggactggaaatggtggagacccgtgcggtgagagctggcagggtgttgtgtgtaccggctcttccataactggaataaccatgaatgctgcaaacttgggaggacagttgggaagtttaggaaacttcactgccatcaccagcttagagcttaacaacaataatattggtggaaccataccggaggacctacctgttacattgcagatttcctctctgctaatcaacttactggaagcatcccaagttcactgtcaaaactcgaaaacttaacagccatgtcagtcaacggcaaccatctaaatggagacctaccagacacttttgattcactcaatagacttgtaaatttggatatttcttcgaacaacttgagtggtgtgttaccatcttcaatgaaaaacctggcatctttgacttcattgcacatgcaagataatcaactgtctgggacccttaacgttttgcaggatctcccactgaaagacttgaacatagagaataatcttttttctggaccggtgcctgcgagtttgcttaacataccaaacttcaaaaaggacgggaatccattcaataccagcatcgtcccatctgcatctccgccttcaacaggaccagctccaacaccagcagcatcaaaaccagctccaacaccagcacccaccacttcaaattcaacgcccccagcaccagcaccctcatttccttcaagatctcctcccccgcctaaaacaacctcaaactcttctgaaggatcaactacccgagatagcacttcaccatctaagaaacacagtacatcaaccctcaagattgttggctttgttcttgccggagtagtgctgtttattatcatagtcctcctagtattattttgtctatccaagtaccaagagagacggtcgagatatgatcataacagaagtcagcaggcaagggtgcatcatagggttgaaccgcaaatcaagccacctccagtgcaacaaagcaatgatcttaaaaaaggtgaggtacttgatagaaggggccatgaactaagttcatcaacggcagctctcgcaaagaaatctcctgaaaaccaaaaggagcatgtaattaattttgatcgaacagattcagatctgtttcctgtttctctaccaccaccacctcctccacctccattacccccaattgaaagagttattgcaaatcccattgttccaccagaaaagcgatatagtcctccaccaaagacaagtagctctacttctgccacatcattctctattgcatctcttcagcaatatacaaatagcttcagagaggagaatgtgataagagagagtagattaggaaaggtttacctagcagagcttcctgatggcaagttattggaggttttgaagattgacaatgctaatggaagaatatcagtagatgacttcctagaagaggttgaatgtatcttagatatcaagcatcctaacattcttgagttagtcggatactgtgctgaatatgggcagaggttacttgtgtacaatcactttagcagaacgacactagatgacacacttcatgatggagaggatactgaaagtgcactgtcatggaatgcccgcctccaggttgctcttggttctggaaaagccttagagtatctccatgctagcttccaacctccaattgtgcaccagaattttgaaccagctaatgtgctccttgacaaaaagttctcagtgtgtgttgctgaatgtggactggcagaattgatgccaccaagttcagtcactcagctgtcaggtcggatgcgtgcattactgaactacgaagcacctgagttgcaggattctggggtcgtttcagaaaggggtgatgtatacagctttggtgtagtgatgctggaacttcttactgggcgtaaaccatatgacagttcacgcccgcgtcatgagcaacatcttgttagatgggccagttctcagcttcatgacatagaatccctgtccaagatggtggacccatctatacgtggacaatgttctgagaaagcattgtcacgtttcgctgacataatcagccgctgtatccagcagcagccagaattcaggccaccaatgtctgaaattgtacaagacctagctagacttgtaaatgccaccggtgaggaatcagagtaacccccaaaaaaagcatggagccatggaaggcatacaatacaaacgtcgcgaccaagttacgtgctgtacaatttttttgggaagataattgtcttgcttggtctggggagaatactgtgaagatgtattttcctcagagagcattgcacactaatgtcagattggaatttcatttagacctggctggggagtggaggtgcagccatctgtgcacctgattgttgatcaaatccatgtaatatttttgcagacatgatattatatatagcgacagtggcggagcctccgccaagcgccaaggcccggcctgatcgggcacgtgtccaggcttccgccgaggaacacttgggtgggctctcgatcggcctagcacacggatgtttggatgggtcaggcagtggtgtcgatttcaggccggctccgccactgtactgtatagcaaggtgtatatatagcaagaccccggattcttgtaataatagtcagggattcgttaaatttgttactctaaagctagtcatttacttgttcgcccgtttatcatgttggatggtatctactctcagcagtcgaagaaaaaaaaaactgctcagagtgcttgtagggaatagagatttggttgttgctgctctaaagctcaacggggcgttctccttccagttcatgcctgccgaaacttgagaaacgtttatctgtgggtctattcc

SEQ ID NO: 206098 - DNA, 3002 bp, Zea Mays
ccatctcctctgtctccgcctcgtcgcttccgcccactcttcctcgccgctgcctcacggccccattgctccgagcgcggcgccggtcgcgatccgaccgggggtgcgcggcgccgaatggtgtgatcgaccccgtcgggaattgggatcgaggtcatgcagcgggctccggagcgccgccgcggcgccgggccgctcctgctgctggcgctgctcgtcgcattggcggccgcgcccagactcgtgcgcgcggtcaccgacgctaccgacgtctctgccataaacggactgtacatgtcactgggatcaccacttctacctggatggactggaaatggtggagacccgtgcggtgagagctggcagggtgttgtgtgtaccggctcttccataactggaataaccatgaatgctgcaaacttgggaggacagttgggaagtttaggaaacttcactgccatcaccagcttagagcttaacaacaataatattggtggaaccataccggaggacctacctgttacattgcagagtcttttcctctctgctaatcaacttactggaagcatcccaagttcactgtcaaaactcgaaaacttaacagccatgtcagtcaacggcaaccatctaaatggagacctaccagacacttttgattcactcaatagacttgtaaatttggatatttcttcgaacaacttgagtggtgtgttaccatcttcaatgaaaaacctggcatctttgacttcattgcacatgcaagataatcaactgtctgggacccttaacgttttgcaggatctcccactgaaagacttgaacatagagaataatcttttttctggaccggtgcctgcgagtttgcttaacataccaaacttcaaaaaggacgggaatccattcaataccagcatcgtcccatctgcatctccgccttcaacaggaccagctccaacaccagcagcatcaaaaccagctccaacaccagcacccaccacttcaaattcaacgcccccagcaccagcaccctcatttccttcaagatctcctcccccgcctaaaacaacctcaaactcttctgaaggatcaactacccgagatagcacttcaccatctaagaaacacagtacatcaaccctcaagattgttggctttgttcttgccggagtagtgctgtttattatcatagtcctcctagtattattttgtctatccaagtaccaagagagacggtcgagatatgatcataacagaagtcagcaggcaagggtgcatcatagggttgaaccgcaaatcaagccacctccagtgcaacaaagcaatgatcttaaaaaaggtgaggtacttgatagaaggggccatgaactaagttcatcaacggcagctctcgcaaagaaatctcctgaaaaccaaaaggagcatgtaattaattttgatcgaacagattcagatctgtttcctgtttctctaccaccaccacctcctccacctccattacccccaattgaaagagttattgcaaatcccattgttccaccagaaaagcgatatagtcctccaccaaagacaagtagctctacttctgccacatcattctctattgcatctcttcagcaatatacaaatagcttcagagaggagaatgtgataagagagagtagattaggaaaggtttacctagcagagcttcctgatggcaagttattggaggttttgaagattgacaatgctaatggaagaatatcagtagatgacttcctagaagaggttgaatgtatcttagatatcaagcatcctaacattcttgagttagtcggatactgtgctgaatatgggcagaggttacttgtgtacaatcactttagcagaacgacactagatgacacacttcatgatggagaggatactgaaagtgcactgtcatggaatgcccgcctccaggttgctcttggttctggaaaagccttagagtatctccatgctagcttccaacctccaattgtgcaccagaattttgaaccagctaatgtgctccttgacaaaaagttctcagtgtgtgttgctgaatgtggactggcagaattgatgccaccaagttcagtcactcagctgtcaggtcggatgcgtgcattactgaactacgaagcacctgagttgcaggattctggggtcgtttcagaaaggggtgatgtatacagctttggtgtagtgatgctggaacttcttactgggcgtaaaccatatgacagttcacgcccgcgtcatgagcaacatcttgttagatgggccagttctcagcttcatgacatagaatccctgtccaagatggtggacccatctatacgtggacaatgttctgagaaagcattgtcacgtttcgctgacataatcagccgctgtatccagcagccagaattcaggccaccaatgtctgaaattgtacaagacctagctagacttgtaaatgccaccggtgaggaatcagagtaacccccaaaaaaagcatggagccatggaaggcatacaatacaaacgtcgcgaccaaacatgatattatatatagcgacagtggcggagcctccgccaagcgccaaggcccggcctgatcgggcacgtgtccaggcttccgccgaggaacacttgggtgggctctcgatcggcctagcacacggatgtttggatgggtcaggcagtggtgtcgatttcaggccggctccgccactgtactgtatagcaaggtgtatatatagcaagaccccggattcttgtaataatagtcagggattcgttaaatttgttactctaaagctagtcatttacttgttcgcccgtttatcatgttggatggtatctactctcagcagtcgaagaaaaaaaaaactgctcagagtgcttgtagggaatagagatttggttgttgctgctctaaagctcaacggggcgttctccttccagttcatgcctgccgaaacttgagaaacgtttatctgtgggtctattcc

SEQ ID NO: 206099 - DNA, 1457 bp, Zea Mays
gccacctagatcgaatcgaactcctcgatgtgtggctccacttgaaccacctgatcttctcctgtggggggaagaagaagaatgatcgccctcgtgcagatattggccttatagtggaacaattcattgctgagtttgaagtagcagccgaagaagatgcaaacttgaataggcaatcaaaaccagccattaacaaacttatgaagcttcctctgctcatagatgttctctccaagaagaatcttcagcaggaatttcttgaccacggagttctcactcttctaaaaaattggcttgagccattacctgatggaagcatgccaaacatgaatattcgatctgctgtactgaaattattaactgattttccaattgacttggaacagtatgaccgaagagagcagcttaagaaaagtggtctgggaaaggtcattatgtttttgtccaaatctgacgaggagactactgcaaataggaaattggctaaggagctggttgataaatggagtcgaccaatattcaacaagagcacgagatttgaggacatgaagagatatgatgatgaaagagcaccttacaggcggccacaaatgaagaaaccttcatcgagtagctctggaatggaatccagagatgatgatcttgatgctgacttttcacaacgcaagtctgggcaaagtagttcaaggcagcacgcttctaggccggaagcctcgcctttggactttgtcattcgtccacagtccaaaattgaccctgagcagatacgggctcgtgctaagcaggctgtccaagaccagcgtcggctgaagatgaacaagaaattgcagcagctgaaagcgcccaagaagaaaaaccttcaggcgtcgaagctcagcgtggaaggccgtggcatgatcaagtacctgtagatcacccgctatggcatccgcagtcagcagtgcccagcacattatacaggacctgcatgggcccagggattgctggattactaagaagcatcctatcaccattccatggcaaacagcccggcatcaataattccttggatcttttttccaaatatttttcttgcctggtagggtgcagcatctgcgcttcagaaaccggttgatttgagcactatctatgagcatgtataaatatggtgcttttcaagcagagtggtgcctttatattgtataaaatatttgtcatgcttatgagttacagttaactctgtctatgttgtctcgatgtactaggtctcaagccctcttaatggagggttgtgatagggtaagcaagtcaacgttaaatctccataaaatgataggttaagcgagtcaacattaaatgtctccaatttaatggagatgaaatccgaaagaaaggattctgttgaggcgtaattcttggatccctttgttggtagtcaacacattcttgagtaagagacttcatttagtgacctatag

SEQ ID NO: 206100 - DNA, 1829 bp, Zea Mays
tccgtctctctcacgcgccaattgatagggaaggggaaacagaagagggcacacacctggttcatgggggtgggcgctgctagagtcttgctgctccacctcttctgctccattgataacacttctctcctttgatttgagtctcccttcatcttctccattaatttgtgccttctctggtcctcgtatgctgattgattcatggctcttttccccttctctgttggttactgtctgcagcctggcgtcatgaggtcacggaggatgaccaagaaggtgttagaaccgtagatgatgataatttcattgatgacactggagttgatccagctgatcgttatggcagcgataatgagcgacattcacctggacgttatgcacaggctgaggagggtgaggaggacgatgaaatcgaacgactcttcaagggtggtaagaagaagaagaagaagaatgatcgccctcgtgcagatattggccttatagtggaacaattcattgctgagtttgaagtagcagccgaagaagatgcaaacttgaataggcaatcaaaaccagccattaacaaacttatgaagcttcctctgctcatagatgttctctccaagaagaatcttcagcaggaatttcttgaccacggagttctcactcttctaaaaaattggcttgagccattacctgatggaagcatgccaaacatgaatattcgatctgctgtactgaaattattaactgattttccaattgacttggaacagtatgaccgaagagagcagcttaagaaaagtggtctgggaaaggtcattatgtttttgtccaaatctgacgaggagactactgcaaataggaaattggctaaggagctggttgataaatggagtcgaccaatattcaacaagagcacgagatttgaggacatgaagagatatgatgatgaaagagcaccttacaggcggccacaaatgaagaaaccttcatcgagtagctctggaatggaatccagagatgatgatcttgatgctgacttttcacaacgcaagtctgggcaaagtagttcaaggcagcacgcttctaggccggaagcctcgcctttggactttgtcattcgtccacagtccaaaattgaccctgagcagatacgggctcgtgctaagcaggctgtccaagaccagcgtcggctgaagatgaacaagaaattgcagcagctgaaagcgcccaagaagaaaaaccttcaggcgtcgaagctcagcgtggaaggccgtggcatgatcaagtacctgtagatcacccgctatggcatccgcagtcagcagtgcccagcacattatacaggacctgcatgggcccagggattgctggattactaagaagcatcctatcaccattccatggcaaacagcccggcatcaataattccttggatcttttttccaaatatttttcttgcctggtagggtgcagcatctgcgcttcagaaaccggttgatttgagcactatctatgagcatgtataaatatggtgcttttcaagcagagtggtgcctttatattgtataaaatatttgtcatgcttatgagttacagttaactctgtctatgttgtctcgatgtactaggtctcaagccctcttaatggagggttgtgatagggtaagcaagtcaacgttaaatctccataaaatgataggttaagcgagtcaacattaaatgtctccaatttaatggagatgaaatccgaaagaaaggattctgttgaggcgtaattcttggatccctttgttggtagtcaacacattcttgagtaagagacttcatttagtgacctatag

SEQ ID NO: 206101 - DNA, 3593 bp, Zea Mays
cacaattcacatctcccctcgctccctgcctccccggccatcgcatcgtgttcgaaatattcaaaacccaccaattcctcggattccgacactcgggtggagggaaccccaaatttttgcccccgcgtcgcctccgccttccaccctccgccccgcaaatctccaaatccgtttcggccccgaaccggacaccgccgcgcttgcttaaatcccgacgcgacgctcgcggaggcggcggaaccctataaggcctggatcccgctccgcgcccccgcccccgcccgatttcaggctctagggttacgcatgccctagcctccgctgcccgtggtgccggtgccatgcctgcgacccgcatcccgctcaagcgctgcaccgccgtcgtccccggcgtggaggatcccggccccgctgcaagcatgccgcccgctaagcgccgccgcgagcgcgtcgtcccgtcgcggttcaggggttcgatgccgccgcccgctcccgtcggggaggaggtggaggtggaggacagggacggggacgtgtacaacgtcgaggtccgcatggccgaacccaaaggcgacacatttggccccgtggagaccgcggtgtggacgccagttctgccggcgcccatggacgccgacctgtaccgggcgtgccgtaacataaacaagagcggcagctgtgggggagctgccagtggtagtgtgctcacgtctgtgagcaatgccgcctcggacggtggtgctggtggcaatggcaccaccgtccgattgagcaatgccggctcaggaggtggtggtggtggcaatggcgggctggaggggagacctgtggtggtggagtgcaagcccaagagggaggtcagcggcaggaaagaggatttctactggccacaggattttgtgctcggggatgttgtgtgggcgaggtctgggaagaagtccccgacatggcctgcgctggtgattgatcccctgttgcatgcgccggaagtcgtgctcaactcctgcgttcctggcgccctctgcgtcatgttttttggttattccgctaacgggcatggcagggactatggatgggttaagcaaggaatgatctttccctttgtggactacctagacaggtttcaaggacagcctctgtataagctcagaccaagcaaattccgtgcagcaattgaggaggctttccttgctgaacgtggtttttttgatctcgaaacggatggggtatgctcaccgcgaaagtctgtaaataagcagtctgatcctattggttttcaggaagaggctgcttcaaataacgagcaagaatgccaatctgagtctcaggttgttggcaaatcggcactgtgttgtgatagctgtggtaatcgtctaccatccaaggtttcaaagaaaaggaagcaagcgggtgagcagatgctttgtatgcactgtgaaaagttattgcagtcgaaacaatactgtggcatatgcaagaaaatttggcaccacacagatggtggaaactgggtttgttgtgatgagtgccagatttgggttcacgttgaatgtgatctaacatgcaacaacgtcgaggatttggaaaatgcagattatttctgtccggattgcaaatcaaaaagtaaaacagttccagcaactgaaaatttgaatacttccacttcagaatgtgccagcacttctaagggaaaactgaccgcaatgatagctgtttgctgcaatggcgaggatgcactgtatgtacctgagaagcacatgatactatgtcaatgtaagtcttgcaaggaaaggatgatgagtctgaatgagtgggagaagcatactggctcaaggaaaaagaattggaagatgagtattagacaaaagagtactggggaactactcattaatttgctggatgatattccttgtgggacatcgaagtattctaacccaggcattaagaaagaagagctgctacaattgcaagctaatccttacagtcctgtctgtgctaaatggacaactgaacgatgtgctgtttgtcgatgggttgaggattgggactacaataaaattataatttgcaacagatgccaaatagctgttcatcaagagtgctatggagcatgtgctgtacaagatcttacaacatggctttgtcgagcatgtgaatccccccaacagaaaagagaatgttgtctatgccctgtcaaagggggcgctctcaagccaacagacattgatggactgtgggttcatgttacatgtgcctggtttcagcctaaagtatcatttccggttgatgagacgatggagccagctatgggaataatgagcatccctgtagaatactttaagaagacttgcgtcatatgcaagcaaatgcatggtgcctgcacacaatgctacaaatgctctacctattaccacgcaatatgtgcgtcaagagctggatattgcatggagttgcaatgctctgaaagaagtggcaggcacattacaaaaatggtttcatactgtgattttcatagtactcctgacccagacaatgtgttgatagtgaagacaccggaaggtgttttctctaccaaattttttctccaaaatggtgagaaacagacagctgcaagactcgtcaggaaggaaaatcaccaggagaaagtgcttcctcctataatttctgactgtctagtcgcaaagtgcctgacctatgaaatgtcgaaatacaagaaacaaccaggagaggctattgcccaccggattatgggacctcgtcaccactctcaggattttattgatggtcttaatgcatgcatggatcgtaaggatgaccaatctttttcaacatttaaagagcgacttcggtatttacagaaaactgaaaatttgagggtctcgtgtggtcgatctggaattcatggatgggggctcttcgccgcaaggaatattcaggagggtcaaatggttattgagtaccgtggcgaacaagttagacggtgtgttgctgacttgagggaagcacagtaccatagagaaaaaaaggattgctatttgttcaagataagcgaagatgttgtcatcgatgctaccgacaaaggaaacatagcgcgcctaattaatcactcggtatgccgaactgctatgctaggatcatgaccgtcagcgatgacaggagcgagatcattctgattgccaagagagacgtctctgccggagaagagctgacgtacgactacttgtttgaccctgatgagtccgaagactgcagggttccatgcctgtgcaaggctcctaactgccgtgggtacatgaactagaagactaaccaacctcagaaacagggactaaagactaacgtgaccccccttacagttacagaggccaaaggctggccatttttcccggaattcttccgttggcttctcggtttatatttactggaaagtttattagttctcgtggctgcccaagttttgaaccattttgtttagatattgcgattgagggcagccaccccattgtatattctttcattgttgtaataagataccagtataatcaagaatgctgactttgaaatggaaagaagaaaaaactcaacttgatgcc

SEQ ID NO: 206102 - DNA, 1075 bp, Zea Mays
ctgttgtgctgtttggttccgtcgcgtcgcgtcccgtgctcagatcagatctctcctctcccccgaccccgagtggagtgcctccctccccccctcccgctccagactagcggagagagatctcggcaccgccgttcgtcgccatggcggcggccaacgctcccatcgccatgcgcgaggcgctcacgctcaccagcctgggcatcgcgccgcagttcgtcaccttcacccacgtcaccatggagtcggagaagtacatctgcgtccgcgagacctccccgcaaaacagtgtcgtcatcatcgacatggccatgcccatgcagccgctccgacggcccatcaccgccgactccgccctcatgaaccccaacaccaggatcctcgccctgaaagcccaaatacctggaacaacacaggatcaccttcaaatatttaacattgaggctaagactaagatcaagtctcaccagatgccggagcaggtcgtattctggaaatggatcactcccaaactgttgggtttggtgacacaaacatcagtttaccactggtcgattgaaggtgattctgagcccaccaagatgtttgataggacggctaatctggcaaacaatcagatcatcaactatcgatgtgacccagcggagaagtggcttgtacttattggaattgcacctggagccccagagaggccacaactggtgaagggaaatatgcaacttttctctgttgatcaacaacgtagccaggcacttgaagcccatgcagcgtcttttgcaacatttaagggaaacctggtttttctaagaaacaagccgacctcttcttccccccagatttccaggatgattttcctgtagctatgcaggtttcacaaaagtatgggcttatctatgtaattactaagcttggccttttgtttgtatatgacttggaaactgctgcggcagtttacagaaatagaatcagtccagaccctatattcttgacggcagaatcttcctctactggtggattttatgccatcaacagaagggggcaggttttacatgccacagttaatgatgcaactgtt

SEQ ID NO: 206103 - DNA, 1217 bp, Zea Mays
gcccataaacaaattccccagcgtctcctctcctctcctctccttccccggcaccgtgctctgttgtgctgtttggttccgtcgcgtcgcgtcccgtgctcagatcagatctctcctctcccccgaccccgagtggagtgcctccctccccccctcccgctccagactagcggagagagatctcggcaccgccgttcgtcgccatggcggcggccaacgctcccatcgccatgcgcgaggcgctcacgttcgtcaccttcacccacgtcaccatggagtcggagaagtacatctgcgtccgcgagacctccccgcaaaacagtgtcgtcatcatcgacatggccatgcccatgcagccgctccgacggcccatcaccgccgactccgccctcatgaaccccaacaccaggatcctcgccctgaaagcccaaatacctggaacaacacaggatcaccttcaaatatttaacattgaggctaagactaagatcaagtctcaccagatgccggagcaggtcgtattctggaaatggatcactcccaaactgttgggtttggtgacacaaacatcagtttaccactggtcgattgaaggtgattctgagcccaccaagatgtttgataggacggctaatctggcaaacaatcagatcatcaactatcgatgtgacccagcggagaagtggcttgtacttattggaattgcacctggagccccagagaggccacaactggtgaagggaaatatgcaacttttctctgttgatcaacaacgtagccaggcacttgaagcccatgcagcgtcttttgcaacatttaaggttgttggtaatgagaatccatcaacccttatttgtttcgcctcaaagacaactaatgctggacagatcacttcaaagttgcatgttattgaactgggtgcacagccagggaaacctggtttttctaagaaacaagccgacctcttcttccccccagatttccaggatgattttcctgtagctatgcaggtttcacaaaagtatgggcttatctatgtaattactaagcttggccttttgtttgtatatgacttggaaactgctgcggcagtttacagaaatagaatcagtccagaccctatattcttgacggcagaatcttcctctactggtggattttatgccatcaacagaagggggcaggttttacatgccacagttaatgatgcaactgtt

SEQ ID NO: 206104 - DNA, 2339 bp, Zea Mays
atatataaattttaaaactgattcaataaagttcaaaatgagagatttaacgacttttcgccatcagttattagagcgcacgtgcagatccacccgggcgtggcttacccagcaatggcgaccatcggccttgtcccctcgacagtcgtcgcatccaccgccattcgcgccccggcccccgcagcgctgacccgtgccagcaaccgccagcccccgcacgcccgccgcctgctggacctcggccgccgcgcgccggcgatggacgccctccgcgtgtcgggtgccgccgagcccctcctccgccccgccgccgccggggggcaccccaggctccgcgtgcggacccgtgcgcagcagggcgatggcggcgccgcggcggagggggacgccgcgttctcgtgggcgcccgtcgtcctcccgtttttattccctgcattgggtggtctccttttcggctatgatattggcgcaacctctggagcaaccatctctgtgcaatctcctgatctcagtggcactgattggttcagcttgtcatctttgcaactagggcttgtggccagtggttcactttatggtgctcttggcggctctcttcttgcataccgcattgcagattttctaggaaggaggatagaattggtcacagcagctgcattatatatccttggtgctttagtcactggatttgcccctaattttgtagcactaatcataggtcgtgtcctgtatgggattggtattggtttggcaatgcatggtgcccctctttatattgcggagacttctccttcacaaatacgtggaacattgatatctttgaaggagctgtttattgtgttagggatactgttaggataccttgtaggaagtcttgaaattgacaatgtaggaggatggcggtacatgtttggttttagtgctccgcttgcagctattatggctattggtatgtggactttaccatcttcaccaagatggctacttctcagggcagttcaaggaaaggcttctttggaggataataaaaagaaggcaattcaagcccttagaacattgaggggccgcacagcaagtgaaaaggttttggcagatgatgttgacgatacaattgtctctattaaggctgcctacgcaggacaggaagctgaaggaaacgtttgggatgtatttgaaggagctagcttgaaggccttcactattggcggaggtctggttctgtttcagcagataacaggtcaaccgagtgttctatattatgctgcttcaatacttcagactgctggattctcagctgcatcagatgctgccaaagtagcaatcttgattgggttgttcaagttgctaatgacaggtgttgcggtatttaaagttgacgatgttggaaggcgcccattattgataggaggtgttggtggaattgctttgtcactcttcctactggcagcttactacaagatcctgaacaacttcccctttgttgctgtcggcgcgttacttctatatgtcggtgcttaccaggtctcatttggtccaattagttggctaatggtatctgagatctttccactccggacaagagggcgtgggatcagcctcgcagtactaacaaatttcggctcgaacgctctggtgacatttgcgttttcacccttgaaggagctcctcgggccagccaatatatttttcctgttcggcgtcatagcagtgctctccctcgtgtttgtgatcctcgtcgttccagaaaccaaaggactgagcctggaggagatcgagtcgaagatcctgaagtaattaaaaaccgttcgtgcgatcataagccccatttggagatattgtaagtagcgatgccattttcaaaacgggcgctcgctcactcgtaggatcggagccaaagctttcagacatgggagtacatatgcaaagggcacgtctcggtgtaaagcttggacatctttctcttttattagcgtagtgaatatttccgaacatacttggtaaattacatttcagttgagtcataatcacgcttctgtagactgtagtccactgtgacctactgtagtagtatgcatgtcactagtaaaagctggtaagctgtgtgatggactgatggtgtagacttgtgcagttgtgctcgcataaggctggccatcagatcgtgtatatagcgacataaaacactattttgcactatagataatactgttataatttacagaatggagttggaaacatgagataaagataagaggtgggacatgagagcttcggtagactatttttaatattatgcagtatgagataaaggtctttgagtgagtggttgtccatccatg

SEQ ID NO: 206105 - DNA, 2518 bp, Zea Mays
gttcaaaatgagagatttaacgacttttcgccatcagttattagagcgcacgtgcagatccacccgggcgtggcttacccagcaatggcgaccatcggccttgtcccctcgacagtcgtcgcatccaccgccattcgcgccccggcccccgcagcgctgacccgtgccagcaaccgccagcccccgcacgcccgccgcctgctggacctcggccgccgcgcgccggcgatggacgccctccgcgtgtcgggtgccgccgagcccctcctccgccccgccgccgccggggggcaccccaggctccgcgtgcggacccgtgcgcagcagggcgatggcggcgccgcggcggagggggacgccgcgttctcgtgggcgcccgtcgtcctcccgtttttattccctgcattgggtggtctccttttcggctatgatattggcgcaacctctggagcaaccatctctgtgcaatctcctgatctcagtggcactgattggttcagcttgtcatctttgcaactagggcttgtggccagtggttcactttatggtgctcttggcggctctcttcttgcataccgcattgcagattttctaggaaggaggatagaattggtcacagcagctgcattatatatccttggtgctttagtcactggatttgcccctaattttgtagcactaatcataggtcgtgtcctgtatgggattggtattggtttgggaatgatatgtctcgatgaaacgtggacctcacatgtgtcactgacagtgtcaaataaggaattgcgcaaaactgcaatggtaggaaaaggatttatcctaattacaattaaagaggaatacaattgcaaaggagcatgtgcatattcagctaggggtttgggagagttggtgttatggcactgaaccattatggtgctctgtgccaggcaatgcatggtgcccctctttatattgcggagacttctccttcacaaatacgtggaacattgatatctttgaaggagctgtttattgtgttagggatactgttaggataccttgtaggaagtcttgaaattgacaatgtaggaggatggcggtacatgtttggttttagtgctccgcttgcagctattatggctattggtatgtggactttaccatcttcaccaagatggctacttctcagggcagttcaaggaaaggcttctttggaggataataaaaagaaggcaattcaagcccttagaacattgaggggccgcacagcaagtgaaaaggttttggcagatgatgttgacgatacaattgtctctattaaggctgcctacgcaggacaggaagctgaaggaaacgtttgggatgtatttgaaggagctagcttgaaggccttcactattggcggaggtctggttctgtttcagcagataacaggtcaaccgagtgttctatattatgctgcttcaatacttcagactgctggattctcagctgcatcagatgctgccaaagtagcaatcttgattgggttgttcaagttgctaatgacaggtgttgcggtatttaaagttgacgatgttggaaggcgcccattattgataggaggtgttggtggaattgctttgtcactcttcctactggcagcttactacaagatcctgaacaacttcccctttgttgctgtcggcgcgttacttctatatgtcggtgcttaccaggtctcatttggtccaattagttggctaatggtatctgagatctttccactccggacaagagggcgtgggatcagcctcgcagtactaacaaatttcggctcgaacgctctggtgacatttgcgttttcacccttgaaggagctcctcgggccagccaatatatttttcctgttcggcgtcatagcagtgctctccctcgtgtttgtgatcctcgtcgttccagaaaccaaaggactgagcctggaggagatcgagtcgaagatcctgaagtaattaaaaaccgttcgtgcgatcataagccccatttggagatattgtaagtagcgatgccattttcaaaacgggcgctcgctcactcgtaggatcggagccaaagctttcagacatgggagtacatatgcaaagggcacgtctcggtgtaaagcttggacatctttctcttttattagcgtagtgaatatttccgaacatacttggtaaattacatttcagttgagtcataatcacgcttctgtagactgtagtccactgtgacctactgtagtagtatgcatgtcactagtaaaagctggtaagctgtgtgatggactgatggtgtagacttgtgcagttgtgctcgcataaggctggccatcagatcgtgtatatagcgacataaaacactattttgcactatagataatactgttataatttacagaatggagttggaaacatgagataaagataagaggtgggacatgagagcttcggtagactatttttaatattatgcagtatgagataaaggtctttgagtgagtggttgtccatccatg

SEQ ID NO: 206106 - DNA, 2309 bp, Zea Mays
atttaacgacttttcgccatcagttattagagcgcacgtgcagatccacccgggcgtggcttacccagcaatggcgaccatcggccttgtcccctcgacagtcgtcgcatccaccgccattcgcgccccggcccccgcagcgctgacccgtgccagcaaccgccagcccccgcacgcccgccgcctgctggacctcggccgccgcgcgccggcgatggacgccctccgcgtgtcgggtgccgccgagcccctcctccgccccgccgccgccggggggcaccccaggctccgcgtgcggacccgtgcgcagcagggcgatggcggcgccgcggcggagggggacgccgcgttctcgtgggcgcccgtcgtcctcccgtttttattccctgcattgggtggtctccttttcggctatgatattggcgcaacctctggagcaaccatctctgtgcaatctcctgatctcagtggcactgattggttcagcttgtcatctttgcaactagggcttgtggccagtggttcactttatggtgctcttggcggctctcttcttgcataccgcattgcagattttctaggaaggaggatagaattggtcacagcagctgcattatatatccttggtgctttagtcactggatttgcccctaattttgtagcactaatcataggtcgtgtcctgtatgggattggtattggtttggtgagtatctgcaggcaatgcatggtgcccctctttatattgcggagacttctccttcacaaatacgtggaacattgatatctttgaaggagctgtttattgtgttagggatactgttaggataccttgtaggaagtcttgaaattgacaatgtaggaggatggcggtacatgtttggttttagtgctccgcttgcagctattatggctattggtatgtggactttaccatcttcaccaagatggctacttctcagggcagttcaaggaaaggcttctttggaggataataaaaagaaggcaattcaagcccttagaacattgaggggccgcacagcaagtgaaaaggttttggcagatgatgttgacgatacaattgtctctattaaggctgcctacgcaggacaggaagctgaaggaaacgtttgggatgtatttgaaggagctagcttgaaggccttcactattggcggaggtctggttctgtttcagcagataacaggtcaaccgagtgttctatattatgctgcttcaatacttcagactgctggattctcagctgcatcagatgctgccaaagtagcaatcttgattgggttgttcaagttgctaatgacaggtgttgcggtatttaaagttgacgatgttggaaggcgcccattattgataggaggtgttggtggaattgctttgtcactcttcctactggcagcttactacaagatcctgaacaacttcccctttgttgctgtcggcgcgttacttctatatgtcggtgcttaccaggtctcatttggtccaattagttggctaatggtatctgagatctttccactccggacaagagggcgtgggatcagcctcgcagtactaacaaatttcggctcgaacgctctggtgacatttgcgttttcacccttgaaggagctcctcgggccagccaatatatttttcctgttcggcgtcatagcagtgctctccctcgtgtttgtgatcctcgtcgttccagaaaccaaaggactgagcctggaggagatcgagtcgaagatcctgaagtaattaaaaaccgttcgtgcgatcataagccccatttggagatattgtaagtagcgatgccattttcaaaacgggcgctcgctcactcgtaggatcggagccaaagctttcagacatgggagtacatatgcaaagggcacgtctcggtgtaaagcttggacatctttctcttttattagcgtagtgaatatttccgaacatacttggtaaattacatttcagttgagtcataatcacgcttctgtagactgtagtccactgtgacctactgtagtagtatgcatgtcactagtaaaagctggtaagctgtgtgatggactgatggtgtagacttgtgcagttgtgctcgcataaggctggccatcagatcgtgtatatagcgacataaaacactattttgcactatagataatactgttataatttacagaatggagttggaaacatgagataaagataagaggtgggacatgagagcttcggtagactatttttaatattatgcagtatgagataaaggtctttgagtgagtggttgtccatccatg

SEQ ID NO: 206107 - DNA, 2232 bp, Zea Mays
atttaacgacttttcgccatcagttattagagcgcacgtgcagatccacccgggcgtggcttacccagcaatggcgaccatcggccttgtcccctcgacagtcgtcgcatccaccgccattcgcgccccggcccccgcagcgctgacccgtgccagcaaccgccagcccccgcacgcccgccgcctgctggacctcggccgccgcgcgccggcgatggacgccctccgcgtgtcgggtgccgccgagcccctcctccgccccgccgccgccggggggcaccccaggctccgcgtgcggacccgtgcgcagcagggcgatggcggcgccgcggcggagggggacgccgcgttctcgtgggcgcccgtcgtcctcccgtttttattccctgcattgggtggtctccttttcggctatgatattggcgcaacctctggagcaaccatctctgtgcaatctcctgatctcagtggcactgattggttcagcttgtcatctttgcaactagggcttgtggccagtggttcactttatggtgctcttggcggctctcttcttgcataccgcattgcagattttctaggaaggaggatagaattggtcacagcagctgcattatatatccttggtgctttagtcactggatttgcccctaattttgtagcactaatcataggtcgtgtcctgtatgggattggtattggtttggcaatgcatggtgcccctctttatattgcggagacttctccttcacaaatacgtggaacattgatatctttgaaggagctgtttattgtgttagggatactgttaggataccttgtaggaagtcttgaaattgacaatgtaggaggatggcggtacatgtttggttttagtgctccgcttgcagctattatggctattggtatgtggactttaccatcttcaccaagatggctacttctcagggcagttcaaggaaaggcttctttggaggataataaaaagaaggcaattcaagcccttagaacattgaggggccgcacagcaagtgaaaaggttttggcagatgatgttgacgatacaattgtctctattaaggctgcctacgcaggacaggaagctgaaggaaacgtttgggatgtatttgaaggagctagcttgaaggccttcactattggcggaggtctggttctgtttcagcagataacaggtcaaccgagtgttctatattatgctgcttcaatacttcagttgctaatgacaggtgttgcggtatttaaagttgacgatgttggaaggcgcccattattgataggaggtgttggtggaattgctttgtcactcttcctactggcagcttactacaagatcctgaacaacttcccctttgttgctgtcggcgcgttacttctatatgtcggtgcttaccaggtctcatttggtccaattagttggctaatggtatctgagatctttccactccggacaagagggcgtgggatcagcctcgcagtactaacaaatttcggctcgaacgctctggtgacatttgcgttttcacccttgaaggagctcctcgggccagccaatatatttttcctgttcggcgtcatagcagtgctctccctcgtgtttgtgatcctcgtcgttccagaaaccaaaggactgagcctggaggagatcgagtcgaagatcctgaagtaattaaaaaccgttcgtgcgatcataagccccatttggagatattgtaagtagcgatgccattttcaaaacgggcgctcgctcactcgtaggatcggagccaaagctttcagacatgggagtacatatgcaaagggcacgtctcggtgtaaagcttggacatctttctcttttattagcgtagtgaatatttccgaacatacttggtaaattacatttcagttgagtcataatcacgcttctgtagactgtagtccactgtgacctactgtagtagtatgcatgtcactagtaaaagctggtaagctgtgtgatggactgatggtgtagacttgtgcagttgtgctcgcataaggctggccatcagatcgtgtatatagcgacataaaacactattttgcactatagataatactgttataatttacagaatggagttggaaacatgagataaagataagaggtgggacatgagagcttcggtagactatttttaatattatgcagtatgagataaaggtctttgagtgagtggttgtccatccatg

SEQ ID NO: 206108 - DNA, 2803 bp, Zea Mays
atttaacgacttttcgccatcagttattagagcgcacgtgcagatccacccgggcgtggcttacccagcaatggcgaccatcggccttgtcccctcgacagtcgtcgcatccaccgccattcgcgccccggcccccgcagcgctgacccgtgccagcaaccgccagcccccgcacgcccgccgcctgctggacctcggccgccgcgcgccggcgatggacgccctccgcgtgtcgggtgccgccgagcccctcctccgccccgccgccgccggggggcaccccaggctccgcgtgcggacccgtgcgcagcagggcgatggcggcgccgcggcggagggggacgccgcgttctcgtgggcgcccgtcgtcctcccgtttttattccctgcattgggtggtctccttttcggctatgatattggcgcaacctctggagcaaccatctctgtgcaatctcctgatctcagtggcactgattggttcagcttgtcatctttgcaactagggcttgtggccagtggttcactttatggtgctcttggcggctctcttcttgcataccgcattgcagattttctaggaaggaggatagaattggtcacagcagctgcattatatatccttggtgctttagtcactggatttgcccctaattttgtagcactaatcataggtcgtgtcctgtatgggattggtattggtttggtgagtatctgcaggtacagatgtttttttatttccttttttctaaaatgatcccaggtaattgttatcaaacgaatctaattgagaactgcatatagaaaacgattttctggggacatttagctatacattcactcaagctaaggaacataacattcactgatataaacttataatgccatgatgtccgattgcagttttctgatatttatatgttagtcatttgctgaagtgtgtaacatcaaaagctagttggctgatgtagtttgatgggcatgttctgttataactaattatagtataagtagatataaaacatgcttgcacttgatatttcttatattttgatgatgcgttgaataaacatattgctgttggtttgaaatatattgtttcctaagttatttaatataactttctgctttaatttctgaggtagttggcacaaggttgttttgtatgttgcactttacggtggcatgcttttgctaacttaatatccactggcatccaaaatgtccaatggtctatgcttcgttaaaaagggaatgatatgtctcgatgaaacgtggacctcacatgtgtcactgacagtgtcaaataaggaattgcgcaaaactgcaatggcaatgcatggtgcccctctttatattgcggagacttctccttcacaaatacgtggaacattgatatctttgaaggagctgtttattgtgttagggatactgttaggataccttgtaggaagtcttgaaattgacaatgtaggaggatggcggtacatgtttggttttagtgctccgcttgcagctattatggctattggtatgtggactttaccatcttcaccaagatggctacttctcagggcagttcaaggaaaggcttctttggaggataataaaaagaaggaaacgtttgggatgtatttgaaggagctagcttgaaggccttcactattggcggaggtctggttctgtttcagcagataacaggtcaaccgagtgttctatattatgctgcttcaatacttcagactgctggattctcagctgcatcagatgctgccaaagtagcaatcttgattgggttgttcaagttgctaatgacaggtgttgcggtatttaaagttgacgatgttggaaggcgcccattattgataggaggtgttggtggaattgctttgtcactcttcctactggcagcttactacaagatcctgaacaacttcccctttgttgctgtcggcgcgttacttctatatgtcggtgcttaccaggtctcatttggtccaattagttggctaatggtatctgagatctttccactccggacaagagggcgtgggatcagcctcgcagtactaacaaatttcggctcgaacgctctggtgacatttgcgttttcacccttgaaggagctcctcgggccagccaatatatttttcctgttcggcgtcatagcagtgctctccctcgtgtttgtgatcctcgtcgttccagaaaccaaaggactgagcctggaggagatcgagtcgaagatcctgaagtaattaaaaaccgttcgtgcgatcataagccccatttggagatattgtaagtagcgatgccattttcaaaacgggcgctcgctcactcgtaggatcggagccaaagctttcagacatgggagtacatatgcaaagggcacgtctcggtgtaaagcttggacatctttctcttttattagcgtagtgaatatttccgaacatacttggtaaattacatttcagttgagtcataatcacgcttctgtagactgtagtccactgtgacctactgtagtagtatgcatgtcactagtaaaagctggtaagctgtgtgatggactgatggtgtagacttgtgcagttgtgctcgcataaggctggccatcagatcgtgtatatagcgacataaaacactattttgcactatagataatactgttataatttacagaatggagttggaaacatgagataaagataagaggtgggacatgagagcttcggtagactatttttaatattatgcagtatgagataaaggtctttgagtgagtggttgtccatccatg

SEQ ID NO: 206109 - DNA, 1776 bp, Zea Mays
ttaatttctgaggtagttggcacaaggttgttttgtatgttgcactttacggtggcatgcttttgctaacttaatatccactggcatccaaaatgtccaatggtctatgcttcgttaaaaagggaatgatatgtctcgatgaaacgtggacctcacatgtgtcactgacagtgtcaaataaggaattgcgcaaaactgcaatggcaatgcatggtgcccctctttatattgcggagacttctccttcacaaatacgtggaacattgatatctttgaaggagctgtttattgtgttagggatactgttaggataccttgtaggaagtcttgaaattgacaatgtaggaggatggcggtacatgtttggttttagtgctccgcttgcagctattatggctattggtatgtggactttaccatcttcaccaagatggctacttctcagggcagttcaaggaaaggcttctttggaggataataaaaagaaggcaattcaagcccttagaacattgaggggccgcacagcaagtgaaaaggttttggcagatgatgttgacgatacaattgtctctattaaggctgcctacgcaggacaggaagctgaaggaaacgtttgggatgtatttgaaggagctagcttgaaggccttcactattggcggaggtctggttctgtttcagcagataacaggtcaaccgagtgttctatattatgctgcttcaatacttcagctgcatcagatgctgccaaagtagcaatcttgattgggttgttcaagttgctaatgacaggtgttgcggtatttaaagttgacgatgttggaaggcgcccattattgataggaggtgttggtggaattgctttgtcactcttcctactggcagcttactacaagatcctgaacaacttcccctttgttgctgtcggcgcgttacttctatatgtcggtgcttaccaggtctcatttggtccaattagttggctaatggtatctgagatctttccactccggacaagagggcgtgggatcagcctcgcagtactaacaaatttcggctcgaacgctctggtgacatttgcgttttcacccttgaaggagctcctcgggccagccaatatatttttcctgttcggcgtcatagcagtgctctccctcgtgtttgtgatcctcgtcgttccagaaaccaaaggactgagcctggaggagatcgagtcgaagatcctgaagtaattaaaaaccgttcgtgcgatcataagccccatttggagatattgtaagtagcgatgccattttcaaaacgggcgctcgctcactcgtaggatcggagccaaagctttcagacatgggagtacatatgcaaagggcacgtctcggtgtaaagcttggacatctttctcttttattagcgtagtgaatatttccgaacatacttggtaaattacatttcagttgagtcataatcacgcttctgtagactgtagtccactgtgacctactgtagtagtatgcatgtcactagtaaaagctggtaagctgtgtgatggactgatggtgtagacttgtgcagttgtgctcgcataaggctggccatcagatcgtgtatatagcgacataaaacactattttgcactatagataatactgttataatttacagaatggagttggaaacatgagataaagataagaggtgggacatgagagcttcggtagactatttttaatattatgcagtatgagataaaggtctttgagtgagtggttgtccatccatg

SEQ ID NO: 206110 - DNA, 1784 bp, Zea Mays
taatttctgaggtagttggcacaaggttgttttgtatgttgcactttacggtggcatgcttttgctaacttaatatccactggcatccaaaatgtccaatggtctatgcttcgttaaaaagggaatgatatgtctcgatgaaacgtggacctcacatgtgtcactgacagtgtcaaataaggaattgcgcaaaactgcaatggcaatgcatggtgcccctctttatattgcggagacttctccttcacaaatacgtggaacattgatatctttgaaggagctgtttattgtgttagggatactgttaggataccttgtaggaagtcttgaaattgacaatgtaggaggatggcggtacatgtttggttttagtgctccgcttgcagctattatggctattggtatgtggactttaccatcttcaccaagatggctacttctcagggcagttcaaggaaaggcttctttggaggataataaaaagaaggcaattcaagcccttagaacattgaggggccgcacagcaagtgaaaaggttttggcagatgatgttgacgatacaattgtctctattaaggctgcctacgcaggacaggaagctgaaggaaacgtttgggatgtatttgaaggagctagcttgaaggccttcactattggcggaggtctggttctgtttcagcaggtcaaccgagtgttctatattatgctgcttcaatacttcagactgctggattctcagctgcatcagatgctgccaaagtagcaatcttgattgggttgttcaagttgctaatgacaggtgttgcggtatttaaagttgacgatgttggaaggcgcccattattgataggaggtgttggtggaattgctttgtcactcttcctactggcagcttactacaagatcctgaacaacttcccctttgttgctgtcggcgcgttacttctatatgtcggtgcttaccaggtctcatttggtccaattagttggctaatggtatctgagatctttccactccggacaagagggcgtgggatcagcctcgcagtactaacaaatttcggctcgaacgctctggtgacatttgcgttttcacccttgaaggagctcctcgggccagccaatatatttttcctgttcggcgtcatagcagtgctctccctcgtgtttgtgatcctcgtcgttccagaaaccaaaggactgagcctggaggagatcgagtcgaagatcctgaagtaattaaaaaccgttcgtgcgatcataagccccatttggagatattgtaagtagcgatgccattttcaaaacgggcgctcgctcactcgtaggatcggagccaaagctttcagacatgggagtacatatgcaaagggcacgtctcggtgtaaagcttggacatctttctcttttattagcgtagtgaatatttccgaacatacttggtaaattacatttcagttgagtcataatcacgcttctgtagactgtagtccactgtgacctactgtagtagtatgcatgtcactagtaaaagctggtaagctgtgtgatggactgatggtgtagacttgtgcagttgtgctcgcataaggctggccatcagatcgtgtatatagcgacataaaacactattttgcactatagataatactgttataatttacagaatggagttggaaacatgagataaagataagaggtgggacatgagagcttcggtagactatttttaatattatgcagtatgagataaaggtctttgagtgagtggttgtccatccatg

SEQ ID NO: 206111 - DNA, 1909 bp, Zea Mays
ctgaggtagttggcacaaggttgttttgtatgttgcactttacggtggcatgcttttgctaacttaatatccactggcatccaaaatgtccaatggtctatgcttcgttaaaaagggaatgatatgtctcgatgaaacgtggacctcacatgtgtcactgacagtgtcaaataaggaattgcgcaaaactgcaatggtaggaaaaggatttatcctaattacaattaaagaggaatacaattgcaaaggagcatgtgcatattcagctaggggtttgggagagttggtgttatggcactgaaccattatggtgctctgtgccaggcaatgcatggtgcccctctttatattgcggagacttctccttcacaaatacgtggaacattgatatctttgaaggagctgtttattgtgttagggatactggataccttgtaggaagtcttgaaattgacaatgtaggaggatggcggtacatgtttggttttagtgctccgcttgcagctattatggctattggtatgtggactttaccatcttcaccaagatggctacttctcagggcagttcaaggaaaggcttctttggaggataataaaaagaaggcaattcaagcccttagaacattgaggggccgcacagcaagtgaaaaggttttggcagatgatgttgacgatacaattgtctctattaaggctgcctacgcaggacaggaagctgaaggaaacgtttgggatgtatttgaaggagctagcttgaaggccttcactattggcggaggtctggttctgtttcagcagataacaggtcaaccgagtgttctatattatgctgcttcaatacttcagactgctggattctcagctgcatcagatgctgccaaagtagcaatcttgattgggttgttcaagttgctaatgacaggtgttgcggtatttaaagttgacgatgttggaaggcgcccattattgataggaggtgttggtggaattgctttgtcactcttcctactggcagcttactacaagatcctgaacaacttcccctttgttgctgtcggcgcgttacttctatatgtcggtgcttaccaggtctcatttggtccaattagttggctaatggtatctgagatctttccactccggacaagagggcgtgggatcagcctcgcagtactaacaaatttcggctcgaacgctctggtgacatttgcgttttcacccttgaaggagctcctcgggccagccaatatatttttcctgttcggcgtcatagcagtgctctccctcgtgtttgtgatcctcgtcgttccagaaaccaaaggactgagcctggaggagatcgagtcgaagatcctgaagtaattaaaaaccgttcgtgcgatcataagccccatttggagatattgtaagtagcgatgccattttcaaaacgggcgctcgctcactcgtaggatcggagccaaagctttcagacatgggagtacatatgcaaagggcacgtctcggtgtaaagcttggacatctttctcttttattagcgtagtgaatatttccgaacatacttggtaaattacatttcagttgagtcataatcacgcttctgtagactgtagtccactgtgacctactgtagtagtatgcatgtcactagtaaaagctggtaagctgtgtgatggactgatggtgtagacttgtgcagttgtgctcgcataaggctggccatcagatcgtgtatatagcgacataaaacactattttgcactatagataatactgttataatttacagaatggagttggaaacatgagataaagataagaggtgggacatgagagcttcggtagactatttttaatattatgcagtatgagataaaggtctttgagtgagtggttgtccatccatg

SEQ ID NO: 206112 - DNA, 1900 bp, Zea Mays
ctgaggtagttggcacaaggttgttttgtatgttgcactttacggtggcatgcttttgctaacttaatatccactggcatccaaaatgtccaatggtctatgcttcgttaaaaagggaatgatatgtctcgatgaaacgtggacctcacatgtgtcactgacagtgtcaaataaggaattgcgcaaaactgcaatggtaggaaaaggatttatcctaattacaattaaagaggaatacaattgcaaaggagcatgtgcatattcagctaggggtttgggagagttggtgttatggcactgaaccattatggtgctctgtgccaggcaatgcatggtgcccctctttatattgcggagacttctccttcacaaatacgtggaacattgatatctttgaaggagctgtttattgtgttagggatactgttaggataccttgtaggaagtcttgaaattgacaatgtaggaggatggcggtacatgtttggttttagtgctccgcttgcagctattatggctattggtatgtggactttaccatcttcaccaagatggctacttctcagggcagttcaaggaaaggcttctttggaggataataaaaagaaggcaattcaagcccttagaacattgaggggccgcacagcaagtgaaaaggttttggcagatgatgttgacgatacaattgtctctattaaggctgcctacgcaggacaggaagctgaaggaaacgtttgggatgtatttgaaggagctagcttgaaggccttcactattggcggaggtctggttctgtttcagcagataacaggtcaaccgagtgttctatattatgctgcttcaatacttcagactgctggattctcagctgcatcagatgctgccaaagtagcaatcttgattgggttgttcaaggtgttgcggtatttaaagttgacgatgttggaaggcgcccattattgataggaggtgttggtggaattgctttgtcactcttcctactggcagcttactacaagatcctgaacaacttcccctttgttgctgtcggcgcgttacttctatatgtcggtgcttaccaggtctcatttggtccaattagttggctaatggtatctgagatctttccactccggacaagagggcgtgggatcagcctcgcagtactaacaaatttcggctcgaacgctctggtgacatttgcgttttcacccttgaaggagctcctcgggccagccaatatatttttcctgttcggcgtcatagcagtgctctccctcgtgtttgtgatcctcgtcgttccagaaaccaaaggactgagcctggaggagatcgagtcgaagatcctgaagtaattaaaaaccgttcgtgcgatcataagccccatttggagatattgtaagtagcgatgccattttcaaaacgggcgctcgctcactcgtaggatcggagccaaagctttcagacatgggagtacatatgcaaagggcacgtctcggtgtaaagcttggacatctttctcttttattagcgtagtgaatatttccgaacatacttggtaaattacatttcagttgagtcataatcacgcttctgtagactgtagtccactgtgacctactgtagtagtatgcatgtcactagtaaaagctggtaagctgtgtgatggactgatggtgtagacttgtgcagttgtgctcgcataaggctggccatcagatcgtgtatatagcgacataaaacactattttgcactatagataatactgttataatttacagaatggagttggaaacatgagataaagataagaggtgggacatgagagcttcggtagactatttttaatattatgcagtatgagataaaggtctttgagtgagtggttgtccatccatg

SEQ ID NO: 206113 - DNA, 1815 bp, Zea Mays
ggactcttctagagcctccgcatcgcaactcacaggctcgactcttccagcctccgactccgcatccgcctccccggcggagcctctcgccaccgcacagcctagatccgcccagaggagctcaatctccccctcgaggccccaaaacgagatcctctgcattcctgcatagatgcagacggctgcttcgtttgggtatgcggcgggacggggacctcggaagcgagctacaacgacgtccccccccccccccccccccccccccccccccgcaccgatcgccgccgtggccctggctcgggtggccaccaggagatctgtcctccctccctcaaacgacgcctccatctcctcgcatttccttctccttttccccttttcaaacattcaggagccgaaggtgccagccaccctttgctcggcgcgtgtcccggcgtagctcacgacgcatcctcacctgcctgcaccgagccaaggagagtcgttggctatgcgcgttagctccgctgctgggtggtcaccatcgtccgagcacaacacagatgcagacagattgaggattctttgtttgtagaacgccatggatgagaggctgctcatgtttgatgtggttgatgacgtgtggacagtgctaacatgattgttcgagttggatgcacacgagagccttaggtggtttggacatgtcttcgagccaagagttgaaatcttgatgggattatgttggggcagatcttaactggaatacatatacggaacccggttggcagcagaggtagtgccccggtgcgccgcgcgcaggggcacgcgacagctacaaatattcggtggaggactggcttaggaaccttggatgcaaggtgattggaaggaaatttgttgaggtggagatggactagaccaaggctaatatcaaggggtacctgtgagggaacaggactacactggatttggctcccgtctcaagagtaaagtgtgtttcagcaacctgctagccggccaccaaaggaccaattatctatttttgttgatgttaatatattaaaatctggttatagtaaatatacataatatgctgtcatctagatcaatacacatatatgcctttgagacataaatatgtgtcatgattcaactttcatgaatagtttttctcaacgactcgcatactaatgatattagcaaattatttaaaataataaccatgatatacaacttatataaattattatgttatatttgtacattttagctaaactatttgacatctaatataattgtaagttcataagcgtagatatattttctagatatgagcttagcggtaggtaattttgcttatctattaccgtaataagcttgatgactgaggtagacatctgatttatatttaatctaactgtttctctatgtgaatggatacatatattaactcaggtagcactacaactagcaatgtatggatgaattgaaggaagtaaaagaaggcagacaatcttatagaaactctgcatattgaaaccgccatgattggcaaagaagttggatgcatctttgcattggtgtgttcttatcaccaagcagtaatgtgaagcaagttcatttgttgactaagaacggatcaacacaaattagtgaagattttgttcacaagagatgcaggatggagaggtggtagatttcaatatggctttgatactattttttccacttacaatattttgtatggaacaagaaaaaacaatgtatgtggttactattgtaattcaagaatttatttctaaataataaatatatttgtttatattttgttta

SEQ ID NO: 206114 - DNA, 1429 bp, Zea Mays
ggactcttctagagcctccgcatcgcaactcacaggctcgactcttccagcctccgactccgcatccgcctccccggcggagcctctcgccaccgcacagcctagatccgcccagaggagctcaatctccccctcgaggccccaaaacgagatcctctgcattcctgcatagatgcagacggctgcttcgtttgggtatgcggcgggacggggacctcggaagcgagctacaacgacgtccccccccccccccccccccccccccccccccgcaccgatcgccgccgtggccctggctcgggtggccaccaggagatctgtcctccctccctcaaacgacgcctccatctcctcgcatttccttctccttttccccttttcaaacattcaggagccgaaggtgccagccaccctttgctcggcgcgtgtcccggcgtagctcacgacgcatcctcacctgcctgcaccgagccaaggagagtcgttggctatgcgcgttagctccgctgctgggtggtcaccatcgtccgagcacaacacagatgcagacagattgaggattctttgtttgtagaacgccatggatgagaggctgctcatgtttgatgtggttgatgacgtgtggacagtgctaacatgattgttcgagttggatgcacacgagagccttaggtggtttggacatgtcttcgagccaagagttgaaatcttgatgggattatgttggggcagatcttaactggaatacatatacggaacccggttggcagcagaggtagtgccccggtgcgccgcgcgcaggggcacgcgacagctacaaatattcggtggaggactggcttaggaaccttggatgcaagtgagttttcaattctttgtaagagaattcgagttgtgttaatttttgctttgcagactccaaatgtcatggtggcagggtgattggaaggaaatttgttgaggtggagatggactagaccaaggctaatatcaaggggtacctgtgagggaacaggactacactggatttggctcccgtctcaagagtaaagtagcactacaactagcaatgtatggatgaattgaaggaagtaaaagaaggcagacaatcttatagaaactctgcatattgaaaccgccatgattggcaaagaagttggatgcatctttgcattggtgtgttcttatcaccaagcagtaatgtgaagcaagttcatttgttgactaagaacggatcaacacaaattagtgaagattttgttcacaagagatgcaggatggagaggtggtagatttcaatatggctttgatactattttttccacttacaatattttgtatggaacaagaaaaaacaatgtatgtggttactattgtaattcaagaatttatttctaaataataaatatatttgtttatattttgttta

SEQ ID NO: 206115 - DNA, 2140 bp, Zea Mays
ggactcttctagagcctccgcatcgcaactcacaggctcgactcttccagcctccgactccgcatccgcctccccggcggagcctctcgccaccgcacagcctagatccgcccagaggagctcaatctccccctcgaggccccaaaacgagatcctctgcattcctgcatagatgcagacggctgcttcgtttgggtatgcggcgggacggggacctcggaagcgagctacaacgacgtccccccccccccccccccccccccccccccccgcaccgatcgccgccgtggccctggctcgggtggccaccaggagatctgtcctccctccctcaaacgacgcctccatctcctcgcatttccttctccttttccccttttcaaacattcaggagccgaaggtgccagccaccctttgctcggcgcgtgtcccggcgtagctcacgacgcatcctcacctgcctgcaccgagccaaggagagtcgttggctatgcgcgttagctccgctgctgggtggtcaccatcgtccgagcacaacacagtgggtaccatcctctcactgaattacttataggaagcctcatcatgtagtttgtgcgctactagggcgagatccacctgttgtgatgatgctctatggcgcacatgtttcttttttatgggaacctcttcttagtaagtgggatggagagctttggtggagtttagcaggtggtcatctgatgattaggcgacgataaggaagtttttgatgagttgctaactgctaggtttgggagtttctctcatttcaggatgcagacagattgaggattctttgtttgtagaacgccatggatgagaggctgctcatgtttgatgtggttgatgacgtgtggacagtgctaacatgattgttcgagttggatgcacacgagagccttaggtggtttggacatgtcttcgagccaagagttgaaatcttgatgggattatgttgatcttaactggaatacatatacggaacccggttggcagcagaggtagtgccccggtgcgccgcgcgcaggggcacgcgacagctacaaatattcggtggaggactggcttaggaaccttggatgcaagtgagttttcaattctttgtaagagaattcgagttgtgttaatttttgctttgcagactccaaatgtcatggtggcagggtgattggaaggaaatttgttgaggtggagatggactagaccaaggctaatatcaaggggtacctgtgagggaacaggactacactggatttggctcccgtctcaagagtaaagtgtgtttcagcaacctgctagccggccaccaaaggaccaattatctatttttgttgatgttaatatattaaaatctggttatagtaaatatacataatatgctgtcatctagatcaatacacatatatgcctttgagacataaatatgtgtcatgattcaactttcatgaatagtttttctcaacgactcgcatactaatgatattagcaaattatttaaaataataaccatgatatacaacttatataaattattatgttatatttgtacattttagctaaactatttgacatctaatataattgtaagttcataagcgtagatatattttctagatatgagcttagcggtaggtaattttgcttatctattaccgtaataagcttgatgactgaggtagacatctgatttatatttaatctaactgtttctctatgtgaatggatacatatattaactcaggtagcactacaactagcaatgtatggatgaattgaaggaagtaaaagaaggcagacaatcttatagaaactctgcatattgaaaccgccatgattggcaaagaagttggatgcatctttgcattggtgtgttcttatcaccaagcagtaatgtgaagcaagttcatttgttgactaagaacggatcaacacaaattagtgaagattttgttcacaagagatgcaggatggagaggtggtagatttcaatatggctttgatactattttttccacttacaatattttgtatggaacaagaaaaaacaatgtatgtggttactattgtaattcaagaatttatttctaaataataaatatatttgtttatattttgttta

SEQ ID NO: 206116 - DNA, 1456 bp, Zea Mays
gactcttctagagcctccgcatcgcaactcacaggctcgactcttccagcctccgactccgcatccgcctccccggcggagcctctcgccaccgcacagcctagatccgcccagaggagctcaatctccccctcgaggccccaaaacgagatcctctgcattcctgcataggcgcctcatcgttcctggcctagcacagatgcagacggctgcttcgtttgggtatgcggcgggacggggacctcggaagcgagctacaacgacgtccccccccccccccccccccccccccccccccgcaccgatcgccgccgtggccctggctcgggtggccaccaggagatctgtcctccctccctcaaacgacgcctccatctcctcgcatttccttctccttttccccttttcaaacattcaggagccgaaggtgccagccaccctttgctcggcgcgtgtcccggcgtagctcacgacgcatcctcacctgcctgcaccgagccaaggagagtcgttggctatgcgcgttagctccgctgctgggtggtcaccatcgtccgagcacaacacagatgcagacagattgaggattctttgtttgtagaacgccatggatgagaggctgctcatgtttgatgtggttgatgacgtgtggacagtgctaacatgattgttcgagttggatgcacacgagagccttaggtggtttggacatgtcttcgagccaagagttgaaatcttgatgggattatgttggggcagatcttaactggaatacatatacggaacccggttggcagcagaggtagtgccccggtgcgccgcgcgcaggggcacgcgacagctacaaatattcggtggaggactggcttaggaaccttggatgcaagtgagttttcaattctttgtaagagaattcgagttgtgttaatttttgctttgcagactccaaatgtcatggtggcagggtgattggaaggaaatttgttgaggtggagatggactagaccaaggctaatatcaaggggtacctgtgagggaacaggactacactggatttggctcccgtctcaagagtaaagtagcactacaactagcaatgtatggatgaattgaaggaagtaaaagaaggcagacaatcttatagaaactctgcatattgaaaccgccatgattggcaaagaagttggatgcatctttgcattggtgtgttcttatcaccaagcagtaatgtgaagcaagttcatttgttgactaagaacggatcaacacaaattagtgaagattttgttcacaagagatgcaggatggagaggtggtagatttcaatatggctttgatactattttttccacttacaatattttgtatggaacaagaaaaaacaatgtatgtggttactattgtaattcaagaatttatttctaaataataaatatatttgtttatattttgttta

SEQ ID NO: 206117 - DNA, 1889 bp, Zea Mays
ctcttctagagcctccgcatcgcaactcacaggctcgactcttccagcctccgactccgcatccgcctccccggcggagcctctcgccaccgcacagcctagatccgcccagaggagctcaatctccccctcgaggccccaaaacgagatcctctgcattcctgcatagtgcagacggctgcttcgtttgggtatgcggcgggacggggacctcggaagcgagctacaacgacgtccccccccccccccccccccccccccccccccgcaccgatcgccgccgtggccctggctcgggtggccaccaggagatctgtcctccctccctcaaacgacgcctccatctcctcgcatttccttctccttttccccttttcaaacattcaggagccgaaggtgccagccaccctttgctcggcgcgtgtcccggcgtagctcacgacgcatcctcacctgcctgcaccgagccaaggagagtcgttggctatgcgcgttagctccgctgctgggtggtcaccatcgtccgagcacaacacagatgcagacagattgaggattctttgtttgtagaacgccatggatgagaggctgctcatgtttgatgtggttgatgacgtgtggacagtgctaacatgattgttcgagttggatgcacacgagagccttaggtggtttggacatgtcttcgagccaagagttgaaatcttgatgggattatgttggggcagatcttaactggaatacatatacggaacccggttggcagcagaggtagtgccccggtgcgccgcgcgcaggggcacgcgacagctacaaatattcggtggaggactggcttaggaaccttggatgcaagtgagttttcaattctttgtaagagaattcgagttgtgttaatttttgctttgcagactccaaatgtcatggtggcagggtgattggaaggaaatttgttgaggtggagatggactagaccaaggctaatatcaaggggtacctgtgagggaacaggactacactggatttggctcccgtctcaagagtaaagtgtgtttcagcaacctgctagccggccaccaaaggaccaattatctatttttgttgatgttaatatattaaaatctggttatagtaaatatacataatatgctgtcatctagatcaatacacatatatgcctttgagacataaatatgtgtcatgattcaactttcatgaatagtttttctcaacgactcgcatactaatgatattagcaaattatttaaaataataaccatgatatacaacttatataaattattatgttatatttgtacattttagctaaactatttgacatctaatataattgtaagttcataagcgtagatatattttctagatatgagcttagcggtaggtaattttgcttatctattaccgtaataagcttgatgactgaggtagacatctgatttatatttaatctaactgtttctctatgtgaatggatacatatattaactcaggtagcactacaactagcaatgtatggatgaattgaaggaagtaaaagaaggcagacaatcttatagaaactctgcatattgaaaccgccatgattggcaaagaagttggatgcatctttgcattggtgtgttcttatcaccaagcagtaatgtgaagcaagttcatttgttgactaagaacggatcaacacaaattagtgaagattttgttcacaagagatgcaggatggagaggtggtagatttcaatatggctttgatactattttttccacttacaatattttgtatggaacaagaaaaaacaatgtatgtggttactattgtaattcaagaatttatttctaaataataaatatatttgtttatattttgttta

SEQ ID NO: 206118 - DNA, 845 bp, Zea Mays
cgcaactcacaggctcgactcttccagcctccgactccgcatccgcctccccggcggagcctctcgccaccgcacagcctagatccgcccagaggagctcaatctccccctcgaggccccaaaacgagatcctctgcattcctgcataggatgcagacagattgaggattctttgtttgtagaacgccatggatgagaggctgctcatgtttgatgtggttgatgacgtgtggacagtgctaacatgattgttcgagttggatgcacacgagagccttaggtggtttggacatgtcttcgagccaagagttgaaatcttgatgggattatgttggggcagatcttaactggaatacatatacggaacccggttggcagcagaggtagtgccccggtgcgccgcgcgcaggggcacgcgacagctacaaatattcggtggaggactggcttaggaaccttggatgcaagtagcactacaactagcaatgtatggatgaattgaaggaagtaaaagaaggcagacaatcttatagaaactctgcatattgaaaccgccatgattggcaaagaagttggatgcatctttgcattggtgtgttcttatcaccaagcagtaatgtgaagcaagttcatttgttgactaagaacggatcaacacaaattagtgaagattttgttcacaagagatgcaggatggagaggtggtagatttcaatatggctttgatactattttttccacttacaatattttgtatggaacaagaaaaaacaatgtatgtggttactattgtaattcaagaatttatttctaaataataaatatatttgtttatattttgttta

SEQ ID NO: 206119 - DNA, 1683 bp, Zea Mays
caactcacaggctcgactcttccagcctccgactccgcatccgcctccccggcggagcctctcgccaccgcacagcctagatccgcccagaggagctcaatctccccctcgaggccccaaaacgagatcctctgcattcctgcataggcgcctcatcgttcctggcctagcacagatgcagacggctgcttcgtttgggtatgcggcgggacggggacctcggaagcgagctacaacgacgtccccccccccccccccccccccccccccccccgcaccgatcgccgccgtggccctggctcgggtggccaccaggagatctgtcctccctccctcaaacgacgcctccatctcctcgcatttccttctccttttccccttttcaaacattcaggagccgaaggtgccagccaccctttgctcggcgcgtgtcccggcgtagctcacgacgcatcctcacctgcctgcaccgagccaaggagagtcgttggctatgcgcgttagctccgctgctgggtggtcaccatcgtccgagcacaacacagtgggtaccatcctctcactgaattacttataggaagcctcatcatgtagtttgtgcgctactagggcgagatccacctgttgtgatgatgctctatggcgcacatgtttcttttttatgggaacctcttcttagtaagtgggatggagagctttggtggagtttagcaggtggtcatctgatgattaggcgacgataaggaagtttttgatgagttgctaactgctaggtttgggagtttctctcatttcaggatgcagacagattgaggattctttgtttgtagaacgccatggatgagaggctgctcatgtttgatgtggttgatgacgtgtggacagtgctaacatgattgttcgagttggatgcacacgagagccttaggtggtttggacatgtcttcgagccaagagttgaaatcttgatgggattatgttggggcagatcttaactggaatacatatacggaacccggttggcagcagaggtagtgccccggtgcgccgcgcgcaggggcacgcgacagctacaaatattcggtggaggactggcttaggaaccttggatgcaagtgagttttcaattctttgtaagagaattcgagttgtgttaatttttgctttgcagactccaaatgtcatggtggcagggtgattggaaggaaatttgttgaggtggagatggactagaccaaggctaatatcaaggggtacctgtgagggaacaggactacactggatttggctcccgtctcaagagtaaagtcactacaactagcaatgtatggatgaattgaaggaagtaaaagaaggcagacaatcttatagaaactctgcatattgaaaccgccatgattggcaaagaagttggatgcatctttgcattggtgtgttcttatcaccaagcagtaatgtgaagcaagttcatttgttgactaagaacggatcaacacaaattagtgaagattttgttcacaagagatgcaggatggagaggtggtagatttcaatatggctttgatactattttttccacttacaatattttgtatggaacaagaaaaaacaatgtatgtggttactattgtaattcaagaatttatttctaaataataaatatatttgtttatattttgttta

SEQ ID NO: 206120 - DNA, 2059 bp, Zea Mays
caactcacaggctcgactcttccagcctccgactccgcatccgcctccccggcggagcctctcgccaccgcacagcctagatccgcccagaggagctcaatctccccctcgaggccccaaaacgagatcctctgcattcctgcataggcgcctcatcgttcctggcctagcacagatgcagacggctgcttcgtttgggtatgcggcgggacggggacctcggaagcgagctacaacgacgtccccccccccccccccccccccccccccccccgcaccgatcgccgccgtggccctggctcgggtggccaccaggagatctgtcctccctccctcaaacgacgcctccatctcctcgcatttccttctccttttccccttttcaaacattcaggagccgaaggtgccagccaccctttgctcggcgcgtgtcccggcgtagctcacgacgcatcctcacctgcctgcaccgagccaaggagagtcgttggctatgcgcgttagctccgctgctgggtggtcaccatcgtccgagcacaacacagtgggtaccatcctctcactgaattacttataggaagcctcatcatgtagtttgtgcgctactagggcgagatccacctgttgtgatgatgctctatggcgcacatgtttcttttttatgggaacctcttcttagtaagtgggatggagagctttggtggagtttagcaggtggtcatctgatgattaggcgacgataaggaagtttttgatgagttgctaactgctaggtttgggagtttctctcatttcaggatgcagacagattgaggattctttgtttgtagaacgccatggatgagaggctgctcatgtttgatgtggttgatgacgtgtggacagtgctaacatgattgttcgagttggatgcacacgagagccttaggtggtttggacatgtcttcgagccaagagttgaaatcttgatgggattatgttggggcagatcttaactggaatacatatacggaacccggttggcagcagaggtagtgccccggtgcgccgcgcgcaggggcacgcgacagctacaaatattcggtggaggactggcttaggaaccttggatgcaagaaatttgttgaggtggagatggactagaccaaggctaatatcaaggggtacctgtgagggaacaggactacactggatttggctcccgtctcaagagtaaagtgtgtttcagcaacctgctagccggccaccaaaggaccaattatctatttttgttgatgttaatatattaaaatctggttatagtaaatatacataatatgctgtcatctagatcaatacacatatatgcctttgagacataaatatgtgtcatgattcaactttcatgaatagtttttctcaacgactcgcatactaatgatattagcaaattatttaaaataataaccatgatatacaacttatataaattattatgttatatttgtacattttagctaaactatttgacatctaatataattgtaagttcataagcgtagatatattttctagatatgagcttagcggtaggtaattttgcttatctattaccgtaataagcttgatgactgaggtagacatctgatttatatttaatctaactgtttctctatgtgaatggatacatatattaactcaggtagcactacaactagcaatgtatggatgaattgaaggaagtaaaagaaggcagacaatcttatagaaactctgcatattgaaaccgccatgattggcaaagaagttggatgcatctttgcattggtgtgttcttatcaccaagcagtaatgtgaagcaagttcatttgttgactaagaacggatcaacacaaattagtgaagattttgttcacaagagatgcaggatggagaggtggtagatttcaatatggctttgatactattttttccacttacaatattttgtatggaacaagaaaaaacaatgtatgtggttactattgtaattcaagaatttatttctaaataataaatatatttgtttatattttgttta

SEQ ID NO: 206121 - DNA, 1072 bp, Zea Mays
agccaaccggcccaaccccgtctaggtttaggcacccgaccgccgcagcgtccccgccgccacgaccacgagcgaaaggaggtcgccggaagagggggcgcggagatgagcgggagcgcgttcaacgcgttcaagtcgcgggtgccggtggcgtggagtccccggctgtacatcacgctggtgcggggcctccccgggacgcggcgcctccaccgccgcacgctcgaggccatgcgcctccgccgctgccaccgcaccgtcgagcaccgcaccacgccgtcgctcctcgggatgctcacccaggtgaagcgcctcgtcgccgtggagaccgaggagatgtacaacgcgcggaagcaggccgaggcggagaggcgcgcgcccagacccccgctcgtcgtctcccaccagccacagccgccggctccgaagccggcagccgccgccgcggtgggtgccgctaccactgcgcagtagcctccgcctggcgctgtgtacgcgagccagacgctcaagtttgcggcgccggtgtacgtcggggatgaggtggttgctcgagtccaggcactcaacatcaggacgacggcggcggcgacgaacagctgcacggcaagacgatatgtcgtcaagttcgcaaccaaatgcttcatggacgaagaggagggctctgttgcgattgaaggcgaagcaatggctgtcctgcctacactggagctcagctctcagtcgactagaaactaggagtggcctcaaaccgggtcactagtcacaagttgctgttgcttaatcatacccgacctggtaatccctctcttctgcaacactgtgtagaatgcgtgtaaactgaacttagtgtagccttcacattgtaagcgaggagtgaaataaagctgttgtttatgcctatgaatctctttgattatgtgcagcgtacaatcactcatccatgaacagtctctagtctctgccggttaattctgtattttttttctcgaaaaagagaaaatcacgaggaagaccaagaccccaagtacagatcaaaacactaggaccagccagaaaaaaaaacaaaaaa

SEQ ID NO: 206122 - DNA, 2502 bp, Zea Mays
cgagccgattcgttccaacttccaagggttttagcggcagcggcagccggagatgggggagcgggcgaaggaatggctcctcgcagcaggcgccggcgccgccgtcggcgcgctctctgccgccgctgtcatcgatcttctctcgagatccaagcggagagagaggtacgcgcgggacctgctggagtccaatggaatgacgactgggaacactcggtccagcaagcacctgggctctcttggtagctcggctcttctctctgatgaagtggtctctgaacagcttacaaggaatatacaattttttggcatggactctcagaagaaagtgactgaatcctatgttgtggttattggtcttggaggggttggcagtcatgcagcatcaatgctcctgagatctggtgttggcaggttgcttcttgtggattttgatcaggtaagcattaacaaggcactcatgatatgttgaaaggtatcactctcatcactaaatcggcatgctgtggcaaccagagatgacgttggaacttcaaaagcgttgtgcctcaagaagcatttttcaatgatatacccagagtgccaaatagatgcaaaagtgcaattgtatgatgcatcgtctgaggaggaaattctttctggacagcctgactttgttcttgattgcatagataacattgataccaaggtgtcactccttgcagcttgcgtgcgcagaggtttgaaggtactttctgcaatgggggctggagctcgagctgatcccaccagaattcgtgtcgcagatttgagagaatcaagcaatgaccccctctctcgatcggtgaggtacaggctcaagaaagaacatggaattgagggtggaataccagtagtcttttcattggaaaagccaaaggcaaagcttcttccttttcaagcttcaaaagaagaggaaactccatcagattaccagattgtgccaggattcagggttcgcattataccagtattgggaaccatccctgcaatatttggtcaagttatggcctcctatgtggtcactcagcttgctggattagattttcaaactgaaccagttgttaacctggatttggatcattaccgtatacttcatcagcgtcttattgagcatgaggaactgatgtatggcacagccgagcaagttctggtagatgctgaagaggtaatgtacattgtcaaagaattgtggcgtggtcgaagtgctagagaccaaagccaggacactggccggaagatgtggagatctgtgaacgaactaatgcttgttcggtgggacaaatcaaaggctgctggcatctcaaacttaatacttgtcaagttcagtgaggctgacgcccatgaatccaccacactcgaccgaataaaagaacaagaacctgaattctactctatggtttcactttcgacgcgtgtcgaactagactgccacggacgcgaagatctcaaccacttgccacagcgcacatggtatggagcgagcggacccagagccacctctccagcttcgccccaggcccagcgtgctcgctgcctcgctctgccggagcctccctccaccatggtccacgtggccacagcaagaagaagaatccccatgcggcggcggtggcgaccgcattggaggaagcagggatgtgcggcgcgaggccaaggccatggcacgcctacgagatggcctagattctcgtgggacccacgatgccgcgcgcgcagtagcatcgcaccccgccacaggaaacaggatgctgcagggaggcgcccgaagcgccgccacggggacgaggacaacccatccccgaccccgacggcgttgtgctggcagacaccgccatcgtgggcgaggacgaccgctgaggtggaggcggcggaggagaagaggctgaggatcagcccgaggccggactcgtctgccgctgcggcggcggagcgcgcgccaggcgaaggcggccgagatggaggcagccgccagcaaccaccgccaagagctggcgtctttggagcccaagcctcgtggcaccacaccaactactttcccatcaccgatgacccgctcgagcccaccgccgccgaggagggcgaggacgccgatgacaatgagggcaacacggaggagtggaggacattgtctagcgcctccgactaagctagactgcaacttttaaaatgtatgtaaatagttaatttagcatctcacttccagcaaagatgatactcacacgtagtttcatgttataatgatttacgtgttccagtttcttttatatcttccaagttgggttgatcaaagcttattctgaaaccagattacccaaaaaaatgtttgtatgaaattaagattttgtttcgtattcctcttggaaactaatgtttttacaatgtttgtccagcggatataaaattaagtttttgtcatttttgtatgatgccaaggttatagagagagtagtgtctgcaagatttgcagaaatagaaaacaaa

SEQ ID NO: 206123 - DNA, 2425 bp, Zea Mays
cgagccgattcgttccaacttccaagggttttagcggcagcggcagccggagatgggggagcgggcgaaggaatggctcctcgcagcaggcgccggcgccgccgtcggcgcgctctctgccgccgctgtcatcgatcttctctcgagatccaagcggagagagaggtacgcgcgggacctgctggagtccaatggaatgacgactgggaacactcggtccagcaagcacctgggctctcttggtagctcggctcttctctctgatgaagtggtctctgaacagcttacaaggaatatacaattttttggcatggactctcagaagaaagtgactgaatcctatgttgtggttattggtcttggaggggttggcagtcatgcagcatcaatgctcctgagatctggtgttggcaggttgcttcttgtggattttgatcagagatgacgttggaacttcaaaagcgttgtgcctcaagaagcatttttcaatgatatacccagagtgccaaatagatgcaaaagtgcaattgtatgatgcatcgtctgaggaggaaattctttctggacagcctgactttgttcttgattgcatagataacattgataccaaggtgtcactccttgcagcttgcgtgcgcagaggtttgaaggtactttctgcaatgggggctggagctcgagctgatcccaccagaattcgtgtcgcagatttgagagaatcaagcaatgaccccctctctcgatcggtgaggtacaggctcaagaaagaacatggaattgagggtggaataccagtagtcttttcattggaaaagccaaaggcaaagcttcttccttttcaagcttcaaaagaagaggaaactccatcagattaccagattgtgccaggattcagggttcgcattataccagtattgggaaccatccctgcaatatttggtcaagttatggcctcctatgtggtcactcagcttgctggattagattttcaaactgaaccagttgttaacctggatttggatcattaccgtatacttcatcagcgtcttattgagcatgaggaactgatgtatggcacagccgagcaagttctggtagatgctgaagaggtaatgtacattgtcaaagaattgtggcgtggtcgaagtgctagagaccaaagccaggacactggccggaagatgtggagatctgtgaacgaactaatgcttgttcggtgggacaaatcaaaggctgctggcatctcaaacttaatacttgtcaagttcagtgaggctgacgcccatgaatccaccacactcgaccgaataaaagaacaagaacctgaattctactctatggtttcactttcgacgcgtgtcgaactagactgccacggacgcgaagatctcaaccacttgccacagcgcacatggtatggagcgagcggacccagagccacctctccagcttcgccccaggcccagcgtgctcgctgcctcgctctgccggagcctccctccaccatggtccacgtggccacagcaagaagaagaatccccatgcggcggcggtggcgaccgcattggaggaagcagggatgtgcggcgcgaggccaaggccatggcacgcctacgagatggcctagattctcgtgggacccacgatgccgcgcgcgcagtagcatcgcaccccgccacaggaaacaggatgctgcagggaggcgcccgaagcgccgccacggggacgaggacaacccatccccgaccccgacggcgttgtgctggcagacaccgccatcgtgggcgaggacgaccgctgaggtggaggcggcggaggagaagaggctgaggatcagcccgaggccggactcgtctgccgctgcggcggcggagcgcgcgccaggcgaaggcggccgagatggaggcagccgccagcaaccaccgccaagagctggcgtctttggagcccaagcctcgtggcaccacaccaactactttcccatcaccgatgacccgctcgagcccaccgccgccgaggagggcgaggacgccgatgacaatgagggcaacacggaggagtggaggacattgtctagcgcctccgactaagctagactgcaacttttaaaatgtatgtaaatagttaatttagcatctcacttccagcaaagatgatactcacacgtagtttcatgttataatgatttacgtgttccagtttcttttatatcttccaagttgggttgatcaaagcttattctgaaaccagattacccaaaaaaatgtttgtatgaaattaagattttgtttcgtattcctcttggaaactaatgtttttacaatgtttgtccagcggatataaaattaagtttttgtcatttttgtatgatgccaaggttatagagagagtagtgtctgcaagatttgcagaaatagaaaacaaa

SEQ ID NO: 206124 - DNA, 2382 bp, Zea Mays
cgagccgattcgttccaacttccaagggttttagcggcagcggcagccggagatgggggagcgggcgaaggaatggctcctcgcagcaggcgccggcgccgccgtcggcgcgctctctgccgccgctgtcatcgatcttctctcgagatccaagcggagagagaggtacgcgcgggacctgctggagtccaatggaatgacgactgggaacactcggtccagcaagcacctgggctctcttggtagctcggctcttctctctgatgaagtggtctctgaacagcttacaagtcatgcagcatcaatgctcctgagatctggtgttggcaggttgcttcttgtggattttgatcaggtatcactctcatcactaaatcggcatgctgtggcaaccagagatgacgttggaacttcaaaagcgttgtgcctcaagaagcatttttcaatgatatacccagagtgccaaatagatgcaaaagtgcaattgtatgatgcatcgtctgaggaggaaattctttctggacagcctgactttgttcttgattgcatagataacattgataccaaggtgtcactccttgcagcttgcgtgcgcagaggtttgaaggtactttctgcaatgggggctggagctcgagctgatcccaccagaattcgtgtcgcagatttgagagaatcaagcaatgaccccctctctcgatcggtgaggtacaggctcaagaaagaacatggaattgagggtggaataccagtagtcttttcattggaaaagccaaaggcaaagcttcttccttttcaagcttcaaaagaagaggaaactccatcagattaccagattgtgccaggattcagggttcgcattataccagtattgggaaccatccctgcaatatttggtcaagttatggcctcctatgtggtcactcagcttgctggattagattttcaaactgaaccagttgttaacctggatttggatcattaccgtatacttcatcagcgtcttattgagcatgaggaactgatgtatggcacagccgagcaagttctggtagatgctgaagaggtaatgtacattgtcaaagaattgtggcgtggtcgaagtgctagagaccaaagccaggacactggccggaagatgtggagatctgtgaacgaactaatgcttgttcggtgggacaaatcaaaggctgctggcatctcaaacttaatacttgtcaagttcagtgaggctgacgcccatgaatccaccacactcgaccgaataaaagaacaagaacctgaattctactctatggtttcactttcgacgcgtgtcgaactagactgccacggacgcgaagatctcaaccacttgccacagcgcacatggtatggagcgagcggacccagagccacctctccagcttcgccccaggcccagcgtgctcgctgcctcgctctgccggagcctccctccaccatggtccacgtggccacagcaagaagaagaatccccatgcggcggcggtggcgaccgcattggaggaagcagggatgtgcggcgcgaggccaaggccatggcacgcctacgagatggcctagattctcgtgggacccacgatgccgcgcgcgcagtagcatcgcaccccgccacaggaaacaggatgctgcagggaggcgcccgaagcgccgccacggggacgaggacaacccatccccgaccccgacggcgttgtgctggcagacaccgccatcgtgggcgaggacgaccgctgaggtggaggcggcggaggagaagaggctgaggatcagcccgaggccggactcgtctgccgctgcggcggcggagcgcgcgccaggcgaaggcggccgagatggaggcagccgccagcaaccaccgccaagagctggcgtctttggagcccaagcctcgtggcaccacaccaactactttcccatcaccgatgacccgctcgagcccaccgccgccgaggagggcgaggacgccgatgacaatgagggcaacacggaggagtggaggacattgtctagcgcctccgactaagctagactgcaacttttaaaatgtatgtaaatagttaatttagcatctcacttccagcaaagatgatactcacacgtagtttcatgttataatgatttacgtgttccagtttcttttatatcttccaagttgggttgatcaaagcttattctgaaaccagattacccaaaaaaatgtttgtatgaaattaagattttgtttcgtattcctcttggaaactaatgtttttacaatgtttgtccagcggatataaaattaagtttttgtcatttttgtatgatgccaaggttatagagagagtagtgtctgcaagatttgcagaaatagaaaacaaa

SEQ ID NO: 206125 - DNA, 2095 bp, Zea Mays
cgagccgattcgttccaacttccaagggttttagcggcagcggcagccggagatgggggagcgggcgaaggaatggctcctcgcagcaggcgccggcgccgccgtcggcgcgctctctgccgccgctgtcatcgatcttctctcgagatccaagcggagagagaggtacgcgcgggacctgctggagtccaatggaatgacgactgggaacactcggtccagcaagcacctgggctctcttggtagctcggctcttctctctgatgaagtggtctctgaacagcttacaagtcatgcagcatcaatgctcctgagatctggtgttggcaggttgcttcttgtggattttgatcaggtatcactctcatcactaaatcggcatgctgtggcaaccagagatgacgttggaacttcaaaagcgttgtgcctcaagaagcatttttcaatgatatacccagagtgccaaatagatgcaaaagtgcaattgtatgatgcatcgtctgaggaggaaattctttctggacagcctgactttgttcttgattgcatagataacattgataccaaggtgtcactccttgcagcttgcgtgcgcagaggtttgaaggtactttctgcaatgggggctggagctcgagctgatcccaccagaattcgtgtcgcagatttgagagaatcaagcaatgaccccctctctcgatcggtgaggtacaggctcaagaaagaacatggaattgagggtggaataccagtagtcttttcattggaaaagccaaaggcaaagcttcttccttttcaagcttcaaaagaagaggaaactccatcagattaccagattgtgccaggattcagggttcgcattataccagtattgggaaccatccctgcaatatttggtcaagttatggcctcctatgtggtcactcagcttgctggattagattttcaaactgaaccagttgttaacctggatttggatcattaccgtatacttcatcagcgtcttattgagcatgaggaactgatgtatggcacagccgagcaagttctggtagatgctgaagaggtaatgtacattgtcaaagaattgtggcgtggtcgaagtgctagagaccaaagccaggacactggccggaagatgtggagatctgtgaacgaactaatgcttgttcggtgggacaaatcaaaggctgctggcatctcaaacttaatacttgtcaagttcagtgaggctgacgcccatgaatccaccacactcgaccgaataaaagaacaagaacctgaattctactctatggtttcactttcgacgcgtgtcgaactagactgccacggacgcgaagatctcaaccacttgccacagcgcacatggtatggagcgagcggacccagagccacctctccagcttcgccccaggcccagcgtgctcgctgcctcgctctgccggagcctccctccaccatggtccacgtggccacagcaagaagaagaatccccatgcggcggcggtggcgaccgcattggaggaagcagggatgtgcggcgcgaggccaaggccatggcacgcctacgagatggcctagattctcgtgggacccacgatgccgcgcgcgcagtagcatcgcaccccgccacaggaaacaggatgctgcagggaggcgcccgaagcgccgccacggggacgaggacaacccatccccgaccccgacggcgttgtgctggcagacaccgccatcgtgggcgaggacgaccgctgaggtggaggcggcggaggagaagaggctgaggatcagcccgaggccggactcgtctgccgctgcggcggcggagcgcgcgccaggcgaaggcggccgagatggaggcagccgccagcaaccaccgccaagagctggcgtctttggagcccaagcctcgtggcaccacaccaactactttcccatcaccgatgacccgctcgagcccaccgccgccgaggagggcgaggacgccgatgacaatgagggcaacacggaggagtggaggacattgtctagcgcctccgactaagctagactgcaacttttaaaattgccaagtgccaaatagaggtccatt

SEQ ID NO: 206126 - DNA, 2532 bp, Zea Mays
gcagacgcggcgaagcaaaccgaaacaaacaaacccaagtgcgcgtccgagcctcgaggcggagaagaaaccggagcgagatatttgcatttcagtccctgcgaagagaaaaccgtcgcgtcctcgccgcgccgctcgcgtcgggatcccgccgccgccctactcggtcgaccatggggacggcgacgatggcgactgcggtgggcgcggccatgctgctctacttcgtgctgagccggcggctggcgggcgaggacgtctcagcccgcggcggtggagggggaggagtcgggtctggaaagcggcggagggggcgcgcgctgcggcggccggtgcagccgccggcgacgtggatcgaggcggtgggcacgctcgcggaaacgctgcgtttcacctactcggagacgctcggcaagtggcccatcggggacctcgccttcggaatcaagtacctcatgcgccgacagtgtatatgctggaagtgattgcattgaattgaaaggacctcaaatcatggaagagctgattgttctacggcggttgattgacctgtgctttcttttctctaagaagccatttccagtgtttcgggaattagctggattttcacaggaggatgttcttattgaggaaccaaaggcggggattttgaagcctgcccatacaattatacgtgatgagtgcaccaaatccttccttgttttgatccgagggactcatagcatgaaagatactctgactgctgctactggggctgtagtgccatttcacctctcacttttggatgaaggcgatgtgagcaaattagtgttaggttatgcacactgtgggatggttgcagcagcccgctggattgcaagaggtgtaacaccatgcctccgtgaagcagtcagacaatgcccagagtaccaaatcaagattgttggccattcattgggtggtggtactgctgcattgctaacctacatccttagagaacacaaagagttttcttcaacaacttgtgttgcatttgcacctgcttcttgcatgacatgggaattagcagaatcaggcaagcattttgtgacaacggttgtcaatggagctgatctggttcccactgtatcaactgcatctattgatgatctccgttctgaggtaacagcttcatcatggttaaatgatctgagggatcaaatacaacagacacgcttcctaaatgtcgtttaccggtcagccactgctttaggaactcgcctgcagtctttttctggtgcgagagagagggttgcaggtgctggagcatttctacgtcctgtttcaaacaaaacccaggttgtgatgaaacaagcacagaatgtcgcacaggctgttgctagaagtcggtctgcattttcctcatggtcatgcatgggtgcacgtcgtcgaggtgtaggtgtagttactgcatgttctaaagatgatatgagagtggaaacccatgtaacatcaacagttgagtcaaagtctgtccttgtagaacattgtggcgccaagaccatagaagaactgcagtatactgcagctagtgtttctgttcatgatgcagcagaggaagaagaggctcttttgagtgaacatgaaacctccagggagaatgccgaagaagaaacaacagagggtgagttgtggtatgagtttgagaaggacttggatcgacaagctgaaatggaggcacgaacaagggaggaagaggcagctgcagccaaagaaataatggaagaggaaagtgctgtgctaaaaggtgtagatgacaggcagtccttcacaccagatagcttggagaggcagcaattctacccccctggtagaatcatgcacatggttgcaatgcctcccacagacgctgacccagatgatccggttgctgctgacgagtgctgtgttggaatatatgagacccctagagatctttacagcaagattcgactctcaaataccatgatcaatgaccactacatgccaatgtataagaaaatgatggaaacattgattgagaagttcgcgagggatgaggactgctattgtacaggttctactgcagaataacatggaagcatgaatgacctatgtacatcgataactgtacaatactccgtgttagctgttattagcctatctgacattgcaatatacaagaggtgatgtcctcctgacccgtgaaaaaaggattttagttagggtcatgtgagtgtgtgatgtgtaaatgtaaaagaaaccagaatcagcaatttaataccttttccagtcatatttgcttgtactttacaagcatgtgatgcttggatcttgaaatctaaatgtttacaaggcattttaaagtcaggcgcttagcaagaagagcgttttgacattgttcatacagaccaatgggcaatgactacagggaactaaaacgataagagttgcaatggcgcactggtgcttgtttagctagccatactatttgatacttgacatggctgttaagaactgaaatgtaaagtgaaagtagagaacggaagaaattgt

SEQ ID NO: 206127 - DNA, 3339 bp, Zea Mays
ggccacggaatttcccggagaaagtgcgggcgtgagggacgagcggacgagcctcagcggcgagagaaaatagaacggggagaccggagcggcggcgggggaggaggagacggaaggaggggatcgagaggggcgcgcgcgaacagaagagagaaagaggaggtggcaggtttggttccgcgcgcgccgacgtgagattccgggcccccgtgccagcaggttcaaataatggattaaaaacttaagctgacacttatggcggatgctcaattcaacccagtgaatccgaagctgacccatgaagaactaaaataagctttatgcttcagtgtcttctgaaatcatcctgaggtattgataagtcagcaacctagagcagaaaatgtcagctccggaattcaggacttcttaccagcaagtatcatcatcacagccccctgagaatgtcggtcaactcaaggtctgccgatgtgggtcgggagactctaactttcagatcactaataaatctgatgctggtgaaaattcaccgacaacttgtccaagctgtcaggttcttaagagtggaaatttattgctctcatctaaagggattggatggacagtatggaaaaaacggtggtttattcttacaaggacatcattagtgttcttcaggagcgatcctagtgtcccccctcccagaggaagtgaaccaattgttacacttggtggaattgacttgaataacagtgcaagtatgatagtcaaagaagaaaggaaagttataacagtcatctttcctgatggccgtgatggacgcacttttacccttaaggcagaaactatagaggacctaaatgaatggagaagtgcattggagaatgctctggctcaggcacccagtgttgcgaatacagcggggcaacatctggcagtcagcactgatataacagaacctgttgaagctgctgttgaacaattggaggataagtctgtaattggcagaccagcagaatttgcacttgtcgatgctgatggcactacagcattcctggagaaggccttaaagttcatcgaagactatggtgtcaaggttgaaggaattctccgtcagtctgctgatgttgaagaagtcaaacgcagggttcaggattacgaaaaggggaagaatgagttctccccagaagaggatgcacatgttatcggtgactgtattaagtgcattcttcgagagatgccatcttccccaattccggcaccatgttgcactgccctggttagagcttaccgaactgacaagacaagaagacttgatgctatgaatagagtgatatatgaagtattcccagaaccaaatcgtcaattgttacagaggattctcaaaatgatgcagattgttggatcacacaaagctgaaaataggatgtctccgtctgctttggcagcttgcatggcaccgcttcttcttcgtcctcttcttcttggtgaatgtgaaattgatagtgaattcaatatggctggggatggttcattccagttgcttcaagctgctgctgctgccaaccatgctcaagctattgttattattatgcttgaggaatatgatcagatatttgatgatattgaagacggttcgtactcttcagatgcttatactgagtctgacattgacaaggaatattcgacagacaatgacatccctgaagacgatggttcctatggttgtggtgaagatgttgaagaagatttaaatgatgatactgaacactcttctggcattaggattgataatgcagatgataaggttaataacaataaatcaagcactacatgtgatgacaatgataaagttgttcagcctcctgctgcaagggccatgagaatagaacatggtgtgcccatggatgacagtaatcaaatttcttctctttcaaaagtggatgatacctctaaaatgcagagcaacagttcattcacagatcatatacaaaaaccaaatgctgattcatcatatttgagtgcaaagtttacagagaaaactggcggctcaacttatgaaagcaaaaggaactcatgggggcgtacttcagcaagaaaaggcttgtcaacagaggaggctggctgttgcagtgataatgacgaggctcatattgcgaagcttgaaaacaagaagacccatctccaatctaaacttacggaggaggtaaaagaaaacacagtcctccaggcaaatttagaaaggcgaaaagcagcactacatgagcgtcgtgtagcacttgaaaaagaagtggaaaatttacgagaccagctgcagaaggagagaaatttgagggcttcattggagtctgggttaatgaatatgcgaagaggacaagtgtccttcccatcaacgatagacaccaagactaaagctgatcttgaggaagttgctgctgctgaagctgatattatgaacttgaagcaaaaggtttctgatcttcgggggcaactcaactaccaagtccagttgagttccacctcgttatgtgaatcatgcaacaagcgggcaataaatgcagacaagcttgtcgaaggtgaacaaaatgctggcctttctccacagattggctcctcagtcgaagcaccaccaattcaagggtctaattctgtagttcctgacatgttatgggctacaaaccaaatggttcagaagatgttgtattcaaagggtgagattgcaaaggacggccaagatggatcacttacatcaaaatggaactttgcacagagaccacactcaaatagtccagttatgagcagggttcaaggttccaatgcctattcaagtactaaaaacgaggaatctggagccgcaccgtcctctgcattagccaagctgactactcgactcaactttttgaaagaaagaagggccttgctcgccagtgagatgcaaaacttagatctgggtcgctcccaggcccagaggcacacggctcctccgaaaactgagactccgaccgacaagtagaatcgttttattgttaggctacacaagcccacaaaagcattctgccatcggggtgtgacaagtccagctgccacgatcgatgctcatgtaggatcgcaggcagtgaagaaaagttcgattggacaatggataggctacctacctatagagtaacttgatttgtaaattgcagaggtaatcgtgtcttcgccatgatgattcatatgtcaagttttgtagcgacaccgacgaccaacctggtttgtactattatctccaattacacaataccctgaatactctggaacaaaaagccaaatggcgcttgcaaataatctgtcggtctgtgtggtactctgatatgtaca

SEQ ID NO: 206128 - DNA, 3059 bp, Zea Mays
ggcgagagaaaatagaacggggagaccggagcggcggcgggggaggaggagacggaaggaggggatcgagaggggcgcgcgcgaacagaagagagaaagaggaggtggcaggtttggttccgcgcgcgccgacgtgagattccgggcccccgtgccagcaggttcaaataatggattaaaaacttaagctgacacttatggcggatgctcaattcaacccagtgaatccgaagctgacccatgaagaactaaaataagctttatgcttcagtgtcttctgaaatcatcctgaggtattgataagtcagcaacctagagcagaaaatgtcagctccggaattcaggacttcttaccagcaagtatcatcatcacagccccctgagaatgtcggtcaactcaaggtctgccgatgtgggtcgggagactctaactttcagatcactaataaatctgatgctggtgaaaattcaccgacaacttgtccaagctgtcaggttcttaagagtggaaatttattgctctcatctaaagggattggatggacagtatggaaaaaacggtggtttattcttacaaggacatcattagtgttcttcaggagcgatcctagtgtcccccctcccagaggaagtgaaccaattgttacacttggtggaattgacttgaataacagtgcaagtatgatagtcaaagaagaaaggaaagttataacagtcatctttcctgatggccgtgatggacgcacttttacccttaaggcagaaactatagaggacctaaatgaatggagaagtgcattggagaatgctctggctcaggcacccagtgttgcgaatacagcggggcaacatctggcagtcagcactgatataacagaacctgttgaagctgctgttgaacaattggaggataagtctgtaattggcagaccagcagaatttgcacttgtcgatgctgatggcactacagcattcctggagaaggccttaaagttcatcgaagactatggtgtcaaggttgaaggaattctccgtcagtctgctgatgttgaagaagtcaaacgcagggttcaggattacgaaaaggggaagaatgagttctccccagaagaggatgcacatgttatcggtgactgtattaagtgcattcttcgagagatgccatcttccccaattccggcaccatgttgcactgccctggttagagcttaccgaactgacaagacaagaagacttgatgctatgaatagagtgatatatgaagtattcccagaaccaaatcgtcaattgttacagaggattctcaaaatgatgcagattgttggatcacacaaagctgaaaataggatgtctccgtctgctttggcagcttgcatggcaccgcttcttcttcgtcctcttcttcttggtgaatgtgaaattgatagtgaattcaatatggctggggatggttcattccagttgcttcaagctgctgctgctgccaaccatgctcaagctattgttattattatgcttgaggaatatgatcagatatttgatgatattgaagacggttcgtactcttcagatgcttatactgagtctgacattgacaaggaatattcgacagacaatgacatccctgaagacgatggttcctatggttgtggtgaagatgttgaagaagatttaaatgatgatactgaacactcttctggcattaggattgataatgcagatgataagtttacagagaaaactggcggctcaacttatgaaagcaaaaggaactcatgggggcgtacttcagcaagaaaaggcttgtcaacagaggaggctggctgttgcagtgataatgacgaggctcatattgcgaagcttgaaaacaagaagacccatctccaatctaaacttacggaggaggtaaaagaaaacacagtcctccaggcaaatttagaaaggcgaaaagcagcactacatgagcgtcgtgtagcacttgaaaaagaagtggaaaatttacgagaccagctgcagaaggagagaaatttgagggcttcattggagtctgggttaatgaatatgcgaagaggacaagtgtccttcccatcaacgatagacaccaagactaaagctgatcttgaggaagttgctgctgctgaagctgatattatgaacttgaagcaaaaggtttctgatcttcgggggcaactcaactaccaagtccagttgagttccacctcgttatgtgaatcatgcaacaagcgggcaataaatgcagacaagcttgtcgaaggtgaacaaaatgctggcctttctccacagattggctcctcagtcgaagcaccaccaattcaagggtctaattctgtagttcctgacatgttatgggctacaaaccaaatggttcagaagatgttgtattcaaagggtgagattgcaaaggacggccaagatggatcacttacatcaaaatggaactttgcacagagaccacactcaaatagtccagttatgagcagggttcaaggttccaatgcctattcaagtactaaaaacgaggaatctggagccgcaccgtcctctgcattagccaagctgactactcgactcaactttttgaaagaaagaagggccttgctcgccagtgagatgcaaaacttagatctgggtcgctcccaggcccagaggcacacggctcctccgaaaactgagactccgaccgacaagtagaatcgttttattgttaggctacacaagcccacaaaagcattctgccatcggggtgtgacaagtccagctgccacgatcgatgctcatgtaggatcgcaggcagtgaagaaaagttcgattggacaatggataggctacctacctatagagtaacttgatttgtaaattgcagaggtaatcgtgtcttcgccatgatgattcatatgtcaagttttgtagcgacaccgacgaccaacctggtttgtactattatctccaattacacaataccctgaatactctggaacaaaaagccaaatggcgcttgcaaataatctgtcggtctgtgtggtactctgatatgtaca

SEQ ID NO: 206129 - DNA, 1904 bp, Zea Mays
aaccatgaaacggttctctttcccgttccaactcccatccaaacgccaccatacagtgctccgttcagcgcctaccttttcttctgcccgtccaccgtgcgcgaggcgctctctcgtgtagctactagacgaccgccaccgccgtctggtcttcgtcgggtccttcgccgatcaacacccaccatttatcgggtgtacatgtgtacacccatgtcctacactgggtccgcccccgagccttctgatcctaacaggaaacctgactcgacaatgggctgcgtggacacaccaagaggaggagatttttttcaatgcgctgcggcaagtaggaaaaaactttgacaagattacacaccgtgttcagagtaaaaacaaggatcaggtcaggcattactattatcgtcttgttcggcgcatgaagaagctactgggtcctaggttctcacttgatgcaaaaaactccaaggataccattgctgctatgcttcgctggtggtctctgcttgagaaatttagctgcactgcatcaaagttgcatctcaaacctcggaggttcaaaacatttgtagaagcactggggaaacaactgctaaaggacagaaataagtccaggagaaagcgttcacgagtggatatgtgcctaccttctccatctccaattatcagcaaagctcctgggaatgagaatcctcctgtaaagttcctgtcagtagatgctcagaatggtagcagagtagcatctcctaaagggtcaattttcaagcaggttgcagaaccgatttctaacaagccagggacaactaaaggggaactctctgccacaagaaccgtgaaacaaaaaaggaaggcaggtggcgctgttgcatctgctgcatataagaaatgggagagagcagccatggctggtgtttctttagttgctgatgcagctgaggagctcgagcgcaacacgattaacccaggcattttttgtaatgttgatgcaagaacactgacttcattatcagaaagactttctagcattgatggcattagcacaaatcatatgaaggaagcagattcacaggcacctgtgaagctgaagctacagttatttccaataaatgaagctactcggaaggcattggagaaggatgaccataatcctcatctagagctcacattaagctctagaaagaaaatatcatctgtgctagaacatctaaaccgaaaatggggtaactcaaacatcgcatctggagagcttattctttttccatattgtgctaatcaagaggatttggctacatatcagaggtggacaacaagagatactgttgcagtagctgatgtgtttctttctgtgaatagcccgtctgttttccgtttaaggtatggttgggtttcccttgttgagcttggagcaggagtaagtgaaatatctttaacccattttgaggattgcatgataccagaagtcatccaagtcaaatcgccatcaggagataaggcttgtgttcaaagtgatggtactttcctcagtaactgcattcatgatcaatatccttgtagttcgatgttattgcatattgttagatgttgtattgtgtgcataatgatgtattgtgtgattgtccctgtattgagcctaggcccacttaccgctattattaatacatcacccgacactgatttagggttagagtttcaatttctatcatgatatctagctaggttagtgttccttcttccccaccccaaccccaaccaccactgtagcagtgccaccggcgtcgctcccgcgccgaccgccttctctcccctccctccatctcgttgcgcggctcggtgcggccccacgtagctcctcctgcgactccttccctcggctcggctccgcctcgcgcctgcaaccttttgagctc

SEQ ID NO: 206130 - DNA, 1922 bp, Zea Mays
atctgttacctattcagaacttgttttgttacatctggatcgagagagattgaatgagatcgcttcatatatctctgatccatagccaaatatgagtattttccaatccataacccattatatatttatatgtcattaacccatgctcttgtcttcaaccatgaaacggttctctttcccgttccaactcccatccaaacgccaccatacagtgctccgttcagcgcctaccttttcttctgcccgtccaccgtgcgcgaggcgctctctcgtgtagctactagacgaccgccaccgccgtctggtcttcgtcgggtccttcgccgatcaacacccaccatttatcgggtgtacatgtgtacacccatgtcctacactgggtccgcccccgagccttctgatcctaacaggaaacctgcaaaaaagcagactcgacaatgggctgcgtggacacaccaagaggaggagatttttttcaatgcgctgcggcaagtaggaaaaaactttgacaagattacacaccgtgttcagagtaaaaacaaggatcaggtcaggcattactattatcgtcttgttcggcgcatgaagaagctactgggtcctaggttctcacttgatgcaaaaaactccaaggataccattgctgctatgcttcgctggtggtctctgcttgagaaatttagctgcactgcatcaaagttgcatctcaaacctcggaggttcaaaacatttgtagaagcactggggaaacaactgctaaaggacagaaataagtccaggagaaagcgttcacgagtggatatgtgcctaccttctccatctccaattatcagcaaagctcctgggaatgagaatcctcctgttgcagaaccgatttctaacaagccagggacaactaaaggggaactctctgccacaagaaccgtgaaacaaaaaaggaaggcaggtggcgctgttgcatctgctgcatataagaaatgggagagagcagccatggctggtgtttctttagttgctgatgcagctgaggagctcgagcgcaacacgattaacccaggcattttttgtaatgttgatgcaagaacactgacttcattatcagaaagactttctagcattgatggcattagcacaaatcatatgaaggaagcagattcacaggcacctgtgaagctgaagctacagttatttccaataaatgaagctactcggaaggcattggagaaggatgaccataatcctcatctagagctcacattaagctctagaaagaaaatatcatctgtgctagaacatctaaaccgaaaatgggaggtggacaacaagagatactgttgcagtagctgatgtgtttctttctgtgaatagcccgtctgttttccgtttaaggtatggttgggtttcccttgttgagcttggagcaggagtaagtgaaatatctttaacccattttgaggattgcatgataccagaagtcatccaagtcaaatcgccatcaggagataaggcttgtgttcaaagtgatggtactttcctcagtaactgcattcatgatcaatatccttgtagttcgatgttattgcatattgttagatgttgtattgtgtgcataatgatgtattgtgtgattgtccctgtattgagcctaggcccacttaccgctattattaatacatcacccgacactgatttagggttagagtttcaatttctatcatgatatctagctaggttagtgttccttcttccccaccccaaccccaaccaccactgtagcagtgccaccggcgtcgctcccgcgccgaccgccttctctcccctccctccatctcgttgcgcggctcggtgcggccccacgtagctcctcctgcgactccttccctcggctcggctccgcctcgcgcctgcaaccttttgagctc

SEQ ID NO: 206131 - DNA, 2435 bp, Zea Mays
gtctgcgagccgactagtcccggcacccgactccccactcctgaccggagtagccagctcccagacattgacgagacataaacccacttgcccacgcgcacggcaagccggcaaggccacgcgagaaattccatctcgagcagagcgcagcaacacgtgcgcggaggtcacagctccgatcgacaagccggccaagcagccacacatgcctcctcacatggcggcgatctcgcaccggatcgcaggatccggcccgcgcgtcgccgttgtggcgccgcctcgcccgcgggggcgcgctgccgtggtcgcgggtgctgcggcgaagggcgcacatcgggagcggacgctggagggcgcgagtgacgacctgagggccgccgcggctcagtgtctggactgggctcccgcgcggcgtcgggtgcgggccgccttcgcgcccgtgctccccaccctcgaccactgccttttcaagatggctcacaatgaaatccagatggaagaggtacgggcgtgatgggatttctgaattgaccttgcattccattttgttcaacgttcaagtagttccctcgctgaaatattgtggcacaagcaaactttctgttggaaaatctttaccatgtccctgtttgtttgaactaaaaaggctttccatcttgagtagccaatagtagattttcgaagatatttttagctttctggactcaagaacctcatgaaagctcagaaaagtgagcttttaagctttccgtataaactcaggttcttcgggattctggcttttcgaaagctagatgaaaaagcctattgacttttcacactaaaaagctgtccagaagctcatacaaacagggctgattcaagagcttctttccttgctttgagtattgatagatactgctagttactgtagaattacgagaccaattcaaagggcgttgaaatattctggaagagttggctgccaagagagggcactgcaactaaggctgcacttttcttctgccatggatatggggatacctgcactttcttttttgaagggattgctaagaggatagcagctgctggttatgcagtttatgctatggattatcctggttttggcatgtcatatggtctccatggctatattgcaagctttgatggaatggtggaccatgtcattgaacagtatgcacgaataagaggcatgaaagaagtgtgtgagctgccacactttctcttggggcagtcaatgggaggtgcagttgccctgaaagtacacttgaagcaacaacaagaatgggatggtgtgcttcttgtcgcacctatgtgcaaggtatttctcaaactcccaattaccatcagattacgtcatcacacaatcacatccttttggttgtgttagtataaggtgtgtatatgtttcactgtccactaactatccaatcatgacttgtgctagtgcacaatagtggattgtagttcacagttgacagtaggtggaaatatagtgcttggtgaaatttgggagccactggtcaagaaatgacttcttatggatatgtttgcaaaacaattttattcatagttactgataactgctaagtccatgccaaatttatttatttttcttgcaatctagcatatttccagttttacttcatggtagggcaactaacctgaagaatgcatgaagaaatttgggagccactggtcaagaaaggacttcatagtaactggtgttggaatctcccttggaagtcttttttcatgacttcttatgggcactgagcatattgtcatgtcttcttcctgaggcgaagttatttccgcagaaagatataggagatttggcatttagagatccaaggaaaaggaaagtagctgagtacaatgccatctcatattctgaccaaatgagattaagaacagcagttgaacttttaaaagccacgaaggacattgaatcacagttggaaaagatctcctctccattgctgattcttcacggagccgcagacatggtaaccgatcctcaggtcagcaaattcctttatgagaaagccagcacgaaggacaagaccctcaagctctatgaaggcagctaccattcaatcttagagggagaaccagatgaccggatttcaactgccattaacgacatcatttcatggctagattcacactgttaaatacccctttgtctatagcctctcatgtcctcatccattgttttggatttatagttccttattagagtaccatgggtctctagtgctttaaattttgccatggtgtgcagagataagtatctctcgaattaattagttgtgcttgctatcttgacactgttggttttatgttaattgcggacaccgcattcaatagcttggatcctgtcaacaagtatcagcattaccaggtccgattatcaaacaaaacaaaatgac

SEQ ID NO: 206132 - DNA, 1647 bp, Zea Mays
gtctgcgagccgactagtcccggcacccgactccccactcctgaccggagtagccagctcccagacattgacgagacataaacccacttgcccacgcgcacggcaagccggcaaggccacgcgagaaattccatctcgagcagagcgcagcaacacgtgcgcggaggtcacagctccgatcgacaagccggccaagcagccacacatgcctcctcacatggcggcgatctcgcaccggatcgcaggatccggcccgcgcgtcgccgttgtggcgccgcctcgcccgcgggggcgcgctgccgtggtcgcgggtgctgcggcgaagggcgcacatcgggagcggacgctggagggcgcgagtgacgacctgagggccgccgcggctcagtgtctggactgggctcccgcgcggcgtcgggtgcgggccgccttcgcgcccgtgctccccaccctcgaccactgccttttcaagatggctcacaatgaaatccagatggaagagaattacgagaccaattcaaagggcgttgaaatattctggaagagttggctgccaagagagggcactgcaactaaggctgcacttttcttctgccatggatatggggatacctgcactttcttttttgaagggattgctaagaggatagcagctgctggttatgcagtttatgctatggattatcctggttttggcatgtcatatggtctccatggctatattgcaagctttgatggaatggtggaccatgtcattgaacagtatgcacgaataagaggcatgaaagaagtgtgtgagctgccacactttctcttggggcagtcaatgggaggtgcagttgccctgaaagtacacttgaagcaacaacaagaatgggatggtgtgcttcttgtcgcacctatgtgcaagtgattttataagactggcttctctttggcaagatttcagaagatgtaacaccacctgcacctgtattgaaggcactgagcatattgtcatgtcttcttcctgaggcgaagttatttccgcagaaagatataggagatttggcatttagagatccaaggaaaaggaaagtagctgagtacaatgccatctcatattctgaccaaatgagattaagaacagcagttgaacttttaaaagccacgaaggacattgaatcacagttggaaaagatctcctctccattgctgattcttcacggagccgcagacatggtaaccgatcctcaggtcagcaaattcctttatgagaaagccagcacgaaggacaagaccctcaagctctatgaaggcagctaccattcaatcttagagggagaaccagatgaccggatttcaactgccattaacgacatcatttcatggctagattcacactgttaaatacccctttgtctatagcctctcatgtcctcatccattgttttggatttatagttccttattagagtaccatgggtctctagtgctttaaattttgccatggtgtgcagagataagtatctctcgaattaattagttgtgcttgctatcttgacactgttggttttatgttaattgcggacaccgcattcaatagcttggatcctgtcaacaagtatcagcattaccaggtccgattatcaaacaaaacaaaatgac

SEQ ID NO: 206133 - DNA, 1807 bp, Zea Mays
atgttttaaactgctacgcctacaacacgcctccccagtcaacacagctcagctcagctcggctagcgagctcctcgctcggctctactagctagtgtgttgggacttgggagctaggcggggttgattgcgattgggggaggcgggagtaggtgatgtacggcgcgccgttgcccaaggacctgaacctgccagcagccctgccgcagccgaccaggacgccaccgcagcagcagatgggctccccgggactgctgcggtacaggtcagcgccgagcacgctgctcggcgaggtgatgtgtggtggtgatcaggacttccccgcggctggcggcgcagggcacggaccaccggaccacgccgccgcggacaacgtcctcgcgcgctttctcgccgggcaccactccgagacccgcgactgcaagcctccccgccccgccgccgccgctcacttcatggacgaagctgccgtcgcgtccatggccgcctcacagcagcagcagctcatgtaccagtcgcagcaggagcagcagatggccgccatggaggggctgtaccgcaacgtcagctccggcggcacggagcacggtgcagccgttggcgctggtaacaacagcctgatccgccagagcagctcccccgccggcttcctcaaccacttgaacatggacaacgggtacgggagcatgctccgggtgggcatgggcggcggcgggttcaggaacggcgtcagcgacgcgcggctcaaggggcagctgagcttctcgtcccggcaggggtcggtgatgtcgcagatctcggaggtgggcagcgaggagctcgacggaggcggcggcagcggcagccccgaggcggccggcagcaacgccagcggcgcggcgcgtgggtacagcggcatcccggggtacccgatgggcggcctcgcgtccggcgcctggccggacgaggcgtcgccgtcgccgacgtccggcgcgaagcgcccccgcgactccggccccgcgctgcagcagccgctggcgccgcagctcagcctgcccagcggaaagaacaagggcggcagggcggcctcggcggagatggcggcgatcgagaagttcctccagttccaggacgccgtcccctgcaagatccgcgccaagcgcgggtgaggaggacgaagatcagcgagcggatacggaagctgcaggagctcgtgcccaacatggaaaagcaaaccaacactgccgacatgctggatctggccgtggactacatcaaggatcttcagaagcaggtcaaggtactgaacgacggccgcgccagctgcacctgctccgccggcgagctgcagggccagttcacccgttaaaaaggagccgcgccacctttttctcaggggggccagttcagctcgcatagttgcgttacgttacatggtgaggactgatcgaggaggtatatattggaattgagacgatagtagctagtctgtacatgcaacaagttcattagcaggcagagtaggcctcgcatgttagtgatagctgcgtcagttaatgtacgtttagattgcacatgtattcatcttgatttacatgtgttagagtagtttagtgtggattttagtttaaatttcacattaatccacttcaacatacattaaccgatgtgggtatatatgaccatctaattagaatctttatatacacatgtatttactcaatccacatgattagcctgtccaaacaagcgctcgtgctacagggcatggtgactgtcatcgtttcacttactactactacgctacaggtgcatgcacgaatccaat

SEQ ID NO: 206134 - DNA, 1005 bp, Zea Mays
cccaactgcccgcgttcccgtgcccgtactaaaaataaataacggactgccatctcctcgtgcactccgccaaccgccgccgccactcgccactctcacgtctcgcccatcccgccactgctgctctccagagtccaggcgacccaggctgcgcggtcgctcggtgttgttagtcccgaccgccgccggccatggcatccaacggcatcgccccaagagatgtatgtgttgttggcgttgcacgcacccctttgggtggtttccttggtgccttgtcttccttgcccgcaacaaagcttggttctatagcaattgaagctgctctgaaaagagcaaatgtggatccggccctcgtgcaggaggtctttttcggaaacgtcttgagtgctaatttgggacaagctcctgcaaggcaagccgctctgggtgcagggataccaaacactgttgtttgcaccactgttaacaaagtctgcgcatctggcatgaaagctactatgttcgccgcacagtcaattcagctgggtatcaatgatattgttgtggcaggtggcatggaaagcatgtccaatgccccaaagtacattgctgaagctaggaaagggtctcgttttggacatgacacacttgttgatgccatgcttaaggatggactttgggatgtatacaatgactgtgccatgggaatgtgtgccgaactttgtgctgacaatcatgccctcacaagagaagaccaggatgcttttgctatccaaagcaaccagcgtggaattgctgctcgtgacagtggtgcttttgcatgggagattgttccgattgaagttcctgttgggagaggaaaaccacctgtacttattgagaaagatgaaagcctggataagtttgacccagcaaaactgaagaaacttcgcccaagtttcaaggagaatggtggtaccgttacagctggaaatgcttctagtataagtgtgtactgcctactactgctggtgtagctacaatcgg

SEQ ID NO: 206135 - DNA, 4211 bp, Zea Mays
ctccccgcctggacaccgtcacaccggtcagcctccacgcctcacggatttcgcacccgaaaaaaaaatagaaagcgaaatcaaccaatctcctatcattcacggcctcgccagcgcctcctcctccccctcctccccagaaatttccccacttgcgccgctcgcgatcggcgcccgagctcccggaatcccggcccggtttcgcgaccgttcgccgcgagccttgggccggtccgggctctgattcgcgggcgccgcggccgtggttcgcgcggggaatgctctacctcaagcagccgggcggcgcggacttagggttccggcgggcggcggtggcggctgctgctgctgctgctgcggggctgtgatctgccgctgtggtggatgcgaggttgagccagcacgcgccggggattctgctggcaatggcggaggcggacagctgcctcgagagcttcgagctctacgagtccgagtcgaaattctatattcttggaactaactgtaacaagacaatatggagattactcaagattgatagaatggagccatcagaggtcaatgtacatgaggattctactgtgctctcacagagtgattaccttgatatgctaaaaaatctagacgaacaacacaggtcaactggtggagtcaaatttgtcaccaactgttttggaatcatcggtttcattaagttccttgggccctattacatgttaattattactgagcagagaaagattggggatatatttggtcatatggtgtaccaagtttctaagactgcgatgattgagttatcaaattccactacgagaccaaaattaattaattccaaggacgagaacaggtacaagaagctcttgcagacaattgatcttagaaaagatttcttttttagccactcatatcatataatgagaagtcttcaaaagaactttaatgatccacaagaagggtgggaactatatgacacaatgttcgtctggaatgagttcctaactcgagggattcgtgacattctgaaaactacactctggactgttgcattagtctatggtttttttaagcaggacaaacttgcgatatgtgggaaggatattatgctgactctcattgctagacgctcgaggcattatgctggcaccaggtatctaaagaggggtgtgaatgaggagggcagagtagcaaatgatgttgagactgagcaaattgtttatgaagacatgcttggaccatggcaaataagctctgttgtgcagaacaggggttcgattccactattctggtcccaggagacatcaaagctgaatcttaagcctgatatcatattgcatggaaaggacaaaaattatgaggctaccaggcttcattttgaaaatcttaggaaaagatatggaaatcctatcatcatcttaaacttgattaagacacgtgagaagagaccacgtgaaatcatactccgtcgggaatttgacagagcaataaagattattaatagtggtctaccaggcgaagatcatttgagatatttacattgggatcttcataagaactctcaaagcaaaagtacaaatgcgcttcaagtgcttttgaaggtggcatttgaagctttgaacttgacagaattcttttatcgtcaagtttccccagctcaaagggcagagaattcccctaatttaagccctacactgaaaaatggttttggtcctcatgtgtgtgatgatgacaacaattgtggcaatgcagactatgttgatgatcttgatgacatttcccaagaagatacctgtggcaattatgatcctggcaatggaattgcagaagatagatctgaggtcaatggatctactcaaataaagcctccaaaatttcaaaagggtgtattacgtacaaactgtatagattgtttggatcgcacaaatgttgctcaatatgcctatggcctagctgctctaggataccagttacatgcacttggttctgtagaatctccagaagttcatttagactcccctttgtctcggcatttgatgcatttttatgaacggatgggtgacacacttgctttacagtatggtggttctgctgctcacaataagatattctctgcaaaaagagggcacttgaagttcgccattcaatctcaagagttctttaggactctgcaacggtactacagtaatgcctatatggatgcttacaaacaagcagcgataaacttatttctaggatacttccaaccgcaggtgggaaaacctgcactttgggagccagaatctggtgacgagcatgtacttgatgacgagacaaggtaagctagcaatatatacctatgcttgaacttacagggttaagtatgctcctaataaaagaacaatatacgcttctctatgaattgaggcaataacagaattgtcactaaaggtggtgtgactacgatcctatatttattgcctctcctattaatatcacattaaactgacacaatataagtgatagtggaaccaaaaattgactagtagtctttgcacgagagcacaaagaattgtgaaacaatatctggtccacatgttctggtttaaccagttctaacttgccatgacacgagttagttatgccacggtttcttcgacagctatttggttcactgacacaaacacaactatggtgtgccacagttccttagcatcctgtcccacacttgatagattcatttttgtgccaaactttgccataagtgtggcgttgattttgctcgccacacttttcgtggcagccactgtttgccgaaggttaggcgtggcaaactacggcaccaaccaaacaggaaagtattaacttctttactttcatatgggtagcaaggaatcatttatattatatcttttcacatttttgttggggtgtttcctgactacttgttttaagaattaaataatccagattttattcacacatgcattgtgcaaatcaaaacaatatatcttgttagttatctgagattatagatatttgtcagtaaattgatgaagagggcaagatcagatggcagcattcttaataaaagcaaactatcaatgtccagtaatggcccaaatggagttttaaactcagcacttactggttcaaaaaatgaagggcaacatccaaactggagttctgattcagtgcatgggatgtcttcagcctctgacaattccatgtcaaagtcaaggtatactccgacagtgtctcacattaagcatataagctgtgaactagactattacaatggttctggtgattcaaatttcctggatcttgactggctttcagcttcagacaatgaaaggtcaaaagccataagcactcctgatgtgaatatttcaactgatgatggtgttcatgatgtaatctatgggataacggatgatcaagctgctgagatccaggctcagggattatctaaggattttgtgcagtgggttaatcaaggagagacattttggtactgatattccaagatgggcgtaccatgtaaattcaagccacataatggttgcacttgcaaaaaggggggaaaataagggagaagtctacatgatggcagtccagacctcatttcaaagcatattaactcttaaagaccattgcaaggagggaccatcaatgtgcatgagattgtttgtcaaccatcagcaattcagcattctcttttcggtatacgaatatgatgatgggcttagagtcacacgcactgttagaagacttgtctagggaagtgtaccattctgttcatttattgaagcttgctcaccaggctggtagatagtgcattgttattattttttcttaaaaggaatgaaagaatgtaggtagtttattctttttaagatgtaccattgtccaggcatgatccccatctctccatcgtgtaaatatatatgtcccaagtgttccacttttcccttttccttccatgagagttgaggtgggcatgaaagcaccatttttccctcagtctctttgtatgggttttctgaaatcatgtacatttatattttgtggcaagcggagagattgttgtgtaatttccattgtaccaaacgtccaaacccctcttaccaatagaagtctcttggactgtttgtcacattgcagattgctttaatacttgctttaaactatctgattatgtgtaaaattttcgtgtgattccttagggtccc

SEQ ID NO: 206136 - DNA, 3922 bp, Zea Mays
ctccccgcctggacaccgtcacaccggtcagcctccacgcctcacggatttcgcacccgaaaaaaaaatagaaagcgaaatcaaccaatctcctatcattcacggcctcgccagcgcctcctcctccccctcctccccagaaatttccccacttgcgccgctcgcgatcggcgcccgagctcccggaatcccggcccggtttcgcgaccgttcgccgcgagccttgggccggtccgggctctgattcgcgggcgccgcggccgtggttcgcgcggggaatgctctacctcaagcagccgggcggcgcggacttagggttccggcgggcggcggtggcggctgctgctgctgctgctgcggggctgtgatctgccgctgtggtggatgcgaggttgagccagcacgcgccggggattctgctggcaatggcggaggcggacagctgcctcgagagcttcgagctctacgagtccgagtcgaaattctatattcttggaactaactgtaacaagacaatatggagattactcaagattgatagaatggagccatcagaggtcaatgtacatgaggattctactgtgctctcacagagtgattaccttgatatgctaaaaaatctagacgaacaacacaggtcaactggtggagtcaaatttgtcaccaactgttttggaatcatcggtttcattaagttccttgggccctattacatgttaattattactgagcagagaaagattggggatatatttggtcatatggtgtaccaagtttctaagactgcgatgattgagttatcaaattccactacgagaccaaaattaattaattccaaggacgagaacaggtacaagaagctcttgcagacaattgatcttagaaaagatttcttttttagccactcatatcatataatgagaagtcttcaaaagaactttaatgatccacaagaagggtgggaactatatgacacaatgttcgtctggaatgagttcctaactcgagggattcgtgacattctgaaaactacactctggactgttgcattagtctatggtttttttaagcaggacaaacttgcgatatgtgggaaggatattatgctgactctcattgctagacgctcgaggcattatgctggcaccaggtatctaaagaggggtgtgaatgaggagggcagagtagcaaatgatgttgagactgagcaaattgtttatgaagacatgcttggaccatggcaaataagctctgttgtgcagaacaggggttcgattccactattctggtcccaggagacatcaaagctgaatcttaagcctgatatcatattgcatggaaaggacaaaaattatgaggctaccaggcttcattttgaaaatcttaggaaaagatatggaaatcctatcatcatcttaaacttgattaagacacgtgagaagagaccacgtgaaatcatactccgtcgggaatttgacagagcaataaagattattaatagtggtctaccaggcgaagatcatttgagatatttacattgggatcttcataagaactctcaaagcaaaagtacaaatgcgcttcaagtgcttttgaaggtggcatttgaagctttgaacttgacagaattcttttatcgtcaagtttccccagctcaaagggcagagaattcccctaatttaagccctacactgaaaaatggttttggtcctcatgtgtgtgatgatgacaacaattgtggcaatgcagactatgttgatgatcttgatgacatttcccaagaagatacctgtggcaattatgatcctggcaatggaattgcagaagatagatctgaggtcaatggatctactcaaataaagcctccaaaatttcaaaagggtgtattacgtacaaactgtatagattgtttggatcgcacaaatgttgctcaatatgcctatggcctagctgctctaggataccagttacatgcacttggttctgtagaatctccagaagttcatttagactcccctttgtctcggcatttgatgcatttttatgaacggatgggtgacacacttgctttacagtatggtggttctgctgctcacaataagatattctctgcaaaaagagggcacttgaagttcgccattcaatctcaagagttctttaggactctgcaacggtactacagtaatgcctatatggatgcttacaaacaagcagcgataaacttatttctaggatacttccaaccgcaggtgggaaaacctgcactttgggagccagaatctggtgacgagcatgtacttgatgacgagacaagtaatggcccaaatggagttttaaactcagcacttactggttcaaaaaatgaagggcaacatccaaactggagttctgattcagtgcatgggatgtcttcagcctctgacaattccatgtcaaagtcaaggtatactccgacagtgtctcacattaagcatataagctgtgaactagactattacaatggttctggtgattcaaatttcctggatcttgactggctttcagcttcagacaatgaaaggttgttcatgctgttcttttccttttgtggtctatcaggcgtcctgttttttgtgcatggtatggtatacacagaaatgacagtgagaagtaaatagtttgtcatttgttattaactccctggacatcttttctcagaaaagaagaaaaactctgcataaattgtctaagtggattatcaggagacctgagcatcattgcattaactaggaaatagttcaagaagaacgttaactccaaaacacactaacataaacacccatgaagattggaacctctcaactgtttactgaaacctgacatctctgtaaaacttgcacaactatccaataaaaagagaaagttattgccaatgccatgtatttttctaatactccattcttgtgtacatggaagtgctgatggaatcacacttataatgtagatgaatgtttctaacctcattattatgtttcgtgctgtgtattatctattatgcttaaacaggtcaaaagccataagcactcctgatgtgaatatttcaactgatgatggtgttcatgatgtaatctatgggataacggatgatcaagctgctgagatccaggctcagggattatctaaggattttgtgcagtgggttaatcaaggagagacattttggtactgatattccaagatgggcgtaccatgtaaattcaagccacataatggttgcacttgcaaaaaggggggaaaataagggagaagtctacatgatggcagtccagacctcatttcaaagcatattaactcttaaagaccattgcaaggagggaccatcaatgtgcatgagattgtttgtcaaccatcagcaattcagcattctcttttcggtatacgaatatgatgatgggcttagagtcacacgcactgttagaagacttgtctagggaagtgtaccattctgttcatttattgaagcttgctcaccaggctggtagatagtgcattgttattattttttcttaaaaggaatgaaagaatgtaggtagtttattctttttaagatgtaccattgtccaggcatgatccccatctctccatcgtgtaaatatatatgtcccaagtgttccacttttcccttttccttccatgagagttgaggtgggcatgaaagcaccatttttccctcagtctctttgtatgggttttctgaaatcatgtacatttatattttgtggcaagcggagagattgttgtgtaatttccattgtaccaaacgtccaaacccctcttaccaatagaagtctcttggactgtttgtcacattgcagattgctttaatacttgctttaaactatctgattatgtgtaaaattttcgtgtgattccttagggtccc

SEQ ID NO: 206137 - DNA, 3456 bp, Zea Mays
cctccccctcctcctccccctccccgcctggacaccgtcacaccggtcagcctccacgcctcacggatttcgcacccgaaaaaaaaatagaaagcgaaatcaaccaatctcctatcattcacggcctcgccagcgcctcctcctccccctcctccccagaaatttccccacttgcgccgctcgcgatcggcgcccgagctcccggaatcccggcccggtttcgcgaccgttcgccgcgagccttgggccggtccgggctctgattcgcgggcgccgcggccgtggttcgcgcggggaatgctctacctcaagcagccgggcggcgcggacttagggttccggcgggcggcggtggcggctgctgctgctgctgctgcggggctgtgatctgccgctgtggtggatgcgaggttgagccagcacgcgccggggattctgctggcaatggcggaggcggacagctgcctcgagagcttcgagctctacgagtccgagtcgaaattctatattcttggaactaactgtaacaagacaatatggagattactcaagattgatagaatggagccatcagaggtcaatgtacatgaggattctactgtgctctcacagagtgattaccttgatatgctaaaaaatctagacgaacaacacaggtcaactggtggagtcaaatttgtcaccaactgttttggaatcatcggtttcattaagttccttgggccctattacatgttaattattactgagcagagaaagattggggatatatttggtcatatggtgtaccaagtttctaagactgcgatgattgagttatcaaattccactacgagaccaaaattaattaattccaaggacgagaacaggtacaagaagctcttgcagacaattgatcttagaaaagatttcttttttagccactcatatcatataatgagaagtcttcaaaagaactttaatgatccacaagaagggtgggaactatatgacacaatgttcgtctggaatgagttcctaactcgagggattcgtgacattctgaaaactacactctggactgttgcattagtctatggtttttttaagcaggacaaacttgcgatatgtgggaaggatattatgctgactctcattgctagacgctcgaggcattatgctggcaccaggtatctaaagaggggtgtgaatgaggagggcagagtagcaaatgatgttgagactgagcaaattgtttatgaagacatgcttggaccatggcaaataagctctgttgtgcagaacaggggttcgattccactattctggtcccaggagacatcaaagctgaatcttaagcctgatatcatattgcatggaaaggacaaaaattatgaggctaccaggcttcattttgaaaatcttaggaaaagatatggaaatcctatcatcatcttaaacttgattaagacacgtgagaagagaccacgtgaaatcatactccgtcgggaatttgacagagcaataaagattattaatagtggtctaccaggcgaagatcatttgagatatttacattgggatcttcataagaactctcaaagcaaaagtacaaatgcgcttcaagtgcttttgaaggtggcatttgaagctttgaacttgacagaattcttttatcgtcaagtttccccagctcaaagggcagagaattcccctaatttaagccctacactgaaaaatggttttggtcctcatgtgtgtgatgatgacaacaattgtggcaatgcagactatgttgatgatcttgatgacatttcccaagaagatacctgtggcaattatgatcctggcaatggaattgcagaagatagatctgaggtcaatggatctactcaaataaagcctccaaaatttcaaaagggtgtattacgtacaaactgtatagattgtttggatcgcacaaatgttgctcaatatgcctatggcctagctgctctaggataccagttacatgcacttggttctgtagaatctccagaagttcatttagactcccctttgtctcggcatttgatgcatttttatgaacggatgggtgacacacttgctttacagtatggtggttctgctgctcacaataagatattctctgcaaaaagagggcacttgaagttcgccattcaatctcaagagttctttaggactctgcaacggtactacagtaatgcctatatggatgcttacaaacaagcagcgataaacttatttctaggatacttccaaccgcaggtgggaaaacctgcactttgggagccagaatctggtgacgagcatgtacttgatgacgagacaagtaatggcccaaatggagttttaaactcagcacttactggttcaaaaaatgaagggcaacatccaaactggagttctgattcagtgcatgggatgtcttcagcctctgacaattccatgtcaaagtcaaggtatactccgacagtgtctcacattaagcatataagctgtgaactagactattacaatggttctggtgattcaaatttcctggatcttgactggctttcagcttcagacaatgaaaggtcaaaagccataagcactcctgatgtgaatatttcaactgatgatggtgttcatgatgtaatctatgggataacggatgatcaagctgctgagatccaggctcagggattatctaaggattttgtgcagtgggttaatcaaggagagacattttggtactgatattccaagatgggcgtaccatgtaaattcaagccacataatggttgcacttgcaaaaaggggggaaaataagggagaagtctacatgatggcagtccagacctcatttcaaagcatattaactcttaaagaccattgcaaggagggaccatcaatgtgcatgagattgtttgtcaaccatcagcaattcagcattctcttttcggtatacgaatatgatgatgggcttagagtcacacgcactgttagaagacttgtctagggaagtgtaccattctgttcatttattgaagcttgctcaccaggctggtagatagtgcattgttattattttttcttaaaaggaatgaaagaatgtaggtagtttattctttttaagatgtaccattgtccaggcatgatccccatctctccatcgtgtaaatatatatgtcccaagtgttccacttttcccttttccttccatgagagttgaggtgggcatgaaagcaccatttttccctcagtctctttgtatgggttttctgaaatcatgtacatttatattttgtggcaagcggagagattgttgtgtaatttccattgtaccaaacgtccaaacccctcttaccaatagaagtctcttggactgtttgtcacattgcagattgctttaatacttgctttaaactatctgattatgtgtaaaattttcgtgtgattccttagggtccc

SEQ ID NO: 206138 - DNA, 2264 bp, Zea Mays
ccaaccgaacggacgtgacacgcacgcacggacgcacggcacgcggacacggcgcgcgcgcggcgactccgggctggggtctccctcttcccttccctcagatccaactccgtttctccattccctccctagcccagccagggaaccagtctcagtgaatcccgcgcccggatcaatctcgcccaaggaagcagctcttcacgacttgcttccagatccatccatccatccatccatccatccgaggttgggccgtgggggtgtcggtgcggtgggaaatggggaaggggatcagcggcgacgcccgcctcgccgcggcgccttacgaccagtgggtgctgctgagccccgccgggggctcgccgcgcccgcccgcgcgctacaagcatgctgcccaagtggttcaagacaagctgtacgttgtcggagggagtcgcaacggccgttctctatcggacgtccaggtttttgattttaagacatcctcttggtcagcgttaagccctgctagaggctcaaaacatcccaaccatgaaaatgatgccacaggtggatcgttcccagcattagcaggccacagtatggtcaagtggaaaaactatctcctggccgtagctgggagcacaaggtcgtcatcatcattaaataaggtttcagtttggcttattgatgtgcaagccaatagctggtctgctgttgaaacttatggaaaagttccaacagctcgagatggccaatcagtatccatacttggttctcgattactgatgtttggtggagaggataacaagagaaggctactgaatgatcttcatatacttgacttggagacaatgatgtgggaagaagtcaaatcagagaaaggtggtccagctcctaggtatgatcattcggctgctgtttacgctgaccagtatcttctgatctttggtggctcttctcactctacatgcttcaatgatctttacctacttgacttgcaaactctggagtggtctcaacctgatgcccaaggagcacacataactcctagaagtggtcatgctggtgctatgattgatgaaaattggtacattgttggcggtggagataatgcaagtggttccactgatacagttgtaattaatgcttccaagtttgtgtggtcagtggtcactagcgtctcagctagagatcctctagcttgtgagggtctcaccctttgctcaaccacagttgatggcgaaaaagttctaattgcctttggcggttacaatgggaaatacagcaacgagatctttgttttgaaatccaagccaagaaatttagtccaacctcgtcttcttcaatcagcagctgcagccgccgccgccgcttctgtgacagctgcctatgctgtaattactgccacagatgagaaaaccagagatattgttgctacagatgattttgatatcaagagagctcaacctgcaagtaattccaaaaagtttgttgctgaaattgatgtacttaatggagagaatggtaaactagcggctagattggcagaggttcgcgatgaaaactcaaaactaaaggataaattagacatgacaaacttgtcatatggtgaattagcaaaggaacttaaatcagttcaagatcaactagcagcagagggttcaagatgccagaagcttgagtcccaaattgctgctgcacggaagagactggaatctgctggttctttggagaatgaactagaagtattgcatcaacatatatctcaggtggaggaaaccattgcaactactcagagaagaaaatctgggggtgtttggaagtgggtggcgggtagtacagaggtctctgacgatgaatagaaacgtaagcggaggatctgctacagttttgaggcagcttgtctgttgccagttgccgggtgcttcctcaaggtcttgctcatggttgatctcgaaaatatgtctcccgaaataatcttgtttatcttcttcggtggtggcacctggtagaaaattttcctgggcagtcttagacattaattcaacagtaaaagcataacatcatgcaagtataccaaatactgagagcgtatcgcattggattattagcagcgctttgtttttgtcgtctggtacctattttttggctggcggttattacaagagcggtctcatattataaattattatatagggcgttcattggttgtgacgctgggaattgaggaaatatacattgcttataccgtaaatttagaaacatttatctggtaacatata

SEQ ID NO: 206139 - DNA, 2427 bp, Zea Mays
ctcctcagctccatccaccatcctcctgcaacctcggaggagacagccaggccagcgcggccgccggccgggcgtgtggcgtgggcgcgtgggcgtatcaccgtgtacgtgatccgagagaaccgtgagcagggtggagcgtgcgttacggcgacggagggaggcaagattccacgattctcgccgtagatcacccaccaggccggccaccgccaccgatcggcagcccccgcactacatccagattccagatcacacacacaccgccactcgcgctcgcgctccgacaagtacgtctataaatacctccgcaccctgctcgtgcgctcccctgagccacaggtacacctccatttggtggcctgcaatgcaaaacccctgcctcgtggtgctcatccctcctccgcctccctctatctcgctgctcgatcttgccacctgcaggggaatcggacgaaatcggtgcctgaacttgcgtcttgtcagtctgaccacgcgcatgggctgttcttgatctcaacccggcgcgcgttgtcactcgccacttctcttcagttgagtgtccatggagctgggagctccacacgcaccgtcgtcctgcatttgttcctcgcatcctttcctcgttctgtgacggcccggtcggatcatccaagaccgaccgacccacacacacacacacaacaaagaaccctcgcgcctcccccggtcggccgaccggtggttagatgcaacgggagatggtgcatgggcacggcgacggcaaccaccaccaacaccagcagctgccgaggtacagcgccgccgcggccgccaccggcgtggcgcgggcgtcgaagaagagcaagcccaagaagatcccgcagcgcggcctcggcgtggcgcagctcgagaagctccggatcgaggagcagaagatggagggatccatgccggtgtcggggcccacgcacctcggcgtcggcgtcggcgggttcggccacctactcccgatgcaccctccgccacacgcgccgctcccgcttctgccgaggcccggcgcggacggcggcgtgcactgcggctacccttcggtgctctgggacccagcgtcggcgtcggcggtggcggaccccatgaagcacccgttctacaagaggagcctgtgcccgctccctccgcttccaacggtgagcgtgggcctgtcgctgacggcggcgtcgtcgagccacccaacggagcccccttcaaaccaaatgtacagcagcggcggcggcggcgcggagactgcggcggcggaggacgacgaggacagggaggcggccggcgtggacagaccctggcccttggtgttcgagggcttgaacacgaccgccttccggacgacggcggcggggaaggcccctctcgcagtcgccgccaggacaacgagagaggccgccgccgccgccgctggcttgccagacgcctgtgccgccgccgacctgagcagatacgagttcagcagagccaccacgaactattacagcttgaacgcgagttttccagactggtcatcgccggagttggggcactgcaagagcagcaaggagaaggagcctgcccctgcctacctcaccttgagcgcgcagcctgcgccacgcgggaagcagcctcctcctgcgctcccctcgatcaaactcccggagttgggtcactggggcgtcatgcagcctcctcaggcaacacgggagcgcttcggcgtcgtcgtccgcgtcggcgtcgcggccgttctacagcttcatgccggctggtccggttcgcatcgacagaccccggatcgggatcaaggccgacgacgcctctgacggcgtcgacctggaactgaagctgtgaaggcgctcatcgctggacccctctgttcctagctggtaaatttgacgccgaacctgaagcgggaactgggaacagagctcgtcgtcgtcgagaagaaaagtttctggcgccgtgttctcggtttgtaacctgaaacacgatgtatcggtatttgcgttcttttttttttctcctcaacattttcccgctcccaataaacatctggtgcgcatggagatggagtgtgtgcagcgtcgagcaggtcttcagtgaggaaaggagagcacgtgcacgatcggggttgcaagcttgcagctggcctctgtggggggtcttttctgtacagatctagcaaggcagcgtcgtggcacacccagatacgcaccagacagtcaggtagatgtctgccaagatatgcaaatatggttgtagatgttctggttttcctttggatcatttgtgtttgtggatgtagtgctacgtgcaatggaatcaccacatttcccattctatttgacactttaattacatcgaaactctatcactcatggatgtttgaatgcactagagtcaatgattagttggctaaaaaaa

SEQ ID NO: 206140 - DNA, 2397 bp, Zea Mays
cacccaccaggccggccaccgccaccgatcggcagcccccgcactacatccagattccagatcacacacacaccgccactcgcgctcgcgctccgacaagtacgtctataaatacctccgcaccctgctcgtgcgctcccctgagccacaggtacacctccatttggtggcctgcaatgcaaaacccctgcctcgtggtgctcatccctcctccgcctccctctatctcgctgctcgatcttgccacctgcaggggaatcggacgaaatcggtgcctgaacttgcgtcttgtcagtctgaccacgcgcatgggctgttcttgatctcaacccggcgcgcgttgtcactcgccacttctcttcagttgagtgtccatggagctgggagctccacacgcaccgtcgtcctgcatttgttcctcgcatcctttcctcgttctgtgacggcccggtcggatcatccaagaccgaccgacccacacacacacacacaacaaagaaccctcgcgcctcccccggtcggccgaccggtggttagatgcaacgggagatggtgcatgggcacggcgacggcaaccaccaccaacaccagcagctgccgaggtacagcgccgccgcggccgccaccggcgtggcgcgggcgtcgaagaagagcaagcccaagaagatcccgcagcgcggcctcggcgtggcgcagctcgagaagctccggatcgaggagcagaagatggagggatccatgccggtgtcggggcccacgcacctcggcgtcggcgtcggcgggttcggccacctactcccgatgcaccctccgccacacgcgccgctcccgcttctgccgaggcccggcgcggacggcggcgtgcactgcggctacccttcggtgctctgggacccagcgtcggcgtcggcggtggcggaccccatgaagcacccgttctacaagaggagcctgtgcccgctccctccgcttccaacgtggcatgggcaggtgagcgtgggcctgtcgctgacggcggcgtcgtcgagccacccaacggagcccccttcaaaccaaatgtacagcagcggcggcggcggcgcggagactgcggcggcggaggacgacgaggacagggtacacgctgtcgttgaggtttcacaactctgtacttctttattactgcgtctgccggtctgcgtgcagtgaaaatattctcgcgcttgggggtcactcgctgctaagtgtgggttggccagagtgtaggaggcggccggcgtggacagaccctggcccttggtgttcgagggcttgaacacgaccgccttccggacgacggcggcggggaaggcccctctcgcagtcgccgccaggacaacgagagaggccgccgccgccgccgctggcttgccagacgcctgtgccgccgccgacctgagcagatacgagttcagcagagccaccacgaactattacaggactagcccggcctccgcctgcagcttgaacgcgagttttccagactggtcatcgccggagttggggcactgcaagagcagcaaggagaaggagcctgcccctgcctacctcaccttgagcgcgcagcctgcgccacgcgggaagcagcctcctcctgcgctcccctcgatcaaactcccggagttgggtcactggggcgtcatgcagcctcctcagcacgggagcgcttcggcgtcgtcgtccgcgtcggcgtcgcggccgttctacagcttcatgccggctggtccggttcgcatcgacagaccccggatcgggatcaaggccgacgacgcctctgacggcgtcgacctggaactgaagctgtgaaggcgctcatcgctggacccctctgttcctagctggtaaatttgacgccgaacctgaagcgggaactgggaacagagctcgtcgtcgtcgagaagaaaagtttctggcgccgtgttctcggtttgtaacctgaaacacgatgtatcggtatttgcgttcttttttttttctcctcaacattttcccgctcccaataaacatctggtgcgcatggagatggagtgtgtgcagcgtcgagcaggtcttcagtgaggaaaggagagcacgtgcacgatcggggttgcaagcttgcagctggcctctgtggggggtcttttctgtacagatctagcaaggcagcgtcgtggcacacccagatacgcaccagacagtcaggtagatgtctgccaagatatgcaaatatggttgtagatgttctggttttcctttggatcatttgtgtttgtggatgtagtgctacgtgcaatggaatcaccacatttcccattctatttgacactttaattacatcgaaactctatcactcatggatgtttgaatgcactagagtcaatgattagttggctaaaaaaa

SEQ ID NO: 206141 - DNA, 2361 bp, Zea Mays
ccgatcggcagcccccgcactacatccagattccagatcacacacacaccgccactcgcgctcgcgctccgacaagtacgtctataaatacctccgcaccctgctcgtgcgctcccctgagccacaggtacacctccatttggtggcctgcaatgcaaaacccctgcctcgtggtgctcatccctcctccgcctccctctatctcgctgctcgatcttgccacctgcaggggaatcggacgaaatcggtgcctgaacttgcgtcttgtcagtctgaccacgcgcatgggctgttcttgatctcaacccggcgcgcgttgtcactcgccacttctcttcagttgagtgtccatggagctgggagctccacacgcaccgtcgtcctgcatttgttcctcgcatcctttcctcgttctgtgacggcccggtcggatcatccaagaccgaccgacccacacacacacacacaacaaagaaccctcgcgcctcccccggtcggccgaccggtggttagatgcaacgggagatggtgcatgggcacggcgacggcaaccaccaccaacaccagcagctgccgaggtacagcgccgccgcggccgccaccggcgtggcgcgggcgtcgaagaagagcaagcccaagaagatcccgcagcgcggcctcggcgtggcgcagctcgagaagctccggatcgaggagcagaagatggagggatccatgccggtgtcggggcccacgcacctcggcgtcggcgtcggcgggttcggccacctactcccgatgcaccctccgccacacgcgccgctcccgcttctgccgaggcccggcgcggacggcggcgtgcactgcggctacccttcggtgctctgggacccagcgtcggcgtcggcggtggcggaccccatgaagcacccgttctacaagaggagcctgtgcccgctccctccgcttccaacggtgagcgtgggcctgtcgctgacggcggcgtcgtcgagccacccaacggagcccccttcaaaccaaatgtacagcagcggcggcggcggcgcggagactgcggcggcggaggacgacgaggacagggtacacgctgtcgttgaggtttcacaactctgtacttctttattactgcgtctgccggtctgcgtgcagtgaaaatattctcgcgcttgggggtcactcgctgctaagtgtgggttggccagagtgtaggaggcggccggcgtggacagaccctggcccttggtgttcgagggcttgaacacgaccgccttccggacgacggcggcggggaaggcccctctcgcagtcgccgccaggacaacgagagaggccgccgccgccgccgctggcttgccagacgcctgtgccgccgccgacctgagcagatacgagttcagcagagccaccacgaactattacaggactagcccggcctccgcctgcagcttgaacgcgagttttccagactggtcatcgccggagttggggcactgcaagagcagcaaggagaaggagcctgcccctgcctacctcaccttgagcgcgcagcctgcgccacgcgggaagcagcctcctcctgcgctcccctcgatcaaactcccggagttgggtcactggggcgtcatgcagcctcctcagcacgggagcgcttcggcgtcgtcgtccgcgtcggcgtcgcggccgttctacagcttcatgccggctggtccggttcgcatcgacagaccccggatcgggatcaaggccgacgacgcctctgacggcgtcgacctggaactgaagctgtgaaggcgctcatcgctggacccctctgttcctagctggtaaatttgacgccgaacctgaagcgggaactgggaacagagctcgtcgtcgtcgagaagaaaagtttctggcgccgtgttctcggtttgtaacctgaaacacgatgtatcggtatttgcgttcttttttttttctcctcaacattttcccgctcccaataaacatctggtgcgcatggagatggagtgtgtgcagcgtcgagcaggtcttcagtgaggaaaggagagcacgtgcacgatcggggttgcaagcttgcagctggcctctgtggggggtcttttctgtacagatctagcaaggcagcgtcgtggcacacccagatacgcaccagacagtcaggtagatgtctgccaagatatgcaaatatggttgtagatgttctggttttcctttggatcatttgtgtttgtggatgtagtgctacgtgcaatggaatcaccacatttcccattctatttgacactttaattacatcgaaactctatcactcatggatgtttgaatgcactagagtcaatgattagttggctaaaaaaa

SEQ ID NO: 206142 - DNA, 2233 bp, Zea Mays
ccgatcggcagcccccgcactacatccagattccagatcacacacacaccgccactcgcgctcgcgctccgacaagtacgtctataaatacctccgcaccctgctcgtgcgctcccctgagccacaggtacacctccatttggtggcctgcaatgcaaaacccctgcctcgtggtgctcatccctcctccgcctccctctatctcgctgctcgatcttgccacctgcaggggaatcggacgaaatcggtgcctgaacttgcgtcttgtcagtctgaccacgcgcatgggctgttcttgatctcaacccggcgcgcgttgtcactcgccacttctcttcagttgagtgtccatggagctgggagctccacacgcaccgtcgtcctgcatttgttcctcgcatcctttcctcgttctgtgacggcccggtcggatcatccaagaccgaccgacccacacacacacacacaacaaagaaccctcgcgcctcccccggtcggccgaccggtggttagatgcaacgggagatggtgcatgggcacggcgacggcaaccaccaccaacaccagcagctgccgaggtacagcgccgccgcggccgccaccggcgtggcgcgggcgtcgaagaagagcaagcccaagaagatcccgcagcgcggcctcggcgtggcgcagctcgagaagctccggatcgaggagcagaagatggagggatccatgccggtgtcggggcccacgcacctcggcgtcggcgtcggcgggttcggccacctactcccgatgcaccctccgccacacgcgccgctcccgcttctgccgaggcccggcgcggacggcggcgtgcactgcggctacccttcggtgctctgggacccagcgtcggcgtcggcggtggcggaccccatgaagcacccgttctacaagaggagcctgtgcccgctccctccgcttccaacggtgagcgtgggcctgtcgctgacggcggcgtcgtcgagccacccaacggagcccccttcaaaccaaatgtacagcagcggcggcggcggcgcggagactgcggcggcggaggacgacgaggacagggtacacgctgtcgttgagagtgtaggaggcggccggcgtggacagaccctggcccttggtgttcgagggcttgaacacgaccgccttccggacgacggcggcggggaaggcccctctcgcagtcgccgccaggacaacgagagaggccgccgccgccgccgctggcttgccagacgcctgtgccgccgccgacctgagcagatacgagttcagcagagccaccacgaactattacagcttgaacgcgagttttccagactggtcatcgccggagttggggcactgcaagagcagcaaggagaaggagcctgcccctgcctacctcaccttgagcgcgcagcctgcgccacgcgggaagcagcctcctcctgcgctcccctcgatcaaactcccggagttgggtcactggggcgtcatgcagcctcctcagcacgggagcgcttcggcgtcgtcgtccgcgtcggcgtcgcggccgttctacagcttcatgccggctggtccggttcgcatcgacagaccccggatcgggatcaaggccgacgacgcctctgacggcgtcgacctggaactgaagctgtgaaggcgctcatcgctggacccctctgttcctagctggtaaatttgacgccgaacctgaagcgggaactgggaacagagctcgtcgtcgtcgagaagaaaagtttctggcgccgtgttctcggtttgtaacctgaaacacgatgtatcggtatttgcgttcttttttttttctcctcaacattttcccgctcccaataaacatctggtgcgcatggagatggagtgtgtgcagcgtcgagcaggtcttcagtgaggaaaggagagcacgtgcacgatcggggttgcaagcttgcagctggcctctgtggggggtcttttctgtacagatctagcaaggcagcgtcgtggcacacccagatacgcaccagacagtcaggtagatgtctgccaagatatgcaaatatggttgtagatgttctggttttcctttggatcatttgtgtttgtggatgtagtgctacgtgcaatggaatcaccacatttcccattctatttgacactttaattacatcgaaactctatcactcatggatgtttgaatgcactagagtcaatgattagttggctaaaaaaa

SEQ ID NO: 206143 - DNA, 2206 bp, Zea Mays
ccgcactacatccagattccagatcacacacacaccgccactcgcgctcgcgctccgacaagtacgtctataaatacctccgcaccctgctcgtgcgctcccctgagccacaggtacacctccatttggtggcctgcaatgcaaaacccctgcctcgtggtgctcatccctcctccgcctccctctatctcgctgctcgatcttgccacctgcaggggaatcggacgaaatcggtgcctgaacttgcgtcttgtcagtctgaccacgcgcatgggctgttcttgatctcaacccggcgcgcgttgtcactcgccacttctcttcagttgagtgtccatggagctgggagctccacacgcaccgtcgtcctgcatttgttcctcgcatcctttcctcgttctgtgacggcccggtcggatcatccaagaccgaccgacccacacacacacacacaacaaagaaccctcgcgcctcccccggtcggccgaccggtggttagatgcaacgggagatggtgcatgggcacggcgacggcaaccaccaccaacaccagcagctgccgaggtacagcgccgccgcggccgccaccggcgtggcgcgggcgtcgaagaagagcaagcccaagaagatcccgcagcgcggcctcggcgtggcgcagctcgagaagctccggatcgaggagcagaagatggagggatccatgccggtgtcggggcccacgcacctcggcgtcggcgtcggcgggttcggccacctactcccgatgcaccctccgccacacgcgccgctcccgcttctgccgaggcccggcgcggacggcggcgtgcactgcggctacccttcggtgctctgggacccagcgtcggcgtcggcggtggcggaccccatgaagcacccgttctacaagaggagcctgtgcccgctccctccgcttccaacgtggcatgggcaggtgagcgtgggcctgtcgctgacggcggcgtcgtcgagccacccaacggagcccccttcaaaccaaatgtacagcagcggcggcggcggcgcggagactgcggcggcggaggacgacgaggacagggaggcggccggcgtggacagaccctggcccttggtgttcgagggcttgaacacgaccgccttccggacgacggcggcggggaaggcccctctcgcagtcgccgccaggacaacgagagaggccgccgccgccgccgctggcttgccagacgcctgtgccgccgccgacctgagcagatacgagttcagcagagccaccacgaactattacagcttgaacgcgagttttccagactggtcatcgccggagttggggcactgcaagagcagcaaggagaaggagcctgcccctgcctacctcaccttgagcgcgcagcctgcgccacgcgggaagcagcctcctcctgcgctcccctcgatcaaactcccggagttgggtcactggggcgtcatgcagcctcctcagcacgggagcgcttcggcgtcgtcgtccgcgtcggcgtcgcggccgttctacagcttcatgccggctggtccggttcgcatcgacagaccccggatcgggatcaaggccgacgacgcctctgacggcgtcgacctggaactgaagctgtgaaggcgctcatcgctggacccctctgttcctagctggtaaatttgacgccgaacctgaagcgggaactgggaacagagctcgtcgtcgtcgagaagaaaagtttctggcgccgtgttctcggtttgtaacctgaaacacgatgtatcggtatttgcgttcttttttttttctcctcaacattttcccgctcccaataaacatctggtgcgcatggagatggagtgtgtgcagcgtcgagcaggtcttcagtgaggaaaggagagcacgtgcacgatcggggttgcaagcttgcagctggcctctgtggggggtcttttctgtacagatctagcaaggcagcgtcgtggcacacccagatacgcaccagacagtcaggtagatgtctgccaagatatgcaaatatggttgtagatgttctggttttcctttggatcatttgtgtttgtggatgtagtgctacgtgcaatggaatcaccacatttcccattctatttgacactttaattacatcgaaactctatcactcatggatgtttgaatgcactagagtcaatgattagttggctaaaaaaa

SEQ ID NO: 206144 - DNA, 2154 bp, Zea Mays
caagtacgtctataaatacctccgcaccctgctcgtgcgctcccctgagccacaggtacacctccatttggtggcctgcaatgcaaaacccctgcctcgtggtgctcatccctcctccgcctccctctatctcgctgctcgatcttgccacctgcaggggaatcggacgaaatcggtgcctgaacttgcgtcttgtcagtctgaccacgcgcatgggctgttcttgatctcaacccggcgcgcgttgtcactcgccacttctcttcagttgagtgtccatggagctgggagctccacacgcaccgtcgtcctgcatttgttcctcgcatcctttcctcgttctgtgacggcccggtcggatcatccaagaccgaccgacccacacacacacacacaacaaagaaccctcgcgcctcccccggtcggccgaccggtggttagatgcaacgggagatggtgcatgggcacggcgacggcaaccaccaccaacaccagcagctgccgaggtacagcgccgccgcggccgccaccggcgtggcgcgggcgtcgaagaagagcaagcccaagaagatcccgcagcgcggcctcggcgtggcgcagctcgagaagctccggatcgaggagcagaagatggagggatccatgccggtgtcggggcccacgcacctcggcgtcggcgtcggcgggttcggccacctactcccgatgcaccctccgccacacgcgccgctcccgcttctgccgaggcccggcgcggacggcggcgtgcactgcggctacccttcggtgctctgggacccagcgtcggcgtcggcggtggcggaccccatgaagcacccgttctacaagaggagcctgtgcccgctccctccgcttccaacggtgagcgtgggcctgtcgctgacggcggcgtcgtcgagccacccaacggagcccccttcaaaccaaatgtacagcagcggcggcggcggcgcggagactgcggcggcggaggacgacgaggacagggaggcggccggcgtggacagaccctggcccttggtgttcgagggcttgaacacgaccgccttccggacgacggcggcggggaaggcccctctcgcagtcgccgccaggacaacgagagaggccgccgccgccgccgctggcttgccagacgcctgtgccgccgccgacctgagcagatacgagttcagcagagccaccacgaactattacagcccggcctccgcctgcagcttgaacgcgagttttccagactggtcatcgccggagttggggcactgcaagagcagcaaggagaaggagcctgcccctgcctacctcaccttgagcgcgcagcctgcgccacgcgggaagcagcctcctcctgcgctcccctcgatcaaactcccggagttgggtcactggggcgtcatgcagcctcctcagcacgggagcgcttcggcgtcgtcgtccgcgtcggcgtcgcggccgttctacagcttcatgccggctggtccggttcgcatcgacagaccccggatcgggatcaaggccgacgacgcctctgacggcgtcgacctggaactgaagctgtgaaggcgctcatcgctggacccctctgttcctagctggtaaatttgacgccgaacctgaagcgggaactgggaacagagctcgtcgtcgtcgagaagaaaagtttctggcgccgtgttctcggtttgtaacctgaaacacgatgtatcggtatttgcgttcttttttttttctcctcaacattttcccgctcccaataaacatctggtgcgcatggagatggagtgtgtgcagcgtcgagcaggtcttcagtgaggaaaggagagcacgtgcacgatcggggttgcaagcttgcagctggcctctgtggggggtcttttctgtacagatctagcaaggcagcgtcgtggcacacccagatacgcaccagacagtcaggtagatgtctgccaagatatgcaaatatggttgtagatgttctggttttcctttggatcatttgtgtttgtggatgtagtgctacgtgcaatggaatcaccacatttcccattctatttgacactttaattacatcgaaactctatcactcatggatgtttgaatgcactagagtcaatgattagttggctaaaaaaa

SEQ ID NO: 206145 - DNA, 2091 bp, Zea Mays
cctgagccacaggtacacctccatttggtggcctgcaatgcaaaacccctgcctcgtggtgctcatccctcctccgcctccctctatctcgctgctcgatcttgccacctgcaggggaatcggacgaaatcggtgcctgaacttgcgtcttgtcagtctgaccacgcgcatgggctgttcttgatctcaacccggcgcgcgttgtcactcgccacttctcttcagttgagtgtccatggagctgggagctccacacgcaccgtcgtcctgcatttgttcctcgcatcctttcctcgttctgtgacggcccggtcggatcatccaagaccgaccgacccacacacacacacacaacaaagaaccctcgcgcctcccccggtcggccgaccggtggttagatgcaacgggagatggtgcatgggcacggcgacggcaaccaccaccaacaccagcagctgccgaggtacagcgccgccgcggccgccaccggcgtggcgcgggcgtcgaagaagagcaagcccaagaagatcccgcagcgcggcctcggcgtggcgcagctcgagaagctccggatcgaggagcagaagatggagggatccatgccggtgtcggggcccacgcacctcggcgtcggcgtcggcgggttcggccacctactcccgatgcaccctccgccacacgcgccgctcccgcttctgccgaggcccggcgcggacggcggcgtgcactgcggctacccttcggtgctctgggacccagcgtcggcgtcggcggtggcggaccccatgaagcacccgttctacaagaggagcctgtgcccgctccctccgcttccaacggtgagcgtgggcctgtcgctgacggcggcgtcgtcgagccacccaacggagcccccttcaaaccaaatgtacagcagcggcggcggcggcgcggagactgcggcggcggaggacgacgaggacagggtacacgctgtcgttgaggaggcggccggcgtggacagaccctggcccttggtgttcgagggcttgaacacgaccgccttccggacgacggcggcggggaaggcccctctcgcagtcgccgccaggacaacgagagaggccgccgccgccgccgctggcttgccagacgcctgtgccgccgccgacctgagcagatacgagttcagcagagccaccacgaactattacagactggtcatcgccggagttggggcactgcaagagcagcaaggagaaggagcctgcccctgcctacctcaccttgagcgcgcagcctgcgccacgcgggaagcagcctcctcctgcgctcccctcgatcaaactcccggagttgggtcactggggcgtcatgcagcctcctcagcacgggagcgcttcggcgtcgtcgtccgcgtcggcgtcgcggccgttctacagcttcatgccggctggtccggttcgcatcgacagaccccggatcgggatcaaggccgacgacgcctctgacggcgtcgacctggaactgaagctgtgaaggcgctcatcgctggacccctctgttcctagctggtaaatttgacgccgaacctgaagcgggaactgggaacagagctcgtcgtcgtcgagaagaaaagtttctggcgccgtgttctcggtttgtaacctgaaacacgatgtatcggtatttgcgttcttttttttttctcctcaacattttcccgctcccaataaacatctggtgcgcatggagatggagtgtgtgcagcgtcgagcaggtcttcagtgaggaaaggagagcacgtgcacgatcggggttgcaagcttgcagctggcctctgtggggggtcttttctgtacagatctagcaaggcagcgtcgtggcacacccagatacgcaccagacagtcaggtagatgtctgccaagatatgcaaatatggttgtagatgttctggttttcctttggatcatttgtgtttgtggatgtagtgctacgtgcaatggaatcaccacatttcccattctatttgacactttaattacatcgaaactctatcactcatggatgtttgaatgcactagagtcaatgattagttggctaaaaaaa

SEQ ID NO: 206146 - DNA, 652 bp, Zea Mays
caaaaactccaatggttcaatttcttatgtcacgtccagattgggaattccatcacgcctcgtcctctccgtcccgaccagaatcatcgcttcttcctgctccggcgatatccgccgccgcctgcggtccggccgagatggggagcacttcctctatgctcacccaatacgatatcgaggaggtccaggaccattgtaaccacgcattctcgcagcaggagatcgtatcgctgtaccaccgcttctgccagctcgaccgtaacggtggtggcttcgtctccgctgacgagttcatgtcggtccctgagttcgccgtaaatcccctctcccagaggctcctgaggatgctggatgggctcaacttcaaggagtttgtagcatttttgtcagcttttagcccccgcacaagcctgcagcaaaagattgaatttattttcagggtttatgatactgactgcaacgggaaggttgcttttgatgacatcttgagcatcttgcgagatctgacaggttcatttatgacagagcaacagagacagaaagtcttgattcatgtgttagaagaagctggatacacaaaagattcacattttacactcccagactttatgaagctggaaggaagcgccattttttcccttgaccaacttgg

SEQ ID NO: 206147 - DNA, 2050 bp, Zea Mays
attccactcggtgctttgcccgaggcccggagaagccttatcgcctcctccttgcacgccgaccgatcgccacaatcccccaccgctcgcctgcctggtgcccgccatgccggagatcaagtgcggcgcggccgagaaggtgaagccggcggcgagcccggaggcggagaagcccgcggacatcgctggcaacatctcctaccacgcgcagtacagcccccacttctcaccgttcgcgttcgggccggagcaggccttctacgccaccgccgagagcgtccgcgaccacctcatccagagatggaacgagacgtacttgcatttccacaagacggatccgaagcagacgtactacctgtccatggagtacctgcagggccgcgcgctcaccaacgccgtcggcaacctcggcatcaccggggcatatgcggaggccgtgaagaagttcggctacgagctcgaggccctcgcggggcaggaaaaagatgcagctctagggaatggcggcttgggtaggcttgcatcttgctttttggattcaatggcaacattgaatttgcctgcttggggctatggcctgcgttaccgatatggactgttcaaacaacacattgccaaggagggccaggaagaagttgcagaagattggcttgataaattcagcccttgggagattcccaggcatgatgtggtgttccctgtcagattttttggccatgttgagattttgcctgatggctctcggaaattggtcggaggagaagtcctgaaggctttagcatatgatgtgccaatccctggatacaagacaaaaaatgcaatcagtcttcgtctttgggaagcaaaagctactgctgaagatttcaacttatttcaattcaatgatggtcaatatgagtcagctgcccaacttcatgctagggctcaacagatatgtgccgttctttatcccggtgatgctacagaagaaggaaagcttctaaggctgaagcagcagtttttcctttgcagcgcatcacttcagggaatgagtgcagaagagaagcagaaggtcacaccgcgcactgtcatgataggagggaaagcgtttgcaacatacactaatgccaaaagaatagtgaaattggtgaatgatgttggtgctgttgtgaacaatgatcccgaagttaacaaatatctgaaggttgtctttatcccaaattacaatgtatcagtggctgaagtgcttattcctggtagcgaattgtcacagcatattagtactgctggtatggaagcaagtggaacaagcaacatgaaattctctctgaatggttgtgttatcattggcacccttgatggagctaatgttgaaataagagaggaggttggagaagataatttcttccttttcggtgccaaagccgatgaagttgctgggctgaggaaggatagagaaaatggtctgttcaaaccagacccacgttttgaagaagccaagcagtttataaggagtggcgcttttggcagctatgactatgaacctctcttggattcccttgaagggaattctggatttgggcgtggtgattatttccttgttggctatgacttcccaagctacatcgatgcacaggatcgggtggatgcagcctacaaggataagaagaagtggaccaagatgtccatcttgaacacagctgggagtggcaaattcagtagcgatcgcaccatcgcccagtatgccaaggagatatgggacatcaaggctagccctgtcgtgtgaacgagggggttgcgattcaacaccaaacgtagtttcttggggtgctataatagtaaggaagaataatgacccacggtgcttgacgcccacttgcgttgtaggcatggaacgggggcacctagcttgttctacagcgctgtctattttgaattggtgcgactttgttgctcttttttcctcccccttatatcttatgaaacaagatccttttgatctgtgctctgaaataaaataattcagttatgatattcgtcgccataatgtgcttgagaaatggatgtccct

SEQ ID NO: 206148 - DNA, 871 bp, Zea Mays
gtaagtggatgatcagaacctgtgttccgcaaggagctatgggttggcaaggacccccacagagcccctcttcttatattgtcaagaagattttgcggttggaagtaccgacagaagcataccctaatttcaattttatcggccgtcttcttggaccaaggggaaactctttaaagaggattgaagcctccacaggctgtcgtgttttcatcagagggaaaggctcaattaaagattctggcaaggaggaacaactcaagggaagacctggctatgaacacttgagtgaacccctccatatcttgattgaagctgagttacctgctaatgtgattgatgcaagacttgcaaaggcacaagagatccttgaagagctgttgaaaccagtggacgaatcacaagactactacaagagacagcaactgcgagaacttgcaatgctaaattcgccactccgagaggagagtccacatccaggtggtgctcctcctagtcccttcagtaacggcggcatgaaaagagtgaaacaatgacaccgccgaggctcgttcctccatcttgactccccagcaaccccaatgcagtccataccttcacaccctatttttcaatgagcaagctttcatgacggtgttggtagtgtgtgacattcttcactgtactagcaggtgaattttgatctcccatcccatgttacattaaccttgagtgacagatgactatgcgtagtgtatcctctatggcagtataactagaacatttgatttatttgttactggtaatgctgagatatagtactgtgcagattctgagttacggtgaactagtgtgccggtatttatctcaattttgtttgcttttcaattttaac

SEQ ID NO: 206149 - DNA, 1994 bp, Zea Mays
agttagttcatcggttctttgtaggttcgcgcgctcacgagtcacgtctagggtttggcggccaagggtcgtgacactacctttctgcctgcttgaagtggagtcgttgattggccttcatctagctcccgccagcgccctacgcgggaaatcgcagccgacaggcaaacgcctcgggaatcagctgtgccccgcgcctcgtgggccaccaggagctgttgctgcccccggtgtctccgccctcaacttccaaaccctaggggcggtagaggctccaaactcgggcgctttggccgtgaccgtccgagttgactagtgccttttcttttcttcctggactgaatggagcaaggggagaaccaatcagctgatagttttgttgtttcatcatcggataataatgagctggaagatttacctgtgaaggaaagatgctttgagcagagagaagctcttcctggggagcctcgctgtgttgtgtgtggccgatatggtgaatatatatgtgatcagactgatgatgacatctgcagtgtggaatgtaagacaatccttctttctcggatagttgctaaaacaaagccagcagtaaaagcagcaaagcgtgtgaaccttcctttaggcgatgagagcttttgtattaaggacatcaattttccaaatatacttactttagctgacagccggatcagttcactgaggagtaaacttgacatttgtgtcaagggtgatgctgttcctgatccaatcatgtgtttctctgcctgtggtcttcctgagaagcttgtgcacaatctcgagactgcgggatattgcatgcctactccagtgcagatgcaagtcatccctgcatcaatgagtaatagaagtttacttgtttctgctgatactggttcagggaaaactgcatcttttctaattcccataattgctcattgttcacgattaagatcacaagaatgcacaggcaatcaaggaccgttggctatagttcttgctccaacaagagagctatgcctgcaggtagaagagcaagcaaaggtgcttggtaaaggtttgcctttcaaaactgctctaattgtcggcggagatccattgcctcaacaaatttacagaattgaaaatggtgttgagttaattgttggcacccctgggaggctaattgatcttctcatgaaacacaatgttgaccttacctatgtttctgtattcgttttggatgaggtggactgcctgctggagaggggattcagggatcaggccatgcagatttttcagtcactttcacacccacaggttatgatgttttcagcaacaatacattcagaagttgagaagatgtctaactcactggctaataatgtgataagtatctcttgtgggaacccaaacagaccaaacaaattagttaaacaagtagtcatttgggtggagtctaagaagaagaagcagaagatttttgagataatgaaaagcaagcaacattttaaacctcctgctgttgtgtttgtgagttccagggttggagctgatctgttgtctgaagcaattactgttgctactggattagaggttgtttctatccatggtgagaaaacgatgattgagagaagagagaatttgcgaaggtttttaacaggagaagtatctgtcgttgtttctactggcgtcctggggcgtggaatggatcttctgaaagtacgtcaagtgatattgtttgatttaccaaattccattgatgaatatattcaccaagttggaagggcatcccggatgggtgaggagggtatggctgttgtgtttgtgaatgaggaggatagaaggattttcaaagagcttgttcaggttctgaagactgcaggagcaccgataccccgtgaaattgcaaattcaagatacacagctggtgtttatgttggtagcgagaggaagagaaagttgagctctaggggtttgcactgtcatgtttgcatgccagctaagatacaagttgt

SEQ ID NO: 206150 - DNA, 1125 bp, Zea Mays
agcagtcagcagagcagagaacgcaggcagaggcagagcggcagcccgcagagcaggcaccataccagtcaaccaccgcttcgttctcctcccacaccgctcgccttcgccttcccatcttctatcatccccgagctccagttctccacacctcacgtctataaataataaataaggcgcccgcggtgcccatcaattcgtgtcaccgcgtcccgagagcgcaaatcattccgcgcgacgcaaaaaccctagcccagccaccgacccctctcatggcaaccaccaccacccaggcgagcctcctcctccagaagcagctaagagatctcgcgaagcacccggtggatgggttctctgctgggctggtcgacgacagcaatgtcttcgagtggcaggtcaccatcatcggaccgcctgacaccctatatgatggagggtacttcaatgcaataatgagcttcccacaaaattacccaaacagcccgccatcagtcagatttacctctgaaatgtggcatccaaatgtctatcctgatgggcgggtttgtatctctattcttcatccacctggtgaagatccaaacggttatgagctcgcaagtgagcgatggacacctgtgcacacagtagaaagcatagttctgagcattatatcaatgctctctagtccaaatgatgagtctccagcaaacattgaggcagctaaggaatggagggaacagagggaggatttcaagaaaaaggttaggcgcatcgtgcggaaatcacaggaaatgttctgaaggaaatgggagtcctggcgaagttaaccatgccatctcaggctgcaggattttgctgccaacctcaaaaaatgcattgggacgtggtcggcttgaaggttctgtttgtgtcgtgtggcttgcgctctactaatgtttggcaaacctgaagtggtaccggttatcgtaaatttggtggtgaacctggcataagcaggcaccattcatgtcatctagccgttttgaaaacatatcaggccttgttcgtttcttatcaaaatcaattggttggaggaaattaaggctttatttagatactctcatattcaactcaatcttctatgtgtattgaggtacattaggg

SEQ ID NO: 206151 - DNA, 531 bp, Zea Mays
ccttctattgttaaaatcaggaacaagtgccagccctgaaaggaatggagggaacagagggaggatttcaagaaaaaggttaggcgcatcgtgcggaaatcacaggaaatgttctgaaggaaatgggagtcctggcgaagttaaccatgccatctcaggctgcaggattttgctgccaacctcaaagtgctcatctgacaccagcgtcttgtgtattttccatttatcgtctgttcattggtgacaattgcctccagaaatgcattgggacgtggtcggcttgaaggttctgtttgtgtcgtgtggcttgcgctctactaatgtttggcaaacctgaagtggtaccggttatcgtaaatttggtggtgaacctggcataagcaggcaccattcatgtcatctagccgttttgaaaacatatcaggccttgttcgtttcttatcaaaatcaattggttggaggaaattaaggctttatttagatactctcatattcaactcaatcttctatgtgtattgaggtacattaggg

SEQ ID NO: 206152 - DNA, 1271 bp, Zea Mays
cgggaattctcgtctcgctcggctcctctgggcccacagcggccagcaaactgcctccgtcctccctgcgggctgtgccgcctcttcttcgcgtcggcgccgccctcctcccttctcttctgctgctgatggaactggatcctcgcctctacgagaacgtctctgtcagcgacaatgatgtccgaaacatagttctatcttatcttatgcacaactgttttaaagagacggcagaggcattcctatctagcaccgggttgaatttacctgtcgactatagtgtggatgtggataagcgtaaagaagggaatgcccttaaagccatagagctgacagaagaaatggcacctaacttgctagagaatgatatggatctacattttgatcttcttagtctccacttcattgagctagttcgctccaaaaaattcacagaagctcttgactttggccagaaaaaattgacatcatttcagaaggttaccaagtatattgagaaactagaggactttatggccctcctggcttatgaagagccggagaagtcacctatgtttcatctactaagcccagagcacaggcagaatgttgcagagggcttgaatcgggctgtccttgcacatgctaatcttccagcatattcatcgttggagagggtggtccagcaagcgactgtggttagacaatacctacagcaggaagttggcaaggattcttacccaccattttctttgaaggcctttctgagcaagtaaatgtgcaaatggtcacttcttcagaacagggtaaccacctctccaggccatcatgtacatgtacccttgtggagtgcatacacgatgaagtagtttatacagttgaggtgttgttgacaccacttatacagttgcaatggtgttgtactttgaaaaggagggtgctgtatgctgtctgcttccttgatttacattctgttttacttgtctctctgccttagacatggcgaaagcatgtatgtatgacctgttgagctattctgtgcgttcgttcggtgaactcagttcgagtcggtttgtaattggtcttttttattactaccgccatgtgcagaggctaaaggtccgaactctggatgcgtaagcgtaacgggttattctgtccatggtactcctatttgcgatttccatatataagggactgtgaattcttcatcacttgtagatgttgatataattttttcagaaaaaaaaatgttcagaggagtttgaatcaaactcaaactttaatttgga

SEQ ID NO: 206153 - DNA, 1282 bp, Zea Mays
attctcgtctcgctcggctcctctgggcccacagcggccagcaaactgcctccgtcctccctgcgggctgtgccgcctcttcttcgcgtcggcgccgccctcctcccttctcttctgctgctgatggaactggatcctcgcctctacgagaacgtctctgtcagcgacaatgatgtccgaaacatagttctatcttatcttatgcacaactgttttaaagagacggcagaggcattcctatctagcaccgggttgaatttacctgtcgactatagtgtggatgtggataagcgtaaagcaatttttaattttgtgctagaagggaatgcccttaaagccatagagctgacagaagaaatggcacctaacttgctagagaatgatatggatctacattttgatcttcttagtctccacttcattgagctagttcgctccaaaaaattaagctcttgactttggccagaaaaaattgacatcatttcagaaggttaccaagtatattgagaaactagaggactttatggccctcctggcttatgaagagccggagaagtcacctatgtttcatctactaagcccagagcacaggcagaatgttgcagagggcttgaatcgggctgtccttgcacatgctaatcttccagcatattcatcgttggagagggtggtccagcaagcgactgtggttagacaatacctacagcaggaagttggcaaggattcttacccaccattttctttgaaggcctttctgagcaagtaaatgtgcaaatggtcacttcttcagaacagggtaaccacctctccaggccatcatgtacatgtacccttgtggagtgcatacacgatgaagtagtttatacagttgaggtgttgttgacaccacttatacagttgcaatggtgttgtactttgaaaaggagggtgctgtatgctgtctgcttccttgatttacattctgttttacttgtctctctgccttagacatggcgaaagcatgtatgtatgacctgttgagctattctgtgcgttcgttcggtgaactcagttcgagtcggtttgtaattggtcttttttattactaccgccatgtgcagaggctaaaggtccgaactctggatgcgtaagcgtaacgggttattctgtccatggtactcctatttgcgatttccatatataagggactgtgaattcttcatcacttgtagatgttgatataattttttcagaaaaaaaaatgttcagaggagtttgaatcaaactcaaactttaatttgga

SEQ ID NO: 206154 - DNA, 2081 bp, Zea Mays
aatagtcggtggtctattatgcaggtcaaaaatgtaccatcacggatgatggatggtctccggtatcatctgcgtgggacatagatggaggactacttttcacgcttcctaaaccttgaaaatttggttcggaccattaatcggattcctcaacgtcttggagtccaattctctgctagccatggaggatcattgactggcaccacagtatactttcatgaaagggcatctacgttatctgttaatactattaccactacagaaaaacagactgcaaatggaacatctgaaggcgcaattttcagaaaaggactttccagtatttacgaaagatcatgtgtcaggtcttcctatcttttacatggcttcatgctggtacgaagattggcattcagtgtgcgagatctgtggaatctattttcaagtgaagtacacgccaaactaaccaggatcttacatcgtttctggacaacactacagggatcttgtgaagacataggatggttgcaaagaactcgggcatcacttcgttcagttgatgggacaggtcgcttcaaggagattttgcatgagataaggaatggcgtgcattgcctgcctgatacactgatttacttatttattcctggcctttttagcaaccacagtccactttacttcaccaatacgaaacgattcttttcaaaaatgggattggcttgccatattgcgaaaattcatagcgaggcgtcagtggagaagaacgcgtgggaactgaaacagtacattgaggagctctactgggggtctggtaagcaggttctgctccttggtcatagcaaaggtggagttgatgcagctgcagctctttccttgtactggtctgagctcaagggtaaggttgctggcctggcgttggttcagagcccatatggtggcaccccggtcgcctccgatatccttcgagaaggccagatcgctgataaggagacaaggaggatcatggagctcatcgtatgcaaactaatcaagggcgacatcagggccttggaggacctcacgtatgccaagagaaaggacttcatctcccagcacaaactccccatcgatgagctgccgatcatctccttccacaccgaagccagcaccgcgcccacagcgctcgcgtcgctgacccgtgtcgcccaagccgagctcctcccatggctacccctgccacggttcttcctgtctgcatccgagtttgtcgagtcaatgctcgcctctctgaaggtccccgtggttgcgcctgtgtctgcagccatggcggtgacagccctccacctgcggctgcgctatggggagaggagcgacgggctggtgacacggcgcgacgccgaggtgcctgggtcagtggtagttagacccgagaggaggctggaccacgcgtggatggtgtactccacgctgaagatgggcagcgctgaggccgatgcgagcgagatgtgcgaggctctgctggccatgctcgttgagattggcaggaagaaattttgctgaccatctggtcatctggagttctccatggttttggttatatatgcacatatatgtcacgcatactacaaatgatagagtattacagtctttacagggaacagtggaaattagattaatttccttggtgaaagcagggctctgtgataaaaccatatgctactttttttgacaatatgcatactttgtggcaatatgcattaattttggacgaaccataggctactttggctatgtaatgttcttcgcacttcacatttaatttagttttttttaatggttttggtttatacactcggctttattttagtaggagagtcactaaccatagcgactgctgagtaaagcctttaaaaaagtgtaaagctaaaaaacatggtttgagtaaaatataaagctaaggaaaagatgttttgatatgttagatttctaaccaaaaataactttagtgcatgtttggaaggagaggtgtttggattcttgtgactattttttagtcattctattttattcattttagttctaaattattaaatacgaaaattaaaatagagttttagtttttg

SEQ ID NO: 206155 - DNA, 2175 bp, Zea Mays
gaatagtcggtggtctattatgcaggtcaaaaatgtaccatcacggatgatggatggtctccggtatcatctgcgtgggacatagatggaggactacttttcacgcttcctaaaccttggttggcagctaagacaatactttgacagaattaatagaaaatttggttcggaccattaatcggattcctcaacgtcttggagtccaattctctgctagccatggaggatcattgactggcaccacagtatactttcatgaaagggcatctacgttatctgttaatactattaccactacagaaaaacagactgcaaatggaacatctgaaggcgcaattttcagaaaaggactttccagtatttacgaaaggttcagtttccttatagctttgtaagctgattacatccgttgttgtcttgtgtctcacattcactttgcaactatttgtgttgttagatcatgtgtcaggtcttcctatcttttacatggcttcatgctggtacgaagattggcattcagtgtgcgagatctgtggaatctattttcaagtgaagtacacgccaaactaaccagggatcttgtgaagacataggatggttgcaaagaactcgggcatcacttcgttcagttgatgggacaggtcgcttcaaggagattttgcatgagataaggaatggcgtgcattgcctgcctgatacactgatttacttatttattcctggcctttttagcaaccacagtccactttacttcaccaatacgaaacgattcttttcaaaaatgggattggcttgccatattgcgaaaattcatagcgaggcgtcagtggagaagaacgcgtgggaactgaaacagtacattgaggagctctactgggggtctggtaagcaggttctgctccttggtcatagcaaaggtggagttgatgcagctgcagctctttccttgtactggtctgagctcaagggtaaggttgctggcctggcgttggttcagagcccatatggtggcaccccggtcgcctccgatatccttcgagaaggccagatcgctgataaggagacaaggaggatcatggagctcatcgtatgcaaactaatcaagggcgacatcagggccttggaggacctcacgtatgccaagagaaaggacttcatctcccagcacaaactccccatcgatgagctgccgatcatctccttccacaccgaagccagcaccgcgcccacagcgctcgcgtcgctgacccgtgtcgcccaagccgagctcctcccatggctacccctgccacggttcttcctgtctgcatccgagtttgtcgagtcaatgctcgcctctctgaaggtccccgtggttgcgcctgtgtctgcagccatggcggtgacagccctccacctgcggctgcgctatggggagaggagcgacgggctggtgacacggcgcgacgccgaggtgcctgggtcagtggtagttagacccgagaggaggctggaccacgcgtggatggtgtactccacgctgaagatgggcagcgctgaggccgatgcgagcgagatgtgcgaggctctgctggccatgctcgttgagattggcaggaagaaattttgctgaccatctggtcatctggagttctccatggttttggttatatatgcacatatatgtcacgcatactacaaatgatagagtattacagtctttacagggaacagtggaaattagattaatttccttggtgaaagcagggctctgtgataaaaccatatgctactttttttgacaatatgcatactttgtggcaatatgcattaattttggacgaaccataggctactttggctatgtaatgttcttcgcacttcacatttaatttagttttttttaatggttttggtttatacactcggctttattttagtaggagagtcactaaccatagcgactgctgagtaaagcctttaaaaaagtgtaaagctaaaaaacatggtttgagtaaaatataaagctaaggaaaagatgttttgatatgttagatttctaaccaaaaataactttagtgcatgtttggaaggagaggtgtttggattcttgtgactattttttagtcattctattttattcattttagttctaaattattaaatacgaaaattaaaatagagttttagtttttg

SEQ ID NO: 206156 - DNA, 2175 bp, Zea Mays
aaacctattcagccccgtcccatcccatccctgcgctctctcgctcccggatcgccgcgagctcctttttgatctttgactcgcatcgcgtctcctctcgcctccgttttggataagcccgtctggaagcctctcctgctttcatttcgccggcccgcggagaacagctcggcgggttcccttcgtgcagcgttcggagagctcttcctgctgctctgcgacggacggggacggagaggtcaaaaatgtaccatcacggatgatggatggtctccggtatcatctgcgtgggacatagatggaggactacttttcacgcttcctaaaccttggttggcagctaagacaatactttgacagaattaatagaaaatttggttcggaccattaatcggattcctcaacgtcttggagtccaattctctgctagccatggaggatcattgactggcaccacagtatactttcatgaaagggcatctacgttatctgttaatactattaccactacagaaaaacagactgcaaatggaacatctgaaggcgcaattttcagaaaaggactttccagtatttacgaaagatcatgtgtcaggtcttcctatcttttacatggcttcatgctggtacgaagattggcattcagtgtgcgagatctgtggaatctattttcaagtgaagtacacgccaaactaaccaggatcttacatcgtttctggacaacactacagggatcttgtgaagacataggatggttgcaaagaactcgggcatcacttcgttcagttgatgggacaggtcgcttcaaggagattttgcatgagataaggaatggcgtgcattgcctgcctgatacactgatttacttatttattcctggcctttttagcaaccacagtccactttacttcaccaatacgaaacgattcttttcaaaaatgggattggcttgccatattgcgaaaattcatagcgaggtatttgagctgaagggtggcatacaagtggtttttctcccctagtattaggcgtcagtggagaagaacgcgtgggaactgaaacagtacattgaggagctctactgggggtctgagcccatatggtggcaccccggtcgcctccgatatccttcgagaaggccagatcgctgataaggagacaaggaggatcatggagctcatcgtatgcaaactaatcaagggcgacatcagggccttggaggacctcacgtatgccaagagaaaggacttcatctcccagcacaaactccccatcgatgagctgccgatcatctccttccacaccgaagccagcaccgcgcccacagcgctcgcgtcgctgacccgtgtcgcccaagccgagctcctcccatggctacccctgccacgccctccacctgcggctgcgctatggggagaggagcgacgggctggtgacacggcgcgacgccgaggtgcctgggtcagtggtagttagacccgagaggaggctggaccacgcgtggatggtgtactccacgctgaagatgggcagcgctgaggccgatgcgagcgagatgtgcgaggctctgctggccatgctcgttgagattggcaggaagaaattttgctgaccatctggtcatctggagttctccatggttttggttatatatgcacatatatgtcacgcatactacaaatgatagagtattacagtctttacagggaacagtggaaattagattaatttccttggtgaaagcagggctctgtgataaaaccatatgctactttttttgacaatatgcatactttgtggcaatatgcattaattttggacgaaccataggctactttggctatgtaatgttcttcgcacttcacatttaatttagttttttttaatggttttggtttatacactcggctttattttagtaggagagtcactaaccatagcgactgctgagtaaagcctttaaaaaagtgtaaagctaaaaaacatggtttgagtaaaatataaagctaaggaaaagatgttttgatatgttagatttctaaccaaaaataactttagtgcatgtttggaaggagaggtgtttggattcttgtgactattttttagtcattctattttattcattttagttctaaattattaaatacgaaaattaaaatagagttttagtttttg

SEQ ID NO: 206157 - DNA, 2139 bp, Zea Mays
aaacctattcagccccgtcccatcccatccctgcgctctctcgctcccggatcgccgcgagctcctttttgatctttgactcgcatcgcgtctcctctcgcctccgttttggataagcccgtctggaagcctctcctgctttcatttcgccggcccgcggagaacagctcggcgggttcccttcgtgcagcgttcggagagctcttcctgctgctctgcgacggacggggacggagaggtcaaaaatgtaccatcacggatgatggatggtctccggtatcatctgcgtgggacatagatggaggactacttttcacgcttcctaaaccttggttggcagctaagacaatactttgacagaattaatagaaaatttggttcggaccattaatcggattcctcaacgtcttggagtccaattctctgctagccatggaggatcattgactggcaccacagtatactttcatgaaagggcatctacgttatctgttaatactattaccactacagaaaaacagactgcaaatggaacatctgaaggcgcaattttcagaaaaggactttccagtatttacgaaagatcatgtgtcaggtcttcctatcttttacatggcttcatgctggtacgaagattggcattcagtgtgcgagatctgtggaatctattttcaagtgaagtacacgccaaactaaccaggatcttacatcgtttctggacaacactacagggatcttgtgaagacataggatggttgcaaagaactcgggcatcacttcgttcagttgatgggacaggtcgcttcaaggagattttgcatgagataaggaatggcgtgcattgcctgcctgatacactgatttacttatttattcctggcctttttagcaaccacagtccactttacttcaccaatacgaaacgattcttttcaaaaatgggattggcttgccatattgcgaaaattcatagcgaggcgtcagtggagaagaacgcgtgggaactgaaacagtacattgaggagctctactgggggtctgagcccatatggtggcaccccggtcgcctccgatatccttcgagaaggccagatcgctgataaggagacaaggaggatcatggagctcatcgtatgcaaactaatcaagggcgacatcagggccttggaggacctcacgtatgccaagagaaaggacttcatctcccagcacaaactccccatcgatgagctgccgatcatctccttccacaccgaagccagcaccgcgcccacagcgctcgcgtcgctgacccgtgtcgcccaagccgagctcctcccatggctacccctgccacgccatggcggtgacagccctccacctgcggctgcgctatggggagaggagcgacgggctggtgacacggcgcgacgccgaggtgcctgggtcagtggtagttagacccgagaggaggctggaccacgcgtggatggtgtactccacgctgaagatgggcagcgctgaggccgatgcgagcgagatgtgcgaggctctgctggccatgctcgttgagattggcaggaagaaattttgctgaccatctggtcatctggagttctccatggttttggttatatatgcacatatatgtcacgcatactacaaatgatagagtattacagtctttacagggaacagtggaaattagattaatttccttggtgaaagcagggctctgtgataaaaccatatgctactttttttgacaatatgcatactttgtggcaatatgcattaattttggacgaaccataggctactttggctatgtaatgttcttcgcacttcacatttaatttagttttttttaatggttttggtttatacactcggctttattttagtaggagagtcactaaccatagcgactgctgagtaaagcctttaaaaaagtgtaaagctaaaaaacatggtttgagtaaaatataaagctaaggaaaagatgttttgatatgttagatttctaaccaaaaataactttagtgcatgtttggaaggagaggtgtttggattcttgtgactattttttagtcattctattttattcattttagttctaaattattaaatacgaaaattaaaatagagttttagtttttg

SEQ ID NO: 206158 - DNA, 2007 bp, Zea Mays
cggcctcgggcgcgtcaccggtgacggtcaaaaatgtaccatcacggatgatggatggtctccggtatcatctgcgtgggacatagatggaggactacttttcacgcttcctaaaccttggttggcagctaagacaatactttgacagaattaatagaaaatttggttcggaccattaatcggattcctcaacgtcttggagtccaattctctgctagccatggaggatcattgactggcaccacagtatactttcatgaaagggcatctacgttatctgttaatactattaccactacagaaaaacagactgcaaatggaacatctgaaggcgcaattttcagaaaaggactttccagtatttacgaaagatcatgtgtcaggtcttcctatcttttacatggcttcatgctggtacgaagattggcattcagtgtgcgagatctgtggaatctattttcaagtgaagtacacgccaaactaaccaggatcttacatcgtttctggacaacactacagggatcttgtgaagacataggatggttgcaaagaactcgggcatcacttcgttcagttgatgggacaggtcgcttcaaggagattttgcatgagataaggaatggcgtgcattgcctgcctgatacactgatttacttatttattcctggcctttttagcaaccacagtccactttacttcaccaatacgaaacgattcttttcaaaaatgggattggcttgccatattgcgaaaattcatagcgaggcgtcagtggagaagaacgcgtgggaactgaaacagtacattgaggagctctactgggggtctgagcccatatggtggcaccccggtcgcctccgatatccttcgagaaggccagatcgctgataaggagacaaggaggatcatggagctcatcgtatgcaaactaatcaagggcgacatcagggccttggaggacctcacgtatgccaagagaaaggacttcatctcccagcacaaactccccatcgatgagctgccgatcatctccttccacaccgaagccagcaccgcgcccacagcgctcgcgtcgctgacccgtgtcgcccaagccgagctcctcccatggctacccctgccacggttcttcctgtctgcatccgagtttgtcgagtcaatgctcgcctctctgaaggtccccgtggttgcgcctgtgtctgcagccatggcggtgacagccctccacctgcggctgcgctatggggagaggagcgacgggctggtgacacggcgcgacgccgaggtgcctgggtcagtggtagttagacccgagaggaggctggaccacgcgtggatggtgtactccacgctgaagatgggcagcgctgaggccgatgcgagcgagatgtgcgaggctctgctggccatgctcgttgagattggcaggaagaaattttgctgaccatctggtcatctggagttctccatggttttggttatatatgcacatatatgtcacgcatactacaaatgatagagtattacagtctttacagggaacagtggaaattagattaatttccttggtgaaagcagggctctgtgataaaaccatatgctactttttttgacaatatgcatactttgtggcaatatgcattaattttggacgaaccataggctactttggctatgtaatgttcttcgcacttcacatttaatttagttttttttaatggttttggtttatacactcggctttattttagtaggagagtcactaaccatagcgactgctgagtaaagcctttaaaaaagtgtaaagctaaaaaacatggtttgagtaaaatataaagctaaggaaaagatgttttgatatgttagatttctaaccaaaaataactttagtgcatgtttggaaggagaggtgtttggattcttgtgactattttttagtcattctattttattcattttagttctaaattattaaatacgaaaattaaaatagagttttagtttttg

SEQ ID NO: 206159 - DNA, 1213 bp, Zea Mays
accccttaaaccctcgtcaaaaccgctgctcactgaatatttccatttttaccctttcctcgcccctacccccgccaccgccgccgccgtcgccgcagccatggcgtcgcggcgctgtctcctccgcttcctctcgatccgcctcgttcctcagagatctcaacctcttgcgccgatctcgactgcgacccggaccctaacctctttgtccgaggccctcggctccccagctccccgggccctcgcctccccccggctgtactacccctcgcgctgccacttcgcgacccgctcctccggcgacgaggacgacggagaagacgaagaagagcactacgacgatgaggggagcgatggggaatggggggacgatgaggaggtggtggcggcggagatcggctacaaggtgttgggaccgctcggggctgacgataaacccttcaagccctacgagcccgtcttcgccgtcgtacagatcggctcgcaccaattcaaggtgagcaatggcgactccatcttcacggagaggttgaagttctgtgatgtgaatgacaagttggtcttaaaccgagttctcatgcttggttcacaagctcaaacagttattgggaggccaatactacctgatgctgctgttcatgctgttgtagaagaacatgccttagatgcaaaagtgatcatattcaagaagaaacggagaaaaaattaccgccggacgaagggtcatcgacaggaattgacaaaactgagaataaccaacattgaaggaatagataagccagaggctgctgctgttgctacctaaacccagggcaaagagagaaagtaacagtgccttttgtttatggcagcaaggcctgcctaggcaatcattctggcgggttgtgttagtcaataccagtgaaatgtcgcttcttttcttgttttaatttgaagggtagaaccgtagaagctgtcagcatttacgatatctgacatgatgccaatgtaccgagcagtttgggtggtgtggatcagctattgtagtttacagtggcacccatttttttcatttttggttagcttttctgttcacatcctttacatgtgttctcaactcctgatatatcagttacatgttgacggctagagtgtaataatgaaaccgcggtgcgtcgtttcgatgtctgaaaactgtaagacctggtttatgcaaactttacacttgcctgca

SEQ ID NO: 206160 - DNA, 1474 bp, Zea Mays
tccaaaacagatgtacattaaccctacataaactactactaggactatgtggatcaacttagggttgccccacaaataaatgtggcagccatgggtgtaggtgagagtgtttattaccactgtactagcagggaaggtggttatgctatgcatacacacagttcaccgacagcccacacctgcagacaccatgtggcccccccttcagttgcccctcccctcatcttttgcctctatagttttatccattgacgcacgcttggtctactgctcttggccccagcacccctgctctccagtcagtgtatgccgccttctatcaaggtggcttggtgactggtgagtgaaaactaggtccagacatattctccactcctttcctctcttactacctacgcagctaaccacatttatcactcactgcagaagcaagtacaggctgggcagtttatattcactcaaaccagcccgttcctcccccacacggccacacacacttcacttcataggcgccccagcagagctcatctctgcctcctgtgtccttctccatgacagagaatctccactccaggaaaatggtacagccaaagaagtttcgtggagtccggcagcgccactggggctcctgggtctctgagatcaggcatcccctccttaagaggagggtctggctgggtacctttgagacggctgaggaggcagcgagagcatatgatgaggctgctgtgctgatgagcggacgcaacgccaagaccaacttcccaatccaaagaagcagcacaggggagcctaccccagctgcgggaagggacgcccgcagcaacttcagcagcggctcctctaccaccaacctgtcccagattctcagtgcgaagctccgcaaatgctgcaaggcgccatcaccgtccctgacctgtctccgccttgaccctgagaagtcccacattggtgtttggcagaagcgtgcaggagcccgtgctgactccaactgggtcatgacagtggagctcaacaaagatgcagcatccactgatgctgcatcacagtccacatcagcaacaactgctccaccagccacgccgatggatgaggaggagaggatcgcactgcaaatgatcgaagagttgctgagcagcagcagcccagcttcaccctcaaacggagatgaccaaggtcgcttcatcatctgaaaagcatggatcaaacagcacaagtcaccatcccagatcagagtttcgctagttctatgtacgtgaaaagctctacatacacatgttcctatcaagatactttgttacacatcaatgtcagtgatataattgcttataaaagaaataaatagattatgattgtgttactgctcatcctttgcttggatcctgatgtcaaactcagttgaagaatctcaacagtttttttttaaatagtgagtatacagtcttactttatttcttcaaacaaagaaaaaaaa

SEQ ID NO: 206161 - DNA, 2353 bp, Zea Mays
caaaaccccacgcgccatcgcaattcgccaaaaggaaaatctcgccgtcacgccgtcactctacaggaccagttggctgcatatggaggtcgaggacctcgaggatctctacaacatcgacgcgtcgtacgaccaagacgacccggatgacgctcgaggatccagcgccgacgaggaagaggatgaagaagacgacgaagaggaggaggaggaggagccggagggggcgcggttggtcgcgggcgattgcggaccatccccacgagctagggtttccgagtttgcggcggctgccggcgccgccgtggagcgggcccacacggccaactgccccgtctgtatggacccgtggacctcccaaggtccgcatcgcatcagttgtatcccatgtgggcatgtctatgggagatcttgcctagagaagtggttaacccagcgcgggaaccgaagtgcgacgtgccctcagtgtggcaaaaggtttaaacataaggacatcatcaacctctatgcacaagaggttgctgttcctaatagtgaacttgagaaggaaatttcatacttaaggcgggaaatctgttctctgaagaagatggttgtgcaccatgataaaatgtttgaggagatgatcaagaggcagaatgatggtgttcgctcaaagagacagaaagtggctgagcactcatatgaagccgcaaatctggtggcatctaccccagccacaataagttttagcttacaggtggcccgtgagaaaacgctcaagcccaacatgacacaaagacacacgcagcacaacgctcccggatagtaccacctcgctagctgaaggagaacgagcgagctataaaaaaaggagcagaacgaattacctgtggctggagctcgagtcatcagcatagacacatctaacaaaataatacttgtttctggaagggcaaatgctataggtgctgaatatgttgttaccaagattagcatgctgtccaaccgtgaagtacgcaaaatccatcttcctcctgaaaccaaagctgttagggatatgtgtatcctgcctggtggctctgctatttttacatcactaggaaggaggctatcacttttcagcatggcaactgacagcattgttcttaactgggatttgccggctcctggttggtcgtgtgcagtaggtgcatctggttcacatcatatttatgctggattgcagaacgggatggttgtggtatttgatatccgtcaaactgtgaggcccttgcgttgtatggtggggctatctgcaaatccggttcatactctccactctgtcattgataacaacggttccaggaaggttctttcagcttctgctataggtccctgcatgtgggatgctgatagcaaccaaagcaggccgcatttgctaactgggacgggagatgagcgtgtctgcatatctcttgcatgtgccgctccatggagtgaccttttggtggcttccttccggcccagagttgatccatcaggagatgcagttgccgcatcccaagtttatctatcacaaacgcctacacggtctgggcaggggaaaccagggcagcacacccttatcaggaggaggacgggtaacacctgcttcgctgaaggcacgacttgctatgccaacgtgagcgagctgcgcatgtcaaaatcggccatcataccttacggatacggaggccaccagcagaagcacctgttctcctacggagacgagtcgctgcgtggggtccggacctggcaactgccttcgtttgggatgcatgctgacctctgcacccaccgggagcccatccttgatttaaggtacgctgctgaaactgaaggaccaggtgggtaccttggttgcttaagcgaggagaagctgcaggtgttcagagttaattaattgttaggtagcttagctggtcagtgagggagcagcttctttttgacttttggtagctcagctcagctaattgctaggtaacataacatcactgtgaaggtcgtgcttgtttggtgaagctgctgtgtacatacagggcaacagctgaaattgcctagttttggtgctgctggctgtttgtttgtgtcactgactggagtgaagaccatctccagcaattcctcccatatttcactgactagagagagtagcatagaaagtgtacataaatacacaatgcattccagagacgctacgcatgtgtattatacaagttgacaggtacgcaaacacatacatggagtgttcatacgtaatagcatctggacactggtgatcggtgggacggggataaataaggttgccaaggtcagcctcgccgccggccaccacgtacggccgtgctccgtc

SEQ ID NO: 206162 - DNA, 1391 bp, Zea Mays
agaccttggcgcccctgcggtgcaagatctttatctggatgacgggatgctgggcaaagcaaggtctgcagcacccagcccattgtcttctgtgcgaccaagcggacgagatgatcggccaatcctggtgaattgcatcttctccaggccaatttgactagatacagattgcaaagttgatccaagatcatttgagtttaagaaaaacaagtttggcaaacctgaggtactgtggcgatctgatgacagcaggatggaatggcctttacatttcaatatttcacacacatcatctttgattgtctgtggcataaccatggatactcctattggcattgacgttgaagagaagacacgaaagacagccaagaatattttatctcttgctcgccgttatttcaccccatctgaaattgattatctagctaaaattccagatcctgatgctcagcaaaaggagttcgtaaaactatggactcttaaagaagcatatgtaaaagctcttggaagggggttttcaggcgcccctttcaacaaattctcgattatattggcagcaaatggcagaatccaaatttctgtggcaccaaaagtatcgaacggttctgactctatccatgactgtctgtccgagaattggcagtttgcacttgctgaactaaacagttctcattacatggcaatctgtatagaggatgactcaacaagttcagattctggaaacggtagactgccactaggattgaaagtatggaagaccactccgttcgtggaagatatacttgtttctggaacggaagctgtaaaacttgtcagttaagtatgtgagaggatatctgccattggtcaagtgatttcgccagatgacaatgtgatgcaacgaatgtatttggacgaagtatgcgctgtgcagggaggctgaacggttttcttcgagcatactgcatgcattgatgaactgaccactgacactgtgtgctttagttaagatttggaaatgcaatgacatacactttggagtcctgatattcatattagcatatcacgacactgtttcgaaaggaataaacatttatctctctcttgtgtgtgtgtgtggggtaattttagacgtattttgtactgattggtccttgttatctgacggatcattggaagaaatattcatgcatcagcatgcttctatcggtggcataggaattctgctattggtcttggtgctgcgttccaatgcgattcgaagctgcaggtgtttgtcatatttggcagaacataatgctgttgaataggattagattatagctcagaatagtaaccgaaagaaactgctctgctgattgcaggctccagcatcatcgttcggatgaggtccttgccgccgtatgtcggag

SEQ ID NO: 206163 - DNA, 857 bp, Zea Mays
atgcttgtcagtataattcttatactacttgcatgaatttatggaatcggcaccaaaagtatcgaacggttctgactctatccatgactgtctgtccgagaattggcagtttgcacttgctgaactaaacagttctcattacatggcaatctgtatagaggatgactcaacaagttcagattctggaaacggtagactgccactaggattgaaagtatggaagaccactccgttcgtggaagatatacttgtttctggaacggaagctgtaaaacttgtcagttaagtatgtgagaggatatctgccattggtcaagtgatttcgccagatgacaatgtgatgcaacgaatgtatttggacgaagtatgcgctgtgcagggaggctgaacggttttcttcgagcatactgcatgcattgatgaactgaccactgacactgtgtgctttagttaagatttggaaatgcaatgacatacactttggagtcctgatattcatattagcatatcacgacactgtttcgaaaggaataaacatttatctctctcttgtgtgtgtgtgtggggtaattttagacgtattttgtactgattggtccttgttatctgacggatcattggaagaaatattcatgcatcagcatgcttctatcggtggcataggaattctgctattggtcttggtgctgcgttccaatgcgattcgaagctgcaggtgtttgtcatatttggcagaacataatgctgttgaataggattagattatagctcagaatagtaaccgaaagaaactgctctgctgattgcaggctccagcatcatcgttcggatgaggtccttgccgccgtatgtcggag

SEQ ID NO: 206164 - DNA, 1334 bp, Zea Mays
cgctgcttcgtcctctctcttcttccttcccctcccccgctcgccaatcgccatcggtcactcttcctcaccttcaccttcaccttccgaaaagagagaccgaggaggatcacaggaggacatccagataagcaggaatagaacaaccccataaaccatatcggaccatacatttgcaaaagcttgtcggttttctagcctccaatcgtccctcaactcaagcctgatgaaagaagaggaggtgaatccttaagagcaagcagactttgctgactgaacaagacatgtgacttggcaagaaagcatggtccttaaccatctgcagcttctggctgcgcctcacatcaagtaactcagctgcaagcggcaccttctggacatacctgacatcattaggtgcaaaggcatggtgtggaatgtgcaaatctcttaaaagaatcccttcagtccgcagagactatagggaaaaatattggcattagcacgactccaaccaggttgtctgccatagttttgctggagggacaaaaacagaagcgttcctgactctacctcaaggatgagagctgcgtcctccacggtttaccctgtctaccttagcctccaccgccaccccaacagccaccaagcctcttttcgtccctcgagagcaaaccatgacaacacccataaatgtaccaagccacccaaagttcttagacggtctctcttctccctgcctgcctcatttcttctcctccacacatcctcctcccttgccgtagatgacgcaaacatgccatctacctcaacaattgacaccacgatcacagatcgcatcttcatggacttcagcgtctgtccaagctactttcgctcagacagacctctaggagctgagctttcctcgtgccctgattccgagcctcttggtcgtgtcgtctttggtctctatggccggcttctccccgtcactactgccaatttcaaagctacgtgtactgcagctgcatataggggcacccttgtccacaagctccttcagggacagttttttgctgctggtcgacaaggtcctcggcatgacaagggtgaggtccagcctccctctggcctcgttaggaattctgagactgttaaccctaaagcgttcgagctaaggcatgcaaggcctggcacgctttcgttatgccttggacagaatgacgatgatgacgacatcaagctcaaccccaattatcacaatcttgaattcttggttactacagggccaggaccctgtcctgagcttgatggccagaacatcgtctttgggactgtattggaaggggtttcctctttcatgaagaaaccat

SEQ ID NO: 206165 - DNA, 1563 bp, Zea Mays
cgctgcttcgtcctctctcttcttccttcccctcccccgctcgccaatcgccatcggtcactcttcctcaccttcaccttcaccttccgaaaagagagaccgaggaggatcacaggaggacatccaggaaaaatattggcattagcacgactccaaccaggttgtctgccatagttttgctggagggacaaaaacagaagcgttcctgactctacctcaaggatgagagctgcgtcctccacggtttaccctgtctaccttagcctccaccgccaccccaacagccaccaagcctcttttcgtccctcgagagcaaaccatgacaacacccataaatgtaccaagccacccaaagttcttagacggtctctcttctccctgcctgcctcatttcttctcctccacacatcctcctcccttgccgtagatgacgcaaacatgccatctacctcaacaattgacaccacgatcacagatcgcatcttcatggacttcagcgtctgtccaagctactttcgctcagacagacctctaggagctgagctttcctcgtgccctgattccgagcctcttggtcgtgtcgtctttggtctctatggccggcttctccccgtcactactgccaatttcaaagctacgtgtactgcagctgcatataggggcacccttgtccacaagctccttcagggacagttttttgctgctggtcgacaaggtcctcggcatgacaagggtgaggtccagcctccctctggcctcgttaggaattctgagactgttaaccctaaagcgttcgagctaaggcatgcaaggcctggcacgctttcgttatgccttggacagaatgacgatgatgacgacatcaagctcaaccccaattatcacaatcttgaattcttggttactacagggccaggaccctgtcctgagcttgatggccagaacatcgtctttgggactgtattggaaggggtttcctctttcatgaagaaaccatcgttcttggtgattggcaatttatgtggacacaaacatattttatgcatgaataacaaacaaacaatatggatatggatatgcattcactgatctcgtctgtcaagtgcaaatggcacaaggaatggatgtcatcaccagcatcgcaaccatacctacctacaaaccagctgaaaggatccgcctcttcaacggctttgcgcagttgattggtgatggaagggctcaaactgcccgggctatgtgggaccgcccgcttaagaccgtgtatatcagcgactgcggggagctgacagtaaccaaaccatctctttcccctccaagcttgccatgactgccagtgtaatgacactacccacatagccagttttctgtctctgttgcttgggtcctctttctgtactctatatatgcagtgtatatattacctgtgttattaaacttatgcatgttccatgagctgtatatatatcgcttccgttgttaatttatgcatgttccctttgacaatgactgtacttgatgagtacatggatgttaattatatggtcaaggcctaatcaatta

SEQ ID NO: 206166 - DNA, 1781 bp, Zea Mays
cgctgcttcgtcctctctcttcttccttcccctcccccgctcgccaatcgccatcggtcactcttcctcaccttcaccttcaccttccgaaaagagagaccgaggaggatcacaggaggacatccagataagcaggaatagaacaaccccataaaccatatcggaccatacatttgcaaaagcttgtcggttttctagcctccaatcgtccctcaactcaagcctgatgaaagaagaggaggtgaatccttaagagcaagcagactttgctgactgaacaagacatgtgacttggcaagaaagcatggtccttaaccatctgcagcttctggctgcgcctcacatcaagtaactcagctgcaagcggcaccttctggacatacctgacatcattagtggggctttgcccggataaagctgatcctgaccagaaggctgacgcggcagcttctctcccaaccacactctcttcagtcttcactcctctcctctccccgctccagtcggtctctccagtctcctctcctcaccttgccaggaacccaggaggaggagggatacaggaaaaatattggcattagcacgactccaaccaggttgtctgccatagttttgctggagggacaaaaacagaagcgttcctgactctacctcaaggatgagagctgcgtcctccacggtttaccctgtctaccttagcctccaccgccaccccaacagccaccaagcctcttttcgtccctcgagagcaaaccatgacaacacccataaatgtaccaagccacccaaagttcttagacggtctctcttctccctgcctgcctcatttcttctcctccacacatcctcctcccttgccgtagatgacgcaaacatgccatctacctcaacaattgacaccacgatcacagatcgcatcttcatggacttcagcgtctgtccaagctactttcgctcagacagacctctaggagctgagctttcctcgtgccctgattccgagcctcttggtcgtgtcgtctttggtctctatggccggcttctccccgtcactactgccaatttcaaagctacgtgtactgcagctgcatataggggcacccttgtccacaagctccttcagggacagttttttgctgctggtcgacaaggtcctcggcatgacaagggcatgcaaggcctggcacgctttcgttatgccttggacagaatgacgatgatgacgacatcaagctcaaccccaattatcacaatcttgaattcttggttactacagggccaggaccctgtcctgagcttgatggccagaacatcgtctttgggactgtattggaaggaatggatgtcatcaccagcatcgcaaccatacctacctacaaaccagctgaaaggatccgcctcttcaacggctttgcgcagttgattggtgatggaagggctcaaactgcccgggctatgtgggaccgcccgcttaagaccgtgtatatcagcgactgcggggagctgacagtaaccaaaccatctctttcccctccaagcttgccatgactgccagtgtaatgacactacccacatagccagttttctgtctctgttgcttgggtcctctttctgtactctatatatgcagtgtatatattacctgtgttattaaacttatgcatgttccatgagctgtatatatatcgcttccgttgttaatttatgcatgttccctttgacaatgactgtacttgatgagtacatggatgttaattatatggtcaaggcctaatcaatta

SEQ ID NO: 206167 - DNA, 1717 bp, Zea Mays
ccccctcctccccggtctcgcacgcgatgccccgccgtgacagtcgccgcccatcaacggcctcgccctccttcctccatcgtcccgctcgcacgaatctagctagctaggcgaagagctcgagcaagacgggcgggtcggcggcgcccccgcgggcccgctgcagcgcgtcggcggcgcgccagacccaggcatcggcggcgcccgtcgtcgtctcctcgcggtgccgcctcatgtggccgcccagcgcctgccccatctcgaagccgagcccgcagacgtggcactcgtgctgcgcctgcggctccctgtctcctcctccgcctccgccgccgccgacgccgtcgccggcctgctgatgatgcttgtgctgctgcctgagcgccctggcgccgacgccgagctcgaggccgtggcggccccgcaggtggctggtccggtggccgccgagcgcctggaacgaggtgaaggcgcggctgcaggtcctgcacacgaacaagctattccatggcggagcaggatggcgacgcggggcagaggccacccgactccgttccggttattatattggtttaaccttggatcgcgttaattcgggccatgaggaggttattccggtggtttgatatcggatctcgttaattcgggccctgaggagtttgtgcgggttgaaatccccaacacgctaattcgttcgggaacattcctcggtgctaatgaagactcaactagaacccttgcagaaatcgagaagaagattgcaagggctaccgtgttacccagaaatcatggggagaatgggagaaactatgttcccatatgaggtctcctattcttcagctgaagatcatacttgctgtggagcctttgatcccttcagagggaccaaggattggagagaacattttcggttacacgatagtggacatcttcagtagcagctgccgtggccaccataagaatcctccttcagagccatatgtccttgaggttggggttttgcaagattatgttggaagtggaggctgtgtgcaaggcgtgacagcgtgtcgtggtcaaggaccctaagctctagcgccaaattcatatcacatttgttctagaatgagatcatgaatggtccctggggttggcctggttcacgctccattctcagtgcgttttccgacatcgttcttcaagcaagcatgcgagctggctcctattttcactgagcttgtggattgtgtgagcttagatggggagtccttgcaagctgctttgtctagaacaaagcaggttcatgaatttaccgcaaggctgctagatattcatgataagatgatgttgataaataataaagaggatatacgcttaatattgcaccggtcggactatatgttggattctgaaatcaattcactgcttcaaattgaaaactctaggagctatattttgccaccaacgctgcaactttctgttgttccatcaggacctacctaagttagcccagcaaagcacaagcccctatccgcacgacattgcccctacctttcgccgcccagatgctagacacagcgcccagtgcccagccgccatggccaggtccccaatgctcagtgctaggacgcctgccttgacttcatggaatattatagctatgttccctccaacactggaaaatgagccgctaatgtggaaaactaggagttagattgaccgattggttgggagtttg

SEQ ID NO: 206168 - DNA, 1516 bp, Zea Mays
atctccgttcgttctgaactatctgctttgccaatttgctgtgaacgggaaatgggtatcataggaagtaatagctgtaatattaccatcatcacttctgttaggtggttcgtgtaggggatcaaaatactaatcagcatcaaccattttttcgacgatgtgccaaccacttcgcactgttttcgggaacattcctcggtgctaatgaagactcaactagaacccttgcagaaatcgagaagaagattgcaagggctaccgtgttacccagaaatcatggggagaatgggagaaactatgttcccatatgaggtctcctattcttcagctgaagatcatacttgctgtggagcctttgatcccttcagagggaccaaggattggagagaacattttcggttacacgatagtggacatcttcagtagcagctgccgtggccaccataagaatcctccttcagagccatatgtccttgaggttggggttttgcaagattatgttggaagtggaggctgtgtgcaaggcgtgacagcgtgtcgtggtcaaggaccctaagctctagcgccaaattcatatcacatttgttctagaatgagatcatgaatggtccctggggttggcctggttcacgctccattctcagtgcgttttccgacatcgttcttcaagcaagcatgcgagctggctcctattttcactgagcttgtggattgtgtgagcttagatggggagtccttgcaagctgctttgtctagaacaaagcaggttcatgaatttaccgcaaggctgctagatattcatgataagatgatgttgataaataataaagaggtggttggcaatgcagtgatgctcggtgaaatcataaactacgtgcagtccctacaatgacaagttgagtttatgtccatgaaactggccaccgtgaatccccaggtggacttaaatagcctgcctaacgtcctccctaaagatgtacatcagtcttgtggtccgccacatttctcgctggagacctcagacgcttcgttgtcgtacctcagccagcctcaccatggaagccctcttggctgcatggacaaccagagttgtatgcatccacttgacacgacgttttgcctggcgataaatccgcagtatcatttcctcaacggtgttagcgatgcatcgtctcagctaatttgatgcttgtgtttatggaaaccaagaggtggcgctgatccattggaaacctggttgtgtatgaatgggtttccagctacttctattcttggagatagaaaccaacatgtttggtttttgtttttattcgctttagaacaactcatttttgtacgaaaagaggcatttagctataattgtttgttgtagtatgtttaccgcaggatagccgttccatgaaatacataaaaacctgatactgttgttatatttggtttagtcatgctcttatggaacctttaatgaggatttttctatatcaagatatcatcgtcatcgtcattattattgcat

SEQ ID NO: 206169 - DNA, 1764 bp, Zea Mays
atctccgttcgttctgaactatctgctttgccaatttgctgtgaacgggaaatgggtatcataggaagtaatagctgtaatattaccatcatcacttctgttaggtggttcgtgtaggggatcaaaatactaatcagcatcaaccattttttcgacgatgtgccaaccacttcgcactgttttcgggaacattcctcggtgctaatgaagactcaactagaacccttgcagaaatcgagaagaagattgcaagggctaccgtgttacccagaaatcatggggagaatgggagaaactatgttcccatatgaggtctcctattcttcagctgaagatcatacttgctgtggagcctttgatcccttcagagggaccaaggattggagagaacattttcggttacacgatagtggacatcttcagtagcagctgccgtggccaccataagaatcctccttcagagccatatgtccttgaggttggggttttgcaagattatgttggaagtggaggctgtgtgcaaggcgtgacagcgtgtcgtggtcaaggaccctaagctctagcgccaaattcatatcacatttgttctagaatgagatcatgaatggtccctggggttggcctggttcacgctccattctcagtgcgttttccgacatcgttcttcaagcaagcatgcgagctggctcctattttcactgagcttgtggattgtgtgagcttagatggggagtccttgcaagctgctttgtctagaacaaagcaggttcatgaatttaccgcaaggctgctagatattcatgataagatgatgttgataaataataaagaggatatacgcttaatattgcaccggtcggactatatgttggattctgaaatcaattcactgcttcaaattgaaaactctaggagctatattttgccaccaacgctgcaactttctgttgttccatcaggattaccaatgctagaatctgtatggattctatcagctgttcgcctactgatgcttatgtgccaatttagtgagactggagtcatacactccatacaaatctatacaaaatcaaagtggttggcaatgcagtgatgctcggtgaaatcataaactacgtgcagtccctacaatgacaagttgagtttatgtccatgaaactggccaccgtgaatccccaggtggacttaaatagcctgcctaacgtcctccctaaagatgtacatcagtcttgtggtccgccacatttctcgctggagacctcagacgcttcgttgtcgtacctcagccagcctcaccatggaagccctcttggctgcatggacaaccagagttgtatgcatccacttgacacgacgttttgcctggcgataaatccgcagtatcatttcctcaacggtgttagcgatgcatcgtctcagttgcagctaatttgatgcttgtgtttatggaaaccaagaggtggcgctgatccattggaaacctggttgtgtatgaatgggtttccagctacttctattcttggagatagaaaccaacatgtttggtttttgtttttattcgctttagaacaactcatttttgtacgaaaagaggcatttagctataattgtttgttgtagtatgtttaccgcaggatagccgttccatgaaatacataaaaacctgatactgttgttatatttggtttagtcatgctcttatggaacctttaatgaggatttttctatatcaagatatcatcgtcatcgtcattattattgcat

SEQ ID NO: 206170 - DNA, 816 bp, Zea Mays
acataatctatttaaagatagtggacatcttcagtagcagctgccgtggccaccataagaatcctccttcagagccatatgtccttgaggttggggttttgcaagattatgttggaagtggaggctgtgtgcaaggcgtgacagcgtgtcgtggtcaaggaccctaagctctagcgccaaattcatatcacatttgttctagaatgagatcatgaatggtccctggggttggcctggttcacgctccattctcagtgcgttttccgacatcgttcttcaagcaagcatgcgagctggctcctattttcactgagcttgtggattgtgtgagcttagatggggagtccttgcaagctgctttgtctagaacaaagcaggttcatgaatttaccgcaaggctgctagatattcatgataagatgatgttgataaataataaagaggatatacgcttaatattgcaccggtcggactatatgttggattctgaaatcaattcactgcttcaaattgaaaactctaggagctatattttgccaccaacgctgcaactttctgttgttccatcaggacctacctaagttagcccagcaaagcacaagcccctatccgcacgacattgcccctacctttcgccgcccagatgctagacacagcgcccagtgcccagccgccatggccaggtccccaatgctcagtgctaggacgcctgccttgacttcatggaatattatagctatgttccctccaacactggaaaatgagccgctaatgtggaaaactaggagttagattgaccgattggttgggagtttg

SEQ ID NO: 206171 - DNA, 1253 bp, Zea Mays
ggaggaataacagctacatctgttcttgtccatgtttctgtagcatcagtagcgcagcgtggttgtacgtttgctgtgttgttgtatcactctttgtctctgcaagtgctaaaccagtcactttatggacggtggttcctgtggtctcgagggagcgtcggtagtgacatctactaccagcgctggtattcagcttctgccagagaagcactgcaccgatgaagcttgtggagccatggcgggcagtaatggtcctgaaggagtgccagtagtgacttctgctgatgaccctccgacccatgccgatattccatttctctgcaattcagttgatgaaacctgtgaagccacaggggacggcagtgctcccttggatgctcagatatgtacgggtttctctaagttgatcagcttggaggtgaagaaaggcctccagaagtgcgcgacgttcccaccctcgtctagtcagcctcagcaggaggattgttcatgctcccatgtaggtgatggcctcacgggtgctcctactttctggcgatctgtgtccttacctgtgataaatacatgtgtgagctaaatctattgatctgcttgtttatgtaacggtacttcaaaactgtatcaccggttatgtcttggcatgcttctttacggatctgttatccatgcatggcagacaatagttggcattttagcagcacaacaatatttctaactattaagtgttaattatctaatgttatttctaactattaagtgttaattatctaatgtatttaatgaagtaacacagttagacttgcctaaagaggccagtgaagcttcactggctgcatagagaagtacttttttattatcatgtaaatgcatggttctttggaaccatttggcctatctgattaattattactataaccgggaacgggagcccgaggctataacccggactcctcgccctcgtaccttgttgctggcgaagagcgtcatcaatggcgagtggaggttcactacacagcccgccggatcttggagcatcattcgcggtcttggcgcgtctacacaactgtatcctaagggcgtcgaagaggagagacggtacgccggtggcgacaaggtacggtagatttgaactggagtgtggaggtatcgtcggccagtgccatcagcgatgggtggaggtttccgtcgagtcgaggaagaaggagcgcttcgtgtaaagatgttgtttgtttattgttattatcttatcggaa

SEQ ID NO: 206172 - DNA, 913 bp, Zea Mays
gtggaagagggcgcaaccataaggttgttgtgccaccgatcaaggcacgggagcttgccttgcctcctaggtttgagatgtttgagggatacatgtatacctgaagacgctatgcttaaggatccaaggaggctttatgcaccaggccggatttatcacatagtcgaaagaagaacgtgcaggtgcggaagatatccaccggtagtcaaaacagctgtgccggtggatggtagatttgagcacatagttctttcctgcaatgccacagcggaccatgccattatttggattgagagggaggcccagaaggctttggatctgatgctggaggaggagaacacgctggcagtgccgtcggagcagcggatggagcggaacgaaaccctgcagagggagcatgtggaggagcacagggccgctctgcgccgggccgtcacgctgtcggtgccagacgggcggcgaccgtcgccgtacggtacgtttgacgacgtggagcagcatcgccagcagccggagaggagcgagagcttcccgccggcggggcccaggcagcgcatgagctggaacgacctgatcgagcgagtgttcgacaaggacgaggacggccagatcgtgctgcgcagctcggttcttctctgacgggcggctgggccgttgtaaattcctttggtcttgtagctgtgctgcctctccctgtagtacccccatttttcctgtgttattattggttgttcaatgtaattccttcattcattgaagaggattctttttctcatgcgcggttcatttagcgacatcagctccgtgcagacaagttttgtgaataaattatcaaggtagagtagatcaatttttgaaatcattttcctgttgattttgatatgtaaagttaggatccaaaatcaaaacctgc

SEQ ID NO: 206173 - DNA, 2699 bp, Zea Mays
agcaaaaatgagacgacgaagcagcaagactcccgccgcaggactgcttccttcgtatgatcgtatcctacgtcctgaccccagcccgcccgcggtctcctacaaatccccgtgcccgactgcccgtagcccccccaagctccggcctccggctgccccgcccccgcgacagcgactccgcccccagacctcgtcaacccgccgcccgcacgtcactccactaacgtgtccccccggcccaccatacccgatggttccccgccaccccacgaccttgacctcgcccgggccgcgccgtcgctgtccccgcgcctgcagcccccgcacgcagccccacccccgacgccacacactcgcacacactaccggaccagggcgaccagaacgctgcgacgggctgcgctgcgcagtccacgccacgccacgccgcacggcaggccgacggaatagtaccgtgccgttggcggcacgtacagcagttcaggccggccttcccctcgcggctctgtccgttataatccgcacgaccgcacgcacggtgcagaagtaagggctgggaccaccggacgacgatgcggggctcctcgggcgcgcgcatgaccgcgcaggacgcggcggaggcggcggtgggcgcggtcgggtgcggctacgacctgacgggggacctccgcctgggccgcgccaagcctggtggccggctggtggacctcgacggcgccgggaagggcccggggacgtcccagtccgcgtccccgtcgccgcgggagctggcgttccccggcggggccgccgtggcgggcgtgccggccggggtcgtcgccggcaagggcgagcgcgcgcggttccgctccgacgtgctccccttcgcgcagatggcggaggaggtgaaccggtcgctgtcgctgcccgccagcaagatcccctcgggcgccttcaacgccatgttcgactaccgcgggtgctggcaccgcgacgccgccgccacgcgcagcctctgcttcgacgcccgcctcgtcgagctctacagcgtcgaggccgtgcgcgccagcctcgccctcagggaccacgtcaggcgggacctcccgcccgtctgggaccccgccgcgctcgccgactccctccctgcaggttcatcgacaagtacgggactcacgtcatcgtcggggtgaagatgggaggcaaggacgtggtgtgcgtgaagcagctcaagggctccagcctcacgcagagcgacgtgcaggcccggctcaaggagctcgccgacgacaggttctcggaggattccacagcaagttccaattcttccaccgcgggaggcggcaggttgtcgcaggggctaaacgttgggcccggatcggccgcctggcagtccttcagatcacccgtcgtgtctcacaaggatgacatggtgtgcattcacgtcaggagaggcggcgtcgacagcggccagggccacggcaagtggctctccaccatcaccggcttcccggacgtcatctccatgtcgttcgtgcccataacgagcctgctcaccggcgtccggggcagcggcttcctcaaccacgcggtgaacctctacctcagatacaagccggccatagaggagctgcagcagtttctcgagttccaggtgcctcggctctgggctccagagttcggtcagctcccgctctccctccagaggcggaagaacatcctgccgtctctccagttcaccctcatgggccctaaacttcacgtcaacactgccaaggtcgactcctgcctccgcccggtgaccggcatccggctgttcctggaaggcaagaagagcgaccagctgggcgtccacctgcagcacctgtcggcgacgcccggcgcgatcacggtgctcggcgaggccgcgtcctcggcggacgacgcggccgccgtgaacgagcgcgcctacatcgagcccgtccggtcgccgctgctctcgcacatctgcacggcgcccgtgcagtacaacggcgcgcttatcgacgactgcgccgccatcgtcaccagcgcctggctcgaggtgcgggacgcctgctgcctcaagaaggtgctcttcctgcgcctcggcttctccggcgtcgcggacatgaagatccgccgctccgagtggggcggggccctggtcgcgccgcgcaggtccgggtcgctgtcggcgcgcctcagcgccgcgctgtccggtggcctggcgccggcgccgccggcggtggaggagaaggtggaggtcaactccgccatattccccaagggcccgccggtgccgctcccggttcagaagatggccaggcacatcgacaccaccgaggtgagcaggggccccgacgacctgccgggctactgggtcgtcaccggcgccaagctctgcatggaaggcggcaaggttgcgctcaaggtcaagtactcgttgctcatcgcagtgcaagaggaccctgaaggacactgacgctttgaggcctccattgccgtcgtcgacgcctcaactctctctgtctgtgttgtgttgcggcggtgtaaagttcagttgtgggcaactacgttgtacagaatacagtgtgcccagaggctgatgtttttttggtttgttcactcagttcttgcaaatctaggaacagtttaggtttagatataatactgagaaattacctgattcgattgagcattcaatacatgaaaaattagtgccg

SEQ ID NO: 206174 - DNA, 3028 bp, Zea Mays
cacccttatcttactgacgagtggcaccagtagtgctcgggcccaaagtgtcacagactaacacctaaccgagtcagttccgaggccctgcgtcattagtttaaccagagctccggtttaaaccgaaaccacactgctaatcggccatcagtttacacaaaacgcaagatcgattatccggtcgcctcccgggccgggggcctttaactcgagtcgctaatccgtttccttgtatcgccccgtctccgacctcgctcgccgccatggatggttcgaaggggagcgtaggtggcggggacgggaccgggcccgaaaagccaagcgccgattcgaaccctagccttgacccgccccaacctaccgcggcggctgtcgaagccacagatgacggtgcggccgcggctgcggccgaggcggccaggcggcccttcacggccctcagccaagaggaagctgacctcgccctcgcccgcgtcctgcaggagcaggagcgggcgtacatgttgcttcggatgaacgggggcggtggcgagggcagcgactacgggagctctgatgaagggagctacgaatatgacgaagagggagaggaggactacgaagaggaactggagcaccgcctccgcgtccaccaccacgagcacccctcgggcgatggtgagggagagggcgggggcgagggcgagggcgccgaggggagcgactacgacgaagagttcgaggaggacgaagaaggggagccggaggtagatcccgcggagtttgaggacgatgaggcttatgcgcgtgcgctgcaggatgctgaggagcgtgaggtcgccgcacggcttatggctctcgctggtctcagcgattggcgaacagtggaggtggagcatgaggaggatcatgcgaatgatccacaggaggcatggcaagaggtcgatccagatgaatactcttatgaggagctagtcgcattgggtgaagtagttggcacagaaaacagaggtctctctgctgatacacttggttctttaccttcagtaacatacaagctgcaacatgttcaggatggcaacacagagcaatgcgtaatttgccgtgtggaattggaggagggtgaatctttgattgcactcccctgcaagcacttataccatcctgaatgcataaaccagtggctgcaaataaataaggtatgatggaccttcttaagcttcattgaatggctagaaacttcatttcattaactacttggtccttaaatactattctgattctgtgaagtatcccagactgtcacacatgcatgtacctgatgggagaatgttttcatcacaactagtctgtttatactatgtttagtaacttctagtcaaaataaaaagcttaagatttttctgtgggctgctaggcaggcatggtttgtcaactgatgttcttattctagttatgcagttgtatttagttcatcatttttctcttaaaaaaactagttgcatataaaacatcgaatgctaatggtattgaggtccgcaataacagggcatcagtctctacattttaagtaagaagattctgttatttgcttgacatagtccctagatttgtaatcgcggtcaagatatcttaggctgttacgttctatcagactgacattgaaccttatagttgtaatggtgcctacgattttctgtcatggtctagtgatgttttggttagcttatgttctgtcatgttgacatgcggaatcatgtaattttcttgtcgcggtaataaaatttgggcacaccatgtggtgggagaaaaggaagattgaaagagcaaatcaataaaccttggaagcaggtatgctgtattcaccaatggacacttggggatatattatctaggttttgcatgatctttatacataaaatacctctaatttttgtacatccacattaatcttgggtagatttggaagttagttaactatatccgtactctctttgaatataagagtcgttcagcaaccttttgttcttaaatcagtccagtatattaaagctttaatgtctattagcgttgtagtattagtagcatcattattgcatgcgactgttttctctttatttaatcagtattgtgatactcttaagttgaccaagaaaacttagtgccttcaaaagtttatcaatggaggctggcaaaaccgctgtaattgctgacacaactgtagtcaggtcaaatgaagtctgatgatggtctgcttgactcctgttatcttaggcagtgtttggttccggagacggctgggatagaatggctccatgccagagagcgtccgtccgggaaattttggggagctggatcattcagcatttgagcataattttccttttttagagccactctgtcctatatggaaccgatccaaacaacaacttactttctgccacagtgactactggctagctataggctatagttgtattcagtattcatattgtcagtccgtttcagcatttctatcatggcagattatgctatatggatccttatcttgcaaagtaataggttttatctgtattattcttagtatatatttcagcatttctgctggcggatcatgccatgtcaacccctaccttgaaaagtatgccctatgtgcagcgcagaagtatcaacctcgggtaacaaggagccatgactgctcctccgatggctatcttgggaacttggtgggaataactagcggcatcactgcagcatctgtattgtcgaaacaaaagcagaaaaaacggtctacatacatgcaaggagatcaggatataatcctcttgtcagtctaaagttctgcccttggttccctgctaactggattgattggccttgccgcttattatctcagttccctatgaacgccttatggctgttgtatgatccataaattatgctaattatattatattgttagtcattctttttactgatcgcatgatcatcttatatatttgcttgtcaactgattttagtttttttcttcttaattctaatcccttcg

SEQ ID NO: 206175 - DNA, 1966 bp, Zea Mays
gccacgccaccttccgtccacgcccacaagtccactcgccacctaccatggctgccggcctgctaacgcgtttcacccaaactcctcccctcttctctctctgcccctggtatgttaagcaattgatgattactaatccactctaacataaactaatcccacgataattacgtcccggcggatatcacccacatctcctgttgctactggagctcgactcatctcgtcctccgtcgcgagacaagaaagtagtaggaagggaggaagatagaggggttgcgtcccagccccacctgctatctcctctcttcttccccttcctcggcggctttccaccattcaggttcagactggaggggccttcctgccaatctccagtgcgtgttcttcagtggaggcgccggccggactcgcgatggagcgggacggccagcagacccgccgcgacaagctcatcatcgatacggatcccggcatcgatgatagcatggctatcctaatggcgttcagagcacatactctggaaatcattgggctcacgaccatattcggcaacgtcgacacagaaggcgcaacatgtaatgcactattgctgggaggaaagccccgtattgctgattttgttcatgggtcagatggcattgggaatctgtttcttcctgcaccctctgctaagaaggttgaggaaagtgctgctgatttcatggttaataaggtctctgagtttccaggagaggtctctgtgcttgctttgggacccctgacaaatgtagcattggccatcaaacgagacccttcctttgcaagcaaggtgaataaaatagttgtactgggtggagctttcttcgtggctggaaatgtcaaccctgctgctgaagcaaatattcttggagacccagaagcagctgacatagtttttacttcaggagcagatgtcattgtggttggcattaacataacaacacaagtctgtttgacagatgagggtctcttggagctaagaaactcaaaagggaagcatgcaccgttcttatctgagacgtgcaagttctacagagattggcatgtcaagtctgatggcttccatggaattttccttcatgatcctgtgagcttcactgccgtgcttcatcccgagtacttcacattcaagaagggtgtggtgagagtggagacccagggcatttgcactggccacactttgatggatcagggattgaaaaagtatgcctttttttctgaataactcataaagattgactatttgatgtttgttagtttcaacaatcttacatacactacatacacattaatatgacataaatctcaccaaattacttataactcttggagtaagcaaaccaaggcaaaagttaccccacaggactatgtttcaacaaatttctatttcacaattgtttctgcttgttcctactatggtgcaggtggaattcagagaacccttggtcagggtataaaccgatttcagttgcatggacggttgatgtgccaaaggttattggctttgtaaagaagctgctcatggcaccatgagcaaggtaccgccatttagcgacatcaatgctctctgatgcccaagaaaatttggcaagtacagagccactctcccagctgcattatacttatttcctggacctggaaagcttcctgttcctccaatagtaagaggatcaccatggttcttttagttgaggtcttaatgatttagatcgacttctatactgcgactaaaaatatcgatatcacaagagtggataaccgtgtctaagccatttcgtccttcaaatctgggagtcaaattgtgaaagcttatgcagcagtctcaaataccatgatgtaaattctggcgtatgacagcatgtctcacacatttgtatcaatacatttcgaatcaatgagatttcccataccctcagtgcatgcaaagatcgtaatcttgttttaa

SEQ ID NO: 206176 - DNA, 1731 bp, Zea Mays
ccactcgccacctaccatggctgccggcctgctaacgcgtttcacccaaactcctcccctcttctctctctgcccctggtatgttaagcaattgatgattactaatccactctaacataaactaatcccacgataattacgtcccggcggatatcacccacatctcctgttgctactggagctcgactcatctcgtcctccgtcgcgagacaagaaagtagtaggaagggaggaagatagaggggttgcgtcccagccccacctgctatctcctctcttcttccccttcctcggcggctttccaccattcaggttcagactggaggggccttcctgccaatctccagtgcgtgttcttcagtggaggcgccggccggactcgcgatggagcgggacggccagcagacccgccgcgacaagctcatcatcgatacggatcccggcatcgatgatagcatggctatcctaatggcgttcagagcacatactctggaaatcattgggctcacgaccatattcggcaacgtcgacacagaaggcgcaacatgtaatgcactattgctgtgtgagagagcaggacatcctgaggttccagtagcagagggcagccacgagcccctaaagggaggaaagccccgtattgctgattttgttcatgggtcagatggcattgggaatctgtttcttcctgcaccctctgctaagaaggttgaggaaagtgctgctgatttcatggttaataaggtctctgagtttccaggagaggtctctgtgcttgctttgggacccctgacaaatgtagcattggccatcaaacgagacccttcctttgcaagcaaggtgaataaaatagttgtactgggtggagctttcttcgtggctggaaatgtcaaccctgctgctgaagcaaatgagcagatgtcattgtggttggcattaacataacaacacaagtctgtttgacagatgagggtctcttggagctaagaaactcaaaagggaagcatgcaccgttcttatctgagacgtgcaagttctacagagattggcatgtcaagtctgatggcttccatggaattttccttcatgatcctgtgagcttcactgccgtgcttcatcccgagtacttcacattcaagaagggtgtggtgagagtggagacccagggcatttgcactggccacactttgatggatcagggattgaaaaagtggaattcagagaacccttggtcagggtataaaccgatttcagttgcatggacggttgatgtgccaaaggttattggctttgtaaagaagctgctcatggcaccatgagcaaggtaccgccatttagcgacatcaatgctctctgatgcccaagaaaatttggcaagtacagagccactctcccagctgcattatacttatttcctggacctggaaagcttcctgttcctccaatagtaagaggatcaccatggttcttttagttgaggtcttaatgatttagatcgacttctatactgcgactaaaaatatcgatatcacaagagtggataaccgtgtctaagccatttcgtccttcaaatctgggagtcaaattgtgaaagcttatgcagcagtctcaaataccatgatgtaaattctggcgtatgacagcatgtctcacacatttgtatcaatacatttcgaatcaatgagatttcccataccctcagtgcatgcaaagatcgtaatcttgttttaa

SEQ ID NO: 206177 - DNA, 1958 bp, Zea Mays
ctgctaacgcgtttcacccaaactcctcccctcttctctctctgcccctggtatgttaagcaattgatgattactaatccactctaacataaactaatcccacgataattacgtcccggcggatatcacccacatctcctgttgctactggagctcgactcatctcgtcctccgtcgcgagacaagaaagtagtaggaagggaggaagatagaggggttgcgtcccagccccacctgctatctcctctcttcttccccttcctcggcggctttccaccattcaggttcagactggaggggccttcctgccaatctccagtgcgtgttcttcagtggaggcgccggccggactcgcgatggagcgggacggccagcagacccgccgcgacaagctcatcatcgatacggatcccggcatcgatgatagcatggctatcctaatggcgttcagagcacatactctggaaatcattgggctcacgaccatattcggcaacgtcgacacagaaggcgcaacatgtaatgcactattgctgtgtgagagagcaggacatcctgaggttccagtagcagagggcagccacgagcccctaaagccccgtattgctgattttgttcatgggtcagatggcattgggaatctgtttcttcctgcaccctctgctaagaaggttgaggaaagtgctgctgatttcatggttaataaggtctctgagtttccaggagaggtctctgtgcttgctttgggacccctgacaaatgtagcattggccatcaaacgagacccttcctttgcaagcaaggtgaataaaatagttgtactgggtggagctttcttcgtggctggaaatgtcaaccctgctgctgaagcaaatattcttggagacccagaagcagctgacatagtttttacttcaggagcagatgtcattgtggttggcattaacataacaacacaagtctgtttgacagatgagggtctcttggagctaagaaactcaaaagggaagcatgcaccgttcttatctgagacgtgcaagttctacagagattggcatgtcaagtctgatggcttccatggaattttccttcatgatcctgtgagcttcactgccgtgcttcatcccgagtacttcacattcaagaagggtgtggtgagagtggagacccagggcatttgcactggccacactttgatggatcagggattgaaaaagtatgcctttttttctgaataactcataaagattgactatttgatgtttgttagtttcaacaatcttacatacactacatacacattaatatgacataaatctcaccaaattacttataactcttggagtaagcaaaccaaggcaaaagttaccccacaggactatgtttcaacaaatttctatttcacaattgtttctgcttgttcctactatggtgcaggtggaattcagagaacccttggtcagggtataaaccgatttcagttgcatggacggttgatgtgccaaaggttattggctttgtaaagaagctgctcatggcaccatgagcaaggtaccgccatttagcgacatcaatgctctctgatgcccaagaaaatttggcaagtacagagccactctcccagctgcattatacttatttcctggacctggaaagcttcctgttcctccaatagtaagaggatcaccatggttcttttagttgaggtcttaatgatttagatcgacttctatactgcgactaaaaatatcgatatcacaagagtggataaccgtgtctaagccatttcgtccttcaaatctgggagtcaaattgtgaaagcttatgcagcagtctcaaataccatgatgtaaattctggcgtatgacagcatgtctcacacatttgtatcaatacatttcgaatcaatgagatttcccataccctcagtgcatgcaaagatcgtaatcttgttttaa

SEQ ID NO: 206178 - DNA, 852 bp, Zea Mays
tcgaatcgggtcggtcttgtcgtgcgtcgtggctgcgcgagcgactcgactgcacccaacccccctcctcccagtccccacacactgcgcgccgccgccggatcctcctagggtttcgccgcaatgtcgctccggccgagcgagcgggagcagatgcggaagggcaactacaagcagacggtggacgcggaggagagtcgctgccgctgcgagggccagatgatggacatgcgcaaggccaagcgcgaggaaagtttccaaaagaagcgctgcgatgggtttcccgcctccgccgccggtgtgccgccgatgggccactccaccgcgctccagcagaagtcccccaatcgaagaggtgatcagcacaggagtggtgccgcgattcattgagtttcttacactttgaggctgcatgggcactcaccaacattgcatcaggcacatcagagaacactaaggtggtggttgagagtggtgctgtgcccatctttgtcaagctactcaactccctcaagcgaggatgttcgtgaatagacatgcactaaattacaagagatgtgtcatattatgaccagaggtggatccagaatttttctatgaccccagccaaatctaccaaattttcttctctttattttatcttaactattttataccatattaaatagagacttatatagagttacatggatcaagccctgggccacagatcgggtggcctggggtgtagatccgccactgattatgactatggatgagacttttgtgatgtaattgatgagactatggatttaaatattgttatgtgattgtgtgtgagatgttttatgtgaaaatatgttgtgttatata

SEQ ID NO: 206179 - DNA, 1236 bp, Zea Mays
tcgaatcgggtcggtcttgtcgtgcgtcgtggctgcgcgagcgactcgactgcacccaacccccctcctcccagtccccacacactgcgcgccgccgccggatcctcctagggtttcgccgcaatgtcgctccggccgagcgagcgggagcagatgcggaagggcaactacaagcagacggtggacgcggaggagagtcgctgccgctgcgagggccagatgatggacatgcgcaaggccaagcgcgaggaaagtttccaaaagaagcgctgcgatgggtttcccgcctccgccgccggtgtgccgccgatgggccactccaccgcgctccagcagaaggtgcggtgcccccctcccttgttcttcctagccccgatctgatccgctctctgcgttagggtatgggtgacgtggtggcactcgatctgctgggttcggatctgattttcttggtgacgggatggcttgccggcgatggtgcaggccgtccactccaacgacccctccgtgcagcttgaggccaccacacagttcaggaagctactttctatagatagcagctttgatatcttgtgggattcttgtatttgttggtgaatccagatgagtgcacggtacttctttcttaattcccactacaactttatgtgaaagttaagtagtaacttgctgattgagtttccataaatttctctcgtagtcccccaatcgaagaggtgatcagcacaggagtggtgccgcgattcattgagtttcttacacgtgaggaccatccccaactccagtttgaggctgcatgggcactcaccaacattgcatcaggcacatcagagaacactaaggtggtggttgagagtggtgctgtgcccatctttgtcaagctactcaactccctcaagcgaggatgttcgtgaatagacatgcactaaattacaagagatgtgtcatattatgaccagaggtggatccagaatttttctatgaccccagccaaatctaccaaattttcttctctttattttatcttaactattttataccatattaaatagagacttatatagagttacatggatcaagccctgggccacagatcgggtggcctggggtgtagatccgccactgattatgactatggatgagacttttgtgatgtaattgatgagactatggatttaaatattgttatgtgattgtgtgtgagatgttttatgtgaaaatatgttgtgttatata

SEQ ID NO: 206180 - DNA, 6178 bp, Zea Mays
atgagatcccacgcaggccagcctcacatcctatatcctctccagtctccaccctcgcggcgcgccccctcaagttctcattccttctcctcgctcgctcgcctcctcctctcctctcctctcctctgcggtgggaactgcggcggcggcttaaaccctcgcgccggcggcttccggcgctccatcagcgccgcgctcgaaggccgcccgtcgctggtcgagcgcgcgaggcagcaggcaccggctaggcaggcagccaataatggcccccaaggccgggcgtggcaagggcaggggcggcggcggcagaggcggcgacaggaggaagaaggaagagaaagtggtgcccagcgtggtggacgtcacggtcgtcaccccctacgaatcccaggtgacactcaaggggatatcgacggaccgtgtgctggacgtgcggaggctgctggggtcgaacgtggaaacgtgccacctgacaaactattcactctcccatgtggcgcgcgggcaccggctggaggacggcgtggaggtcgtggcgctcaagccctgcgctctccggatcgtcgaagaggagtacgcgacggcggagcaggcggaggcgcacgtgcgccgcctgctggacatcctcgcctgcaccaccgcgttcgccaagccccgggacggcgccgccaagcacaggccgtccaagcacggccgtcccgcgtcgcccggggcccatggcgccgtcagcggcgaggccgccgcgccgccgccgatatcggaggcgcacgacatggccgccatccggccgccgccgaagctgggggagttctacgacttcctctccttcgcgcatctcaccccgcccgtccaccttatcaggaggaaggaggcgagcggcgcttctcgggaaggcgtctacttcgaaatcgagtggctaatccaatttgatttgcgctttagtgttaaatcacaaccgtgcaatagccaatctactaggcgtgtaggtatgagcatacgcctaatgaaggagttcatctgtgcccaggtgaaggtttgcaacgggaagcttctgcacgtagttgcttcacgaaagggtttctacttggcagggaagccacaaaacgtaagccactccctggtggacctgctgcaacagctcagcaacgcgtttgctaacgcatatgaggcgttgatgaaagcttttgtggaccacaataagtttgggaatttgccatatgggttccgtgcaaacacgtggcttattcctccaatatatgttgatcccgccacaaagtgcccagcactgccagttgaggatgagaattggggtggaaatgggggtggctgtggtcgtgatggaagatatgatcgcagatgctggtcaaaagagttctctgttctgtctagaatgccatgcaaatctgacgaagaacgggtgatcagagaccggaaagcttttcttttacacaatctgtttgtagatacagcaatttttagagctgcatcaacaatacggcgactcattgatcagtctatgaactcaattggttcccgtggtactactcatggttcaaacgtatttgaggaacatatcggcgacatgaatataactgtgaagaaagatgaggctgatgctagttcaaaggtggacgacaaggttgatggtgttgccttctgtaaaacaggtgctatggatattgcacaaaagaatcttctgaaaggtttaacttctgatgaaaatgttcttattaaggattcttccacactcggagtggtgattgtcaagcattgtggatatacagcaactgtgaaggtttctggacgtgcaaaggacagtaatgatgttaaacaaacacatgacgtctctgataattttgatggaatgctgaacattgatgtgcctgaccatccagatggaggttctaatgccttgaatgtcaacagtctaaggataccactccaaagtgttacgcatccagaaactgttgttggtaagcagaaccctagcccaaagtctcatgcttataaccccgcaaggaaactggcatgcaaaatacttgaggacagcttggtaaagcttgatagcatgcctagcataaattctagaattatcagatgggaacttgggtcctcctggctacaacagttacagaaaaaggattctccggcatctgagaatgttaagcggaatgcaacaaaggctgataaagaatcagctgtcaaaggtcttggaaagcattttgaacaattaaagaaaattaaaaagaaagaatgcaacattgacggttccagttctgagaaggaagaatgtaacagtaactgctcgtcaatgaatgaggatgctttctttcgcttgaagagtttgggagctggccttcatgaaaagtccctcgaagagctcacaaagatggcccataatttctatgatgagactgcactcccaaagctggtggctgatttcgcgtcccttgagctttctcctgtggatggaagaaccatgaccgatttcatgcatacaaggggacttaatatgtcctctttaggtcgtgtggtagagctagcagagaagctcccacacatccagtctatatgcattcatgaaatggttattagatcctttaagcacatcgtccgagctgttattgctgctgttgatgacatgcaaaatatttctgcagctatagctgaaactctaaacatattacttggatctcccagacttgaaaatggtgctgacacagatgcccatattgacaataatttgcgtttgaaatgggttggactggagctagttgcaagagattatgatatgaatagccctaacccatttgacaaatctgacattgtcagcattgttcctgtatgcaagcatgtggtctactcatctattgatggtcgaaacttactggaatcatcgaagatggcattggataaaggaaaattagatgatgctgtgagctatggaacaaaggcattgtccaaaattatagctgtttgtggtccataccatcgactgacggctaatgcatacagccttcttgctgtggtgctttatcatactggagattttaatcaggcaactgtatatcaacagaaggcacttgatatcaatgaaagggagcttggtcttgatcatccggaaactatgaagagttatggggatttatctgtcttctattatcgccttcaacacattgaaatggctctaaagtatgtcaaccgtgcactatatctgcttcagttctcgtgtgggctttcacacccgaattcagctgccacctacataaatgtggctatgatggaagaaggcatgggaaatgttcatgttgctcttcgatacttgcatgaagccctgaagtgcaacaagaggttgctaggagctgatcacatccagactgctgcaagctaccatgccatagccatagccctttcaatgatggacgcgtactccctaagcgtgcaacatgaacaaacaaccttgcagatacttcaggagaaactagggcaagatgacctccgaactcaggatgctgctgcatggctagaatattttgagtcaaaagcattagaacaacaagaggcggctcgaagaggcatgccaaaacctgattcatctattgcaagtaaaggacatcttaggtatgaaactacgaataatctgtgaagtttcatttataaaatatttgtatttagattgaaacatatatctttccagtgtatcagatcttcttgacttcataagcccagaccaggaaagaaaagaaagggatatgcaaaggaaatgcaggcgtgcaaagaataatatcagagctcatcatggtgaatcagttgaagagaaggagaattttcagcttgtttcaggatctcctcttgaagcaagcaaagacagttttcaagaagaaaaactggatgtgcatcctcctgctgtattagaagaaaattatgctgcccatgatgagcataagcaatgtgatgttttatcaccagaagaatattctgatgaagggtggcaagcagctagtatgagaggaagatctgcaaatgtaaggaagaaaagcagtcgcaggaaaccggctcttatgaaattaatggttgatcattttgaaggtagtcatacaggttctgtgtataggactggtttacaacctcaaacaaaaggagacaaagaagattctgtaagtgctcctagccagctttcatttggaagttttttgaaaaccgacaagttgaatggggattccagcattgctgaagataagacgtgcaatggtagcgctaaccaagaacaacggacaaagctaacaggaattaacaggccaaccagtatcgcttccaaattcatatcatacaaagatgtggctgtttcgccccctggcacagtattgaaacccattttggagaagaaggaagcaaaggagaaagatagtggacgtgatattgacctagcactgtcatccgaggaagaagataaaaagtttacagaaaaagagaaagaaaagccaagtgaggacagtagcaaagagattctttcaattcagcgagatttagagagtcatgcagaaatacctcctgacagcaacagtgatgaaggcccatctgcagctagtaaagcgtctggaagcaaactgtcagcttcagctcctccattcaatccaggatcagtgttatcaatgtcccagccatacagcacggtggcagtatatgatgccagtgctatccttcaggcaataccaagtcaagcaatggagattctcccttctgccattgacactagagtgcctcgtggtcctcggtccaccttgtactatcgtactgggcattccttccaaaggaaacaaggttacacgcacagccagagcactattgtaaggggtagctactcccccacaaccatgaatccacatgctgctgaatttgtgcctggaaaaacttcgcaacaatctgatgtggctgacagagaacccagtcctgctaatcctgtggccaattctgatctggatgttgtatcgcagaccacagatgaagcgagggccgaaacgcctgccacagaaaaggcaggtcaggttgagaaagtcgtttcaggtaaaggaaaggaaaacagggggaaagacatcgtgagaaactcatacaaaacagaacttgcaaggcaaattttactcagtttcattgtgaagtcggtgcacgacagtttaggtccctcccgggctgaaccagagaggaagccaagtggatcagatgaagctagtaatgaacagaccagcgtcttaggcaagaacgcttctggttctggtcgcaaagatccagataaacaagagaaagcgacggaggttactaagggcctgaaggatacagagggattcactgtcgtttcaaaacgccgaaggcgtccccagccgttcatgaaccccataaatggcctatattctcagccgtctatttgcacctctgtcagttaaggtcattgcgttttcgaagacctgcaatattttgagagatggacctttgccttcgcctttgcctttgcttagaggattggtagcagagattttccctatccaagtgagctgtgagcagcgagcatttagttaaactgtacaaaaggtttccgggataccctttttgtaataaaagaaactgatgtattccgcagtagctgtagcgctggatataatgttcctttgtatgttatatatgacagaatcataggaaatagcagatgttaagttaatccgatattcagtggagcgcccttgtgctttatgatgttcctcatgttgtgagccccagttaatcattgcaatttgcaaatatgctgccagactgccagagcagaagaaactgaatcttctaggcgccaagagttcgaaatcttattcatggaggcatgtctttggataccttgccagcgggtgagcagcacttcactgagaagcaattgcagctgcagacccaccagatcaccagaccaccggggcccggacaggcgtgaactggtcgatcggcagttttaagctgttgcagcttatactgtaggagtgtagtagctacgtaggagcagcctgtactgtagctgctgagaccacacaaaaactgaatcagttacaaacttgaaactttcattaattgctgtgaaccaatatccgatcgagattgttgtgaatacgctacatatacatattttatgacttattttgcg

SEQ ID NO: 206181 - DNA, 5977 bp, Zea Mays
cgcaggccagcctcacatcctatatcctctccagtctccaccctcgcggcgcgccccctcaagttctcattccttctcctcgctcgctcgcctcctcctctcctctcctctcctctgcggtgggaactgcggcggcggcttaaaccctcgcgccggcggcttccggcgctccatcagcgccgcgctcgaaggccgcccgtcgctggtcgagcgcgcgaggcagcaggcaccggctaggcaggcagccaataatggcccccaaggccgggcgtggcaagggcaggggcggcggcggcagaggcggcgacaggaggaagaaggaagagaaagtggtgcccagcgtggtggacgtcacggtcgtcaccccctacgaatcccaggtgacactcaaggggatatcgacggaccgtgtgctggacgtgcggaggctgctggggtcgaacgtggaaacgtgccacctgacaaactattcactctcccatgtggcgcgcgggcaccggctggaggacggcgtggaggtcgtggcgctcaagccctgcgctctccggatcgtcgaagaggagtacgcgacggcggagcaggcggaggcgcacgtgcgccgcctgctggacatcctcgcctgcaccaccgcgttcgccaagccccgggacggcgccgccaagcacaggccgtccaagcacggccgtcccgcgtcgcccggggcccatggcgccgtcagcggcgaggccgccgcgccgccgccgatatcggaggcgcacgacatggccgccatccggccgccgccgaagctgggggagttctacgacttcctctccttcgcgcatctcaccccgcccgtccaccttatcaggaggaaggaggcgagcggcgcttctcgggaaggcgtctacttcgaaatcgaggtgaaggtttgcaacgggaagcttctgcacgtagttgcttcacgaaagggtttctacttggcagggaagccacaaaacgtaagccactccctggtggacctgctgcaacagctcagcaacgcgtttgctaacgcatatgaggcgttgatgaaagcttttgtggaccacaataagtttgggaatttgccatatgggttccgtgcaaacacgtggcttattcctccaatatatgttgatcccgccacaaagtgcccagcactgccagttgaggatgagaattggggtggaaatgggggtggctgtggtcgtgatggaagatatgatcgcagatgctggtcaaaagagttctctgttctgtctagaatgccatgcaaatctgacgaagaacgggtgatcagagaccggaaagcttttcttttacacaatctgtttgtagatacagcaatttttagagctgcatcaacaatacggcgactcattgatcagtctatgaactcaattggttcccgtggtactactcatggttcaaacgtatttgaggaacatatcggcgacatgaatataactgtgaagaaagatgaggctgatgctagttcaaaggtggacgacaaggttgatggtgttgccttctgtaaaacaggtgctatggatattgcacaaaagaatcttctgaaaggtttaacttctgatgaaaatgttcttattaaggattcttccacactcggagtggtgattgtcaagcattgtggatatacagcaactgtgaaggtttctggacgtgcaaaggacagtaatgatgttaaacaaacacatgacgtctctgataattttgatggaatgctgaacattgatgtgcctgaccatccagatggaggttctaatgccttgaatgtcaacagtctaaggataccactccaaagtgttacgcatccagaaactgttgttggtaagcagaaccctagcccaaagtctcatgcttataaccccgcaaggaaactggcatgcaaaatacttgaggacagcttggtaaagcttgatagcatgcctagcataaattctagaattatcagatgggaacttgggtcctcctggctacaacagttacagaaaaaggattctccggcatctgagaatgttaagcggaatgcaacaaaggctgataaagaatcagctgtcaaaggtcttggaaagcattttgaacaattaaagaaaattaaaaagaaagaatgcaacattgacggttccagttctgagaaggaagaatgtaacagtaactgctcgtcaatgaatgaggatgctttctttcgcttgaagagtttgggagctggccttcatgaaaagtccctcgaagagctcacaaagatggcccataatttctatgatgagactgcactcccaaagctggtggctgatttcgcgtcccttgagctttctcctgtggatggaagaaccatgaccgatttcatgcatacaaggggacttaatatgtcctctttaggtcgtgtggtagagctagcagagaagctcccacacatccagtctatatgcattcatgaaatggttattagatcctttaagcacatcgtccgagctgttattgctgctgttgatgacatgcaaaatatttctgcagctatagctgaaactctaaacatattacttggatctcccagacttgaaaatggtgctgacacagatgcccatattgacaataatttgcgtttgaaatgggttggactggagctagttgcaagagattatgatatgaatagccctaacccatttgacaaatctgacattgtcagcattgttcctgtatgcaagcatgtggtctactcatctattgatggtcgaaacttactggaatcatcgaagatggcattggataaaggaaaattagatgatgctgtgagctatggaacaaaggcattgtccaaaattatagctgtttgtggtccataccatcgactgacggctaatgcatacagccttcttgctgtggtgctttatcatactggagattttaatcaggcaactgtatatcaacagaaggcacttgatatcaatgaaagggagcttggtcttgatcatccggaaactatgaagagttatggggatttatctgtcttctattatcgccttcaacacattgaaatggctctaaagtatgtcaaccgtgcactatatctgcttcagttctcgtgtgggctttcacacccgaattcagctgccacctacataaatgtggctatgatggaagaaggcatgggaaatgttcatgttgctcttcgatacttgcatgaagccctgaagtgcaacaagaggttgctaggagctgatcacatccagactgctgcaagctaccatgccatagccatagccctttcaatgatggacgcgtactccctaagcgtgcaacatgaacaaacaaccttgcagatacttcaggagaaactagggcaagatgacctccgaactcaggatgctgctgcatggctagaatattttgagtcaaaagcattagaacaacaagaggcggctcgaagaggcatgccaaaacctgattcatctattgcaagtaaaggacatcttagtgtatcagatcttcttgacttcataagcccagaccaggaaagaaaagaaagggatatgcaaaggaaatgcaggcgtgcaaagaataatatcagagctcatcatggtgaatcagttgaagagaaggagaattttcagcttgtttcaggatctcctcttgaagcaagcaaagacagttttcaagaagaaaaactggatgtgcatcctcctgctgtattagaagaaaattatgctgcccatgatgagcataagcaatgtgatgttttatcaccagaagaatattctgatgaagggtggcaagcagctagtatgagaggaagatctgcaaatgtaaggaagaaaagcagtcgcaggaaaccggctcttatgaaattaatggttgatcattttgaaggtagtcatacaggttctgtgtataggactggtttacaacctcaaacaaaaggagacaaagaagattctgtaagtgctcctagccagctttcatttggaagttttttgaaaaccgacaagttgaatggggattccagcattgctgaagataagacgtgcaatggtagcgctaaccaagaacaacggacaaagctaacaggaattaacaggccaaccagtatcgcttccaaattcatatcatacaaagatgtggctgtttcgccccctggcacagtattgaaacccattttggagaagaaggaagcaaaggagaaagatagtggacgtgatattgacctagcactgtcatccgaggaagaagataaaaagtttacagaaaaagagaaagaaaagccaagtgaggacagtagcaaagagattctttcaattcagcgagatttagagagtcatgcagaaatacctcctgacagcaacagtgatgaaggcccatctgcagctagtaaagcgtctggaagcaaactgtcagcttcagctcctccattcaatccaggatcagtgttatcaatgtcccagccatacagcacggtggcagtatatgatgccagtgctatccttcaggcaataccaagtcaagcaatggagattctcccttctgccattgacactagagtgcctcgtggtcctcggtccaccttgtactatcgtactgggcattccttccaaaggaaacaaggttacacgcacagccagagcactattgtaaggggtagctactcccccacaaccatgaatccacatgctgctgaatttgtgcctggaaaaacttcgcaacaatctgatgtggctgacagagaacccagtcctgctaatcctgtggccaattctgatctggatgttgtatcgcagaccacagatgaagcgagggccgaaacgcctgccacagaaaaggcaggtcaggttgagaaagtcgtttcaggtaaaggaaaggaaaacagggggaaagacatcgtgagaaactcatacaaaacagaacttgcaaggcaaattttactcagtttcattgtgaagtcggtgcacgacagtttaggtccctcccgggctgaaccagagaggaagccaagtggatcagatgaagctagtaatgaacagaccagcgtcttaggcaagaacgcttctggttctggtcgcaaagatccagataaacaagagaaagcgacggaggttactaagggcctgaaggatacagagggattcactgtcgtttcaaaacgccgaaggcgtccccagccgttcatgaaccccataaatggcctatattctcagccgtctatttgcacctctgtcagttaaggtcattgcgttttcgaagacctgcaatattttgagagatggacctttgccttcgcctttgcctttgcttagaggattggtagcagagattttccctatccaagtgagctgtgagcagcgagcatttagttaaactgtacaaaaggtttccgggataccctttttgtaataaaagaaactgatgtattccgcagtagctgtagcgctggatataatgttcctttgtatgttatatatgacagaatcataggaaatagcagatgttaagttaatccgatattcagtggagcgcccttgtgctttatgatgttcctcatgttgtgagccccagttaatcattgcaatttgcaaatatgctgccagactgccagagcagaagaaactgaatcttctaggcgccaagagttcgaaatcttattcatggaggcatgtctttggataccttgccagcgggtgagcagcacttcactgagaagcaattgcagctgcagacccaccagatcaccagaccaccggggcccggacaggcgtgaactggtcgatcggcagttttaagctgttgcagcttatactgtaggagtgtagtagctacgtaggagcagcctgtactgtagctgctgagaccacacaaaaactgaatcagttacaaacttgaaactttcattaattgctgtgaaccaatatccgatcgagattgttgtgaatacgctacatatacatattttatgacttattttgcg

SEQ ID NO: 206182 - DNA, 6073 bp, Zea Mays
ctcacatcctatatcctctccagtctccaccctcgcggcgcgccccctcaagttctcattccttctcctcgctcgctcgcctcctcctctcctctcctctcctctgcggtgggaactgcggcggcggcttaaaccctcgcgccggcggcttccggcgctccatcagcgccgcgctcgaaggccgcccgtcgctggtcgagcgcgcgaggcagcaggcaccggctaggcaggcagccaataatggcccccaaggccgggcgtggcaagggcaggggcggcggcggcagaggcggcgacaggaggaagaaggaagagaaagtggtgcccagcgtggtggacgtcacggtcgtcaccccctacgaatcccaggtgacactcaaggggatatcgacggaccgtgtgctggacgtgcggaggctgctggggtcgaacgtggaaacgtgccacctgacaaactattcactctcccatgtggcgcgcgggcaccggctggaggacggcgtggaggtcgtggcgctcaagccctgcgctctccggatcgtcgaagaggagtacgcgacggcggagcaggcggaggcgcacgtgcgccgcctgctggacatcctcgcctgcaccaccgcgttcgccaagccccgggacggcgccgccaagcacaggccgtccaagcacggccgtcccgcgtcgcccggggcccatggcgccgtcagcggcgaggccgccgcgccgccgccgatatcggaggcgcacgacatggccgccatccggccgccgccgaagctgggggagttctacgacttcctctccttcgcgcatctcaccccgcccgtccaccttatcaggaggaaggaggcgagcggcgcttctcgggaaggcgtctacttcgaaatcgaggtgaaggtttgcaacgggaagcttctgcacgtagttgcttcacgaaagggtttctacttggcagggaagccacaaaacgcatatgaggcgttgatgaaagcttttgtggaccacaataagtttgggaatttgccatatgggttccgtgcaaacacgtggcttattcctccaatatatgttgatcccgccacaaagtgcccagcactgccagttgaggatgagaattggggtggaaatgggggtggctgtggtcgtgatggaagatatgatcgcagatgctggtcaaaagagttctctgttctgtctagaatgccatgcaaatctgacgaagaacgggtgatcagagaccggaaagcttttcttttacacaatctgtttgtagatacagcaatttttagagctgcatcaacaatacggcgactcattgatcagtctatgaactcaattggttcccgtggtactactcatggttcaaacgtatttgaggaacatatcggcgacatgaatataactgtgaagaaagatgaggctgatgctagttcaaaggtggacgacaaggttgatggtgttgccttctgtaaaacaggtgctatggatattgcacaaaagaatcttctgaaaggtttaacttctgatgaaaatgttcttattaaggattcttccacactcggagtggtgattgtcaagcattgtggatatacagcaactgtgaaggtttctggacgtgcaaaggacagtaatgatgttaaacaaacacatgacgtctctgataattttgatggaatgctgaacattgatgtgcctgaccatccagatggaggttctaatgccttgaatgtcaacagtctaaggataccactccaaagtgttacgcatccagaaactgttgttggtaagcagaaccctagcccaaagtctcatgcttataaccccgcaaggaaactggcatgcaaaatacttgaggacagcttggtaaagcttgatagcatgcctagcataaattctagaattatcagatgggaacttgggtcctcctggctacaacagttacagaaaaaggattctccggcatctgagaatgttaagcggaatgcaacaaaggctgataaagaatcagctgtcaaaggtcttggaaagcattttgaacaattaaagaaaattaaaaagaaagaatgcaacattgacggttccagttctgagaaggaagaatgtaacagtaactgctcgtcaatgaatggtatgcaagtatcagataagatatctgttgatgaaacgaataagggagctgatgtaagcaagttaatgtcagaggatgctttctttcgcttgaagagtttgggagctggccttcatgaaaagtccctcgaagagctcacaaagatggcccataatttctatgatgagactgcactcccaaagctggtggctgatttcgcgtcccttgagctttctcctgtggatggaagaaccatgaccgatttcatgcatacaaggggacttaatatgtcctctttaggtcgtgtggtagagctagcagagaagctcccacacatccagtctatatgcattcatgaaatggttattagatcctttaagcacatcgtccgagctgttattgctgctgttgatgacatgcaaaatatttctgcagctatagctgaaactctaaacatattacttggatctcccagacttgaaaatggtgctgacacagatgcccatattgacaataatttgcgtttgaaatgggtagagagcttcctttcaaaaaagattctgctggaaactgaaagatgaatttgcacacttacggaaatttatcattctgagaggtctctgcagtaaggttggactggagctagttgcaagagattatgatatgaatagccctaacccatttgacaaatctgacattgtcagcattgttcctgtatgcaagcatgtggtctactcatctattgatggtcgaaacttactggaatcatcgaagatggcattggataaaggaaaattagatgatgctgtgagctatggaacaaaggcattgtccaaaattatagctgtttgtggtccataccatcgactgacggctaatgcatacagccttcttgctgtggtgctttatcatactggagattttaatcaggcaactgtatatcaacagaaggcacttgatatcaatgaaagggagcttggtcttgatcatccggaaactatgaagagttatggggatttatctgtcttctattatcgccttcaacacattgaaatggctctaaagtatgtcaaccgtgcactatatctgcttcagttctcgtgtgggctttcacacccgaattcagctgccacctacataaatgtggctatgatggaagaaggcatgggaaatgttcatgttgctcttcgatacttgcatgaagccctgaagtgcaacaagaggttgctaggagctgatcacatccagactgctgcaagctaccatgccatagccatagccctttcaatgatggacgcgtactccctaagcgtgcaacatgaacaaacaaccttgcagatacttcaggagaaactagggcaagatgacctccgaactcaggatgctgctgcatggctagaatattttgagtcaaaagcattagaacaacaagaggcggctcgaagaggcatgccaaaacctgattcatctattgcaagtaaaggacatcttagatcttcttgacttcataagcccagaccaggaaagaaaagaaagggatatgcaaaggaaatgcaggcgtgcaaagaataatatcagagctcatcatggtgaatcagttgaagagaaggagaattttcagcttgtttcaggatctcctcttgaagcaagcaaagacagttttcaagaagaaaaactggatgtgcatcctcctgctgtattagaagaaaattatgctgcccatgatgagcataagcaatgtgatgttttatcaccagaagaatattctgatgaagggtggcaagcagctagtatgagaggaagatctgcaaatgtaaggaagaaaagcagtcgcaggaaaccggctcttatgaaattaatggttgatcattttgaaggtagtcatacaggttctgtgtataggactggtttacaacctcaaacaaaaggagacaaagaagattctgtaagtgctcctagccagctttcatttggaagttttttgaaaaccgacaagttgaatggggattccagcattgctgaagataagacgtgcaatggtagcgctaaccaagaacaacggacaaagctaacaggaattaacaggccaaccagtatcgcttccaaattcatatcatacaaagatgtggctgtttcgccccctggcacagtattgaaacccattttggagaagaaggaagcaaaggagaaagatagtggacgtgatattgacctagcactgtcatccgaggaagaagataaaaagtttacagaaaaagagaaagaaaagccaagtgaggacagtagcaaagagattctttcaattcagcgagatttagagagtcatgcagaaatacctcctgacagcaacagtgatgaaggcccatctgcagctagtaaagcgtctggaagcaaactgtcagcttcagctcctccattcaatccaggatcagtgttatcaatgtcccagccatacagcacggtggcagtatatgatgccagtgctatccttcaggcaataccaagtcaagcaatggagattctcccttctgccattgacactagagtgcctcgtggtcctcggtccaccttgtactatcgtactgggcattccttccaaaggaaacaaggttacacgcacagccagagcactattgtaaggggtagctactcccccacaaccatgaatccacatgctgctgaatttgtgcctggaaaaacttcgcaacaatctgatgtggctgacagagaacccagtcctgctaatcctgtggccaattctgatctggatgttgtatcgcagaccacagatgaagcgagggccgaaacgcctgccacagaaaaggcaggtcaggttgagaaagtcgtttcaggtaaaggaaaggaaaacagggggaaagacatcgtgagaaactcatacaaaacagaacttgcaaggcaaattttactcagtttcattgtgaagtcggtgcacgacagtttaggtccctcccgggctgaaccagagaggaagccaagtggatcagatgaagctagtaatgaacagaccagcgtcttaggcaagaacgcttctggttctggtcgcaaagatccagataaacaagagaaagcgacggaggttactaagggcctgaaggatacagagggattcactgtcgtttcaaaacgccgaaggcgtccccagccgttcatgaaccccataaatggcctatattctcagccgtctatttgcacctctgtcagttaaggtcattgcgttttcgaagacctgcaatattttgagagatggacctttgccttcgcctttgcctttgcttagaggattggtagcagagattttccctatccaagtgagctgtgagcagcgagcatttagttaaactgtacaaaaggtttccgggataccctttttgtaataaaagaaactgatgtattccgcagtagctgtagcgctggatataatgttcctttgtatgttatatatgacagaatcataggaaatagcagatgttaagttaatccgatattcagtggagcgcccttgtgctttatgatgttcctcatgttgtgagccccagttaatcattgcaatttgcaaatatgctgccagactgccagagcagaagaaactgaatcttctaggcgccaagagttcgaaatcttattcatggaggcatgtctttggataccttgccagcgggtgagcagcacttcactgagaagcaattgcagctgcagacccaccagatcaccagaccaccggggcccggacaggcgtgaactggtcgatcggcagttttaagctgttgcagcttatactgtaggagtgtagtagctacgtaggagcagcctgtactgtagctgctgagaccacacaaaaactgaatcagttacaaacttgaaactttcattaattgctgtgaaccaatatccgatcgagattgttgtgaatacgctacatatacatattttatgacttattttgcg

SEQ ID NO: 206183 - DNA, 5984 bp, Zea Mays
ctcacatcctatatcctctccagtctccaccctcgcggcgcgccccctcaagttctcattccttctcctcgctcgctcgcctcctcctctcctctcctctcctctgcggtgggaactgcggcggcggcttaaaccctcgcgccggcggcttccggcgctccatcagcgccgcgctcgaaggccgcccgtcgctggtcgagcgcgcgaggcagcaggcaccggctaggcaggcagccaataatggcccccaaggccgggcgtggcaagggcaggggcggcggcggcagaggcggcgacaggaggaagaaggaagagaaagtggtgcccagcgtggtggacgtcacggtcgtcaccccctacgaatcccaggtgacactcaaggggatatcgacggaccgtgtgctggacgtgcggaggctgctggggtcgaacgtggaaacgtgccacctgacaaactattcactctcccatgtggcgcgcgggcaccggctggaggacggcgtggaggtcgtggcgctcaagccctgcgctctccggatcgtcgaagaggagtacgcgacggcggagcaggcggaggcgcacgtgcgccgcctgctggacatcctcgcctgcaccaccgcgttcgccaagccccgggacggcgccgccaagcacaggccgtccaagcacggccgtcccgcgtcgcccggggcccatggcgccgtcagcggcgaggccgccgcgccgccgccgatatcggaggcgcacgacatggccgccatccggccgccgccgaagctgggggagttctacgacttcctctccttcgcgcatctcaccccgcccgtccaccttatcaggaggaaggaggcgagcggcgcttctcgggaaggcgtctacttcgaaatcgaggtgaaggtttgcaacgggaagcttctgcacgtagttgcttcacgaaagggtttctacttggcagggaagccacaaaacgcatatgaggcgttgatgaaagcttttgtggaccacaataagtttgggaatttgccatatgggttccgtgcaaacacgtggcttattcctccaatatatgttgatcccgccacaaagtgcccagcactgccagttgaggatgagaattggggtggaaatgggggtggctgtggtcgtgatggaagatatgatcgcagatgctggtcaaaagagttctctgttctgtctagaatgccatgcaaatctgacgaagaacgggtgatcagagaccggaaagcttttcttttacacaatctgtttgtagatacagcaatttttagagctgcatcaacaatacggcgactcattgatcagtctatgaactcaattggttcccgtggtactactcatggttcaaacgtatttgaggaacatatcggcgacatgaatataactgtgaagaaagatgaggctgatgctagttcaaaggtggacgacaaggttgatggtgttgccttctgtaaaacaggtgctatggatattgcacaaaagaatcttctgaaaggtttaacttctgatgaaaatgttcttattaaggattcttccacactcggagtggtgattgtcaagcattgtggatatacagcaactgtgaaggtttctggacgtgcaaaggacagtaatgatgttaaacaaacacatgacgtctctgataattttgatggaatgctgaacattgatgtgcctgaccatccagatggaggttctaatgccttgaatgtcaacagtctaaggataccactccaaagtgttacgcatccagaaactgttgttggtaagcagaaccctagcccaaagtctcatgcttataaccccgcaaggaaactggcatgcaaaatacttgaggacagcttggtaaagcttgatagcatgcctagcataaattctagaattatcagatgggaacttgggtcctcctggctacaacagttacagaaaaaggattctccggcatctgagaatgttaagcggaatgcaacaaaggctgataaagaatcagctgtcaaaggtcttggaaagcattttgaacaattaaagaaaattaaaaagaaagaatgcaacattgacggttccagttctgagaaggaagaatgtaacagtaactgctcgtcaatgaatggtatgcaagtatcagataagatatctgttgatgaaacgaataagggagctgatgtaagcaagttaatgtcagaggatgctttctttcgcttgaagagtttgggagctggccttcatgaaaagtccctcgaagagctcacaaagatggcccataatttctatgatgagactgcactcccaaagctggtggctgatttcgcgtcccttgagctttctcctgtggatggaagaaccatgaccgatttcatgcatacaaggggacttaatatgtcctctttaggtcgtgtggtagagctagcagagaagctcccacacatccagtctatatgcattcatgaaatggttattagatcctttaagcacatcgtccgagctgttattgctgctgttgatgacatgcaaaatatttctgcagctatagctgaaactctaaacatattacttggatctcccagacttgaaaatggtgctgacacagatgcccatattgacaataatttgcgtttgaaatgggttggactggagctagttgcaagagattatgatatgaatagccctaacccatttgacaaatctgacattgtcagcattgttcctgtatgcaagcatgtggtctactcatctattgatggtcgaaacttactggaatcatcgaagatggcattggataaaggaaaattagatgatgctgtgagctatggaacaaaggcattgtccaaaattatagctgtttgtggtccataccatcgactgacggctaatgcatacagccttcttgctgtggtgctttatcatactggagattttaatcaggcaactgtatatcaacagaaggcacttgatatcaatgaaagggagcttggtcttgatcatccggaaactatgaagagttatggggatttatctgtcttctattatcgccttcaacacattgaaatggctctaaagtatgtcaaccgtgcactatatctgcttcagttctcgtgtgggctttcacacccgaattcagctgccacctacataaatgtggctatgatggaagaaggcatgggaaatgttcatgttgctcttcgatacttgcatgaagccctgaagtgcaacaagaggttgctaggagctgatcacatccagactgctgcaagctaccatgccatagccatagccctttcaatgatggacgcgtactccctaagcgtgcaacatgaacaaacaaccttgcagatacttcaggagaaactagggcaagatgacctccgaactcaggatgctgctgcatggctagaatattttgagtcaaaagcattagaacaacaagaggcggctcgaagaggcatgccaaaacctgattcatctattgcaagtaaaggacatcttagtgtatcagatcttcttgacttcataagcccagaccaggaaagaaaagaaagggatatgcaaaggaaatgcaggcgtgcaaagaataatatcagagctcatcatggtgaatcagttgaagagaaggagaattttcagcttgtttcaggatctcctcttgaagcaagcaaagacagttttcaagaagaaaaactggatgtgcatcctcctgctgtattagaagaaaattatgctgcccatgatgagcataagcaatgtgatgttttatcaccagaagaatattctgatgaagggtggcaagcagctagtatgagaggaagatctgcaaatgtaaggaagaaaagcagtcgcaggaaaccggctcttatgaaattaatggttgatcattttgaaggtagtcatacaggttctgtgtataggactggtttacaacctcaaacaaaaggagacaaagaagattctgtaagtgctcctagccagctttcatttggaagttttttgaaaaccgacaagttgaatggggattccagcattgctgaagataagacgtgcaatggtagcgctaaccaagaacaacggacaaagctaacaggaattaacaggccaaccagtatcgcttccaaattcatatcatacaaagatgtggctgtttcgccccctggcacagtattgaaacccattttggagaagaaggaagcaaaggagaaagatagtggacgtgatattgacctagcactgtcatccgaggaagaagataaaaagtttacagaaaaagagaaagaaaagccaagtgaggacagtagcaaagagattctttcaattcagcgagatttagagagtcatgcagaaatacctcctgacagcaacagtgatgaaggcccatctgcagctagtaaagcgtctggaagcaaactgtcagcttcagctcctccattcaatccaggatcagtgttatcaatgtcccagccatacagcacggtggcagtatatgatgccagtgctatccttcaggcaataccaagtcaagcaatggagattctcccttctgccattgacactagagtgcctcgtggtcctcggtccaccttgtactatcgtactgggcattccttccaaaggaaacaaggttacacgcacagccagagcactattgtaaggggtagctactcccccacaaccatgaatccacatgctgctgaatttgtgcctggaaaaacttcgcaacaatctgatgtggctgacagagaacccagtcctgctaatcctgtggccaattctgatctggatgttgtatcgcagaccacagatgaagcgagggccgaaacgcctgccacagaaaaggcaggtcaggttgagaaagtcgtttcaggtaaaggaaaggaaaacagggggaaagacatcgtgagaaactcatacaaaacagaacttgcaaggcaaattttactcagtttcattgtgaagtcggtgcacgacagtttaggtccctcccgggctgaaccagagaggaagccaagtggatcagatgaagctagtaatgaacagaccagcgtcttaggcaagaacgcttctggttctggtcgcaaagatccagataaacaagagaaagcgacggaggttactaagggcctgaaggatacagagggattcactgtcgtttcaaaacgccgaaggcgtccccagccgttcatgaaccccataaatggcctatattctcagccgtctatttgcacctctgtcagttaaggtcattgcgttttcgaagacctgcaatattttgagagatggacctttgccttcgcctttgcctttgcttagaggattggtagcagagattttccctatccaagtgagctgtgagcagcgagcatttagttaaactgtacaaaaggtttccgggataccctttttgtaataaaagaaactgatgtattccgcagtagctgtagcgctggatataatgttcctttgtatgttatatatgacagaatcataggaaatagcagatgttaagttaatccgatattcagtggagcgcccttgtgctttatgatgttcctcatgttgtgagccccagttaatcattgcaatttgcaaatatgctgccagactgccagagcagaagaaactgaatcttctaggcgccaagagttcgaaatcttattcatggaggcatgtctttggataccttgccagcgggtgagcagcacttcactgagaagcaattgcagctgcagacccaccagatcaccagaccaccggggcccggacaggcgtgaactggtcgatcggcagttttaagctgttgcagcttatactgtaggagtgtagtagctacgtaggagcagcctgtactgtagctgctgagaccacacaaaaactgaatcagttacaaacttgaaactttcattaattgctgtgaaccaatatccgatcgagattgttgtgaatacgctacatatacatattttatgacttattttgcg

SEQ ID NO: 206184 - DNA, 2029 bp, Zea Mays
gcaaattctccctgagccagaccaattcgaccgtgaactggcccgagtgaagtccacgcatccgtctcttcccgctccggcccattgcccattccgttcacaaattcacttctctctctctccgtcgagatgcttcgtggctccgccgccctcctccgccgcctcgcccctcgtatctcgggcggtggctgcggaaacacgactcaccggcgccttcttcctcccatcgcccccttcctccgcgcccgcttcttgtctgccccgactacctcttcaccgccttcttcgtcttcagctgcctgccacgaggaggatgcggaggacagagacctccccgagatctccaatggtgatgcaggtgcccggctcagcatctccgtcgaccgctccgggctctacaaccccacaggtgttgttgtgtcaaaatgcggcagagcactcgcacgagccgtcgtcggaatccgagctcgtcaagcacatcaagagcatcataaagtttcggagtgggccaatcagcatagctgaatacatggaggaggtgctgacgaacccacagtcaggattctacatcaaccgtgacgtgtttggggaatcaggggatttcatcacctcgccagaggtcagccagatgtttggagagatgattggtgtatgggcaatgtgcctctgggagcaaatgggaaagccagcgaaggtgaatctgattgagcttggcccaggacgaggaacactcttggctgatttacttaggggatcggccaagtttgctaacttcaccaaggcactgagcattaacttagttgagtgcagccctacattgcaaaaaatccagtataatactctgaaatgtgaagatgaacatgttggtgatggcaagagaacagttagcaagatttgtggagcccctgtttgttggcatgcctccctcgaacaggttccctcaggatcaccaaccataatcattgcacatgaattctatgatgccttaccaatccatcagtttcagaaagcatcacgtggatggtgcgaaaagatggtggatattgcagaagattctttgtttcggtttgttttgtctccccatcccacagcctctttaatctacctcgccaagcgttgtggttgggctagctccgaggagcttgagaagattgagcacattgaagtctgccccaaagcaatggagcttaccgaacaaattgcagatagaattagttcggacggcggaggcgctcttattattgactatggaaaaaatggaatagtgtccgatagtctccaggccatccgcaaacacaagtttgtggacatattagacgatcctggctccgctgatttgagtgcctacgttgattttgcttcgatcaagcgctccgccgaggaagcttcagacgatatctcggtccatgggccaatgacgcagtcccagttcctgggttctctcggcatcaacttcagggtagaagctctcctgcagaactgcaccgaggagcaggcggaatcattgcggacgggctactggcgactggttggagacggggaagccccgttctgggaaggccccgaggaccaggcggcacctgttggaatgggcaccaggtacttggccatggccattgtcaacaagaagcagggcacgcccattccgttcgagtgagggtccggctcgggcatagctttccccgttctgttggaatgtagcagcgttgtcgaggggttttgatgatcagatcagccaattcttctctgctttttctcatgtacacgcaaaacatggtctcgttattttgtgacggacggaaggagggtacctactcgactgaaacagctcataattgtgtcctatgccattacaatcgcaatgttcctctcctgtcgaaatgggcctctgcacgctattattcgagacgtgcagcccctgagaaagaagcgtgcgtctgttggccacttggcctgcagagtcagcctgtttagatggtacagtactgcactacatgatgatgatgctttataaatagtagcttgtcta

SEQ ID NO: 206185 - DNA, 4059 bp, Zea Mays
gaggatctttatttcttggatcctaatacaaactacagcctgcgcctttatagaggcaggcgacttacaactcaagaaaacaagcagatatcttaaggaactaatctgctattatttggcaactaactagctaaggaaactaagcagatatcttaaagaactaatctgctattatttggcaaccaactagctaaggaaactaagtatccctgatttgtagccacggttgtttcctgccccttttctccttatttgctgattgtctttccttaactgtccctgctggcattcggtcccttagcggcccttctccttgaatactggcgcccccacaaaggttctgtgctacttgggtccacttttccccagaaacctttctttattttggcaagatgagtattaggtccctaagatgaaagcttacatcagtgatcctgaagacctaaagcaagatagcacataccaggaaaaatgggatgacatgataataaattttttggcagaatgtttggatgttgtgaatgatactgagtgggtcatttctttgggtgatgcatttgcacggcagtatgatctgtattctatatctgacggacacgctgctttgctgcacagatgcttgggaatgcttcttcagaaggttgatgataggatttatgtcagcgagaagattgattggatgtgtagacactcaagtatgtctattcctattaatcgccttggacttgctcaaggcatcgggctggttgcggcttctcatttagatacagtgttggagaaactgaagaacatactagatagtgcagagcaaagtgctttccagaggttcctctcatttttctcattcggcccaaaagtggaagatgttgatgacacatatgcagcattggcgttgatgtatggttatgccgcaagatatgctccatcaactgttattgaagccagaattaatgcacttgtggggagtaatatgcttggaaggttgcttcatgttcagcatcctactgcaaagcaagctgtgattactgcaatcgaccttttaggtcgagctgttattagtgctgctgaaatgggaatctcattcccactgaaacgaagagatcagttactggagtacgttttaactctaatgggtagggatcaaagtaatgatctcactgatttcaacactgagcttttgcacacacagagccttgctttaagtgcctgtactactcttgtctcgctagaaccaagattgccaatggaaacaagaaaccgtgtcatgaaggcaacattaggtttttttgctttgccaacagagccctcaagcattgttgagagtctcgtaacaaacctaattattctgttaggtgccatcctgcttacaagtggtgaagatggtcgaagtcgagcagagcagttgctgcatattcttaggcagcttgatccatatgtatcatcatctctggaacaccaaagaagaagaggatgtgttgctgtacaggaggtgttaataaagtttcgcaatctttgttctggtggattcggtgcattgggctcctatccaactttcacaatgaataaacaaatcgatcgagggactaggagcttgtcaagtttgccatctgcatttgtgttgcctagtcgagattctttaagcttgggagagaggacaatggcataccttcctcgttgtgctgatacagacacggaagttaggaaagttgcaattcagatcattgcacttttcttcgacatttcattgtcacttccaaagcagaaggcatatcctaatgatattgatctggaatcctcgtatagtgctttgtcctcccttgaggagttagtctctattgtcagaagggaggcatctgttgatcaaactgaactatttcagagggttgtatcctcagtgtgtattctattatcaaaggatgagctggtcgtcttgctacactcttgtacgttggcaacatgtgataagataaaacagtcagcagatgcttcaattcaagctattatcatgtttattatcagaagaggcaaggagctacgtgaagctgatgtctcgaggacaactcaatctttgctctcatctgctatttctcttactgacacacactcacgccaagaggttctgaatgctatatcatgcctagcagaaaacaccaatcacgttgtggtctttgatgaggttctatctgtggctggaaaagatatctgtacaaaagacataccaaggattcgtggaggctgggccatacaggatgttttttatgcattttcccagcacaaggagcttgcacttctattcctggagtacactttatctatacttcacaaagaacctgtcataataaacagttctgagaagggggagagtacctctgagtcattggctgatgactgtattctacaggcaactatgtttgctctcaatgcatttatgagaggtggtgggaagattgggaaacaagcagttgagaaaagttacccttctgttctttcgggccttatactgaagctcggaagtcttaatggtgttgctgaattgggccgaaatgaacttctacgatcgttgttaattgcatttcagtcattttgcgaatgtgttggtgatgtagaaatgggaaagctattagctcgagatggggaacaaactgagaaggacaaatggatcgagcttgttcaggaaatcgcatgcagttcctcagtaaaacgaccaaaagatgttctgccaacttgtgttatcttgtgtaatgctctcaaccgaaatcagagggctgaaagggaggctgctgctgctgcactatcagaatttatccaccacattgaaaaagaacctacattgcttgaacaaatggttgaggaaatgtgtcaacatgtttctgatgattcaccaactgtcaggagcctctgtttgcgtggacttgtgcaggctcctgagagccacatgcttaaatacatccagcaagtgttaggagtaatattagcacttcttgaagaccccaacgagtctgttcaattaactgctgtccaatgcttgttaaatgtccttaatttgtcagaacaagatgctgttggtccaatcttaataaatctcttagtaaggctgcgaaatcttcaggtctcaatgaatacgaaaatgaggtccaatgcgtttgcagcttatggtgctttaagtgcatatggtgttggtttgcagcgcactgcttttattgagcagatacatgctacccttccccgtctgatcctccatcttcacgatgatgacctaagtgttcgtcttgcctgtcggaacacattccagctccttgcgacattgatggaagtagagggcttgtctgtgctcctcagcaagcagtattttgcttctgatcgccgttctgactatgaggacttcattagagacttaacaagacaactttgtcggttgtctcccgccagagtcgacagctacctagaatcggctatccaggcattcgatgcaccttggccagtcataagagcaaacgcagtttgtttggtgagttgcatgctatcctttttggatgatcagcgattcattgctccttatttctcccaggtatttgctacgttggttggtagaatgagccaatcgccagacgcaattgttcgagcatcagcatcgtctgcgctgggcattctgatcaagagatctaacatgctgaggtcactggtttcacgatatgatcgagcagattcatcacgcaattcccagagcggtgattctaacaccaagacaccatcagagtttcaagaacaggcagaaggaaatccgaatgatggcgcaagtggagcggcaataaaggggactgaagccgatcactgatgtaaatttactcgtatatacgtatagtgttctagctatgcatgcttgtgtatatgctgtacttccctcgcaaataggaacaggagagcaaatttatgctgccatgtcaatagatcttcagtacacctgtaaagcaaccactcacagttagatgattatttattgaatcaaatattatttatatattgaattgaattttcttcgatgcagtatgtcgaatcttc

SEQ ID NO: 206186 - DNA, 1839 bp, Zea Mays
atagccttcccattggaaagcgaacgctcacagctcacagctcacgcacccatccacctccaaagtccaaaagcggaacccacgcctgccgcaacggcgaaaccgtcggaaccctagatctctctcgcccgcgctccgaaaccccagatccgccatgcaccagcctagagctcgctacccacccggctatggctccggcggtggaggcggagccggacgtggcggtggaggcggaaatggaggaggtggcggaaaccacaactactacggccgaaacccgcagcaacaccactaccaccagcagcagcagtcgcagcactctcataggaactcttcgtaccagcaacagtggctgcggcgagaccaggcccccgccgttgcgggggcagcgtccggaaacgctgtggccaagacggcgtctcagcttgacgccgtaggctcgagctcccaagactggaaggctcaactaaatataccagctccagatacacgctacaggacagaggatgtcactgcaacaaaaggcaatgagtttgaagattatttcttgaaacgtgaactgcttatgggaatctacgaaaagggatttgaaagaccatctcctattcaagaagaaagcattcctattgcgctgactggaagtgatattcttgcaagggcaaaaaatggcactggaaagactgctgccttttgcattccggcacttgaaaaaattgatcctgaaaaaaatgctattcaagttgttatactagtaccaacaagggaactggctctgcaaacttcgcaagtctgtaaagagctcgggaagtaccttaacattcaagttatggttagcactggaggaactagcttgaaggatgacatcatgcgtttataccaacctgttcatttacttgttgggactcctggccgaatacttgatcttaccaggaagggcatttgtgtgttgaaagactgttcaatgcttgtcatggatgaggcagacaagctattagctccagagttccagccttctgtggaggcacttattcatttccttccacctagtcggcagctgttgatgttttcagcaacctttcctgtaactgtcaaggaattcaaagataaatatctgcctagaccttatgtgattaatctaatggatgaactgaccctgaaaggaatcacacaatattatgcttttgtcgaagaaaggcaaaaagttcattgcctgaatacacttttctcaaagcttcaaattaatcaatccattatattctgcaactctgttaatagagttgagctactggctaagaaaataactgaactcggttattcatgcttctacattcatgctaagatgttgcaagaccacagaaaccgagtgtttcatgattttcgtaatggtgcttgcagaaaccttgtgtgcacagatctgtttaccagaggaattgatatccaggctgttaatgtggtcattaattttgacttccctaagacatctgagacatacttacacagggtgcttttttttaatcttgtctagaagctgtttgttttataaccttcctgaattaaatatttatgtgtgttgtcaaattcctaggttggccgttctgggagatatggacaccttggtttggcagtgaacttgatcacttatgaagaccgtttcaacttatataggattgagcaagaacttggaacggaaattaagacaatacccccacagattgacctgtccatatactgccaatgatatgtgacagtttcaatgagcatcggacacattttatttattttgagaacatctgtacatagcaacccatcaatagaatcaaaactaaggtgataccccct

SEQ ID NO: 206187 - DNA, 953 bp, Zea Mays
caccctgcacagcgtgcccagccccggccgcatgctctcagcagaccagcgcagcgcccagcaccagcagccggccgcccgacgcccatcctcagcaaaccagcagccggaggctgctttacatgcctttgggaacatctgtggtgttggtagacaagaagatcagatgaaactggatagcgaagccgaggaaaacttgaagcgcttggtctatacgactgcagcaaacagtccaaaattaaccccttcagctcttctactatcagttctgcaacaagacccagacgttaggatagctggctacagagtaataacaggactggtcatccgggaatggtgcttaagggaggtttgcttaaattcagagataatcagatttgttacggatccaacaatggagacaacaaaacttggcatggaaacccggtatggctgctgtgtggcaatcaacaaggccctatcatcatcccatcttctgcatgaagcaagtctttctgaactcgttgggaagttgaatgatgcggtgaaacggggcccttacctttctgataggaagcgtgtggaggcacggccggtggttgatactgcagagaggttttaaggtgccctcgagtattcacccaaagtaaacgatcactctcacagcgtagctaggaggtaactgagcgtgccctgcgtctcatacggttggcttatgggtaacagacatatatatgatgtacctggacgatggggaggacaatgtgtagttgaattcactgagactggcacaatacctaaacttacaaagcaaagatgttgtttcttctattttgctttgtggatgtcttatgcagcccctacctgcgaaagaaaatcatctgttgcaggaccgtgccaaattttgatgaaattgcagatgcagccggcactaatttttcatgtattgaatgctcaatcgaatcaggtaattt

SEQ ID NO: 206188 - DNA, 1987 bp, Zea Mays
cagcccgtcgcctccactcgtgaaccgggacacacgtacgttgaacaaacacccaaggcctgacgagacgagatccggacctccgtcctcccaactagggcgcgcgcgcgacctcggcaccggcggcctcgatccatcgttctctcggatccccgccagtgcatgccctggaacggacggacggaatggcagcgtcgccggaccacctcttcggcctgcgcaacagcttctacgtcggcgcataccacgccgtcatcaccagcagccagtccctccccgcgcacgcgctctcccccgacgacctcgtcgagcgcgacgccctcatgtaccgctcctacatcgccatcggctcctaccagctggtgatcggcgagatcgggcccagcgcggccacgccgctccaggccgtcaagctgctcgccgtgtacctctccggcgacggcgggaacagggaatcggtggtctcgaggcttcgtgagctcctgtcagacgcggcggtcgggagcaatccgattctccgggtgatggccggcaccgtcttcatgcacgaacgcgattacgccgaggctctcaagcacaccaactccggtggcagcatggagctgcttgcgctgaatgttcagatataccttcaaatgaacaggacggaccacgcagagaagcagctcagggtgatgcagcagctggacgaagaccacacgctgacgcagctcgccaacgcatgggtcgaccttgtgctgggtggttccaagatccaagaagcgcgcctcatcttccaggacctgtccgagaagtacccgacgacctgcacgattcttaacgggaaagccctgtgctcgatgcacatgggcaacttcgaggacgcggaggggttgctgctcgagtcactgaacaaggacgccaaggatactgagactctcgccaacctcacggtgtgcagcctgaacctggggaaacccgcaacgcgctacctcaaccagctgaagctcgcacacccggaccacgcgctggtgaagcgaatgtcctccgctgcagagagcttcgacagagcctgccaagcaatggcgtgaacctcgtttgcgaaaattacatttgttttccctaggatgagtcggaataacatcgtgatctactctgaagcaaagcagctagtgcatggctttctcatgggcagcttggactccaccgtcggcatgcttttccactggtctcggatagtacattcggcctcgctggtgcgctggaaaggcccaggtgtttcctttaccttttgggctatgctctctctctctctgacgccttgttgcgatgggagtgactgaggggaagcaatccttgaaatcctaaacaggagatagcatgaaacagtatttggttcaggacactaaaaaaatgctactattgaagattcaataacacggccagtaaggaaagccattcatgttatgcctggagactacagcgtgatttgatttgtggacactaatgttattctagcctgtattgttaaatcacatagggagaaaaaaaacgtaactgattatatatacagtgatctggaactgaagcctgttggtaccttggaaaccaagcttgtgcaggcaagagatttgacaatcaaagacctgataggcaaataaaccagacgaagtgaagagagaagtagaacaattgttaagtttcgttgcttgtttgtgagccgtgtgcttgtttatgatgacgacgacgcgcattcaagaaatccgaattgattgggtgtgctgagggatctacaaccaggaaaaagcgaaggatgtctggttaaaaattgtaaaggatgcggagattcgaagggacatgcatgaaagtatctggggtcaggtggtctggtgagcctgattttttcacgaaagcagcaatgctcgcttttctttttccctggccctaggaaactgtcttatttcttttttgcttctttttgaaagacaagctttaccgtgccttgcta

SEQ ID NO: 206189 - DNA, 856 bp, Zea Mays
cgctcgttgatctgtgggcccgttcgtcgcgatcactaccgctgggacccaccaccctgtaaccctaacccatcttccacgcacgcgtaactgggttgttgcaaccacccatcgactagggcccctctgtccctatatacggcgccccatcgtgcctcaatccaagcactgagtcgcacccccgtcgtggaaagggaacaacatcgcccccaacaccgagagagatagggggatctgccgcacgagcatcctgcagggatcaccgctctgggctggacagatggtcaaggcaagtctccagagcacgtacgttcgtgacctcatatggtgaggttggtggatgggagcatggttgtttctcaccgaagtttccctccgccaaggaaagccccctgccgcgggccggcgttgctgcttcaccactgtcgttggtgaagttcacgcccgggtttggtgcccctaaaacccgggtgtgataggtcatgaagtacctaaagaccaaattggagaagtacctggagttgtaccaaaggattgttgtgcccttgatcacttttctttacttgataatcttctcgataatcattgtgacatgctcaggttaacttgatgggacctaataggttaccctagtattgttcaccctacaccttgcaaacaaatgaactattgggtagtcttgctattgccatacctgattttagaattaatattatatcttaattatgatcatgctccattattattgttggtttaactattgttcatgataagattatcgtgttaattggaacatggagtgaccatgtcacacctggttttagaaggcaaaccgaatgcgaaccatgtacgcgcc

SEQ ID NO: 206190 - DNA, 1473 bp, Zea Mays
cgcacccccgtcgtggaaagggaacaacatcgcccccaacaccgagagagatagggggatctgccgcacgagcatcctgcagggatcaccgctctgggctggacagatggtcaaggcaagtctccagagcacgtacgttcgtgacctcatatggtgaggttggtggatgggagcatggttgtttctcaccgaagtttccctccgccaaggaaagccccctgccgcgggccggcgttgctgcttcaccactgtcgggtggaatgggacgccctcggctgactaattaaaaaggtagtagaggactaccttacccaaaaggggcaatggcggtagaggagctgcgtatagggaagttctcgggtcgatcatgctacgatggcttttcggacgagagatgcctatactgcctttctcaaaaaccgtagcgggttttctgaagctagtggaactttgtaaaggtctcatagtggatccctagccattcacctcggaagtgtctaagggccttacaaaccctggctagacgggatacacgacttgtgggtaaagggcgcaacctctgcagagtgtaaaactggtatatcagtcgtgctcacggttaagagcgacttaggactctcgcatgattaatttatggaactaaacttaatttgtcatatgcattgcattgtgggtgttgttattaattttgatctcataattatttgggttggtatctacttttgcttagtaactgctaataaaattttgaccaactctaaaagcaatgctcagctttaaccatatcctttggtaagtcttacacttcatatgagcccccacctttggtgagttcatgcacattattccccacaacatgttgagcgatgaacgcatgaatgatgtcgcgatgatgttcgtgagaggtctaggtcgtcgtctcccagtcaactatggctgctggatcgttgtcttcatatgatataattatttaattattttgtacacaattcccatatatattaaagatttgacatttgtttatttaccatgagtcatcatacagttggtgaagttcacgcccgggtttggtgcccctaaaacccgggtgtgataggtcatgaagtacctaaagaccaaattggagaagtacctggagttgtaccaaaggattgttgtgcccttgatcacttttctttacttgataatcttctcgataatcattgtgacatgctcaggttaacttgatgggacctaataggttaccctagtattgttcaccctacaccttgcaaacaaatgaactattgggtagtcttgctattgccatacctgattttagaattaatattatatcttaattatgatcatgctccattattattgttggtttaactattgttcatgataagattatcgtgttaattggaacatggagtgaccatgtcacacctggttttagaaggcaaaccgaatgcgaaccatgtacgcgcc

SEQ ID NO: 206191 - DNA, 351 bp, Zea Mays
ccgtcgtggaaagggaacaacatcgcccccaacaccgagagagatagggggatctgccgcacgagcatcctgcagggatcaccgctctgggctggacagatggtcaaggcaagtctccagagcacgtacgttcgtgacctcatatggtgaggttggtggatgggagcatggttgtttctcaccgaagtttccctccgccaaggaaagccccctgccgcgggccggcgttgctgcttcaccactgtcggtgatggtgtcagagttggcgtgggtggagaggtaggactcccaccaagattgagctgctcccctcaacaaacggggaccatacagaactttctctctgtcatc

SEQ ID NO: 206192 - DNA, 3704 bp, Zea Mays
ctttcgtcacttctcaccgaaaaccaatcgccctcctccccacgcctgtggacccaaaaaaaatcaattcgattttctctcttccgttctccccacacaagaattgacctccgttttattgccgctcatctcaatctaatctctctctctagctcccccaatcgccagatcacagagagaggggaagagcgtgaggagggacgagaaagccaagctgtatagcgagaaagctcagttgagttctgttctgcttttgtcttcctctctcgctggatctactactcccaccactgcctctgcctcggcctcgttgctgctggctgcgtgcgtgactgcgtgcctttgcccaaagcaagcctgcctgctcggtggctcgcttcggttgcagctgcagtgacctcaccctgcctctatgcttgctctcccaccatgtggtggtggtcttcgcgctccaactaacccccaccagcagcgcatcacaccaccgcatcgcaccgcgatgccaaccctggtggcgtcacgcggcccggcggcttcttccgcgcgccgcattgcaatgccgccaccgccgctggacggacccgtgaaggagtactagctagctagctagcccagcggcagcgggcgaggcgaagggagcggaggtcgttcttgcagacatgttcaagtcgcggtggcgcggcggcagggccaaggccgtgttcaagctgcagttccacgccacgcaggtgcccgagctgggatgggaggcgatggtggtggtggtgacgccgcaggacgctggccggccgacggcgcggtcggagcccgcggaggtcaccgatggcgcgtgccggtgggcggcccctgtcatggaggccaccaagctccccaccggcaaggacaagatctaccagttcctcgtctatgagaccgggtcgagcaaggcggcgctgctgggggaggccacggtgaacctggcggagtacgccgacgcgttgaagccgtcggtggtgacgctcccgctcaagggcagccccggtgcgctgctgcacgatggattgttgataagaaaaccgccagacatgaggtttccatcaagaagaaatgtgcctatgtctgctgatccagtgggccatctccacaatggcagcagtttcgatgccgtctcagtgtcgggttcagatggaagttctgggcgatatacccccaaaattagcgcaagcacacacaactcatttcttcaggatagtagcaatgctctctcgccatttgccaacaatcgcaccgtgaggaacccattgaccagttctggtgactggtcaggaagctcagctcctgatgctagtacggatgggtcaacaagcaattctggtgaggcagggttaagaggggaagaggatgatgtagataagctaagaagtgagatagccactttaaccaggaaagtggatgtttcagatatggagttgcagactctccgaaagcaaattgtgaaggagagtcggcgtgggcaagatctcttcaaggagatgagtagcctgagggaggagagggatgcactcagaagagaatgtgaaagactcagaggggcaaagaatatgatccatgattcaaatggctcagagaaacggctctcagatggggatgacccatggtcacagattgaagaactgaagcaagatctgagtcatgagaagaatctaaattcagatcttcgtctgcaacttcaaaagatgaaggaatccaactctgagctgcttctggctgtgaaagatcttgatgagtcgttggataaaaaaaacagagagatttccattttgcaagaggatacacaggaggatcagcaggaggcagaatatgagcatgcgctgtcaaatgtgcacaactctggacagaaattagccttatctgaaacgagttcataccaagagaaggaagatgagcttatgctggatgcactggcaaagaagcgtgatgacatctctacctctgagcttgaaaagaaagtccttgagttgagcaatgaaatcgagttgtacaagaaagaccgtgaggatatcgagatgcaaatggagcaacttgcacttgattatgagattctaaagcaagagaaccatgacgtgtcttcgaggctggagcaagcacaactgagggagcagctaaggatgcaatatgagtgttcggctcatttagctattataagtgatcttgaggccaatgttgagagcttggataatgagctccagacacaggctaaaaagtttgaagctgacatagcagaaataacgagcgcaaaggtggaacaagagcagcgggccattaaggctgaggattctctgaggaagataagatggaacaatgcagctactgcagaacgacttcaggaggaattcaaggtgttgtcttcacaggtatcttccgctttcagtgcgaatgaacgacaccttgtgcaagcaaggaaagaggtcgcggagctgcagttgcagaagagccagttagaagagttgctgcagaaggcccaaggagatcttggatcagttcaggatcagcaccgggcgaaggtccaacagttaataaccctagtggatttcaagtcaaaggagatagacaggctactgacggagctcaaaagcaagagtgacgagttccatgaccaaaaaagatgcgatgaagcaaggctgaatgctctgtcagaagaaatggacctactcaatgccaagatcgacgagctatccagcgagagaaacgacctctctgaaaagaacgcgcagaaagacaaggaactggccggaatcagtgaaaaggacatgcagttgcaagacaagactgctgagatcacttcactaaataaggagcttgtatctctcaaagaccaagtgaagacgcatctggacgaactgcacgatttaaaatgtctgaaggacaggaaggaggagacaattggaaaactgcaaatagatattgggtcactgaaactccagtgcgacaacttgaagacttcgctgtccaagaaggagtccgagaaagataaccttgcctctcaggtgctggagctgagaagatcccttgagacccgggaagaaggggcaaaggcaaatggccaaaattcagacgcgaagaacaatccgcatactaataataagcgcatgaagcacaataccggctccaccgggagcattgctgcactgccaggcaccaacggacagggtgaagacgatggtgactgcaatgggcatgacatgaggaacgccgcagcggacggggcagcgaaggagctggcctcgctgaaggagagcagcaaggcggtggaggaggagctgaaggagctgcacgagcggtactcggcgattagcctgaggctcgcggaagtggagggcgagcggcagcagctcgtgatgaccgttcggtcgctgaagaactcctccttgcggtgactgatgcatctccacccaaattgctgtagctaaaaggatttagacgataggtttgtccgtgacgtggttttgtccgtcagagttacagtacacagcatgtagatctcgtcacagtaaaatgtgcagtaatatagccataagttgtaatagttgtcttaccctctctacagtgtcagtgtgtcgtgctgtataatttccgtggcgtcattgtgttgtgaagtaaggaaaatgagaaggaaaagagtggtctttcagtttaatctcagaaacgcttgcgttgtgttccaa

SEQ ID NO: 206193 - DNA, 3828 bp, Zea Mays
ggcagcaggcagcacggcaaggccgcagcatatccgtagcaacgctgcagtactttcgtcacttctcaccgaaaaccaatcgccctcctccccacgcctgtggacccaaaaaaaatcaattcgattttctctcttccgttctccccacacaagaattgacctccgttttattgccgctcatctcaatctaatctctctctctagctcccccaatcgccagatcacagagagaggggaagagcgtgaggagggacgagaaagccaagctgtatagcgagaaagctcagttgagttctgttctgcttttgtcttcctctctcgctggatctactactcccaccactgcctctgcctcggcctcgttgctgctggctgcgtgcgtgactgcgtgcctttgcccaaagcaagcctgcctgctcggtggctcgcttcggttgcagctgcagtgacctcaccctgcctctatgcttgctctcccaccatgtggtggtggtcttcgcgctccaactaacccccaccagcagcgcatcacaccaccgcatcgcaccgcgatgccaaccctggtggcgtcacgcggcccggcggcttcttccgcgcgccgcattgcaatgccgccaccgccgctggacggacccgtgaaggagtactagctagctagctagcccagcggcagcgggcgaggcgaagggagcggaggtcgttcttgcagacatgttcaagtcgcggtggcgcggcggcagggccaaggccgtgttcaagctgcagttccacgccacgcaggtgcccgagctgggatgggaggcgatggtggtggtggtgacgccgcaggacgctggccggccgacggcgcggtcggagcccgcggaggtcaccgatggcgcgtgccggtgggcggcccctgtcatggaggccaccaagctccccaccggcaaggacaagatctaccagttcctcgtctatgagaccgtgaccatccagcgggtggtgggtggcgccggtgggtgcggagacgacgcgagcggcgagaacggcgacgctctgccagcggtggcgaagacgccaaagaggaggacgacgctgcagagccagctgagcaagtttgaggacgaggacagcgagaaggcaagagcagccgcggatgcgatgagtcctgtgcaagatggattgttgataagaaaaccgccagacatgaggtttccatcaagaagaaatgtgcctatgtctgctgatccagtgggccatctccacaatggcagcagtttcgatgccgtctcagtgtcgggttcagatggaagttctgggcgatatacccccaaaattagcgcaagcacacacaactcatttcttcaggatagtagcaatgctctctcgccatttgccaacaatcgcaccgtgaggaacccattgaccagttctggtgactggtcaggaagctcagctcctgatgctagtacggatgggtcaacaagcaattctggtgaggcagggttaagaggggaagaggatgatgtagataagctaagaagtgagatagccactttaaccaggaaagtggatgtttcagatatggagttgcagactctccgaaagcaaattgtgaaggagagtcggcgtgggcaagatctcttcaaggagatgagtagcctgagggaggagagggatgcactcagaagagaatgtgaaagactcagaggggcaaagaatatgatccatgattcaaatggctcagagaaacggctctcagatggggatgacccatggtcacagattgaagaactgaagcaagatctgagtcatgagaagaatctaaattcagatcttcgtctgcaacttcaaaagatgaaggaatccaactctgagctgcttctggctgtgaaagatcttgatgagtcgttggataaaaaaaacagagagatttccattttgcaagaggatacacaggaggatcagcaggaggcagaatatgagcatgcgctgtcaaatgtgcacaactctggacagaaattagccttatctgaaacgagttcataccaagagaaggaagatgagcttatgctggatgcactggcaaagaagcgtgatgacatctctacctctgagcttgaaaagaaagtccttgagttgagcaatgaaatcgagttgtacaagaaagaccgtgaggatatcgagatgcaaatggagcaacttgcacttgattatgagattctaaagcaagagaaccatgacgtgtcttcgaggctggagcaagcacaactgagggagcagctaaggatgcaatatgagtgttcggctcatttagctattataagtgatcttgaggccaatgttgagagcttggataatgagctccagacacaggctaaaaagtttgaagctgacatagcagaaataacgagcgcaaaggtggaacaagagcagcgggccattaaggctgaggattctctgaggaagataagatggaacaatgcagctactgcagaacgacttcaggaggaattcaaggtgttgtcttcacaggtatcttccgctttcagtgcgaatgaacgacaccttgtgcaagcaaggaaagaggtcgcggagctgcagttgcagaagagccagttagaagagttgctgcagaaggcccaaggagatcttggatcagttcaggatcagcaccgggcgaaggtccaacagttaataaccctagtggatttcaagtcaaaggagatagacaggctactgacggagctcaaaagcaagagtgacgagttccatgaccaaaaaagatgcgatgaagcaaggctgaatgctctgtcagaagaaatggacctactcaatgccaagatcgacgagctatccagcgagagaaacgacctctctgaaaagaacgcgcagaaagacaaggaactggccggaatcagtgaaaaggacatgcagttgcaagacaagactgctgagatcacttcactaaataaggagcttgtatctctcaaagaccaagtgaagacgcatctggacgaactgcacgatttaaaatgtctgaaggacaggaaggaggagacaattggaaaactgcaaatagatattgggtcactgaaactccagtgcgacaacttgaagacttcgctgtccaagaaggagtccgagaaagataaccttgcctctcaggtgctggagctgagaagatcccttgagacccgggaagaaggggcaaaggcaaatggccaaaattcagacgcgaagaacaatccgcatactaataataagcgcatgaagcacaataccggctccaccgggagcattgctgcactgccaggcaccaacggacagggtgaagacgatggtgactgcaatgggcatgacatgaggaacgccgcagcggacggggcagcgaaggagctggcctcgctgaaggagagcagcaaggcggtggaggaggagctgaaggagctgcacgagcggtactcggcgattagcctgaggctcgcggaagtggagggcgagcggcagcagctcgtgatgaccgttcggtcgctgaagaactcctccttgcggtgactgatgcatctccacccaaattgctgtagctaaaaggatttagacgataggtttgtccgtgacgtggttttgtccgtcagagttacagtacacagcatgtagatctcgtcacagtaaaatgtgcagtaatatagccataagttgtaatagttgtcttaccctctctacagtgtcagtgtgtcgtgctgtataatttccgtggcgtcattgtgttgtgaagtaaggaaaatgagaaggaaaagagtggtctttcagtttaatctcagaaacgcttgcgttgtgttccaa

SEQ ID NO: 206194 - DNA, 3932 bp, Zea Mays
ccagactcaagcaatggcgtggcaaagtactgcagcaggcagcaggcagcacggcaaggccgcagcatatccgtagcaacgctgcagtactttcgtcacttctcaccgaaaaccaatcgccctcctccccacgcctgtggacccaaaaaaaatcaattcgattttctctcttccgttctccccacacaagaattgacctccgttttattgccgctcatctcaatctaatctctctctctagctcccccaatcgccagatcacagagagaggggaagagcgtgaggagggacgagaaagccaagctgtatagcgagaaagctcagttgagttctgttctgcttttgtcttcctctctcgctggatctactactcccaccactgcctctgcctcggcctcgttgctgctggctgcgtgcgtgactgcgtgcctttgcccaaagcaagcctgcctgctcggtggctcgcttcggttgcagctgcagtgacctcaccctgcctctatgcttgctctcccaccatgtggtggtggtcttcgcgctccaactaacccccaccagcagcgcatcacaccaccgcatcgcaccgcgatgccaaccctggtggcgtcacgcggcccggcggcttcttccgcgcgccgcattgcaatgccgccaccgccgctggacggacccgtgaaggagtactagctagctagctagcccagcggcagcgggcgaggcgaagggagcggaggtcgttcttgcagacatgttcaagtcgcggtggcgcggcggcagggccaaggccgtgttcaagctgcagttccacgccacgcaggtgcccgagctgggatgggaggcgatggtggtggtggtgacgccgcaggacgctggccggccgacggcgcggtcggagcccgcggaggtcaccgatggcgcgtgccggtgggcggcccctgtcatggaggccaccaagctccccaccggcaaggacaagatctaccagttcctcgtctatgagaccgggtcgagcaaggcggcgctgctgggggaggccacggtgaacctggcggagtacgccgacgcgttgaagccgtcggtggtgacgctcccgctcaagggcagccccggtgcgctgctgcaccggcgagaacggcgacgctctgccagcggtggcgaagacgccaaagaggaggacgacgctgcagagccagctgagcaagtttgaggacgaggacagcgagaaggcaagagcagccgcggatgcgatgagtcctgtgcaagatggattgttgataagaaaaccgccagacatgaggtttccatcaagaagaaatgtgcctatgtctgctgatccagtgggccatctccacaatggcagcagtttcgatgccgtctcagtgtcgggttcagatggaagttctgggcgatatacccccaaaattagcgcaagcacacacaactcatttcttcaggatagtagcaatgctctctcgccatttgccaacaatcgcaccgtgaggaacccattgaccagttctggtgactggtcaggaagctcagctcctgatgctagtacggatgggtcaacaagcaattctggtgaggcagggttaagaggggaagaggatgatgtagataagctaagaagtgagatagccactttaaccaggaaagtggatgtttcagatatggagttgcagactctccgaaagcaaattgtgaaggagagtcggcgtgggcaagatctcttcaaggagatgagtagcctgagggaggagagggatgcactcagaagagaatgtgaaagactcagaggggcaaagaatatgatccatgattcaaatggctcagagaaacggctctcagatggggatgacccatggtcacagattgaagaactgaagcaagatctgagtcatgagaagaatctaaattcagatcttcgtctgcaacttcaaaagatgaaggaatccaactctgagctgcttctggctgtgaaagatcttgatgagtcgttggataaaaaaaacagagagatttccattttgcaagaggatacacaggaggatcagcaggaggcagaatatgagcatgcgctgtcaaatgtgcacaactctggacagaaattagccttatctgaaacgagttcataccaagagaaggaagatgagcttatgctggatgcactggcaaagaagcgtgatgacatctctacctctgagcttgaaaagaaagtccttgagttgagcaatgaaatcgagttgtacaagaaagaccgtgaggatatcgagatgcaaatggagcaacttgcacttgattatgagattctaaagcaagagaaccatgacgtgtcttcgaggctggagcaagcacaactgagggagcagctaaggatgcaatatgagtgttcggctcatttagctattataagtgatcttgaggccaatgttgagagcttggataatgagctccagacacaggctaaaaagtttgaagctgacatagcagaaataacgagcgcaaaggtggaacaagagcagcgggccattaaggctgaggattctctgaggaagataagatggaacaatgcagctactgcagaacgacttcaggaggaattcaaggtgttgtcttcacaggtatcttccgctttcagtgcgaatgaacgacaccttgtgcaagcaaggaaagaggtcgcggagctgcagttgcagaagagccagttagaagagttgctgcagaaggcccaaggagatcttggatcagttcaggatcagcaccgggcgaaggtccaacagttaataaccctagtggatttcaagtcaaaggagatagacaggctactgacggagctcaaaagcaagagtgacgagttccatgaccaaaaaagatgcgatgaagcaaggctgaatgctctgtcagaagaaatggacctactcaatgccaagatcgacgagctatccagcgagagaaacgacctctctgaaaagaacgcgcagaaagacaaggaactggccggaatcagtgaaaaggacatgcagttgcaagacaagactgctgagatcacttcactaaataaggagcttgtatctctcaaagaccaagtgaagacgcatctggacgaactgcacgatttaaaatgtctgaaggacaggaaggaggagacaattggaaaactgcaaatagatattgggtcactgaaactccagtgcgacaacttgaagacttcgctgtccaagaaggagtccgagaaagataaccttgcctctcaggtgctggagctgagaagatcccttgagacccgggaagaaggggcaaaggcaaatggccaaaattcagacgcgaagaacaatccgcatactaataataagcgcatgaagcacaataccggctccaccgggagcattgctgcactgccaggcaccaacggacagggtgaagacgatggtgactgcaatgggcatgacatgaggaacgccgcagcggacggggcagcgaaggagctggcctcgctgaaggagagcagcaaggcggtggaggaggagctgaaggagctgcacgagcggtactcggcgattagcctgaggctcgcggaagtggagggcgagcggcagcagctcgtgatgaccgttcggtcgctgaagaactcctccttgcggtgactgatgcatctccacccaaattgctgtagctaaaaggatttagacgataggtttgtccgtgacgtggttttgtccgtcagagttacagtacacagcatgtagatctcgtcacagtaaaatgtgcagtaatatagccataagttgtaatagttgtcttaccctctctacagtgtcagtgtgtcgtgctgtataatttccgtggcgtcattgtgttgtgaagtaaggaaaatgagaaggaaaagagtggtctttcagtttaatctcagaaacgcttgcgttgtgttccaa

SEQ ID NO: 206195 - DNA, 1131 bp, Zea Mays
ccttgagttgtacatgctgtgctgttacgggaaaggaacaggagtgatcgtctattttctcatcacataaacgtactgcgtttctactttctagtggagaaggaaaagacaattttctcgtaaccttccgggctcctcttcctctcctcgcgttcccccaccaaaccctaatccgagcacccagcccctacccgcttccgctcgcgccggcctttggggctctcaccctgagcggtaggaatccgcagggctccggttgggtgccagaagcatccaagtcgttggcgggagaccgggaaatggcggaaaaagagggggcgaaggttggggcggaagagatggaagagcgggagcaggaaggggaggcggaggaggtggaggtgaagtttcgtctcttcgacggctccgacatcggccccgtgcgctgcaacgccgccaccaccaccgtcgccgctctcaaggatcgcgtcgtcgccgactggcccaaagataaacaaattatcccaaagactgctagtgatgtaaaactaataagtggcggcaaaattctagaaaatgacaagaatgttgcacagtgcagagctccttttggcgatcttcccagtagtgctatcacgatgcacgttgttgttcaaccatcatcagccaaatcaaaaccagaaggcgaacaagttgcccaaaaccactcgttgctcatgtaccatactgtgaactatatgaaggtcaagtccctacgagaccaacaataatttgtacgtccacaaaaatattctgcagagaatttgagaacaaagattcaagatgtccatgccattctctgccaacgggtggcaatggcgaaagacaacgtccacatgttgtaagctatatgtaattgtaacttaggtacaaagagtcgtccctgtgctgtgcggtcagggaaaatagtctggtggttgcgctgttttactctacaagatgtcttatatgatgtacaagatacagacacttctgggtgtagtgaccttgttcccacctcaccttttaaagtttgtggcgctgagtcaatatggatctaagtcaattgattgaagaaacattttcgactatgcagtattttctcatttatttatggcctgtttgaggcaagag

SEQ ID NO: 206196 - DNA, 2645 bp, Zea Mays
tcaaaagggaagaaggctccgcggctggcgcgcgaccttctctccccaccacattctcccccctcctctcttcttctccaatccatctctctgtttgtctcctatcctttcctctctcccacttatcgacggacttcctgcgaggaacacagagggccatccaggcacttcctctgcatcacacacctatgctgcggctgcgtgatggaggaagctaacgccccagtgacgaccagccacccctcctccaccgctcctgatgcgcctccggacccggcggctgttccatccagttctgaccaaggctcccaatcctgtcaggcccagcagcaacaggtccaccagctggatgaaacgcgagagccggcgggcagcagctacgaagcgtcagagatcgccggccgcttcaacgaggccatcgatcccaaggccggcatcgacgctgcggcgcccatcgtcgattccgtcaagggcgccgtcagcaaattcggagctgtaggggttgttgattggagagagaaacgcaagcatgtccaggatgagctcgacaaggtgcgggaagaggtcacggagtaccagaagagagcacaggaggcggaggccggcagagcgcaagctctgcgggagctgggaaccgtcgtgaccgctgccgacgagctgggcctgggcctggagatggcgcgggccgagcaagcccaggcgcggcggcaggtggagctcgccgagctgcagctcgaggaggtgcggcgcggcgcaaaggcggagctcgacaccgtcagggaacgccgcacggccgcgctcgctgacctgcgggcggcgcgagcggaggtggagtcgctggagaaggtgcgcgcgcgcgccgcggccgaagcaggcgcggcggtggcgcgggagcgggaggccgccgcggcgtcgcgggaggctgggaaggccgtcgaggacctcaccgccgagctcgtcgcgctgaaaggggagctggagtcctcgcacgccgcccatgtcgcggcggagcagaagaggatgggcctggcggtcgcgtgggaggaagacaaggcgcggtggcagatggagctggaggaagccgagcaggaggccaaggggctgcgagagaagctcgtggttgcctgcgacgtcgagacgaaggcggtggcggcttcccagctcatggcgagcctaaaagctgagctgttcgcttacgccgtcgagagaacaacactgggacaggaggaggaggcgacagcgatcagcgaccggttgatgctggagaagaccaagaaagagctcgacgacgtgaaagcgagcgtcgagatggccaagcacgaggccaagtgcctgcgcgtcgccgccgcctcgatgcgcgatgagctggagaaggagaaggcagggctcaccgcgctgcggcggaaggaaagggaaaggcaagggctctcgtcagcgtccatcccttacctcgaggaggagttgaggtgggtgaccgccgagctcgccgaggcacgagcgaagaggggcagcgacgagagcgagatggccgagcgtgtagccgaggcacggcgagaagcggaggaagccaaggcgaaggcccggtcggctcgagaaaaggtcgccagggccaaggaagttgcgggcgtggccaaggccgccgtcgccgccatggaggcgcggctggaggcggtgacgcgggagatactcgccgcgaacaagtcggccgagaccgccacggcctcggccggcgcgctgctgcaagaaagcaagccgtcgagcgataaggacgtggaagcaggcgtgaccgtgacgctgacggtgcaggagtacgccgagctgagccggagagcgcaggagacagaggaggccgccggcatgcgggtggtcgaggcggtgaagctgatcaaggaggccaaggacgcggaggtgaggaggctggagaaggtggcgcggctggacaagcagaccgagcagaggcggctggcgctggaggccgcgacgctggaggccgaggaggcggagttcgacaagctgtcagcggagcgggagctgaggcagtggcgcgccgagcacgagcagcggcgcgcgcccggcgacaccgactcgccccgcccgggcctcgccgagatctccgtgctccacgaccagggcaccggcgaggggcgcgggaacccgcacatagtcagcccgagggcaggctacatgccgcggacggagctggtgatgacgggatcggcggcggatgcggatgcggatgcggacgcgaggcagaggaagaccttcttcccgcggattgtcatgttcttcgcgcgaaagagaactcagtcttggaagtgatgcacaacaaccggcttccttttgaaatttcttttggggcttgcttctggtacgtggctttctcggatggagcagatcaaatatgacgacacaagtgtaaaatgtgtattgatcataattttttttttcgttttcactcggagttgtgatccatgcttggaaatatggaccggcttgaatcttgatagttggtaaggtcttgttcttttgtccaatccaaaaatcatttcagctgatcaaaacttatactccctccgtctcagattagtattcgctttggattttagtttttatcgtttagctttaatcaatacattcaactgttt

SEQ ID NO: 206197 - DNA, 2440 bp, Zea Mays
ccacattctcccccctcctctcttcttctccaatccatctctctgtttgtctcctatcctttcctctctcccacttatcgacggacttcctgcgaggaacacagagggccatccaggcccagcagcaacaggtccaccagctggatgaaacgcgagagccggcgggcagcagctacgaagcgtcagagatcgccggccgcttcaacgaggccatcgatcccaaggccggcatcgacgctgcggcgcccatcgtcgattccgtcaagggcgccgtcagcaaattcggagctgtaggggttgttgattggagagagaaacgcaagcatgtccaggatgagctcgacaaggtgcgggaagaggtcacggagtaccagaagagagcacaggaggcggaggccggcagagcgcaagctctgcgggagctgggaaccgtcgtgaccgctgccgacgagctgggcctgggcctggagatggcgcgggccgagcaagcccaggcgcggcggcaggtggagctcgccgagctgcagctcgaggaggtgcggcgcggcgcaaaggcggagctcgacaccgtcagggaacgccgcacggccgcgctcgctgacctgcgggcggcgcgagcggaggtggagtcgctggagaaggtgcgcgcgcgcgccgcggccgaagcaggcgcggcggtggcgcgggagcgggaggccgccgcggcgtcgcgggaggctgggaaggccgtcgaggacctcaccgccgagctcgtcgcgctgaaaggggagctggagtcctcgcacgccgcccatgtcgcggcggagcagaagaggatgggcctggcggtcgcgtgggaggaagacaaggcgcggtggcagatggagctggaggaagccgagcaggaggccaaggggctgcgagagaagctcgtggttgcctgcgacgtcgagacgaaggcggtggcggcttcccagctcatggcgagcctaaaagctgagctgttcgcttacgccgtcgagagaacaacactgggacaggaggaggaggcgacagcgatcagcgaccggttgatgctggagaagaccaagaaagagctcgacgacgtgaaagcgagcgtcgagatggccaagcacgaggccaagtgcctgcgcgtcgccgccgcctcgatgcgcgatgagctggagaaggagaaggcagggctcaccgcgctgcggcggaaggaaagggaaaggcaagggctctcgtcagcgtccatcccttacctcgaggaggagttgaggtgggtgaccgccgagctcgccgaggcacgagcgaagaggggcagcgacgagagcgagatggccgagcgtgtagccgaggcacggcgagaagcggaggaagccaaggcgaaggcccggtcggctcgagaaaaggtcgccagggccaaggaagttgcgggcgtggccaaggccgccgtcgccgccatggaggcgcggctggaggcggtgacgcgggagatactcgccgcgaacaagtcggccgagaccgccacggcctcggccggcgcgctgctgcaagaaagcaagccgtcgagcgataaggacgtggaagcaggcgtgaccgtgacgctgacggtgcaggagtacgccgagctgagccggagagcgcaggagacagaggaggccgccggcatgcgggtggtcgaggcggtgaagctgatcaaggaggccaaggacgcggaggtgaggaggctggagaaggtggcgcggctggacaagcagaccgagcagaggcggctggcgctggaggccgcgacgctggaggccgaggaggcggagttcgacaagctgtcagcggagcgggagctgaggcagtggcgcgccgagcacgagcagcggcgcgcgcccggcgacaccgactcgccccgcccgggcctcgccgagatctccgtgctccacgaccagggcaccggcgaggggcgcgggaacccgcacatagtcagcccgagggcaggctacatgccgcggacggagctggtgatgacgggatcggcggcggatgcggatgcggatgcggacgcgaggcagaggaagaccttcttcccgcggattgtcatgttcttcgcgcgaaagagaactcagtcttggaagtgatgcacaacaaccggcttccttttgaaatttcttttggggcttgcttctggtacgtggctttctcggatggagcagatcaaatatgacgacacaagtgtaaaatgtgtattgatcataattttttttttcgttttcactcggagttgtgatccatgcttggaaatatggaccggcttgaatcttgatagttggtaaggtcttgttcttttgtccaatccaaaaatcatttcagctgatcaaaacttatactccctccgtctcagattagtattcgctttggattttagtttttatcgtttagctttaatcaatacattcaactgttt

SEQ ID NO: 206198 - DNA, 2644 bp, Zea Mays
ccctcctctcttcttctccaatccatctctctgtttgtctcctatcctttcctctctcccacttatcgacggacttcctgcgaggaacacagagggccatccagcatcatccgtggctgctgaattcctgatacgtctctgtttgatgcacattggtcgtcaggcacttcctctgcatcacacacctatgctgcggctgcgtgatggaggaagctaacgccccagtgacgaccagccacccctcctccaccgctcctgatgcgcctccggacccggcggctgttccatccagttctgaccaaggctcccaatcctgtcaggcccagcagcaacaggtccaccagctggatgaaacgcgagagccggcgggcagcagctacgaagcgtcagagatcgccggccgcttcaacgaggccatcgatcccaaggccggcatcgacgctgcggcgcccatcgtcgattccgtcaagggcgccgtcagcaaattcggagctgtaggggttgttgattggagagagaaacgcaagcatgtccaggatgagctcgacaaggtgcgggaagaggtcacggagtaccagaagagagcacaggaggcggaggccggcagagcgcaagctctgcgggagctgggaaccgtcgtgaccgctgccgacgagctgggcctgggcctggagatggcgcgggccgagcaagcccaggcgcggcggcaggtggagctcgccgagctgcagctcgaggaggtgcggcgcggcgcaaaggcggagctcgacaccgtcagggaacgccgcacggccgcgctcgctgacctgcgggcggcgcgagcggaggtggagtcgctggagaaggtgcgcgcgcgcgccgcggccgaagcaggcgcggcggtggcgcgggagcgggaggccgccgcggcgtcgcgggaggctgggaaggccgtcgaggacctcaccgccgagctcgtcgcgctgaaaggggagctggagtcctcgcacgccgcccatgtcgcggcggagcagaagaggatgggcctggcggtcgcgtgggaggaagacaaggcgcggtggcagatggagctggaggaagccgagcaggaggccaaggggctgcgagagaagctcgtggttgcctgcgacgtcgagacgaaggcggtggcggcttcccagctcatggcgagcctaaaagctgagctgttcgcttacgccgtcgagagaacaacactgggacaggaggaggaggcgacagcgatcagcgaccggttgatgctggagaagaccaagaaagagctcgacgacgtgaaagcgagcgtcgagatggccaagcacgaggccaagtgcctgcgcgtcgccgccgcctcgatgcgcgatgagctggagaaggagaaggcagggctcaccgcgctgcggcggaaggaaagggaaaggcaagggctctcgtcagcgtccatcccttacctcgaggaggagttgaggtgggtgaccgccgagctcgccgaggcacgagcgaagaggggcagcgacgagagcgagatggccgagcgtgtagccgaggcacggcgagaagcggaggaagccaaggcgaaggcccggtcggctcgagaaaaggtcgccagggccaaggaagttgcgggcgtggccaaggccgccgtcgccgccatggaggcgcggctggaggcggtgacgcgggagatactcgccgcgaacaagtcggccgagaccgccacggcctcggccggcgcgctgctgcaagaaagcaagccgtcgagcgataaggacgtggaagcaggcgtgaccgtgacgctgacggtgcaggagtacgccgagctgagccggagagcgcaggagacagaggaggccgccggcatgcgggtggtcgaggcggtgaagctgatcaaggaggccaaggacgcggaggtgaggaggctggagaaggtggcgcggctggacaagcagaccgagcagaggcggctggcgctggaggccgcgacgctggaggccgaggaggcggagttcgacaagctgtcagcggagcgggagctgaggcagtggcgcgccgagcacgagcagcggcgcgcgcccggcgacaccgactcgccccgcccgggcctcgccgagatctccgtgctccacgaccagggcaccggcgaggggcgcgggaacccgcacatagtcagcccgagggcaggctacatgccgcggacggagctggtgatgacgggatcggcggcggatgcggatgcggatgcggacgcgaggcagaggaagaccttcttcccgcggattgtcatgttcttcgcgcgaaagagaactcagtcttggaagtgatgcacaacaaccggcttccttttgaaatttcttttggggcttgcttctggtacgtggctttctcggatggagcagatcaaatatgacgacacaagtgtaaaatgtgtattgatcataattttttttttcgttttcactcggagttgtgatccatgcttggaaatatggaccggcttgaatcttgatagttggtaaggtcttgttcttttgtccaatccaaaaatcatttcagctgatcaaaacttatactccctccgtctcagattagtattcgctttggattttagtttttatcgtttagctttaatcaatacattcaactgttt

SEQ ID NO: 206199 - DNA, 2882 bp, Zea Mays
cctggcctgacttctcttcctcctacccacccaccgccccactccaccttttccttccccgccggccgccgcgcagcgcgagcggagtcgccctctccagtagagtaggagtgacgtctctacctatccacctcagccccctcttttcattccccacccgcgccgcgcgagcggagtttcgcagcacgctgcggctcgcttcgccagaattcctggcgagggtacagaattccgcatcgaaacggaagggttccgctcaccgagaaaattggcctcaatcgcgcgtccgtcctcagcgtcgatgccaaggagggaacaacaactggggtttcagcaaaggattggacaaacacaatattggcacttgtgtctcctaattccaaaccggaggacttcaaccgcccagttctttgtgaaattgttgatgatgatgatggctccatggctttgttaccaaaactgcaacaatttgcaaagagggagaacctgaagataatatcaattgcagacctgataagcgaggggggcaccgacacgaagccacgagatggtttggagagaaacagttgaagcatctcccgcggaggttcacactggtccctctccgcgccgaagcacaacgagactgctttctgctcttcaccacctgccagccatcctcctgaagaccccagggtgatgttggggatggacaagagatcttagtacgagtgcattcggagtgcctaactggggacatatttggatcagcgagatgcgattatgggaattaacttgctctggcaatgaccatgattgagaaaactggccggggtgtagtagtctatcttcgtggccatgagggtaggggtattgggctgggtcacaagcttcaagcatacaacttacaagatgatgggcgcgatactgtcgaggcaaacttggagctagggctgcctgctgactcgcgggagtacggtataggtgcacagatattacgccatcttggtgccaggaccatgcggctgatgactaacaaccctgccaagtacactggactcaagggctatggtttaagtgtccttggtagagtgccattgctaacaccgataaccaccgagaataggcgctatatggaaacaaagcgattgaagatggggcatgtttatggaagccgctccagtaatcatgcaaacggcagtggcttggctggtgctggcgagagagaggagcaggatcagaatgacagtgctggcgtgcaagagcgaactccagaagcttgagtgcctaactctgcgttccttagagctgctccaatgggagtcttaaaaagagatgcatcttaaaatatagggctccatggcaaaaaaatcactccaacggggacctcattttacaaaaactcaggaaacaaatttgggctccggtctcattggtcccaaatgtaggacttgaaactatcggccctattctcgttcccacgcccccacgaccttcggtcttttcctgttgcattcgttctcaagccgtctctcccacaaaccaaaccctctgcctgtcgagaagcattggcgagatggatggacggccaccgccttttcctcgttcacggccaacaggttggcctcgttgaacttccatggagatggcactagatgtgatagggagatcatcagctgtgtcttctccgccagatttgcgcaggcctcctgtggccgtggctgcagagcgaaggcctgcaagtatgtctgcaacttcccaacagacacaaggacaagcgtcttggcatcgaatcgctgcagaccatgccgatcggagtttatcagtggcaccgatgatgtatcaagatccattgtcaatgattgatgactatagaacctgaagatgtatttgcctgccaagaaaatatggagagcgaaaatgaggtcatggagtcaccaccattgaatgattcaaattcacagtcaaaaccaaagggtcgatccaagaattttaatgaagctgaagacattttgttgatgtcagcttatcttaacatacgtaaagatgcaattactggaagggatcaataagaaggcaacttttgggaaagagttgagaagtactttaacgttaacaggacatttgagtcagatcgtaactggtcatcgttgaagcatcggtggggtataattcacaaataagttagtagtttccaaggtttccatgacagtatcgaaaggaaaaatgaaagtgggaagacaagtgatgataagctggctgaagcaaatgtaatgttccatcaatttaaaaataaggccttttctttgttccatgcgtggaacattctcagacatgagccaaagtgggctgaagataaaacatctaatgaagggaatgcaaatggggacagtcatcccaatgctcaaagacctgcaggaaggaaagctgaaaaggaaaagatgaaagcaaaaaggcgcaacagtgatgaagagtctgatcctttcattgaagaggtaaaaaaatttgagagaatcgagagagaaaactgagagcgaacgaaaggagcgtgatgaaagatactttgagctgcataagaaaaaagtagacttggagcaagaccagcatgacaagttgataatggcacttgagtcttgacacgagcacaatggatgaccaaggaaaacagtattttcagttgatgaaagaagatattttagctcgacgctttgggagtaggcagccatagttatttagtttttaatactttagacttttttccattcaaaacagattatcttgatgttcatgtaatgtaagaacatattttcattcaaagcagattatcttgatgtttgcaacaatctgtgttgacattgttttctggttactgtaaaagttgagttgaaattttgcttctgaaa

SEQ ID NO: 206200 - DNA, 3388 bp, Zea Mays
cctggcctgacttctcttcctcctacccacccaccgccccactccaccttttccttccccgccggccgccgcgcagcgcgagcggagtcgccctctccagtagagtaggagtgacgtctctacctatccacctcagccccctcttttcattccccacccgcgccgcgcgagcggagtttcgcagcacgctgcggctcgcttcgccagaattcctggcgagggtacagaattccgcatcgaaacggaagggttccgctcaccgagaaaattggcctcaatcgcgcgtccgtcctcagcgtcgatgccaaggagggaacaacaactggggtttcagcaaaggattggacaaacacaatattggcacttgtgtctcctaattccaaaccggaggacttcaaccgcccagttctttgtgaaattgttgatgatgatgatggctccatggctttgttaccaaaactgcaacaatttgcaaagagggagaacctgaagataatatcaattgcagacctgataagcgaggggggcaccgacacgaagccacgagatggtttggagagaaacagttgaagcatctcccgcggaggttcacactggtccctctccgcgccgaagcacaacgagactgctttctgctcttcaccacctgccagccatcctcctgaagaccccagggtgatgttggggatggacaagagatcttagtacgagtgcattcggagtgcctaactggggacatatttggatcagcgagatgcgattatgggaattaacttgctctggcaatgaccatgattgagaaaactggccggggtgtagtagtctatcttcgtggccatgagggtaggggtattgggctgggtcacaagcttcaagcatacaacttacaagatgatgggcgcgatactgtcgaggcaaacttggagctagggctgcctgctgactcgcgggagtacggtataggtgcacagatattacgccatcttggtgccaggaccatgcggctgatgactaacaaccctgccaagtacactggactcaagggctatggtttaagtgtccttggtagagtgccattgctaacaccgataaccaccgagaataggcgctatatggaaacaaagcgattgaagatggggcatgtttatggaagccgctccagtaatcatgcaaacggcagtggcttggctggtgctggcgagagagaggagcaggatcagaatgacagtgctggcgtgcaagagcgaactccagaagcttgagtgcctaactctgcgttccttagagctgctccaatgggagtcttaaaaagagatgcatcttaaaatatagggctccatggcaaaaaaatcactccaacggggacctcattttacaaaaactcaggaaacaaatttgggctccggtctcattggtcccaaatgtaggacttgaaactatcggccctattctcgttcccacgcccccacgaccttcggtcttttcctgttgcattcgttctcaagccgtctctcccacaaaccaaaccctctgcctgtcgagaagcattggcgagatggatggacggccaccgccttttcctcgttcacggccaacaggttggcctcgttgaacttccatggagatggcactagatgtgatagggagatcatcagctgtgtcttctccgccagatttgcgcaggcctcctgtggccgtggctgcagagcgaaggcctgcaagtatgtctgcaacttcccaacagacacaaggacaagcgtcttggcatcgaatcgctgcagaccatgccgatcggagtttatcagtggcaccgatgatgtatcaagatccattgtcaatgattgatgactataggtaataacctttctgttgagattagtagtcgattatatttgctcatgaattcaatcgatggtgatctgggatctccatggttgagaaattgaagtcaaggcctggtgaggttacttgtactggtaggtgctgatagatgtagtgctcaccgatgcttgtgaattgaattattggttctgaaaatatcctcacttcaaccatgcatacgagattatgagtaaatgtgaattccatacactctgttgccccagtccaatacaaccttgctgaaccttgcatatttgtgtgagcaggtacatttttgggagtctctttaatgtttttcttgtttggtctcataattagtggagtacttcaacttatgtgcattattatatcaatttgattaccaaactttattgtgtatagcgtcaaagctgttttgaatgtcttgtgtttgtgtatatttcattctaattccataaccagagtctgctcatatttttacactactctattgaaccaagaacctgaagatgtatttgcctgccaagaaaatatggagagcgaaaatgaggtcatggagtcaccaccattgaatgattcaaattcacagtcaaaaccaaagggtcgatccaagaattttaatgaagctgaagacattttgttgatgtcagcttatcttaacatacgtaaagatgcaattactggaagggatcaataagaaggcaacttttgggaaagagttgagaagtactttaacgttaacaggacatttgagtcagatcgtaactggtcatcgttgaagcatcggtggggtataattcacaaataagttagtagtttccaaggtttccatgacagtatcgaaaggaaaaatgaaagtgggaagacaagtgatgataagctggctgaagcaaatgtaatgttccatcaatttaaaaataaggccttttctttgttccatgcgtggaacattctcagacatgagccaaagtgggctgaagataaaacatctaatgaagggaatgcaaatggggacagtcatcccaatgctcaaagacctgcaggaaggaaagctgaaaaggaaaagatgaaagcaaaaaggcgcaacagtgatgaagagtctgatcctttcattgaagaggtaaaaaaatttgagagaatcgagagagaaaactgagagcgaacgaaaggagcgtgatgaaagatactttgagctgcataagaaaaaagtagacttggagcaagaccagcatgacaagttgataatggcacttgagtcttgacacgagcacaatggatgaccaaggaaaacagtattttcagttgatgaaagaagatattttagctcgacgctttgggagtaggcagccatagttatttagtttttaatactttagacttttttccattcaaaacagattatcttgatgttcatgtaatgtaagaacatattttcattcaaagcagattatcttgatgtttgcaacaatctgtgttgacattgttttctggttactgtaaaagttgagttgaaattttgcttctgaaa

SEQ ID NO: 206201 - DNA, 2904 bp, Zea Mays
gacttctcttcctcctacccacccaccgccccactccaccttttccttccccgccggccgccgcgcagcgcgagcggagtcgccctctccagtagagtaggagtgacgtctctacctatccacctcagccccctcttttcattccccacccgcgccgcgcgagcggagtttcgcagcacgctgcggctcgcttcgccagaattcctggcgagggtacagaattccgcatcgaaacggaagggttccgctcaccgagaaaattggcctcaatcgcgcgtccgtcctcagcgtcgtgcgttcggatgccaaggagggaacaacaactggggtttcagcaaaggattggacaaacacaatattggcacttgtgtctcctaattccaaaccggaggacttcaaccgcccagctgggttacctccttttgcagttctttgtgaaattgttgatgatgatgatggctccatggctttgttaccaaaactgcaacaatttgcaaagagggagaacctgaagataatatcaattgcagacctgataagcgaggggggcaccgacacgaagccacgagatggtttggagagaaacagttgaagcatctcccgcggaggttcacactggtccctctccgcgccgaagcacaacgagactgctttctgctcttcaccacctgccagccatcctcctgaagaccccagggtgatgttggggatggacaagagatcttagtacgagtgcattcggagtgcctaactggggacatatttggatcagcgagatgcgattatgggaattaacttgctctggcaatgaccatgattgagaaaactggccggggtgtagtagtctatcttcgtggccatgagggtaggggtattgggctgggtcacaagcttcaagcatacaacttacaagatgatgggcgcgatactgtcgaggcaaacttggagctagggctgcctgctgactcgcgggagtacggtataggtgcacagatattacgccatcttggtgccaggaccatgcggctgatgactaacaaccctgccaagtacactggactcaagggctatggtttaagtgtccttggtagagtgccattgctaacaccgataaccaccgagaataggcgctatatggaaacaaagcgattgaagatggggcatgtttatggaagccgctccagtaatcatgcaaacggcagtggcttggctggtgctggcgagagagaggagcaggatcagaatgacagtgctggcgtgcaagagcgaactccagaagcttgagtgcctaactctgcgttccttagagctgctccaatgggagtcttaaaaagagatgcatcttaaaatatagggctccatggcaaaaaaatcactccaacggggacctcattttacaaaaactcaggaaacaaatttgggctccggtctcattggtcccaaatgtaggacttgaaactatcggccctattctcgttcccacgcccccacgaccttcggtcttttcctgttgcattcgttctcaagccgtctctcccacaaaccaaaccctctgcctgtcgagaagcattggcgagatggatggacggccaccgccttttcctcgttcacggccaacaggttggcctcgttgaacttccatggagatggcactagatgtgatagggagatcatcagctgtgtcttctccgccagatttgcgcaggcctcctgtggccgtggctgcagagcgaaggcctgcaagtatgtctgcaacttcccaacagacacaaggacaagcgtcttggcatcgaatcgctgcagaccatgccgatcggagtttatcagtggcaccgatgatgtatcaagatccattgtcaatgattgatgactatagaacctgaagatgtatttgcctgccaagaaaatatggagagcgaaaatgaggtcatggagtcaccaccattgaatgattcaaattcacagtcaaaaccaaagggtcgatccaagaattttaatgaagctgaagacattttgttgatgtcagcttatcttaacatacgtaaagatgcaattactggaagggatcaataagaaggcaacttttgggaaagagttgagaagtactttaacgttaacaggacatttgagtcagatcgtaactggtcatcgttgaagcatcggtggggtataattcacaaataagttagtagtttccaaggtttccatgacagtatcgaaaggaaaaatgaaagtgggaagacaagtgatgataagctggctgaagcaaatgtaatgttccatcaatttaaaaataaggccttttctttgttccatgcgtggaacattctcagacatgagccaaagtgggctgaagataaaacatctaatgaagggaatgcaaatggggacagtcatcccaatgctcaaagacctgcaggaaggaaagctgaaaaggaaaagatgaaagcaaaaaggcgcaacagtgatgaagagtctgatcctttcattgaagaggtaaaaaaatttgagagaatcgagagagaaaactgagagcgaacgaaaggagcgtgatgaaagatactttgagctgcataagaaaaaagtagacttggagcaagaccagcatgacaagttgataatggcacttgagtcttgacacgagcacaatggatgaccaaggaaaacagtattttcagttgatgaaagaagatattttagctcgacgctttgggagtaggcagccatagttatttagtttttaatactttagacttttttccattcaaaacagattatcttgatgttcatgtaatgtaagaacatattttcattcaaagcagattatcttgatgtttgcaacaatctgtgttgacattgttttctggttactgtaaaagttgagttgaaattttgcttctgaaa

SEQ ID NO: 206202 - DNA, 5038 bp, Zea Mays
gacttctcttcctcctacccacccaccgccccactccaccttttccttccccgccggccgccgcgcagcgcgagcggagtcgccctctccagtagagtaggagtgacgtctctacctatccacctcagccccctcttttcattccccacccgcgccgcgcgagcggagtttcgcagcacgctgcggctcgcttcgccagaattcctggcgagggtacagaattccgcatcgaaacggaagggttccgctcaccgagaaaattggcctcaatcgcgcgtccgtcctcagcgtcgtgcgttcggatgccaaggagggaacaacaactggggtttcagcaaaggattggacaaacacaatattggcacttgtgtctcctaattccaaaccggaggacttcaaccgcccagttctttgtgaaattgttgatgatgatgatggctccatggctttgttaccaaaactgcaacaatttgcaaagagggagaacctgaagataatatcaattgcagacctgataagcgaggggggcaccgacacgaagccacgagatggtttggagagaaacagttgaagcatctcccgcggaggttcacactggtccctctccgcgccgaagcacaacgagactgctttctgctcttcaccacctgccagccatcctcctgaagaccccaggtgtacttggaaaaaaatgaatgattgtacttggagtcttggatgtgaaatttttttatgatagccttcttgacttcttgcattgtaattctaagctttgaacattcccatttgcagatataggagaaagagagtgttatggtcgttagatcggtgaggaattggagaggggtatcgatgggcaggaacaccagccgggggcctctgcccacgaccgagcaagaggagggtttctcccttctaattcttgcctgctttatttttcatccattgattacataaataggccggctgaccgcccctatctagctagagatccttatctccttaaaactctcctaaaaactctcaacaaactactaactgataacctatctagataatctcaactaatcttctaaataatctcaactaatcttctaatcttatctctaactatccttatctaatcccccttggagggcccatggctgctgctgccgcagcccctccgtggacctccttaggccctgacactacacccctcctggacaagcagctcgtcctcgagctacagcatgacgatgctcaaagaccgagtctacttgactcaaaaccagaaacctagaagacaaaccttttacatctcggcttatcttattattccgaatatgttttttttgaccccataagataaggcggacaccctccgcgcattggacttgcacgtgtgcagccacctggatcccatggactccatctagacgaaaggggagcacatggacgggcacctggaataggtcgcaacaataaccagcggaggcgctctcgtggcggccggtagcggaatgtggtggcgccaaatagtgcgcccttgtcgatgacgaggggagtgccttccctaccgccgctgccgtagagttgaagttcgtcgcccgcgggacacgtaccatgctcgcacttggtgacttggagatagcggcccggtgacgctgctgatggccgtccgacagggcgaggtcgcgcccccgtgtgccgaggtcaaccgtcaccaaggctgcctcgagcatccgctggcgcatctcccgcactctctgtcgtgcaaggaagccacgagcaacaacttgtatgcccacagccgccgacgtctggagacgtgcggacaacgccaactggtggtgcccatgttgcactgctgccttgatttgcagcagcccttgcttaaccttctggagcgtggcttgcatctttgcgagatcagcccttatgttggtccacaagtcgcccgtcgatggagctggtgattgctgagtcgtggctgcccctagtggcgttgcccatggggacggacacgccgtcaacgaagatgatgtgacgaaatttggcgttgttcctggggatgggcgcgccaacgtccaggacgtggtgacaaaattggcaggtgatggtgcccatggagatagggacgccggttgccaagatggtgtgacgaaggtggcatgtggcgcaacccatagagatggcgacgtcggttgccaggacggcgtgatgaaggtgacatgcggcgcagtccatggagatggggacgccggttgccaggatgacaccacgaaattggcagcagaagccataggatcagatcgaaacccaaggtagccaataccagatgttatggtcgttagatcgatgagggattggagaggggtatcgatgggcaggaacaccggccgggggcctctgcccacagtaaattttatgttcagcagaaggatggctacatttaatgttatgttcattagagtgatggctactacttcaaacatcaggtccaaaaagtttgaatgtgcatgggcagcttatgaactttgaaaaacaaggacctccttgcatgatgtaggaatgtaaagtcacatgctttgggctgaagggtgtaaaaatgttgctcccaaatgaaccacaatatgacgagacattttgccagctacatccactacactggatgagtaaaagatctgattttctttatcttgaggtggtatcccggatatgatctgcttgcagacaaccaaaaaggcaaaaacatctcctttgttttcgaatttagtctagtgattgtctaaatgataaacatgtttcccccagcaatatgtttggaattttagaatggttcttttcactcatgcagggtgatgttggggatggacaagagatcttagtacgagtgcattcggagtgcctaactggggacatatttggatcagcgagatgcgattatgggaattaacttgctctggcaatgaccatgattgagaaaactggccggggtgtagtagtctatcttcgtggccatgagggtaggggtattgggctgggtcacaagcttcaagcatacaacttacaagatgatgggcgcgatactgtcgaggcaaacttggagctagggctgcctgctgactcgcgggagtacggtataggtgcacagatattacgccatcttggtgccaggaccatgcggctgatgactaacaaccctgccaagtacactggactcaagggctatggtttaagtgtccttggtagagtgccattgctaacaccgataaccaccgagaataggcgctatatggaaacaaagcgattgaagatggggcatgtttatggaagccgctccagtaatcatgcaaacggcagtggcttggctggtgctggcgagagagaggagcaggatcagaatgacagtgctggcgtgcaagagcgaactccagaagcttgagtgcctaactctgcgttccttagagctgctccaatgggagtcttaaaaagagatgcatcttaaaatatagggctccatggcaaaaaaatcactccaacggggacctcattttacaaaaactcaggaaacaaatttgggctccggtctcattggtcccaaatgtaggacttgaaactatcggccctattctcgttcccacgcccccacgaccttcggtcttttcctgttgcattcgttctcaagccgtctctcccacaaaccaaaccctctgcctgtcgagaagcattggcgagatggatggacggccaccgccttttcctcgttcacggccaacaggttggcctcgttgaacttccatggagatggcactagatgtgatagggagatcatcagctgtgtcttctccgccagatttgcgcaggcctcctgtggccgtggctgcagagcgaaggcctgcaagtatgtctgcaacttcccaacagacacaaggacaagcgtcttggcatcgaatcgctgcagaccatgccgatcggagtttatcagtggcaccgatgatgtatcaagatccattgtcaatgattgatgactatagatgtatttgcctgccaagaaaatatggagagcgaaaatgaggtcatggagtcaccaccattgaatgattcaaattcacagtcaaaaccaaagggtcgatccaagaattttaatgaagctgaagacattttgttgatgtcagcttatcttaacatacgtaaagatgcaattactggaagggatcaataagaaggcaacttttgggaaagagttgagaagtactttaacgttaacaggacatttgagtcagatcgtaactggtcatcgttgaagcatcggtggggtataattcacaaataagttagtagtttccaaggtttccatgacagtatcgaaaggaaaaatgaaagtgggaagacaagtgatgataagctggctgaagcaaatgtaatgttccatcaatttaaaaataaggccttttctttgttccatgcgtggaacattctcagacatgagccaaagtgggctgaagataaaacatctaatgaagggaatgcaaatggggacagtcatcccaatgctcaaagacctgcaggaaggaaagctgaaaaggaaaagatgaaagcaaaaaggcgcaacagtgatgaagagtctgatcctttcattgaagaggtaaaaaaatttgagagaatcgagagagaaaactgagagcgaacgaaaggagcgtgatgaaagatactttgagctgcataagaaaaaagtagacttggagcaagaccagcatgacaagttgataatggcacttgagtcttgacacgagcacaatggatgaccaaggaaaacagtattttcagttgatgaaagaagatattttagctcgacgctttgggagtaggcagccatagttatttagtttttaatactttagacttttttccattcaaaacagattatcttgatgttcatgtaatgtaagaacatattttcattcaaagcagattatcttgatgtttgcaacaatctgtgttgacattgttttctggttactgtaaaagttgagttgaaattttgcttctgaaa

SEQ ID NO: 206203 - DNA, 2880 bp, Zea Mays
ttctcttcctcctacccacccaccgccccactccaccttttccttccccgccggccgccgcgcagcgcgagcggagtcgccctctccagtagagtaggagtgacgtctctacctatccacctcagccccctcttttcattccccacccgcgccgcgcgagcggagtttcgcagcacgctgcggctcgcttcgccagaattcctggcgagggtacagaattccgcatcgaaacggaagggttccgctcaccgagaaaattggcctcaatcgcgcgtccgtcctcagcgtcgtgcgttcggatgccaaggagggaacaacaactggggtttcagcaaaggattggacaaacacaatattggcacttgtgtctcctaattccaaaccggaggacttcaaccgcccagttctttgtgaaattgttgatgatgatgatggctccatggctttgttaccaaaactgcaacaatttgcaaagagggagaacctgaagataatatcaattgcagacctgataagcgaggggggcaccgacacgaagccacgagatggtttggagagaaacagttgaagcatctcccgcggaggttcacactggtccctctccgcgccgaagcacaacgagactgctttctgctcttcaccacctgccagccatcctcctgaagaccccagggtgatgttggggatggacaagagatcttagtacgagtgcattcggagtgcctaactggggacatatttggatcagcgagatgcgattatgggaattaacttgctctggcaatgaccatgattgagaaaactggccggggtgtagtagtctatcttcgtggccatgagggtaggggtattgggctgggtcacaagcttcaagcatacaacttacaagatgatgggcgcgatactgtcgaggcaaacttggagctagggctgcctgctgactcgcgggagtacggtataggtgcacagatattacgccatcttggtgccaggaccatgcggctgatgactaacaaccctgccaagtacactggactcaagggctatggtttaagtgtccttggtagagtgccattgctaacaccgataaccaccgagaataggcgctatatggaaacaaagcgattgaagatggggcatgtttatggaagccgctccagtaatcatgcaaacggcagtggcttggctggtgctggcgagagagaggagcaggatcagaatgacagtgctggcgtgcaagagcgaactccagaagcttgagtgcctaactctgcgttccttagagctgctccaatgggagtcttaaaaagagatgcatcttaaaatatagggctccatggcaaaaaaatcactccaacggggacctcattttacaaaaactcaggaaacaaatttgggctccggtctcattggtcccaaatgtaggacttgaaactatcggccctattctcgttcccacgcccccacgaccttcggtcttttcctgttgcattcgttctcaagccgtctctcccacaaaccaaaccctctgcctgtcgagaagcattggcgagatggatggacggccaccgccttttcctcgttcacggccaacaggttggcctcgttgaacttccatggagatggcactagatgtgatagggagatcatcagctgtgtcttctccgccagatttgcgcaggcctcctgtggccgtggctgcagagcgaaggcctgcaagtatgtctgcaacttcccaacagacacaaggacaagcgtcttggcatcgaatcgctgcagaccatgccgatcggagtttatcagtggcaccgatgatgtatcaagatccattgtcaatgattgatgactatagaacctgaagatgtatttgcctgccaagaaaatatggagagcgaaaatgaggtcatggagtcaccaccattgaatgattcaaattcacagtcaaaaccaaagggtcgatccaagaattttaatgaagctgaagacattttgttgatgtcagcttatcttaacatacgtaaagatgcaattactggaagggatcaataagaaggcaacttttgggaaagagttgagaagtactttaacgttaacaggacatttgagtcagatcgtaactggtcatcgttgaagcatcggtggggtataattcacaaataagttagtagtttccaaggtttccatgacagtatcgaaaggaaaaatgaaagtgggaagacaagtgatgataagctggctgaagcaaatgtaatgttccatcaatttaaaaataaggccttttctttgttccatgcgtggaacattctcagacatgagccaaagtgggctgaagataaaacatctaatgaagggaatgcaaatggggacagtcatcccaatgctcaaagacctgcaggaaggaaagctgaaaaggaaaagatgaaagcaaaaaggcgcaacagtgatgaagagtctgatcctttcattgaagaggtaaaaaaatttgagagaatcgagagagaaaactgagagcgaacgaaaggagcgtgatgaaagatactttgagctgcataagaaaaaagtagacttggagcaagaccagcatgacaagttgataatggcacttgagtcttgacacgagcacaatggatgaccaaggaaaacagtattttcagttgatgaaagaagatattttagctcgacgctttgggagtaggcagccatagttatttagtttttaatactttagacttttttccattcaaaacagattatcttgatgttcatgtaatgtaagaacatattttcattcaaagcagattatcttgatgtttgcaacaatctgtgttgacattgttttctggttactgtaaaagttgagttgaaattttgcttctgaaa

SEQ ID NO: 206204 - DNA, 3386 bp, Zea Mays
ttctcttcctcctacccacccaccgccccactccaccttttccttccccgccggccgccgcgcagcgcgagcggagtcgccctctccagtagagtaggagtgacgtctctacctatccacctcagccccctcttttcattccccacccgcgccgcgcgagcggagtttcgcagcacgctgcggctcgcttcgccagaattcctggcgagggtacagaattccgcatcgaaacggaagggttccgctcaccgagaaaattggcctcaatcgcgcgtccgtcctcagcgtcgtgcgttcggatgccaaggagggaacaacaactggggtttcagcaaaggattggacaaacacaatattggcacttgtgtctcctaattccaaaccggaggacttcaaccgcccagttctttgtgaaattgttgatgatgatgatggctccatggctttgttaccaaaactgcaacaatttgcaaagagggagaacctgaagataatatcaattgcagacctgataagcgaggggggcaccgacacgaagccacgagatggtttggagagaaacagttgaagcatctcccgcggaggttcacactggtccctctccgcgccgaagcacaacgagactgctttctgctcttcaccacctgccagccatcctcctgaagaccccagggtgatgttggggatggacaagagatcttagtacgagtgcattcggagtgcctaactggggacatatttggatcagcgagatgcgattatgggaattaacttgctctggcaatgaccatgattgagaaaactggccggggtgtagtagtctatcttcgtggccatgagggtaggggtattgggctgggtcacaagcttcaagcatacaacttacaagatgatgggcgcgatactgtcgaggcaaacttggagctagggctgcctgctgactcgcgggagtacggtataggtgcacagatattacgccatcttggtgccaggaccatgcggctgatgactaacaaccctgccaagtacactggactcaagggctatggtttaagtgtccttggtagagtgccattgctaacaccgataaccaccgagaataggcgctatatggaaacaaagcgattgaagatggggcatgtttatggaagccgctccagtaatcatgcaaacggcagtggcttggctggtgctggcgagagagaggagcaggatcagaatgacagtgctggcgtgcaagagcgaactccagaagcttgagtgcctaactctgcgttccttagagctgctccaatgggagtcttaaaaagagatgcatcttaaaatatagggctccatggcaaaaaaatcactccaacggggacctcattttacaaaaactcaggaaacaaatttgggctccggtctcattggtcccaaatgtaggacttgaaactatcggccctattctcgttcccacgcccccacgaccttcggtcttttcctgttgcattcgttctcaagccgtctctcccacaaaccaaaccctctgcctgtcgagaagcattggcgagatggatggacggccaccgccttttcctcgttcacggccaacaggttggcctcgttgaacttccatggagatggcactagatgtgatagggagatcatcagctgtgtcttctccgccagatttgcgcaggcctcctgtggccgtggctgcagagcgaaggcctgcaagtatgtctgcaacttcccaacagacacaaggacaagcgtcttggcatcgaatcgctgcagaccatgccgatcggagtttatcagtggcaccgatgatgtatcaagatccattgtcaatgattgatgactataggtaataacctttctgttgagattagtagtcgattatatttgctcatgaattcaatcgatggtgatctgggatctccatggttgagaaattgaagtcaaggcctggtgaggttacttgtactggtaggtgctgatagatgtagtgctcaccgatgcttgtgaattgaattattggttctgaaaatatcctcacttcaaccatgcatacgagattatgagtaaatgtgaattccatacactctgttgccccagtccaatacaaccttgctgaaccttgcatatttgtgtgagcaggtacatttttgggagtctctttaatgtttttcttgtttggtctcataattagtggagtacttcaacttatgtgcattattatatcaatttgattaccaaactttattgtgtatagcgtcaaagctgttttgaatgtcttgtgtttgtgtatatttcattctaattccataaccagagtctgctcatatttttacactactctattgaaccaagaacctgaagatgtatttgcctgccaagaaaatatggagagcgaaaatgaggtcatggagtcaccaccattgaatgattcaaattcacagtcaaaaccaaagggtcgatccaagaattttaatgaagctgaagacattttgttgatgtcagcttatcttaacatacgtaaagatgcaattactggaagggatcaataagaaggcaacttttgggaaagagttgagaagtactttaacgttaacaggacatttgagtcagatcgtaactggtcatcgttgaagcatcggtggggtataattcacaaataagttagtagtttccaaggtttccatgacagtatcgaaaggaaaaatgaaagtgggaagacaagtgatgataagctggctgaagcaaatgtaatgttccatcaatttaaaaataaggccttttctttgttccatgcgtggaacattctcagacatgagccaaagtgggctgaagataaaacatctaatgaagggaatgcaaatggggacagtcatcccaatgctcaaagacctgcaggaaggaaagctgaaaaggaaaagatgaaagcaaaaaggcgcaacagtgatgaagagtctgatcctttcattgaagaggtaaaaaaatttgagagaatcgagagagaaaactgagagcgaacgaaaggagcgtgatgaaagatactttgagctgcataagaaaaaagtagacttggagcaagaccagcatgacaagttgataatggcacttgagtcttgacacgagcacaatggatgaccaaggaaaacagtattttcagttgatgaaagaagatattttagctcgacgctttgggagtaggcagccatagttatttagtttttaatactttagacttttttccattcaaaacagattatcttgatgttcatgtaatgtaagaacatattttcattcaaagcagattatcttgatgtttgcaacaatctgtgttgacattgttttctggttactgtaaaagttgagttgaaattttgcttctgaaa

SEQ ID NO: 206205 - DNA, 3382 bp, Zea Mays
ccactccaccttttccttccccgccggccgccgcgcagcgcgagcggagtcgccctctccagtagagtaggagtgacgtctctacctatccacctcagccccctcttttcattccccacccgcgccgcgcgagcggagtttcgcagcacgctgcggctcgcttcgccagaattcctggcgagggtacagaattccgcatcgaaacggaagggttccgctcaccgagaaaattggcctcaatcgcgcgtccgtcctcagcgtcgtgcgttcggatgccaaggagggaacaacaactggggtttcagcaaaggattggacaaacacaatattggcacttgtgtctcctaattccaaaccggaggacttcaaccgcccagctgggttacctccttttgcagttctttgtgaaattgttgatgatgatgatggctccatggctttgttaccaaaactgcaacaatttgcaaagagggagaacctgaagataatatcaattgcagacctgataagcgaggggggcaccgacacgaagccacgagatggtttggagagaaacagttgaagcatctcccgcggaggttcacactggtccctctccgcgccgaagcacaacgagactgctttctgctcttcaccacctgccagccatcctcctgaagaccccaggtggtgatgttggggatggacaagagatcttagtacgagtgcattcggagtgcctaactggggacatatttggatcagcgagatgcgattatgggaattaacttgctctggcaatgaccatgattgagaaaactggccggggtgtagtagtctatcttcgtggccatgagggtaggggtattgggctgggtcacaagcttcaagcatacaacttacaagatgatgggcgcgatactgtcgaggcaaacttggagctagggctgcctgctgactcgcgggagtacggtataggtgcacagatattacgccatcttggtgccaggaccatgcggctgatgactaacaaccctgccaagtacactggactcaagggctatggtttaagtgtccttggtagagtgccattgctaacaccgataaccaccgagaataggcgctatatggaaacaaagcgattgaagatggggcatgtttatggaagccgctccagtaatcatgcaaacggcagtggcttggctggtgctggcgagagagaggagcaggatcagaatgacagtgctggcgtgcaagagcgaactccagaagcttgagtgcctaactctgcgttccttagagctgctccaatgggagtcttaaaaagagatgcatcttaaaatatagggctccatggcaaaaaaatcactccaacggggacctcattttacaaaaactcaggaaacaaatttgggctccggtctcattggtcccaaatgtaggacttgaaactatcggccctattctcgttcccacgcccccacgaccttcggtcttttcctgttgcattcgttctcaagccgtctctcccacaaaccaaaccctctgcctgtcgagaagcattggcgagatggatggacggccaccgccttttcctcgttcacggccaacaggttggcctcgttgaacttccatggagatggcactagatgtgatagggagatcatcagctgtgtcttctccgccagatttgcgcaggcctcctgtggccgtggctgcagagcgaaggcctgcaagtatgtctgcaacttcccaacagacacaaggacaagcgtcttggcatcgaatcgctgcagaccatgccgatcggagtttatcagtggcaccgatgatgtatcaagatccattgtcaatgattgatgactataggtaataacctttctgttgagattagtagtcgattatatttgctcatgaattcaatcgatggtgatctgggatctccatggttgagaaattgaagtcaaggcctggtgaggttacttgtactggtaggtgctgatagatgtagtgctcaccgatgcttgtgaattgaattattggttctgaaaatatcctcacttcaaccatgcatacgagattatgagtaaatgtgaattccatacactctgttgccccagtccaatacaaccttgctgaaccttgcatatttgtgtgagcaggtacatttttgggagtctctttaatgtttttcttgtttggtctcataattagtggagtacttcaacttatgtgcattattatatcaatttgattaccaaactttattgtgtatagcgtcaaagctgttttgaatgtcttgtgtttgtgtatatttcattctaattccataaccagagtctgctcatatttttacactactctattgaaccaagaacctgaagatgtatttgcctgccaagaaaatatggagagcgaaaatgaggtcatggagtcaccaccattgaatgattcaaattcacagtcaaaaccaaagggtcgatccaagaattttaatgaagctgaagacattttgttgatgtcagcttatcttaacatacgtaaagatgcaattactggaagggatcaataagaaggcaacttttgggaaagagttgagaagtactttaacgttaacaggacatttgagtcagatcgtaactggtcatcgttgaagcatcggtggggtataattcacaaataagttagtagtttccaaggtttccatgacagtatcgaaaggaaaaatgaaagtgggaagacaagtgatgataagctggctgaagcaaatgtaatgttccatcaatttaaaaataaggccttttctttgttccatgcgtggaacattctcagacatgagccaaagtgggctgaagataaaacatctaatgaagggaatgcaaatggggacagtcatcccaatgctcaaagacctgcaggaaggaaagctgaaaaggaaaagatgaaagcaaaaaggcgcaacagtgatgaagagtctgatcctttcattgaagaggtaaaaaaatttgagagaatcgagagagaaaactgagagcgaacgaaaggagcgtgatgaaagatactttgagctgcataagaaaaaagtagacttggagcaagaccagcatgacaagttgataatggcacttgagtcttgacacgagcacaatggatgaccaaggaaaacagtattttcagttgatgaaagaagatattttagctcgacgctttgggagtaggcagccatagttatttagtttttaatactttagacttttttccattcaaaacagattatcttgatgttcatgtaatgtaagaacatattttcattcaaagcagattatcttgatgtttgcaacaatctgtgttgacattgttttctggttactgtaaaagttgagttgaaattttgcttctgaaa

SEQ ID NO: 206206 - DNA, 3374 bp, Zea Mays
gagaagtcaaagcgcacgggtcggcaggcagcttccgcgttcccactgcgcagtccgcgctcctcttccctcactggtgctcgccttggctgctccactcccagctccaaaaccctaaccccgcgagacatccagcagctaggagcgggtccaggagctcaccgtcgagcgaccgctacactcgacctcaccggtttctaatgctgatcaaagcatgagcttcactcctgttccaaggttcaggggggcagcctattcgcagttgtgtcctcagtctagcagttgtgctgaacatttggtaaatgtggatggggcgagtgcaaaagacttgtcagttgacccaagcacattttgtattccgcaagatgctaatcagggattttgtagccgagctttacagtacactagttctgtttcaaagcagggatttgcagctcaaggtcttcctgtaaatgctgcagagtttggtctgaataatgattcttctttggtgggaggatatcaacaatttgactaccttctggggcctcctcaaactgaagtgtgtgaaggaatgtggatgaaaaatatcaacacaagtatcatccaccggcgtagaccttctaatgcatcctgccttgatcatacagaagaactaacttcctatgaaaatgatgagggagctatctcatttggaagtagttgtagcacaggaattgcgagttatccatatagtactcctttgcaaagaaatagccacatttcggatacgcgggatggaacttgggatgctctcgtgcaaatgcaagaggctttggaagcatccaacagtgacaatggactcaatgaagagtgcagtgatttgactttcaatcatgcagaactttcaggtgggaatgccgtaaagcataaagttgtttgggacaatggctctttaaacagtccatctttcacctcaaatttattgtctttccctggtgatactgagaccaccctcacaagtgcctccactgtttattgtacctttcagaactttgctgatctccaacataagatgaacaacaatgagcaaaacaaattatctagtgaggttgaactgcctcgtcagaaagtgcccatgacaaaccatgttaatggaagtggaggtgaaatgcattctgctgaatggggaacgaaccctggtctcatagaatcttctggctttatgccaagcaatgaagacagacaaaacgatatatcacatcaaccgtcaagttcatttgtatacagtgcagatggaactgtggatcattgctcaaaaaagtcacccctcatgtatgaatgtgaagagcagatggaaattgattcacttttaaattcattcggtgtatcaactgattcattttcacaaacatatggaatgtttgagcgaagcaacaatttggttgagtttgatatgaagaccgaattagatgaaagtggttctgctgcatgctttaataataatgccccatatatgcaaactggaccacctgagtcagctatatctgatggatcttcttatcctgaacagtatcagtctacttctcaaacatgtggcttagtttatgcttcagcatctcagtggcaaaatatgtcaagttctggattgcctttactggattgtcgcaaaagtattggtgagcccacttcaataattagcctggggggaaatggtaaaggacacttgctgcccacaagtgaagatactttattacagaaaccacagagtgttgctcctgatgctagattggaaatgaccgacaatgttgctgattgctatctggagtctgctgctagcttggatggccattcttgtccactaggagcttccgcatgtcatgatgaagcaatggcagccaaagatttgcagacagcacaacatggcgtagtcacagattgcacctttggaatacatacttcaaaccacgctggacattcagacatgctgctacccattacacagactacttctgttcaagagcctggcttgagtttgtccaaggatctgaactcatcatgtattcgaggaacagaggttaagaaagtagatttaacagcaacatacaattctgaacgccatggcatcctccgcctcaagtcttttgaacaaaaaactcctgagagtatgggtatgaaaacatacatatatcattgtggtgatcatagccagattgttgatcctcagcagagtatcatactcgctgcaagcaaaccttcacactcaagtgttttgccagttgacaaatctgatggcaaggtcgtttcacagcaaaaaaagcggaaaagggctgcagaaaaccttttagcgtggcatgatcacatcatgcccgggcatgggagcatgcatcgtagaagaacacctgaattggattgggctcgtgctaccaaaagattggttgagaaggtagatggtgagaatgcaacaatgggaagtagcacctttaatactccagctcggaagagacttattttgactactagcctgattcagtatattcttcctgttgtaccagctagacttcttgccgcaaatgttactaattccattgaggccattgtataccacatttctaaatccgcactcagtgacgcatgtgacactgctctatctgttgtgaatgacacgctaccgaaccagagcagcacttctggtaaggaaggctcaagaatcctatcagaagttctggaaacatatgagtcgaggcttggcaagctggaaatttccttgttaagctctgaaaaggcgacgacattgcatgatctggcatcagagctacaggacttggggcggtggtatattctctatcatcttgcaaagtggcatgggtacactaacaattctgagctcgaccctggcgcagctactgtcaagaaacatgaaggagctgctgcagcaccagtaaactcgctgagtgatatcaagtgtcgcttactgaactagggcagctcagcgactactaacaagtcaacccaacccgtgttatgctgaactgcgtataggaatatagaaccatagaacatactgctgctgtggataggcctggcgcggtggtgagaagccttctactgagccaaagaacctcactcatgtggaagtcgtcatcactgggtccgtctttagaacgtactgccgccccgttgccttgttggctttttttttgtttgtaaatgagaggcaacctctccgtttagacttaggaatatggtgatgtgacttaccatgtgctatgtgatcattagatgtaggagcacgggaagatcattttgcaagtatagctaacgctagctgtctggaacttccagatgttactgttcttttggccagtttgctagatggttatgatccggtggttgcagtttttgattgtctttta

SEQ ID NO: 206207 - DNA, 3381 bp, Zea Mays
cctcttccctcactggtgctcgccttggctgctccactcccagctccaaaaccctaaccccgcgagacatccagcagctaggagcgggtccaggagctcaccgtcgagcgaccgctacactcgacctcaccggtttctaatgctgatcaaagcatgagcttcactcctgttccaaggttcaggggggcagcctattcgcagttgtgtcctcagtctagcagttgtgctgaacatttggtaaatgtggatggggcgagtgcaaaagacttgtcagttgacccaagcacattttgtattccgcaagatgctaatcagggattttgtagccgagctttacagtacactagttctgtttcaaagcagggatttgcagctcaaggtcttcctgtaaatgctgcagagtttggtctgaataatgattcttctttggtgggaggatatcaacaatttgactaccttctggggcctcctcaaactgaagtgtgtgaaggaatgtggatgaaaaatatcaacacaagtatcatccaccggcgtagaccttctaatgcatcctgccttgatcatacagaagaactaacttcctatgaaaatgatgagggagctatctcatttggaagtagttgtagcacaggaattgcgagttatccatatagtactcctttgcaaagaaatagccacatttcggatacgcgggatggaacttgggatgctctcgtgcaaatgcaagaggctttggaagcatccaacagtgacaatggactcaatgaagagtgcagtgatttgactttcaatcatgcagaactttcaggtgggaatgccgtaaagcataaagttgtttgggacaatggctctttaaacagtccatctttcacctcaaatttattgtctttccctggtgatactgagaccaccctcacaagtgcctccactgtttattgtacctttcagaactttgctgatctccaacataagatgaacaacaatgagcaaaacaaattatctagtgaggttgaactgcctcgtcagaaagtgcccatgacaaaccatgttaatggaagtggaggtgaaatgcattctgctgaatggggaacgaaccctggtctcatagaatcttctggctttatgccaagcaatgaagacagacaaaacgatatatcacatcaaccgtcaagttcatttgtatacagtgcagatggaactgtggatcattgctcaaaaaagtcacccctcatgtatgaatgtgaagagcagatggaaattgattcacttttaaattcattcggtgtatcaactgattcattttcacaaacatatggaatgtttgagcgaagcaacaatttggttgagtttgatatgaagaccgaattagatgaaagtggttctgctgcatgctttaataataatgccccatatatgcaaactggaccacctgagtcagctatatctgatggatcttcttatcctgaacagtatcagtctacttctcaaacatgtggcttagtttatgcttcagcatctcagtggcaaaatatgtcaagttctggattgcctttactggattgtcgcaaaagtattggtgagcccacttcaataattagcctggggggaaatggtaaaggacacttgctgcccacaagtgaagatactttattacagaaaccacagagtgttgctcctgatgctagattggaaatgaccgacaatgttgctgattgctatctggagtctgctgctagcttggatggccattcttgtccactaggagcttccgcatgtcatgatgaagcaatggcagccaaagatttgcagacagcacaacatggcgtagtcacagattgcacctttggaatacatacttcaaaccacgctggacattcagacatgctgctacccattacacagactacttctgttcaagagcctggcttgagtttgtccaaggatctgaactcatcatgtattcgaggaacagaggttaagaaagtagatttaacagcaacatacaattctgaacgccatggcatcctccgcctcaagtcttttgaacaaaaaactcctgagagtatgggtatgaaaacatacatatatcattgtggtgatcatagccagattgttgatcctcagcagagtatcatactcgctgcaagcaaaccttcacactcaagtgttttgccagttgacaaatctgatggcaaggtcgtttcacagcaaaaaaagcggaaaagggctgcagaaaaccttttagcgtggcatgatcacatcatgcccgggcatgggagcatgcatcgtagaagaacacctgaattggattgggctcgtgctaccaaaagattggttgagaaggtagatggtgagaatgcaacaatgggaagtagcacctttaatactccagctcggaagagacttattttgactactagcctgattcagtatattcttcctgttgtaccagctagacttcttgccgcaaatgttactaattccattgaggccattgtataccacatttctaaatccgcactcagtgacgcatgtgacactgctctatctgttgtgaatgacacgctaccgaaccagagcagcacttctggtaaggaaggctcaagaatcctatcagaagttctggaaacatatgagtcgaggcttggcaagctggaaatttccttgttaagctgaaaaggcgacgacattgcatgatctggcatcagagctacaggacttggggcggtggtatattctctatcatcttgcaaagtggcatgggtacactaacaattctgagctcgaccctggcgcagctactgtcaagaaacatgaaggagctgctgcagcaccagtaaactcgctgagtgatatcaagtgtcgcttactgaactagggcagctcagcgactactaacaagtcaacccaacccgtgttatgctgaactgcgtataggaatatagaaccatagaacatactgctgctgtggataggcctggcgcggtggtgagaagccttctactgagccaaaggtcttgggtttaacacaacctttctgcaaaaatgtagagataaaggctgactctgttatttcttctctagaacctcactcatgtggaagtcgtcatcactgggtccgtctttagaacgtactgccgccccgttgccttgttggctttttttttgtttgtaaatgagaggcaacctctccgtttagacttaggaatatggtgatgtgacttaccatgtgctatgtgatcattagatgtaggagcacgggaagatcattttgcaagtatagctaacgctagctgtctggaacttccagatgttactgttcttttggccagtttgctagatggttatgatccggtggttgcagtttttgattgtctttta

SEQ ID NO: 206208 - DNA, 3263 bp, Zea Mays
cctcactggtgctcgccttggctgctccactcccagctccaaaaccctaaccccgcgagacatccagcagctaggagcgggtccaggagctcaccgtcgagcgaccgctacactcgacctcaccggtttctaatgctgatcaaagcatgagcttcactcctgttccaaggttcaggggggcagcctattcgcagttgtgtcctcagtctagcagttgtgctgaacatttggtaaatgtggatggggcgagtgcaaaagacttgtcagttgacccaagcacattttgtattccgcaagatgctaatcagggattttgtagccgagctttacagtacactagttctgtttcaaagcagggatttgcagctcaaggtcttcctgtaaatgctgcagagtttggtctgaataatgattcttctttggtgggaggatatcaacaatttgactaccttctggggcctcctcaaactgaagtgtgtgaaggaatgtggatgaaaaatatcaacacaagtatcatccaccggcgtagaccttctaatgcatcctgccttgatcatacagaagaactaacttcctatgaaaatgatgagggagctatctcatttggaagtagttgtagcacaggaattgcgagttatccatatagtactcctttgcaaagaaatagccacatttcggatacgcgggatggaacttgggatgctctcgtgcaaatgcaagaggctttggaagcatccaacagtgacaatggactcaatgaagagtgcagtgatttgactttcaatcatgcagaactttcaggtgggaatgccgtaaagcataaagttgtttgggacaatggctctttaaacagtccatctttcacctcaaatttattgtctttccctggtgatactgagaccaccctcacaagtgcctccactgtttattgtacctttcagaactttgctgatctccaacataagatgaacaacaatgagcaaaacaaattatctagtgaggttgaactgcctcgtcagaaagtgcccatgacaaaccatgttaatggaagtggaggtgaaatgcattctgctgaatggggaacgaaccctggtctcatagaatcttctggctttatgccaagcaatgaagacagacaaaacgatatatcacatcaaccgtcaagttcatttgtatacagtgcagatggaactgtggatcattgctcaaaaaagtcacccctcatgtatgaatgtgaagagcagatggaaattgattcacttttaaattcattcggtgtatcaactgattcattttcacaaacatatggaatgtttgagcgaagcaacaatttggttgagtttgatatgaagaccgaattagatgaaagtggttctgctgcatgctttaataataatgccccatatatgcaaactggaccacctgagtcagctatatctgatggatcttcttatcctgaacagtatcagtctacttctcaaacatgtggcttagtttatgcttcagcatctcagtggcaaaatatgtcaagttctggattgcctttactggattgtcgcaaaagtattggtgagcccacttcaataattagcctggggggaaatggtaaaggacacttgctgcccacaagtgaagatactttattacagaaaccacagagtgttgctcctgatgctagattggaaatgaccgacaatgttgctgattgctatctggagtctgctgctagcttggatggccattcttgtccactaggagcttccgcatgtcatgatgaagcaatggcagccaaagatttgcagacagcacaacatggcgtagtcacagattgcacctttggaatacatacttcaaaccacgctggacattcagacatgctgctacccattacacagactacttctgttcaagagcctggcttgagtttgtccaaggatctgaactcatcatgtattcgaggaacagaggttaagaaagtagatttaacagcaacatacaattctgaacgccatggcatcctccgcctcaagtcttttgaacaaaaaactcctgagagtatgggtatgaaaacatacatatatcattgtggtgatcatagccagattgttgatcctcagcagagtatcatactcgctgcaagcaaaccttcacactcaagtgttttgccagttgacaaatctgatggcaaggtcgtttcacagcaaaaaaagcggaaaagggctgcagaaaaccttttagcgtggcatgatcacatcatgcccgggcatgggagcatgcatcgtagaagaacacctgaattggattgggctcgtgctaccaaaagattggttgagaagacttcttgccgcaaatgttactaattccattgaggccattgtataccacatttctaaatccgcactcagtgacgcatgtgacactgctctatctgttgtgaatgacacgctaccgaaccagagcagcacttctggtaaggaaggctcaagaatcctatcagaagttctggaaacatatgagtcgaggcttggcaagctggaaatttccttgttaagctctgaaaaggcgacgacattgcatgatctggcatcagagctacaggacttggggcggtggtatattctctatcatcttgcaaagtggcatgggtacactaacaattctgagctcgaccctggcgcagctactgtcaagaaacatgaaggagctgctgcagcaccagtaaactcgctgagtgatatcaagtgtcgcttactgaactagggcagctcagcgactactaacaagtcaacccaacccgtgttatgctgaactgcgtataggaatatagaaccatagaacatactgctgctgtggataggcctggcgcggtggtgagaagccttctactgagccaaaggtcttgggtttaacacaacctttctgcaaaaatgtagagataaaggctgactctgttatttcttctctagaacctcactcatgtggaagtcgtcatcactgggtccgtctttagaacgtactgccgccccgttgccttgttggctttttttttgtttgtaaatgagaggcaacctctccgtttagacttaggaatatggtgatgtgacttaccatgtgctatgtgatcattagatgtaggagcacgggaagatcattttgcaagtatagctaacgctagctgtctggaacttccagatgttactgttcttttggccagtttgctagatggttatgatccggtggttgcagtttttgattgtctttta

SEQ ID NO: 206209 - DNA, 3266 bp, Zea Mays
ctcactggtgctcgccttggctgctccactcccagctccaaaaccctaaccccgcgagacatccagcagctaggagcgggtccaggagctcaccgtcgagcgaccgctacactcgacctcaccggtttctaatgctgatcaaagcatgagcttcactcctgttccaaggttcaggggggcagcctattcgcagttgtgtcctcagtctagcagttgtgctgaacatttggtaaatgtggatggggcgagtgcaaaagacttgtcagttgacccaagcacattttgtattccgcaagatgctaatcagggattttgtagccgagctttacagtacactagttctgtttcaaagcagggatttgcagctcaaggtcttcctgtaaatgctgcagagtttggtctgaataatgattcttctttggtgggaggatatcaacaatttgactaccttctggggcctcctcaaactgaagtgtgtgaaggaatgtggatgaaaaatatcaacacaagtatcatccaccggcgtagaccttctaatgcatcctgccttgatcatacagaagaactaacttcctatgaaaatgatgagggagctatctcatttggaagtagttgtagcacaggaattgcgagttatccatatagtactcctttgcaaagaaatagccacatttcggatacgcgggatggaacttgggatgctctcgtgcaaatgcaagaggctttggaagcatccaacagtgacaatggactcaatgaagagtgcagtgatttgactttcaatcatgcagaactttcaggtgggaatgccgtaaagcataaagttgtttgggacaatggctctttaaacagtccatctttcacctcaaatttattgtctttccctggtgatactgagaccaccctcacaagtgcctccactgtttattgtacctttcagaactttgctgatctccaacataagatgaacaacaatgagcaaaacaaattatctagtgaggttgaactgcctcgtcagaaagtgcccatgacaaaccatgttaatggaagtggaggtgaaatgcattctgctgaatggggaacgaaccctggtctcatagaatcttctggctttatgccaagcaatgaagacagacaaaacgatatatcacatcaaccgtcaagttcatttgtatacagtgcagatggaactgtggatcattgctcaaaaaagtcacccctcatgtatgaatgtgaagagcagatggaaattgattcacttttaaattcattcggtgtatcaactgattcattttcacaaacatatggaatgtttgagcgaagcaacaatttggttgagtttgatatgaagaccgaattagatgaaagtggttctgctgcatgctttaataataatgccccatatatgcaaactggaccacctgagtcagctatatctgatggatcttcttatcctgaacagtatcagtctacttctcaaacatgtggcttagtttatgcttcagcatctcagtggcaaaatatgtcaagttctggattgcctttactggattgtcgcaaaagtattggtgagcccacttcaataattagcctggggggaaatggtaaaggacacttgctgcccacaagtgaagatactttattacagaaaccacagagtgttgctcctgatgctagattggaaatgaccgacaatgttgctgattgctatctggagtctgctgctagcttggatggccattcttgtccactaggagcttccgcatgtcatgatgaagcaatggcagccaaagatttgcagacagcacaacatggcgtagtcacagattgcacctttggaatacatacttcaaaccacgctggacattcagacatgctgctacccattacacagactacttctgttcaagagcctggcttgagtttgtccaaggatctgaactcatcatgtattcgaggaacagaggttaagaaagtagatttaacagcaacatacaattctgaacgccatggcatcctccgcctcaagtcttttgaacaaaaaactcctgagagtatgggtatgaaaacatacatatatcattgtggtgatcatagccagattgttgatcctcagcagagtatcatactcgctgcaagcaaaccttcacactcaagtgttttgccagttgacaaatctgatggcaaggtcgtttcacagcaaaaaaagcggaaaagggctgcagaaaaccttttagcgtggcatgatcacatcatgcccgggcatgggagcatgcatcgtagaagaacacctgaattggattgggctcgtgctaccaaaagattggttgagaagctagacttcttgccgcaaatgttactaattccattgaggccattgtataccacatttctaaatccgcactcagtgacgcatgtgacactgctctatctgttgtgaatgacacgctaccgaaccagagcagcacttctggtaaggaaggctcaagaatcctatcagaagttctggaaacatatgagtcgaggcttggcaagctggaaatttccttgttaagctctgaaaaggcgacgacattgcatgatctggcatcagagctacaggacttggggcggtggtatattctctatcatcttgcaaagtggcatgggtacactaacaattctgagctcgaccctggcgcagctactgtcaagaaacatgaaggagctgctgcagcaccagtaaactcgctgagtgatatcaagtgtcgcttactgaactagggcagctcagcgactactaacaagtcaacccaacccgtgttatgctgaactgcgtataggaatatagaaccatagaacatactgctgctgtggataggcctggcgcggtggtgagaagccttctactgagccaaaggtcttgggtttaacacaacctttctgcaaaaatgtagagataaaggctgactctgttatttcttctctagaacctcactcatgtggaagtcgtcatcactgggtccgtctttagaacgtactgccgccccgttgccttgttggctttttttttgtttgtaaatgagaggcaacctctccgtttagacttaggaatatggtgatgtgacttaccatgtgctatgtgatcattagatgtaggagcacgggaagatcattttgcaagtatagctaacgctagctgtctggaacttccagatgttactgttcttttggccagtttgctagatggttatgatccggtggttgcagtttttgattgtctttta

SEQ ID NO: 206210 - DNA, 3112 bp, Zea Mays
attgctgatgctcctctattattgagtgcaaacggatcgcaacgagatgcaaccaaatccccgtccactccaccagctctgcaatccgacaagagatttgccaattatttctcctagaaaaaccgatcgcatcagtccccatcctcttcgccgtggggtcggcaggcagggcaaggctaggcagcgcctctccgcgtgtggtccgtgtgcgagggtccgctcctcctcccctccgtgcacccggagggcagcggcgtctcttcttcctggtcgaatctccccgcggctgtgaataggaggaggtcgacgacgccatagcaaaaaacaaatccttggaatgctttcggagggtcggggattcgtcgccggctgcctgcactgatgcttggagcgcgcgaatctgctcaagttttgatcttggcgtgctcttgagtctggaatccgggcattcattggggctttgttctcagtttgcaaggctgcaaggccgtgctagtttgaacccatggagactactagcacaacaaatgaacagactgataggggggcgatgtgggagttggaaaggaatctcgatcagcccatggatgcagaggccggcagattgagaaatatgtacagggaaaagtcctaccctacacttgtgctgttacaacttgctttccaaagccttggtgtggtgtttggggatttaggcacatcacctttatatgtcttctccaacattttccctcatgaaattgaagacacggaacaaattattggagcactctcgcttgttatttactcccttaccctgattccacttgttaagtacgtgttcattgtcttgagggcaaatgataatggccaaggtggaacatttgctctttactcgttgctttgccggcatgcaaagataaacactattccgaatcagcatagaacagatgaagaactaacaacatacagccgccacacatatgatgagaaatctcttgctgcaaagatcaaaaggtggttagaggggcaccaattcagaaagaatgtcattcttattcttgttctttttggtacttgtatggcagttggagatggaatcctcactcctgcaatatcagttctttctgcaactggaggaatacaagtggaagagaaaaaaatgaaaaatgatgcggttgtcatcgtctctgtggtcatattgattggattattcagcatgcagcactttggtactgataaagtcagttggctttttgcgccgatagtatttgtttggttcatactcattggagtcctgggcgctgtaaacatttccaaatatgaccaatctgttctcaaggcttttaatcctatctatgtatatcggtactttaagcgagggaagactagctgggcttctttgggaggaattatgcttagcattacagaagcactgtttgctgatctctcatatttccctgtacaagctattcagattgctttcacggtggttgtgtttccatgtcttcttttgcagtatacaggccaagctgcctatatagctcagaacaaagatcatgtctcccatgccttctatttttcccttccagattctgtactctggccatcattcattgttgcaacagctgctgcaatagttgctagtcaggcaactatatcgatgacatattcgattatcaagcaagcacttgctctagggtgcttccccagagtgagaattatccatacttccaagaagtatctaggccagatatacagtcccgatattaattggatccttctggtattctgcattgctgtcactgctggatttaaaaaccaaagccagatagcaaatgcatacggtactgccgtgataatggttatgcttgtgacaacatttctcatgatccctataatgctgttggtgtggcgcagccactggaccttggtcatcctgttcaccgtgctgtcactgtttgttgaaattccgtacttcaccgctgtggtgcggaagatcgaccagggtggctgggttccacttgtgtttgctgttgccttcctcatcatcatgtatgtatggcactatggtacgctcaagcggtatgagtttgagatgcacagcaaggtgtccatggcatggatcctaggccttggtccaagcctcggtctggtcagggtgcctggtgtgggcctggtgtacaccgagctggcaagtggtgttcctcacatcttctcacacttcatcaccaacctccctgccatccactccaccctggtctttgtgtgtgtgaaataccttcctgtctacactgtgccactggatgaaaggttccttgtgaagcgaattggtcccaagaacttccacatgtttagatgcgtggcgcggtatggctacaaggacatccacaagaaggatgatgacttcgagcagatgctcttcgacagcctgatgctattcgtcaggctggagagcatgatggaagagtacacggattctgatgagtacagcacccgtgagacgaacctgtcaggcagcgccaacccaagaatcaatggcatcagcgccggttcaaacatggatctcagctacacatcccatgactccattatacaggtgcagtccccaaattatacggggaacagccaggcggtgtcaccaggtcagctgtaccataccgtgggcgacgagattgcgttcctgaacgcgtgcagggacgccggggtggtgcacatcctcgggaacacagtcatcagggcccgcagagattcagggttcatcaagaagattgctatcaattacttgtatgctttccttaggaagatctgcagggagaacagcgccatcttcaatgttccccatgagagcctactgaatgttgggcaggtgttctatgtgtaagcactaaaaccaaacacatgtagtagatgagagttcagcttcggaaccactggagagaatctagctgtgttttgttcataggtaataggagtataatagttgaaagaattgtacagcaaaacagcatctttaatgtgaccatttggagcctgatcagtagtggctagggctggacgaaatacttgtggctcgataactcgctcgactcggctcgttttgattctgtagcgagccaagctagcattttag

SEQ ID NO: 206211 - DNA, 1342 bp, Zea Mays
taaatatagaaacaaaaattatacgtacaaactatggcaaacattaggcagctaagcctgaatccgctttgtggcgcctatgcgcccgcagcaaccaacgaggcaacggatcgagttcctctccgaactccaactctgcgccgcaatccactcaagaaggttagccctcgtggtctcggatttggataatcctccgccgaggtatgaaacaggaggcggccaccagcatagtggtgacccaggaggacgtcctgcaccactacaaggagcctccaccccgccgcgaggacgatccgccagcactggctgcgtcgctgtcgttgccgtcgtcactgtcggaggacgatggcgacgccatgccgcagccatcttcatacgcggtcttgccgcgccgggaaggcgagctggtgtctgcggaggagctgctgctggtgccgccgctcaacttcgccatggtggaccacggcgtgtaccgctccggattcccggacgcctccaacttgccgtttcttgagacgctccgactccgctccgtcctgtgcctgtgcccggagccatacccggaggctaatctggagttcctccgtgcccacgggatcaagctcttccagttcggaatcgacggctccaagttttggacttttgatactgaaataacaggaaccatttgtgaacataccagaagatagaatccgtgaagctctagaagtcatcctagatgcaagcaaccatccggttcttattcactgcaagcgaggaaagcatcgaaccggctgtgtggttggatgctttaggaaattgcaacgctggtgtctaacttcaatatttgacgaataccagcgttttgctgctgccaaaacaagagtttctgacctacggttcatggagctatttgatgtatcgagcataaagcatttagcatttgagtcgtctgtatgatagtaacattggtgcatgataacaactcaatactggttccattacggtgtcatctttttcatttaagaaaaaaaatcatttctaaaaatgctaccttattactccctccatccccaaatataattcgttttagactaaatatatattaattaattaatctataaatattatttgtatttgtatgtatatattcattatcattgtggacggaaaaaaagtctatattttgagacagagcgagtatttttttagcataatggtttgggagaggcaagtcataagaataagtcctgactacatgtggttattatcagttcatatatgtgataatggcagcttaatatctgttgctaagaaaatggacgaaatcgctcgagtctacttcattgtgggagttcttttt

SEQ ID NO: 206212 - DNA, 3017 bp, Zea Mays
gtcgttctcgttcggtcgttttcgttcccctacctccagtccagtcccaggtccgagccggaccttgatcgccgccgtgcctcggcgcaaggaatggggccttcggtcttacccttgcacgcgccgccggcatcaggagacgtctctgtgtgcttcgccgtgccttcagccgtagccggcgccgcatcagcgtgctccagagaggaccgcagcttccagcacgtgtccctgacaccgccccacactggattgggaagggccgctgaccccacgcacctgcccgctggccagtgttggaagtttcagactcagttatttgaaacatcaagatggttaatttcggaaagaaattgatggctgatcaagtggacgaatggaaaggatactacatcaattacaagctgatgaagaaaatgttaaagcaatatgtccaacaaacccaacatgatgagaaagatcgcgaacaagttcttaaagacttttcaaggtttcttgatgaccagattgaaaggattgtgctttttctgctacaacaacaaggccatcttgccagtaggattgagaaattggcagaaaaacgcactgctcttctggaagagtatgacatatcacaagtttatcagctgcatgatgcatacagggaagtcgggcttgatctcataaagcttctccgctttgttgatgtgaatgctactggtatacgcaagatactaaagaaatttgataaacgctttggctacaagttcactgattattatgtcaccactcgtgcaaatcatccttattctcagcttcagcaagtatttaagcaagtgggaattgtagctgttgtaggtgcattatcgcgcaaccttgaatatctgcagcatcatgaaggaagctttgtatccatctatgatcgtccagcagttaccttgaaggaccctattatagaccaagtaaaccatgcagtacagaaactcacgcatgccacgaattttatgcaattcttgggacagcacgcgcttattgtccaggaagatgcagaaagcgagtcggaggatcttgttggtgatcagagctaccatttcatgtccctggtgcttaatctagtgaacacattcctttacatggtgaatacatatatcattgtgccgactgcagatgactatgcagtaagccttggggctgctgcaactgtatgtggtataattattggatcgatggcagtcgcccaagtattctcctcagtctacttcagtgcctggtcaaataagtcctacttcaaacctcttgtgttcagtagcattatgctgtttcttggaaacctactgtatgcattggcatatgatctgaattcactaatagttctcctgactggacgactgctatgtgggtatgcaattttctcaattcactctatctcacttgatttacgttccacttttgtatgctagcattgatctgggtgaaaattactagtatgacaaatgcaggttgaggatccttaagctgagggcaatattctagaatatttatattgctgaatagaaaacaaaatggaaactgtatatcttacaaggagataaaggattttaaatctcgagactggcattaaaatatatgcttttctatttcttttatagaacttaactagttatccctacctccctttgggctagtaatttgtctatattgtttaaggttcttgattttctgacggtgcatctgtgatcgagctgccagcatgtaatgtgcaggttaggttctgcaagagcagtgaaccgtcgctatatcagtgactgtgtgcctctcaagatgaggctacaagcctctgccgggttcgttagtgctagcgctcttggcatggcatgtggccctgctcttgctggttttctccagattaaattcaagatatactcgctcagttttaatcagagcacattgcctggatgggtcatgtgcatttcttggcttatttacttattgtggttgtggcttacattcaaggaaccagaacacttcactaaaactctggtcaatgaacagccgtcagaatctggccgccaaggaaattctaacttggaggcaggtctagctgaaccattgcttcaaggtatagaacgaaggcaggatgagaactcagaagttaatgatgatactgaagtagagtcagaaagctctcatgaaccagcaacatcaattgcttcagcatacagattgctaactccatctgtgaaggcccagctactgatatacttcatgctcaagtacgcaatggaaatactactatcagaatcgagcgttgtcaccacatactattttagctggtctacaagtgctgtggctatctttctagcgattcttggattaacggttcttccagtaaatgccattgttggaagctacgttacaaatttattcgaggataggcaaattttgttggcatctgaagtcatggttctcatcggtataatcatgagcttttgtttcacacctcactactccatcccgcaatatgttctttcagctttcatcacatttgtatttgctgaggtgcttgaaggagtgaatctgtccttgctctcacgagtaatgtcatcgaggctttcccgagggacctacaatggtggactcctttcgacagaggccgggacgttggcccgtgtagttgcagatgccacgattactgcagccggttatctcggcacggacctccttctgaatgtcactcttctcccatcccttgtgatttgcatagtctccatcgcagcagcactctacacttacaacaatctctattgaagctattgttgctgtacaagtgtacaacaatgttcctaagctaaaatgttcctgcccacaacgggtttgtatatctgttcaagcatggtttgtaaacattttgatcaagtttgtatgcaaaatttcttgtatttagtgcatttatgtaaagattcatcctgtaaagaattataaactatgagacgctattgccatttatgatcatttatgtttatctttttagccttatgtta

SEQ ID NO: 206213 - DNA, 2831 bp, Zea Mays
gccacgccgtaccgtgcaagcgcgtttgctgatgttcatctaattactgtataataatatctccgggcgaaagagctagcaatcgtcggcgggggaggaggggctcgattgctgctcaagactcagttatttgaaacatcaagatggttaatttcggaaagaaattgatggctgatcaagtggacgaatggaaaggatactacatcaattacaagctgatgaagaaaatgttaaagcaatatgtccaacaaacccaacatgatgagaaagatcgcgaacaagttcttaaagacttttcaaggtttcttgatgaccagattgaaaggattgtgctttttctgctacaacaacaaggccatcttgccagtaggattgagaaattggcagaaaaacgcactgctcttctggaagagtatgacatatcacaagtttatcagctgcatgatgcatacagggaagtcgggcttgatctcataaagcttctccgctttgttgatgtgaatgctactggtatacgcaagatactaaagaaatttgataaacgctttggctacaagttcactgattattatgtcaccactcgtgcaaatcatccttattctcagcttcagcaagtatttaagcaagtgggaattgtagctgttgtaggtgcattatcgcgcaaccttgaatatctgcagcatcatgaaggaagctttgtatccatctatgatcgtccagcagttaccttgaaggaccctattatagaccaagtaaaccatgcagtacagaaactcacgcatgccacgaattttatgcaattcttgggacagcacgcgcttattgtccaggaagatgcagaaagcgagtcggaggatcttgttggtgatcagagctaccatttcatgtccctggtgcttaatctagtgaacacattcctttacatggtgaatacatatatcattgtgccgactgcagatgactatgcagtaagccttggggctgctgcaactgtatgtggtataattattggatcgatggcagtcgcccaagtattctcctcagtctacttcagtgcctggtcaaataagtcctacttcaaacctcttgtgttcagtagcattatgctgtttcttggaaacctactgtatgcattggcatatgatctgaattcactaatagttctcctgactggacgactgctatgtgggtatgcaattttctcaattcactctatctcacttgatttacgttccacttttgtatgctagcattgatctgggtgaaaattactagtatgacaaatgcaggttgaggatccttaagctgagggcaatattctagaatatttatattgctgaatagaaaacaaaatggaaactgtatatcttacaaggagataaaggattttaaatctcgagactggcattaaaatatatgcttttctatttcttttatagaacttaactagttatccctacctccctttgggctagtaatttgtctatattgtttaaggttcttgattttctgacggtgcatctgtgatcgagctgccagcatgtaatgtgcaggttaggttctgcaagagcagtgaaccgtcgctatatcagtgactgtgtgcctctcaagatgaggctacaagcctctgccgggttcgttagtgctagcgctcttggcatggcatgtggccctgctcttgctggttttctccagattaaattcaagatatactcgctcagttttaatcagagcacattgcctggatgggtcatgtgcatttcttggcttatttacttattgtggttgtggcttacattcaaggaaccagaacacttcactaaaactctggtcaatgaacagccgtcagaatctggccgccaaggaaattctaacttggaggcaggtctagctgaaccattgcttcaaggtatagaacgaaggcaggatgagaactcagaagttaatgatgatactgaagtagagtcagaaagctctcatgaaccagcaacatcaattgcttcagcatacagattgctaactccatctgtgaaggcccagctactgatatacttcatgctcaagtacgcaatggaaatactactatcagaatcgagcgttgtcaccacatactattttagctggtctacaagtgctgtggctatctttctagcgattcttggattaacggttcttccagtaaatgccattgttggaagctacgttacaaatttattcgaggataggcaaattttgttggcatctgaagtcatggttctcatcggtataatcatgagcttttgtttcacacctcactactccatcccgcaatatgttctttcagctttcatcacatttgtatttgctgaggtgcttgaaggagtgaatctgtccttgctctcacgagtaatgtcatcgaggctttcccgagggacctacaatggtggactcctttcgacagaggccgggacgttggcccgtgtagttgcagatgccacgattactgcagccggttatctcggcacggacctccttctgaatgtcactcttctcccatcccttgtgatttgcatagtctccatcgcagcagcactctacacttacaacaatctctattgaagctattgttgctgtacaagtgtacaacaatgttcctaagctaaaatgttcctgcccacaacgggtttgtatatctgttcaagcatggtttgtaaacattttgatcaagtttgtatgcaaaatttcttgtatttagtgcatttatgtaaagattcatcctgtaaagaattataaactatgagacgctattgccatttatgatcatttatgtttatctttttagccttatgtta

SEQ ID NO: 206214 - DNA, 2631 bp, Zea Mays
ctgcacgcggctataagtacccaccgccatctcactttgcccagcagcacggcagtagctgcgccattgcacgcctccggccggcggctgcttgtcttgctgcttctgccgcacatccgtgatccggcagaaggtgcttcgttcgttgcaggcctggcgccacgccgtaccgtgcaagcgcgtttgctgatgttcatctaattactgtataataatatctccgggcgaaagagctagcaatcgtcggcgggggaggaggggctcgattgctgctcaagtttcagactcagttatttgaaacatcaagatggttaatttcggaaagaaattgatggctgatcaagtggacgaatggaaaggatactacatcaattacaagctgatgaagaaaatgttaaagcaatatgtccaacaaacccaacatgatgagaaagatcgcgaacaagttcttaaagacttttcaaggtttcttgatgaccagattgaaaggattgtgctttttctgctacaacaacaaggccatcttgccagtaggattgagaaattggcagaaaaacgcactgctcttctggaagagtatgacatatcacaagtttatcagctgcatgatgcatacagggaagtcgggcttgatctcataaagcttctccgctttgttgatgtgaatgctactggtatacgcaagatactaaagaaatttgataaacgctttggctacaagttcactgattattatgtcaccactcgtgcaaatcatccttattctcagcttcagcaagtatttaagcaagtgggaattgtagctgttgtaggtgcattatcgcgcaaccttgaatatctgcagcatcatgaaggaagctttgtatccatctatgatcgtccagcagttaccttgaaggaccctattatagaccaagtaaaccatgcagtacagaaactcacgcatgccacgaattttatgcaattcttgggacagcacgcgcttattgtccaggaagatgcagaaagcgagtcggaggatcttgttggtgatcagagctaccatttcatgtccctggtgcttaatctagtgaacacattcctttacatggtgaatacatatatcattgtgccgactgcagatgactatgcagtaagccttggggctgctgcaactgtatgtggtataattattggatcgatggcagtcgcccaagtattctcctcagtctacttcagtgcctggtcaaataagtcctacttcaaacctcttgtgttcagtagcattatgctgtttcttggaaacctactgtatgcattggcatatgatctgaattcactaatagttctcctgactggacgactgctatgtgggttaggttctgcaagagcagtgaaccgtcgctatatcagtgactgtgtgcctctcaagatgaggctacaagcctctgccgggttcgttagtgctagcgctcttggcatggcatgtggccctgctcttgctggttttctccagattaaattcaagatatactcgctcagttttaatcagagcacattgcctggatgggtcatgtgcatttcttggcttatttacttattgtggttgtggcttacattcaaggaaccagaacacttcactaaaactctggtcaatgaacagccgtcagaatctggccgccaaggaaattctaacttggaggcaggtctagctgaaccattgcttcaaggtatagaacgaaggcaggatgagaactcagaagttaatgatgatactgaagtagagtcagaaagctctcatgaaccagcaacatcaattgcttcagcatacagattgctaactccatctgtgaaggcccagctactgatatacttcatgctcaagtacgcaatggaaatactactatcagaatcgagcgttgtcaccacatactattttagctggtctacaagtgctgtggctatctttctagcgattcttggattaacggttcttccagtaaatgccattgttggaagctacgttacaaatttattcgaggataggcaaattttgttggcatctgaagtcatggttctcatcggtataatcatgagcttttgtttcacacctcactactccatcccgcaatatgttctttcagctttcatcacatttgtatttgctgaggtgcttgaaggagtgaatctgtccttgctctcacgagtaatgtcatcgaggctttcccgagggacctacaatggtggactcctttcgacagaggccgggacgttggcccgtgtagttgcagatgccacgattactgcagccggttatctcggcacggacctccttctgaatgtcactcttctcccatcccttgtgatttgcatagtctccatcgcagcagcactctacacttacaacaatctctattgaagctattgttgctgtacaagtgtacaacaatgttcctaagctaaaatgttcctgcccacaacgggtttgtatatctgttcaagcatggtttgtaaacattttgatcaagtttgtatgcaaaatttcttgtatttagtgcatttatgtaaagattcatcctgtaaagaattataaactatgagacgctattgccatttatgatcatttatgtttatctttttagccttatgtta

SEQ ID NO: 206215 - DNA, 2644 bp, Zea Mays
acagaagcgaggcgcgcccactgcccacgccacgcactcctatactcctatgctatgcctctcctcccctccacagagtggcagtggcggggtgaggtgagagagagtgagactgtgagagtgagagaccactccatctctccttttactctcctctcccctcccgctcgcttttttcagcggggggagagaggccgcggcggcagcttgcagcaccagagagagagagagagcgagcgagcgagcaaaggccaacagatcacagctagctccgccccgccccgcctaccagagttttcaatttcaccgcgacgtcaaaagaaagcagcttttggtggtaatctcttggagcattgcagcggcgagcgagatctgccacgacgcgccagctcctgcagcggcccggcggccccggcctgccactgctactcatctgcgccgctggcagaggagctgccgctaccgctgccgccgcacccattgcctgcccctgcagcctgcccaagcagcaagcacaaagccccatcccgcatcaccctcaggctactccaaactactgcaccgtccactgtcgcccgcgcgcctcagccacgcagtcttatgcatcaatgcatgccctagcattctgcggcttcccccgtgcggcgcccaccgctggagagtagagacacgcggatagcaccaagaccagcgccggctacgtagctgctgctcggtgtctcttcagactcttcttactaggggggaaggaggaggaccaaggcaggcagtcggcagcgaggaggtgaaaagggcagcagctgcccgtgccgtaggagaggccgggcggcggccgcgtacgtccgttgcagcgcgcgcgcgcgcgctctggcctccgtgcgataccacgcgacgctgaatcgccgatcgacatgacgctggaggctctgtgcccgaccagcagcgacgtcctcgtctacgacaccttcaacgccgccgccgcatgcgccgctgcttctgcggggaccttccttttcggcaatgcaccaccggtggaggtgccggcggcggcggcggcccaggcgaacggggagaacagcgtgcagcaggggcggaggaagcggcggcgacggcagaggagcaccaagaacgccgaggacgccgagagccagcggatgacccacatcgccgtcgagcgcaaccgccgccgccagatgaacgagtacctcgccgcgctccgctcgctcatgccggactcctacgtccaccggagcgatcaggcgtccgtggtcagtggcgcaatcgatttcgtgaaggagctggagcagcagctgcaatccctggaggcccagaagctggcgctgaagcggcagctgcagcagcagcagcagcgcagcgtcacggccgcgatacgcgacgacgcggcgcagccggctcgaggccgtgatgacatcggcgcgggcgcgggcggggacgccgcggcgcgcagcgaggtgtcggcgccggagccagacccgcctccgttcgcgcggttcttccggtacccgcagtacgcgcggcggcacgcggcggcgcgggaggacgccggcgcggaggagacgagccgcgcctccgcggtggcggacgtggaggtgggcgtggtggtggacgcgcacgccagcctgcgcgtgatggcgccgcggaggcccgggcagcttctgcggatggtggccgggatgcaggcgctcggcctcgccgtgctgcacctcaacgtggccaccgccgcggtcgacgcgacggcgctctacacgctcagcctcaaggctacgtaaaggagaaaaggacgatcatggagaatcctctcttggcttggcgagcagagcaggcacctggcccgtcgtccattgacatggcgaggagatcgatgtggactgcagagaaagattgtgttgtgtgccgctgccctgcctttttcttttctagtgctgcgtgtttcaggacagcagagactgactgctgagtaagctatatgtgtttgtgtgccccggagccgagccggacccctcaacgtagcaggtggaggaagggtgcgccctggcgacggcggaggagatcgccgcggcggtgcaccacgtcctatgcatcatcgacgccgaggcgacgccgcagaggctgctcgctgccggagcaccagggacagggcagccggacgtctagctagtcaggatgattcaggacgaggtcttcccggcgtaacggggcggcatgggctgcgcggggtgtctgcttccgtttcttgtaaagtgcagtggcgtgcgtgcgtggctggccagcacacgagagcctgatggcgtagcgtaggtacagagtatgtaacgggcaataacacgcaggttcgtgtctggacctgtggtctctcgttcgtgcatgcctatgcgtgcccttgtgtttgcgtgtgacgggaattggaattgaggacgggaagcaggaatgcaggaacagggaagggatcggacgttgttttcttcatgcgctcagcacaactgcgcaagggaaggggagccgtgctgaatcttgctactcgtacgctacagtgcttcacgcattctttccaatctacgcccaagtaacggtcattcttcttcctgggcctggccggccggcccactccaccatccttcgcagc

SEQ ID NO: 206216 - DNA, 2662 bp, Zea Mays
tggcagtggcggggtgaggggggaaggaggaggaccaaggcaggcagtcggcagcgaggaggtgaaaagggcagcagctgcccgtgccgtaggagaggccgggcggcggccgcgtacgtccgttgcagcgcgcgcgcgcgcgctctggcctccgtgcgataccacgcgacgctgaatcgccgatcgacatgacgctggaggctctgtgcccgaccagcagcgacgtcctcgtctacgacaccttcaacgccgccgccgcatgcgccgctgcttctgcggggaccttccttttcggcaatgcaccaccggtggaggtgccggcggcggcggcggcccaggcgaacggggagaacagcgtgcagcaggggcggaggaagcggcggcgacggcagaggagcaccaagaacgccgaggacgccgagagccagcggatgacccacatcgccgtcgagcgcaaccgccgccgccagatgaacgagtacctcgccgcgctccgctcgctcatgccggactcctacgtccaccgggcgtccgtggtcagtggcgcaatcgatttcgtgaaggagctggagcagcagctgcaatccctggaggcccagaagctggcgctgaagcggcagctgcagcagcagcagcagcgcagcgtcacggccgcgatacgcgacgacgcggcgcagccggctcgaggccgtgatgacatcggcgcgggcgcgggcggggacgccgcggcgcgcagcgaggtgtcggcgccggagccagacccgcctccgttcgcgcggttcttccggtacccgcagtacgcgcggcggcacgcggcggcgcgggaggacgccggcgcggaggagacgagccgcgcctccgcggtggcggacgtggaggtgggcgtggtggtggacgcgcacgccagcctgcgcgtgatggcgccgcggaggcccgggcagcttctgcggatggtggccgggatgcaggcgctcggcctcgccgtgctgcacctcaacgtggccaccgccgcggtcgacgcgacggcgctctacacgctcagcctcaaggtacgacggcggcgcacactaccggacggatgggtagctagcaaagcgacggtccctttctccttccgtccacggacacggaccaaccgtcgtcgtcaaagcctcgttgcttgtcacacactggctcgttttcttgtgcctgaaatggtgctatcgccgtgctctaacatgcactttggtcaccaccggtgccactgcccctgagcaagtacgtgaccaaaatcctctgtccttttcttttttacaacaaaaagctctctgatgcggagatcgctagattacgtccaccgaaacaaagggacatgatgccagatagtatagcatcccgtccaccgaaaatccgagagagtagagtgtagaggccatttgtatgacacggcaccgcactagcagcagaggcgtccaaacgcagtagcaccgcagcaccattgtccatcgcactgactttgtgcctgctgggccagatctccaaatacagagacatgtagaacacagtacacaccacagtggcttcccctgcgagcccagcacgactgcaccacgagccatgggcgcttgcttttgaccgggagagagagagagagtccagtccagagctcgaaagctgtttgctgcgtttggcaagctgtagcactgggcttttgacgtccctgtctgaacaccttcaaattcgagcagataggataggagtacagtaaaaaaaagaaaaggctgtgtattttcaccgttctcttttttttcgcactaaaggctacgtaaaggagaaaaggacgatcatggagaatcctctcttggcttggcgagcagagcaggcacctggcccgtcgtccattgacatggcgaggagatcgatgtggactgcagagaaagattgtgttgtgtgccgctgccctgcctttttcttttctagtgctgcgtgtttcaggacagcagagactgactgctgagtaagctatatgtgtttgtgtgccccggagccgagccggacccctcaacgtagcaggtggaggaagggtgcgccctggcgacggcggaggagatcgccgcggcggtgcaccacgtcctatgcatcatcgacgccgaggcgacgccgcagaggctgctcgctgccggagcaccagggacagggcagccggacgtctagctagtcaggatgattcaggacgaggtcttcccggcgtaacggggcggcatgggctgcgcggggtgtctgcttccgtttcttgtaaagtgcagtggcgtgcgtgcgtggctggccagcacacgagagcctgatggcgtagcgtaggtacagagtatgtaacgggcaataacacgcaggttcgtgtctggacctgtggtctctcgttcgtgcatgcctatgcgtgcccttgtgtttgcgtgtgacgggaattggaattgaggacgggaagcaggaatgcaggaacagggaagggatcggacgttgttttcttcatgcgctcagcacaactgcgcaagggaaggggagccgtgctgaatcttgctactcgtacgctacagtgcttcacgcattctttccaatctacgcccaagtaacggtcattcttcttcctgggcctggccggccggcccactccaccatccttcgcagc

SEQ ID NO: 206217 - DNA, 1287 bp, Zea Mays
ctcactggtatgtttgctgacaagaagaacacgtccagtgatagcagtaaaccagctttccagtttggtggaaataatgtcatatttggtggcaagaaggatgcacctgttgacagcagtaaacctttccagtttggtccgaataatggcatatttggtgacaagaaggatactcccagtgacagcagcaaacctttccattttggtgcaaacaagggcatatttggcgacaagaagacgacaagtgttgcccaaagttttaacccacagagtccacctctgttttcaatgaatcaacaatcagtcctcccaggaaaccaaaatacttctgaagcttcagctgacgcagatgaagatgctgaacctgagaagccaagcagcccttctgtaaagaaggcagaagagaagggggtagttgtcgttcatgaaaccaaatgcaaggtgtatgtcaagcatgatgatgccactaagggttggaaagacattggtgttggtcagctctctatcagaagtaaagaaggcacagagaaagcttccaaagaatccactcctaccattgttataagaaacgatgttggtaaaatcctcctgaatgctctgatctacaaggggataaaaatgaaccttcagaagaatacggttgcttcgatatttcatacttcagatgcacaatcaagtgaatcagctggtgacacagttgtagctcgaacatacctgttccgattgaaaaatgtagaggaggctacaaaactatcgacagcaatcaaggagaatgcgccctcagactagttcttacggcatggattatcatctcgaatctccgcttttggcacgagctgtaagatctgaaggggacaccaccgatggccactgcggcaggctaaaagatgccttgcagagtttctttatttttttttgttctcctagctgcatcaagatatcttgcttgtaacttgtaaggctgactggctggttatgtattagtactttcatgtaccatcttttgcattgacaagattattgagcatgcttgcagcccatcatgtcaccgcaggcagcaaagcaagtggcaatggttcaagtctgggatgcaaccgagtttccgtcttcggatatcctgtacagctttcaccacaagaactagaaatcgaggatctttcggccatcgagttgaccataatcgtcgtaagctgctggcctattgtaaactttatcaattccgttctacggaacggctggtgtaccttgtgccggcgtgcagaccggaacagggaatgccgcgtccgg

SEQ ID NO: 206218 - DNA, 1952 bp, Zea Mays
agcaatcgcatattcgattgcctttcttgccctacgccgccagcttcccacggagccaccaccctccacttctcaccactgccgtctccttcccaaactcggctgccgtctcctttgattccacggcctgccacgcagcagcagcaaaactcctagtcaacccttcaactcgcctactactcctactagctccttcttttcttcgatctccgcaatctacagctttgcttctcccggctcgagcggctagggtttcgggagtgcgcggtgagacggcatgacaacgcggggagctaagcgcgcggccacctccgaccccgccgcacccgatctgggttcaattgcagctgcaaaatcatccagctgaactttgggaggacggccttaaggattacatatcacatgcttctgaaatcatggaaaaattcaaggatgttgtcaactggctaaggcaaaatcaagcaggttcaatagttgtttcatccccaagctcactgaaggatgataagtccaatctgccagcagcagatgatagcaagctcttagtacagccaagttcagataacaaacagaaggctccaattatggcttctagttcttcatcttttcagaactcaagcttaccgaaccttttttcatcgccttctcagcaaaaaacaccagattacagtggtatgtttgctgacaagaagaacacgtccagtgatagcagtaaaccagctttccagtttggtggaaataatgtcatatttggtggcaagaaggatgcacctgttgacagcagtaaacctttccagtttggtccgaataatggcatatttggtgacaagaaggatactcccagtgacagcagcaaacctttccattttggtgcaaacaagggcatatttggcgacaagaagacgacaagtgttgcccaaagttttaacccacagagtccacctctgttttcaatgaatcaacaatcagtcctcccaggaaaccaaaatacttctgaagcttcagctgacgcagatgaagatgctgaacctgagaagccaagcagcccttctgtaaagaaggcagaagagaagggggtagttgtcgttcatgaaaccaaatgcaaggtgtatgtcaagcatgatgatgccactaagggttggaaagacattggtgttggtcagctctctatcagaagtaaagaaggcacagagaaagcttccaaagaatccactcctaccattgttataagaaacgatgttggtaaaatcctcctgaatgctctgatctacaaggggataaaaatgaaccttcagaagaatacggttgcttcgatatttcatacttcagatgcacaatcaagtgaatcagctggtgacacagttgtagctcgaacatacctgttccgattgaaaaatgtagaggaggctacaaaactatcgacagcaatcaaggagaatgcgccctcagactagttcttacggcatggattatcatctcgaatctccgcttttggcacgagctgtaagatctgaaggggacaccaccgatggccactgcggcaggctaaaagatgccttgcagagtttctttatttttttttgttctcctagctgcatcaagatatcttgcttgtaacttgtaaggctgactggctggttatgtattagtactttcatgtaccatcttttgcattgacaagattattgagcatgcttgcagcccatcatgtcaccgcaggcagcaaagcaagtggcaatggttcaagtctgggatgcaaccgagtttccgtcttcggatatcctgtacagctttcaccacaagaactagaaatcgaggatctttcggccatcgagttgaccataatcgtcgtaagctgctggcctattgtaaactttatcaattccgttctacggaacggctggtgtaccttgtgccggcgtgcagaccggaacagggaatgccgcgtccgg

SEQ ID NO: 206219 - DNA, 2115 bp, Zea Mays
taaaccagcaatcgcatattcgattgcctttcttgccctacgccgccagcttcccacggagccaccaccctccacttctcaccactgccgtctccttcccaaactcggctgccgtctcctttgattccacggcctgccacgcagcagcagcaaaactcctagtcaacccttcaactcgcctactactcctactagctccttcttttcttcgatctccgcaatctacagctttgcttctcccggctcgagcggctagggtttcgggagtgcgcggtgagacggcatgacaacgcggggagctaagcgcgcggccacctccgaccccgccgcacccgatggcggagtcttcccatcagcatgtgatggcaggacccgctagtttagatcctcggcgggcggaggctgctagcaaacatctgggttcaattgcagctgcaaaatcatccagctgaactttgggaggacggccttaaggattacatatcacatgcttctgaaatcatggaaaaattcaaggatgttgtcaactggctaaggcaaaatcaagcaggttcaatagttgtttcatccccaagctcactgaaggatgataagtccaatctgccagcagcagatgatagcaagctcttagtacagccaagttcagataacaaacagaaggctccaattatggcttctagttcttcatcttttcagaactcaagcttaccgaaccttttttcatcgccttctcagcaaaaaacaccagattacagtggtatgtttgctgacaagaagaacacgtccagtgatagcagtaaaccagctttccagtttggtggaaataatgtcatatttggtggcaagaaggatgcacctgttgacagcagtaaacctttccagtttggtccgaataatggcatatttggtgacaagaaggatactcccagtgacagcagcaaacctttccattttggtgcaaacaagggcatatttggcgacaagaagacgacaagtggtgacagcagtaatccttttcagtttggtgcaaataatggttttccaacatccaatgcaccatctattttttcttcagttgcccaaagttttaacccacagagtccacctctgttttcaatgaatcaacaatcagtcctcccaggaaaccaaaatacttctgaagcttcagctgacgcagatgaagatgctgaacctgagaagccaagcagcccttctgtaaagaaggcagaagagaagggggtagttgtcgttcatgaaaccaaatgcaaggtgtatgtcaagcatgatgatgccactaagggttggaaagacattggtgttggtcagctctctatcagaagtaaagaaggcacagagaaagcttccaaagaatccactcctaccattgttataagaaacgatgttggtaaaatcctcctgaatgctctgatctacaaggggataaaaatgaaccttcagaagaatacggttgcttcgatatttcatacttcagatgcacaatcaagtgaatcagctggtgacacagttgtagctcgaacatacctgttccgattgaaaaatgtagaggaggctacaaaactatcgacagcaatcaaggagaatgcgccctcagactagttcttacggcatggattatcatctcgaatctccgcttttggcacgagctgtaagatctgaaggggacaccaccgatggccactgcggcaggctaaaagatgccttgcagagtttctttatttttttttgttctcctagctgcatcaagatatcttgcttgtaacttgtaaggctgactggctggttatgtattagtactttcatgtaccatcttttgcattgacaagattattgagcatgcttgcagcccatcatgtcaccgcaggcagcaaagcaagtggcaatggttcaagtctgggatgcaaccgagtttccgtcttcggatatcctgtacagctttcaccacaagaactagaaatcgaggatctttcggccatcgagttgaccataatcgtcgtaagctgctggcctattgtaaactttatcaattccgttctacggaacggctggtgtaccttgtgccggcgtgcagaccggaacagggaatgccgcgtccgg

SEQ ID NO: 206220 - DNA, 2107 bp, Zea Mays
gttcggtttgctgctttgaatgactgacgtgtgggtccacataaaccagcaatcgcatattcgattgcctttcttgccctacgccgccagcttcccacggagccaccaccctccacttctcaccactgccgtctccttcccaaactcggctgccgtctcctttgattccacggcctgccacgcagcagcagcaaaactcctagtcaacccttcaactcgcctactactcctactagctccttcttttcttcgatctccgcaatctacagctttgcttctcccggctcgagcggctagggtttcgggagtgcgcggtgagacggcatgacaacgcggggagctaagcgcgcggccacctccgaccccgccgcacccgatggcggagtcttcccatcagcatgtgatggcaggacccgctagtttagatcctcggcgggcggaggctgctagcaaacatgtgagggcacttaatacccagtttgcaagctgggttcaattgcagctgcaaaatcatccagctgaactttgggaggacggccttaaggattacatatcacatgcttctgaaatcatggaaaaattcaaggatgttgtcaactggctaaggcaaaatcaagcaggttcaatagttgtttcatccccaagctcactgaaggatgataagtccaatctgccagcagcagatgatagcaagctcttagtacagccaagttcagataacaaacagaaggctccaattatggcttctagttcttcatcttttcagaactcaagcttaccgaaccttttttcatcgccttctcagcaaaaaacaccagattacagtggtatgtttgctgacaagaagaacacgtccagtgatagcagtaaaccagctttccagtttggtggaaataatgtcatatttggtggcaagaaggatgcacctgttgacagcagtaaacctttccagtttggtccgaataatggcatatttggtgacaagaaggatactcccagtgacagcagcaaacctttccattttggtgcaaacaagggcatatttggcgacaagaagacgacaagtgttgcccaaagttttaacccacagagtccacctctgttttcaatgaatcaacaatcagtcctcccaggaaaccaaaatacttctgaagcttcagctgacgcagatgaagatgctgaacctgagaagccaagcagcccttctgtaaagaaggcagaagagaagggggtagttgtcgttcatgaaaccaaatgcaaggtgtatgtcaagcatgatgatgccactaagggttggaaagacattggtgttggtcagctctctatcagaagtaaagaaggcacagagaaagcttccaaagaatccactcctaccattgttataagaaacgatgttggtaaaatcctcctgaatgctctgatctacaaggggataaaaatgaaccttcagaagaatacggttgcttcgatatttcatacttcagatgcacaatcaagtgaatcagctggtgacacagttgtagctcgaacatacctgttccgattgaaaaatgtagaggaggctacaaaactatcgacagcaatcaaggagaatgcgccctcagactagttcttacggcatggattatcatctcgaatctccgcttttggcacgagctgtaagatctgaaggggacaccaccgatggccactgcggcaggctaaaagatgccttgcagagtttctttatttttttttgttctcctagctgcatcaagatatcttgcttgtaacttgtaaggctgactggctggttatgtattagtactttcatgtaccatcttttgcattgacaagattattgagcatgcttgcagcccatcatgtcaccgcaggcagcaaagcaagtggcaatggttcaagtctgggatgcaaccgagtttccgtcttcggatatcctgtacagctttcaccacaagaactagaaatcgaggatctttcggccatcgagttgaccataatcgtcgtaagctgctggcctattgtaaactttatcaattccgttctacggaacggctggtgtaccttgtgccggcgtgcagaccggaacagggaatgccgcgtccgg

SEQ ID NO: 206221 - DNA, 1079 bp, Zea Mays
tttgcatgatctacatctatatgcgatgactatgctcaggaggacgaggaatacgaggagaagctgaagaaggaaactgtggtgctgtttttcctagcaacatatggggatggggagccaactgataatgcagcacgattctacaaatggtttactgagggaaaagagaaggaagtttggttgaaggatcttaaatatggtatttttggccttggaaacaggcaatacgaacattttaataaggttgcaaaggtggtagatgagctagtagaggagcagggaaagaactagtgtggccagaattagatcaattgctccgcgacgaggatgacacaactggtgcatcgactccatatactgctgctattcctgaatacagagttgttttcattgacaaatctgacctgtcattccaagatagatcatggacactagccaacggtactggtgtgattgatattcaacacccttgcaggtctaatgttgctgttcggaaggagctgcacaaaccagcttcagatcgctcttgtatccatctcgagtttgacatttctggcactggtcttgtgtatgaaaccggagaccatgttggtgtatatgcagaaaattctgttcagactgtggaggaggttgaaaggctacttgacctttctccagacacattcttctccatccatgcagatgcagaagatggatctcctcgtaaaggaggaggttccttggccccacctttcccatctccatgtaccttgcggactgcgcttctacgatatgctgatctactcaatccaccgaagaaggctgctttgcttgctttagcttctcacgcatctgatccagctgaagctgagcgacttagattcttggcttctccttctggaaaggatgagtattctcaatggataactgctagtcagaggagccttcttgaagttatggccgcattcccttcagctaagccaccactgggagtgttttttgcagcaatagctcctcgtctgcaaccacgatactactcaatttcatcatctccaaagaagatggttagcgggaagccatgtgtacctttggtaaagcta

SEQ ID NO: 206222 - DNA, 1038 bp, Zea Mays
gtggtatgtaccttccattagggaggatccaccaaggagtttgttcaacatggatgaagaatacaattcctctggaatatagcgaagaatgcagctgggctcccatctttgtgaggcagtcaaatttcaagttacctgctgatccgtccactcctattatcatgattggtcctgggacagggctggctccttttagaggcttcttgcaggaaaggttagcattgaaacaatctggggcagaattgggcacttcaatccttttctttggatgcaggaaccgtaatatggactacatatatgaagatgagttgcaaactttccttgaggagggggcgctttctgagctaattgttgcattctctcgggaagggccaacgaaagaatatgtgcagcataagatggtggaaaaggccacagatatttggaacatcatctcaaatggtggttacttatatgtttgcggtgatgccaagggaatggctagagatgtacacaaaatgcttcatacaatagtccaagagcagggatctttggataactccaaaaccgagagctatgtaaagagcctgcagatggaaggaaggtacctccgtgatgtatggtgacacatcacctcaaataagccatagctctagcgtgtggaagtaaagctggctttgcgtgtatgacatgtctaatgccaacccaatcgtcagctttggaatgaagcgtgccattgatgatatactgaaatgagttgatcagtgcaattctttgacatctaactatttattattatatgagatgggaggaactgatggagaataaatgctgctgtagatttgtagaagttcaaaaaaattgggtacccctgacaagtttgtagccaagggggtacatcatacagtttgagatgaggacactatgtatactgtttgagacgaggacattatgtatactactctagaaggctaccgaaaccaaattttgcatctgtttattaaaagcttgtacttttatcatggtatccgtcgttggcaatctacaactttgtacagc

SEQ ID NO: 206223 - DNA, 2117 bp, Zea Mays
tggaaagggcaggcagcacccgggacgcgcacagacctaaccaccatgctaatacgggcaagcagtgtctgaaatgttacaggcaggcaggaaaccgacgccagttccaacgccgcgcgcggcatcaggccgcgctggcgcgcggggtccttgatatcccgcggcggccggcctgctggtttcccgcggttcctccccttccccgatcggcgccgcgatccctgttcttcctccgcaattcaacaacctcagattattattattattgttgtcgcgacgtcgatcggtctacaatcatctggttcggatcgtgaatcttaaatcgagcaagaactggtttcggatcaatcaagcgtgctcaaacaagggttccaaggttttgcaagacaagcgtgtgtgtgagagagagacctgcattgtttggtcgccactactaccatgcgcgatggccgcgtcgctgtcctcggcgctgagctccatggaggtgatgctggacgcgctcatgcagcgagggataggcaagccggaagaagccagcagcaagcccaaagaagaggagccgccaccggcgctgcccagccgcccgacggggcgaggcagactcccggcgctgcataggcccggcggcacagcagcggctccgtggatccaccggccatccccggtaccgcagccaacgcaggaagacgatgaggagaaatgtctggtcggtcgggagctggaaagacgggcggccaaggcagaggaggaggtgaagcagaaagacgaggagatgaggcagaaagagcagctcatcgccacgctgcaacggcaggtgcagcactacgaatcccggctctcggaatgcgaggtcaggatgaaatctgtggagaggcagatcacttcgttacagatggctcacagtcacagccagaccgctggcgtaagcgtaaggagagatggatcgacgaggcacatccagggatcatctcgtggaggccttccgccgtcgtctcagccatcgtcagtgaggcgccagcagcgcggttccgagcccgccgctgccgacgagagcgagaggacgacactggcggagccggtagtgaaccagctggccagggagttccagacggggagggaggcgttcgagcacaacgcgcgcgcggtggcggaggccagcaggctgccgacgtcgtcgtccactcctggcagcgccaggtcggtggaggagctcaagacgctcaagagccagttcgccacgtggaaaaaggagtacgaggcccggctgaagaagaccaaggccgagctcaagaggctcgtccacgccgagaagaggaacggcgccggcgaccggcacgcgcaccagcggcggtgcgggtggtggaggatcaaagcgcccaaatgctgcagggcgcccaagtgctgcagcagcttcaagctacccagccccaaatcgtgctgctgctgcttccgccgctgatgcatacatgattcactgcaaatgcatgggttggctcttcgcatgctcagggttggatttgacgccccaaaaatcattggaatatgagaccatagtgagtgaacaagaagagaattactggtgtcttttactcgttgttggtaccgatctagacaccaatctagccaggtgtaccgtcatcggtgctttctgctcaggcgtggatagtccgcgacctgtgacaggagcgggatcttgtctacgccgaagccggacggtccacgggtgcgcagaggcggtggcgttcgccaacagcacctggatctaacctcccgaaagggaccccatcacgaagaagagatcatagggtttatcttgggattaacataccacccaagacacctttagacgacgtgaagccgaagagaggtgaaaataaagatgagaaggctaagttactgctactccgagggcataaaaagtgaaggaatgataaattaattaattggttcgattgttgtgttctcaatcgtcagtacccttcaaatatataaggagaggtatggaccctttcctaggcgttctccaatagctcccacgagtttagagggataaacacgcgagaagaaaggagcttaactgtctgatctaatcctattgtggaccgtccgggccttag

SEQ ID NO: 206224 - DNA, 1200 bp, Zea Mays
cgggcggccgggcccaaccccaaccccacgcgagcgaggcgcggccatcataacgctcttccgctccactccaaatccttgctcccatttcaaaacctcttcctcctctcctcgccgcagctcccaccattcccgcagacgccttgtccccttcccagcttcccctccccaccccgtctgctacaacgcctacggcgtcttcaaagacagggacatgtacgagcgcgtcttcggcgacggcgaccgcctcgcgcgcttcctccgctggcgcgtccaggtcatggagcgtggcgtgcgcgcgctcaccctgaggcccgggggcgtcaacgccatcatacaggtcaccgacctcaaggacatgccaaagcgggagctcagagccgccagcaaccagatcctctccctcttccaggacaactacccggagatggtagcgcggaaggtgttcattaacgtgccgtggtacttctccgtgctcttctccatgatctcgcccttcctcacggagcgcaccaagagcaagttcgtcatcgcgcgcgagggcaacgtcgccgagacactctacaagttcatccggccggagctggtgcctgtgcagtacggcgggctgagccgcaccggtgacctcgagaacggaccaccgaagccggcgtccgagttcaccatcaagggtggcgagaaggtcttcctggagatcgacggtatcgaggccggtgcaacgataacgtgggatctggtcgtcgggggctgggacctcgagtacggagccgagtacgtgccggcggccgaggacagctacacgctctgcgtggagaagacgaggatggtctcggccaccgccgaggagcccgtgcacaatgccttcacggctagggaagccggcaagatggtgctgtccatagacaattctggttcccggaagcgcaaggttgccgcctacaggtacttcgtgcgcaagtcgtcggcgtaggcatgctgatgtcttgtggtggtcgtcgcggccggcaccttgccggcaggtagccgcgagggggaggttaacgtcaagttaggctgtttaattattagtgctataacgacatgcatgtattatgccatatgtagaatataatgtactccgtaagagctgttgcacttttgtcatcaccactgttataaagctaatgatgagttaagttttttgggctactcgcctctctc

SEQ ID NO: 206225 - DNA, 1443 bp, Zea Mays
ccatggcgagttgatctttgattttgatgctatctcacacttaacggaagttctaaaggaagcatcgccaaggttgcaagcaaaagtctgttgtgtacttgaccatatagcagcttcggagcaacatgccaccgcaatgactgctgcttgcactggttcagtaattgaagctattcttgaaataggggttattcatgggaccagaagtgactctgagaactttgaaattcctagtgtagttataaaagaactcagtgaggctgtgtctgcagctgtgaggttactctcaaagttattgaactttgatcttttcatccgcagcataaacggtgaaaaaatcacttctttgctaagaagaacgctcaaatcaaatttcccccttcagtcaaaggattgtcttgcggcatgcctcattaagctagaatccagagctggcttatcaggagatcatggtgttagtagtatagatatggagataactatctatgagactattccaaggctaattgagcaaatgatgatatcactttcgtttgaaaataaaagaagtgctgtaatagagctcaacaagataatatctggtggtgtgctggaatatacaagagcagtggcagattctggaggcatatttccactggtgaaaatgcttgaagaggcggatggagatgcactggaggctatcttatctatcttatataatctgagcatggatccagagaatcacccagcaataattgctgctggagcagtgcctctgttgaagcggattgttcgtacagaagccccacaatggagtagtgcaattcagctgttgagaacattgcctgtatgacattgatgaagaaaatggccattcatcgccaacaaacattataaactgcacttagggcctgtttggtttgatggctaacttgccacactttgcctaacttttgtgcctaaggttagttcttcaattcgaacgactaaccttaggcaaagtgtggcacatttagccacgaaccaaacagccccttagtgcatgcacagccaatttcttagattgaggttgcggttgaacctagctccagctccctatcatcatcaaaatttgaattttatgatctggaagaaagcatcagcaaggcatttcctccaaagtagcgatatatgctgcccttttggctagttgaaaagcacaccggggcctgatgtgtccttttgctcacatcacatgccacggcaatagctagtaccacgaactattttggataccggcagtttgctggttgtgagaggacccaagaaagttcaaattgtagcttgctaaatcgtcgtgtttcgacactaggtgactttactctttaaaaatgctatcctttttgtgtaacctgaaatcctgaataacctccacggtgccaatatcaaaagaatctctttttgactccagctggggtaatcgtg

SEQ ID NO: 206226 - DNA, 3200 bp, Zea Mays
ccgagccacatcgcagtttattcggtgttcgagactagaagcctggagaaacgtttgttgttcttccagaacacgccctcggaatcctatcgcctcccacagcacacgacgcgcctttgctgaactctctctgtcgccatgctgccggcggtcgccgctgcatcccccggcctctcacatctgccgcgctaccaccaccttggccgtcgctttcacctccgccgccaccgccttctacctgctattccggccaggctatcgtgtggggccacccacgcccgccgccttctccttgccggcgcgttcgcaaaaggggagggttcttcaggacaggatgttgatcactctgctggtgccacaaattctgggtctgcataccttggtctcttcgttcgattgcttggcttggataatgacacccgtgatagggagcatgctgtttgcacactctatcaatactcccttggtggaaggaagagcatcgatgagataatgcaattccctggttgtattgttctcatcattagcctcctgaaatcagagtccattcttgcctgcgaagcagccacaggtcttctgcgtaacattacgtcagttcacatatataggaagatggctggtgagagtggagcaatggaagaaatcattaatcttctctgtaaatctacaataacccccaagattctagagcagtgtttgtgtaccatttggaacttttctattgatgaaaaatggaggtacaaggttctgaagagcgatgtcctaatgaagattgttggttacctggatgaagaagacatacaagtcaaagaagccgctggtggtatcatatcaaatttagctttgagttcctctagtcatggagctttggttgaagtaggcgtcatcccaaaattggttcatcttttgcaaaccaaagaagatgactataagattattagaaaggaagctaaaagttcactaatacagctggccactgatgattgttactacagccttataatagaggagggtctagttcgggttcctttggttggctcagctgcatataaagcctttaaacctctccctcattcatggccctcttttcctgatggctctaagattcagcggagttctcatccctcaaagtacggtgctaccgaactgctccttggcttgagtgtcaatgagaacgatacaaaaccagatgaagctaaaattaatgctatgataggacgttctaatcagcaattccttgcacgtgttggagctattgagttggatgatcaaggacaagaggaatctggatctgaaaagaatgacatgtataccattttgccatgggtagatggtgttgcacggttagttttaatccttggacttgaagatgtctctgcaatcaaaaaggctgctagagcaatgggtgatgcatcaataaatgaacatatgcgtacctcattcaaggaagctggggctgttaaacctctacttcagctgctcaagcacaaagatgtacatgttagagaagctggtgcttatgcgttggaaaaattatgtgtaagtgccacagtctgccataatatcaaaacagaaggtggactagaattgcttgtaaatatagtcaaggatcgacatactccagtagaactactagagaagataatttatatactttctcgaatgtttgacatggggatttgcatggttgctgtgccggatactgaaggttataaggatagtgaaaacagtgcaaagacatctgttaaccaagagatgtccagcgagttgatctttgattttgatgctatctcacacttaacggaagttctaaaggaagcatcgccaaggttgcaagcaaaagtctgttgtgtacttgaccatatagcagcttcggagcaacatgccaccgcaatgactgctgcttgcactggttcagtaattgaagctattcttgaaataggggttattcatgggaccagaagtgactctgagaactttgaaattcctagtgtagttataaaagaactcagtgaggctgtgtctgcagctgtgaggttactctcaaagttattgaactttgatcttttcatccgcagcataaacggtgaaaaaatcacttctttgctaagaagaacgctcaaatcaaatttcccccttcagtcaaaggattgtcttgcggcatgcctcattaagctagaatccagagctggcttatcaggagatcatggtgttagtagtatagatatggagataactatctatgagactattccaaggctaattgagcaaatgatgatatcactttcgtttgaaaataaaagaagtgctgtaatagagctcaacaagataatatctggtggtgtgctggaatatacaagagcagtggcagattctggaggcatatttccactggtgaaaatgcttgaagaggcggatggagatgcactggaggctatcttatctatcttatataatctgagcatggatccagagaatcacccagcaataattgctgctggagcagtgcctctgttgaagcggattgttcgtacagaagccccacaatggagtagtgcaattcagctgttgagaacattgcctgtatgacattgatgaagaaaatggccattcatcgccaacaaacattataaactgcacttagggcctgtttggtttgatggctaacttgccacactttgcctaacttttgtgcctaaggttagttcttcaattcgaacgactaaccttaggcaaagtgtggcacatttagccacgaaccaaacagccccttagtgcatgcacagccaatttcttagattgaggttgcggttgaacctagctccagctccctatcatcatcaaaatttgaattttatgatctggaagaaagcatcagcaaggcatttcctccaaagtagcgatatatgctgcccttttggctagttgaaaagcacaccggggcctgatgtgtccttttgctcacatcacatgccacggcaatagctagtaccacgaactattttggataccggcagtttgctggttgtgagaggacccaagaaagttcaaattgtagcttgctaaatcgtcgtgtttcgacactaggtgactttactctttaaaaatgctatcctttttgtgtaacctgaaatcctgaataacctccacggtgccaatatcaaaagaatctctttttgactccagctggggtaatcgtg

SEQ ID NO: 206227 - DNA, 2797 bp, Zea Mays
ctctctcttcacgcacacgcagcagcagacgggacgcaacccaagtagtacgcaagccgaacagattttccccatttccctgctctcctcgccctccccacgaaattccctgcttgatcacgccgatttcagctgtttgcaacacttcctcttgttcgatttttattaactcgtcgactccacctcaccgaggtcaaatctttggcatcggattctgttctgtgctgccttttggtttcggcgccgaattcagttccgattccgaacagttagcagctttaagcggctttcagttcgagcgcgtcggaggcatccctgattccggcgatgtcgttgcccgcgatttccatgtacaccagtccgccgggcgcggtctactcttcggagttcgacccagcctcccgtggctcgtcgccttgcaccaccgctgcgcccccgccgccggccgcctcgtaccgcttgccctccggcggcggcggcctgtcttgcctcttctcctcgccggcagctgcggccgcgccgccccgcgccccggctcacgacgacctcggtgcgctgtggcacaacagatccgacgacctgagcgtccccgccgacgggggcgggtactcctactcgcactcccactcgtcttcgcagctaaagcggagggacctgcatcaccaccaccacagccccgtgtcggtgttccaggggccgtccacctcttcaccatcccggagcccaccggcttcttggctcgccgcccgcgaccgcgaccgcctcttcgctggcttcgtgcgcaacgctctcggttcctgcgttgactacgcgccgcccaccagccctcgcccggaggtcggcgccagcgagctcgcgttcgagctcgacgagaacctcgcggaggctagccctgcctgcgagccatacgcccaagagctgctcgcgagtgcccaggatcgccaccgcatcttccacgaggagctggtcgtgaaggccttcttggaggccgagaaggctcaccgtggccagacgcgcgcgagtggtgacccctacttgcaacattgtgtggagactgctgtgctacttgccaaggtcggcgcaaatgcaacggttgtctctgctgggcttctgcatgacaccattgatgattcattcattgactatgaccacatcttccatatgtttggtgctggggttgccgatctcgtcgaaggggtatccaagttgagccacctcagcaaacttgctcgtgacaacaacacggcaagcaggacagttgaagcagatcgcttgcatacgatgctcctcgcaatggcggatgcacgcgctgttctaataaagcttgcggatcggctgcataacatggagaccttaaaagctttgccttgtgccaaacaagaaagattcgccaaggaaacaatggagattttcgtgcctctagctaaccggctaggggttgctagctggaaagaccagctggagaatctctgtttcaagtatctgaatccggaagagcacgaggagttgtcgtccaaacttagggaatccttcgacgaagaactgatcacatctgccgtggataaactggataaaggcctgagggatgctggtgtctcgtaccacagtctttctgggaggcacaagagcctatacagcatccattgcaagatgctaaagaagaacttgacgatggaagagatccacgatatacacgggctgcgtcttttggttgagagcgaagaagattgctacgaagccctttgcgtcgtccacagactgtggcctcgagtcaccggtcgattcaaggattacatatcacgtccgaaactaaatgggtatcggtcgctgcacactgtcgtcatgagcgaaggcgtccacccgttcgaggtccagatccgcacgagggagatgcatctgcaggccgagtacgggttcgcggcgcactggaggtacaaggagggcacctgcaggcactcgttcgtgctccggatggtggagtgggcaaggtgggtgctcacatggcagtgcgaggcgatggacagagaacggactgcctcccttggcagtgatgacggtactgtgagcgtgaggccaccaccagcatgcccgttcccccagcatgcagaggactgcccatactcgtacacccgccaatgcaaccatgatggaccgctgttcgtcatcctcttggagcatggcaagatgtctgtccaagaattcccggcgaacttgacggtgatggatctcatggaccgcgtgggcgccaacagctcgagatggagcccctacagcattccgatgaaggaggacctgcggccgagggtgaacggcgagcccatatgcgacccagaccggaggctcaacatgggggacgtggtggagctgacgccggccctgcctcgaaagtccctcagcgggtaccgggaagagatccagcgcatgtacgatcgcggcggcttcgcgctctcagcccggggcggcggcggcggcggcggcggcgccagacgctgctgagagacagtagcaagacgacgatgcgtagccctttttttttctagtaccattgtaccattcaattcgttgtaaatacgtagtatagcaggtaggtaggccttgcagccggggtgggtgggttctgaaatctgttgcaccctgtcctgaaccccatgcagtgtgtaaaaagtagaacgctgtgtatgtaagctgttcaagttcgtctcagcttctatctcaggccctgtttgaattacaaggactaattattagccactaaagtttagttcattttagtttagttcatttgtcgccaaccagg

SEQ ID NO: 206228 - DNA, 2798 bp, Zea Mays
tctctctcttcacgcacacgcagcagcagacgggacgcaacccaagtagtacgcaagccgaacagattttccccatttccctgctctcctcgccctccccacgaaattccctgcttgatcacgccgatttcagctgtttgcaacacttcctcttgttcgatttttattaactcgtcgactccacctcaccgaggtcaaatctttggcatcggattctgttctgtgctgccttttggtttcggcgccgaattcagttccgattccgaacagttagcagctttaagcggctttcagttcgagcgcgtcggaggcatccctgattccggcgatgtcgttgcccgcgatttccatgtacaccagtccgccgggcgcggtctactcttcggagttcgacccagcctcccgtggctcgtcgccttgcaccaccgctgcgcccccgccgccggccgcctcgtaccgcttgccctccggcggcggcggcctgtcttgcctcttctcctcgccggcagctgcggccgcgccgccccgcgccccggctcacgacgacctcggtgcgctgtggcacaacagatccgacgacctgagcgtccccgccgacgggggcgggtactcctactcgcactcccactcgtcttcgcagctaaagcggagggacctgcatcaccaccaccacagccccgtgtcggtgttccaggggccgtccacctcttcaccatcccggagcccaccggcttcttggctcgccgcccgcgaccgcgaccgcctcttcgctggcttcgtgcgcaacgctctcggttcctgcgttgactacgcgccgcccaccagccctcgcccggaggtcggcgccagcgagctcgcgttcgagctcgacgagaacctcgcggaggctagccctgcctgcgagccatacgcccaagagctgctcgcgagtgcccaggatcgccaccgcatcttccacgaggagctggtcgtgaaggccttcttggaggccgagaaggctcaccgtggccagacgcgcgcgagtggtgacccctacttgcaacattgtgtggagactgctgtgctacttgccaaggtcggcgcaaatgcaacggttgtctctgctgggcttctgcatgacaccattgatgattcattcattgactatgaccacatcttccatatgtttggtgctggggttgccgatctcgtcgaaggggtatccaagttgagccacctcagcaaacttgctcgtgacaacaacacggcaagcaggacagttgaagcagatcgcttgcatacgatgctcctcgcaatggcggatgcacgcgctgttctaataaagcttgcggatcggctgcataacatggagaccttaaaagctttgccttgtgccaaacaagaaagattcgccaaggaaacaatggagattttcgtgcctctagctaaccggctaggggttgctagctggaaagaccagctggagaatctctgtttcaagtatctgaatccggaagagcacgaggagttgtcgtccaaacttagggaatccttcgacgaagaactgatcacatctgccgtggataaactggataaaggcctgagggatgctggtgtctcgtaccacagtctttctgggaggcacaagagcctatacagcatccattgcaagatgctaaagaagaacttgacgatggaagagatccacgatatacacgggctgcgtcttttggttgagagcgaagaagattgctacgaagccctttgcgtcgtccacagactgtggcctcgagtcaccggtcgattcaaggattacatatcacgtccgaaactaaatgggtatcggtcgctgcacactgtcgtcatgagcgaaggcgtccacccgttcgaggtccagatccgcacgagggagatgcatctgcaggccgagtacgggttcgcggcgcactggaggtacaaggagggcacctgcaggcactcgttcgtgctccggatggtggagtgggcaaggtgggtgctcacatggcagtgcgaggcgatggacagagaacggactgcctcccttggcagtgatgacggtactgtgagcgtgaggccaccaccagcatgcccgttcccccagcatgcagaggactgcccatactcgtacacccgccaatgcaaccatgatggaccgctgttcgtcatcctcttggagcatggcaagatgtctgtccaagaattcccggcgaacttgacggtgatggatctcatggaccgcgtgggcgccaacagctcgagatggagcccctacagcattccgatgaaggaggacctgcggccgagggtgaacggcgagcccatatgcgacccagaccggaggctcaacatgggggacgtggtggagctgacgccggccctgcctcgaaagtccctcagcgggtaccgggaagagatccagcgcatgtacgatcgcggcggcttcgcgctctcagcccggggcggcggcggcggcggcggcggcgccagacgctgctgagagacagtagcaagacgacgatgcgtagccctttttttttctagtaccattgtaccattcaattcgttgtaaatacgtagtatagcaggtaggtaggccttgcagccggggtgggtgggttctgaaatctgttgcaccctgtcctgaaccccatgcagtgtgtaaaaagtagaacgctgtgtatgtaagctgttcaagttcgtctcagcttctatctcaggccctgtttgaattacaaggactaattattagccactaaagtttagttcattttagtttagttcatttgtcgccaaccagg

SEQ ID NO: 206229 - DNA, 726 bp, Zea Mays
ccaggctccagctgtccaggaaattaaaccatacaatatttttcctgtggttagcactgtcagggtggttgttcagaattttcatttttggcacgtttgtgctgccatttgctgcccctcttctccttgggacctttgctaacagggttgccattgagggaacatgcccagcatgcaaaaggcgtttcgtgggctaccgcaaccaagtgattcggtgcatgagctgccaaaacattgtatggcagccaaataacagcccatctggtggtgctagaagttcacgaagctcggaacctgatgtgattgatgtagaatatgaagagaagtaagaacattctgccccaccctacaccgaaaagcaaaaatcacgtgggcggaagaagaggcaaggcttgagacacaggctgcaccccatgagcaatttgtagatttggttgtttgtgtttttctggtgtacatacattacgtgctcctttcgaaataaaatggaaattctggtgttgtgcacagcgagacgatgtgtggcacctttcgatgttaggttctggtgtatccatagcttattgtactgttgcatctggatactaggaaacatcttgtaaagcaagcagcttagggaagactttgtacaaccactcacttcatacgacgccaattgcaaaatgttaatgacaattaaaataaccagtaaatctatatgccagatcatatactggatcttcgtca

SEQ ID NO: 206230 - DNA, 3251 bp, Zea Mays
cgcatcagctcgcacttgttagcgtatcatccagtctccagaacccacaccctcccctcccagtcgttgccgcttggccgcctgctcagtgctcaccacacacgtccaaccgcacccagacacccatccttatatacgcgcgcagcttaacgtacgcggtgacgccgccagcagctcgctctcgcaccgaccgtcccagaaatatctcgtcggcggtcagttgagctgcgagcaaccatcaaccaatcaaggacgacgacgcacggatcgatggccacgctctcctcctgcagccgcctgagtagcggcaccggcgccgcggctatccgccggcagccgaagccgacccgtgcaggagtcctgttcaccagccggcggggctcctccgcgagcgttcgcacggccgccgccgctgccactgcggcgccggccgccgtagagcagcagaacacgggggtgtcggtgtcgctgccgacgtgggcggagttcgagctcgggcgggcgccggtgtactggaagaccagcaacggcctgccgtcctccccgggcgaggggctgaccctgttctacaacccggcggcgagcaagatggccccgaacgacgtgttcggcgtggcgttcaacggcggcttcaaccagcccatcatgtgcggcggcgagccgaggcagatgacgctgcaggtccgcgggaaagccgacccgcccatctacaccatcaggatacgcgtgccgcagcacgccacaagcttgatcttctccttcaccaacggggccgagtgggacgggccgtacaccctcaagttcagggtcccgaagccatggcagaagaagccgctgagcttcttcaacgagggcctggcggacgagctcaacagggagggcgcctgcgacctggccatctacccggacgagaacatcgccatcaccagctgcgccatggacggctacctcgacgaggggggggatcggtgcaagctggatatcgtgagcgggtgcacggaccccagctccgacatgttcgacccgctggccaccgtcgacgacggctcctgcccactcgagtctgattccgaggaatgaaggagcttcagttcgatccttttttttgtggggggcaaggaaacgtggtccatacatcttatcagtgcaagtttgtgatcatgtgatacatgaagcatatacgtgtacgtatttcaccagactacctgcaccggtgagcaagatgatctcctacttgcaccaccattagagcagtggatatgatctcatacttgcgcgttgcactagtagagttgtggatacttaggatccatcattgcaaactctgatacaaaccagtgtaagctgagctgcatggattgcagatctgtatacctacggctcatgcagctataccgtcctggattgtaccacacaatcaatattatcaaatgtaagatacgacttggagggaagcttataaagacttccccgtgaatggaagagcaatcggttcatgaatcatcggagcacagctctcaaccattggcataaacaacactgatcacatccagtgtcagatattaggcacacaaagcacgcatttggctacgctgcaactgcatgtctgaaactgaaacaaacaaaaacaagcatagcgcaaccaacaaccatgctagcattacggttccagagttcaaggcaaccacagacgttaagttaacatagcatcatttcgtcttggttcattcgctacagtatccactcatagtggcaacgaagacttgtaactacaggaaagacccactgcaccacataccctttccatgccaagtagatccgcgtcttcagtctccaccaacctggcgtttccaggagtcctccacaatgagctcgtctactccccagtcttcatagctgttttaaaacaaagtaattaaagatgactacattgtaaaagtattcataaaaaagaagtatgtgcttttccatggaatctcaccttccatcaggtaagtaccgtctgatcgtgaagggtatcttgcgcgctctcagctccttcattgcaatctaaaattggtcagtttcaccctcaagctcaaccatgactggagcattcatgctgcaaaaagactaaggttagtattaggttggaagataggttttttacatgttcaacactcaaaattattaaccttatctgcaaggctcgtgtacccaggatgcgcgcacgttcgtacttcgtcatgtattttgttgttttgcgttcacgcttggtcttttcctgttccttatcttcaccctcaccacctatgacgtcatcaggggcatcttcgttgttctcaggctcttcttcagctccttcctgttcaacagaggtacattggttgtattggccatataatatcttcctataaagcatagaagttgaataaaagtataaaacaatagtaatgtgcctgcacctcaatctccggttctgggggctcatcctcatacctgtataacaaaaagaacaataagattgtaaatccaatgatacaaccatgtgaaacttagtgtataagtaaaaagtgacatttgagtgatcagaagaaccacaaagaagtggtggtcaccgttttttgtctaccaacataaataccccttagtttctctaatgtaaatatttacatgaaacaccaagctaagtgattaaagccacctgacaagaatttgatccaataatttatcacatagttctaaccaaccaacttaccctatattattgccacagttcgaaggaaggtgacaaatatatacaagtggcactcttaaattcctaaaatagatgacgaacaaaaggtgcaggtatctcccttcactggaggggagatgtccgataccaaggagaggagatgcgtgataccgaaaccacataggggagctgtcatcctaactcaaggataaactcggtcaatcaactaaccatcgcaggcaccttttattgacgaaaaccgatatgaataattccaacaaaaccgcccagctttcatccctaaaaacgctcctccacccccgaccgccactctcacaagcagcgataaatcaatcacaatcgacccattgctacatataaaccaagagaaagagagaagatgcgctccgtcgaggctgagcgcggattaacggagattatgcctgtacaaataaaacctaataattctccgctaaccattgcgcgcccaaacgaaacaagcaccagagggggggaggatgagggagagatcgac

SEQ ID NO: 206231 - DNA, 1991 bp, Zea Mays
ggctaacagttgtatgatcgtgtcaaccatgactcggcgaggacgtgcacttgactccctctggcggttttttttgtttagccctcgttcaaaaaccaaatgttctccctgctccaccccgttctcacgccgccgccgcgtgctagccggaaccctaggaccctgcggccgtggtaggaagcgctgccgcagccatgacagggacaacttggataattgacagccaaagatttgccaccaaaataaaaaatgcttctgggtctttagatccaagtaaacagaaatggatcggcaacccaagtaaagagtgcccaaagtgcagtcatgtgattgataacagtgatgttgttcaccagtggcccggtttgcctaaaggtgtaaaatttgatccttctgaccaggaattaatctggcacttaatggcaaaacatggaaaatctggaataaaacctcatccgttcattgatgaattcattccaacagttgaggaagatgaaggcatctgttacactcatccacaaaaacttccaggtgttaaacaaaatggaagtgtatcacatttcttccacagaacatttaaggcttacaacactgggactaggaagcgtcgaaggataaacactgacgatgctgatgtccgttggcacaagacaggcaagacaaagccagtactagttgatggaaaacaccttggttgtaagaaaataatggtgctttatataagcccgttgaagggtggaaaggctgagaagaccaattgggtgatccaccagtaccacctaggcactggagaggatgagagagatggtgaatatgttgtctccaaactattttttcagcaacagtttaaacctggggacaagaatgctcaagagctaactacatccgatgatctggaatcaatggctgctgaatcaaatctcccagattttactacattgcccactgacaaacatgttggtacagtccaagaagttgttcataatcctgagcataatctttaccaggttgttcaccagtggcccggtttgcctaaaggtgtaaaatttgatccttctgaccaggaattaatctggcacttaatggcaaaacatggaaaatctggaataaaacctcatccgttcattgatgaattcattccaacagttgaggaagatgaaggcatctgttacactcatccacagaaacttccaggtgttaaacaaaatggaagtgtatcacatttcttccacagaacatttaaggcttacaacactgggactaggaagcgtcgaaggataaacactgacgatgctgatgtccgttggcacaagacaggcaagacaaagccagtactagttgatggaaaacaccttggttgtaagaaaataatggtgctttatataagcccgttgaagggtggaaaggctgagaagaccaattgggtgatccaccagtaccacctaggcgctggagaggatgagagagatggtgaatatgttgtctccaaactattttttcagcaacagtttaaacctggggacaagaatgctcaagagctaactacatccgatgatctggaatcaatggctgctgaatcaaatctcccagattttactacattgcccactgacaaacatgttggtacagtccaagaagttgttcataatcctgagcataatctttaccagcttaatagaaactgtgaaataagcattgaagagactgttgtcctcccaccctctgtaaaaacaataaaggacggagataatctccaatcacaagatcagaagttgtgggaaggcgattcctagtttgaattgttagactcgcagcagctggcagaaggactcgctctctgtgacgagttcctcctgagtcagtctcaaacctcttgtggaggtggagatgaacctagagagaccaaaccttgcctggctgcttatgcccatctgtcagcagaggacttcaagaagagagtaggaggacgggtcggggtgagagccgccaga

SEQ ID NO: 206232 - DNA, 806 bp, Zea Mays
aatttggcccggggcttcacttaatcctggttccgccactgcagcgcaacctcgatcgcgcacagaggcccattccgccgaggagtggcacgaggagagacgacaggtgcggggatggggtcagttttgctgccaacgctgcggctgaagagtgaggtcgacgccgccatccgcgacaccctcgataaggtcctcgttctccgatttggtcgcgccaccgacgccacttgcctccacctagatgacatcctggataaatcttcttgggacatatccaagtttgctatggtagcattagttgacatggactctgaggagattcaagtttacattgactactttgacattactttggttccagcaaccattttcttcttcaatgcccatcacatgaagatggattcagggacacctgaccacacaaaatggataggttcttttagcagcaaacaagactttatcgatgtagttgaggcaatattcagaggtgcgatgaaaggcaaactgatagtgtcttgcccccttcctcctgagaggataccaagattccagcttcttttcaaggatgtctgagaaaactgcagctcatcacgtgcacacaatcagctacctagcccaaggtttgtatttaatcacgttcatcaaatatgacgggtatagatttcttgtttggtgttaataccttgctactagtttatattgagttttggcattttacacaaactggacctggtgtgtgtgtgtgtgtgggtgggggttggggggcgtgcccccatggcattgcatttaagaagaagcattttaca

SEQ ID NO: 206233 - DNA, 603 bp, Zea Mays
ctggttagtttgagattggctggttgttgctgtttgtgaggatgcgctggataaatcttcttgggacatatccaagtttgctatggtagcattagttgacatggactctgaggagattcaagtttacattgactactttgacattactttggttccagcaaccattttcttcttcaatgcccatcacatgaagatggattcagggacacctgaccacacaaaatggataggttcttttagcagcaaacaagactttatcgatgtagttgaggcaatattcagaggtgcgatgaaaggcaaactgatagtgtcttgcccccttcctcctgagaggataccaagattccagcttcttttcaaggatgtctgagaaaactgcagctcatcacgtgcacacaatcagctacctagcccaaggtttgtatttaatcacgttcatcaaatatgacgggtatagatttcttgtttggtgttaataccttgctactagtttatattgagttttggcattttacacaaactggacctggtgtgtgtgtgtgtgtgggtgggggttggggggcgtgcccccatggcattgcatttaagaagaagcattttaca

SEQ ID NO: 206234 - DNA, 428 bp, Zea Mays
gtcaataataaggaagtaggctgtggaaggacacctgaccacacaaaatggataggttcttttagcagcaaacaagactttatcgatgtagttgaggcaatattcagaggtgcgatgaaaggcaaactgatagtgtcttgcccccttcctcctgagaggataccaagattccagcttcttttcaaggatgtctgagaaaactgcagctcatcacgtgcacacaatcagctacctagcccaaggtttgtatttaatcacgttcatcaaatatgacgggtatagatttcttgtttggtgttaataccttgctactagtttatattgagttttggcattttacacaaactggacctggtgtgtgtgtgtgtgtgggtgggggttggggggcgtgcccccatggcattgcatttaagaagaagcattttaca

SEQ ID NO: 206235 - DNA, 1035 bp, Zea Mays
agaatagaaccgctgtgtgcaagctccggaccgtcaggataagaaaacagcgcggcggcaggcagctcctcctgcgactgcgagcgcccgtccatggcgtccatctccccttccctccatcacccttgcaattctagaactggcttccttggaaagacacacgggactcgtcctcgtcttttctctgctggaagagttggatttgtcagaacactagtggagtgcaaggaatctagaattggaaagcagcccattgaagtcccaccgaatgttactctcacattagaagagcagtttgtcaaagctaagggcccactaggggaattatctctcagcttcccaggtgatgtgaagattgtgaaagaagaatccggtaacctgagagtttataagactgcagagaccaagcgggcgaaccagatgcacggtcttttcaggtcctctaagcaaaaacaccttcggcaaggccatatgcaagcaggcacaacacgaagaacattgacagacaacatcatcgttggtgtgtcgaaaggattcgataagaagcttcagctagtgggcgtcgggtatcgtgcggcggtggagggcaacgatctcgtgatgaacctgggattctcccaccctgttcggatggccattcctgaaggcctggcggtcaaggtggaggagaacacaaggatcaccgtgagcggctatgacaagagcgcgatcggtcagtttgctgctaccataaagaagtggaggccacctgagccatacaagggaaagggtatcagatatatggatgaagttgtccgaaggaaggaaggaaaagccggaaagaagaaatagaaagtgtttttttgccctctccttacttcatttcatttttcccactgtaatgatcttcgtttgctaaggctgaacctaagaaatatattgttctgtgctgatcatggcatatagatgtatactttgagcaccccattgtttcataatttcattgtttttcaaggtatttattctgctccattgaaaaagcgaaatgaatatcag

SEQ ID NO: 206236 - DNA, 1488 bp, Zea Mays
atacagcccacagacacttccttcctccacgcttgggcacggcagcggcgccgcaaagccgaacgagagagagaagcagagaacccctcctcgacctcggcctctcctcttcctcctccgctcccaaaatcctagggttttgctcgccgcggcgcgatggagcccacctcatcggcgtcgatcgcgcggcagacgtgggagctggagaacaatatccccgcggcggcctccgacccggacgcgatggacgcgatctaccgctacgacgacgcgtctcaggcgcgggcgcagcaggagaagccttgggccaacgacccgcaccacttccgccgcaccaagatctccgcgctcgcgctgctcaagatggttgtccacgcccgcgccgggggcaccatcgaggtcatggggctcatgcagggcaagtgcgagggcgacgccatcatcgttatggacgcattcgcgctccccgttgagggcaccgagaccagggtcaatgcccaggccgatgcctacgagtacatggttgactactcaaccatcaacaagcaggctggaaggttggagaatgtggttggctggtatcactcgcaccctggctatggatgctggctgtcaggaatcgacgtgtcaactcagatgctcaatcaacaattcacagaaccattcttggcagttgtgatagaccccacaaggacagtttctgctggtaaagtggagattggagcctttagaacatacccaaaagattacaagccaccagatgagcctgtatctgagtatcagactattccactcaacaagatagaagattttggtgtccattgcaaatcgtcatccctggattctcacctccttgatctgctctggaacaaatattgggtcaacacgctatcttcatcatcgcttctgggcaacagagattatgttgctgggcagatctttgatttagctgataaactagagcaagctgaaggccagctggcacacagtcgatttggtggtatgattatgccatcgcaacgaaagaaagagcaagaagagtctccactggctaaggtaacacgagatagctccaaaatcacagctgagcaggttcacggcctcatgtcacaggtcataaaagacatccttttcaactctgttcacccgtcaagcaaggcaagcacaagtgctccaccagattcatccggtcctgagcctatggttgaagcctgagttccagcggaaggggacaatggatatttgtgttatgttatctgattcagaaggtgcaaaacaagttatcttttgagtacagaatcatcatgtaattatgagttgccatcttgggctgccactgagagggtgtgatttgggtccggttagcaatctcatgtattggatttcggatcagtattcgaagctttcataacgaggagccatcatcttattttagctgtttgtttggcttgccatttagttattggaagggtcgcttctttaagactg

SEQ ID NO: 206237 - DNA, 490 bp, Zea Mays
gtgtttatgtgttgatttgacagaaaatagaccagatttctcacatcaggcaggttcattcctgggtgctatacacttgctgtctcggaggagcttccagaagagtatcaagggatttgtcaagacaacaacgtgcagtatgtgccgcccaagcgtgtctaagtatcaagacggcaatgatggtgtcttggtcctgaagcagtatagataattaggtagaagtatctgtgcttgccaagggaactgctcctcttatgctttgtatccgagtgctaaggcagtctatttcatgttagtgataaggctgtctatttaggtggtgaaccggcgggtgattgaatcttatccaataaccttgatgcctgttcttgaaatctgtgacaatgcggctcatgtgcgtctgtcatgttctttcacatctatgtatatatgaagaaaaatgtaatagctaaaggtcgttggaccatgaaccctcggcccctgaagaccc

SEQ ID NO: 206238 - DNA, 825 bp, Zea Mays
ctagaaagactacgagctcgcggggaagacggggacttccggagagagagagagagagagagagagagagagagcaggaagcaggggctagacgcggatcggcgagcatgaggggcggcggcggcggcgggatgatggacgatgaagagagggtgggccatgcggagatcccgaccagtttcggtcccgagctgcgcgcctgcctccgatgccgcctcgtcaagacctacgaccagttcagggagaacggctgcgaaaactgcccgtttctagagatggacagagagcacgacaacgtcgtcaactgcaccacccccaacttcactggaattatctctctgatggaccccagtaggagctgggcagcccgttggttgagaattggcaggttcattcctgggtgctatacacttgctgtctcggaggagcttccagaagagtatcaagggatttgtcaagacaacaacgtgcagtatgtgccgcccaagcgtgtctaagtatcaagacggcaatgatggtgtcttggtcctgaagcagtatagataattaggtagaagtatctgtgcttgccaagggaactgctcctcttatgctttgtatccgagtgctaaggcagtctatttcatgttagtgataaggctgtctatttaggtggtgaaccggcgggtgattgaatcttatccaataaccttgatgcctgttcttgaaatctgtgacaatgcggctcatgtgcgtctgtcatgttctttcacatctatgtatatatgaagaaaaatgtaatagctaaaggtcgttggaccatgaaccctcggcccctgaagaccc

SEQ ID NO: 206239 - DNA, 3382 bp, Zea Mays
gtgattcatcctaaaaatttggggagacaaacaagcagtaatccaatccaaaggagagccgttatcagaccccgtgcttcttggatccatcggcgtgagctggtcttgtagaaatcattagccacgtcgtgtattaatggagtccacggaggaattttgtttctttgtggctgcggtcttccactacggatcaataagcttgattgctgagccttgccggacagcacatctccgtgccatggagattgccaaagaggcaggtgcactgctctcttatgacccaaacctgagggaggcactatggccatcccgtgaggaggcccgcacccagatcttgagcatctgggaccaggcagacattgtcaaggtcagcgaagtcgagctcgagttcttgacaggcatcgactcggtggaggacgatgttgtcatgaagctgtggcggcctaccatgaagctgctcctagtgactcttggagatcaagggtgcaagtactatgccagggatttccatggcgctgtgccttccttcaaagtacaacaagttgatacaactggcgcaggtgacgcgttcgttggtgctctgctccaaaggatcgttaaagatccatcctcgctacaagatgagaagaagcttgtggagtcgattaaattcgctaacgcgtgcggagcgatcaccaccacgaagaagggggcgatcccgtcgctgcccaccgaagcggaggtcttgcagctaatagagaaggcttagatcatcatcgtcctgtacgccatggttttcaccagcttctacttcttcgaattgtattggattctgatatggaacagaagaagaagcggctgccccatcttaccagccctttttgtttgccctagtttccccttgtgaaaagggtgttttgttttataaactctacttgcaataagcagagcctttttttaattatgtcagggtgcatttgatacgatcgaataatcatcaatccataattgtagcaatttttttttaaaaaaagaaaagtcaattgagtttttgttccagtggtggataaatttctagaatcgggatatctggtcctgataagaggtgatattcagagcctttattttctactatagatagctgagactgagacagagtacactggcggcatctgccgggccagtggggcttcattgagcagctttgattgttttgtaaccgccgcgtgtgtttgggacgggttgtggttcagagaaattaatcgcaacatgtggtcagctggaaagctgagatttctggttggtgcaaaactttactgctgttgcacatctggcatctgtggccttggctgtcatttatgattgctgttccactgcctgcgctttgatcattctgtgtgtattgtgcgctctggtcactttctttatgttgtgctcacggccgtctcgtcaatcgcccggagatgacatgtcagcagtccacgtcaacagtggctctatctaatgtaagggccgtggctgagatttcctgtgtttttgtgtcgaggcatctgtcactgatttcggccatccacagccacaatcgccggtacttcttcgtcgcttgccgtctggcgagacaggctggcccatacagttttggcatctgccgccaccgccccgccggtagacaagagacgaggactagccgtgcacggtgcatcgcggtctggttccgccggaggcggcttgcccggattctcggcaatcatcagcgcgtgccgcaagcatctcttgcgttgcctcctcatccgacaggctgtgggatgctcacacaaatcgttagtacacgactgcacttagtcctgtttggaagcatccagtttttaaaaagctggtttaggcctcgttggtttctggctgatccggccgttccaggcctctttccagccggaaaaattatccagttttgaatccgacactcagctgttcgtttcaatctgaaataaaaacaaaagcggcccggttcgaagtttccacttcctctattgctcggtaggaatctaggcctcttaccatctggatcaaatcctgggctggtttgagtgatccactgtttcctggcctggaactgtttctggcctggatgacttcccagacaactgaacggggccttatagaaattaaggtggttctaaacatatcagtttatgacctagtttgtataaattaaatttctagtttcttaaaaaccaagaaactagcctctcctagctaaaaaataaaactgatttcttaaaaaccgagttgcttccaaacagaatcttagtagtgacttcgtcgcgtcaaggataatgcatgcacaacatggtaggcaagaagaaacagatgaaacaaatgggcagttgggtttcaccctacagcttgtaagaaggacacgagcgggtgcgtccatcactctctgccatcggcacccgcgccgtcctaggctcccctccgaacacggcttcaaaccccgcacgcactcgccaacgacaccaacttccggccaatcccccgcgatgccgactggtgaggtgtaacacccctagccgtcggcgagtcacgaggacgtgagaccggtcttccccgcggtacgtcaaggcaaggagccccaagaacgggacccgggtatggaacatgtaagtggttgtggatttgtgttatttcttgatctctagatctcagtttgttacaagtacttaaagctatctaatgaccggcctaatcctccccctgttggaaccagaccactgacacatggcgtgtctgtcaggtcgtccgcacacacggcgcgcccacccataccgtcggaccgcgacacacgcgcccacacacatatcagcgggctttagatctcttgggtcaacactccccgcaaaaagctagcatgtttggggttgcaccctcagccatataaaccatactttcccactctcactacataatgtgggactattcccaacaatctccccctcacacattttgagccgagatttgtctgagaatatactgggtcaacctggctttgatacgaattgttggaaccggacctctaacacttggcgtgtccgtcgggccgcctgcacacacgacgtgcccacccagaccgtcggtccgcgacacacgcgcccgcacgcatagcagcggactttaggtctcttgggtcaacacccccaaaagctagcctattaggggttgcaacctcaaccatataaaccatgtttgcccaccctcacgacataatgtgggactattttcaacaatctaagatgctggtgccggctgccggaatgcgcagctcgacggcaatcggcaacacaagaatcttgcctacgacgtcgcacaatcctctaacacacgtgaatgcagaagaatagcgttg

SEQ ID NO: 206240 - DNA, 1536 bp, Zea Mays
aggcggagcagcacaggacaggacagccagaggccgggagcagaggaggcggtcgtggcgagcggcgagccacaggcacgggcacctatcgttgaattgaacgaaaggagagcgggagaaagcgactcgtcactcgtcagtctctcgtcctcatgccgtcgccgctgggtggacgaatccaattcgggcctggcaaggctggcatgccgtcggcctccctagctcgccgcctcctctctactatatcatctccagcgatcccttcacgcagtaccagcaccagcgccagcaacagcaacagctgtggtttcagcacaagaagggccaggaagaagcgcagctgcgtttcttggacggtgagcgcggctactccggcggacatggcgaccaacagtgccctggcgaagctggcgccgctggaagccatcctgttcgacatcgacggcacgctctgcgactccgaccccatccacttctgcgccttccgagagctcctgcagcaggccggcttcaacggcggtgtccccatcacggaggagttctacagcgccaacatcagcgggggccacaacgacgacctcgccaggtcgctgttcccgggcatggatcaccagaaggcgatgcggttcatggatgacaaagaagctatgttcagaaagtctagcttgaaatctgggtgtgtaaaatctgaacccgcagtggaataacctgaagctgaaacctattacgcaggttggcgcctgggcagctgaagcccgtggatgggctgcaggagctgtgcggatggatggaaggccgcgacctgaagcgcgcggcggtgacgaacgccccgagggcgaacgccgagctgatgctgtcgctgttgggcctcaccgacttcttcccggtgctcgtcatcgggagcgagtgcgaccgggccaagccgttccctgacccgtacctcaaggcgctccagctcatcggcgcatcgcctcaacacaccttcatatttgaagactctgcatcgggggtccgggccggtgtggctgccggagtgcccgtggttggcctgacgacgaggaaccccgggaaggtgctgaaagacgcaggggccagcttgctggtcaaggattttcaggacccggagctgatgtccgtgcttcaacaggtggaggtcgaacccgcagcggcgaatgcgcaaggctgatgcgtcggtcactgcggacaactaagaaatgaaatgtcgtgctggactagccttcagcgattctttcagagtggaatagctgtgtaactgcatcgtgtaataaactaactccggtcggttcctcggctggaacctggagactagcttcttggtggattcaaacagggcccaaatagaccctaagttaagggaggtttcctgtgcccaacaataatgccttactagtaattagcgcgcgtcttacgcgcgtaaaaagaattcgtaatttaagtgataataatattatattattttaaataaaatgtacataaatattttataatataagtgataattcagcaaactattcg

SEQ ID NO: 206241 - DNA, 1393 bp, Zea Mays
aggcggagcagcacaggacaggacagccagaggccgggagcagaggaggcggtcgtggcgagcggcgagccacaggcacgggcacctatcgttgaattgaacgaaaggagagcgggagaaagcgactcgtcactcgtcagtctctcgtcctcatgccgtcgccgctgggtggacgaatccaattcgggcctggcaaggctggcatgccgtcggcctccctagctcgccgcctcctctctactatatcatctccagcgatcccttcacgcagtaccagcaccagcgccagcaacagcaacagctgtggtttcagcacaagaagggccaggaagaagcgcagctgcgtttcttggacggtgagcgcggctactccggcggacatggcgaccaacagcggcagtgccctggcgaagctggcgccgctggaagccatcctgttcgacatcgacggcacgctctgcgactccgaccccatccacttctgcgccttccgagagctcctgcagcaggccggcttcaacggcggtgtccccatcacggaggagttctacagcgccaacatcagcgggggccacaacgacgacctcgccaggtcgctgttcccgggcatggatcaccagaaggcgatgcggttcatggatgacaaagaagctatgttcagaaagttggcgcctgggcagctgaagcccgtggatgggctgcaggagctgtgcggatggatggaaggccgcgacctgaagcgcgcggcggtgacgaacgccccgagggcgaacgccgagctgatgctgtcgctgttgggcctcaccgacttcttcccggtgctcgtcatcgggagcgagtgcgaccgggccaagccgttccctgacccgtacctcaaggcgctccagctcatcggcgcatcgcctcaacacaccttcatatttgaagactctgcatcgggggtccgggccggtgtggctgccggagtgcccgtggttggcctgacgacgaggaaccccgggaaggtggaggtcgaacccgcagcggcgaatgcgcaaggctgatgcgtcggtcactgcggacaactaagaaatgaaatgtcgtgctggactagccttcagcgattctttcagagtggaatagctgtgtaactgcatcgtgtaataaactaactccggtcggttcctcggctggaacctggagactagcttcttggtggattcaaacagggcccaaatagaccctaagttaagggaggtttcctgtgcccaacaataatgccttactagtaattagcgcgcgtcttacgcgcgtaaaaagaattcgtaatttaagtgataataatattatattattttaaataaaatgtacataaatattttataatataagtgataattcagcaaactattcg

SEQ ID NO: 206242 - DNA, 1396 bp, Zea Mays
tacggtggcaggcggagcagcacaggacaggacagccagaggccgggagcagaggaggcggtcgtggcgagcggcgagccacaggcacgggcacctatcgttgaattgaacgaaaggagagcgggagaaagcgactcgtcactcgtcagtctctcgtcctcatgccgtcgccgctgggtggacgaatccaattcgggcctggcaaggctggcatgccgtcggcctccctagctcgccgcctcctctctactatatcatctccagcgatcccttcacgcagtaccagcaccagcgccagcaacagcaacagctgtggtttcagcacaagaagggccaggaagaagcgcagctgcgtttcttggacggtgagcgcggctactccggcggacatggcgaccaacagtgccctggcgaagctggcgccgctggaagccatcctgttcgacatcgacggcacgctctgcgactccgaccccatccacttctgcgccttccgagagctcctgcagcaggccggcttcaacggcggtgtccccatcacggaggagttctacagcgccaacatcagcgggggccacaacgacgacctcgccaggtcgctgttcccgggcatggatcaccagaaggcgatgcggttcatggatgacaaagaagctatgttcagaaagttggcgcctgggcagctgaagcccgtggatgggctgcaggagctgtgcggatggatggaaggccgcgacctgaagcgcgcggcggtgacgaacgccccgagggcgaacgccgagctgatgctgtcgctgttgggcctcaccgacttcttcccggtgctcgtcatcgggagcgagtgcgaccgggccaagccgttccctgacccgtacctcaaggcgctccagctcatcggcgcatcgcctcaacacaccttcatatttgaagactctgcatcgggggtccgggccggtgtggctgccggagtgcccgtggttggcctgacgacgaggaaccccgggaaggtggaggtcgaacccgcagcggcgaatgcgcaaggctgatgcgtcggtcactgcggacaactaagaaatgaaatgtcgtgctggactagccttcagcgattctttcagagtggaatagctgtgtaactgcatcgtgtaataaactaactccggtcggttcctcggctggaacctggagactagcttcttggtggattcaaacagggcccaaatagaccctaagttaagggaggtttcctgtgcccaacaataatgccttactagtaattagcgcgcgtcttacgcgcgtaaaaagaattcgtaatttaagtgataataatattatattattttaaataaaatgtacataaatattttataatataagtgataattcagcaaactattcg

SEQ ID NO: 206243 - DNA, 2615 bp, Zea Mays
aagagagagaaagaggtgatattgataagacgggaaaataccctaggctctcgccagtctccggtgcggctcaacaccgaccgaacccgtgaaaaattcgttctcctttcgatccgtttggcggggggctcggccggatccgaccggaggggcgccgccgatccatccggtcgcagccgcgtctgatttggtgcggattttggcgagataccccgctcctagctccgctgtttcaaggataacaaagatggcgtcgccgcggggcgggttcgatgagcaagatcgccggacggagaagggcaccgaggtgttcgtcggcgggctgccgcggtcggccacggaaagcacgctccgagagatattttcttcatgcggagagattattgacgcgcgcataatgaaagatcagagtggtcactcaaagggatatggttttgtgcggtttgcaaagagggattatgctaatactgccaaaaggcaaaagaatggtattgagagtggactttagaagaatttgaagaattgattcacaaggcattcaaagatgttgtttcggttgaccttgcaatggcgtcaaatcttggttcttcaaacaagaagaatatcaatcgaggctttggatttgtgagattttcttctcatgcagctgcagcacgtgtaatccgcatcggttcaagaacagatttcatgcttggtgatattttgcatcctgcgataaattgggctgataaagagtctcatctggatcctgatgaaatggccaagatgaagtctgcttttattggtaacctgccagaagatgttaatgaggagtacttgagaaagctttttggacagttcggtgaggtagtacgggttgctatctcaagaaaaggacaatgtccagttgcttttgttcacttcgccaaacgttcagagcttgagaatgctatagaagaaatggatggtaaaacggtgagaggacctggtcgagggccgtctttcaagatccaggtgtcagttgctcgacctacggcagacaacgacaagaagcgatctcgtgaagaagtgagaactagaagatcaaatgcatcaggagataggcgagattattctcatggaagatatggacacgattcacttgatcgtcaagtgaaagctccaagattatctaattatgtggccgatgctgctgacccctatgaatcagctgttaattcattaccttcagctgtcaaggaagtcttgcttcgaattctacgtctaagaattggtactcgatatgatattgatatccattgtgttaaaagccttgatgagcttcctgagtcatctgctcttgctgtccttaatcagtttttgatatcaggtggagacaaacacaacaaaggagattattttgcatcgttggttgctaagcaccaggctgagacctttggcttaacacatgcattacacggtaccacttatttgtcaagaaatccggaaatgcatagcaagcgatacccacatgaagattatgattttgtgacacccaggagcagtaggtacgattcgtcagcccatcatccttcaacatactacgaagacgatccaccagtgtctgagtcaagggttagaagatatgctgaagaaaggtccaccattgtaagaagcccagaaccacgtccgcgatatgacgaaacagacataagaataaacccagaaccaagattaccatatgaatcaagacacaacgccgaaaagcatctcgatcgaagatacatacaagagcatagttcaaatattgaaagaccagctgaagaagctctcctttctagggaaaggagatttctgcctgctgcagggtacatgccgaacccaggcggctcggatttccgctccaggtcgcccgccgaatattcagcacaacgccaacaaatgaggtttgatccattcacaggtgaaccttacaagtttgatcccttcacaggggagcccatcaggccagatccgaaccagcgccgctcaggaagcctgtactgatcagattagttggagcgatatgccagataagaccctgaaacaaagctagatctggataactcttcttcttgtctgccaagtgtctctgtgattttgcttgtgggctacagatcatgtaccccgagcaccatgtgtgatccagtcggactaatcatttcggcattgaaaagtcggactaactttttttgtgcccataacgctacgtattgtttggtagattaattaaaaattcatccggtgaaaagcaattttctggtatttttctggaggtgcagtaggcgtggtaatgcagaatttcaactgctacgtacactgcaagcgctgttttacccgattcgtctttacgtgttgccaaatgtttcattgacttcatagaactgatttcgactactttggatgctgagcaagggaccatgcctttctcacatatactcatctggagaatgtcaagcaagacggcccatctggacacatggcaagaagagataaactagctagctgcctcccaatgatgctactaccttctcttcgactgcttcaacgttcacatgcccctcccttgcatggcgtagtaaactgggttgcttgaaaaaacgccacttctaagcgta

SEQ ID NO: 206244 - DNA, 1071 bp, Zea Mays
gtgaatggccaagacgccaagtagatgtctggaatgttgccgatgtcgaacgtgtccgctaatccttcacagcttacaattttctatggcggatcagtatgtgtgtatgactcagtgccaccggaaaaggctcaagcaatcatgcttatagctgcagctgcagcggcagcggcagctaccaaaagcagtgctgcccctactgttaagcctccaatggtgcctgcagccactgttgccccagcagctgtcgtttctcctgtgcttacacggtctccatcactgcagagcacttctgtagcaactgggcaacctcaggttgttgctgaacctagctcgatatgcaaacttcaggctgatctccccattgccaggaggcactctcttcagcgtttccttgagaaacgccgtgacagggtcgtgagcaaagctccatacagcaccgccaagtcgtccgatggcatggagtcaccgaggattgaggtgacagcggagggcaaggcccagtaacttgaaaggtccccgcggagtcccatcggtgaaggctgacgttgtgggaaggggcagggacgcgctgttgttgccttatgttatgtggcggcggcagcgtggaaccgcactaataatgtggaccggaacctctgttaccgtcgtttgtgctgtcgcgtgctaggtttatgctgaagtggattcctttactccgcacaccgaactgtgtctgttgtacatcacgccgtgacgccggtggtctcgtctgtctgacttcgttacatggatcgtctagtagtaacggaatgcagtaccacgtgtggacatgtgtttagtgtgaaagatgatggggctttgcttgcttgtttccactaccatttcccattttggcacttaacgtttgttcttctcttcgctaccttgttctcagctcaaatggtcccacgcagatgcatgtgtagggaggttgaaaatgatagaaatacgctcagatcaccttcgttccttgcttctcttgccgtttctgttggaccaaaaataaaataaaatttcgatgtcgtcccacgcagatgcatgcggaacccc

SEQ ID NO: 206245 - DNA, 912 bp, Zea Mays
gctcgcaggcgaaatccccttcggtctggaatgttgccgatgtcgaacgtgtccgctaatccttcacagcttacaattttctatggcggatcagtatgtgtgtatgactcagtgccaccggaaaagagcacttctgtagcaactgggcaacctcaggttgttgctgaacctagctcgatatgcaaacttcaggctgatctccccattgccaggaggcactctcttcagcgtttccttgagaaacgccgtgacagggtcgtgagcaaagctccatacagcaccgccaagtcgtccgatggcatggagtcaccgaggattgaggtgacagcggagggcaaggcccagtaacttgaaaggtccccgcggagtcccatcggtgaaggctgacgttgtgggaaggggcagggacgcgctgttgttgccttatgttatgtggcggcggcagcgtggaaccgcactaataatgtggaccggaacctctgttaccgtcgtttgtgctgtcgcgtgctaggtttatgctgaagtggattcctttactccgcacaccgaactgtgtctgttgtacatcacgccgtgacgccggtggtctcgtctgtctgacttcgttacatggatcgtctagtagtaacggaatgcagtaccacgtgtggacatgtgtttagtgtgaaagatgatggggctttgcttgcttgtttccactaccatttcccattttggcacttaacgtttgttcttctcttcgctaccttgttctcagctcaaatggtcccacgcagatgcatgtgtagggaggttgaaaatgatagaaatacgctcagatcaccttcgttccttgcttctcttgccgtttctgttggaccaaaaataaaataaaatttcgatgtcgtcccacgcagatgcatgcggaacccc

SEQ ID NO: 206246 - DNA, 899 bp, Zea Mays
ctgggacgagcttctcctccttggatggtggttgtagatcccgtgggagcttcaagtggcgacgttgcacggagccgtcgtcggtgttgcctttagcgagatttctcggagaagggagcatggagggttctaacttgaaaggtttggtagatgatgaaattgtcgtgaagacaggcaaagctgcaggcatcggtttagcttttggcagtgtgtatggtgcactacattctatgttgtttgatggacctcaggttggcaataatgtcaagtatccccagctgatcagaactaccaaggtgtgtgggcattatgccgcaagcttagcggtttttggagctacatttgtaggtgtcgagcaggctcttgcaaggtacaggatgaagaaggacatcattaatggtgctgttgcaggttttgctgctggtgcttctctgggtttcagtgctggaagcttccgggcagcattcttttcaggctctgcagtcgctttgacatctgtagtgctggatgtcaccggaacgaaaactactgatgaagaagaaaaaggccagcactagccaccctgagatatggaagagtactatctgtttcagaggagtttcatctctaaagaaatgctagtagagtagtagtataggcggcagtgaggatttcttaaccatcgatactagcacacaaacgtactactccctccgttttttatttatttatcgtgttttagtttaaagtgggcgacaaatattcgagaatggaggtagtatgttcataatagaggtagtaggttgtatacttcgctggggtcatggtctgaggtagttggttgtttcttcctgacgtatgctctatgcttaagaatgtatatcccttctgtgcagagggttcatgctcttctatggttt

SEQ ID NO: 206247 - DNA, 2373 bp, Zea Mays
ggttgggactgagacccgcgcgggcctttggttggtgagcgccgccgtggtggccctggttggtacttggtagtgttctcccggcttccgcttccctgggggtagggtaccagtgtactgctactgcggcgcacgccggcacgcgcagccgggtttccttgctggcgcgcgcgcccgttcatgcgcggcgctttggtggcttggatgttcctcgaggaaacaggaagggttgccgcgtacaccccagttcttgccagccgtatctttctaggtatctgtgcattcctgccctgctgtggttggctaggtaggggtggtaactggtaagaacagcaagaaccaaccatggctgctgatgttgggcttcggttcaacggctggtcatactcggatttgccttacaacgaccacaatgcacaggattcatcagttcaggaaatggtgctcaaccatggctcggtgtcattcggtagatttgctgcagaatcattgtcatgggaaagaaggtcagtgtttgaacataacagacgccaagaggaactaagcaagctcacagcccctggtttggttgcacaaaagaaggctttctttgaagaatattacaagagggcaagacatctcaaggctcagggggtattgcaccaggctggagccgcagtggaggagaacgatagcagccaggcagatgaattgccagcagctatgtctgaagatccagtagccactgctccaagttctagttttgagccttccactgatgttgagagcaaatgccaggatgctcatgagcacgggtacttgacatttaatcctttattttctcagacagcaagcttgccaaacattcaggaggagagttctagctctggtcaaaagcatggattcagttgtgaaactattgagagaaaagttcttgcaccaagacgtgtggcatcaaatgataatgatcaaagcaatattgctggatcaaggattgtcttaccaatagtcagtctacaatcagaatacctcaaagctgatcctgagaagagtgaggcaagcaaaaatgtacctattattaataggtcaaaaaaggtatcaaaggacctggcaacttctgttatcagcatcccaagggtagatttaagaaggaattcagaaaacggaccctctcgagacttggaggatccattccacaagagagttgagatgaaattgcgtgctttatctgatcggatggatgctgacagaactacggcctctagtagatcatcctcttaccaacctcctgagagagctatgacctcagctagatctgcatatcaagatagactagcaatatcttctagatccagtgtgtctcagaacactagtaaagccttggcaccttctaaattagctgctcaagcttcccataaatttcttaaaggtgtgcagcgtttagatgccatgccccgtggtattttcgttaataaaggatcaagtgcttctcttgttgcttcttgcaacagtagtgcaactgggaagttgtctgccaagattttggtggcacccagttcgtctcaagttggtgcaaagacttccaggactgctcaggttacaccgaaaagagcagcaggacctaccagtgtaaacaatgtgtcacacaataaaaggaagcacacaccggtcgcattgggtgaaaaatacccaaagagagagtatgtgcgcagatctgcacctccaagtgcaagaagcagctccgagaatctccctcgtgctgcaaaggcgcctaagatatcaaaagtgatgaatgcggtgtccaaggctgaagctgtgcagaagtcaaaatcatcaagcaatcttgttggaggaagaaatttatcgacaaagcgctccgcaaactgcaatgaagaaaacagaaaggcgatcccgtcgcgcaaggtaaacatggctgaatgcacgaggagcaatctgaaaggtggcccatcactgactaagaacaagccacggcaagagaggccacggtggagatgattgccaggcgagagaagccacgaatccaccacggtgattattaaatagtcttgagaagcatcgatcacctggagcctcaaacgtgtacctctggttagttttgcaacacgaaattgagtgccggccatcaaaagcatacagcaccaagacttgccttgtcttgtagctgtagcatacagtggctggctgtttgttccccttgttgttgtaatccaacaacagtcgcaagagaatatctggatgtgcaaggcagtatcgtgccgctgctgtgctgtcgttacggcccgtgacatttctggccgtcgcgtttgttgctgctttgcgaaggggatacaccggaaccatttgaggttctaaataactttaacaacaacaaca

SEQ ID NO: 206248 - DNA, 1593 bp, Zea Mays
ttttttttttgaagcaccaagaagcacagattcacactcaagccaaagcatttcggatcaaaacagcaagggtgagcctagaacaaaaactcgaaggagcaagaagagctcgtatcagaaaaccatttcagataaatctgagctttgttcagtaccttctcagatttgtgacgacaagaagcatggttcagagccaagactggctgactgtgaagccgaacaagctacctgtgggaataacgaagaatcatctggagcacttacacatggtgattttgctggagagctccaagttcagcagcaggttgaacagcatgaactacttgcgccaccaaagatagaatcatcaaagtcacctgatggagggaagtccgtcagttcgttcccaaaccaagggtgtatcccacagttctttgagggtctggactggatgattccaccttcctattaccaagactccaatggcatccaatcagttaccgcgtcggataacatttttaatccatctgaaggtataccttccaccatgaacgctgatgccttggatgcgtttcaaacatcttgcctttctgagtgctttcctagctccattcaagagttcatcggcagtccggatataaacacactggcatttatgtcgcctgagatgcaacaattggatgccggcagcaacttgccgagcacatccaactcctatgtgcagatgagtttctcggaggagagccacagcgcatccttgagtggccttcacatggaagccatccatataaacagctcgtcatgctctcagccactggcgacggggagcttcgatgcaggggcgttcccgaaactgtcaaacataagagaatgccaacccttgcctctgcaagagatccacaccagttccatgggaacaccttcatgcagtatggacgcggcggcagagtacggcacggatagaagtgcgaagcaaatgaaaccaccggtccggacctatacaaaggttcagaagttaggatcagttggaagatgtattgacgttacacggttcagagattaccatgagttgaggtcagccattgcgtgcatgtttggactccaggggaagctggaacatcctggcagttcagattggaagcttgtttatgtcgactacgagaacgatgttcttctcgttggagacgatccatgggaggagttcatcaactgtgtgagatgcatccggatcttatcaccttcggaagtacagcagatgagcgagaacggcgtgcatgtcttgaacgactgcatccaaatagcttagcaaagtcacggctgtatgctctacagcctgcacagtgtaggctcttcttgtaaataaaaatatacagcatgtgcgtcaaattctctggtcgctctgtttcttttgtagcacgagaagaaacaattacagatgtcaacatcctgccaatgccatgtgtgtttctttcaggagtcaaattatttttttacgaagctgaatcgagctaacggacgtgaggaaattctgtaaaacaactgttaatcataaattctgtaaaagtatggtgtcgtggtaggtggggcattaccttagccttccggatgagctgg

SEQ ID NO: 206249 - DNA, 705 bp, Zea Mays
ttcctgttatgtatgggtcctctctgcaaaatgcaggggaggttttgtttttcgaggaaggcgagcctaagattgatggcgaaccaggcgatttgaagttcaggatccgaacagcattacacagccacttcaaacgagaaggcaatgacctgcatgcaacagttacaatatccctgctgcaagctctggttggtttcgagaagacaatcaagcatcttgacaaccatctggtagaaattggcaccaagggcatcaccaaaccgaaggagatcaggaagttcaaaggtgaaggcatgccactataccaaagcaacaagaaaggtgacctgtatgtgacattcgaggtgttattcccgaaaaccctaaccgctgaccagaaggccaagcttaaggatgttctcgtgtagaccattgttttccacttgtatgctactgagtttgaggcagagcgccttgaggaaaattttcggagtagcttgcataggaagcagcagctgcttcctttttatgtgattttccattgcaaatcctagcagcatggtcttctttttctttcccttgcgttttgttatgcgcccttaacagctcggtgtaggtttagaaggcacaacaaaactgtaccagaatatttgtacctttggaattctgaatacatagattgaacacctcgggtgcttgcttattctatgctcactggccacttct

SEQ ID NO: 206250 - DNA, 686 bp, Zea Mays
gtcagaggtggctgaacacgaggttttgtttttcgaggaaggcgagcctaagattgatggcgaaccaggcgatttgaagttcaggatccgaacagcattacacagccacttcaaacgagaaggcaatgacctgcatgcaacagttacaatatccctgctgcaagctctggttggtttcgagaagacaatcaagcatcttgacaaccatctggtagaaattggcaccaagggcatcaccaaaccgaaggagatcaggaagttcaaaggtgaaggcatgccactataccaaagcaacaagaaaggtgacctgtatgtgacattcgaggtgttattcccgaaaaccctaaccgctgaccagaaggccaagcttaaggatgttctcgtgtagaccattgttttccacttgtatgctactgagtttgaggcagagcgccttgaggaaaattttcggagtagcttgcataggaagcagcagctgcttcctttttatgtgattttccattgcaaatcctagcagcatggtcttctttttctttcccttgcgttttgttatgcgcccttaacagctcggtgtaggtttagaaggcacaacaaaactgtaccagaatatttgtacctttggaattctgaatacatagattgaacacctcgggtgcttgcttattctatgctcactggccacttct

SEQ ID NO: 206251 - DNA, 1068 bp, Zea Mays
caatttttgtaatttacttacaaaaggtggaagacaaaaggacaacaacaaagcttcactccatagctgagtttggtttttttggtggtggtggtggtgggatggaagaggaggaacaacaaattttaaaaggtgatgaggtgattgttgaactggatgcttcattagaggacttgtacatgggcggttcattaaaggtttggagagagaaaaatgtcataaagccagcaccaggaaagaggcgctgcaactgtaggaacgaagtttaccatcgacaaataggtcctggaatgtatcaacagatgactgagcaggtctgcgaccaatgtccaaatgtgaaatttgtacgagaaggtgaattcttgactgttgatattgagaagggaatgaaagatggacaggaggttttgtttttcgaggaaggcgagcctaagattgatggcgaaccaggcgatttgaagttcaggatccgaacagcattacacagccacttcaaacgagaaggcaatgacctgcatgcaacagttacaatatccctgctgcaagctctggttggtttcgagaagacaatcaagcatcttgacaaccatctggtagaaattggcaccaagggcatcaccaaaccgaaggagatcaggaagttcaaaggtgaaggcatgccactataccaaagcaacaagaaaggtgacctgtatgtgacattcgaggtgttattcccgaaaaccctaaccgctgaccagaaggccaagcttaaggatgttctcgtgtagaccattgttttccacttgtatgctactgagtttgaggcagagcgccttgaggaaaattttcggagtagcttgcataggaagcagcagctgcttcctttttatgtgattttccattgcaaatcctagcagcatggtcttctttttctttcccttgcgttttgttatgcgcccttaacagctcggtgtaggtttagaaggcacaacaaaactgtaccagaatatttgtacctttggaattctgaatacatagattgaacacctcgggtgcttgcttattctatgctcactggccacttct

SEQ ID NO: 206252 - DNA, 1335 bp, Zea Mays
atccatttttcccatttgacagccttttttctactggttcatttactcttcatttgtcatgcgtcaggaagagctactacgacgtgctgcaagttcccaagggcgcgtccgaggatcagattaagaggtcgtaccgcaagctcgcgctcaagtatcatccggataagaaccccgacaacgaggaggccaacaagcgcttcgctgagatcaacaacgcgtatgaggtgttgacggaccaggagaagaagaagatctatgaccggtatggcgaggaggggttgaagcagttccaaggcgggagaggaagtggcggtggaatgaacattcaggacatctttagcagtttttttggtggtggtggtggtgggatggaagaggaggaacaacaaattttaaaaggtgatgaggtgattgttgaactggatgcttcattagaggacttgtacatgggcggttcattaaaggtttggagagagaaaaatgtcataaagccagcaccaggaaagaggcgctgcaactgtaggaacgaagtttaccatcgacaaataggtcctggaatgtatcaacagatgactgagcaggtctgcgaccaatgtccaaatgtgaaatttgtacgagaaggtgaattcttgactgttgatattgagaagggaatgaaagatggacaggaggttttgtttttcgaggaaggcgagcctaagattgatggcgaaccaggcgatttgaagttcaggatccgaacagcattacacagccacttcaaacgagaaggcaatgacctgcatgcaacagttacaatatccctgctgcaagctctggttggtttcgagaagacaatcaagcatcttgacaaccatctggtagaaattggcaccaagggcatcaccaaaccgaaggagatcaggaagttcaaaggtgaaggcatgccactataccaaagcaacaagaaaggtgacctgtatgtgacattcgaggtgttattcccgaaaaccctaaccgctgaccagaaggccaagcttaaggatgttctcgtgtagaccattgttttccacttgtatgctactgagtttgaggcagagcgccttgaggaaaattttcggagtagcttgcataggaagcagcagctgcttcctttttatgtgattttccattgcaaatcctagcagcatggtcttctttttctttcccttgcgttttgttatgcgcccttaacagctcggtgtaggtttagaaggcacaacaaaactgtaccagaatatttgtacctttggaattctgaatacatagattgaacacctcgggtgcttgcttattctatgctcactggccacttct

SEQ ID NO: 206253 - DNA, 1641 bp, Zea Mays
cttctagaaagttttaaaccgcaggaaccaaaaggccactgcagcagacggaggacggcgacggtggcggcggggaagagccgaagaggacgacgagggatagaacggcgagggagaagctgtctctcttcacgctcgggatcgttaaccgtagctgacaaccgtgcggaaacaccggattgtgagggccgaggagagaggtgcggcgaggcctctcgaggaggcgggggcgggatggcgacgccggggaagggaggggcagcgcggtttgcggccgcgctcttcgtcctcctgaatctcgctgtggccattgctgggaagagctactacgacgtgctgcaagttcccaagggcgcgtccgaggatcagattaagaggtcgtaccgcaagctcgcgctcaagtatcatccggataagaaccccgacaacgaggaggccaacaagcgcttcgctgagatcaacaacgcgtatgaggtgttgacggaccaggagaagaagaagatctatgaccggtatggcgaggaggggttgaagcagttccaaggcgggagaggaagtggcggtggaatgaacattcaggacatctttagcagtttttttggtggtggtggtggtgggatggaagaggaggaacaacaaattttaaaaggtgatgaggtgattgttgaactggatgcttcattagaggacttgtacatgggcggttcattaaaggtttggagagagaaaaatgtcataaagccagcaccaggaaagaggcgctgcaactgtaggaacgaagtttaccatcgacaaataggtcctggaatgtatcaacagatgactgagcaggtctgcgaccaatgtccaaatgtgaaatttgtacgagaaggtgaattcttgactgttgatattgagaagggaatgaaagatggacaggtgggccgtcacacttctcgtgggaggtcagaggtggctgaacacgtacgtacgaggaggttttgtttttcgaggaaggcgagcctaagattgatggcgaaccaggcgatttgaagttcaggatccgaacagcattacacagccacttcaaacgagaaggcaatgacctgcatgcaacagttacaatatccctgctgcaagctctggttggtttcgagaagacaatcaagcatcttgacaaccatctggtagaaattggcaccaagggcatcaccaaaccgaaggagatcaggaagttcaaaggtgaaggcatgccactataccaaagcaacaagaaaggtgacctgtatgtgacattcgaggtgttattcccgaaaaccctaaccgctgaccagaaggccaagcttaaggatgttctcgtgtagaccattgttttccacttgtatgctactgagtttgaggcagagcgccttgaggaaaattttcggagtagcttgcataggaagcagcagctgcttcctttttatgtgattttccattgcaaatcctagcagcatggtcttctttttctttcccttgcgttttgttatgcgcccttaacagctcggtgtaggtttagaaggcacaacaaaactgtaccagaatatttgtacctttggaattctgaatacatagattgaacacctcgggtgcttgcttattctatgctcactggccacttct

SEQ ID NO: 206254 - DNA, 1433 bp, Zea Mays
gggtggtgaactggtgatggtgatgctcgctcgtagtgcatgtgcatccatccgacttcccaacagcctacctctcgcgttccaggacaaaacgcagtcttggctcggcagccgaggcgagaggagcctttgcccacctttgctcactcgcttcgctttccatcctgttgcgcggccgcggcgcaggtgcggttggccatcacaggccaaggacccctcttcctcttccctttgacccaccaccgcccccctcttcccttcttcccccactgtcgccgctcctcgtcttccactctctccactttgctgcttcttctcccttattaatgctcgtgggctcctatgatccgccctccgccgcgggtttcttgatccatccccggcccaaggaagcggaccccggcgaacactcctgacagattcgcccgtccgccgctccctcgattcggtcctccccgtcagcggtgtttaggacctctgcagcatagcatctggtccgtccctggagatgtccggcgtacaggagcagttcgagatcaagttccggctgccggacggcaccgacatcggacccaggcggttcccgccggcgtccaccgtcgccacgctcaaggagaccatcatcgcccagtggcccaaagataaggaaaaaggtcctaggactgtgaatgatcttaagcttattaatgctgggaagatactggagaacaacaaaaccctatcagaatgcaaaagcccgatttgcgacttctctgcgatgacaacaatgcatgtcgtcatccgcgcaccgacttcaagcaaacagtctgataaaagagcagaaaagaaagcgaaaaatttcaggtgcggttgtgccattatgtgacagcattgtgaatagtagcagagagaacgtggccatttcagttttctccctttttttttcctgctctcgctggagtgttgtattatgttcgaggcgctttctcctttcattttgttttgaagtaccgcgtgcaagcttcaacagctgtcaagtgccctttaatcgtgagtgtgcatcaagcacagaattagaaggcggttggctgctaattacccttaatcttgagtttgtcaagcacacaatttgaaggcagtcattagcgtcgaaactacgatgtccaccctatccaatcttccatggtttcacgcttctcttctatatttatgctaccctgggtgacaaatgtttaatgtatgccttccatgctagatgaactttttggaacgccattctaactcatcaatttctattctgtaaaactaaaaccagttgtaatctgccatagatcagtatgcttgctatatgggagtcacattgatatgttttgcaactgttgctcatactctaaattagtagtagtttattgctggttcatctcagtttgcatcagctaccgtaaggtttgtat

SEQ ID NO: 206255 - DNA, 1470 bp, Zea Mays
tgaactggtgatggtgatgctcgctcgtagtgcatgtgcatccatccgacttcccaacagcctacctctcgcgttccaggacaaaacgcagtcttggctcggcagccgaggcgagaggagcctttgcccacctttgctcactcgcttcgctttccatcctgttgcgcggccgcggcgcaggtgcggttggccatcacaggccaaggacccctcttcctcttccctttgacccaccaccgcccccctcttcccttcttcccccactgtcgccgctcctcgtcttccactctctccactttgctgcttcttctcccttattaatgctcgtgggctcctatgatccgccctccgccgcgggtttcttgatccatccccggcccaaggaagcggaccccggcgaacactcctgacagattcgcccgtccgccgctccctcgattcggtcctccccgtcagcgcgttgacgccttgacggtatgaagccctattcttggcaggcaggtgtttaggacctctgcagcatagcatctggtccgtccctggagatgtccggcgtacaggagcagttcgagatcaagttccggctgccggacggcaccgacatcggacccaggcggttcccgccggcgtccaccgtcgccacgctcaaggagaccatcatcgcccagtggcccaaagataaggaaaaaggtcctaggactgtgaatgatcttaagcttattaatgctgggaagatactggagaacaacaaaaccctatcagaatgcaaaagcccgatttgcgacttctctgcgatgacaacaatgcatgtcgtcatccgcgcaccgacttcaagcaaacagtctgataaaagagcagaaaagaaagcgaaaaatttcaggtgcggttgtgccattatgtgacagcattgtgaatagtagcagagagaacgtggccatttcagttttctccctttttttttcctgctctcgctggagtgttgtattatgttcgaggcgctttctcctttcattttgttttgaagtaccgcgtgcaagcttcaacagctgtcaagtgccctttaatcgtgagtgtgcatcaagcacagaattagaaggcggttggctgctaattacccttaatcttgagtttgtcaagcacacaatttgaaggcagtcattagcgtcgaaactacgatgtccaccctatccaatcttccatggtttcacgcttctcttctatatttatgctaccctgggtgacaaatgtttaatgtatgccttccatgctagatgaactttttggaacgccattctaactcatcaatttctattctgtaaaactaaaaccagttgtaatctgccatagatcagtatgcttgctatatgggagtcacattgatatgttttgcaactgttgctcatactctaaattagtagtagtttattgctggttcatctcagtttgcatcagctaccgtaaggtttgtat

SEQ ID NO: 206256 - DNA, 1427 bp, Zea Mays
ctcgctcgtagtgcatgtgcatccatccgacttcccaacagcctacctctcgcgttccaggacaaaacgcagtcttggctcggcagccgaggcgagaggagcctttgcccacctttgctcactcgcttcgctttccatcctgttgcgcggccgcggcgcaggtgcggttggccatcacaggccaaggacccctcttcctcttccctttgacccaccaccgcccccctcttcccttcttcccccactgtcgccgctcctcgtcttccactctctccactttgctgcttcttctcccttattaatgctcgtgggctcctatgatccgccctccgccgcgggtttcttgatccatccccggcccaaggaagcggaccccggcgaacactcctgacagattcgcccgtccgccgctccctcgattcggtcctccccgtcagcgccctattcttggcaggcaggtgtttaggacctctgcagcatagcatctggtccgtccctggagatgtccggcgtacaggagcagttcgagatcaagttccggctgccggacggcaccgacatcggacccaggcggttcccgccggcgtccaccgtcgccacgctcaaggagaccatcatcgcccagtggcccaaagataaggaaaaaggtcctaggactgtgaatgatcttaagcttattaatgctgggaagatactggagaacaacaaaaccctatcagaatgcaaaagcccgatttgcgacttctctgcgatgacaacaatgcatgtcgtcatccgcgcaccgacttcaagcaaacagtctgataaaagagcagaaaagaaagcgaaaaatttcaggtgcggttgtgccattatgtgacagcattgtgaatagtagcagagagaacgtggccatttcagttttctccctttttttttcctgctctcgctggagtgttgtattatgttcgaggcgctttctcctttcattttgttttgaagtaccgcgtgcaagcttcaacagctgtcaagtgccctttaatcgtgagtgtgcatcaagcacagaattagaaggcggttggctgctaattacccttaatcttgagtttgtcaagcacacaatttgaaggcagtcattagcgtcgaaactacgatgtccaccctatccaatcttccatggtttcacgcttctcttctatatttatgctaccctgggtgacaaatgtttaatgtatgccttccatgctagatgaactttttggaacgccattctaactcatcaatttctattctgtaaaactaaaaccagttgtaatctgccatagatcagtatgcttgctatatgggagtcacattgatatgttttgcaactgttgctcatactctaaattagtagtagtttattgctggttcatctcagtttgcatcagctaccgtaaggtttgtat

SEQ ID NO: 206257 - DNA, 833 bp, Zea Mays
atttggttggtgctattactgctggaacttatggtgcttagataaggaaaaaggtcctaggactgtgaatgatcttaagcttattaatgctgggaagatactggagaacaacaaaaccctatcagaatgcaaaagcccgatttgcgacttctctgcgatgacaacaatgcatgtcgtcatccgcgcaccgacttcaagcaaacagtctgataaaagagcagaaaagaaagcgaaaaatttcaggtgcggttgtgccattatgtgacagcattgtgaatagtagcagagagaacgtggccatttcagttttctccctttttttttcctgctctcgctggagtgttgtattatgttcgaggcgctttctcctttcattttgttttgaagtaccgcgtgcaagcttcaacagctgtcaagtgccctttaatcgtgagtgtgcatcaagcacagaattagaaggcggttggctgctaattacccttaatcttgagtttgtcaagcacacaatttgaaggcagtcattagcgtcgaaactacgatgtccaccctatccaatcttccatggtttcacgcttctcttctatatttatgctaccctgggtgacaaatgtttaatgtatgccttccatgctagatgaactttttggaacgccattctaactcatcaatttctattctgtaaaactaaaaccagttgtaatctgccatagatcagtatgcttgctatatgggagtcacattgatatgttttgcaactgttgctcatactctaaattagtagtagtttattgctggttcatctcagtttgcatcagctaccgtaaggtttgtat

SEQ ID NO: 206258 - DNA, 2110 bp, Zea Mays
atcatttaaggtgtttgtgcttgatttaatttcttacatttttaaataaaatgagtgattaaagttttcgaaaaaagtcaatagtatcatattgtgaatataaatattttgaataagacgaatgaacagagttagtacttaatagaattgatactcgtaccagcaagtttctgtactttgtttttcctaagtttgtacttctttatcggaagtataaagtataggtgaccgaccagtgtttctttacctttcattttccgtgctcgatttttttagatcgaacaccaggccaggaggaggagcaggcgcggctaaacgcgcgagtgcacgtagcaaaccgcatcgtcgaaagaggagagagaaataataaatatacgacgagggggcatggcccccctctcccttattctattcctccacaccgatcactcgctgctcccctctctcgccggagctccgggccggatggcggcggcagcagcagctcctcccgcctccgtgatcgcgtgatggacgcacacaccgccgcgctccgccgatggacgacgccggaaggccaccaccacacgctcccgtggcggtgaccgcctccgcctccgcctccgccaccgccgcgcccgcccctccccaaccctcagccactgctgccgtcgacaggtcctcccccgaccccgacgcgctctatgaagaggggatgtggcaacaaatggccatggacagcggtgccactatgcaacctgggtcatatcctgagcgaccaggtgaacccgactgcacttactatctcaggactggattgtgtcgatttggcatgagctgccgattcaatcatcctccggataggaatctggctattgcctctgccagaatgaagggagaatatcctgagagagcgggacagccagagtgtcagtattatctgaagactggaacatgcaagtttggccctacatgcaaatttcaccatcccagggaaaaggctggaattgcagggagggtgcagctaaacacatcaggatatccactccgcccgaatgaaaaggagtgtgcatattatttaaaaacaggacactgtaaatatgcaaatacttgtaaattccaccatccggaacttttcaatgtggtgccttcgtcacgtggttctcctatttatacctctgtacattcctctgcgagtgctggtccgcagtcctatactggaactatgccaagctgggcttttccacgagcttcttttataccaagccctaggtggcaaagtccttcaaattatgcgccgatgattgtacctcagggccttgttcaaatgcagagctggaattcatatactggtcagctgcagtcacctggggctcaacaaacttatggaagttcacaacaaggagaagctagtacaggaaatcagggaatgctgtcaccatacagacccagttcgtttcccgtgcctcaatatgcgctgcagagagagaatgtatttcctgagagacctgatgaaccagaatgccaatattacatgaagacaggagattgtaaattcggtgcagtgtgcaagttccatcatccccgggtgagatcactgccccctccagattgtgtcttaagtccaatgggtcttccactacgtccaggtgaagaactgtgcaaattctattctcgttacggcatctgcaagttcggcgccaactgtaaattcgaccatcctacagtggttgctccaatggtctatgcttgacctacttcgatttataaaatccatggcactgcctcaggcgctgtgaatgtttctcctaacttcctgccgggatcaaagttctgtaaattgagttgctaccggagatgtacagcccctttttttttggttaatccagatctttgggaataactctcgaaaccgaataaactttggatacagagatgccagttttcaggtgcctgcactatttgacattattgctgcacctatggttccgaacagaggaacagttgaattctctggaggggctgaagcctgcacttgtgcagttgagattatatcatcgcgtcgatttattttggaacctgtattcagctggtgttgaggcatttgtttctgaggtgaaatgaactctcc

SEQ ID NO: 206259 - DNA, 2256 bp, Zea Mays
atcatttaaggtgtttgtgcttgatttaatttcttacatttttaaataaaatgagtgattaaagttttcgaaaaaagtcaatagtatcatattgtgaatataaatattttgaataagacgaatgaacagagttagtacttaatagaattgatactcgtaccagcaagtttctgtactttgtttttcctaagtttgtacttctttatcggaagtataaagtataggtgaccgaccagtgtttctttacctttcattttccgtgctcgatttttttagatcgaacaccaggccaggaggaggagcaggcgcggctaaacgcgcgagtgcacgtagcaaaccgcatcgtcgaaagaggagagagaaataataaatatacgacgagggggcatggcccccctctcccttattctattcctccacaccgatcactcgctgctcccctctctcgccggagctccgggccggatggcggcggcagcagcagctcctcccgcctccgtgatcgcgtgatggacgcacacaccgccgcgctccgccgatggacgacgccggaaggccaccaccacacgctcccgtggcggtgaccgcctccgcctccgcctccgccaccgccgcgcccgcccctccccaaccctcagccactgctgccgtcgacaggtcctcccccgaccccgacgcgctctatgaagaggggatgtggcaacaaatggccatggacagcggtgccactatgcaacctgggtcatatcctgagcgaccaggtgaacccgactgcacttactatctcaggactggattgtgtcgatttggcatgagctgccgattcaatcatcctccggataggaatctggctattgcctctgccagaatgaagggagaatatcctgagagagcgggacagccagagtgtcagtattatctgaagactggaacatgcaagtttggccctacatgcaaatttcaccatcccagggaaaaggctggaattgcagggagggtgcagctaaacacatcaggatatccactccgcccggtttgtcttccgttgccatttatatctcctcttctacatatgtctgtttgttttgctgaaaagaagtccactttgcttctgtagaatgaaaaggagtgtgcatattatttaaaaacaggacactgtaaatatgcaaatacttgtaaattccaccatccggaacttttcaatgtggtgccttcgtcacgtggttctcctatttatacctctgtacattcctctgcgagtgctggtccgcagtcctatactggaactatgccaagctgggcttttccacgagcttcttttataccaagccctaggtggcaaagtccttcaaattatgcgccgatgattgtacctcagggccttgttcaaatgcagagctggaattcatatactggtcagctgcagtcacctggggctcaacaaacttatggaagttcacaacaaggagaagctagtacaggaaatcagggaatgctgtcaccatacagacccagttcgtttcccgtgcctcaatatgcgctgcagagagagaatgtatttcctgagagacctgatgaaccagaatgccaatattacatgaagacaggagattgtaaattcggtgcagtgtgcaagttccatcatccccggggtgaagaactgtgcaaattctattctcgttacggcatctgcaagttcggcgccaactgtaaattcgaccatcctacagtggttgctccaatggtctatgcgtatggtttctccgcgtctgcttcccctgcatccgcttcgactaatgtacctatggcgcgacgccttctgggatccccaccggggtctggatatacatcttaggcgtcgttttttttttcagttgacctacttcgatttataaaatccatggcactgcctcaggcgctgtgaatgtttctcctaacttcctgccgggatcaaagttctgtaaattgagttgctaccggagatgtacagcccctttttttttggttaatccagatctttgggaataactctcgaaaccgaataaactttggatacagagatgccagttttcaggtgcctgcactatttgacattattgctgcacctatggttccgaacagaggaacagttgaattctctggaggggctgaagcctgcacttgtgcagttgagattatatcatcgcgtcgatttattttggaacctgtattcagctggtgttgaggcatttgtttctgaggtgaaatgaactctcc

SEQ ID NO: 206260 - DNA, 2731 bp, Zea Mays
atcatttaaggtgtttgtgcttgatttaatttcttacatttttaaataaaatgagtgattaaagttttcgaaaaaagtcaatagtatcatattgtgaatataaatattttgaataagacgaatgaacagagttagtacttaatagaattgatactcgtaccagcaagtttctgtactttgtttttcctaagtttgtacttctttatcggaagtataaagtataggtgaccgaccagtgtttctttacctttcattttccgtgctcgatttttttagatcgaacaccaggccaggaggaggagcaggcgcggctaaacgcgcgagtgcacgtagcaaaccgcatcgtcgaaagaggagagagaaataataaatatacgacgagggggcatggcccccctctcccttattctattcctccacaccgatcactcgctgctcccctctctcgccggagctccgggccggatggcggcggcagcagcagctcctcccgcctccgtgatcgcgtgatggacgcacacaccgccgcgctccgccgatggacgacgccggaaggccaccaccacacgctcccgtggcggtgaccgcctccgcctccgcctccgccaccgccgcgcccgcccctccccaaccctcagccactgctgccgtcgacaggtcctcccccgaccccgacgcgctctatgaagaggggatgtggcaacaaatggccatggacagcggtgccactatgcaacctgggtcatatcctgagcgaccaggtgaacccgactgcacttactatctcaggactggattgtgtcgatttggcatgagctgccgattcaatcatcctccggataggaatctggctattgcctctgccagaatgaagggagaatatcctgagagagcgggacagccagagtgtcagtattatctgaagactggaacatgcaagtttggccctacatgcaaatttcaccatcccagggaaaaggctggaattgcagggagggtgcagctaaacacatcaggatatccactccgcccgaatgaaaaggagtgtgcatattatttaaaaacaggacactgtaaatatgcaaatacttgtaaattccaccatccggaacttttcaatgtggtgccttcgtcacgtggttctcctatttatacctctgtacattcctctgcgagtgctggtccgcagtcctatactggaactatgccaagctgggcttttccacgagcttcttttataccaagccctaggtggcaaagtccttcaaattatgcgccgatgattgtacctcagggccttgttcaaatgcagagctggaattcatatactggtcagctgcagtcacctggggctcaacaaacttatggaagttcacaacaaggagaagctagtacaggaaatcagggaatgctgtcaccatacagacccagttcgtttcccgtgcctcaatatgcgctgcagagagagaatgtatttcctgagagacctgatgaaccagaatgccaatattacatgaagacaggagattgtaaattcggtgcagtgtgcaagttccatcatccccgggtgagatcactgccccctccagattgtgtcttaagtccaatgggtcttccactacgtccagtaagtcattaaacccttcaccgtttctgttgtatcggtcctttgtttaggcattttatcaattatatatgaatatgttgattgttgtactacctcgtctctttatgggataggctccgcaaattttcttgtggaaacacatcatcatttagaatatgcatcaatgcgactgcttggttgttgtagtctagaaatttgaaaatcaaatatgtgctatgctgtttataaagaggctctcgtgtcagacaaagaaagtgaaggatgttccatacacgtttctcagccagatgattgatttcagtggggcatgatttctgctaatgatgattgatttattctcctagtcctagcaataaatgcacaacttattaaagacactaagatgcatattcaaggcatcgttgttgatacctggacactgattagagcaatgtcaaaagttacaaatttgctaggacaggtattatcagacagttactcggtagaggaagggacaagtgcacagactgatgtctgcttacaaatagagcctgtctcatcaataggcactagatagtccttttgctgcacctcattgaatggcctgtcgtcttgattatcctgtccccaatggtttttcagggtgaagaactgtgcaaattctattctcgttacggcatctgcaagttcggcgccaactgtaaattcgaccatcctacagtggttgctccaatggtctatgcttgacctacttcgatttataaaatccatggcactgcctcaggcgctgtgaatgtttctcctaacttcctgccgggatcaaagttctgtaaattgagttgctaccggagatgtacagcccctttttttttggttaatccagatctttgggaataactctcgaaaccgaataaactttggatacagagatgccagttttcaggtgcctgcactatttgacattattgctgcacctatggttccgaacagaggaacagttgaattctctggaggggctgaagcctgcacttgtgcagttgagattatatcatcgcgtcgatttattttggaacctgtattcagctggtgttgaggcatttgtttctgaggtgaaatgaactctcc

SEQ ID NO: 206261 - DNA, 971 bp, Zea Mays
gagcggatgtctgtactgattcaaacttttttcccatgcttatttgactgcgtgcaaattgtatatcagggtcagctgcagtcacctggggctcaacaaacttatggaagttcacaacaaggagaagctagtacaggaaatcagggaatgctgtcaccatacagacccagttcgtttcccgtgcctcaatatgcgctgcagagagagaatgtatttcctgagagacctgatgaaccagaatgccaatattacatgaagacaggagattgtaaattcggtgcagtgtgcaagttccatcatccccgggtgagatcactgccccctccagattgtgtcttaagtccaatgggtcttccactacgtccaggtgaagaactgtgcaaattctattctcgttacggcatctgcaagttcggcgccaactgtaaattcgaccatcctacagtggttgctccaatggtctatgcgtatggtttctccgcgtctgcttcccctgcatccgcttcgactaatgtacctatggcgcgacgccttctgggatccccaccggggtctggatatacatcttaggcgtcgttttttttttcagttgacctacttcgatttataaaatccatggcactgcctcaggcgctgtgaatgtttctcctaacttcctgccgggatcaaagttctgtaaattgagttgctaccggagatgtacagcccctttttttttggttaatccagatctttgggaataactctcgaaaccgaataaactttggatacagagatgccagttttcaggtgcctgcactatttgacattattgctgcacctatggttccgaacagaggaacagttgaattctctggaggggctgaagcctgcacttgtgcagttgagattatatcatcgcgtcgatttattttggaacctgtattcagctggtgttgaggcatttgtttctgaggtgaaatgaactctcc

SEQ ID NO: 206262 - DNA, 2162 bp, Zea Mays
cattggctccctggatatccctcctccctctcgcgcttgcagcaaaatccaatgcttcgctctcgcttctgcagattgctcgctccccaaaaccttcacaaaaaaagccacccaaaaaaatccgtttcataactgaaaaaatcaaatagaaaaatcaagtgaagccggtaaagaaaaaaatggcagtggttggcctatccagtgctttcgctcctctcagaggttcttggatagccgtaaggatcaggcagggtggccaacgtgcagggatcagcttgtgtccatctccaaggagcaggaggagctgcgcggcagtggttcgggcggaggtgagcttcgtggacgccgacgaggcgaagaggctcgtgggcgaggagggctacacggtgctggacatcagggacagggcgcagcgcgagagggcacacatcaagtcctccacacacgtgcctctcttcattgagaaccaagacaacgacattgggaccatcgtgaagcgccagctgcacaacaacttcgcggggctcttcttcgggctgcccttcaccaagctcaacccggacttcgccctgacagtcaaggacaagttctcgccggaaagcaagctgctggttgtctgccaggaaggtctcagctgctgcagatgcactggagaaagaaggcttccaaaatattgcatgcatcacatcaggtcttcaaacagtgaagccaggaacgtttgaatctgtggggaaaagtgagctgcagaacgcggggaaagctggccttgtgaccatccaagggaagatttctgtagtccttgggactgtattgattagtgcctacctgtttataacattcttcccagaccaggctgagaagctttttgacttggctggcatcagcttgtgatcagagctgatgttcttcggtactccacttcataatcaggtcatcatttgcatctgttcgctgaaattatgtcagaattatgtttatccagagatccctgtcctctccaaaatagaaacgttacaattatttgatgtcgatacgagttacatcttgattctgaggttccttcatgtatttcaattctactttggagttttctaatgaatttgacatgactgctcaagttaatgctagaatgcctctaacaattcatttgacatgcaaaagtgcaaatgcccttgctttattgtaataacatcataaactcccttcttcataggtagtaagaccaaaaaatgcttttagatgctaactagggaaaaatactatttgatactcataaacttgtaatagtaccaaaaacaatgtgttctgtggcaagccacaaaactagttcaggttttgattttcacccaaggagctaaggtactattcttttacaaataagatgataatcattgcagaatctgggtaaatgctcaatatgaactaattgtatataatttccatttcctgtaggatggttgatcaagtcagattcactcagatgtttccagactgaaaaggaatttttgctctgtgtactattagggaattcttgagagattagcacttaaattctttgaaacatcccttttctcgatgtacctcctatatatatcgtatgcttgattcatctacatgtttgtgttgctttttgaagtatctagacctgcagttatgattcaggatttcaaatagaagctttttatccatctaatcatgctcatccacttgagaacattgaccctgaaagattatgtagaccttgataccaattgcagttgcagatgaaatgattgtcttgtgtaatggtgtaataatagatcttgcactttttggggtgtgttagcgtcaatctgggtgccagtcactgggagttgttccgctcggtgggctctctgtggcggcgcggacggtccgcgacttggacagtaggagcagggttccctgtgccgagccagacggtctgcgctgcgctgggctggcggcgttcagcaacgacacctggaatctcgccctccgagagggaccttgtcaggaaggagagatcctagggtttatcttgggatcgataggccacccaatatgtctctagatgatgtagagtcacataggtgaagattgggataaagaagactatgttactggactcctagggcaagaatgtaaagaaattaataaacagg

SEQ ID NO: 206263 - DNA, 1786 bp, Zea Mays
atttcctaaaaatactttgccaagagttttgtagcctaacaagatctggctaaacctcacgatgctggtggtctgcccagcacaaatggccaaaagacagtggatctggctaaacctcccgtggatccagcgtggcgtgattccattggctccctggatatccctcctccctctcgcgcttgcagcaaaatccaatgcttcgctctcgcttctgcagattgctcgctccccaaaaccttcacaaaaaaagccacccaaaaaaatccgtttcataactgaaaaaatcaaatagaaaaatcaagtgaagccggtaaagaaaaaaatggcagtggttggcctatccagtgctttcgctcctctcagaggttcttggatagccgtaaggatcaggcagggtggccaacgtgcagggatcagcttgtgtccatctccaaggagcaggaggagctgcgcggcagtggttcgggcggaggtgagcttcgtggacgccgacgaggcgaagaggctcgtgggcgaggagggctacacggtgctggacatcagggacagggcgcagcgcgagagggcacacatcaagtcctccacacacgtgcctctcttcattgagaaccaagacaacgacattgggaccatcgtgaagcgccagctgcacaacaacttcgcggggctcttcttcgggctgcccttcaccaagctcaacccggacttcgccctgacagtcaaggacaagttctcgccggaaagcaagctgctggttgtctgccaggaaggtctcagcagctgctgcagatgcactggagaaagaaggcttccaaaatattgcatgcatcacatcaggtcttcaaacagtgaagccaggaacgtttgaatctgtggggaaaagtgagctgcagaacgcggggaaagctggccttgtgaccatccaagggaagatttctgtagtccttgggactgtattgattagtgcctacctgtttataacattcttcccagaccaggctgagaagctttttgacttggctggcatcagcttgtgatcagagctgatgttcttcggtactccacttcataatcaggatggttgatcaagtcagattcactcagatgtttccagactgaaaaggaatttttgctctgtgtactattagggaattcttgagagattagcacttaaattctttgaaacatcccttttctcgatgtacctcctatatatatcgtatgcttgattcatctacatgtttgtgttgctttttgaagtatctagacctgcagttatgattcaggatttcaaatagaagctttttatccatctaatcatgctcatccacttgagaacattgaccctgaaagattatgtagaccttgataccaattgcagttgcagatgaaatgattgtcttgtgtaatggtgtaataatagatcttgcactttttggggtgtgttagcgtcaatctgggtgccagtcactgggagttgttccgctcggtgggctctctgtggcggcgcggacggtccgcgacttggacagtaggagcagggttccctgtgccgagccagacggtctgcgctgcgctgggctggcggcgttcagcaacgacacctggaatctcgccctccgagagggaccttgtcaggaaggagagatcctagggtttatcttgggatcgataggccacccaatatgtctctagatgatgtagagtcacataggtgaagattgggataaagaagactatgttactggactcctagggcaagaatgtaaagaaattaataaacagg

SEQ ID NO: 206264 - DNA, 1536 bp, Zea Mays
gtatgcgttcggcgacgcgacgcgcacggcgcaccattccgcggccacgaagagcacaatcctgttcgccacgccatgcctctccacgcccgcgcaccgccgctccgccactcccaccttctactcaccgccgccaccgctcggctccgcccgtgcgcagcgccagcgaccaagccccgccgccgctccctcgtcctcgtccgcgcctccagctcggaccctccgcagcagcagctcaacctctccgtgctccgcttcaccctcgggattccggggctggacgaatcgtacctcccccggtggataggcctcggtttcggcgcgctcgtcgtgctcaaccacctcctctctgcgtccccgacgcccgcgcagctcaggtccgaggctgtggggctgtgcctggccgcgttctcggcgacgctgccgttcctggggaggttccttgagggcgctgatgctgccagccgagtgccgttgcccgaggggagcatccaagtattcgtcatgtctgagaacctgtcagctgtgcagaaggaggacatggcgtgggcgtcgtacgtcctgctccggaacacaaacaccacgtctgtggtcatagcaattggggatctcttgtgcgtacgaggatactggaatccacctgcaaatacttcaaaatattccacgatcgagtggttcaaaagtcagatgcagcaactaggacttgttgatttgaggggtgctttatacttccctaattcgtcagattctcagcttgcgaagattctgccagatgggattctttctgtgctagcgcaacctattctgagtcctgatccagctaataatgaaacaaaaactgaaggtgtcatcctgttggcctgcaatgcaaattatgcatatagtgagaaagatagggcttggataagaacagttgcagacaaatttcaacgtgcttaatttagaggtaccaaagtcaggcagtactggaaaatggaccgggaaagattggggagtgtaaagtagactgactggtccaagaaggatttggagtcttggcaacgtggactgagcagaataagagagttttgcagttgggaggaaatcagcattaagctactgtttattagggttggcgctagttgaagcaaaatagtccagcaatagtttgttcagttggctagagactatgtggtgatgtgtttggtttgtctctgtgcctcttgctttggtatgtatgtctgattggatttggcattgaagcagaaaggctgctccagagattagtgacatgtgcaaagtagcaatgctgtcataatttacgcatactccagcccaattgaggcagttgatcacctggctgcatttatataagcagtaaaagcatttttagttcaaagtgttgtcacatttaagattgcaaatactgctgatcaatcacattccttcatatatgtacctagattttctattgcaggcttgcagctagtgaccttttcagttgctattgctagtatacacaaacttaacagacaagggaaatgtttgaatcttctg

SEQ ID NO: 206265 - DNA, 1046 bp, Zea Mays
ctgctaccagcctcagctcctcgttgcccagggccactgcaaaagagtgccaagatcttcgtcgtactacacccagctgatcttttgctcgaggcatcctttccagaaggcggcggcagctgcagctttccagaagctcccacccgagctcctccggctaagctacccggcgaggaataataagcatgcaagaaccagctggcggcgggccacggacaacgaccaagcggcgccggccgcggcacaaggaactaccagcacccctcctctcccaggctctcccgttccgagcgccgagagatccccggtgacgcccggcaacggccagccgcagcagccggtcgccgacgccaacggcagcgcgccgagcgagccgccgaagcgggcgccgctgacggcgcgggagcggctgcgggcggcgcgcgtgctggggaagtacgcagagccgtcggtgaaagggtcttcgtcgaaaccggccaaaccggagttcgggagcggtgtgctggacgcgctgcgcgaggcggacgcgaagaaggccgggggcgggggcgggggcgggcggcgtgggtcgcgcctacccgaggcgccgggcaacctgttcgacgacagcaagcgcgggatgcccaaggacgggtggacgttcgagctgccgttcggggtggacgtcttcctcgtcctcgtctccttcacgctcatcaccaccatcatgttcggcaccgccttcctcgtgtggaagctcggcgccatacacttcaacgagtactagcctttagactgtctctacttgattggaggataaagggcgattatgcagtgctagacgagagaattgtgtgtattcgtaatgtactgtattgaccacagacactggtctgccgaagattttcgagaaaacatagaaatgtgtgattgcacgaaacaggtgtcatgttatatagaactaataaatgtggttatgaaatcttacaacaatgtggctgtagtttagtggtaagaattctacgttgtggccgtagagacctgggctcgaatcccagcagccacac

SEQ ID NO: 206266 - DNA, 2371 bp, Zea Mays
ctccttctctctttccggtggcgaagcaccgctctcgccctagtggtcgcttgaactcagcggtggttgcggcgtgcaagttgtattggccctcgactcttgctgtcggcccgccgctgcttcttgttttttttttctatccttcgttccgtctctttccgttgtttcttcgagtaccgctgttggtaacgcgtgaccaatttgtgcttgcagagtctcggtatatagatcacgcacgagtgaaagcccataatagggctcgactttagatagtctgttgaagaagatatggattgcaaaccgtgtctatttagaatctattttgggttttaagttggatttggatcctctgttggacttagtctgagatacagtttccgtccgtggtctgcgagcgagagcaggaggcggccacgcaagctccacgaagggaacgaaaccgacgccgagcccgagacggcgagccgttgcttcgcgacacctcgctcgcttctcttccaggcttccacctccacttccacatggccgctcccatccacgcgcgtctcctcccgctccccttgcacccgaacccaagccccagtctccacgcgagcggcacacgacgggtgccctggcccccgcgccaccgccgccgctgcttcgcgacgccgccgtcgcggaacgggagctcctcctcgccggagatcgactggtgcccggtgccgccggaccagctccccgtgaacgagtacgaggcgcttgcggcctccctgcccttctcctgggcggcggggggcctccgcgtctactgctcccgcctcgcgctcacgggcgccgccgtcgcgctcttcgtcgggctcccggtcgccgccttcgggggccgcggcggggccggcggcgacgctctgcacctcgcgctcggtgccacggggtccgggatcctcgccgtcacgctcgctgtcgtgcggatgtacctcgggtgggcctacgtcggcaaccgcctgctcagcgccacagtggagtatgaggagacgggatggtatgatggtcaggtgagatgtttctgttgatcccgtcctttcttgtacttgatcctaattttctaataaatttctagattgaactgtagtacttagaggtactccgtgtcactcaggtagaacggggatcatttctagaggctagagctgacttgctgcttggttaggccttgaaatgttttggtgatacaaacaattggacaaaaggaatatgatctagaaaactacggggaatcatccaaccattgatacacacttagtgccaccaaaacagatactgaaaatgtgcccctatggtcctatgggccccgtgtgcatccatcgttggatacttggatgcatacgaggaagcatgtgagcaggaaagagaaatattgagggcacctctctccggctgtacacggatcccatggggatatgtccttagggcaaaattaacattcacccactgaaaaaacttctgcggctgttttctgttgctttatctttatcaagcctgacattattgatattcatgccatagaaaaacgtgaggtgttaatctaccgctgtttcatattatagcaagtgcttccttgtaaattaagcattgatgtagaattgctgagttattttagtccttgtaagttgttgtaacatgcagacagctgtctcgaaaaggaggagaaaaacatgtacacacatccttatggtgcttctgtaaatttgttttactagtgttagtcaagatggtttgtggttttccgcttcgtttgatcttattcttgataagtacttgtattcttcttaataaaaatttgtatgcatggaattcattatacttggctcatcacaccagggttaacttttggtgctaaaatcatttcttacctttggcagatatgggttaaaactccagaagttttagctcgtgatcggcttctaggctcattttctgtcaagcctgtgctaaacagggtgaagttcaccttggtgggtctggcaggctccctgatcctttgcattcttctgtacgtgaacacggaaaccccaaaggaaccttatggaaatacaggtggaaggtctatcccgggagtgtacagcgacgctgctgcaaggtcgtttgagcccgatgcattctgtggagaacctgatttgtcgtagcatcgtaaagcgtggagcatggaaggtttgtagatggcagtatatatggtctcacagggtatatacgggggtttctgtacggggtttttaatccatcaaactagggtaatgtaaatatttggccacacccacactagtatcgatattttagacgcaagcctcttatgaaaatttatgctgacgggccacggtgaagtgaaaggggg

SEQ ID NO: 206267 - DNA, 561 bp, Zea Mays
agtgacaactgaactggaaaactcgtagacggacgctgggcgagtttgaggcagaggcggcttctcccccgcagttagcgtggcaaggcgaaggcggcatgttgtcccatgaccctccacagccagaacacttcttccaggctctggagagcaacccatgtctgcaacctacataccatacgatggacatgaaccagcagccagtgccagcgccgggcggctgctatcctgcatggatgtcttagccagtgcttcattccattgccttgagaagtgtcctgaccttcacagatccctacgagctttattactgcttttgcctgcccctttgctgcttgcggtgcttactgaactgtccaaatgaccacatggtcatatataggttattgctgtctttatcttatgttgatcacggcctgctcagctgctttagcgccatgcaaaatggcttgggcgatgcacgcttgaatgggtcgaactgcttatgttttgggagtataaatcacttagcaataagcattggcatgtcctctgtctcaaatacaagtacactttactgtt

SEQ ID NO: 206268 - DNA, 537 bp, Zea Mays
ctctctcattcatgtcacctcttttcctcactgtccctctctgttccctcgacggtcaggcctctccttaaccgcggatgccgatctctgccaccagcgcacggtacgctagttgatcacgtgatatggaggactagaaccgagtcgaccacaagatgttgttaagcgcgggtttcttcgtaaggtgatgctgatggataaagttaaggatggatggcctgatcaactgccaggacaaggaagatcatcaagagatcgtcgtctaaccaacactgacttagtgttattccaggcaagccccgatgcatttgccacctccttgttgttataaaacttttatcacttatatgttgcattaggtgataggagttgagtgatgaaaaacaattgatgcattgccattccttggaatttgattactattccttgattcctgtttataaaagagaactaaagatgcttagccctgcttagataattaaaagttgtttcttttaaaaagatgatgtgttacacgggatatgggaaattgttgtg

SEQ ID NO: 206269 - DNA, 456 bp, Zea Mays
cgatctctgccaccagcgcacggtacgctagttgatcacgtgatatggaggactagaaccgagtcgaccacaagatgttgttaagcgcgggtttcttcgtaaggtgatgctgatggataaagttaaggatggatggcctgatcaactgccaggacaaggaagatcatcaagagatcgtcgtctaaccaacactgacttagtgttattccaggcaagccccgatgcatttgccacctccttgttgttataaaacttttatcacttatatgttgcattaggtgataggagttgagtgatgaaaaacaattgatgcattgccattccttggaatttgattactattccttgattcctgtttataaaagagaactaaagatgcttagccctgcttagataattaaaagttgtttcttttaaaaagatgatgtgttacacgggatatgggaaattgttgtg

SEQ ID NO: 206270 - DNA, 1613 bp, Zea Mays
aaaacactgtcctgtctggtcaggtctcgaaccggcccgagagcgcaatgcaccagcaatggaggcgagcggcagtcggggtccggagggggagcccggtccccaagcgccgcagaggcgtcggcgtggctactggcttcgggtttacggcgcagtcgctgaacgacgacatcctccggtccgtcttctcccggctggacgaccacttcgacctcgcccgctgctccgccgtctgcggctcatggaataggataattgaaacagctcatctcatgagggatatgtattacaaaaggaacccaccagcaagaggttcaagctctaatatttcagtaaaaagttactttgagatgcttgccatggatgagcatgcatctgctttctctagaggacctgctgaagcttttcagtggattgggcacccaatgagggctaccttgtgccgtatgaagagtggtttaattttaactggagttggagataagattctctgcctttggtctgctgaaagctgcaaattcatgaatgagtacaatgtgccaaattctaaaacattagtcgactttgattttgatgaaaataaggtttgaccagctcccagatttgcatatggagacgcagtgaaccaagaagcatatttcaatctggtggagcctcattcaatcatgggttatgcatgagttttgctgatccggaggttgtaattggttgtgaggatggtcgagcctttgtatatgatatgtacagcaggagttgctcacgtatttatcggcttcactcctctcctgtgacatgtttgatgataacggatgaccagctgattgttggtggatcaacttttggaaatgtagctattgcagatcaaacctcagggcagaagttaggtgttctaaaatcagatcatggaccattggcaataagatccttatcttcctgcacaaattcacacatgatatttgctggttcgtcagctggttatgcacattgctgggacttaaggactttgaggcctctctgggaaaaaagagtcagcccaaatgtcatctacagcacacgtcatttgcccggtgacacggcaacgctggcagttggaggcattgacggcgtgctccgcgttatatgccaaaggactggtgacatcattcgcagtcttgtcgttgacgcagatctcccagcagaagccacatctagatcccggcagcaaatagagaagaaacgtgttcgaaggattgaccctgatgcacagttggacggtatcccgaggcgtttgcgccctcagattaccagcctatcggttgggatgaagaagattgtgaccacgcatggtgaaaactacattagggtttggaagtttcgcatgaaaagttcgtaaaaagggcgagatgatggtaatctagttatctggtgtaacctgtactgtagtctactgaataagatggcgtggtaccgtggtgtgtcacctgcgcttgtaataatagcctgaaacatagttcatttgtacacttgtagtcctctttaggatactattagcaattaaaaaaatgtttgtgctcggttcttttttttttacaatagatcgctatatgaaaaaaagtctgtactcagcttacggt

SEQ ID NO: 206271 - DNA, 1607 bp, Zea Mays
aaaacactgtcctgtctggtcaggtctcgaaccggcccgagagcgcaatgcaccagcaatggaggcgagcggcagtcggggtccggagggggagcccggtccccaagcgccgcagaggcgtcggcgtggctactggcttcgggtttacggcgcagtcgctgaacgacgacatcctccggtccgtcttctcccggctggacgaccacttcgacctcgcccgctgctccgccgtctgcggctcatggataattgaaacagctcatctcatgagggatatgtattacaaaaggaacccaccagcaagaggttcaagctctaatatttcagtaaaaagttactttgagatgcttgccatggatgagcatgcatctgctttctctagaggacctgctgaagcttttcagtggattgggcacccaatgagggctaccttgtgccgtatgaagagtggtttaattttaactggagttggagataagattctctgcctttggtctgctgaaagctgcaaattcatgaatgagtacaatgtgccaaattctaaaacattagtcgactttgattttgatgaaaataaggtttgaccagctcccagatttgcatatggagacgcagtgaaccaagaagcatatttcaatctggtggagcctcattcaatcatgggttatgcatgagttttgctgatccggaggttgtaattggttgtgaggatggtcgagcctttgtatatgatatgtacagcaggagttgctcacgtatttatcggcttcactcctctcctgtgacatgtttgatgataacggatgaccagctgattgttggtggatcaacttttggaaatgtagctattgcagatcaaacctcagggcagaagttaggtgttctaaaatcagatcatggaccattggcaataagatccttatcttcctgcacaaattcacacatgatatttgctggttcgtcagctggttatgcacattgctgggacttaaggactttgaggcctctctgggaaaaaagagtcagcccaaatgtcatctacagcacacgtcatttgcccggtgacacggcaacgctggcagttggaggcattgacggcgtgctccgcgttatatgccaaaggactggtgacatcattcgcagtcttgtcgttgacgcagatctcccagcagaagccacatctagatcccggcagcaaatagagaagaaacgtgttcgaaggattgaccctgatgcacagttggacggtatcccgaggcgtttgcgccctcagattaccagcctatcggttgggatgaagaagattgtgaccacgcatggtgaaaactacattagggtttggaagtttcgcatgaaaagttcgtaaaaagggcgagatgatggtaatctagttatctggtgtaacctgtactgtagtctactgaataagatggcgtggtaccgtggtgtgtcacctgcgcttgtaataatagcctgaaacatagttcatttgtacacttgtagtcctctttaggatactattagcaattaaaaaaatgtttgtgctcggttcttttttttttacaatagatcgctatatgaaaaaaagtctgtactcagcttacggt

SEQ ID NO: 206272 - DNA, 1515 bp, Zea Mays
aaaacactgtcctgtctggtcaggtctcgaaccggcccgagagcgcaatgcaccagcaatggaggcgagcggcagtcggggtccggagggggagcccggtccccaagcgccgcagaggcgtcggcgtggctactggcttcgggtttacggcgcagtcgctgaacgacgacatcctccggtccgtcttctcccggctggacgaccacttcgacctcgcccgctgctccgccgtctgcggctcatggataattgaaacagctcatctcatgagggatatgtattacaaaaggaacccaccagcaagaggttcaagctctaatatttcagtaaaaagttactttgagatgcttgccatggatgagcatgcatctgctttctctagaggacctgctgaagcttttcagtggattgggcacccaatgagggctaccttgtgccgtatgaagagtggtttaattttaactggagttggagataagattgtaggtttgaccagctcccagatttgcatatggagacgcagtgaaccaagaagcatatttcaatctggtggagcctcattcaatcatgggttatgcatgagttttgctgatccggaggttgtaattggttgtgaggatggtcgagcctttgtatatgatatgtacagcaggagttgctcacgtatttatcggcttcactcctctcctgtgacatgtttgatgataacggatgaccagctgattgttggtggatcaacttttggaaatgtagctattgcagatcaaacctcagggcagaagttaggtgttctaaaatcagatcatggaccattggcaataagatccttatcttcctgcacaaattcacacatgatatttgctggttcgtcagctggttatgcacattgctgggacttaaggactttgaggcctctctgggaaaaaagagtcagcccaaatgtcatctacagcacacgtcatttgcccggtgacacggcaacgctggcagttggaggcattgacggcgtgctccgcgttatatgccaaaggactggtgacatcattcgcagtcttgtcgttgacgcagatctcccagcagaagccacatctagatcccggcagcaaatagagaagaaacgtgttcgaaggattgaccctgatgcacagttggacggtatcccgaggcgtttgcgccctcagattaccagcctatcggttgggatgaagaagattgtgaccacgcatggtgaaaactacattagggtttggaagtttcgcatgaaaagttcgtaaaaagggcgagatgatggtaatctagttatctggtgtaacctgtactgtagtctactgaataagatggcgtggtaccgtggtgtgtcacctgcgcttgtaataatagcctgaaacatagttcatttgtacacttgtagtcctctttaggatactattagcaattaaaaaaatgtttgtgctcggttcttttttttttacaatagatcgctatatgaaaaaaagtctgtactcagcttacggt

SEQ ID NO: 206273 - DNA, 1521 bp, Zea Mays
aaaacactgtcctgtctggtcaggtctcgaaccggcccgagagcgcaatgcaccagcaatggaggcgagcggcagtcggggtccggagggggagcccggtccccaagcgccgcagaggcgtcggcgtggctactggcttcgggtttacggcgcagtcgctgaacgacgacatcctccggtccgtcttctcccggctggacgaccacttcgacctcgcccgctgctccgccgtctgcggctcatggaataggataattgaaacagctcatctcatgagggatatgtattacaaaaggaacccaccagcaagaggttcaagctctaatatttcagtaaaaagttactttgagatgcttgccatggatgagcatgcatctgctttctctagaggacctgctgaagcttttcagtggattgggcacccaatgagggctaccttgtgccgtatgaagagtggtttaattttaactggagttggagataagattgtaggtttgaccagctcccagatttgcatatggagacgcagtgaaccaagaagcatatttcaatctggtggagcctcattcaatcatgggttatgcatgagttttgctgatccggaggttgtaattggttgtgaggatggtcgagcctttgtatatgatatgtacagcaggagttgctcacgtatttatcggcttcactcctctcctgtgacatgtttgatgataacggatgaccagctgattgttggtggatcaacttttggaaatgtagctattgcagatcaaacctcagggcagaagttaggtgttctaaaatcagatcatggaccattggcaataagatccttatcttcctgcacaaattcacacatgatatttgctggttcgtcagctggttatgcacattgctgggacttaaggactttgaggcctctctgggaaaaaagagtcagcccaaatgtcatctacagcacacgtcatttgcccggtgacacggcaacgctggcagttggaggcattgacggcgtgctccgcgttatatgccaaaggactggtgacatcattcgcagtcttgtcgttgacgcagatctcccagcagaagccacatctagatcccggcagcaaatagagaagaaacgtgttcgaaggattgaccctgatgcacagttggacggtatcccgaggcgtttgcgccctcagattaccagcctatcggttgggatgaagaagattgtgaccacgcatggtgaaaactacattagggtttggaagtttcgcatgaaaagttcgtaaaaagggcgagatgatggtaatctagttatctggtgtaacctgtactgtagtctactgaataagatggcgtggtaccgtggtgtgtcacctgcgcttgtaataatagcctgaaacatagttcatttgtacacttgtagtcctctttaggatactattagcaattaaaaaaatgtttgtgctcggttcttttttttttacaatagatcgctatatgaaaaaaagtctgtactcagcttacggt

SEQ ID NO: 206274 - DNA, 2084 bp, Zea Mays
cttcagaagtcgccgcgacaaggtgctgaattttgactttctaccagaaatcggagcgaaccaaactgccgggaaaacccctcgcctgcggcttcgcgtcggccgccgccgctgccgacactttaccgcgtgccttgcgcccccgcgccgccgatgcgatcagcgacgcacgccagatccgagcttctgtaggaccttcagccgtcgccgtcccatgggggactgcgtcgtcgaggacggccacgggcaccactactcggaggcggtggagggcgcggtttcgttgacggtagccgtggagctcgatgagcgggcggaagagtcgcgggaggaggaggagggtggcgggcagcggaagaaaatgggcgggatcccaagggagccgtcgttctcgcggtggtgcagggacccctctgccgcctccgcctccaataccgccgctgctgcggcgaccagtgacagcgacgcctcagaggagttcgagctgccgctcctgccatcctcctcgggcggcggcggctcaccgatggacattgaggtgggggcaacggcgagatctgatgatctgccgatctcgccgaggttgcttgcgaaggtcatcgggttgatagcgtgttggtacacactgagcacgtgcttgacgctgtacaacaaggagatgctgggaaagcacatgtggaagttcccggcgccattcctgatgaacacagtgcatttcacgatgcaggccgtggcgtcgagggccatcgtgtggttccagcaacgaggcctagagggagggccaagtaaaatgtcgtggaaggattactgtttacgagttgtcccaacagctttggctactgctcttgatataaatctgagcaacatttcacttgttttcattactgtgacatttgctacaatgtgcaaatctgcttctccaattttcattcttctgtttgctttcatgttcaggcttgagaaaccgagctttagccttcttggaatcatgctggttgtttcatttggagttctactaacagttgctaaagagacagaatttaatctatggggatttatgtttattatgcttgctgctgttatggctggtttccgctggtccatgactcagattcttctccagaaagaggaatatgcattaaagaatccttttaccttgatgagtcatgttgccccggtgatggcaatagtaacagcaattatttccatcgtgatggatccatggcatgacttcagagcaagtcacttttttgatagttctactcacataataagaagcagtgtgttgctgcttctaggtggggctttggcctttttcatggtataaaaggttcaaaaaagggcatcacagtgaagatgctgggacaaatatccaatcttacaatgggacttcaaagtacgttatccttgatgatgatactgaagatcaggatgattcaggctgacctgaatatggtaggtaagaatgcagactactatatgcactggcgtttccagagaagcaagatcttctggtgcctgcatagacttacttccacaggctaactgatatcatactattttttgagttgatcaaccgctgtggccactggccagccatgcacgagcgtgacgcttgcagccgtgtgacaagttgagaagactacacgctcgtacatggaacatacaaggtacagcctggtatcagtacagatgttttctcctttcgttcaagacaaagaacggtgcatatatctgaacgaggcattctgcagtatgtccacgaagaaaatgttgcatcaattacaattagaaacacaggtaacacacttaactttatggatgaggatagggttcggttttgtagtgcattctgattgttgaagggagattcagcatcggaacatagctttcttttctttagttctttctttttttgagatgaaaaataaatagtactaacaatcttatatgtaataatgttgtatttacgggaatgtgtaccgtttcacgtaggagcatttcgcgccttattgtaatacctcatcttgagaggtcagtgccaagtcggcacggtccatctcaaatttcctttgcgtattttg

SEQ ID NO: 206275 - DNA, 2075 bp, Zea Mays
cttcagaagtcgccgcgacaaggtgctgaattttgactttctaccagaaatcggagcgaaccaaactgccgggaaaacccctcgcctgcggcttcgcgtcggccgccgccgctgccgacactttaccgcgtgccttgcgcccccgcgccgccgatgcgatcagcgacgcacgccagatccgagcttctgtaggaccttcagccgtcgccgtcccatgggggactgcgtcgtcgaggacggccacgggcaccactactcggaggcggtggagggcgcggtttcgttgacggtagccgtggagctcgatgagcgggcggaagagtcgcgggaggaggaggagggtggcgggcagcggaagaaaatgggcgggatcccaagggagccgtcgttctcgcggtggtgcagggacccctctgccgcctccgcctccaataccgccgctgctgcggcgaccagtgacagcgacgcctcagaggagttcgagctgccgctcctgccatcctcctcgggcggcggcggctcaccgatggacattgaggtgggggcaacggcgagatctgatgatctgccgatctcgccgaggttgcttgcgaaggtcatcgggttgatagcgtgttggtacacactgagcacgtgcttgacgctgtacaacaaggagatgctgggaaagcacatgtggaagttcccggcgccattcctgatgaacacagtgcatttcacgatgcaggccgtggcgtcgagggccatcgtgtggttccagcaacgaggcctagagggagggccaagtaaaatgtcgtggaaggattactgtttacgagttgtcccaacagctttggctactgctcttgatataaatctgagcaacatttcacttgttttcattactgtgacatttgctacaatgtgcaaatctgcttctccaattttcattcttctgtttgctttcatgttcaggcttgagaaaccgagctttagccttcttggaatcatgctggttgtttcatttggagttctactaacagttgctaaagagacagaatttaatctatggggatttatgtttattatgcttgctgctgttatggctggtttccgctggtccatgactcagattcttctccagaaagaggaatatgcattaaagaatccttttaccttgatgagtcatgttgccccggtgatggcaatagtaacagcaattatttccatcgtgatggatccatggcatgacttcagagcaagtcacttttttgatagttctactcacataataagaagcagtgtgttgctgcttctaggtggggctttggcctttttcatggtataaaaggttcaaaaaagggcatcacagtgaagatgctgggacaaatatccaatcttacaatgggacttcaaagtacgttatccttgatgatgatactgaagatcaggatgattcaggctgacctgaatatgaatgcagactactatatgcactggcgtttccagagaagcaagatcttctggtgcctgcatagacttacttccacaggctaactgatatcatactattttttgagttgatcaaccgctgtggccactggccagccatgcacgagcgtgacgcttgcagccgtgtgacaagttgagaagactacacgctcgtacatggaacatacaaggtacagcctggtatcagtacagatgttttctcctttcgttcaagacaaagaacggtgcatatatctgaacgaggcattctgcagtatgtccacgaagaaaatgttgcatcaattacaattagaaacacaggtaacacacttaactttatggatgaggatagggttcggttttgtagtgcattctgattgttgaagggagattcagcatcggaacatagctttcttttctttagttctttctttttttgagatgaaaaataaatagtactaacaatcttatatgtaataatgttgtatttacgggaatgtgtaccgtttcacgtaggagcatttcgcgccttattgtaatacctcatcttgagaggtcagtgccaagtcggcacggtccatctcaaatttcctttgcgtattttg

SEQ ID NO: 206276 - DNA, 2095 bp, Zea Mays
accgaaccaaacaacacacgtcaaagcggaaaacctcagaaaaccacaataaatcatcctcgtccaccactgcccccgctctgctgcaactccactcggcccggccgccctttccacccaccttgatcctctgatccgttggtgcttgaccgatccatggacacccatatcggatccgtgaacggggcggcgtcgaaccagacggttggctgcccggcgtcggcgccggggtgcccgatggcgtccacgccggcgcagcccgcggcgaccctgtcggcgggggaggcgtcgctggggcgccacctcgcgcgtcgcctcgtgcaggtcggcgtcaacgatgtattcgcggttccgggggacttcaacctcacgctgctcgaccacctgatcgccgagcccggcctgcgcctcgtcggctgctgcaacgagctcaacgccgggtacgccgccgacgggtacgcgcgcgcgcgcggcgtcggggcctgcgccgtcacgttcacagtcggggggctcagcgtgctcaacgccatcgcgggcgcctacagcgagaacctgcccgtcatctgcatcgccggcgggcccaactccaacgactacgggaccaaccgcatcctccaccacaccatcggcctccccgacttctcgcaggagctccgctgcttccagaccgtcacctgccatcaggcggtggtgaacaatctggatgacgcgcacgagcagatcgacacggccattgccacggcactgagggagagcaagcccgtgtacctcagcatcagctgcaacctccctgggctgcctcatcctaccttcagccgcgacccagtgcccttcttcctcacccccaggagcaacaagatggggctagaggctgcagtggaggcaactgtcgaattcctgaacaaggcggtgaagccagtccttgtcgccggccccaaactgcgtgtggcaaaggcaggaaaggcatttgtcgatatggtagatgccagtggctatgcctatgccgtgatgccatcggccaagggtcttgtgccagagactcacccccacttcatcggcacctactggggcgccgtcagcaccgccttctgtgcggagattgttgagtccgcagatgcctacctctttgcaggccccattttcaatgactacagctctgttggctactcattcctcctcaagaaggaaaaggccatcatcgtccagcctgagcgtgtgatagtggggaatgggccggcattcggatgtgtgatgatgaaagagttcttgtctgaattggctaagagggttaataagaacaccactgcctatgagaattacaagaggatctttgtacctgagggccagccgctggaaagcgagccaaatgagccactgcgagtgaatgtgctcttcaagcacgtccagaagatgttgactggtgatagcgcggtgattgctgagactggtgactcctggttcaactgccagaagcttaagctgccagaaggctgtggtatggttcgattggatggtcagtgggtgcattgctcggatatgctcagggtgcgaaccacaagcgtgtgattgccttcattggtgatgggagcttccaggttacagcacaggatgtgtcaactatgctgcgatgtgagcagaacagcataatcttcctgatcaacaacggtgggtacacgattgaggtggaaatccatgacgggccatacaacgtcatcaagaactggaactacactggctttgtggacgccatccacaatggcttgggcaagtgctggacctccaaggtgaagagcgaggaggagctgacggctgccattgagacagcgctaggggagaagaaggactgcctgtgcttcatcgaggtgatcgcgcacaaggacgacaccagcaaagagctgctggaatggggctctagggtttctgccgccaactcccggccaccaaatcctcagtagaagtcccgcaggctccaagcctcggagtgccagtagtgatagtaagctgtagcacggtgggggctcaaccgaataacgtgaacgcattgccctttctgttacgtgttttattttattgtgtttctgtggtcgtaaaaaaa

SEQ ID NO: 206277 - DNA, 2997 bp, Zea Mays
gactgattggttctcggccgcgaacggcccacgcgaagtgcataagcacagggctggcccggcccgcgctagacctcaagtcctcaaggcaggcgcatagttctgtttcaacctcacagcgtcgtgacgtcgtcctctgcttcgcaagcgcccgagccgcgcgccgccgaacccgccgcctcctccagcctccgggcacatcggagcacgccagccaatcgcaccccgacacggcggcaccggaggaacccctccttcttggtcgtagcctccgtggcctccctcccctcaccccttccggtgttggattgagggtggagcggagatccgccacggcttgattgatccctggctcgtcctcctacgcaggatcgatacaccatataatttgggattctaaggtcccggtgcagcttcttctcgcagaagtttacgccctatgcccctcgctaagcccacccctgtgattccgccgtgacgcgtcatccacgggagaaacgccatgatgtcgaggtttgcccacttggggaagagcagaaaacttgctgaaacccttttggttgcctcaaagcccaatactgctggtggccaaaacattgcttcaagctttgcattcggcttgggttattccagcagggcctttttgcacgggaaggttcataatggtccaaacacctcctacatgctgggaagagcaaatgatagcttacattggagcactggtgtgaggaaattctcaattctttcatcttgtagccagaatgcatttcagagtcagcttgcttggaagcgacttgtagcactgggttctcgtgcaccaaaagcatctccaatttttagtaaggttgcttgtgccattggcttggctgtgagtaggtctaatatagccccttaccttgtcgcttttattgcgggagaggtaatgctagctcagaagacatctgcagatggagaatactacccaatacgtgagagagctcaggatggccgtatttacgttacctctctaatatattcggcagtagaattggttattataatcttcagatcaatatatttggcattgctgttcactccaagtatactgatggccccatttgcagagactcttggcagtaagtataggaaaacatggcttcgacttgtccatcgtactttggagcttgcaggtcctgcgtttatcaaatggggccaatgggctgcaacacgccctgatctgtttccaagtgacctttgtactgaattgtcaaagctgcacacaaaagcaccagctcacagctttacctatactaagaaaactgttgagaaagcttttggtcgaaagctatcagacatttttgaaaattttgaagaggaccctgttgcatctggaagtgttgctcaagtgcatcgggctgttctacgattccggtatcctaatcggcagacaaagcgtgtaactgttgcagtaaaagtaaggcatcctggtgtaggggactcaataagaagagatttcaatatcatcaatgccgtagcaaaaatatctagatatatccccacgctgaattggttgcgcctagatgagagtgtacaacagtttgctgtcttcatgatgtctcaagttgaccttgcaagggaagctgctcatctgagccggtttatctacaacttccgaaggtggaaggatgtatctttcccaagacctctctatccacttgttcatcctgctgttttagttgagacttacgagcatggggagagtgtttcacactatgttgatgaccttgaaggacatgatcgaattaaaagtgctctggcccatattggtactcacgcgctcttgaaaatgctactggttgataatttcgtccatgcagatatgcacccaggaaatattttagttcgtgttgcacaaccaaagaactcaaataacacccttaaaaagtcaaggccacatgtagtcttcctggatgtaggaatgactgctgaactttcaagtaatgaccgtgtgaatttacttgagttcttcaaggctgttgctcgccgagatggtcgtacagctgcagaaagtactctaaagttgtcaaaacaacagaattgtccaaatccaaaagcttttattgaggaagttgaacgatcattctctttttggggcactgctgaaggtgatgctatccacccagctgagtgtatgcaccaactgcttgagcaagttcgatgtcataaagtgaatatcgatggcaatgtttgtactgtcatggtgactacattagttcttgagggctggcaacgtaagttggatccagattataatgttatgaagactctgcaaactttactttttaaggaagattgggcgaagtctcttcaatacactatccaagggctcatggcgccttagggtcgtccgcaatcctttctaaagttttgatctggtttgtgttcgactggaggatcctcttctctcaccatcacgtctggcttcttttctacgttatttcacgtttcgtttctctgtacctgtcctggcgttgtgctgctaaagcagccttgatgataaagtaataactgcagtaaaaattttcagaagctaccagagtactatgctgctcagctctgggctgtcttcttatatgttcttgatgaagggccaaagaattaggtccttttcccccccctcctaccaacacttttgacaatagctcttagatgatgtagcaaaaggcgttctgttctgatgatcttttttgtaactggagagattgtatccgtggactggagagttgcttatgtacagacagagatactgttaatctcgaaggaatccacttgtcaactgacaattattcccaggaaaaggctcccagttttttcttgttttacatgtattagcaatgctgaatgtctgaaatttgaatgattttgctggtagggaggtatattgaacaacattgtggttacccttatatgtttgtagcgttttataggtcataaattaacttggaacatgaagcgtgc

SEQ ID NO: 206278 - DNA, 1495 bp, Zea Mays
aacgaggatgtactaatgttgtggtaaataatgatggacgatagtcgataacgtgaggtgtggttggtactggtagctagcgtgatgtatggtctgtattcagcctaactaatttgccagcgagtgatgcggtgacgtgctgctgctgttgtagtaggtggtggagcaagcccagtccccaatcccaccctgccacccaaccttgcttcttctccgatagctatttctctgctttctctccaatcttcccgggtttccctgattaaagatggctgaatcctttgttctcagtaccggctcgaggatcccatcggttgggcttggcgtatggcaaatacaacctgacgctgccaacgacgccatctacgctgctgtcaaggctgggtatcggcatattgactgtgcagcagcatacaacaatgaggaggaggtgggcctggctttgaagaaattatttgaagatggtgtggttaagcgtgatgatttgtttatcacctctaagctatgggctgctaatcatgcacctgaagatgtggaagagggaatcgacaccacacttcaagatttgcagcttgactacttggacttgtacctcatccatggtccaatccgcatcaaaaaaggaactagcacgatgacccctgaaaactttctccctacagatatccctgctacatgggcagcgatggagaagttatacgactctggcaaagctcgtgcaatcggcgtgagtaacttctcttgtaagaagctgcatgatttgcttgccgttgcacgagtgcctccagcagtcaaccaggttgagtgtcatccggtttggcagcaagacaagctccggaagctatgccaatccaatggtgttcatctttctgcattctcgcctttaggctcacctggatctccttggatcaatgggccaagtgtcctcaagaaccccattgtggtctctgttgcagacaagttgcagaaaacgcctgcccaggtcgctctacgctggggaatccaaatgggccatagtgtactcccgaaaagcgccaatgagtccaggattaaggagaacattgacatatttggctggtctattcctgaagatttgatggccaagttctctgaaatcaaacaggctgctgacagctgagtttgtagttcaccctcaggccggctacaatacattggaggacttttgggatggtgaaatataaaagcatacaaatttgttcagaataaaagagccaggcgaggaaacaaccacaaaaaaggggagatcgaatgcataggccccaatacgatgaatttgggggtttacgtgattgctgaacacaagtattgtgtgactaatctgtgttttgatgtggtaaatgtaattgggttagtcacaataagagataagtgtctttgccacaagacttttggttcattggttgaagcatgatgtaaaccgtaaaggatattcatgaaaactaaggacgctatagagcaaatgtaggttgtgtgc

SEQ ID NO: 206279 - DNA, 1404 bp, Zea Mays
aacgaggatgtactaatgttgtggtaaataatgatggacgatagtcgataacgtgaggtgtggttggtactggtagctagcgtgatgtatggtctgtattcagcctaactaatttgccagcgagtgatgcggtgacgtgctgctgctgttgtagtaggtggtggagcaagcccagtccccaatcccaccctgccacccaaccttgcttcttctccgatagctatttctctgctttctctccaatcttcccgggtttccctgattaaagatggctgaatcctttgttctcagtaccggctcgaggatcccatcggttgggcttggcgtatggcaaatacaacctgacgctgccaacgacgccatctacgctgctgtcaaggctgggtatcggcatattgactgtgcagcagcatacaacaatgaggaggaggtgggcctggctttgaagaaattatttgaagatggtgtggttaagcgtgatgatttgtttatcacctctaagctatgggctgctaatcatgcacctgaagatgtggaagagggaatcgacaccacacttcaagatttgcagcttgactacttggacttgtacctcatccatggtccaatccgcatcaaaaaaggaactagcacgatgacccctgaaaactttctccctacagatatccctgctacatgggcagcgatggagaagttatacgactctggcaaagctcgtgcaatcggccaagacaagctccggaagctatgccaatccaatggtgttcatctttctgcattctcgcctttaggctcacctggatctccttggatcaatgggccaagtgtcctcaagaaccccattgtggtctctgttgcagacaagttgcagaaaacgcctgcccaggtcgctctacgctggggaatccaaatgggccatagtgtactcccgaaaagcgccaatgagtccaggattaaggagaacattgacatatttggctggtctattcctgaagatttgatggccaagttctctgaaatcaaacaggtcaggctgctgacagctgagtttgtagttcaccctcaggccggctacaatacattggaggacttttgggatggtgaaatataaaagcatacaaatttgttcagaataaaagagccaggcgaggaaacaaccacaaaaaaggggagatcgaatgcataggccccaatacgatgaatttgggggtttacgtgattgctgaacacaagtattgtgtgactaatctgtgttttgatgtggtaaatgtaattgggttagtcacaataagagataagtgtctttgccacaagacttttggttcattggttgaagcatgatgtaaaccgtaaaggatattcatgaaaactaaggacgctatagagcaaatgtaggttgtgtgc

SEQ ID NO: 206280 - DNA, 1974 bp, Zea Mays
aaaagcggcgctgccagtgtgtatattacacggcgcggaggacggggacgcggaggactcgcccggcccatcccgcaccccctacctccgaggctgcgatccgctcttgtaggctccctcgccaatccgctcctcctccctccctccaactgttgtgcgtgcagcggcgtcggagaagagatggcgtcggaggccaaggacgtgggcatcctcgccatggacatctacttcccgcccagctgcgtgctccagagttggaaacacatgatggtgtgagcaaagggaagtacaccattgggcttgggcaggaaaatatggcattttgcactgaagttgaggatgttatttcgatgagcttgacagttgtgaagtccctcctgaaaaattataacattgacccaaagtgcattggacgtttggaagttggcagtgaaacagtaatagacaagagcaagtctataaagacatggctgatgcagatatttgaggaatctggcaatactgatattgaaggagtggactcctcaaatgcgtgctatggtggaacagctgcattgtttaattgtgttaactgggttgaaagcaactcatgggatgggcgttatggacttgttgtttgcacagacagtgcggtttatgctgaaggtccggctcgtcctactggtggtgcagctgctattgcaatgctgattggaccaaatgctcctatttcttttgaaagcaaatataggggatctcatatggcccatgtatacgacttttacaagcctgatctcgcgagtgaatatccggtggttgatgggaagctatcacagacatgctacctcatggcattggactcctgctacaatgtattttgtaaaaagtacgaaaagcatgagggaaagcagttttcaatttttgatgcagattatgttgtgttccattctccatacaacaagcttgtacagaaaagctttgctcgtttgtactacaatgatttcttgagaaactgcagcacggttgatgaagagtcgagggaaaagttggcaccgtatgcaggcttgtcatctgaagaaagctaccagagtcgcgaccttgaaaaggcatctcagcaagttgcaaagaacctgtacgagtccaaggttcagccaacaacattgatcccaaagcaagttgggaatatgtatacagcatcactctatgctgctcttgcatcggttatacataatagacatgaaactctggcaggccagaggattgttatgttttcgtatggcagtgggttgacatcaacaatgttctctttcaagattaatgaaggccatcaccctttcagcttgctaaacattgcaaacataatggatgtttccaagaaattgaaggcaagacatgtggtcccgccaaagaaatttatcgaggtactgaaactgatggagcaccggtatggggcgaaagatttcgtgaccagtcaagacacaagtttgctatctgtaggcacatattatctcacgcatgttgactccaagtaccgaaggttctatgacgtgaaaggtgacggtgtcaccactactgcaatgtccaacggccactgatctgtcttctgcccggagctgcaacaagtcaaataacagaggcaggtgttcctaagcattctgattcttcttagattatctattaggaagggacgctggagcttagattaatctctgccaagttgtaaggttgtaaagttagttagagctgcgtcattgctgtaatgcttgcttggtaaaagttctggcgctcttcagttcttcagtgcttgcaaaattcaaatcaagctcactactagttgtaagaattctgaataatctgcagaatcactggttacatccaagttacgctgttgaatgcatgatttcatgtttaacacgattaatgcatctggattcagctgtgttgttggagtactcgtgtcgtgtcttgtacctttttaaaaagaagtttcttaca

SEQ ID NO: 206281 - DNA, 1974 bp, Zea Mays
aaaagcggcgctgccagtgtgtatattacacggcgcggaggacggggacgcggaggactcgcccggcccatcccgcaccccctacctccgaggctgcgatccgctcttgtaggctccctcgccaatccgctcctcctccctccctccaactgttgtgcgtgcagcggcgtcggagaagagatggcgtcggaggccaaggacgtgggcatcctcgccatggacatctacttcccgcccagctgcgtgctccaggaagagttggaaacacatgatggtgtgagcaaagggaagtacaccattgggcttgggcaggaaaatatggcattttgcactgaagttgaggatgttatttcgatgagcttgacagttgtgaagtccctcctgaaaaattataacattgacccaaagtgcattggacgtttggaagttggcagtgaaacagtaatagacaagagcaagtctataaagacatggctgatgcagatatttgaggaatctggcaatactgatattgaaggagtggactcctcaaatgcgtgctatggtggaacagctgcattgtttaattgtgttaactgggttgaaagcaactcatgggatgggcgttatggacttgttgtttgcacagacagtgcggtttatgctgaaggtccggctcgtcctactggtggtgcagctgctattgcaatgctgattggaccaaatgctcctatttcttttgaaagcaaatataggggatctcatatggcccatgtatacgacttttacaagcctgatctcgcgagtgaatatccggtggttgatgggaagctatcacagacatgctacctcatggcattggactcctgctacaatgtattttgtaaaaagtacgaaaagcatgagggaaagcagttttcaatttttgatgcagattatgttgtgttccattctccatacaacaagcttgtacagaaaagctttgctcgtttgtactacaatgatttcttgagaaactgcagcacggttgatgaagagtcgagggaaaagttggcaccgtatgcaggcttgtcatctgaagaaagctaccagagtcgcgaccttgaaaaggcatctcagcaagttgcaaagaacctgtacgagtccaaggttcagccaacaacattgatcccaaagcaagttgggaatatgtatacagcatcactctatgctgctcttgcatcggttatacataatagacatgaaactctggccagaggattgttatgttttcgtatggcagtgggttgacatcaacaatgttctctttcaagattaatgaaggccatcaccctttcagcttgctaaacattgcaaacataatggatgtttccaagaaattgaaggcaagacatgtggtcccgccaaagaaatttatcgaggtactgaaactgatggagcaccggtatggggcgaaagatttcgtgaccagtcaagacacaagtttgctatctgtaggcacatattatctcacgcatgttgactccaagtaccgaaggttctatgacgtgaaaggtgacggtgtcaccactactgcaatgtccaacggccactgatctgtcttctgcccggagctgcaacaagtcaaataacagaggcaggtgttcctaagcattctgattcttcttagattatctattaggaagggacgctggagcttagattaatctctgccaagttgtaaggttgtaaagttagttagagctgcgtcattgctgtaatgcttgcttggtaaaagttctggcgctcttcagttcttcagtgcttgcaaaattcaaatcaagctcactactagttgtaagaattctgaataatctgcagaatcactggttacatccaagttacgctgttgaatgcatgatttcatgtttaacacgattaatgcatctggattcagctgtgttgttggagtactcgtgtcgtgtcttgtacctttttaaaaagaagtttcttaca

SEQ ID NO: 206282 - DNA, 1763 bp, Zea Mays
cgggatacgggcacatatggccatggagaatcatcacgaagagttggaaacacatgatggtgtgagcaaagggaagtacaccattgggcttgggcaggaaaatatggcattttgcactgaagttgaggatgttatttcgatgagcttgacagttgtgaagtccctcctgaaaaattataacattgacccaaagtgcattggacgtttggaagttggcagtgaaacagtaatagacaagagcaagtctataaagacatggctgatgcagatatttgaggaatctggcaatactgatattgaaggagtggactcctcaaatgcgtgctatggtggaacagctgcattgtttaattgtgttaactgggttgaaagcaactcatgggatgggcgttatggacttgttgtttgcacagacagtgcggtttatgctgaaggtccggctcgtcctactggtggtgcagctgctattgcaatgctgattggaccaaatgctcctatttcttttgaaagcaaatataggggatctcatatggcccatgtatacgacttttacaagcctgatctcgcgagtgaatatccggtggttgatgggaagctatcacagacatgctacctcatggcattggactcctgctacaatgtattttgtaaaaagtacgaaaagcatgagggaaagcagttttcaatttttgatgcagattatgttgtgttccattctccatacaacaagcttgtacagaaaagctttgctcgtttgtactacaatgatttcttgagaaactgcagcacggttgatgaagagtcgagggaaaagttggcaccgtatgcaggcttgtcatctgaagaaagctaccagagtcgcgaccttgaaaaggcatctcagcaagttgcaaagaacctgtacgagtccaaggttcagccaacaacattgatcccaaagcaagttgggaatatgtatacagcatcactctatgctgctcttgcatcggttatacataatagacatgaaactctggcaggccagaggattgttatgttttcgtatggcagtgggttgacatcaacaatgttctctttcaagattaatgaaggccatcaccctttcagcttgctaaacattgcaaacataatggatgtttccaagaaattgaaggcaagacatgtggtcccgccaaagaaatttatcgaggtactgaaactgatggagcaccggtatggggcgaaagatttcgtgaccagtcaagacacaagtttgctatctgtaggcacatattatctcacgcatgttgactccaagtaccgaaggttctatgacgtgaaaggtgacggtgtcaccactactgcaatgtccaacggccactgatctgtcttctgcccggagctgcaacaagtcaaataacagaggcaggtgttcctaagcattctgattcttcttagattatctattaggaagggacgctggagcttagattaatctctgccaagttgtaaggttgtaaagttagttagagctgcgtcattgctgtaatgcttgcttggtaaaagttctggcgctcttcagttcttcagtgcttgcaaaattcaaatcaagctcactactagttgtaagaattctgaataatctgcagaatcactggttacatccaagttacgctgttgaatgcatgatttcatgtttaacacgattaatgcatctggattcagctgtgttgttggagtactcgtgtcgtgtcttgtacctttttaaaaagaagtttcttaca

SEQ ID NO: 206283 - DNA, 1986 bp, Zea Mays
gcccaaaattacggcccctctctttctctctctgactacctccgtatgaggcagcttgtgctcgttcgagactgagacaccccaacacgcctccctcagcgcagatctcgccgccgccgagatgctccgccgcggcgtgcttcttctcgcggccatcctcatcgccgtcgcacactcgcccctcgcgtacgcctcggaggccgagcacaagtataaaacagaagaacctgttaagctatgggtaaacaaggttgggccttacaataaccctcaagaaacttacaactattacagtctcccgttttgtcaaccatctgaaaaccctgcacataaatggggtggtctcggagaggtccttggtggaaatgagctgattgatagtcagatcgatataaagttcataaaaaatgtggacaagggggccatttgcacaattgaacttgatgttcaaaaggttcagcaatttgctaatgccattgaaaactcatattggtttgagcttttcatagatgatctgccattgtggggttttgttggggagactgacaaaaacaatgagaaaaagcactacctttacactcacaagaacattgttgttaaatacaatggtaacaggataattcatgtgaatctaacacaagagtcacctaagcttcttgaagctggcaaaaagttggatatgacttattcagtgaagtgggtgcaaacaaatgtggcatttgcacggcgctttgaggtttacttagactacccgttctttgaacaccagattcattggttctccatcttcaattcattcatgatggttattttcttgactggtttagtgtcaatgatattgatgaggacactaagaaatgattatgcaaaatatgctcgtgaagatgatgatctggaatcacttgagcgagatgttaatgaagaatccgggtggaagcttgtccatggtgatgtgttccggcctcctcgtggccaggtgtttctttctgccctagttggtattggcactcagctggcggctcttatcctgcttgtgattgtgttggccattgttgtcatgttatatgttgggcgaggagctatcatcacaaccttcattgtgtgctacgctcttacatctttcatctctggatatgttagtggtggtctctattcaaggaatggtggaaaaaactggataaaggctatgatccttacagcatcactttttccattcttgtgtttctcgattggattgttgttaaacactattgctatcttctaccgatcattagcagctataccatttggcacaatggttgtcatgtttattctttgggctttcatctccttcccgttggttctattggggactgtagttggtagaaattggagtggtgctcccaacaacccgtgtcgtgtgaaaacgatcccgcgcccaattcctgaaaagaagtggtaccttacaccttctgttatttcactgatgggtggacttctccccttcggcagcatcttcattgagatgtacttcgtattcacttccttctggaactacaaggtgtactacgtctatggtttcatgttgctggtgtttgtcatcctcataatagtcaccatatgtgtcactattgtgggtacttatttcttgttgaatgctgagaactatcattggcaatggacatcattcttctctgctgcttctaccgccttgtatgtgtatctatactctatatactattatcatgtgaagacaaagatgtcaggatttttccagacaagcttctactttggttacaccttgatgttctgtcttggattgggaatactttgcggtgctgttggatatttgggctccaccctatttgtgaggaggatctacagaaatatcaaatgcgactaaacttggtctaggctgctagcatgtcttgtcacaatatggtgcagagtaataccttgagcttctgattgacttcggaaattacacaggagaagagcccgttgctg

SEQ ID NO: 206284 - DNA, 2704 bp, Zea Mays
gcgcagcaccgactgccaccaattcctcgcctcgcctcgcatctgcaagatattagaatcccgcctgcgtcctccgcctgaacgcagagccttctattgcggcgccggcgccggcgccacgacccttctccgccagtccccactagagggcttagaactgcgtggaccacccggcgcctcttggcctctctcgctccgtccttgcgggcgcgacgacggcctccgacagctccgcaaagtcatccaagcctggaacaggatgcgcgtcagctactggttgctgtgtcgaagataacaaattttcaaagctgtcgacctccagggatccaaaaatctccctcccaggtggtgctgcctgctgcgtgcaggggagtgagcgtggctgcgtgggcaccctcggggtcggatctgaagaggaagaaggctgtcgcgctgacctcgactcgatgacggccagaagataaccgacgacatcggaccgcatccgcgcctcctcgagaagggcgccaacgtcatccttgctagccacctggtgagtcacctccccaccatcatgtcgaaataaatctttgactcgtgggttctgtgtttttttaattttagcctacttcaacgaactaactggtggtggttgttgttgttgaaacgacgaatacagaattacagatgcgattgtgacttgcatcattgcatgccgccgccatggtctcgccctcccatcccagcgtgggcggctgccaactccctcttccgccgccaccgccgcctgcagcccctcctcttcccggccgtctctcactgcgaccacctccgcgttctgtcccactgcctcgtgtccggcctcgcccgcaaccccttcgttgcctcccgccttctcctcgcatcctccagcctctccctccccttctccctcaccctcctcgcctatctcccggcctcctcgctctcatcgttctccttcaactcgctcatccgcgcctccccaccgcgcctcgcgctccgcctgtttgacgaaatgcgcagccgaggagtccccacggacccctacaccttaccgctcctgatcagcgcctgttcctgcagcggttttacactgtgccagtctctgcacgggcagggcttccgtcttggctacaattgccacgtattcacccagacggcgctgttgaacgcgtacctcaagtgcgggtcggtggccaccgcttgcagggtgttcgaggaaatgccggtgaaggatgtggttgcgtggaccagcatggtgtctggttatgtagactccaggatgtacttaaaagccgtcgaggtatttaacgagatgagaggtgctgatgatcttgtgtggcctaatgaggccacagtggtgtcacttgccactgcctgtgctggtctgggctcgctggagcatgcaaagggtctgcattcgtatgtggagaaggctgggttggaggacgagttaattgtcaggaatgcattggttgacatgtatgggaagtgtggctgcattgagtcggcacatagattgttttgtttgatgcgtgagaaggacttgcattcatggacaacaatgatttcagggctgtcttctcatggacgcggcgaagaagcggttggtttgttcttcagcatgtgcgaggagggagtattaccagattcgaccacttttattgtggttctgtctgcctgtagccatgctggactagtagatgaggggatacatatcttcaattccatggagagtgagcacaatgtcccccgggacaccaagcactatggttgcatggtggatcttttcagcagagcagggcttgttcgccgtgcttatgaattcattagcatgatgcctttcgaaccaaacttggagattcttggggccctgctgagtgcatgcagtatcaataatgaactggagattggggagctcgtgctcaataagattgacatggtctgctcctacaaaggaggtgctggtgtgcttctgtcaaatatatatgctaaccaaaatctgtggcatgaagtggataccattagaaggaagataaggactgaagcaattgtcaggaagccacctggtcatagtttgattgcagcagaagtttcttccatgactttctgattggtaattgcatagatttgcttttaatgaagctgtggtcctgattttgcgaaggaggcttggggtgtttgctttcaacaatccctgtaggccagtcgaaatggaaggtgttatgaggagggtgatcacttcggacaacatctgctttgtaaatgctgcgggcgattgccaagaagctggctgagcttacaacgctaacggatgtcacaaccatcgtcggctaggctggctgacaagatgagccacatttggaccggtggtggcgcgagcgagcttggagctcttggaaggcaaggcgctaccaggtgtccttgtccttttgtttcggaccatggtgtaacactgcaaagcttatggtttgtattggacttgggataggcttgccgtcgagttttggtagatgagtggtgaataagcttgatctataccactgttaccccctcacctaaaagaactatacaactgctgtcgttacctctcgttggctaccatggtgcactgccatcacttggatgacaaaatcgtcgccatgcactgattcaatgcaatttattccatgcccattaatcccatgccctcgtttaaattgtt

SEQ ID NO: 206285 - DNA, 1220 bp, Zea Mays
gcgagtggcggggagaggaggcggcggcggcaagggcgcgacgggggaggatgatgtcgctgcagcctgcaggagttgtgttctctggccttgagagaaaggagtcgccaattttagtgggctcctgttgtgtttttcggtccattcctcccaaggcccagcatctgccagtcgcatgccgtgacgcacaaaacccacggcggcacggctccattccgcgtccgcactctctatataaagtgtccctctcttccctccaagccctagacgcaccccttcctcgtttcgccgcctccgccgacaccgactgcctacctcagctgccgtcgccatgggcagaaggcctgctagatgctatcgccagatcaagaacaagccgtaccctaagtccaggtactgccgtggtgtccctgaccccaagatcaggatctacgatgtcgggatgaagaggaagggtgttgatgagttcccctactgtgtgcaccttgtctcttgggagaaggagaatgtctccagtgaggcgctcgaggctgcccgcattgcctgcaacaagtacatgaccaagtctgcaggaaaggatgccttccaccttagggtccgggttcacccgttccatgtcctccgtatcaacaagatgctttcctgtgccggggctgataggctccagactggaatgaggggtgcctttggcaagcctcagggcacctgtgctagggtggacattggtcaggtcctcctttccgtgcgatgcaaggacaacaatgctgcccatgccagcgaagctctgcgtcgcgctaagttcaagttccctggccgccaaaagatcattgagagcagaaagtggggcttcaccaagttcagccgcgctgactacctgaagtacaagagcgagggcagaattgttcctgatggtgtcaacgcaaagctgctcggcaaccacggcagacttgagaagcgtgctcctgggaaggctttcctcgatgccgttgcttaacagcgtgaaactggacttcagagagaatattgggacgagagtgcgcggcggagttgtacattttttttgtttttcttctaaaataggatttaggattaggtgttttggatttgttggagttgctctcaggtttaattatttttaatccctaaaataccaaacggatgactaaaataggtattctaaataggatttctagtgactagggtttaggagggtaactaat

SEQ ID NO: 206286 - DNA, 1407 bp, Zea Mays
gcgagtggcggggagaggaggcggcggcggcaagggcgcgacgggggaggatgatgtcgctgcagcctgcaggagttgtgttctctggccttgagagaaaggagtcgccaattttagtgggctcctgttgtgtttttcggtccattcctcccaaggcccagcatctgccagtcgcatgccgtgacgcacaaaacccacggcggcacggctccattccgcgtccgcactctctatataaagtgtccctctcttccctccaagccctagacgcaccccttcctcgtttcgccgcctccgccgacaccgactgcctacctcagctgccgtcgccatgggcagaaggcctgctagatgctatcgccagatcaagaacaagccgtaccctaagtccaggtactgccgtggtgtccctgaccccaagatcaggatctacgatgtcgggatgaagaggaagggtgttgatgagttcccctactgtgtgcaccttgtctcttgggagaaggagaatgtctccagtgaggcgctcgaggctgcccgcattgcctgcaacaagtacatgaccaagtctgcaggaaaggatgccttccaccttagggtccgggttcacccgttccatgtcctccgtatcaacaagatgctttcctgtgccggggctgataggctccagactggaatgaggggtgcctttggcaagcctcagggcacctgtgctagggtggacattggtcaggtcctcctttccgtgcgatgcaaggacaacaatgctgcccatgccagcgaagctctgcgtcgcgctaagttcaagttccctggccgccaaaagatcattgagagcagaaagtggggcttcaccaagttcagccgcgctgactacctgaagtacaagagcgagggcagaattgttcctgatggtgtcaacgcaaagctgctcggcaaccacggcagacttgagaagcgtgctcctgggaaggctttcctcgatgccgttgcttaagtgcggatgcgaatcctgacgttttgctttagcgtatcttactttgcttcgtggaacatgaatttcaagtgttttgagggtattacagtgccttatgtgaacttgcctatcttgtgctgaacatcggaataatacgtatttgtgtgccatcgcctttccggagctcaccaaacagtcgttcctgcagcagcgtgaaactggacttcagagagaatattgggacgagagtgcgcggcggagttgtacattttttttgtttttcttctaaaataggatttaggattaggtgttttggatttgttggagttgctctcaggtttaattatttttaatccctaaaataccaaacggatgactaaaataggtattctaaataggatttctagtgactagggtttaggagggtaactaat

SEQ ID NO: 206287 - DNA, 589 bp, Zea Mays
attttcttccccgaattccaaccaaacggcatcattcgatcgatcgtccgcaccgtgtccaggcaccagctggagctgctcagggaagccgtgcacgacggcatggagaagaacgcgaggccggttcaggacgtcaacgacagggacatcagcatcttccgcccaaagccacacaagcactactagtactagctatggtataggttgcacagtccagcagcgcgcgtagttggtatcgatcagtagtgatgcacgagctagctgacgcggttcagtgttggggagaggtgtctgctgtatatggttacggttttgttttataattctttccatctatgttataggacgaaataaacagacgaggatcaccttcaggtccactcttcagaagaagaacaaaaaaaaaaggaaaagagaacatgtcgatgcgcatgtggctcgatcgatttgattattgttgttgagtagttggcactcaaacatgacctatctaactggcacggtcttttgttaaaaaaaatactatgatttgattgtcgtttagcaggacgagtcacatgtgtacagtataagcctatatatattcttc

SEQ ID NO: 206288 - DNA, 1894 bp, Zea Mays
cctacttgtgtactcatgtatgattttattaataagcctcactgtgtgcagtgagcaagagcccaaacatgttttcttaggcatttgcagttgagtaacccatgttaattgcctcaactactttatagtagcccatatgtatcataatatgcactgtatgctactttccataccgttcactggacaaggctaagagaaatgaaataaaatgctggttagatatgtgtgtttcttgtatttgatgctaaattcttattttgtaaatagaaactgtattgtattttgtgctaggatcgtcaacaaggttgtatgagacatgatcacttgaaaactttgatctctattactccatccatccacaaaagggtgcaattttcacttttcgaggagccaaacagtttgaagttggaccataattataccaagaagtattaacctttatggtaagataagtagaatggcagacccagtgccggaggctcccacatgagtggtgtgtgggaaagggataaaccgaggcaagtctttccctacaaatacgaagagctttgagcccgtgacctgatgactctagtgagacaactctcaccgctgcaccaagcctgtccataaaattaattatgagatatattttcgtagtaaatctagttagggacataaatgttaatattattcactataaacttggtcaaactagtttgacttgcacaaatcccacagttgcatccttttgtcccattagctgcatccttttgtggatagagggagtacaactttgcaagcattccatctacgaattagaataacgttaacagtcagttgttttggtgtgtgattggtgattataaaagtaacaggacatgctgtcgtgcactcaaaatttggtttgttaacctcgtgattagggatgtaagctctgacaccatatagttgtgggccagttagctacttagctagctaacttctatcccgcatcccttcctttgatatttggatttgttcaatcgagtattgggttgatccaatgtcctaggaatgcaaaactcccatccctactcacgatctgaattttgatgatgtctgctatatatctatttaaatttattcacgaaaaatatgttgaaagtgctggcgtattgtttatggcctgaattttgtagagaatagttgttacaatgtaatatactggatacgtttgcagctatgaagctttcattctagttgaagacttgcatcgcggtaaaagatctgattcacaccagcatatgtttgtcacagcttcttttaagttttgtttcttcaaggatcaagattctcatgcatttctcaaaaagaaagaagaagaggaaagaaaaactggtatccaaccagtcaagaaaattgggaaagctgaatctccaaatctccaaagtttcgtgaagcagcagttctcgggtactcctccagatcagcagaaaggtatactgaaccaacgggaactggtgccactttcaagccagggacttggcagccaccaacatgaatgccaacatgaactttagaagatgaaggacggtgtaccggagcattttcctttcacctatctgtgtaacattttaacatttgctctgaaagaatcactagcctatgttccttctttcagatggttacccatctgatggagttatagccttaagttccttcttttagatgcttacccatctgatggagttataggtgatcgggggctcccacggtatgctgttttttttgtggctaaattgtcctctgtaatctttactgtgatagcaactgtaataaactggaccagtgttttgcatcagggctctcttagagacactgttcaacatattctagtatgtctgatgctgcgaaatattgttttgtacggtag

SEQ ID NO: 206289 - DNA, 2413 bp, Zea Mays
agacacccatactgattcgctggcggcaggccgacggctacggagacggaagtggcgaccggttccggcgaggcgcaggcgacagataggggacagggcgaccatttctagcgaggcaggagcggggaagatccggaagctgcgatgtcgaagcggctgctgtcgcggctgctcggcatgttccaatcgcggacgcaggtgggcgtcgacaaggccggcaaccgctacttcacccgcgttgaggaggtcgacggcacaatgaaggagaggcgctgggtggagttcaagggcgcagaccaggactcgaccaccgttccagtcatgtcgtgcttgtagtcgagtggatttgctggctgaatggccaaaggaagaaagctccaacaccagaggaattggctgagctggaggcaagacgtgaacgtgtcaagcaaaacattcagcgtatgtatgcggtgtttcctacttgtgtactcatgtatgattttattaataagcctcactgtgtgcagtgagcaagagcccaaacatgttttcttaggcatttgcagttgagtaacccatgttaattgcctcaactactttatagtagcccatatgtatcataatatgcactgtatgctactttccataccgttcactggacaaggctaagagaaatgaaataaaatgctggttagatatgtgtgtttcttgtatttgatgctaaattcttattttgtaaatagaaactgtattgtattttgtgctaggatcgtcaacaaggttgtatgagacatgatcacttgaaaactttgatctctattactccatccatccacaaaagggtgcaattttcacttttcgaggagccaaacagtttgaagttggaccataattataccaagaagtattaacctttatggtaagataagtagaatggcagacccagtgccggaggctcccacatgagtggtgtgtgggaaagggataaaccgaggcaagtctttccctacaaatacgaagagctttgagcccgtgacctgatgactctagtgagacaactctcaccgctgcaccaagcctgtccataaaattaattatgagatatattttcgtagtaaatctagttagggacataaatgttaatattattcactataaacttggtcaaactagtttgacttgcacaaatcccacagttgcatccttttgtcccattagctgcatccttttgtggatagagggagtacaactttgcaagcattccatctacgaattagaataacgttaacagtcagttgttttggtgtgtgattggtgattataaaagtaacaggacatgctgtcgtgcactcaaaatttggtttgttaacctcgtgattagggatgtaagctctgacaccatatagttgtgggccagttagctacttagctagctaacttctatcccgcatcccttcctttgatatttggatttgttcaatcgagtattgggttgatccaatgtcctaggaatgcaaaactcccatccctactcacgatctgaattttgatgatgtctgctatatatctatttaaatttattcacgaaaaatatgttgaaagtgctggcgtattgtttatggcctgaattttgtagagaatagttgttacaatgtaatatactggatacgtttgcagctatgaagctttcattctagttgaagacttgcatcgcggtaaaagatctgattcacaccagcatatgtttgtcacagcttcttttaagttttgtttcttcaaggatcaagattctcatgcatttctcaaaaagaaagaagaagaggaaagaaaaactggtatccaaccagtcaagaaaattgggaaagctgaatctccaaatctccaaagtttcgtgaagcagcagttctcgggtactcctccagatcagcagaaaggacctgaggataggcctaaggacacaactcatacagaagatgctacgacagacaatgagaggtatactgaaccaacgggaactggtgccactttcaagccagggacttggcagccaccaacatgaatgccaacatgaactttagaagatgaaggacggtgtaccggagcattttcctttcacctatctgtgtaacattttaacatttgctctgaaagaatcactagcctatgttccttctttcagatggttacccatctgatggagttatagccttaagttccttcttttagatgcttacccatctgatggagttataggtgatcgggggctcccacggtatgctgttttttttgtggctaaattgtcctctgtaatctttactgtgatagcaactgtaataaactggaccagtgttttgcatcagggctctcttagagacactgttcaacatattctagtatgtctgatgctgcgaaatattgttttgtacggtag

SEQ ID NO: 206290 - DNA, 2412 bp, Zea Mays
gcgccgtctgtggaccagacacccatactgattcgctggcggcaggccgacggctacggagacggaagtggcgaccggttccggcgaggcgcaggcgacagataggggacagggcgaccatttctagcgaggcaggagcggggaagatccggaagctgcgatgtcgaagcggctgctgtcgcggctgctcggcatgttccaatcgcggacgcaggtgggcgtcgacaaggccggcaaccgctacttcacccgcgttgaggaggtcgacggcacaatgaaggagaggcgctgggtggagttcaagggcgcagaccaggactcgaccaccgttccagtcgagtggatttgctggctgaatggccaaaggaagaaagctccaacaccagaggaattggctgagctggaggcaagacgtgaacgtgtcaagcaaaacattcagcgtatgtatgcggtgtttcctacttgtgtactcatgtatgattttattaataagcctcactgtgtgcagtgagcaagagcccaaacatgttttcttaggcatttgcagttgagtaacccatgttaattgcctcaactactttatagtagcccatatgtatcataatatgcactgtatgctactttccataccgttcactggacaaggctaagagaaatgaaataaaatgctggttagatatgtgtgtttcttgtatttgatgctaaattcttattttgtaaatagaaactgtattgtattttgtgctaggatcgtcaacaaggttgtatgagacatgatcacttgaaaactttgatctctattactccatccatccacaaaagggtgcaattttcacttttcgaggagccaaacagtttgaagttggaccataattataccaagaagtattaacctttatggtaagataagtagaatggcagacccagtgccggaggctcccacatgagtggtgtgtgggaaagggataaaccgaggcaagtctttccctacaaatacgaagagctttgagcccgtgacctgatgactctagtgagacaactctcaccgctgcaccaagcctgtccataaaattaattatgagatatattttcgtagtaaatctagttagggacataaatgttaatattattcactataaacttggtcaaactagtttgacttgcacaaatcccacagttgcatccttttgtcccattagctgcatccttttgtggatagagggagtacaactttgcaagcattccatctacgaattagaataacgttaacagtcagttgttttggtgtgtgattggtgattataaaagtaacaggacatgctgtcgtgcactcaaaatttggtttgttaacctcgtgattagggatgtaagctctgacaccatatagttgtgggccagttagctacttagctagctaacttctatcccgcatcccttcctttgatatttggatttgttcaatcgagtattgggttgatccaatgtcctaggaatgcaaaactcccatccctactcacgatctgaattttgatgatgtctgctatatatctatttaaatttattcacgaaaaatatgttgaaagtgctggcgtattgtttatggcctgaattttgtagagaatagttgttacaatgtaatatactggatacgtttgcagctatgaagctttcattctagttgaagacttgcatcgcggtaaaagatctgattcacaccagcatatgtttgtcacagcttcttttaagttttgtttcttcaaggatcaagattctcatgcatttctcaaaaagaaagaagaagaggaaagaaaaactggtatccaaccagtcaagaaaattgggaaagctgaatctccaaatctccaaagtttcgtgaagcagcagttctcgggtactcctccagatcagcagaaaggacctgaggataggcctaaggacacaactcatacagaagatgctacgacagacaatgagaggtatactgaaccaacgggaactggtgccactttcaagccagggacttggcagccaccaacatgaatgccaacatgaactttagaagatgaaggacggtgtaccggagcattttcctttcacctatctgtgtaacattttaacatttgctctgaaagaatcactagcctatgttccttctttcagatggttacccatctgatggagttatagccttaagttccttcttttagatgcttacccatctgatggagttataggtgatcgggggctcccacggtatgctgttttttttgtggctaaattgtcctctgtaatctttactgtgatagcaactgtaataaactggaccagtgttttgcatcagggctctcttagagacactgttcaacatattctagtatgtctgatgctgcgaaatattgttttgtacggtag

SEQ ID NO: 206291 - DNA, 637 bp, Zea Mays
aacaaatctctctatgcatcgaaggtgcccctatacgtggcgacaaagatggcatctatcaggaagtcttccttcatggttccatctactgacacctatgctcgtgctgccgttcgtcacattggatacgagcctaggtgcacaccgtactggccacactctgtcgtgtggttcttgatctcgattcttcctgagtcccttatagacagcgtgcgcctgggcatgtgcattaagatccgcaagaaggggctggccaaggacgccaagaagaaggcactgtgattgatgtttcagaatgcaggtccagattcgaagatttcctcatcacctgtagtagacatgtgccttgctgtagtcactttattagctccggagtctgttaagaatcgagaatgccattgctccatccacggttatgatgttaaaaattattattcttcaattcaaaatgtaacactaatacgagtaatgatgaatgcaattaacttgaagaagttgtgtaactcaattatttttctggacaatttcacgtttttgtgaagtttctttgcccgcgcatgactttaaatggaattttctgtaaacagagtttgctgtttatggagaatttaatactctcccttccacatttgtcttg

SEQ ID NO: 206292 - DNA, 1540 bp, Zea Mays
ggccattcgcctctcctatataacgaccacttcctcccaccgcttcttcccacgcctcccaacctcctctgcttccgagatctctccccacctcccggtccgctagcagatagcgggggccagagagatcgagatccggaggcgctagcgccacccatcagcgtctgcggcaatggcgggcacggtgacggtcccggggtcgtcgaaaccctccacgccgctgctcaaggacgagctcgacatcgtgatcccgacgatccgcaacctcgacttcctcgagatgtggaggcccttcttccagccctaccacctcatcatcgtgcaggacggcgacccgaccaagaccatcaaggtccccgagggcttcgactacgagctctacaaccgcaacgacatcaaccgcatcctcgggcccaaggcctcctgcatatccttcaaggactccgcctgccgctgcttcggctacatggtctccaagaagaagttgccaaggacccatcaggcaaggatatcaatgctcttgagcagcacatcaagaacctcctcagcccgtccacaccgttcttcttcaacaccctgtacgacccctaccgtgagggtgctgactttgtgcgtggataccccttcagcctcagggagggtgcccacactgctgtctcccacggcctgtggctgaacatccctgactatgatgcacccacccagctggtcaagcctaaggagaggaacgaaaggtacgttgatgctgtcatgacaatccccaagggaaccttgttccccatgtgcggcatgaaccttgccttcgacagggatctcattggccctgccatgtacttcggtctcatgggtgatggccagcccattggtcgctacgacgacatgtgggccggatggtgtgtgaaggtcatctgcgaccacttgagcctgggagtcaagactggcttgccatacatctggcacagcaaggctagcaaccccttcgttaacttgaagaaggaatacaagggcatcttctggcaggaggacatcatccccttcttccagaacgtgaccattcccaaggattgcgacaccgtccagaagtgctacatctacctctctggacaggtgaaggagaagcttggcaagatcgacccctactttgccaagctcggtgacgccatggtcacctggatcgaggcctgggatgagctgaacccggctggccccgcggctgggaaagacaaggccaagtagatgggagtccctgggggtgcattcacttccctgctgaagtgaaaagaaagtatgattgggtccagcctaggctcccccatagatatagctctttttgagagggaagagggattaattcagcagcaggttctttttataaattctttgttgttatgaagcaggcggtacttttgtagttgatgaaggggatttgtcgccactgtcatttacataattcggataataatttatattgtgtaatcttgagaatcaaagcactgtttgtgttatagcatgtctatgaatgcgcactgttgctttttcc

SEQ ID NO: 206293 - DNA, 1141 bp, Zea Mays
aagaaccgcaccaagcgtcagatcaaccttgagatgggtttactcacaacatgctaagcgacgttcacaacaactggaagacctgcgaggccgtcaggataaaatgcctcggcgtgccaacggtcgatatgcaaaacgtgtgccatcagcttgaggataaaactggtggcctgatcatccaccggcatggtagcctgttgatactgtacaggggtaggcactataatccaaagaaaagacctgttgttccgttgatgctgtggaagcctgctgaacctgtttacccgaggctaatcaaaacgacaatagaagggctcacagttgaggagacaaagcaaatgaggaagaagggcctacatgttcctgttttgacaaaacttgccaagaatggatattatgctagtctcgtgccaatggtccgggatgcctttttgacggatgagctggttcgaatagactgcaaaggattgccaaaaagtgactataagaagattggagttaagctcagggaccttgttccttgcattcttgtctcatttgacaaggagcaaatcattgtttggaggggaaatgaagatgggagcctacaagatcgaacacagaagtcattcctttcatttatcgactcagatgttgcatcagtgaaggatgagactggtgatcaggaacaaataccaagtgatttgtcatatgatgggtgttctgagatgaagtgccaaattacaaaagtaatttaggacctagactcttttaggttgatctgacatatccagaatacacagttcacatagttgcaagctctacacatcaacaatggaattgacaagtcctcaatgtaaaagtttgtgtattctctaaccatgatagttgcattgtatcacatgtaagccatggtaatttctagagaaaattccactgcaattttgtccaagaccttacttgccatgccattgtaaatgttctaattccttatattaccactcggatgcaatttcttaccttttcatgccattgctagtggcatagaagggtaaaaaagctgcatgttctaatctcttatatatcactgatgatgacatagaagggtaaaaaaaaatgcttggcatggaagggattaagatatttgcgatggtaattaagg

SEQ ID NO: 206294 - DNA, 640 bp, Zea Mays
ctttttttcctgaagttcttgtggaaccgggtgaccagatggcaccattgccatgatcagactgtagcgacgattccgcttcggacagcgacacggcgagtggcgactccgggcttcacgaaggcccgcagccagcagccgactaggacgccggtgtccaagtcctccatggaggaagatcttgcgataaggtgaacgcactgtagattatccttccatgccggtgtcggtcatgagcagtgggcggccgcggcgacgagcgacaacagagcttcaaggaaaggtagtgttcagaggaacccactggataagacaatggtccgtgttgcaaaaagaggaaaacatgacataaatcaagtggggatgtcgtgcgcttgagactacaatgatgcaaattttctcatacaacggatggagttttagtaatcgaattgatttttaataaatttcgaaatatggttgttcttgagatattaaacatcgtgtatattggtttgagatgtaataattgaacaaccacatgcatctattggtgcagaagctagaatatttcaatatattccctattctaaaaaaagttaaatatcgtagatatgctagtgtgtagtgtatatgtttccctataaattctttagtttag

SEQ ID NO: 206295 - DNA, 173 bp, Zea Mays
atggtgcgaggtaacatactcattacccaccactacgagctaatatacacacacctacagtctcccattgctaaaatcactggacatgtctttcaatcaaataaacactctgcccaaagagattggcctggctactgctttagtcaaggttgagttctcaaacaattgcctta

SEQ ID NO: 206296 - DNA, 1175 bp, Zea Mays
gcagcagttatcaaaacttcaaaaatgataagattactaatacaatatttttttgttacctttagatttcagctccccttggcaggcccaaatctatccgtccatagtccttgtaccgcgaaatctaaaatccccaaaaccctagctacccggcgtaactcccctttccctcgcctctctgcggcgctgcgcggcacctagcttcctatacgaagcaccggaggcggggtagactagcgggctggccatggcgtcaacggtgctggaggcgacgagggtggcccatgaggacttggagaggctggagcgcctcgcggcgcgcgagctgcaatgggagcccgataacccgcgcgaccgcttttttcagtcccaccgcgtccgccacatgctcgacctcgtcgtctccacctcctgcaagctcagccattgcaagacgtcgataagattttttttaaagctgaagagtgaatttgaggaacgatgggccaatggagaaatacctggatggggaaataaaggcgcagaaaacgagtctaaaatagatcttgattactacagcacagttgaaacaggtccttaatgctttgttcaacctttgcaaaattaataaaagaagacaggaacaagcagccaaaaatggaatcatccctcacttgatgaaatttgtcatgtcagactcacctctgcggcagtatgccctgcctttgttgtgtacttaaatctgctcgaggatgatgcatgggcatgcacgacattagattctattgctgtttgtttggctcacgataatgatcacagaaaagtggaacaagcactcttgaaaagaggccattcagaatttaatgaagttcttccaagattgcctagaacagttttttggccatatattggacgctttcttgaagataataacgaaatcttctaggctaaatataacaatggctaccaatggtttaacaacattgctcattgcaagacttgaccattcaaatttggtggtcgcaaaagtgtggagacttgaattcatataaagttaggcttaacattagtgcaaacagttgtattttagtttagatttagagtacactaatgtatgcgttgtttgacaatgcttatttatgatatattgaatggtacttatttatatcatattaattataatgttgttcaatata

SEQ ID NO: 206297 - DNA, 5137 bp, Zea Mays
ccgcgcgtcagttaccgctgcccacccaccgggcacactttcaacacaggtgctgcgccggatgatcccaagagcagcaaacaaataataaacccctccaggcatacgcgagagcactctagtctcgagcacagcacaaggccgccggtcccttctctcccactcccactactcgcgctcgccgctggatcctccacccgccgcggcgccaggccggagatccagcagctgggaccacggaggtcggccggttgctccgttcccgctggtggttgctcttcggccgctggagatcggcagacggaagcagttgacgccacagggcttcgtgctgccgaattccccagatattctgggggttcaaccgaacccccatgcccgacaacactgggcttgaaattggccttaaaggctccaagggagccccaatgccaggaacggaaggaagagtggcaaaggatttgaagaaagctcctgcctccttggaggaaagcaatgcttctcgtgatgaggatcctggcggagggcctgccttgactgggaagaaaaggaaggaccggaggggttccgcggatgacaacaggaatgtgacaagaagggtgttgaggtccgacgccatgaagctgcgtgctgaggctgaggcaccatgtggagcgggtgtggaggttagcaaaactgatagtttggagaggaaacactgtgacactactgtggaggctgaggcttgcaaaagtagtgtgctgatggaagttgcctgcaatggtggggaagccaacggattagttaacttggatgcgagcgatgtttcggaagaatcaactaggtgttctgataataatatgggaatgcctggtgttcctgcaacagatttttctcaagatggtggcttagctcaaggtagcattgcagaatcagatgataagacagtcaagtcagatgaggtgtccgctgtaactcattcagagcagaatgactcccaagctggaataaacagttataatgctgatgaggcccaagataacaaagtgagacatgggccttgtcaggatgaggtcatagactcagcaattactaatggtgccaacacaagtacagatttaaccaaaaccagccctaccagtggatcagaatctgttaagcaggatgatagtaagcaggagaataatttggttcatactgaaggagtgatactccacagtggtgatccgaaagttgagaatcattctcaaattgaggacacttgtacagaaactgagatttctttgactgggaatggaagatgtgcagctgataaccacactgatcgaactgggtacactaagcaggaggagaggggcagccctgtgaacgaaaccaatgatatttcggcacatgacattgtttttacaaggagaggtagaaaatcatgtgaggcaaagcaggggacatgtgaagaggagtcacggtttgagaagcgagttacgagatcagctacagttagacagagagaagtttctggaagcttatgcaaaactaccacgaatgagactgcactaggaagcagagggaggaagggagatattattgctcactatacaaggaaagtgagcagtgcagtatctccaaaaggtcaccatgctgagctgggagaatgtaataccagtatggagaatcaaacagtgaaacaaaaggtggttgatcgaagagattcaggtgccactaagaatgataatgatgcgaatgacacaaagaataaggaatcagaaaagacagagatcaatctgaagacgcaaccacctgttggaagtgttagcattgtaaataaaacaactgtaggagctgtttctgtggtgggtcagagtatctctggttcagccatcactgagagaaatgatacagatcatactgattctgatggagttaaatatgaaaatatgactcttgtgcagaaactactactgtctgttggcgcgaagattgttgccagcaagaagagggtattggaagcaggtcctgataaaaccactggaaggtcaccaattgctttgccatccatgaaaaagacaagaaatacgtcttctgatcctgagatagatcaacctgataagtcttctggagagaagcttattggaaataactgtgatttgggcaataaacgtgttttgagggaacggcagcatcagaatcaaacatatttgtcaagcaggtcttctaaccagtctaatcaaaatgctatcaagcagacacaggatcaatctgacgatgatgacatcagcagcgatacttcctacaggagaactcgtagcggacgtcgtcgtggtgctgcccgtcttgccgtgccaaaacaagaggactccagtgattctgaagaagttgttgttgtgaaaaagaatcgacggaaacgtaagaaatctgtgcataaacacagggctggatctaagttgaagcatacttctggtagtcctcccaaaacaggtcgtttgggtagacctccacttgtcaaatctgaatgtggctgcttacctctgcagccaggaaaagggaaaatgaatgtgcctgaaggtacaggagctctacgcgaagaaaaacaaaaaataagtgatcagataaaggccatgcttctagatgctggttggacaattgatttaagacccaggaatggtagaaactacatggattccgtgtatatacatcctagtggcaaagggtcttactggtcagttacaaaagcatattacgtgttccgtgcagatatggaatctgagcagaaggaaagttctaaagaccatattctgtcaaaaaaatctgttggtagccccggcaaaaggcaggtctctagttcttcaggctgtactttaacagatgatatccttagcaaattaaaaagagttgttgtaaacaaacgaacaaccaaagtagagattcaaaggttgagacagaagaaggaaaagaagaatactacaaattcaacaagattgcatttaggcaatgaaagaaaaaagagaggtggctgtgctctactcgttcgtggatcgaacaaggagtctggcagcaccactgatggttttgttccatatgaatggaaacgtacgatcttctcctggctgattgatctgaatgttctatcagtcaatactaagctgaactgtttggatgaaagccactcaaaggttttactagagggttttgtcactagggatgggattaactgcagctgctgtagcgaggtcatttcagtgccagaatttgtgactcatgctggttctgaagtaaataagccatacagaaacatacttgtggatgggctagacattgaccttttgcactgtctcattaatgcatggaatatgcagtctgatgctgaaagacaagatttctttcccgttagcattgagggagatgaccccaatgatgacacctgtggtatttgtggagatggaggcaatttgatctgttgtgatggatgcccctcgacatttcacatgagttgtctaggactggaggcacttcccactgattattggtgttgttccaactgctcatgtaaattttgccatgaacattctagtgatgatgctgaagacactgctgatgttgattcttcattgcatacttgttcccagtgcgaagagcagtatcatggagcctgctctcctgatattgattccatagctactaatctttctagtcagacaggcaatttattctgccaacaaagctgcagactgctgtttgaggaattgcagaatcttctcgcagtcaagaaggatcttgaaccagaatactcatgcagagttgttcaacgcatccatgaagaggtaccagaagaagtccttgctttggacaaaagagttgagtgtaactccaagattgctgttgcactctcattaatggacgagtgcttccttccgattgttgaccagagaactggcatcaacttgatacgcaatgttgtgtataactgtggatcaaattttgcccgattggatttccgtggattctatataattattttagaacgtggagatgaaataatagctgcagcatctgtccgaatacatggaaccaagttagctgagatgccgttcattggtacccggaatatgtataggcgacaagggatgtgccgccgacttgttgatggaattgaaatgatcctcagctctctcaatattgagaagctgatcattcctgctatcacagaacttgtggacacctggacatctaaatttggatttagtccactggacgattctgagaagcaggaagtgaaatccgttagcatgttagtttttcctggtacaggtcttctccaaaagccattgctgaagacctcaccatcggaagatcaatgctcccaaggagtcaatgaagattcgctttgctctggtgcaagtgccgaccccctaggttcggtggtcaaagagcatggggacaccagcaaagatgccgatggtacttgcaacggtgatgtttcacagcgatctcctctttcctgatggtaagatttggttgcagctttctgggcccccccaagctttatatggacgaaacctccgtttgtttttgtacctctcgagttttgactcagcagccagcatgacaaccatccgtttggcagaaagaggcttccggttttttgcagattagttgccggggcacccctgtagttgtactcagaatttgaccattgactcgtcggcctgggaaaagaatcagcccgtgcagtactgaaaagcgtttactccaaccaggaaccagctaacttactgtgcagctgaaaagtcagtatgcagaatgtggaggataatatcacttcttttgtttttttttggtcgttaacttagaactccgagggcgagtcgtcgtaaatgttacaccagttgttattttgttaatagctttttttttaaaaatgttttcgctagcgcattcctagaaccttctcatttctgtaagatagttctcgcctctgtaagataaactaatgtatgcgcaagctagaaatagtccgcctgatccgtcacgcggaattggttacctaaaccctgttaatgtttcgttttgcatcgtgttggaatgtgtgtgttcttcctgtgaaggaaagcttttgcgggtcattatactagagcgaaaccatatcatcgtttgagatgtg

SEQ ID NO: 206298 - DNA, 6449 bp, Zea Mays
ccgcgcgtcagttaccgctgcccacccaccgggcacactttcaacacaggtgctgcgccggatgatcccaagagcagcaaacaaataataaacccctccaggcatacgcgagagcactctagtctcgagcacagcacaaggccgccggtcccttctctcccactcccactactcgcgctcgccgctggatcctccacccgccgcggcgccaggccggagatccagcagctgggaccacggaggtcggccggttgctccgttcccgctggtggttgctcttcggccgctggagatcggcagacggaagcagttgacgccacagggcttcgtgctgccgaattccccagatattctgggggttcaaccgaacccccatgcccgacaacactgggcttgaaattggccttaaaggctccaagggagccccaatgccaggaacggaaggaagagtggcaaaggatttgaagaaagctcctgcctccttggaggaaagcaatgcttctcgtgatgaggatcctggcggagggcctgccttgactgggaagaaaaggaaggaccggaggggttccgcggatgacaacaggaatgtgacaagaagggtgttgaggtccgacgccatgaagctgcgtgctgaggctgaggcaccatgtggagcgggtgtggaggttagcaaaactgatagtttggagaggaaacactgtgacactactgtggaggctgaggcttgcaaaagtagtgtgctgatggaagttgcctgcaatggtggggaagccaacggattagttaacttggatgcgagcgatgtttcggaagaatcaactaggtgttctgataataatatgggaatgcctggtgttcctgcaacagatttttctcaagatggtggcttagctcaaggtagcattgcagaatcagatgataagacagtcaagtcagatgaggtgtccgctgtaactcattcagagcagaatgactcccaagctggaataaacagttataatgctgatgaggcccaagataacaaagtgagacatgggccttgtcaggatgaggtcatagactcagcaattactaatggtgccaacacaagtacagatttaaccaaaaccagccctaccagtggatcagaatctgttaagcaggatgatagtaagcaggagaataatttggttcatactgaaggagtgatactccacagtggtgatccgaaagttgagaatcattctcaaattgaggacacttgtacagaaactgagatttctttgactgggaatggaagatgtgcagctgataaccacactgatcgaactgggtacactaagcaggaggagaggggcagccctgtgaacgaaaccaatgatatttcggcacatgacattgtttttacaaggagaggtagaaaatcatgtgaggcaaagcaggggacatgtgaagaggagtcacggtttgagaagcgagttacgagatcagctacagttagacagagagaagtttctggaagcttatgcaaaactaccacgaatgagactgcactaggaagcagagggaggaagggagatattattgctcactatacaaggaaagtgagcagtgcagtatctccaaaaggtcaccatgctgagctgggagaatgtaataccagtatggagaatcaaacagtgaaacaaaaggtggttgatcgaagagattcaggtgccactaagaatgataatgatgcgaatgacacaaagaataaggaatcagaaaagacagagatcaatctgaagacgcaaccacctgttggaagtgttagcattgtaaataaaacaactgtaggagctgtttctgtggtgggtcagagtatctctggttcagccatcactgagagaaatgatacagatcatactgattctgatggagttaaatatgaaaatatgactcttgtgcagaaactactactgtctgttggcgcgaagattgttgccagcaagaagagggtattggaagcaggtcctgataaaaccactggaaggtcaccaattgctttgccatccatgaaaaagacaagaaatacgtcttctgatcctgagatagatcaacctgataagtcttctggagagaagcttattggaaataactgtgatttgggcaataaacgtgttttgagggaacggcagcatcagaatcaaacatatttgtcaagcaggtcttctaaccagtctaatcaaaatgctatcaagcagacacaggatcaatctgacgatgatgacatcagcagcgatacttcctacaggagaactcgtagcggacgtcgtcgtggtgctgcccgtcttgccgtgccaaaacaagaggactccagtgattctgaagaagttgttgttgtgaaaaagaatcgacggaaacgtaagaaatctgtgcataaacacagggctggatctaagttgaagcatacttctggtagtcctcccaaaacaggtcgtttgggtagacctccacttgtcaaatctgaatgtggctgcttacctctgcagccaggaaaagggaaaatgaatgtgcctgaaggtacaggagctctacgcgaagaaaaacaaaaaataagtgatcagataaaggccatgcttctagatgctggttggacaattgatttaagacccaggaatggtagaaactacatggattccgtgtatatacatcctagtggcaaagggtcttactggtcagttacaaaagcatattacgtgttccgtgcagatatggaatctgagcagaaggaaagttctaaagaccatattctgtcaaaaaaatctgttggtagccccggcaaaaggcaggtctctagttcttcaggctgtactttaacagatgatatccttagcaaattaaaaagagttgttgtaaacaaacgaacaaccaaagtagagattcaaaggttgagacagaagaaggaaaagaagaatactacaaattcaacaagattgcatttaggcaatgaaagaaaaaagagaggtggctgtgctctactcgttcgtggatcgaacaaggagtctggcagcaccactgatggttttgttccatatgaatggaaacgtacgatcttctcctggctgattgatctgaatgttctatcagtcaatactaagctgaactgtttggatgaaagccactcaaaggttttactagagggttttgtcactagggatgggattaactgcagctgctgtagcgaggtcatttcagtgccagaatttgtgactcatgctggttctgaagtaaataagccatacagaaacatacttgtggatgggctagacattgaccttttgcactgtctcattaatgcatggaatatgcagtctgatgctgaaagacaagatttctttcccgttagcattgagggagatgaccccaatgatgacacctgtggtatttgtggagatggaggcaatttgatctgttgtgatggatgcccctcgacatttcacatgagttgtctaggactggaggcacttcccactgattattggtgttgttccaactgctcatgtaaattttgccatgaacattctagtgatgatgctgaagacactgctgatgttgattcttcattgcatacttgttcccagattcataacatatggtatcatgagtcaggtatcctttccatgacttctgctgcggacgatgtacgcacatggcgtgaggagctcgctcgtgccagggcagatctggagcaggcccgatctgctatcctccagctagtgatctactcacggcaaaggtggagtctgactgccgatcagcggcgacaacgcgactgcaggaggctgtgcatgggttcctggcgtgacgtccagtgtggcagcggcttgccgtcttcaggctacgacacgtggcttcctggcgcggcgtcaagcacagcaagcagcggcttgccctcttcaggttgcggcacttggcttcctgacgtggcgtcaagcacgacaagcggcaacacggttgcaggctacggccttcagcagggttggccgatccttagccatgtggacagcaagaacaagtctggttgggtggtgctgtctccactggaactcgcggtagctcaggccgtaagactggtgagctgccacgtcttggcctttgcagcctggaagaggttgttcccatgggatccagggtggcatatgttaggttctttattttatttgttaataaattaaagcggagatgtaaaaggcttatagttagggttgcactttcacatgcatatcaagttagacagcaaggttgtttccatgcaccgagaacgagctgtcttcaaagggtgggggaatgtcatgtggtggcagcccagggcatggaggcccatagggataggctcagggttaggattagtgaataaagattagataagattgacttagatacttgggattagattagataaaataagattgagttagttacttgagagccgagtcttcgtatctatacaaggatgggctgtacctccttaagaagaaaaaggaatgaagaagaattagtcccagatctctccaatagtctggtctctctcaagccgactccgcctgactaccttccggcgctgtttatcacccctatgaactaggattcaaaacatatttgaactattatttagtgacttgagaaccttgtcattttaatccagctattaaaagctctactcttcttttggattgagtcgctatatttttatttctgaaactagacagttggtatttagtcataagaaatgtgtaatgcaaaaacaccatggaagttgtgtatttttgaaaatgctgtattaaacactattttttaccatcaaatcaaacacacatcctgtctagatcctttctatctatttgtggttttatttatcttctagtttattaatgtatgtataccctccctacaagccgcaactgacccaagaacttccaaacttcaaatggtatagttgcataatctgaaattactagttctgtgatgcagctgtttgaggaattgcagaatcttctcgcagtcaagaaggatcttgaaccagaatactcatgcagagttgttcaacgcatccatgaagaggtaccagaagaagtccttgctttggacaaaagagttgagtgtaactccaagattgctgttgcactctcattaatggacgagtgcttccttccgattgttgaccagagaactggcatcaacttgatacgcaatgttgtgtataactgtggatcaaattttgcccgattggatttccgtggattctatataattattttagaacgtggagatgaaataatagctgcagcatctgtccgaatacatggaaccaagttagctgagatgccgttcattggtacccggaatatgtataggcgacaagggatgtgccgccgacttgttgatggaattgaaatgatcctcagctctctcaatattgagaagctgatcattcctgctatcacagaacttgtggacacctggacatctaaatttggatttagtccactggacgattctgagaagcaggaagtgaaatccgttagcatgttagtttttcctggtacaggtcttctccaaaagccattgctgaagacctcaccatcggaagatcaatgctcccaaggagacaaaactgaaaaatcatctgatgtagtcaatgaagattcgctttgctctggtgcaagtgccgaccccctaggttcggtggtcaaagagcatggggacaccagcaaagatgccgatggtacttgcaacggtgatgtttcacagcgatctcctctttcctgatggtaagatttggttgcagctttctgggcccccccaagctttatatggacgaaacctccgtttgtttttgtacctctcgagttttgactcagcagccagcatgacaaccatccgtttggcagaaagaggcttccggttttttgcagattagttgccggggcacccctgtagttgtactcagaatttgaccattgactcgtcggcctgggaaaagaatcagcccgtgcagtactgaaaagcgtttactccaaccaggaaccagctaacttactgtgcagctgaaaagtcagtatgcagaatgtggaggataatatcacttcttttgtttttttttggtcgttaacttagaactccgagggcgagtcgtcgtaaatgttacaccagttgttattttgttaatagctttttttttaaaaatgttttcgctagcgcattcctagaaccttctcatttctgtaagatagttctcgcctctgtaagataaactaatgtatgcgcaagctagaaatagtccgcctgatccgtcacgcggaattggttacctaaaccctgttaatgtttcgttttgcatcgtgttggaatgtgtgtgttcttcctgtgaaggaaagcttttgcgggtcattatactagagcgaaaccatatcatcgtttgagatgtg

SEQ ID NO: 206299 - DNA, 6504 bp, Zea Mays
ccgcgcgtcagttaccgctgcccacccaccgggcacactttcaacacaggtgctgcgccggatgatcccaagagcagcaaacaaataataaacccctccaggcatacgcgagagcactctagtctcgagcacagcacaaggccgccggtcccttctctcccactcccactactcgcgctcgccgctggatcctccacccgccgcggcgccaggccggagatccagcagctgggaccacggaggtcggccggttgctccgttcccgctggtggttgctcttcggccgctggagatcggcagacggaagcagttgacgccacagggcttcgtgctgccgaattccccagatattctgggggttcaaccgaacccccatgcccgacaacactgggcttgaaattggccttaaaggctccaagggagccccaatgccaggaacggaaggaagagtggcaaaggatttgaagaaagctcctgcctccttggaggaaagcaatgcttctcgtgatgaggatcctggcggagggcctgccttgactgggaagaaaaggaaggaccggaggggttccgcggatgacaacaggaatgtgacaagaagggtgttgaggtccgacgccatgaagctgcgtgctgaggctgaggcaccatgtggagcgggtgtggaggttagcaaaactgatagtttggagaggaaacactgtgacactactgtggaggctgaggcttgcaaaagtagtgtgctgatggaagttgcctgcaatggtggggaagccaacggattagttaacttggatgcgagcgatgtttcggaagaatcaactaggtgttctgataataatatgggaatgcctggtgttcctgcaacagatttttctcaagatggtggcttagctcaaggtagcattgcagaatcagatgataagacagtcaagtcagatgaggtgtccgctgtaactcattcagagcagaatgactcccaagctggaataaacagttataatgctgatgaggcccaagataacaaagtgagacatgggccttgtcaggatgaggtcatagactcagcaattactaatggtgccaacacaagtacagatttaaccaaaaccagccctaccagtggatcagaatctgttaagcaggatgatagtaagcaggagaataatttggttcatactgaaggagtgatactccacagtggtgatccgaaagttgagaatcattctcaaattgaggacacttgtacagaaactgagatttctttgactgggaatggaagatgtgcagctgataaccacactgatcgaactgggtacactaagcaggaggagaggggcagccctgtgaacgaaaccaatgatatttcggcacatgacattgtttttacaaggagaggtagaaaatcatgtgaggcaaagcaggggacatgtgaagaggagtcacggtttgagaagcgagttacgagatcagctacagttagacagagagaagtttctggaagcttatgcaaaactaccacgaatgagactgcactaggaagcagagggaggaagggagatattattgctcactatacaaggaaagtgagcagtgcagtatctccaaaaggtcaccatgctgagctgggagaatgtaataccagtatggagaatcaaacagtgaaacaaaaggtggttgatcgaagagattcaggtgccactaagaatgataatgatgcgaatgacacaaagaataaggaatcagaaaagacagagatcaatctgaagacgcaaccacctgttggaagtgttagcattgtaaataaaacaactgtaggagctgtttctgtggtgggtcagagtatctctggttcagccatcactgagagaaatgatacagatcatactgattctgatggagttaaatatgaaaatatgactcttgtgcagaaactactactgtctgttggcgcgaagattgttgccagcaagaagagggtattggaagcaggtcctgataaaaccactggaaggtcaccaattgctttgccatccatgaaaaagacaagaaatacgtcttctgatcctgagatagatcaacctgataagtcttctggagagaagcttattggaaataactgtgatttgggcaataaacgtgttttgagggaacggcagcatcagaatcaaacatatttgtcaagcaggtcttctaaccagtctaatcaaaatgctatcaagcagacacaggatcaatctgacgatgatgacatcagcagcgatacttcctacaggagaactcgtagcggacgtcgtcgtggtgctgcccgtcttgccgtgccaaaacaagaggactccagtgattctgaagaagttgttgttgtgaaaaagaatcgacggaaacgtaagaaatctgtgcataaacacagggctggatctaagttgaagcatacttctggtagtcctcccaaaacaggtcgtttgggtagacctccacttgtcaaatctgaatgtggctgcttacctctgcagccaggaaaagggaaaatgaatgtgcctgaaggtacaggagctctacgcgaagaaaaacaaaaaataagtgatcagataaaggccatgcttctagatgctggttggacaattgatttaagacccaggaatggtagaaactacatggattccgtgtatatacatcctagtggcaaagggtcttactggtcagttacaaaagcatattacgtgttccgtgcagatatggaatctgagcagaaggaaagttctaaagaccatattctgtcaaaaaaatctgttggtagccccggcaaaaggcaggtctctagttcttcaggctgtactttaacagatgatatccttagcaaattaaaaagagttgttgtaaacaaacgaacaaccaaagtagagattcaaaggttgagacagaagaaggaaaagaagaatactacaaattcaacaagattgcatttaggcaatgaaagaaaaaagagaggtggctgtgctctactcgttcgtggatcgaacaaggagtctggcagcaccactgatggttttgttccatatgaatggaaacgtacgatcttctcctggctgattgatctgaatgttctatcagtcaatactaagctgaactgtttggatgaaagccactcaaaggttttactagagggttttgtcactagggatgggattaactgcagctgctgtagcgaggtcatttcagtgccagaatttgtgactcatgctggttctgaagtaaataagccatacagaaacatacttgtggatgggctagacattgaccttttgcactgtctcattaatgcatggaatatgcagtctgatgctgaaagacaagatttctttcccgttagcattgagggagatgaccccaatgatgacacctgtggtatttgtggagatggaggcaatttgatctgttgtgatggatgcccctcgacatttcacatgagttgtctaggactggaggcacttcccactgattattggtgttgttccaactgctcatgtaaattttgccatgaacattctagtgatgatgctgaagacactgctgatgttgattcttcattgcatacttgttcccagtgcgaagagcagtatcatggagcctgctctcctgatattgattccatagctactaatctttctagtcagacaggcaatttattctgccaacaaagctgcagactggtaacgcttgtcagattattgttcttttttccttgaccttgtttctggatatgctaccttgtggttttcatgatcataatttaaatggtgacacttgctattttactttcatgtttgaggcagatatcgttcccttttttaacggctcatgttgggtttgggactaaaaggcttttgctgttgttttatgtttaagaccttaatcactaatgagatgtttggtttgaggaataagctagtccatcatcttcgcactcctcacttttttgtttggtttgcgaaatggaatgagttgatccattatcacctcatttgtcatagttagttagttagtactaacacgaggaatggggccatctcaccaaatttgaggaatagattcatgatgcaccaccgcatcttggatgaagtgattcctcaaaccaaacacctcctaaatatctgcaccatcccgctctgttagcttcctttcttgatcatatgcatatatgtttttccttctaatagcaatatcatagcaatgtacatatattcaggttgctggtttttatttacatggatttcattactacaagtgattacatatagtaaggtactatatgagtgtggtattttgtcatggggcggcaacccagggcatggaggcttagattggataagattgagttagttacttgggattagattagataatattgagttagttacttgggatccaagtcttcctatctatataaggatgaactgtacctccttaagaagaaaaaggaatgaagaagaattagtcctagatctctccaatagtctagtccctcccatgctgactctgcccggctaccttcccggcgctgactaggattcataacatatggtatcatgagtcaggtatcctttccatgacttctgctgcggacgatgtacgcacatggcgtgaggagctcgctcgtgccagggcagatctggagcaggcccgatctgctatcctccagctagtgatctactcacggcaaaggtggagtctgactgccgatcagcggcgacaacgcgactgcaggaggctgtgcatgggttcctggcgtgacgtccagtgtggcagcggcttgccgtcttcaggctacgacacgtggcttcctggcgcggcgtcaagcacagcaagcagcggcttgccctcttcaggttgcggcacttggcttcctgacgtggcgtcaagcacgacaagcggcaacacggttgcaggctacggccttcagcagggttggccgatccttagccatgtggacagcaagaacaagtctggttgggtggtgctgtctccactggaactcgcggtagctcaggccctgtttgaggaattgcagaatcttctcgcagtcaagaaggatcttgaaccagaatactcatgcagagttgttcaacgcatccatgaagaggtaccagaagaagtccttgctttggacaaaagagttgagtgtaactccaagattgctgttgcactctcattaatggacgagtgcttccttccgattgttgaccagagaactggcatcaacttgatacgcaatgttgtgtataactgtggatcaaattttgcccgattggatttccgtggattctatataattattttagaacgtggagatgaaataatagctgcagcatctgtccgaatacatggaaccaagttagctgagatgccgttcattggtacccggaatatgtataggcgacaagggatgtgccgccgacttgttgatggaattgaaatgatcctcagctctctcaatattgagaagctgatcattcctgctatcacagaacttgtggacacctggacatctaaatttggatttagtccactggacgattctgagaagcaggaagtgaaatccgttagcatgttagtttttcctggtacaggtcttctccaaaagccattgctgaagacctcaccatcggaagatcaatgctcccaaggagacaaaactgaaaaatcatctgatgtagtcaatgaagattcgctttgctctggtgcaagtgccgaccccctaggttcggtggtcaaagagcatggggacaccagcaaagatgccgatggtacttgcaacggtgatgtttcacagcgatctcctctttcctgatggtaagatttggttgcagctttctgggcccccccaagctttatatggacgaaacctccgtttgtttttgtacctctcgagttttgactcagcagccagcatgacaaccatccgtttggcagaaagaggcttccggttttttgcagattagttgccggggcacccctgtagttgtactcagaatttgaccattgactcgtcggcctgggaaaagaatcagcccgtgcagtactgaaaagcgtttactccaaccaggaaccagctaacttactgtgcagctgaaaagtcagtatgcagaatgtggaggataatatcacttcttttgtttttttttggtcgttaacttagaactccgagggcgagtcgtcgtaaatgttacaccagttgttattttgttaatagctttttttttaaaaatgttttcgctagcgcattcctagaaccttctcatttctgtaagatagttctcgcctctgtaagataaactaatgtatgcgcaagctagaaatagtccgcctgatccgtcacgcggaattggttacctaaaccctgttaatgtttcgttttgcatcgtgttggaatgtgtgtgttcttcctgtgaaggaaagcttttgcgggtcattatactagagcgaaaccatatcatcgtttgagatgtg

SEQ ID NO: 206300 - DNA, 6746 bp, Zea Mays
ccgcgcgtcagttaccgctgcccacccaccgggcacactttcaacacaggtgctgcgccggatgatcccaagagcagcaaacaaataataaacccctccaggcatacgcgagagcactctagtctcgagcacagcacaaggccgccggtcccttctctcccactcccactactcgcgctcgccgctggatcctccacccgccgcggcgccaggccggagatccagcagctgggaccacggaggtcggccggttgctccgttcccgctggtggttgctcttcggccgctggagatcggcagacggaagcagttgacgccacagggcttcgtgctgccgaattccccagatattctgggggttcaaccgaacccccatgcccgacaacactgggcttgaaattggccttaaaggctccaagggagccccaatgccaggaacggaaggaagagtggcaaaggatttgaagaaagctcctgcctccttggaggaaagcaatgcttctcgtgatgaggatcctggcggagggcctgccttgactgggaagaaaaggaaggaccggaggggttccgcggatgacaacaggaatgtgacaagaagggtgttgaggtccgacgccatgaagctgcgtgctgaggctgaggcaccatgtggagcgggtgtggaggttagcaaaactgatagtttggagaggaaacactgtgacactactgtggaggctgaggcttgcaaaagtagtgtgctgatggaagttgcctgcaatggtggggaagccaacggattagttaacttggatgcgagcgatgtttcggaagaatcaactaggtgttctgataataatatgggaatgcctggtgttcctgcaacagatttttctcaagatggtggcttagctcaaggtagcattgcagaatcagatgataagacagtcaagtcagatgaggtgtccgctgtaactcattcagagcagaatgactcccaagctggaataaacagttataatgctgatgaggcccaagataacaaagtgagacatgggccttgtcaggatgaggtcatagactcagcaattactaatggtgccaacacaagtacagatttaaccaaaaccagccctaccagtggatcagaatctgttaagcaggatgatagtaagcaggagaataatttggttcatactgaaggagtgatactccacagtggtgatccgaaagttgagaatcattctcaaattgaggacacttgtacagaaactgagatttctttgactgggaatggaagatgtgcagctgataaccacactgatcgaactgggtacactaagcaggaggagaggggcagccctgtgaacgaaaccaatgatatttcggcacatgacattgtttttacaaggagaggtagaaaatcatgtgaggcaaagcaggggacatgtgaagaggagtcacggtttgagaagcgagttacgagatcagctacagttagacagagagaagtttctggaagcttatgcaaaactaccacgaatgagactgcactaggaagcagagggaggaagggagatattattgctcactatacaaggaaagtgagcagtgcagtatctccaaaaggtcaccatgctgagctgggagaatgtaataccagtatggagaatcaaacagtgaaacaaaaggtggttgatcgaagagattcaggtgccactaagaatgataatgatgcgaatgacacaaagaataaggaatcagaaaagacagagatcaatctgaagacgcaaccacctgttggaagtgttagcattgtaaataaaacaactgtaggagctgtttctgtggtgggtcagagtatctctggttcagccatcactgagagaaatgatacagatcatactgattctgatggagttaaatatgaaaatatgactcttgtgcagaaactactactgtctgttggcgcgaagattgttgccagcaagaagagggtattggaagcaggtcctgataaaaccactggaaggtcaccaattgctttgccatccatgaaaaagacaagaaatacgtcttctgatcctgagatagatcaacctgataagtcttctggagagaagcttattggaaataactgtgatttgggcaataaacgtgttttgagggaacggcagcatcagaatcaaacatatttgtcaagcaggtcttctaaccagtctaatcaaaatgctatcaagcagacacaggatcaatctgacgatgatgacatcagcagcgatacttcctacaggagaactcgtagcggacgtcgtcgtggtgctgcccgtcttgccgtgccaaaacaagaggactccagtgattctgaagaagttgttgttgtgaaaaagaatcgacggaaacgtaagaaatctgtgcataaacacagggctggatctaagttgaagcatacttctggtagtcctcccaaaacaggtcgtttgggtagacctccacttgtcaaatctgaatgtggctgcttacctctgcagccaggaaaagggaaaatgaatgtgcctgaaggtacaggagctctacgcgaagaaaaacaaaaaataagtgatcagataaaggccatgcttctagatgctggttggacaattgatttaagacccaggaatggtagaaactacatggattccgtgtatatacatcctagtggcaaagggtcttactggtcagttacaaaagcatattacgtgttccgtgcagatatggaatctgagcagaaggaaagttctaaagaccatattctgtcaaaaaaatctgttggtagccccggcaaaaggcaggtctctagttcttcaggctgtactttaacagatgatatccttagcaaattaaaaagagttgttgtaaacaaacgaacaaccaaagtagagattcaaaggttgagacagaagaaggaaaagaagaatactacaaattcaacaagattgcatttaggcaatgaaagaaaaaagagaggtggctgtgctctactcgttcgtggatcgaacaaggagtctggcagcaccactgatggttttgttccatatgaatggaaacgtacgatcttctcctggctgattgatctgaatgttctatcagtcaatactaagctgaactgtttggatgaaagccactcaaaggttttactagagggttttgtcactagggatgggattaactgcagctgctgtagcgaggtcatttcagtgccagaatttgtgactcatgctggttctgaagtaaataagccatacagaaacatacttgtggatgggctagacattgaccttttgcactgtctcattaatgcatggaatatgcagtctgatgctgaaagacaagatttctttcccgttagcattgagggagatgaccccaatgatgacacctgtggtatttgtggagatggaggcaatttgatctgttgtgatggatgcccctcgacatttcacatgagttgtctaggactggaggcacttcccactgattattggtgttgttccaactgctcatgtaaattttgccatgaacattctagtgatgatgctgaagacactgctgatgttgattcttcattgcatacttgttcccagtgcgaagagcagtgtactgatccctgtttatacttactctgtagttcttttgaatttcgaaatcttttgacactttttattccattttcattattatcttactatattattttgatgttcaatcatgtctttgagtattttatacgataatgtctgcagatcatggagcctgctctcctgatattgattccatagctactaatctttctagtcagacaggcaatttattctgccaacaaagctgcagactggtatcctttccatgacttctgctgcggacgatgtacgcacatggcgtgaggagctcgctcgtgccagggcagatctggagcaggcccgatctgctatcctccagctagtgatctactcacggcaaaggtggagtctgactgccgatcagcggcgacaacgcgactgcaggaggctgtgcatgggttcctggcgtgacgtccagtgtggcagcggcttgccgtcttcaggctacgacacgtggcttcctggcgcggcgtcaagcacagcaagcagcggcttgccctcttcaggttgcggcacttggcttcctgacgtggcgtcaagcacgacaagcggcaacacggttgcaggctacggtccgccgttccctggtgcagcgacttgcatcggtattgcgcgttgaacaacacgcggcacgtggggcgacaaggccttcagcagggttggccgatccttagccatgtggacagcaagaacaagtctggttgggtggtgctgtctccactggaactcgcggtagctcaggccgtaagactggtgagctgccacgtcttggcctttgcagcctggaagaggttgttcccatgggatccagggtggcatatgttaggttctttattttatttgttaataaattaaagcggagatgtaaaaggcttatagttagggttgcactttcacatgcatatcaagttagacagcaaggttgtttccatgcaccgagaacgagctgtcttcaaagggtgggggaatgtcatgtggtggcagcccagggcatggaggcccatagggataggctcagggttaggattagtgaataaagattagataagattgacttagatacttgggattagattagataaaataagattgagttagttacttgagagccgagtcttcgtatctatacaaggatgggctgtacctccttaagaagaaaaaggaatgaagaagaattagtcccagatctctccaatagtctggtctctctcaagccgactccgcctgactaccttccggcgctgtttatcacccctatgaactaggattcaaaacatatttgaactattatttagtgacttgagaaccttgtcattttaatccagctattaaaagctctactcttcttttggattgagtcgctatatttttatttctgaaactagacagttggtatttagtcataagaaatgtgtaatgcaaaaacaccatggaagttgtgtatttttgaaaatgctgtattaaacactattttttaccatcaaatcaaacacacatcctgtctagatcctttctatctatttgtggttttatttatcttctagtttattaatgtatgtataccctccctacaagccgcaactgacccaagaacttccaaacttcaaatggtatagttgcataatctgaaattactagttctgtgatgcagctgtttgaggaattgcagaatcttctcgcagtcaagaaggatcttgaaccagaatactcatgcagagttgttcaacgcatccatgaagaggtaccagaagaagtccttgctttggacaaaagagttgagtgtaactccaagattgctgttgcactctcattaatggacgagtgcttccttccgattgttgaccagagaactggcatcaacttgatacgcaatgttgtgtataactgtggatcaaattttgcccgattggatttccgtggattctatataattattttagaacgtggagatgaaataatagctgcagcatctgtccgaatacatggaaccaagttagctgagatgccgttcattggtacccggaatatgtataggcgacaagggatgtgccgccgacttgttgatggaattgaaatgatcctcagctctctcaatattgagaagctgatcattcctgctatcacagaacttgtggacacctggacatctaaatttggatttagtccactggacgattctgagaagcaggaagtgaaatccgttagcatgttagtttttcctggtacaggtcttctccaaaagccattgctgaagacctcaccatcggaagatcaatgctcccaaggagacaaaactgaaaaatcatctgatgtagtcaatgaagattcgctttgctctggtgcaagtgccgaccccctaggttcggtggtcaaagagcatggggacaccagcaaagatgccgatggtacttgcaacggtgatgtttcacagcgatctcctctttcctgatggtaagatttggttgcagctttctgggcccccccaagctttatatggacgaaacctccgtttgtttttgtacctctcgagttttgactcagcagccagcatgacaaccatccgtttggcagaaagaggcttccggttttttgcagattagttgccggggcacccctgtagttgtactcagaatttgaccattgactcgtcggcctgggaaaagaatcagcccgtgcagtactgaaaagcgtttactccaaccaggaaccagctaacttactgtgcagctgaaaagtcagtatgcagaatgtggaggataatatcacttcttttgtttttttttggtcgttaacttagaactccgagggcgagtcgtcgtaaatgttacaccagttgttattttgttaatagctttttttttaaaaatgttttcgctagcgcattcctagaaccttctcatttctgtaagatagttctcgcctctgtaagataaactaatgtatgcgcaagctagaaatagtccgcctgatccgtcacgcggaattggttacctaaaccctgttaatgtttcgttttgcatcgtgttggaatgtgtgtgttcttcctgtgaaggaaagcttttgcgggtcattatactagagcgaaaccatatcatcgtttgagatgtg

SEQ ID NO: 206301 - DNA, 917 bp, Zea Mays
ctcacttctggaagagtgaaagtggagtaaagaaacctagagatggattacctggacctgtacctaatccacatgcccgtctgccagaagcccgggccgcctgtgttcccggccaggagagaggacgcccgcccgttcgacttcaagggcgtgtggcaggcgatggaggagtgccagcggctagggctcgctagggccatcggcgtcagcaacttcaggaccaagcacctcgacaagatgatgccttttgccaccatcacccctgcggtgaaccaggtggaggtgaacccggtttgccagcagctgaagctgagggggtactgcgccgagaagggcatccacgtccaggcgttctcgccgttgggaggccagagctgggcggcggaaagaaacgccgtgctcgagtccgaggtcctcgcggagatagccaaggcgagagggaagaccgtggcgcaggtgtcgttgagatgggtatttgagcaaggggtgagttttgtcgttaagacctacaaaaaggagaggcttaaggaaaacctcgagatcttcgactgggagttgactgacgaggacagggtcaagatcagccggatcccgcagaagaagctttctggcttctcattcatgttcaagccggaaggtgagttcacatcggttgatgtctcggagatcaatcctatagaggagtaggcgctaaagaaatgccttgattctcaataagccaatttcgcttgatgtagtacctgtatatatttgaataaggcagcattgactgtccgttgttgaactcaatcgtttttttacatccgaaatcctgtcatgtaaatcagtataaaaggacgaattttttgggaactccctctgtctctggttcataacttcatatacatattcagaaacatgcatagtggaattttggg

SEQ ID NO: 206302 - DNA, 1626 bp, Zea Mays
ccgttcccatcttgcagttgcgtcccctctcgctcgcggccatggcgaaacctcgcggggcgccgaagctcctctacccccgccaccggcggctcctacggtcaccgatctcgcgctgcgcttgcctgttcctcgccttcgctgcgctcctcctcgtctcctccctgcaccaggtcgttcgggtcgacctactacgcccggacccgccccaccagttcaaggcaagtcagacagctacatgactgttagaagtaatggaggactcaaccaaatgcgcactggaatctgtgatatggttgcagttgcccgtttggtgaatgcaacacttgttatccctcagttagataagcgatccttctggcaagataccaggttctgagtattaggttatagtttagctattgccatatattctgtctgattgctccttatttttttgtttaacaactcccaccactatctacagtacatttaaagacatatttgatgagcctcattttattaaggctttggaaggagatgtccacattgtgagtgacttgcctggaagtttgcaatctgctccaagagcccggaaacatttcacctcatggtccggtgcaagttattatgaggaagtgaaagagctctggaagaatcagaaggtagttcacatcccaaaatctgattcgcgtcttgctaacaacggtcttccaattgatatccagagattgagatgccgctgtctttaccaagcactgcgtttttcggatctgattgaggaccttggaaaggcatgaattctcttgataaactgtacatatctttaactcagaatttactgtcttcaattgcagttggagatttatagcagtctctaattagattctgagccaatgtaacacttacgaaacagaagctagtagagcgtctaagatctcatggaaaatatattgctcttcatctacgatatgagaaggatatgctagcatttacgggatgcacttacggtctgagtgatttggaagcaaatgagttgagaattatgagagagagaacaagccactggaaactgaaggatataaactcaactgaacagagatatgaaggcaactgtccactgacaccaaatgaggtgggcatttttctgcgtgctatgggctatcctgaatccacgtggatataccttgcagcaggtgaaatttatggtggtgaaaagtatatatcaaaattgagatcatacttcccaaatttggttagcaaggacatgctagcaacagaagaagagcttgcgaaattcagtaatcatgcttctcaagttgctgcccttgattacataatcgcagttgaaagtgatgtgtttattccatcacactctggcaatatggcaaaagctgtagaaggccatcgtcgatttctagggcatcgtaaaactatcactcctgacagtctctgataagtgcacacttatcttgcacatatttcatagatcccagtatcgttttggatgtttcttttctgtggacatttgcaagtgtatggagttataagtcctttatttgtgcagtatccttttacttactcctctttatttttacacttttgacattatgctctatcaatcttcgccatgtaactaagtgttcg

SEQ ID NO: 206303 - DNA, 3893 bp, Zea Mays
gtctcactgagtcaataggtcatgggtttgaagcagcctctccgcatttgcgggtgaaggcttgcctcgatttatcccttccccagaccccactcatgttattaactcctccagaaactccgctttttcgatctttggatgatgaagaaaaccaatccatcactcaggtttctaggggcagagctcagagcaagcctgtacaaacttcaaggtcatccacgatggataatagtcaaagagctagtagaagcagtgcaagcccaagcaggcttagcccatctccacgctctatgggaaggacaagatcatctagttcagcttctcgctctagcccaccacttgctgttcaaacacaaatgccatcacaaagatcgtcagcccctccgattgctaagacattaacacctcctcgaaggtctccaagtcctgtctcaagaaggatgagtactggttcaagtcgcccaactttgaatgaaacaagaggagcttcaccagtgaaacctaatcacagatcttcacaaaagctgcatggatggcaatcaaacgttcctggtttcccttacgatgcgccttcgaaccttcgcacatctctaactgatcgtccagtatgccggtcaaggggtggatcaccttcatcttttagtggactagaaaaaggttcaagatctagaagacagtcaatgtctcctaccccacctagaagagccagttcatctcacagcattgaacgggaccgaatgagctcttacagcaaagcttctgcaacatcatctggtgaggatgatctggattctatgcagtctgtaccaattagctactccagtagcccagttgtgaaaaagagcttggttgtaatgaaaaccagaaccatggcaccatcaaagaatctgtccaaaaatttcacacctagttctgtcccaaagcggacatttgactctgcactttggttgatggatcaccgcaaagctccacaagataggttccgaccacttctatcaggtgcccctgccagcacatttggttctgggaatggaaatgatgtgcacaaacctatgttttcacacaattcctctttgacaactagcagcaatgcaagctcttatcatggtgccacttttggctcttatatgcatggcagccaagaacaacatgatttggttggtgaatgggaagcagatgatagttctcggggtcatgaggatatatttatgtttgataaattggatgagctcaataaagaagacattcattacaagagcacgggatctacggataattcactggtcatagtaaaacatctagtaagtagcagacatgacttggaaggaagcagtagacctaatcagtccttatgccattctgctgatagttctcaggttggcaatagtaaaaatgctaattgctctagatgtgggaagttttttgatgcgatggatgtggatgaagagggtgtctattgtgatgtatgtgcttcaatgattggaaatatcttaaccagtcctattgtacaacctataggagaagaaaaccagcaatttgataaaactacaaatttgaaacattgcatcgcatctgaccctcctatacccacaggttgtataggctatagcaaagaagtatctcttgatcatcaacttgtgaacagtgaatcgtacactgattgcctggaccaggtccctccaattcattcaatggggcacacacctcaggaaatgctactggggcgggaggaaaagattgacgcagagcatagaaagaaacatgttggggactcattaggaaatacaaatgatattgtcttccatcaatctaatgtgactgaatgtgaacaaatagaaccaacatctgtggggcatgaccttttcatcagagaccaaatggataaccataatcatggatcgtcccaatataatgaaactatctctgaaactgtgaccagtgacagttctcatcaaccaggatcaactacatatcaaaaccctaaacttgaaactactgagggtactgggatatcagtactattagtccctaagtcaaacagcaataaatggcctattgtagaagggagggccctggctgctacaaatatgttgtgttcagaaccctattatgcaagagatggtgtcagtatgatgaagcgtagctttggactggacagcacttcagctgcttcttccagtgatcttggatcttcaaggcaatcaatcatatgttttgagcgccttaggagtggtaagaggggtgacttcgagaagtctcagataagcagcactatgagtcgtcaaagcattgcttctgtgtcagatatgtcaatctgtagctcttcagcttcactttgccctcagattggtgctgtaggttattgctgatgatgacagtcatgttgacttgaaaattcagagctatttaagtgaggtaggagatacaacagttgagaatcatagtgctggcagaatgcctgacatggatcataccagtacaaatatgtattctttagatactgaaatgccaagtgatacccgagagtcatcaggcctagaggaaagttgcctgcctgaaactgaagaggatgcttacgccatcaatcagtgcaataaaggtagtgctcgagaacattcaagtgatgagaacaactttgatgatattcaaatgcagtctgaaatagttcagggtttagctgaggaaaacagattggacgattgttgcatgtctgccatctctgaggaggatgtgttgatttctggacgagaagccgacataagggaacttccgaatgatgaagaattttgtgcggaggtagaaggatcaaggaaacaaatccaaagatgctttacattggaagaagctgctgatacaattctcttctgtagttctattgtccacgaccttgcatacaaggctgcgactattgcattggaaaatgagaaggaatcagagtttgttgaccctattcgcccaactgttagaatagttggaggatctttctctaaggatgagagtttaccaaagctgactcacagacgaactccaaatcgtaaggtcaaaaggaaaagattggaaggtgaaacaactacaacggaaactacagagaaagatgctgttgcgaaagactcctcccctgtatgttccgcatcaggtattacaaggaattccgataatatgaaacctccaaagctggagtccaagtgcaactgtataatcatgtaagtaacttcacgtccaaggtcgaaggagttgtgatattggttgggacgaaaatccatgctttctggtttcatgtcacatgcaacttgaagcatgcctacctgcttggttaacccgctgtcagcagcaacgatggagttcaaggcagtggatcttccactagattattttgcagaggtgcatttgctgtgttttttaggtgacagaatgcactgcgagctattcttttgtaaagtcttttcttctctgttgtggaaattttctgcttgtcgtgaggtctattgcggtttgtccaaagtgtgaaagactactagagttgtgctgatagcgtatttacttgcaatgcacgtggctacttgtgaaaatgatggtcgtatactcctatgcacacggcccggatctcacttttttgattccacgatgcatctcttcattgtggagttgtgggtgttggttcttttgccccacaccaaatatggtggcgttctcagctctccgagttcattctttgagatttattttaacctggactgaaagtaatggctttattttcccacttttcctatccaccagttgcctgaaatctagactttgttaaggcgacatgttgcgcgtctgtttcgcttcaagacttgtgcgtcttctcctactgtcggatatgatccattataatttggactcgactcgtg

SEQ ID NO: 206304 - DNA, 4693 bp, Zea Mays
aaaaacaaaagccacttctcccccagtccaccgcctccctctctgctcctccagcgaagcgcacgcacgacgagcgcaggctgcaaggcaaccgaagctagcgagctcctttgcttctacccgcggcaactcttcaggcgctcgcgacgcatcgagcccttaaggccgaggcgagcgcgagttcgggagcggaggagagaagcgctccgcgagacgactgggacccccaccgcgctcgggtcggaagctggatctgcctcggggctcgtgcccgcggctggatatcgtggggcgcgggggccggagcggctggtggagcggactgccggcggacggagggcgccggtaatcgaaggcggcggtggaatgcgggccatgatacatgttccatctgttctggttctggatggaatttgactgcattctgctatccctgaaagaagggtagcacgcttaagaggccaggaaaaatgccactgtcaccctcaccaaggagatcaaggtctcctgcatgggagacttatcacaagaggaacaacagtttcgggaatgtgcttcctgtgaaatcgaaggatgatgaactcgctttgttctctgatatgcagaaagttgagacggagaacttcttactggaaccgtcagaagattttgacgactcaatcgcagcaaaactgagctatttcccagaagtaaaacttggtgttaacattcctgcccatggagaaagccacaatttgctaaatgcggacgacaataaaaatgattatgagtggttattaactcctccagaaactccgctttttcgatctttggatgatgaagaaaaccaatccatcactcaggtttctaggggcagagctcagagcaagcctgtacaaacttcaaggtcatccacgatggataatagtcaaagagctagtagaagcagtgcaagcccaagcaggcttagcccatctccacgctctatgggaaggacaagatcatctagttcagcttctcgctctagcccaccacttgctgttcaaacacaaatgccatcacaaagatcgtcagcccctccgattgctaagacattaacacctcctcgaaggtctccaagtcctgtctcaagaaggatgagtactggttcaagtcgcccaactttgaatgaaacaagaggagcttcaccagtgaaacctaatcacagatcttcacaaaagctgcatggatggcaatcaaacgttcctggtttcccttacgatgcgccttcgaaccttcgcacatctctaactgatcgtccagtatgccggtcaaggggtggatcaccttcatcttttagtggactagaaaaaggttcaagatctagaagacagtcaatgtctcctaccccacctagaagagccagttcatctcacagcattgaacgggaccgaatgagctcttacagcaaagcttctgcaacatcatctggtgaggatgatctggattctatgcagtctgtaccaattagctactccagtagcccagttgtgaaaaagagcttggttgtaatgaaaaccagaaccatggcaccatcaaagaatctgtccaaaaatttcacacctagttctgtcccaaagcggacatttgactctgcactttggttgatggatcaccgcaaagctccacaagataggttccgaccacttctatcaggtgcccctgccagcacatttggttctgggaatggaaatgatgtgcacaaacctatgttttcacacaattcctctttgacaactagcagcaatgcaagctcttatcatggtgccacttttggctcttatatgcatggcagccaagaacaacatgatttggttggtgaatgggaagcagatgatagttctcggggtcatgaggatatatttatgtttgataaattggatgagctcaataaagaagacattcattacaagagcacgggatctacggataattcactggtcatagtaaaacatctagtaagtagcagacatgacttggaaggaagcagtagacctaatcagtccttatgccattctgctgatagttctcaggttggcaatagtaaaaatgctaattgctctagatgtgggaagttttttgatgcgatggatgtggatgaagagggtgtctattgtgatgtatgtgcttcaatgattggaaatatcttaaccagtcctattgtacaacctataggagaagaaaaccagcaatttgataaaactacaaatttgaaacattgcatcgcatctgaccctcctatacccacaggttgtataggctatagcaaagaagtatctcttgatcatcaacttgtgaacagtgaatcgtacactgattgcctggaccaggtccctccaattcattcaatggggcacacacctcaggaaatgctactggggcgggaggaaaagattgacgcagagcatagaaagaaacatgttggggactcattaggaaatacaaatgatattgtcttccatcaatctaatgtgactgaatgtgaacaaatagaaccaacatctgtggggcatgaccttttcatcagagaccaaatggataaccataatcatggatcgtcccaatataatgaaactatctctgaaactgtgaccagtgacagttctcatcaaccaggatcaactacatatcaaaaccctaaacttgaaactactgagggtactgggatatcagtactattagtccctaagtcaaacagcaataaatggcctattgtagaagggagggccctggctgctacaaatatgttgtgttcagaaccctattatgcaagagatggtgtcagtatgatgaagcgtagctttggactggacagcacttcagctgcttcttccagtgatcttggatcttcaaggcaatcaatcatatgttttgagcgccttaggagtggtaagaggggtgacttcgagaagtctcagataagcagcactatgagtcgtcaaagcattgcttctgtgtcagatatgtcaatctgtagctcttcagcttcactttgccctcagattggtgctgtaggtgattcctgtttcccaattgacactttagaaagcagcacttcaagaacattgatctcttctgaagaaaatgatgctttttgtaaggatgctttgccaagtgatatggaatgtttgtctccacaggttattgctgatgatgacagtcatgttgacttgaaaattcagagctatttaagtgaggtaggagatacaacagttgagaatcatagtgctggcagaatgcctgacatggatcataccagtacaaatatgtattctttagatactgaaatgccaagtgatacccgagagtcatcaggcctagaggaaagttgcctgcctgaaactgaagaggatgcttacgccatcaatcagtgcaataaaggtagtgctcgagaacattcaagtgatgagaacaactttgatgatattcaaatgcagtctgaaatagttcagggtttagctgaggaaaacagattggacgattgttgcatgtctgccatctctgaggaggatgtgttgatttctggacgagaagccgacataagggaacttccgaatgatgaagaattttgtgcggaggtagaaggatcaaggaaacaaatccaaagatgctttacattggaagaagctgctgatacaattctcttctgtagttctattgtccacgaccttgcatacaaggctgcgactattgcattggaaaatgagaaggaatcagagtttgttgaccctattcgcccaactgttagaatagttggaggatctttctctaaggatgagagtttaccaaagctgactcacagacgaactccaaatcgtaaggtcaaaaggaaaagattggaaggtgaaacaactacaacggaaactacagagaaagatgctgttgcgaaagactcctcccctgtatgttccgcatcaggtattacaaggaattccgataatatgaaacctccaaagctggagtccaagtgcaactgtataatcatgtaagtaacttcacgtccaaggtcgaaggagttgtgatattggttgggacgaaaatccatgctttctggtttcatgtcacatgcaacttgaagcatgcctacctgcttggttaacccgctgtcagcagcaacgatggagttcaaggcagtggatcttccactagattattttgcagaggtgcatttgctgtgttttttaggtgacagaatgcactgcgagctattcttttgtaaagtcttttcttctctgttgtggaaattttctgcttgtcgtgaggtctattgcggtttgtccaaagtgtgaaagactactagagttgtgctgatagcgtatttacttgcaatgcacgtggctacttgtgaaaatgatggtcgtatactcctatgcacacggcccggatctcacttttttgattccacgatgcatctcttcattgtggagttgtgggtgttggttcttttgccccacaccaaatatggtggcgttctcagctctccgagttcattctttgagatttattttaacctggactgaaagtaatggctttattttcccacttttcctatccaccagttgcctgaaatctagactttgttaaggcgacatgttgcgcgtctgtttcgcttcaagacttgtgcgtcttctcctactgtcggatatgatccattataatttggactcgactcgtg

SEQ ID NO: 206305 - DNA, 3614 bp, Zea Mays
aaaaacaaaagccacttctcccccagtccaccgcctccctctctgctcctccagcgaagcgcacgcacgacgagcgcaggctgcaaggcaaccgaagctagcgagctcctttgcttctacccgcggcaactcttcaggcgctcgcgacgcatcgagcccttaaggccgaggcgagcgcgagttcgggagcggaggagagaagcgctccgcgagacgactgggacccccaccgcgctcgggtcggaagctggatctgcctcggggctcgtgcccgcggctggatatcgtggggcgcgggggccggagcggctggtggagcggactgccggcggacggagggcgccggtaatcgaaggcggcggtggaatgcgggccatgatacatgttccatctgttctggttctggatggaatttgactgcattctgctatccctgaaagaagggtagcacgcttaagaggccaggaaaaatgccactgtcaccctcaccaaggagatcaaggtctcctgcatgggagacttatcacaagaggaacaacagtttcgggaatgtgcttcctgtgaaatcgaaggatgatgaactcgctttgttctctgatatgcagaaagttgagacggagaacttcttactggaaccgtcagaagattttgacgactcaatcgcaaaactgagctatttcccagaagtaaaacttggtgttaacattcctgcccatggagaaagccacaatttgctaaatgcggacgacaataaaaatgattatgagtggttattaactcctccagaaactccgctttttcgatctttggatgatgaagaaaaccaatccatcactcaggtttctaggggcagagctcagagcaagcctgtacaaacttcaaggtcatccacgatggataatagtcaaagagctagtagaagcagtgcaagcccaagcaggcttagcccatctccacgctctatgggaaggacaagatcatctagttcagcttctcgctctagcccaccacttgctgttcaaacacaaatgccatcacaaagatcgtcagcccctccgattgctaagacattaacacctcctcgaaggtctccaagtcctgtctcaagaaggatgagtactggttcaagtcgcccaactttgaatgaaacaagaggagcttcaccagtgaaacctaatcacagatcttcacaaaagctgcatggatggcaatcaaacgttcctggtttcccttacgatgcgccttcgaaccttcgcacatctctaactgatcgtccagtatgccggtcaaggggtggatcaccttcatcttttagtggactagaaaaaggttcaagatctagaagacagtcaatgtctcctaccccacctagaagagccagttcatctcacagcattgaacgggaccgaatgagctcttacagcaaagcttctgcaacatcatctggtgaggatgatctggattctatgcagtctgtaccaattagctactccagtagcccagttgtgaaaaagagcttggttgtaatgaaaaccagaaccatggcaccatcaaagaatctgtccaaaaatttcacacctagttctgtcccaaagcggacatttgactctgcactttggttgatggatcaccgcaaagctccacaagataggttccgaccacttctatcaggtgcccctgccagcacatttggttctgggaatggaaatgatgtgcacaaacctatgttttcacacaattcctctttgacaactagcagcaatgcaagctcttatcatggtgccacttttggctcttatatgcatggcagccaagaacaacatgatttggttggtgaatgggaagcagatgatagttctcggggtcatgaggatatatttatgtttgataaattggatgagctcaataaagaagacattcattacaagagcacgggatctacggataattcactggtcatagtaaaacatctagtaagtagcagacatgacttggaaggaagcagtagacctaatcagtccttatgccattctgctgatagttctcaggttggcaatagtaaaaatgctaattgctctagatgtgggaagttttttgatgcgatggatgtggatgaagagggtgtctattgtgatgtatgtgcttcaatgattggaaatatcttaaccagtcctattgtacaacctataggagaagaaaaccagcaatttgataaaactacaaatttgaaacattgcatcgcatctgaccctcctatacccacaggttgtataggctatagcaaagaagtatctcttgatcatcaacttgtgaacagtgaatcgtacactgattgcctggaccaggtccctccaattcattcaatggggcacacacctcaggaaatgctactggggcgggaggaaaagattgacgcagagcatagaaagaaacatgttggggactcattaggaaatacaaatgatattgtcttccatcaatctaatgtgactgaatgtgaacaaatagaaccaacatctgtggggcatgaccttttcatcagagaccaaatggataaccataatcatggatcgtcccaatataatgaaactatctctgaaactgtgaccagtgacagttctcatcaaccaggatcaactacatatcaaaaccctaaacttgaaactactgagggtactgggatatcagtactattagtccctaagtcaaacagcaataaatggcctattgtagaagggagggccctggctgctacaaatatgttgtgttcagaaccctattatgcaagagatggtgtcagtatgatgaagcgtagctttggactggacagcacttcagctgcttcttccagtgatcttggatcttcaaggcaatcaatcatatgttttgagcgccttaggagtggtaagaggggtgacttcgagaagtctcagataagcagcactatgagtcgtcaaagcattgcttctgtgtcagatatgtcaatctgtagctcttcagcttcactttgccctcagattggtgctgtaggtgattcctgtttcccaattgacactttagaaagcagcacttcaagaacattgatctcttctgaagaaaatgatgctttttgtaaggatgctttgccaagtgatatggaatgtttgtctccacaggttattgctgatgatgacagtcatgttgacttgaaaattcagagctatttaagtgaggtaggagatacaacagttgagaatcatagtgctggcagaatgcctgacatggatcataccagtacaaatatgtattctttagatactgaaatgccaagtgatacccgagagtcatcaggcctagaggaaagttgcctgcctgaaactgaagaggatgcttacgccatcaatcagtgcaataaaggtagtgctcgagaacattcaagtgatgagaacaactttgatgatattcaaatgcagtctgaaatagttcagggtttagctgaggaaaacagattggacgattgttgcatgtctgccatctctgaggaggatgtgttgatttctggacgagaagccgacataagggaacttccgaatgatgtttggctgagccaatgaaattatggccactctgtggag

SEQ ID NO: 206306 - DNA, 734 bp, Zea Mays
gtccgcaagaccgcaacaccaccccattctccagcaacgagacaacaaatctcctcctcttcctctccgtatccgcatcagtccatcaccttcaatggcggcggcggcggctgctgccacctccttcaccaccctcgccgtcgcgcgttcggcggggcagcggtccctccttgcctccaaggccgcaccttcgccgctcctctccctccgtggcgcccgcatcccctcgcaggccgtctccttctccgggggccttgcggcgtcgccctctcacagccgcgcgcgcttcgctacatccgccagcgccgagcccaaggaagcagatcttcagtctaaaatcaccaataaggtgtattttgacataagcattgggaaccctgtggggaagaatgttgggaggattgtcatcggcttgtatggggatgatgttccacaaacagcagagaactttcgtgctctttgcactggagagaaagggtttggatacaagggatccagtttccaccgtgtcatcagcgactttatgatccagggcggagattttgacaagggcaatggtaccggtgggaaaagcatatatggacgcactttcaaagatgagaacttcaaattggttcacactggacctggagtggtcagcatggctaatgctggaccgaacaccaacggcagccagtttttcatttgcactgtcaagcaccaaagctaacccagaactggtaatgactggtgca

SEQ ID NO: 206307 - DNA, 1069 bp, Zea Mays
ctgatttaaaaaaaacaataagtgaaatcaagaggaggcgctcaaacaatgtaggtgtgagacgtgtcccaactctgaagatcatcctgtccacccatgtcttgtggtcgaaaactgcctccgcagcatggatccagcaaacgaacagaagagaagtctccagcaggcagcagcccatcgtcccacaccaagaacaaccagagaggcaagcaggggagaatcgcggaggtctgggaaacaccatcctgcagagatgacagtgctgctctccccgagctcctccctgttcctcgccaaaccttctgccgtcgccaagggcagggcggcggctgtgacgtgcttcagcgggccctccctgtcagtggggcgtgaagatcaggagggtgtagcagtggtggtggggaggcgtgcgttggcttccgcagcagctgtcgcctcagtgcttgggtttgcaggccgtggtctggcggccaaccagggcctgctcgccgggagggtccccggcttgtctgaacctgacgaaaatggttggagaacgtaccgcaggccagacgacaagtccggtggccacggagttggctggagccccatcatcccgtacagcttcaaagttccagacggctgggatgagaacgtggaagggaaggtcctgtcctcggagacggcggcgcattcgggaagaacttactaccagttcgagctggagccgccccatgtgttcatcaccgccacggcagctgggaacaggctctacctcttcagtgtaactgcaaacggtctgcagtggaagaggcattacaaagacctcaaacagatagcacaatcatttcgagtcgtgtagggttccaattcctactactactttttttttacagcgcctggctcttgttgatatgattagaggacatgggagacggtaatacggagagaggacaagtgagcatcgcttctgatgaccactctaactctgtaaggttacaaagctgcagcagcagttcaacagcttgtgtaaacctgctcgctaaggctaaatgcttttactatattttttttccccctgatgttgcct

SEQ ID NO: 206308 - DNA, 914 bp, Zea Mays
tgcctttttgtatgtcttttccttggttaccttagttccaaggggtcaagctcgtggtcttacatggtttatcccgatggatgacccaacactcatctccaggcagcaactttttgccagaattgttggcggccttggtggtagagctgctgaggaggtcatatttggagagcctgaggtgaccactggagctgctggtgacttgcagcaaattactggcttagccaagcagatggttgtgacattcggtatgtctgaaattggtccatggtctctgatggagggtggagcgcagagtggggacgtcatcatgagaatgatggcaaggaactccatgtcagagaagctcgcggaggacattgattcggccgtgaagcagttgtcggatgaggcctacgagatcgctttgaggcacattagaaacaacagggaggccattgacaaaatcgttgaggtgctcattgagaaggagacagtgaccggagacgagttccgggcgatcctttctgagtttgccgagatccctgttgagaaccgggttcccccagccacaccggcggccgcgctcccagcctaaaccctagccttgtaggggaggattttcttgttgtatggtgttcatattttggattcttggtgtacactaactctactaaatctgccggattttcggtacacgacatgtaagatgtaacttactcatggtgaattaatagtaaaatgtaattagattaaaataataggcctggcgcaacattttcagtttgtagcttcgcttctggcgagcgaaatctcttgctatatgttccacggttcctacttcataaaactatatgttctaattaagaacttgccattttgtttttggaactgatgggatcgggatcagcaagttgccacatttttaaaatgca

SEQ ID NO: 206309 - DNA, 1492 bp, Zea Mays
tcttgagtgagtttgtcgatatctacggacaagtaagaaaagatggcgctgccatccatgagtcttgtggcaaagggtgtgcttcccttctcagcacgtacctcgagtggtgtcacacaaaggccggtgtcagtgactgcttccttggagcacaaaaccagcgatgccagaaggaagttcctaaaacttgcgcttgggaaccttggagttggactgcccaccttgttgggcgctaagaaagctctcgctgatgagcaaggcgtctcgtcctcgaggatgtcttattcgaggttccttgagtatcttgacaaggatagagtccgtgtgcagcttcctggtctaagccaggagcttcttcaaaaaacacctgggttcagcggagcagacttggcaaaccttctgaatgaagcagccattctggctggaagacggggaaggacagcaatttcttcaaaagagattgatgattctattgacagaattgtagctggtatggaagggaccgtgatgacagacgggaagagcaaaagtcttgttgcttaccatgaagttgggcatgcaatttgcggaactttgacgcctggccatgatcctgtccaaaaggttaccttagttccaaggggtcaagctcgtggtcttacatggtttatcccgatggatgacccaacactcatctccaggcagcaactttttgccagaattgttggcggccttggtggtagagctgctgaggaggtcatatttggagagcctgaggtgaccactggagctgctggtgacttgcagcaaattactggcttagccaagcagatggttgtgacattcggtatgtctgaaattggtccatggtctctgatggagggtggagcgcagagtggggacgtcatcatgagaatgatggcaaggaactccatgtcagagaagctcgcggaggacattgattcggccgtgaagcagttgtcggatgaggcctacgagatcgctttgaggcacattagaaacaacagggaggccattgacaaaatcgttgaggtgctcattgagaaggagacagtgaccggagacgagttccgggcgatcctttctgagtttgccgagatccctgttgagaaccgggttcccccagccacaccggcggccgcgctcccagcctaaaccctagccttgtaggggaggattttcttgttgtatggtgttcatattttggattcttggtgtacactaactctactaaatctgccggattttcggtacacgacatgtaagatgtaacttactcatggtgaattaatagtaaaatgtaattagattaaaataataggcctggcgcaacattttcagtttgtagcttcgcttctggcgagcgaaatctcttgctatatgttccacggttcctacttcataaaactatatgttctaattaagaacttgccattttgtttttggaactgatgggatcgggatcagcaagttgccacatttttaaaatgca

SEQ ID NO: 206310 - DNA, 2111 bp, Zea Mays
ggttaactgatatgcggtcctcagaccctgcatgtgttgcaagtcgtggagtggcttcatgccacccaaacacaggagttgcaatgtgaaatcatgaattcgtctggaagtagaaacgggcgctctgggttacaattacaaacagctaccgctgctaccagccactagccgtcgccctccttccaatcttacgcgaatcaagtcattaaaaataaaaaaacataataaaaaacgacacaagaaaagcacaaactccaatcgctctggacatttcatagatttttgcactggccaggaggaattccggacatttcacccgcctcaagacctggcgactactcccgtctatgtcatgtgggctcatctcttccttatcgacgctgtggccgcccagccgcccacgttgcctcctccccgagacaatccccacgccaccgcgcaccggagacgaacctgaggagagaaaaatctgcgcccgtcagtgtgctcgcctacttctacgctccgctcgttcccccaaatagttcctcggcttcgctcctttcccctccctgctccggctccggttcgcacacagatggcgctgccatccatgagtcttgtggcaaagggtgtgcttcccttctcagcacgtacctcgagtggtgtcacacaaaggccggtgtcagtgactgcttccttggagcacaaaaccagcgatgccagaaggaagttcctaaaacttgcgcttgggaaccttggagttggactgcccaccttgttgggcgctaagaaagctctcgctgatgagcaaggcgtctcgtcctcgaggatgtcttattcgaggttccttgagtatcttgacaaggatagagtgaagaaggttgatttgtttgagaatgggacaattgctattgtggaggccatttctcctgagcttggtaaccgcgtgcaaagagtccgtgtgcagcttcctggtctaagccaggagcttcttcaaaaaacacctgggttcagcggagcagacttggcaaaccttctgaatgaagcagccattctggctggaagacggggaaggacagcaatttcttcaaaagagattgatgattctattgacagaattgtagctggtatggaagggaccgtgatgacagacgggaagagcaaaagtcttgttgcttaccatgaagttgggcatgcaatttgcggaactttgacgcctggccatgatcctgtccaaaaggttaccttagttccaaggggtcaagctcgtggtcttacatggtttatcccgatggatgacccaacactcatctccaggcagcaactttttgccagaattgttggcggccttggtggtagagctgctgaggaggtcatatttggagagcctgaggtgaccactggagctgctggtgacttgcagcaaattactggcttagccaagcagatggttgtgacattcggtatgtctgaaattggtccatggtctctgatggagggtggagcgcagagtggggacgtcatcatgagaatgatggcaaggaactccatgtcagagaagctcgcggaggacattgattcggccgtgaagcagttgtcggatgaggcctacgagatcgctttgaggcacattagaaacaacagggaggccattgacaaaatcgttgaggtgctcattgagaaggagacagtgaccggagacgagttccgggcgatcctttctgagtttgccgagatccctgttgagaaccgggttcccccagccacaccggcggccgcgctcccagcctaaaccctagccttgtaggggaggattttcttgttgtatggtgttcatattttggattcttggtgtacactaactctactaaatctgccggattttcggtacacgacatgtaagatgtaacttactcatggtgaattaatagtaaaatgtaattagattaaaataataggcctggcgcaacattttcagtttgtagcttcgcttctggcgagcgaaatctcttgctatatgttccacggttcctacttcataaaactatatgttctaattaagaacttgccattttgtttttggaactgatgggatcgggatcagcaagttgccacatttttaaaatgca

SEQ ID NO: 206311 - DNA, 1357 bp, Zea Mays
cagctatgctcaccacaagtgtaagatgaacaagcacaagctccagaagcgacttcgccgccacacatgagagctctctcctatccagttcgagagatgcaggatagaatgagacggcaggggcaatatggtgaagcggatattaactctatggttgctgcccagttgcatcactaccaggcacagcaaagggtacagaaacaccctgagaatagctacactggaagagatcctgcacaagcttctgcggagcatcagtacactccccctaaagcaagacagagtcaatgggatcgaggtggaccaaatgcgccaagccaggttccatcatatgcatataacgaagcccaaggtgctggaggtgcgcaatccttttatgatgggcagagatctgatacaaaggttggtctagaaaagcagcccagcaaggagtctagggagcaacctcgtactgaacgaactgaaacaagatacgagaattataatcttcctcggacattcgaaggtcttgaacaaagtttccatgaagacattattttgctatccaaggaactacaggaggcagaggatgctgaaaattctagacacatggagagattgaaggatataaatacacagtaccaggagaaactattagcacttagagctcggcaagcgaactatagagatgagttcctgcgcaaggaatctctagcacgccagcagcaataccagcacgccagcatgagccattacgctagcaattccacggctggggagcagcatggttataacccaacggcagcaggcacgcctcctgttgctgctggaggtgcttatggtgaggctcatcggggttatgcttctggccagtatgaatcatttagcgatcgtccagattatccagagttccatgatgggggcagaggtcgtggtcgtagttctgagcagcgtgctcaataccctggtggtcgtgcttataattccggtggccggcgattctagatatgctttgaactttgaaggacgatctatcactctgtcaagcgagctcatatcacctgatgtcagtgtgctgtaccgtgctatactcgaccgagaaacctaagcgctcataaaacttgttctacaattcaggtgcatcgaactactttatggttttgctagagttcattctggttataattgtagaggaacgaaacgatgagagaacactgacttttccgtttctctgcattcatgtaatatgatctcggaagcaataacatttcatcttctatagcttcgagcatcagagagatggtcaaatgacactgatttgcattacatgtgattgtgaaacatttgcttttgaaaatgccaataaaaagaagcatat

SEQ ID NO: 206312 - DNA, 1244 bp, Zea Mays
ccgcttgggccgaacaaggcctgggctacggccgccgccgcatcggacatcctttcacccttcagcccgcgtgccctctgtttctctcccggttcttcccctctcttgcgacgacagggttgggtaacgccgctcgccgccgccgccgccatacgcaggtgccgaggccttcgtcgatctcttagccgtcgacaagcacccaagagatgcaggatagaatgagacggcaggggcaatatggtgaagcggatattaactctatggttgctgcccagttgcatcactaccaggcacagcaaagggtacagaaacaccctgagaatagctacactggaagagatcctgcacaagcttctgcggagcatcagtacactccccctaaagcaagacagagtcaatgggatcgaggtggaccaaatgcgccaagccaggttccatcatatgcatataacgaagcccaaggtgctggaggtgcgcaatccttttatgatgggcagagatctgatacaaaggttggtctagaaaagcagcccagcaaggagtctagggagcaacctcgtactgaacgaactgaaacaagatacgagaattataatcttcctcggacattcgaaggtcttgaacaaagtttccatgaagacattattttgctatccaaggaactacaggaggcagaggatgctgaaaattctagacacatggagagattgaaggatataaatacacagtaccaggagaaactattagcacttagagctcggcaagcgaactatagagatgagttcctgcgcaaggaatctctagcacgccagcagcaataccagcacgccagcatgagccattacgctagcaattccacggctggggagcagcatggttataacccaacggcagcaggcacgcctcctgttgctgctggaggtgcttatggtgaggctcatcggggttatgcttctggccagtatgaatcatttagcgatcgtccagattatccagagttccatgatgggggcagaggtcgtggtcgtagttctgagcagcgtgctcaataccctggtggtcgtgcttataattccggtggccggcgattctagatatgctttgaactttgaaggacgatctatcactctgtcaagcgagctcatatcacctgatgtcagtgtgctgtaccgtgctatactcgaccgagaaacctaagcgctcataaaacttgttctacaattcaggcctgcatcgtgcgtcca

SEQ ID NO: 206313 - DNA, 3495 bp, Zea Mays
ctcttttccccgatgaccagttctcacaaaaggcaggacgcaagcagcagccatatcctccaggtttcatgattcttctcttcatcctctgcttccatcttcctcctttggaactggagaaaggagaggagacaaaaccatccaagcgatccgtttctcccacttgtctcgcgccaccattattgcccgcccaatgggacgccgccgtatcctcgccgcgccatagttttaaccttgcgtccacgcctgcccaagtgcccatcccacttttcttccacgcaaaggattttctctctctctccttttccattttaatactgcacgatctctgatcgattgattcggccgagataactggagccttgtgtttttatttcgggggtcttgtaccaaaatagcgtcgattttatctacttgacccctgacccattctctctctctctctcccttttcaatttcgggggctttatttctctcctcccacgccttgcatcttcttgatgcgttgcgtcccgactcgaggcagacatcggaggcgcgccactgacttagctcgcgatttctagatccgcaaccctgcgctgctcaactccgattcttttagttcggattcgggtagcagcagggcttcggtggcgatgacttgattgatacgaattggggatttcttgctgtttgcgcctctcttcgtatcggcgctgaagggctcagctcgagattagaacaatttgggttttggggtcttttcttcttctactactgctggtcaagttcacagaaatcgctggctccgtggtccaatggacgagtccggggaagcgagcgtcggctccttcaggatcgggccgtcgacgctgctgggccgcggggtggcgttccgcgtgctcctcttcagctcgctgtggcgcctgcgggcgcgcgcgtacgcggccatctcgcgcgtgcgcagcgcggcgctgccggtggcggcgtcctggctgcacctcaggaacagccacggcgtcctcctcatggccgtgctcctcgccctcttcctgaggaaactctcggccgcgcggtcgcgggcggcgctcgcgcgccggcgcaggcagcacgagaaggccatgctgcatgccgggacgtacgaggtctgggcgcgcgccgccaaggtgctcgacaagatgtctgagcaggtccacgaggcggatttctacgacgaggagctcatcaggaataggctcgaggaactccggagacggagggaggacgggtcgctccgggacgtggtgttctgtatgcgcggcgatcttgttaggaacttggggaacatgtgcaaccctgaacttcacaagggcaggctagaggttcctaagcttataaaggagtacattgaagaggtttctactcaactaagaatggtgtgcgaatctgacactgacgagttgctgttggaagagaaacttgcctttgttcaggagaccaggcatgcctttgggaggacagcgctactcttaagtgggggtgcttcactcgggtctttccatgtaggtgtagtgaaaacattggttgagcataagcttctgcctcggattatagcaggatcaagcgttggttccatcatatgttcgatcgttgctacccgtacatggcctgagattgagagcttcttcacagactcattacagaccttgcagtttttcgacaggatgggcggaatttttgcagtgatgaggcgtgtcaccacttatggtgcactgcatgacattagccagatgcaaaggcttttgagggatctcacaagtaacttaacatttcaagaggcttatgacatgaccggccgtgttcttgggatcaccgtttgctctcctagaaaaaatgagccaccccgctgcctcaactacctgacggcaccacatgttgttatttggagtgcagtaaccgcctcttgtgcatttcctgggctctttgaagctcaggaactgatggcaaaggataggttcggcaacatcgttcccttccatgcaccctttgccacagatcctgaacaaggtcctggagcatcgaagcgcaggtggagagacgggagcttggagatggatttacccatgatgagacttaaggagttgtttaatgtaaaccatttcattgtgagccaaactaaccctcacatttctccactcctccggatgaaagagcttgttagagcctatggagggcgctttgctggaaagcttgctcgtcttgctgaaatggaggttaagtatcgatgcaaccaaatcctagagatcggtcttccaatgggaggacttgcaaaattgtttgcccaggattgggagggtgatgtgaccatggttatgccagcaacacttgctcagtacttgaagatcattcagaatccaacatacgcggagctccaaatggctgccaaccaaggccgcaggtgcacatgggagaagctctccgcaatcagagcgaactgcgccattgaacttgcacttgacgaatccatagcggttctaaaccacaaacggaggctaaaacgaagcatggagaggacggcggcggcttcgcagggtcactctaactatgtccgacccaagactccgaggaggataccgtcatggagccgcatcagtcgagagaactctttggagtctctctcggaagagatctctgcggttgctgcttcgtccatgcagcaaggcgctgctcttgttgtcggcgcaccaccaacgactctttctcagcatgttcggcgcagttctcatgacggaagtgagagtgagtcagaaaccattgaccttaattcctggaccaggagtggagggcctctaatgaggacagcgtccgccgacaggttcatcagtttcatccataacattgagattgacacagaattaagtaggccctgtgctgtggaaggtgatgctgcagatgcacagaaaattctgggaccgagtcgtgcaacactgtcaacaccagagcttctactcccacaagcatggctgttcgtgaaggagatttgctgccgcctgaaagcactactgataatgtcctacttaacattgtgaaaagagacgccctgcaggatggtgtaactgaattggcggaaagctcctgcgctgaaggatatgcggcaaactgtgacaccgtctcagggctagactgctgaaggtaacaagacgctcgctgctgacttgagcaatcaacaattagctgatgattagattcttcttgattttgatgatgaaaggtcatttatatgtagctcactacagcaacgcagtgtaggaaaattgtacctgctcgatttaaactttaaagagcatgccatgagtagctttgttaatgttaatattcacatccattgtggaattgttggttgatgcatttcttagcacgtcgagcaaccatatcacagcatgccatgagttcggcactggtacttggaatgtccaaatcatctgttcgctacatgtaacatgcagtggtttattagtcttgcagacacttcat

SEQ ID NO: 206314 - DNA, 2263 bp, Zea Mays
ctcaatcttgccacggtactccttgatctgaataacatgttcctaagcttataaaggagtacattgaagaggtttctactcaactaagaatggtgtgcgaatctgacactgacgagttgctgttggaagagaaacttgcctttgttcaggagaccaggcatgcctttgggaggacagcgctactcttaagtgggggtgcttcactcgggtctttccatgtaggtgtagtgaaaacattggttgagcataagcttctgcctcggattatagcaggatcaagcgttggttccatcatatgttcgatcgttgctacccgtacatggcctgagattgagagcttcttcacagactcattacagaccttgcagtttttcgacaggatgggcggaatttttgcagtgatgaggcgtgtcaccacttatggtgcactgcatgacattagccagatgcaaaggcttttgagggatctcacaagtaacttaacatttcaagaggcttatgacatgaccggccgtgttcttgggatcaccgtttgctctcctagaaaaaatgagccaccccgctgcctcaactacctgacggcaccacatgttgttatttggagtgcagtaaccgcctcttgtgcatttcctgggctctttgaagctcaggaactgatggcaaaggataggttcggcaacatcgttcccttccatgcaccctttgccacagatcctgaacaaggtcctggagcatcgaagcgcaggtggagagacgggagcttggagatggatttacccatgatgagacttaaggagttgtttaatgtaaaccatttcattgtgagccaaactaaccctcacatttctccactcctccggatgaaagagcttgttagagcctatggagggcgctttgctggaaagcttgctcgtcttgctgaaatggaggttaagtatcgatgcaaccaaatcctagagatcggtcttccaatgggaggacttgcaaaattgtttgcccaggattgggagggtgatgtgaccatggttatgccagcaacacttgctcagtacttgaagatcattcagaatccaacatacgcggagctccaaatggctgccaaccaaggccgcaggtgcacatgggagaagctctccgcaatcagagcgaactgcgccattgaacttgcacttgacgaatccatagcggttctaaaccacaaacggaggctaaaacgaagcatggagaggacggcggcggcttcgcagggtcactctaactatgtccgacccaagactccgaggaggataccgtcatggagccgcatcagtcgagagaactctttggagtctctctcggaagagatctctgcggttgctgcttcgtccatgcagcaaggcgctgctcttgttgtcggcgcaccaccaacgactctttctcagcatgttcggcgcagttctcatgacggaagtgagagtgagtcagaaaccattgaccttaattcctggaccaggagtggagggcctctaatgaggacagcgtccgccgacaggttcatcagtttcatccataacattgagattgacacagaattaagtaggccctgtgctgtggaaggtgatgctgcaggtattttgtcagaatctaccttcccaaacggtccacgaccgaacaatagctcaagtgttagtatgccaggtagatgcacagaaaattctgggaccgagtcgtgcaacactgtcaacaccagagcttctactcccacaagcatggctgttcgtgaaggagatttgctgccgcctgaaagcactactgataatgtcctacttaacattgtgaaaagagacgccctgcaggatggtgtaactgaattggcggaaagctcctgcgctgaaggatatgcggcaaactgtgacaccgtctcagggctagactgctgaaggtaacaagacgctcgctgctgacttgagcaatcaacaattagctgatgattagattcttcttgattttgatgatgaaaggtcatttatatgtagctcactacagcaacgcagtgtaggaaaattgtacctgctcgatttaaactttaaagagcatgccatgagtagctttgttaatgttaatattcacatccattgtggaattgttggttgatgcatttcttagcacgtcgagcaaccatatcacagcatgccatgagttcggcactggtacttggaatgtccaaatcatctgttcgctacatgtaacatgcagtggtttattagtcttgcagacacttcat

SEQ ID NO: 206315 - DNA, 2489 bp, Zea Mays
cgaaaggtagccatggctcgctggccgactccgcgctgtctgtgactgtgactgtgattgtgagacacttctcttctatctcctccatttcatggcctcccgcctaaccctcatttacccgcccgttctcccgccgctcagcattctagggttttcagtttttcgagctccagtgcgccgcggccgccgcccgtgatgcctgactcaccggagctagtcgtgagggcgctcgggaagcgcctggcgcagccgcgcttaggcaaggacgcccttatcaagctcctcaagcaagctgaaagtgcattatcagagtttagtcaatcatcctctctgcaggatcctcttcatgctctgagcaaatctcttgtccagaccactttactcaaccataaggataaggatgtcaagcttcttgtttctgtttgtttaatcgaagttatgcgtgttcttgcacctgatccaccttttagtgatgaaatacttaaggaaatatttaagctatttatcagcatatttgcggaccttgctgaaactagcagtccatttcttactagaaggatgaaaattttggaaaatgttgctgcacttagatgttctatgatcatgctcaacattggctgcgaggacttgattcttgatatggtcaaaattttcttctccacagtgaagcatggtcttcaaaagagtgtgcaccaagctatgctatcaatgatgacacaaatattgaatgagaaagttactcagtctcttgtagatgtgattttacgcaatttagtaaaagatgacaagggagcatcccacaagctagcttttaacatcattgaaaattgtgctgacaaattggagcctatcattcacagttttttgtcctcatgcatttttaacaaggacatgcctgttactgaacttaggagattatatcataaaattattcttgaaatattccagtgtgcaccccagatccttttcgctgtcattccgagcttgacgcatgaacttcttagtgaccaagttgatataaggctggaggcagttcaccttattgggaggcttcttgccctatctaatcttcagtttggtcaagaaaacaagatggtttttatagaatttctaaggagattctctgacaaatctgcagaagttagaattgccgcaattgatgcagccaaagcgtgctatatggatgtgtctagggatgaagcacaacatatactttcatcacttgaagggaggttactagattttgatgagaaagtgaggatccgagctgttcacacagtctgtgatttagccaaatcaaaccttagctcttctgctaaactgatattacatgcagctgagagactacgtgacaaaaaagcatccgttagaaaaaatgtaatgcacaagttgttggagctgtatcgggattactgtgagaaatgctcaaaaggaactgccacagtcaacactcattatgaacaaatcccagctaaacttatagttctttgtttcgataatgatattgaatccttcaggccacagaatatggagcttatatttgctgaagaactctttccattctctctttctccaaaagagagggcgacccattggattgcgttcttttcttatttcaaaccagaacatattaaggctttgaacatcattttttctcagaagagacggttacaactggagatgcaaacatatttatcacttcgagcaaggaaggaggaatcatcagaagaaatgcagaagagaatccgtgcggcattcagaaagatggcaacatcctttccagatatttccaaagctgaagagtgctttgaaaatttgcaccagatgaaagataataacatatttaaggatttggatgaactaataaatgagggaaccagttttgcaaaaggccgcgtgaccagagatatgtttctcaagagaatcgggcagaaacacccaatttacacattttccagagtgctgtctataaaatgtttgcattcaatatttaatcaggagatgatctgtgccatcctcgaatctcttttgtcccgcggaaatgaattaattgattatgttgagtctgcttgtgatctattactggtaattgcaatggtgtttccatcattattccgaggctcagaggagtacttgcttaagttgttcttagaagaaccaattctgataaatgtgaagactctccagatgttggcacatttggcaaaatctacacactgtttgtctactaattttagcaatgttgtgtacccattattggagcaaaagtgcattgaaggtactcgtgctgaatcaaaatacgcaatcactgcaattgctgcactccactcagatgataagaaatttgctaaattatttaagctgccgcattttcatccaagccggataacttcttgaaaggaaaaaagaaattcttatcgctgcacaagtttctagatgacattgaccatttttctgttctagctcacccaactttgcttatcttattc

SEQ ID NO: 206316 - DNA, 2461 bp, Zea Mays
cgaaaggtagccatggctcgctggccgactccgcgctgtctgtgactgtgactgtgattcattctagggttttcagtttttcgagctccagtgcgccgcggccgccgcccgtgatgcctgactcaccggagctagtcgtgagggcgctcgggaagcgcctggcgcagccgcgcttaggcaaggacgcccttatcaagctcctcaagcaagctgaaagtgcattatcagagtttagtcaatcatcctctctgcaggatcctcttcatgctctgagcaaatctcttgtccagaccactttactcaaccataaggataaggatgtcaagcttcttgtttctgtttgtttaatcgaagttatgcgtgttcttgcacctgatccaccttttagtgatgaaatacttaaggaaatatttaagctatttatcagcatatttgcggaccttgctgaaactagcagtccatttcttactagaaggatgaaaattttggaaaatgttgctgcacttagatgttctatgatcatgctcaacattggctgcgaggacttgattcttgatatggtcaaaattttcttctccacagtgaaatggttatttggtaagattcttgatcctatcacggctgtgaaatgcgtaggaatgcatggtcttcaaaagagtgtgcaccaagctatgctatcaatgatgacacaaatattgaatgagaaagttactcagtctcttgtagatgtgattttacgcaatttagtaaaagatgacaagggagcatcccacaagctagcttttaacatcattgaaaattgtgctgacaaattggagcctatcattcacagttttttgtcctcatgcatttttaacaaggacatgcctgttactgaacttaggagattatatcataaaattattcttgaaatattccagtgtgcaccccagatccttttcgctgtcattccgagcttgacgcatgaacttcttagtgaccaagttgatataaggctggaggcagttcaccttattgggaggcttcttgccctatctaatcttcagtttggtcaagaaaacaagatggtttttatagaatttctaaggagattctctgacaaatctgcagaagttagaattgccgcaattgatgcagccaaagcgtgctatatggatgtgtctagggatgaagcacaacatatactttcatcacttgaagggaggttactagattttgatgagaaagtgaggatccgagctgttcacacagtctgtgatttagccaaatcaaaccttagctcttctgctaaactgatattacatgcagctgagagactacgtgacaaaaaagcatccgttagaaaaaatgtaatgcacaagttgttggagctgtatcgggattactgtgagaaatgctcaaaaggaactgccacagtcaacactcattatgaacaaatcccagctaaacttatagttctttgtttcgataatgatattgaatccttcaggccacagaatatggagcttatatttgctgaagaactctttccattctctctttctccaaaagagagggcgacccattggattgcgttcttttcttatttcaaaccagaacatattaaggctttgaacatcattttttctcagaagagacggttacaactggagatgcaaacatatttatcacttcgagcaaggaaggaggaatcatcagaagaaatgcagaagagaatccgtgcggcattcagaaagatggcaacatcctttccagatatttccaaagctgaagagtgctttgaaaatttgcaccagatgaaagataataacatatttaaggatttggatgaactaataaatgagggaaccagttttgcaaaaggccgcgtgaccagagatatgtttctcaagagaatcgggcagaaacacccaatttacacattttccagagtgctgtctataaaatgtttgcattcaatatttaatcaggagatgatctgtgccatcctcgaatctcttttgtcccgcggaaatgaattaattgattatgttgagtctgcttgtgatctattactggtaattgcaatggtgtttccatcattattccgaggctcagaggagtacttgcttaagttgttcttagaagaaccaattctgataaatgtgaagactctccagatgttggcacatttggcaaaatctacacactgtttgtctactaattttagcaatgttgtgtacccattattggagcaaaagtgcattgaaggtactcgtgctgaatcaaaatacgcaatcactgcaattgctgcactccactcagatgataagaaatttgctaaattatttaagctgccgcattttcatccaagccggataacttcttgaaaggaaaaaagaaattcttatcgctgcacaagtttctagatgacattgaccatttttctgttctagctcacccaactttgcttatcttattc

SEQ ID NO: 206317 - DNA, 2394 bp, Zea Mays
catttacccgcccgttctcccgccgctcagcattctagggttttcagtttttcgagctccagtgcgccgcggccgccgcccgtgatgcctgactcaccggagctagtcgtgagggcgctcgggaagcgcctggcgcagccgcgcttaggcaaggacgcccttatcaagctcctcaagcaagctgaaagtgcattatcagagtttagtcaatcatcctctctgcaggatcctcttcatgctctgagcaaatctcttgtccagaccactttactcaaccataaggataaggatgtcaagcttcttgtttctgtttgtttaatcgaagttatgcgtgttcttgcacctgatccaccttttagtgatgaaatacttaaggaaatatttaagctatttatcagcatatttgcggaccttgctgaaactagcagtccatttcttactagaaggatgaaaattttggaaaatgttgctgcacttagatgttctatgatcatgctcaacattggctgcgaggacttgattcttgatatggtcaaaattttcttctccacagtgaagcatggtcttcaaaagagtgtgcaccaagctatgctatcaatgatgacacaaatattgaatgagaaagttactcagtctcttgtagatgtgattttacgcaatttagtaaaagatgacaagggagcatcccacaagctagcttttaacatcattgaaaattgtgctgacaaattggagcctatcattcacagttttttgtcctcatgcatttttaacaaggacatgcctgttactgaacttaggagattatatcataaaattattcttgaaatattccagtgtgcaccccagatccttttcgctgtcattccgagcttgacgcatgaacttcttagtgaccaagttgatataaggctggaggcagttcaccttattgggaggcttcttgccctatctaatcttcagtttggtcaagaaaacaagatggtttttatagaatttctaaggagattctctgacaaatctgcagaagttagaattgccgcaattgatgcagccaaagcgtgctatatggatgtgtctagggatgaagcacaacatatactttcatcacttgaagggaggttactagattttgatgagaaagtgaggatccgagctgttcacacagtctgtgatttagccaaatcaaaccttagctcttctgctaaactgatattacatgcagctgagagactacgtgacaaaaaagcatccgttagaaaaaatgtaatgcacaagttgttggagctgtatcgggattactgtgagaaatgctcaaaaggaactgccacagtcaacactcattatgaacaaatcccagctaaacttatagttctttgtttcgataatgatattgaatccttcaggccacagaatatggagcttatatttgctgaagaactctttccattctctctttctccaaaagagagggcgacccattggattgcgttcttttcttatttcaaaccagaacatattaaggctttgaacatcattttttctcagaagagacggttacaactggagatgcaaacatatttatcacttcgagcaaggaagcctgcttgtgctgtaggaggaatcatcagaagaaatgcagaagagaatccgtgcggcattcagaaagatggcaacatcctttccagatatttccaaagctgaagagtgctttgaaaatttgcaccagatgaaagataataacatatttaaggatttggatgaactaataaatgagggaaccagttttgcaaaaggccgcgtgaccagagatatgtttctcaagagaatcgggcagaaacacccaatttacacattttccagagtgctgtctataaaatgtttgcattcaatatttaatcaggagatgatctgtgccatcctcgaatctcttttgtcccgcggaaatgaattaattgattatgttgagtctgcttgtgatctattactggtaattgcaatggtgtttccatcattattccgaggctcagaggagtacttgcttaagttgttcttagaagaaccaattctgataaatgtgaagactctccagatgttggcacatttggcaaaatctacacactgtttgtctactaattttagcaatgttgtgtacccattattggagcaaaagtgcattgaaggtactcgtgctgaatcaaaatacgcaatcactgcaattgctgcactccactcagatgataagaaatttgctaaattatttaagctgccgcattttcatccaagccggataacttcttgaaaggaaaaaagaaattcttatcgctgcacaagtttctagatgacattgaccatttttctgttctagctcacccaactttgcttatcttattc

SEQ ID NO: 206318 - DNA, 3289 bp, Zea Mays
caatatctcccatccgttcctttctgaatacctggccgttagcaatttctaatggtttggttcatttccttttgatattttttttttaattttttttcgtgtattgctttagagacagaaaaaataaagaaatttctctatgaaactcccttacagcgaaatccctatctgttgtttgcaatccaactttgttgtgcattagtgttcttgtactcacccctctgtccaaggaccaaaatgggaagctggtgtcgtaatggtttattgaaggaaaaaaacagattgatacctggttcttggttcatgttgctgggatgccttcacaccaatctgcaattttcatcatatttggctggtttttcctgctcctgatcagattttgaaagagctaaccattgcccacaatcaacttactgtcggttgggtcagggtgctgctagctcctcccaaagtttctctccaatatctatacaatttgtgccagtccatctaatcaccccgcgcccctagagaataggcattgaagaaactggtagcctgttcctcaagatcatatatagggggaaaaaagcacaaaataaagaacgaactcatctgctgttctttcaataattgtatggtcatcacggatacaatcaaaagtcagtagcaagactgggaagctagctgaggagatggtcatttgtcgtcaagtgcagagattagcaagaaaaaccgcaaaaattggtctcagtgcaatcagctcgttcaagaagaaggccctgcatcttatgggctgtctttgctccaaaggcgccaaagaagatgccaatgccgcttctggacgcagaacgccgccaaggagaagtgagccagccactgatgcgatcgcgaaggacagcagcagttcagccgcgcttaataatgcaaagaccaaaggaaatctgtatggtgcagaaaaggtggtagtgtctctagatgctaggatcagcagtggaaacaacgcagagtttaaagggcttaatgcagtctctggctggccatcttggctcgtgaatgtggcacctaaagcagtagaaggctggttgcctcggcgagcagattcctttgagaaactggccaagattgggcaaggaacctacagtgtggtgtacaaagcccgggatctggaatctgggaagatcgttgcgctaaaaaaggtgcggttcgtcaacatggatcccgagagcgtgcgcttcatggccagagaaatccacatccttcggaggctggaccatcccaacgtcataaagctccaagggatcgtaacgtcccgcgtgtcgcagagcctctaccttgtcttcgagtacatggagcatgacctcgctggtctcgttgcaactccaggcctcaagctcactgagccgcagataaaatgcatcgtccagcagctgctccacggcctcgaccattgccacagaaacggggtcctgcatagggacatcaagggctcgaacctgttgattgacagcaacgggacgctcaagatcggagacttcggcctggcaatatcgtacgatcccagcaacccgcagccactgacaagccgcgttgtgacgttatggtacagaccaccggagcttctgctgggtgccacagattatgctgctgcggtggacatgtggagcacaggatgtatcgtggctgagttgtttgctggcaagccaatcatgccaggaagaaccgaggtggagcaaatccacaagatatttaagctgtgtggctccccatccgagaactactgcaagaaatcgaaggtgccagaaactgcaatgttcaagcctcagcagcaatacaggcggtgtgtcaccgagactttcaaagatttacccactccagctgtacttctcatcgactcattgctttcgctagagccagaaggacgtggaacagccacctcagctcttcaaagtgaatttttcagagccaaaccactcgcttgcgacccttcgagcctaccgaaactcccaccaagcaaagagtacgatgtcagacttaggcaagaagaagccaggaggctaagaaacgcggcggcacttggcgggccaggagctgaatctgtcaaacctggaaatgagagccatgtagtagccagtcgcgccattgatatagctgctcaagttaagcaacccacgcatagcacttcgaagagcacctgtgagaagttcagcgccgaggacagtgtgccagggttccgtgtagagcctcgggcactgccaacctcagcgcaggttcctgagtgtggatccacgtggaataacacaggggatcaccatcgttcggtcctcggccgcgtttgcagctctgttcgcgttgcgaggaagaaagggccatcgaattcgaatacgccacagtacgacgctgcagacttgaggaacggcggtgaccgcaaccagcgagcagacaggcctgccgtctcctctcagaagaaagaccagcaggaggaccgtggaaggaagtacaaaaggatccactattctgggccgttgatgccaccgggtggcaacatcgaagacatgctcaaggagcacgagaggcacatccaagaagcggtgcgcaaggcgcgactctgtaagggaagcaagtagctacatagagcagctgaaggcgctaggagaagcctcacatggactcacccagactcatcaaaagctgccatatcgaggagccgcaatagctgtctgtcacatgcaatgcaacacggtcagctattgaagtagtgagatgagacagctctcaccttttaaaattcataggtgagaaccttcgcttgtaatgcgatgagacattttaaaattgaagtgcagagaaatcgggaaggagaattgctaagccactgtaaagtttaggcacccttttttttgtaagtttgatgcagttgtaatagccactgtaaagttgttcatcgattttgctgacaactctggattatggaaaacaacaggagctggatttgaaacttcagacgagcagtctcatggcccttcaagacataattgcagcctgaggatgatgcagctagaacaacatgatgtgtttaagcatacttaaattattaacgaacgatgagtcaatgctaatcatcagtttatcacgagcatcagatagtaatcttagaaggtggaatcgacatttcgaatctgaaagtttcgaagaaaacaattgttgtggctcctcaaaaaaaaaaagtaacagtttctgaaatataatgtaaaggattgctaagccataccaccagcgaaaacttgaacacatttgttaagggagtaaa

SEQ ID NO: 206319 - DNA, 1689 bp, Zea Mays
gcggcaaggccgcaagaatcattttgtgaaaaaaaaaactaaaaaaaaatacaactaggttcatccactttagggcacctccctcacccgaagagctgatgctgacagctccaccgctcgccgccgccgcccgccgcgccgccacagctgccgcatgtggcgccgcccaccggctcctccttccagtttgctttctatcctccaacccctctgccccgagcactctcgtaccgcgccgccgcttcggccacatgtcgcaggagtgcatggccccgcgcgctcccctaccgccggtcggacggaactttgcggtggctgtgggggatgagatcctgtatggagatgccccggagctggttgtggtgtcgttctaccggttcgctgatttccccgaccatgctgcattccggctgccgcttaaggagctttgcgaggagctggtggcattatccttgcacctgagggaatcaatggtagtatatgtggaaccccagttgctgtggacaaaatcttaaactttattcaagaagacggtcgtttaaaaggattgagaatgatccagtcacctgttactccagaggatgaggccatacatcatggacataccagtcactcccctgttggtgctggggaagatgcaccattccgatgggatcatgtccgtgtcaaattgaaaaaggagatagtgacgtttggagacccaggtgttatgccaactaaaatcgttgggaaatatgttaagccaaaagactggaatgacttgataagtgatccagacactgcaccctagggtcagggggagatgataatggaaccggtgaaccatcggcagaccttaatgccagcaaatccaaacagctaccaagagttgctatgtactgcactggtggtatccgatgtgagaaggcatcaagctttctcctcggcaagggctttaaagaggtttatcatttggaaggcgggatattgaagtatctggaggaaatcccaaaggccgaaagtttgtgggagggtgaatgctttgtgtttgacaagcgtgtctctgtggggcatggattggcccaaggcacccacaaactttgctacgggtgtaagcagccagtcagcgatgaggacatgttgtcgcctcactgggagtacggcgtctcttgcccgcattgcttcgcaacgaaatccgaggaggagaaggaacgggctagggctcggcagcggcagttcgagacctttggagtgataggtgggcctcatatgggcaagagtccgagagggtctgccgctaacaatgcagtggagttcatacagttgcccaagtcagtgtaactttaattatccatctgaaacttttagattgaagtgttgttgacaaagtgagggaatcaaccagattggcaatgattgccatattatgatcttttccgatgcttaagtttttgtcggaaaaagtggtgtcgataccatttgttttagattgtaacctcgctaactcccggagatgctaaggtcctgttcggttgtttagaattggagacccgaattaattcctagccggattatttctctaatttatatagattttgatgagctggaatgaatcctggcttattccggtacaaccgaacgggccctaaagaattttcaatgcagggggaacaaatataagcatgtttttcggattaaagtcagttgttc

SEQ ID NO: 206320 - DNA, 922 bp, Zea Mays
atatttcttttctgtcggaatgggatatgagtgggctgggccgaatgcaggcagggtcgtctggtgctacactgctactctttccacgaccccatggcaaaatagcaaatttctctcgattgtgatatcagcccacatagatataaccgtttggggaaaagaatcgtgggctgtgacctgtcgtcttcgtctccggcagagcaaagcggcggcgaggcgggagatatagaggagagacgagagcgggatggggtacctgtggagggtgcggctgtcttcatttgctgccggcgcggcgacggcttcggcggcggggttcttcctcctctacaaggaccacctgctcgcccgcgctgccatcatcagccaggtggaggacatcaaggaaacttctgaaaagcattatgcagccctaaataagaggatatcagcactggaaagcagaagagaaccaggaactatcaaagaggcatcagattaattctgagttgggcttatgtcatggttacatctgcccatgtgtttttgattgctgcaggcggtataaactgcagcattttaagctgtactattgtgttgttgaaattctatgaactctgaatttgaattgtgttacacttcttgtctatgtcgtctttatgagatggacaagatcaaataaaatacattttttcttgatagaataagttatcagatgtgtgcaaagtatcttttttttttgtcttcgtgaccatttgctaaacaacagtattggcacttgttagtctatggctctgtgcattgcattgcttttgagcacttcggcaatttacatgtgaattttgtacaatcacgggtgactgcaaagcctgtaatgagacggttacttgaacttcacgctggtattcaatctgaatgattttgcttgcagctgcaaattcag

SEQ ID NO: 206321 - DNA, 2099 bp, Zea Mays
ccgctcgccagtcggtcgccactcgccaccgcaactatttctgctggctgctgccgctgccgctgctcattccattccctgcgctaacccggcgcccgctcgccctgcctgccactcccgccgcgtgctgcctaccagcaggccaggccaggcacccctgccctgtccgccaccagcacaaccgcgtgcgccggtctggtcggtacatgccaggatggagaccccttcgtcgacgtgcgacgagggctccgagctcgacgcgcgctcgcagtccgactacgccgacttcgacgacctggacctcccgccgcggggccgccaccgccgggacccgtcctccgacgcgtcctccgagtgcagcggggagcccgggagcccgtacgcctcctcgccgtacccgcgctggccggtgtgcacgcttcctgcgagggtgccgccgccggccgcgccgctgctcaagaggctcggcacgacgcggcgcggcgcccgtgtcggcgcgtgtgacgggaaggccggcgacggcgagctgcagctgatcaaggagaggttctccaagcttctcttgggcgaggacatgtcggggagcggcaagggggtctcgacctccgtggccatctccaacgccatcaccaacctctacgcgactgtctttgggagctgccacaggctgaagcccctgccgccggagaagaagtccatgtggcggcgggagatggactgcctcctctccgtctgcgactacatcgttgagttcttcccttccaaggagatcttgcccgacggcagcatacgagaggtgaaaacaggtgatggcgacccgaccgcgatccgacatctacgtcaacctccccgccctcgagaagctggacgacatgttgctcgagattctgtacagctttcagaagactgaattctggtacgtcaacgacaaagggcagaaagacgattccgtcgcgacgccgtgccgtccggtgagccaccgcggcgaggagaagtggtggctgcccgtgccgtgcgtcgccaagcccgggctgacggagacggcgcggcgagacctgcagcagaagcgcgactgcgcgagccagatccacaaggcggccatggccatcaacaatgccgttcttgcggagatacggatccccgacctgtacaaggaagcactacccaagtgcgggcgggccagcgtgggggatctgatctatcggcacatgtcgttcccgggcaagttctctccggagtacctgctggactgcctggagatctcgtcggagcacgaggccctggaggcggcggaccgcgtggaggcggcgatgcacgtgtggcggcggaaggcgagccagaggtcaccctggagcgcggtcaaggacctgatggagtccgacaagaacgtgatgctggcgagacgcgccgaggacgtgctgctctgcctcaagcagcggttccccggcctctcgcagaccacgctcgacgccagcaagatccagtacaacaaggatgttgggcaagcaatactagagagctattcgagggtgctggagagcctggcgtacaacatcgtaacatgtgtagatgacgttctcttcgcagatgaagccgccagaaagatagcatgagtgatcatttgttcatccttcctgcctggtccgggaaaccaaaaaataaggggtccatgtccatgatccatccacagaatgtacattatgccataacttgtagcagtagtaccatctaccaatggatgatagcacgagcagttaactctcctaggcagccatgtcttggttttcatcacaatggtccctcagtgcctttgcatcctcttttctctttcatcaccaattcaccatatggatgtcagttgtcacagctgtgtgattggctggaggtatcagctgaactgaagtagtagtgacttgtgaatcttttgatacaggacatgggcaacgcctgacagagtgaccggcacaagttcacagctgatatattcacaaaatgtttcaagtaattcttgaaacacagaagcaatagagtatctcataaagtaacggaaacaatattatgttcacaatgaaaatttaccataaatactggggtacttt

SEQ ID NO: 206322 - DNA, 1612 bp, Zea Mays
aaaattgagagtggcaaaatcacaaatttctctcaacggtcctagcaatcgcgtcaccgtcttctccatcgccggtgctcccttactctcgatggcatcctcggccgccgctcgccgccttctcctcctccgccaccgccatgggaaccttctccccaaacgccacttctcttcctcatccgctcccgacggcctcgacgacggcggtggccgcgtcaagatcttcgaccgcgacctgaagcgccggcaccgggaccgcgcggcgtgggtgatgcgtgagaccgatgggctcgtggatgcggtcgctgagaatctcctagaccgcctcgaggactgcaggaaagccttcccctccgcactctgccttgggggctccgccggcgccgtccgccgcttgctccgtggccgcggtgggattgagaggctgatcatgatggacatgtcagccgatatggtgaagaagtggcgagagtcagagaatgccactggtgatgggcctgagacccactttgttatcggcgatgaggagtttcttccaatcaaagagagctcacaggatttgataatgagctgtcttggacttcattggacaaatgatctacctggagcaatgatacagtgtaggctggcgttgcaacctgatggcctttttctggcagcaattcttggtggagaaacactgaaggagcttagaattgcatgcacagttgctcaaatggaacgcgaagggggcatcagtcctcgaatgtcccctttagcgcaagtccgtgacgcaggaaaccttttgacaagggcaggctttacccttccaggagttgatgttgatcagtataccgttagatacaataatgctttggaacttgttgaacatcttagagcaatgggggaaacaaatgctctctttcaaagaaatcctgtgttgaaaagggatacggccttggcaactgcagcaatttaccagtcaatgtttgggttagaagacggatctattccagcaacctttcaagtaatttacatgactggctggagggagcatccatcacagcaaaaggctaagagaaggggttctgcgaccatatcattcggtgatatacagaaacaatttggtcccagtgagaactgagcctcactgcttcagaaatgtgttcccaaaccccactcaggctttgtttgggtaaagaggaactgaagtggattgaggtgtattgaaaggactgaaagggaaattagttcatgttacacttcaatacaccccataccacctcaattcactccaataagagattacccaaacaggcctcatgtgagagcctccggagctgggtctaaccattttagtattcccaaacccttgatcgaaaattaaaaaaaaaaacaacatttgaggaaagaaaagaaatcctctggtggttccacccaacggctttgtattcctgaaggttgatgtttgtggtgggcttctgttgcctgttgtatgaacatactgagtttgatggaatccagcaattgtgaaattcatctgtagtgttactccacccacaaggttcgctagtggcgtgctgcaatgttacaagacaccaccactgttgtggtagacctacagctattgcgg

SEQ ID NO: 206323 - DNA, 1621 bp, Zea Mays
caaatttctctcaacggtcctagcaatcgcgtcaccgtcttctccatcgccggtgctcccttactctcgatggcatcctcggccgccgctcgccgccttctcctcctccgccaccgccatgggaaccttctccccaaacgccacttctcttcctcatccgctcccgacggcctcgacgacggcggtggccgcgtcaagatcttcgaccgcgacctgaagcgccggcaccgggaccgcgcggcgtgggtgatgcgtgagaccgatgggctcgtggatgcggtcgctgagaatctcctagaccgcctcgaggactgcaggaaagccttcccctccgcactctgccttgggggctccgccggcgccgtccgccgcttgctccgtggccgcggtgggattgagaggctgatcatgatggacatgtcagccgatatggtgaagaagtggcgagagtcagagaatgccactggtgatgggcctgagacccactttgttatcggcgatgaggagtttcttccaatcaaagagaggatttgataatgagctgtcttggacttcattggacaaatgatctacctggagcaatgatacaggctggcgttgcaacctgatggcctttttctggcagcaattcttggtggagaaacactgaaggagcttagaattgcatgcacagttgctcaaatggaacgcgaagggggcatcagtcctcgaatgtcccctttagcgcaagtccgtgacgcaggaaaccttttgacaagggcaggctttacccttccaggagttgatgttgatcagtataccgttagatacaataatgctttggaacttgttgaacatcttagagcaatgggggaaacaaatgctctctttcaaagaaatcctgtgttgaaaagggatacggccttggcaactgcagcaatttaccagtcaatgtttgggttagaagacggatctattccagcaacctttcaagtaatttacatgactggctggagggagcatccatcacagcaaaaggctaagagaaggggttctgcgaccatatcattcggtgatatacagaaacaatttggtcccagtgagaactgagcctcactgcttcagaaatgtgttcccaaaccccactcaggctttgtttgggtaaagaggaactgaagtggattgaggtgtattgaaaggactgaaagggaaattagttcatgttacacttcaatacaccccataccacctcaattcactccaataagagattacccaaacaggcctcatgtgagagcctccggagctgggtctaaccattttagtattcccaaacccttgatcgaaaattaaaaaaaaaaacaacatttgaggaaagaaaagaaatcctctggtggttccacccaacggctttgtattcctgaaggttgatgtttgtggtgggcttctgttgcctgttgtatgaacatactgagtttgatggaatccagcaattgtgaaattcatctgtagtgttactccacccacaaggttcgctagtggcgtgctgcaatgttacaagacaccaccactgttgtggtagacctgtgagtgcaaagaaacttagaaatttatttactcccttaacaaatgtgttcaagtt

SEQ ID NO: 206324 - DNA, 1599 bp, Zea Mays
caaatttctctcaacggtcctagcaatcgcgtcaccgtcttctccatcgccggtgctcccttactctcgatggcatcctcggccgccgctcgccgccttctcctcctccgccaccgccatgggaaccttctccccaaacgccacttctcttcctcatccgctcccgacggcctcgacgacggcggtggccgcgtcaagatcttcgaccgcgacctgaagcgccggcaccgggaccgcgcggcgtgggtgatgcgtgagaccgatgggctcgtggatgcggtcgctgagaatctcctagaccgcctcgaggactgcaggaaagccttcccctccgcactctgccttgggggctccgccggcgccgtccgccgcttgctccgtggccgcggtgggattgagaggctgatcatgatggacatgtcagccgatatggtgaagaagtggcgagagtcagagaatgccactggtgatgggcctgagacccactttgttatcggcgatgaggagtttcttccaatcaaagagagctcacaggatttgataatgagctgtcttggacttcattggacaaatgatctacctggagcaatgatacagtgtaggctggcgttgcaacctgatggcctttttctggcagcaattcttggtggagaaacactgaaggagcttagaattgcatgcacagttgctcaaatggaacgcgaagggggcatcagtcctcgaatgtcccctttagcgcaagtccgtgacgcaggaaaccttttgacaagggcaggctttacccttccaggagttgatgttgatcagtataccgttagatacaataatgctttggaacttgttgaacatcttagagcaatgggggaaacaaatgctctctttcaaagaaatcctgtgttgaaaagggatacggccttggcaactgcagcaatttaccagtcaatgtttgggtaatttacatgactggctggagggagcatccatcacagcaaaaggctaagagaaggggttctgcgaccatatcattcggtgatatacagaaacaatttggtcccagtgagaactgagcctcactgcttcagaaatgtgttcccaaaccccactcaggctttgtttgggtaaagaggaactgaagtggattgaggtgtattgaaaggactgaaagggaaattagttcatgttacacttcaatacaccccataccacctcaattcactccaataagagattacccaaacaggcctcatgtgagagcctccggagctgggtctaaccattttagtattcccaaacccttgatcgaaaattaaaaaaaaaaacaacatttgaggaaagaaaagaaatcctctggtggttccacccaacggctttgtattcctgaaggttgatgtttgtggtgggcttctgttgcctgttgtatgaacatactgagtttgatggaatccagcaattgtgaaattcatctgtagtgttactccacccacaaggttcgctagtggcgtgctgcaatgttacaagacaccaccactgttgtggtagacctgtgagtgcaaagaaacttagaaatttatttactcccttaacaaatgtgttcaagtt

SEQ ID NO: 206325 - DNA, 3396 bp, Zea Mays
ccaaccaaactgacctacccggaaaacgagccccccgactcccgcctgccgccgccgctctgccagccaaacccaaactaaaaccctcgccgacggcgcgcctgttgttaaaccctagaaaaaccagcggcgacaggagtggccgcaaccccgccgccggagggggctccacgaccagatagaagagggagagaggatggggatcttcgagccgttccgtgcgatcggctacatcacggcgagcggcgtgcccttctccgtgcagcgcctcagcaccgagaccttcgtcaccgtcagcgtcggcaaggctttccaagtctataactgtgctaagctgaatttggttcttgctgatccgtgctattgcatcctacaaggattatacatttgctgcttatggaagtgatattgcagttttcaaaaggactgaccaggtggctacttggagtagacatgaagaaaaggtcaacatgctatacctatttggagaatatgttctaagcgcagatgctaaaggtaatgtattcatgtgggccttcagaggagcagaaccaaacactgaaccagttggaagcatatcattgggagacaagttcaccccaacatgtatcatgcatcctgatacttatctgaataaggtaattgttggtagcgaagaaggctccttgcagctgtggaatatcagcacaaaaaagaaactgtatgatttcaatggttggaactcacctgttcggtgttgtgtctcttctcctgccctggatgtagttgctgtcggatgttctgatgggtcagttcatgttcataatgtaagatatgatgaagaattgatgtctttcaaccaccagattcgtggtgctgtgactgcactgtcatttcgaacagatgggcaaccccttctggcttctggaggttcttcaggcgttatcagcatatggaatcttgagaagagacggctgcattctgtgattagggaggcccatgatggttcaatagtttcacttcacttttttgcgaatgaacctattctgatgagttcagctgctgacaattcagtcaaaatgtggatatttgatagtaatgatggaggtgctcgtctgttacgatttcgaagtggtcacagtgcaccacctaggtgcataagattctatggcaatggaaaatgcatattatctgctggccaagatcgtgcatttcgccttttctcagttatccaggatcaacaaagtagagagctttctcagaggcatgttgcaaaaagagcaaaaaagctaagagtaaaggaggaagagatcaagctaaaaccagttgttacatttgactgtgctgagatacgtgcacgtgactggtgtaatgttgtcacatgccacatggatactccacaggcatatgtatggcgtcttcagaactttgttattggtgaacatgttttgacaccatcatcaagcactgtgacaccaattaaggcttgtgtgataagtgcatgtggtaattttactatcttgggcactgaaggtggttggattgaaaaatttaaccttcaatcagggtttagtcgtggtagttacattgacacctcgttggcaatgcaatgtgcacatgatggtgaagttgttggattagcttgcgatgccagaaatggctttttgattagtgctggataccaaggtgatattaaggcatgggattttaaaacttgcaagctgaaatctagattggatgttggtaaatctgttactaaaatcgcatttcaccggccaaatggtcttcttgctacggtagcaggtgatatggtactcatattgtttgatacggtgtccatgaaaatggttcgtagatttgaaggacatacagaccgtatcactgatttgtgcttcagtgaggatggaaaatggctcatctcgtctagcatggatgggactcttaggatttgggacatcagtttagcaaggcagatagatgcaatgcatgttgatgtatctataacatctatctctatgtctcctaatatggatgtgttggcaaccactcatgttgatcaaaatggtgtctacctctgggttaatcaatctttattctcggtctcaacaaatactgaaaattatgccagtggtaaacatgtacggaatgtgtgtttgccagctgtttcatcaacagagagatctgaggaagaacaagttcagaatttaggagagtcatataagtccagtattaaaccttttgtcataacggatcatcaaataccgaatctagttaccctctccttacttccaaagagtcaatggcaaagtttgactaatcttgacattataaaggttcgcaataaaccaattgagccacctaagaaacctgagaaggcaccattcttcttgccttcagttccatccctttctggggagatattgtttgagcctcctgccagctcaaaagatacagacatcagtaccacgaagaatacaaatcataagatgtctgaactctcctctcatttcagtcagcagttgcaattttgtggtgaaacaaagaactattcggcttttactgactacctaaaaggcctgtcaccgtcgtctttagatatggaactgcgaatgctacaaatattagatgatgaagagtctgaagatctggagcaaagacctgagcttcagtccatttcttcgctgttggattatttcattcatgaactttccttcaggaataactttgagtttgtccaggctgttctgaaattgtttttgaagatacatggtgaaacaatacgacggcactcaatgcttcagagtaaggtgaagaagcttcttgaggtccagagcttagtttggcagaagattgataagatctttcagggtgcacgatgcatggttacattcctcagtaactcacaattttagtagcaggccggagttccacataccagggcatacatggtgcctaatgcctgcacgagtgtggccattggattgagcaagtggatatagttgattttttttggagacggcattaaaatggatctggttctcaaacatggcatgactaggcattggagcattgttgagcagcagccatggctatattactctaggcttacaattttgctgtagctgttagtctgttacacagcaaggagtccacttggtaaacatttgtagctaccaaaacagccccatctcatggtgtaacaattttgtagttttacatttgtgtcatctttttgtaacaaactgatgtatcaaacaccgtattgcaagaaatactaaggcttgccattgctatttgaacaaaaaaccatatctgtatattcaacaagcttagcttctgtgttggtcttatattgtggaggataccaggtgaaaatatccaaatgtacctaagtttgcaattatataaactctgaaa

SEQ ID NO: 206326 - DNA, 3889 bp, Zea Mays
ccaaccaaactgacctacccggaaaacgagccccccgactcccgcctgccgccgccgctctgccagccaaacccaaactaaaaccctcgccgacggcgcgcctgttgttaaaccctagaaaaaccagcggcgacaggagtggccgcaaccccgccgccggagggggctccacgaccagatagaagagggagagaggatggggatcttcgagccgttccgtgcgatcggctacatcacggcgagcggcgtgcccttctccgtgcagcgcctcagcaccgagaccttcgtcaccgtcagcgtcggcaaggctttccaagtctataactgtgctaagctgaatttggttcttgctggaccccaattgcccaagaagatccgtgctattgcatcctacaaggattatacatttgctgcttatggaagtgatattgcagttttcaaaaggactgaccaggtggctacttggagtagacatgaagaaaaggtcaacatgctatacctatttggagaatatgttctaagcgcagatgctaaaggtaatgtattcatgtgggccttcagaggagcagaaccaaacactgaaccagttggaagcatatcattgggagacaagttcaccccaacatgtatcatgcatcctgatacttatctgaataaggtaattgttggtagcgaagaaggctccttgcagctgtggaatatcagcacaaaaaagaaactgtatgatttcaatggttggaactcacctgttcggtgttgtgtctcttctcctgccctggatgtagttgctgtcggatgttctgatgggtcagttcatgttcataatgtaagatatgatgaagaattgatgtctttcaaccaccagattcgtggtgctgtgactgcactgtcatttcgaacagatgggcaaccccttctggcttctggaggttcttcaggcgttatcagcatatggaatcttgagaagagacggctgcattctgtgattagggaggcccatgatggttcaatagtttcacttcacttttttgcgaatgaacctattctgatgagttcagctgctgacaattcagtcaaaggacaggggcaacaagaaccttctttctggcaactagcatctggcttgatagcctgctaataagtgcagctaacaaaacatccgggaacaaacttacaattcctttaacactgttacctgttatttgtctcgtttcactttgtgggtcctaatctaatatgctctaccagatgtggatatttgatagtaatgatggaggtgctcgtctgttacgatttcgaagtggtcacagtgcaccacctaggtgcataagattctatggcaatggaaaatgcatattatctgctggccaagatcgtgcatttcgccttttctcagttatccaggatcaacaaagtagagagctttctcagaggcatgttgcaaaaagagcaaaaaagctaagagtaaaggaggaagagatcaagctaaaaccagttgttacatttgactgtgctgagatacgtgcacgtgactggtgtaatgttgtcacatgccacatggatactccacaggcatatgtatggcgtcttcagaactttgttattggtgaacatgttttgacaccatcatcaagcactgtgacaccaattaaggcttgtgtgataagtgcatgtggtaattttactatcttgggcactgaaggtggttggattgaaaaatttaaccttcaatcagggtttagtcgtggtagttacattgacacctcgttggcaatgcaatgtgcacatgatggtgaagttgttggattagcttgcgatgccagaaatggctttttgattagtgctggataccaaggtgatattaaggcatgggattttaaaacttgcaagctgaaatctagattggatgttggtaaatctgttactaaaatcgcatttcaccggccaaatggtcttcttgctacggtagcaggtgatatggtactcatattgtttgatacggtgtccatgaaaatggttcgtagatttgaaggacatacagaccgtatcactgatttgtgcttcagtgaggatggaaaatggctcatctcgtctagcatggatgggactcttaggatttgggacatcagtttagcaaggcagatagatgcaatgcatgttgatgtatctataacatctatctctatgtctcctaatatggatgtgttggcaaccactcatgttgatcaaaatggtgtctacctctggtagagttctgttgcatcaccctgcgctcagcctattattaccacccttacatatctcaatttattttgtagctacatatatagttcagaaaaatgaaattatgagattggccttccagctggtgcactttccacaaatattttattcatcccacttatagccaacagtattatcagtacactctgtttcaacatatgcaccacgagttgtgttcttttatacgctgttatgggtcatgatatgcatactttttccagtttttttttcattgtggtctcatacatgtgctataaattggacagggttaatcaatctttattctcggtctcaacaaatactgaaaattatgccagtggtaaacatgtacggaatgtgtgtttgccagctgtttcatcaacagagagatctgaggaagaacaagttcagaatttaggagagtcatataagtccagtattaaaccttttgtcataacggatcatcaaataccgaatctagttaccctctccttacttccaaagagtcaatggcaaagtttgactaatcttgacattataaaggttcgcaataaaccaattgagccacctaagaaacctgagaaggcaccattcttcttgccttcagttccatccctttctggggagatattgtttgagcctcctgccagctcaaaagatacagacatcagtaccacgaagaatacaaatcataagatgtctgaactctcctctcatttcagtcagcagttgcaattttgtggtgaaacaaagaactattcggcttttactgactacctaaaaggcctgtcaccgtcgtctttagatatggaactgcgaatgctacaaatattagatgatgaagagtctgaagatctggagcaaagacctgagcttcagtccatttcttcgctgttggattatttcattcatgaactttccttcaggaataactttgagtttgtccaggctgttctgaaattgtttttgaagatacatggtgaaacaatacgacggcactcaatgcttcagagtaaggtgaagaagcttcttgaggtccagagcttagtttggcagaagattgataagatctttcagggtgcacgatgcatggttacattcctcagtaactcacaattttagtagcaggccggagttccacataccagggcatacatggtgcctaatgcctgcacgagtgtggccattggattgagcaagtggatatagttgattttttttggagacggcattaaaatggatctggttctcaaacatggcatgactaggcattggagcattgttgagcagcagccatggctatattactctaggcttacaattttgctgtagctgttagtctgttacacagcaaggagtccacttggtaaacatttgtagctaccaaaacagccccatctcatggtgtaacaattttgtagttttacatttgtgtcatctttttgtaacaaactgatgtatcaaacaccgtattgcaagaaatactaaggcttgccattgctatttgaacaaaaaaccatatctgtatattcaacaagcttagcttctgtgttggtcttatattgtggaggataccaggtgaaaatatccaaatgtacctaagtttgcaattatataaactctgaaa

SEQ ID NO: 206327 - DNA, 3586 bp, Zea Mays
ccaaccaaactgacctacccggaaaacgagccccccgactcccgcctgccgccgccgctctgccagccaaacccaaactaaaaccctcgccgacggcgcgcctgttgttaaaccctagaaaaaccagcggcgacaggagtggccgcaaccccgccgccggagggggctccacgaccagatagaagagggagagaggatggggatcttcgagccgttccgtgcgatcggctacatcacggcgagcggcgtgcccttctccgtgcagcgcctcagcaccgagaccttcgtcaccgtcagcgtcggcaaggctttccaagtctataactgtgctaagctgaatttggttcttgctggaccccaattgcccaagaagatccgtgctattgcatcctacaaggattatacatttgctgcttatggaagtgatattgcagttttcaaaaggactgaccaggtggctacttggagtagacatgaagaaaaggtcaacatgctatacctatttggagaatatgttctaagcgcagatgctaaaggtaatgtattcatgtgggccttcagaggagcagaaccaaacactgaaccagttggaagcatatcattgggagacaagttcaccccaacatgtatcatgcatcctgatacttatctgaataaggtaattgttggtagcgaagaaggctccttgcagctgtggaatatcagcacaaaaaagaaactgtatgatttcaatggttggaactcacctgttcggtgttgtgtctcttctcctgccctggatgtagttgctgtcggatgttctgatgggtcagttcatgttcataatgtaagatatgatgaagaattgatgtctttcaaccaccagattcgtggtgctgtgactgcactgtcatttcgaacagatgggcaaccccttctggcttctggaggttcttcaggcgttatcagcatatggaatcttgagaagagacggctgcattctgtgattagggaggcccatgatggttcaatagtttcacttcacttttttgcgaatgaacctattctgatgagttcagctgctgacaattcagtcaaaggacaggggcaacaagaaccttctttctggcaactagcatctggcttgatagcctgctaataagtgcagctaacaaaacatccgggaacaaacttacaattcctttaacactgttacctgttatttgtctcgtttcactttgtgggtcctaatctaatatgctctaccagatgtggatatttgatagtaatgatggaggtgctcgtctgttacgatttcgaagtggtcacagtgcaccacctaggtgcataagattctatggcaatggaaaatgcatattatctgctggccaagatcgtgcatttcgccttttctcagttatccaggatcaacaaagtagagagctttctcagaggcatgttgcaaaaagagcaaaaaagctaagagtaaaggaggaagagatcaagctaaaaccagttgttacatttgactgtgctgagatacgtgcacgtgactggtgtaatgttgtcacatgccacatggatactccacaggcatatgtatggcgtcttcagaactttgttattggtgaacatgttttgacaccatcatcaagcactgtgacaccaattaaggcttgtgtgataagtgcatgtggtaattttactatcttgggcactgaaggtggttggattgaaaaatttaaccttcaatcagggtttagtcgtggtagttacattgacacctcgttggcaatgcaatgtgcacatgatggtgaagttgttggattagcttgcgatgccagaaatggctttttgattagtgctggataccaaggtgatattaaggcatgggattttaaaacttgcaagctgaaatctagattggatgttggtaaatctgttactaaaatcgcatttcaccggccaaatggtcttcttgctacggtagcaggtgatatggtactcatattgtttgatacggtgtccatgaaaatggttcgtagatttgaaggacatacagaccgtatcactgatttgtgcttcagtgaggatggaaaatggctcatctcgtctagcatggatgggactcttaggatttgggacatcagtttagcaaggcagatagatgcaatgcatgttgatgtatctataacatctatctctatgtctcctaatatggatgtgttggcaaccactcatgttgatcaaaatggtgtctacctctgggttaatcaatctttattctcggtctcaacaaatactgaaaattatgccagtggtaaacatgtacggaatgtgtgtttgccagctgtttcatcaacagagagatctgaggaagaacaagttcagaatttaggagagtcatataagtccagtattaaaccttttgtcataacggatcatcaaataccgaatctagttaccctctccttacttccaaagagtcaatggcaaagtttgactaatcttgacattataaaggttcgcaataaaccaattgagccacctaagaaacctgagaaggcaccattcttcttgccttcagttccatccctttctggggagatattgtttgagcctcctgccagctcaaaagatacagacatcagtaccacgaagaatacaaatcataagatgtctgaactctcctctcatttcagtcagcagttgcaattttgtggtgaaacaaagaactattcggcttttactgactacctaaaaggcctgtcaccgtcgtctttagatatggaactgcgaatgctacaaatattagatgatgaagagtctgaagatctggagcaaagacctgagcttcagtccatttcttcgctgttggattatttcattcatgaactttccttcaggaataactttgagtttgtccaggctgttctgaaattgtttttgaagatacatggtgaaacaatacgacggcactcaatgcttcagagtaaggtgaagaagcttcttgaggtccagagcttagtttggcagaagattgataagatctttcagggtgcacgatgcatggttacattcctcagtaactcacaattttagtagcaggccggagttccacataccagggcatacatggtgcctaatgcctgcacgagtgtggccattggattgagcaagtggatatagttgattttttttggagacggcattaaaatggatctggttctcaaacatggcatgactaggcattggagcattgttgagcagcagccatggctatattactctaggcttacaattttgctgtagctgttagtctgttacacagcaaggagtccacttggtaaacatttgtagctaccaaaacagccccatctcatggtgtaacaattttgtagttttacatttgtgtcatctttttgtaacaaactgatgtatcaaacaccgtattgcaagaaatactaaggcttgccattgctatttgaacaaaaaaccatatctgtatattcaacaagcttagcttctgtgttggtcttatattgtggaggataccaggtgaaaatatccaaatgtacctaagtttgcaattatataaactctgaaa

SEQ ID NO: 206328 - DNA, 3182 bp, Zea Mays
ccaaccaaactgacctacccggaaaacgagccccccgactcccgcctgccgccgccgctctgccagccaaacccaaactaaaaccctcgccgacggcgcgcctgttgttaaaccctagaaaaaccagcggcgacaggagtggccgcaaccccgccgccggagggggctccacgaccagatagaagagggagagaggatggggatcttcgagccgttccgtgcgatcggctacatcacggcgagcggcgtgcccttctccgtgcagcgcctcagcaccgagaccttcgtcaccgtcagcgtcggcaaggctttccaagtctataactgtgctaagctgaatttggttcttgctggaccccaattgcccaagaagatccgtgctattgcatcctacaaggattatacatttgctgcttatggaagtgatattgcagttttcaaaaggactgaccagaggagcagaaccaaacactgaaccagttggaagcatatcattgggagacaagttcaccccaacatgtatcatgcatcctgatacttatctgaataagttgctgtcggatgttctgatgggtcagttcatgttcataatgtaagatatgatgaagaattgatgtctttcaaccaccagattcgtggtgctgtgactgcactgtcatttcgaacagatgggcaaccccttctggcttctggaggttcttcaggcgttatcagcatatggaatcttgagaagagacggctgcattctgtgattagggaggcccatgatggttcaatagtttcacttcacttttttgcgaatgaacctattctgatgagttcagctgctgacaattcagtcaaaatgtggatatttgatagtaatgatggaggtgctcgtctgttacgatttcgaagtggtcacagtgcaccacctaggtgcataagattctatggcaatggaaaatgcatattatctgctggccaagatcgtgcatttcgccttttctcagttatccaggatcaacaaagtagagagctttctcagaggcatgttgcaaaaagagcaaaaaagctaagagtaaaggaggaagagatcaagctaaaaccagttgttacatttgactgtgctgagatacgtgcacgtgactggtgtaatgttgtcacatgccacatggatactccacaggcatatgtatggcgtcttcagaactttgttattggtgaacatgttttgacaccatcatcaagcactgtgacaccaattaaggcttgtgtgataagtgcatgtggtaattttactatcttgggcactgaaggtggttggattgaaaaatttaaccttcaatcagggtttagtcgtggtagttacattgacacctcgttggcaatgcaatgtgcacatgatggtgaagttgttggattagcttgcgatgccagaaatggctttttgattagtgctggataccaaggtgatattaaggcatgggattttaaaacttgcaagctgaaatctagattggatgttggtaaatctgttactaaaatcgcatttcaccggccaaatggtcttcttgctacggtagcaggtgatatggtactcatattgtttgatacggtgtccatgaaaatggttcgtagatttgaaggacatacagaccgtatcactgatttgtgcttcagtgaggatggaaaatggctcatctcgtctagcatggatgggactcttaggatttgggacatcagtttagcaaggcagatagatgcaatgcatgttgatgtatctataacatctatctctatgtctcctaatatggatgtgttggcaaccactcatgttgatcaaaatggtgtctacctctgggttaatcaatctttattctcggtctcaacaaatactgaaaattatgccagtggtaaacatgtacggaatgtgtgtttgccagctgtttcatcaacagagagatctgaggaagaacaagttcagaatttaggagagtcatataagtccagtattaaaccttttgtcataacggatcatcaaataccgaatctagttaccctctccttacttccaaagagtcaatggcaaagtttgactaatcttgacattataaaggttcgcaataaaccaattgagccacctaagaaacctgagaaggcaccattcttcttgccttcagttccatccctttctggggagatattgtttgagcctcctgccagctcaaaagatacagacatcagtaccacgaagaatacaaatcataagatgtctgaactctcctctcatttcagtcagcagttgcaattttgtggtgaaacaaagaactattcggcttttactgactacctaaaaggcctgtcaccgtcgtctttagatatggaactgcgaatgctacaaatattagatgatgaagagtctgaagatctggagcaaagacctgagcttcagtccatttcttcgctgttggattatttcattcatgaactttccttcaggaataactttgagtttgtccaggctgttctgaaattgtttttgaagatacatggtgaaacaatacgacggcactcaatgcttcagagtaaggtgaagaagcttcttgaggtccagagcttagtttggcagaagattgataagatctttcagggtgcacgatgcatggttacattcctcagtaactcacaattttagtagcaggccggagttccacataccagggcatacatggtgcctaatgcctgcacgagtgtggccattggattgagcaagtggatatagttgattttttttggagacggcattaaaatggatctggttctcaaacatggcatgactaggcattggagcattgttgagcagcagccatggctatattactctaggcttacaattttgctgtagctgttagtctgttacacagcaaggagtccacttggtaaacatttgtagctaccaaaacagccccatctcatggtgtaacaattttgtagttttacatttgtgtcatctttttgtaacaaactgatgtatcaaacaccgtattgcaagaaatactaaggcttgccattgctatttgaacaaaaaaccatatctgtatattcaacaagcttagcttctgtgttggtcttatattgtggaggataccaggtgaaaatatccaaatgtacctaagtttgcaattatataaactctgaaa

SEQ ID NO: 206329 - DNA, 3455 bp, Zea Mays
ccaaccaaactgacctacccggaaaacgagccccccgactcccgcctgccgccgccgctctgccagccaaacccaaactaaaaccctcgccgacggcgcgcctgttgttaaaccctagaaaaaccagcggcgacaggagtggccgcaaccccgccgccggagggggctccacgaccagatagaagagggagagaggatggggatcttcgagccgttccgtgcgatcggctacatcacggcgagcggcgtgcccttctccgtgcagcgcctcagcaccgagaccttcgtcaccgtcagcgtcggcaaggctttccaagtctataactgtgctaagctgaatttggttcttgctggaccccaattgcccaagaagatccgtgctattgcatcctacaaggattatacatttgctgcttatggaagtgatattgcagttttcaaaaggactgaccaggtggctacttggagtagacatgaagaaaaggtcaacatgctatacctatttggagaatatgttctaagcgcagatgctaaaggtaatgtattcatgtgggccttcagaggagcagaaccaaacactgaaccagttggaagcatatcattgggagacaagttcaccccaacatgtatcatgcatcctgatacttatctgaataaggtaattgttggtagcgaagaaggctccttgcagctgtggaatatcagcacaaaaaagaaactgtatgatttcaatggttggaactcacctgttcggtgttgtgtctcttctcctgccctggatgtagttgctgtcggatgttctgatgggtcagttcatgttcataatgtaagatatgatgaagaattgatgtctttcaaccaccagattcgtggtgctgtgactgcactgtcatttcgaacaggctagctaaagtggtctctcaaatttacctttcttccagatgggcaaccccttctggcttctggaggttcttcaggcgttatcagcatatggaatcttgagaagagacggctgcattctgtgattagggaggcccatgatggttcaatagtttcacttcacttttttgcgaatgaacctattctgatgagttcagctgctgacaattcagtcaaaatgtggatatttgatagtaatgatggaggtgctcgtctgttacgatttcgaagtggtcacagtgcaccacctaggtgcataagattctatggcaatggaaaatgcatattatctgctggccaagatcgtgcatttcgccttttctcagttatccaggatcaacaaagtagagagctttctcagaggcatgttgcaaaaagagcaaaaaagctaagagtaaaggaggaagagatcaagctaaaaccagttgttacatttgactgtgctgagatacgtgcacgtgactggtgtaatgttgtcacatgccacatggatactccacaggcatatgtatggcgtcttcagaactttgttattggtgaacatgttttgacaccatcatcaagcactgtgacaccaattaaggcttgtgtgataagtgcatgtggtaattttactatcttgggcactgaaggtggttggattgaaaaatttaaccttcaatcagggtttagtcgtggtagttacattgacacctcgttggcaatgcaatgtgcacatgatggtgaagttgttggattagcttgcgatgccagaaatggctttttgattagtgctggataccaaggtgatattaaggcatgggattttaaaacttgcaagctgaaatctagattggatgttggtaaatctgttactaaaatcgcatttcaccggccaaatggtcttcttgctacggtagcaggtgatatggtactcatattgtttgatacggtgtccatgaaaatggttcgtagatttgaaggacatacagaccgtatcactgatttgtgcttcagtgaggatggaaaatggctcatctcgtctagcatggatgggactcttaggatttgggacatcagtttagcaaggcagatagatgcaatgcatgttgatgtatctataacatctatctctatgtctcctaatatggatgtgttggcaaccactcatgttgatcaaaatggtgtctacctctgggttaatcaatctttattctcggtctcaacaaatactgaaaattatgccagtggtaaacatgtacggaatgtgtgtttgccagctgtttcatcaacagagagatctgaggaagaacaagttcagaatttaggagagtcatataagtccagtattaaaccttttgtcataacggatcatcaaataccgaatctagttaccctctccttacttccaaagagtcaatggcaaagtttgactaatcttgacattataaaggttcgcaataaaccaattgagccacctaagaaacctgagaaggcaccattcttcttgccttcagttccatccctttctggggagatattgtttgagcctcctgccagctcaaaagatacagacatcagtaccacgaagaatacaaatcataagatgtctgaactctcctctcatttcagtcagcagttgcaattttgtggtgaaacaaagaactattcggcttttactgactacctaaaaggcctgtcaccgtcgtctttagatatggaactgcgaatgctacaaatattagatgatgaagagtctgaagatctggagcaaagacctgagcttcagtccatttcttcgctgttggattatttcattcatgaactttccttcaggaataactttgagtttgtccaggctgttctgaaattgtttttgaagatacatggtgaaacaatacgacggcactcaatgcttcagagtaaggtgaagaagcttcttgaggtccagagcttagtttggcagaagattgataagatctttcagggtgcacgatgcatggttacattcctcagtaactcacaattttagtagcaggccggagttccacataccagggcatacatggtgcctaatgcctgcacgagtgtggccattggattgagcaagtggatatagttgattttttttggagacggcattaaaatggatctggttctcaaacatggcatgactaggcattggagcattgttgagcagcagccatggctatattactctaggcttacaattttgctgtagctgttagtctgttacacagcaaggagtccacttggtaaacatttgtagctaccaaaacagccccatctcatggtgtaacaattttgtagttttacatttgtgtcatctttttgtaacaaactgatgtatcaaacaccgtattgcaagaaatactaaggcttgccattgctatttgaacaaaaaaccatatctgtatattcaacaagcttagcttctgtgttggtcttatattgtggaggataccaggtgaaaatatccaaatgtacctaagtttgcaattatataaactctgaaa

SEQ ID NO: 206330 - DNA, 3726 bp, Zea Mays
cccaaccccaaccaaactgacctacccggaaaacgagccccccgactcccgcctgccgccgccgctctgccagccaaacccaaactaaaaccctcgccgacggcgcgcctgttgttaaaccctagaaaaaccagcggcgacaggagtggccgcaaccccgccgccggagggggctccacgaccagatagaagagggagagaggatggggatcttcgagccgttccgtgcgatcggctacatcacggcgagcggcgtgcccttctccgtgcagcgcctcagcaccgagaccttcgtcaccgtcagcgtcggcaaggctttccaagtctataactgtgctaagctgaatttggttcttgctggaccccaattgcccaagaagatccgtgctattgcatcctacaaggattatacatttgctgcttatggaagtgatattgcagttttcaaaaggactgaccaggtggctacttggagtagacatgaagaaaaggtcaacatgctatacctatttggagaatatgttctaagcgcagatgctaaaggtaatgtattcatgtgggccttcagaggagcagaaccaaacactgaaccagttggaagcatatcattgggagacaagttcaccccaacatgtatcatgcatcctgatacttatctgaataaggtaattgttggtagcgaagaaggctccttgcagctgtggaatatcagcacaaaaaagaaactgtatgatttcaatggttggaactcacctgttcggtgttgtgtctcttctcctgccctggatgtagttgctgtcggatgttctgatgggtcagttcatgttcataatgtaagatatgatgaagaattgatgtctttcaaccaccagattcgtggtgctgtgactgcactgtcatttcgaacagatgggcaaccccttctggcttctggaggttcttcaggcgttatcagcatatggaatcttgagaagagacggctgcattctgtgattagggaggcccatgatggttcaatagtttcacttcacttttttgcgaatgaacctattctgatgagttcagctgctgacaattcagtcaaaatgtggatatttgatagtaatgatggaggtgctcgtctgttacgatttcgaagtggtcacagtgcaccacctaggtgcataagattctatggcaatggaaaatgcatattatctgctggccaagatcgtgcatttcgccttttctcagttatccaggatcaacaaagtagagagctttctcagaggcatgttgcaaaaagagcaaaaaagctaagagtaaaggaggaagagatcaagctaaaaccagttgttacatttgactgtgctgagatacgtgcacgtgactggtgtaatgttgtcacatgccacatggatactccacaggcatatgtatggcgtcttcagaactttgttattggtgaacatgttttgacaccatcatcaagcactgtgacaccaattaaggcttgtgtgataagtgcatgtggtaattttactatcttgggcactgaaggtggttggattgaaaaatttaaccttcaatcagggtttagtcgtggtagttacattgacacctcgttggcaatgcaatgtgcacatgatggtgaagttgttggattagcttgcgatgccagaaatggctttttgattagtgctggataccaaggtgatattaaggcatgggattttaaaacttgcaagctgaaatctagattggatgttggtaaatctgttactaaaatcgcatttcaccggccaaatggtcttcttgctacggtagcaggtgatatggtactcatattgtttgatacggtgtccatgaaaatggttcgtagatttgaaggacatacagaccgtatcactgatttgtgcttcagtgaggatggaaaatggctcatctcgtctagcatggatgggactcttaggatttgggacatcagtttagcaaggcagatagatgcaatgcatgttgatgtatctataacatctatctctatgtctcctaatatggatgtgttggcaaccactcatgttgatcaaaatggtgtctacctctggtagagttctgttgcatcaccctgcgctcagcctattattaccacccttacatatctcaatttattttgtagctacatatatagttcagaaaaatgaaattatgagattggccttccagctggtgcactttccacaaatattttattcatcccacttatagccaacagtattatcagtacactctgtttcaacatatgcaccacgagttgtgttcttttatacgctgttatgggtcatgatatgcatactttttccagtttttttttcattgtggtctcatacatgtgctataaattggacagggttaatcaatctttattctcggtctcaacaaatactgaaaattatgccagtggtaaacatgtacggaatgtgtgtttgccagctgtttcatcaacagagagatctgaggaagaacaagttcagaatttaggagagtcatataagtccagtattaaaccttttgtcataacggatcatcaaataccgaatctagttaccctctccttacttccaaagagtcaatggcaaagtttgactaatcttgacattataaaggttcgcaataaaccaattgagccacctaagaaacctgagaaggcaccattcttcttgccttcagttccatccctttctggggagatattgtttgagcctcctgccagctcaaaagatacagacatcagtaccacgaagaatacaaatcataagatgtctgaactctcctctcatttcagtcagcagttgcaattttgtggtgaaacaaagaactattcggcttttactgactacctaaaaggcctgtcaccgtcgtctttagatatggaactgcgaatgctacaaatattagatgatgaagagtctgaagatctggagcaaagacctgagcttcagtccatttcttcgctgttggattatttcattcatgaactttccttcaggaataactttgagtttgtccaggctgttctgaaattgtttttgaagatacatggtgaaacaatacgacggcactcaatgcttcagagtaaggtgaagaagcttcttgaggtccagagcttagtttggcagaagattgataagatctttcagggtgcacgatgcatggttacattcctcagtaactcacaattttagtagcaggccggagttccacataccagggcatacatggtgcctaatgcctgcacgagtgtggccattggattgagcaagtggatatagttgattttttttggagacggcattaaaatggatctggttctcaaacatggcatgactaggcattggagcattgttgagcagcagccatggctatattactctaggcttacaattttgctgtagctgttagtctgttacacagcaaggagtccacttggtaaacatttgtagctaccaaaacagccccatctcatggtgtaacaattttgtagttttacatttgtgtcatctttttgtaacaaactgatgtatcaaacaccgtattgcaagaaatactaaggcttgccattgctatttgaacaaaaaaccatatctgtatattcaacaagcttagcttctgtgttggtcttatattgtggaggataccaggtgaaaatatccaaatgtacctaagtttgcaattatataaactctgaaa

SEQ ID NO: 206331 - DNA, 658 bp, Zea Mays
aagtagaccggaaaaccccatctcccccgccgccccaccacgcacgatggccgccgtaaggtcgctgctccgctcgtcggcctcccttcttcgcgccgcccccgccctcgcgagatcctcggctaccacgcgtccgtctcttcggcgcgcattggctgctcctcctcgccttctccggtcgcccgtcgagtcgagcttctgcgtggagtcgcttctgcctctgcacaccgccaccgccggtgcacgcatgacgtccatgctcgccgctcctggccaaggcctcggctggctcacccaagctgaaactgacggagtataacgccccctgtgggtgctcccctttaggaaccaggacatcaattgtgcttcgagttcttctgtgcctggaggaaacaggaagagttgattggaaaaagaaaaaatgggatgtgtttttctttttgttcatgtgaactgagatacgacttaataaactagatcttcgaatgatgctctgacccccccccccccctttttttaatgttttttcattgactaaaacggttatgtaatgataactatgtgacacttgttttgtttggtgtgattcttcagcgtagcctggtgatcgagactcatgcaggcattcgcttttgatctcaatccaatttatcctgga

SEQ ID NO: 206332 - DNA, 1376 bp, Zea Mays
gggctcccccaccatccgtggcccgacgacgtccccatttccaagctcctcctcgcgattccaatccacgcacgcctcctccgcttccgcctcgctcagggttagggtttcctctgctccccatctcattcttgttttttcatgttggatttgttagagaaggcttgatctatgcctgttggggcccgattcggcgtcccgggatcgattggtgcggttttattgacggggtgggggcaagaggttgcggtggtgttgattcgttggatacggggatttcggggactcgcatgttcgtgggttgatttggccttcgcacttcgcttatagtcagtgatggaacacaaggaggcgggctgccagcagccggagggcccaatcctatgcatcaataactgcggcttcttcggcagtgctgcgacgatgaacatgtgctccaagtgccacaaggagatgataacgaagcaggagcaggcccagctggctgcctcctccatcgatagcattgtcaatggcggtgacggcgggaaaggacctgtaattgctgcatctgtaaatgtggcagttcctcaagttgagcagaagactattgttgtgcagcccatgcttgtagctgaaaccagcgaggctgctgctgtaatccccaaggccaaggaaggcccagaccggtgcgcggcctgcaggaagcgtgttgggctgacgggatttagctgccgatgcgggaacatgtactgttcggtgcaccgctactccgacaaacatgactgtcagttcgactatcggactgcagcaagggacgcgattgccaaggccaatcctgtggtgagggcggagaagctcgacaagatctgaggcgggcattgggggagcgaaatggttgcaatctgcaagaattcaacatgctgtctttgctgcgttatcattgaaacttgccattcttgtctgctgctgcgtcccgtgaggttcaatactgtgatgcacacagcatccaggcagccgcaagaatttcatcaaaatggtttcccgtgttggctatgtcgtgacacagcttggtgtttgagtatgctgaatctggattagctacaacctacacaagcacaatttcctggtgaatgttgacactaggtgacctgaattctcaagcaaggcgtttcatattctgcaatctctttccagcgtgcgtacaacgggaacatgcagctcgcctttccgcatgtgattgcaacacgcctaacttgtttttgtatgattgtcacctgcaaagaattggaacaagtctaagcaacttgttttttgtatgatcgccacttgcaaagaagataatgatttgtacgaaatagtattcttctgctgggcatgaaatgttttcctccctc

SEQ ID NO: 206333 - DNA, 2462 bp, Zea Mays
ctttattagacgactatttgccaggatgaggtcatcagatatttcaatggaatcaaaacgagaattggtgagaaggctttgttcttgttctgttcttgcatgaattttgcacacttagtaagagtctaccacttgttcagcaactgcgactgtttcgggatctttcaggtgaaggagtttttgaaataatttctgatgtgttgcagagtcaagatagaaaaatcatttcagctgggacagatatccttatactttttcttaatcaggaccctaacctattgaggtcatatattgtccaacaagaaggaaattctcttctaggacttctggttaaaggcatggtaactgacttcagtgaggaaatgcactgccagtttctagaaattctacgcatattgatggattcttttactacgtctggagcacatagagacgtagttattgagattttctacgaaagacatcttgactatttggttgatgtaatagcatcctcttgtcccccgaggagcttgtctcgatcatcatctaactcggtacatgttggtggaaatgctgaaggacactgtatcaagcctgagattttgttaaatgtttgtgaactgctgtgcttttgtgttgttcatcatccctacagaattaagtgtaattttcttatgaacaatgctatcgagaaaatccttacattgactcaacgaagggagaagtttttggttgtagcagctgttagatttatgcgtactattatatccagaaatgatgaccatctcattcgccatgttgtgaagttcaacttgctgaaaccaataattgatgtctttgttgacaatggggagagatataacatgctacattcaggagtactcgaattgttggaatacatacggaaggaaaatataaaaactctcattatctatgctattgagtctttctgggatgaacttgccatctttgaacactttggaagtattcaggccttcaaactcaagtatcaacagtacctggagagcgctgaaccaaggttgaatgctagtgtgcctgacatgagaaagaaggcagaacaaagaggtcttgagaaggaagaggaagactacttcaatgaggacagtgatgaagaagattcaggctccggccggcgggctaaacatgcacagaaccaaaataacaagcctaagtccaaggtccccaatggaagtgaagctgatgacactgatggcgcctctaggcctaaatctgctggacttgtggactatgacgatgatgacgatgaggacttcaatccaccaccaaaggagccttctaggcctgcagaggatgatgtgcccttaaacatatccccgttgaagcggaagccagtgaatgcagtggatgggaaacattcagacggagagggtcgcaggaggcaaaaaatagaaactagaattagttgtgctaaaattgctgctgttactagtacagctattaagcacacagatctacaaaacaagtatgcttcccacttgcttacgtcagccacaccaagtactgaagccaatggtatttttagtgaacatggtactaactatgaggagcaacaacatcctatggagaacacagaaacttcacgacaaactggtggtgattgtataaaagatgtgggcagtatgtctcccgagaaggccgtaaatactaccaatacaagcgattcggagccttattcagtaagatgactactacacagctggttggtccatgtacccatcctgtgctgtggtcaacaggaaggaatcagaatgtgtttggctccaagcgctgaatgcatcgatatcatgctggaaacatgattggaggtgacatagattgcagctacctttacatctcaagtgtacttgcgagaattgcaatggtatcctactgctccagaacaggtaaacatggtcactccatccgcaaagaagaatcatgtgttcaaccagtgtcaattcaacagaataaagaagaatcatgtgttcaaccagtgtcaattcaacagaataatctgttcagcagtttgctttatccgtgctcattgtactacgaacctccgccgtctacttgaatatcaagcctccacgggcagcaaagaatggcgcaaattattgagactcgacagcaatgagcttgatcagtatgttcagggacggtccggaggtgtccttgagggggtcgccgatgacggcagctttctgagcgtgcgacccaaccgaggctatatctaacaaactgcactatgtaaacagtctacattgtaaaataatattttacacggttatatacactctatttaagcatgatcttagtgtggttgtttaaacatggtcttagtgtggttggatgcaccacttgcccttgttaacaaggcccgtgttaacaaggtgaaaaaaaataacttcagatgtatgtcttgaaatagtgccaaaccacatacattaacaaagggtgtg

SEQ ID NO: 206334 - DNA, 3695 bp, Zea Mays
caatggcagaggagaggtgggccttggttggaggacaaggccttgatggggagaagcagacagaggcaggagaaaaaatgagtgcagggtggaaaaaggcgcgtgtcaaagtataccgtttggctgatggtgggaagtgggacgatcaaggaacaggttatgtttctattgattacattgagggttcaaaagaactaggtttgactgttttagatgaagatgacaatgatacactacttatgcacaacatcacatctgacgatatttacagaaaacaagaagaaacaatcatttcatggagagatcgtgaagcagcaacagacttagcgttaagctttcaggaagctgctggatgctcctacatatgggaacacatatgcgatattcagagaaaccttcagttcagtaaccttggtgctctggaagttggtcctcgtcaatcatcagaatctctagaagcctctagaataatgcattctaatgatgattcattccgctctgccaacggcggcgaattcagggagcttcctcctgttgagttgtctaatcttccttttattttgaagactgtattggaggctggcattacagatcagatgcacgtggcagagttgataacacaagataatgactttttcccaaagatagtggacattttcagaatgtgcgaggatttagagaacatagatgatcttcacatgattttcaaattggtcaagggaataatattgttgaacagtccatcgatctttgacaagattttctctgatgagtttattcttgacataataggtgcccttgaatatgatccagaggttccaagagtgcaaaatcaccgtgcttttctgaaagatcatgtagttttcaaagaggccatacgtattgaaaatgtttctgttgtttcaaagattcatcaaacatacagaatcggctatcttaaggatgttatactaccacgaatactggatgatgccactctagcaagtctgaacacaatgatacactcaaataatgcttcggttatttccctgctaaaggatgacacactctttattagacgactatttgccaggatgaggtcatcagatatttcaatggaatcaaaacgagaattggttctgttcttgcatgaattttgcacacttagtaagagtctaccacttgttcagcaactgcgactgtttcgggatctttcaggtgaaggagtttttgaaataatttctgatgtgttgcagagtcaagatagaaaaatcatttcagctgggacagatatccttatactttttcttaatcaggaccctaacctattgaggtcatatattgtccaacaagaaggaaattctcttctaggacttctggttaaaggcatggtaactgacttcagtgaggaaatgcactgccagtttctagaaattctacgcatattgatggattcttttactacgtctggagcacatagagacgtagttattgagattttctacgaaagacatcttgactatttggttgatgtaatagcatcctcttgtcccccgaggagcttgtctcgatcatcatctaactcggtacatgttggtggaaatgctgaaggacactgtatcaagcctgagattttgttaaatgtttgtgaactgctgtgcttttgtgttgttcatcatccctacagaattaagtgtaattttcttatgaacaatgctatcgagaaaatccttacattgactcaacgaagggagaagtttttggttgtagcagctgttagatttatgcgtactattatatccagaaatgatgaccatctcattcgccatgttgtgaagttcaacttgctgaaaccaataattgatgtctttgttgacaatggggagagatataacatgctacattcaggagtactcgaattgttggaatacatacggaaggaaaatataaaaactctcattatctatgctattgagtctttctgggatgaacttgccatctttgaacactttggaagtattcaggccttcaaactcaagtatcaacagtacctggagagcgctgaaccaaggttgaatgctagtgtgcctgacatgagaaagaaggcagaacaaagaggtcttgagaaggaagaggaagactacttcaatgaggacagtgatgaagaagattcaggctccggccggcgggctaaacatgcacagaaccaaaataacaagcctaagtccaaggtccccaatggaagtgaagctgatgacactgatggcgcctctaggcctaaatctgctggacttgtggactatgacgatgatgacgatgaggacttcaatccaccaccaaaggagccttctaggcctgcagaggatgatgtgcccttaaacatatccccgttgaagcggaagccagtgaatgcagtggatgggaaacattcagacggagagggtcgcaggaggcaaaaaatagaaactagaattagttgtgctaaaattgctgctgttactagtacagctattaagcacacagatctacaaaacaagtatgcttcccacttgcttacgtcagccacaccaagtactgaagccaatggtatttttagtgaacatggtactaactatgaggagcaacaacatcctatggagaacacagaaacttcacgacaaactggtggtgattgtataaaagatgtgggcagtatgtctcccgagaaggccgtaaatactaccaatacaagcgattcggagccttattcagtaagatgactactacacagctggttggtccatgtacccatcctgtgctgtggtcaacaggaaggaatcagaatgtgtttggctccaagcgctgaatgcatcgatatcatgctggaaacatgattggaggtgacatagattgcagctacctttacatctcaagtaaaattccagttacccctttttgcgcctgtaaagttaattttccgcaaggacagatctgacaaacatgataataggaatgactgtagattcgaacattggatgggccttgctcctgctgctgcgctcgctattgtatcggtttatgagccaacgtagtagtgaatatgtgccttcaactttatttttctccacaattattgatactgttgtaaaacaagtaggaaggcatagtttatgttgaatagcgtttttgcaagactttgtgctaactcacctatatgattgtaatttgttggttaatagttttggtcggacatgttacgttggataattaatctggtcttgtgatagaataatttatgcagaattttttctttgttaagccaaatatgttgtgcacatttgacacaaactactacggtagaatttcagaagtgaataatgttcgatgtattgagatctgggttatggagtttatgttgaatagcgtttttgcaagactttgtgctaactcacctatatgattgtaatttgttggttcatagttttggtcggacatgttaccttggataattaatctagtcttgtgatagaataatttatggataattttttctttgttaagccaaatatgttgtgcacatttgacacaaactactaaggtagaatttcagaagtgaataatgttcgatgtattgagatctgggttatggatgacaggtgtacttgcgagaattgcaatggtatcctactgctccagaacaggtttatccacggcttgagaaatgtgaaaacattaca

SEQ ID NO: 206335 - DNA, 3223 bp, Zea Mays
attaaacataacgaacacgcgcacaaaaaatattgacaaaaaccggaggggtaaaaggggaaaggccacggccgcctggaggagcgagagggcggaagaggggaagcggcagccgcaggcccgcagctcgtcgatggtggttagggtttcgccgcccgcaccctcgaccagctgaagaatcgcccggtggttgaagaggctcgcgcctcgccctacaaggctccaagggaagaggggatagacagcggcggaccgcggcgtgcggctgatggccgagcaggaggggagggacgcggaagcggggggcgatgccgcggccgcagcggtggcgtcgcacaccagcagcatgcagcgtgtcaaagtataccgtttggctgatggtgggaagtgggacgatcaaggaacaggttatgtttctattgattacattgagggttcaaaagaactaggtttgactgttttagatgaagatgacaatgatacactacttatgcacaacatcacatctgacgatatttacagaaaacaagaagaaacaatcatttcatggagagatcgtgaagcagcaacagacttagcgttaagctttcaggaagctgctggatgctcctacatatgggaacacatatgcgatattcagagaaaccttcagttcagtaaccttggtgctctggaagttggtcctcgtcaatcatcagaatctctagaagcctctagaataatgcattctaatgatgattcattccgctctgccaacggcggcgaattcagggagcttcctcctgttgagttgtctaatcttccttttattttgaagactgtattggaggctggcattacagatcagatgcacgtggcagagttgataacacaagataatgactttttcccaaagatagtggacattttcagaatgtgcgaggatttagagaacatagatgatcttcacatgattttcaaattggtcaagggaataatattgttgaacagtccatcgatctttgacaagattttctctgatgagtttattcttgacataataggtgcccttgaatatgatccagaggttccaagagtgcaaaatcaccgtgcttttctgaaagatcatgtagttttcaaagaggccatacgtattgaaaatgtttctgttgtttcaaagattcatcaaacatacagaatcggctatcttaaggatgttatactaccacgaatactggatgatgccactctagcaagtctgaacacaatgatacactcaaataatgcttcggttatttccctgctaaaggatgacacactctttattagacgactatttgccaggatgaggtcatcagatatttcaatggaatcaaaacgagaattggttctgttcttgcatgaattttgcacacttagtaagagtctaccacttgttcagcaactgcgactgtttcgggatctttcaggtgaaggagtttttgaaataatttctgatgtgttgcagagtcaagatagaaaaatcatttcagctgggacagatatccttatactttttcttaatcaggaccctaacctattgaggtcatatattgtccaacaagaaggaaattctcttctaggacttctggttaaaggcatggtaactgacttcagtgaggaaatgcactgccagtttctagaaattctacgcatattgatggattcttttactacgtctggagcacatagagacgtagttattgagattttctacgaaagacatcttgactatttggttgatgtaatagcatcctcttgtcccccgaggagcttgtctcgatcatcatctaactcggtacatgttggtggaaatgctgaaggacactgtatcaagcctgagattttgttaaatgtttgtgaactgctgtgcttttgtgttgttcatcatccctacagaattaagtgtaattttcttatgaacaatgctatcgagaaaatccttacattgactcaacgaagggagaagtttttggttgtagcagctgttagatttatgcgtactattatatccagaaatgatgaccatctcattcgccatgttgtgaagttcaacttgctgaaaccaataattgatgtctttgttgacaatggggagagatataacatgctacattcaggagtactcgaattgttggaatacatacggaaggaaaatataaaaactctcattatctatgctattgagtctttctgggatgaacttgccatctttgaacactttggaagtattcaggccttcaaactcaagtatcaacagtacctggagagcgctgaaccaaggttgaatgctagtgtgcctgacatgagaaagaaggcagaacaaagaggtcttgagaaggaagaggaagactacttcaatgaggacagtgatgaagaagattcaggctccggccggcgggctaaacatgcacagaaccaaaataacaagcctaagtccaaggtccccaatggaagtgaagctgatgacactgatggcgcctctaggcctaaatctgctggacttgtggactatgacgatgatgacgatgaggacttcaatccaccaccaaaggagccttctaggcctgcagaggatgatgtgcccttaaacatatccccgttgaagcggaagccagtgaatgcagtggatgggaaacattcagacggagagggtcgcaggaggcaaaaaatagaaactagaattagttgtgctaaaattgctgctgttactagtacagctattaagcacacagatctacaaaacaagtatgcttcccacttgcttacgtcagccacaccaagtactgaagccaatggtatttttagtgaacatggtactaactatgaggagcaacaacatcctatggagaacacagaaacttcacgacaaactggtggtgattgtataaaagatgtgggcagtatgtctcccgagaaggccgtaaatactaccaatacaagcgattcggagccttattcagtaagatgactactacacagctggttggtccatgtacccatcctgtgctgtggtcaacaggaaggaatcagaatgtgtttggctccaagcgctgaatgcatcgatatcatgctggaaacatgattggaggtgacatagattgcagctacctttacatctcaagtgtacttgcgagaattgcaatggtatcctactgctccagaacaggtttatccacggcttgagaaatgtgaaaacattaca

SEQ ID NO: 206336 - DNA, 3588 bp, Zea Mays
ccaattcagaaaaaacggaggaaacgagaaggccctcctgcctgccccttgcttcctcccgagtcccgtactcccgtggcggcggcggcggctgctcgacccgcccgcccggccgccatgtcgatctgcgggtaccactccccacgcttctccgagaattgtgcgtttgtcgggcacccttcgcaggagcatcaggattgtcagaacgccactgatggttatagcggcttcatcttgcacttgtcaggagatgaggacacggtggttagttcaccggtcagcagcaatgtgctacctttctctttgcgtgtgtcttcagaaagtgccgcacaaccttccctagctgaaggcagtggcaatcctcagataccaaactctggtacgtgcaatggtctatccgagagcctctgtgcagatggtgaagaacaagaggtcaatgctgtctcccagaatcagtttgaggctaacgatcctcaggttgatatgccgacaaaagtggctcgcaaggagatcagtatacaacctgatacaatcagacatagaagacatggtttcaatggtggaaaggttgatgttcgaaagcttcgtaatgttgatgtaaatgatgcgattgaactatcgattgctgcatctgaggccatggttattgcagagatgatacttgatgattctcagcctgataaatcggctgcagctgctatagaagctgctctacacgtgaaagaagcccggaagcaattctactttgaggagccacaacatgcttgtggatcctcagaaggtggtcttgatgagattgattggcttgcagaattggatgagtctgaaatggttgacgcataccaagatgttgctctgtccctcatccacattgcttgctcatctcaagatcataacacaggtgatttgaagcaacaaaattcccatcctacttgtcccccatgtgatgcagacacacacatcttatgggattcttcttctgagaggcaaaataaaaaatggaacagccaaaatgctgatagtgatgaccatgtatctgattcttttccaaacaatcagtcagcaggtgtgccaccaaatgaaccaactccatgctctgcctctgtaaagcaagcagctctatgtaaaacaatttcatgttcaagaaataagaaaactgtcctccaggcgtcaactcaaaacaatgctgcttttcatggaaccttgggagctcttgcaacataccaaaatgttcataagaaagttgcaggagttgctgcacagacgaatgttggtatgaagaagcgtgtaaaaggtttgtttgaggaagaaaatagctacatttctgattcaattagcacagataggcgctgtcctacttctagagcatcatccatggaaattgtcgcctcttcaagggcatctttgtattgcaaagctgaaggtttacttgaagaaaatcatcatcctggaactgaagagttgtgttgccaagtagtatgttctagcttgtcacaagtggatcctttatgttccattgttccatgtagcatatcttgcgatgaaggtcccagtagccaggctcctgtgtgcaaacagagtgaaggccatgaaggtcccagtaaccaggctccttcgtgcaaaaagaacgaaggcaatgaaggtcccacttgcctgacacctgaacgcgaacatagtaaaaaaaaggaggaagaatttatgcataccaaagaatttcctatgatgcaatacctggatgaggaggctggtccatcttgtgtgcctttagttaagccagcagattctaatgttccattccggcgaaggaaatacagttcactaaggccatttagcacaatagcaactaagtcaaacatatttggaagtacatcaaattctaatgctgatgttccagtttgtcagcttgagagattcacacccattgttctaaataagaatgtacagcgtgtgcaagctgccaaggaattcatagaaaatagtgctggggctgaaaatttggaagatttctctgcagttcggaagcagacatattatcctcaggatggcagtgaggatcaaatcagggagctacaggtcccacgggaagtctttccgccaacagagaatttggttgttaaacagcaccttaaaagaaaaagggtccaattttcagaagcaaagcgtagtagcagaagaaccaagaacaatagaaggatcctgactaaatcaagattcagtcgatcagatagcagaacaggagagatgcttgagaccagagagtacactgataacaaagaagacacatttcaaggagtagagtttctgttgactggatttcctaaacagaaggaaaaagaaattgagtccctaatacgaaaatctggtggctatgtactttctaaagtgtcaccctttccacttgataaaagaaagaacatggctgagtttccaagctggaatcctcccatagtactttcgcctaaaaaggtgtcaacagctaagttcttatatggctgtgctatagatgcctggatattgaatcccatttggctcttcgattctcttcaagccggcatcatgctgccacctggaaagtatttaattcgacaaaggaatgcccagaagcataattcatcattcgaccgcccacttcacccaaaatgtaatacattgatatttgatggagtaggattcttgatccacggcaaaatcagcttctgttcaaaattttccaacattgtcaagcatggagggggccaagtttttatatctcttcagggattagttcaaagcttgaaggatggaagtacatcgcgtggaatcattcttattgcaaacgcggctagtgcgtctcgtcatctaacccattgtggtttggagcatgacataaatacagcgacagcaagctggatcatcgctagtttattttctggtaaattgattccattgaagaaagatcgctgtgcttcatttcgccgaatcaagatgccattgttccaacaaaagcaacatgtattttacatgagtcaagagatatgatctctgctgcatcacatagctacaataccatgggaatctcaaatacttctcactgaaacatgactgctatgcattcactctgatgaacctcttttaaaagaagagtttgtcacagcatttttttgtcactcagaaatccctctgttcagcaccaaggtcgtattcttttgtcacttcacaattgaaggggaagctaggaaatagagcattcttcaatcatggatttacggcgccctatcaggctacagctgagaaagggttagttactgctcgaggtgagcaaagtattcatcttccagctacatcattctggaaacttggtttctcaacaacatgacaagtgatccaacaacatgacaagtggatcacggaaggtttgaaggggattgagggggaaatgaactaatttcctcctcaattccctctaattttccgtgatcgctggtcaccaaatcagctctaatcatggcatcataacacaattttgcagtccagaatcaactgtaagcagttccttatatgttgtagattgtagcatgtaaatcgtaaatagaaataccagatgtaatc

SEQ ID NO: 206337 - DNA, 541 bp, Zea Mays
accgcacgcacccgccgacgcccgcgcggccacgcactaggcggcaccgcagcgacggtcgacgatcgccacacccggacaccccacacaggcacccagccacgcgagcggcgaaactgcgggagccaatcagaacctacagcgatgcaatgatcgccgtcgcatcgtccttcccctcgcgcgcccacgcggctccgttcggctcggggacactgccaccgccgtctacgcggcgcagcacgtccctccgccacccgcgcgtctcggcgctcggtggaggcctcgaaggagagccggggaagatactggatccgcgcgccacgccgttccagatcctcggcctcgacgccgccgccggctactccgccgccgaactcaaggccgcctttcgcgcccgggttaaggaattccatcctgatgtttgcaaggacccagaaaatgcagatttaataatgaggcgagtgatcgaggcctatcagtgcgagtgtggccttaaaggtttcagaattgtgaaggaactttagaaatctgactccatgta

SEQ ID NO: 206338 - DNA, 1579 bp, Zea Mays
gtttgccatcttcgttggactgcgaggaaacttggattctgaaggctccacgagaacatgtctgcaacgtcagaggcattgacagatgattttgaagcctggcattcatcatggcggttctgcatactaggtgttatacttgagaagcaagaaaccgtgggtgtgagtgtgacaaccagaatgaagtcagcaatgtcctcatttcaacacacaaacattatctatctctattattcatagacagtcatggcaccgagctgcggttgccatcttgttcacgtcactgccttcacaagcccttgctacttttttcagatctaaatctgaagcaacggccagaggaactcaggttggattggacagtggtccgttccattgggattgggtgggtctggggacctaggcagaccagatggccgggctattcaccgagcaggctgctgtgtacgccgcagcacggccggcgtacccgaaggatctgtttgccaagctctcggcgctcactgctcaccaccgccgcgcttgggacgtcggtactggcaatggccaggcagccatcggtgtcgcggagcactacgacagcgtggtggccacggacgtgtccgcggaacagctgcggcacgccacgccacaccccaaggtccggtacctgcacacccgcgacgccacgccgggggaggaggacctcgtcgccatgctgggcggcggcgaggccagcgtggacctcatcacggtggcacaggccgtgcactggttcgacctcccggcgttctacggcgccgcgcgccgcgtcctgcggaggcccggcggggtgatcgcggtctggggctacaactaccgcgtgagccccgtggaggacatgatggcgcgtttcttcagcaccacgctgccctactgggacccccgagctcggtattgcactgacggataccgggacctgccgttccccttcgaggacatcgggctcgggaaggaaggagagccggcgagcctcgacgtggagcacgagatgtcgttcgagggcctgattggcatgctgaggtcctggtcggcggtgacgacggcgaagcagcagggcgtggacctgctgggggcccgcgtcgtgaaagagctggaggaagggtggggtggggcggagctggtgcggaaggtcacatacaaggccttcctcctggcaggcaccccggggcccatggctgatgagtaatcaatgaggacctgtttggaaatatagttttctcgttctacagtatttcaatactatagtatgtcgtatgttataacataaaactgtagttttagcaaaactaaagtaaaatcaaagtagttcttcatacatagcactgtttggtagcatatagtttttggcttatataaataaggaagataagtttaaattcaaatagctacaacttatgatgggctgcatcatcggtaagacaagtttaaattcaaaacagtctgttgtaaccatctgagtatcgaagttcacaaagttgaagaattagcaattagcattcaaatgcttctatgtatggaattctgagtacgtagaaatctactcagttggaaacctgcg

SEQ ID NO: 206339 - DNA, 1667 bp, Zea Mays
ttaatcccctcgccttcgtaagctcagtcctccactcctccacctctcccacccaacaacaaaacaagcctaatggcttcctctccatctcacgccactgcgttgcctacttgccctagaaccctcgccgccgcccctctttaggattcccatgtccctggtcgccccctgacacgcccgccccggatcctgcaccggaattccgcgtggaattccgggccgaaccgcctctctgcgtgcgcctccgaccaccaaactctctcacacgcgcgcgcgcgcacgtctgaggcggttggattctccggtgggggtcccttggtctcgatttgctgctgatgggggtgccgaagcagcgctggacgccggaggaagaggccgcgctcaaggccggcgtcgccaagcacgggcccggcaagtggcgcaccatcctccgggactcggacttcagcgcgctcctgcgcctccgctccaatgttgacctcaaggacaagtggcgcaacttgagcgtcaccgcaggaggttacgggtctagagagaaggcaaggatggcgttgaagaaaggcaggcgcgtggtgcctaagcttactgctgagccaatggatgtagatgagaaggatatggacaacgctcatgacacagtcattgatgtggaaccgttagcaatggctttcgagcccttgccttttttggaaagcccagataagtcagttgctaggctcgatgatctcatagtagaagctataaggaagcttaacgagccatctgggtccaataaggcagtcatttctggatatattgaggaccaatactggccgcctgctgattttcaatacctgctatctacaaaattgaagtcattggttaattctggaaaattaatcaaggtaaaccaaaagtacagaattgcaccaagttcttccttgggcggaataagcactaagatgaaaggcatgaccagggaagaggctgctgcctttgctgccaaggcagttgccgaggcagaagtagcaatggcagaagctgaggaagcagcaagagttgcagaggctgcagaaaatgatgctgaagctgcaaaggcttttcttgatgctgtcattttgtcaatgagaaacaggaacgctgcttccatgatacttcgagcttgctgatcctttacccatgcagcacaccgatgttctgctgcaaagattttctggatagacgagtttcttgtatagccttatagatcatggcgggttttcaacagcttgctgttgtcctgtgctgtgcagccaatcgacaacatgataacaagaatgatcgagaaagtagtcttcatttttttttgtttcccattgtgttgctttgtaattaaactatagccttttcccttcattagttgatgaagtgatgtcgtctaatagaacaactgtagtgaaaagaaaatgtcagaaagccgccttagttaatgcaaattgctgtgatagtatttttgcagaaatgattatatggtgacagcgtttaagattataactgccttgcagttgccgtcgattatatgcctgtaatagctagtttgggaactccatttttctaagagattttttttatttagaaaaatataacaccttagtaaaatgaggtttccaaactagccctaagattgacaacttccctttggataccag

SEQ ID NO: 206340 - DNA, 1081 bp, Zea Mays
gctgtatatatacttcttcctatgtacaaatgaccgtgttctcctttaattaatacgctgatagttggctgagagcgacagatttctaggcaaggacgaagtactagaagacagcaaccacaaggacattgcccccaagcaacaaacttggtactagataacatgaaagagtagcttcgacgtagaagaaactttggcgcccttcaaatcccatggccgcactcggttcttctgtcacatccagaggcttggcactccatacctccgtgtgtgtggtttttcttcatcgtcgccacgggaatccagtgatcccggccgcaccgtctcgtccccagcgaagtcttgcgagtgggttaacaacgagttcttcaggcatgaacaatgccttccctattatcaaaggaactacacgaattcctgcggttggtcctggccctgcaaatccgccaggaggaaacctaccgatacccagcagcatgcctccgtgggccaagtgggtggccggggccgtcatacttgcgatacctatctacaggaggttcagaactttagaagagaagacggcagaggtggccatcgaggtggtcgacacggtggcggaggcggcggagaaggtcgccggcgaggtcgccggcgcgtttcccggcaacgacggtctcagggaagcggcctcgaagattaagacggtcgcggatgagatcgaggaagacgccgagaaagccgaggccctaatcgagaaggttgacgagatcaagaaagaggttgattcaattgtggatcctataatcgacaaggttgtcaaggacaaagaaatatagagacaggtggtgaactgaagatgtaaacatttgttgggctggtctggttaggaatggatccggatatttattcagatgttaaattactttcgattgcaaacaaatatgatatataatttgttatgtaaatttatattggtgattttagtattaagcttatcaagattcataaaatttaaatatcaaatatgttatatatcattttaaatatttgatttaaaattcggatgcggatattattcggattcgaatgttgttttacc

SEQ ID NO: 206341 - DNA, 1617 bp, Zea Mays
acaccgggccgccacacaaaatccccacacctgcctgcgtatcgcgctgcccacccaccgcacatccccgcctcccgccggccggccgcccgcctaacgactcgcggtcaccgcctgcgggccaccgtccgcccccagctcgcttacgatattgtacgttcgtggcgcggagcaccgtggtgttggcctagtacgtcgatttcacggtgacttcaccaccattgccgcccagtggctgcagaagctccccgccagcaacaagttcacctacaactgcgacggccacaccttcagttacctcatagagaaaggatttagaatcccattaagtttactgctgctaccatttaaagggcagaactgccggtcttcaagctctttgttactcctgatcatctgtggcacaattgtcatcgggcaaaatgccatcagtttatctctacatccctaacattatcgggtattttaggatcatcataaatttcattgcatttgcggtttgctattccaacaaggctctctttgctgtcttgtacttcttcagctttgtccttgatggtgtggatggttggtttgcacggaagtttaatcaagcatcaacatttggagcagtgttggacatggttacagataggtactccttgaatgaatctttaaaatctgcaggttttacagacctggtttagtcttcttgatattgctcgggttggatattacgagccactggtttcagatgtacagttctttcttgtcaggtaagactagccacaaggatgtaaaacacacaggcaattggcttctgaaattatattatgggtacaggccattcatggccttctgctgtgtttcttgtgaggttttgtatattatcctctttctctttgctgatgagaagtcaacaagcttgcttagtgcatgcaaaggtctcctgaaccaaagccccatcattatcttggtgtttatttccacattagttggctgggcagtgaaacaagtcaccaatgtcatccagatgaaaacggctgcggatgcatgtgttgtgtacgacctgaagcgcagcaaatgaaaagcatgaagggaaaactctacggtttaactcagtcctgtgtggacgtatccaaagggaaaaactctccgaggggatacgtcttacgttccttgacatctttctgatgatgccttacgtggggccagaggatgacatgccgtgggaagagcagcatgtcataaagagaaccaacgcaaacaattgttttgtgaaggcggctattgatttgttgtcaagagtgttttattatgtcatacaaatgatgaattgatgatggtacctttgttacctgggctagccctttgtgtcaacatgaaagatgcttacgagccacatgttcccttctgaaatgaaggttttgagttgcaaaaatttacatattcccttctgaaagccagcaactgcacctcgagagggtttaatggttacttttaccccccaaaataggcactagctattattcggatgatttcccttttgctccttattaaacatcctttggttcagttttattgatagttttaatttttttacatgatctcccttagttcaaaaaaataaaattaaaa

SEQ ID NO: 206342 - DNA, 1037 bp, Zea Mays
acactttcctttctccctcctgtgactcagtcggtcatggcggctcagatccagactcctccggcgtgggcgggcgtgagatccccgacagcacggccctagcagcggccacccccggtgggcacggcttgtgcgcgaccgtcccggcctgtgcgcgggcgcggcgtggcccttgacggcgcgctggcaagcgccctgctggtgcacaggcgggcagccacgacggcgcgcgagcgaggacccccggcgacgcgtggccccggctccgatccagtctcgtccggcgggcgcgggccctgccccggcggctccccgtgaccctggtgcatgtctacgaacaacgggtaacagtagaatccaaggctacacaagatatgcatgcgtcccgacagcgagtgtgctgcaactgcagggccatgcaggaagatgttccatagtgctggaggtgaagaggtcattgatcgaccatctctctctcgcaacgacattatcattccagttttggtcccgacagaaatgtgcgcgcgctggctgttagcatcagctctgccaccagcaacatgtccgctagtagtccagcaaatgtcatggttgaacaaccccaatgatcagctatgagaagaaatgacacgtatctttcacacgcacataggagccatacgaagaacgtactaatgaaaagatcgatgaattatattgatatgatatgacgctgcatatgacgaggcgatgtctagtcagcacggaccagactatgactggaggacctcacctattgatcctcaggctatgtatgtaagtggtggaaaagctcatagaaggtacacaatgtttgctaacgtcatcaactcgagccaggtgagggttcggcgtggaggttcgtcaaggtctgctactcgtagctcccatcgctccatgttatggtgatcggcgaccgtgagcttcatgttattgtgttctcatacttgagacttttattatgactatgtatgatatagtgtctcttattagtactggatgatatgtgtcttattatg

SEQ ID NO: 206343 - DNA, 2136 bp, Zea Mays
cacgccacactcctcacctctcctcgctccacgcacgcgctctctcacccgctggctattagtcgtcgtcccttggatttcgacactctctctagcgggcgcctgttccgccgccgtccatcgatcctagctagctagctagctagggcgcgaccgtcgtctcggtggttgttgacaggtcccgtacgtgtgtgctcgccatggctcgtggcgacggcgggcagctggcggagctgtccgcgggggtccgcggcgcggccgcggtggtggaccacgtggccccgatcagcctcgggaggctcatcctcgccggcatggtcgccggcggcgtgcagtacggctgggcgctgcagctctccctcctcacgccctacgtgcagactctggggctttcacatgcgctcacttcattcatgtggctctgcggccctattgccggcttagtggtccaaccgctggttggcctgtacagcgacaggtgtacatcgagatgggggagacggaggccgtttatcctgacagggtgcatgctcatctgcgttgccgtgagttcattggaggagctgcaacaacagcttggtcaccgttgttcactgttgttgttgttgctgctgtttatcgtttcccggttaatgttttccagttcatatgccgtgtgcatataggtcattgttgtcggattctcgtcagacatcggagctgctctaggggacacgaaggaacactgcagcctctaccacggtcctcgttggcacgctgcgatcgtgtacgttctggggttttggctccttgacttctccaacaacactgtgcagaccatcatgggccaagtgcggctaactccatcttctgttcttggatggcgctgggaaacatcctaggctactcctctggctccacgaacaattggcacaagtggtttcccttccttaaaacgagcgcctgctgtgaggcctgtgcgaacctgaaaggtgcatttctggtggccgtggtgttcctagtcctgtgcctgacggtaaccctgatcttcgccaaggaggtgccgtacagagcgaacgagaacctcccgacgacgaaggccggcggcgaggtcgagactgagcctaccgggccacttgccgtgctcaagggcttcaaggacctgcctcccgggatgccgtccgtgctcctcgtgactgccatcacctggctttcgtggttcccgttcatcctctacgacaccgactggatgggccgggagatctaccacggcgaccccaaggggagcaacgcccagatctcggcgttcaacgaaggtgtccgagtcggcgcgttcgggctgctactcaactcggttattctagggttcagctcgttcctgatcgagcccatgtgccggaaggtcgggccgagggtggtgtgggtgacgagcaacttcatggtctgcgtcgccatggcggccaccgcgctgatcagcttctggtcgctcagggactaccacgggtacgtgcaggacgccatcaccgcgaacgccagcatcaaggccgtctgcctcgtcctcttcgccttcctgggcgtccctctcgccatcctgtacagcgtcccgttcgcggtgacggcgcagctggcggccacccggggcggcgggcaggggctgtgcaccggcgtcctcaacatctccatcgtcatccctcaggtgatcatcgcgctgggcgccggcccgtgggacgcgctgttcgggaagggcaacatcccggcgttcggcgtcgcgtcggccttcgccctcgtcggcggcgtcgtgggcgtgttcctgctgcccaagatctccaagcgccagttccgggccgtcagcgcgggcggccactgatcgaacccggccggggccggccgccggcacgcagcccggcaagagctgtatgttgttgagagttgaacagaaaccatgcatgtgtgcttctgtagttctgttgtttgtggtcgatcgatgggcgttgcgtggcagcgtgggcaagcgaggcgaggtgcgcggatccaaaaaaagggccattcgatcaatcaatgtgtagtagagtacaactagacgatgatgttcacatcatttgtctttaatacataccggtttctattgtctttacaatatttttgtctatattaatt

SEQ ID NO: 206344 - DNA, 1252 bp, Zea Mays
gccagatccccttctccattttatccgtccaacgagggggaaaaatcccaccgagaaatccccctccattccctccctcgtggcctcgtctcctcccgtggcccgtgggggacggcacgcaaccacacgcagccactcaccggtgagcggcgaggcgactggcgcggccgcgcaccgcagtcacgcacgcaggcgctcaatggctgcgtcactctgctccccgcctccgctcccttccgccttccgccgatcccgcgccgtcgtccgcgcctcctcctcctcctcgtcgtcatccgccgtctcgtcgtcgtcgtccgcccccaaagcgcggttcgtcgcccgccgctccgagtccgtccccgtccagcagctgcggagtacatgagcttgccagccagccagtactcggtgctggacgccgagcgcatcgaacgcgtcgacgactccaccttccggtgctacgtgtaccgcttccgtttcttcgcgcttgaggtctgccccgtcctcctggtccgcgtcgatgaggaacccgacggctgttgtattcgcctcctctcctgcaaactggagggatcaccgctcgtggaggcgcagaatgataaattctcagcttccatggcgaatagggttttctgcagcagcaagtcgcaagattcgacccttcaacaacttacatcagatactacaatagaggttgcaattgatataccttttccatttcgagcaataccagttgaagccattgaatcaagtggcaggcaagtgcttgaacagttactcagagtcatgcttccaagatttctgaagcagcttgttaaagactaccaagcttgggcttctggcgatgcttctaggaaaccacttggcactggtgaaatctgaagctgcccagtgtctccattacgcatgatagtttgatcgtagaattcagttattgcccccttgtgttgtatagcaatcctgccaaaacaatgggcatgcttgtttcagtttttttttgctgattttggctgccaaaagctgttgtatgctaaacgctcagtttttcattccacttttatgagaatcgttttgatgaaaaaatgtccaaaattaacttaaacacaatcgatcgacaggaggaatctgtcacttcctgcattctaaaccctatggatccttttatctttcttcgtatataatttttataattttgtattctctctacagctagattctctcaaaaaagctcgtcagaaaaaacaaacaaaca

SEQ ID NO: 206345 - DNA, 2176 bp, Zea Mays
ggattttgtcgctaccaatatcaacctctcctcactgagtttttggagtgttacttgcaacttgcaagaaagcacacctatgaaccctgaacggtgtattcccacgtagtagggctttgcagtatccattcggttctgtgctggagctggacatatttgcctgattgcaccatttgattccctgccattgttttcctttgactctctcgttggtaactgtaactctttttaagtgtttctgcattctgttttcgttaggctgtctccagcagctctcatatctcatttcctatctcacattttatttgaaatgccactctgcaaacagtatatctacagtacaaaacagtgtttgcccgatctactgtacacagccctactgttccattaactgtgctagcacctagttcattgcagtattgcactatgccagtggcagcattatgtgcaagagaaaaaaaaagtgacaatctgaacctgcacaaattcttacttgttatttttccagctcagctttggttatgtaacgtctttatgtatggtctcctctaaccaatttcttgtcacaagaacaaataagcaaattcctttacttggcagatagttattatgccctaaatttcatactctcttgcagttcctgagaaacgtcttcggttcagaacaaccgttgatgcttcagaaacacaagtgattgaggctatgcagaagatagcttcacacatagggaacgcttcaaaattcagcaaggcatcaaaactagctttgcaactcatcgaggctggaagcgtcaagcctggaacaatcggtcatttctttgctatactagaagctgcgatgtcttcaccgggagtgtgcaacgagccttctgtacgagcagactaccacaaattgttcgatgctgctcagggtgtaacagagttactcaaccaagagcagaaaaatcgattcaacatatgggtgctgcatgcagtggtggctaacgatcttttcactgatgacagctttgtgttctcaaaggctgtaggaaagatcaaagatgccatctcagccctgccagtggcaacggtggatgacgacaacgacgaagctgcggcccttgctgctgcgagcaaaactgatgtggcgacggataacgaagcaggtcatggcgtcccagccgcagcttctgactctgtggtggatgatggcgcgcatgccgtggccttggagccggaagaagaatcctccgaccctttcggtttagatgggcttcttgagcacaggcctaagaagacgtctgggagagctcgagagaaggcagtcgcggctctgaacagaaagacggtcgaggaggaagcaaagagggttctcaagtcgcagcgggaggcccttctgaaatgcctggaaatagccgctcggcgctacagaatcccgtggtgagtttttgtgtgtgtgatagatagatagagcaccgtccatttgcttagcagtatatttctgttttgtttttttttttttggattgagcgatattatcttgttgtgttcgccaggacacagaccgccattgacattttggcgaagcaggcgtacgacgacgcggcccggttcacacggcggcagcgggacgcgatcgctaagctgtggaactcgatcaaggagcagcagatccggcggaagcaaggcaagtcggtgagcgggaagctggacgtgaacgccttcgagtacctccaggagaagtactcccgcgagaagatgagcatccggcacagcgtgggcggcggcggcgatcgtcgcgcgacgcagtggctgggctaggccgtgcgtgtgtgtgatggtttgtgcctttggcttcatcagcgacacggcgtgggagttgtttgtgcttggtttttcgtagaggagaggagagagttgacatgatcttccccgtagcatgtgatgggtggctcttggtgtaacgttacgtactagctgcactgaactcgttgcatgtctttatcagtgctggaactggaagcagcagctgaaactgctgacaacgacatggcagtgcagcacagtgcggctgttgggggcaaaatgctttgtttatgccggcacccggcagcacatactactagagtagcagcagtctatcaccacccttatttgatttctctgttcggttcggattaaaactaactgttttaact

SEQ ID NO: 206346 - DNA, 1684 bp, Zea Mays
gtcactatagattccgtcgtcacgcaccgtgcatgtcaaagtgcatccagaacgagatagaagcagaaccggagtcacaccctttccgcgagataatcgattgcagcctcagcaatccacagtccatgggacagcggccaaacaagttcttccgagaggttcttgccttgtgcgactatccccatcttctagaacagagtggaactaattccttgttcagctctggtgcgatagcaagggcacgggagattctagacctctttcccgggagagcaacaggaggatatagccactctcagggcactgaaggattgcgcgacataatcgccgctggaatagccgctcgagataatttcccctgtaacgcggatgacattttcctgacagatggagcagctccgccggttcacatgatgatgcacctgctgatacgggataaaaaagacggcatcctctgcccagttccatcgcattccttgtacacgagtgctatgcttctccagggcgctactcttgtgccatatttccttgacgagtcaagaggctggggagtgagcatgtcagacctgaagaagcagctggatagtgcccggtcaatgggtgtttttgttagggggcttgtggttataaatccaggcaaccctactggacatgttctcgtggaggaaaatcagcgtgagattgtggatttctgcaggaatgaagatcttgttcttctagcagacgaggtttaccaggaaaatatttacgcagatgagaagggatttcactctttcaagaagatagcacggtccatggggtacggcgaaggagacatatctttagtgtccttccattcagtttctaatggatattatggtgaatgtgggagaaggggaggctacatggaagtcactggcttcaactctgatgtaaagaaacaagtgtacaaagttgtatccctaagctcgtgctccaacatctccggccagatcctcatgagcctagtcatgaacccgccacaggtcggagacgagtcgtacgcctcttaccaggccgaaagagacggcgtcctgtcatctttcgctcgctgcgcagaggccatggtgcgctcattcaacgggctggaaggggtgacctgtagcgaggctgaaggagcagtgttcgtgttcccttcagtccgtctgccaaagaaggcggtcgcagctgccgaggcaagcaacacgcagccagatgcgttctacgccctccgcctcctcgaaaccaccgggatcgtcgttgtgcctggctctgtttttggacagatgcatggaacgtggcatttcagatgcacggtcctgccacacgaagagaagaagacgatgacggtgatcatctccagctttgtggcgtttcatcgagccttcatggaagagtttcgcgactaacagatttcagctcctcttcttctatctctgtattgtaccacaacttaatgctgtacttcggagaaaacctagacctctccaaatgcatgattcctgtatgaaactgtttgagtttttctttttcttttgttgttgtgtctgttacggctattttagtccaacgcaactaattatatatatatatataggcaggtataacgggagcccaaggaagcccaggtcggttcccggtctggccgatggaacaggcgcgcctgtgttttaacgtggggctgaga

SEQ ID NO: 206347 - DNA, 1871 bp, Zea Mays
ccgcactgtcgggcagtgcaacagccaagagtgctgaacctaaaccgaactgactgcggcgtcctcttcttgttcccaaacctcaccgcctcaactgcttcgccttcgactgcgggcggcggcggcggcgtacaaagaaccaaaagatgactccttgcgctctcaccgtcgactccctaaacccaaaggtgctggctctcgcggatcacctcggcgacaacgccattgcccgccgcgcgcagtgcatccagaacgagatagaagcagaaccggagtcacaccctttccgcgagataatcgattgcagcctcagcaatccacagtccatgggacagcggccaaacaagttcttccgagaggttcttgccttgtgcgactatccccatcttctagaacagagtggaactaattccttgttcagcaagggcacgggagattctagacctctttcccgggagagcaacaggaggatatagccactctcagggcactgaaggattgcgcgacataatcgccgctggaatagccgctcgagataatttcccctgtaacgcggatgacattttcctgacagatggagcagctccgccggttcacatgatgatgcacctgctgatacgggataaaaaagacggcatcctctgcccagttccatcgcattccttgtacacgagtgctatgcttctccagggcgctactcttgtgccatatttccttgacgagtcaagaggctggggagtgagcatgtcagacctgaagaagcagctggatagtgcccggtcaatgggtgtttttgttagggggcttgtggttataaatccaggcaaccctactggacatgttctcgtggaggaaaatcagcgtgagattgtggatttctgcaggaatgaagatcttgttcttctagcagacgaggtttaccaggaaaatatttacgcagatgagaagggatttcactctttcaagaagatagcacggtccatggggtacggcgaaggagacatatctttagtgtccttccattcagtttctaatggatattatggtgaatgtgggagaaggggaggctacatggaagtcactggcttcaactctgatgtaaagaaacaagtgtacaaagttgtatccctaagctcgtgctccaacatctccggccagatcctcatgagcctagtcatgaacccgccacaggtcggagacgagtcgtacgcctcttaccaggccgaaagagacggcgtcctgtcatctttcgctcgctgcgcagaggccatggtgcgctcattcaacgggctggaaggggtgacctgtagcgaggctgaaggagcagtgttcgtgttcccttcagtccgtctgccaaagaaggcggtcgcagctgccgaggcaagcaacacgcagccagatgcgttctacgccctccgcctcctcgaaaccaccgggatcgtcgttgtgcctggctctgtttttggacagatgcatggaacgtggcatttcagatgcacggtcctgccacacgaagagaagaagacgatgacggtgatcatctccagctttgtggcgtttcatcgagccttcatggaagagtttcgcgactaacagatttcagctcctcttcttctatctctgtattgtaccacaacttaatgctgtacttcggagaaaacctagacctctccaaatgcatgattcctgtatgaaactgtttgagtttttctttttcttttgttgttgtgtctgttacggctattttagtccaacgcaactaattatatatatatatataggcaggtataacgggagcccaaggaagcccaggtcggttcccggtctggccgatggaacaggcgcgcctgtgttttaacgtggggctgaga

SEQ ID NO: 206348 - DNA, 1909 bp, Zea Mays
gcatctccatcgtgctgtggctgcattttttctacgcttcccaccaaccgcactgtcgggcagtgcaacagccaagagtgctgaacctaaaccgaactgactgcggcgtcctcttcttgttcccaaacctcaccgcctcaactgcttcgccttcgactgcgggcggcggcggcggcgtacaaagaaccaaaagatgactccttgcgctctcaccgtcgactccctaaacccaaaggtgctggctctcgcggatcacctcggcgacaacgccattgcccgccgcgcgcagtgcatccagaacgagatagaagcagaaccggagtcacaccctttccgcgagataatcgattgcagcctcagcaatccacagtccatgggacagcggccaaacaagttcttccgagaggttcttgccttgtgcgactatccccatcttctagaacagagtggaactaattccttgttcagctctggtgcgatagcaagggcacgggagattctagacctctttcccgggagagcaacaggaggatatagccactctcagggcactgaaggattgcgcgacataatcgccgctggaatagccgctcgagataatttcccctgtaacgcggatgacattttcctgacagatggagcagctccgccggttcacatgatgatgcacctgctgatacgggataaaaaagacggcatcctctgcccagttccatcgcattccttgtacacgagtgctatgcttctccagggcgctactcttgtgccatatttccttgacgagtcaagaggctggggagtgagcatgtcagacctgaagaagcagctggatagtgcccggtcaatgggtgtttttgttagggggcttgtggttataaatccaggcaaccctactggacatgttctcgtggaggaaaatcagcgtgagattgtggatttctgcaggaatgaagatcttgttcttctagcagacgaggtttaccaggaaaatatttacgcagatgagaagggatttcactctttcaagaagatagcacggtccatggggtacggcgaaggagacatatctttagtgtccttccattcagtttctaatggatattatggtgaatgtgggagaaggggaggctacatggaagtcactggcttcaactctgatgtaaagaaacaagtgtacaaagttgtatccctaagctcgtgctccaacatctccggccagatcctcatgagcctagtcatgaacccgccacaggtcggagacgagtcgtacgcctcttaccaggccgaaagagacggcgtcctgtcatctttcgctcgctgcgcagaggccatggtgcgctcattcaacgggctggaaggggtgacctgtagcgaggctgaaggagcagtgttcgtgttcccttcagtccgtctgccaaagaaggcggtcgcagctgccgaggcaagcaacacgcagccagatgcgttctacgccctccgcctcctcgaaaccaccgggatcgtcgttgtgcctggctctgtttttggacagatgcacggtcctgccacacgaagagaagaagacgatgacggtgatcatctccagctttgtggcgtttcatcgagccttcatggaagagtttcgcgactaacagatttcagctcctcttcttctatctctgtattgtaccacaacttaatgctgtacttcggagaaaacctagacctctccaaatgcatgattcctgtatgaaactgtttgagtttttctttttcttttgttgttgtgtctgttacggctattttagtccaacgcaactaattatatatatatatataggcaggtataacgggagcccaaggaagcccaggtcggttcccggtctggccgatggaacaggcgcgcctgtgttttaacgtggggctgaga

SEQ ID NO: 206349 - DNA, 1839 bp, Zea Mays
gcatctccatcgtgctgtggctgcattttttctacgcttcccaccaaccgcactgtcgggcagtgcaacagccaagagtgctgaacctaaaccgaactgactgcggcgtcctcttcttgttcccaaacctcaccgcctcaactgcttcgccttcgactgcgggcggcggcggcggcgtacaaagaaccaaaagatgactccttgcgctctcaccgtcgactccctaaacccaaaggtgctggctctcgcggatcacctcggcgacaacgccattgcccgccgcgcgcagtgcatccagaacgagatagaagcagaaccggagtcacaccctttccgcgagataatcgattgcagcctcagcaatccacagtccatgggacagcggccaaacaagttcttccgagaggttcttgccttgtgcgactatccccatcttctagaacagagtggaactaattccttgttcagctctggtgcgatagcaagggcacgggagattctagacctctttcccgggagagcaacaggaggatatagccactctcagggcactgaaggattgcgcgacataatcgccgctggaatagccgctcgagataatttcccctgtaacgcggatgacattttcctgacagatggagcagctccgccggttcacatgatgatgcacctgctgatacgggataaaaaagacggcatcctctgcccagttccatcgcattccttgtacacgagtgctatgcttctccagggcgctactcttgtgccatatttccttgacgagtcaagaggctggggagtgagcatgtcagacctgaagaagcagctggatagtgcccggtcaatgggtgtttttgttagggggcttgtggttataaatccaggcaaccctactggacatgttctcgtggaggaaaatcagcgtgagattgtggatttctgcaggaatgaagatcttgttcttctagcagacgaggtttaccaggaaaatatttacgcagatgagaagggatttcactctttcaagaagatagcacggtccatggggtacggcgaaggagacatatctttagtgtccttccattcagtttctaatggatattatggtgaatgtgggagaaggggaggctacatggaagtcactggcttcaactctgatgtaaagaaacaagtgtacaaagttgtatccctaagctcgtgctccaacatctccggccagatcctcatgagcctagtcatgaacccgccacaggtcggagacgagtcgtacgcctcttaccaggccgaaagagacggcgtcctgtcatctttcgctcgctgcgcagaggccatggtgcgctcattcaacgggctggaaggggtgacctgtagcgaggctgaaggagcagtgttcgtgttcccttcagtccgtctgccaaagaaggcggtcgcagctgccgaggcaagcaacacgcagccagatgcgttctacgccctccgcctcctcgaaaccaccgggatcgtcgttgtgcctggctctgtttttggacagatgcatggaacgtggcatttcagatgcacggtcctgccacacgaagagaagaagacgatgacggtgatcatctccagctttgtggcgtttcatcgagccttcatggaagagtttcgcgactaacagatttcagctcctcttcttctatctctgtattgtaccacaacttaatgctgtacttcggagaaaacctagacctctccaaatgcatgattcctgcaggtataacgggagcccaaggaagcccaggtcggttcccggtctggccgatggaacaggcgcgcctgtgttttaacgtggggctgaga

SEQ ID NO: 206350 - DNA, 1869 bp, Zea Mays
catgcatctccatcgtgctgtggctgcattttttctacgcttcccaccaaccgcactgtcgggcagtgcaacagccaagagtgctgaacctaaaccgaactgactgcggcgtcctcttcttgttcccaaacctcaccgcctcaactgcttcgccttcgactgcgggcggcggcggcggcgtacaaagaaccaaaagatgactccttgcgctctcaccgtcgactccctaaacccaaaggtgctggctctcgcggatcacctcggcgacaacgccattgcccgccgcgcgcagtgcatccagaacgagatagaagcagaaccggagtcacaccctttccgcgaggttcttgccttgtgcgactatccccatcttctagaacagagtggaactaattccttgttcagctctggtgcgatagcaagggcacgggagattctagacctctttcccgggagagcaacaggaggatatagccactctcagggcactgaaggattgcgcgacataatcgccgctggaatagccgctcgagataatttcccctgtaacgcggatgacattttcctgacagatggagcagctccgccggttcacatgatgatgcacctgctgatacgggataaaaaagacggcatcctctgcccagttccatcgcattccttgtacacgagtgctatgcttctccagggcgctactcttgtgccatatttccttgacgagtcaagaggctggggagtgagcatgtcagacctgaagaagcagctggatagtgcccggtcaatgggtgtttttgttagggggcttgtggttataaatccaggcaaccctactggacatgttctcgtggaggaaaatcagcgtgagattgtggatttctgcaggaatgaagatcttgttcttctagcagacgaggtttaccaggaaaatatttacgcagatgagaagggatttcactctttcaagaagatagcacggtccatggggtacggcgaaggagacatatctttagtgtccttccattcagtttctaatggatattatggtgaatgtgggagaaggggaggctacatggaagtcactggcttcaactctgatgtaaagaaacaagtgtacaaagttgtatccctaagctcgtgctccaacatctccggccagatcctcatgagcctagtcatgaacccgccacaggtcggagacgagtcgtacgcctcttaccaggccgaaagagacggcgtcctgtcatctttcgctcgctgcgcagaggccatggtgcgctcattcaacgggctggaaggggtgacctgtagcgaggctgaaggagcagtgttcgtgttcccttcagtccgtctgccaaagaaggcggtcgcagctgccgaggcaagcaacacgcagccagatgcgttctacgccctccgcctcctcgaaaccaccgggatcgtcgttgtgcctggctctgtttttggacagatgcatggaacgtggcatttcagatgcacggtcctgccacacgaagagaagaagacgatgacggtgatcatctccagctttgtggcgtttcatcgagccttcatggaagagtttcgcgactaacagatttcagctcctcttcttctatctctgtattgtaccacaacttaatgctgtacttcggagaaaacctagacctctccaaatgcatgattcctgtatgaaactgtttgagtttttctttttcttttgttgttgtgtctgttacggctattttagtccaacgcaactaattatatatatatatataggcaggtataacgggagcccaaggaagcccaggtcggttcccggtctggccgatggaacaggcgcgcctgtgttttaacgtggggctgaga

SEQ ID NO: 206351 - DNA, 2031 bp, Zea Mays
aaaaccgcggctgtggtcggcggccccccggtctccttccactcgctttccggcgggcgactggcctaaaatcgcctcttgtttgtttgcttccgtcgtcccctctccacgtagagcacgcccccggaccaccttttataagcaccaaccatctggccttgccgcgccgattcgccacgaagccgcactgtgagagagggacgcggcctgttgtcccggcttttagacgcaacttccatcgctgcgaagctatccattcgtgttcgtcatggccgccagcgtcaccgtggaaaacctcaaccccaaggtcttaaaatgtgagtatgcagtccgtggggagattgtcatccatgctcagcgcctgcagcaacaactacaaacacaaccagggtctcttccttttgatgagatcctctattgcaacattgggaatccccaatctcttggtcagcaacctgtgacattcttcagggaggttcttgctctttgtgatcatccgtgcctcttggaaaaagaggaaaccaaatcattgttcagtgctgatgcaatttctcgagcaaagcagattcttgcaactattcctggaagggcaacaggtgcatatagtcacagtcagggtatcaaaggactgcgtgatgcaattgctgctggaatcatgtcacgtgatggattccctgcaaatgcagatgacattttcattacagacggagcaagtcctggggtccacatgatgatgcaattactgattaggaatgagaaagatggcattctgtgcccaattcctcagtaccctttgtactcagcctccatagctcttcatggtggagctcttgtcccctattaccttaatgaaaaaactgggtggggtttggagatctctgatcttaagatgcaactggaaaatgctcggtcaaaaggcattgatgttagggccttggtggttatcaatccaggaaatccgactgggcaggttcttgctgaagacaaccaatatgatatagtgaaattctggtatatcaagagaacatctatgtggacaacaagaaatttaactctttcaagaagattgtaagatccatggggtatggcgaggatgatctccctctagtatcgttacagtctgtttccaaaggatactatggagagtgtggtaaaagaggagggtacatggagattactggcttcagtgctccagtaagagagcagatctacaagatagcttcagtgaacctatgctccaatatcactggtcaaatccttgcgagcctcgtcatgaatccaccaaaggttggagacgaatcatatgcttcctacaaggcagagaaagatggaatccttgagtctttagctcgtcgtgcaaaggcgttggaggatgcattcaacaagcttgagggattttcatgtaacaaggccgaaggagcaatgtatcttttccctcagattcttctgccacagaaggcaatcgaggctgctaaagctgctaagaaagcgcctgacgctttctacgctctccgtctccttgaatcgactggaatcgtcgtggtccctggatctggatttggtcaagttcctggaacatggcacatcagatgcacgatcctgccgcaggaagacaagatccccgcggtgatcagccgcttcagggctttccatgaggcgttcttggccgaataccgcgactaaactgttacgctgtgtgtgagttaagttggaggttcagtagaactgtagaagagctcagtgacagcgcagaaagaggcagtgttagaaaggcttaggtccttcttcacaggagcaacagttgtcttgtctcatcaaggagaaataaaaattttagttttacaacttctcattgacactgttgggttcttgacatggtagagaattgtgtgcactgtgcctggcactgggtcctactagcggcgcaatttaagcgtgaccaggatggcgccatcagccatctctgtcgatattacactgctagctgaaaatgccacttggtccctttcaggtgtttgtggacctaaacct

SEQ ID NO: 206352 - DNA, 2679 bp, Zea Mays
cggcggcaggccggtgactgacatccgtgaacggtgaaccctcttgggttcttcgcgatttctccactgcttcacacgggaccggccacccatggaggcctacgcgggtgccgcgcccgcggccggcgtcttcgcaggctacagcaccgcggccacgcgccccttcatcatcttcctccgccgccgcgggtctccgcgttccggcgccaggcgggtgcgcctcgtccgggcgccgccgccgccgcgcgctgcagaggacctgcccccgctcgacaagtgggacattatggagctggatttcggcaggttcctcggggaggaccccaagcttaccctcgccaagattcttcttaagaagtcagatccggatgcctcgtctctcgatgtggagaaactaattgccaaaaatagagacaagctcgatgatattctgagggactgcatggaagctaataagaagggtcagggttttgacacatcagaaagtgggccctctttgaatacgacacggccaacaataagcaagccgaccgaatccaaaagttctttgaatatttccaagcccagtatgggcagacctatccaaggagggactccattgactttacttcgaccagcaggaagcaaaccgaagcaagatggtccttctctggctcagtcgcgaccagttggaagcaaagcaagtgaagatgcacctttgtttatcttgtcgcggccaattgggagcaatccaaagttaaggggcactccggtgcaagatagttggcccagtaaagagagtttagctgccgcaacagagttcagtgaggcggggagcatctcaagaacaggcgaggtggatgtcgccttgcggaaacccaccgtgcaccagagtcaggatgatgatctgaagtccaagctcaaaattaagccaaatgttaacctgaaaatgaggaaagatatgaatgaggacttaaggaacatttctctccttcaaaagccagatgttgcaaaagatactgtaaacccagagcaggaccatgcctccgctagccctgccacagtttctgctacagaggataacagcgaacttgaggcagaaaatgctcttgatgaaaaaatagcaaccgaaaatgtccatgaatcatctgggctcgatgatgattctgctgcagccatcagctcaaactttcatccaagaaacaagcactgctggaccagtagataaccaatcagctaccagcaacaatttctctatgcaggctttcttgcaaggaaaacctagaagagaaaaccaatctgctgaaatattgccatctgaagtagatgaaaagatgactgctactgataataaaaattatgttgatgatgggggaaatgtgttaccatcaaaattagaggacatcacagagagtgactggacaaggttagagaattacgcaagtaccggagaaaaggttgaggtggagctgataaattgcagtgcgaaggggtttgttgtgtcacttgactcactgataggtttcttaccgtaccgtaatcttgctacaaagtggaaattcttagcctttgagacttggttaagaaggaagggtggcgatccttccttgtacaagcagagtttgggattagaggatagttttgaggttaatgacacaaacctagaaccagaatctagctcagtttccaaaatagctggtgaggaccaagaatctctgtcatctaagccgaagtttgaagatcttattcgagcatacaaccaagaaaaatccaagtttttatcttcatttattggtcaaagactccgagtatcagttgtcctggccgacagaaattccaagcggatatttttctctatgaagccaaaagagagcgaagaaatgatccagaaaaagaaaaacctgatggctaggctcaacgttggagatattattcagtgcactatcaagagatttgtttactttgggatatttgttgaggttgaaggtgttcctgcgttgattcagcagtgggaagtgtcgtgggatgacaccttagatccagcagtttcttacaaaattggtcaggttgtggatgctaaagttatccaacttgactataataatatccgcatatttttgtcacttaaagatgtaaagccaaatccatccgtaggtgctttggaatcagtcgttggtgaggatttatcgtttggtggagctcttgaacccgtgcaagcagatttcgagtggcccgaggtagacgccctcatggaagagatgcggagaacagagggtgtaagagatgtctataaaggacggttcttccaaagcccagggttagctccgacgtttcaggtctacatggcacctgtggtcggtccgaaatacaagctcctggcgcggtatgggaacagcgtccaggaggtgatggtggagacggcacttggcaaagaagagttgaaggaggcagtcctgatgtgcactaatagggttagctaggatctccatgacgcgcatttgctgggaccggtttctcgggttgctagctggattggaacagcatacggattatatatccggttaaaagttactgaaatgcagaaaaagaagaacgactctattaatcgagtttaggattgccaatttgattgaaaattctctgttgtggattggttgaggaaagaaacgaaggtggtctgcccccttctcttgtcaaaga

SEQ ID NO: 206353 - DNA, 2665 bp, Zea Mays
atccgtgaacggtgaaccctcttgggttcttcgcgatttctccactgcttcacacgggaccggccacccatggaggcctacgcgggtgccgcgcccgcggccggcgtcttcgcaggctacagcaccgcggccacgcgccccttcatcatcttcctccgccgccgcgggtctccgcgttccggcgccaggcgggtgcgcctcgtccgggcgccgccgccgccgcgcgctgcagaggacctgcccccgctcgacaagtgggacattatggagctggatttcggcaggttcctcggggaggaccccaagcttaccctcgccaagattcttcttaagaagtcagatccggatgcctcgtctctcgatgtggagaaactaattgccaaaaatagagacaagctcgatgatattctgagggactgcatggaagctaataagaagggtcagggttttgacacatcagaaagtgggccctctttgaatacgacacggccaacaataagcaagccgaccgaatccaaaagttctttgaatatttccaagcccagtatgggcagacctatccaaggagggactccattgactttacttcgaccagcaggaagcaaaccgaagcaagatggtccttctctggctcagtcgcgaccagttggaagcaaagcaagtgaagatgcacctttgtttatcttgtcgcggccaattgggagcaatccaaagttaaggggcactccggtgcaagatagttggcccagtaaagagagtttagctgccgcaacagagttcagtgaggcggggagcatctcaagaacaggcgaggtggatgtcgccttgcggaaacccaccgtgcaccagagtcaggatgatgatctgaagtccaagctcaaaattaagccaaatgttaacctgaaaatgaggaaagatatgaatgaggacttaaggaacatttctctccttcaaaagccagatgttgcaaaagatactgtaaacccagagcaggaccatgcctccgctagccctgccacagtttctgctacagaggataacagcgaacttgaggcagaaaatgctcttgatgaaaaaatagcaaccgaaaatgtccatgaatcatctgggctcgatgatgattctgctgcaggactacagccatcagctcaaactttcatccaagaaacaagcactgctggaccagtagataaccaatcagctaccagcaacaatttctctatgcaggctttcttgcaaggaaaacctagaagagaaaaccaatctgctgaaatattgccatctgaagtagatgaaaagatgactgctactgataataaaaattatgttgatgatgggggaaatgtgttaccatcaaaattagaggacatcacagagagtgactggacaaggttagagaattacgcaagtaccggagaaaaggttgaggtggagctgataaattgcagtgcgaaggggtttgttgtgtcacttgactcactgataggtttcttaccgtaccgtaatcttgctacaaagtggaaattcttagcctttgagacttggttaagaaggaagggtggcgatccttccttgtacaagcagagtttgggattagaggatagttttgaggttaatgacacaaacctagaaccagaatctagctcagtttccaaaatagctggtgaggaccaagaatctctgtcatctaagccgaagtttgaagatcttattcgagcatacaaccaagaaaaatccaagtttttatcttcatttattggtcaaagactccgagtatcagttgtcctggccgacagaaattccaagcggatatttttctctatgaagccaaaagagagcgaagaaatgatccagaaaaagaaaaacctgatggctaggctcaacgttggagatattattcagtgcactatcaagagatttgtttactttgggatatttgttgaggttgaaggtgttcctgcgttgattcagcagtgggaagtgtcgtgggatgacaccttagatccagcagtttcttacaaaattggtcaggttgtggatgctaaagttatccaacttgactataataatatccgcatatttttgtcacttaaagatgtaaagccaaatccatccgtaggtgctttggaatcagtcgttggtgaggatttatcgtttggtggagctcttgaacccgtgcaagcagatttcgagtggcccgaggtagacgccctcatggaagagatgcggagaacagagggtgtaagagatgtctataaaggacggttcttccaaagcccagggttagctccgacgtttcaggtctacatggcacctgtggtcggtccgaaatacaagctcctggcgcggtatgggaacagcgtccaggaggtgatggtggagacggcacttggcaaagaagagttgaaggaggcagtcctgatgtgcactaatagggttagctaggatctccatgacgcgcatttgctgggaccggtttctcgggttgctagctggattggaacagcatacggattatatatccggttaaaagttactgaaatgcagaaaaagaagaacgactctattaatcgagtttaggattgccaatttgattgaaaattctctgttgtggattggttgaggaaagaaacgaaggtggtctgcccccttctcttgtcaaaga

SEQ ID NO: 206354 - DNA, 2419 bp, Zea Mays
caaattccatggcagtcttgtcttgtgcatgtgtaaggttttgggtgactatacagtatacacgtttagaaaaaaatgttttctgggactaccatatagtttttatgctgtatggcggaagtgccgagtgttatagttggtgtgataaaatactctgcaaaaattgatgaaattgagcattaatgaagttgtctgttttgatgtagcatagaaagtaattgacaggattgcatatgatccacgctagtttattctgcgctttaagtgaatagggatcaaggatatcgtacacaacagttttgctttatgctggttcatttgtctacggacaatggactagttgctgcactgtttctgtgattcaccatgggaagcagtggagcagatacaccgtctaaggagcagcagccacctgctacctcaggtgctgcaataccacctgtttatccagattggtctagcttccaggcatatcccccaatcccaccacatggattcttcccctcacctgtggcatcaagtccacagggtcatcctttcatgtggggagctcaagctatgattccaccttatggaacaccgccaccatatgtcatgtacccccctggagtatatgcccacccatctatgcccccgggtgcacatccatttactccttatgccattacttctccaaatggcaatgctgatgctactggaactactgttgcagctggtaatactgatggcaagccctctgaaggcaaagataaaagtccaacaaagcgatccaaaggaagtttgggcagcttgaacatgcttactggaaagaatcccagtgaacatggtaagtcctcaggtgcatcgggtaatggagtcacttctcaaagtggcgaaagtggcagtgacagttcaagcgaagggagtgaaggaaattctcacaatgattcacatcacaaggaaagtggacaggaacacgatggggatgttcgaagttcccggaatggtgtatcacgtttgcaatctgagggaaaattgaaccaagctatggcaatcttgcccataccatcaagtggcccagcaactgatccaactacaaacctaaatattgggatggactattgggccaacacagcaagctctgctcctgcaattcatggcaaagcgacgtcaacaacagttccaggggctgtggtcccagcagagcagtggacacaggatgaacatgaactcaaaaagcaaagaagaaagcagtccaatagggagtctgcacgtagatctaggttacgtaaacaggaaaatgcttcacttagagatgaagtaaaccgtatcagaaaagagtacgaggaacttctatcaaggaataactcactaaaggaaaaacttgaaggcaaacaacacaaaactgatgaggcaggacttaacaacaagctgcaacattctggtgatgacagccagaaaaaaggaaactaatgctatcatgcaatgcttgcctacattggtcctaactagattattgggaggtgcaattgtagtatgcacattaactccttactttattgcagttaattgttaccaggttgtgataatgttgatgccaaccttttgtgtgggtgtttcctgtttcagatctatcttggcttatcttttagaagccaagatgtgactgaagctataggctgtgacccaattcactatatctgttagaaatagtggataaagtcaaactttcaaatttgaagtgctgactaatattgttatgtatacctggcaaaagactggtttccttttaattcagtctggttgaacattttgctgggctttcactactgcctagtttatgtacattgttgttcatatcggttgttcctagttattttttgtaataattaacaaatagatgagggacactgtctcaacctctgcaccaatatatatatggacacacacacacacacacacctcttttttgcgtctattttctgttttacttcaaagtttgcaggtttgtttcagccctgtttgattgtgagccttggcgctggcggtattttttttaagtttaaatgatccacctgctgtaggtaagtttggttaaaagacattcctatttttctgtttagtgacactgatattagtaatccttttttttcatccatctatttaagtgtcagcagaatcgtttgttaaacttgctttcctgaacttgctcttgattctggtaagtttttgggctcctggcactttacttttatgatcttattttgatttgctttttacaggaaaatggttctggactatgtcttagatgggaagcatagttcattagtatgtctgccttacaggttcttaagcagggatcgtggaagaacctgtgttgggaggtggtagagaagatgtgccaatgattggtttttggtcaatgtcttctctggtgccg

SEQ ID NO: 206355 - DNA, 2291 bp, Zea Mays
tgctgccggatcgacggcgatgctagggtttaggttttgctttatgctggttcatttgtctacggacaatggactagttgctgcactgtttctgtgattcaccatgggaagcagtggagcagatacaccgtctaaggagcagcagccacctgctacctcaggtgctgcaataccacctgtttatccagattggtctagcttccaggcatatcccccaatcccaccacatggattcttcccctcacctgtggcatcaagtccacagggtcatcctttcatgtggggagctcaagctatgattccaccttatggaacaccgccaccatatgtcatgtacccccctggagtatatgcccacccatctatgcccccgggtgcacatccatttactccttatgccattacttctccaaatggcaatgctgatgctactggaactactgttgcagctggtaatactgatggcaagccctctgaaggcaaagataaaagtccaacaaagcgatccaaaggaagtttgggcagcttgaacatgcttactggaaagaatcccagtgaacatggtaagtcctcaggtgcatcgggtaatggagtcacttctcaaaggtatttttgctgtaaccttaaacaccttatattcttgtgtgcatccgtctttaagtatatcagtgaatgagttgctgtttctctttgtagtggcgaaagtggcagtgacagttcaagcgaagggagtgaaggaaattctcacaatgattcacatcacaaggaaagtggacaggaacacgatggggatgttcgaagttcccggaatggtgtatcacgtttgcaatctgagggaaaattgaaccaagctatggcaatcttgcccataccatcaagtggcccagcaactgatccaactacaaacctaaatattgggatggactattgggccaacacagcaagctctgctcctgcaattcatggcaaagcgacgtcaacaacagttccaggggctgtggtcccagcagagcagtggacacaggatgaacatgaactcaaaaagcaaagaagaaagcagtccaatagggagtctgcacgtagatctaggttacgtaaacaggctgaatgtgaggaattggctcaacgtgctgatgttttaaagcaggaaaatgcttcacttagagatgaagtaaaccgtatcagaaaagagtacgaggaacttctatcaaggaataactcactaaaggaaaaacttgaaggcaaacaacacaaaactgatgaggcaggacttaacaacaagctgcaacattctggtgatgacagccagaaaaaaggaaactaatgctatcatgcaatgcttgcctacattggtcctaactagattattgggaggtgcaattgtagtatgcacattaactccttactttattgcagttaattgttaccaggttgtgataatgttgatgccaaccttttgtgtgggtgtttcctgtttcagatctatcttggcttatcttttagaagccaagatgtgactgaagctataggctgtgacccaattcactatatctgttagaaatagtggataaagtcaaactttcaaatttgaagtgctgactaatattgttatgtatacctggcaaaagactggtttccttttaattcagtctggttgaacattttgctgggctttcactactgcctagtttatgtacattgttgttcatatcggttgttcctagttattttttgtaataattaacaaatagatgagggacactgtctcaacctctgcaccaatatatatatggacacacacacacacacacacctcttttttgcgtctattttctgttttacttcaaagtttgcaggtttgtttcagccctgtttgattgtgagccttggcgctggcggtattttttttaagtttaaatgatccacctgctgtaggtaagtttggttaaaagacattcctatttttctgtttagtgacactgatattagtaatccttttttttcatccatctatttaagtgtcagcagaatcgtttgttaaacttgctttcctgaacttgctcttgattctggtaagtttttgggctcctggcactttacttttatgatcttattttgatttgctttttacaggaaaatggttctggactatgtcttagatgggaagcatagttcattagtatgtctgccttacaggttcttaagcagggatcgtggaagaacctgtgttgggaggtggtagagaagatgtgccaatgattggtttttggtcaatgtcttctctggtgccg

SEQ ID NO: 206356 - DNA, 2203 bp, Zea Mays
actcgcgtcgcacggatctctccttccctccaggctccagctccaaagcctcgtcgtcttcttcgccccgccacccgtcctgcacactcacaactagacatcgtaccacccaggttttgctttatgctggttcatttgtctacggacaatggactagttgctgcactgtttctgtgattcaccatgggaagcagtggagcagatacaccgtctaaggagcagcagccacctgctacctcaggtgctgcaataccacctgtttatccagattggtctagcttccaggcatatcccccaatcccaccacatggattcttcccctcacctgtggcatcaagtccacagggtcatcctttcatgtggggagctcaagctatgattccaccttatggaacaccgccaccatatgtcatgtacccccctggagtatatgcccacccatctatgcccccgggtgcacatccatttactccttatgccattacttctccaaatggcaatgctgatgctactggaactactgttgcagctggtaatactgatggcaagccctctgaaggcaaagataaaagtccaacaaagcgatccaaaggaagtttgggcagcttgaacatgcttactggaaagaatcccagtgaacatggtaagtcctcaggtgcatcgggtaatggagtcacttctcaaagtggcgaaagtggcagtgacagttcaagcgaagggagtgaaggaaattctcacaatgattcacatcacaaggaaagtggacaggaacacgatggggatgttcgaagttcccggaatggtgtatcacgtttgcaatctgagggaaaattgaaccaagctatggcaatcttgcccataccatcaagtggcccagcaactgatccaactacaaacctaaatattgggatggactattgggccaacacagcaagctctgctcctgcaattcatggcaaagcgacgtcaacaacagttccaggggctgtggtcccagcagagcagtggacacaggctgaatgtgaggaattggctcaacgtgctgatgttttaaagcaggaaaatgcttcacttagagatgaagtaaaccgtatcagaaaagagtacgaggaacttctatcaaggaataactcactaaaggaaaaacttgaaggcaaacaacacaaaactgatgaggcaggacttaacaacaagctgcaacattctggtgatgacagccagaaaaaaggaaactaatgctatcatgcaatgcttgcctacattggtcctaactagattattgggaggtgcaattgtagtatgcacattaactccttactttattgcagttaattgttaccaggttgtgataatgttgatgccaaccttttgtgtgggtgtttcctgtttcagatctatcttggcttatcttttagaagccaagatgtgactgaagctataggctgtgacccaattcactatatctgttagaaatagtggataaagtcaaactttcaaatttgaagtgctgactaatattgttatgtatacctggcaaaagactggtttccttttaattcagtctggttgaacattttgctgggctttcactactgcctagtttatgtacattgttgttcatatcggttgttcctagttattttttgtaataattaacaaatagatgagggacactgtctcaacctctgcaccaatatatatatggacacacacacacacacacacctcttttttgcgtctattttctgttttacttcaaagtttgcaggtttgtttcagccctgtttgattgtgagccttggcgctggcggtattttttttaagtttaaatgatccacctgctgtaggtaagtttggttaaaagacattcctatttttctgtttagtgacactgatattagtaatccttttttttcatccatctatttaagtgtcagcagaatcgtttgttaaacttgctttcctgaacttgctcttgattctggtaagtttttgggctcctggcactttacttttatgatcttattttgatttgctttttacaggaaaatggttctggactatgtcttagatgggaagcatagttcattagtatgtctgccttacaggttcttaagcagggatcgtggaagaacctgtgttgggaggtggtagagaagatgtgccaatgattggtttttggtcaatgtcttctctggtgccg

SEQ ID NO: 206357 - DNA, 2421 bp, Zea Mays
actcgcgtcgcacggatctctccttccctccaggctccagctccaaagcctcgtcgtcttcttcgccccgccacccgtcctgcacactcacaactagacatcgtaccacccaggtgatctcgcgcgccactccctccttccatcccttagccccagctttactctcccctcccgcgcccagatcccgaggctcctacccctcgatcgccgccttccagcggccgatccggcgctggctcgcggcccccgacaggttttgctttatgctggttcatttgtctacggacaatggactagttgctgcactgtttctgtgattcaccatgggaagcagtggagcagatacaccgtctaaggagcagcagccacctgctacctcaggtgctgcaataccacctgtttatccagattggtctagcttccaggcatatcccccaatcccaccacatggattcttcccctcacctgtggcatcaagtccacagggtcatcctttcatgtggggagctcaagctatgattccaccttatggaacaccgccaccatatgtcatgtacccccctggagtatatgcccacccatctatgcccccgggtgcacatccatttactccttatgccattacttctccaaatggcaatgctgatgctactggaactactgttgcagctggtaatactgatggcaagccctctgaaggcaaagataaaagtccaacaaagcgatccaaaggaagtttgggcagcttgaacatgcttactggaaagaatcccagtgaacatggtaagtcctcaggtgcatcgggtaatggagtcacttctcaaagtggcgaaagtggcagtgacagttcaagcgaagggagtgaaggaaattctcacaatgattcacatcacaaggaaagtggacaggaacacgatggggatgttcgaagttcccggaatggtgtatcacgtttgcaatctgagggaaaattgaaccaagctatggcaatcttgcccataccatcaagtggcccagcaactgatccaactacaaacctaaatattgggatggactattgggccaacacagcaagctctgctcctgcaattcatggcaaagcgacgtcaacaacagttccaggggctgtggtcccagcagagcagtggacacaggatgaacatgaactcaaaaagcaaagaagaaagcagtccaatagggagtctgcacgtagatctaggttacgtaaacaggctgaatgtgaggaattggctcaacgtgctgatgttttaaagcaggaaaatgcttcacttagagatgaagtaaaccgtatcagaaaagagtacgaggaacttctatcaaggaataactcactaaaggaaaaacttgaaggcaaacaacacaaaactgatgaggcaggacttaacaacaagctgcaacattctggtgatgacagccagaaaaaaggaaactaatgctatcatgcaatgcttgcctacattggtcctaactagattattgggaggtgcaattgtagtatgcacattaactccttactttattgcagttaattgttaccaggttgtgataatgttgatgccaaccttttgtgtgggtgtttcctgtttcagatctatcttggcttatcttttagaagccaagatgtgactgaagctataggctgtgacccaattcactatatctgttagaaatagtggataaagtcaaactttcaaatttgaagtgctgactaatattgttatgtatacctggcaaaagactggtttccttttaattcagtctggttgaacattttgctgggctttcactactgcctagtttatgtacattgttgttcatatcggttgttcctagttattttttgtaataattaacaaatagatgagggacactgtctcaacctctgcaccaatatatatatggacacacacacacacacacacctcttttttgcgtctattttctgttttacttcaaagtttgcaggtttgtttcagccctgtttgattgtgagccttggcgctggcggtattttttttaagtttaaatgatccacctgctgtaggtaagtttggttaaaagacattcctatttttctgtttagtgacactgatattagtaatccttttttttcatccatctatttaagtgtcagcagaatcgtttgttaaacttgctttcctgaacttgctcttgattctggtaagtttttgggctcctggcactttacttttatgatcttattttgatttgctttttacaggaaaatggttctggactatgtcttagatgggaagcatagttcattagtatgtctgccttacaggttcttaagcagggatcgtggaagaacctgtgttgggaggtggtagagaagatgtgccaatgattggtttttggtcaatgtcttctctggtgccg

SEQ ID NO: 206358 - DNA, 1595 bp, Zea Mays
gcgccactcgcgtcgcacggatctctccttccctccaggctccagctccaaagcctcgtcgtcttcttcgccccgccacccgtcctgcacactcacaactagacatcgtaccacccaggttttgctttatgctggttcatttgtctacggacaatggactagttgctgcactgtttctgtgattcaccatgggaagcagtggagcagatacaccgtctaaggagcagcagccacctgctacctcaggtgctgcaataccacctgtttatccagattggtctagcttccaggcatatcccccaatcccaccacatggattcttcccctcacctgtggcatcaagtccacagggtcatcctttcatgtggggagctcaagctatgattccaccttatggaacaccgccaccatatgtcatgtacccccctggagtatatgcccacccatctatgcccccgggtgcacatccatttactccttatgccattacttctccaaatggcaatgctgatgctactggaactactgttgcagctggtaatactgatggcaagccctctgaaggcaaagataaaagtccaacaaagcgatccaaaggaagtttgggcagcttgaacatgcttactggaaagaatcccagtgaacatggtaagtcctcaggtgcatcgggtaatggagtcacttctcaaagtggcgaaagtggcagtgacagttcaagcgaagggagtgaaggaaattctcacaatgattcacatcacaaggaaagtggacaggaacacgatggggatgttcgaagttcccggaatggtgtatcacgtttgcaatctgagggaaaattgaaccaagctatggcaatcttgcccataccatcaagtggcccagcaactgatccaactacaaacctaaatattgggatggactattgggccaacacagcaagctctgctcctgcaattcatggcaaagcgacgtcaacaacagttccaggggctgtggtcccagcagagcagtggacacaggatgaacatgaactcaaaaagcaaagaagaaagcagtccaatagggagtctgcacgtagatctaggttacgtaaacaggctgaatgtgaggaattggctcaacgtgctgatgttttaaagcaggaaaatgcttcacttagagatgaagtaaaccgtatcagaaaagagtacgaggaacttctatcaaggaataactcactaaaggaaaaacttgaaggcaaacaacacaaaactgatgaggcaggacttaacaacaagctgcaacattctggtgatgacagccagaaaaaaggaaactaatgctatcatgcaatgcttgcctacattggtcctaactagattattgggagccctgtttgattgtgagccttggcgctggcggtattttttttaagtttaaatgatccacctgctgtaggaaaatggttctggactatgtcttagatgggaagcatagttcattagtatgtctgccttacaggttcttaagcagggatcgtggaagaacctgtgttgggaggtggtagagaagatgtgccaatgattggtttttggtcaatgtcttctctggtgccg

SEQ ID NO: 206359 - DNA, 1439 bp, Zea Mays
aaagcagaaatcattcacgcatcggtccaccgagccacaccacaccaccgtctcgcggagaaactcctccaaaacccccaaaccctttcaatcggcggcaatggcggcgccggtggccgacgatgcctcggcatccccaggctacgtcctccgctccacacttgaggggcaccgccgcgccgtatcaacagttaagttctccccggatggccgccttctcgcctccgcctccgccgacaagcttcttcgcgtgtggtcttcctccgatctcacccccgttgcggagctcgagggccatggagagggtgtctcagacctctctttctcccccgacggccgcctccttgcctccgcctccgatgatcgcaccgtccgcatctgggacctcgccgtcggcggaggggcccgcctcgtcaagacgctcacgggccacaccaactacgccttctgcgtctccttcagcccccatggcaacgtcctcgcctccgggtcctttgacgagacggtgcgcgtgtgggaggtcaggtccgggagctacgacgggctctgccgcgtctgggactcggccaccggtcactgcgtcaaaaccctcatcgacgacgagagcccaccagtgtcctttgccaagttctcccccaatggcaagtttatcctcgcggcaacgcttgacagcaccttgaggctttggaatttctcagctggaaagtttctgaagacatataccggacatgttaacacaaagtactgcatcccagcggcgttttctatcacgaatagcaagtatattgtcagtggctccgaggacaaatgtgtctacctatgggacctccagtcaagaagaatagtgcagaaactggaaggccatactgatactgtcattgcggtctcatgtcatcccaaggaaaacatgatcgcatccggggcgcttgacaatgacaagaccgtgaaagtttgggtccaaaaggaagaagattgatgagcggcctggttacgctcttatctacattggctgtcatgtggactgactaatggtaagcaaaatatgcagcttcccaagcaactaaagtttgctgcagtggagaatgtgatgctcctggcatgtgtaactgagtgagtgctatattgtctattcagcagctcggcgatgatattagtgaactcaagtgttctgtagagctattcctgggaggctgggatcatgtaagaaagactcaacacaacaatgcttgaacttcatttgttgtgtttctgattccctaatctttgatgcggagctgtttttgttattatatccatattagctcaatattttgaagtctgtacgctgggttacaggttcaattgctggtcatagatgctgaagtatattagctgaccctgtgtcatggttcattgatttattttttttaagttgttgcacatagaaggaagaaaaaaaa

SEQ ID NO: 206360 - DNA, 2609 bp, Zea Mays
gccatcgcgcgctcgcctccctccccgcgcccgcagtccccgccgcaatccccgcgtccgcgcccgcagtccccgccgccgagcagtcccgccgcgccccctctccctgcaaaccccgccacgacgcagcaactgatccaccatcgacgcgcgcgccgcgcgccccgacgcggaacgctggatcccgcgcagcagaaggcggccaaccagtcgccgtcgcccccggcccccaccccgcctgctgcagcaagcggcgtccgctaccgcatgccctcgtccccggacctcctcctccccgccgacgctaccaagatgcgccgctactccgcgctgcccaacggcggccgccaggagacgttggccgaccgcgtgcaccgctaccagggcgtcatgctcgtcatcctcgcctcgctcgcgctcgtctctctcgtcctcctcctcatgccacgctcacccgctggcaccatgggcggcgcccggggcagacaggtacgcactcccccgcccggtgacccgttgccggacttggagtcacgctgcctagactcgcccgctgggtggattcgtcgcgttggaggtcggattgtgaccacgccgtccagttaggatgtcgtcgtctccagatccaggggatggggttgctcggcatggcggccaagggcccctcgcccacgcgtcgcctcctatcgcagccgcacttggccatctcctcgctggtggcctccgtggctctgatccactgcttcctcaacacccggagatggttgacgtcgccttcgccgtctcctcgccagtggcctccaccagccccgcagtccaagacaaagccgcgacatgagtcaacccaagtccggtcgcacctacaccgatgaccgtacccaacgtgagtcaagccaagtccattcccctcccttgcttcctcaacttgttgtcttgtggtctgaagtttgtctcggagaaggtgatgccatcatcatcagttgtgattatgaattatattctactgataggtattcaatctctctattcggcaacaccttaaaaagtggattgcaggcttagataatttttggaacacaacattgctccaaaaaagtttttctgaagaaaaggtatcaatctgcagtttggtaagtgagtctgaatctgcagcaccaaggacttcaataattagtttgaacctgcacttacagttctatgggtcttctcaattcttaataatattatatttttaatgaataattgaatatatattgagtctgtgtcatagattcagtcgccttaacaccctttgttgttttcccacttaagttagttaatgagatgaatggatggaaattacgtagtgaatgtatgataagtccaggctacatgttaaaagacacacttggctacttgagctctgtatttccatgaagaaatcttattgacgggtgctttcatctgctatttggatccgttgctgatggatcttacaaagaagaagttgagctttaagaggaacgtggtgtcattgtcatctgagctcaagggtgtgaggagcaagcttgcttcctaggagcagttgtttgtaagggaatctcaaactagaaagcttgcggagacaaaaacaaggagcatggaagaggaagtaatcaagctgcagaaatgcttataggacaaggatgaacaactgcattcattcacaagtagcacagaacagtaccatcatgagttggatgatcttagaacacatctgtcatttactcaagctacaggagaagcaggaacccaactgaaccttcaacttgcttgttctgggagatctgtgagcaagcgagttgtcctataacagttggctcctcacaatgggtattcgacatgagccccatccctgccacagacttgggaaaggcacagtgatttttatggtgacatgaagacattcctcttcaaattatatctttaagcaaccaattttcgccctactggtgcaaacaagaatttgcaatggataggttactggctgcacttgtttgtgaatacttggagtgaccacaactaagtcacacaatgaaactttactttccagagtgtaacctgccggacttctaatagaatgaactgaaagacttctctaacaaaagtggagctgaggggagcaagagtgctaaaagtggtccaatgtttttagatgttctcgaatgttatctgaaatatgaggtatggtgcataaaaaagtaggaaccacaatgagattgtgatgctgcacatggcacatcaaggtgcgcaagatatgtaccatagaaattatcgtaaagtgcacacagctgtatgtatagatgtttagaagtgaccgaagttaggcttgctcaaccggggcaatgatttacttagcctgctgaaatgtactataggtagcattcaagtttgtgaccatcatgcaagtacatgtgggtttgttgaaattgtgtggtcatcggagatgtagcaaaatgttccctatcgagagctcgtgtactatatttgttttatgaacttaattttgttgatgtaggactattacaaagttctagagacaacttaatttttattacaacataatatgtggtcatacatatgttaatgtt

SEQ ID NO: 206361 - DNA, 3038 bp, Zea Mays
gccatcgcgcgctcgcctccctccccgcgcccgcagtccccgccgcaatccccgcgtccgcgcccgcagtccccgccgccgagcagtcccgccgcgccccctctccctgcaaaccccgccacgacgcagcaactgatccaccatcgacgcgcgcgccgcgcgccccgacgcggaacgctggatcccgcgcagcagaaggcggccaaccagtcgccgtcgcccccggcccccaccccgcctgctgcagcaagcggcgtccgctaccgcatgccctcgtccccggacctcctcctccccgccgacgctaccaagatgcgccgctactccgcgctgcccaacggcggccgccaggagacgttggccgaccgcgtgcaccgctaccagggcgtcatgctcgtcatcctcgcctcgctcgcgctcgtctctctcgtcctcctcctcatgccacgctcacccgctggcaccatgggcggcgcccggggcagacagcgagatcgagctcttcgtccaggtacgcactcccccgcccggtgacccgttgccggacttggagtcacgctgcctagactcgcccgctgggtggattcgtcgcgttggaggtcggattgtgaccacgccgtccagttaggatgtcgtcgtctccagatccaggggatggggttgctcggcatggcggccaagggcccctcgcccacgcgtcgcctcctatcgcagccgcacttggccatctcctcgctggtggcctccgtggctctgatccactgcttcctcaacacccggagatggttgacgtcgccttcgccgtctcctcgccagtggcctccaccagccccgcagtccaagacaaagccgcgacatgagtcaacccaagtccggtcgcacctacaccgatgaccgtacccaacgcttagataatttttggaacacaacattgctccaaaaaagtttttctgaagaaaaggtatcaatctgcagtttggtaagtgagtctgaatctgcagcaccaaggacttcaataattagtttgaacctgcacttacagttctatgggtcttctcaattcttaataatattatatttttaatgaataattgaatatatattgagtctgtgtcatagattcagtcgccttaacaccctttgttgttttcccacttaagttagttaatgagatgaatggatggaaattacgtagtgaatgtatgataagtccaggctacatgttaaaagacacacttggctacttgagctctgtatttccatgaagaaatcttattgacgggtgctttcatctgctatttggatccgttgctgatggatcttacaaagaagaagttgagctttaagaggaacgtggtgtcattgtcatctgagctcaagggtgtgaggagcaagcttgcttcctaggagcagttgtttgtaagggaatctcaaactagaaagcttgcggagacaaaaacaaggagcatggaagaggaagtaatcaagctgcagaaatgcttataggacaaggatgaacaactgcattcattcacaagtagcacagaacagtaccatcatgagttggatgatcttagaacacatctgtcatttactcaagctacaggagaagcaggaacccaactgaaccttcaacttgcttgttctgggagatctgtgagcaagcgagttgtcctataacagttggctcctcacaatgggtattcgacatgagccccatccctgccacagacttgggaaaggcacagtgatttttatggtgacatgaagacattcctcttcaaattatatctttaagcaaccaattttcgccctactggtgcaaacaagaatttgcaatggataggttactggctgcacttgtttgtgaatacttggagtgaccacaactaagtcacacaatgaaactttactttccagagtgtaacctgccggacttctaatagaatgaactgaaagacttctctaacaaaagtggagctgaggggagcaagagtgctaaaagtggtccaatgtttttagatgttctcgaatgttatctgaaatatgaggtttatctcttgcttgatcaacaatagaagcaaaaaatcatccttttgtttatttatgtttcccaatataaaggaaaaaggggaaatattttggtgcagtgtgcccaattcttttgtccctagaaaactgtgtagccgcctataacaggcgctatagtcagttttagctattttagacaccactactatttgtacacacatttctattatcctattttagcctgctatatccatgtatgagccttatgggaactctgcaactactatggatcctcttatacattatgttcgacatgcagacaaggtattatattgagttggaccaataatccttcatatttattgatgtgaattatgttgtactggtgtcctgtccttttgtttgtgctttataatttgtaattcctagctgctgatatggtatgatggatgggaggtggctgaaatcgttcggataagtgtcaatttgttgttttctatttttatgaatggttttctatttcagctgatgaaccttttatagttcttttattatatactgccactgattgctaatagggtgcatgtctcctatttctaggtatggtgcataaaaaagtaggaaccacaatgagattgtgatgctgcacatggcacatcaaggtgcgcaagatatgtaccatagaaattatcgtaaagtgcacacagctgtatgtatagatgtttagaagtgaccgaagttaggcttgctcaaccggggcaatgatttacttagcctgctgaaatgtactataggtagcattcaagtttgtgaccatcatgcaagtacatgtgggtttgttgaaattgtgtggtcatcggagatgtagcaaaatgttccctatcgagagctcgtgtactatatttgttttatgaacttaattttgttgatgtaggactattacaaagttctagagacaacttaatttttattacaacataatatgtggtcatacatatgttaatgtt

SEQ ID NO: 206362 - DNA, 1945 bp, Zea Mays
gccatcgcgcgctcgcctccctccccgcgcccgcagtccccgccgcaatccccgcgtccgcgcccgcagtccccgccgccgagcagtcccgccgcgccccctctccctgcaaaccccgccacgacgcagcaactgatccaccatcgacgcgcgcgccgcgcgccccgacgcggaacgctggatcccgcgcagcagaaggcggccaaccagtcgccgtcgcccccggcccccaccccgcctgctgcagcaagcggcgtccgctaccgcatgccctcgtccccggacctcctcctccccgccgacgctaccaagatgcgccgctactccgcgctgcccaacggcggccgccaggagacgttggccgaccgcgtgcaccgctaccagggcgtcatgctcgtcatcctcgcctcgctcgcgctcgtctctctcgtcctcctcctcatgccacgctcacccgctggcaccatgggcggcgcccggggcagacagcgagatcgagctcttcgtccaggtacgcactcccccgcccggtgacccgttgccggacttggagtcacgctgcctagactcgcccgctgggtggattcgtcgcgttggaggtcggattgtgaccacgccgtccagttaggatgtcgtcgtctccagatccaggggatggggttgctcggcatggcggccaagggcccctcgcccacgcgtcgcctcctatcgcagccgcacttggccatctcctcgctggtggcctccgtggctctgatccactgcttcctcaacacccggagatggttgacgtcgccttcgccgtctcctcgccagtggcctccaccagccccgcagtccaagacaaagccgcgacatgagtcaacccaagtccggtcgcacctacaccgatgaccgtacccaacgtattcaatctctctattcggcaacaccttaaaaagtggattgcaggcttagataatttttggaacacaacattgctccaaaaaagtttttctgaagaaaaggtatcaatctgcagtttgaagaagttgagctttaagaggaacgtggtgtcattgtcatctgagctcaagggtgtgaggagcaagcttgcttcctaggagcagttgtttgtaagggaatctcaaactagaaagcttgcggagacaaaaacaaggagcatggaagaggaagtaatcaagctgcagaaatgcttataggacaaggatgaacaactgcattcattcacaagtagcacagaacagtaccatcatgagttggatgatcttagaacacatctgtcatttactcaagctacaggagaagcaggaacccaactgaaccttcaacttgcttgttctgggagatctgtgagcaagcgagttgtcctataacagttggctcctcacaatgggtattcgacatgagccccatccctgccacagacttgggaaaggcacagtgatttttatggtgacatgaagacattcctcttcaaattatatctttaagcaaccaattttcgccctactggtgcaaacaagaatttgcaatgggtatggtgcataaaaaagtaggaaccacaatgagattgtgatgctgcacatggcacatcaaggtgcgcaagatatgtaccatagaaattatcgtaaagtgcacacagctgtatgtatagatgtttagaagtgaccgaagttaggcttgctcaaccggggcaatgatttacttagcctgctgaaatgtactataggtagcattcaagtttgtgaccatcatgcaagtacatgtgggtttgttgaaattgtgtggtcatcggagatgtagcaaaatgttccctatcgagagctcgtgtactatatttgttttatgaacttaattttgttgatgtaggactattacaaagttctagagacaacttaatttttattacaacataatatgtggtcatacatatgttaatgtt

SEQ ID NO: 206363 - DNA, 846 bp, Zea Mays
gtcagtttcgctgtccatttctcagggtagcgatgctttttcacagtctggcctgtattcaaatcaccaagacattggaccacgttatgcgggggtacttctcggattgtcaaacactgctggcgtgcttgcaggagtttttggtactgcagccactggctacattcttcagaaaggttcttgggatagtgtgtttaaggtgtctgttgtgctgtacatagtaggaacggtggtgtggaatgtctttgcaactggagagaaagttctcgaataagctgtggacattcctatatgccaatatacgaaaattgtatgattttggtatacaaaggtaaatttaagaagagatacagctggaagaaaactccattttgtgcaagagatataccttcatctaatgtttgggctatcggaagaatgaaatcaaattagagtatcgtgtgaggtcaagaaggtactcatggaactggagaaacttcttgtacagaaagcaactgcaccaatggcacgtcagattttgcagctgtttcttgagaagtacaggcttctaccaagatcatcaatccacatatttttgttttgtttttaaaatacatggtagttaaatcgtgtttcaacttgcccttgattaaggcgctacagctactgccaactaaatgtagtattatgtgagctctttttcatcgagaattcctaattgtacctgcttcagataccttaaacgtctctgttccttgcgtcgttgctattatcgttttgtgtatgctgcataatgatattgcatggtgatggtgtcatttttttggcatcccggtgcctgaagaagagtagatttaatgtatggct

SEQ ID NO: 206364 - DNA, 1731 bp, Zea Mays
tgtctcaatttgtctgataagaaaggtcaatatgagcattgcaatccttccaatgtcgtcagagttcagctggagcccagcaaccgtcggtctaatccaatcatctttcttttggggttaccttcttacacagatacttggaggtatttgggctgataggtttggtggtaagctagtactagggtttggggttatatggtggtcaattgcgacagttcttacgccccttgcagccaagattggacttccatgcttactcaccatgcgtgccttcatggggataggcgagggcgttgccatgcctgctatgaacaacatcctttccaaatggatcccagtttcagagagaagcagatctcttgccttggtgtacagtggaatgtaccttgggtcagtcaccggcctggctttgtcacctctgttgattagcagatttggctggccttctgtcttttatgcatttggatcccttggaagcgtttggtttgcactgtggcaaagcaaagcacacagctctccagatgatgatccagagctaagtaaagctgaaaagaggcatatactgggtggcagccccttaaaagagcctgtcacttccataccatggaggttgattctatcaaaggctccagtgtgggctctcataatatcacatttttgccataactggggaacatttattctgttaacatggatgcccacatactacaatcaggttctgaagttcaatctaaccgagtccgggcttctctgtgtcttgccatggctgacaatggctgtcttcgcgaatattggtggatggattgctgatactcttgttcaaagagggatctcagttacaaacgttcgtaagatcatgcaatcaattggtttccttggaccagccttgttcttaacactgctgagcaaaggtagcgatgctttttcacagtctggcctgtattcaaatcaccaagacattggaccacgttatgcgggggtacttctcggattgtcaaacactgctggcgtgcttgcaggagtttttggtactgcagccactggctacattcttcagaaaggttcttgggatagtgtgtttaaggtgtctgttgtgctgtacatagtaggaacggtggtgtggaatgtctttgcaactggagagaaagttctcgaataagctgtggacattcctatatgccaatatacgaaaattgtatgattttggtatacaaaggtaaatttaagaagagatacagctggaagaaaactccattttgtgcaagagatataccttcatctaatgtttgggctatcggaagaatgaaatcaaattagagtatcgtgtgaggtcaagaaggtactcatggaactggagaaacttcttgtacagaaagcaactgcaccaatggcacgtcagattttgcagctgtttcttgagaagtacaggcttctaccaagatcatcaatccacatatttttgttttgtttttaaaatacatggtagttaaatcgtgtttcaacttgcccttgattaaggcgctacagctactgccaactaaatgtagtattatgtgagctctttttcatcgagaattcctaattgtacctgcttcagataccttaaacgtctctgttccttgcgtcgttgctattatcgttttgtgtatgctgcataatgatattgcatggtgatggtgtcatttttttggcatcccggtgcctgaagaagagtagatttaatgtatggct

SEQ ID NO: 206365 - DNA, 2407 bp, Zea Mays
gctccctaccgcttgtccgtttcttcctctcccgaagtagcaacgtgaatcgggccaggcttgcggatgccggggtgcggagtagcggggagagggggcgtgggggtgtcgtcggccgcacgccccactccgcgccgcccctgcctctggatgcctatcgctcgcggctacgggaggcaacctgagctgaaatattgcacatcatcacaaagcaagtctgtgttactaggagcaggatttggtcgacatgttactaggagcaatccttatctgctccaaaattccagtagcactacaatggcaagactgcaaaagtctgggcagtttcagcaacttgtcttggacccttcaagaaactatttgactaagacattctacaatgcaaacatgaagaggagagttctgtcgagggttgagtgttttgtgtcttcagatccaataaacaatggttggttgaaaccaaggaggtctgagaatttcactagcttggagagcgcatgtgtccagcgagaatacaaactaccagtcagaacacgtgctgactgtaaagcagagcagtatgaaataacaggatcacctttgagcccttctgatgctgatgctgttatgattggagacacaaatgagatttctccctggtggcaggagttcccaaagcgctggatgattgttctcttgtgcttctttgcgttccttctttgcaatatggaccgtgtcaatatgagcattgcaatccttccaatgtcgtcagagttcagctggagcccagcaaccgtcggtctaatccaatcatctttcttttggggttaccttcttacacagatacttggaggtatttgggctgataggtttggtggtaagctagtactagggtttggggttatatggtggtcaattgcgacagttcttacgccccttgcagccaagattggacttccatgcttactcaccatgcgtgccttcatggggataggcgagggcgttgccatgcctgctatgaacaacatcctttccaaatggatcccagtttcagagagaagcagatctcttgccttggtgtacagtggaatgtaccttgggcacacagctctccagatgatgatccagagctaagtaaagctgaaaagaggcatatactgggtggcagccccttaaaagagcctgtcacttccataccatggaggttgattctatcaaaggctccagtgtgggctctcataatatcacatttttgccataactggggaacatttattctgttaacatggatgcccacatactacaatcaggtttctacaatgttatgctgtgaaacgtttggctttgctcattgttaaagttatctattggtgtcatgccatcgcttgttgtccccaaatccttttacccaggttctgaagttcaatctaaccgagtccgggcttctctgtgtcttgccatggctgacaatggctgtcttcgcgaatattggtggatggattgctgatactcttgttcaaagagggatctcagttacaaacgttcgtaagatcatgcaatcaattggtttccttggaccagccttgttcttaacactgctgagcaaaggtagcgatgctttttcacagtctggcctgtattcaaatcaccaagacattggaccacgttatgcgggggtacttctcggattgtcaaacactgctggcgtgcttgcaggagtttttggtactgcagccactggctacattcttcagaaaggttcttgggatagtgtgtttaaggtgtctgttgtgctgtacatagtaggaacggtggtgtggaatgtctttgcaactggagagaaagttctcgaataagctgtggacattcctatatgccaatatacgaaaattgtatgattttggtatacaaaggtaaatttaagaagagatacagctggaagaaaactccattttgtgcaagagatataccttcatctaatgtttgggctatcggaagaatgaaatcaaattagagtatcgtgtgaggtcaagaaggtactcatggaactggagaaacttcttgtacagaaagcaactgcaccaatggcacgtcagattttgcagctgtttcttgagaagtacaggcttctaccaagatcatcaatccacatatttttgttttgtttttaaaatacatggtagttaaatcgtgtttcaacttgcccttgattaaggcgctacagctactgccaactaaatgtagtattatgtgagctctttttcatcgagaattcctaattgtacctgcttcagataccttaaacgtctctgttccttgcgtcgttgctattatcgttttgtgtatgctgcataatgatattgcatggtgatggtgtcatttttttggcatcccggtgcctgaagaagagtagatttaatgtatggct

SEQ ID NO: 206366 - DNA, 2350 bp, Zea Mays
ctcaccgcgcgctccctaccgcttgtccgtttcttcctctcccgaagtagcaacgtgggaggcaacctgagctgaaatattgcacatcatcacaaagcaagtctgtgttactaggagcaggatttggtcgacatgttactaggagcaatccttatctgctccaaaattccagtagcactacaatggcaagactgcaaaagtctgggcagtttcagcaacttgtcttggacccttcaagaaactatttgactaagacattctacaatgcaaacatgaagaggagagttctgtcgagggttgagtgttttgtgtcttcagatccaataaacaatggttggttgaaaccaaggaggtctgagaatttcactagcttggagagcgcatgtgtccagcgagaatacaaactaccagtcagaacacgtgctgactgtaaagcagagcagtatgaaataacaggatcacctttgagcccttctgatgctgatgctgttatgattggagacacaaatgagatttctccctggtggcaggagttcccaaagcgctggatgattgttctcttgtgcttctttgcgttccttctttgcaatatggaccgtgtcaatatgagcattgcaatccttccaatgtcgtcagagttcagctggagcccagcaaccgtcggtctaatccaatcatctttcttttggggttaccttcttacacagatacttggaggtatttgggctgataggtttggtggtaagctagtactagggtttggggttatatggtggtcaattgcgacagttcttacgccccttgcagccaagattggacttccatgcttactcaccatgcgtgccttcatggggataggcgagggcgttgccatgcctgctatgaacaacatcctttccaaatggatcccagtttcagagagaagcagatctcttgccttggtgtacagtggaatgtaccttgggtcagtcaccggcctggctttgtcacctctgttgattagcagatttggctggccttctgtcttttatgcatttggatcccttggaagcgtttggtttgcactgtggcaaagcaaagcacacagctctccagatgatgatccagagctaagtaaagctgaaaagaggcatatactgggtggcagccccttaaaagagcctgtcacttccataccatggaggttgattctatcaaaggctccagtgtgggctctcataatatcacatttttgccataactggggaacatttattctgttaacatggatgcccacatactacaatcaggttctgaagttcaatctaaccgagtccgggcttctctgtgtcttgccatggctgacaatggctgtcttcgcgaatattggtggatggattgctgatactcttgttcaaagagggatctcagttacaaacgttcgtaagatcatgcaatcaattggtttccttggaccagccttgttcttaacactgctgagcaaagttcgtactccagccatggctgtattatgtatggcatgcagtcagggtagcgatgctttttcacagtctggcctgtattcaaatcaccaagacattggaccacgttatgcgggggtacttctcggattgtcaaacactgctggcgtgcttgcaggagtttttggtactgcagccactggctacattcttcagaaaggttcttgggatagtgtgtttaaggtgtctgttgtgctgtacatagtaggaacggtggtgtggaatgtctttgcaactggagagaaagttctcgaataagctgtggacattcctatatgccaatatacgaaaattgtatgattttggtatacaaaggtaaatttaagaagagatacagctggaagaaaactccattttgtgcaagagatataccttcatctaatgtttgggctatcggaagaatgaaatcaaattagagtatcgtgtgaggtcaagaaggtactcatggaactggagaaacttcttgtacagaaagcaactgcaccaatggcacgtcagattttgcagctgtttcttgagaagtacaggcttctaccaagatcatcaatccacatatttttgttttgtttttaaaatacatggtagttaaatcgtgtttcaacttgcccttgattaaggcgctacagctactgccaactaaatgtagtattatgtgagctctttttcatcgagaattcctaattgtacctgcttcagataccttaaacgtctctgttccttgcgtcgttgctattatcgttttgtgtatgctgcataatgatattgcatggtgatggtgtcatttttttggcatcccggtgcctgaagaagagtagatttaatgtatggct

SEQ ID NO: 206367 - DNA, 2477 bp, Zea Mays
ctatctcctcaccgcgcgctccctaccgcttgtccgtttcttcctctcccgaagtagcaacgtgaatcgggccaggcttgcggatgccggggtgcggagtagcggggagagggggcgtgggggtgtcgtcggccgcacgccccactccgcgccgcccctgcctctggatgcctatcgctcgcggctacgggaggcaacctgagctgaaatattgcacatcatcacaaagcaagtctgtgttactaggagcaggatttggtcgacatgttactaggagcaatccttatctgctccaaaattccagtagcactacaatggcaagactgcaaaagtctgggcagtttcagcaacttgtcttggacccttcaagaaactatttgactaagacattctacaatgcaaacatgaagaggagagttctgtcgagggttgagtgttttgtgtcttcagatccaataaacaatggttggttgaaaccaaggaggtctgagaatttcactagcttggagagcgcatgtgtccagcgagaatacaaactaccagtcagaacacgtgctgactgtaaagcagagcagtatgaaataacaggatcacctttgagcccttctgatgctgatgctgttatgattggagacacaaatgagatttctccctggtggcaggagttcccaaagcgctggatgattgttctcttgtgcttctttgcgttccttctttgcaatatggaccgtgtcaatatgagcattgcaatccttccaatgtcgtcagagttcagctggagcccagcaaccgtcggtctaatccaatcatctttcttttggggttaccttcttacacagatacttggaggtatttgggctgataggtttggtggtaagctagtactagggtttggggttatatggtggtcaattgcgacagttcttacgccccttgcagccaagattggacttccatgcttactcaccatgcgtgccttcatggggataggcgagggcgttgccatgcctgctatgaacaacatcctttccaaatggatcccagtttcagagagaagcagatctcttgccttggtgtacagtggaatgtaccttgggtcagtcaccggcctggctttgtcacctctgttgattagcagatttggctggccttctgtcttttatgcatttggatcccttggaagcgtttggtttgcactgtggcaaagcaaagcacacagctctccagatgatgatccagagctaagtaaagctgaaaagaggcatatactgggtggcagccccttaaaagagcctgtcacttccataccatggaggttgattctatcaaaggctccagtgtgggctctcataatatcacatttttgccataactggggaacatttattctgttaacatggatgcccacatactacaatcaggttctgaagttcaatctaaccgagtccgggcttctctgtgtcttgccatggctgacaatggctgtcttcgcgaatattggtggatggattgctgatactcttgttcaaagagggatctcagttacaaacgttcgtaagatcatgcaatcaattggtttccttggaccagccttgttcttaacactgctgagcaaagttcgtactccagccatggctgtattatgtatggcatgcagtcagcgatgctttttcacagtctggcctgtattcaaatcaccaagacattggaccacgttatgcgggggtacttctcggattgtcaaacactgctggcgtgcttgcaggagtttttggtactgcagccactggctacattcttcagaaaggttcttgggatagtgtgtttaaggtgtctgttgtgctgtacatagtaggaacggtggtgtggaatgtctttgcaactggagagaaagttctcgaataagctgtggacattcctatatgccaatatacgaaaattgtatgattttggtatacaaaggtaaatttaagaagagatacagctggaagaaaactccattttgtgcaagagatataccttcatctaatgtttgggctatcggaagaatgaaatcaaattagagtatcgtgtgaggtcaagaaggtactcatggaactggagaaacttcttgtacagaaagcaactgcaccaatggcacgtcagattttgcagctgtttcttgagaagtacaggcttctaccaagatcatcaatccacatatttttgttttgtttttaaaatacatggtagttaaatcgtgtttcaacttgcccttgattaaggcgctacagctactgccaactaaatgtagtattatgtgagctctttttcatcgagaattcctaattgtacctgcttcagataccttaaacgtctctgttccttgcgtcgttgctattatcgttttgtgtatgctgcataatgatattgcatggtgatggtgtcatttttttggcatcccggtgcctgaagaagagtagatttaatgtatggct

SEQ ID NO: 206368 - DNA, 2570 bp, Zea Mays
cacacacggacacgctcgcatcccactatctccccgcctcaccgccacttcaccactttgctcatcctatctcctcaccgcgcgctccctaccgcttgtccgtttcttcctctcccgaagtagcaacgtgcttcttcattcacctgttccagaatcgggccaggcttgcggatgccggggtgcggagtagcggggagagggggcgtgggggtgtcgtcggccgcacgccccactccgcgccgcccctgcctctggatgcctatcgctcgcggctacgggaggcaacctgagctgaaatattgcacatcatcacaaagcaagtctgtgttactaggagcaggatttggtcgacatgttactaggagcaatccttatctgctccaaaattccagtagcactacaatggcaagactgcaaaagtctgggcagtttcagcaacttgtcttggacccttcaagaaactatttgactaagacattctacaatgcaaacatgaagaggagagttctgtcgagggttgagtgttttgtgtcttcagatccaataaacaatggttggttgaaaccaaggaggtctgagaatttcactagcttggagagcgcatgtgtccagcgagaatacaaactaccagtcagaacacgtgctgactgtaaagcagagcagtatgaaataacaggatcacctttgagcccttctgatgctgatgctgttatgattggagacacaaatgagatttctccctggtggcaggagttcccaaagcgctggatgattgttctcttgtgcttctttgcgttccttctttgcaatatggaccgtgtcaatatgagcattgcaatccttccaatgtcgtcagagttcagctggagcccagcaaccgtcggtctaatccaatcatctttcttttggggttaccttcttacacagatacttggaggtatttgggctgataggtttggtggtaagctagtactagggtttggggttatatggtggtcaattgcgacagttcttacgccccttgcagccaagattggacttccatgcttactcaccatgcgtgccttcatggggataggcgagggcgttgccatgcctgctatgaacaacatcctttccaaatggatcccagtttcagagagaagcagatctcttgccttggtgtacagtggaatgtaccttgggtcagtcaccggcctggctttgtcacctctgttgattagcagatttggctggccttctgtcttttatgcatttggatcccttggaagcgtttggtttgcactgtggcaaagcaaagcacacagctctccagatgatgatccagagctaagtaaagctgaaaagaggcatatactgggtggcagccccttaaaagagcctgtcacttccataccatggaggttgattctatcaaaggctccagtgtgggctctcataatatcacatttttgccataactggggaacatttattctgttaacatggatgcccacatactacaatcaggttctgaagttcaatctaaccgagtccgggcttctctgtgtcttgccatggctgacaatggctgtcttcgcgaatattggtggatggattgctgatactcttgttcaaagagggatctcagttacaaacgttcgtaagatcatgcaatcaattggtttccttggaccagccttgttcttaacactgctgagcaaagttcgtactccagccatggctgtattatgtatggcatgcagtcagggtagcgatgctttttcacagtctggcctgtattcaaatcaccaagacattggaccacgttatgcgggggtacttctcggattgtcaaacactgctggcgtgcttgcaggagtttttggtactgcagccactggctacattcttcagaaaggttcttgggatagtgtgtttaaggtgtctgttgtgctgtacatagtaggaacggtggtgtggaatgtctttgcaactggagagaaagttctcgaataagctgtggacattcctatatgccaatatacgaaaattgtatgattttggtatacaaaggtaaatttaagaagagatacagctggaagaaaactccattttgtgcaagagatataccttcatctaatgtttgggctatcggaagaatgaaatcaaattagagtatcgtgtgaggtcaagaaggtactcatggaactggagaaacttcttgtacagaaagcaactgcaccaatggcacgtcagattttgcagctgtttcttgagaagtacaggcttctaccaagatcatcaatccacatatttttgttttgtttttaaaatacatggtagttaaatcgtgtttcaacttgcccttgattaaggcgctacagctactgccaactaaatgtagtattatgtgagctctttttcatcgagaattcctaattgtacctgcttcagataccttaaacgtctctgttccttgcgtcgttgctattatcgttttgtgtatgctgcataatgatattgcatggtgatggtgtcatttttttggcatcccggtgcctgaagaagagtagatttaatgtatggct

SEQ ID NO: 206369 - DNA, 2565 bp, Zea Mays
ccgatggcgatggaagtcacacacggacacgctcgcatcccactatctccccgcctcaccgccacttcaccactttgctcatcctatctcctcaccgcgcgctccctaccgcttgtccgtttcttcctctcccgaagtagcaacgtgaatcgggccaggcttgcggatgccggggtgcggagtagcggggagagggggcgtgggggtgtcgtcggccgcacgccccactccgcgccgcccctgcctctggatgcctatcgctcgcggctacgggaggcaacctgagctgaaatattgcacatcatcacaaagcaagtctgtgttactaggagcaggatttggtcgacatgttactaggagcaatccttatctgctccaaaattccagtagcactacaatggcaagactgcaaaagtctgggcagtttcagcaacttgtcttggacccttcaagaaactatttgactaagacattctacaatgcaaacatgaagaggagagttctgtcgagggttgagtgttttgtgtcttcagatccaataaacaatggttggttgaaaccaaggaggtctgagaatttcactagcttggagagcgcatgtgtccagcgagaatacaaactaccagtcagaacacgtgctgactgtaaagcagagcagtatgaaataacaggatcacctttgagcccttctgatgctgatgctgttatgattggagacacaaatgagatttctccctggtggcaggagttcccaaagcgctggatgattgttctcttgtgcttctttgcgttccttctttgcaatatggaccgtgtcaatatgagcattgcaatccttccaatgtcgtcagagttcagctggagcccagcaaccgtcggtctaatccaatcatctttcttttggggttaccttcttacacagatacttggaggtatttgggctgataggtttggtggtaagctagtactagggtttggggttatatggtggtcaattgcgacagttcttacgccccttgcagccaagattggacttccatgcttactcaccatgcgtgccttcatggggataggcgagggcgttgccatgcctgctatgaacaacatcctttccaaatggatcccagtttcagagagaagcagatctcttgccttggtgtacagtggaatgtaccttgggtcagtcaccggcctggctttgtcacctctgttgattagcagatttggctggccttctgtcttttatgcatttggatcccttggaagcgtttggtttgcactgtggcaaagcaaagcacacagctctccagatgatgatccagagctaagtaaagctgaaaagaggcatatactgggtggcagccccttaaaagagcctgtcacttccataccatggaggttgattctatcaaaggctccagtgtgggctctcataatatcacatttttgccataactggggaacatttattctgttaacatggatgcccacatactacaatcaggttctgaagttcaatctaaccgagtccgggcttctctgtgtcttgccatggctgacaatggctgtcttcgcgaatattggtggatggattgctgatactcttgttcaaagagggatctcagttacaaacgttcgtaagatcatgcaatcaattggtttccttggaccagccttgttcttaacactgctgagcaaagttcgtactccagccatggctgtattatgtatggcatgcagtcagggtagcgatgctttttcacagtctggcctgtattcaaatcaccaagacattggaccacgttatgcgggggtacttctcggattgtcaaacactgctggcgtgcttgcaggagtttttggtactgcagccactggctacattcttcagaaaggttcttgggatagtgtgtttaaggtgtctgttgtgctgtacatagtaggaacggtggtgtggaatgtctttgcaactggagagaaagttctcgaataagctgtggacattcctatatgccaatatacgaaaattgtatgattttggtatacaaaggtaaatttaagaagagatacagctggaagaaaactccattttgtgcaagagatataccttcatctaatgtttgggctatcggaagaatgaaatcaaattagagtatcgtgtgaggtcaagaaggtactcatggaactggagaaacttcttgtacagaaagcaactgcaccaatggcacgtcagattttgcagctgtttcttgagaagtacaggcttctaccaagatcatcaatccacatatttttgttttgtttttaaaatacatggtagttaaatcgtgtttcaacttgcccttgattaaggcgctacagctactgccaactaaatgtagtattatgtgagctctttttcatcgagaattcctaattgtacctgcttcagataccttaaacgtctctgttccttgcgtcgttgctattatcgttttgtgtatgctgcataatgatattgcatggtgatggtgtcatttttttggcatcccggtgcctgaagaagagtagatttaatgtatggct

SEQ ID NO: 206370 - DNA, 1305 bp, Zea Mays
gaggccaaggccattcatccctctcctattttgaaggcggccctcccgtacgtaagcgcacacggacacggcctctggctctggctctggctctgcacaccgccggcgcccgcccgctatttgtgtccacggcgacgatctgcagcggcgatggctcggcgacgggacgacgtagcgctggccgccatcacctttgcgatcgtcgccttgtgcgcgcggtatgcgtcggcagtgggcaccacaccccagtcatccttcagctacagggagggtgacccgaccgggcctacaaaatgggccacattgcagaaggactgggatgtctgtgacagcggcaccgagcagtccccgatcgacgtcgccaaggtggaggtctctgaggatttagacccgctgcagcagacctacgagcctggcgacgccgtcatgcacaacagactccacgatttcatgctgaactggacaggagggaacggcggcctgacaatcgaagggaagaagtacaagctgaagcaggtgcactggcacgttccctctgagcacaccgtcaacggcacccgctttgacgcggagatgcacatggtccacgaggactccaccgacgccaagtcgaaagccgtcgtcgcggtgctgttcagcgccaaagcaggcaagtccagcaagctgctccgcgatctcaagccctacttcgagaggctcgctggtaaacagaacggcacggaggaagtgaagggccccgtcgtcgatccggcagcctggatagacaaggcctctggatactacgggtacgagggctcgcttacaaccccaccctgcactcaaggagtgctttggactatcatgagcaaggtagcagatgcatccaaggaggagatccactccatcgagtcggtgaaggaggcaaatgcacggccggctcagaaaatcaacagccgcgttgttcgctactacaaagcagcaggagccacagaagcgccggcgccggcgccggcgccagaagcaacctgatcgaggagaacgtgagccttgaagacgttagaacagtagctcaccctcccgagagtatgggttgaaaatctttggcgaattgatgtctcgatgcaaattaaacaggcatgccatctttgtgtaaacagaagttttacacactaagttccactcctatactactaccataattttagtaatgtaaatacttgaaagaattgcttaaatataaatgtttaaagacattatgaggaattgccaagtatcaaaggctcgatactcctctctagatctcattggaccacctgtgtaagggta

SEQ ID NO: 206371 - DNA, 1368 bp, Zea Mays
ctattttgaaggcggccctcccgtacgtaagcgcacacggacacggcctctggctctggctctggctctgcacaccgccggcgcccgcccgctatttgtgtccacggcgacgatctgcagcggcgatggctcggcgacgggacgacgtagcgctggccgccatcacctttgcgatcgtcgccttgtgcgcgcggtatgcgtcggcagtgggcaccacaccccagtcatccttcagctacagggagggtgacccgaccgggcctacaaaatgggccacattgcagaaggactgggatgtctgtgacagcggcaccgagcagtccccgatcgacgtcgccaaggtggaggtctctgaggatttagacccgctgcagcagacctacgagcctggcgacgccgtcatgcacaacagactccacgatttcatgctgaactggacaggagggaacggcggcctgacaatcgaagggaagaagtacaagctgaagcaggtgcactggcacgttccctctgagcacaccgtcaacggcacccgctttgacgcggagatgcacatggtccacgaggactccaccgacgccaagtcgaaagccgtcgtcgcggtgctgttcagcgccaaagcaggcaagtccagcaagctgctccgcgatgtacctcaagccctacttcgagaggctcgctggtaaacagaacggcacggaggaagtgaagggccccgtcgtcgatccggcagcctggatagacaaggcctctggatactacgggtacgagggctcgcttacaaccccaccctgcactcaaggagtgctttggactatcatgagcaaggtagcagatgcatccaaggaggagatccactccatcgagtcggtgaaggaggcaaatgcacggccggctcagaaaatcaacagccgcgttgttcgctactacaaagcagcaggagccacagaagcgccggcgccggcgccggcgccagaagcaacctgatcgaggagaacgtgagccttgaagacgtaccacgatgcttctttgttcggcttcctatatatactcgaaagctcgtgtgctgagtattgacagtttctttggtgaaacaggttagaacagtagctcaccctcccgagagtatgggttgaaaatctttggcgaattgatgtctcgatgcaaattaaacaggcatgccatctttgtgtaaacagaagttttacacactaagttccactcctatactactaccataattttagtaatgtaaatacttgaaagaattgcttaaatataaatgtttaaagacattatgaggaattgccaagtatcaaaggctcgatactcctctctagatctcattggaccacctgtgtaagggta

SEQ ID NO: 206372 - DNA, 696 bp, Zea Mays
cttgagaagattttatgatgatgatgtatattttgtgtagttgacacggtacaagaacttcaaggaaggacacaagaggattcttgtggctactgatttggttggtaggggaatcgacattgaacgtgtcaacattgtcgtaaactatgatatgcctgattccgctgatacatacctgcatagggttggtcgggctggacgttttggtaccaagggacttgcaataacatttgtttcttcatctgattctgatgttctcaatcaagtgcaggagaggtttgaggttgacataaaggagctgcctgagcagattgacacgtcgacatacatgccatcttgatgatcgaggtgaaccagtgtttagtttgagctggaaaggagagcttgtttgaaatatacaccttagatcgctgttggacaaccttagcaccttgtttgaaagatgttccatttgtacttaaccagcagtctagtggattaagcagtaggcgtcgcaacagctgttacatgctacctaggattttatttgcaactctgtaatgttttctatgctccgactgctaattgttctgtttgagactgccctctgggtgcatgttttactagtaaattactcgcaccatgcccgagtcttcggagcatgtgtttacatatttaaaagagttgctacaaataggagaaaaatatattgaacat

SEQ ID NO: 206373 - DNA, 1954 bp, Zea Mays
caccaacgaaatttcgcgtgatcaacagttcaacacacaaagtatagagtggatactttctgggtctcaaatatggtattcatgagtctggaccgtaagacgggctactattgaagcagactccacccggcgcgtcctcgtctcgtctcgtctcgcacgcacccctcactttccttgtcaatcgactcgcgatcgaatccgccccgagtcgattccgccgcggaccgaccggttcacttcccttttctcccgagatctcgactctcgagcaagtatgggtgaggcgaaggacaacgaggtgtacgaggaggacctagtcgactatgaggaggaggtggagaatgtcattgatggcgcccccaccaacggctcctcagatgtcgtcaagaaggggtacgtagggatccacagctcggggttcagagacttcctgctcaagccagagcttcttcgcgccattcaggattgcgggtttgagcatccttctgaaggtacaaattcttctgacattttctgctggaggagaatatgtgcaacatgagtgcatccctcaagctattcttggaatggatgtcatctgtcaagcaaaatctggaatgggtaagactgcagtttttgtcctgtcaactcttcagcagattgatcctgttgctggccaagtagctgcacttgtgttgtgccacacaagagaattagcttaccagatttgccatgaatttgagaggtttagcaaatacctgcctgaattaagagtagctgttttctatggtggtgttcacataaaaaaccacaaggatctgctgaagaatgaatgcccccatattgtggttggcacgcctggaaggatactagctctagctagagataaggaccttcccttgaagaatgtgcggcatttcattcttgatgaatgtgacaagatgctcgaatcacttgacatgcgcagagatgtccaggagatcttcaaaatgactccgcatgataagcaagtgatgatgttttcagcaacactcagcaaggagattcgacctgtttgcaagaggttcatgcaagatcctatggaaatttatgttgatgatgaggctaaactgacccttcatggtctagttcagcactatatcaaattaagtgaggcagagaagaaccgaaagttgaacgatcttttagatgcactcgacttcaaccaagttgtgatatttgttaaaagtgttagtagagctgcagaactcaacaaattgctctgcgagtgcaatttcccctcaatctgtatacattctggaatgacacaggaagagaggttgacacggtacaagaacttcaaggaaggacacaagaggattcttgtggctactgatttggttggtaggggaatcgacattgaacgtgtcaacattgtcgtaaactatgatatgcctgattccgctgatacatacctgcatagggttggtcgggctggacgttttggtaccaagggacttgcaataacatttgtttcttcatctgattctgatgttctcaatcaagtgcaggagaggtttgaggttgacataaaggagctgcctgagcagattgacacgtcgacatacatgccatcttgatgatcgaggtgaaccagtgtttagtttgagctggaaaggagagcttgtttgaaatatacaccttagatcgctgttggacaaccttagcaccttgtttgaaagatgttccatttgtacttaaccagcagtctagtggattaagcagtaggcgtcgcaacagctgttacatgctacctaggattttatttgcaactctgtaatgttttctatgctccgactgctaattgttctgtttgagactgccctctgggtgcatgttttactagtaaattactcgcaccatgcccgagtcttcggagcatgtgtttacatatttaaaagagttgctacaaataggagaaaaatatattgaacat

SEQ ID NO: 206374 - DNA, 2255 bp, Zea Mays
ctctcatttcccccctcctcccgctccccttggctccccaagcctcgacgcccggctagggttttgcctccttcccgccgccgctgtttcagcgagcgagaccgagtggtagagaaagagcggtgcttagccacccatgtcgctgcgtccgagcgagcgggtcgaggtacggcggaaccgctacaaggtggcggttgacgcggaggaggggcggcggcggcgcgaggacaatatggtggagatccgcaagagccgccgtgaggagagcctcctcaagaggcgccgtgaggggctccaggcccaggtccctgcccctccctccggggttgagaagaagcttgaaagcctcccagctatggttagtggggtttattcggatgataataaccttcagcttgaggccaccacacagttccgcaaattgctctctatagagaggagtctcccccatcgaagaagttatcaaaacaggtgtagttccaagatttgtgcagtctctcaccagagaggatttcccccagctgcagtttgaagccgcatgggctctcacaaatattgcttctggcacttcagaaaatacaaaggctgttattgaccatggggctgttcctatatttgtgaagcttcttgggtctggtagtgatgatgctgtgtgggctttgggtaatgttgctggcgattctccgaagtgccgcgaccttgttctcgccaatggtgcgttgatgcctctgctagcccagttgaatgagcatgttaagctctccatgctgcggaatgccacctggactttgtctaacttctgcaggggaaaaccacagccatcatttgatcagactaagcctgctctgccagcacttgcacgacttatccattccaacgacgaggaagttctcactgatgcatgctgggccctgtcatacttatctgacggcactaatgataagatccaggctgtgattgaagctggtgtttgcccccggctcgtggagcttctcctccatccatcaccatcggtgcttatacctgctctacgaactgttgggaatattgtcactggagatgatttgcaaactcagtgtattattgatcatcaagctcttccccgcctcctgaatctgttgacgcagaaccacaagaaaagcattaagaaagaggcatgctggactatttcaaatattactgctggaaacaaagatcagatacaggctgtcataagtgccggtatcatcgctcctttgttgcaactgcttcaaacagcagagtttgatatcaagaaggaggctgcttgggccatctcaaatgctacctctggtggttctcatgagcaaatcaagtacttggtgtctgagggctgcatcaagccattgtgtgaccttcttgtctgccctgatccgagaattgtaacagtttgtctggagggtctggagaatattcttaaagtagggcagcatgacaagaccatgggtgcaacaggtgacactaatgtcttagctcagatgatcgatgaagcggaaggcctggaaaagatcgagaacctacagagccacgataacaatgaaatctatgaaaaggctgtgaagcttcttgagacatactggatggaggaggaagatgacgcaatggctactgccggggaagctgctcctgctgtttttgactttaaccaaggtggcaaccctcctgctgctggtggtctgaacttcaactgatacagtctttgatcgaaagggtgttaattccctcagtgatgggcttggcattggcttgtcgtgacaaatgtagtctggtcgactccacgtgggatataatggtttgtggtgagtccaataaactcaagatttcgaagggagatgggctgagcattatattcccaagtgaaccatggctatcaatatcgcagggtctgtaacaaggattatataatcgtcgaacattagagcgtgggttcttgagaacgctactctaggttgtgcgtcgtttaattatatctggctactgtaaggcattcctgattggtttggttttttaagttcctcgggaatggtctgcgttgcaggttgtccggagtgggtaaacctgagtgggaacatttgagcatattgctcggccttgttttactacggtcgaggctaaattgatttctaaaagctgtttgcttctgcattgttggcgggaaaataaggcgaatgttttgatgccaaattcaatttcgagttaagaggcagatacaaggcccttcacaacgcaaatcttac

SEQ ID NO: 206375 - DNA, 2099 bp, Zea Mays
cccgcctctcatttcccccctcctcccgctccccttggctccccaagcctcgacgcccggctagggttttgcctccttcccgccgccgctgtttcagcgagcgagaccgagtggtagagaaagagcggtgcttagccacccatgtcgctgcgtccgagcgagcgggtcgaggtacggcggaaccgctacaaggtggcggttgacgcggaggaggggcggcggcggcgcgaggacaatatggtggagatccgcaagagccgccgtgaggagagcctcctcaagaggcgccgtgaggggctccaggcccaggtccctgcccctccctccggggttgagaagaagcttgaaagcctcccagctatggttagtggggtttattcggatgataataaccttcagcttgaggccaccacacagttccgcaaattgctctctatagagaggagtctcccccatcgaagaagttatcaaaacaggtgtagttccaagatttgtgcagtctctcaccagagaggatttcccccagctgcagtttgaagccgcatgggctctcacaaatattgcttctggcacttcagaaaatacaaaggctgttattgaccatggggctgttcctatatttgtgaagcttcttgggtctggtagtgatgatgttcgtgagcaggctgtgtgggctttgggtaatgttgctggcgattctccgaagtgccgcgaccttgttctcgccaatggtgcgttgatgcctctgctagcccagttgaatgagcatgttaagctctccatgctgcggaatgccacctggactttgtctaacttctgcaggggaaaaccacagccatcatttgatcagactaagcctgctctgccagcacttgcacgacttatccattccaacgacgaggaagttctcactgatgcatgctgggccctgtcatacttatctgacggcactaatgataagatccaggctgtgattgaagctggtgtttgcccccggctcgtggagcttctcctccatccatcaccatcggtgcttatacctgctctacgaactgttgggaatattgtcactggagatgatttgcaaactcagtgtattattgatcatcaagctcttccccgcctcctgaatctgttgacgcagaaccacaagaaaagcattaagaaagaggcatgctggactatttcaaatattactgctggaaacaaagatcagatacaggctgtcataagtgccggtatcatcgctcctttgttgcaactgcttcaaacagcagagtttgatatcaagaaggaggctgcttgggccatctcaaatgctacctctggtggttctcatgagcaaatcaagtacttggtgtctgagggctgcatcaagccattgtgtgaccttcttgtctgccctgatccgagaattgtaacagtttgtctggagggtctggagaatattcttaaagtagggcagcatgacaagaccatgggtgcaacaggtgacactaatgtcttagctcagatgatcgatgaagcggaaggcctggaaaagatcgagaacctacagagccacgataacaatgaaatctatgaaaaggctgtgaagcttcttgagacatactggatggaggaggaagatgacgcaatggctactgccggggaagctgctcctgctgtttttgactttaaccaaggtggcaaccctcctgctgctggtggtctgaacttcaactgatacagtctttgatcgaaagggtgttaattccctcagtgatgggcttggcattggcttgtcgtgacaaatgtagtctggtcgactccacgtgggatataatggtttgtgggtctgtaacaaggattatataatcgtcgaacattagagcgtgggttcttgagaacgctactctaggttgtccggagtgggtaaacctgagtgggaacatttgagcatattgctcggccttgttttactacggtcgaggctaaattgatttctaaaagctgtttgcttctgcattgttggcgggaaaataaggcgaatgttttgatgccaaattcaatttcgagttaagaggcagatacaaggcccttcacaacgcaaatcttac

SEQ ID NO: 206376 - DNA, 2180 bp, Zea Mays
cccgcctctcatttcccccctcctcccgctccccttggctccccaagcctcgacgcccggctagggttttgcctccttcccgccgccgctgtttcagcgagcgagaccgagtggtagagaaagagcggtgcttagccacccatgtcgctgcgtccgagcgagcgggtcgaggtacggcggaaccgctacaaggtggcggttgacgcggaggaggggcggcggcggcgcgaggacaatatggtggagatccgcaagagccgccgtgaggagagcctcctcaagaggcgccgtgaggggctccaggcccaggtccctgcccctccctccggggttgagaagaagcttgaaagcctcccagctatggttagtggggtttattcggatgataataaccttcagcttgaggccaccacacagttccgcaaattgctctctatagagaggagtctcccccatcgaagaagttatcaaaacaggtgtagttccaagatttgtgcagtctctcaccagagaggatttcccccagctgctttgaagccgcatgggctctcacaaatattgcttctggcacttcagaaaatacaaaggctgttattgaccatggggctgttcctatatttgtgaagcttcttgggtctggtagtgatgatgttcgtgagcaggctgtgtgggctttgggtaatgttgctggcgattctccgaagtgccgcgaccttgttctcgccaatggtgcgttgatgcctctgctagcccagttgaatgagcatgttaagctctccatgctgcggaatgccacctggactttgtctaacttctgcaggggaaaaccacagccatcatttgatcagactaagcctgctctgccagcacttgcacgacttatccattccaacgacgaggaagttctcactgatgcatgctgggccctgtcatacttatctgacggcactaatgataagatccaggctgtgattgaagctggtgtttgcccccggctcgtggagcttctcctccatccatcaccatcggtgcttatacctgctctacgaactgttgggaatattgtcactggagatgatttgcaaactcagtgtattattgatcatcaagctcttccccgcctcctgaatctgttgacgcagaaccacaagaaaagcattaagaaagaggcatgctggactatttcaaatattactgctggaaacaaagatcagatacaggctgtcataagtgccggtatcatcgctcctttgttgcaactgcttcaaacagcagagtttgatatcaagaaggaggctgcttgggccatctcaaatgctacctctggtggttctcatgagcaaatcaagtacttggtgtctgagggctgcatcaagccattgtgtgaccttcttgtctgccctgatccgagaattgtaacagtttgtctggagggtctggagaatattcttaaagtagggcagcatgacaagaccatgggtgcaacaggtgacactaatgtcttagctcagatgatcgatgaagcggaaggcctggaaaagatcgagaacctacagagccacgataacaatgaaatctatgaaaaggctgtgaagcttcttgagacatactggatggaggaggaagatgacgcaatggctactgccggggaagctgctcctgctgtttttgactttaaccaaggtggcaaccctcctgctgctggtggtctgaacttcaactgatacagtctttgatcgaaagggtgttaattccctcagtgatgggcttggcattggcttgtcgtgacaaatgtagtctggtcgactccacgtgggatataatggtttgtggtgagtccaataaactcaagatttcgaagggagatgggctgagcattatattcccaagtgaaccatggctatcaatatcgcagggtctgtaacaaggattatataatcgtcgaacattagagcgtgggttcttgagaacgctactctaggttgtccggagtgggtaaacctgagtgggaacatttgagcatattgctcggccttgttttactacggtcgaggctaaattgatttctaaaagctgtttgcttctgcattgttggcgggaaaataaggcgaatgttttgatgccaaattcaatttcgagttaagaggcagatacaaggcccttcacaacgcaaatcttac

SEQ ID NO: 206377 - DNA, 2241 bp, Zea Mays
cttggcgctaggtcccccgcctctcatttcccccctcctcccgctccccttggctccccaagcctcgacgcccggctagggttttgcctccttcccgccgccgctgtttcagcgagcgagaccgagtggtagagaaagagcggtgcttagccacccatgtcgctgcgtccgagcgagcgggtcgaggtacggcggaaccgctacaaggtggcggttgacgcggaggaggggcggcggcggcgcgaggacaatatggtggagatccgcaagagccgccgtgaggagagcctcctcaagaggcgccgtgaggggctccaggcccaggtccctgcccctccctccggggttgagaagaagcttgaaagcctcccagctatggttagtggggtttattcggatgataataaccttcagcttgaggccaccacacagttccgcaaattgctctctatagagaggagtctcccccatcgaagaagttatcaaaacaggtgtagttccaagatttgtgcagtctctcaccagagaggatttcccccagctgcagaaaatacaaaggctgttattgaccatggggctgttcctatatttgtgaagcttcttgggtctggtagtgatgatgttcgtgagcaggctgtgtgggctttgggtaatgttgctggcgattctccgaagtgccgcgaccttgttctcgccaatggtgcgttgatgcctctgctagcccagttgaatgagcatgttaagctctccatgctgcggaatgccacctggactttgtctaacttctgcaggggaaaaccacagccatcatttgatcagactaagcctgctctgccagcacttgcacgacttatccattccaacgacgaggaagttctcactgatgcatgctgggccctgtcatacttatctgacggcactaatgataagatccaggctgtgattgaagctggtgtttgcccccggctcgtggagcttctcctccatccatcaccatcggtgcttatacctgctctacgaactgttgggaatattgtcactggagatgatttgcaaactcagtgtattattgatcatcaagctcttccccgcctcctgaatctgttgacgcagaaccacaagaaaagcattaagaaagaggcatgctggactatttcaaatattactgctggaaacaaagatcagatacaggctgtcataagtgccggtatcatcgctcctttgttgcaactgcttcaaacagcagagtttgatatcaagaaggaggctgcttgggccatctcaaatgctacctctggtggttctcatgagcaaatcaagtacttggtgtctgagggctgcatcaagccattgtgtgaccttcttgtctgccctgatccgagaattgtaacagtttgtctggagggtctggagaatattcttaaagtagggcagcatgacaagaccatgggtgcaacaggtgacactaatgtcttagctcagatgatcgatgaagcggaaggcctggaaaagatcgagaacctacagagccacgataacaatgaaatctatgaaaaggctgtgaagcttcttgagacatactggatggaggaggaagatgacgcaatggctactgccggggaagctgctcctgctgtttttgactttaaccaaggtggcaaccctcctgctgctggtggtctgaacttcaactgatacagtctttgatcgaaagggtgttaattccctcagtgatgggcttggcattggcttgtcgtgacaaatgtagtctggtcgactccacgtgggatataatggtttgtggtgagtccaataaactcaagatttcgaagggagatgggctgagcattatattcccaagtgaaccatggctatcaatatcgcagggtctgtaacaaggattatataatcgtcgaacattagagcgtgggttcttgagaacgctactctaggttgtgcgtcgtttaattatatctggctactgtaaggcattcctgattggtttggttttttaagttcctcgggaatggtctgcgttgcaggttgtccggagtgggtaaacctgagtgggaacatttgagcatattgctcggccttgttttactacggtcgaggctaaattgatttctaaaagctgtttgcttctgcattgttggcgggaaaataaggcgaatgttttgatgccaaattcaatttcgagttaagaggcagatacaaggcccttcacaacgcaaatcttac

SEQ ID NO: 206378 - DNA, 2064 bp, Zea Mays
ctcacatgcagctagctaaaaatagttaagcaaatatgcactgtctaattacgtgaatcagaatgcaaatcgtgcacgggattaactaacaagatagatggcactgatctgtgtacttccgtaattccgtttagattggtctccggatgcatttcctgtatggacgattagttgggatcgtagctcagcaactgcttccttcttccgttgcccgcaatggattcagcgaggagctggttcaccaagctccaaacgagggagaaatccattggcaagaagaaggaattgcctcccaatggcaaggagcccggcgacgatgcgccgtcgagcgcaaccaagcagagggttgcggcggccaagcagtacatcgagaaacactacaaggagcagatgaagcatctgcaggacaggaaagaaagacggtgtagtctagaaaagaaactagcggacgctgatgtgtccgaagaggaggtcaacaacatcctgaagcagttcgagaagaaagagacggagtacatgcggttgcaaaggcacaaaatgagcgtcgaggatttcgagctgctaacaatgatagggaagggagcttttggcgaggtcagagtctgcagagagaagaccacaggaaacgtgtatgcgatgaagaagcttaaaaagtcagaaatgcttcgtcgaggtcaggacagcgagtacctgtacctgatcatggagtacctcccaggaggcgacatgatgacgctgctcatgaggaaagacacgctgacggaagacgaggccaggttctacgtcggcgagacggttcttgcgatcgaatcgatccacaggcacaactacatccatagagacatcaagcctgacaacctgctactggacaagcacgggcacctgaggctgtcggatttcgggctgtgcaaaccgctggactactccaacttcccggacctgaacgagaaggacgtgacgccgcctacgaagtcgtcggcgatgcatggggacgggaagcagcagtcgatgccgaagcgctcgcagcaagaacagctggagcactggcagaagaacagaagaaccctggcttactcgaccgtcggaacaccagactacatcgctccagaagttcttctgaagaaaggctacgggatggaatgtgactggtggtcccttggttctatcatgtatgagatgctagtgggttatcctccattctattctgacgagcctatgactacttgccgaaagatcgtgaattggagaacacacctgaaatttcccgaagaagcgaggctaacggcagacgccaaagatcttataagcaagctgctctgcaacgtcgaccagcgcctcgggacaaagggcgcagaagagataaaggagcacccctggttcagtggactagaatggggaaagctatatgagatagaagccgcgtacctgcctcaggtcacagacgagttggacacccagaactttgagaagtttgaggagtcctcggacggtagtagcgttcagggttcagcaaaggcgggcccttggagaaagatgctttcttcaaaggacctgaactttgtgggctatacctacaagaactttgaacttgtgaacgatcacgatgtccccggcatggctgagctgaagaagaaggagaaggcaaagagaccaagcgtcaagtctctgttcggcgcagattcacctgaaggagacggagggagaggggagccgcagcctgaagtcgacgacgaaacagcctccgcggaaggaagcgcccggaaaccagcagagcctgaactgaccagaagcctcagctcgccatccacgtgaaacaaatgtgtgcgtcatgttgtatgtactctttgttaattgattcacgagctaatagcgatcgtaccgtgctgaaaatgagtagtgtgtgtccgtggaatgtatacgcaccgatgtgttgacgaagcggaactcgcaaacgcgttttaaacactggaattcacgtggaaactacaaaaaaaaacaacaacaacgtcttctacaacttatcaatttggcaagtagcagcagcacatgactacgcacgaagaa

SEQ ID NO: 206379 - DNA, 2382 bp, Zea Mays
ccgctctcgtcttcctctcccaatgtcaatagccacttccactcccaaagtcacaagggtccgaacccaacaaaaaaactctccaaaccccatttcatttttcaaatctgctcctgccccacctccgccgccggacttccaaacgatcaaaccccacccagtcgctgtctccagccccaaatcctcgagctccctccgtcagtggcgcgatggggttcgtggatccggcggcgccgctgctggcgacgtgcggcggcgacacggttaagcttttcgacgtcacggtggagaccggcgacccctgcgtcctcgcctacacccccgcgcccgcgcaccccgtcaacgccgtcaagtggaaccacaccaatcttattgtagcaagtgctggcgatgataaaaagatctcattgtggcataagaagggtcaaaatgtaggacaactaccaacatcaactgtcgaccgtggtgatgacatagaggagtgcatttattctatcagctttagcaacaaaggttctcgatatctctgttcctgtggaagtggccatattgttaggatatgggatttgcagcgtaagagatgtatcaaatggctaagcggtcacactgacacaattactggcgtaatgtataactgcaaagatgaacatttggcatcgatcagcatgaagggggacctgattcttcataatcttgcttctggagcacgtgtttctgaacttagcgatccaaacggacagctggagatgatggttctgtgcatctttgggatacaactgcaaagtctcctaaggtttcatggctgaagcaacattctgcacccacaagtggtgtttgtatttcaccatccagtgataagataattgctacagtgggccttgataagaagttatacactttagattcagggtcaagacggccggcccacactattcctcatgaggccccattctcctcattggcgtataatgatgatggtactataatagcagcgggcactaacagtggacgtgtggtgttctatgatattcgaggaaaaccaaagccattgaccatccttcgtgcatataatacttctgaggtttatgctggcaacggtcgaagcctgtcgttgttaatgagaacagttcttctgaagttgctcttcttgggggaactaatgaagagtctgttcttatgccagatcccttgccttcagcaacacctacaggccttggttctggggtggccactacaagtcttctctctttgacagcaaacacaagtggctatctttcggcctcaaattcttctactatggaggaaacaccatatagaactcgtccgctgactggtggaccgttatcaaagctacaggctcctcttagtaactataatctgaaggatgatatggatgtattttctccacttgttgatgtccagcctttcacaccatctagtggcaactggtgggatgagcatggaagtgatgatgcaaaaaaggatgataaaccaggagaaaagaaattttcaacaaccaggaagtattcgtatatggaaggcaatgatgagccacatccgattgcagattggcggtctactgcaagacaggatagcatctcatctgtgactactacatccatgccatcatggaagagcgaactgtctgtatcttcgccagagccagcaactggaaatgcattaccagacaggcttactcaacgtcaactgatctcacgctttgggtcttcagcctttccaactggtggcttggcatttacagcctcacaagatccagcttcagcacccagtcactcactgaagggttctcttacaagtaacattttaatgaatctacaaaacaagggcatcttgaacaatgtatcctcttccctggacgcatcctctcctaatcttcagagttcacttccctcatcatatgtttcaaaaactatgccatctgtgattcctgatcaactaggagcagcacaatccacttctttgtggagacccacaacatatactgatagaatgagctcatcatctgtttttagtgatggattagcttcagcatttggctcacccaaatcaaagaagacaggagcagaagcaaaagatgagttgctcagtaacattttgtcaagacaaacagcagctggctcttcatctgcaatccctttagcaagcaatggggtagtgccaccacaactggcgaacacaggttcttcatctgatcaactcggcgcttcttccttctcacttcagtatgtgcagcgcatgcttgaagaatctcttgggtctgtccagaagtccatccatgaggatgtgagaaatctccacattgaacttttaagacagtttcacatgcacgaggcgaatgtgtgttccagtggttagaacctg

SEQ ID NO: 206380 - DNA, 3037 bp, Zea Mays
ccgctctcgtcttcctctcccaatgtcaatagccacttccactcccaaagtcacaagggtccgaacccaacaaaaaaactctccaaaccccatttcatttttcaaatctgctcctgccccacctccgccgccggacttccaaacgatcaaaccccacccagtcgctgtctccagccccaaatcctcgagctccctccgtcagtggcgcgatggggttcgtggatccggcggcgccgctgctggcgacgtgcggcggcgacacggttaagcttttcgacgtcacggtggagaccggcgacccctgcgtcctcgcctacacccccgcgcccgcgcaccccgtcaacgccgtcaagtggaaccacaccaatcttattgtagcaagtgctggcgatgataaaaagatctcattgtggcataagaagggtcaaaatgtaggacaactaccaacatcaactgtcgaccgtggtgatgacatagaggagtgcatttattctatcagctttagcaacaaaggttctcgatatctctgttcctgtggaagtggccatattgttaggatatgggatttgcagcgtaagagatgtatcaaatggctaagcggtcacactgacacaattactggcgtaatgtataactgcaaagatgaacatttggcatcgatcagcatgaagggggacctgattcttcataatcttgcttctggagcacgtgtttctgaacttagcgatccaaacggacaggtcaggttctgagagtgcttgattattcacgaaatagtaggcatttattggtgacagctggagatgatggttctgtgcatctttgggatacaactgcaaagtctcctaaggtttcatggctgaagcaacattctgcacccacaagtggtgtttgtatttcaccatccagtgataagataattgctacagtgggccttgataagaagttatacactttagattcagggtcaagacggccggcccacactattcctcatgaggccccattctcctcattggcgtataatgatgatggtactataatagcagcgggcactaacagtggacgtgtggtgttctatgatattcgaggaaaaccaaagccattgaccatccttcgtgcatataatacttctgaggctgtgacaggtttatgctggcaacggtcgaagcctgtcgttgttaatgagaacagttcttctgaagttgctcttcttgggggaactaatgaagagtctgttcttatgccagatcccttgccttcagcaacacctacaggccttggttctggggtggccactacaagtcttctctctttgacagcaaacacaagtggctatctttcggcctcaaattcttctactatggaggaaacaccatatagaactcgtccgctgactggtggaccgttatcaaagctacaggctcctcttagtaactataatctgaaggatgatatggatgtattttctccacttgttgatgtccagcctttcacaccatctagtggcaactggtgggatgagcatggaagtgatgatgcaaaaaaggatgataaaccaggagaaaagaaattttcaacaaccaggaagtattcgtatatggaaggcaatgatgagccacatccgattgcagattggcggtctactgcaagacaggatagcatctcatctgtgactactacatccatgccatcatggaagagcgaactgtctgtatcttcgccagagccagcaactggaaatgcattaccagacaggcttactcaacgtcaactgatctcacgctttgggtcttcagcctttccaactggtggcttggcatttacagcctcacaagatccagcttcagcacccagtcactcactgaagggttctcttacaagtaacattttaatgaatctacaaaacaagggcatcttgaacaatgtatcctcttccctggacgcatcctctcctaatcttcagagttcacttccctcatcatatgtttcaaaaactatgccatctgtgattcctgatcaactaggagcagcacaatccacttctttgtggagacccacaacatatactgatagaatgagctcatcatctgtttttagtgatggattagcttcagcatttggctcacccaaatcaaagaagacaggagcagaagcaaaagatgagttgctcagtaacattttgtcaagacaaacagcagctggctcttcatctgcaatccctttagcaagcaatggggtagtgccaccacaactggcgaacacaggttcttcatctgatcaactcggcgcttcttccttctcacttcagtatgtgcagcgcatgcttgaagaatctcttgggtctgtccagaagtccatccatgaggatgtgagaaatctccacattgaacttttaagacagtttcacatgcacgagatggaaatgtcaggcgtgctgaacttggtcctggaaaaggtggaaggcctgacaaaagaagtgcagcaactaagaagggagaaccaacagctcaggcagcagcttctctaatatgtgcctttgggcgcctctctggcaatcttatgctgtggaagagtgcaatttgctcaggagtcctaggtaggcccaaacctatgtagaggcctggcgatggttgattctcatattggttggaagctcgtgtttgactttgacacggttgtacatataatcctcttaatttagaagcatattttgatcgaattattgatttgtctgtttgccgtgcttcttggactggctccatgtatcttggtggaccttgggcgtcctgatggcatatgtgagaggtcaacacaggtttccgatgtagcttttgttaatataattccttgattaggctcaaaatactctcttaacgatggtatatgatattttgtgatgtgagtagattattactctttgtccagtttataaggcgtcttctgaaattggcacaatttcttaaattacacttgatcacttatttattttattctctttgtttctgaataaatcaatttagaaccttgatttgtg

SEQ ID NO: 206381 - DNA, 2222 bp, Zea Mays
ctcacaagggttgcacaggttgtgaggtggcttatgctttgaaaacactaattttttgctcagagtatgtggtcatggccctagcagttggagcgagctgtatatgtcagaccgagtatgttgtttgttaaaccctagggcattagccacctgaaattacttttttctgtcccaatatatttgttatggtactaatttttttatttgcaaaatcaataaccacggagaattgagatttttatttgcttgtaacacatataatcggttaggggcacaattaaaatcaaatcaaataaataaaaccttttgtcccttctaaaaaggaaatcgcaaaagaatgtagggagtgctttttatactgaagcatccactagctaaaattatgtctacattgatatttctattgctccctttaaagtgctaatatgtttgacaacatatagcgtcattgttgactcgcttaaaatcaaataaactagaaaataaagttgaccacaattgtttgtttgaaaaaagatgataggctaattctgcctttgggtctggtagtctcttgccaaatttcagtccttagattgcaataattgttttaagttgcaattttaagtggatgcatcttttatcggccagttcttacttcttagttgttttgatcgatctaacttaaagtttttcacttttttttcttcagttgaaatccaatttactatgctcaattgcccatcgtgaagaacatataatttatgaatcttgaacttcagaagttcttcatttaccgtcttatgaaacatgaggacaggtttcacaacacattttgacattatatctttatcaagtcagttgtggtgaactgtgaacaaatgtgcttgttatgcatatcaacacctcttgtatttgcattcttcccctagcagtaaggtcaatggcactcagatgggaaataaccgaagcatcttatgccatggcagttgcgctcttcttctttggccactgactcttactttctctttctggtcaaatcttcattctttcagacctctatgctgggttgaacatatgtcgttggacaatgaaactggattagacaaacctggaataagggtcaggttcgtgatcaaactttgagcagaataaagagcaatattgaactcatagtagcgacaaatggtggaaatagggtggtggtgatcccacactccatgggggtcctctattttctgcattttacgaaatgggtcgaagcacctcctcccgtggggggcagtggtggtccgaactggtgtgagaaccatattaaagctgtaatgaatattggaggatctttcttaggagttcctaaggctgttgctgggcttttctcatctgaagccaaagatgttgccgttgctaggtataaggtaattgattcatttatttaaagcaaaagggaatagcaaaagaatggaatattattggatgctcgacaagcttggcggagcttttgctcccaagccatcttctggacctcacaagtccagggagtgcctgcctctgatcctcatcatcaggaacaggctcaagtatgcaccgacgtaccgtgaggtcatttctatcctgatgcaacaccatgtacttgttgatggcaagatgtcatttccatccctaagacaaacgagaactacaggctgctttcgtcttcacccaatcagggatgaggatgccaagttcaagctctacaaggtgaggtctgttcagtttggccagaaagacatcccctatctgaacacctacgacgaccgcaccatccgctaccccgacccgctcatcaaggccaacgacaccatcaagatcgatctggagaccaacaagatcatggacttcatcatgtttgacgtcggcaacgtggtcatggtgatcggcaggaggaataccgggcgtgtaggagtgatcaagataagggagaagcataagggcaacttcgagaccatccacgtgctgcttggagctttttgctatgtctagttttctcctatttgttgtacaggaaaacatagaatgaaattcaaatttggtggccacaaaagtgtggagacttgatttcatataaagttaggcttaacattagtgcaaacagttgtattttagtttagatttagagtacactatgtatgcgttgtttgacaatgcttatttatgatatattgaatggtacttatttatattaattaattataatgttattc

SEQ ID NO: 206382 - DNA, 2782 bp, Zea Mays
agtttgacacacacaattctcggccccgcacaatggcccactcgctgcacgcgcacgcagacgtatcaatagatgccgcactcgccgcatcacgagatgtcgccgccggctgccaacacagtggatcgtccgccgctgaagatgagggaggtatcacggcgcgtcacgcctacacctcggcccactcgctgtcgtcggctgcctacacagggagcccccgccgccgaagaggagggaggtcttgcggcacgggactcggcgacggcgccccctaacacatcgactgggaggtctgcctcactgctgccacactcatcgccaggtacgccgccctctccccgagccctttcctcacgcgtctactcagccgagccctcattgctgctggcccctggcctccggatcggggctcacaagggttgcacaggttgtgaggtggcttatgctttgaaaacactaattttttgctcagagtatgtggtcatggccctagcagttggagcgagctgtatatgtcagaccgagtatgttgtttgttaaaccctagggcattagccacctgaaattacttttttctgtcccaatatatttgttatggtactaatttttttatttgcaaaatcaataaccacggagaattgagatttttatttgcttgtaacacatataatcggttaggggcacaattaaaatcaaatcaaataaataaaaccttttgtcccttctaaaaaggaaatcgcaaaagaatgtagggagtgctttttatactgaagcatccactagctaaaattatgtctacattgatatttctattgctccctttaaagtgctaatatgtttgacaacatatagcgtcattgttgactcgcttaaaatcaaataaactagaaaataaagttgaccacaattgtttgtttgaaaaaagatgataggctaattctgcctttgggtctggtagtctcttgccaaatttcagtccttagattgcaataattgttttaagttgcaattttaagtggatgcatcttttatcggccagttcttacttcttagttgttttgatcgatctaacttaaagtttttcacttttttttcttcagttgaaatccaatttactatgctcaattgcccatcgtgaagaacatataatttatgaatcttgaacttcagaagttcttcatttaccgtcttatgaaacatgaggacaggtttcacaacacattttgacattatatctttatcaagtcagttgtggtgaactgtgaacaaatgtgcttgttatgcatatcaacacctcttgtatttgcattcttcccctagcagtaaggtcaatggcactcagatgggaaataaccgaagcatcttatgccatggcagttgcgctcttcttctttggccactgactcttactttctctttctggtcaaatcttcattctttcagacctctatgctgggttgaacatatgtcgttggacaatgaaactggattagacaaacctggaataagggtcaggtcagtcacaggccttgttgcagcaaactattttgtccctagatattttgtttgggctgtcttaattgccaatttagctcgtattggatatgaagaaaagaccatgtacatggttgcatatgattggaggttatctttccagaacactgaggttcgtgatcaaactttgagcagaataaagagcaatattgaactcatagtagcgacaaatggtggaaatagggtggtggtgatcccacactccatgggggtcctctattttctgcattttacgaaatgggtcgaagcacctcctcccgtggggggcagtggtggtccgaactggtgtgagaaccatattaaagctgtaatgaatattggaggatctttcttaggagttcctaaggctgttgctgggcttttctcatctgaagccaaagatgttgccgttgctaggtataaggtaattgattcatttatttaaagcaaaagggaatagcaaaagaatggaatattattggatgctcgacaagcttggcggagcttttgctcccaagccatcttctggacctcacaagtccagggagtgcctgcctctgatcctcatcatcaggaacaggctcaagtatgcaccgacgtaccgtgaggtcatttctatcctgatgcaacaccatgtacttgttgatggcaagatgtcatttccatccctaagacaaacgagaactacaggctgctttcgtcttcacccaatcagggatgaggatgccaagttcaagctctacaaggtgaggtctgttcagtttggccagaaagacatcccctatctgaacacctacgacgaccgcaccatccgctaccccgacccgctcatcaaggccaacgacaccatcaagatcgatctggagaccaacaagatcatggacttcatcatgtttgacgtcggcaacgtggtcatggtgatcggcaggaggaataccgggcgtgtaggagtgatcaagataagggagaagcataagggcaacttcgagaccatccacgtgctgcttggagctttttgctatgtctagttttctcctatttgttgtacaggaaaacatagaatgaaattcaaatttggtggccacaaaagtgtggagacttgatttcatataaagttaggcttaacattagtgcaaacagttgtattttagtttagatttagagtacactatgtatgcgttgtttgacaatgcttatttatgatatattgaatggtacttatttatattaattaattataatgttattc

SEQ ID NO: 206383 - DNA, 5515 bp, Zea Mays
gggcaatacagtcagattattaggcatccgccgatcctcggctccgatcaatggcgtccaccaacgcaatcgatttccaactcacccaggcccgggcgctgctgtccgaattcgacaaccggctccgcgagattgattccaagtgggagacccgcgtcggcgtcctcgaaacgaaagttgcggactctgctcgaaatctggagacgatctccaaggagatccgcgacggggtggtggcgcagttggcggcggccgaggcgggtgtggatttccggatccgcctgcttgagacggggaccatcattcgcgtcgctgcgctcgagtcgactgcccacgccttcgagctgtggcgtcctcacgtcgacttgtcgatcgacagtctcttctcctccattgacgcggtttgtaccgaggtcgagaaattggggatccaccggttcccaggaccgcgtcccagcgatggcgcagcagcaccggggaccgcgacgcaaccggaaccctcttctcatcggccacgttcatcgcctccgcccgaggtccatgacggcgacgatgacgatgaagaaattgacgatgacgatgacgacgacgacgacgacgacgacgacgacgacgacgacgacgacgacgacgacgacgaggtttgggtttgtttccagcttcacgcgggtctcttggggttgtgtgcgttggcaggttctggatttcttgattcgcggcacccaatttcttggggattaatttctcccgttctgatagaaggcgatggctcatcgactgggtcggtcgtaggctggttttcgtttgaacacgtcctcgatttgattgaccattgggtcgggtttttgattttacggggaaacccagaaaagaaggaaggaaggggaaaccgcaatgccagttattgaatatcgcggagtggtgccatggcaatttcgagtgtccgttttttgtcccgttctggctgattcttgccctctgaagtttttcgtcgctttattcaatcatccgtttacatttttatgtgtcataatttgggcttccttcagggatttgatccatttgcaggatgacttagtttttgtagataggtaaatttagcaaattcgaggtgtgaatcatgtgaagcatttttttctttttccgtttagaattccgcgagaaaactcggtacatgttgagcacattatttggattctttttttacgtgtttttgttgtaaatggacatatcatgataccagaggtcatgccatgacttgcatgtcttctggaaagtttttttagactatggccaatcattcgagtaggataaaataggtgaattactgggattatttcgttgtgctctccctgcttccatttggaaataaaataaaataataaattacctgatgattgcaactcacaaggattatgagggcttcacagacgaagagctggacaaattcgaaagcgccttcggatggggttctacattcttgagtgatcctcaagttctttgtatggactcgagtgatccacaaaacccccctcgtattggccggcaaaattatgagccgctcaccgcacaggagtttttttcactgcgccacaattggcaacagctgctcgatggcaagaagacatacctccgcccaccaaagaacaaccgtgttgccaagcacagttatgctaactgcacctttgtaaccccagaacctcttgagaaggcactacaatgtcaggagccgctatctgattttggtcggaaatatgcagaaaattctatagttcagcaaaagtttaagattcttagtgaacattatgcgcacgtcagacaaatgcgaatggatggatcatctttttacagagctttccttttctcttacttggaaaaccttgggaaaatgcaagctagtcatgctgaggtcactcgcttaatggaatgtgtggcaaggtccagagagaaattttgtcgtttacattggaatgatgcgtacttctcaaatcctgaagcatttttctcaagtgttgtttctgagttcgagcaattggtcaattcagttgccaatgggctaaatgctgatgagctttacaagagaagcctacatgagattacatcatccaggattctttgtttgtttagattgctgacagaggttcatatccgtacacatcatgcggactacccagaattcagtcaggaaacagaagcccttatgttttgcttagcatcggtgcgtccctttgaagctggagctaacattctacaaatgagtgctctatcaagtgcacttggcatcccattgcacctggcatgtacggatgtaaccacgagtgatgatgaaattgtgacagtaaagtgctttgacttgtttcctcaatcagaatcaggagcaagcacaacatcaggagctacgagttcaatcagaagttactctctgtcaagcacaactgataaacacccagagcaaggaagggatgataacaactcaaccatgccggctggaaacttgttttcgtctgatcgcatgcctttagttatcttactgagtaggaagggtcaatatggcattctttatcgcaagtgaacaagttctgactatacggcagcctctggtggacagttctaaccggaactgtttgggttataacatggaaacctattgacaacctactctagtgtgggtgtttgattgtgcatctgcttccaaaatgtatctggttacatttttgcccccgacaaaaaatactccatttgctagatgtgctgatgcatgcagtttatgaaacaaatttggacttggcataaaatctgaggctgggagcagtgggacagatctgttactttttcggtttatttttcttatggatgtttgtaccattgctgaagcatggatggaagattcatatttggtaagaacatatgaaggactagttgttttctgatacagcaggacgtggtttggatcattcaagttcaaggaccaataacaccaaaatttcagaatgaaggcattttttgagagtccttgttactgcaggctctcctgaggacactaaaagttggatgcattctagaaggagcttcaaattattgataatgatgtggactttgtatttttattgtgaaaaatctttgaacacacttcttgtggagaactaggattagcattgacagcagactcaatcaaatgaaaatatagtatgcgagcggtcatttttctgggataaaaaactcatgtgaatggagtactcattcagtcttgcgtatttttgcagcttgcatggcacaaatagggctgttgagtaaaaaatttaaagccttttatgggagagattaaattggaaatacatatttgcttcaagtggaaggttgtggacatacagcgccacctacttgacatgatgaatggttcgtgacattcaaacacagacagacaagtctggttctacctccttaactttattggctggtcatcttcgcgtcacaagggcaggagagaacaataatttcgtcgagtggtgggtcaaaatcaacaaatgggtgccttcaaccttaaaaaagggtctaattccttgataatcctaggctcctggatgatttggaaacaaagaaattagattgttttcaattggaccacacgagtatcctgaggattcttgtccagattgaggaggctcatctgtggtgtcttgcaggagccaaagagctagcccgcgcaactgtagcaccgctacctcttaagtatgtctccttagaccttgttcggttacattaaatcttctggcagtactcatgcagtgcatttgcatcggaggggattgaaagagattaaatcttcttctattcaattttgactagcaagggatttaactccctccaatccggttcaatccactcctaaccgaacaagcccttaattggattacaacatgtactcatgcagtgcatttgcattcagttgtatgccagatatgctacagtggtgcctgacacctgcatgttttagcttctgtggcaggcgaaagccttgcttgacaacgttgtaacccttctcggatctggcatttaacaagcacttgagcagcagcagaagcactgccgttctttacaaaactcctatccaagatgtattctggcaagagtgacatattaggcagctaaggatatgagggagcactggtgttcactaagtcgaggcattaagcgcaaggcgattttgcattgttctggtagagccaagtgatatgctgtaaaaatccttgcactttagtactccaaatgggccaaagtacttcaaagggagcttcacacatggttgggaatttaccatgaccaacctgaaatcgatttggataaccatgcttatcagtctgtatcttcattttgttctgaactcaactcagttcattcttgagatccaaatttagctgcccatagcatcagaactatcggaaagaagtggaggcatagtcctaaagttttttttaaaagagaaacaggagggtagcaagcccctagtgcataatcctataaagttggaaccagagacttataacatgctacatggtttgcggcacaatgaaggttgatatgtgataaattctactaggttatatttgaggcaaacaagatgcatagagctttgaggagtttctagtttcaagtgcaaaatgcggaagcccaagatgctgcaatacaatctcctccacagcgcaaaaagcaattggcttgttgagaaagggaagaacaaagtttacaaaggggcaatccaggtaccagaagaacttcttaagaaactaggagctttatcccctaagtcggaatcttcaagtacagatctctttgaacaatttgcacagatcacctaagcattgatagagcatggacaacaactgaaaaagaaaaaaaaggctagaaaaaccagaaaagcgccagtcgccaatcagatggtctcagcacctcttattgctctctcactaaggaaaatatgaaagccagatggtctgaacacatcttatcgctctctcacttaggaaaatatggaaatcatcaaagccgtgaggaaggaacgctgataattcaacatcatccaaggttctatcagtccagcaagctatctgaacctttctgatccaaggttttccagagttcagacttctgtttgtttattgacaatagcttagctttggtagtaaggacatgtcgcgtgccggcctctgttgttgtaagtggtgctcaatgctaaagcccttagcaagtttttcttgtggttcttttctagacgaagcttttttagccttgtttagtgtgtttctccttagcaagttgagttttagatggttggaggtgagctagatgtgtttgttgtggttatttttttcttttcttgagctagctgtggtggttaacctctacttgtaaggtttttgggcccgtttttcccttaaaagttgggccatgactctccttttctcttctaataaaattagctgcaaaacttttgctgtcatttcgaaaaaaacacaca

SEQ ID NO: 206384 - DNA, 738 bp, Zea Mays
cgcggccatgcatggcggcggtcctgcgtacgtgtatggatgatgatcgcgcccgtcatctggaagacgaggcaggtgggatcggcggcggagacgtgagcagtttttccgctgattctgagtttctgacagccggaatctatatatacatacaaacacaagagcaaatcaaagggacgggaaacgggaagaggtggtgcgtgctaactcctatgcatcgcattcctggatgttcattggtcaatgatgatgctgcactgctgcagctcgggtagtttttgctaagctggaggtgcagcagacaagacaacaagaaagaggaggcaactaaggagtagtactatactgatgccactagtccatcgtggagctcggttcaggaagctcatcgatctcgttgtacttgtaccgaactatctcaaaaaacatagtgcctgtttgtctggattgctgctcggccacaagcacagctgtctggcccggggcaccatccaaacaatcccatatagagcgtgtttggacgcagtcatgcgcttgggttttgcttttgcctgtctgtgcccggcagattcatgggcctgtaagcaaacacgtcccaattatctgaactcggaattatttacgcctcggcaagattcatcaactcaatttttttgtgaacaatcttattgtgttactaggtgaatgcccgtgcgttgctacggagtaaacatattatgataagatatattgaaattc

SEQ ID NO: 206385 - DNA, 1666 bp, Zea Mays
gcagggctgaaggtctgccagggcgcgctctactgcctgggcgcggagggcgtgctgcgggtcagcctcggctgcttcgtcttcttcttcgtcatgttcctgtccaccgtgaaggccaggaaggtgcacgactgccgcaactcgtggcactccgagtggtggccggccaagctcgccctctggctcggcctcaccgccgtcaccttcctcgcgccgtcgccgctcgtccagctctacggtggcgcatttcggagcaggggctttcctggtgatccagctgatcagcgtcaccaggttcatcatgtggctcaacgactggtgccgcgcagagatgacccagaagagataccacttgcagattcaggcggtgtccatcgtcacgtacgtggggtcgctcctggggatcgtgctcatgtacgtgtggtacgcgcccagcccggcctgcaggctcaacatcctcttcatcaccgtcacgctggcgctcgtgcagctcatgaccttcgtctccatgagctccaaggtgaaggcagggtacgtggcgccggggctgatggggatctacgtcgtgttcctgtgctggtcggcgatcagaagcgagccgcacacggaggtttgcaacaggaaggcagaagtcgccacgagcgcagactgggtgaacatcgcgagctttgtgatcgccgtcgtcgtcatcgtggcggcgaccttctcgacggggatcgactccaagtgcctccagttcaagcaggcggagggggagtcggaggaggaggaggaggacgacatcccctacggcctcggcttcttccacctggtgttctccatgggcgccatgtacttcgccatgatcttcgtcggctggaacgcgaacgcgagccacaccatggagaggtggacgatcgacgtcgggtgggcgagcacgtgggtgcgcgtcggcaacgagtggctggcggcaatcgtgtacatatggatgatgatcgcgcccgtcatctggaagacgaggcaggtgggatcggcggcggagacgtgagcagtttttccgctgattctgagtttctgacagccggaatctatatatacatacaaacacaagagcaaatcaaagggacgggaaacgggaagaggtggtgcgtgctaactcctatgcatcgcattcctggatgttcattggtcaatgatgatgctgcactgctgcagctcgggtagtttttgctaagctggaggtgcagcagacaagacaacaagaaagaggaggcaactaaggagtagtactatactgatgccactagtccatcgtggagctcggttcaggaagctcatcgatctcgttgtacttgtaccgaactatctcaaaaaacatagtgcctgtttgtctggattgctgctcggccacaagcacagctgtctggcccggggcaccatccaaacaatcccatatagagcgtgtttggacgcagtcatgcgcttgggttttgcttttgcctgtctgtgcccggcagattcatgggcctgtaagcaaacacgtcccaattatctgaactcggaattatttacgcctcggcaagattcatcaactcaatttttttgtgaacaatcttattgtgttactaggtgaatgcccgtgcgttgctacggagtaaacatattatgataagatatattgaaattc

SEQ ID NO: 206386 - DNA, 1987 bp, Zea Mays
cacgccccttgcgaaaaagaagggagctgtgctaaaatttcttggaggggagggggtagagatgacgtttggtagcgccgacatggaggccggcggcggcggcgagcgccgccacggacaacaggaggaacagtcatccgacgagcggcgcgcgcggttcgcggaggactggggctgctgcgcctgcgcctgcgcggggctattcctggggcccaacccgatggtggcgcgctacatgtacgcgctcatcttcctcgtcaccaacctcctcgcctggacgctccgcgactacggcgactccgcgctcgccgagctgcagcggctgaaggtctgccagggcgcgctctactgcctgggcgcggagggcgtgctgcgggtcagcctcggctgcttcgtcttcttcttcgtcatgttcctgtccaccgtgaaggccaggaaggtgcacgactgccgcaactcgtggcactccgagtggtggccggccaagctcgccctctggctcggcctcaccgccgtcaccttcctcgcgccgtcgccgctcgtccagctctacgggaaggtggcgcatttcggagcaggggctttcctggtgatccagctgatcagcgtcaccaggttcatcatgtggctcaacgactggtgccgcgcagagatgacccagaagagataccacttgcagattcaggcggtgtccatcgtcacgtacgtggggtcgctcctggggatcgtgctcatgtacgtgtggtacgcgcccagcccggcctgcaggctcaacatcctcttcatcaccgtcacgctggcgctcgtgcagctcatgaccttcgtctccatgagctccaaggtgaaggcagggtacgtggcgccggggctgatggggatctacgtcgtgttcctgtgctggtcggcgatcagaagcgagccgcacacggaggtttgcaacaggaaggcagaagtcgccacgagcgcagactgggtgaacatcgcgagctttgtgatcgccgtcgtcgtcatcgtggcggcgaccttctcgacggggatcgactccaagtgcctccagttcaagcaggcggagggggagtcggaggaggaggaggaggacgacatcccctacggcctcggcttcttccacctggtgttctccatgggcgccatgtacttcgccatgatcttcgtcggctggaacgcgaacgcgagccacaccatggagaggtggacgatcgacgtcgggtgggcgagcacgtgggtgcgcgtcggcaacgagtggctggcggcaatcgtgtacatatggatgatgatcgcgcccgtcatctggaagacgaggcaggtgggatcggcggcggagacgtgagcagtttttccgctgattctgagtttctgacagccggaatctatatatacatacaaacacaagagcaaatcaaagggacgggaaacgggaagaggtggtgcgtgctaactcctatgcatcgcattcctggatgttcattggtcaatgatgatgctgcactgctgcagctcgggtagtttttgctaagctggaggtgcagcagacaagacaacaagaaagaggaggcaactaaggagtagtactatactgatgccactagtccatcgtggagctcggttcaggaagctcatcgatctcgttgtacttgtaccgaactatctcaaaaaacatagtgcctgtttgtctggattgctgctcggccacaagcacagctgtctggcccggggcaccatccaaacaatcccatatagagcgtgtttggacgcagtcatgcgcttgggttttgcttttgcctgtctgtgcccggcagattcatgggcctgtaagcaaacacgtcccaattatctgaactcggaattatttacgcctcggcaagattcatcaactcaatttttttgtgaacaatcttattgtgttactaggtgaatgcccgtgcgttgctacggagtaaacatattatgataagatatattgaaattc

SEQ ID NO: 206387 - DNA, 2188 bp, Zea Mays
acaaaagccagacacaccaccaccgcctcttccacgccctcccttattcgctcccacatccaccaccatctctaccgcgccgcacccagctccagctctagcagcaccatctctaccgacgcacccacctcctcctccttggtgaaggccggccgcgccactgcacgagcacacacgaacgcacagagacgggtggccgccgtaccgacgcccgcgcctccaggtagactagactactactagtacctggcagggggctgctccattgccggcacatcatcaggaaaaagaagggagctgtgctaaaatttcttggaggggagggggtagagatgacgtttggtagcgccgacatggaggccggcggcggcggcgagcgccgccacggacaacaggaggaacagtcatccgacgagcggcgcgcgcggttcgcggaggactggggctgctgcgcctgcgcctgcgcggggctattcctggggcccaacccgatggtggcgcgctacatgtacgcgctcatcttcctcgtcaccaacctcctcgcctggacgctccgcgactacggcgactccgcgctcgccgagctgcagcggctgaaggtctgccagggcgcgctctactgcctgggcgcggagggcgtgctgcgggtcagcctcggctgcttcgtcttcttcttcgtcatgttcctgtccaccgtgaaggccaggaaggtgcacgactgccgcaactcgtggcactccgagtggtggccggccaagctcgccctctggctcggcctcaccgccgtcaccttcctcgcgccgtcgccgctcgtccagctctacgggaaggtggcgcatttcggagcaggggctttcctggtgatccagctgatcagcgtcaccaggttcatcatgtggctcaacgactggtgccgcgcagagatgacccagaagagataccacttgcagattcaggcggtgtccatcgtcacgtacgtggggtcgctcctggggatcgtgctcatgtacgtgtggtacgcgcccagcccggcctgcaggctcaacatcctcttcatcaccgtcacgctggcgctcgtgcagctcatgaccttcgtctccatgagctccaaggtgaaggcagggtacgtggcgccggggctgatggggatctacgtcgtgttcctgtgctggtcggcgatcagaagcgagccgcacacggaggtttgcaacaggaaggcagaagtcgccacgagcgcagactgggtgaacatcgcgagctttgtgatcgccgtcgtcgtcatcgtggcggcgaccttctcgacggggatcgactccaagtgcctccagttcaagcaggcggagggggagtcggaggaggaggaggaggacgacatcccctacggcctcggcttcttccacctggtgttctccatgggcgccatgtacttcgccatgatcttcgtcggctggaacgcgaacgcgagccacaccatggagaggtggacgatcgacgtcgggtgggcgagcacgtgggtgcgcgtcggcaacgagtggctggcggcaatcgtgtacatatggatgatgatcgcgcccgtcatctggaagacgaggcaggtgggatcggcggcggagacgtgagcagtttttccgctgattctgagtttctgacagccggaatctatatatacatacaaacacaagagcaaatcaaagggacgggaaacgggaagaggtgctcgggtagtttttgctaagctggaggtgcagcagacaagacaacaagaaagaggaggcaactaaggagtagtactatactgatgccactagtccatcgtggagctcggttcaggaagctcatcgatctcgttgtacttgtaccgaactatctcaaaaaacatagtgcctgtttgtctggattgctgctcggccacaagcacagctgtctggcccggggcaccatccaaacaatcccatatagagcgtgtttggacgcagtcatgcgcttgggttttgcttttgcctgtctgtgcccggcagattcatgggcctgtaagcaaacacgtcccaattatctgaactcggaattatttacgcctcggcaagattcatcaactcaatttttttgtgaacaatcttattgtgttactaggtgaatgcccgtgcgttgctacggagtaaacatattatgataagatatattgaaattc

SEQ ID NO: 206388 - DNA, 1197 bp, Zea Mays
ctttagctgtcttaactgcactcacgggcgaaaagttttcggaaattgtgggaagcccatactacatggctcctgaagtcttgaagaggaactatggacctgaaatagacatatggagcgctggtgttatcttgtatattttgttatgtggtgttcctccattttgggctgagactgaacaaggagttgcacaagctattcttcggggaaatgtagattttaagcgagaaccctggcccaatgtttcagataatgctaaagatcttgttcggcagatgcttcaacctgatccaaagctcaggctaacagcaaagcaagttcttgagcatccctggcttcaaaatgctaagaaagctccaaacgttcctcttggagacattgtaaagtcaaggctgaaacagttttcaaggatgaacagattcaaaagaagagctctaagggttattgctgatcacttgtcggctgaagaggttcaggacataaaggagatgttcaaggtgatggatactgataatgatggtatagtttcttatgaagagttaaagagcgggatcgcaaattttggttctcatcttgcagaatcagaagtgcaaatgcttatcgaagctgtggatacaaatggtagaggagcactagattacggtgaatttttggctgtctcgctccatttacaaaggatggcaaatgacgagcaccttcggcgggccttcctatttttcgacaaggatggcaacggtttcatcgagcccgaggagcttcaggaagccctgatggaggacgggggagctgataccatggacgtggtcaatgacatattgcaagaagttgacacagacaaggatgggaaaattagctacgacgaatttgtagcgatgatgaaaactggcacggactggaggaaggcatcgcggcactattcaagagggcgcttcaatagccttagcataaagctgataaaagacgggtctgtaaagctgggtagcggcagccttttccagtgtcgctggggagcatctgctgaaggattgcacacctgcacgcctgctcatctcctccggtgtagtacctgacgctcaaaatgttgtaaaaatgttttggtgttgacctcaaatataatgcaatttgctcgctggtaccgtgtgctgtcaccctatactcatttgcacctacaaatcggtgaagagtaactatgacagt

SEQ ID NO: 206389 - DNA, 2820 bp, Zea Mays
gaaaattttcttcgaaccagttctgagcagtgtagccctcctgtccgctgttcggtgcccgctgcccacctccctctcctccttccgacctcgccgcctccctccctaaactctaaaccctccaccagccgaagctactgccgcggccgcagcagaggtcgcgacgacgaacgctgaagaagcgccggcgagggagagtcctttactttttcctatgctgtagcaaaacaagcctataccatcttccaaatatactcgttccgtgccggcggcctcccctcctacgcccctgtcgattcttcaatcttcaccaacgtctgcgcgtagcaggctagcagtcggcacggcttcctcagatctgccggacgacttgttgttcgtcaccgactcaccagcaaccaatgtcggccatcagccggcagcaggggaagctgggcggagggtcattgcggcacggcgtccaggcgtacagcaggcaccagcaacagcccatggcaaacgccgcagatgaccctatggtagatgaagccggagtagaagatgccttcacacatgagatcaccgattatttgtacgtccctagataccatgtgttgagttggatggaaactgtggaggggatggtggccggtgtggcggcgcttccgccggtgtatttgatactgaacagagatcttcttgagacgggatggggatggaagaggctggtgccctacagacctggttatgttgagtggcatgtgttcaagaaataccttggggactatttcgaccataatcgtgaagcttttctttgtgccgagcagaagcctgatccatttggatggattattgctgaaaagagtgccctgattgctgcagccaaattgtgcctcaagatggagaaggcacttctcaggtactgtgctagctttctcactcctgacgacaaaaggctgatcctcgggatcaaggaccaggcaaagcaaatgatccaatcagaggtgcttcaagcaatggttcaaatgggtgtccttgttcctactggagatatgactgttgtcagaagaaccgctcaatttttccttaatagctttcaagagtgcctaacagcacaaaggaaggagagagaaatggcaaccgcagaactgggtttcaaaaagcaattaactaaggaggagaagtttgaaaagaggaagcagagacttgctacaatcggagaggatcttttggcgattgctgctgatcaaccatttcgcttccctgccacatttacatttgtggtcagagcattctcagttctagatggtactgggaaaggccttcatcctaggtttcatattacagagattgctaagccctgaaaatgccaaggaattgctaagatttaatgacgctggtgttgaaatagttgtgaaggtgtgtggagagacatgtgtattcctcctatgacgaattcctcaggctccatgaaggtaagcctgtcttaatgggcttgattgttgaacctgacttagtacttttatccatgtcacgacattgaaccagacagtcactcatgtccttaggatattaacggtatacatcaacaattcattctattttaattgcttgcaaaacttttttggcccttcaaatgagttccacgcatcaagaagtcaagattccaggaggcctaaaataggagaggagggcgcagcttgattcaatccatgtcaagtcaaaggctgctgcgaagtttgcacatgcaagtagaatttagatggtgaggttttgtctctgttcccatttttataacgactaggtgtttgaattcctaagattaaagtttatgtagattcttatttgtaattagatctctgttaggcatctaactgaataaatgatctcctaaagaattgacagattccatcactgagcagcccttcgccccggtggctgcggtgtcgcactggctgacacctgctcgcagttgcattacaagttttactgactatgtattttcaggtttattcaatttcggttctaatgcttctgacagcagttgtatcagtcctcttgttcagcttacatgtatccctcgcatccttccttggatccacataagtgttaataataattttgttgcatctcctctgctgatcagagctttcaaactcatgacagaataatgtactaaacttcagtttggtgtctatctcagtgtacctacactcagttggaaaacttcaaccacactgcaacaaggtttataaaaggtttgctatcaggaaaaacaaatttatgggctcaaacaaagtgtgatagtgaaagtcattttgcttccagcttaagaaccaagccaagaaaacagatatcaactgtgacgccacactcaaaagcttgtttggtgggagggacaaggttgggatgctggagatctccaagcttttgagtcgtggcttcccgaaaatctccaagcttttgtggtccatggagccagggatggctctttggtaaaagacttcgttgtggatggcctcttttatggtccatgttaagtcccaagtcccactaggtggttaagcagaaaaatcttgtgatggcattaagactttcagactttgtttttgggtctgatgcatgtaaaaaggattcccagtgtttctgttgctcttgcgatcctgtgaggacacatatgagagaaatatttagtttgttgatggcaaatcttgtcttatgttcatgtctgtgcctatctgatcaagcgttatgatatgatcccatgcgtggtactgtgttctttagagatgtacttaattatgtttctcttgcatttcatattgctttgtctaattgtta

SEQ ID NO: 206390 - DNA, 2363 bp, Zea Mays
aaattttcttcgaaccagttctgagcagtgtagccctcctgtccgctgttcggtgcccgctgcccacctccctctcctccttccgacctcgccgcctccctccctaaactctaaaccctccaccagccgaagctactgccgcggccgcagcagaggtcgcgacgacgaacgctgaagaagcgccggcgagggagagtcctttactttttcctatgctgtagcaaaacaagcctataccatcttccaaatatactcgttccgtgccggcggcctcccctcctacgcccctgtcgattcttcaatcttcaccaacgtctgcgcgtagcaggctagcagtcggcacggcttcctcagatctgccggacgacttgttgttcgtcaccgactcaccagcaaccaatgtcggccatcagccggcagcaggggaagctgggcggagggtcattgcggcacggcgtccaggcgtacagcaggcaccagcaacagcccatggcaaacgccgcagatgaccctatggtagatgaagccggagtagaagatgccttcacacatgagatcaccgattatttgtacgtccctagataccatgtgttgagttggatggaaactgtggaggggatggtggccggtgtggcggcgcttccgccggtgtatttgatactgaacagagatcttcttgagacgggatggggatggaagaggctggtgccctacagacctggttatgttgagtggcatgtgttcaagaaataccttggggactatttcgaccataatcgtgaagcttttctttgtgccgagcagaagcctgatccatttggatggattattgctgaaaagagtgccctgattgctgcagccaaattgtgcctcaagatggagaaggcacttctcaggtactgtgctagctttctcactcctgacgacaaaaggctgatcctcgggatcaaggaccaggcaaagcaaatgatccaatcagaggtgcttcaagcaatggttcaaatgggtgtccttgttcctactggagatatgactgttgtcagaagaaccgctcaatttttccttaatagctttcaagagtgcctaacagcacaaaggaaggagagagaaatggcaaccgcagaactgggtttcaaaaagcaattaactaaggaggagaagtttgaaaagaggaagcagagacttgctacaatcggagaggatcttttggcgattgctgctgatcaaccatttcgcttccctgccacatttacatttgtggtcagagcattctcaggtgtgtggagagacatgtgtattcctcctatgacgaattcctcaggctccatgaaggtaagcctgtcttaatgggcttgattgttgaacctgacttagtacttttatccatgtcacgacattgaaccagacagtcactcatgtccttaggatattaacggtatacatcaacaattcattctattttaattgcttgcaaaacttttttggcccttcaaatgagttccacgcatcaagaagtcaagattccaggaggcctaaaataggagaggagggcgcagcttgattcaatccatgtcaagtcaaaggctgctgcgaagtttgcacatgcaagtagaatttagatggtttattcaatttcggttctaatgcttctgacagcagttgtatcagtcctcttgttcagcttacataataatgtactaaacttcagtttggtgtctatctcagtgtacctacactcagttggaaaacttcaaccacactgcaacaaggtttataaaaggtttgctatcaggaaaaacaaatttatgggctcaaacaaagtgtgatagtgaaagtcattttgcttccagcttaagaaccaagccaagaaaacagatatcaactgtgacgccacactcaaaagcttgtttggtgggagggacaaggttgggatgctggagatctccaagcttttgagtcgtggcttcccgaaaatctccaagcttttgtggtccatggagccagggatggctctttggtaaaagacttcgttgtggatggcctcttttatggtccatgttaagtcccaagtcccactaggtggttaagcagaaaaatcttgtgatggcattaagactttcagactttgtttttgggtctgatgcatgtaaaaaggattcccagtgtttctgttgctcttgcgatcctgtgaggacacatatgagagaaatatttagtttgttgatggcaaatcttgtcttatgttcatgtctgtgcctatctgatcaagcgttatgatatgatcccatgcgtggtactgtgttctttagagatgtacttaattatgtttctcttgcatttcatattgctttgtctaattgtta

SEQ ID NO: 206391 - DNA, 2413 bp, Zea Mays
attttcttcgaaccagttctgagcagtgtagccctcctgtccgctgttcggtgcccgctgcccacctccctctcctccttccgacctcgccgcctccctccctaaactctaaaccctccaccagccgaagctactgccgcggccgcagcagaggtcgcgacgacgaacgctgaagaagcgccggcgagggagagtcctttactttttcctatgctgtagcaaaacaagcctataccatcttccaaatatactcgttccgtgccggcggcctcccctcctacgcccctgtcgattcttcaatcttcaccaacgtctgcgcgtagcaggctagcagtcggcacggcttcctcagatctgccggacgacttgttgttcgtcaccgactcaccagcaaccaatgtcggccatcagccggcagcaggggaagctgggcggagggtcattgcggcacggcgtccaggcgtacagcaggcaccagcaacagcccatggcaaacgccgcagatgaccctatggtagatgaagccggagtagaagatgccttcacacatgagatcaccgattatttgtacgtccctagataccatgtgttgagttggatggaaactgtggaggggatggtggccggtgtggcggcgcttccgccggtgtatttgatactgaacagagatcttcttgagacgggatggggatggaagaggctggtgccctacagacctggttatgttgagtggcatgtgttcaagaaataccttggggactatttcgaccataatcgtgaagcttttctttgtgccgagcagaagcctgatccatttggatggattattgctgaaaagagtgccctgattgctgcagccaaattgtgcctcaagatggagaaggcacttctcaggtactgtgctagctttctcactcctgacgacaaaaggctgatcctcgggatcaaggaccaggcaaagcaaatgatccaatcagaggtgcttcaagcaatggttcaaatgggtgtccttgttcctactggagatatgactgttgtcagaagaaccgctcaatttttccttaatagctttcaagagtgcctaacagcacaaaggaaggagagagaaatggcaaccgcagaactgggtttcaaaaagcaattaactaaggaggagaagtttgaaaagaggaagcagagacttgctacaatcggagaggatcttttggcgattgctgctgatcaaccatttcgcttccctgccacatttacatttgtggtcagagcattctcagttctagatggtactgggaaaggccttcatcctagaaatgccaaggaattgctaagatttaatgacgctggtgttgaaatagttgtgaaggtgtgtggagagacatgtgtattcctcctatgacgaattcctcaggctccatgaaggtaagcctgtcttaatgggcttgattgttgaacctgacttagtacttttatccatgtcacgacattgaaccagacagtcactcatgtccttaggatattaacggtatacatcaacaattcattctattttaattgcttgcaaaacttttttggcccttcaaatgagttccacgcatcaagaagtcaagattccaggaggcctaaaataggagaggagggcgcagcttgattcaatccatgtcaagtcaaaggctgctgcgaagtttgcacatgcaagtagaatttagatggtttattcaatttcggttctaatgcttctgacagcagttgtatcagtcctcttgttcagcttacattgtacctacactcagttggaaaacttcaaccacactgcaacaaggtttataaaaggtttgctatcaggaaaaacaaatttatgggctcaaacaaagtgtgatagtgaaagtcattttgcttccagcttaagaaccaagccaagaaaacagatatcaactgtgacgccacactcaaaagcttgtttggtgggagggacaaggttgggatgctggagatctccaagcttttgagtcgtggcttcccgaaaatctccaagcttttgtggtccatggagccagggatggctctttggtaaaagacttcgttgtggatggcctcttttatggtccatgttaagtcccaagtcccactaggtggttaagcagaaaaatcttgtgatggcattaagactttcagactttgtttttgggtctgatgcatgtaaaaaggattcccagtgtttctgttgctcttgcgatcctgtgaggacacatatgagagaaatatttagtttgttgatggcaaatcttgtcttatgttcatgtctgtgcctatctgatcaagcgttatgatatgatcccatgcgtggtactgtgttctttagagatgtacttaattatgtttctcttgcatttcatattgctttgtctaattgtta

SEQ ID NO: 206392 - DNA, 2450 bp, Zea Mays
attttcttcgaaccagttctgagcagtgtagccctcctgtccgctgttcggtgcccgctgcccacctccctctcctccttccgacctcgccgcctccctccctaaactctaaaccctccaccagccgaagctactgccgcggccgcagcagaggtcgcgacgacgaacgctgaagaagcgccggcgagggagagtcctttactttttcctatgctgtagcaaaacaagcctataccatcttccaaatatactcgttccgtgccggcggcctcccctcctacgcccctgtcgattcttcaatcttcaccaacgtctgcgcgtagcaggctagcagtcggcacggcttcctcagatctgccggacgacttgttgttcgtcaccgactcaccagcaaccaatgtcggccatcagccggcagcaggggaagctgggcggagggtcattgcggcacggcgtccaggcgtacagcaggcaccagcaacagcccatggcaaacgccgcagatgaccctatggtagatgaagccggagtagaagatgccttcacacatgagatcaccgattatttgtacgtccctagataccatgtgttgagttggatggaaactgtggaggggatggtggccggtgtggcggcgcttccgccggtgtatttgatactgaacagagatcttcttgagacgggatggggatggaagaggctggtgccctacagacctggttatgttgagtggcatgtgttcaagaaataccttggggactatttcgaccataatcgtgaagcttttctttgtgccgagcagaagcctgatccatttggatggattattgctgaaaagagtgccctgattgctgcagccaaattgtgcctcaagatggagaaggcacttctcaggtactgtgctagctttctcactcctgacgacaaaaggctgatcctcgggatcaaggaccaggcaaagcaaatgatccaatcagaggtgcttcaagcaatggttcaaatgggtgtccttgttcctactggagatatgactgttgtcagaagaaccgctcaatttttccttaatagctttcaagagtgcctaacagcacaaaggaaggagagagaaatggcaaccgcagaactgggtttcaaaaagcaattaactaaggaggagaagtttgaaaagaggaagcagagacttgctacaatcggagaggatcttttggcgattgctgctgatcaaccatttcgcttccctgccacatttacatttgtggtcagagcattctcagttctagatggtactgggaaaggccttcatcctagaaatgccaaggaattgctaagatttaatgacgctggtgttgaaatagttgtgaaggtgtgtggagagacatgtgtattcctcctatgacgaattcctcaggctccatgaaggtaagcctgtcttaatgggcttgattgttgaacctgacttagtacttttatccatgtcacgacattgaaccagacagtcactcatgtccttaggatattaacggtatacatcaacaattcattctattttaattgcttgcaaaacttttttggcccttcaaatgagttccacgcatcaagaagtcaagattccaggaggcctaaaataggagaggagggcgcagcttgattcaatccatgtcaagtcaaaggctgctgcgaagtttgcacatgcaagtagaatttagatggtttattcaatttcggttctaatgcttctgacagcagttgtatcagtcctcttgttcagcttacataataatgtactaaacttcagtttggtgtctatctcagtgtacctacactcagttggaaaacttcaaccacactgcaacaaggtttataaaaggtttgctatcaggaaaaacaaatttatgggctcaaacaaagtgtgatagtgaaagtcattttgcttccagcttaagaaccaagccaagaaaacagatatcaactgtgacgccacactcaaaagcttgtttggtgggagggacaaggttgggatgctggagatctccaagcttttgagtcgtggcttcccgaaaatctccaagcttttgtggtccatggagccagggatggctctttggtaaaagacttcgttgtggatggcctcttttatggtccatgttaagtcccaagtcccactaggtggttaagcagaaaaatcttgtgatggcattaagactttcagactttgtttttgggtctgatgcatgtaaaaaggattcccagtgtttctgttgctcttgcgatcctgtgaggacacatatgagagaaatatttagtttgttgatggcaaatcttgtcttatgttcatgtctgtgcctatctgatcaagcgttatgatatgatcccatgcgtggtactgtgttctttagagatgtacttaattatgtttctcttgcatttcatattgctttgtctaattgtta

SEQ ID NO: 206393 - DNA, 2598 bp, Zea Mays
cttcgaaccagttctgagcagtgtagccctcctgtccgctgttcggtgcccgctgcccacctccctctcctccttccgacctcgccgcctccctccctaaactctaaaccctccaccagccgaagctactgccgcggccgcagcagaggtcgcgacgacgaacgctgaagaagcgccggcgagggagagtcctttactttttcctatgctgtagcaaaacaagcctataccatcttccaaatatactcgttccgtgccggcggcctcccctcctacgcccctgtcgattcttcaatcttcaccaacgtctgcgcgtagcaggctagcagtcggcacggcttcctcagatctgccggacgacttgttgttcgtcaccgactcaccagcaaccaatgtcggccatcagccggcagcaggggaagctgggcggagggtcattgcggcacggcgtccaggcgtacagcaggcaccagcaacagcccatggcaaacgccgcagatgaccctatggtagatgaagccggagtagaagatgccttcacacatgagatcaccgattatttgtacgtccctagataccatgtgttgagttggatggaaactgtggaggggatggtggccggtgtggcggcgcttccgccggtgtatttgatactgaacagagatcttcttgagacgggatggggatggaagaggctggtgccctacagacctggttatgttgagtggcatgtgttcaagaaataccttggggactatttcgaccataatcgtgaagcttttctttgtgccgagcagaagcctgatccatttggatggattattgctgaaaagagtgccctgattgctgcagccaaattgtgcctcaagatggagaaggcacttctcaggtactgtgctagctttctcactcctgacgacaaaaggctgatcctcgggatcaaggaccaggcaaagcaaatgatccaatcagaggtgcttcaagcaatggttcaaatgggtgtccttgttcctactggagatatgactgttgtcagaagaaccgctcaatttttccttaatagctttcaagagtgcctaacagcacaaaggaaggagagagaaatggcaaccgcagaactgggtttcaaaaagcaattaactaaggaggagaagtttgaaaagaggaagcagagacttgctacaatcggagaggatcttttggcgattgctgctgatcaaccatttcgcttccctgccacatttacatttgtggtcagagcattctcaggtgtgtggagagacatgtgtattcctcctatgacgaattcctcaggctccatgaaggtaagcctgtcttaatgggcttgattgttgaacctgacttagtacttttatccatgtcacgacattgaaccagacagtcactcatgtccttaggatattaacggtatacatcaacaattcattctattttaattgcttgcaaaacttttttggcccttcaaatgagttccacgcatcaagaagtcaagattccaggaggcctaaaataggagaggagggcgcagcttgattcaatccatgtcaagtcaaaggctgctgcgaagtttgcacatgcaagtagaatttagatggtgaggttttgtctctgttcccatttttataacgactaggtgtttgaattcctaagattaaagtttatgtagattcttatttgtaattagatctctgttaggcatctaactgaataaatgatctcctaaagaattgacagattccatcactgagcagcccttcgccccggtggctgcggtgtcgcactggctgacacctgctcgcagttgcattacaagttttactgactatgtattttcaggtttattcaatttcggttctaatgcttctgacagcagttgtatcagtcctcttgttcagcttacataataatgtactaaacttcagtttggtgtctatctcagtgtacctacactcagttggaaaacttcaaccacactgcaacaaggtttataaaaggtttgctatcaggaaaaacaaatttatgggctcaaacaaagtgtgatagtgaaagtcattttgcttccagcttaagaaccaagccaagaaaacagatatcaactgtgacgccacactcaaaagcttgtttggtgggagggacaaggttgggatgctggagatctccaagcttttgagtcgtggcttcccgaaaatctccaagcttttgtggtccatggagccagggatggctctttggtaaaagacttcgttgtggatggcctcttttatggtccatgttaagtcccaagtcccactaggtggttaagcagaaaaatcttgtgatggcattaagactttcagactttgtttttgggtctgatgcatgtaaaaaggattcccagtgtttctgttgctcttgcgatcctgtgaggacacatatgagagaaatatttagtttgttgatggcaaatcttgtcttatgttcatgtctgtgcctatctgatcaagcgttatgatatgatcccatgcgtggtactgtgttctttagagatgtacttaattatgtttctcttgcatttcatattgctttgtctaattgtta

SEQ ID NO: 206394 - DNA, 2312 bp, Zea Mays
ccagttctgagcagtgtagccctcctgtccgctgttcggtgcccgctgcccacctccctctcctccttccgacctcgccgcctccctccctaaactctaaaccctccaccagccgaagctactgccgcggccgcagcagaggtcgcgacgacgaacgctgaagaagcgccggcgagggagagtcctttactttttcctatgctgtagcaaaacaagcctataccatcttccaaatatactcgttccgtgccggcggcctcccctcctacgcccctgtcgattcttcaatcttcaccaacgtctgcgcgtagcaggctagcagtcggcacggcttcctcagatctgccggacgacttgttgttcgtcaccgactcaccagcaaccaatgtcggccatcagccggcagcaggggaagctgggcggagggtcattgcggcacggcgtccaggcgtacagcaggcaccagcaacagcccatggcaaacgccgcagatgaccctatggtagatgaagccggagtagaagatgccttcacacatgagatcaccgattatttgtacgtccctagataccatgtgttgagttggatggaaactgtggaggggatggtggccggtgtggcggcgcttccgccggtgtatttgatactgaacagagatcttcttgagacgggatggggatggaagaggctggtgccctacagacctggttatgttgagtggcatgtgttcaagaaataccttggggactatttcgaccataatcgtgaagcttttctttgtgccgagcagaagcctgatccatttggatggattattgctgaaaagagtgccctgattgctgcagccaaattgtgcctcaagatggagaaggcacttctcaggtactgtgctagctttctcactcctgacgacaaaaggctgatcctcgggatcaaggaccaggcaaagcaaatgatccaatcagaggtgcttcaagcaatggttcaaatgggtgtccttgttcctactggagatatgactgttgtcagaagaaccgctcaatttttccttaatagctttcaagagtgcctaacagcacaaaggaaggagagagaaatggcaaccgcagaactgggtttcaaaaagcaattaactaaggaggagaagtttgaaaagaggaagcagagacttgctacaatcggagaggatcttttggcgattgctgctgatcaaccatttcgcttccctgccacatttacatttgtggtcagagcattctcaggtgtgtggagagacatgtgtattcctcctatgacgaattcctcaggctccatgaaggtaagcctgtcttaatgggcttgattgttgaacctgacttagtacttttatccatgtcacgacattgaaccagacagtcactcatgtccttaggatattaacggtatacatcaacaattcattctattttaattgcttgcaaaacttttttggcccttcaaatgagttccacgcatcaagaagtcaagattccaggaggcctaaaataggagaggagggcgcagcttgattcaatccatgtcaagtcaaaggctgctgcgaagtttgcacatgcaagtagaatttagatggtttattcaatttcggttctaatgcttctgacagcagttgtatcagtcctcttgttcagcttacattgtacctacactcagttggaaaacttcaaccacactgcaacaaggtttataaaaggtttgctatcaggaaaaacaaatttatgggctcaaacaaagtgtgatagtgaaagtcattttgcttccagcttaagaaccaagccaagaaaacagatatcaactgtgacgccacactcaaaagcttgtttggtgggagggacaaggttgggatgctggagatctccaagcttttgagtcgtggcttcccgaaaatctccaagcttttgtggtccatggagccagggatggctctttggtaaaagacttcgttgtggatggcctcttttatggtccatgttaagtcccaagtcccactaggtggttaagcagaaaaatcttgtgatggcattaagactttcagactttgtttttgggtctgatgcatgtaaaaaggattcccagtgtttctgttgctcttgcgatcctgtgaggacacatatgagagaaatatttagtttgttgatggcaaatcttgtcttatgttcatgtctgtgcctatctgatcaagcgttatgatatgatcccatgcgtggtactgtgttctttagagatgtacttaattatgtttctcttgcatttcatattgctttgtctaattgtta

SEQ ID NO: 206395 - DNA, 2429 bp, Zea Mays
gttctgagcagtgtagccctcctgtccgctgttcggtgcccgctgcccacctccctctcctccttccgacctcgccgcctccctccctaaactctaaaccctccaccagccgaagctactgccgcggccgcagcagaggtcgcgacgacgaacgctgaagaagcgccggcgagggagagtcctttactttttcctatgctgtagcaaaacaagcctataccatcttccaaatatactcgttccgtgccggcggcctcccctcctacgcccctgtcgattcttcaatcttcaccaacgtctgcgcgtagcaggctagcagtcggcacggcttcctcagatctgccggacgacttgttgttcgtcaccgactcaccagcaaccaatgtcggccatcagccggcagcaggggaagctgggcggagggtcattgcggcacggcgtccaggcgtacagcaggcaccagcaacagcccatggcaaacgccgcagatgaccctatggtagatgaagccggagtagaagatgccttcacacatgagatcaccgattatttgtacgtccctagataccatgtgttgagttggatggaaactgtggaggggatggtggccggtgtggcggcgcttccgccggtgtatttgatactgaacagagatcttcttgagacgggatggggatggaagaggctggtgccctacagacctggttatgttgagtggcatgtgttcaagaaataccttggggactatttcgaccataatcgtgaagcttttctttgtgccgagcagaagcctgatccatttggatggattattgctgaaaagagtgccctgattgctgcagccaaattgtgcctcaagatggagaaggcacttctcaggtactgtgctagctttctcactcctgacgacaaaaggctgatcctcgggatcaaggaccaggcaaagcaaatgatccaatcagaggtgcttcaagcaatggttcaaatgggtgtccttgttcctactggagatatgactgttgtcagaagaaccgctcaatttttccttaatagctttcaagagtgcctaacagcacaaaggaaggagagagaaatggcaaccgcagaactgggtttcaaaaagcaattaactaaggaggagaagtttgaaaagaggaagcagagacttgctacaatcggagaggatcttttggcgattgctgctgatcaaccatttcgcttccctgccacatttacatttgtggtcagagcattctcagttctagatggtactgggaaaggccttcatcctaggtttcatattacagagattgctaagccctgaaaatgccaaggaattgctaagatttaatgacgctggtgttgaaatagttgtgaaggtgtgtggagagacatgtgtattcctcctatgacgaattcctcaggctccatgaaggtaagcctgtcttaatgggcttgattgttgaacctgacttagtacttttatccatgtcacgacattgaaccagacagtcactcatgtccttaggatattaacggtatacatcaacaattcattctattttaattgcttgcaaaacttttttggcccttcaaatgagttccacgcatcaagaagtcaagattccaggaggcctaaaataggagaggagggcgcagcttgattcaatccatgtcaagtcaaaggctgctgcgaagtttgcacatgcaagtagaatttagatggtttattcaatttcggttctaatgcttctgacagcagttgtatcagtcctcttgttcagcttacattgtacctacactcagttggaaaacttcaaccacactgcaacaaggtttataaaaggtttgctatcaggaaaaacaaatttatgggctcaaacaaagtgtgatagtgaaagtcattttgcttccagcttaagaaccaagccaagaaaacagatatcaactgtgacgccacactcaaaagcttgtttggtgggagggacaaggttgggatgctggagatctccaagcttttgagtcgtggcttcccgaaaatctccaagcttttgtggtccatggagccagggatggctctttggtaaaagacttcgttgtggatggcctcttttatggtccatgttaagtcccaagtcccactaggtggttaagcagaaaaatcttgtgatggcattaagactttcagactttgtttttgggtctgatgcatgtaaaaaggattcccagtgtttctgttgctcttgcgatcctgtgaggacacatatgagagaaatatttagtttgttgatggcaaatcttgtcttatgttcatgtctgtgcctatctgatcaagcgttatgatatgatcccatgcgtggtactgtgttctttagagatgtacttaattatgtttctcttgcatttcatattgctttgtctaattgtta

SEQ ID NO: 206396 - DNA, 2785 bp, Zea Mays
gttctgagcagtgtagccctcctgtccgctgttcggtgcccgctgcccacctccctctcctccttccgacctcgccgcctccctccctaaactctaaaccctccaccagccgaagctactgccgcggccgcagcagaggtcgcgacgacgaacgctgaagaagcgccggcgagggagagtcctttactttttcctatgctgtagcaaaacaagcctataccatcttccaaatatactcgttccgtgccggcggcctcccctcctacgcccctgtcgattcttcaatcttcaccaacgtctgcgcgtagcaggctagcagtcggcacggcttcctcagatctgccggacgacttgttgttcgtcaccgactcaccagcaaccaatgtcggccatcagccggcagcaggggaagctgggcggagggtcattgcggcacggcgtccaggcgtacagcaggcaccagcaacagcccatggcaaacgccgcagatgaccctatggtagatgaagccggagtagaagatgccttcacacatgagatcaccgattatttgtacgtccctagataccatgtgttgagttggatggaaactgtggaggggatggtggccggtgtggcggcgcttccgccggtgtatttgatactgaacagagatcttcttgagacgggatggggatggaagaggctggtgccctacagacctggttatgttgagtggcatgtgttcaagaaataccttggggactatttcgaccataatcgtgaagcttttctttgtgccgagcagaagcctgatccatttggatggattattgctgaaaagagtgccctgattgctgcagccaaattgtgcctcaagatggagaaggcacttctcaggtactgtgctagctttctcactcctgacgacaaaaggctgatcctcgggatcaaggaccaggcaaagcaaatgatccaatcagaggtagtgcagagaaacctgtgaagcagcgtgcttcaagcaatggttcaaatgggtgtccttgttcctactggagatatgactgttgtcagaagaaccgctcaatttttccttaatagctttcaagagtgcctaacagcacaaaggaaggagagagaaatggcaaccgcagaactgggtttcaaaaagcaattaactaaggaggagaagtttgaaaagaggaagcagagacttgctacaatcggagaggatcttttggcgattgctgctgatcaaccatttcgcttccctgccacatttacatttgtggtcagagcattctcagttctagatggtactgggaaaggccttcatcctagaaatgccaaggaattgctaagatttaatgacgctggtgttgaaatagttgtgaaggtgtgtggagagacatgtgtattcctcctatgacgaattcctcaggctccatgaaggtaagcctgtcttaatgggcttgattgttgaacctgacttagtacttttatccatgtcacgacattgaaccagacagtcactcatgtccttaggatattaacggtatacatcaacaattcattctattttaattgcttgcaaaacttttttggcccttcaaatgagttccacgcatcaagaagtcaagattccaggaggcctaaaataggagaggagggcgcagcttgattcaatccatgtcaagtcaaaggctgctgcgaagtttgcacatgcaagtagaatttagatggtgaggttttgtctctgttcccatttttataacgactaggtgtttgaattcctaagattaaagtttatgtagattcttatttgtaattagatctctgttaggcatctaactgaataaatgatctcctaaagaattgacagattccatcactgagcagcccttcgccccggtggctgcggtgtcgcactggctgacacctgctcgcagttgcattacaagttttactgactatgtattttcaggtttattcaatttcggttctaatgcttctgacagcagttgtatcagtcctcttgttcagcttacatgtatccctcgcatccttccttggatccacataagtgttaataataattttgttgcatctcctctgctgatcagagctttcaaactcatgacagaataatgtactaaacttcagtttggtgtctatctcagtgtacctacactcagttggaaaacttcaaccacactgcaacaaggtttataaaaggaaaaacaaatttatgggctcaaacaaagtgtgatagtgaaagtcattttgcttccagcttaagaaccaagccaagaaaacagatatcaactgtgacgccacactcaaaagcttgtttggtgggagggacaaggttgggatgctggagatctccaagcttttgagtcgtggcttcccgaaaatctccaagcttttgtggtccatggagccagggatggctctttggtaaaagacttcgttgtggatggcctcttttatggtccatgttaagtcccaagtcccactaggtggttaagcagaaaaatcttgtgatggcattaagactttcagactttgtttttgggtctgatgcatgtaaaaaggattcccagtgtttctgttgctcttgcgatcctgtgaggacacatatgagagaaatatttagtttgttgatggcaaatcttgtcttatgttcatgtctgtgcctatctgatcaagcgttatgatatgatcccatgcgtggtactgtgttctttagagatgtacttaattatgtttctcttgcatttcatattgctttgtctaattgtta

SEQ ID NO: 206397 - DNA, 2586 bp, Zea Mays
agcagtgtagccctcctgtccgctgttcggtgcccgctgcccacctccctctcctccttccgacctcgccgcctccctccctaaactctaaaccctccaccagccgaagctactgccgcggccgcagcagaggtcgcgacgacgaacgctgaagaagcgccggcgagggagagtcctttactttttcctatgctgtagcaaaacaagcctataccatcttccaaatatactcgttccgtgccggcggcctcccctcctacgcccctgtcgattcttcaatcttcaccaacgtctgcgcgtagcaggctagcagtcggcacggcttcctcagatctgccggacgacttgttgttcgtcaccgactcaccagcaaccaatgtcggccatcagccggcagcaggggaagctgggcggagggtcattgcggcacggcgtccaggcgtacagcaggcaccagcaacagcccatggcaaacgccgcagatgaccctatggtagatgaagccggagtagaagatgccttcacacatgagatcaccgattatttgtacgtccctagataccatgtgttgagttggatggaaactgtggaggggatggtggccggtgtggcggcgcttccgccggtgtatttgatactgaacagagatcttcttgagacgggatggggatggaagaggctggtgccctacagacctggttatgttgagtggcatgtgttcaagaaataccttggggactatttcgaccataatcgtgaagcttttctttgtgccgagcagaagcctgatccatttggatggattattgctgaaaagagtgccctgattgctgcagccaaattgtgcctcaagatggagaaggcacttctcaggtactgtgctagctttctcactcctgacgacaaaaggctgatcctcgggatcaaggaccaggcaaagcaaatgatccaatcagaggtgcttcaagcaatggttcaaatgggtgtccttgttcctactggagatatgactgttgtcagaagaaccgctcaatttttccttaatagctttcaagagtgcctaacagcacaaaggaaggagagagaaatggcaaccgcagaactgggtttcaaaaagcaattaactaaggaggagaagtttgaaaagaggaagcagagacttgctacaatcggagaggatcttttggcgattgctgctgatcaaccatttcgcttccctgccacatttacatttgtggtcagagcattctcagttctagatggtactgggaaaggccttcatcctaggtttcatattacagagattgctaagccctgagtactttttgcattactagcatctgaatacttattcaaaaacacacaaagcttgcacatcttcacttattatgtactgtctatattttcatcttgaacttttctggtactgacttgaaatgtctattaaatttgctagaaatgccaaggaattgctaagatttaatgacgctggtgttgaaatagttgtgaaggtgtgtggagagacatgtgtattcctcctatgacgaattcctcaggctccatgaaggtaagcctgtcttaatgggcttgattgttgaacctgacttagtacttttatccatgtcacgacattgaaccagacagtcactcatgtccttaggatattaacggtatacatcaacaattcattctattttaattgcttgcaaaacttttttggcccttcaaatgagttccacgcatcaagaagtcaagattccaggaggcctaaaataggagaggagggcgcagcttgattcaatccatgtcaagtcaaaggctgctgcgaagtttgcacatgcaagtagaatttagatggtttattcaatttcggttctaatgcttctgacagcagttgtatcagtcctcttgttcagcttacataataatgtactaaacttcagtttggtgtctatctcagtgtacctacactcagttggaaaacttcaaccacactgcaacaaggtttataaaaggaaaaacaaatttatgggctcaaacaaagtgtgatagtgaaagtcattttgcttccagcttaagaaccaagccaagaaaacagatatcaactgtgacgccacactcaaaagcttgtttggtgggagggacaaggttgggatgctggagatctccaagcttttgagtcgtggcttcccgaaaatctccaagcttttgtggtccatggagccagggatggctctttggtaaaagacttcgttgtggatggcctcttttatggtccatgttaagtcccaagtcccactaggtggttaagcagaaaaatcttgtgatggcattaagactttcagactttgtttttgggtctgatgcatgtaaaaaggattcccagtgtttctgttgctcttgcgatcctgtgaggacacatatgagagaaatatttagtttgttgatggcaaatcttgtcttatgttcatgtctgtgcctatctgatcaagcgttatgatatgatcccatgcgtggtactgtgttctttagagatgtacttaattatgtttctcttgcatttcatattgctttgtctaattgtta

SEQ ID NO: 206398 - DNA, 2311 bp, Zea Mays
gtccgctgttcggtgcccgctgcccacctccctctcctccttccgacctcgccgcctccctccctaaactctaaaccctccaccagccgaagctactgccgcggccgcagcagaggtcgcgacgacgaacgctgaagaagcgccggcgagggagagtcctttactttttcctatgctgtagcaaaacaagcctataccatcttccaaatatactcgttccgtgccggcggcctcccctcctacgcccctgtcgattcttcaatcttcaccaacgtctgcgcgtagcaggctagcagtcggcacggcttcctcagatctgccggacgacttgttgttcgtcaccgactcaccagcaaccaatgtcggccatcagccggcagcaggggaagctgggcggagggtcattgcggcacggcgtccaggcgtacagcaggcaccagcaacagcccatggcaaacgccgcagatgaccctatggtagatgaagccggagtagaagatgccttcacacatgagatcaccgattatttgtacgtccctagataccatgtgttgagttggatggaaactgtggaggggatggtggccggtgtggcggcgcttccgccggtgtatttgatactgaacagagatcttcttgagacgggatggggatggaagaggctggtgccctacagacctggttatgttgagtggcatgtgttcaagaaataccttggggactatttcgaccataatcgtgaagcttttctttgtgccgagcagaagcctgatccatttggatggattattgctgaaaagagtgccctgattgctgcagccaaattgtgcctcaagatggagaaggcacttctcaggtactgtgctagctttctcactcctgacgacaaaaggctgatcctcgggatcaaggaccaggcaaagcaaatgatccaatcagaggtgcttcaagcaatggttcaaatgggtgtccttgttcctactggagatatgactgttgtcagaagaaccgctcaatttttccttaatagctttcaagagtgcctaacagcacaaaggaaggagagagaaatggcaaccgcagaactgggtttcaaaaagcaattaactaaggaggagaagtttgaaaagaggaagcagagacttgctacaatcggagaggatcttttggcgattgctgctgatcaaccatttcgcttccctgccacatttacatttgtggtcagagcattctcaggtgtgtggagagacatgtgtattcctcctatgacgaattcctcaggctccatgaaggtaagcctgtcttaatgggcttgattgttgaacctgacttagtacttttatccatgtcacgacattgaaccagacagtcactcatgtccttaggatattaacggtatacatcaacaattcattctattttaattgcttgcaaaacttttttggcccttcaaatgagttccacgcatcaagaagtcaagattccaggaggcctaaaataggagaggagggcgcagcttgattcaatccatgtcaagtcaaaggctgctgcgaagtttgcacatgcaagtagaatttagatggtttattcaatttcggttctaatgcttctgacagcagttgtatcagtcctcttgttcagcttacataataatgtactaaacttcagtttggtgtctatctcagtgtacctacactcagttggaaaacttcaaccacactgcaacaaggtttataaaaggaaaaacaaatttatgggctcaaacaaagtgtgatagtgaaagtcattttgcttccagcttaagaaccaagccaagaaaacagatatcaactgtgacgccacactcaaaagcttgtttggtgggagggacaaggttgggatgctggagatctccaagcttttgagtcgtggcttcccgaaaatctccaagcttttgtggtccatggagccagggatggctctttggtaaaagacttcgttgtggatggcctcttttatggtccatgttaagtcccaagtcccactaggtggttaagcagaaaaatcttgtgatggcattaagactttcagactttgtttttgggtctgatgcatgtaaaaaggattcccagtgtttctgttgctcttgcgatcctgtgaggacacatatgagagaaatatttagtttgttgatggcaaatcttgtcttatgttcatgtctgtgcctatctgatcaagcgttatgatatgatcccatgcgtggtactgtgttctttagagatgtacttaattatgtttctcttgcatttcatattgctttgtctaattgtta

SEQ ID NO: 206399 - DNA, 2437 bp, Zea Mays
ccgctgttcggtgcccgctgcccacctccctctcctccttccgacctcgccgcctccctccctaaactctaaaccctccaccagccgaagctactgccgcggccgcagcagaggtcgcgacgacgaacgctgaagaagcgccggcgagggagagtcctttactttttcctatgctgtagcaaaacaagcctataccatcttccaaatatactcgttccgtgccggcggcctcccctcctacgcccctgtcgattcttcaatcttcaccaacgtctgcgcgtagcaggctagcagtcggcacggcttcctcagatctgccggacgacttgttgttcgtcaccgactcaccagcaaccaatgtcggccatcagccggcagcaggggaagctgggcggagggtcattgcggcacggcgtccaggcgtacagcaggcaccagcaacagcccatggcaaacgccgcagatgaccctatggtagatgaagccggagtagaagatgccttcacacatgagatcaccgattatttgtacgtccctagataccatgtgttgagttggatggaaactgtggaggggatggtggccggtgtggcggcgcttccgccggtgtatttgatactgaacagagatcttcttgagacgggatggggatggaagaggctggtgccctacagacctggttatgttgagtggcatgtgttcaagaaataccttggggactatttcgaccataatcgtgaagcttttctttgtgccgagcagaagcctgatccatttggatggattattgctgaaaagagtgccctgattgctgcagccaaattgtgcctcaagatggagaaggcacttctcaggtactgtgctagctttctcactcctgacgacaaaaggctgatcctcgggatcaaggaccaggcaaagcaaatgatccaatcagaggtgcttcaagcaatggttcaaatgggtgtccttgttcctactggagatatgactgttgtcagaagaaccgctcaatttttccttaatagctttcaagagtgcctaacagcacaaaggaaggagagagaaatggcaaccgcagaactgggtttcaaaaagcaattaactaaggaggagaagtttgaaaagaggaagcagagacttgctacaatcggagaggatcttttggcgattgctgctgatcaaccatttcgcttccctgccacatttacatttgtggtcagagcattctcagttctagatggtactgggaaaggccttcatcctaggtttcatattacagagattgctaagccctgagtactttttgcattactagcatctgaatacttattcaaaaacacacaaagcttgcacatcttcacttattatgtactgtctatattttcatcttgaacttttctggtactgacttgaaatgtctattaaatttgctagaaatgccaaggaattgctaagatttaatgacgctggtgttgaaatagttgtgaaggtgtgtggagagacatgtgtattcctcctatgacgaattcctcaggctccatgaaggatattaacggtatacatcaacaattcattctattttaattgcttgcaaaacttttttggcccttcaaatgagttccacgcatcaagaagtcaagattccaggaggcctaaaataggagaggagggcgcagcttgattcaatccatgtcaagtcaaaggctgctgcgaagtttgcacatgcaagtagaatttagatggtttattcaatttcggttctaatgcttctgacagcagttgtatcagtcctcttgttcagcttacattgtacctacactcagttggaaaacttcaaccacactgcaacaaggtttataaaaggaaaaacaaatttatgggctcaaacaaagtgtgatagtgaaagtcattttgcttccagcttaagaaccaagccaagaaaacagatatcaactgtgacgccacactcaaaagcttgtttggtgggagggacaaggttgggatgctggagatctccaagcttttgagtcgtggcttcccgaaaatctccaagcttttgtggtccatggagccagggatggctctttggtaaaagacttcgttgtggatggcctcttttatggtccatgttaagtcccaagtcccactaggtggttaagcagaaaaatcttgtgatggcattaagactttcagactttgtttttgggtctgatgcatgtaaaaaggattcccagtgtttctgttgctcttgcgatcctgtgaggacacatatgagagaaatatttagtttgttgatggcaaatcttgtcttatgttcatgtctgtgcctatctgatcaagcgttatgatatgatcccatgcgtggtactgtgttctttagagatgtacttaattatgtttctcttgcatttcatattgctttgtctaattgtta

SEQ ID NO: 206400 - DNA, 2568 bp, Zea Mays
cgctgttcggtgcccgctgcccacctccctctcctccttccgacctcgccgcctccctccctaaactctaaaccctccaccagccgaagctactgccgcggccgcagcagaggtcgcgacgacgaacgctgaagaagcgccggcgagggagagtcctttactttttcctatgctgtagcaaaacaagcctataccatcttccaaatatactcgttccgtgccggcggcctcccctcctacgcccctgtcgattcttcaatcttcaccaacgtctgcgcgtagcaggctagcagtcggcacggcttcctcagatctgccggacgacttgttgttcgtcaccgactcaccagcaaccaatgtcggccatcagccggcagcaggggaagctgggcggagggtcattgcggcacggcgtccaggcgtacagcaggcaccagcaacagcccatggcaaacgccgcagatgaccctatggtagatgaagccggagtagaagatgccttcacacatgagatcaccgattatttgtacgtccctagataccatgtgttgagttggatggaaactgtggaggggatggtggccggtgtggcggcgcttccgccggtgtatttgatactgaacagagatcttcttgagacgggatggggatggaagaggctggtgccctacagacctggttatgttgagtggcatgtgttcaagaaataccttggggactatttcgaccataatcgtgaagcttttctttgtgccgagcagaagcctgatccatttggatggattattgctgaaaagagtgccctgattgctgcagccaaattgtgcctcaagatggagaaggcacttctcaggtactgtgctagctttctcactcctgacgacaaaaggctgatcctcgggatcaaggaccaggcaaagcaaatgatccaatcagaggtagtgcagagaaacctgtgaagcagcgtgcttcaagcaatggttcaaatgggtgtccttgttcctactggagatatgactgttgtcagaagaaccgctcaatttttccttaatagctttcaagagtgcctaacagcacaaaggaaggagagagaaatggcaaccgcagaactgggtttcaaaaagcaattaactaaggaggagaagtttgaaaagaggaagcagagacttgctacaatcggagaggatcttttggcgattgctgctgatcaaccatttcgcttccctgccacatttacatttgtggtcagagcattctcagttctagatggtactgggaaaggccttcatcctaggtttcatattacagagattgctaagccctgagtactttttgcattactagcatctgaatacttattcaaaaacacacaaagcttgcacatcttcacttattatgtactgtctatattttcatcttgaacttttctggtactgacttgaaatgtctattaaatttgctagaaatgccaaggaattgctaagatttaatgacgctggtgttgaaatagttgtgaaggtgtgtggagagacatgtgtattcctcctatgacgaattcctcaggctccatgaaggtaagcctgtcttaatgggcttgattgttgaacctgacttagtacttttatccatgtcacgacattgaaccagacagtcactcatgtccttaggatattaacggtatacatcaacaattcattctattttaattgcttgcaaaacttttttggcccttcaaatgagttccacgcatcaagaagtcaagattccaggaggcctaaaataggagaggagggcgcagcttgattcaatccatgtcaagtcaaaggctgctgcgaagtttgcacatgcaagtagaatttagatggtttattcaatttcggttctaatgcttctgacagcagttgtatcagtcctcttgttcagcttacattgtacctacactcagttggaaaacttcaaccacactgcaacaaggtttataaaaggtttgctatcaggaaaaacaaatttatgggctcaaacaaagtgtgatagtgaaagtcattttgcttccagcttaagaaccaagccaagaaaacagatatcaactgtgacgccacactcaaaagcttgtttggtgggagggacaaggttgggatgctggagatctccaagcttttgagtcgtggcttcccgaaaatctccaagcttttgtggtccatggagccagggatggctctttggtaaaagacttcgttgtggatggcctcttttatggtccatgttaagtcccaagtcccactaggtggttaagcagaaaaatcttgtgatggcattaagactttcagactttgtttttgggtctgatgcatgtaaaaaggattcccagtgtttctgttgctcttgcgatcctgtgaggacacatatgagagaaatatttagtttgttgatggcaaatcttgtcttatgttcatgtctgtgcctatctgatcaagcgttatgatatgatcccatgcgtggtactgtgttctttagagatgtacttaattatgtttctcttgcatttcatattgctttgtctaattgtta

SEQ ID NO: 206401 - DNA, 2440 bp, Zea Mays
cgctgttcggtgcccgctgcccacctccctctcctccttccgacctcgccgcctccctccctaaactctaaaccctccaccagccgaagctactgccgcggccgcagcagaggtcgcgacgacgaacgctgaagaagcgccggcgagggagagtcctttactttttcctatgctgtagcaaaacaagcctataccatcttccaaatatactcgttccgtgccggcggcctcccctcctacgcccctgtcgattcttcaatcttcaccaacgtctgcgcgtagcaggctagcagtcggcacggcttcctcagatctgccggacgacttgttgttcgtcaccgactcaccagcaaccaatgtcggccatcagccggcagcaggggaagctgggcggagggtcattgcggcacggcgtccaggcgtacagcaggcaccagcaacagcccatggcaaacgccgcagatgaccctatggtagatgaagccggagtagaagatgccttcacacatgagatcaccgattatttgtacgtccctagataccatgtgttgagttggatggaaactgtggaggggatggtggccggtgtggcggcgcttccgccggtgtatttgatactgaacagagatcttcttgagacgggatggggatggaagaggctggtgccctacagacctggttatgttgagtggcatgtgttcaagaaataccttggggactatttcgaccataatcgtgaagcttttctttgtgccgagcagaagcctgatccatttggatggattattgctgaaaagagtgccctgattgctgcagccaaattgtgcctcaagatggagaaggcacttctcaggtactgtgctagctttctcactcctgacgacaaaaggctgatcctcgggatcaaggaccaggcaaagcaaatgatccaatcagaggtgcttcaagcaatggttcaaatgggtgtccttgttcctactggagatatgactgttgtcagaagaaccgctcaatttttccttaatagctttcaagagtgcctaacagcacaaaggaaggagagagaaatggcaaccgcagaactgggtttcaaaaagcaattaactaaggaggagaagtttgaaaagaggaagcagagacttgctacaatcggagaggatcttttggcgattgctgctgatcaaccatttcgcttccctgccacatttacatttgtggtcagagcattctcagttctagatggtactgggaaaggccttcatcctaggtttcatattacagagattgctaagccctgaaaatgccaaggaattgctaagatttaatgacgctggtgttgaaatagttgtgaaggtgtgtggagagacatgtgtattcctcctatgacgaattcctcaggctccatgaaggtaagcctgtcttaatgggcttgattgttgaacctgacttagtacttttatccatgtcacgacattgaaccagacagtcactcatgtccttaggatattaacggtatacatcaacaattcattctattttaattgcttgcaaaacttttttggcccttcaaatgagttccacgcatcaagaagtcaagattccaggaggcctaaaataggagaggagggcgcagcttgattcaatccatgtcaagtcaaaggctgctgcgaagtttgcacatgcaagtagaatttagatggtttattcaatttcggttctaatgcttctgacagcagttgtatcagtcctcttgttcagcttacataataatgtactaaacttcagtttggtgtctatctcagtgtacctacactcagttggaaaacttcaaccacactgcaacaaggtttataaaaggtttgctatcaggaaaaacaaatttatgggctcaaacaaagtgtgatagtgaaagtcattttgcttccagcttaagaaccaagccaagaaaacagatatcaactgtgacgccacactcaaaagcttgtttggtgggagggacaaggttgggatgctggagatctccaagcttttgagtcgtggcttcccgaaaatctccaagcttttgtggtccatggagccagggatggctctttggtaaaagacttcgttgtggatggcctcttttatggtccatgttaagtcccaagtcccactaggtggttaagcagaaaaatcttgtgatggcattaagactttcagactttgtttttgggtctgatgcatgtaaaaaggattcccagtgtttctgttgctcttgcgatcctgtgaggacacatatgagagaaatatttagtttgttgatggcaaatcttgtcttatgttcatgtctgtgcctatctgatcaagcgttatgatatgatcccatgcgtggtactgtgttctttagagatgtacttaattatgtttctcttgcatttcatattgctttgtctaattgtta

SEQ ID NO: 206402 - DNA, 2546 bp, Zea Mays
gttcggtgcccgctgcccacctccctctcctccttccgacctcgccgcctccctccctaaactctaaaccctccaccagccgaagctactgccgcggccgcagcagaggtcgcgacgacgaacgctgaagaagcgccggcgagggagagtcctttactttttcctatgctgtagcaaaacaagcctataccatcttccaaatatactcgttccgtgccggcggcctcccctcctacgcccctgtcgattcttcaatcttcaccaacgtctgcgcgtagcaggctagcagtcggcacggcttcctcagatctgccggacgacttgttgttcgtcaccgactcaccagcaaccaatgtcggccatcagccggcagcaggggaagctgggcggagggtcattgcggcacggcgtccaggcgtacagcaggcaccagcaacagcccatggcaaacgccgcagatgaccctatggtagatgaagccggagtagaagatgccttcacacatgagatcaccgattatttgtacgtccctagataccatgtgttgagttggatggaaactgtggaggggatggtggccggtgtggcggcgcttccgccggtgtatttgatactgaacagagatcttcttgagacgggatggggatggaagaggctggtgccctacagacctggttatgttgagtggcatgtgttcaagaaataccttggggactatttcgaccataatcgtgaagcttttctttgtgccgagcagaagcctgatccatttggatggattattgctgaaaagagtgccctgattgctgcagccaaattgtgcctcaagatggagaaggcacttctcaggtactgtgctagctttctcactcctgacgacaaaaggctgatcctcgggatcaaggaccaggcaaagcaaatgatccaatcagaggtgcttcaagcaatggttcaaatgggtgtccttgttcctactggagatatgactgttgtcagaagaaccgctcaatttttccttaatagctttcaagagtgcctaacagcacaaaggaaggagagagaaatggcaaccgcagaactgggtttcaaaaagcaattaactaaggaggagaagtttgaaaagaggaagcagagacttgctacaatcggagaggatcttttggcgattgctgctgatcaaccatttcgcttccctgccacatttacatttgtggtcagagcattctcaggtgtgtggagagacatgtgtattcctcctatgacgaattcctcaggctccatgaaggtaagcctgtcttaatgggcttgattgttgaacctgacttagtacttttatccatgtcacgacattgaaccagacagtcactcatgtccttaggatattaacggtatacatcaacaattcattctattttaattgcttgcaaaacttttttggcccttcaaatgagttccacgcatcaagaagtcaagattccaggaggcctaaaataggagaggagggcgcagcttgattcaatccatgtcaagtcaaaggctgctgcgaagtttgcacatgcaagtagaatttagatggtgaggttttgtctctgttcccatttttataacgactaggtgtttgaattcctaagattaaagtttatgtagattcttatttgtaattagatctctgttaggcatctaactgaataaatgatctcctaaagaattgacagattccatcactgagcagcccttcgccccggtggctgcggtgtcgcactggctgacacctgctcgcagttgcattacaagttttactgactatgtattttcaggtttattcaatttcggttctaatgcttctgacagcagttgtatcagtcctcttgttcagcttacataataatgtactaaacttcagtttggtgtctatctcagtgtacctacactcagttggaaaacttcaaccacactgcaacaaggtttataaaaggaaaaacaaatttatgggctcaaacaaagtgtgatagtgaaagtcattttgcttccagcttaagaaccaagccaagaaaacagatatcaactgtgacgccacactcaaaagcttgtttggtgggagggacaaggttgggatgctggagatctccaagcttttgagtcgtggcttcccgaaaatctccaagcttttgtggtccatggagccagggatggctctttggtaaaagacttcgttgtggatggcctcttttatggtccatgttaagtcccaagtcccactaggtggttaagcagaaaaatcttgtgatggcattaagactttcagactttgtttttgggtctgatgcatgtaaaaaggattcccagtgtttctgttgctcttgcgatcctgtgaggacacatatgagagaaatatttagtttgttgatggcaaatcttgtcttatgttcatgtctgtgcctatctgatcaagcgttatgatatgatcccatgcgtggtactgtgttctttagagatgtacttaattatgtttctcttgcatttcatattgctttgtctaattgtta

SEQ ID NO: 206403 - DNA, 2314 bp, Zea Mays
ctccttccgacctcgccgcctccctccctaaactctaaaccctccaccagccgaagctactgccgcggccgcagcagaggtcgcgacgacgaacgctgaagaagcgccggcgagggagagtcctttactttttcctatgctgtagcaaaacaagcctataccatcttccaaatatactcgttccgtgccggcggcctcccctcctacgcccctgtcgattcttcaatcttcaccaacgtctgcgcgtagcaggctagcagtcggcacggcttcctcagatctgccggacgacttgttgttcgtcaccgactcaccagcaaccaatgtcggccatcagccggcagcaggggaagctgggcggagggtcattgcggcacggcgtccaggcgtacagcaggcaccagcaacagcccatggcaaacgccgcagatgaccctatggtagatgaagccggagtagaagatgccttcacacatgagatcaccgattatttgtacgtccctagataccatgtgttgagttggatggaaactgtggaggggatggtggccggtgtggcggcgcttccgccggtgtatttgatactgaacagagatcttcttgagacgggatggggatggaagaggctggtgccctacagacctggttatgttgagtggcatgtgttcaagaaataccttggggactatttcgaccataatcgtgaagcttttctttgtgccgagcagaagcctgatccatttggatggattattgctgaaaagagtgccctgattgctgcagccaaattgtgcctcaagatggagaaggcacttctcaggtactgtgctagctttctcactcctgacgacaaaaggctgatcctcgggatcaaggaccaggcaaagcaaatgatccaatcagaggtagtgcagagaaacctgtgaagcagcgtgcttcaagcaatggttcaaatgggtgtccttgttcctactggagatatgactgttgtcagaagaaccgctcaatttttccttaatagctttcaagagtgcctaacagcacaaaggaaggagagagaaatggcaaccgcagaactgggtttcaaaaagcaattaactaaggaggagaagtttgaaaagaggaagcagagacttgctacaatcggagaggatcttttggcgattgctgctgatcaaccatttcgcttccctgccacatttacatttgtggtcagagcattctcaggtgtgtggagagacatgtgtattcctcctatgacgaattcctcaggctccatgaaggtaagcctgtcttaatgggcttgattgttgaacctgacttagtacttttatccatgtcacgacattgaaccagacagtcactcatgtccttaggatattaacggtatacatcaacaattcattctattttaattgcttgcaaaacttttttggcccttcaaatgagttccacgcatcaagaagtcaagattccaggaggcctaaaataggagaggagggcgcagcttgattcaatccatgtcaagtcaaaggctgctgcgaagtttgcacatgcaagtagaatttagatggtttattcaatttcggttctaatgcttctgacagcagttgtatcagtcctcttgttcagcttacataataatgtactaaacttcagtttggtgtctatctcagtgtacctacactcagttggaaaacttcaaccacactgcaacaaggtttataaaaggtttgctatcaggaaaaacaaatttatgggctcaaacaaagtgtgatagtgaaagtcattttgcttccagcttaagaaccaagccaagaaaacagatatcaactgtgacgccacactcaaaagcttgtttggtgggagggacaaggttgggatgctggagatctccaagcttttgagtcgtggcttcccgaaaatctccaagcttttgtggtccatggagccagggatggctctttggtaaaagacttcgttgtggatggcctcttttatggtccatgttaagtcccaagtcccactaggtggttaagcagaaaaatcttgtgatggcattaagactttcagactttgtttttgggtctgatgcatgtaaaaaggattcccagtgtttctgttgctcttgcgatcctgtgaggacacatatgagagaaatatttagtttgttgatggcaaatcttgtcttatgttcatgtctgtgcctatctgatcaagcgttatgatatgatcccatgcgtggtactgtgttctttagagatgtacttaattatgtttctcttgcatttcatattgctttgtctaattgtta

SEQ ID NO: 206404 - DNA, 2833 bp, Zea Mays
ctccttccgacctcgccgcctccctccctaaactctaaaccctccaccagccgaagctactgccgcggccgcagcagaggtcgcgacgacgaacgctgaagaagcgccggcgagggagagtcctttactttttcctatgctgtagcaaaacaagcctataccatcttccaaatatactcgttccgtgccggcggcctcccctcctacgcccctgtcgattcttcaatcttcaccaacgtctgcgcgtagcaggctagcagtcggcacggcttcctcagatctgccggacgacttgttgttcgtcaccgactcaccagcaaccaatgtcggccatcagccggcagcaggggaagctgggcggagggtcattgcggcacggcgtccaggcgtacagcaggcaccagcaacagcccatggcaaacgatgaccctatggtagatgaagccggagtagaagatgccttcacacatgagatcaccgattatttgtacgtccctagataccatgtgttgagttggatggaaactgtggaggggatggtggccggtgtggcggcgcttccgccggtgtatttgatactgaacagagatcttcttgagacgggatggggatggaagaggctggtgccctacagacctggttatgttgagtggcatgtgttcaagaaataccttggggactatttcgaccataatcgtgaagcttttctttgtgccgagcagaagcctgatccatttggatggattattgctgaaaagagtgccctgattgctgcagccaaattgtgcctcaagatggagaaggcacttctcaggtactgtgctagctttctcactcctgacgacaaaaggctgatcctcgggatcaaggaccaggcaaagcaaatgatccaatcagaggtgcttcaagcaatggttcaaatgggtgtccttgttcctactggagatatgactgttgtcagaagaaccgctcaatttttccttaataggtaattacttttccttgaatttttattttcctcgagcctgcttgagagttgtgtgttatttcattaacgaaaaaagagtaaccaaatacaacactgcccatgagaagatgttaccttgtagttatagcagatggagtctgttgaactggatgagcatggtgttttttgaacaagatgagcatgatgtttggctttgttcttttttcatctattatttatagctttcaagagtgcctaacagcacaaaggaaggagagagaaatggcaaccgcagaactgggtttcaaaaagcaattaactaaggaggagaagtttgaaaagaggaagcagagacttgctacaatcggagaggatcttttggcgattgctgctgatcaaccatttcgcttccctgccacatttacatttgtggtcagagcattctcagttctagatggtactgggaaaggccttcatcctagaaatgccaaggaattgctaagatttaatgacgctggtgttgaaatagttgtgaaggtgtgtggagagacatgtgtattcctcctatgacgaattcctcaggctccatgaaggatattaacggtatacatcaacaattcattctattttaattgcttgcaaaacttttttggcccttcaaatgagttccacgcatcaagaagtcaagattccaggaggcctaaaataggagaggagggcgcagcttgattcaatccatgtcaagtcaaaggctgctgcgaagtttgcacatgcaagtagaatttagatggtgaggttttgtctctgttcccatttttataacgactaggtgtttgaattcctaagattaaagtttatgtagattcttatttgtaattagatctctgttaggcatctaactgaataaatgatctcctaaagaattgacagattccatcactgagcagcccttcgccccggtggctgcggtgtcgcactggctgacacctgctcgcagttgcattacaagttttactgactatgtattttcaggtttattcaatttcggttctaatgcttctgacagcagttgtatcagtcctcttgttcagcttacatgtatccctcgcatccttccttggatccacataagtgttaataataattttgttgcatctcctctgctgatcagagctttcaaactcatgacagaataatgtactaaacttcagtttggtgtctatctcagtgtacctacactcagttggaaaacttcaaccacactgcaacaaggtttataaaaggtttgctatcaggaaaaacaaatttatgggctcaaacaaagtgtgatagtgaaagtcattttgcttccagcttaagaaccaagccaagaaaacagatatcaactgtgacgccacactcaaaagcttgtttggtgggagggacaaggttgggatgctggagatctccaagcttttgagtcgtggcttcccgaaaatctccaagcttttgtggtccatggagccagggatggctctttggtaaaagacttcgttgtggatggcctcttttatggtccatgttaagtcccaagtcccactaggtggttaagcagaaaaatcttgtgatggcattaagactttcagactttgtttttgggtctgatgcatgtaaaaaggattcccagtgtttctgttgctcttgcgatcctgtgaggacacatatgagagaaatatttagtttgttgatggcaaatcttgtcttatgttcatgtctgtgcctatctgatcaagcgttatgatatgatcccatgcgtggtactgtgttctttagagatgtacttaattatgtttctcttgcatttcatattgctttgtctaattgtta

SEQ ID NO: 206405 - DNA, 2238 bp, Zea Mays
ctccttccgacctcgccgcctccctccctaaactctaaaccctccaccagccgaagctactgccgcggccgcagcagaggtcgcgacgacgaacgctgaagaagcgccggcgagggagagtcctttactttttcctatgctgtagcaaaacaagcctataccatcttccaaatatactcgttccgtgccggcggcctcccctcctacgcccctgtcgattcttcaatcttcaccaacgtctgcgcgtagcaggctagcagtcggcacggcttcctcagatctgccggacgacttgttgttcgtcaccgactcaccagcaaccaatgtcggccatcagccggcagcaggggaagctgggcggagggtcattgcggcacggcgtccaggcgtacagcaggcaccagcaacagcccatggcaaacgccgcagatgaccctatggtagatgaagccggagtagaagatgccttcacacatgagatcaccgattatttgtacgtccctagataccatgtgttgagttggatggaaactgtggaggggatggtggccggtgtggcggcgcttccgccggtgtatttgatactgaacagagatcttcttgagacgggatggggatggaagaggctggtgccctacagacctggttatgttgagtggcatgtgttcaagaaataccttggggactatttcgaccataatcgtgaagcttttctttgtgccgagcagaagcctgatccatttggatggattattgctgaaaagagtgccctgattgctgcagccaaattgtgcctcaagatggagaaggcacttctcaggtactgtgctagctttctcactcctgacgacaaaaggctgatcctcgggatcaaggaccaggcaaagcaaatgatccaatcagaggtgcttcaagcaatggttcaaatgggtgtccttgttcctactggagatatgactgttgtcagaagaaccgctcaatttttccttaatagctttcaagagtgcctaacagcacaaaggaaggagagagaaatggcaaccgcagaactgggtttcaaaaagcaattaactaaggaggagaagtttgaaaagaggaagcagagacttgctacaatcggagaggatcttttggcgattgctgctgatcaaccatttcgcttccctgccacatttacatttgtggtcagagcattctcaggtgtgtggagagacatgtgtattcctcctatgacgaattcctcaggctccatgaaggtaagcctgtcttaatgggcttgattgttgaacctgacttagtacttttatccatgtcacgacattgaaccagacagtcactcatgtccttaggatattaacggtatacatcaacaattcattctattttaattgcttgcaaaacttttttggcccttcaaatgagttccacgcatcaagaagtcaagattccaggaggcctaaaataggagaggagggcgcagcttgattcaatccatgtcaagtcaaaggctgctgcgaagtttgcacatgcaagtagaatttagatggtttattcaatttcggttctaatgcttctgacagcagttgtatcagtcctcttgttcagcttacattgtacctacactcagttggaaaacttcaaccacactgcaacaaggtttataaaaggaaaaacaaatttatgggctcaaacaaagtgtgatagtgaaagtcattttgcttccagcttaagaaccaagccaagaaaacagatatcaactgtgacgccacactcaaaagcttgtttggtgggagggacaaggttgggatgctggagatctccaagcttttgagtcgtggcttcccgaaaatctccaagcttttgtggtccatggagccagggatggctctttggtaaaagacttcgttgtggatggcctcttttatggtccatgttaagtcccaagtcccactaggtggttaagcagaaaaatcttgtgatggcattaagactttcagactttgtttttgggtctgatgcatgtaaaaaggattcccagtgtttctgttgctcttgcgatcctgtgaggacacatatgagagaaatatttagtttgttgatggcaaatcttgtcttatgttcatgtctgtgcctatctgatcaagcgttatgatatgatcccatgcgtggtactgtgttctttagagatgtacttaattatgtttctcttgcatttcatattgctttgtctaattgtta

SEQ ID NO: 206406 - DNA, 2769 bp, Zea Mays
ctccttccgacctcgccgcctccctccctaaactctaaaccctccaccagccgaagctactgccgcggccgcagcagaggtcgcgacgacgaacgctgaagaagcgccggcgagggagagtcctttactttttcctatgctgtagcaaaacaagcctataccatcttccaaatatactcgttccgtgccggcggcctcccctcctacgcccctgtcgattcttcaatcttcaccaacgtctgcgcgtagcaggctagcagtcggcacggcttcctcagatctgccggacgacttgttgttcgtcaccgactcaccagcaaccaatgtcggccatcagccggcagcaggggaagctgggcggagggtcattgcggcacggcgtccaggcgtacagcaggcaccagcaacagcccatggcaaacgccgcagatgaccctatggtagatgaagccggagtagaagatgccttcacacatgagatcaccgattatttgtacgtccctagataccatgtgttgagttggatggaaactgtggaggggatggtggccggtgtggcggcgcttccgccggtgtatttgatactgaacagagatcttcttgagacgggatggggatggaagaggctggtgccctacagacctggttatgttgagtggcatgtgttcaagaaataccttggggactatttcgaccataatcgtgaagcttttctttgtgccgagcagaagcctgatccatttggatggattattgctgaaaagagtgccctgattgctgcagccaaattgtgcctcaagatggagaaggcacttctcaggtactgtgctagctttctcactcctgacgacaaaaggctgatcctcgggatcaaggaccaggcaaagcaaatgatccaatcagaggtagtgcagagaaacctgtgaagcagcgtgcttcaagcaatggttcaaatgggtgtccttgttcctactggagatatgactgttgtcagaagaaccgctcaatttttccttaatagctttcaagagtgcctaacagcacaaaggaaggagagagaaatggcaaccgcagaactgggtttcaaaaagcaattaactaaggaggagaagtttgaaaagaggaagcagagacttgctacaatcggagaggatcttttggcgattgctgctgatcaaccatttcgcttccctgccacatttacatttgtggtcagagcattctcagttctagatggtactgggaaaggccttcatcctaggtttcatattacagagattgctaagccctgaaaatgccaaggaattgctaagatttaatgacgctggtgttgaaatagttgtgaaggtgtgtggagagacatgtgtattcctcctatgacgaattcctcaggctccatgaaggtaagcctgtcttaatgggcttgattgttgaacctgacttagtacttttatccatgtcacgacattgaaccagacagtcactcatgtccttaggatattaacggtatacatcaacaattcattctattttaattgcttgcaaaacttttttggcccttcaaatgagttccacgcatcaagaagtcaagattccaggaggcctaaaataggagaggagggcgcagcttgattcaatccatgtcaagtcaaaggctgctgcgaagtttgcacatgcaagtagaatttagatggtgaggttttgtctctgttcccatttttataacgactaggtgtttgaattcctaagattaaagtttatgtagattcttatttgtaattagatctctgttaggcatctaactgaataaatgatctcctaaagaattgacagattccatcactgagcagcccttcgccccggtggctgcggtgtcgcactggctgacacctgctcgcagttgcattacaagttttactgactatgtattttcaggtttattcaatttcggttctaatgcttctgacagcagttgtatcagtcctcttgttcagcttacatgtatccctcgcatccttccttggatccacataagtgttaataataattttgttgcatctcctctgctgatcagagctttcaaactcatgacagaataatgtactaaacttcagtttggtgtctatctcagtgtacctacactcagttggaaaacttcaaccacactgcaacaaggtttataaaaggtttgctatcaggaaaaacaaatttatgggctcaaacaaagtgtgatagtgaaagtcattttgcttccagcttaagaaccaagccaagaaaacagatatcaactgtgacgccacactcaaaagcttgtttggtgggagggacaaggttgggatgctggagatctccaagcttttgagtcgtggcttcccgaaaatctccaagcttttgtggtccatggagccagggatggctctttggtaaaagacttcgttgtggatggcctcttttatggtccatgttaagtcccaagtcccactaggtggttaagcagaaaaatcttgtgatggcattaagactttcagactttgtttttgggtctgatgcatgtaaaaaggattcccagtgtttctgttgctcttgcgatcctgtgaggacacatatgagagaaatatttagtttgttgatggcaaatcttgtcttatgttcatgtctgtgcctatctgatcaagcgttatgatatgatcccatgcgtggtactgtgttctttagagatgtacttaattatgtttctcttgcatttcatattgctttgtctaattgtta

SEQ ID NO: 206407 - DNA, 2529 bp, Zea Mays
ctccttccgacctcgccgcctccctccctaaactctaaaccctccaccagccgaagctactgccgcggccgcagcagaggtcgcgacgacgaacgctgaagaagcgccggcgagggagagtcctttactttttcctatgctgtagcaaaacaagcctataccatcttccaaatatactcgttccgtgccggcggcctcccctcctacgcccctgtcgattcttcaatcttcaccaacgtctgcgcgtagcaggctagcagtcggcacggcttcctcagatctgccggacgacttgttgttcgtcaccgactcaccagcaaccaatgtcggccatcagccggcagcaggggaagctgggcggagggtcattgcggcacggcgtccaggcgtacagcaggcaccagcaacagcccatggcaaacgccgcagatgaccctatggtagatgaagccggagtagaagatgccttcacacatgagatcaccgattatttgtacgtccctagataccatgtgttgagttggatggaaactgtggaggggatggtggccggtgtggcggcgcttccgccggtgtatttgatactgaacagagatcttcttgagacgggatggggatggaagaggctggtgccctacagacctggttatgttgagtggcatgtgttcaagaaataccttggggactatttcgaccataatcgtgaagcttttctttgtgccgagcagaagcctgatccatttggatggattattgctgaaaagagtgccctgattgctgcagccaaattgtgcctcaagatggagaaggcacttctcaggtactgtgctagctttctcactcctgacgacaaaaggctgatcctcgggatcaaggaccaggcaaagcaaatgatccaatcagaggtgcttcaagcaatggttcaaatgggtgtccttgttcctactggagatatgactgttgtcagaagaaccgctcaatttttccttaatagctttcaagagtgcctaacagcacaaaggaaggagagagaaatggcaaccgcagaactgggtttcaaaaagcaattaactaaggaggagaagtttgaaaagaggaagcagagacttgctacaatcggagaggatcttttggcgattgctgctgatcaaccatttcgcttccctgccacatttacatttgtgttctagatggtactgggaaaggccttcatcctaggtttcatattacagagattgctaagccctgagtactttttgcattactagcatctgaatacttattcaaaaacacacaaagcttgcacatcttcacttattatgtactgtctatattttcatcttgaacttttctggtactgacttgaaatgtctattaaatttgctagaaatgccaaggaattgctaagatttaatgacgctggtgttgaaatagttgtgaaggtgtgtggagagacatgtgtattcctcctatgacgaattcctcaggctccatgaaggtaagcctgtcttaatgggcttgattgttgaacctgacttagtacttttatccatgtcacgacattgaaccagacagtcactcatgtccttaggatattaacggtatacatcaacaattcattctattttaattgcttgcaaaacttttttggcccttcaaatgagttccacgcatcaagaagtcaagattccaggaggcctaaaataggagaggagggcgcagcttgattcaatccatgtcaagtcaaaggctgctgcgaagtttgcacatgcaagtagaatttagatggtttattcaatttcggttctaatgcttctgacagcagttgtatcagtcctcttgttcagcttacataataatgtactaaacttcagtttggtgtctatctcagtgtacctacactcagttggaaaacttcaaccacactgcaacaaggtttataaaaggtttgctatcaggaaaaacaaatttatgggctcaaacaaagtgtgatagtgaaagtcattttgcttccagcttaagaaccaagccaagaaaacagatatcaactgtgacgccacactcaaaagcttgtttggtgggagggacaaggttgggatgctggagatctccaagcttttgagtcgtggcttcccgaaaatctccaagcttttgtggtccatggagccagggatggctctttggtaaaagacttcgttgtggatggcctcttttatggtccatgttaagtcccaagtcccactaggtggttaagcagaaaaatcttgtgatggcattaagactttcagactttgtttttgggtctgatgcatgtaaaaaggattcccagtgtttctgttgctcttgcgatcctgtgaggacacatatgagagaaatatttagtttgttgatggcaaatcttgtcttatgttcatgtctgtgcctatctgatcaagcgttatgatatgatcccatgcgtggtactgtgttctttagagatgtacttaattatgtttctcttgcatttcatattgctttgtctaattgtta

SEQ ID NO: 206408 - DNA, 2302 bp, Zea Mays
ctccttccgacctcgccgcctccctccctaaactctaaaccctccaccagccgaagctactgccgcggccgcagcagaggtcgcgacgacgaacgctgaagaagcgccggcgagggagagtcctttactttttcctatgctgtagcaaaacaagcctataccatcttccaaatatactcgttccgtgccggcggcctcccctcctacgcccctgtcgattcttcaatcttcaccaacgtctgcgcgtagcaggctagcagtcggcacggcttcctcagatctgccggacgacttgttgttcgtcaccgactcaccagcaaccaatgtcggccatcagccggcagcaggggaagctgggcggagggtcattgcggcacggcgtccaggcgtacagcaggcaccagcaacagcccatggcaaacgccgcagatgaccctatggtagatgaagccggagtagaagatgccttcacacatgagatcaccgattatttgtacgtccctagataccatgtgttgagttggatggaaactgtggaggggatggtggccggtgtggcggcgcttccgccggtgtatttgatactgaacagagatcttcttgagacgggatggggatggaagaggctggtgccctacagacctggttatgttgagtggcatgtgttcaagaaataccttggggactatttcgaccataatcgtgaagcttttctttgtgccgagcagaagcctgatccatttggatggattattgctgaaaagagtgccctgattgctgcagccaaattgtgcctcaagatggagaaggcacttctcaggtactgtgctagctttctcactcctgacgacaaaaggctgatcctcgggatcaaggaccaggcaaagcaaatgatccaatcagaggtagtgcagagaaacctgtgaagcagcgtgcttcaagcaatggttcaaatgggtgtccttgttcctactggagatatgactgttgtcagaagaaccgctcaatttttccttaatagctttcaagagtgcctaacagcacaaaggaaggagagagaaatggcaaccgcagaactgggtttcaaaaagcaattaactaaggaggagaagtttgaaaagaggaagcagagacttgctacaatcggagaggatcttttggcgattgctgctgatcaaccatttcgcttccctgccacatttacatttgtggtcagagcattctcaggtgtgtggagagacatgtgtattcctcctatgacgaattcctcaggctccatgaaggtaagcctgtcttaatgggcttgattgttgaacctgacttagtacttttatccatgtcacgacattgaaccagacagtcactcatgtccttaggatattaacggtatacatcaacaattcattctattttaattgcttgcaaaacttttttggcccttcaaatgagttccacgcatcaagaagtcaagattccaggaggcctaaaataggagaggagggcgcagcttgattcaatccatgtcaagtcaaaggctgctgcgaagtttgcacatgcaagtagaatttagatggtttattcaatttcggttctaatgcttctgacagcagttgtatcagtcctcttgttcagcttacataataatgtactaaacttcagtttggtgtctatctcagtgtacctacactcagttggaaaacttcaaccacactgcaacaaggtttataaaaggaaaaacaaatttatgggctcaaacaaagtgtgatagtgaaagtcattttgcttccagcttaagaaccaagccaagaaaacagatatcaactgtgacgccacactcaaaagcttgtttggtgggagggacaaggttgggatgctggagatctccaagcttttgagtcgtggcttcccgaaaatctccaagcttttgtggtccatggagccagggatggctctttggtaaaagacttcgttgtggatggcctcttttatggtccatgttaagtcccaagtcccactaggtggttaagcagaaaaatcttgtgatggcattaagactttcagactttgtttttgggtctgatgcatgtaaaaaggattcccagtgtttctgttgctcttgcgatcctgtgaggacacatatgagagaaatatttagtttgttgatggcaaatcttgtcttatgttcatgtctgtgcctatctgatcaagcgttatgatatgatcccatgcgtggtactgtgttctttagagatgtacttaattatgtttctcttgcatttcatattgctttgtctaattgtta

SEQ ID NO: 206409 - DNA, 2937 bp, Zea Mays
ctccttccgacctcgccgcctccctccctaaactctaaaccctccaccagccgaagctactgccgcggccgcagcagaggtcgcgacgacgaacgctgaagaagcgccggcgagggagagtcctttactttttcctatgctgtagcaaaacaagcctataccatcttccaaatatactcgttccgtgccggcggcctcccctcctacgcccctgtcgattcttcaatcttcaccaacgtctgcgcgtagcaggctagcagtcggcacggcttcctcagatctgccggacgacttgttgttcgtcaccgactcaccagcaaccaatgtcggccatcagccggcagcaggggaagctgggcggagggtcattgcggcacggcgtccaggcgtacagcaggcaccagcaacagcccatggcaaacgatgaccctatggtagatgaagccggagtagaagatgccttcacacatgagatcaccgattatttgtacgtccctagataccatgtgttgagttggatggaaactgtggaggggatggtggccggtgtggcggcgcttccgccggtgtatttgatactgaacagagatcttcttgagacgggatggggatggaagaggctggtgccctacagacctggttatgttgagtggcatgtgttcaagaaataccttggggactatttcgaccataatcgtgaagcttttctttgtgccgagcagaagcctgatccatttggatggattattgctgaaaagagtgccctgattgctgcagccaaattgtgcctcaagatggagaaggcacttctcaggtactgtgctagctttctcactcctgacgacaaaaggctgatcctcgggatcaaggaccaggcaaagcaaatgatccaatcagaggtagtgcagagaaacctgtgaagcagcgtacgtgatgagtaggagatatgttttcataagctaagctgccatctcctttcactagacttattaattggtctgtcgtctatacacgtaaggaccatatatttaccggccggagaaactcccgctggtttttggaggcagctgcacacgggcacaaaggggtcgttgtattcaattagggttctctcacagtagctgagacgtacgtgtacgttggccaaatatcttttatacgagtcatctatcattgatttagattatctatcattgttccaaaaattcagttactaagaggcagactaagaaaaggtaaagatatttgtactttcttttataggagcagatgaaggcataatatccccacttagacaaatttatctccatattgcaatttaaatggtagcagtagatcattaatccagtatcagtcaaaatattcgggaaggattgcttgaagtattctatggagtttatgaaaaggatcctgacaaagttagttctcagggcataatatcctgcagatgatagtttataccctgtgatgttctgggaagtgttgaatcttgtattcctgcaggtgcttcaagcaatggttcaaatgggtgtccttgttcctactggagatatgactgttgtcagaagaaccgctcaatttttccttaatagctttcaagagtgcctaacagcacaaaggaaggagagagaaatggcaaccgcagaactgggtttcaaaaagcaattaactaaggaggagaagtttgaaaagaggaagcagagacttgctacaatcggagaggatcttttggcgattgctgctgatcaaccatttcgcttccctgccacatttacatttgtggtcagagcattctcagttctagatggtactgggaaaggccttcatcctagaaatgccaaggaattgctaagatttaatgacgctggtgttgaaatagttgtgaaggtgtgtggagagacatgtgtattcctcctatgacgaattcctcaggctccatgaaggtaagcctgtcttaatgggcttgattgttgaacctgacttagtacttttatccatgtcacgacattgaaccagacagtcactcatgtccttaggatattaacggtatacatcaacaattcattctattttaattgcttgcaaaacttttttggcccttcaaatgagttccacgcatcaagaagtcaagattccaggaggcctaaaataggagaggagggcgcagcttgattcaatccatgtcaagtcaaaggctgctgcgaagtttgcacatgcaagtagaatttagatggtttattcaatttcggttctaatgcttctgacagcagttgtatcagtcctcttgttcagcttacattgtacctacactcagttggaaaacttcaaccacactgcaacaaggtttataaaaggtttgctatcaggaaaaacaaatttatgggctcaaacaaagtgtgatagtgaaagtcattttgcttccagcttaagaaccaagccaagaaaacagatatcaactgtgacgccacactcaaaagcttgtttggtgggagggacaaggttgggatgctggagatctccaagcttttgagtcgtggcttcccgaaaatctccaagcttttgtggtccatggagccagggatggctctttggtaaaagacttcgttgtggatggcctcttttatggtccatgttaagtcccaagtcccactaggtggttaagcagaaaaatcttgtgatggcattaagactttcagactttgtttttgggtctgatgcatgtaaaaaggattcccagtgtttctgttgctcttgcgatcctgtgaggacacatatgagagaaatatttagtttgttgatggcaaatcttgtcttatgttcatgtctgtgcctatctgatcaagcgttatgatatgatcccatgcgtggtactgtgttctttagagatgtacttaattatgtttctcttgcatttcatattgctttgtctaattgtta

SEQ ID NO: 206410 - DNA, 2775 bp, Zea Mays
ctccttccgacctcgccgcctccctccctaaactctaaaccctccaccagccgaagctactgccgcggccgcagcagaggtcgcgacgacgaacgctgaagaagcgccggcgagggagagtcctttactttttcctatgctgtagcaaaacaagcctataccatcttccaaatatactcgttccgtgccggcggcctcccctcctacgcccctgtcgattcttcaatcttcaccaacgtctgcgcgtagcaggctagcagtcggcacggcttcctcagatctgccggacgacttgttgttcgtcaccgactcaccagcaaccaatgtcggccatcagccggcagcaggggaagctgggcggagggtcattgcggcacggcgtccaggcgtacagcaggcaccagcaacagcccatggcaaacgccgcagatgaccctatggtagatgaagccggagtagaagatgccttcacacatgagatcaccgattatttgtacgtccctagataccatgtgttgagttggatggaaactgtggaggggatggtggccggtgtggcggcgcttccgccggtgtatttgatactgaacagagatcttcttgagacgggatggggatggaagaggctggtgccctacagacctggttatgttgagtggcatgtgttcaagaaataccttggggactatttcgaccataatcgtgaagcttttctttgtgccgagcagaagcctgatccatttggatggattattgctgaaaagagtgccctgattgctgcagccaaattgtgcctcaagatggagaaggcacttctcaggtactgtgctagctttctcactcctgacgacaaaaggctgatcctcgggatcaaggaccaggcaaagcaaatgatccaatcagaggtgcttcaagcaatggttcaaatgggtgtccttgttcctactggagatatgactgttgtcagaagaaccgctcaatttttccttaatagctttcaagagtgcctaacagcacaaaggaaggagagagaaatggcaaccgcagaactgggtttcaaaaagcaattaactaaggaggagaagtttgaaaagaggaagcagagacttgctacaatcggagaggatcttttggcgattgctgctgatcaaccatttcgcttccctgccacatttacatttgtggtcagagcattctcagttctagatggtactgggaaaggccttcatcctaggtttcatattacagagattgctaagccctgagtactttttgcattactagcatctgaatacttattcaaaaacacacaaagcttgcacatcttcacttattatgtactgtctatattttcatcttgaacttttctggtactgacttgaaatgtctattaaatttgctagaaatgccaaggaattgctaagatttaatgacgctggtgttgaaatagttgtgaaggtgtgtggagagacatgtgtattcctcctatgacgaattcctcaggctccatgaaggtaagcctgtcttaatgggcttgattgttgaacctgacttagtacttttatccatgtcacgacattgaaccagacagtcactcatgtccttaggatattaacggtatacatcaacaattcattctattttaattgcttgcaaaacttttttggcccttcaaatgagttccacgcatcaagaagtcaagattccaggaggcctaaaataggagaggagggcgcagcttgattcaatccatgtcaagtcaaaggctgctgcgaagtttgcacatgcaagtagaatttagatggtgaggttttgtctctgttcccatttttataacgactaggtgtttgaattcctaagattaaagtttatgtagattcttatttgtaattagatctctgttaggcatctaactgaataaatgatctcctaaagaattgacagattccatcactgagcagcccttcgccccggtggctgcggtgtcgcactggctgacacctgctcgcagttgcattacaagttttactgactatgtattttcaggtttattcaatttcggttctaatgcttctgacagcagttgtatcagtcctcttgttcagcttacataataatgtactaaacttcagtttggtgtctatctcagtgtacctacactcagttggaaaacttcaaccacactgcaacaaggtttataaaaggaaaaacaaatttatgggctcaaacaaagtgtgatagtgaaagtcattttgcttccagcttaagaaccaagccaagaaaacagatatcaactgtgacgccacactcaaaagcttgtttggtgggagggacaaggttgggatgctggagatctccaagcttttgagtcgtggcttcccgaaaatctccaagcttttgtggtccatggagccagggatggctctttggtaaaagacttcgttgtggatggcctcttttatggtccatgttaagtcccaagtcccactaggtggttaagcagaaaaatcttgtgatggcattaagactttcagactttgtttttgggtctgatgcatgtaaaaaggattcccagtgtttctgttgctcttgcgatcctgtgaggacacatatgagagaaatatttagtttgttgatggcaaatcttgtcttatgttcatgtctgtgcctatctgatcaagcgttatgatatgatcccatgcgtggtactgtgttctttagagatgtacttaattatgtttctcttgcatttcatattgctttgtctaattgtta

SEQ ID NO: 206411 - DNA, 1894 bp, Zea Mays
gggttctctcacagtagctgagacgtgcttcaagcaatggttcaaatgggtgtccttgttcctactggagatatgactgttgtcagaagaaccgctcaatttttccttaatagctttcaagagtgcctaacagcacaaaggaaggagagagaaatggcaaccgcagaactgggtttcaaaaagcaattaactaaggaggagaagtttgaaaagaggaagcagagacttgctacaatcggagaggatcttttggcgattgctgctgatcaaccatttcgcttccctgccacatttacatttgtggtcagagcattctcagttctagatggtactgggaaaggccttcatcctaggtttcatattacagagattgctaagccctgagtactttttgcattactagcatctgaatacttattcaaaaacacacaaagcttgcacatcttcacttattatgtactgtctatattttcatcttgaacttttctggtactgacttgaaatgtctattaaatttgctagaaatgccaaggaattgctaagatttaatgacgctggtgttgaaatagttgtgaaggtgtgtggagagacatgtgtattcctcctatgacgaattcctcaggctccatgaaggatattaacggtatacatcaacaattcattctattttaattgcttgcaaaacttttttggcccttcaaatgagttccacgcatcaagaagtcaagattccaggaggcctaaaataggagaggagggcgcagcttgattcaatccatgtcaagtcaaaggctgctgcgaagtttgcacatgcaagtagaatttagatggtgaggttttgtctctgttcccatttttataacgactaggtgtttgaattcctaagattaaagtttatgtagattcttatttgtaattagatctctgttaggcatctaactgaataaatgatctcctaaagaattgacagattccatcactgagcagcccttcgccccggtggctgcggtgtcgcactggctgacacctgctcgcagttgcattacaagttttactgactatgtattttcaggtttattcaatttcggttctaatgcttctgacagcagttgtatcagtcctcttgttcagcttacatgtatccctcgcatccttccttggatccacataagtgttaataataattttgttgcatctcctctgctgatcagagctttcaaactcatgacagaataatgtactaaacttcagtttggtgtctatctcagtgtacctacactcagttggaaaacttcaaccacactgcaacaaggtttataaaaggaaaaacaaatttatgggctcaaacaaagtgtgatagtgaaagtcattttgcttccagcttaagaaccaagccaagaaaacagatatcaactgtgacgccacactcaaaagcttgtttggtgggagggacaaggttgggatgctggagatctccaagcttttgagtcgtggcttcccgaaaatctccaagcttttgtggtccatggagccagggatggctctttggtaaaagacttcgttgtggatggcctcttttatggtccatgttaagtcccaagtcccactaggtggttaagcagaaaaatcttgtgatggcattaagactttcagactttgtttttgggtctgatgcatgtaaaaaggattcccagtgtttctgttgctcttgcgatcctgtgaggacacatatgagagaaatatttagtttgttgatggcaaatcttgtcttatgttcatgtctgtgcctatctgatcaagcgttatgatatgatcccatgcgtggtactgtgttctttagagatgtacttaattatgtttctcttgcatttcatattgctttgtctaattgtta

SEQ ID NO: 206412 - DNA, 1414 bp, Zea Mays
agatggtactgggaaaggccttcatcctagaaatgccaaggaattgctaagatttaatgacgctggtgttgaaatagttgtgaaggtgtgtggagagacatgtgtattcctcctatgacgaattcctcaggctccatgaaggatattaacggtatacatcaacaattcattctattttaattgcttgcaaaacttttttggcccttcaaatgagttccacgcatcaagaagtcaagattccaggaggcctaaaataggagaggagggcgcagcttgattcaatccatgtcaagtcaaaggctgctgcgaagtttgcacatgcaagtagaatttagatggtgaggttttgtctctgttcccatttttataacgactaggtgtttgaattcctaagattaaagtttatgtagattcttatttgtaattagatctctgttaggcatctaactgaataaatgatctcctaaagaattgacagattccatcactgagcagcccttcgccccggtggctgcggtgtcgcactggctgacacctgctcgcagttgcattacaagttttactgactatgtattttcaggtttattcaatttcggttctaatgcttctgacagcagttgtatcagtcctcttgttcagcttacatgtatccctcgcatccttccttggatccacataagtgttaataataattttgttgcatctcctctgctgatcagagctttcaaactcatgacagaataatgtactaaacttcagtttggtgtctatctcagtgtacctacactcagttggaaaacttcaaccacactgcaacaaggtttataaaaggtttgctatcaggaaaaacaaatttatgggctcaaacaaagtgtgatagtgaaagtcattttgcttccagcttaagaaccaagccaagaaaacagatatcaactgtgacgccacactcaaaagcttgtttggtgggagggacaaggttgggatgctggagatctccaagcttttgagtcgtggcttcccgaaaatctccaagcttttgtggtccatggagccagggatggctctttggtaaaagacttcgttgtggatggcctcttttatggtccatgttaagtcccaagtcccactaggtggttaagcagaaaaatcttgtgatggcattaagactttcagactttgtttttgggtctgatgcatgtaaaaaggattcccagtgtttctgttgctcttgcgatcctgtgaggacacatatgagagaaatatttagtttgttgatggcaaatcttgtcttatgttcatgtctgtgcctatctgatcaagcgttatgatatgatcccatgcgtggtactgtgttctttagagatgtacttaattatgtttctcttgcatttcatattgctttgtctaattgtta

SEQ ID NO: 206413 - DNA, 2261 bp, Zea Mays
ccttcatcctaggtttcatattacagagattgctaagccctgagtactttttgcattactagcatctgaatacttattcaaaaacacacaaagcttgcacatcttcacttattatgtactgtctatattttcatcttgaacttttctggtactgacttgaaatgtctattaaatttgctagaaatgccaaggaattgctaagatttaatgacgctggtgttgaaatagttgtgaaggtgtgtggagagacatgtgtattcctcctatgacgaattcctcaggctccatgaaggtaagcctgtcttaatgggcttgattgttgaacctgacttagtacttttatccatgtcacgacattgaaccagacagtcactcatgtccttaggatattaacggtatacatcaacaattcattctattttaattgcttgcaaaacttttttggcccttcaaatgagttccacgcatcaagaagtcaagattccaggaggcctaaaataggagaggagggcgcagcttgattcaatccatgtcaagtcaaaggctgctgcgaagtttgcacatgcaagtagaatttagatggtgaggttttgtctctgttcccatttttataacgactaggtgtttgaattcctaagattaaagtttatgtagattcttatttgtaattagatctctgttaggcatctaactgaataaatgatctcctaaagaattgacagattccatcactgagcagcccttcgccccggtggctgcggtgtcgcactggctgacacctgctcgcagttgcattacaagttttactgactatgtattttcaggtttattcaatttcggttctaatgcttctgacagcagttgtatcagtcctcttgttcagcttacatgtatccctcgcatccttccttggatccacataagtgttaataataattttgttgcatctcctctgctgatcagagctttcaaactcatgacagaataatgtactaaacttcagtttggtgtctatctcagtgtacctacactcagttggaaaacttcaaccacactgcaacaaggtttataaaaggtttgctatcaggaaaaacaaatttatgggctcaaacaaagtgtgatagtgaaagtcattttgcttccagcttaaggccaaggcggatgaggcggccgcggcggcgggatccaagtcaggcggccatgagttgctgatgtttgaggcccttcgtgaagccttgatagaagagatgaatttggatccaacagtgtgcgtcatgggtgaagatgttggtcattatggaggttcatacaaggtgaccaaagggttggctgagatgttcggagatctccgggtccttgatacccctatcgccgagaactccttcactggcatgggagttggagcagcaatgaaggggctgaggcctgttgtggaaggcatgaacatgggtttccttctccttgcctacaaccagatctcgaacaaccaggtgagcacgtgaccatcctcacgtactcccgcatgaggtaccacgtgatgcaggctgccaagacgctggtgaacaaggggtacgaccccgaggtcatcgacatcaggtcgctgaagccgttcgacctgcacacgatcgggaactcgatcaagaagacccaccgcgtgctgatcgtggaggagtgcatgcggacgggcggcatcggcgccagcctgcggtcggccatcatcgacaacttctgggactacctggacgcccccatcatgtgcctgtcgtcgcaggacgtgccgaccccgtacgccgcgacgctggaggacgccaccgtggtgcagcccgcgcagatcgtggccgccgtcgagcagatctgccaatgatcagtgatatcatggctttgttgagtacctgatctgtggagtcagattaccgtggttttgtttctctgtcgcatcgcgactgtcaccgtgccttagacaagacatgtttttgtattttgcaacgcagaagccatactcgtactggatgccgtttgtgggtggcctatttgttcattgtgcaaagttggatgccatactcgtacactattattatcaggtttcagcattcgtttgtactttgtagcagcgccgtgttgcgctgtcggcatgacgttgaattcactcctgcacctgaattttgttggttatattttagattttttaattattcctctatgtactagttctacggagagacaaaaaacccactcgggcattgtattttggtcgtcccatc

SEQ ID NO: 206414 - DNA, 1370 bp, Zea Mays
ttgtttaacacgtatatctctgctcgagagcttcggaagcggatgcgcgacgcgttttcctcgtcctggctatccacggttgccacggcggcgtacgactaccaacagatccgcggtgggcggagtaccttgcgagctccgccgtcctgccgcacctcttctcccacccctatgtccgcgcgcacctccagcaaaagttctaccgccgcttcgtcgattctgatttttctgttggaggaatgtcctcaaccacatctattcagccctcagcatcttcaggtggtgcatctacttcagctgatgagaatgcaaggcctcctgattcagcacgaagcatattgtctctacagttggaccagcggtcattacatttttctgttagtgcttgggttcttattgttgccttgattggcatctttccattggcaccacattcccttcagtataagggatatcggttgtcacttcttggcacaacatgtactacaggctatgctttgtttgctttgtacaggctaccccgagcagggaacatgcaggctgttcaggtgtggtgtcaccatgtaactgcatcaaaggattttataccattcatgtactgccttatgttttctacatccaaactgcacttgaagcttgttttggtacctgtaatttgttgggcacttgaacatgtcgctcgatttctacgtcgccattttactagctcatctttgtacaggacatacttggagcaaccttgtacatgggttgagacaaacacaaatgcagtccagtttctacgttcaaatgcagagattttgacgggctttcttttgatcctatccctgttctcgcgacagcgaaatcttatgcaaacattcatgtattggcagttgctgaagctcatgtaccattctcccttcactgccgcttatcatagagctatctggctaaaaattgggcggacaattaacccttatatccaccgttacaccccttttcttcatgacccgataaatgctggcatgagatggtggtttaggtaggttgaatgcagcactgtcagtcatgtaaagagatgcaagtatgtttatggtattattttactccaaagagaatctttgagaaaactgctgcttgggagtggtgtgattagtcccttgtgtggctttgagctgatgacaatttagtagttagcatgatcagtaactcttaactcttgtaggcttgtagctagagctagtcgagatcttagcctgtttggcatgaactgaagttaggtggggaggttattattgtgaccgaattgttttgatttttctgactattggctattgctgaccacatatcagtgttatcaaagggacgttactattctacgtgttata

SEQ ID NO: 206415 - DNA, 1334 bp, Zea Mays
ctccattgccaaggaaatttcagaggcggaattgagatagaggagggagtgggaagggagacagggaggggtcagtcgtcttcctttgtccccgtgctgctcctttgcttcggagtcttgccaagcctagattcgaggagagggctccctctctttccttgcttggcctgcatcggaaggattctgatttttctgttggaggaatgtcctcaaccacatctattcagccctcagcatcttcaggtggtgcatctacttcagctgatgagaatgcaaggcctcctgattcagcacgaagcatattgtctctacagttggaccagcggtcattacatttttctgttagtgcttgggttcttattgttgccttgattggcatctttccattggcaccacattcccttcagtataagggatatcggttgtcacttcttggcacaacatgtactacaggctatgctttgtttgctttgtacaggctaccccgagcagggaacatgcaggctgttcaggtgtggtgtcaccatgtaactgcatcaaaggattttataccattcatgtactgccttatgttttctacatccaaactgcacttgaagcttgttttggtacctgtaatttgttgggcacttgaacatgtcgctcgatttctacgtcgccattttactagctcatctttgtacaggacatacttggagcaaccttgtacatgggttgagacaaacacaaatgcagtccagtttctacgttcaaatgcagagattttgacgggctttcttttgatcctatccctgttctcgcgacagcgaaatcttatgcaaacattcatgtattggcagttgctgaagctcatgtaccattctcccttcactgccgcttatcatagagctatctggctaaaaattgggcggacaattaacccttatatccaccgttacaccccttttcttcatgacccgataaatgctggcatgagatggtggtttaggtaggttgaatgcagcactgtcagtcatgtaaagagatgcaagtatgtttatggtattattttactccaaagagaatctttgagaaaactgctgcttgggagtggtgtgattagtcccttgtgtggctttgagctgatgacaatttagtagttagcatgatcagtaactcttaactcttgtaggcttgtagctagagctagtcgagatcttagcctgtttggcatgaactgaagttaggtggggaggttattattgtgaccgaattgttttgatttttctgactattggctattgctgaccacatatcagtgttatcaaagggacgttactattctacgtgttata

SEQ ID NO: 206416 - DNA, 3406 bp, Zea Mays
tggcgtggtacaaggttgggggttttgcggaaccattgaggagcgatcccgacggctgacgtaaaaaggatgatgtggcgctttgtatgcgcggctagatacaggtagggtgacaatggactctaaattttatactataaaatgtaaggatcggatcgagttaggatcgggctatatttctattgatttttgaactaaaaataatttagggtcttagcaatttgtgaagaaacatttggatcgtgatccattaacacctctagatacatgacttttacatatgtaaataaattagagagaagctagctctagaaaccgagcaaagccaagagcccaaaaaagagacttcacagctctctctctcattctctcctccgctgtgaaaataggagttggagtaagagcactaaactactactagtagtatttagattacaaacaaaaaatcaaccaaagtacagccccaaataatccccggcgacagcggtagctagctccagcagctctcgtgtgacaggcacggaatcgcggtgtagctagctccggttccaaattgtgcagttcgtgatctcgactcccagccagcttgattgctgtccgtctctatccggccggtttacatcccagcttttgagaggggaggtggttttctacggaagcttcttctaaccgcgcctctctctcgctgtcaagagctctcgatccgccctggttcgcactccactctgattttttttactcgttttatttgtttatttatatatatgatatcgtgctttatttccttccacgtcatacctgtccgccatctactagtagcatacagatcccaccttagttcataccaacgacttgggtgcgtgtacgtgtgtattcaatctatcgcgcgtgtgaagtgcaagcgtctactctactcgcgattagctttccatgaatggtcttgcgactagctttatgagatagagagagaaaaaggaaacaacctgaaaggcagaaatggttatttcgcgctaaactcacttgagcataactctgacggtgatgctagatggtagtagcttattagcaccagcgagcgcaattattatcggtgatggcagcacagctcgggggttcatctcctgtcgttctattcctttcagctaagctaatccagcaggttgagtgagcagcaagccttagatattcgcccgtagttttcacctctctctctctcctcccctgccctgttacggatcgcactaaagcatgcacaagcacaacacaacagctcgcgtctgctagaacagtctaccaggagctagctcgatgatcgagtggcgaatgaaggcacaagtcctcggtggtggcgggccccagagaccatttgctttcgcgcccttgtcacctagcagctagcagcagagggaggaaggacaagcccacacacaagctctcttcttttctctctgccgtctctcctccttcgctgccgtttggtgctcgtgtcgcgtgtggctgcgctcgtatatagcgtagctttctaggatcccaccagcagagtagcagtagcaggcgcctggtttccggtttccctgcagtgaaggaagaggaagcccaaccccaaggacagcagcgtacaatcaggctgatgcttgttggaactcagctgttgatgcttgtaagcctcgctgcctggctgcgtcctgtgctgtagatacgagatcccgcagcgttcgtttgttgcacttgcaccggcttgctgctagcttgcgacaggactaggaggagctagccgaggaggaggtgtgtgactccatggacgcgggccagcaggatgcgtgggactgggactgggaggtcctgctgccagaccacaggagctcatcctccgtgcgccaccaccacggcagcaacaataatacccttgacgatcaagaagaagcagaggagctcgacctgctgctgcctgcgccaggaggggacgacgtcgttgacgcgcacgacgacgagtgcaaggacatcggcgtcgtgccggacgacgaggccaagaagtcctcctccgtcgcgcctagcgctgccgccggcgatccgacgatggcctcctccgagggcgccgtggaagcgaaggagccgttccagagccctgatgacgccaaggccaccgccgacgacggcggcaagtttgctgcccagcagcaggaggaggaggagggggaggacgaggaggaagatgccggcaaggaaaacgacgacgacgacaaggcggcgcgtgcgccgcagtgcgtggtgttcagcgtggggaagctgaaggtgaacgggatcggcgcgctgtgctcgttcggcgtcgcggccgccaccctctgcgtgttcctcgtcggcggcaggcagcaccacaggcggcaggagcagcgggaggagacgatccagctgcagttctacggcgacgataaggttcgctgacgactcatttaccggctaccgccgcgcgcgccttttcctttccacctaatatccatccgcaatctctctcgatcttttacgaaagcagtattcttttgagcaaatagtagttaattagtcgggcatgaagaatgcgagtgcgaggtctgagtaattaattaattaattgttacggtctaccttgggcgttagtatttgtctgtcgtcttgtctgacgcaaacagatagtaactccttaccactagctagcagatcgtttggacccagctgcttgttgtacgtgctacttgttgtttctttgattgacaaacgaatgaatcgatgacagtaactgattctgtctgaagaagatgcctgcttgcctgccgtgcctgcctctttgtgttgtgtagtgtgtgtgctgatgtggtgtgcatgcagaggatccatcaggtggtgcagcagacgtcgaggctgaaccaggccatgtcgtccgtgatgggggcgggaggaggcgcgtccgcgagggccaacatatccttcggtggattctacgatggattctgacggaacactggggaacagatgggtgtagctagtatacactgccgcgtactactggtggacgatgtaaataattattgggggctcttattattattattagaccttggtttaatgctacacagatacggacggacggatggatgggttataggtttattcaagttgatagtaactaaggggcatagggaagtcttaattagttgacaagttattagtaactaaaaacgtcgaaccatgcgtgcatgctcctcttgggtttacatatatttgtattcattatatattaatgaatgatctgtgtgcatgcaataaaaaaaaagaaaaaaaagagaacctttaaagttgaattagctggtgtatacacgcaacttaatgtgatatcagaaccagagatcacgagtaagctatcatactggtt

SEQ ID NO: 206417 - DNA, 1474 bp, Zea Mays
gtaagcaagaccaacggagcaaggcccccccaggggggcggggcaccacaggtactcttctcctgcttggcctcttgtgccgcaaccgcgagtgcggcctacggtagcctccaaagcagcacatccaaagcagggaccgaatggacatggaccggccggaggaggaggggcagcagcggagggagacgatgacgccggtgctcctcaggctgttcggcgtggacgtccaccggggtggcggcagcggggagccggaggagtcgccgatggacctgaggaagagctccagcatgcccgacctcaccatcaacccgctgctgtcgccggaggagaaagagggctgcaaggggtacgcctccgacgacgcggagctggcgtccggccagcagaagcgccgccgtcgcaaggcacaggacaggaagaaaggaattccatggaccgaggaggagcacaggaagttcctggacgggctaaggcagctgggcaagggggactggaggggcatctccaagggcttcgtcaccaccaggacggcgacgcaggtggccagccacgcccagaagtacttcctccggcagaccaaccccggtatgaagaagcgccgggcgagcctcttcgacgtcggtatcgcggactacaaggacaaccaggtgccaggccctcagagcatcgtcgctgccaaaccggcgcctacgcaggagataatccacaccgaccgcggcgacgtccccataccaagatatagaggcctcggagagattttaggcagtaacatgcaggtaaggttaatcaactgactgactactactatttcaacaagaactcccatgttcccgcggggacttcgctctccatggcctccggcctggaaacggcctcgaccgtcgacagcctggagctcagcatcgccgtcaacggcctggagctcagcatcgcgcccccttcccggtgcgtctgcggcggcgcggcgggggccatcaaggttctgtgactcggccgggacgccgagggagctactcgcatttggcttcccctgcgagcatgcgtttcatcaagtattatcagcctcgtcaggctgccgcgcgcagccgggtttcggtcttgctggttgtgttggtgtgttctgttctgttttgttgtgcgcaaggaatgtttgtgaagtgcattgcgttgtaatacactaatactagcagtgttgtggaatggaattaggggagagggatcagctgggatttgggggttgatgggtccctgtctcgacttcgagtgggttcgtttcgtgttccaatccgaggaggcggcgacgggcgcaaggcgtcgtgtgggtgtggctctgagctccccgatcccgcccaataattggaccgtgccgtccaaaacgcatacgccaactaatcttcggaagaaagtcgcagctttacgttatgtgacatttagttaaagtgatatgcgtttagccagtttttatttttta

SEQ ID NO: 206418 - DNA, 764 bp, Zea Mays
cccactaaatgctctaaagattgtgaataggattaagaaagagtgccctcatgtaccccttatgttgtatataaatggaaatggaggtttacttgagcgcatgaaggacacaagagttgatgttattggccttgactggacagtggacatggctgatggaaggaagcgccttggtaatggaatcagtgtacaagggaatgtggatccagcatttctgttctcaccattaccagtactgactgatgaaattcgtagggttgtgaaagcagctggtacaaaaggtcatatacttaacttgggccacggtgtacttcagaaaacacccgaagaagctgtagcacatttctttgatgtcacaaggagcttgagatatgacacccatttccaaggttctgttgctgaagaattgcagcctgttgcttgattcgtagtgttgtctgcattctacctttttaagacatactcattattgaagcctggatatgtcctgtggagatatcggcagcaaattaaatgtaattttattcattgtttatctgttagttttattcattgtttatctgttccattattcatgtgactgaagaagagatgcatgatgcatgcaacctggtttcgtaggagagccaggctacaggcacagtccgcttcagcggcgcctgtggctgttcaaatcagagctgctataattcctgtgaaaccgtccagtctcgacctgtgtttacatcctaatgattgctgactgtgtgtgttgcagattgttt

SEQ ID NO: 206419 - DNA, 1619 bp, Zea Mays
tacccggttgctcccccttggatccttgtttgcttcctgctgcctggccttctctcctccccaaaatcaatccctcgcccacaaaggagagccagccaaaccttccacctcctccatttccagccccgtccccacaccagctcgcgtaacctcctccccatggctggaggcggcggcgcaggcgcgggctcgtcgtccggcggcggcggagggggcggcagggagggcgactgggactgcggcagctgcggcaaccgcaactacgccttccgctcgctttgcaaccgctgcaagcatccgcgcctcctcgtcgaccccaacaccccgcgcgactccaagtggctaccccgcgccggggactggatctgcaccggttgcagtaacaataattatgcatccagaaagaactgcaaaaagtgtggcttgcccaaggaggaagcagcaatgccagcattgcaaatggcagggatggctatgccagcttatgcaacttatattgcaagactacaaagccttgctgcttctgcttctgcctataacatgaactttgggatggctgccaattcacctttgcagcagcaactacttgcaaatgcaaactggccctatgggatggctggtagatatgggatgcaatcttctggttggccatttggcaacggcaacccaaatcagtttttaggtgttccaaaggattggcgtaatggagattggttctgcagctgtggatctcataactattcatctcgtactcagtgcaaagagtgtggtgcacctgtaccatcgagcattccctccacaacaatgaaagctacatctgatgcctcttccactcacaggcgtcctggctacagcctcagctagttggggcaaaccatctagaaggtcaatttgaggacggtcttcttcctctagtgtagccgcttcttcatctgtgagttgagcacctggagcaaactgactgagacgggccctctcccttgatggactgggcgagagccgagcaagatgcacttgctctgcatgtgcaggctctacaaccttttcatctgttagttgttcacctggagcaaaagaaggactgagcgagagctgatcaagacgcacctgccatgtcttctctacagccctttctgactgcacaggcacctgctctgcatgtgcaggctctacaacctgtgccttgtctggtattgtggcacggttgtcacctgtgagttgtgcatctggagcacactggcattcaatgttccatcgtgaaacattgtctgtcacctgtgagttttgcataagtctaaactgatccattgttctagcaagaaaatcatcatcgcgagttttaaggaaacattcacgatccttcgcgtctttgacataatcagaccatgttgaattactgtcaaggtgagtcgtttcatgtccaaggatccacatggagtgcctgtggaagaaataattatttagatgagtatgtactgggatcttgaattaactaagtatccaaaggctgatcctttgccaacaaaaaaacaaaatttaattaaaccaacaaaaaggaacaaaagttaacctactttgctcttgtcaaagccacattagttctcataacacaatcaaga

SEQ ID NO: 206420 - DNA, 1138 bp, Zea Mays
cttctctcctccccaaaatcaatccctcgcccacaaaggagagccagccaaaccttccacctcctccatttccagccccgtccccacaccagctcgcgtaacctcctccccatggctggaggcggcggcgcaggcgcgggctcgtcgtccggcggcggcggagggggcggcagggagggcgactgggactgcggcagctgcggcaaccgcaactacgccttccgctcgctttgcaaccgctgcaagcatccgcgcctcctcgtcgaccccaacaccccgcgcgactccaagtggctaccccgcgccggggactggatctgcaccggttgcagtaacaataattatgcatccagaaagaactgcaaaaagtgtggcttgcccaaggaggaagcagcaatgccagcattgcaaatggcagggatggctatgccagcttatgcaacttatattgcaagactacaaagccttgctgcttctgcttctgcctataacatgaactttgggatggctgccaattcacctttgcagcagcaactacttgcaaatgcaaactggccctatgggatggctggtagatatgggatgcaatcttctggttggccatttggcaacggcaacccaaatcagtttttaggtgttccaaaggattggcgtaatggagattggttctgcagctgtggatctcataactattcatctcgtactcagtgcaaagagtgtggtgcacctgtaccatcgagcattccctccacaacaatgaaagctacatctgatgcctcttccagtatttatgcaatgctgtacactgtgttaaacatctggcaagtggttcactggtggacgcatctccaggtccgagcgtaaaaatcttaagttttgagcataaaacccctcggttataagcgtaaataccgagccaatatgaggttcatatctatggtgggttgtattcacgatcctatttttatgttaattccgaaaaatatgggagtcacatccatggggtttatatttttatgcagatccaaaaattatggcagatttgtggtggtgtagtattgtatggttaagacttataagacttatgtatcgtgtggttgagagttgaaacttatttgtggatttgtgtcaattggcg

SEQ ID NO: 206421 - DNA, 1513 bp, Zea Mays
cagaatgttacaaaatccattaataacacacgaatatgactattccacttaaggatctgcaaaataggtttaaatatttcaaagatttgtggggacggtacaataagcttacgcgacagttgtcaagtggcgcaggcccgataaagctctcacttgaagaggtatctcacctgaacatttcagtctttctctatttatagaacttaacactaactgacgctttccattgcagataaaaaaagaacttgaatcgggtaaatacgaacgtatgttgcaatatttggatcagctcacacatatatttataagctgtgatgagcataagtcaccatcagtacctgcgtatcgtgccaatattagatgtgggaacttaagtagtgcaagtactgggaagcgcagcattgacgagacctcttccagccatgttcggcagaagagctcgaaagttcatttggctcagtcattacaaaatgacattacccacgaagatgcaatgcaatatcttaaagaccatgacatcttaggtggtactttaaaattttgtatagccaataagttacttaaagactatcaaaatctgaccacgttctcccgtctgaaatctcttgaggaaaggattagtttcctggaaggaacctgaaattaaaatctgatggatcagtttcctaccagtaacctggaaattagaatctgatccctcttccttaaagcattaggaactaagcggttggcttcagaggacctggccaatgactgggataataaaaggctaaatccaggaaatgacaattatccactttcaacaggagctgcaaataatttatttttgggtattgagcaaggagctggaagcagcaatggccagtctgcctttcccaagtttgacaatgggagctcagtggcattaccatctgggcagggaatgtctggtcttatgggaaaaggggcaaaatggcgtgacggggactggttgtgcaacaactgcaacaatcacaactatgcatctcgtgcgttttgcaacaggtgcaaaactcagaaagaatctgcagttcaccctggtgtgttatagcttgctgttggattattttgttccaggatatgttgctgcctgttctagctccttcctcaaggctgcggtttgagttttttcgattctgcagtgtttttgctgctctaaaatgtttgtctcgatatttcattagtgcttgttgaagttccccatttgtttatggtataagcgcttgaataaaatgtttctggaaagtaccggcctacaatctggattttggcaaaataattgaattagttgttgtacaatgaggcaaattgtcttacgttgtacttgatgaactctggagtattatcactcgtcgggttgaaaaggggaactatacaatgtaatttcagtacagattattattttttcctgagaactccagttgtgctgttatgcgagttttgcccattcagaatacttttgatgcattcatcagaattcggctgttactttttc

SEQ ID NO: 206422 - DNA, 3794 bp, Zea Mays
cggcccggaccagaggactcgcccttcatttgttgggggagagaatggaggttggagggaggggcagaacttcaatgcgggcagtgaaggccagaaggggcacgccggcggcgacggcggagaccgtggtgttctgtgcagtggctaaatttctatagtaaaagctgtgcaccatgctgtgcagggagtttgccacgtcacttctttcttctcagccgttggataccaaacggagtacacaaaattgtccacgtcgcctttcaatagagtccattggatgtgcagggagtttgccacgtcacttctttcttctcagccgttggataccaaacggagtacacaaaattgtccacgtcgcctttcaatagagtccattggatgccttttaaacggtgcgtactctgccttcttttttttcctctcacatcctcccgtaagttccagagaaggctggacattggacactccggccaataagaaaacgggcaaaagaaagaaaaaaagaaggaaagcaacgggagaggcacgccctcgctcctggcagccgagaacgcgtctgctgctcctgatgactaggttttcatcctcctctcctcagtctctcgatcttgctcttctcaggtcctgtgacaacaaatctccctatccgcagcttccgcttctttgtgacagtaatcttcatatttttgcctgtcatccatgtcagcgaggtcctactttcatttacaatgtggagtagaactgtttgattgtttcttcatgccagttctgttttatagccatcaattcatgaagaccaatgtcatgacatgctttctcaatatctggcatctcaggaatttgtctgatcttttcccaattgatccatttattgtcagcacattacttcttgctatatatattgttgtatagattcatatgctcgttcgaccaaaaacggtcatcgcttgcagttctatcctgtagatacaaatttacgcataccttcccgacactttacagtgtacctaatgaggaccgcatgaagaagaaagttgagaatggaaaattgtcagaaatatttaaaagcaaaattgtttcttcaaaaaaatcaaaaacaaaagatgcaagacttgtgttttgcactccctataggtctagttggttggaaaatcagaaattccacatcttatttattgatgaggcagcatacttaaaagaatgtgaatcattgatccctcttgcaactagtgggataaaacatgtggtgcttgttggggatgacaaacaactacaatcagtggtaaagagcacgatatgtctttattataacttataagaccatttgaatgtatccttgattccttgtgttaccaatgattatttctagactgctaatactttctccttactggtaagattgctaaagagaacaggtttgggcgaagcctctttgagagattaagtggacttgatttcccaaagcacatgctaaatattcaatatagaatgcaccctttcatcagcaagtttccaaatcaaaaattttatgaaggaaaaattatagatggtctgaacgttaaggactataacaatatttatctcgatgtgcatatatatggtccttattcattcatccatgttgaagatggtttcgaagaaaacaataaacagggcttaaaaatattgttgaagctgctgtggtagccaatattgttggcagatttgcggaaggtatgtctaacatttgagctgataaagaacatgtaagtttcattaaagctgatatgtttaagtgtcatccatgtttttttggtctataaccactacagcatgcgccgagcagaagaagaaaaccaacgttggtatagtatctccatatgcagcccaagtaatttctttgcaagaaagagttcagatttataagaagcatgactttctttctattgaagtatgcattgttgattcatgtcaaagtgctgagaaagacattaatcctttcaacagttagacaaaataatggtgggaatataggctttgttgattgtgttatgagaactaatgtggctttgacaagagcaaagtatgttaacttttgttcctttttgttggcttaattaaattttattttttttgttggcaaaggatcaacctttggatacttagttaattcaagatcccagtacatactcatctaaataattatttcttccacaggcactgcatgtggatccttggacatgaattcaacatggtatgatttagtcaaagacgcgaaggatcgtgaatgtttctttaaagctcgcgatgatgatttttttgctagaacaatggatcagtttagacttatgcaaaactcacaggtgacagacaatgtttcacgatggaacattgaatgccagtgtgctccagatgcacaactcacatgtgacaaccatgctacaataccagacaaggctccagatgcacaactcacaggtgacaaccgtgccacaataccagacaaggcacaggttgtagagcctgcacatgcagagcaggtgcctatgcagtcagaaagagctgcagaaaagacatggcagctgtgtcttaatcagctctcgcacattccttcttttgctccaggtgaacaactaacagacgaaaaggttgtagagcctgcacatgcaaagcaagtgcatcttgctcagctctcgcccagtccatcaagggagagggcccgtctcagtcagtttgctcaaggtgctcaactcacagatgaagaagcggctgcactagaggaagaagaccatcctcaaattgaccttctggatggtttgcggcgcggaggccggctgcggggttccggggcagcgcgtctcgcggaggtgcgtagacgacggcggagcggcgtcctcacctccatggcgtcgctgtcgagcaagcaccacgtcctaatccaggtgctgctcgcccgcggcccgctctctgagcgcgacttccacgctttcatcgatggcgcctttggcaagaacaccggaactaagcggttggcttcagaggacctggccaatgactgggataataaaaggctaaatccaggaaatgacaattatccactttcaacaggagctgcaaataatttatttttgggtattgagcaaggagctggaagcagcaatggccagtctgcctttcccaagtttgacaatgggagctcagtggcattaccatctgggcagggaatgtctggtcttatgggaaaaggggcaaaatggcgtgacggggactggttgtgcaacaactgcaacaatcacaactatgcatctcgtgcgttttgcaacaggtgcaaaactcagaaagaatctgcagttcaccctggtgtgttatagcttgctgttggattattttgttccaggatatgttgctgcctgttctagctccttcctcaaggctgcggtttgagttttttcgattctgcagtgtttttgctgctctaaaatgtttgtctcgatatttcattagtgcttgttgaagttccccatttgtttatggtataagcgcttgaataaaatgtttctggaaagtaccggcctacaatctggattttggcaaaataattgaattagttgttgtacaatgaggcaaattgtcttacgttgtacttgatgaactctggagtattatcactcgtcgggttgaaaaggggaactatacaatgtaatttcagtacagattattattttttcctgagaactccagttgtgctgttatgcgagttttgcccattcagaatacttttgatgcattcatcagaattcggctgttactttttc

SEQ ID NO: 206423 - DNA, 3472 bp, Zea Mays
cggcccggaccagaggactcgcccttcatttgttgggggagagaatggaggttggagggaggggcagaacttcaatgcgggcagtgaaggccagaaggggcacgccggcggcgacggcggagaccgtggtgttctgtgcagtggctaaatttctatagtaaaagctgtgcaccatgctgtgcagggagtttgccacgtcacttctttcttctcagccgttggataccaaacggagtacacaaaattgtccacgtcgcctttcaatagagtccattggatgtgcagggagtttgccacgtcacttctttcttctcagccgttggataccaaacggagtacacaaaattgtccacgtcgcctttcaatagagtccattggatgccttttaaacggtgcgtactctgccttcttttttttcctctcacatcctcccgtaagttccagagaaggctggacattggacactccggccaataagaaaacgggcaaaagaaagaaaaaaagaaggaaagcaacgggagaggcacgccctcgctcctggcagccgagaacgcgtctgctgctcctgatgactaggttttcatcctcctctcctcagtctctcgatcttgctcttctcaggtcctgtgacaacaaatctccctatccgcagcttccgcttctttgtgacagtaatcttcatatttttgcctgtcatccatgtcagcgaggtcctactttcatttacaatgtggagtagaactgtttgattgtttcttcatgccagttctgttttatagccatcaattcatgaagaccaatgtcatgacatgctttctcaatatctggcatctcaggaatttgtctgatcttttcccaattgatccatttattgtcagcacattacttcttgctatatatattgttgtatagattcatatgctcgttcgaccaaaaacggtcatcgcttgcagttctatcctgtagatacaaatttacgcataccttcccgacactttacagtgtacctaatgaggaccgcatgaagaagaaagttgagaatggaaaattgtcagaaatatttaaaagcaaaattgtttcttcaaaaaaatcaaaaacaaaagatgcaagacttgtgttttgcactccctataggtctagttggttggaaaatcagaaattccacatcttatttattgatgaggcagcatacttaaaagaatgtgaatcattgatccctcttgcaactagtgggataaaacatgtggtgcttgttggggatgacaaacaactacaatcagtggtaaagagcacgatatgtctttattataacttataagaccatttgaatgtatccttgattccttgtgttaccaatgattatttctagactgctaatactttctccttactggtaagattgctaaagagaacaggtttgggcgaagcctctttgagagattaagtggacttgatttcccaaagcacatgctaaatattcaatatagaatgcaccctttcatcagcaagtttccaaatcaaaaattttatgaaggaaaaattatagatggtctgaacgttaaggactataacaatatttatctcgatgtgcatatatatggtccttattcattcatccatgttgaagatggtttcgaagaaaacaataaacagggcttaaaaatattgttgaagctgctgtggtagccaatattgttggcagatttgcggaaggtatgtctaacatttgagctgataaagaacatgtaagtttcattaaagctgatatgtttaagtgtcatccatgtttttttggtctataaccactacagcatgcgccgagcagaagaagaaaaccaacgttggtatagtatctccatatgcagcccaattagacaaaataatggtgggaatataggctttgttgattgtgttatgagaactaatgtggctttgacaagagcaaagcactgcatgtggatccttggacatgaattcaacatggtatgatttagtcaaagacgcgaaggatcgtgaatgtttctttaaagctcgcgatgatgatttttttgctagaacaatggatcagtttagacttatgcaaaactcacaggtgacagacaatgtttcacgatggaacattgaatgccagtgtgctccagatgcacaactcacatgtgacaaccatgctacaataccagacaaggctccagatgcacaactcacaggtgacaaccgtgccacaataccagacaaggcacaggttgtagagcctgcacatgcagagcaggtgcctatgcagtcagaaagagctgcagaaaagacatggcagctgtgtcttaatcagctctcgcacattccttcttttgctccaggtgaacaactaacagacgaaaaggttgtagagcctgcacatgcaaagcaagtgcatcttgctcagctctcgcccagtccatcaagggagagggcccgtctcagtcagtttgctcaaggtgctcaactcacagatgaagaagcggctgcactagaggaagaagaccatcctcaaattgaccttctggatggtttgcggcgcggaggccggctgcggggttccggggcagcgcgtctcgcggaggtgcgtagacgacggcggagcggcgtcctcacctccatggcgtcgctgtcgagcaagcaccacgtcctaatccaggtgctgctcgcccgcggcccgctctctgagcgcgacttccacgctttcatcgatggcgcctttggcaagaacaccgcattaggaactaagcggttggcttcagaggacctggccaatgactgggataataaaaggctaaatccaggaaatgacaattatccactttcaacaggagctgcaaataatttatttttgggtattgagcaaggagctggaagcagcaatggccagtctgcctttcccaagtttgacaatgggagctcagtggcattaccatctgggcagggaatgtctggtcttatgggaaaagggtgcaaaactcagaaagaatctgcagttcaccctggtgtgttatagcttgctgttggattattttgttccaggatatgttgctgcctgttctagctccttcctcaaggctgcggtttgagttttttcgattctgcagtgtttttgctgctctaaaatgtttgtctcgatatttcattagtgcttgttgaagttccccatttgtttatggtataagcgcttgaataaaatgtttctggaaagtaccggcctacaatctggattttggcaaaataattgaattagttgttgtacaatgaggcaaattgtcttacgttgtacttgatgaactctggagtattatcactcgtcgggttgaaaaggggaactatacaatgtaatttcagtacagattattattttttcctgagaactccagttgtgctgttatgcgagttttgcccattcagaatacttttgatgcattcatcagaattcggctgttactttttc

SEQ ID NO: 206424 - DNA, 3196 bp, Zea Mays
cggcccggaccagaggactcgcccttcatttgttgggggagagaatggaggttggagggaggggcagaacttcaatgcgggcagtgaaggccagaaggggcacgccggcggcgacggcggagaccgtggtgttctgtgcagtggctaaatttctatagtaaaagctgtgcaccatgctgtgcagggagtttgccacgtcacttctttcttctcagccgttggataccaaacggagtacacaaaattgtccacgtcgcctttcaatagagtccattggatgtgcagggagtttgccacgtcacttctttcttctcagccgttggataccaaacggagtacacaaaattgtccacgtcgcctttcaatagagtccattggatgccttttaaacggtgcgtactctgccttcttttttttcctctcacatcctcccgtaagttccagagaaggctggacattggacactccggccaataagaaaacgggcaaaagaaagaaaaaaagaaggaaagcaacgggagaggcacgccctcgctcctggcagccgagaacgcgtctgctgctcctgatgactaggttttcatcctcctctcctcagtctctcgatcttgctcttctcaggtcctgtgacaacaaatctccctatccgcagcttccgcttctttgtgacagtaatcttcatatttttgcctgtcatccatgtcagcgaggtcctactttcatttacaatgtggagtagaactgtttgattgtttcttcatgccagttctgttttatagccatcaattcatgaagaccaatgtcatgacatgctttctcaatatctggcatctcaggaatttgtctgatcttttcccaattgatccatttattgtcagcacattacttcttgctatatatattgttgtatagattcatatgctcgttcgaccaaaaacggtcatcgcttgcagttctatcctgtagatacaaatttacgcataccttcccgacactttacagtgtacctaatgaggaccgcatgaagaagaaagttgagaatggaaaattgtcagaaatatttaaaagcaaaattgtttcttcaaaaaaatcaaaaacaaaagatgcaagacttgtgttttgcactccctataggtctagttggttggaaaatcagaaattccacatcttatttattgatgaggcagcatacttaaaagaatgtgaatcattgatccctcttgcaactagtgggataaaacatgtggtgcttgttggggatgacaaacaactacaatcagtggtaaagagcacgatatgtctttattataacttataagaccatttgaatgtatccttgattccttgtgttaccaatgattatttctagactgctaatactttctccttactggtaagattgctaaagagaacaggtttgggcgaagcctctttgagagattaagtggacttgatttcccaaagcacatgctaaatattcaatatagaatgcaccctttcatcagcaagtttccaaatcaaaaattttatgaaggaaaaattatagatggtctgaacgttaaggactataacaatatttatctcgatgtgcatatatatggtccttattcattcatccatgttgaagatggtttcgaagaaaacaataaacagggcttaaaaatattgttgaagctgctgtggtagccaatattgttggcagatttgcggaagcatgcgccgagcagaagaagaaaaccaacgttggtatagtatctccatatgcagcccaattagacaaaataatggtgggaatataggctttgttgattgtgttatgagaactaatgtggctttgacaagagcaaagcactgcatgtggatccttggacatgaattcaacatggtgacagacaatgtttcacgatggaacattgaatgccagtgtgctccagatgcacaactcacatgtgacaaccatgctacaataccagacaaggctccagatgcacaactcacaggtgaacaactaacagacgaaaaggttgtagagcctgcacatgcaaagcaagtgcatcttgctcagctctcgcccagtccatcaagggagagggcccgtctcagtcagtttgctcaaggtgctcaactcacagatgaagaagcggctgcactagaggaagaagaccatcctcaaattgaccttctggatggtttgcggcgcggaggccggctgcggggttccggggcagcgcgtctcgcggaggtgcgtagacgacggcggagcggcgtcctcacctccatggcgtcgctgtcgagcaagcaccacgtcctaatccaggtgctgctcgcccgcggcccgctctctgagcgcgacttccacgctttcatcgatggcgcctttggcaagaacaccgcattaggaactaagcggttggcttcagaggacctggccaatgactgggataataaaaggctaaatccaggaaatgacaattatccactttcaacaggagctgcaaataatttatttttgggtattgagcaaggagctggaagcagcaatggccagtctgcctttcccaagtttgacaatgggagctcagtggcattaccatctgggcagggaatgtctggtcttatgggaaaaggggcaaaatggcgtgacggggactggttgtgcaacaactgcaacaatcacaactatgcatctcgtgcgttttgcaacaggtgcaaaactcagaaagaatctgcagttcaccctggtgtgttatagcttgctgttggattattttgttccaggatatgttgctgcctgttctagctccttcctcaaggctgcggtttgagttttttcgattctgcagtgtttttgctgctctaaaatgtttgtctcgatatttcattagtgcttgttgaagttccccatttgtttatggtataagcgcttgaataaaatgtttctggaaagtaccggcctacaatctggattttggcaaaataattgaattagttgttgtacaatgaggcaaattgtcttacgttgtacttgatgaactctggagtattatcactcgtcgggttgaaaaggggaactatacaatgtaatttcagtacagattattattttttcctgagaactccagttgtgctgttatgcgagttttgcccattcagaatacttttgatgcattcatcagaattcggctgttactttttc

SEQ ID NO: 206425 - DNA, 3064 bp, Zea Mays
cggcccggaccagaggactcgcccttcatttgttgggggagagaatggaggttggagggaggggcagaacttcaatgcgggcagtgaaggccagaaggggcacgccggcggcgacggcggagaccgtggtgttctgtgcagtggctaaatttctatagtaaaagctgtgcaccatgctgtgcagggagtttgccacgtcacttctttcttctcagccgttggataccaaacggagtacacaaaattgtccacgtcgcctttcaatagagtccattggatgtgcagggagtttgccacgtcacttctttcttctcagccgttggataccaaacggagtacacaaaattgtccacgtcgcctttcaatagagtccattggatgccttttaaacggtgcgtactctgccttcttttttttcctctcacatcctcccgtaagttccagagaaggctggacattggacactccggccaataagaaaacgggcaaaagaaagaaaaaaagaaggaaagcaacgggagaggcacgccctcgctcctggcagccgagaacgcgtctgctgctcctgatgactaggttttcatcctcctctcctcagtctctcgatcttgctcttctcaggtcctgtgacaacaaatctccctatccgcagcttccgcttctttgtgacagtaatcttcatatttttgcctgtcatccatgtcagcgaggtcctactttcatttacaatgtggagtagaactgtttgattgtttcttcatgccagttctgttttatagccatcaattcatgaagaccaatgtcatgacatgctttctcaatatctggcatctcaggaatttgtctgatcttttcccaattgatccatttattgtcagcacattacttcttgctatatatattgttgtatagattcatatgctcgttcgaccaaaaacggtcatcgcttgcagttctatcctgtagatacaaatttacgcataccttcccgacactttacagtgtacctaatgaggaccgcatgaagaagaaagttgagaatggaaaattgtcagaaatatttaaaagcaaaattgtttcttcaaaaaaatcaaaaacaaaagatgcaagacttgtgttttgcactccctataggtctagttggttggaaaatcagaaattccacatcttatttattgatgaggcagcatacttaaaagaatgtgaatcattgatccctcttgcaactagtgggataaaacatgtggtgcttgttggggatgacaaacaactacaatcagtggtaaagagcacgatatgtctttattataacttataagaccatttgaatgtatccttgattccttgtgttaccaatgattatttctagactgctaatactttctccttactggtaagattgctaaagagaacaggtttgggcgaagcctctttgagagattaagtggacttgatttcccaaagcacatgctaaatattcaatatagaatgcaccctttcatcagcaagtttccaaatcaaaaattttatgaaggaaaaattatagatggtctgaacgttaaggactataacaatatttatctcgatgtgcatatatatggtccttattcattcatccatgttgaagatggtttcgaagaaaacaataaacagggcttaaaaatattgttgaagctgctgtggtagccaatattgttggcagatttgcggaagcatgcgccgagcagaagaagaaaaccaacgttggtatagtatctccatatgcagcccaattagacaaaataatggtgggaatataggctttgttgattgtgttatgagaactaatgtggctttgacaagagcaaagcactgcatgtggatccttggacatgaattcaacatggtgacagacaatgtttcacgatggaacattgaatgccagtgtgctccagatgcacaactcacatgtgacaaccatgctacaataccagacaaggctccagatgcacaactcacagatgaagaagcggctgcactagaggaagaagaccatcctcaaattgaccttctggatggtttgcggcgcggaggccggctgcggggttccggggcagcgcgtctcgcggaggtgcgtagacgacggcggagcggcgtcctcacctccatggcgtcgctgtcgagcaagcaccacgtcctaatccaggtgctgctcgcccgcggcccgctctctgagcgcgacttccacgctttcatcgatggcgcctttggcaagaacaccgcattaggaactaagcggttggcttcagaggacctggccaatgactgggataataaaaggctaaatccaggaaatgacaattatccactttcaacaggagctgcaaataatttatttttgggtattgagcaaggagctggaagcagcaatggccagtctgcctttcccaagtttgacaatgggagctcagtggcattaccatctgggcagggaatgtctggtcttatgggaaaaggggcaaaatggcgtgacggggactggttgtgcaacaactgcaacaatcacaactatgcatctcgtgcgttttgcaacaggtgcaaaactcagaaagaatctgcagttcaccctggtgtgttatagcttgctgttggattattttgttccaggatatgttgctgcctgttctagctccttcctcaaggctgcggtttgagttttttcgattctgcagtgtttttgctgctctaaaatgtttgtctcgatatttcattagtgcttgttgaagttccccatttgtttatggtataagcgcttgaataaaatgtttctggaaagtaccggcctacaatctggattttggcaaaataattgaattagttgttgtacaatgaggcaaattgtcttacgttgtacttgatgaactctggagtattatcactcgtcgggttgaaaaggggaactatacaatgtaatttcagtacagattattattttttcctgagaactccagttgtgctgttatgcgagttttgcccattcagaatacttttgatgcattcatcagaattcggctgttactttttc

SEQ ID NO: 206426 - DNA, 3392 bp, Zea Mays
cggcccggaccagaggactcgcccttcatttgttgggggagagaatggaggttggagggaggggcagaacttcaatgcgggcagtgaaggccagaaggggcacgccggcggcgacggcggagaccgtggtgttctgtgcagtggctaaatttctatagtaaaagctgtgcaccatgctgtgcagggagtttgccacgtcacttctttcttctcagccgttggataccaaacggagtacacaaaattgtccacgtcgcctttcaatagagtccattggatgtgcagggagtttgccacgtcacttctttcttctcagccgttggataccaaacggagtacacaaaattgtccacgtcgcctttcaatagagtccattggatgccttttaaacggtgcgtactctgccttcttttttttcctctcacatcctcccgtaagttccagagaaggctggacattggacactccggccaataagaaaacgggcaaaagaaagaaaaaaagaaggaaagcaacgggagaggcacgccctcgctcctggcagccgagaacgcgtctgctgctcctgatgactaggttttcatcctcctctcctcagtctctcgatcttgctcttctcaggtcctgtgacaacaaatctccctatccgcagcttccgcttctttgtgacagtaatcttcatatttttgcctgtcatccatgtcagcgaggtcctactttcatttacaatgtggagtagaactgtttgattgtttcttcatgccagttctgttttatagccatcaattcatgaagaccaatgtcatgacatgctttctcaatatctggcatctcaggaatttgtctgatcttttcccaattgatccatttattgtcagcacattacttcttgctatatatattgttgtatagattcatatgctcgttcgaccaaaaacggtcatcgcttgcagttctatcctgtagatacaaatttacgcataccttcccgacactttacagtgtacctaatgaggaccgcatgaagaagaaagttgagaatggaaaattgtcagaaatatttaaaagcaaaattgtttcttcaaaaaaatcaaaaacaaaagatgcaagacttgtgttttgcactccctataggtctagttggttggaaaatcagaaattccacatcttatttattgatgaggcagcatacttaaaagaatgtgaatcattgatccctcttgcaactagtgggataaaacatgtggtgcttgttggggatgacaaacaactacaatcagtggtaaagagcacgatatgtctttattataacttataagaccatttgaatgtatccttgattccttgtgttaccaatgattatttctagactgctaatactttctccttactggtaagattgctaaagagaacaggtttgggcgaagcctctttgagagattaagtggacttgatttcccaaagcacatgctaaatattcaatatagaatgcaccctttcatcagcaagtttccaaatcaaaaattttatgaaggaaaaattatagatggtctgaacgttaaggactataacaatatttatctcgatgtgcatatatatggtccttattcattcatccatgttgaagatggtttcgaagaaaacaataaacagggcttaaaaatattgttgaagctgctgtggtagccaatattgttggcagatttgcggaaggtatgtctaacatttgagctgataaagaacatgtaagtttcattaaagctgatatgtttaagtgtcatccatgtttttttggtctataaccactacagcatgcgccgagcagaagaagaaaaccaacgttggtatagtatctccatatgcagcccaagtaatttctttgcaagaaagagttcagatttataagaagcatgactttctttctattgaagtatgcattgttgattcatgtcaaagtgctgagaaagacattaatcctttcaacagttagacaaaataatggtgggaatataggctttgttgattgtgttatgagaactaatgtggctttgacaagagcaaagtatgttaacttttgttcctttttgttggcttaattaaattttattttttttgttggcaaaggatcaacctttggatacttagttaattcaagatcccagtacatactcatctaaataattatttcttccacaggcactgcatgtggatccttggacatgaattcaacatggtatgatttagtcaaagacgcgaaggatcgtgaatgtttctttaaagctcgcgatgatgatttttttgctagaacaatggatcagtttagacttatgcaaaactcacaggtgacagacaatgtttcacgatggaacattgaatgccagtgtgctccagatgcacaactcacagatgaagaagcggctgcactagaggaagaagaccatcctcaaattgaccttctggatggtttgcggcgcggaggccggctgcggggttccggggcagcgcgtctcgcggaggtgcgtagacgacggcggagcggcgtcctcacctccatggcgtcgctgtcgagcaagcaccacgtcctaatccaggtgctgctcgcccgcggcccgctctctgagcgcgacttccacgctttcatcgatggcgcctttggcaagaacaccgcattaggaactaagcggttggcttcagaggacctggccaatgactgggataataaaaggctaaatccaggaaatgacaattatccactttcaacaggagctgcaaataatttatttttgggtattgagcaaggagctggaagcagcaatggccagtctgcctttcccaagtttgacaatgggagctcagtggcattaccatctgggcagggaatgtctggtcttatgggaaaagggtgcaaaactcagaaagaatctgcagttcaccctggtgtgttatagcttgctgttggattattttgttccaggatatgttgctgcctgttctagctccttcctcaaggctgcggtttgagttttttcgattctgcagtgtttttgctgctctaaaatgtttgtctcgatatttcattagtgcttgttgaagttccccatttgtttatggtataagcgcttgaataaaatgtttctggaaagtaccggcctacaatctggattttggcaaaataattgaattagttgttgtacaatgaggcaaattgtcttacgttgtacttgatgaactctggagtattatcactcgtcgggttgaaaaggggaactatacaatgtaatttcagtacagattattattttttcctgagaactccagttgtgctgttatgcgagttttgcccattcagaatacttttgatgcattcatcagaattcggctgttactttttc

SEQ ID NO: 206427 - DNA, 1784 bp, Zea Mays
gtttgcttttttaagtctgataatatttgtaccaacattttcacagagccattgtaatgtttcctgtagtgctgctgttgatggagtcaatggatgcctcacctacagtacatgtcgttcaagaaactactactatcagtattctcataccactaacttgcaaatttcaccagtagaccagatgcctttgcctcggaaattaaagaaatcaattcagcgaaacgcttactttttaacccagaagaggaagctcgtaccacactgttcatcagaccttagtacctcctgcagaggagtgcccaactatttatcaatcaatgttttgcaagaccaatcaaatacaaaacagggagctattcgtaaagcgcttgtcattttgaatcctaattctggattccgcagctctcgggatgttttctaccagaaagtgcaatcaacattgaaggcttcaagatggaagtcattgaaacagcatatgccgggcatgcaaaggttctttcttctactgttgacctcaaaaaattccctgatggtattatatgtgttggtggcgatgggatcgtcaatgaggttttgaatggattacttagtagagacgattttgacgtggcaattcgatttcccattgggataatacctgctggttctgataattcattggtgtggactgttcttggcatcagggatcctgtttctgcggcaatcgctttagctaagggggatttcacaccaatagatgtgtttgccgtaaagtggatccaagctggagtgactcattttggtttgacagcttcctactatggtttcgtagctgatgttctgcaactgtcagaaaagttccgcgtgcagctcggtcccttccgttacgttgttgctggccttctgaagtttctttcattaccccagtacagatttgaggtggactatctcccttcatcgctgcaggggagaagttctgaatcaagaccactggctgaaaaacgtcacgaacagctttctgatgacggcaaggttaggagaggcacacagaccaacggtaggatcaaagacgactgggttaccaggaacggggagtttcttggcatttttgtttgcaatcacttctgcaagcctgcccaggggttactttctcctgttatcgcaccgaaagcgcggcacgacgacggcagcctggacctgattctcgtccatggaagcggcaggctgagactgttttgcttctttgttgcctatcagctctgctggcatcttctactcccctacgtggaatatgtcaagataaaagaagtgaaggttaggccagttggcagtacccacagtggttgtggcgtcgacggtgagcttcttgatggagagcgcggtgctgaatggcagtgctcgctgcttccagcacaaggcaggctgcttggccaggatcccggtgctttcaactagttagggctcgttcggttagctctcaatccatgtagattgagtgagattagatgagtttgaatcccaaacaagtcaaacttcttaattttttccaatcccatctaatccatgtgtattgggaataaccgaacaaggcttactgttttatctgtccagcagtaccgaggttgttggttaatttcatgataagagagcgagtttcagcaatgttcgtatactgattatacagtattctgtctctatagattgtagctgcagcagtctgaacaactgattttaatttttggccactattttcgtatatttattgtgagtttgtgaacaaggctagagcctagtgcacatagggg

SEQ ID NO: 206428 - DNA, 1748 bp, Zea Mays
gtcatcgtcgtgtcagaatgaggtttcctgtagtgctgctgttgatggagtcaatggatgcctcacctacagtacatgtcgttcaagaaactactactatcagtattctcataccactaacttgcaaatttcaccagtagaccagatgcctttgcctcggaaattaaagaaatcaattcagcgaaacgcttactttttaacccagaagaggaagctcgtaccacactgttcatcagaccttagtacctcctgcagaggagtgcccaactatttatcaatcaatgttttgcaagaccaatcaaatacaaaacagggagctattcgtaaagcgcttgtcattttgaatcctaattctggattccgcagctctcgggatgttttctaccagaaagtgcaatcaacattgaaggcttcaagatggaagtcattgaaacagcatatgccgggcatgcaaaggttctttcttctactgttgacctcaaaaaattccctgatggtattatatgtgttggtggcgatgggatcgtcaatgaggttttgaatggattacttagtagagacgattttgacgtggcaattcgatttcccattgggataatacctgctggttctgataattcattggtgtggactgttcttggcatcagggatcctgtttctgcggcaatcgctttagctaagggggatttcacaccaatagatgtgtttgccgtaaagtggatccaagctggagtgactcattttggtttgacagcttcctactatggtttcgtagctgatgttctgcaactgtcagaaaagttccgcgtgcagctcggtcccttccgttacgttgttgctggccttctgaagtttctttcattaccccagtacagatttgaggtggactatctcccttcatcgctgcaggggagaagttctgaatcaagaccactggctgaaaaacgtcacgaacagctttctgatgacggcaaggttaggagaggcacacagaccaacggtaggatcaaagacgactgggttaccaggaacggggagtttcttggcatttttgtttgcaatcacttctgcaagcctgcccaggggttactttctcctgttatcgcaccgaaagcgcggcacgacgacggcagcctggacctgattctcgtccatggaagcggcaggctgagactgttttgcttctttgttgcctatcagctctgctggcatcttctactcccctacgtggaatatgtcaagataaaagaagtgaaggttaggccagttggcagtacccacagtggttgtggcgtcgacggtgagcttcttgatggagagcgcggtgctgaatggcagtgctcgctgcttccagcacaaggcaggctgcttggccaggatcccggtgctttcaactagttagggctcgttcggttagctctcaatccatgtagattgagtgagattagatgagtttgaatcccaaacaagtcaaacttcttaattttttccaatcccatctaatccatgtgtattgggaataaccgaacaaggcttactgttttatctgtccagcagtaccgaggttgttggttaatttcatgataagagagcgagtttcagcaatgttcgtatactgattatacagtattctgtctctatagattgtagctgcagcagtctgaacaactgattttaatttttggccactattttcgtatatttattgtgagtttgtgaacaaggctagagcctagtgcacatagggg

SEQ ID NO: 206429 - DNA, 1859 bp, Zea Mays
cttgccttatgaatacccccagcatgagtatcggatgcacatttcaattgaatattcggggcatatacgtttgcttttttaagtctgataatatttgtaccaacattttcacagagccattgtaatgtttcctgtagtgctgctgttgatggagtcaatggatgcctcacctacagtacatgtcgttcaagaaactactactatcagtattctcataccactaacttgcaaatttcaccagtagaccagatgcctttgcctcggaaattaaagaaatcaattcagcgaaacgcttactttttaacccagaagaggaagctcgtaccacactgttcatcagaccttagtacctcctgcagaggagtgcccaactatttatcaatcaatgttttgcaagaccaatcaaatacaaaacagggagctattcgtaaagcgcttgtcattttgaatcctaattctggattccgcagctctcgggatgttttctaccagaaagtgcaatcaacattgaagctttcaggcttcaagatggaagtcattgaaacagcatatgccgggcatgcaaaggttctttcttctactgttgacctcaaaaaattccctgatggtattatatgtgttggtggcgatgggatcgtcaatgaggttttgaatggattacttagtagagacgattttgacgtggcaattcgatttcccattgggataatacctgctggttctgataattcattggtgtggactgttcttggcatcagggatcctgtttctgcggcaatcgctttagctaagggggatttcacaccaatagatgtgtttgccgtaaagtggatccaagctggagtgactcattttggtttgacagcttcctactatggtttcgtagctgatgttctgcaactgtcagaaaagttccgcgtgcagctcggtcccttccgttacgttgttgctggccttctgaagtttctttcattaccccagtacagatttgaggtggactatctcccttcatcgctgcaggggagaagttctgaatcaagaccactggctgaaaaacgtcacgaacagctttctgatgacggcaaggttaggagaggcacacagaccaacggtaggatcaaagacgactgggttaccaggaacggggagtttcttggcatttttgtttgcaatcacttctgcaagcctgcccaggggttactttctcctgttatcgcaccgaaagcgcggcacgacgacggcagcctggacctgattctcgtccatggaagcggcaggctgagactgttttgcttctttgttgcctatcagctctgctggcatcttctactcccctacgtggaatatgtcaagataaaagaagtgaaggttaggccagttggcagtacccacagtggttgtggcgtcgacggtgagcttcttgatggagagcgcggtgctgaatggcagtgctcgctgcttccagcacaaggcaggctgcttggccaggatcccggtgctttcaactagttagggctcgttcggttagctctcaatccatgtagattgagtgagattagatgagtttgaatcccaaacaagtcaaacttcttaattttttccaatcccatctaatccatgtgtattgggaataaccgaacaaggcttactgttttatctgtccagcagtaccgaggttgttggttaatttcatgataagagagcgagtttcagcaatgttcgtatactgattatacagtattctgtctctatagattgtagctgcagcagtctgaacaactgattttaatttttggccactattttcgtatatttattgtgagtttgtgaacaaggctagagcctagtgcacatagggg

SEQ ID NO: 206430 - DNA, 1933 bp, Zea Mays
agctgaggagaaaggacttgattgggaagccgcctcagaaaggacgctcctccccaaccccatccccgcccccgcgggctcggaaagctgaggagaaaggacttgattgggaagccgcctcagaaaggacgctcctccccaaccccatccccgcccccgcgggctcggcgggttgcgctgctgcggtgcggtgagacgcgggggcacggacggaggccgccactggatctcgtggagctggcccgcgccgagagcgatcatgagctctagaggccttgtccgcctcccggtttcctgtagtgctgctgttgatggagtcaatggatgcctcacctacagtacatgtcgttcaagaaactactactatcagtattctcataccactaacttgcaaatttcaccagtagaccagatgcctttgcctcggaaattaaagaaatcaattcagcgaaacgcttactttttaacccagaagaggaagctcgtaccacactgttcatcagaccttagtacctcctgcagaggagtgcccaactatttatcaatcaatgttttgcaagaccaatcaaatacaaaacagggagctattcgtaaagcgcttgtcattttgaatcctaattctggattccgcagctctcgggatgttttctaccagaaagtgcaatcaacattgaagctttcaggcttcaagatggaagtcattgaaacagcatatgccgggcatgcaaaggttctttcttctactgttgacctcaaaaaattccctgatggtattatatgtgttggtggcgatgggatcgtcaatgaggttttgaatggattacttagtagagacgattttgacgtggcaattcgatttcccattgggataatacctgctggttctgataattcattggtgtggactgttcttggcatcagggatcctgtttctgcggcaatcgctttagctaagggggatttcacaccaatagatgtgtttgccgtaaagtggatccaagctggagtgactcattttggtttgacagcttcctactatggtttcgtagctgatgtacagatttgaggtggactatctcccttcatcgctgcaggggagaagttctgaatcaagaccactggctgaaaaacgtcacgaacagctttctgatgacggcaaggttaggagaggcacacagaccaacggtaggatcaaagacgactgggttaccaggaacggggagtttcttggcatttttgtttgcaatcacttctgcaagcctgcccaggggttactttctcctgttatcgcaccgaaagcgcggcacgacgacggcagcctggacctgattctcgtccatggaagcggcaggctgagactgttttgcttctttgttgcctatcagctctgctggcatcttctactcccctacgtggaatatgtcaagataaaagaagtgaaggttaggccagttggcagtacccacagtggttgtggcgtcgacggtgagcttcttgatggagagcgcggtgctgaatggcagtgctcgctgcttccagcacaaggcaggctgcttggccaggatcccggtgctttcaactagttagggctcgttcggttagctctcaatccatgtagattgagtgagattagatgagtttgaatcccaaacaagtcaaacttcttaattttttccaatcccatctaatccatgtgtattgggaataaccgaacaaggcttactgttttatctgtccagcagtaccgaggttgttggttaatttcatgataagagagcgagtttcagcaatgttcgtatactgattatacagtattctgtctctatagattgtagctgcagcagtctgaacaactgattttaatttttggccactattttcgtatatttattgtgagtttgtgaacaaggctagagcctagtgcacatagggg

SEQ ID NO: 206431 - DNA, 3559 bp, Zea Mays
agctgaggagaaaggacttgattgggaagccgcctcagaaaggacgctcctccccaaccccatccccgcccccgcgggctcggaaagctgaggagaaaggacttgattgggaagccgcctcagaaaggacgctcctccccaaccccatccccgcccccgcgggctcggcgggttgcgctgctgcggtgcggtgagacgcgggggcacggacggaggccgccactggatctcgtggagctggcccgcgccgagagcgatcatgagctctagaggccttgtccgcctcccggtttcctgtagtgctgctgttgatggagtcaatggatgcctcacctacagtacatgtcgttcaagaaactactactatcagtattctcataccactaacttgcaaatttcaccagtagaccagatgcctttgcctcggaaattaaagaaatcaattcagcgaaacgcttactttttaacccagaagaggaagctcgtaccacactgttcatcagaccttagtacctcctgcagaggagtgcccaactatttatcaatcaatgttttgcaagaccaatcaaatacaaaacagggagctattcgtaaagcgcttgtcattttgaatcctaattctggattccgcagctctcgggatgttttctaccagaaagtgcaatcaacattgaagctttcaggcttcaagatggaagtcattgaaacagcatatgccgggcatgcaaaggttctttcttctactgttgacctcaaaaaattccctgatggtattatatgtgttggtggcgatgggatcgtcaatgaggttttgaatggattacttagtagagacgattttgacgtggcaattcgatttcccattgggataatacctgctggttctgataattcattggtgtggactgttcttggcatcagggatcctgtttctgcggcaatcgctttagctaaggtaccttgattatgttaacactcaacaacaaaaaacaacaaggctttttagtctgaagtaaagcaagttgggataggctaaagttaaaacccgactaaaaccactagtcaatgttcagccacctggatctgttctccatgcactcttattcaaggttaaatctttgggtatattctatcatttcaagtctccttttaccgcattttcccatatcaccttcggtctttccttgcctctcttctcattgctatcgtgccttaggatcccactacacactggtacctcaatatgtcttcgtttggatatgttcaaaccatctcaaacggtgttagataagtttttctgcaattggtggctggtgctatctctagtctatcacatatatcatcgttccggattcgatcccttctttgtatggccataaatccaacatagcatatgtatttccgcaacacttatctgttaaacatgttgtcttttttagactgacattctgcaccatacaacatagcaggtctaacagttgtcctataaaacttgccttttagcttccgtggtatcctcttgtcacataaaacggtagatgtttgatgtcactttatccaccctgcttttattccatggctaatatcttcatcaatattcccatctctctgtagcattcatcctaaataccgaaagatattctttataagcactacttagtcttacaaattagcatctcatttttcatgtatagtagtgccgaagtcacatctcatatatttgattttaattctatagttttactgtgtctaaaacctttagaatctagagtctcctgccataacttcaatttcttatttactcctgctcgactttcaccaatcaatactacactgtctgcaaaaatgcatacaccaagggatatcctcctgtatgtcccgtatgatatcatgcattaccaaagcaaaaaggtaagggcttaaagttgactcttattgtagttctattcttatcaggaagtcatccgtgtccccatcacttgttcgaacactagtcacaacattggtgtacatgttttaaatgagtctaacatacttttttggaactttatgtttgtttaaagcccaccacataatattcattggtattttgttataagccttttccaaatcaatgaaaaccttatgtgggtccttttgctccctatactgttccatcacttgtctttttaagaaaatggcttacatggttgatcttttgagtatgaaaacaaattagttcatagagatccttgttatttctcttagacaatgctcaataattcttccatagcttcatgtatggctcgtcaactttactgcctggtaactagtacagctttgaatgtctcccttattttttgtagattggtactgatatacttctccactcgttagccatcttgttttcatgttcacttatttgatactagatcgtacaactaagattttctctgaatcggtatatcatcaaacttaacggcacatattaatctgaggccattcttctgcagggggatttcacaccaatagatgtgtttgccgtaaagtggatccaagctggagtgactcattttggtttgacagcttcctactatggtttcgtagctgatgttctgcaactgtcagaaaagttccgcgtgcagctcggtcccttccgttacgttgttgctggccttctgaagtttctttcattaccccagtacagatttgaggtggactatctcccttcatcgctgcaggggagaagttctgaatcaagaccactggctgaaaaacgtcacgaacagctttctgatgacggcaaggttaggagaggcacacagaccaacggtaggatcaaagacgactgggttaccaggaacggggagtttcttggcatttttgtttgcaatcacttctgcaagcctgcccaggggttactttctcctgttatcgcaccgaaagcgcggcacgacgacggcagcctggacctgattctcgtccatggaagcggcaggctgagactgttttgcttctttgttgcctatcagctctgctggcatcttctactcccctacgtggaatatgtcaagataaaagaagtgaaggttaggccagttggcagtacccacagtggttgtggcgtcgacggtgagcttcttgatggagagcgcggtgctgaatggcagtgctcgctgcttccagcacaaggcaggctgcttggccaggatcccggtgctttcaactagttagggctcgttcggttagctctcaatccatgtagattgagtgagattagatgagtttgaatcccaaacaagtcaaacttcttaattttttccaatcccatctaatccatgtgtattgggaataaccgaacaaggcttactgttttatctgtccagcagtaccgaggttgttggttaatttcatgataagagagcgagtttcagcaatgttcgtatactgattatacagtattctgtctctatagattgtagctgcagcagtctgaacaactgattttaatttttggccactattttcgtatatttattgtgagtttgtgaacaaggctagagcctagtgcacatagggg

SEQ ID NO: 206432 - DNA, 3552 bp, Zea Mays
agctgaggagaaaggacttgattgggaagccgcctcagaaaggacgctcctccccaaccccatccccgcccccgcgggctcggaaagctgaggagaaaggacttgattgggaagccgcctcagaaaggacgctcctccccaaccccatccccgcccccgcgggctcggcgggttgcgctgctgcggtgcggtgagacgcgggggcacggacggaggccgccactggatctcgtggagctggcccgcgccgagagcgatcatgagctctagaggccttgtccgcctcccggtttcctgtagtgctgctgttgatggagtcaatggatgcctcacctacagtacatgtcgttcaagaaactactactatcagtattctcataccactaacttgcaaatttcaccagtagaccagatgcctttgcctcggaaattaaagaaatcaattcagcgaaacgcttactttttaacccagaagaggaagctcgtaccacactgttcatcagaccttagtacctcctgcagaggagtgcccaactatttatcaatcaatgttttgcaagaccaatcaaatacaaaacagggagctattcgtaaagcgcttgtcattttgaatcctaattctggattccgcagctctcgggatgttttctaccagaaagtgcaatcaacattgaaggcttcaagatggaagtcattgaaacagcatatgccgggcatgcaaaggttctttcttctactgttgacctcaaaaaattccctgatggtattatatgtgttggtggcgatgggatcgtcaatgaggttttgaatggattacttagtagagacgattttgacgtggcaattcgatttcccattgggataatacctgctggttctgataattcattggtgtggactgttcttggcatcagggatcctgtttctgcggcaatcgctttagctaaggtaccttgattatgttaacactcaacaacaaaaaacaacaaggctttttagtctgaagtaaagcaagttgggataggctaaagttaaaacccgactaaaaccactagtcaatgttcagccacctggatctgttctccatgcactcttattcaaggttaaatctttgggtatattctatcatttcaagtctccttttaccgcattttcccatatcaccttcggtctttccttgcctctcttctcattgctatcgtgccttaggatcccactacacactggtacctcaatatgtcttcgtttggatatgttcaaaccatctcaaacggtgttagataagtttttctgcaattggtggctggtgctatctctagtctatcacatatatcatcgttccggattcgatcccttctttgtatggccataaatccaacatagcatatgtatttccgcaacacttatctgttaaacatgttgtcttttttagactgacattctgcaccatacaacatagcaggtctaacagttgtcctataaaacttgccttttagcttccgtggtatcctcttgtcacataaaacggtagatgtttgatgtcactttatccaccctgcttttattccatggctaatatcttcatcaatattcccatctctctgtagcattcatcctaaataccgaaagatattctttataagcactacttagtcttacaaattagcatctcatttttcatgtatagtagtgccgaagtcacatctcatatatttgattttaattctatagttttactgtgtctaaaacctttagaatctagagtctcctgccataacttcaatttcttatttactcctgctcgactttcaccaatcaatactacactgtctgcaaaaatgcatacaccaagggatatcctcctgtatgtcccgtatgatatcatgcattaccaaagcaaaaaggtaagggcttaaagttgactcttattgtagttctattcttatcaggaagtcatccgtgtccccatcacttgttcgaacactagtcacaacattggtgtacatgttttaaatgagtctaacatacttttttggaactttatgtttgtttaaagcccaccacataatattcattggtattttgttataagccttttccaaatcaatgaaaaccttatgtgggtccttttgctccctatactgttccatcacttgtctttttaagaaaatggcttacatggttgatcttttgagtatgaaaacaaattagttcatagagatccttgttatttctcttagacaatgctcaataattcttccatagcttcatgtatggctcgtcaactttactgcctggtaactagtacagctttgaatgtctcccttattttttgtagattggtactgatatacttctccactcgttagccatcttgttttcatgttcacttatttgatactagatcgtacaactaagattttctctgaatcggtatatcatcaaacttaacggcacatattaatctgaggccattcttctgcagggggatttcacaccaatagatgtgtttgccgtaaagtggatccaagctggagtgactcattttggtttgacagcttcctactatggtttcgtagctgatgttctgcaactgtcagaaaagttccgcgtgcagctcggtcccttccgttacgttgttgctggccttctgaagtttctttcattaccccagtacagatttgaggtggactatctcccttcatcgctgcaggggagaagttctgaatcaagaccactggctgaaaaacgtcacgaacagctttctgatgacggcaaggttaggagaggcacacagaccaacggtaggatcaaagacgactgggttaccaggaacggggagtttcttggcatttttgtttgcaatcacttctgcaagcctgcccaggggttactttctcctgttatcgcaccgaaagcgcggcacgacgacggcagcctggacctgattctcgtccatggaagcggcaggctgagactgttttgcttctttgttgcctatcagctctgctggcatcttctactcccctacgtggaatatgtcaagataaaagaagtgaaggttaggccagttggcagtacccacagtggttgtggcgtcgacggtgagcttcttgatggagagcgcggtgctgaatggcagtgctcgctgcttccagcacaaggcaggctgcttggccaggatcccggtgctttcaactagttagggctcgttcggttagctctcaatccatgtagattgagtgagattagatgagtttgaatcccaaacaagtcaaacttcttaattttttccaatcccatctaatccatgtgtattgggaataaccgaacaaggcttactgttttatctgtccagcagtaccgaggttgttggttaatttcatgataagagagcgagtttcagcaatgttcgtatactgattatacagtattctgtctctatagattgtagctgcagcagtctgaacaactgattttaatttttggccactattttcgtatatttattgtgagtttgtgaacaaggctagagcctagtgcacatagggg

SEQ ID NO: 206433 - DNA, 1619 bp, Zea Mays
atagaccccgcgcatggacggcctccatccactccgcccagcacccgcacctcgtcagtcgtcaccgagaagcagaagcagcagctgctgcctgctggtcgttcgttcgcctcgttctctccgcctccccccaccccccgcctcgcttcctcctccgcgcttccttcgccgaggcgtcagcgtcagcgagggcgtataaagcgctccccctccgcgcgcggccgcggcggcgggatccaagtcaggcggccatgagttgctgatgtttgaggcccttcgtgaagccttgatagaagagatgaatttggatccaacagtgtgcgtcatgggtgaagatgttggtcattatggaggttcatacaaggtgaccaaagggttggctgagatgttcggagatctccgggtccttgatacccctatcgccgagaactccttcactggcatgggagttggagcagcaatgaaggggctgaggcctgttgtggaaggcatgaacatgggtttccttctccttgcctacaaccagatctcgaacaactgcggcatgcttcactacacctcaggcggccagttcaagatcccggtcgtgatccgaggccccggcggtgtcggtcgccagctcggtgccgagcactcgcagcggctagagtcgtacttccagtcgattcctggccttcagatggttgcctgctccactccttacaacgcaaagggcctgatgaaggcggccataaggagcgagaaccccgtggtgctgtttgagcacgtcctcttgtacaacctgaaggagaaaatccccgacgaggagtacatctgctgcctggaggaggcggagatggtgcggccaggtgagcacgtgaccatcctcacgtactcccgcatgaggtaccacgtgatgcaggctgccaagacgctggtgaacaaggggtacgaccccgaggtcatcgacatcaggtcgctgaagccgttcgacctgcacacgatcgggaactcgatcaagaagacccaccgcgtgctgatcgtggaggagtgcatgcggacgggcggcatcggcgccagcctgcggtcggccatcatcgacaacttctgggactacctggacgcccccatcatgtgcctgtcgtcgcaggacgtgccgaccccgtacgccgcgacgctggaggacgccaccgtggtgcagcccgcgcagatcgtggccgccgtcgagcagatctgccaatgatcagtgatatcatggctttgttgagtacctgatctgtggagtcagattaccgtggttttgtttctctgtcgcatcgcgactgtcaccgtgccttagacaagacatgtttttgtattttgcaacgcagaagccatactcgtactggatgccgtttgtgggtggcctatttgttcattgtgcaaagttggatgccatactcgtacactattattatcaggtttcagcattcgtttgtactttgtagcagcgccgtgttgcgctgtcggcatgacgttgaattcactcctgcacctgaattttgttggttatattttagattttttaattattcctctatgtactagttctacggagagacaaaaaacccactcgggcattgtattttggtcgtcccatc

SEQ ID NO: 206434 - DNA, 1165 bp, Zea Mays
acccgagttttggttacccattgtcatggatgttcatgggcacacggccaccacaccgcggcgcgtggccagcgcagcgaatccatccccatcctcatgattataaataaataataattttacacgcccccttctctctcgatttctcgcggagcggccctccacctttatcgccgccgccgccgttgctgtgttccgtctcttcgccgatggcttcggccaaggtggagaaccgaggcgcgctgtccaaaaggtcacgtaacgacgagaatgatgtcaggacctcctgcttctggatatgaccggtcacctctattttacggaggaggtggtggcgccccacctccaattccgcttggaactggtagctatggtgctccatatccacaccttgggatgcgatatggctatggtccaccagtaggacctcctggttcatacggtcttttctcttcatatggtccacctgggccaatgagtggtatgggatatggcccaggacctgagctaggccgatatagctatgggtttagaggttctccaatgccggtttctagtccatggtctggtggagcattagctgaaaacaatgacaacattgcttcacgaaagcgccgtggaggccctgatggactttctgagggtgactggacctgtcccaaatgcgacaacattaacttttccttcagaagcacttgcaacatgaagaaatgtggagccccgaggccaactccgggaggtaacacgagctcatctcgcaaggacaacagcaataaggaagcccctgaaggaagctggacctgcccagagtgcaacaacctgaactacccattccgcacggtgtgtaacaggaaaggatgctcgtacagcaagccagccccggcgaacaactgaacccaaccttcgcgcatcgtcgagatattgttgtacccgtagattgtatcctagtcgtgtgcaatctttgaactgcacaaagatgtttgtgcctggagacgagagattcgattcgttacgcttaatttactattatacttttttattaaatgatgaaaactagggaagagcattatatctataaactcttagtagtctgctatacacagcaattgacatcaattgttgcagctctcgagacattaatccttgaaccacgcaacatgttctc

SEQ ID NO: 206435 - DNA, 1685 bp, Zea Mays
ctgactggcgttcgtgttccgtgttcgactcgacgcgctcgtgcgtggcatacagacgaacacctcacaaggacaaccagtcccctcactcaggaagcttcccggggaaagaatgtgcgggtgtgcggccctcgtcgccggagcccggccgccacggcccgtcctcccccgcaggctccgtcgccgtcgagggagctccgtccgagcagaggtctcaccaggcggtgagtcccagccgaagaaggtcaccgtcgcaggcgccggctgggccggctttgccgccgcgcaccacctcattaaacagtcattgacttcgacaacactgacactgcttggaggaaatatgatgcaagtaaggaagttccattgtctatccagttagttcagattagtgtacgtgtcacatgtactacatgtcttcataatgggttatctttatcaaattattgttggtatcttcatctgtagtgactgcaaaagagctttttaagatgtatggttgctctcaaaggctctacagggaaatttttgagctagttattcaggctgccctgtttgctcctggtgagcaatgtagtgcagctgcaacactggggatgctgtactattatgtgttgtctcatcaggaaaattctgacttcttgctgtgccgtggtgaagtagaagaaaaaattttctctccttggctgcaatcattggagcttaaaggcttaaaatttgtagaaaataaagttccaacaagtttgactacagatgtggatagcggatgcatctcttctattgtttgtggtgatgatgtgtacgaggcagatgcatttgttttagccatgggactctcttctctacaatccatcgtcaaaaacagtccattcctacggtctgatcgagaattcaggaatcttcttcacctatctacagtcgatgtgatctctgtaaaattatggtttgataaaaagatcataattccaaaggttgccaatgtgtgttctggttttgatgattcatctggctgggcattctttgaccttacctcagtatatgatgattattgtgaagaatcaataaccattgtggaggctgaattttataatgctagccatttggtactcttaagtgatgatgatattgtctatgaagcttcatcacatcttatcaaatgcatacaagattttgagggcgcaattgtgataagatattcaatcagaagatctcctaattctgtaatcaactttcttccagttgaaggagatgagccccatatagagacattgcgaagtctcaatagaagagccaatgaactgaagtcacaaattccattctcagaattctttctccaataattttgttgggatttttctgtgtttgttgagcattgccattgttgtaggcattgttattaagtcggtaaggtaaagcgtggcgacctagccctttgagtcgactagacgcttaaggcgcgcagcgaggtgtcgccatacagatgtcctaacctacaggagagcaatagaaacataccttgttgatgccaattttggagctccagtttcgcttgttccatgtagcgtgtatcccccttacagattgcaacatgaacatgttgtgaattataattaatgtaagaaacaatttataatgcaatgattgaatgaatcatctgtgtaaaatatagattggcttgaagggga

SEQ ID NO: 206436 - DNA, 1883 bp, Zea Mays
ctgactggcgttcgtgttccgtgttcgactcgacgcgctcgtgcgtggcatacagacgaacacctcacaaggacaaccagtcccctcactcaggaagcttcccggggaaagaatgtgcgggtgtgcggccctcgtcgccggagcccggccgccacggcccgtcctcccccgcaggctccgtcgccgtcgagggagctccgtccgagcagaggtctcaccaggcggtgagtcccagccgaagaaggtcaccgtcgcaggcgccggctgggccggctttgccgccgcgcaccacctcattaaacaggggtacgatgtcacgcttcttgctgcggagagtggcccaacggaggaggttggcctcagaggattctggcaaccgtatcgcaacatcttcgctttagtcgacgagctggggatctcgcctttcacgggctggaataaagcagcatactattctacggagggccttgctgtcgaatttcccatatttcataaccagccccgattaccagctccctttggagtctttgcatatccagaattccctaatcttcctttgagtgataggctgacatcaattcctgtcatagctgcagtcattgacttcgacaacactgacactgcttggaggaaatatgatgcaagaaaattctgacttcttgctgtgccgtggtgaagtagaagaaaaaattttctctccttggctgcaatcattggagcttaaaggcttaaaatttgtagaaaataaagttccaacaagtttgactacagatgtggatagcggatgcatctcttctattgtttgtggtgatgatgtgtacgaggcagatgcatttgttttagccatgggactctcttctctacaatccatcgtcaaaaacagtccattcctacggtctgatcgagaattcaggaatcttcttcacctatctacagtcgatgtgatctctgtaaaattatggtttgataaaaagatcataattccaaaggttgccaatgtgtgttctggttttgatgattcatctggctgggcattctttgaccttacctcagtatatgatgattattgtgaagaatcaataaccattgtggaggctgaattttataatgctagccatttggtactcttaagtgatgatgatattgtctatgaagcttcatcacatcttatcaaatgcatacaagattttgagggcgcaattgtgataagatattcaatcagaagatctcctaattctgtaatcaactttcttccaggctcgtataagtacacactgagaggatcaacttcctttccaaatttgtttattgctggtgattggattgtcaaccgacatgggtccttttctaaagaaaaagcatatgtgactggacttgaagctggtaatagggtagtagactattttgacattggggactttgccaaaataattgcagttgaaggagatgagccccatatagagacattgcgaagtctcaatagaagagccaatgaactgaagtcacaaattccattctcagaattctttctccaataattttgttgggatttttctgtgtttgttgagcattgccattgttgtaggcattgttattaagtcggtaaggtaaagcgtggcgacctagccctttgagtcgactagacgcttaaggcgcgcagcgaggtgtcgccatacagatgtcctaacctacaggagagcaatagaaacataccttgttgatgccaattttggagctccagtttcgcttgttccatgtagcgtgtatcccccttacagattgcaacatgaacatgttgtgaattataattaatgtaagaaacaatttataatgcaatgattgaatgaatcatctgtgtaaaatatagattggcttgaagggga

SEQ ID NO: 206437 - DNA, 1935 bp, Zea Mays
ctgactggcgttcgtgttccgtgttcgactcgacgcgctcgtgcgtggcatacagacgaacacctcacaaggacaaccagtcccctcactcaggaagcttcccggggaaagaatgtgcgggtgtgcggccctcgtcgccggagcccggccgccacggcccgtcctcccccgcaggctccgtcgccgtcgagggagctccgtccgagcagaggtctcaccaggcggtgagtcccagccgaagaaggtcaccgtcgcaggcgccggctgggccggctttgccgccgcgcaccacctcattaaacaggggtacgatgtcacgcttcttgctgcggagagtggcccaacggaggaggttggcctcagaggattctggcaaccgtatcgcaacatcttcgctttagtcgacgagctggggatctcgcctttcacgggctggaataaagcagcatactattctacggagggccttgctgtcgaatttcccatatttcataaccagccccgattaccagctccctttggagtctttgcatatccagaattccctaatcttcctttgagtgataggctgacatcaattcctgtcatagctgcagtcattgacttcgacaacactgacactgcttggaggaaatatgatgcaagaaaattctgacttcttgctgtgccgtggtgaagtagaagaaaaaattttctctccttggctgcaatcattggagcttaaaggcttaaaatttgtagaaaataaagttccaacaagtttgactacagatgtggatagcggatgcatctcttctattgtttgtggtgatgatgtgtacgaggcagatgcatttgttttagccatgggactctcttctctacaatccatcgtcaaaaacaggaatcttcttcacctatctacagtcgatgtgatctctgtaaaattatggtttgataaaaagatcataattccaaaggttgccaatgtgtgttctggttttgatgattcatctggctgggcattctttgaccttacctcagtatatgatgattattgtgaagaatcaataaccattgtggaggctgaatttgtatgttcatgtcacctttatcagtttgaaaatatacagcattttcatcaggatgtacttactctttcaacttatttctcagtataatgctagccatttggtactcttaagtgatgatgatattgtctatgaagcttcatcacatcttatcaaatgcatacaagattttgagggcgcaattgtgataagatattcaatcagaagatctcctaattctgtaatcaactttcttccaggctcgtataagtacacactgagaggatcaacttcctttccaaatttgtttattgctggtgattggattgtcaaccgacatgggtccttttctaaagaaaaagcatatgtgactggacttgaagctggtaatagggtagtagactattttgacattggggactttgccaaaataattgcagttgaaggagatgagccccatatagagacattgcgaagtctcaatagaagagccaatgaactgaagtcacaaattccattctcagaattctttctccaataattttgttgggatttttctgtgtttgttgagcattgccattgttgtaggcattgttattaagtcggtaaggtaaagcgtggcgacctagccctttgagtcgactagacgcttaaggcgcgcagcgaggtgtcgccatacagatgtcctaacctacaggagagcaatagaaacataccttgttgatgccaattttggagctccagtttcgcttgttccatgtagcgtgtatcccccttacagattgcaacatgaacatgttgtgaattataattaatgtaagaaacaatttataatgcaatgattgaatgaatcatctgtgtaaaatatagattggcttgaagggga

SEQ ID NO: 206438 - DNA, 1846 bp, Zea Mays
ctgactggcgttcgtgttccgtgttcgactcgacgcgctcgtgcgtggcatacagacgaacacctcacaaggacaaccagtcccctcactcaggaagcttcccggggaaagaatgtgcgggtgtgcggccctcgtcgccggagcccggccgccacggcccgtcctcccccgcaggctccgtcgccgtcgagggagctccgtccgagcagaggtctcaccaggcggtgagtcccagccgaagaaggtcaccgtcgcaggcgccggctgggccggctttgccgccgcgcaccacctcattaaacaggggtacgatgtcacgcttcttgctgcggagagtggcccaacggaggaggttggcctcagaggattctggcaaccgtatcgcaacatcttcgctttagtcgacgagctggggatctcgcctttcacgggctggaataaagcagcatactattctacggagggccttgctgtcgaatttcccatatttcataaccagccccgattaccagctccctttggagtctttgcatatccagaattccctaatcttcctttgagtgataggctgacatcaattcctgtcatagctgcagtcattgacttcgacaacactgacactgcttggaggaaatatgatgcaagaaaattctgacttcttgctgtgccgtggtgaagtagaagaaaaaattttctctccttggctgcaatcattggagcttaaaggcttaaaatttgtagaaaataaagttccaacaagtttgactacagatgtggatagcggatgcatctcttctattgtttgtggtgatgatgtgtacgaggcagatgcatttgttttagccatgggactctcttctctacaatccatcgtcaaaaacaggtaacaccgtatatgtcacacgttaatcttgggtcagttttgccttaccttagaaccttaccttactacattcagtaatgttggaagccaagaatggtaagaacatatatcctataacacttaaagcagccatacgtttcagttttcacaacctgaattctgcatttaatttatatgcttttctgacatgtaaagtccattcctacggtctgatcgagaattcaggaatcttcttcacctatctacagtcgatgtgatctctgtaaaattatggtttgataaaaagatcataattccaaaggttgccaatgtgtgttctggttttgatgattcatctggctgggcattctttgaccttacctcagtatatgatgattattgtgaagaatcaataaccattgtggaggctgaatttcttcatcacatcttatcaaatgcatacaagattttgagggcgcaattgtgataagatattcaatcagaagatctcctaattctgtaatcaactttcttccagttgaaggagatgagccccatatagagacattgcgaagtctcaatagaagagccaatgaactgaagtcacaaattccattctcagaattctttctccaataattttgttgggatttttctgtgtttgttgagcattgccattgttgtaggcattgttattaagtcggtaaggtaaagcgtggcgacctagccctttgagtcgactagacgcttaaggcgcgcagcgaggtgtcgccatacagatgtcctaacctacaggagagcaatagaaacataccttgttgatgccaattttggagctccagtttcgcttgttccatgtagcgtgtatcccccttacagattgcaacatgaacatgttgtgaattataattaatgtaagaaacaatttataatgcaatgattgaatgaatcatctgtgtaaaatatagattggcttgaagggga

SEQ ID NO: 206439 - DNA, 1645 bp, Zea Mays
caccaacctacctcctcccctcccaccgcgggctcccgtgcgtctgccacggtgccacccgctcccgcgacatctatagacagagcagccgttctagaaagcatagtaggagagagatgagcgaggaggagaggaaaggagggggcggaggaggggacgacggagcggcggcggccgcgcgagcggcggagcaggcgcgggagctgcaggacgcggcggcggcgctgctgacgcgcacgcgggcggaggaggaggcgctgcgccggcgcgccgccgcgctgcagggggagctaaggcggctacgcgaggccgccgcggcgcacgcggacagcgaaaaggttgaggaggacttggatcgagcaacgtgcctcattaccgaaggagacgttgcgtcgctgctcccgagcaagacgcaaggcacttttctgaggatgttcttgggaccagtaaatctgcgggcaccaaggaaggaggtgcagctcaaggtgaaggaggagtacaatagctacaggaactgccttgctgtttcttggttttccagtgattttgttgttccttcgacaatggttatggaatagatgctttccagcattgccagttcagctgtaccaggcttggttgttattcctgtatactagtttagctttgcgtgagaacatactgcgagttaatggaagcgatattcgtccttggtggatacttcatcactactctgccatgctgatgtctgttataagtctcacatgggagataaaggggcaacctaattgtgcacgcaagcagagaggcgtggaactttttctgtgctgggccataatgcaaggatttgtcatgatgttgcagaatagatatcagcgtcaaagattatatactaggattgctttggggaaggctaaaaggatggatgttgtatggggagagactgctggtgttgaaggtcaattgttgctgttgtgccctctcctttttctattgcagggatttgagggttatgttgggtttttacttcttcgcacagctcatactggtgtcgtccctgagtggcaggtggtggtctgtgggatcctgctgatttccatggcaattggcaacttcgcaaacacattggatacattgatggccaagtctcggttcaaagcgaagatgaagaaatcaaagggcaaacgggatcttgacacgtgcccctcaccaacaggttcgtcgccgacagattcagcaaccagagcatgaaaaggtcaagagggccagttgcttaccctatgaccattgcccgtgtttaaccagggctggtcaccattgtaaatcattagtgttttctggccatcagcccctaatccttactgtctctgtcagagctcatactcatgtaagcatcaggcaactaggttgctgatggtcctaggctgaaaaaggatactgagaataaacttctggtgtttgtttatacctatatcctgaacatggagtggagtagatgagctttaggactgcaagtcttagcaaaattttcccagtatagttgtgaagctgtgagacatttgtcacaatgcgaagctgtatacaggttgaggcactatattgcttattattctgccctcggtgtatgattgatgaaatggagagtgcagaacagcgctgacactca

SEQ ID NO: 206440 - DNA, 731 bp, Zea Mays
cttgatagaatttactccatcgaatcacatatataaattaatctaggctaaaaggatggatgttgtatggggagagactgctggtgttgaaggtcaattgttgctgttgtgccctctcctttttctattgcaggtggtggtctgtgggatcctgctgatttccatggcaattggcaacttcgcaaacacattggatacattgatggccaagtctcggttcaaagcgaagatgaagaaatcaaagggcaaacgggatcttgacacgtgcccctcaccaacaggttcgtcgccgacagattcagcaaccagagcatgaaaaggtcaagagggccagttgcttaccctatgaccattgcccgtgtttaaccagggctggtcaccattgtaaatcattagtgttttctggccatcagcccctaatccttactgtctctgtcagagctcatactcatgtaagcatcaggcaactaggttgctgatggtcctaggctgaaaaaggatactgagaataaacttctggtgtttgtttatacctatatcctgaacatggagtggagtagatgagctttaggactgcaagtcttagcaaaattttcccagtatagttgtgaagctgtgagacatttgtcacaatgcgaagctgtatacaggttgaggcactatattgcttattattctgccctcggtgtatgattgatgaaatggagagtgcagaacagcgctgacactca

SEQ ID NO: 206441 - DNA, 627 bp, Zea Mays
gaacttcttaactgacatgatttcttggctatttttattttaataaggagttctcagactgttgtgttgcattcctatgcgaaggatatatatgagctctgaattagaaagagcttgaaacccacaattgtaggtaccacctagatcatgggtaacagcaagcaaaatgagttaacaaaggagacaactgtgcaagctactggagtagcctcgaacctggtggaagctatccagggagctgggttcaagctgcaaactctaagcttgagcttcgatgatttcgacgagccagcagcaggagcgggaggcactgtccaatccagcgagtgagctaatttgtggtgccgtgcgtggtgccaaatgcatataattcggtctcctgattttgtttaccctgctccttacctttgatttcccaagcacgatcttgttttttttttggcaaatggtcgagaaatcaatgaatatttttaaggaaaaacatttgttttttttggctgattcgtgaagttagtgatggcttaagtaaattcatttggcagcgcttccaatacttgggaattctgggccgaaactgcctaatatccctatccttgtaggctttggctcaacatgcaattgctttac

SEQ ID NO: 206442 - DNA, 2590 bp, Zea Mays
acatgatcctgctttgtcaccggcccctccctcacctaccaggatgaacctgctgacgtcgacctctgtcaccattcccgcccatgctcaactcccctagagaccggtcccacgcgccggcggagccctgcttttttcgtcgtcgctctcccagcgagccgtgcccgtctgctcctcctctctccctccatgctcctcgctgcgctctcttccccgcacacttatctttccagctcagtgtccgtccctctcctcgacacgcacatcttccattgctcgcttgcttcctcgtgtcgtctagctctatccgattccaacacagctacctataaatacatctctctctctctctctctccccgagcagagctaggcagagggcagaccattggcgagaggattgttggagctcggccgagcagagcacgcacagtgtgattgtgtgtgtgtgtgtctgacatggcgtcgctctggctagcgagagcgtcgtcccagctggcgcgccgtgccgccgccaggaggcctcctccgcgtcctgcgcgccacggctccggccaacccaccagttcgtggttcttgggctcggtgccgcaggcggcccttgggtcaccagcgctggacacaagccgccggggcttctgctccgtccggcgcttcgcaggggagagcagcgctgctgctgctgcggcggctgtcgtcgacgaggagccggagagcgggttcgcagccggcgatcagcaggcagttgactttccaggagggaaagtatcctttgtggccgaaatgaacttccttccagaatcgacgagggaaaggatcaactgctaccgcgtgcttgacgacgacggcagaacgatatcaggaagtagattccaagaggtcagtcgggagctggctctgaagatgtacagcgagatggtgacgctccagatcatggataccatcttctacgaggctcagaggcagggcaggatctcgttctacctcacttccaacggcgaggaagcgatcaacatagcctctgctgctgcgctcagtatggatgacattgtgctgcctcagagcccaaaatgtagtacagggaacctggtgttcttctatggcgtggcttcactctgcaggagtttgcaaaccagtgctttgggaacaagctggactatggtaaagggaggcagatgcccattcactatgggtcgaaccgtctgaactatttcacagtctcgtcacctatcgcaacacagctccctcatgctgttggagctgcctactctctgaagatggacaagaaggacgcgtgtgccatcacatactttggggacggtgggacaaggagacttccatgcagcgctcaacttcgcggctgttatggaggcaccggtgatcttcttctgccgcaacaatggctgggccatcagcactccgactactgaacaattcagaagtgatggagttgtcatccgtggccaggcttatgggatccgtggcatccgagtagatggcaatgatgctcttgctgtgtacagcgcaatccatgctgcccgagaaatggctgtaactgaaggaagaccaattttagttgaggcactgacttaccgagtcggccatcactcgacatccgatgattcgaccaagtacaggccagttgatgagattgagcattggcgaacagcgagggatccgatttccagatacagaaaatgggttcagggtaatgactggtggtctgatgctgaagaatctgagctcaggagcagagtgagaaaagagcttctccaagccatccaggttgcagaaagaatgccaaaaccaccagttactgagcttttcactgatgtttacgacaagatcccttccaacctgcatgaacaagagcaattgctgcgggatacaatcatgaggcaccctgcagactacccaactgatgtacccgtttagttttcttggccttagatgagcagtatcgttgtgtaattattgatgagtcaggtccatagcattttgaataatacagtgattcagccagtgaactgctgattcaacacgttcttaaacaataattcaacctggcagattgccctgttgctggcactcgtgagccatgctaagatatttcattgcctgcacagcgtaccttataataataatagctactgaagctgcatataaaatatagtaaccagactggcagagatcatttcaaatgattccctattctaagtaacttaaatgccctccagtcataatttcgtatataaagcgttaactccgccaacaagattctaatgttgacagtgtgaaaaataaaatactagagcacaagggtcaagatggagaaacagtacaaaatgctatggacctgaatcatcagaccaacaatttcaaattcatctgtcaaggacctatatcaacaattgttaacctaaaactaaaatttccatgctaataatactaaataggcactaatattctgcaaactgcatcggaaatagaaccgcaaaaatatctcatactatgcctatgcttttgccccagatgtaattacaacttacagcaacaagcatatattgtatggttcctcacatctgtatcaa

SEQ ID NO: 206443 - DNA, 3080 bp, Zea Mays
atcacaattcacaggctgcacagcacacaaaccccgcgtaggggtagagatcacctcacccctcccgactccggcgcatccattcggtcgctgccggatgcgtgcttgacccggccatggatgactctgtccctttcaatgacctcggtccctccaagcccccgtcggcctctttctacgacgatatgttcgagtcctacttcaatcgcgcggccgaggcccccgagcccgcgcctaaggcttcttcctcgccgtcgacgccgccgcccgtgttcgacaagccagtcttcgacgacgatccttacacggccgatccattcgacgcgatccccttgtttggaggcggtggtggaggggaagaggaagacttgcacggtggcgtccggagtgcggcaaagccggagaggacggagttggaggtggtgggttttgatgaagatttgttccctgggttggctgggagcaccaattttcccatggagaagccggccagggaggtggagcgggaccgtcaaccagtggggttcgacgacgagttgatccctggattcgatggaagcatgaagccagcgccgcaaatggagcctgagacagtggcgtttgatgatgatgtgatccctgactgcagtggaggcacgagctatccctcttcggcaagggaggaacctataacgagacaagaaagtgaatcaatttcctctagcaaaattagcatgagcatgccagaagatcctttcgttactttaggtggtacacacaaatcgggatattcatctttagggttgttttcaaatcttctgaataacattggcatgcctagaaaggaagcggacacaacgcctgataataccagtgggatatttcagggttctgatatctttactgagtttccaaaagccatgccacccttttcgtttacatctgaaaaccagagtgatagaactgaaaggagatatactgaaaacataatcagcacgagtcactccgatcggctgcctcaggagaagacagtccaacaagcatcaacagaagcacctgccaatacattgactgagatgaacttccctgaagcatctgttgtccatgaagtacctgttaccactagttttcagacattgaacccatttgttgaggaagacgatttgttagaggtgaatcaatcttcacaaacgactaatgatgtgtggctaactgttttagatattgctttagtgacactacctacaagtgcgccacctccttcaaggcctccacctccacttgctgctaagaaaccacctactgaatctgtaactagtgaagcatatgcccatcattgtaatcaacgctaccatcactccatatgttcttcaaacacctctaaaacatcccaaattgatgaattggaagattttttcttgacaaagcctgcaaattctgccattggtcatccacaagttctaaagcatgaaggaaatgggcattatccatctgcagctactgcaagtttcatggactggactgagatgggacactgtaaaagggggaaccaaggggcatttgattctatgttcactagcagtcaatatcgacagccagaaatagatgagaaagcagaggtatgtgctcatgaaacagaaagtacagatgaagaaaagagattagagaatgaacaaatacaaagagaacataaagaagagcaaataagagcagaaagggagatggaagaagagcttgagagggaaagagaaaatgtgagacaaagggaacaagaggagcagaggaggcgtgaaaaagaaagagtggccaggcaggctgtagataaggctatacgggaggcacgcgaaagatcagctgctgaagcacgcatgcaagctgagaaggaggctcgtcaaagagcagagcgagctgcagtatggaaagcagcaacagaagctcgtgagagagctgcagtggaggcaaaggaaagagctgcgaaggctgctgcagaagctaaggaaagagaagcagcagaggctagagaaagggctgcaacagaatcaagggaaagggatgccaaagttgccgcagatgcaagggaaagagctgctagggctgctgctgaagctagggaaaaggaaacagcagaatttcaggagaaagctactgcagaagctcgggcaaaggctgagcgagctgctgttgagaaagctgcagcagaagcacggtggagggctgaaagagcagctttcgagagggttgctactgaagttaagcaaagggcttttaatgatgctagagaaagggctgccgctgcagctgcagctgaagcactggcaagagaaaatcagcaaaggagagcaacaacagaacctgaccttgagtcattctttggcatgccttctcgatcaagtagtctaccgagatcatacaacaacacaacaacgaatcctttcgatgttcaacctggcaatgctggttctggtggtgtaaggaggacaccttctggttcaggttttccctttactcagccttcatcaagcaatcttatggatggcctatcttctatatttggagcacctttaccatctgctgtatttcaagaagtggatggagagagtgaagagagaaggaaggcaagattggaacgacaccaaagaacaatggagcgtgcggcaaaagctcttgctgagaagaatgagcgtgacttgcaagctcagcaggagcaagaagagcgacatagaattggtgaatcacttgattttgagataaagaggtgggctgctggcaaagaaggcaacctacgggccttgctaacaacgttgcaatatattctttggcctgaatgtggctggcgacctgtatcattgactgatctgattacagcagcatctgtcaagaaagaatacaggaaagcaacattgtgtatccatcctgataaggtgcagcagaagggtgcaaatcttcaacagaaatacattgcagaaaaggtatttgaccttctgaaggaagcctggaaaaaattcaactcagaagaactcttctaacaacttgtttaggaaaatgttgatcgcaaaacaagtattgggaaggacagaggatcatcaaggacttgaaacatg

SEQ ID NO: 206444 - DNA, 3065 bp, Zea Mays
gtcatcacaattcacaggctgcacagcacacaaaccccgcgtaggggtagagatcacctcacccctcccgactccggcgcatccattcggtcgctgccggatgcgtgcttgacccggccatggatgactctgtccctttcaatgacctcggtccctccaagcccccgtcggcctctttctacgacgatatgttcgagtcctacttcaatcgcgcggccgaggcccccgagcccgcgcctaaggcttcttcctcgccgtcgacgccgccgcccgtgttcgacaagccagtcttcgacgacgatccttacacggccgatccattcgacgcgatccccttgtttggaggcggtggtggaggggaagaggaagacttgcacggtggcgtccggagtgcggcaaagccggagaggacggagttggaggtggtgggttttgatgaagatttgttccctgggttggctgggagcaccaattttcccatggagaagccggccagggaggtggagcgggaccgtcaaccagtggggttcgacgacgagttgatccctggattcgatggaagcatgaagccagcgccgcaaatggagcctgagacagtggcgtttgatgatgatgtgatccctgactgcagtggaggcacgagctatccctcttcggcaagggaggaacctataacgagacaagaaagtgaatcaatttcctctagcaaaattagcatgagcatgccagaagatcctttcgttactttaggtggtacacacaaatcgggatattcatctttagggttgttttcaaatcttctgaataacattggcatgcctagaaaggaagcggacacaacgcctgataataccagtgggatatttcagggttctgatatctttactgagtttccaaaagccatgccacccttttcgtttacatctgaaaaccagagtgatagaactgaaaggagatatactgaaaacataatcagcacgagtcactccgatcggctgcctcaggagaagacagtccaacaagcatcaacagaagcacctgccaatacattgactgagatgaacttccctgaagcatctgttgtccatgaagtacctgttaccactagttttcagacattgaacccatttgttgaggaagacgatttgttagaggtgaatcaatcttcacaaacgactaatgatgtgtggctaactgttttagatattgctttagtgacactacctacaagtgcgccacctccttcaaggcctccacctccacttgctgctaagaaaccacctactgaatctgtaactagtgaagcatatgcccatcattgtaatcaacgctaccatcactccatatgttcttcaaacacctctaaaacatcccaaattgatgaattggaagattttttcttgacaaagcctgcaaattctgccattggtcatccacaagttctaaagcatgaaggaaatgggcattatccatctgcagctactgcaagtttcatggactggactgagatgggacactgtaaaagggggaaccaaggggcatttgattctatgttcactagcagtcaatatcgacagccagaaatagatgagaaagcagaggtatgtgctcatgaaacagaaagtacagatgaagaaaagagattagagaatgaacaaatacaaagagaacataaagaagagcaaataagagcagaaagggagatggaagaagagcttgagagggaaagagaaaatgtgagacaaagggaacaagaggagcagaggaggcgtgaaaaagaaagagtggccaggcaggctgtagataaggctatacgggaggcacgcgaaagatcagctgctgaagcacgcatgcaagctgagaaggaggctcgtcaaagagcagagcgagctgcagtatggaaagcagcaacagaagctcgtgagagagctgcagtggaggcaaaggaaagagctgcgaaggctgctgcagaagctaaggaaagagaagcagcagaggctagagaaagggctgcaacagaatcaagggaaagggatgccaaagttgccgcagatgcaagggaaagagctgctagggctgctgctgaagctagggaaaaggaaacagcagaatttcaggagaaagctactgcagaagctcgggcaaaggctgagcgagctgctgttgagaaagctgcagcagaagcacggtggagggctgaaagagcagctttcgagagggttgctactgaagttaagcaaagggcttttaatgatgctagagaaagggctgccgctgcagctgcagctgaagcactggcaagagaaaatcagcaaaggagagcaacaacagaacctgaccttgagtcattctttggcatgccttctcgatcaagtagtctaccgagatcatacaacaacacaacaacgaatcctttcgatgttcaacctggcaatgctggttctggtggtgtaaggaggacaccttctggttcaggttttccctttactcagccttcatcaagcaatcttatggatggcctatcttctatatttggagcacctttaccatctgctgtatttcaagaagtggatggagagagtgaagagagaaggaaggcaagattggaacgacaccaaagaacaatggagcgtgcggcaaaagctcttgctgagaagaatgagcgtgacttgcaagctcagcaggagcaagaagagcgacatagaattggtgaatcacttgattttgagataaagaggtgggctgctggcaaagaaggcaacctacgggccttgctaacaacgttgcaatatattctttggcctgaatgtggctggcgacctgtatcattgactgatctgattacagcagcatctgtcaagaaagaatacaggaaagcaacattgtgtatccatcctgataaggtgcagcagaagggtgcaaatcttcaacagaaatacattgcagaaaaggaagcctggaaaaaattcaactcagaagaactcttctaacaacttgtttaggaaaatgttgatcgcaaaacaagtattgggaaggacagaggatcatcaaggacttgaaacatg

SEQ ID NO: 206445 - DNA, 3569 bp, Zea Mays
cacaaaccccgcgtaggggtagagatcacctcacccctcccgactccggcgcatccattcggtcgctgccggatgcgtgcttgacccggccatggatgactctgtccctttcaatgacctcggtccctccaagcccccgtcggcctctttctacgacgatatgttcgagtcctacttcaatcgcgcggccgaggcccccgagcccgcgcctaaggcttcttcctcgccgtcgacgccgccgcccgtgttcgacaagccagtcttcgacgacgatccttacacggccgatccattcgacgcgatccccttgtttggaggcggtggtggaggggaagaggaagacttgcacggtggcgtccggagtgcggcaaagccggagaggacggagttggaggtggtgggttttgatgaagatttgttccctgggttggctgggagcaccaattttcccatggagaagccggccagggaggtggagcgggaccgtcaaccagtggggttcgacgacgagttgatccctggattcgatggaagcatgaagccagcgccgcaaatggagcctgagacagtggcgtttgatgatgatgtgatccctgactgcagtggaggcacgagctatccctcttcggcaagggaggaacctataacgagacaagaaagtgaatcaatttcctctagcaaaattagcatgagcatgccagaagatcctttcgttactttaggtggtacacacaaatcgggatattcatctttagggttgttttcaaatcttctgaataacattggcatgcctagaaaggaagcggacacaacgcctgataataccagtgggatatttcagggttctgatatctttactgagtttccaaaagccatgccacccttttcgtttacatctgaaaaccagagtgatagaactgaaaggagatatactgaaaacataatcagcacgagtcactccgatcggctgcctcaggagaagacagtccaacaagcatcaacagaagcacctgccaatacattgactgagatgaacttccctgaagcatctgttgtccatgaagtacctgttaccactagttttcagacattgaacccatttgttgaggaagacgatttgttagaggtgaatcaatcttcacaaacgactaatgatgtgtggctaactgttttagatattgctttagtgacactacctacaagtgcgccacctccttcaaggcctccacctccacttgctgctaagaaaccacctactgaatctgtaactagtgaagcatatgcccatcattgtaatcaacgctaccatcactccatatgttcttcaaacacctctaaaacatcccaaattgatgaattggaagattttttcttgacaaagcctgcaaattctgccattggtcatccacaagttctaaagcatgaaggaaatgggcattatccatctgcagctactgcaagtttcatggactggactgagatgggacactgtaaaagggggaaccaaggggcatttgattctatgttcactagcagtcaatatcgacagccagaaatagatgagaaagcagaggtatgtgctcatgaaacagaaagtacagatgaagaaaagagattagagaatgaacaaatacaaagagaacataaagaagagcaaataagagcagaaagggagatggaagaagagcttgagagggaaagagaaaatgtgagacaaagggaacaagaggagcagaggaggcgtgaaaaagaaagagtggccaggcaggctgtagataaggctatacgggaggcacgcgaaagatcagctgctgaagcacgcatgcaagctgagaaggaggctcgtcaaagagcagagcgagctgcagtatggaaagcagcaacagaagctcgtgagagagctgcagtggaggcaaaggaaagagctgcgaaggctgctgcagaagctaaggaaagagaagcagcagaggctagagaaagggctgcaacagaatcaagggaaagggatgccaaagttgccgcagatgcaagggaaagagctgctagggctgctgctgaagctagggaaaaggaaacagcagaatttcaggagaaagctactgcagaagctcgggcaaaggctgagcgagctgctgttgagaaagctgcagcagaagcacggtggagggctgaaagagcagctttcgagagggttgctactgaagttaagcaaagggcttttaatgatgctagagaaagggctgccgctgcagctgcagctgaagcactggcaagagaaaatcagcaaaggagagcaacaacagaacctgaccttgagtcattctttggcatgccttctcgatcaagtagtctaccgagatcatacaacaacacaacaacgaatcctttcgatgttcaacctggcaatgctggttctggtggtgtaaggaggacaccttctggttcaggttttccctttactcagccttcatcaagcaatcttatggatggcctatcttctatatttggagcacctttaccatctgctgtatttcaagaagtggatggagagagtgaagagagaaggaaggcaagattggaacgacaccaaagaacaatggagcgtgcggcaaaagctcttgctgagaagaatgagcgtgacttgcaagctcagcaggagcaagaagagcgacatagaattggtgaatcacttgattttgagataaagaggtgggctgctggcaaagaaggcaacctacgggccttgctaacaacgttgcaatatcagcatctgtcaagaaagaatacaggaaagcaacattgtgtatccatcctgataaggtgcagcagaagggtgcaaatcttcaacagaaatacattgcagaaaaggtatttgaccttctgaaggaagcctggaaaaaattcaactcagaagaactcttctaacaacttgtttaggaaaatgttgatcgcaaaacaagtattgggaaggacagggacatactggtccctgtagtaatgaagaaagggagagtagcaggggccctgtttggtaagggtatgtagaagcaggcaccagctcgaggggcgattccggttagctcaaggccagatatgcaggctagtcgctcgtccaatctggagaagcagccgccagctcaaggacgtttcttgctagctctaggctagggaaaatttaactatttgatgataactctctaaaagaactatttgatgataactctctaaaagatacttttataatgtccataacagttaccattattttttgaaacattctacatttttgtcattttacctacatggctggccacgcatgcccactatgtgtccttgccagcgtggaatgctttggaaaatgtcccttttgccctccatctctcagccattgagccgatagcctcgccagcgacgtcgggtagctagctacccacaaggcctagctcgtcgggattctccaccagtggcgtcgttggcgtcattcgccccaccacgagcacgttgaccttagataacatgttgatggtctcaaacacctccttggtgtacccttgccgctcctcgaagtg

SEQ ID NO: 206446 - DNA, 2721 bp, Zea Mays
gtccagagagcgcgagagattgtgctgagttcctggctgacgcgaccagacagcgtctgcaaacaaaaaaaaaaccagaaacatttttgggaggatgtgatgcaggacaaaggatttctctccccgccgtccctgtctcccagacaactacctccacgctccccacggtcctctcctaatcccaattaatgctacgcaggcaaagatcgttttttttgttcttgtgcaccggttctctgattgcggagtcctgctctctctgcggtcggttttcgttgatccctcctgcattggtccgctccggctcagatccgattctctaggaaaagaaagaccagagtatcaggtggaacaacagaattctaggtactgccgggccgctcaacaagggaagagcaagagctccagtctctgtcccactgaggggttgtgaatcatgatcctctaataaccataccctggaaggctggaacaaatttcgttccaaaagggacataatcagagaaggccagttaagggggcagtgagaagggatggcgatggagttggccaagcaattgctcgtcgctgttctcagaagctatgcaccacctctctgggctacaatcattgccagtgtttttgttatcatctccgtctcactgtccctgtacttgctactcaatcatctgtcagcctacaaaaacccagaggaacagaagtttcttgtcggcgtcatcctcatggtgccatgctatgcagtcgagtcggtaagtatatatcattggtatatccgtcaataagtgtggacatcgaaattatgcgagatggttatgaggcatttgctatgtactgttttgggcgctatctagttgcttgcttaggtggtgaagataggacaattgaatttttgaaaagggaaggtggttcaggttctgctgtaccactcttaggccaagcatctgaacaacgatatgtaaaccatccatttccaatgaactacatgcttaaaccatggccgctaggcgaatggttttacttggtcatcaaatttgggctagttcaatatatgataataaaatcaatatgtgctattcttgcggtgattcttgaatcctttggagtgtactgtgaaggagagtttaagttgaactgtgggtactcttacacggctgtggttctcaatttcagtcagtcatgggccttatactgtctcgttcagttctatgctgtgataaaggatgagttagctcatataaagcctcttgcaaagtttctgacattcaagtctattgtgttcttaacatggtggcaaggtatagcaattgcactgctcttcaactggggttcgttgagaggccctattgctcaagaattgcagttcaagtcaagtatccaagactttattatctgcatagagatgggtgttgctgccgttgcccacctgtatgtcttccctgcgaagccatacgagctaattggtgattgttttgttggagatgtttcagttcttggagattatgcttctgtcgactgccctctagaccccgatgaagtcaaggatagtgagcgcccaaccaagtttaggctcccccagccagatgatcatgttaggtgttccactgccataaaagaaagcgtccgtgatgtcgtacttgggggcggtgaatacattgtgaatgacttgaagtttaccgtgaaccatgctgtggaacccatcaatgaaaagctgcacatgatatccgagaacatcaaaaagcgtgagaagggaaagaggaaaacgaatgatgatagctgcatcagttcaccaacatccttgaccagggtcatcagtgggattgatgatccgctcctgaacggaagcttgagtgacaacagcggtccaaagaaagcacggaggcagcgcaggaaatcaggctatgcaagcgcagagagcggtggggagagcagcgaccatggcctaggcgggtttgagatccgagggaacagatggattactagggagtgacagctaggagcaatctgtggagatactatgtaaatgtcacaggagttggcctgtggtgatgtgcgataaccgggccagtgggttctgagcgtaagacgaggtctctagcaatgatatgttgtagcgtgactaaatcgagatgagcaatcaggttgttgtctgttgattctttcggctgaccatttcggctgctgaggccttgatcctgtatttgagatgtcaggcctacttagagcaaatgctggaaggaagcaatgtgcctgttctgaggtccctccagcatcacttgtaatttgtaaagtactcaagtacagactagaactagtcatgcataccagaagaatagatagatgtttcagaagttgaggcctgagatgccgtgccactctatttgctctgtttcatgctttgccgttattatatcactattttcactgttcattctaaggccgttgtcacacgggtaccagaagagcagaacacctttttacgttccttttgctgctatggatggacttcgagagttccttgagaaagcactctcatctatctttccaattccttgtttccttgtggatcctgatcactgaagatggccatttgatttttcacttttcagttatatataaagtgaagacggttgtctcacgcaatatgtgaagtgcaagatgagctctacactgcaaggaaccccaagaaaaaaccacaggtaagtttgtctgattgacaacggc

SEQ ID NO: 206447 - DNA, 1160 bp, Zea Mays
gagagtgtaacagttgtcaacaatacattagtgaatggtacagaaactgctggcacgtcaactatatctacacccagcttgcacgatcttcaagtgtatggtgttattgtgaccatactgctgtgttttattgtgttcggtggtgtcaaaattatcaacaagagggaatcactggattgagtataaccacattgaaagacaattggggtgaaaactatcaacgtacaaataatgctggcgttcctgatccaagtggatcaatatattgggatttcaatgctttggtaggtctgtttttcccagcagtcactggaattatggctggctcaaaccgatctgcttcactgaaagatacacagcgttcgataccaatcggcacattatctgcaactctttcaacaactgctatgtacttgttctctgtgcttctgtttggagccttggccacacgggaagagcttctaactgataggcttcttactgctacggtggcttggcctgctcctgcagtgatttacattggtattattctgtccaccttaggtgcagcactgcagagtttgactggggctccaaggttgcttgcagcaattgcgaatgatgacattcttcctgttcttaattacttcaaagtttctgagggatctgagccacatgcggccactttattcacagctttcatctgtatttgctgtgttgttattggaaacttggatttgattacccccactatcacaatgtttttccttctgtgctatgctggcgtgaacctgtcatgctttctgcttgacctccttgatgctcctagttggcgccctagatggaaatttcaccattggagcctttcacttgttggggcattactctgtgttggtatggttcttaatactcttacaattttattttgtctatcatgatcttcagcatgaacagtttaaacttgagttaggtctttggtttgagactttgttcacttctattgtttttaatccaaccaccttatcttcacctatactaaagtcttgtttatcatgttttacaatagcaaatatctaatcgaaacagccataaatgcatttataattataagtgctgacatgaaaaaaacagttggtaacggaaacaacactttattttggactgatagatggataaatggc

SEQ ID NO: 206448 - DNA, 2122 bp, Zea Mays
cagaggcggggtttctccggtatttatacacaagcgatatctggctcttggacgcagcgatggagctaccgatgcagtcagtctccagcttgctgctcgccggtccttcgcctagctcgccggaagccgcggagacgacgccgccaccgatgcagccgctacaatgtcaacatgagcgattggtgggcaacatgtgcccttctctctatctcgccgtctacagagggcggatagcggacgtcacggcgctgcttctggaacaacccgccgttgcaatagattgtcaagccactaccacgccgggcactgctattatgcacggacagtgcgacatacttgagttgacagcggagaggaacaccgctctacatgtggctgcggagcaagggcaccacgagctgatccgggagctctacttcaggttctcagaccagggcctcctcaatcgcctgaactcggcgctggacacgccgctgcattccgcggcgagggcagggcacgtcagggcagtcgctgttctcttcgagctggcgagggatcgtggcgtgaacattctgggatgcaaaaatgaggcaggggacacggccctgcacctggcggcgaggcacgggcacggtgcagcggtggaggtcctgatctcggcggcggcagaaccggcggccgagctgaacaacgccggcgtgtcgcctctgtacctggcagtaatcagcggctcggtgcaagcagtcagagcgattaccacgtgcaaggacgcatcatcgctggggccaggcgcacagaatgctctgcacgctgccgtcttccagagctcagaaatggttcacctgctattggaatggaggccagctctggccgaccaagtcgacagcggcggcagcagcccgctccatttcgcttcgtccgacggcgaccgcacaatcgtgaaggcgatcctgcgtgcctcaccaccaagcacagtttacaagaaggactcggacggcctgtcggcccttcacgtcgcggcgcggatgggacatcgccgcgtcgtgaaggacatgctacggagctatcccgacgccgccgagctccgcgacggtaacggcggtaccttcgtccacgcagcagccagggagaggcgctcctcggtggtgtcgctcgctatcagcaactccatgctgcgcggcgtcctggacgcgcaggacagggacgggaacacgccgctccacctcgcggtggcggtgggatcgaccggcgacgtggaggccctgctacgggagggcaaggtgcgtgccgacgttctgaacaacgacggtcacacggcgttggatctcgccgccagatcgaacgccggtttcttcgccacgatcaacctggtggtggcgttagtcgccttcggggcacggctccggccgcagaggcaggaccgcctggagcagtggggcggccgcgacatggtgcggaaggggatacagaacacgtccgacagcctcgcggtggtggccggcctcattgtcgctgcagcgttcgccgccgggttcaacttgcccggtgggtacggagacgacggcaaggcgaacctcaagcacgagattgtcttcaagaccttcctgttcttgaacaccggggccgtggcgacgtccatgctggcggtggcgctgctcgtctatgggaaggcgtcttcgcactccgacggctcgtggaagaccttcgcggcggcgctgcacctgctgtgggtgtcgctcgtctgcatgatgctggcctttcaggcggctctgttttccgtggcgacaacaagggcactaacttacgggttcctagttgtatacatgtgcatctttatcttgcaggtgcgtatcgcgaagtggctggggcctgacacgaggttgcgcacgatttggaggtttcactggaaagggaggcatgtcgacatcaaacggcagtatccgttcgccaacgctttcgtagtcaatgtatatctgtttacagctctaagtttgctagtgcctattggttttgaagtcatgtttctattaggtgggagatccatcgatacttcctcttaggctgtaatcggatcgaaaacaaaacagacggatattttttgaatcatatttatttttatatttttttctctttagattcg

SEQ ID NO: 206449 - DNA, 1494 bp, Zea Mays
cttttaccctgcctgcccagccctggccctgggtgcgtttgcattgcagccactgcatggatgcatttggcatgccgcggtactgctgctcgctcgccccttccgtgcgcggtgcgccactgctagtgagaagagatatagctaggcttcagtgcgacgacgacgacgagatggggcaccactcctgctgcaacaagcagaaggtccggaggggcttgtggtcgccggaggaggacgagaagctcgtcaagtacatcaccgcgcacggccatggttgctggagctcagtcccaaggcaagcagggctgcagcggtgcggcaagagctgcaggctgaggtggatcaactacctgaggccggacctgaagaggggaagcttctcgcagcaggaggaggccctcatcgtcgagctccacagggtgcttgggaacaggtgggcccagatcgccaagcatctgcctggtagaacggacaacgaggtgaagaacttctggaactccaccatcaagaagaagctcatctcccaggccgtgggcagcctccacccagacctgtactacaacattctggatggaggagccgccggagcacaggacctcgcggccgccggatgcgcgccgctgaacggggcggacagcgcgtcagcagcggcggcgcaagcagtgggcgtgacgacgacgcagccttctccttccatggcgcacgtcgaccccgcggcggcgtgggcggcggacttcggctcccagacgctcttcctccccggcggcgcggccgctctccagtacgccgccgccgtcgagggggagttcgtcaagcagtgccgcacggcggcggacgcctgctacccgccggagccggaggacggcggcggcggcgcgaggcagtgcaacaaccaggcagctgccgatgtcgtgacggcggcggtgcaaccggaaggcgccggcctcccggtgttccttgaacccaagtgcgccggcagtttcatgcccgagcctgctctggctccggtgatggacttcatggaagccatcctggggtcgacggcggcggcgtcggctgccagcgcttcgtctctcgacgacacctgcttctcggcgaacgccggcatgcagtcccactgttggattccctgaattattcaccctatttacttccatcggtagatgcatatatacatgcatggatgactcttcatcaagcgcgcgcggagtatcagatatgattaagtatagagtttatgaaataattaatatagatatagtaggtttctctcactctcatcgatcagggtagtaacaacatgggttacatgtaaatatgtttacgtacgtatatataatgtctagtgaaggcaagggcaagcatatatatatgagtgggtgtcagtcacgcgccagtaaggaatagtacttgaaactcctttacagctaagctatatgtttgtagcgtgcatgttattgcattggacacggatgcgcggctagagattcttac

SEQ ID NO: 206450 - DNA, 3235 bp, Zea Mays
cacgcacacacgcatccgttccatctatctgcatccttccgctggtgttctggcaactatcatcggtcggcagtcggcaccgcacacaccctgcccagtgcccaccgtcttcgaagcttctcttctcctcctcctccctaccggctacccttctctccttccctcgccggtcgccaccccctcaccacgagacgcacagccggcagcgaatctcctcaccagcccagacgccgcagcgcagcgccgagccctagtccgccggtccagcgaggcagaaagttgataccgctttggcgtcttccctatggaacatcttccctcaacactagcatggatctgcagtgcgtagcatgagtttgcatgcacgtttggcttttgttcgtcattgaggctggtgcacttctataatgggttcacgatcaaagaacgaagatgacaaggctcttgtcttgtgccaggaaagaaaacgatttgttagagaagctcttgacgggagatgtgcttttgcagctactcatttcgcttatattcagtcactgaggcacacgggatttgctctgagaaaattcgtagagcctgaagtgccgacagattcgtcactgttcacatcaacatctgccactccagagcctcctacaatcatgcagaaaccgatgaccatatctccatccctttcacatcatgctagtgactctttctccccagttccctcaccattatcttcaggacgtttccatgttaatcatatgaaagctgggggcaattcagtgacaactgttaaggagaaggtgattgaacctgtgaccgcaactctcgaaacatcatcccctgtgcgtggacaagctatccatgacctggatgacagttcaacgtttgaagctccccctggaacaccaccatgggactactttggccttttccaacctgttgagagccagatgtcattccatgatgacaaggaacttggtcatgactttgagaatgatgatgatatcaggcgtcttcgggagaaagagggaatcccagaacttgaagaggaactggagaagtctcctgcttatcctgattatctaaagcggcgcctaggacaggagaaacctccagatctcaaagatgttgagaaatctcctatgaatggtggagaggatgatcttgcattgtcagaagatgattttgacaatccaacatctgaatctttagtgcggatgttcaagaatcgcaatgatacacccgttgcacatattgcaacagatcattcatccacatcgcttcctaaagatgacttagtttcagaaacgattgattctcagcctgaaagaccaaaagatgacagagcagttgattctcagactgaaagactaaaagatgtcacgccagatgatcctcagactgaaaaaccaaaagatcatgccggagttgattctcctactgaaaaaacaaaagatcatcctggagttgattctcctgctgaaaaaccaaaacatgacatgagggtactggacattagcatgtatgaaagtgacgaaacgcctgttacaagtcctccgaaagaaatttcatcttcaactgctgcgtttcaagttaatgggaaattcaagaaacctttacatgatgtaaggaatgtggcgagggatttaaactcttgcattaaggagattgagatcttgtttatcaaggcatctgattctgggaaagaagtcccaaggatgcttgaagcagacaaagtcaatttccgccctttactaccagaagaaaaagcgccgggatcaacagcatcaggcttttttgcaacattatttgcttgttgcagagaggaagtccctcttcctcaacctcctcctcaggccgaagtgaagtaccttacctggcatagatcaatgtcttcactttcttcatcatctagaattcctcttgggacaacatcgaaggaagacactgacggtctcaatggaaatatctttggtggtgtatacatgaattcaggcagtcatgcctccacactggacaggttgtatgcatgggagagaaagctttatgatgaagtcaaggcaagcagtgtagtttgcaggcaatatgatgagaaatgtaggcagctaagacaccaggaatcaagaggagaaagccaaatgagtattgacaaaacccgtgctgttgtgaaggatttgcactccagaattttagtggccattcagagaatcgacatgatttcgaagaacatagaggatctaagagacaaagagcttcaaccacaactagaggaattaattggaagtttgactcgcatgtgggcaacaatgcttgagtgtcaccggcatcaacacgatatcattaaactagtatccagcactcgcaacatgaagacctcaattcggtcagaatcacagttccaagcaactctactccttcaggttgagctgaacacattatgttcaaactttcagaaatggatagcatcccacaaagcatatttgcagagcctaaattcatggctactcaagtgtgtgaaggcactacaaaggaagaggaagagttccaggaaaaagaacatcaaagctgatccaataacaaagtatgctgttgcgcccatatttaaaacctgtgagagctggataaatttgttggatgatttaccaacggatttggaggatgctattaaggaccttgctgctgatataaaccgttacgtgccacatcaagagaagcaacgaggcggttcaaagctaactctctcgttgtcccgtagtggaaggtcaaacggcgagatgggtgaagtccacaggagttatacccctatggatttacaatcaagtttggagacatttctagggaagcttgaaatgttctctgatgtttcattgcagaagtacatgaagctcaaagaggatattgatgaggcgaaggagaggtatgaggaggcgcaggcagcccagcggatttaatttctggcacagaacataactagtcatgtagagatgtcatctagtgtcggtgtatgcttgttgaaataataggcataaattacttttgccattttgtaagttgcaagataagcctaggaacaaaattgtagagtacatgctaaaatatgccgctgaactgcggttgtaaatgtgaggtggtgataattgaagtcgaagttgcgggggatataaggtgtacattcatcttggggctatatcaatacatgaggtttcattttcttcattgttctcatctatgcagagcttacaacttg

SEQ ID NO: 206451 - DNA, 790 bp, Zea Mays
gccctagggcgtggaccgtccggccgtcaggcagggaacccgagctcctgcaccaggtcgcggaccgtccggcccttcgcggacaggaggaagaggaagaagaagcggcagcgagcgaggatgccgtgcctgaacgtgtcgaccaacgtgaacctggagggggtggacacctccgccatcctcgccgaagcctccaagtccgtcgccaacatcatcggcaagcccgaggcctacgtgatggttgttctcaagggttcggtgcctatggcatttggaggtacccaggagccagcagcttacggtgagctggtttccatcggaggcctgaaccctgatgtgaacaagaagcttagtgctggcatcgcttctatcctggagtcaaagctgtctgttcccaagtcacgcttctacctcaagttctatgactcgaagcgctcggacttcggttggaacggctccaccttctagacttgaggtctgcagctgaaataaaagaaattcgtggaatcatggtacctaatgcccatggctattgcctattaaggacaatgtcataagatgtgtcttaatcggtgctgaactgagaaacagtaactgttgtcgtggaactggaagtggggtgctggcgtgtcagagtgcttgcttcctacctagcatagcatgcctgtgctatcttgttattggtattggcttgatatcagtctatattatcatttattatggttggtccttcgggtttggtaactgaaccaacaaaaaaaaactgattttagtgctggttttttttttt

SEQ ID NO: 206452 - DNA, 523 bp, Zea Mays
gccctagggcgtggaccgtccggccgtcaggcagggaacccgagctcctgcaccaggtcgcggaccgtccggcccttcgcggacaggaggaagaggaagaagaagcggcagcgagcgaggatgccgtgcctgaacgtgtcgaccaacgtgaacctggagggggtggacacctccgccatcctcgccgaagcctccaagtccgtcgccaacatcatcggcaagcccgaggcctacgtgatggttgttctcaagggttcggtgcctatggcatttggaggtacccaggagccagcagcttacggtgagctggtttccatcggaggcctgaaccctgatgtgaacaagaagcttagtgctggcgtgtcagagtgcttgcttcctacctagcatagcatgcctgtgctatcttgttattggtattggcttgatatcagtctatattatcatttattatggttggtccttcgggtttggtaactgaaccaacaaaaaaaaactgattttagtgctggttttttttttt

SEQ ID NO: 206453 - DNA, 503 bp, Zea Mays
gccctagggcgtggaccgtccggccgtcaggcagggaacccgagctcctgcaccaggtcgcggaccgtccggcccttcgcggacaggaggaagaggaagaagaagcggcagcgagcgaggatgccgtgcctgaacgtgtcgaccaacgtgaacctggagggggtggacacctccgccatcctcgccgaagcctccaagtccgtcgccaacatcatcggcaagcccgaggcctacgtgatggttgttctcaagggttcggtgcctatggcatttggaggtacccaggagccagcagcttacggtgagctggtttccatcggaggcctgaaccctgatgtgaacaagaagcttagtgctggcgtgtcagagtgcttgcttcctacctagcatagcatgcctgtgctatcttgttattggtattggcttgatatcagtctatattatcatttattatggttggaaccaacaaaaaaaaactgattttagtgctggttttttttttt

SEQ ID NO: 206454 - DNA, 770 bp, Zea Mays
gccctagggcgtggaccgtccggccgtcaggcagggaacccgagctcctgcaccaggtcgcggaccgtccggcccttcgcggacaggaggaagaggaagaagaagcggcagcgagcgaggatgccgtgcctgaacgtgtcgaccaacgtgaacctggagggggtggacacctccgccatcctcgccgaagcctccaagtccgtcgccaacatcatcggcaagcccgaggcctacgtgatggttgttctcaagggttcggtgcctatggcatttggaggtacccaggagccagcagcttacggtgagctggtttccatcggaggcctgaaccctgatgtgaacaagaagcttagtgctggcatcgcttctatcctggagtcaaagctgtctgttcccaagtcacgcttctacctcaagttctatgactcgaagcgctcggacttcggttggaacggctccaccttctagacttgaggtctgcagctgaaataaaagaaattcgtggaatcatggtacctaatgcccatggctattgcctattaaggacaatgtcataagatgtgtcttaatcggtgctgaactgagaaacagtaactgttgtcgtggaactggaagtggggtgctggcgtgtcagagtgcttgcttcctacctagcatagcatgcctgtgctatcttgttattggtattggcttgatatcagtctatattatcatttattatggttggaaccaacaaaaaaaaactgattttagtgctggttttttttttt

SEQ ID NO: 206455 - DNA, 1068 bp, Zea Mays
ctctctcacagtccactcagtctttacacactgtctgcctcactcacgtccttctcctgctgccgctacaccgagccatggaaagggaggtgcagctgatggaggggaggcaagcgtggccgctccacatgatggggatggctgccgctggtacgaccgccacctgcttcgacaactacagcagcagtggcagtggcggcggcggcggcgactgcttcgtgctcgggtgggagcagctagcgccggcgccgttcggctgcttcgggctcctcaccgccgacgtccacgacctcttcccgctctatgatgacaatgatgacggcgatgatcccttgagctcgattttctccgcgggcctcgcgccggcagcggagggagcggtgtgccccgccgccgcagaggcagagcccctccccagctcgtcctcgtccaactgccgcgggggggacccgcgcgccggcggggtcgacctgcagccgcagggacagatgcagcagggcaccgcgcgggcgcggggccgggccgggaccccgccgctgccgaggacctccgcgccctcgctgaaacgcgcgacacgcgaagagtcgtcgtcggagcacgcggcggcggcggcggcggaggagtgcagccagagcggcggcggcagcaagcggcggaagggcgcgggggtggtgcgcccgttcgcgctgctgaagcccgacgggctggacggcggcgcgacgctggcggacatcaacgcgcgcatcctgatgcggcccgcgcggccggtccggcaccccgtgggcgagttcgcgtgcgcgccgcgcgtgtccgcggaccagccgggcttctcgggcaaggccgtcgccagcctcacgcgcctgcacacccccggcgggcgcggcaccatcaccatcataaggacgcgaggctaggctaggcttgtactatgcatgaatcatggcggtgtatgtaggattagctagctagccacctgttgtggtgtaaattatgagcgtaacctgcaatgtaaatcgaacgaataaatttctccaatcatggcggtggtggctcatgacatccctcctg

SEQ ID NO: 206456 - DNA, 840 bp, Zea Mays
ctgggttctacgtgtttagattgtactagtgctgacagagattctactactgctaatagtaaattagtcattagtatgatgacaatgatgacggcgatgatcccttgagctcgattttctccgcgggcctcgcgccggcagcggagggagcggtgtgccccgccgccgcagaggcagagcccctccccagctcgtcctcgtccaactgccgcgggggggacccgcgcgccggcggggtcgacctgcagccgcagggacagatgcagcagggcaccgcgcgggcgcggggccgggccgggaccccgccgctgccgaggacctccgcgccctcgctgaaacgcgcgacacgcgaagagtcgtcgtcggagcacgcggcggcggcggcggcggaggagtgcagccagagcggcggcggcagcaagcggcggaagggcgcgggggtggtgcgcccgttcgcgctgctgaagcccgacgggctggacggcggcgcgacgctggcggacatcaacgcgcgcatcctgatgcggcccgcgcggccggtccggcaccccgtgggcgagttcgcgtgcgcgccgcgcgtgtccgcggaccagccgggcttctcgggcaaggccgtcgccagcctcacgcgcctgcacacccccggcgggcgcggcaccatcaccatcataaggacgcgaggctaggctaggcttgtactatgcatgaatcatggcggtgtatgtaggattagctagctagccacctgttgtggtgtaaattatgagcgtaacctgcaatgtaaatcgaacgaataaatttctccaatcatggcggtggtggctcatgacatccctcctg

SEQ ID NO: 206457 - DNA, 3471 bp, Zea Mays
cgaaaaaaggcagtgtcgcttctcttatcggcgtcgaccccccttctccactcgcaaccaaaccctcgcatcgtacagcagccgcaccaaatctcaccgccacctccgggtccggggactcaagcgccccgccgccgccgctgccggggaccacgaaaggacgcgccgaccccggatctgcgactcgccggtctccgaacgcacgctactgaacggacgcggggcttggctgctcgatcgcaccgcccgggaaaaaaagggagagcccgccggatttaaccggacacaccgaacgcgcagctcctccgggccaggggccggacagaatccatgcagccgaggtcccgcattcggggccgcgacccgccgccgccgccgccgccaggaggacgctaccgtcgccgatccccgccccctccatcaccgcgccaccagcgccgcccacgtgatccgccccctccacagcggaagaggcgcagctccgagctgcccccgccacggcgatacgaggaggatcctctccttaacggcttcgcccccgctgccgagaggcgttcacgcggcgacatcctgctcgaggccggccgtctggccgctcactacttggttgccaaaggcctcctctccgagcaccttctcctggcaagggaggacccaaatcacaatcccatttaccgccctgagccccccgctcccgctcccgctcctcctccgactctagctccctctagttacgggaggaagagagacgaggacgacggcccgaggtggcggcggagtggaagtggagccgaggaccaggggcgtggctcaaggtgggacgacgacagggaagccaagaggtcggggtgggacaggaggagccacagctttgatggaaggcgtaaatgcaacgatgacggtggcggtgatgctgaccgtagcggccgccggacacgcgactacgatgagtcgaagagaccaccgatgtcaaggtcctattcgcataacgatcgttgggcttcagctgatgccagagtagatcgaaggaggagaagtaggagcaggaccaggagctactacagtggcagcaggagagatccagatttgctagcaggcacccgtgatttggatcgcaccaaggtgccagactctggcattgttcctgctgctggtggtgatggaggcgtgcacgatgcggatgccgatggaacacgaaagcagctgaaggttcctagttcaatgttggtttcggagatgaatgacagtgctgtcgaagctgcgcctatagaagaggatcatgctcaagacatgtctgaaggtgaggacggtgagtttgcagaagagatttctgaagacgaggatggtgagtttgcagcctctgatttgaatgatgaagatggtgatgaaatggatgacacccaaagacaaccgtctcacatgcatgttcatgcatctgaatctatcgaggaacctgtccatagacagtcccagctcagcaatgctgaagagggaatggaaactggcattgcacacgtggatgcatatatggtagagccattggcagagaacaatgttttctctgaaacaaggtatgaaatggaggctccacaaaatggagctgaaactgctgttgttgatctttacagagatgcagaagagcaaccattgacagagaataatgattgctccgaagcagagaatgagatgaacaagagtgagtttgaaactggtgttggcaatcttgatagagatgaacaagagcaactattggcagagaataataatggctctgaagtaaggtatgacatggaggctccacaaagtgaggttgaaactggtgttggcagtcttaatagagatgaccaagagcagctgttgacagtgactgatggttactctgaattaagatatgaaacagggactccacaaactgaagttgaaactgttattgatgatatcagtagggatgagcaagagctgccagcttggtacaaaatttttgatctcaacgtcattgaaactccattgggctgtgaggtttccgagatttcttgtggtcatccagcagatggtctttgtgattctgtgcctgattcagttggtctggtgaaccaagaagcaaacaatgatacctctgaaattcaaggtcaagatggtcatgcaggggccaatcaagtgttagaagatgagtctgatttgaatagctatgatctgaacaatgaagctgatgaagatgcacaggatgatactttagaaaatcaagttcaagacgagaatgtagaggataatcacttactggaggatgggcatgatttgacgaggtatgatgtgaacaatgaggctggtgagcatgcacatgataaccacctggtgaaaaatgcggaaatacttctaaatcatattatggttgcatgtatatcagataattgccatatgaacaatgagaaaatgcttctaaagcaaaatgtggatgagcaacagatggagaacgagcagatgcttatagatcaggtcactagtgttcaagttttggatagtcaccatgtgcacgatgaacagttgctggtaggtcatgctgcagatgatcatcaccaaatggaaccaaatcccatggctttttctttgggcgttcatgatctggataactactatttgagtagcaagcaaatacttctgtataatgatgcaggaggtatacaccatttgaaggatgggcaaattattttagatgaggctgcagatggacaagctagagttcacaatatgggccatggacgaacgattcctggaattgatctggaagatgattatgcacaggtgtctgccatcagaaatacaggagaatgtctagaatctgcaagtgatacctcgcacgaatacacggataatgttctacaagaacatatgtgttctcaagactagcaaacctcaagttttggtgacaatcctaagactaacacacaagcagcttcttcttcaactgtcaccagattttcaaaactggtgtactggaaatgatgctgtgaaggcacaggtgattcccatttctcagtgatgatgtgttgtatattggattcaacaatatgccattagaacttgtgaatgtctgggacctgccatcctctgagcttgggaaatccttgtgagctctggcaccctgttgtctgtgcattcagatcctaacacaccggaccatgggaggtctgcaccggaccgatcgctggagctagttagtcgactggtcgttgttatagcttttcattgacaagtcggtttagtgacacttctgccttcccgagatatagctgcgatgtcagtatgtctcagtagctgaatatgtcatatatttttttaactagaaatgatttgatgggcgttttgtgctgcgcctgcttcagagctctcctgcttttcagtggaactgtcaactgtcaagtgcatagagaacacgcttctcgttgttgcttacacgggagtagcgttgaccat

SEQ ID NO: 206458 - DNA, 3817 bp, Zea Mays
gtcgcttctcttatcggcgtcgaccccccttctccactcgcaaccaaaccctcgcatcgtacagcagccgcaccaaatctcaccgccacctccgggtccggggactcaagcgccccgccgccgccgctgccggggaccacgaaaggacgcgccgaccccggatctgcgactcgccggtctccgaacgcacgctactgaacggacgcggggcttggctgctcgatcgcaccgcccgggaaaaaaagggagagcccgccggatttaaccggacacaccgaacgcgcagctcctccgggccaggggccggacagaatccatgcagccgaggtcccgcattcggggccgcgacccgccgccgccgccgccgccaggaggacgctaccgtcgccgatccccgccccctccatcaccgcgccaccagcgccgcccacgtgatccgccccctccacagcggaagaggcgcagctccgagctgcccccgccacggcgatacgaggaggatcctctccttaacggcttcgcccccgctgccgagaggcgttcacgcggcgacatcctgctcgaggccggccgtctggccgctcactacttggttgccaaaggcctcctctccgagcaccttctcctggcaagggaggacccaaatcacaatcccatttaccgccctgagccccccgctcccgctcccgctcctcctccgactctagctccctctagttacgggaggaagagagacgaggacgacggcccgaggtggcggcggagtggaagtggagccgaggaccaggggcgtggctcaaggtgggacgacgacagggaagccaagaggtcggggtgggacaggaggagccacagctttgatggaaggcgtaaatgcaacgatgacggtggcggtgatgctgaccgtagcggccgccggacacgcgactacgatgagtcgaagagaccaccgatgtcaaggtcctattcgcataacgatcgttgggcttcagctgatgccagagtagatcgaaggaggagaagtaggagcaggaccaggagctactacagtggcagcaggagagatccagatttgctagcaggcacccgtgatttggatcgcaccaaggtgccagactctggcattgttcctgctgctggtggtgatggaggcgtgcacgatgcggatgccgatggaacacgaaagcagctgaaggttcctagttcaatgttggtttcggagatgaatgacagtgctgtcgaagctgcgcctatagaagaggatcatgctcaagacatgtctgaaggtgaggacggtgagtttgcagaagagatttctgaagacgaggatggtgagtttgcagcctctgatttgaatgatgaagatggtgatgaaatggatgacacccaaagacaaccgtctcacatgcatgttcatgcatctgaatctatcgaggaacctgtccatagacagtcccagctcagcaatgctgaagagggaatggaaactggcattgcacacgtggatgcatatatggtagagccattggcagagaacaatgttttctctgaaacaaggtatgaaatggaggctccacaaaatggagctgaaactgctgttgttgatctttacagagatgcagaagagcaaccattgacagagaataatgattgctccgaagcagagaatgagatgaacaagagtgagtttgaaactggtgttggcaatcttgatagagatgaacaagagcaactattggcagagaataataatggctctgaagtaaggtatgacatggaggctccacaaagtgaggttgaaactggtgttggcagtcttaatagagatgaccaagagcagctgttgacagtgactgatggttactctgaattaagatatgaaacagggactccacaaactgaagttgaaactgttattgatgatatcagtagggatgagcaagagctgccagcttggtacaaaatttttgatctcaacgtcattgaaactccattgggctgtgaggtttccgagatttcttgtggtcatccagcagatggtctttgtgattctgtgcctgattcagttggtctggtgaaccaagaagcaaacaatgatacctctgaaattcaaggtcaagatggtcatgcaggggccaatcaagtgttagaagatgagtctgatttgaatagctatgatctgaacaatgaagctgatgaagatgcacaggatgatactttagaaaatcaagttcaagacgagaatgtagaggataatcacttactggaggatgggcatgatttgacgaggtatgatgtgaacaatgaggctggtgagcatgcacatgataaccacctggtgaaaaatgcggaaatacttctaaatcatattatggttgcatgtatatcagataattgccatatgaacaatgagaaaatgcttctaaagcaaaatgtggatgagcaacagatggagaacgagcagatgcttatagatcaggtcactagtgttcaagttttggatagtcaccatgtgcacgatgaacagttgctggtaggtcatgctgcagatgatcatcaccaaatggaaccaaatcccatggctttttctttgggcgttcatgatctggataactactatttgagtagcaagcaaatacttctgtataatgatgcaggaggtatacaccatttgaaggatgggcaaattattttagatgaggctgcagatggacaagctagagttcacaatatgggccatggacgaacgattcctggaattgatctggaagatgattatgcacaggtgtctgccatcagaaatacaggagaatgtctagaatctgcaagtgatacctcgcacgaatacacggataatgttctacaagaacatatgtgttctcaagactagcaaacctcaagttttggtgacaatcctaagactaacacacaagcagcttcttcttcaactgtcaccagattttcaaaactggtgtactggaaatgatgctgtgaaggcacaggtaagagcgctattttggttagacatgtgtccttacttcttcttggaccgagaaaatcagtttcttttataagagcatcgagtaaagcattatgattggcaactatattgttagtagatcacttgctgtctaatgctaggagttcgattttgatcttgaacacttcatatgttccaaggcaaaattcatgcccatgtatattgtcgtttgttattacttgcaattactgtcgctgttcttcttgactgcacacggtaacattgcattaatctatgtgatccatttcttcaggtgattcccatttctcagtgatgatgtgttgtatattggattcaacaatatgccattagaacttgtgaatgtctgggacctgccatcctctgagcttgggaaatccttgtgagctctggcaccctgttgtctgtgcattcagatcctaacacaccggaccatgggaggtctgcaccggaccgatcgctggagctagttagtcgactggtcgttgttatgtacggagtatgttgtgcaatagtagtttcttttggattcctagtgctcactctcttttttttttccagagcttttcattgacaagtcggtttagtgacacttctgccttcccgagatatagctgcgatgtcagtatgtctcagtagctgaatatgtcatatatttttttaactagaaatgatttgatgggcgttttgtgctgcgcctgcttcagagctctcctgcttttcagtggaactgtcaactgtcaagtgcatagagaacacgcttctcgttgttgcttacacgggagtagcgttgaccat

SEQ ID NO: 206459 - DNA, 1346 bp, Zea Mays
ctaaaagtctccaccttctctcatccccatttcctccccacgccccgtcggtttctctcatgccaatttctcttgccctggttctctctcgctcgtcggcgcgcagttggagtcgccgagagcgccgtctgcgccgaatggtactcgccgtcaaactccgtcgtggagctgaaggcgcgattggcgtgaactacggcatggtcgccaacaacctgccggcgccggagcaggtcgtctccatgtacaaggccaagaacatcagctacgtgcggctcttccacccggacacggacgcgttgaacgcgctccgcggctccggcgtcggcgtcgtcctgggcacgctgaacgaggacctcccgcgcctggcgtccgacccgtccttcgccgcgtcgtgggtggccacgaacgtgcagcccttcgccggcgccgtccagttccggtacatcaacgccggcaacgaggtcatcccgggggacgccgcggcgcgggtgctcccggccatgcagaacctggagtcggcgctccggtccgcgggggtcacgggcgtccccgtcaccacggccgtggccaccagcgtgctcggcgcctcgtacccgccgtcccagggcgcattctccgaggcggccgcgtcggtgatggcgcccatcgtctcgtacctgtcgtcgaagggcgcgccgctgctggtcaacgtatacccgtacttcgcctactcgagcagcggcgggcaggtggcgctcgggtacgcgctgctgtcggcggacgccggcgcggcgtcgtcggtcacggacgccggggtggtctacaccaacatgttcgacgctatcgtggacgcgacgcacgccgcggtggagaaagccggggtccaggggctggagctggtggtgtcggagaccggctggccgtcggccggcggcgagggcgccaccgtggagaatgccgcggcgtacaacaacaacgtggtgcggcacgtcggcggcggtaccccgcgccggccagggaaggccgtggagacgtaccttttcgccatgttcaacgagaacggcaaggccgagggcgtggagcagcacttcggcctcttccagccggacatgagcgaggtctaccacgtcgacttcacggcgggatccccctaggtctagggaggaggcggcttacccgcttcttcacttttagtagtaggctcatccttcattcccctgatctacttcgttttgttggagtagcaaaactgccgcacgtcacgtttactgtttattttttaatatcttatatagaaaaataatatcaacatttattctttaaataagtttatgtttactataaatatttttttaattcatctcata

SEQ ID NO: 206460 - DNA, 2604 bp, Zea Mays
ttccattccaccacgggcacgtggcgcagcagagctcgaccgctataagggctcctcgtcagcctcagctcgtccatcctccaccagcaggcaccaggcagctgtcggccccggggccgccttcgttttctggtctcctctccaccaacacggcgcgcgcggagctcccatgacgacgacgagcacccacctggatctcgaggctgcgcggcgcggaggcggcggcggcggtggcggtggcagcagcagcccgcccggatacgagcaggcggaggctggcaacgaccttcgcaaagatctagcccttgcttacaagaccctcggcgttgtgtttggtggcctcgtcacgtctcccctctacgtttatccgtcaatgaacttgtcatctcccacgaaagatgactacatggggttatacagcataatgttttggactcttactttgattggtgtggtcaagtatgtaggcatagcactcaacgccgacgatcatggtgaagggggtacatttgccatgtactctttgctgtgtaggcatgctgatataggcatacttccttccaaaaaggtttatttggaagaggagccactgcttcgaaatcagtctgcagcagctagaaggcctagctggctggggaaattctttgagcgaagcataacagccagaagagcgctgctgttcatgtcaatactgggaatgtgcatgctcattggggatggcatactcactcctgccatttcagttttatcagcgatccaagggttgagagggccatttccatccgtcaggaattctgtagtggaagctctgtctgccgtgatccttatcggcttgttcttgctgcaaaagtatgggacctcgaaagtgagcttcctgttctcaccgatcatggcggcgtggaccttcaccactccaatcatcggcctgtacagcatcgttcattactaccccggcatcttcaaagccatctcaccgcactatatcgtccgtttcttcctgagaaacaaaaaggaagggtggcgcatgctcggtggaactgttctatgcatcacgggcgctgaagccatgtttgcagaccttggccacttcagtaagaagggtattcagatagcatttctgtctagcatatacccttctctggtgctcacatacgctgggcaaacagcgtacctcatcaacaacgtcaacgacttcagtgacggattctacaagtttgttcctcgccctgtttactggcccatgttcatcatcgcgacgctggcggcgatcgtcgcaagccaatccttgatatccgcgacgttctcagtcatcaagcaatccgttgtcctggactacttcccgcgcgttaaggtggtgcacacgtcgcagcacaaggaaggggaggtttactccccagaaaccaattacatcctcatggtgctttgcgttagcgtcgtactaggcttcggagctgggaatgcgatcgggaacgcattcggtgttgtggtcatcatggtcatgctcataaccacagtcatgctcaccctggtgatgatcattatatggagaacgccgcctgttcttgtggcgctctacttcgtgcctttcgtcgtcatggaagggtcttatgtcagtgcagtcttcaccaagatccccgaaggcggctggctcccctttgcggtgtccatcatcctggcgatggtcatgttcggctggtactacggcaggcagcggaagacggagtacgagatagcgaacaaggtgaccgtggagcgcctcggcgagctcctggcgaagccggaggtccagagggtccccgggctgtgcttcttctacagcaacatccaggacgggctcacgcccatcgtcggccactacatcaagaacatgagctcgctgcacgcggtcacggtcttcgtcaccctccggtacctgctggtggccaaggtggacgagcgggagagggtcctcgtcgcgaggctgggaccggacggggtgtacggctgcactgtccagtacgggtacgcggacagcctcagcggcggcgacctcaccgcgcaggtcacgggctccctgcgccggcactttgggacggcggaggccggggcggaagaggccgcgcgcctggaggcggcgaggacgaacggcgtcgtgcacgttcggggtaagatgaggttctacgtgggcgaggacgccgggtggttcgacaaggtcatgctcgggttctacgagttcctgcacggcatctgtcgctccgcgctgccggcgctggggacgccgctgcaacagcgagtcgagatcggcatgctgtacaaggtttgatcgatcaaggttatcaaatgcgcacataaccaatatacgcaacatcaaaataagtcaatgagtatacccgtggcgtgtcatagtgtgattgtgttcaagaaattcacatgcatgaacagaacctagtaaaaagctgcgaatgaagctgcacaaattttgttttgccggtttgtatggcatgacatggttactggcaaggacctttgtttcactttttcagttctgcagcagtgcttttcggttgccttattcaaaatagaacagttcgcatgcaaaaaggtgactaccaattcaaaacagaa

SEQ ID NO: 206461 - DNA, 2444 bp, Zea Mays
ggggagtggtctggtcgtgataggaaggcggaccactttccaaagcccgttgcgtgcgttccgcgccggtgatcactgacaacggatagccttgtcaccttgcagtgagtgcaggctggcaacgaccttcgcaaagatctagcccttgcttacaagaccctcggcgttgtgtttggtggcctcgtcacgtctcccctctacgtttatccgtcaatgaacttgtcatctcccacgaaagatgactacatggggttatacagcataatgttttggactcttactttgattggtgtggtcaagtatgtaggcatagcactcaacgccgacgatcatggtgaagggggtacatttgccatgtactctttgctgtgtaggcatgctgatataggcatacttccttccaaaaaggtttatttggaagaggagccactgcttcgaaatcagtctgcagcagctagaaggcctagctggctggggaaattctttgagcgaagcataacagccagaagagcgctgctgttcatgtcaatactgggaatgtgcatgctcattggggatggcatactcactcctgccatttcagttttatcagcgatccaagggttgagagggccatttccatccgtcaggaattctgtagtggaagctctgtctgccgtgatccttatcggcttgttcttgctgcaaaagtatgggacctcgaaagtgagcttcctgttctcaccgatcatggcggcgtggaccttcaccactccaatcatcggcctgtacagcatcgttcattactaccccggcatcttcaaagccatctcaccgcactatatcgtccgtttcttcctgagaaacaaaaaggaagggtggcgcatgctcggtggaactgttctatgcatcacgggcgctgaagccatgtttgcagaccttggccacttcagtaagaagggtattcagatagcatttctgtctagcatatacccttctctggtgctcacatacgctgggcaaacagcgtacctcatcaacaacgtcaacgacttcagtgacggattctacaagtttgttcctcgccctgtttactggcccatgttcatcatcgcgacgctggcggcgatcgtcgcaagccaatccttgatatccgcgacgttctcagtcatcaagcaatccgttgtcctggactacttcccgcgcgttaaggtggtgcacacgtcgcagcacaaggaaggggaggtttactccccagaaaccaattacatcctcatggtgctttgcgttagcgtcgtactaggcttcggagctgggaatgcgatcgggaacgcattcggtgttgtggtcatcatggtcatgctcataaccacagtcatgctcaccctggtgatgatcattatatggagaacgccgcctgttcttgtggcgctctacttcgtgcctttcgtcgtcatggaagggtcttatgtcagtgcagtcttcaccaagatccccgaaggcggctggctcccctttgcggtgtccatcatcctggcgatggtcatgttcggctggtactacggcaggcagcggaagacggagtacgagatagcgaacaaggtgaccgtggagcgcctcggcgagctcctggcgaagccggaggtccagagggtccccgggctgtgcttcttctacagcaacatccaggacgggctcacgcccatcgtcggccactacatcaagaacatgagctcgctgcacgcggtcacggtcttcgtcaccctccggtacctgctggtggccaaggtggacgagcgggagagggtcctcgtcgcgaggctgggaccggacggggtgtacggctgcactgtccagtacgggtacgcggacagcctcagcggcggcgacctcaccgcgcaggtcacgggctccctgcgccggcactttgggacggcggaggccggggcggaagaggccgcgcgcctggaggcggcgaggacgaacggcgtcgtgcacgttcggggtaagatgaggttctacgtgggcgaggacgccgggtggttcgacaaggtcatgctcgggttctacgagttcctgcacggcatctgtcgctccgcgctgccggcgctggggacgccgctgcaacagcgagtcgagatcggcatgctgtacaaggtttgatcgatcaaggttatcaaatgcgcacataaccaatatacgcaacatcaaaataagtcaatgagtatacccgtggcgtgtcatagtgtgattgtgttcaagaaattcacatgcatgaacagaacctagtaaaaagctgcgaatgaagctgcacaaattttgttttgccggtttgtatggcatgacatggttactggcaaggacctttgtttcactttttcagttctgcagcagtgcttttcggttgccttattcaaaatagaacagttcgcatgcaaaaaggtgactaccaattcaaaacagaa

SEQ ID NO: 206462 - DNA, 2803 bp, Zea Mays
caacgaccttggtggtcgcaagagccgctacgagggtggagtgagcagcagcgacatagaagtgagtgagattatgggtcgcgggagctacgatggctagccaagtgaagcaagaggggctgagatcctgagccacgaaagcgccagcagcgaggcctgcacccaggccgagtccatgtcccctgagacaagcagtacacagggggccagtcagggctgggtctccaatggcaccaggatggtgaagtcctggtggcctacgcccatgctaaggacggttgcgctagggccagcggtgcctaggcaagccaggttgagactgcagtggcgcgcaccatggccgatgatggtggcagtgaggctgacgaggcctcgactggctgcaccgagggcagtagagggctggacagtggacacagccagggcgctcgtgtcggaaccgccgttgtcggcgccagagtgccagaccctgtgaggccgacgatcggggcggcaccatgaggggcagtacacaatacacacagtctaacaagtgcaaaatgctggcaacgaccttcgcaaagatctagcccttgcttacaagaccctcggcgttgtgtttggtggcctcgtcacgtctcccctctacgtttatccgtcaatgaacttgtcatctcccacgaaagatgactacatggggttatacagcataatgttttggactcttactttgattggtgtggtcaagtatgtaggcatagcactcaacgccgacgatcatggtgaaggtttatttggaagaggagccactgcttcgaaatcagtctgcagcagctagaaggcctagctggctggggaaattctttgagcgaagcataacagccagaagagcgctgctgttcatgtcaatactgggaatgtgcatgctcattggggatggcatactcactcctgccatttcagttttatcagcgatccaagggttgagagggccatttccatccgtcaggaattctgtagtggaagctctgtctgccgtgatccttatcggcttgttcttgctgcaaaagtatgggacctcgaaagtgagcttcctgttctcaccgatcatggcggcgtggaccttcaccactccaatcatcggcctgtacagcatcgttcattactaccccggcatcttcaaagccatctcaccgcactatatcgtccgtttcttcctgagaaacaaaaaggaagggtggcgcatgctcggtggaactgttctatgcatcacgggcgctgaagccatgtttgcagaccttggccacttcagtaagaagggtattcagatagcatttctgtctagcatatacccttctctggtgctcacatacgctgggcaaacagcgtacctcatcaacaacgtcaacgacttcagtgacggattctacaagtttgttcctcgccctgtttactggcccatgttcatcatcgcgacgctggcggcgatcgtcgcaagccaatccttgatatccgcgacgttctcagtcatcaagcaatccgttgtcctggactacttcccgcgcgttaaggtggtgcacacgtcgcagcacaaggaaggggaggtttactccccagaaaccaattacatcctcatggtgctttgcgttagcgtcgtactaggcttcggagctgggaatgcgatcgggaacgcattcggtgttgtggtcatcatggtcatgctcataaccacagtcatgctcaccctggtgatgatcattatatggagaacgccgcctgttcttgtggcgctctacttcgtgcctttcgtcgtcatggaagggtcttatgtcagtgcagtcttcaccaagatccccgaaggcggctggctcccctttgcggtgtccatcatcctggcgatggtcatgttcggctggtactacggcaggcagcggaagacggagtacgagatagcgaacaaggtgaccgtggagcgcctcggcgagctcctggcgaagccggaggtccagagggtccccgggctgtgcttcttctacagcaacatccaggacgggctcacgcccatcgtcggccactacatcaagaacatgagctcgctgcacgcggtcacggtcttcgtcaccctccggtacctgctggtggccaaggtggacgagcgggagagggtcctcgtcgcgaggctgggaccggacggggtgtacggctgcactgtccagtacgggtacgcggacagcctcagcggcggcgacctcaccgcgcaggtcacgggctccctgcgccggcactttgggacggcggaggccggggcggaagaggccgcgcgcctggaggcggcgaggacgaacggcgtcgtgcacgttcggggtaagatgaggttctacgtgggcgaggacgccgggtggttcgacaaggtcatgctcgggttctacgagttcctgcacggcatctgtcgctccgcgctgccggcgctggggacgccgctgcaacagcgagtcgagatcggcatgctgtacaaggtttgatcgatcaaggttatcaaatgcgcacataaccaatatacgcaacatcaaaataagtcaatgagtatacccgtggcgtgtcatagtgtgattgtgttcaagaaattcacatgcatgaacagaacctagtaaaaagctgcgaatgaagctgcacaaattttgttttgccggtttgtatggcatgacatggttactggcaaggacctttgtttcactttttcagttctgcagcagtgcttttcggttgccttattcaaaatagaacagttcgcatgcaaaaaggtgactaccaattcaaaacagaa

SEQ ID NO: 206463 - DNA, 1422 bp, Zea Mays
atagaaggaaaaatttagagacagtcgctgcggatagttgttccatattcgaaaaagcaaaaatgatatgcacgtcacaatagttgttccccagatttgttttgtcacgcgccccgcccgacgcccgccacggcgccaccatgtcgcaggctacggaggtcgtcggaaacccgtacgccgccgagctcgctgcagccaagaaggccgtcgccctagcggcccgcctctgccagagagtgcagcggagcattttgcactctgacattcaatcgaaggcagacaagactcctgttacagttgcggattatggatcacaggtactggtatgtctggtcctgaagaaggaattgccttctcactctttctcaatcatagctgaagaggattcaaaagacttgagagaagatggtgcccaagaaattatagaacacattaccaccctcattaatgaaaccatcgtaaatgatggttcatacaacatgtcgttatctaaggaagatgtgctttctgcaattgatggtggtaaatctgagggaggtccatctgggcgacattggatattagacccaatagatggcactaaaggtttcataaggggagatcagtatgcagttgcacttggactacttgatgagggcaaagttgttctgggtgtgttgggatgtccaaatcttccattaaaatcaacaaacaagaacaatagcagctcttttggggatcgaataggttccctcttttttgctacaattggttgtggagcgcaagttgaggccttagaaggatctgagccacaaaagtgtttgctccaccaataatccagttgacgcctcattctttgaatcctttgaagcatcacactccaagcgtgatttaactagctccattgcagagaaacttggtgtccgagctcctcctgttagaatggatagccaagcaaaatatggtgccctagcacgtggtgatggtgccatttttctgcgcatcccgcacaaaagttacatagaaacagtttgggatcatgcagctggatcaattattgtcacagaagctggtggcatggtaaaagatgccgcaggaaacgatttggatttttgcaaaggtagatatcttgatcgtgacagaggaattattgcaacaaacaagcatttaatgccactagttctaaaggcggttcaagaggctatgaaggaggaacagtaggctgctgtgttcatggagcagttgcaatatttgttatgacatttcctgtttgaatcttaatattagttttgcacaatctcgatgtgcggaaaagttgttgtacttgtaccatatgctagtgtatcgtgtgagtcatatgccactcacatactcacatttccttatctcaacaaatggatatgaatttacctgattgggtttcctattttctatgtgcatttt

SEQ ID NO: 206464 - DNA, 351 bp, Zea Mays
acacgagcaggcgtgcagttgctgagcgtcgtcctcgctttccttctggctctatgtactggccgagcagccccaggcacccacgcgcgtgctctgcgatgccgacccagcgaagcctcgcgacaatcgtctctggaagtcctctggcgtccgttcctgatgtccacgcgatcgccaaggcggccatctccctctcgtccagcatacccgagcggccatatcccatgtgcggcgtaccaggcctgctcgaagccctccaaaatcctttcatgtaatctctcgtcatgtgattagtcctgcaccctccagcttcttcacgtggctagcacatcagattgcgatccgtttccg

SEQ ID NO: 206465 - DNA, 1409 bp, Zea Mays
ctcaagtatagagctaagagcgtgtggtgagtttttttttaatcaagtgtcggagacacaggtcaactcaactacaaccggagtaccataacctatggacaacaccaacatggtcgtggtgacgacgcgggattccggaatcctggcacggttcctcatcaagcccgcggcattccacccgtggcgcgaccgcgccaccacgcagcccacgcaccaacgccgccctaataaatcccctgcgctccgcgcccgccggctcgcaaccctaaccttcctcccctgctccgccgccgccacggtcgcctctactgccatggtgagcgctgaagtcggcatcgattacgtgctgtggacggaggacgaggtgtccacccgcgtgggcgaggtcgccgccgagctcgcggccgacctgcgcgcgttgccggagcccgccgtcatcgtcggcgtcgccacgggcgcgttcctcttcctcgctgacctcgtccggcgcgtcgacgtgcggctcgtggtcgacctcgtgcgcgtcgagtcctatggggcgggcacagagtccagcggcaagccacgtatcacggccgacctcaaagtcgatgtggccgggaagcatgtggtcgtgatattgttgacacagggaatactctgtcctatctcattgctcatttggagaagaaaggtgcatcatccatatcggtttgcacttttcttgacaaaccagcaagaaggaaagtcaatgttcatctagtaggggatggaaaattttaccgtggatttgagtgcccagactactttgttgttggctatggtttagattacgcggagctctaccgtaacctgccttatgtcggagttctcaagcccgagatgtacaaaaaggattcaagcaattagacctgaggctgtacctgcaccttgtgcaatcgatcgatacgaagatctcagttacaaatgatacagagatcccagttttgatcaacaactttaccgaagcagaacttcttaatgcaaatgatacgagggggaaaaaggcaaaaaaaaaacagaaagatctagtttaccttttttctgtaagttcaggaaaacttcagttttttccaggtttctgtagcataacagcaagatgtacaactgtcagttttgtttgtcaccaaacagcaacccagaagggaaagatgtagttatatggcatgttacattttcagtttacaggctaaacagcttacagtgtcttgtagtgagatgtaactgtaaggtcggggagcttagtgaggtcagggtgggccatgcgttcccctgcccaacataaccaccattgagcaaacagtattttcattaccgtttagagactgtttggttgagttgttgctaaaaaaagctgacgtggaatgtgagatgtgaaaaaaattgctata

SEQ ID NO: 206466 - DNA, 3038 bp, Zea Mays
attatcgtcgtgccaccataagcgcggcctcgcgccaacaagaacctcggcctcgggaggcagcagtagcaccgccgggggaggcgcagcgcagcgcaacggccggcgccgggacgagagatcctcgaatgtacatgacttgaagctccaaggaacagcatggagttcgctttggaggcttcccacagctatggcgtgtttcaggaagatgttccgcactatccctgcaatatgaggcagtacccaaaatcagggctcaaccacagctttaacccagtcaagaagctgatccaggaggacatctcgttccgaacgaatgaagtccagaagaggcccggcggcgtcatcgccagactgatgggcatggaatcgcctccactgaacgcagctactgaatccatcagtcgttcggagatcaccccgagaccaacaatgccaagaagagatcctcctgaaagggagacctcagccaagcatgtctccttcgtgcagcacggcaacagggactccaccaagcaggcgtcaaagcaggagatccgagcctatggcgaggagagggacgtgtttgggcagcagaacaagaggggcaacgagtggagtaagccgcagccgcgggagcacccgcaggaggaggagctgcagaagttcaagaaggagttcgaggcgtggcaggcgagcagggcgtgggagcactcgagaagcttcgagctggagagtagcaccctcggcgacgacgatgacgacggcaggtgcacggacatcgtgccgtacaggtaccagcaccaccaccaccaccaccacaaggggaaagatgccagccatggcggcaagcacatacgctcctccaacgaggacgtgcattgttggagaagaagcagcaaggagagcggcacgtccatctccgggagccgtacgttctctctgacgaccagcgcagacgccgccgcctgctccacgaggctgccgctctccaggttctaccacgaggaggagaggtcgctgtcgccgacgaggatcgtgatcctcaagccctgccccgagctgagcgcggacgacgtcgaggagtcctcgctcgggtcgccggagctggtgaagaaggagaacaacatggaggccttcctggaggaggtcaagaagaggctcaagatcgagctcgagggcggggtggcctccgacgacaaggcggaccgccgttggttcgccgccgcagccgccgccgacgttattccggccgacccgaagcagatcgcgcggagcatcgccaaccagatcagggagaacgtcacgagggacatgcacccggcgctgctgcggtcggagtccacgcgctcgtaccgcagcgacgtgccgttcgacgggcagggacagatggattacatcggccgagacgccaggaggcagctctccgacagctcaagaacgtgctgaggagggacccgccggacgccgagacgcccttctcgttctcccaccggagaagggccacctcgacgtcgttcgacgaggagccaacgaggcccaagccgacgaggcacgaggtggcgccgccgtcgtcgaggaaggggaaggtcaggagcaaggaggaggagaagaagtgcgcggtggagtccgacgtccggtcgttcagatacggaccgagcaacaccccgacgacgacccagctggactccgagcccgtgtcgccgcgaaacctcatgaggtcgttctcggcgccggtgtccgggacgaccttcgtgaagctcctctcggaggagccgcgggtgctgaccggagcgaggctgcagcgcaagcaggaaggccacgggagcagcaggccagcgtcgtcggaggagaggaaagggaggaaggacgcgttcagcatcagaggcaaggtgtccaacctgaggcagaactttgggctcagagccaagctgttcggcaagaagttccacgcctccgacgagccgttccccgacgacctcccgcccatcggcaccctcgtcaccgcaccatcggtcctcatacaccccggcgtcctgcaggagaactccaccgaggtaccaccgagcccggcgtcatggtgcagcagcccgcctgacgagatgagcaggggaggctacccaagccctgtctcgccattggaggcatcctttagcgagcaccggtctcccatgaggacggaagccaaagacatggcttcagctgcttctgaaccaggagaacaagcccatgctgaagaggggcgcgccgagacaagtcctgtcctggacgagcaggacgacggcgacatggacgatacagatcaccccatgaagtccttcgtcagagctgttctcgtcgtcgccggcatgtacgggcggaggcacaaccctggcaacgccaccatgtcagagtgcgaggtcaagcctatccccaagtgggtgctggaggaagtcgtgtccccgtcctcagccccggcgggcagcggcgcggcagccgtcatggaccaccggctcctcttcgacctcgtcaacgaggcgctgccgggagccgtccgggcctccacgacgctgtgcgcgttcgacaagtgccacgccatggcgccaaggagagcctccggtggcaaggcgctgctagaggcgctgtggaagtccatgcaggtgtggatagagccgccgagcgaccgcaggacggcgagctctgcctccgtggacgtgctgatcggccgtgacctgagcgtgtcggcgtggcacggcgcgttccgcgaggacgcggacgcgctggctggggacgtggaggcggagctgctggacgagctgctcgaagagacggtgtgggacgtgctcctcaatgtgggggactcatgatcggatcgtatgcctcttctgacgagtatacttgtacattttggggtgcctttttttctgcctcttttgggtgcttgccgggtttgtgaacggtgttgcattggcgagtgagatatgtaactatgcttgcgtgtggaagaatgctgaatttacactgagaaatgcttaaagaagagagagaaaaagatgaataataaaaggaacagctgtcgt

SEQ ID NO: 206467 - DNA, 3670 bp, Zea Mays
ctctcttctcttctcttctcttctcttctctcgccgttcgcgctgtgctctggttctgctgtctggtcggtcctgctgtcgaggctgcattgcatatttgcatgcacaggagcggctgcagggaaggagtgagaggagcaggatgggtaggtgggcgggtgagggcaaaaggaagacttcgcttttcgctttcccggctgttgctgttgctttccttccccttctaatcatcccttctcctcctccctagttattatcgtcgtgccaccataagcgcggcctcgcgccaacaagaacctcggcctcgggaggcagcagtagcaccgccgggggaggcgcagcgcagcgcaacggccggcgccgggacgagagatcctcgaatgtacatgacaaggaaacttttccgtccagctgacccctctctgatctcgccaccgaagcgcacgctggacacccgtggttggtggcaccatgctgcagtacctggacttctcgcacgccagcacctcaaggaagtgggcgcacaggagacagggcgacggtatggcgatcatcagtccaaatgtccaatcctctctatccaccatccttctcagatgaactaggcctgcaatcctgcattcctcgctggacgctacagtttatagcatggtcataggaatgtaggattacatttttttattaatcaagatatccttttttttccccttgatttggtcgatatgatatctttatctgctcttttggtatgccataatcatcttccaggacttgaagctccaaggaacagcatggagttcgctttggaggcttcccacagctatggcgtgtttcaggaagatgttccgcactatccctgcaatatgaggcagtacccaaaatcagggctcaaccacagctttaacccagtcaagaagctgatccaggaggacatctcgttccgaacgaatgaagtccagaagaggcccggcggcgtcatcgccagactgatgggcatggaatcgcctccactgaacgcagctactgaatccatcagtcgttcggagatcaccccgagaccaacaatgccaagaagagatcctcctgaaagggagacctcagccaagcatgtctccttcgtgcagcacggcaacagggactccaccaagcaggcgtcaaagcaggagatccgagcctatggcgaggagagggacgtgtttgggcagcagaacaagaggggcaacgagtggagtaagccgcagccgcgggagcacccgcaggaggaggagctgcagaagttcaagaaggagttcgaggcgtggcaggcgagcagggcgtgggagcactcgagaagcttcgagctggagagtagcaccctcggcgacgacgatgacgacggcaggtgcacggacatcgtgccgtacaggtaccagcaccaccaccaccaccaccacaaggggaaagatgccagccatggcggcaagcacatacgctcctccaacgaggacgtgcattgttggagaagaagcagcaaggagagcggcacgtccatctccgggagccgtacgttctctctgacgaccagcgcagacgccgccgcctgctccacgaggctgccgctctccaggttctaccacgaggaggagaggtcgctgtcgccgacgaggatcgtgatcctcaagccctgccccgagctgagcgcggacgacgtcgaggagtcctcgctcgggtcgccggagctggtgaagaaggagaacaacatggaggccttcctggaggaggtcaagaagaggctcaagatcgagctcgagggcggggtggcctccgacgacaaggcggaccgccgttggttcgccgccgcagccgccgccgacgttattccggccgacccgaagcagatcgcgcggagcatcgccaaccagatcagggagaacgtcacgagggacatgcacccggcgctgctgcggtcggagtccacgcgctcgtaccgcagcgacgtgccgttcgacgggcagggacagatggattacatcggccgagacgccaggaggcagctctccgacagctcaagaacgtgctgaggagggacccgccggacgccgagacgcccttctcgttctcccaccggagaagggccacctcgacgtcgttcgacgaggagccaacgaggcccaagccgacgaggcacgaggtggcgccgccgtcgtcgaggaaggggaaggtcaggagcaaggaggaggagaagaagtgcgcggtggagtccgacgtccggtcgttcagatacggaccgagcaacaccccgacgacgacccagctggactccgagcccgtgtcgccgcgaaacctcatgaggtcgttctcggcgccggtgtccgggacgaccttcgtgaagctcctctcggaggagccgcgggtgctgaccggagcgaggctgcagcgcaagcaggaaggccacgggagcagcaggccagcgtcgtcggaggagaggaaagggaggaaggacgcgttcagcatcagaggcaaggtgtccaacctgaggcagaactttgggctcagagccaagctgttcggcaagaagttccacgcctccgacgagccgttccccgacgacctcccgcccatcggcaccctcgtcaccgcaccatcggtcctcatacaccccggcgtcctgcaggagaactccaccgaggtaccaccgagcccggcgtcatggtgcagcagcccgcctgacgagatgagcaggggaggctacccaagccctgtctcgccattggaggcatcctttagcgagcaccggtctcccatgaggacggaagccaaagacatggcttcagctgcttctgaaccaggagaacaagcccatgctgaagaggggcgcgccgagacaagtcctgtcctggacgagcaggacgacggcgacatggacgatacagatcaccccatgaagtccttcgtcagagctgttctcgtcgtcgccggcatgtacgggcggaggcacaaccctggcaacgccaccatgtcagagtgcgaggtcaagcctatccccaagtgggtgctggaggaagtcgtgtccccgtcctcagccccggcgggcagcggcgcggcagccgtcatggaccaccggctcctcttcgacctcgtcaacgaggcgctgccgggagccgtccgggcctccacgacgctgtgcgcgttcgacaagtgccacgccatggcgccaaggagagcctccggtggcaaggcgctgctagaggcgctgtggaagtccatgcaggtgtggatagagccgccgagcgaccgcaggacggcgagctctgcctccgtggacgtgctgatcggccgtgacctgagcgtgtcggcgtggcacggcgcgttccgcgaggacgcggacgcgctggctggggacgtggaggcggagctgctggacgagctgctcgaagagacggtgtgggacgtgctcctcaatgtgggggactcatgatcggatcgtatgcctcttctgacgagtatacttgtacattttggggtgcctttttttctgcctcttttgggtgcttgccgggtttgtgaacggtgttgcattggcgagtgagatatgtaactatgcttgcgtgtggaagaatgctgaatttacactgagaaatgcttaaagaagagagagaaaaagatgaataataaaaggaacagctgtcgt

SEQ ID NO: 206468 - DNA, 3339 bp, Zea Mays
ctctcttctcttctcttctcttctcttctctcgccgttcgcgctgtgctctggttctgctgtctggtcggtcctgctgtcgaggctgcattgcatatttgcatgcacaggagcggctgcagggaaggagtgagaggagcaggatggttattatcgtcgtgccaccataagcgcggcctcgcgccaacaagaacctcggcctcgggaggcagcagtagcaccgccgggggaggcgcagcgcagcgcaacggccggcgccgggacgagagatcctcgaatgtacatgacaaggaaacttttccgtccagctgacccctctctgatctcgccaccgaagcgcacgctggacacccgtggttggtggcaccatgctgcagtacctggacttctcgcacgccagcacctcaaggaagtgggcgcacaggagacagggcgacggacttgaagctccaaggaacagcatggagttcgctttggaggcttcccacagctatggcgtgtttcaggaagatgttccgcactatccctgcaatatgaggcagtacccaaaatcagggctcaaccacagctttaacccagtcaagaagctgatccaggaggacatctcgttccgaacgaatgaagtccagaagaggcccggcggcgtcatcgccagactgatgggcatggaatcgcctccactgaacgcagctactgaatccatcagtcgttcggagatcaccccgagaccaacaatgccaagaagagatcctcctgaaagggagacctcagccaagcatgtctccttcgtgcagcacggcaacagggactccaccaagcaggcgtcaaagcaggagatccgagcctatggcgaggagagggacgtgtttgggcagcagaacaagaggggcaacgagtggagtaagccgcagccgcgggagcacccgcaggaggaggagctgcagaagttcaagaaggagttcgaggcgtggcaggcgagcagggcgtgggagcactcgagaagcttcgagctggagagtagcaccctcggcgacgacgatgacgacggcaggtgcacggacatcgtgccgtacaggtaccagcaccaccaccaccaccaccacaaggggaaagatgccagccatggcggcaagcacatacgctcctccaacgaggacgtgcattgttggagaagaagcagcaaggagagcggcacgtccatctccgggagccgtacgttctctctgacgaccagcgcagacgccgccgcctgctccacgaggctgccgctctccaggttctaccacgaggaggagaggtcgctgtcgccgacgaggatcgtgatcctcaagccctgccccgagctgagcgcggacgacgtcgaggagtcctcgctcgggtcgccggagctggtgaagaaggagaacaacatggaggccttcctggaggaggtcaagaagaggctcaagatcgagctcgagggcggggtggcctccgacgacaaggcggaccgccgttggttcgccgccgcagccgccgccgacgttattccggccgacccgaagcagatcgcgcggagcatcgccaaccagatcagggagaacgtcacgagggacatgcacccggcgctgctgcggtcggagtccacgcgctcgtaccgcagcgacgtgccgttcgacgggcagggacagatggattacatcggccgagacgccaggaggcagctctccgacagctcaagaacgtgctgaggagggacccgccggacgccgagacgcccttctcgttctcccaccggagaagggccacctcgacgtcgttcgacgaggagccaacgaggcccaagccgacgaggcacgaggtggcgccgccgtcgtcgaggaaggggaaggtcaggagcaaggaggaggagaagaagtgcgcggtggagtccgacgtccggtcgttcagatacggaccgagcaacaccccgacgacgacccagctggactccgagcccgtgtcgccgcgaaacctcatgaggtcgttctcggcgccggtgtccgggacgaccttcgtgaagctcctctcggaggagccgcgggtgctgaccggagcgaggctgcagcgcaagcaggaaggccacgggagcagcaggccagcgtcgtcggaggagaggaaagggaggaaggacgcgttcagcatcagaggcaaggtgtccaacctgaggcagaactttgggctcagagccaagctgttcggcaagaagttccacgcctccgacgagccgttccccgacgacctcccgcccatcggcaccctcgtcaccgcaccatcggtcctcatacaccccggcgtcctgcaggagaactccaccgaggtaccaccgagcccggcgtcatggtgcagcagcccgcctgacgagatgagcaggggaggctacccaagccctgtctcgccattggaggcatcctttagcgagcaccggtctcccatgaggacggaagccaaagacatggcttcagctgcttctgaaccaggagaacaagcccatgctgaagaggggcgcgccgagacaagtcctgtcctggacgagcaggacgacggcgacatggacgatacagatcaccccatgaagtccttcgtcagagctgttctcgtcgtcgccggcatgtacgggcggaggcacaaccctggcaacgccaccatgtcagagtgcgaggtcaagcctatccccaagtgggtgctggaggaagtcgtgtccccgtcctcagccccggcgggcagcggcgcggcagccgtcatggaccaccggctcctcttcgacctcgtcaacgaggcgctgccgggagccgtccgggcctccacgacgctgtgcgcgttcgacaagtgccacgccatggcgccaaggagagcctccggtggcaaggcgctgctagaggcgctgtggaagtccatgcaggtgtggatagagccgccgagcgaccgcaggacggcgagctctgcctccgtggacgtgctgatcggccgtgacctgagcgtgtcggcgtggcacggcgcgttccgcgaggacgcggacgcgctggctggggacgtggaggcggagctgctggacgagctgctcgaagagacggtgtgggacgtgctcctcaatgtgggggactcatgatcggatcgtatgcctcttctgacgagtatacttgtacattttggggtgcctttttttctgcctcttttgggtgcttgccgggtttgtgaacggtgttgcattggcgagtgagatatgtaactatgcttgcgtgtggaagaatgctgaatttacactgagaaatgcttaaagaagagagagaaaaagatgaataataaaaggaacagctgtcgt

SEQ ID NO: 206469 - DNA, 3080 bp, Zea Mays
ctacccctaacagagcgacgcgaaggacaaggaaacttttccgtccagctgacccctctctgatctcgccaccgaagcgcacgctggacacccgtggttggtggcaccatgctgcagtacctggacttctcgcacgccagcacctcaaggaagtgggcgcacaggagacagggcgacggacttgaagctccaaggaacagcatggagttcgctttggaggcttcccacagctatggcgtgtttcaggaagatgttccgcactatccctgcaatatgaggcagtacccaaaatcagggctcaaccacagctttaacccagtcaagaagctgatccaggaggacatctcgttccgaacgaatgaagtccagaagaggcccggcggcgtcatcgccagactgatgggcatggaatcgcctccactgaacgcagctactgaatccatcagtcgttcggagatcaccccgagaccaacaatgccaagaagagatcctcctgaaagggagacctcagccaagcatgtctccttcgtgcagcacggcaacagggactccaccaagcaggcgtcaaagcaggagatccgagcctatggcgaggagagggacgtgtttgggcagcagaacaagaggggcaacgagtggagtaagccgcagccgcgggagcacccgcaggaggaggagctgcagaagttcaagaaggagttcgaggcgtggcaggcgagcagggcgtgggagcactcgagaagcttcgagctggagagtagcaccctcggcgacgacgatgacgacggcaggtgcacggacatcgtgccgtacaggtaccagcaccaccaccaccaccaccacaaggggaaagatgccagccatggcggcaagcacatacgctcctccaacgaggacgtgcattgttggagaagaagcagcaaggagagcggcacgtccatctccgggagccgtacgttctctctgacgaccagcgcagacgccgccgcctgctccacgaggctgccgctctccaggttctaccacgaggaggagaggtcgctgtcgccgacgaggatcgtgatcctcaagccctgccccgagctgagcgcggacgacgtcgaggagtcctcgctcgggtcgccggagctggtgaagaaggagaacaacatggaggccttcctggaggaggtcaagaagaggctcaagatcgagctcgagggcggggtggcctccgacgacaaggcggaccgccgttggttcgccgccgcagccgccgccgacgttattccggccgacccgaagcagatcgcgcggagcatcgccaaccagatcagggagaacgtcacgagggacatgcacccggcgctgctgcggtcggagtccacgcgctcgtaccgcagcgacgtgccgttcgacgggcagggacagatggattacatcggccgagacgccaggaggcagctctccgacagctcaagaacgtgctgaggagggacccgccggacgccgagacgcccttctcgttctcccaccggagaagggccacctcgacgtcgttcgacgaggagccaacgaggcccaagccgacgaggcacgaggtggcgccgccgtcgtcgaggaaggggaaggtcaggagcaaggaggaggagaagaagtgcgcggtggagtccgacgtccggtcgttcagatacggaccgagcaacaccccgacgacgacccagctggactccgagcccgtgtcgccgcgaaacctcatgaggtcgttctcggcgccggtgtccgggacgaccttcgtgaagctcctctcggaggagccgcgggtgctgaccggagcgaggctgcagcgcaagcaggaaggccacgggagcagcaggccagcgtcgtcggaggagaggaaagggaggaaggacgcgttcagcatcagaggcaaggtgtccaacctgaggcagaactttgggctcagagccaagctgttcggcaagaagttccacgcctccgacgagccgttccccgacgacctcccgcccatcggcaccctcgtcaccgcaccatcggtcctcatacaccccggcgtcctgcaggagaactccaccgaggtaccaccgagcccggcgtcatggtgcagcagcccgcctgacgagatgagcaggggaggctacccaagccctgtctcgccattggaggcatcctttagcgagcaccggtctcccatgaggacggaagccaaagacatggcttcagctgcttctgaaccaggagaacaagcccatgctgaagaggggcgcgccgagacaagtcctgtcctggacgagcaggacgacggcgacatggacgatacagatcaccccatgaagtccttcgtcagagctgttctcgtcgtcgccggcatgtacgggcggaggcacaaccctggcaacgccaccatgtcagagtgcgaggtcaagcctatccccaagtgggtgctggaggaagtcgtgtccccgtcctcagccccggcgggcagcggcgcggcagccgtcatggaccaccggctcctcttcgacctcgtcaacgaggcgctgccgggagccgtccgggcctccacgacgctgtgcgcgttcgacaagtgccacgccatggcgccaaggagagcctccggtggcaaggcgctgctagaggcgctgtggaagtccatgcaggtgtggatagagccgccgagcgaccgcaggacggcgagctctgcctccgtggacgtgctgatcggccgtgacctgagcgtgtcggcgtggcacggcgcgttccgcgaggacgcggacgcgctggctggggacgtggaggcggagctgctggacgagctgctcgaagagacggtgtgggacgtgctcctcaatgtgggggactcatgatcggatcgtatgcctcttctgacgagtatacttgtacattttggggtgcctttttttctgcctcttttgggtgcttgccgggtttgtgaacggtgttgcattggcgagtgagatatgtaactatgcttgcgtgtggaagaatgctgaatttacactgagaaatgcttaaagaagagagagaaaaagatgaataataaaaggaacagctgtcgt

SEQ ID NO: 206470 - DNA, 2066 bp, Zea Mays
gctaattccaatgccaatggcggccgcggccggcgcgggcgagcccggtccgcgctcggaggcgtccggcttcggctctggctgcaaccacctgcggccgcggcgggggcctccacccccgtccccgtcccccgcggtcgggaagccgctcccgtccggcgcggtgccgcgccatgcgttcgtgttcgacggcgagggcggcttctccgaggcaccctggggccttgcggtgtccggttcgtcgcggaccggggagttcacgtggcaccacgtggagctcccgcgctccgcgggcgccgcggcggccaagccgctccaccacgcgcaggcgctcatcgagctcctctgcccgccgctcacgctgcaggagatcctcgcgttcgtcgccacgggcccgcactgcgcctcctcgggcgacggcgcgctcctgctccgcgtcagcgcgccgggccccgtcggcagcgcgtacgcgctccgcctcgccgcgcgcgtcaccgagagctccgtcgtcaccgtgtccgtcggcggggtcccgcgcctcgcgttcgggaccaggcaggcgtcgctcctctcggaggttccgctcggcgtcgccgcctcgctctccgacgagggccatggcgggggccgcgccgtcgacggcggcgtgatcatcgatgagcgcctgctcgagtcgctgctggccatgaaccacgcggacggcgcgcacacggacaacccggtgccgcggacggtgtccaacctcctcgtgcacgtcctcggcacgcacgtagaccacgtccacgacattgtcacgcgcctcgagatggacctggacgccgtcgagctgcagctcgacaaaggtggtcactttttgaggaagcttttgctggatggcaggagattcccaaaaatgcatctggatctacagcggttgcttcaggtatgagttctctctcaagtttctgggaaatacattgggaacctggaatgctattttataatttgcactgatttagccaaaatggcaacttgcatgaagtgactgttgatgtgacattgaggtttattggcatgctgtgttgctcatagtttggctttcaggttctaaaagtgcaggtacttgatttcagttaatctatcgagatggaacagaagtcacaggctcgattctactgtttttgtttgtgtaggttgtttctcactgtgaacaagtattcccccgcgtgaaggaaaaatgtgcgagcaagagttggttcgcaacaggagatatagcagcccttgaagatctgataggtcgtctcagaaggctcaaagaaaacctagggttcattacaaatagaatcaccacacttcaggctagtctggacagttggcaatcggagcagataaacaaaagcttgtactacctttcatttctctccataatattcctgcctctttccattgtcactggagttttcgggatgaacgtcggtggtgtgccgtggacagggcagaacaagaaccctaaaaaccgggatggcttcatgaatgtcatgctaatatgtgttgcaatcttgttacttctgttgctgtgtttcttgtttccttcattatattctcatgtgacgtcatggagaacccgccgtgagctgacccggagcaactctcagaacagaagacatctgaaactcttcaaaggtcacaaggaaggttacatgcgcctatgacgacaatacagttgcaaactacggtgtccatttcagctgtaaggtgattgtcagtgatgttgtaagtgtaagatttgtggggaaagatcctagatagccaacacatgtacaggtttgaaggagaccctccatggctccatttgaggttcataccttgttcattgcttagtttgtttttgttgtagattcatggctgtcactgcaccttttatttattctgaaaatgtgttagttcttcaatgaagaccacccacgacaatttgtcattgttgttccaggtggacgtgtttcatagttgtacgcagcgaattcctgcctgttttcagcgtattgaaataaatagtcggagcaacagctatggcttttattctgaaa

SEQ ID NO: 206471 - DNA, 1911 bp, Zea Mays
aataatattatttattagatttggatattttgctagttcactgcaaggtccctgcggcttgtcaataatacgccctcacgtggcgctgcgcgggcgctaattccaatgccaatggcggccgcggccggcgcgggcgagcccggtccgcgctcggaggcgtccggcttcggctctggctgcaaccacctgcggccgcggcgggggcctccacccccgtccccgtcccccgcggtcgggaagccgctcccgtccggcgcggtgccgcgccatgcgttcgtgttcgacggcgagggcggcttctccgaggcaccctggggccttgcggtgtccggttcgtcgcggaccggggagttcacgtggcaccacgtggagctcccgcgctccgcgggcgccgcggcggccaagccgctccaccacgcgcaggcgctcatcgagctcctctgcccgccgctcacgctgcaggagatcctcgcgttcgtcgccacgggcccgcactgcgcctcctcgggcgacggcgcgctcctgctccgcgtcagcgcgccgggccccgtcggcagcgcgtacgcgctccgcctcgccgcgcgcgtcaccgagagctccgtcgtcaccgtgtccgtcggcggggtcccgcgcctcgcgttcgggaccaggcaggcgtcgctcctctcggaggttccgctcggcgtcgccgcctcgctctccgacgagggccatggcgggggccgcgccgtcgacggcggcgtgatcatcgatgagcgcctgctcgagtcgctgctggccatgaaccacgcggacggcgcgcacacggacaacccggtgccgcggacggtgtccaacctcctcgtgcacgtcctcggcacgcacgtagaccacgtccacgacattgtcacgcgcctcgagatggacctggacgccgtcgagctgcagctcgacaaaggtggtcactttttgaggaagcttttgctggatggcaggagattcccaaaaatgcatctggatctacagcggttgcttcaggttgtttctcactgtgaacaagtattcccccgcgtgaaggaaaaatgtgcgagcaagagttggttcgcaacaggagatatagcagcccttgaagatctgataggtcgtctcagaaggctcaaagaaaacctagggttcattacaaatagaatcaccacacttcaggctagtctggacagttggcaatcggagcagataaacaaaagcttgtactacctttcatttctctccataatattcctgcctctttccattgtcactggagttttcgggatgaacgtcggtggtgtgccgtggacagggcagaacaagaaccctaaaaaccgggatggcttcatgaatgtcatgctaatatgtgttgcaatcttgttacttctgttgctgtgtttcttgtttccttcattatattctcatgtgacgtcatggagaacccgccgtgagctgacccggagcaactctcagaacagaagacatctgaaactcttcaaaggtcacaaggaaggttacatgcgcctatgacgacaatacagttgcaaactacggtgtccatttcagctgtaaggtgattgtcagtgatgttgtaagtgtaagatttgtggggaaagatcctagatagccaacacatgtacaggtttgaaggagaccctccatggctccatttgaggttcataccttgttcattgcttagtttgtttttgttgtagattcatggctgtcactgcaccttttatttattctgaaaatgtgttagttcttcaatgaagaccacccacgacaatttgtcattgttgttccaggtggacgtgtttcatagttgtacgcagcgaattcctgcctgttttcagcgtattgaaataaatagtcggagcaacagctatggcttttattctgaaa

SEQ ID NO: 206472 - DNA, 2901 bp, Zea Mays
gtcatgtttgcaaaattctctgtgatgatgtgaacgaaggtctgaaaaaatcacagaactcactcgaacgacggtgccgccgcttgcctcgccggaccatggccgctgtgccgtcggggttcctcctcatcactggcccgccgggcgtggggaagacgacgctggtcatgcgggtgtttgaaaccctcagaggctcccacccgaacctcaacattcgcggattctatacccgagaggtgagagagggcggagaaaggatagggttcgaggttgtcacgctcgacggtagaactggaccactttcctcatgcaaggtttccaggttgctattatgcatttatgcttgttctaaattctgatattaataaggtaattgttggtatttgtttagcaccgtgtatttgggtatttggaattttgaaatgcgttatctgatactggagattgtcagtagtttaaattgtatctaacagcagcgcgaacacacttcactgaaatgtccacttcttaagtccatcttgcagaataagattcacaatatgtgtagcacatctcatatgaaggtactttcctacaagtatggtacctttactattatttagttgtttcttcagatatgataaaccactgttattagcactagcattatcaactgttactgtcataatttttcctaacccattccatcaagcatctatgtaagttcttcccaatgacatcccccttatgaccctttacttggaagaagctaatgaccttcttatgcaaattccaattatcatcaacgaagtgtgcagtcactgtaatatagtagtcttgttgttgagaagtccaacaatcagtggtaaggcaaaccctttcacatttctgttttcaaaagtgcatcaactttgctttttcctgaaagtaaatgcgaatgatgtccctagtgcaagtccatcgggatggaggctcaaaacgagggcaagcaatggacataaactttctaaagcctgccttctcaccaaacgcaaaaggaagttcatcttgtatgaccatttcattaaaagcttgtctaagcaactcaggatcataccttcatgcgctaacaccttgtccatcagtagcttgcaaagtaccttgcttattgtccttgttcagtttatggggattgcgcttacatgtattaaagtgctttcgcattctagatgtaccattggttgttgtatcagcccaaatattatggctgcaatacttgcactgtcccttctttaccatgttgtttgcatcctttattttgatgaaatgctaccacatttcggaacggggagccatcactttcctttcacttcctttgttttctccatcactaacttgaacaacctcaacagaaccacctgtatctcccacatttgaagcacaagcaccatcaacaacaggtttcagtgcagatgacatctacaaaagaataaaatgggcaacacatgatacacatcaacaatcatgtacatagaaccgaatccgaatttattatttcggttttctggattcattacctgtacctgatacccgtttttttggttctttcggtttcagtctcggttttttcggtatttggatctcggtttttatgcccagtcctaatagcagctagttaatatgtgagattaatacagtgttgcgtccacatattcttgcctttttgccattctaatattttttagctatcctagttctgcatggttgtcattgcttatttccacaatgctaccttgacataaaaaacgtggtcgggagggaatgaccgccctcccggtataatactaagaagagagcaaaacattagtcccgactaagaaaatctccaaagtctggcctcccatcactaacggcccgacgtcaaccgtccactgtgcaacggtccaaccggagggtggcgcataggacatcgtaaccagagagcggatgaggcataacgaggggattttttttaaccaagccggaaaattcgccgtgagggaatcgaacccggttcttggatgtttgatgaatttaagagtttttgtaacctagatatcctcacacataccattaccttttggttcttttgcagcccggagtctgttagatggcctaccgtcgggaaatacaaagtagacgtagcatccttggaatcattagcagtacctgagctgcaggtaagcagttggtggtgggttatgaaagagctacgaaatgtcaatgatcatgggatgtgtgcttgttaggttaagcatgagtgcatgataacgttttaaagtttgttctcgattgataacggcggagaaggaaatatacttcatatttcatgttggatcaggttaaggaagaaacagatctcttcatcattgacgaagtgggtaaaatggagctgttcagttcagcatttttccctgcggtaatgagagttattgaatccaatataccagtgttggccaccatacccattcctaggcagggccgggacattccaggagttgcgaggttgcggaatcatcctggagcagctgttttcaccttagacactggtaacagagatacgatgagagatactatatgcagtcagctaaggagtttgttgcagaggtgatctgctaacctccctgtgtctatgtagccactgctttttttgacataagataacaagcaaacgatcaagagtagaagttttctctcagaacctcgagtatctgttttcaagtttagctctgaatggatgataagcatgtcgttcagtttgttcttagttccgtatgtggttattcaatcatgtatttgcattcggtgggggcaaggttttattgccacaataactctcgcttgtatggatgcggttagcatgtagtgactctacaacaggtatcacatgatttgcacaactaa

SEQ ID NO: 206473 - DNA, 2047 bp, Zea Mays
gtcatgtttgcaaaattctctgtgatgatgtgaacgaaggtctgaaaaaatcacagaactcactcgaacgacggtgccgccgcttgcctcgccggaccatggccgctgtgccgtcggggttcctcctcatcactggcccgccgggcgtggggaagacgacgctggtcatgcgggtgtttgaaaccctcagaggctcccacccgaacctcaacattcgcggattctatacccgagaggtgagagagggcggagaaaggatagggttcgaggttgtcacgctcgacggtagaactggaccactttcctcatgcaaggtttccaggttgctattatgcatttatgcttgttctaaattctgatattaataaggtaattgttggtatttgtttagcaccgtgtatttgggtatttggaattttgaaatgcgttatctgatactggagattgtcagtagtttaaattgtatctaacagcagcgcgaacacacttcactgaaatgtccacttcttaagtccatcttgcagaataagattcacaatatgtgtagcacatctcatatgaaggtactttcctacaagtatggtacctttactattatttagttgtttcttcagatatgataaaccactgttattagcactagcattatcaactgttactgtcataatttttcctaacccattccatcaagcatctatgtaagttcttcccaatgacatcccccttatgaccctttacttggaagaagctaatgaccttcttatgcaaattccaattatcatcaacgaagtgtgcagtcactgtaatatagtagtcttgttgttgagaagtccaacaatcagtgtgcaagtccatcgggatggaggctcaaaacgagggcaagcaatggacataaactttctaaagcctgccttctcaccaaacgcaaaaggaagttcatcttgtatgaccatttcattaaaagcttgtctaagcaactcaggatcataccttcatgcgctaacaccttgtccatcagtagcttgcaaagtaccttgcttattgtccttgttcagtttatggggattgcgcttacatgtattaaagtgctttcgcattctagatgtaccattggttgttgtatcagcccaaatattatggctgcaatacttgcactgtcccttctttaccatgttgtttgcatcctttattttgatgaaatgctaccacatttcggaacggggagccatcactttcctttcacttcctttgttttctccatcactaacttgaacaacctcaacagaaccacctgtatctcccacatttgaagcacaagcaccatcaacaacaggtttcagtgcagatgacatctacaaaagaataaaatgggcaacacatgatacacatcaacaatcatcccggagtctgttagatggcctaccgtcgggaaatacaaagtagacgtagcatccttggaatcattagcagtacctgagctgcaggttaaggaagaaacagatctcttcatcattgacgaagtgggtaaaatggagctgttcagttcagcatttttccctgcggtaatgagagttattgaatccaatataccagtgttggccaccatacccattcctaggcagggccgggacattccaggagttgcgaggttgcggaatcatcctggagcagctgttttcaccttagacactggtaacagagatacgatgagagatactatatgcagtcagctaaggagtttgttgcagaggtgatctgctaacctccctgtgtctatgtagccactgctttttttgacataagataacaagcaaacgatcaagagtagaagttttctctcagaacctcgagtatctgttttcaagtttagctctgaatggatgataagcatgtcgttcagtttgttcttagttccgtatgtggttattcaatcatgtatttgcattcggtgggggcaaggttttattgccacaataactctcgcttgtatggatgcggttagcatgtagtgactctacaacaggtatcacatgatttgcacaactaa

SEQ ID NO: 206474 - DNA, 2301 bp, Zea Mays
caacgaacggaggcgcgcggagcaaatcggagattcggagcccgggaccgggcgcgctccaccaccacacgtgacctcgctctcggcctcccgggcctcggcttgggcgcttggcaggctccccgctcctgcgggagaacgcaaggcaatcgatctcccgcccgcctccgatccctcctccattctcgctcgtccacggtctgccctatataacccctcgctccgttggtttcgtcgcctccgttcccccaagggagaagggtacgttggtgatatcccgcgtccccagcgaggatgctgtcattgcgctgccacgccgccgcgccggcgacccgcggcgtcgcatgtgaacacggggcgcgttcatcgtgttgtcttctttctttgccccccgtttccacctaggcagagataaataagatctgcggaatcaagaagctctgtccaaggaggaagccagcggcacggcagtgccctcggcggtgatgaagtacgtctccgggccgtacttcgaaccggacttcgacccgctactcgaccgcttcggcaccccaggggtcgtcgtcgacaatgagacacgcgaggactgcacgctcgtcaaggttgacagcgtgaaccgggacggcgtgctgctggagatggtgcagctgctcaccgatctcgacctcgtcatctccaagtcgtacatctcctccgacggcggctggctcatggatgtgttccatgtgacggaccagatcgggcgcaagctgacggacccgtcgctgcccgagttcatccagcgcgcgctcgtgccgacccaccggccgggcaacggcccgtctccgaggttcaccacgtgcctgggcaacgtggtcgggccgggcggccccgacgtttcgggctgcgccgcgctcgagttcacggtgcacgaccgcccggggctcctgtcctccatcacgtccgtgctggccgacaacgggtgccacgtcgcgtccgggcaggcgtggacgcacaacggccgcgcggctggggtgctgtacgtgacggacaccgcgggcggcgccgcgctgctcccgggccggtgcgcgcgcatcgagcggctggtgaacgccgtggtggacgcgcgcgagaacgtgaccggggagcgccactgggtgcgcgtgtcggagcccgcgcagggccgcgtgcacacggagcgccgcctgcaccaactcatgcacgacgacagggactacgagtccggcccggccccgacccccgtcgacgaggacctcttcagcgtgggcgaaaaggcggcgaccgcgcggacggcccgccgcgccgtgacgcgggtgtccatcgacagctgggaggagcggggctacgccgtcgtcaagatgacgagcagggaccgccccaggctgctcttcgacacggtgtgcgcgctcaccgacatgcagtacgtcgtcttccacgctaccgtcggatcccaggggcctcttgccattcaggagtattacatccggcacaaggacgggcgcacggtcgacaacagcgccgagaggcagaaggtctcccggtgcctcgtggccgcggtggagcggagggccactcatggcgtcagggtggaggtgcgcgccgccgaccggtcgggcttgctatcggatttcaccagggtgctgcgggagcacggcctgtcgctgctgagagttgagctcaagaggcacaaggacgaggccttcggcatattttacctcgtcacggacaccggaggcgaggtgcgcgctgagtcgttgcgcgccgtgcaggcgagggtcgccgagatggatatctcgctcgacgttgtgaaggaggcccctggctggccgccggtgaggaagactagcgtaccagccccgcccgccgccgggtctcagcctcaggagaggcccagaccttccctggggagcctcctatggtcacaccttgggaagctctcgaataacttcaacaacatcaggtcttgatacctgttcgcagaatgcacctgttgttctgcatagacgcttccattggtgcgtcggttccaataacttcctggacctcgagtaccaagaatttatgtcaggaagcagtacaaaactgtacataaagtgtatcagataaaagtaagcagagtgacgttcaatttatcaagaacttaggtgtgtttggttcgagaaataactttatctaaaatgagatgatgcattataagtatatttctcaaatttggtataatgaatttatttcacatgttaatactaactataataaatgagtttctcatgttaatactaactataaggaatgagatggtgg

SEQ ID NO: 206475 - DNA, 2053 bp, Zea Mays
caacgaacggaggcgcgcggagcaaatcggagattcggagcccgggaccgggcgcgctccaccaccacacgtgacctcgctctcggcctcccgggcctcggcttgggcgcttggcaggctccccgctcctgcgggagaacgcaaggtttccacctaggcagagataaataagatctgcggaatcaagaagctctgtccaaggaggaagccagcggcacggcagtgccctcggcggtgatgaagtacgtctccgggccgtacttcgaaccggacttcgacccgctactcgaccgcttcggcaccccaggggtcgtcgtcgacaatgagacacgcgaggactgcacgctcgtcaaggttgacagcgtgaaccgggacggcgtgctgctggagatggtgcagctgctcaccgatctcgacctcgtcatctccaagtcgtacatctcctccgacggcggctggctcatggatgtgttccatgtgacggaccagatcgggcgcaagctgacggacccgtcgctgcccgagttcatccagcgcgcgctcgtgccgacccaccggccgggcaacggcccgtctccgaggttcaccacgtgcctgggcaacgtggtcgggccgggcggccccgacgtttcgggctgcgccgcgctcgagttcacggtgcacgaccgcccggggctcctgtcctccatcacgtccgtgctggccgacaacgggtgccacgtcgcgtccgggcaggcgtggacgcacaacggccgcgcggctggggtgctgtacgtgacggacaccgcgggcggcgccgcgctgctcccgggccggtgcgcgcgcatcgagcggctggtgaacgccgtggtggacgcgcgcgagaacgtgaccggggagcgccactgggtgcgcgtgtcggagcccgcgcagggccgcgtgcacacggagcgccgcctgcaccaactcatgcacgacgacagggactacgagtccggcccggccccgacccccgtcgacgaggacctcttcagcgtgggcgaaaaggcggcgaccgcgcggacggcccgccgcgccgtgacgcgggtgtccatcgacagctgggaggagcggggctacgccgtcgtcaagatgacgagcagggaccgccccaggctgctcttcgacacggtgtgcgcgctcaccgacatgcagtacgtcgtcttccacgctaccgtcggatcccaggggcctcttgccattcaggagtattacatccggcacaaggacgggcgcacggtcgacaacagcgccgagaggcagaaggtctcccggtgcctcgtggccgcggtggagcggagggccactcatggcgtcagggtggaggtgcgcgccgccgaccggtcgggcttgctatcggatttcaccagggtgctgcgggagcacggcctgtcgctgctgagagttgagctcaagaggcacaaggacgaggccttcggcatattttacctcgtcacggacaccggaggcgaggtgcgcgctgagtcgttgcgcgccgtgcaggcgagggtcgccgagatggatatctcgctcgacgttgtgaaggaggcccctggctggccgccggtgaggaagactagcgtaccagccccgcccgccgccgggtctcagcctcaggagaggcccagaccttccctggggagcctcctatggtcacaccttgggaagctctcgaataacttcaacaacatcaggtcttgatacctgttcgcagaatgcacctgttgttctgcatagacgcttccattggtgcgtcggttccaataacttcctggacctcgagtaccaagaatttatgtcaggaagcagtacaaaactgtacataaagtgtatcagataaaagtaagcagagtgacgttcaatttatcaagaacttaggtgtgtttggttcgagaaataactttatctaaaatgagatgatgcattataagtatatttctcaaatttggtataatgaatttatttcacatgttaatactaactataataaatgagtttctcatgttaatactaactataaggaatgagatggtgg

SEQ ID NO: 206476 - DNA, 2275 bp, Zea Mays
aacgaacggaggcgcgcggagcaaatcggagattcggagcccgggaccgggcgcgctccaccaccacacgtgacctcgctctcggcctcccgggcctcggcttgggcgcttggcaggctccccgctcctgcgggagaacgcaaggcaatcgatctcccgcccgcctccgatccctcctccattctcgctcgtccacggtctgccctatataacccctcgctccgttggtttcgtcgcctccgttcccccaagggagaagggtacgttggtgatatcccgcgtccccagcgaggatgctgtcattgcgctgccacgccgccgcgccggcgacccgcggcgtcgcatgtgaacacggggcgcgttcatcgtttccacctaggcagagataaataagatctgcggaatcaagaagctctgtccaaggaggaagccagcggcacggcagtgccctcggcggtgatgaagtacgtctccgggccgtacttcgaaccggacttcgacccgctactcgaccgcttcggcaccccaggggtcgtcgtcgacaatgagacacgcgaggactgcacgctcgtcaaggttgacagcgtgaaccgggacggcgtgctgctggagatggtgcagctgctcaccgatctcgacctcgtcatctccaagtcgtacatctcctccgacggcggctggctcatggatgtgttccatgtgacggaccagatcgggcgcaagctgacggacccgtcgctgcccgagttcatccagcgcgcgctcgtgccgacccaccggccgggcaacggcccgtctccgaggttcaccacgtgcctgggcaacgtggtcgggccgggcggccccgacgtttcgggctgcgccgcgctcgagttcacggtgcacgaccgcccggggctcctgtcctccatcacgtccgtgctggccgacaacgggtgccacgtcgcgtccgggcaggcgtggacgcacaacggccgcgcggctggggtgctgtacgtgacggacaccgcgggcggcgccgcgctgctcccgggccggtgcgcgcgcatcgagcggctggtgaacgccgtggtggacgcgcgcgagaacgtgaccggggagcgccactgggtgcgcgtgtcggagcccgcgcagggccgcgtgcacacggagcgccgcctgcaccaactcatgcacgacgacagggactacgagtccggcccggccccgacccccgtcgacgaggacctcttcagcgtgggcgaaaaggcggcgaccgcgcggacggcccgccgcgccgtgacgcgggtgtccatcgacagctgggaggagcggggctacgccgtcgtcaagatgacgagcagggaccgccccaggctgctcttcgacacggtgtgcgcgctcaccgacatgcagtacgtcgtcttccacgctaccgtcggatcccaggggcctcttgccattcaggagtattacatccggcacaaggacgggcgcacggtcgacaacagcgccgagaggcagaaggtctcccggtgcctcgtggccgcggtggagcggagggccactcatggcgtcagggtggaggtgcgcgccgccgaccggtcgggcttgctatcggatttcaccagggtgctgcgggagcacggcctgtcgctgctgagagttgagctcaagaggcacaaggacgaggccttcggcatattttacctcgtcacggacaccggaggcgaggtgcgcgctgagtcgttgcgcgccgtgcaggcgagggtcgccgagatggatatctcgctcgacgttgtgaaggaggcccctggctggccgccggtgaggaagactagcgtaccagccccgcccgccgccgggtctcagcctcaggagaggcccagaccttccctggggagcctcctatggtcacaccttgggaagctctcgaataacttcaacaacatcaggtcttgatacctgttcgcagaatgcacctgttgttctgcatagacgcttccattggtgcgtcggttccaataacttcctggacctcgagtaccaagaatttatgtcaggaagcagtacaaaactgtacataaagtgtatcagataaaagtaagcagagtgacgttcaatttatcaagaacttaggtgtgtttggttcgagaaataactttatctaaaatgagatgatgcattataagtatatttctcaaatttggtataatgaatttatttcacatgttaatactaactataataaatgagtttctcatgttaatactaactataaggaatgagatggtgg

SEQ ID NO: 206477 - DNA, 1064 bp, Zea Mays
caagaccccggcacctctctctctctccatccagctgcttctccaatctccaccgtccctctctctcgtttgcttgctagctcttgttgcacaccacagccagctctagcttgcattggggttcttgcccttggcaaagccctcatttttcttggtgtgcatatagcttgcatgcatttgattgggtttaggtttgccagcagcagcaatttaaacgaataaacaggatccctttctttctccaattttcgtgtgcgtattaattagcttgcatgcttgggccggcgatgtctgagctcgtgtgtggcggctgcttcaccatgctggtgcactcccgcagcgcaactaacgtacggtgccctcactgcggcaggctcggctcgacaagatcaggaaaccagatggggcacctgtcgtgcgggcaatgccggacaaccctggcatacccgccgggagcgacgacagtcgggtgcccgacatgccgcaacgtcaatccagttccaaccagggtacgtatggatgctcggccgcagcagacgatggttctggtggagaatcctaagacgctggatgaaaagggcaaactggtgagcagtgttgccgttggtgtcacctcgtggaaaagatgaccaacaactcacttcattccggctaatctcgtcatcatcgacaacgacgacagctaatgtaaaatcaagtgtgttttgaagcgcttgatgtttttcatataaggaaaaaaagaaaagaggcagagtagcagtagctgttgagcagcaaaagatctgaaaattgtaaatacattacatgctatagccacccgtgtgcgcctttgtgcccctggaattgtattcttgccctgccaaggtcagacacgctgagtcgactctgcactctagcgctttatctgcaaattcggattctccggctgaaaaaaaaaaaccgagagaaaggatagtgctgcccatgataagattctgcagcctaaactctctaggcagtttatgcagaaactgcgctggtcgttttcagttttttttttcacagtgcgctgaactgaaaagtgc

SEQ ID NO: 206478 - DNA, 813 bp, Zea Mays
cttgtgttagcgctggtgattcggcagccagcgaggctgatccgggaccgggtggctggccggtggccacaccagaggtctattatacctggattccgcgaggccacggaccacggtgcgcgcgctcttgtcttgttcctgtgcctgccactgccagtgccaccatctcgccgtcggcgtcggctcgtcgcctgagagccgaggccacgcaggcacccgggccgggggatgtcggcgccggcggcacaggccgtggtggcgctggctctcgcggccatcctctcgaccccggcgccccaggcggacaccttctccaacgtcccgcccacgctctccgggggcgacgggaagcaagagcggatcaagcaccccaggtcggccaaggcgttgcagtgcacgaccaagtgcgtcggcacctgcatccgcggcggcggcggcgcgcccggcgaggggcccctcaacgtcaggaggcccctcgtggtgttcaaggacggcttccgcagccggcagtactgcctgatagagtgctcggacatttgcaatcgcatcaaggatgggcaggacggaccctgagacgggccagaggaacaacatgcccaagcccaaagttgttggagcaactgccatggctgcggtgcaggctagatatgggatccggttcttctgccaggcctccagaagcagaacttcagaggcgacaagggtaataaggtacagtaaaccagtcagtaacatataggatccagagacatttgctagcaacaaaatccgagaaaagctgttaagagtgatgcgtagtggtcttgataaccg

SEQ ID NO: 206479 - DNA, 776 bp, Zea Mays
cttgtgttagcgctggtgattcggcagccagcgaggctgatccgggaccgggtggctggccggtggccacaccagaggtctattatacctggattccgcgaggccacggaccacggtgcgcgcgctcttgtcttgttcctgtgcctgccactgccagtgccaccatctcgccgtcggcgtcggctcgtcgcctgagagccgaggccacgcaggcacccgggccgggggatgtcggcgccggcggcacaggccgtggtggcgctggctctcgcggccatcctctcgaccccggcgccccaggcggacaccttctccaacgtcccgcccacgctctccgggggcgacgggaagcaagagcggatcaagcaccccaggtcggccaaggcgttgcagtgcacgaccaagtgcgtcggcacctgcatccgcggcggcggcggcgcgcccggcgaggggcccctcaacgtcaggaggcccctcgtggtgttcaaggacggcttccgcagccggcagtactggatgggcaggacggaccctgagacgggccagaggaacaacatgcccaagcccaaagttgttggagcaactgccatggctgcggtgcaggctagatatgggatccggttcttctgccaggcctccagaagcagaacttcagaggcgacaagggtaataaggtacagtaaaccagtcagtaacatataggatccagagacatttgctagcaacaaaatccgagaaaagctgttaagagtgatgcgtagtggtcttgataaccg

SEQ ID NO: 206480 - DNA, 1322 bp, Zea Mays
cacaaatataacctgtgatcgcgttaatttgagcttctaagcacggataggatctggaatgaactgcctgacctgtgactcctccacggcaacctcttcctgggtagatgcttggccagggaagcagatgcatagccacaattaccgtgtgccggagccattccttgatcaagtagtgatcataattggggcctcggcaagtgcagttgacatttcgagagacatcgcaagcatggcggaagaggtacatattgctgatagatcagcaccggcttccacctgtaacaagcagcctggctatgataatctgtggcttcattccatggtaaactaccttttatgagtttatcctggtgaatcaagatatggaagcttttatctactggaggagctgccacagttagtgttgtggcgaatctaatgctcgggctgcagattgaccatgcgcaggaggatggcactgtggtgttccaggatggcagctcaatcaaagctgatgttatcatgcactgcactggctacctgtatgactttccattccttggagatgacagcactatcaccgtggacgacaaccgtgtcgatccactatacaagcatatttttccacccgaagtggcacctcatttgtccttcatcggattgccttggaaagtcagttttgctgcaaattgatgccccagttaagatgcacctgtaacctaccctgtgaagctcaaagatcttgaacattccaacctctgttctttccaggttatccccttcccactgtttgaactccaaagtaagtgggttgctagagttctatcaggacggattaatcttccatccgaagacaggatgatggaagatgtgaaggctttctatttgaaactagaagcacatggatggcctaagagatacacacataattttgcaaattaccagtttgagtatgatgattggctcgctgagcaatgtggccatccaccagtcgaagaatggaggaagcagatgtatgctgtaacttcaatgaacaaggcagctcgtcctgagagttaccgtgatgaatgggatgacgagcatctggtggccgaagcaaatgaatacttcaagaaattcttgtaaattctttcttactattctcatcccatattctttcggcatacccgaggctgatctcaactgcaatatgcaaatatgaataaccatttaagtgatgtggattggatacacttctgggttagcatttcatcgatcattcgatcgatgtatatatatgagactgttctggtagtaaacaatcttgtagtaaactgtggattggtcatcaattaacaaca

SEQ ID NO: 206481 - DNA, 2011 bp, Zea Mays
gaatgttgttgctgggctggctacagtacagtacaggtgcaggcttcattcctccagtggcggcggacaacgccgaacagacagaagaatactgtagagaagatcgtcgcacccaccggaggacgagacgggccctaggcacaccacgcaatcagccgccccgcgcccccgcccgcggttggcgatgttgccgtgacgtcttccagggaggagaagccaacatcacaaactccacgacgaataactggcagtagaagccgagaaggtaggcccgctcgttccaacatcacaaactccacacggctctcctgtctccgctgcccgctccacctccctccatgccgtcggcttccctccgcctcgccgtcgtcggcgcgggcgcggcgggcctggttgccgcccgcgagctacgccgcgagggccatgcgcccgtcgtcttcgagcgcgccgccgccgttgggggcacttggctctacacgcctcccgccacgtcctccgacccgctcggcgccgcggcgacgcattccagcctctacgcatcgctccgcaccaacctgccacgcgagaccatgggcttcctcgacttccccttcgccgctggcgccgcgggctcccgagacccccgccggtttcccgggcacgaggaggtgctccgctacctggaggcgttcgcgcgccggttcgacctgctccggctcgtccgcttcgagacggaggtgctcagtgtgaggagggaagacggagggaggtgggctgtgacgtcgaggaagctcggggataaggggagcggcgaggaggagttctatgatgccgtcgtggtctgcaatggtcactacacggagccacgcctcgccgtcattcccggggtagatgcttggccagggaagcagatgcatagccacaattaccgtgtgccggagccattccttgatcaagtagtgatcataattggggcctcggcaagtgcagttgacatttcgagagacatcgcaagcatggcggaagaggtacatattgctgatagatcagcaccggcttccacctgtaacaagcagcctggctatgataatctgtggcttcattccatgattgaccatgcgcaggaggatggcactgtggtgttccaggatggcagctcaatcaaagctgatgttatcatgcactgcactgggtatagtgatctgcagtatcacttgcatcccgtttcctacaaaagcatgccattttgcgttaatttggaatctgataatgtgcttcttgcatttgtatgttgcctagctacctgtatgactttccattccttggagatgacagcactatcaccgtggacgacaaccgtgtcgatccactatacaagcatatttttccacccgaagtggcacctcatttgtccttcatcggattgccttggaaagtcagttttgctgcaaattgatgccccagttatccccttcccactgtttgaactccaaagtaagtgggttgctagagttctatcaggacggattaatcttccatccgaagacaggatgatggaagatgtgaaggctttctatttgaaactagaagcacatggatggcctaagagatacacacataattttgcaaattaccagtttgagtatgatgattggctcgctgagcaatgtggccatccaccagtcgaagaatggaggaagcagatgtatgctgtaacttcaatgaacaaggcagctcgtcctgagagttaccgtgatgaatgggatgacgagcatctggtggccgaagcaaatgaatacttcaagaaattcttgtaaattctttcttactattctcatcccatattctttcggcatacccgaggctgatctcaactgcaatatgcaaatatgaataaccatttaagtgatgtggattggatacacttctgggttagcatttcatcgatcattcgatcgatgtatatatatgagactgttctggtagtaaacaatcttgtagtaaactgtggattggtcatcaattaacaaca

SEQ ID NO: 206482 - DNA, 2578 bp, Zea Mays
atggcgtccgcggccgcccctccaacctccctctccctcgcggcccgcgcggccaccagggcagccgccgccgccgccgccccgctgcgcaggggaggcctcgccacggcgtgccagccggcacggtctctggctttcgcggcgggcgacgcgcggctcgcggtccacgtcgcgtcgcgatgccggcaggcgttctccgggcgtggcacgcgggccatggccaccatggcgaagaagagcgtaggggaactcacggaggccgacctcgaggggaagcgcgtcttcgtgcgcgccgacctcaacgtgccgctcgacgagaaccagaacatcaccgacgacacccgcatccgggccgccatccccaccatccagtacatcctcagcaagggcgccaaggtcatcctctcaagccacttgggtcgccctaagggttttacacccaagtttagcttagctccccttgtaggacggttgtctgagcttcttggcattcaggtgcaaaaagccgacgatgttattggccctgaagttgagaagctggtggcggccttgcccaacggtggggttctgctgcttgagaacgtaagattctacaaggaagaggagaagaatgacccagagtttgcacagaagcttgcctccctagcagatctttatgttaacgatgcatttggaacagcccacagggcgcatgcatcgaccgagggagttaccaagtttttgcagccttctgttgcagggttccttctgcagaaggaactcgactaccttgtcggagctgtttcaagccctaaacgcccttttgctgccatcgtgggtggttcaaaggtgtcatccaagatcggggttattgagtccctgttggagaagtgtgatatccttctcttgggtggtggtatgatcttcacgttttacaaggcacaaggtctccctgttggtgcttcattggtcgaggaagacaaactcgagcttgcaacgtctctacttgcaaaggctaaggaaaagggtgtctcccttatgctgccaaccgatgttgtcattgctgacaagtttgcccctgatgctaacagccagattgttccagcatctgcaattcctgatggttggatgggcctggatattggcccagattctgtcgcttcattcaacgcagccctggatacaaccaagacggtcatctggaacgggcccatgggtgtcttcgaatttgacaagttcgctgtaggaaccgaggctgtggcaaagaagctggcagaactcagcggcaagggcgtcacaactatcatcggaggcggagactccgtcgccgccgtcgagaaggtgggagttgctgacgttatgagccacatttccacgggaggtggcgctagcctggaattgttggaaggaaaggagcttccgggagttgttgcgttgaatgaagccgccactgtgaccagaagcaaactctagcgtgcgctgatgccccgtgggaagctagatgtcacgttacggaggacgctgtgctgagctgccggtctctgttgtcaagaacctgtaaccatttaattgcaagggaaaataacagaggatcaattccgatgctttgcagacctgttggctgttggtccaccctgtgttgcatatacaccaggccagggcgctcggaacatgggcaagtagtatcggctccactgacatattgcaactctgtggccactcatcagcaggcgattaaaagagacagcaaaccatgctggactacacattccgcagacatccaacacaattgagagctatacgacagacagcatagaaccgacatcctcatgttcatacacagaatgttatgtgtcacacaaaacactgtgacaaagaaagttcatacgcagggcagctctccagacacacgtggcagaaaacaaggttttctgaaggctggagctgggctacagaagaggaaagcgtgatcactgctccgccacatctgccagtttggttccaccatcagctttctcccccttccaccctagtccaggatgcgacggcgccgctttctcgccctcgaaaccacgggcatcccgcagcgaggcctcaaaatcggtggaatcaattgccgtcgggaggaggctgccaatgtcatccttcgctccgaacccgccagcccgtatgacgtcctccgtagagatggcagcttccatgttcacatgagctgctgcatggccattcaacggaccggtgttcgtgtttccatcgtctgaatctggaaacgtgttcaagggctcctggccttggctcggaacactgtttgtcactgcgtctgggttcttttgttgggcttgctgttcgttgctaaagctctttccatccatgcctgccgggttgatgagcaggctcaggaggaagattcaggaacttacctctgctccgctgcgatctacgcttcgactatggaatcgtttctcttcgctcaccggtgttggccaggatgttctattgcagtcacggactgcatcgacacgtgccaagcgaagtggatacatggctggccctatgcgaccgctgagcccgatgggccactagactgggccacggttcc

SEQ ID NO: 206483 - DNA, 1026 bp, Zea Mays
catgtgggagcctacgctattgggtgaatagattactgaagttatacaagaacgagaagtacatcctcttcttcgagcagtttggatcaagggagccgacatttctagttactttcaaggaatcagcaacaagtatgtcagtcctaaggagcctgtggcaagcacattggcttcacaagaatcagctaaggcaggacgaggttttcccatggttagaagaaagcatagtcgcattggagaatggattcactgacttcctcgagcaattggggagtgctggctgggaccaggacctgatcattttgaaagtcccaaaagagcccgtcttggtgttggaacatctagaagaccaagaggtgtaagatgccacggctggtctgttgctaacctagaggacaatgtagagtcttcttttctattgcgtgatcatgacctgctgaatcaattgcaactgagcatcgcgaaggagccgagttcccatgtggcagatgcttagtgatctaacaagaatagaaactgtctggcatgtgacatgatgtttatgctttaaggagtgtttggtttatagggattaatttttagtcccttcattttatatgattttagtctctaaattatcaaatacgtagtttctgtatttcataatttagaaactaaaatagaataaaatagaatgactaaaaatagaaaccaaacactcacttagtctttacactcaatattatgattataatgcatcacctgctgtcaattgagttgatgcccaaagggcaaaggcactcgctcgtctccgtgacttttttatgtgcaatgcatcaattttctatcattggcatgaaactctcctgcctccagtcacaaatacttggcatggacagtccccgaaacatcatttcatattttttgtacaaaatattatgaatggtagtacatttttatgaaactgctttccatgtttttttaatcattttcaactctccaaatttaacaaaaaatggaatatgcaactaacaacgtctctaaaag

SEQ ID NO: 206484 - DNA, 1992 bp, Zea Mays
cttgatttcggctacgccatctgatttccccattctacacccgaactcacaaagaaactgtcgagtttgcatttggaatgggacaggcatgaatctccagtgaacggtgtggaagatgagaatgcagattctttgatcccacaggctattttggactttgtgcttccagctgggtttccagggtctgtttcagcggactacctggactacatgttgttgcagttcccaacaaatgtgacaggttggatctgtcatgtattggttacatcaagtcttttgaaggctgtaggtgttgggtcctttacaggaacttctgcagctgcatctgctgctgctatcagatgggtatcaaaggatggcattggggcctttggacgtcttctcattggtggacgctttggagcacttttcgatgatgacccaaagaagtggaggatgtatgcagatttcattggaagtgctggaagcatatttgagcttagcactacattatatccaggttactttctcccacttgcatcattagggaaccttgcaaaggccatagcaagaggatttaaagatccttcatttcgcgttatccaaaatcactttgcagaatctggaaatcttggagaggttgctgcaaaggaggaagtatgggaagtaggagctcagcttttaggcctttcaatcggtgtactcattatggataagacaggtgtaaagtcatcatacttaactcttgttttaacttggctgagtgttcgtcttctacatctttggttgcgctatcagtccatatcagttctcaagttccgcacagtaagataaacctaaaacgtggccggattcttgtgaaatcacatgttgcacaacatactgttcctggttatgttgcttgcaatgaggaagaaaacattttaacatgggaaagatacttgcgtccacaagtttctttcggtgtgcccatggaaagaatgcttggtggtgacaaatccagtgacatggtgaatagattactgaagttatacaagaacgagaagtacatcctcttcttcgagcagtttggatcaagggagccgacatttctagttactttcaaggaatcagcaacaagtatgtcagtcctaaggagcctgtggcaagcacattggcttcacaagaatcagctaaggcaggacgaggttttcccatggttagaagaaagcatagtcgcattggagaatggattcactgacttcctcgagcaattggggagtgctggctgggaccaggacctgatcattttgaaagtcccaaaagagcccgtcttggtgttggaacatctagaagaccaagaggtgtaagatgccacggctggtctgttgctaacctagaggacaatgtagagtcttcttttctattgcgtgatcatgacctgctgaatcaattgcaactgagcatcgcgaaggagccgagttcccatgtggcagatgcttagtgatctaacaagaatagaaactgtctggcatgtgacatgatgtttatgctttaaggagtgtttggtttatagggattaatttttagtcccttcattttatatgattttagtctctaaattatcaaatacgtagtttctgtatttcataatttagaaactaaaatagaataaaatagaatgactaaaaatagaaaccaaacactcacttagtctttacactcaatattatgattataatgcatcacctgctgtcaattgagttgatgcccaaagggcaaaggcactcgctcgtctccgtgacttttttatgtgcaatgcatcaattttctatcattggcatgaaactctcctgcctccagtcacaaatacttggcatggacagtccccgaaacatcatttcatattttttgtacaaaatattatgaatggtagtacatttttatgaaactgctttccatgtttttttaatcattttcaactctccaaatttaacaaaaaatggaatatgcaactaacaacgtctctaaaag

SEQ ID NO: 206485 - DNA, 1730 bp, Zea Mays
ccacgaaccaaacatggagaaaaacgccgaactttacagtcaagtagcgcactttggcttgtgggcagctgtgcccctatcacggtatccatacactcccggcatcccttccatccgcgacccgccgcgtccgtacaccggaccatgctctccacacccgccgcaggctggcgcttccgccggggaggtctgccctggaggcttcatacgtgctcctgcctggcgtcgccgctgtcttccagcggcggcgagcctgaaaaggcgaggcctttgctcgcggagaggtaccgggacggtgtcgtcaagagatatatttcggatggcagttctaagctgcaacttcgtttggagaagcatgaatctccagtgaacggtgtggaagatgagaatgcagattctttgatcccacaggctattttggactttgtgcttccagctgggtttccagggtctgtttcagcggactacctggactacatgttgttgcagttcccaacaaatgtgacaggttggatctgtcatgtattggttacatcaagtcttttgaaggctgtaggtgttgggtcctttacaggaacttctgcagctgcatctgctgctgctatcaggtggacgctttggagcacttttcgatgatgacccaaagaagtggaggatgtatgcagatttcattggaagtgctggaagcatatttgagcttagcactacattatatccaggttactttctcccacttgcatcattagggaaccttgcaaaggccatagcaagaggatttaaagatccttcatttcgcgttatccaaaatcactttgcagaatctggaaatcttggagaggttgctgcaaaggaggaagtatgggaagtaggagctcagcttttaggcctttcaatcggtgtactcattatggtatatatgtacagttcattatgttttatatgttgtttatatctaaccgcctttttgtatggcaaccttattgatcagttataatatcgcactgatggagacagatgccatcatttttatatccatttacagttgctgtttttattctaggataagacaggtgtaaagtcatcatacttaactcttgttttaacttggctgagtgttcgtcttctacatctttggttgcgctatcagtccatatcagttctcaagttccgcacagtaagataaacctaaaacgtggccggattcttgtgaaatcacatgttgcacaacatactgttcctggttatgttgcttgcaatgaggaagaaaacattttaacatgggaaagatacttgcgtccacaagtttctttcggtgtgcccatggaaagaatgcttggtggtgacaaatccagtgacatggaagcgaaagcctaggaaaaattcaactaaaggctggttccccaaagatgtacctgagtcatcacagccagttgaccacgagaatgaagacgtggttgcaatgataccagctattgaagatgttgttgaaagaccttcttcgccaccagaagaacgtgtagttcgagtcctagttaaaaagatcacacctaggaagaagaatgtttgagtactatggtgaacttgtttgttcttatggtagtatggtgtgtgtatggaactatggcatttgtgtgacatttgtatgtaactttggcatctgtatgacatttgtatgcacctatggcatttgtatggtacttgtatgacactatggcatttgtatgaactct

SEQ ID NO: 206486 - DNA, 1423 bp, Zea Mays
ccacgaaccaaacatggagaaaaacgccgaactttacagtcaagtagcgcactttggcttgtgggcagctgtgcccctatcacggtatccatacactcccggcatcccttccatccgcgacccgccgcgtccgtacaccggaccatgctctccacacccgccgcaggctggcgcttccgccggggaggtctgccctggaggcttcatacgtgctcctgcctggcgtcgccgctgtcttccagcggcggcgagcctgaaaaggcgaggcctttgctcgcggagaggtaccgggacggtgtcgtcaagaggtttttcacttctgaaccgtgaattcttgatttcggctacgccatctgatttccccattctacacccgaactcacaaagaaactgtcgagtttgcatttggaatgggacaggcatgaatctccagtgaacggtgtggaagatgagaatgcagattctttgatcccacaggctattttggactttgtgcttccagctgggtttccagattggtacaggctgtaggtgttgggtcctttacaggaacttctgcagctgcatctgctgctgctatcagatgggtatcaaaggatggcattggggcctttggacgtcttctcattggtggacgctttggagcacttttcgatgatgacccaaagaagtggaggatgtatgcagatttcattggaagtgctggaagcatatttgagcttagcactacattatatccaggttactttctcccacttgcatcattagggaaccttgcaaaggccatagcaagaggatttaaagatccttcatttcgcgttatccaaaatcactttgcagaatctggaaatcttggagaggttgctgcaaagataaacctaaaacgtggccggattcttgtgaaatcacatgttgcacaacatactgttcctggttatgttgcttgcaatgaggaagaaaacattttaacatgggaaagatacttgcgtccacaagtttctttcggtgtgcccatggaaagaatgcttggtggtgacaaatccagtgacatggaagcgaaagcctaggaaaaattcaactaaaggctggttccccaaagatgtacctgagtcatcacagccagttgaccacgagaatgaagacgtggttgcaatgataccagctattgaagatgttgttgaaagaccttcttcgccaccagaagaacgtgtagttcgagtcctagttaaaaagatcacacctaggaagaagaatgtttgagtactatggtgaacttgtttgttcttatggtagtatggtgtgtgtatggaactatggcatttgtgtgacatttgtatgtaactttggcatctgtatgacatttgtatgcacctatggcatttgtatggtacttgtatgacactatggcatttgtatgaactct

SEQ ID NO: 206487 - DNA, 1521 bp, Zea Mays
ccacgaaccaaacatggagaaaaacgccgaactttacagtcaagtagcgcactttggcttgtgggcagctgtgcccctatcacggtatccatacactcccggcatcccttccatccgcgacccgccgcgtccgtacaccggaccatgctctccacacccgccgcaggctggcgcttccgccggggaggtctgccctggaggcttcatacgtgctcctgcctggcgtcgccgctgtcttccagcggcggcgagcctgaaaaggcgaggcctttgctcgcggagaggtaccgggacggtgtcgtcaagagatatatttcggatggcagttctaagctgcaacttcgtttggagaagcatgaatctccagtgaacggtgtggaagatgagaatgcagattctttgatcccacaggctattttggactttgtgcttccagctgggtttccaggctgtaggtgttgggtcctttacaggaacttctgcagctgcatctgctgctgctatcagatgggtatcaaaggatggcattggggcctttggacgtcttctcattggtggacgctttggagcacttttcgatgatgacccaaagaagtggaggatgtatgcagatttcattggaagtgctggaagcatatttgagcttagcactacattatatccaggttactttctcccacttgcatcattagggaaccttgcaaaggccatagcaagaggatttaaagatccttcatttcgcgttatccaaaatcactttgcagaatctggaaatcttggagaggttgctgcaaaggaggaagtatgggaagtaggagctcagcttttaggcctttcaatcggtgtactcattatggataagacaggtgtaaagtcatcatacttaactcttgttttaacttggctgagtgttcgtcttctacatctttggttgcgctatcagtccatatcagttctcaagttccgcacaataaacctaaaacgtggccggattcttgtgaaatcacatgttgcacaacatactgttcctggttatgttgcttgcaatgaggaagaaaacattttaacatgggaaagatacttgcgtccacaagtttctttcggtgtgcccatggaaagaatgcttggtggtgacaaatccagtgacatggaagcgaaagcctaggaaaaattcaactaaaggctggttccccaaagatgtacctgagtcatcacagccagttgaccacgagaatgaagacgtggttgcaatgataccagctattgaagatgttgttgaaagaccttcttcgccaccagaagaacgtgtagttcgagtcctagttaaaaagatcacacctaggaagaagaatgtttgagtactatggtgaacttgtttgttcttatggtagtatggtgtgtgtatggaactatggcatttgtgtgacatttgtatgtaactttggcatctgtatgacatttgtatgcacctatggcatttgtatggtacttgtatgacactatggcatttgtatgaactct

SEQ ID NO: 206488 - DNA, 1627 bp, Zea Mays
ccacgaaccaaacatggagaaaaacgccgaactttacagtcaagtagcgcactttggcttgtgggcagctgtgcccctatcacggtatccatacactcccggcatcccttccatccgcgacccgccgcgtccgtacaccggaccatgctctccacacccgccgcaggctggcgcttccgccggggaggtctgccctggaggcttcatacgtgctcctgcctggcgtcgccgctgtcttccagcggcggcgagcctgaaaaggcgaggcctttgctcgcggagaggtaccgggacggtgtcgtcaagagatatatttcggatggcagttctaagctgcaacttcgtttggagaagcatgaatctccagtgaacggtgtggaagatgagaatgcagattctttgatcccacaggctattttggactttgtgcttccagctgggtttccagggtctgtttcagcggactacctggactacatgttgttgcagttcccaacaaatgtgacaggttggatctgtcatgtattggttacatcaagtcttttgaaggctgtaggtgttgggtcctttacaggaacttctgcagctgcatctgctgctgctatcagatgggtatcaaaggatggcattggggcctttggacgtcttctcattggtggacgctttggagcacttttcgatgatgacccaaagaagtggaggatgtatgcagatttcattggaagtgctggaagcatatttgagcttagcactacattatatccaggttactttctcccacttgcatcattagggaaccttgcaaaggccatagcaagaggatttaaagatccttcatttcgcgttatccaaaatcactttgcagaatctggaaatcttggagaggttgctgcaaaggaggaagtatgggaagtaggagctcagcttttaggcctttcaatcggtgtactcattatggataagacaggtgtaaagtcatcatacttaactcttgttttaacttggctgagtgttcgtcttctacatctttggttgcgctatcagtccatatcagttctcaagttccgcacagtaagataaacctaaaacgtggccggattcttgtgaaatcacatgttgcacaacatactgttcctggttatgttgcttgcaatgaggaagaaaacattttaacatgggaaagatacttgcgtccacaagtttctttcggtgtgcccatggaaagaatgcttggtggtgacaaatccagtgacatggaagcgaaagcctaggaaaaattcaactaaaggctggttccccaaagatgtacctgagtcatcacagccagttgaccacgagaatgaagacgtggttgcaatgataccagctattgaagatgttgttgaaagaccttcttcgccaccagaagaacgtgtagttcgagtcctagttaaaaagatcacacctaggaagaagaatgtttgagtactatggtgaacttgtttgttcttatggtagtatggtgtgtgtatggaactatggcatttgtgtgacatttgtatgtaactttggcatctgtatgacatttgtatgcacctatggcatttgtatggtacttgtatgacactatggcatttgtatgaactct

SEQ ID NO: 206489 - DNA, 2459 bp, Zea Mays
atgatgaatttagaggacgctgagagcgtgtgtgagaaggtgtgcgtggtcgaagcggatttgactcgattttgtttataacaacatcaggcaggcagctacctcgtgataatcaaagcttaattaatcccgagcgaaaattatgatgcgcacatggctgccccgccggacgagagatgattattacaagtaagcacgaggaaagggaagagaagaagaagagggctcgtctcgtcttgcaggccggaggctgcgtcgctgccccgccggcgccgccgtatgccagttctttgtcagtcccttcggcaggtcttcgtgggtccttctccttcgccggcgacgagcacccaccaaggacagcgggtacagcgctagttattgcttcaccttccttatctttgctgcagcaactggaggccgaggcttttacaaggagctggggaagaatgggcagaagctgctatcgaatctgaagctttgcttggcacaccagcactggagagatgtataagaaccaactccaggagcttgctcagaggagctgcttcaatctgccgtcctattcctgcatccgggagggaccagatcatgcaccccggtttaaggctacagttaatttcaacggggagatgttcgagagcccagtgttttgttccactctgcggcaggcggagcatgcggcagctgaggtagcactcaatgagttatcaaagagggggccttcgtcgacgctggctgccaaagttctggatgaaaccgggatatacaagaatcttcttcaagaaactgctcatcgagctggtctaaaactccccatctatactactattagatctgggccaggtcatacgcctgtgttcgcatgcacagtggagttggcaggaaaggcatttactggcaatcctggcaagaccaagaagcaagctcaaaagaatgctgcaatggctgcctggtctgaattgaagaaactgcccagggtaggtgagccgtcatcctcatcttgtccacctgatcaggatgatgaagtgcaggaacaggtcgtagttactcggactcttgcaagcttgaaccaggcaaatagtggcaaggtgccacatcagaaggaaaaacagcaaagcaataaccgcccatcatcacggagatgttatcctaaaccaaatacaccattctaccgaccatttatgcaaaatcaggcttatcctagcgttccaccagatcaagctatgtaccatctgtggcatcggatgcaagtgacagccaacgcctcgctttccagtggtaccagctatgggcaatacaagtttttgcccaccagcagctatgctccccatgtaccctccttcacctcaagggcaattctccaatccggctaaccaggatgctctaggccttcttccatgttttcctgatgcttctcctgccatgctacggcacttctcaccttaccctgtctcctatgtgccaagaagtcctctgccggttactgttcacaatgttcatgagagaaggcatgaccatactgaaacagttgagcttcctgatgctgtggtgttctcccaatgcacgaccctagattcctttaggacatcagaatgtggcggtccaccactcaaggttcaagaaccaaccaaaaatcggaaagaaggctgtattgggtcccctgagaaagaacttgacactcttgccgtctcaagctctaccgcacaagcgtcgtcgcaaaagttggaagcaaatgaaggtaagcaaacagtgcaggcaggtttgaagcagacccatgaacagcagctgatgtcatcctcgtcttgtgttagttcttcagttgtggcacagagctcgcattacgctagctccatccagcatgatgagtctatacatagaaggaatcctcctcatactagttcgcctgcattgcctgatgtgtggtcttcccgctcgcaagctctgcccagatttggatcaccaagttgggtgttccagcagcgaccttggttggctgcacccgtcacagttcgaaccgctgttcctgtctgctcagccaggccaaacgtggtgaattctaccactggaataagacctgctgcccagagccatgatggagagagagatctgaacagcgccgcagcagcgagttctggattcaataaactccaaatttgagctgcggttttggttctgctgagcttttcatctcagttttgtttgcttcttggcttgaggtttattttttagttagatataccagataggctcttaggttttcattttacatttaccagatgtccagttccttctgaagataaatggacgagaactgtaatataaaaaatgcagaggcctttctcatgcgatttgaattcagtttcagtatgcaatcgatgtagttccagcagtgtatggtacaaccgcctggctgctgagctttcggcagctgtagtcacagccaatgcaatcgagcgcag
